United States Patent Application Publication US 2005/0255487 A1 - sequence listing, part 9

SEQ ID NO: 222401 - RNA, 19 nt, Homo sapiens
  misc_RNA (1)...(19): siRNA sense strand
agacaaguacagauaccuu

SEQ ID NO: 222402 - RNA, 19 nt, Homo sapiens
  misc_RNA (1)...(19): siRNA sense strand
gcaucauuucccuguguaa

SEQ ID NO: 222403 - RNA, 19 nt, Homo sapiens
  misc_RNA (1)...(19): siRNA sense strand
cugcaaagaguguccaauc

SEQ ID NO: 222404 - RNA, 19 nt, Homo sapiens
  misc_RNA (1)...(19): siRNA sense strand
cuuauaggacugccaugaa

SEQ ID NO: 222405 - RNA, 19 nt, Homo sapiens
  misc_RNA (1)...(19): siRNA sense strand
caaagaguguccaaucauu

SEQ ID NO: 222406 - RNA, 19 nt, Homo sapiens
  misc_RNA (1)...(19): siRNA sense strand
uagcugaccugaauaaugu

SEQ ID NO: 222407 - RNA, 19 nt, Homo sapiens
  misc_RNA (1)...(19): siRNA sense strand
gcaugauucuauccaaauu

SEQ ID NO: 222408 - RNA, 19 nt, Homo sapiens
  misc_RNA (1)...(19): siRNA sense strand
ugaacuggcugcugaaugu

SEQ ID NO: 222409 - RNA, 19 nt, Homo sapiens
  misc_RNA (1)...(19): siRNA sense strand
gauauccugcagauuauua

SEQ ID NO: 222410 - RNA, 19 nt, Homo sapiens
  misc_RNA (1)...(19): siRNA sense strand
gagaagauguucgagacuu

SEQ ID NO: 222411 - RNA, 19 nt, Homo sapiens
  misc_RNA (1)...(19): siRNA sense strand
gcacuuuaauuaugacauc

SEQ ID NO: 222412 - RNA, 19 nt, Homo sapiens
  misc_RNA (1)...(19): siRNA sense strand
guaaagcacauuuggaaga

SEQ ID NO: 222413 - RNA, 19 nt, Homo sapiens
  misc_RNA (1)...(19): siRNA sense strand
gaauauugcacuccgacua

SEQ ID NO: 222414 - RNA, 19 nt, Homo sapiens
  misc_RNA (1)...(19): siRNA sense strand
uuauaggacugccaugaaa

SEQ ID NO: 222415 - RNA, 19 nt, Homo sapiens
  misc_RNA (1)...(19): siRNA sense strand
gggugaaguugcauccuuu

SEQ ID NO: 222416 - RNA, 19 nt, Homo sapiens
  misc_RNA (1)...(19): siRNA sense strand
gcaagagcacaacaauuug

SEQ ID NO: 222417 - RNA, 19 nt, Homo sapiens
  misc_RNA (1)...(19): siRNA sense strand
gcacaacaauuuggucaac

SEQ ID NO: 222418 - RNA, 19 nt, Homo sapiens
  misc_RNA (1)...(19): siRNA sense strand
agcaagagcacaacaauuu

SEQ ID NO: 222419 - RNA, 19 nt, Homo sapiens
  misc_RNA (1)...(19): siRNA sense strand
agaagauguucgagacuuu

SEQ ID NO: 222420 - RNA, 19 nt, Homo sapiens
  misc_RNA (1)...(19): siRNA sense strand
gagcaagagcacaacaauu

SEQ ID NO: 222421 - RNA, 19 nt, Homo sapiens
  misc_RNA (1)...(19): siRNA sense strand
ucaagcaaguggcaaguuc

SEQ ID NO: 222422 - RNA, 19 nt, Homo sapiens
  misc_RNA (1)...(19): siRNA sense strand
ccacgagacucaaacaacu

SEQ ID NO: 222423 - RNA, 19 nt, Homo sapiens
  misc_RNA (1)...(19): siRNA sense strand
cagcacaaccucaagcaaa

SEQ ID NO: 222424 - RNA, 19 nt, Homo sapiens
  misc_RNA (1)...(19): siRNA sense strand
gcaaagaguguccaaucau

SEQ ID NO: 222425 - RNA, 19 nt, Homo sapiens
  misc_RNA (1)...(19): siRNA sense strand
auggauauccugcagauua

SEQ ID NO: 222426 - RNA, 19 nt, Homo sapiens
  misc_RNA (1)...(19): siRNA sense strand
uguaacaucugcaaagagu

SEQ ID NO: 222427 - RNA, 19 nt, Homo sapiens
  misc_RNA (1)...(19): siRNA sense strand
guccggagcugcuuccaau

SEQ ID NO: 222428 - RNA, 19 nt, Homo sapiens
  misc_RNA (1)...(19): siRNA sense strand
gcaaguggcaaguucaaca

SEQ ID NO: 222429 - RNA, 19 nt, Homo sapiens
  misc_RNA (1)...(19): siRNA sense strand
gcuuccaauuugcuaauaa

SEQ ID NO: 222430 - RNA, 19 nt, Homo sapiens
  misc_RNA (1)...(19): siRNA sense strand
uggaagacaaguacagaua

SEQ ID NO: 222431 - RNA, 19 nt, Homo sapiens
  misc_RNA (1)...(19): siRNA sense strand
ggauccguguccugucuuu

SEQ ID NO: 222432 - RNA, 19 nt, Homo sapiens
  misc_RNA (1)...(19): siRNA sense strand
gucuuuagcugaccugaau

SEQ ID NO: 222433 - RNA, 19 nt, Homo sapiens
  misc_RNA (1)...(19): siRNA sense strand
gacaaguacagauaccuuu

SEQ ID NO: 222434 - RNA, 19 nt, Homo sapiens
  misc_RNA (1)...(19): siRNA sense strand
ccaagcaucaggccaaaug

SEQ ID NO: 222435 - RNA, 19 nt, Homo sapiens
  misc_RNA (1)...(19): siRNA sense strand
ggagcaagagcacaacaau

SEQ ID NO: 222436 - RNA, 19 nt, Homo sapiens
  misc_RNA (1)...(19): siRNA sense strand
guguaaagcacauuuggaa

SEQ ID NO: 222437 - RNA, 19 nt, Homo sapiens
  misc_RNA (1)...(19): siRNA sense strand
caagacaguugggugaagu

SEQ ID NO: 222438 - RNA, 19 nt, Homo sapiens
  misc_RNA (1)...(19): siRNA sense strand
gaagauguucgagacuuug

SEQ ID NO: 222439 - RNA, 19 nt, Homo sapiens
  misc_RNA (1)...(19): siRNA sense strand
gucagauucucagcuuaua

SEQ ID NO: 222440 - RNA, 19 nt, Homo sapiens
  misc_RNA (1)...(19): siRNA sense strand
uaacaucugcaaagagugu

SEQ ID NO: 222441 - RNA, 19 nt, Homo sapiens
  misc_RNA (1)...(19): siRNA sense strand
cggagcugcuuccaauuug

SEQ ID NO: 222442 - RNA, 19 nt, Homo sapiens
  misc_RNA (1)...(19): siRNA sense strand
gaagacaaguacagauacc

SEQ ID NO: 222443 - RNA, 19 nt, Homo sapiens
  misc_RNA (1)...(19): siRNA sense strand
ccauggauauccugcagau

SEQ ID NO: 222444 - RNA, 19 nt, Homo sapiens
  misc_RNA (1)...(19): siRNA sense strand
ggcaucauuucccugugua

SEQ ID NO: 222445 - RNA, 19 nt, Homo sapiens
  misc_RNA (1)...(19): siRNA sense strand
uggauauccugcagauuau

SEQ ID NO: 222446 - RNA, 19 nt, Homo sapiens
  misc_RNA (1)...(19): siRNA sense strand
ggaagacaaguacagauac

SEQ ID NO: 222447 - RNA, 19 nt, Homo sapiens
  misc_RNA (1)...(19): siRNA sense strand
ugcaaagaguguccaauca

SEQ ID NO: 222448 - RNA, 19 nt, Homo sapiens
  misc_RNA (1)...(19): siRNA sense strand
guggauaugugucugaacu

SEQ ID NO: 222449 - RNA, 19 nt, Homo sapiens
  misc_RNA (1)...(19): siRNA sense strand
acuggcugcugaauguuua

SEQ ID NO: 222450 - RNA, 19 nt, Homo sapiens
  misc_RNA (1)...(19): siRNA sense strand
acuaucccaugguggaaua

SEQ ID NO: 222451 - RNA, 19 nt, Homo sapiens
  misc_RNA (1)...(19): siRNA sense strand
ccggagcugcuuccaauuu

SEQ ID NO: 222452 - RNA, 19 nt, Homo sapiens
  misc_RNA (1)...(19): siRNA sense strand
ccaaauuccaagacaguug

SEQ ID NO: 222453 - RNA, 19 nt, Homo sapiens
  misc_RNA (1)...(19): siRNA sense strand
cagaaacugccaagcauca

SEQ ID NO: 222454 - RNA, 19 nt, Homo sapiens
  misc_RNA (1)...(19): siRNA sense strand
uaugacaucugccaaagcu

SEQ ID NO: 222455 - RNA, 19 nt, Homo sapiens
  misc_RNA (1)...(19): siRNA sense strand
aaugucagauucucagcuu

SEQ ID NO: 222456 - RNA, 19 nt, Homo sapiens
  misc_RNA (1)...(19): siRNA sense strand
ucgagacuuugccaaggua

SEQ ID NO: 222457 - RNA, 19 nt, Homo sapiens
  misc_RNA (1)...(19): siRNA sense strand
gcaaaaggccauaaaaugc

SEQ ID NO: 222458 - RNA, 19 nt, Homo sapiens
  misc_RNA (1)...(19): siRNA sense strand
cugcaugauucuauccaaa

SEQ ID NO: 222459 - RNA, 19 nt, Homo sapiens
  misc_RNA (1)...(19): siRNA sense strand
uaaagcacauuuggaagac

SEQ ID NO: 222460 - RNA, 19 nt, Homo sapiens
  misc_RNA (1)...(19): siRNA sense strand
acaggagucuaaagcacuu

SEQ ID NO: 222461 - RNA, 19 nt, Homo sapiens
  misc_RNA (1)...(19): siRNA sense strand
acagauaccuuuucaagca

SEQ ID NO: 222462 - RNA, 19 nt, Homo sapiens
  misc_RNA (1)...(19): siRNA sense strand
aagcacauuuggaagacaa

SEQ ID NO: 222463 - RNA, 19 nt, Homo sapiens
  misc_RNA (1)...(19): siRNA sense strand
gcuaauaauaagccagaga

SEQ ID NO: 222464 - RNA, 19 nt, Homo sapiens
  misc_RNA (1)...(19): siRNA sense strand
caagagcacaacaauuugg

SEQ ID NO: 222465 - RNA, 19 nt, Homo sapiens
  misc_RNA (1)...(19): siRNA sense strand
ccugucagcugcaugugau

SEQ ID NO: 222466 - RNA, 19 nt, Homo sapiens
  misc_RNA (1)...(19): siRNA sense strand
gcugcugaauguuuaugau

SEQ ID NO: 222467 - RNA, 19 nt, Homo sapiens
  misc_RNA (1)...(19): siRNA sense strand
acagagcucuaccagucuu

SEQ ID NO: 222468 - RNA, 19 nt, Homo sapiens
  misc_RNA (1)...(19): siRNA sense strand
acaguugggugaaguugca

SEQ ID NO: 222469 - RNA, 19 nt, Homo sapiens
  misc_RNA (1)...(19): siRNA sense strand
guuugaccacuauuuauga

SEQ ID NO: 222470 - RNA, 19 nt, Homo sapiens
  misc_RNA (1)...(19): siRNA sense strand
gcuuauaggacugccauga

SEQ ID NO: 222471 - RNA, 19 nt, Homo sapiens
  misc_RNA (1)...(19): siRNA sense strand
caucaggccaaauguaaca

SEQ ID NO: 222472 - RNA, 19 nt, Homo sapiens
  misc_RNA (1)...(19): siRNA sense strand
gauucuauccaaauuccaa

SEQ ID NO: 222473 - RNA, 19 nt, Homo sapiens
  misc_RNA (1)...(19): siRNA sense strand
ggcaaguucaacaggauuu

SEQ ID NO: 222474 - RNA, 19 nt, Homo sapiens
  misc_RNA (1)...(19): siRNA sense strand
gaacuggcugcugaauguu

SEQ ID NO: 222475 - RNA, 19 nt, Homo sapiens
  misc_RNA (1)...(19): siRNA sense strand
cugcugaauguuuaugaua

SEQ ID NO: 222476 - RNA, 19 nt, Homo sapiens
  misc_RNA (1)...(19): siRNA sense strand
aagcaucaggccaaaugua

SEQ ID NO: 222477 - RNA, 19 nt, Homo sapiens
  misc_RNA (1)...(19): siRNA sense strand
uggcaucauuucccugugu

SEQ ID NO: 222478 - RNA, 19 nt, Homo sapiens
  misc_RNA (1)...(19): siRNA sense strand
ccaugaaacuccgaagacu

SEQ ID NO: 222479 - RNA, 19 nt, Homo sapiens
  misc_RNA (1)...(19): siRNA sense strand
auaauaagccagagaucga

SEQ ID NO: 222480 - RNA, 19 nt, Homo sapiens
  misc_RNA (1)...(19): siRNA sense strand
cuaauaauaagccagagau

SEQ ID NO: 222481 - RNA, 19 nt, Homo sapiens
  misc_RNA (1)...(19): siRNA sense strand
ugggugaaguugcauccuu

SEQ ID NO: 222482 - RNA, 19 nt, Homo sapiens
  misc_RNA (1)...(19): siRNA sense strand
caucauuucccuguguaaa

SEQ ID NO: 222483 - RNA, 19 nt, Homo sapiens
  misc_RNA (1)...(19): siRNA sense strand
gcguggauaugugucugaa

SEQ ID NO: 222484 - RNA, 19 nt, Homo sapiens
  misc_RNA (1)...(19): siRNA sense strand
gcacuaucccaugguggaa

SEQ ID NO: 222485 - RNA, 19 nt, Homo sapiens
  misc_RNA (1)...(19): siRNA sense strand
gagccugucagcugcaugu

SEQ ID NO: 222486 - RNA, 19 nt, Homo sapiens
  misc_RNA (1)...(19): siRNA sense strand
guacagauaccuuuucaag

SEQ ID NO: 222487 - RNA, 19 nt, Homo sapiens
  misc_RNA (1)...(19): siRNA sense strand
gucccucucugcguggaua

SEQ ID NO: 222488 - RNA, 19 nt, Homo sapiens
  misc_RNA (1)...(19): siRNA sense strand
ggagcugcuuccaauuugc

SEQ ID NO: 222489 - RNA, 19 nt, Homo sapiens
  misc_RNA (1)...(19): siRNA sense strand
uuagcugaccugaauaaug

SEQ ID NO: 222490 - RNA, 19 nt, Homo sapiens
  misc_RNA (1)...(19): siRNA sense strand
guggcaaguucaacaggau

SEQ ID NO: 222491 - RNA, 19 nt, Homo sapiens
  misc_RNA (1)...(19): siRNA sense strand
acaacaauuuggucaacgu

SEQ ID NO: 222492 - RNA, 19 nt, Homo sapiens
  misc_RNA (1)...(19): siRNA sense strand
gacuacaucaggagaagau

SEQ ID NO: 222493 - RNA, 19 nt, Homo sapiens
  misc_RNA (1)...(19): siRNA sense strand
uaauaagccagagaucgaa

SEQ ID NO: 222494 - RNA, 19 nt, Homo sapiens
  misc_RNA (1)...(19): siRNA sense strand
ugucagauucucagcuuau

SEQ ID NO: 222495 - RNA, 19 nt, Homo sapiens
  misc_RNA (1)...(19): siRNA sense strand
ggauauccugcagauuauu

SEQ ID NO: 222496 - RNA, 19 nt, Homo sapiens
  misc_RNA (1)...(19): siRNA sense strand
agcaucaggccaaauguaa

SEQ ID NO: 222497 - RNA, 19 nt, Homo sapiens
  misc_RNA (1)...(19): siRNA sense strand
gcccuuugcuuggaucucu

SEQ ID NO: 222498 - RNA, 19 nt, Homo sapiens
  misc_RNA (1)...(19): siRNA sense strand
gcugaauguuuaugauacg

SEQ ID NO: 222499 - RNA, 19 nt, Homo sapiens
  misc_RNA (1)...(19): siRNA sense strand
agacuuugccaagguacua

SEQ ID NO: 222500 - RNA, 19 nt, Homo sapiens
  misc_RNA (1)...(19): siRNA sense strand
caagcaaguggcaaguuca

SEQ ID NO: 222501 - RNA, 19 nt, Homo sapiens
  misc_RNA (1)...(19): siRNA sense strand
agacaaguacagauaccuu

SEQ ID NO: 222502 - RNA, 19 nt, Homo sapiens
  misc_RNA (1)...(19): siRNA sense strand
gcaucauuucccuguguaa

SEQ ID NO: 222503 - RNA, 19 nt, Homo sapiens
  misc_RNA (1)...(19): siRNA sense strand
cugcaaagaguguccaauc

SEQ ID NO: 222504 - RNA, 19 nt, Homo sapiens
  misc_RNA (1)...(19): siRNA sense strand
cuuauaggacugccaugaa

SEQ ID NO: 222505 - RNA, 19 nt, Homo sapiens
  misc_RNA (1)...(19): siRNA sense strand
caaagaguguccaaucauu

SEQ ID NO: 222506 - RNA, 19 nt, Homo sapiens
  misc_RNA (1)...(19): siRNA sense strand
uagcugaccugaauaaugu

SEQ ID NO: 222507 - RNA, 19 nt, Homo sapiens
  misc_RNA (1)...(19): siRNA sense strand
gcaugauucuauccaaauu

SEQ ID NO: 222508 - RNA, 19 nt, Homo sapiens
  misc_RNA (1)...(19): siRNA sense strand
ugaacuggcugcugaaugu

SEQ ID NO: 222509 - RNA, 19 nt, Homo sapiens
  misc_RNA (1)...(19): siRNA sense strand
gauauccugcagauuauua

SEQ ID NO: 222510 - RNA, 19 nt, Homo sapiens
  misc_RNA (1)...(19): siRNA sense strand
gagaagauguucgagacuu

SEQ ID NO: 222511 - RNA, 19 nt, Homo sapiens
  misc_RNA (1)...(19): siRNA sense strand
gcacuuuaauuaugacauc

SEQ ID NO: 222512 - RNA, 19 nt, Homo sapiens
  misc_RNA (1)...(19): siRNA sense strand
guaaagcacauuuggaaga

SEQ ID NO: 222513 - RNA, 19 nt, Homo sapiens
  misc_RNA (1)...(19): siRNA sense strand
gaauauugcacuccgacua

SEQ ID NO: 222514 - RNA, 19 nt, Homo sapiens
  misc_RNA (1)...(19): siRNA sense strand
uuauaggacugccaugaaa

SEQ ID NO: 222515 - RNA, 19 nt, Homo sapiens
  misc_RNA (1)...(19): siRNA sense strand
gggugaaguugcauccuuu

SEQ ID NO: 222516 - RNA, 19 nt, Homo sapiens
  misc_RNA (1)...(19): siRNA sense strand
gcaagagcacaacaauuug

SEQ ID NO: 222517 - RNA, 19 nt, Homo sapiens
  misc_RNA (1)...(19): siRNA sense strand
gcacaacaauuuggucaac

SEQ ID NO: 222518 - RNA, 19 nt, Homo sapiens
  misc_RNA (1)...(19): siRNA sense strand
agcaagagcacaacaauuu

SEQ ID NO: 222519 - RNA, 19 nt, Homo sapiens
  misc_RNA (1)...(19): siRNA sense strand
agaagauguucgagacuuu

SEQ ID NO: 222520 - RNA, 19 nt, Homo sapiens
  misc_RNA (1)...(19): siRNA sense strand
gagcaagagcacaacaauu

SEQ ID NO: 222521 - RNA, 19 nt, Homo sapiens
  misc_RNA (1)...(19): siRNA sense strand
ucaagcaaguggcaaguuc

SEQ ID NO: 222522 - RNA, 19 nt, Homo sapiens
  misc_RNA (1)...(19): siRNA sense strand
ccacgagacucaaacaacu

SEQ ID NO: 222523 - RNA, 19 nt, Homo sapiens
  misc_RNA (1)...(19): siRNA sense strand
cagcacaaccucaagcaaa

SEQ ID NO: 222524 - RNA, 19 nt, Homo sapiens
  misc_RNA (1)...(19): siRNA sense strand
gcaaagaguguccaaucau

SEQ ID NO: 222525 - RNA, 19 nt, Homo sapiens
  misc_RNA (1)...(19): siRNA sense strand
auggauauccugcagauua

SEQ ID NO: 222526 - RNA, 19 nt, Homo sapiens
  misc_RNA (1)...(19): siRNA sense strand
uguaacaucugcaaagagu

SEQ ID NO: 222527 - RNA, 19 nt, Homo sapiens
  misc_RNA (1)...(19): siRNA sense strand
guccggagcugcuuccaau

SEQ ID NO: 222528 - RNA, 19 nt, Homo sapiens
  misc_RNA (1)...(19): siRNA sense strand
gcaaguggcaaguucaaca

SEQ ID NO: 222529 - RNA, 19 nt, Homo sapiens
  misc_RNA (1)...(19): siRNA sense strand
gcuuccaauuugcuaauaa

SEQ ID NO: 222530 - RNA, 19 nt, Homo sapiens
  misc_RNA (1)...(19): siRNA sense strand
uggaagacaaguacagaua

SEQ ID NO: 222531 - RNA, 19 nt, Homo sapiens
  misc_RNA (1)...(19): siRNA sense strand
ggauccguguccugucuuu

SEQ ID NO: 222532 - RNA, 19 nt, Homo sapiens
  misc_RNA (1)...(19): siRNA sense strand
gucuuuagcugaccugaau

SEQ ID NO: 222533 - RNA, 19 nt, Homo sapiens
  misc_RNA (1)...(19): siRNA sense strand
gacaaguacagauaccuuu

SEQ ID NO: 222534 - RNA, 19 nt, Homo sapiens
  misc_RNA (1)...(19): siRNA sense strand
ccaagcaucaggccaaaug

SEQ ID NO: 222535 - RNA, 19 nt, Homo sapiens
  misc_RNA (1)...(19): siRNA sense strand
ggagcaagagcacaacaau

SEQ ID NO: 222536 - RNA, 19 nt, Homo sapiens
  misc_RNA (1)...(19): siRNA sense strand
guguaaagcacauuuggaa

SEQ ID NO: 222537 - RNA, 19 nt, Homo sapiens
  misc_RNA (1)...(19): siRNA sense strand
caagacaguugggugaagu

SEQ ID NO: 222538 - RNA, 19 nt, Homo sapiens
  misc_RNA (1)...(19): siRNA sense strand
gaagauguucgagacuuug

SEQ ID NO: 222539 - RNA, 19 nt, Homo sapiens
  misc_RNA (1)...(19): siRNA sense strand
gucagauucucagcuuaua

SEQ ID NO: 222540 - RNA, 19 nt, Homo sapiens
  misc_RNA (1)...(19): siRNA sense strand
uaacaucugcaaagagugu

SEQ ID NO: 222541 - RNA, 19 nt, Homo sapiens
  misc_RNA (1)...(19): siRNA sense strand
cggagcugcuuccaauuug

SEQ ID NO: 222542 - RNA, 19 nt, Homo sapiens
  misc_RNA (1)...(19): siRNA sense strand
gaagacaaguacagauacc

SEQ ID NO: 222543 - RNA, 19 nt, Homo sapiens
  misc_RNA (1)...(19): siRNA sense strand
ccauggauauccugcagau

SEQ ID NO: 222544 - RNA, 19 nt, Homo sapiens
  misc_RNA (1)...(19): siRNA sense strand
ggcaucauuucccugugua

SEQ ID NO: 222545 - RNA, 19 nt, Homo sapiens
  misc_RNA (1)...(19): siRNA sense strand
uggauauccugcagauuau

SEQ ID NO: 222546 - RNA, 19 nt, Homo sapiens
  misc_RNA (1)...(19): siRNA sense strand
ggaagacaaguacagauac

SEQ ID NO: 222547 - RNA, 19 nt, Homo sapiens
  misc_RNA (1)...(19): siRNA sense strand
ugcaaagaguguccaauca

SEQ ID NO: 222548 - RNA, 19 nt, Homo sapiens
  misc_RNA (1)...(19): siRNA sense strand
guggauaugugucugaacu

SEQ ID NO: 222549 - RNA, 19 nt, Homo sapiens
  misc_RNA (1)...(19): siRNA sense strand
acuggcugcugaauguuua

SEQ ID NO: 222550 - RNA, 19 nt, Homo sapiens
  misc_RNA (1)...(19): siRNA sense strand
acuaucccaugguggaaua

SEQ ID NO: 222551 - RNA, 19 nt, Homo sapiens
  misc_RNA (1)...(19): siRNA sense strand
ccggagcugcuuccaauuu

SEQ ID NO: 222552 - RNA, 19 nt, Homo sapiens
  misc_RNA (1)...(19): siRNA sense strand
ccaaauuccaagacaguug

SEQ ID NO: 222553 - RNA, 19 nt, Homo sapiens
  misc_RNA (1)...(19): siRNA sense strand
cagaaacugccaagcauca

SEQ ID NO: 222554 - RNA, 19 nt, Homo sapiens
  misc_RNA (1)...(19): siRNA sense strand
uaugacaucugccaaagcu

SEQ ID NO: 222555 - RNA, 19 nt, Homo sapiens
  misc_RNA (1)...(19): siRNA sense strand
aaugucagauucucagcuu

SEQ ID NO: 222556 - RNA, 19 nt, Homo sapiens
  misc_RNA (1)...(19): siRNA sense strand
ucgagacuuugccaaggua

SEQ ID NO: 222557 - RNA, 19 nt, Homo sapiens
  misc_RNA (1)...(19): siRNA sense strand
gcaaaaggccauaaaaugc

SEQ ID NO: 222558 - RNA, 19 nt, Homo sapiens
  misc_RNA (1)...(19): siRNA sense strand
cugcaugauucuauccaaa

SEQ ID NO: 222559 - RNA, 19 nt, Homo sapiens
  misc_RNA (1)...(19): siRNA sense strand
uaaagcacauuuggaagac

SEQ ID NO: 222560 - RNA, 19 nt, Homo sapiens
  misc_RNA (1)...(19): siRNA sense strand
acaggagucuaaagcacuu

SEQ ID NO: 222561 - RNA, 19 nt, Homo sapiens
  misc_RNA (1)...(19): siRNA sense strand
acagauaccuuuucaagca

SEQ ID NO: 222562 - RNA, 19 nt, Homo sapiens
  misc_RNA (1)...(19): siRNA sense strand
aagcacauuuggaagacaa

SEQ ID NO: 222563 - RNA, 19 nt, Homo sapiens
  misc_RNA (1)...(19): siRNA sense strand
gcuaauaauaagccagaga

SEQ ID NO: 222564 - RNA, 19 nt, Homo sapiens
  misc_RNA (1)...(19): siRNA sense strand
caagagcacaacaauuugg

SEQ ID NO: 222565 - RNA, 19 nt, Homo sapiens
  misc_RNA (1)...(19): siRNA sense strand
ccugucagcugcaugugau

SEQ ID NO: 222566 - RNA, 19 nt, Homo sapiens
  misc_RNA (1)...(19): siRNA sense strand
gcugcugaauguuuaugau

SEQ ID NO: 222567 - RNA, 19 nt, Homo sapiens
  misc_RNA (1)...(19): siRNA sense strand
acagagcucuaccagucuu

SEQ ID NO: 222568 - RNA, 19 nt, Homo sapiens
  misc_RNA (1)...(19): siRNA sense strand
acaguugggugaaguugca

SEQ ID NO: 222569 - RNA, 19 nt, Homo sapiens
  misc_RNA (1)...(19): siRNA sense strand
guuugaccacuauuuauga

SEQ ID NO: 222570 - RNA, 19 nt, Homo sapiens
  misc_RNA (1)...(19): siRNA sense strand
gcuuauaggacugccauga

SEQ ID NO: 222571 - RNA, 19 nt, Homo sapiens
  misc_RNA (1)...(19): siRNA sense strand
caucaggccaaauguaaca

SEQ ID NO: 222572 - RNA, 19 nt, Homo sapiens
  misc_RNA (1)...(19): siRNA sense strand
gauucuauccaaauuccaa

SEQ ID NO: 222573 - RNA, 19 nt, Homo sapiens
  misc_RNA (1)...(19): siRNA sense strand
ggcaaguucaacaggauuu

SEQ ID NO: 222574 - RNA, 19 nt, Homo sapiens
  misc_RNA (1)...(19): siRNA sense strand
gaacuggcugcugaauguu

SEQ ID NO: 222575 - RNA, 19 nt, Homo sapiens
  misc_RNA (1)...(19): siRNA sense strand
cugcugaauguuuaugaua

SEQ ID NO: 222576 - RNA, 19 nt, Homo sapiens
  misc_RNA (1)...(19): siRNA sense strand
aagcaucaggccaaaugua

SEQ ID NO: 222577 - RNA, 19 nt, Homo sapiens
  misc_RNA (1)...(19): siRNA sense strand
uggcaucauuucccugugu

SEQ ID NO: 222578 - RNA, 19 nt, Homo sapiens
  misc_RNA (1)...(19): siRNA sense strand
ccaugaaacuccgaagacu

SEQ ID NO: 222579 - RNA, 19 nt, Homo sapiens
  misc_RNA (1)...(19): siRNA sense strand
auaauaagccagagaucga

SEQ ID NO: 222580 - RNA, 19 nt, Homo sapiens
  misc_RNA (1)...(19): siRNA sense strand
cuaauaauaagccagagau

SEQ ID NO: 222581 - RNA, 19 nt, Homo sapiens
  misc_RNA (1)...(19): siRNA sense strand
ugggugaaguugcauccuu

SEQ ID NO: 222582 - RNA, 19 nt, Homo sapiens
  misc_RNA (1)...(19): siRNA sense strand
caucauuucccuguguaaa

SEQ ID NO: 222583 - RNA, 19 nt, Homo sapiens
  misc_RNA (1)...(19): siRNA sense strand
gcguggauaugugucugaa

SEQ ID NO: 222584 - RNA, 19 nt, Homo sapiens
  misc_RNA (1)...(19): siRNA sense strand
gcacuaucccaugguggaa

SEQ ID NO: 222585 - RNA, 19 nt, Homo sapiens
  misc_RNA (1)...(19): siRNA sense strand
gagccugucagcugcaugu

SEQ ID NO: 222586 - RNA, 19 nt, Homo sapiens
  misc_RNA (1)...(19): siRNA sense strand
guacagauaccuuuucaag

SEQ ID NO: 222587 - RNA, 19 nt, Homo sapiens
  misc_RNA (1)...(19): siRNA sense strand
gucccucucugcguggaua

SEQ ID NO: 222588 - RNA, 19 nt, Homo sapiens
  misc_RNA (1)...(19): siRNA sense strand
ggagcugcuuccaauuugc

SEQ ID NO: 222589 - RNA, 19 nt, Homo sapiens
  misc_RNA (1)...(19): siRNA sense strand
uuagcugaccugaauaaug

SEQ ID NO: 222590 - RNA, 19 nt, Homo sapiens
  misc_RNA (1)...(19): siRNA sense strand
guggcaaguucaacaggau

SEQ ID NO: 222591 - RNA, 19 nt, Homo sapiens
  misc_RNA (1)...(19): siRNA sense strand
acaacaauuuggucaacgu

SEQ ID NO: 222592 - RNA, 19 nt, Homo sapiens
  misc_RNA (1)...(19): siRNA sense strand
gacuacaucaggagaagau

SEQ ID NO: 222593 - RNA, 19 nt, Homo sapiens
  misc_RNA (1)...(19): siRNA sense strand
uaauaagccagagaucgaa

SEQ ID NO: 222594 - RNA, 19 nt, Homo sapiens
  misc_RNA (1)...(19): siRNA sense strand
ugucagauucucagcuuau

SEQ ID NO: 222595 - RNA, 19 nt, Homo sapiens
  misc_RNA (1)...(19): siRNA sense strand
ggauauccugcagauuauu

SEQ ID NO: 222596 - RNA, 19 nt, Homo sapiens
  misc_RNA (1)...(19): siRNA sense strand
agcaucaggccaaauguaa

SEQ ID NO: 222597 - RNA, 19 nt, Homo sapiens
  misc_RNA (1)...(19): siRNA sense strand
gcccuuugcuuggaucucu

SEQ ID NO: 222598 - RNA, 19 nt, Homo sapiens
  misc_RNA (1)...(19): siRNA sense strand
gcugaauguuuaugauacg

SEQ ID NO: 222599 - RNA, 19 nt, Homo sapiens
  misc_RNA (1)...(19): siRNA sense strand
agacuuugccaagguacua

SEQ ID NO: 222600 - RNA, 19 nt, Homo sapiens
  misc_RNA (1)...(19): siRNA sense strand
caagcaaguggcaaguuca

SEQ ID NO: 222601 - RNA, 19 nt, Homo sapiens
  misc_RNA (1)...(19): siRNA sense strand
agacaaguacagauaccuu

SEQ ID NO: 222602 - RNA, 19 nt, Homo sapiens
  misc_RNA (1)...(19): siRNA sense strand
gcaucauuucccuguguaa

SEQ ID NO: 222603 - RNA, 19 nt, Homo sapiens
  misc_RNA (1)...(19): siRNA sense strand
cugcaaagaguguccaauc

SEQ ID NO: 222604 - RNA, 19 nt, Homo sapiens
  misc_RNA (1)...(19): siRNA sense strand
cuuauaggacugccaugaa

SEQ ID NO: 222605 - RNA, 19 nt, Homo sapiens
  misc_RNA (1)...(19): siRNA sense strand
caaagaguguccaaucauu

SEQ ID NO: 222606 - RNA, 19 nt, Homo sapiens
  misc_RNA (1)...(19): siRNA sense strand
uagcugaccugaauaaugu

SEQ ID NO: 222607 - RNA, 19 nt, Homo sapiens
  misc_RNA (1)...(19): siRNA sense strand
gcaugauucuauccaaauu

SEQ ID NO: 222608 - RNA, 19 nt, Homo sapiens
  misc_RNA (1)...(19): siRNA sense strand
ugaacuggcugcugaaugu

SEQ ID NO: 222609 - RNA, 19 nt, Homo sapiens
  misc_RNA (1)...(19): siRNA sense strand
gauauccugcagauuauua

SEQ ID NO: 222610 - RNA, 19 nt, Homo sapiens
  misc_RNA (1)...(19): siRNA sense strand
gagaagauguucgagacuu

SEQ ID NO: 222611 - RNA, 19 nt, Homo sapiens
  misc_RNA (1)...(19): siRNA sense strand
gcacuuuaauuaugacauc

SEQ ID NO: 222612 - RNA, 19 nt, Homo sapiens
  misc_RNA (1)...(19): siRNA sense strand
guaaagcacauuuggaaga

SEQ ID NO: 222613 - RNA, 19 nt, Homo sapiens
  misc_RNA (1)...(19): siRNA sense strand
gaauauugcacuccgacua

SEQ ID NO: 222614 - RNA, 19 nt, Homo sapiens
  misc_RNA (1)...(19): siRNA sense strand
uuauaggacugccaugaaa

SEQ ID NO: 222615 - RNA, 19 nt, Homo sapiens
  misc_RNA (1)...(19): siRNA sense strand
gggugaaguugcauccuuu

SEQ ID NO: 222616 - RNA, 19 nt, Homo sapiens
  misc_RNA (1)...(19): siRNA sense strand
gcaagagcacaacaauuug

SEQ ID NO: 222617 - RNA, 19 nt, Homo sapiens
  misc_RNA (1)...(19): siRNA sense strand
gcacaacaauuuggucaac

SEQ ID NO: 222618 - RNA, 19 nt, Homo sapiens
  misc_RNA (1)...(19): siRNA sense strand
agcaagagcacaacaauuu

SEQ ID NO: 222619 - RNA, 19 nt, Homo sapiens
  misc_RNA (1)...(19): siRNA sense strand
agaagauguucgagacuuu

SEQ ID NO: 222620 - RNA, 19 nt, Homo sapiens
  misc_RNA (1)...(19): siRNA sense strand
gagcaagagcacaacaauu

SEQ ID NO: 222621 - RNA, 19 nt, Homo sapiens
  misc_RNA (1)...(19): siRNA sense strand
ucaagcaaguggcaaguuc

SEQ ID NO: 222622 - RNA, 19 nt, Homo sapiens
  misc_RNA (1)...(19): siRNA sense strand
ccacgagacucaaacaacu

SEQ ID NO: 222623 - RNA, 19 nt, Homo sapiens
  misc_RNA (1)...(19): siRNA sense strand
cagcacaaccucaagcaaa

SEQ ID NO: 222624 - RNA, 19 nt, Homo sapiens
  misc_RNA (1)...(19): siRNA sense strand
gcaaagaguguccaaucau

SEQ ID NO: 222625 - RNA, 19 nt, Homo sapiens
  misc_RNA (1)...(19): siRNA sense strand
auggauauccugcagauua

SEQ ID NO: 222626 - RNA, 19 nt, Homo sapiens
  misc_RNA (1)...(19): siRNA sense strand
uguaacaucugcaaagagu

SEQ ID NO: 222627 - RNA, 19 nt, Homo sapiens
  misc_RNA (1)...(19): siRNA sense strand
guccggagcugcuuccaau

SEQ ID NO: 222628 - RNA, 19 nt, Homo sapiens
  misc_RNA (1)...(19): siRNA sense strand
gcaaguggcaaguucaaca

SEQ ID NO: 222629 - RNA, 19 nt, Homo sapiens
  misc_RNA (1)...(19): siRNA sense strand
gcuuccaauuugcuaauaa

SEQ ID NO: 222630 - RNA, 19 nt, Homo sapiens
  misc_RNA (1)...(19): siRNA sense strand
uggaagacaaguacagaua

SEQ ID NO: 222631 - RNA, 19 nt, Homo sapiens
  misc_RNA (1)...(19): siRNA sense strand
ggauccguguccugucuuu

SEQ ID NO: 222632 - RNA, 19 nt, Homo sapiens
  misc_RNA (1)...(19): siRNA sense strand
gucuuuagcugaccugaau

SEQ ID NO: 222633 - RNA, 19 nt, Homo sapiens
  misc_RNA (1)...(19): siRNA sense strand
gacaaguacagauaccuuu

SEQ ID NO: 222634 - RNA, 19 nt, Homo sapiens
  misc_RNA (1)...(19): siRNA sense strand
ccaagcaucaggccaaaug

SEQ ID NO: 222635 - RNA, 19 nt, Homo sapiens
  misc_RNA (1)...(19): siRNA sense strand
ggagcaagagcacaacaau

SEQ ID NO: 222636 - RNA, 19 nt, Homo sapiens
  misc_RNA (1)...(19): siRNA sense strand
guguaaagcacauuuggaa

SEQ ID NO: 222637 - RNA, 19 nt, Homo sapiens
  misc_RNA (1)...(19): siRNA sense strand
caagacaguugggugaagu

SEQ ID NO: 222638 - RNA, 19 nt, Homo sapiens
  misc_RNA (1)...(19): siRNA sense strand
gaagauguucgagacuuug

SEQ ID NO: 222639 - RNA, 19 nt, Homo sapiens
  misc_RNA (1)...(19): siRNA sense strand
gucagauucucagcuuaua

SEQ ID NO: 222640 - RNA, 19 nt, Homo sapiens
  misc_RNA (1)...(19): siRNA sense strand
uaacaucugcaaagagugu

SEQ ID NO: 222641 - RNA, 19 nt, Homo sapiens
  misc_RNA (1)...(19): siRNA sense strand
cggagcugcuuccaauuug

SEQ ID NO: 222642 - RNA, 19 nt, Homo sapiens
  misc_RNA (1)...(19): siRNA sense strand
gaagacaaguacagauacc

SEQ ID NO: 222643 - RNA, 19 nt, Homo sapiens
  misc_RNA (1)...(19): siRNA sense strand
ccauggauauccugcagau

SEQ ID NO: 222644 - RNA, 19 nt, Homo sapiens
  misc_RNA (1)...(19): siRNA sense strand
ggcaucauuucccugugua

SEQ ID NO: 222645 - RNA, 19 nt, Homo sapiens
  misc_RNA (1)...(19): siRNA sense strand
uggauauccugcagauuau

SEQ ID NO: 222646 - RNA, 19 nt, Homo sapiens
  misc_RNA (1)...(19): siRNA sense strand
ggaagacaaguacagauac

SEQ ID NO: 222647 - RNA, 19 nt, Homo sapiens
  misc_RNA (1)...(19): siRNA sense strand
ugcaaagaguguccaauca

SEQ ID NO: 222648 - RNA, 19 nt, Homo sapiens
  misc_RNA (1)...(19): siRNA sense strand
guggauaugugucugaacu

SEQ ID NO: 222649 - RNA, 19 nt, Homo sapiens
  misc_RNA (1)...(19): siRNA sense strand
acuggcugcugaauguuua

SEQ ID NO: 222650 - RNA, 19 nt, Homo sapiens
  misc_RNA (1)...(19): siRNA sense strand
acuaucccaugguggaaua

SEQ ID NO: 222651 - RNA, 19 nt, Homo sapiens
  misc_RNA (1)...(19): siRNA sense strand
ccggagcugcuuccaauuu

SEQ ID NO: 222652 - RNA, 19 nt, Homo sapiens
  misc_RNA (1)...(19): siRNA sense strand
ccaaauuccaagacaguug

SEQ ID NO: 222653 - RNA, 19 nt, Homo sapiens
  misc_RNA (1)...(19): siRNA sense strand
cagaaacugccaagcauca

SEQ ID NO: 222654 - RNA, 19 nt, Homo sapiens
  misc_RNA (1)...(19): siRNA sense strand
uaugacaucugccaaagcu

SEQ ID NO: 222655 - RNA, 19 nt, Homo sapiens
  misc_RNA (1)...(19): siRNA sense strand
aaugucagauucucagcuu

SEQ ID NO: 222656 - RNA, 19 nt, Homo sapiens
  misc_RNA (1)...(19): siRNA sense strand
ucgagacuuugccaaggua

SEQ ID NO: 222657 - RNA, 19 nt, Homo sapiens
  misc_RNA (1)...(19): siRNA sense strand
gcaaaaggccauaaaaugc

SEQ ID NO: 222658 - RNA, 19 nt, Homo sapiens
  misc_RNA (1)...(19): siRNA sense strand
cugcaugauucuauccaaa

SEQ ID NO: 222659 - RNA, 19 nt, Homo sapiens
  misc_RNA (1)...(19): siRNA sense strand
uaaagcacauuuggaagac

SEQ ID NO: 222660 - RNA, 19 nt, Homo sapiens
  misc_RNA (1)...(19): siRNA sense strand
acaggagucuaaagcacuu

SEQ ID NO: 222661 - RNA, 19 nt, Homo sapiens
  misc_RNA (1)...(19): siRNA sense strand
acagauaccuuuucaagca

SEQ ID NO: 222662 - RNA, 19 nt, Homo sapiens
  misc_RNA (1)...(19): siRNA sense strand
aagcacauuuggaagacaa

SEQ ID NO: 222663 - RNA, 19 nt, Homo sapiens
  misc_RNA (1)...(19): siRNA sense strand
gcuaauaauaagccagaga

SEQ ID NO: 222664 - RNA, 19 nt, Homo sapiens
  misc_RNA (1)...(19): siRNA sense strand
caagagcacaacaauuugg

SEQ ID NO: 222665 - RNA, 19 nt, Homo sapiens
  misc_RNA (1)...(19): siRNA sense strand
ccugucagcugcaugugau

SEQ ID NO: 222666 - RNA, 19 nt, Homo sapiens
  misc_RNA (1)...(19): siRNA sense strand
gcugcugaauguuuaugau

SEQ ID NO: 222667 - RNA, 19 nt, Homo sapiens
  misc_RNA (1)...(19): siRNA sense strand
acagagcucuaccagucuu

SEQ ID NO: 222668 - RNA, 19 nt, Homo sapiens
  misc_RNA (1)...(19): siRNA sense strand
acaguugggugaaguugca

SEQ ID NO: 222669 - RNA, 19 nt, Homo sapiens
  misc_RNA (1)...(19): siRNA sense strand
guuugaccacuauuuauga

SEQ ID NO: 222670 - RNA, 19 nt, Homo sapiens
  misc_RNA (1)...(19): siRNA sense strand
gcuuauaggacugccauga

SEQ ID NO: 222671 - RNA, 19 nt, Homo sapiens
  misc_RNA (1)...(19): siRNA sense strand
caucaggccaaauguaaca

SEQ ID NO: 222672 - RNA, 19 nt, Homo sapiens
  misc_RNA (1)...(19): siRNA sense strand
gauucuauccaaauuccaa

SEQ ID NO: 222673 - RNA, 19 nt, Homo sapiens
  misc_RNA (1)...(19): siRNA sense strand
ggcaaguucaacaggauuu

SEQ ID NO: 222674 - RNA, 19 nt, Homo sapiens
  misc_RNA (1)...(19): siRNA sense strand
gaacuggcugcugaauguu

SEQ ID NO: 222675 - RNA, 19 nt, Homo sapiens
  misc_RNA (1)...(19): siRNA sense strand
cugcugaauguuuaugaua

SEQ ID NO: 222676 - RNA, 19 nt, Homo sapiens
  misc_RNA (1)...(19): siRNA sense strand
aagcaucaggccaaaugua

SEQ ID NO: 222677 - RNA, 19 nt, Homo sapiens
  misc_RNA (1)...(19): siRNA sense strand
uggcaucauuucccugugu

SEQ ID NO: 222678 - RNA, 19 nt, Homo sapiens
  misc_RNA (1)...(19): siRNA sense strand
ccaugaaacuccgaagacu

SEQ ID NO: 222679 - RNA, 19 nt, Homo sapiens
  misc_RNA (1)...(19): siRNA sense strand
auaauaagccagagaucga

SEQ ID NO: 222680 - RNA, 19 nt, Homo sapiens
  misc_RNA (1)...(19): siRNA sense strand
cuaauaauaagccagagau

SEQ ID NO: 222681 - RNA, 19 nt, Homo sapiens
  misc_RNA (1)...(19): siRNA sense strand
ugggugaaguugcauccuu

SEQ ID NO: 222682 - RNA, 19 nt, Homo sapiens
  misc_RNA (1)...(19): siRNA sense strand
caucauuucccuguguaaa

SEQ ID NO: 222683 - RNA, 19 nt, Homo sapiens
  misc_RNA (1)...(19): siRNA sense strand
gcguggauaugugucugaa

SEQ ID NO: 222684 - RNA, 19 nt, Homo sapiens
  misc_RNA (1)...(19): siRNA sense strand
gcacuaucccaugguggaa

SEQ ID NO: 222685 - RNA, 19 nt, Homo sapiens
  misc_RNA (1)...(19): siRNA sense strand
gagccugucagcugcaugu

SEQ ID NO: 222686 - RNA, 19 nt, Homo sapiens
  misc_RNA (1)...(19): siRNA sense strand
guacagauaccuuuucaag

SEQ ID NO: 222687 - RNA, 19 nt, Homo sapiens
  misc_RNA (1)...(19): siRNA sense strand
gucccucucugcguggaua

SEQ ID NO: 222688 - RNA, 19 nt, Homo sapiens
  misc_RNA (1)...(19): siRNA sense strand
ggagcugcuuccaauuugc

SEQ ID NO: 222689 - RNA, 19 nt, Homo sapiens
  misc_RNA (1)...(19): siRNA sense strand
uuagcugaccugaauaaug

SEQ ID NO: 222690 - RNA, 19 nt, Homo sapiens
  misc_RNA (1)...(19): siRNA sense strand
guggcaaguucaacaggau

SEQ ID NO: 222691 - RNA, 19 nt, Homo sapiens
  misc_RNA (1)...(19): siRNA sense strand
acaacaauuuggucaacgu

SEQ ID NO: 222692 - RNA, 19 nt, Homo sapiens
  misc_RNA (1)...(19): siRNA sense strand
gacuacaucaggagaagau

SEQ ID NO: 222693 - RNA, 19 nt, Homo sapiens
  misc_RNA (1)...(19): siRNA sense strand
uaauaagccagagaucgaa

SEQ ID NO: 222694 - RNA, 19 nt, Homo sapiens
  misc_RNA (1)...(19): siRNA sense strand
ugucagauucucagcuuau

SEQ ID NO: 222695 - RNA, 19 nt, Homo sapiens
  misc_RNA (1)...(19): siRNA sense strand
ggauauccugcagauuauu

SEQ ID NO: 222696 - RNA, 19 nt, Homo sapiens
  misc_RNA (1)...(19): siRNA sense strand
agcaucaggccaaauguaa

SEQ ID NO: 222697 - RNA, 19 nt, Homo sapiens
  misc_RNA (1)...(19): siRNA sense strand
gcccuuugcuuggaucucu

SEQ ID NO: 222698 - RNA, 19 nt, Homo sapiens
  misc_RNA (1)...(19): siRNA sense strand
gcugaauguuuaugauacg

SEQ ID NO: 222699 - RNA, 19 nt, Homo sapiens
  misc_RNA (1)...(19): siRNA sense strand
agacuuugccaagguacua

SEQ ID NO: 222700 - RNA, 19 nt, Homo sapiens
  misc_RNA (1)...(19): siRNA sense strand
caagcaaguggcaaguuca

SEQ ID NO: 222701 - RNA, 19 nt, Homo sapiens
  misc_RNA (1)...(19): siRNA sense strand
agacaaguacagauaccuu

SEQ ID NO: 222702 - RNA, 19 nt, Homo sapiens
  misc_RNA (1)...(19): siRNA sense strand
gcaucauuucccuguguaa

SEQ ID NO: 222703 - RNA, 19 nt, Homo sapiens
  misc_RNA (1)...(19): siRNA sense strand
cugcaaagaguguccaauc

SEQ ID NO: 222704 - RNA, 19 nt, Homo sapiens
  misc_RNA (1)...(19): siRNA sense strand
cuuauaggacugccaugaa

SEQ ID NO: 222705 - RNA, 19 nt, Homo sapiens
  misc_RNA (1)...(19): siRNA sense strand
caaagaguguccaaucauu

SEQ ID NO: 222706 - RNA, 19 nt, Homo sapiens
  misc_RNA (1)...(19): siRNA sense strand
uagcugaccugaauaaugu

SEQ ID NO: 222707 - RNA, 19 nt, Homo sapiens
  misc_RNA (1)...(19): siRNA sense strand
gcaugauucuauccaaauu

SEQ ID NO: 222708 - RNA, 19 nt, Homo sapiens
  misc_RNA (1)...(19): siRNA sense strand
ugaacuggcugcugaaugu

SEQ ID NO: 222709 - RNA, 19 nt, Homo sapiens
  misc_RNA (1)...(19): siRNA sense strand
gauauccugcagauuauua

SEQ ID NO: 222710 - RNA, 19 nt, Homo sapiens
  misc_RNA (1)...(19): siRNA sense strand
gagaagauguucgagacuu

SEQ ID NO: 222711 - RNA, 19 nt, Homo sapiens
  misc_RNA (1)...(19): siRNA sense strand
gcacuuuaauuaugacauc

SEQ ID NO: 222712 - RNA, 19 nt, Homo sapiens
  misc_RNA (1)...(19): siRNA sense strand
guaaagcacauuuggaaga

SEQ ID NO: 222713 - RNA, 19 nt, Homo sapiens
  misc_RNA (1)...(19): siRNA sense strand
gaauauugcacuccgacua

SEQ ID NO: 222714 - RNA, 19 nt, Homo sapiens
  misc_RNA (1)...(19): siRNA sense strand
uuauaggacugccaugaaa

SEQ ID NO: 222715 - RNA, 19 nt, Homo sapiens
  misc_RNA (1)...(19): siRNA sense strand
gggugaaguugcauccuuu

SEQ ID NO: 222716 - RNA, 19 nt, Homo sapiens
  misc_RNA (1)...(19): siRNA sense strand
gcaagagcacaacaauuug

SEQ ID NO: 222717 - RNA, 19 nt, Homo sapiens
  misc_RNA (1)...(19): siRNA sense strand
gcacaacaauuuggucaac

SEQ ID NO: 222718 - RNA, 19 nt, Homo sapiens
  misc_RNA (1)...(19): siRNA sense strand
agcaagagcacaacaauuu

SEQ ID NO: 222719 - RNA, 19 nt, Homo sapiens
  misc_RNA (1)...(19): siRNA sense strand
agaagauguucgagacuuu

SEQ ID NO: 222720 - RNA, 19 nt, Homo sapiens
  misc_RNA (1)...(19): siRNA sense strand
gagcaagagcacaacaauu

SEQ ID NO: 222721 - RNA, 19 nt, Homo sapiens
  misc_RNA (1)...(19): siRNA sense strand
ucaagcaaguggcaaguuc

SEQ ID NO: 222722 - RNA, 19 nt, Homo sapiens
  misc_RNA (1)...(19): siRNA sense strand
ccacgagacucaaacaacu

SEQ ID NO: 222723 - RNA, 19 nt, Homo sapiens
  misc_RNA (1)...(19): siRNA sense strand
cagcacaaccucaagcaaa

SEQ ID NO: 222724 - RNA, 19 nt, Homo sapiens
  misc_RNA (1)...(19): siRNA sense strand
gcaaagaguguccaaucau

SEQ ID NO: 222725 - RNA, 19 nt, Homo sapiens
  misc_RNA (1)...(19): siRNA sense strand
auggauauccugcagauua

SEQ ID NO: 222726 - RNA, 19 nt, Homo sapiens
  misc_RNA (1)...(19): siRNA sense strand
uguaacaucugcaaagagu

SEQ ID NO: 222727 - RNA, 19 nt, Homo sapiens
  misc_RNA (1)...(19): siRNA sense strand
guccggagcugcuuccaau

SEQ ID NO: 222728 - RNA, 19 nt, Homo sapiens
  misc_RNA (1)...(19): siRNA sense strand
gcaaguggcaaguucaaca

SEQ ID NO: 222729 - RNA, 19 nt, Homo sapiens
  misc_RNA (1)...(19): siRNA sense strand
gcuuccaauuugcuaauaa

SEQ ID NO: 222730 - RNA, 19 nt, Homo sapiens
  misc_RNA (1)...(19): siRNA sense strand
uggaagacaaguacagaua

SEQ ID NO: 222731 - RNA, 19 nt, Homo sapiens
  misc_RNA (1)...(19): siRNA sense strand
ggauccguguccugucuuu

SEQ ID NO: 222732 - RNA, 19 nt, Homo sapiens
  misc_RNA (1)...(19): siRNA sense strand
gucuuuagcugaccugaau

SEQ ID NO: 222733 - RNA, 19 nt, Homo sapiens
  misc_RNA (1)...(19): siRNA sense strand
gacaaguacagauaccuuu

SEQ ID NO: 222734 - RNA, 19 nt, Homo sapiens
  misc_RNA (1)...(19): siRNA sense strand
ccaagcaucaggccaaaug

SEQ ID NO: 222735 - RNA, 19 nt, Homo sapiens
  misc_RNA (1)...(19): siRNA sense strand
ggagcaagagcacaacaau

SEQ ID NO: 222736 - RNA, 19 nt, Homo sapiens
  misc_RNA (1)...(19): siRNA sense strand
guguaaagcacauuuggaa

SEQ ID NO: 222737 - RNA, 19 nt, Homo sapiens
  misc_RNA (1)...(19): siRNA sense strand
caagacaguugggugaagu

SEQ ID NO: 222738 - RNA, 19 nt, Homo sapiens
  misc_RNA (1)...(19): siRNA sense strand
gaagauguucgagacuuug

SEQ ID NO: 222739 - RNA, 19 nt, Homo sapiens
  misc_RNA (1)...(19): siRNA sense strand
gucagauucucagcuuaua

SEQ ID NO: 222740 - RNA, 19 nt, Homo sapiens
  misc_RNA (1)...(19): siRNA sense strand
uaacaucugcaaagagugu

SEQ ID NO: 222741 - RNA, 19 nt, Homo sapiens
  misc_RNA (1)...(19): siRNA sense strand
cggagcugcuuccaauuug

SEQ ID NO: 222742 - RNA, 19 nt, Homo sapiens
  misc_RNA (1)...(19): siRNA sense strand
gaagacaaguacagauacc

SEQ ID NO: 222743 - RNA, 19 nt, Homo sapiens
  misc_RNA (1)...(19): siRNA sense strand
ccauggauauccugcagau

SEQ ID NO: 222744 - RNA, 19 nt, Homo sapiens
  misc_RNA (1)...(19): siRNA sense strand
ggcaucauuucccugugua

SEQ ID NO: 222745 - RNA, 19 nt, Homo sapiens
  misc_RNA (1)...(19): siRNA sense strand
uggauauccugcagauuau

SEQ ID NO: 222746 - RNA, 19 nt, Homo sapiens
  misc_RNA (1)...(19): siRNA sense strand
ggaagacaaguacagauac

SEQ ID NO: 222747 - RNA, 19 nt, Homo sapiens
  misc_RNA (1)...(19): siRNA sense strand
ugcaaagaguguccaauca

SEQ ID NO: 222748 - RNA, 19 nt, Homo sapiens
  misc_RNA (1)...(19): siRNA sense strand
guggauaugugucugaacu

SEQ ID NO: 222749 - RNA, 19 nt, Homo sapiens
  misc_RNA (1)...(19): siRNA sense strand
acuggcugcugaauguuua

SEQ ID NO: 222750 - RNA, 19 nt, Homo sapiens
  misc_RNA (1)...(19): siRNA sense strand
acuaucccaugguggaaua

SEQ ID NO: 222751 - RNA, 19 nt, Homo sapiens
  misc_RNA (1)...(19): siRNA sense strand
ccggagcugcuuccaauuu

SEQ ID NO: 222752 - RNA, 19 nt, Homo sapiens
  misc_RNA (1)...(19): siRNA sense strand
ccaaauuccaagacaguug

SEQ ID NO: 222753 - RNA, 19 nt, Homo sapiens
  misc_RNA (1)...(19): siRNA sense strand
cagaaacugccaagcauca

SEQ ID NO: 222754 - RNA, 19 nt, Homo sapiens
  misc_RNA (1)...(19): siRNA sense strand
uaugacaucugccaaagcu

SEQ ID NO: 222755 - RNA, 19 nt, Homo sapiens
  misc_RNA (1)...(19): siRNA sense strand
aaugucagauucucagcuu

SEQ ID NO: 222756 - RNA, 19 nt, Homo sapiens
  misc_RNA (1)...(19): siRNA sense strand
ucgagacuuugccaaggua

SEQ ID NO: 222757 - RNA, 19 nt, Homo sapiens
  misc_RNA (1)...(19): siRNA sense strand
gcaaaaggccauaaaaugc

SEQ ID NO: 222758 - RNA, 19 nt, Homo sapiens
  misc_RNA (1)...(19): siRNA sense strand
cugcaugauucuauccaaa

SEQ ID NO: 222759 - RNA, 19 nt, Homo sapiens
  misc_RNA (1)...(19): siRNA sense strand
uaaagcacauuuggaagac

SEQ ID NO: 222760 - RNA, 19 nt, Homo sapiens
  misc_RNA (1)...(19): siRNA sense strand
acaggagucuaaagcacuu

SEQ ID NO: 222761 - RNA, 19 nt, Homo sapiens
  misc_RNA (1)...(19): siRNA sense strand
acagauaccuuuucaagca

SEQ ID NO: 222762 - RNA, 19 nt, Homo sapiens
  misc_RNA (1)...(19): siRNA sense strand
aagcacauuuggaagacaa

SEQ ID NO: 222763 - RNA, 19 nt, Homo sapiens
  misc_RNA (1)...(19): siRNA sense strand
gcuaauaauaagccagaga

SEQ ID NO: 222764 - RNA, 19 nt, Homo sapiens
  misc_RNA (1)...(19): siRNA sense strand
caagagcacaacaauuugg

SEQ ID NO: 222765 - RNA, 19 nt, Homo sapiens
  misc_RNA (1)...(19): siRNA sense strand
ccugucagcugcaugugau

SEQ ID NO: 222766 - RNA, 19 nt, Homo sapiens
  misc_RNA (1)...(19): siRNA sense strand
gcugcugaauguuuaugau

SEQ ID NO: 222767 - RNA, 19 nt, Homo sapiens
  misc_RNA (1)...(19): siRNA sense strand
acagagcucuaccagucuu

SEQ ID NO: 222768 - RNA, 19 nt, Homo sapiens
  misc_RNA (1)...(19): siRNA sense strand
acaguugggugaaguugca

SEQ ID NO: 222769 - RNA, 19 nt, Homo sapiens
  misc_RNA (1)...(19): siRNA sense strand
guuugaccacuauuuauga

SEQ ID NO: 222770 - RNA, 19 nt, Homo sapiens
  misc_RNA (1)...(19): siRNA sense strand
gcuuauaggacugccauga

SEQ ID NO: 222771 - RNA, 19 nt, Homo sapiens
  misc_RNA (1)...(19): siRNA sense strand
caucaggccaaauguaaca

SEQ ID NO: 222772 - RNA, 19 nt, Homo sapiens
  misc_RNA (1)...(19): siRNA sense strand
gauucuauccaaauuccaa

SEQ ID NO: 222773 - RNA, 19 nt, Homo sapiens
  misc_RNA (1)...(19): siRNA sense strand
ggcaaguucaacaggauuu

SEQ ID NO: 222774 - RNA, 19 nt, Homo sapiens
  misc_RNA (1)...(19): siRNA sense strand
gaacuggcugcugaauguu

SEQ ID NO: 222775 - RNA, 19 nt, Homo sapiens
  misc_RNA (1)...(19): siRNA sense strand
cugcugaauguuuaugaua

SEQ ID NO: 222776 - RNA, 19 nt, Homo sapiens
  misc_RNA (1)...(19): siRNA sense strand
aagcaucaggccaaaugua

SEQ ID NO: 222777 - RNA, 19 nt, Homo sapiens
  misc_RNA (1)...(19): siRNA sense strand
uggcaucauuucccugugu

SEQ ID NO: 222778 - RNA, 19 nt, Homo sapiens
  misc_RNA (1)...(19): siRNA sense strand
ccaugaaacuccgaagacu

SEQ ID NO: 222779 - RNA, 19 nt, Homo sapiens
  misc_RNA (1)...(19): siRNA sense strand
auaauaagccagagaucga

SEQ ID NO: 222780 - RNA, 19 nt, Homo sapiens
  misc_RNA (1)...(19): siRNA sense strand
cuaauaauaagccagagau

SEQ ID NO: 222781 - RNA, 19 nt, Homo sapiens
  misc_RNA (1)...(19): siRNA sense strand
ugggugaaguugcauccuu

SEQ ID NO: 222782 - RNA, 19 nt, Homo sapiens
  misc_RNA (1)...(19): siRNA sense strand
caucauuucccuguguaaa

SEQ ID NO: 222783 - RNA, 19 nt, Homo sapiens
  misc_RNA (1)...(19): siRNA sense strand
gcguggauaugugucugaa

SEQ ID NO: 222784 - RNA, 19 nt, Homo sapiens
  misc_RNA (1)...(19): siRNA sense strand
gcacuaucccaugguggaa

SEQ ID NO: 222785 - RNA, 19 nt, Homo sapiens
  misc_RNA (1)...(19): siRNA sense strand
gagccugucagcugcaugu

SEQ ID NO: 222786 - RNA, 19 nt, Homo sapiens
  misc_RNA (1)...(19): siRNA sense strand
guacagauaccuuuucaag

SEQ ID NO: 222787 - RNA, 19 nt, Homo sapiens
  misc_RNA (1)...(19): siRNA sense strand
gucccucucugcguggaua

SEQ ID NO: 222788 - RNA, 19 nt, Homo sapiens
  misc_RNA (1)...(19): siRNA sense strand
ggagcugcuuccaauuugc

SEQ ID NO: 222789 - RNA, 19 nt, Homo sapiens
  misc_RNA (1)...(19): siRNA sense strand
uuagcugaccugaauaaug

SEQ ID NO: 222790 - RNA, 19 nt, Homo sapiens
  misc_RNA (1)...(19): siRNA sense strand
guggcaaguucaacaggau

SEQ ID NO: 222791 - RNA, 19 nt, Homo sapiens
  misc_RNA (1)...(19): siRNA sense strand
acaacaauuuggucaacgu

SEQ ID NO: 222792 - RNA, 19 nt, Homo sapiens
  misc_RNA (1)...(19): siRNA sense strand
gacuacaucaggagaagau

SEQ ID NO: 222793 - RNA, 19 nt, Homo sapiens
  misc_RNA (1)...(19): siRNA sense strand
uaauaagccagagaucgaa

SEQ ID NO: 222794 - RNA, 19 nt, Homo sapiens
  misc_RNA (1)...(19): siRNA sense strand
ugucagauucucagcuuau

SEQ ID NO: 222795 - RNA, 19 nt, Homo sapiens
  misc_RNA (1)...(19): siRNA sense strand
ggauauccugcagauuauu

SEQ ID NO: 222796 - RNA, 19 nt, Homo sapiens
  misc_RNA (1)...(19): siRNA sense strand
agcaucaggccaaauguaa

SEQ ID NO: 222797 - RNA, 19 nt, Homo sapiens
  misc_RNA (1)...(19): siRNA sense strand
gcccuuugcuuggaucucu

SEQ ID NO: 222798 - RNA, 19 nt, Homo sapiens
  misc_RNA (1)...(19): siRNA sense strand
gcugaauguuuaugauacg

SEQ ID NO: 222799 - RNA, 19 nt, Homo sapiens
  misc_RNA (1)...(19): siRNA sense strand
agacuuugccaagguacua

SEQ ID NO: 222800 - RNA, 19 nt, Homo sapiens
  misc_RNA (1)...(19): siRNA sense strand
caagcaaguggcaaguuca

SEQ ID NO: 222801 - RNA, 19 nt, Homo sapiens
  misc_RNA (1)...(19): siRNA sense strand
agacaaguacagauaccuu

SEQ ID NO: 222802 - RNA, 19 nt, Homo sapiens
  misc_RNA (1)...(19): siRNA sense strand
gcaucauuucccuguguaa

SEQ ID NO: 222803 - RNA, 19 nt, Homo sapiens
  misc_RNA (1)...(19): siRNA sense strand
cugcaaagaguguccaauc

SEQ ID NO: 222804 - RNA, 19 nt, Homo sapiens
  misc_RNA (1)...(19): siRNA sense strand
cuuauaggacugccaugaa

SEQ ID NO: 222805 - RNA, 19 nt, Homo sapiens
  misc_RNA (1)...(19): siRNA sense strand
caaagaguguccaaucauu

SEQ ID NO: 222806 - RNA, 19 nt, Homo sapiens
  misc_RNA (1)...(19): siRNA sense strand
uagcugaccugaauaaugu

SEQ ID NO: 222807 - RNA, 19 nt, Homo sapiens
  misc_RNA (1)...(19): siRNA sense strand
gcaugauucuauccaaauu

SEQ ID NO: 222808 - RNA, 19 nt, Homo sapiens
  misc_RNA (1)...(19): siRNA sense strand
ugaacuggcugcugaaugu

SEQ ID NO: 222809 - RNA, 19 nt, Homo sapiens
  misc_RNA (1)...(19): siRNA sense strand
gauauccugcagauuauua

SEQ ID NO: 222810 - RNA, 19 nt, Homo sapiens
  misc_RNA (1)...(19): siRNA sense strand
gagaagauguucgagacuu

SEQ ID NO: 222811 - RNA, 19 nt, Homo sapiens
  misc_RNA (1)...(19): siRNA sense strand
gcacuuuaauuaugacauc

SEQ ID NO: 222812 - RNA, 19 nt, Homo sapiens
  misc_RNA (1)...(19): siRNA sense strand
guaaagcacauuuggaaga

SEQ ID NO: 222813 - RNA, 19 nt, Homo sapiens
  misc_RNA (1)...(19): siRNA sense strand
gaauauugcacuccgacua

SEQ ID NO: 222814 - RNA, 19 nt, Homo sapiens
  misc_RNA (1)...(19): siRNA sense strand
uuauaggacugccaugaaa

SEQ ID NO: 222815 - RNA, 19 nt, Homo sapiens
  misc_RNA (1)...(19): siRNA sense strand
gggugaaguugcauccuuu

SEQ ID NO: 222816 - RNA, 19 nt, Homo sapiens
  misc_RNA (1)...(19): siRNA sense strand
gcaagagcacaacaauuug

SEQ ID NO: 222817 - RNA, 19 nt, Homo sapiens
  misc_RNA (1)...(19): siRNA sense strand
gcacaacaauuuggucaac

SEQ ID NO: 222818 - RNA, 19 nt, Homo sapiens
  misc_RNA (1)...(19): siRNA sense strand
agcaagagcacaacaauuu

SEQ ID NO: 222819 - RNA, 19 nt, Homo sapiens
  misc_RNA (1)...(19): siRNA sense strand
agaagauguucgagacuuu

SEQ ID NO: 222820 - RNA, 19 nt, Homo sapiens
  misc_RNA (1)...(19): siRNA sense strand
gagcaagagcacaacaauu

SEQ ID NO: 222821 - RNA, 19 nt, Homo sapiens
  misc_RNA (1)...(19): siRNA sense strand
ucaagcaaguggcaaguuc

SEQ ID NO: 222822 - RNA, 19 nt, Homo sapiens
  misc_RNA (1)...(19): siRNA sense strand
ccacgagacucaaacaacu

SEQ ID NO: 222823 - RNA, 19 nt, Homo sapiens
  misc_RNA (1)...(19): siRNA sense strand
cagcacaaccucaagcaaa

SEQ ID NO: 222824 - RNA, 19 nt, Homo sapiens
  misc_RNA (1)...(19): siRNA sense strand
gcaaagaguguccaaucau

SEQ ID NO: 222825 - RNA, 19 nt, Homo sapiens
  misc_RNA (1)...(19): siRNA sense strand
auggauauccugcagauua

SEQ ID NO: 222826 - RNA, 19 nt, Homo sapiens
  misc_RNA (1)...(19): siRNA sense strand
uguaacaucugcaaagagu

SEQ ID NO: 222827 - RNA, 19 nt, Homo sapiens
  misc_RNA (1)...(19): siRNA sense strand
guccggagcugcuuccaau

SEQ ID NO: 222828 - RNA, 19 nt, Homo sapiens
  misc_RNA (1)...(19): siRNA sense strand
gcaaguggcaaguucaaca

SEQ ID NO: 222829 - RNA, 19 nt, Homo sapiens
  misc_RNA (1)...(19): siRNA sense strand
gcuuccaauuugcuaauaa

SEQ ID NO: 222830 - RNA, 19 nt, Homo sapiens
  misc_RNA (1)...(19): siRNA sense strand
uggaagacaaguacagaua

SEQ ID NO: 222831 - RNA, 19 nt, Homo sapiens
  misc_RNA (1)...(19): siRNA sense strand
ggauccguguccugucuuu

SEQ ID NO: 222832 - RNA, 19 nt, Homo sapiens
  misc_RNA (1)...(19): siRNA sense strand
gucuuuagcugaccugaau

SEQ ID NO: 222833 - RNA, 19 nt, Homo sapiens
  misc_RNA (1)...(19): siRNA sense strand
gacaaguacagauaccuuu

SEQ ID NO: 222834 - RNA, 19 nt, Homo sapiens
  misc_RNA (1)...(19): siRNA sense strand
ccaagcaucaggccaaaug

SEQ ID NO: 222835 - RNA, 19 nt, Homo sapiens
  misc_RNA (1)...(19): siRNA sense strand
ggagcaagagcacaacaau

SEQ ID NO: 222836 - RNA, 19 nt, Homo sapiens
  misc_RNA (1)...(19): siRNA sense strand
guguaaagcacauuuggaa

SEQ ID NO: 222837 - RNA, 19 nt, Homo sapiens
  misc_RNA (1)...(19): siRNA sense strand
caagacaguugggugaagu

SEQ ID NO: 222838 - RNA, 19 nt, Homo sapiens
  misc_RNA (1)...(19): siRNA sense strand
gaagauguucgagacuuug

SEQ ID NO: 222839 - RNA, 19 nt, Homo sapiens
  misc_RNA (1)...(19): siRNA sense strand
gucagauucucagcuuaua

SEQ ID NO: 222840 - RNA, 19 nt, Homo sapiens
  misc_RNA (1)...(19): siRNA sense strand
uaacaucugcaaagagugu

SEQ ID NO: 222841 - RNA, 19 nt, Homo sapiens
  misc_RNA (1)...(19): siRNA sense strand
cggagcugcuuccaauuug

SEQ ID NO: 222842 - RNA, 19 nt, Homo sapiens
  misc_RNA (1)...(19): siRNA sense strand
gaagacaaguacagauacc

SEQ ID NO: 222843 - RNA, 19 nt, Homo sapiens
  misc_RNA (1)...(19): siRNA sense strand
ccauggauauccugcagau

SEQ ID NO: 222844 - RNA, 19 nt, Homo sapiens
  misc_RNA (1)...(19): siRNA sense strand
ggcaucauuucccugugua

SEQ ID NO: 222845 - RNA, 19 nt, Homo sapiens
  misc_RNA (1)...(19): siRNA sense strand
uggauauccugcagauuau

SEQ ID NO: 222846 - RNA, 19 nt, Homo sapiens
  misc_RNA (1)...(19): siRNA sense strand
ggaagacaaguacagauac

SEQ ID NO: 222847 - RNA, 19 nt, Homo sapiens
  misc_RNA (1)...(19): siRNA sense strand
ugcaaagaguguccaauca

SEQ ID NO: 222848 - RNA, 19 nt, Homo sapiens
  misc_RNA (1)...(19): siRNA sense strand
guggauaugugucugaacu

SEQ ID NO: 222849 - RNA, 19 nt, Homo sapiens
  misc_RNA (1)...(19): siRNA sense strand
acuggcugcugaauguuua

SEQ ID NO: 222850 - RNA, 19 nt, Homo sapiens
  misc_RNA (1)...(19): siRNA sense strand
acuaucccaugguggaaua

SEQ ID NO: 222851 - RNA, 19 nt, Homo sapiens
  misc_RNA (1)...(19): siRNA sense strand
ccggagcugcuuccaauuu

SEQ ID NO: 222852 - RNA, 19 nt, Homo sapiens
  misc_RNA (1)...(19): siRNA sense strand
ccaaauuccaagacaguug

SEQ ID NO: 222853 - RNA, 19 nt, Homo sapiens
  misc_RNA (1)...(19): siRNA sense strand
cagaaacugccaagcauca

SEQ ID NO: 222854 - RNA, 19 nt, Homo sapiens
  misc_RNA (1)...(19): siRNA sense strand
uaugacaucugccaaagcu

SEQ ID NO: 222855 - RNA, 19 nt, Homo sapiens
  misc_RNA (1)...(19): siRNA sense strand
aaugucagauucucagcuu

SEQ ID NO: 222856 - RNA, 19 nt, Homo sapiens
  misc_RNA (1)...(19): siRNA sense strand
ucgagacuuugccaaggua

SEQ ID NO: 222857 - RNA, 19 nt, Homo sapiens
  misc_RNA (1)...(19): siRNA sense strand
gcaaaaggccauaaaaugc

SEQ ID NO: 222858 - RNA, 19 nt, Homo sapiens
  misc_RNA (1)...(19): siRNA sense strand
cugcaugauucuauccaaa

SEQ ID NO: 222859 - RNA, 19 nt, Homo sapiens
  misc_RNA (1)...(19): siRNA sense strand
uaaagcacauuuggaagac

SEQ ID NO: 222860 - RNA, 19 nt, Homo sapiens
  misc_RNA (1)...(19): siRNA sense strand
acaggagucuaaagcacuu

SEQ ID NO: 222861 - RNA, 19 nt, Homo sapiens
  misc_RNA (1)...(19): siRNA sense strand
acagauaccuuuucaagca

SEQ ID NO: 222862 - RNA, 19 nt, Homo sapiens
  misc_RNA (1)...(19): siRNA sense strand
aagcacauuuggaagacaa

SEQ ID NO: 222863 - RNA, 19 nt, Homo sapiens
  misc_RNA (1)...(19): siRNA sense strand
gcuaauaauaagccagaga

SEQ ID NO: 222864 - RNA, 19 nt, Homo sapiens
  misc_RNA (1)...(19): siRNA sense strand
caagagcacaacaauuugg

SEQ ID NO: 222865 - RNA, 19 nt, Homo sapiens
  misc_RNA (1)...(19): siRNA sense strand
ccugucagcugcaugugau

SEQ ID NO: 222866 - RNA, 19 nt, Homo sapiens
  misc_RNA (1)...(19): siRNA sense strand
gcugcugaauguuuaugau

SEQ ID NO: 222867 - RNA, 19 nt, Homo sapiens
  misc_RNA (1)...(19): siRNA sense strand
acagagcucuaccagucuu

SEQ ID NO: 222868 - RNA, 19 nt, Homo sapiens
  misc_RNA (1)...(19): siRNA sense strand
acaguugggugaaguugca

SEQ ID NO: 222869 - RNA, 19 nt, Homo sapiens
  misc_RNA (1)...(19): siRNA sense strand
guuugaccacuauuuauga

SEQ ID NO: 222870 - RNA, 19 nt, Homo sapiens
  misc_RNA (1)...(19): siRNA sense strand
gcuuauaggacugccauga

SEQ ID NO: 222871 - RNA, 19 nt, Homo sapiens
  misc_RNA (1)...(19): siRNA sense strand
caucaggccaaauguaaca

SEQ ID NO: 222872 - RNA, 19 nt, Homo sapiens
  misc_RNA (1)...(19): siRNA sense strand
gauucuauccaaauuccaa

SEQ ID NO: 222873 - RNA, 19 nt, Homo sapiens
  misc_RNA (1)...(19): siRNA sense strand
ggcaaguucaacaggauuu

SEQ ID NO: 222874 - RNA, 19 nt, Homo sapiens
  misc_RNA (1)...(19): siRNA sense strand
gaacuggcugcugaauguu

SEQ ID NO: 222875 - RNA, 19 nt, Homo sapiens
  misc_RNA (1)...(19): siRNA sense strand
cugcugaauguuuaugaua

SEQ ID NO: 222876 - RNA, 19 nt, Homo sapiens
  misc_RNA (1)...(19): siRNA sense strand
aagcaucaggccaaaugua

SEQ ID NO: 222877 - RNA, 19 nt, Homo sapiens
  misc_RNA (1)...(19): siRNA sense strand
uggcaucauuucccugugu

SEQ ID NO: 222878 - RNA, 19 nt, Homo sapiens
  misc_RNA (1)...(19): siRNA sense strand
ccaugaaacuccgaagacu

SEQ ID NO: 222879 - RNA, 19 nt, Homo sapiens
  misc_RNA (1)...(19): siRNA sense strand
auaauaagccagagaucga

SEQ ID NO: 222880 - RNA, 19 nt, Homo sapiens
  misc_RNA (1)...(19): siRNA sense strand
cuaauaauaagccagagau

SEQ ID NO: 222881 - RNA, 19 nt, Homo sapiens
  misc_RNA (1)...(19): siRNA sense strand
ugggugaaguugcauccuu

SEQ ID NO: 222882 - RNA, 19 nt, Homo sapiens
  misc_RNA (1)...(19): siRNA sense strand
caucauuucccuguguaaa

SEQ ID NO: 222883 - RNA, 19 nt, Homo sapiens
  misc_RNA (1)...(19): siRNA sense strand
gcguggauaugugucugaa

SEQ ID NO: 222884 - RNA, 19 nt, Homo sapiens
  misc_RNA (1)...(19): siRNA sense strand
gcacuaucccaugguggaa

SEQ ID NO: 222885 - RNA, 19 nt, Homo sapiens
  misc_RNA (1)...(19): siRNA sense strand
gagccugucagcugcaugu

SEQ ID NO: 222886 - RNA, 19 nt, Homo sapiens
  misc_RNA (1)...(19): siRNA sense strand
guacagauaccuuuucaag

SEQ ID NO: 222887 - RNA, 19 nt, Homo sapiens
  misc_RNA (1)...(19): siRNA sense strand
gucccucucugcguggaua

SEQ ID NO: 222888 - RNA, 19 nt, Homo sapiens
  misc_RNA (1)...(19): siRNA sense strand
ggagcugcuuccaauuugc

SEQ ID NO: 222889 - RNA, 19 nt, Homo sapiens
  misc_RNA (1)...(19): siRNA sense strand
uuagcugaccugaauaaug

SEQ ID NO: 222890 - RNA, 19 nt, Homo sapiens
  misc_RNA (1)...(19): siRNA sense strand
guggcaaguucaacaggau

SEQ ID NO: 222891 - RNA, 19 nt, Homo sapiens
  misc_RNA (1)...(19): siRNA sense strand
acaacaauuuggucaacgu

SEQ ID NO: 222892 - RNA, 19 nt, Homo sapiens
  misc_RNA (1)...(19): siRNA sense strand
gacuacaucaggagaagau

SEQ ID NO: 222893 - RNA, 19 nt, Homo sapiens
  misc_RNA (1)...(19): siRNA sense strand
uaauaagccagagaucgaa

SEQ ID NO: 222894 - RNA, 19 nt, Homo sapiens
  misc_RNA (1)...(19): siRNA sense strand
ugucagauucucagcuuau

SEQ ID NO: 222895 - RNA, 19 nt, Homo sapiens
  misc_RNA (1)...(19): siRNA sense strand
ggauauccugcagauuauu

SEQ ID NO: 222896 - RNA, 19 nt, Homo sapiens
  misc_RNA (1)...(19): siRNA sense strand
agcaucaggccaaauguaa

SEQ ID NO: 222897 - RNA, 19 nt, Homo sapiens
  misc_RNA (1)...(19): siRNA sense strand
gcccuuugcuuggaucucu

SEQ ID NO: 222898 - RNA, 19 nt, Homo sapiens
  misc_RNA (1)...(19): siRNA sense strand
gcugaauguuuaugauacg

SEQ ID NO: 222899 - RNA, 19 nt, Homo sapiens
  misc_RNA (1)...(19): siRNA sense strand
agacuuugccaagguacua

SEQ ID NO: 222900 - RNA, 19 nt, Homo sapiens
  misc_RNA (1)...(19): siRNA sense strand
caagcaaguggcaaguuca

SEQ ID NO: 222901 - RNA, 19 nt, Homo sapiens
  misc_RNA (1)...(19): siRNA sense strand
agacaaguacagauaccuu

SEQ ID NO: 222902 - RNA, 19 nt, Homo sapiens
  misc_RNA (1)...(19): siRNA sense strand
gcaucauuucccuguguaa

SEQ ID NO: 222903 - RNA, 19 nt, Homo sapiens
  misc_RNA (1)...(19): siRNA sense strand
cugcaaagaguguccaauc

SEQ ID NO: 222904 - RNA, 19 nt, Homo sapiens
  misc_RNA (1)...(19): siRNA sense strand
cuuauaggacugccaugaa

SEQ ID NO: 222905 - RNA, 19 nt, Homo sapiens
  misc_RNA (1)...(19): siRNA sense strand
caaagaguguccaaucauu

SEQ ID NO: 222906 - RNA, 19 nt, Homo sapiens
  misc_RNA (1)...(19): siRNA sense strand
uagcugaccugaauaaugu

SEQ ID NO: 222907 - RNA, 19 nt, Homo sapiens
  misc_RNA (1)...(19): siRNA sense strand
gcaugauucuauccaaauu

SEQ ID NO: 222908 - RNA, 19 nt, Homo sapiens
  misc_RNA (1)...(19): siRNA sense strand
ugaacuggcugcugaaugu

SEQ ID NO: 222909 - RNA, 19 nt, Homo sapiens
  misc_RNA (1)...(19): siRNA sense strand
gauauccugcagauuauua

SEQ ID NO: 222910 - RNA, 19 nt, Homo sapiens
  misc_RNA (1)...(19): siRNA sense strand
gagaagauguucgagacuu

SEQ ID NO: 222911 - RNA, 19 nt, Homo sapiens
  misc_RNA (1)...(19): siRNA sense strand
gcacuuuaauuaugacauc

SEQ ID NO: 222912 - RNA, 19 nt, Homo sapiens
  misc_RNA (1)...(19): siRNA sense strand
guaaagcacauuuggaaga

SEQ ID NO: 222913 - RNA, 19 nt, Homo sapiens
  misc_RNA (1)...(19): siRNA sense strand
gaauauugcacuccgacua

SEQ ID NO: 222914 - RNA, 19 nt, Homo sapiens
  misc_RNA (1)...(19): siRNA sense strand
uuauaggacugccaugaaa

SEQ ID NO: 222915 - RNA, 19 nt, Homo sapiens
  misc_RNA (1)...(19): siRNA sense strand
gggugaaguugcauccuuu

SEQ ID NO: 222916 - RNA, 19 nt, Homo sapiens
  misc_RNA (1)...(19): siRNA sense strand
gcaagagcacaacaauuug

SEQ ID NO: 222917 - RNA, 19 nt, Homo sapiens
  misc_RNA (1)...(19): siRNA sense strand
gcacaacaauuuggucaac

SEQ ID NO: 222918 - RNA, 19 nt, Homo sapiens
  misc_RNA (1)...(19): siRNA sense strand
agcaagagcacaacaauuu

SEQ ID NO: 222919 - RNA, 19 nt, Homo sapiens
  misc_RNA (1)...(19): siRNA sense strand
agaagauguucgagacuuu

SEQ ID NO: 222920 - RNA, 19 nt, Homo sapiens
  misc_RNA (1)...(19): siRNA sense strand
gagcaagagcacaacaauu

SEQ ID NO: 222921 - RNA, 19 nt, Homo sapiens
  misc_RNA (1)...(19): siRNA sense strand
ucaagcaaguggcaaguuc

SEQ ID NO: 222922 - RNA, 19 nt, Homo sapiens
  misc_RNA (1)...(19): siRNA sense strand
ccacgagacucaaacaacu

SEQ ID NO: 222923 - RNA, 19 nt, Homo sapiens
  misc_RNA (1)...(19): siRNA sense strand
cagcacaaccucaagcaaa

SEQ ID NO: 222924 - RNA, 19 nt, Homo sapiens
  misc_RNA (1)...(19): siRNA sense strand
gcaaagaguguccaaucau

SEQ ID NO: 222925 - RNA, 19 nt, Homo sapiens
  misc_RNA (1)...(19): siRNA sense strand
auggauauccugcagauua

SEQ ID NO: 222926 - RNA, 19 nt, Homo sapiens
  misc_RNA (1)...(19): siRNA sense strand
uguaacaucugcaaagagu

SEQ ID NO: 222927 - RNA, 19 nt, Homo sapiens
  misc_RNA (1)...(19): siRNA sense strand
guccggagcugcuuccaau

SEQ ID NO: 222928 - RNA, 19 nt, Homo sapiens
  misc_RNA (1)...(19): siRNA sense strand
gcaaguggcaaguucaaca

SEQ ID NO: 222929 - RNA, 19 nt, Homo sapiens
  misc_RNA (1)...(19): siRNA sense strand
gcuuccaauuugcuaauaa

SEQ ID NO: 222930 - RNA, 19 nt, Homo sapiens
  misc_RNA (1)...(19): siRNA sense strand
uggaagacaaguacagaua

SEQ ID NO: 222931 - RNA, 19 nt, Homo sapiens
  misc_RNA (1)...(19): siRNA sense strand
ggauccguguccugucuuu

SEQ ID NO: 222932 - RNA, 19 nt, Homo sapiens
  misc_RNA (1)...(19): siRNA sense strand
gucuuuagcugaccugaau

SEQ ID NO: 222933 - RNA, 19 nt, Homo sapiens
  misc_RNA (1)...(19): siRNA sense strand
gacaaguacagauaccuuu

SEQ ID NO: 222934 - RNA, 19 nt, Homo sapiens
  misc_RNA (1)...(19): siRNA sense strand
ccaagcaucaggccaaaug

SEQ ID NO: 222935 - RNA, 19 nt, Homo sapiens
  misc_RNA (1)...(19): siRNA sense strand
ggagcaagagcacaacaau

SEQ ID NO: 222936 - RNA, 19 nt, Homo sapiens
  misc_RNA (1)...(19): siRNA sense strand
guguaaagcacauuuggaa

SEQ ID NO: 222937 - RNA, 19 nt, Homo sapiens
  misc_RNA (1)...(19): siRNA sense strand
caagacaguugggugaagu

SEQ ID NO: 222938 - RNA, 19 nt, Homo sapiens
  misc_RNA (1)...(19): siRNA sense strand
gaagauguucgagacuuug

SEQ ID NO: 222939 - RNA, 19 nt, Homo sapiens
  misc_RNA (1)...(19): siRNA sense strand
gucagauucucagcuuaua

SEQ ID NO: 222940 - RNA, 19 nt, Homo sapiens
  misc_RNA (1)...(19): siRNA sense strand
uaacaucugcaaagagugu

SEQ ID NO: 222941 - RNA, 19 nt, Homo sapiens
  misc_RNA (1)...(19): siRNA sense strand
cggagcugcuuccaauuug

SEQ ID NO: 222942 - RNA, 19 nt, Homo sapiens
  misc_RNA (1)...(19): siRNA sense strand
gaagacaaguacagauacc

SEQ ID NO: 222943 - RNA, 19 nt, Homo sapiens
  misc_RNA (1)...(19): siRNA sense strand
ccauggauauccugcagau

SEQ ID NO: 222944 - RNA, 19 nt, Homo sapiens
  misc_RNA (1)...(19): siRNA sense strand
ggcaucauuucccugugua

SEQ ID NO: 222945 - RNA, 19 nt, Homo sapiens
  misc_RNA (1)...(19): siRNA sense strand
uggauauccugcagauuau

SEQ ID NO: 222946 - RNA, 19 nt, Homo sapiens
  misc_RNA (1)...(19): siRNA sense strand
ggaagacaaguacagauac

SEQ ID NO: 222947 - RNA, 19 nt, Homo sapiens
  misc_RNA (1)...(19): siRNA sense strand
ugcaaagaguguccaauca

SEQ ID NO: 222948 - RNA, 19 nt, Homo sapiens
  misc_RNA (1)...(19): siRNA sense strand
guggauaugugucugaacu

SEQ ID NO: 222949 - RNA, 19 nt, Homo sapiens
  misc_RNA (1)...(19): siRNA sense strand
acuggcugcugaauguuua

SEQ ID NO: 222950 - RNA, 19 nt, Homo sapiens
  misc_RNA (1)...(19): siRNA sense strand
acuaucccaugguggaaua

SEQ ID NO: 222951 - RNA, 19 nt, Homo sapiens
  misc_RNA (1)...(19): siRNA sense strand
ccggagcugcuuccaauuu

SEQ ID NO: 222952 - RNA, 19 nt, Homo sapiens
  misc_RNA (1)...(19): siRNA sense strand
ccaaauuccaagacaguug

SEQ ID NO: 222953 - RNA, 19 nt, Homo sapiens
  misc_RNA (1)...(19): siRNA sense strand
cagaaacugccaagcauca

SEQ ID NO: 222954 - RNA, 19 nt, Homo sapiens
  misc_RNA (1)...(19): siRNA sense strand
uaugacaucugccaaagcu

SEQ ID NO: 222955 - RNA, 19 nt, Homo sapiens
  misc_RNA (1)...(19): siRNA sense strand
aaugucagauucucagcuu

SEQ ID NO: 222956 - RNA, 19 nt, Homo sapiens
  misc_RNA (1)...(19): siRNA sense strand
ucgagacuuugccaaggua

SEQ ID NO: 222957 - RNA, 19 nt, Homo sapiens
  misc_RNA (1)...(19): siRNA sense strand
gcaaaaggccauaaaaugc

SEQ ID NO: 222958 - RNA, 19 nt, Homo sapiens
  misc_RNA (1)...(19): siRNA sense strand
cugcaugauucuauccaaa

SEQ ID NO: 222959 - RNA, 19 nt, Homo sapiens
  misc_RNA (1)...(19): siRNA sense strand
uaaagcacauuuggaagac

SEQ ID NO: 222960 - RNA, 19 nt, Homo sapiens
  misc_RNA (1)...(19): siRNA sense strand
acaggagucuaaagcacuu

SEQ ID NO: 222961 - RNA, 19 nt, Homo sapiens
  misc_RNA (1)...(19): siRNA sense strand
acagauaccuuuucaagca

SEQ ID NO: 222962 - RNA, 19 nt, Homo sapiens
  misc_RNA (1)...(19): siRNA sense strand
aagcacauuuggaagacaa

SEQ ID NO: 222963 - RNA, 19 nt, Homo sapiens
  misc_RNA (1)...(19): siRNA sense strand
gcuaauaauaagccagaga

SEQ ID NO: 222964 - RNA, 19 nt, Homo sapiens
  misc_RNA (1)...(19): siRNA sense strand
caagagcacaacaauuugg

SEQ ID NO: 222965 - RNA, 19 nt, Homo sapiens
  misc_RNA (1)...(19): siRNA sense strand
ccugucagcugcaugugau

SEQ ID NO: 222966 - RNA, 19 nt, Homo sapiens
  misc_RNA (1)...(19): siRNA sense strand
gcugcugaauguuuaugau

SEQ ID NO: 222967 - RNA, 19 nt, Homo sapiens
  misc_RNA (1)...(19): siRNA sense strand
acagagcucuaccagucuu

SEQ ID NO: 222968 - RNA, 19 nt, Homo sapiens
  misc_RNA (1)...(19): siRNA sense strand
acaguugggugaaguugca

SEQ ID NO: 222969 - RNA, 19 nt, Homo sapiens
  misc_RNA (1)...(19): siRNA sense strand
guuugaccacuauuuauga

SEQ ID NO: 222970 - RNA, 19 nt, Homo sapiens
  misc_RNA (1)...(19): siRNA sense strand
gcuuauaggacugccauga

SEQ ID NO: 222971 - RNA, 19 nt, Homo sapiens
  misc_RNA (1)...(19): siRNA sense strand
caucaggccaaauguaaca

SEQ ID NO: 222972 - RNA, 19 nt, Homo sapiens
  misc_RNA (1)...(19): siRNA sense strand
gauucuauccaaauuccaa

SEQ ID NO: 222973 - RNA, 19 nt, Homo sapiens
  misc_RNA (1)...(19): siRNA sense strand
ggcaaguucaacaggauuu

SEQ ID NO: 222974 - RNA, 19 nt, Homo sapiens
  misc_RNA (1)...(19): siRNA sense strand
gaacuggcugcugaauguu

SEQ ID NO: 222975 - RNA, 19 nt, Homo sapiens
  misc_RNA (1)...(19): siRNA sense strand
cugcugaauguuuaugaua

SEQ ID NO: 222976 - RNA, 19 nt, Homo sapiens
  misc_RNA (1)...(19): siRNA sense strand
aagcaucaggccaaaugua

SEQ ID NO: 222977 - RNA, 19 nt, Homo sapiens
  misc_RNA (1)...(19): siRNA sense strand
uggcaucauuucccugugu

SEQ ID NO: 222978 - RNA, 19 nt, Homo sapiens
  misc_RNA (1)...(19): siRNA sense strand
ccaugaaacuccgaagacu

SEQ ID NO: 222979 - RNA, 19 nt, Homo sapiens
  misc_RNA (1)...(19): siRNA sense strand
auaauaagccagagaucga

SEQ ID NO: 222980 - RNA, 19 nt, Homo sapiens
  misc_RNA (1)...(19): siRNA sense strand
cuaauaauaagccagagau

SEQ ID NO: 222981 - RNA, 19 nt, Homo sapiens
  misc_RNA (1)...(19): siRNA sense strand
ugggugaaguugcauccuu

SEQ ID NO: 222982 - RNA, 19 nt, Homo sapiens
  misc_RNA (1)...(19): siRNA sense strand
caucauuucccuguguaaa

SEQ ID NO: 222983 - RNA, 19 nt, Homo sapiens
  misc_RNA (1)...(19): siRNA sense strand
gcguggauaugugucugaa

SEQ ID NO: 222984 - RNA, 19 nt, Homo sapiens
  misc_RNA (1)...(19): siRNA sense strand
gcacuaucccaugguggaa

SEQ ID NO: 222985 - RNA, 19 nt, Homo sapiens
  misc_RNA (1)...(19): siRNA sense strand
gagccugucagcugcaugu

SEQ ID NO: 222986 - RNA, 19 nt, Homo sapiens
  misc_RNA (1)...(19): siRNA sense strand
guacagauaccuuuucaag

SEQ ID NO: 222987 - RNA, 19 nt, Homo sapiens
  misc_RNA (1)...(19): siRNA sense strand
gucccucucugcguggaua

SEQ ID NO: 222988 - RNA, 19 nt, Homo sapiens
  misc_RNA (1)...(19): siRNA sense strand
ggagcugcuuccaauuugc

SEQ ID NO: 222989 - RNA, 19 nt, Homo sapiens
  misc_RNA (1)...(19): siRNA sense strand
uuagcugaccugaauaaug

SEQ ID NO: 222990 - RNA, 19 nt, Homo sapiens
  misc_RNA (1)...(19): siRNA sense strand
guggcaaguucaacaggau

SEQ ID NO: 222991 - RNA, 19 nt, Homo sapiens
  misc_RNA (1)...(19): siRNA sense strand
acaacaauuuggucaacgu

SEQ ID NO: 222992 - RNA, 19 nt, Homo sapiens
  misc_RNA (1)...(19): siRNA sense strand
gacuacaucaggagaagau

SEQ ID NO: 222993 - RNA, 19 nt, Homo sapiens
  misc_RNA (1)...(19): siRNA sense strand
uaauaagccagagaucgaa

SEQ ID NO: 222994 - RNA, 19 nt, Homo sapiens
  misc_RNA (1)...(19): siRNA sense strand
ugucagauucucagcuuau

SEQ ID NO: 222995 - RNA, 19 nt, Homo sapiens
  misc_RNA (1)...(19): siRNA sense strand
ggauauccugcagauuauu

SEQ ID NO: 222996 - RNA, 19 nt, Homo sapiens
  misc_RNA (1)...(19): siRNA sense strand
agcaucaggccaaauguaa

SEQ ID NO: 222997 - RNA, 19 nt, Homo sapiens
  misc_RNA (1)...(19): siRNA sense strand
gcccuuugcuuggaucucu

SEQ ID NO: 222998 - RNA, 19 nt, Homo sapiens
  misc_RNA (1)...(19): siRNA sense strand
gcugaauguuuaugauacg

SEQ ID NO: 222999 - RNA, 19 nt, Homo sapiens
  misc_RNA (1)...(19): siRNA sense strand
agacuuugccaagguacua

SEQ ID NO: 223000 - RNA, 19 nt, Homo sapiens
  misc_RNA (1)...(19): siRNA sense strand
caagcaaguggcaaguuca

SEQ ID NO: 223001 - RNA, 19 nt, Homo sapiens
  misc_RNA (1)...(19): siRNA sense strand
agacaaguacagauaccuu

SEQ ID NO: 223002 - RNA, 19 nt, Homo sapiens
  misc_RNA (1)...(19): siRNA sense strand
gcaucauuucccuguguaa

SEQ ID NO: 223003 - RNA, 19 nt, Homo sapiens
  misc_RNA (1)...(19): siRNA sense strand
cugcaaagaguguccaauc

SEQ ID NO: 223004 - RNA, 19 nt, Homo sapiens
  misc_RNA (1)...(19): siRNA sense strand
cuuauaggacugccaugaa

SEQ ID NO: 223005 - RNA, 19 nt, Homo sapiens
  misc_RNA (1)...(19): siRNA sense strand
caaagaguguccaaucauu

SEQ ID NO: 223006 - RNA, 19 nt, Homo sapiens
  misc_RNA (1)...(19): siRNA sense strand
uagcugaccugaauaaugu

SEQ ID NO: 223007 - RNA, 19 nt, Homo sapiens
  misc_RNA (1)...(19): siRNA sense strand
gcaugauucuauccaaauu

SEQ ID NO: 223008 - RNA, 19 nt, Homo sapiens
  misc_RNA (1)...(19): siRNA sense strand
ugaacuggcugcugaaugu

SEQ ID NO: 223009 - RNA, 19 nt, Homo sapiens
  misc_RNA (1)...(19): siRNA sense strand
gauauccugcagauuauua

SEQ ID NO: 223010 - RNA, 19 nt, Homo sapiens
  misc_RNA (1)...(19): siRNA sense strand
gagaagauguucgagacuu

SEQ ID NO: 223011 - RNA, 19 nt, Homo sapiens
  misc_RNA (1)...(19): siRNA sense strand
gcacuuuaauuaugacauc

SEQ ID NO: 223012 - RNA, 19 nt, Homo sapiens
  misc_RNA (1)...(19): siRNA sense strand
guaaagcacauuuggaaga

SEQ ID NO: 223013 - RNA, 19 nt, Homo sapiens
  misc_RNA (1)...(19): siRNA sense strand
gaauauugcacuccgacua

SEQ ID NO: 223014 - RNA, 19 nt, Homo sapiens
  misc_RNA (1)...(19): siRNA sense strand
uuauaggacugccaugaaa

SEQ ID NO: 223015 - RNA, 19 nt, Homo sapiens
  misc_RNA (1)...(19): siRNA sense strand
gggugaaguugcauccuuu

SEQ ID NO: 223016 - RNA, 19 nt, Homo sapiens
  misc_RNA (1)...(19): siRNA sense strand
gcaagagcacaacaauuug

SEQ ID NO: 223017 - RNA, 19 nt, Homo sapiens
  misc_RNA (1)...(19): siRNA sense strand
gcacaacaauuuggucaac

SEQ ID NO: 223018 - RNA, 19 nt, Homo sapiens
  misc_RNA (1)...(19): siRNA sense strand
agcaagagcacaacaauuu

SEQ ID NO: 223019 - RNA, 19 nt, Homo sapiens
  misc_RNA (1)...(19): siRNA sense strand
agaagauguucgagacuuu

SEQ ID NO: 223020 - RNA, 19 nt, Homo sapiens
  misc_RNA (1)...(19): siRNA sense strand
gagcaagagcacaacaauu

SEQ ID NO: 223021 - RNA, 19 nt, Homo sapiens
  misc_RNA (1)...(19): siRNA sense strand
ucaagcaaguggcaaguuc

SEQ ID NO: 223022 - RNA, 19 nt, Homo sapiens
  misc_RNA (1)...(19): siRNA sense strand
ccacgagacucaaacaacu

SEQ ID NO: 223023 - RNA, 19 nt, Homo sapiens
  misc_RNA (1)...(19): siRNA sense strand
cagcacaaccucaagcaaa

SEQ ID NO: 223024 - RNA, 19 nt, Homo sapiens
  misc_RNA (1)...(19): siRNA sense strand
gcaaagaguguccaaucau

SEQ ID NO: 223025 - RNA, 19 nt, Homo sapiens
  misc_RNA (1)...(19): siRNA sense strand
auggauauccugcagauua

SEQ ID NO: 223026 - RNA, 19 nt, Homo sapiens
  misc_RNA (1)...(19): siRNA sense strand
uguaacaucugcaaagagu

SEQ ID NO: 223027 - RNA, 19 nt, Homo sapiens
  misc_RNA (1)...(19): siRNA sense strand
guccggagcugcuuccaau

SEQ ID NO: 223028 - RNA, 19 nt, Homo sapiens
  misc_RNA (1)...(19): siRNA sense strand
gcaaguggcaaguucaaca

SEQ ID NO: 223029 - RNA, 19 nt, Homo sapiens
  misc_RNA (1)...(19): siRNA sense strand
gcuuccaauuugcuaauaa

SEQ ID NO: 223030 - RNA, 19 nt, Homo sapiens
  misc_RNA (1)...(19): siRNA sense strand
uggaagacaaguacagaua

SEQ ID NO: 223031 - RNA, 19 nt, Homo sapiens
  misc_RNA (1)...(19): siRNA sense strand
ggauccguguccugucuuu

SEQ ID NO: 223032 - RNA, 19 nt, Homo sapiens
  misc_RNA (1)...(19): siRNA sense strand
gucuuuagcugaccugaau

SEQ ID NO: 223033 - RNA, 19 nt, Homo sapiens
  misc_RNA (1)...(19): siRNA sense strand
gacaaguacagauaccuuu

SEQ ID NO: 223034 - RNA, 19 nt, Homo sapiens
  misc_RNA (1)...(19): siRNA sense strand
ccaagcaucaggccaaaug

SEQ ID NO: 223035 - RNA, 19 nt, Homo sapiens
  misc_RNA (1)...(19): siRNA sense strand
ggagcaagagcacaacaau

SEQ ID NO: 223036 - RNA, 19 nt, Homo sapiens
  misc_RNA (1)...(19): siRNA sense strand
guguaaagcacauuuggaa

SEQ ID NO: 223037 - RNA, 19 nt, Homo sapiens
  misc_RNA (1)...(19): siRNA sense strand
caagacaguugggugaagu

SEQ ID NO: 223038 - RNA, 19 nt, Homo sapiens
  misc_RNA (1)...(19): siRNA sense strand
gaagauguucgagacuuug

SEQ ID NO: 223039 - RNA, 19 nt, Homo sapiens
  misc_RNA (1)...(19): siRNA sense strand
gucagauucucagcuuaua

SEQ ID NO: 223040 - RNA, 19 nt, Homo sapiens
  misc_RNA (1)...(19): siRNA sense strand
uaacaucugcaaagagugu

SEQ ID NO: 223041 - RNA, 19 nt, Homo sapiens
  misc_RNA (1)...(19): siRNA sense strand
cggagcugcuuccaauuug

SEQ ID NO: 223042 - RNA, 19 nt, Homo sapiens
  misc_RNA (1)...(19): siRNA sense strand
gaagacaaguacagauacc

SEQ ID NO: 223043 - RNA, 19 nt, Homo sapiens
  misc_RNA (1)...(19): siRNA sense strand
ccauggauauccugcagau

SEQ ID NO: 223044 - RNA, 19 nt, Homo sapiens
  misc_RNA (1)...(19): siRNA sense strand
ggcaucauuucccugugua

SEQ ID NO: 223045 - RNA, 19 nt, Homo sapiens
  misc_RNA (1)...(19): siRNA sense strand
uggauauccugcagauuau

SEQ ID NO: 223046 - RNA, 19 nt, Homo sapiens
  misc_RNA (1)...(19): siRNA sense strand
ggaagacaaguacagauac

SEQ ID NO: 223047 - RNA, 19 nt, Homo sapiens
  misc_RNA (1)...(19): siRNA sense strand
ugcaaagaguguccaauca

SEQ ID NO: 223048 - RNA, 19 nt, Homo sapiens
  misc_RNA (1)...(19): siRNA sense strand
guggauaugugucugaacu

SEQ ID NO: 223049 - RNA, 19 nt, Homo sapiens
  misc_RNA (1)...(19): siRNA sense strand
acuggcugcugaauguuua

SEQ ID NO: 223050 - RNA, 19 nt, Homo sapiens
  misc_RNA (1)...(19): siRNA sense strand
acuaucccaugguggaaua

SEQ ID NO: 223051 - RNA, 19 nt, Homo sapiens
  misc_RNA (1)...(19): siRNA sense strand
ccggagcugcuuccaauuu

SEQ ID NO: 223052 - RNA, 19 nt, Homo sapiens
  misc_RNA (1)...(19): siRNA sense strand
ccaaauuccaagacaguug

SEQ ID NO: 223053 - RNA, 19 nt, Homo sapiens
  misc_RNA (1)...(19): siRNA sense strand
cagaaacugccaagcauca

SEQ ID NO: 223054 - RNA, 19 nt, Homo sapiens
  misc_RNA (1)...(19): siRNA sense strand
uaugacaucugccaaagcu

SEQ ID NO: 223055 - RNA, 19 nt, Homo sapiens
  misc_RNA (1)...(19): siRNA sense strand
aaugucagauucucagcuu

SEQ ID NO: 223056 - RNA, 19 nt, Homo sapiens
  misc_RNA (1)...(19): siRNA sense strand
ucgagacuuugccaaggua

SEQ ID NO: 223057 - RNA, 19 nt, Homo sapiens
  misc_RNA (1)...(19): siRNA sense strand
gcaaaaggccauaaaaugc

SEQ ID NO: 223058 - RNA, 19 nt, Homo sapiens
  misc_RNA (1)...(19): siRNA sense strand
cugcaugauucuauccaaa

SEQ ID NO: 223059 - RNA, 19 nt, Homo sapiens
  misc_RNA (1)...(19): siRNA sense strand
uaaagcacauuuggaagac

SEQ ID NO: 223060 - RNA, 19 nt, Homo sapiens
  misc_RNA (1)...(19): siRNA sense strand
acaggagucuaaagcacuu

SEQ ID NO: 223061 - RNA, 19 nt, Homo sapiens
  misc_RNA (1)...(19): siRNA sense strand
acagauaccuuuucaagca

SEQ ID NO: 223062 - RNA, 19 nt, Homo sapiens
  misc_RNA (1)...(19): siRNA sense strand
aagcacauuuggaagacaa

SEQ ID NO: 223063 - RNA, 19 nt, Homo sapiens
  misc_RNA (1)...(19): siRNA sense strand
gcuaauaauaagccagaga

SEQ ID NO: 223064 - RNA, 19 nt, Homo sapiens
  misc_RNA (1)...(19): siRNA sense strand
caagagcacaacaauuugg

SEQ ID NO: 223065 - RNA, 19 nt, Homo sapiens
  misc_RNA (1)...(19): siRNA sense strand
ccugucagcugcaugugau

SEQ ID NO: 223066 - RNA, 19 nt, Homo sapiens
  misc_RNA (1)...(19): siRNA sense strand
gcugcugaauguuuaugau

SEQ ID NO: 223067 - RNA, 19 nt, Homo sapiens
  misc_RNA (1)...(19): siRNA sense strand
acagagcucuaccagucuu

SEQ ID NO: 223068 - RNA, 19 nt, Homo sapiens
  misc_RNA (1)...(19): siRNA sense strand
acaguugggugaaguugca

SEQ ID NO: 223069 - RNA, 19 nt, Homo sapiens
  misc_RNA (1)...(19): siRNA sense strand
guuugaccacuauuuauga

SEQ ID NO: 223070 - RNA, 19 nt, Homo sapiens
  misc_RNA (1)...(19): siRNA sense strand
gcuuauaggacugccauga

SEQ ID NO: 223071 - RNA, 19 nt, Homo sapiens
  misc_RNA (1)...(19): siRNA sense strand
caucaggccaaauguaaca

SEQ ID NO: 223072 - RNA, 19 nt, Homo sapiens
  misc_RNA (1)...(19): siRNA sense strand
gauucuauccaaauuccaa

SEQ ID NO: 223073 - RNA, 19 nt, Homo sapiens
  misc_RNA (1)...(19): siRNA sense strand
ggcaaguucaacaggauuu

SEQ ID NO: 223074 - RNA, 19 nt, Homo sapiens
  misc_RNA (1)...(19): siRNA sense strand
gaacuggcugcugaauguu

SEQ ID NO: 223075 - RNA, 19 nt, Homo sapiens
  misc_RNA (1)...(19): siRNA sense strand
cugcugaauguuuaugaua

SEQ ID NO: 223076 - RNA, 19 nt, Homo sapiens
  misc_RNA (1)...(19): siRNA sense strand
aagcaucaggccaaaugua

SEQ ID NO: 223077 - RNA, 19 nt, Homo sapiens
  misc_RNA (1)...(19): siRNA sense strand
uggcaucauuucccugugu

SEQ ID NO: 223078 - RNA, 19 nt, Homo sapiens
  misc_RNA (1)...(19): siRNA sense strand
ccaugaaacuccgaagacu

SEQ ID NO: 223079 - RNA, 19 nt, Homo sapiens
  misc_RNA (1)...(19): siRNA sense strand
auaauaagccagagaucga

SEQ ID NO: 223080 - RNA, 19 nt, Homo sapiens
  misc_RNA (1)...(19): siRNA sense strand
cuaauaauaagccagagau

SEQ ID NO: 223081 - RNA, 19 nt, Homo sapiens
  misc_RNA (1)...(19): siRNA sense strand
ugggugaaguugcauccuu

SEQ ID NO: 223082 - RNA, 19 nt, Homo sapiens
  misc_RNA (1)...(19): siRNA sense strand
caucauuucccuguguaaa

SEQ ID NO: 223083 - RNA, 19 nt, Homo sapiens
  misc_RNA (1)...(19): siRNA sense strand
gcguggauaugugucugaa

SEQ ID NO: 223084 - RNA, 19 nt, Homo sapiens
  misc_RNA (1)...(19): siRNA sense strand
gcacuaucccaugguggaa

SEQ ID NO: 223085 - RNA, 19 nt, Homo sapiens
  misc_RNA (1)...(19): siRNA sense strand
gagccugucagcugcaugu

SEQ ID NO: 223086 - RNA, 19 nt, Homo sapiens
  misc_RNA (1)...(19): siRNA sense strand
guacagauaccuuuucaag

SEQ ID NO: 223087 - RNA, 19 nt, Homo sapiens
  misc_RNA (1)...(19): siRNA sense strand
gucccucucugcguggaua

SEQ ID NO: 223088 - RNA, 19 nt, Homo sapiens
  misc_RNA (1)...(19): siRNA sense strand
ggagcugcuuccaauuugc

SEQ ID NO: 223089 - RNA, 19 nt, Homo sapiens
  misc_RNA (1)...(19): siRNA sense strand
uuagcugaccugaauaaug

SEQ ID NO: 223090 - RNA, 19 nt, Homo sapiens
  misc_RNA (1)...(19): siRNA sense strand
guggcaaguucaacaggau

SEQ ID NO: 223091 - RNA, 19 nt, Homo sapiens
  misc_RNA (1)...(19): siRNA sense strand
acaacaauuuggucaacgu

SEQ ID NO: 223092 - RNA, 19 nt, Homo sapiens
  misc_RNA (1)...(19): siRNA sense strand
gacuacaucaggagaagau

SEQ ID NO: 223093 - RNA, 19 nt, Homo sapiens
  misc_RNA (1)...(19): siRNA sense strand
uaauaagccagagaucgaa

SEQ ID NO: 223094 - RNA, 19 nt, Homo sapiens
  misc_RNA (1)...(19): siRNA sense strand
ugucagauucucagcuuau

SEQ ID NO: 223095 - RNA, 19 nt, Homo sapiens
  misc_RNA (1)...(19): siRNA sense strand
ggauauccugcagauuauu

SEQ ID NO: 223096 - RNA, 19 nt, Homo sapiens
  misc_RNA (1)...(19): siRNA sense strand
agcaucaggccaaauguaa

SEQ ID NO: 223097 - RNA, 19 nt, Homo sapiens
  misc_RNA (1)...(19): siRNA sense strand
gcccuuugcuuggaucucu

SEQ ID NO: 223098 - RNA, 19 nt, Homo sapiens
  misc_RNA (1)...(19): siRNA sense strand
gcugaauguuuaugauacg

SEQ ID NO: 223099 - RNA, 19 nt, Homo sapiens
  misc_RNA (1)...(19): siRNA sense strand
agacuuugccaagguacua

SEQ ID NO: 223100 - RNA, 19 nt, Homo sapiens
  misc_RNA (1)...(19): siRNA sense strand
caagcaaguggcaaguuca

SEQ ID NO: 223101 - RNA, 19 nt, Homo sapiens
  misc_RNA (1)...(19): siRNA sense strand
agacaaguacagauaccuu

SEQ ID NO: 223102 - RNA, 19 nt, Homo sapiens
  misc_RNA (1)...(19): siRNA sense strand
gcaucauuucccuguguaa

SEQ ID NO: 223103 - RNA, 19 nt, Homo sapiens
  misc_RNA (1)...(19): siRNA sense strand
cugcaaagaguguccaauc

SEQ ID NO: 223104 - RNA, 19 nt, Homo sapiens
  misc_RNA (1)...(19): siRNA sense strand
cuuauaggacugccaugaa

SEQ ID NO: 223105 - RNA, 19 nt, Homo sapiens
  misc_RNA (1)...(19): siRNA sense strand
ugaagaagaugaaaggaaa

SEQ ID NO: 223106 - RNA, 19 nt, Homo sapiens
  misc_RNA (1)...(19): siRNA sense strand
gcaaagugccgaaacaaga

SEQ ID NO: 223107 - RNA, 19 nt, Homo sapiens
  misc_RNA (1)...(19): siRNA sense strand
gaaacaagaagaaggagaa

SEQ ID NO: 223108 - RNA, 19 nt, Homo sapiens
  misc_RNA (1)...(19): siRNA sense strand
cggagaagcuggaaagugu

SEQ ID NO: 223109 - RNA, 19 nt, Homo sapiens
  misc_RNA (1)...(19): siRNA sense strand
agaagcagcauuugauaua

SEQ ID NO: 223110 - RNA, 19 nt, Homo sapiens
  misc_RNA (1)...(19): siRNA sense strand
cgagaaagaaauaagauug

SEQ ID NO: 223111 - RNA, 19 nt, Homo sapiens
  misc_RNA (1)...(19): siRNA sense strand
cgagaagcagcauuugaua

SEQ ID NO: 223112 - RNA, 19 nt, Homo sapiens
  misc_RNA (1)...(19): siRNA sense strand
gaagcagcauuugauauac

SEQ ID NO: 223113 - RNA, 19 nt, Homo sapiens
  misc_RNA (1)...(19): siRNA sense strand
gagaagcagcauuugauau

SEQ ID NO: 223114 - RNA, 19 nt, Homo sapiens
  misc_RNA (1)...(19): siRNA sense strand
caaagugccgaaacaagaa

SEQ ID NO: 223115 - RNA, 19 nt, Homo sapiens
  misc_RNA (1)...(19): siRNA sense strand
gauaaaagaaggaacauug

SEQ ID NO: 223116 - RNA, 19 nt, Homo sapiens
  misc_RNA (1)...(19): siRNA sense strand
gaacgagaagcagcauuug

SEQ ID NO: 223117 - RNA, 19 nt, Homo sapiens
  misc_RNA (1)...(19): siRNA sense strand
ccucugcgcuggaaucagu

SEQ ID NO: 223118 - RNA, 19 nt, Homo sapiens
  misc_RNA (1)...(19): siRNA sense strand
caaggaagagcugagguuu

SEQ ID NO: 223119 - RNA, 19 nt, Homo sapiens
  misc_RNA (1)...(19): siRNA sense strand
gagaaaccucuuuauccaa

SEQ ID NO: 223120 - RNA, 19 nt, Homo sapiens
  misc_RNA (1)...(19): siRNA sense strand
cgacgagaaagaaauaaga

SEQ ID NO: 223121 - RNA, 19 nt, Homo sapiens
  misc_RNA (1)...(19): siRNA sense strand
gcugcaaagugccgaaaca

SEQ ID NO: 223122 - RNA, 19 nt, Homo sapiens
  misc_RNA (1)...(19): siRNA sense strand
agaacgagaagcagcauuu

SEQ ID NO: 223123 - RNA, 19 nt, Homo sapiens
  misc_RNA (1)...(19): siRNA sense strand
gagaagcuggaaaguguga

SEQ ID NO: 223124 - RNA, 19 nt, Homo sapiens
  misc_RNA (1)...(19): siRNA sense strand
ucacugguguuugaggauu

SEQ ID NO: 223125 - RNA, 19 nt, Homo sapiens
  misc_RNA (1)...(19): siRNA sense strand
caucggcccacguguauug

SEQ ID NO: 223126 - RNA, 19 nt, Homo sapiens
  misc_RNA (1)...(19): siRNA sense strand
gaaaccucuuuauccaaca

SEQ ID NO: 223127 - RNA, 19 nt, Homo sapiens
  misc_RNA (1)...(19): siRNA sense strand
gguuugccauccagaacaa

SEQ ID NO: 223128 - RNA, 19 nt, Homo sapiens
  misc_RNA (1)...(19): siRNA sense strand
uauacaugcucaaccuuca

SEQ ID NO: 223129 - RNA, 19 nt, Homo sapiens
  misc_RNA (1)...(19): siRNA sense strand
gauguccucugcgcuggaa

SEQ ID NO: 223130 - RNA, 19 nt, Homo sapiens
  misc_RNA (1)...(19): siRNA sense strand
cugggucacugguguuuga

SEQ ID NO: 223131 - RNA, 19 nt, Homo sapiens
  misc_RNA (1)...(19): siRNA sense strand
gagaaagaaauaagauugc

SEQ ID NO: 223132 - RNA, 19 nt, Homo sapiens
  misc_RNA (1)...(19): siRNA sense strand
ugugaaugcugaacugaag

SEQ ID NO: 223133 - RNA, 19 nt, Homo sapiens
  misc_RNA (1)...(19): siRNA sense strand
aagcagcauuugauauaca

SEQ ID NO: 223134 - RNA, 19 nt, Homo sapiens
  misc_RNA (1)...(19): siRNA sense strand
gaagcuggaaagugugaau

SEQ ID NO: 223135 - RNA, 19 nt, Homo sapiens
  misc_RNA (1)...(19): siRNA sense strand
aaggaacauugcagagcua

SEQ ID NO: 223136 - RNA, 19 nt, Homo sapiens
  misc_RNA (1)...(19): siRNA sense strand
ucaaggaagagcugagguu

SEQ ID NO: 223137 - RNA, 19 nt, Homo sapiens
  misc_RNA (1)...(19): siRNA sense strand
cgagguagccccugaagaa

SEQ ID NO: 223138 - RNA, 19 nt, Homo sapiens
  misc_RNA (1)...(19): siRNA sense strand
aaagaggcgacgagaaaga

SEQ ID NO: 223139 - RNA, 19 nt, Homo sapiens
  misc_RNA (1)...(19): siRNA sense strand
aggaagagcugagguuugc

SEQ ID NO: 223140 - RNA, 19 nt, Homo sapiens
  misc_RNA (1)...(19): siRNA sense strand
ugauauacaugcucaaccu

SEQ ID NO: 223141 - RNA, 19 nt, Homo sapiens
  misc_RNA (1)...(19): siRNA sense strand
gacgagaaagaaauaagau

SEQ ID NO: 223142 - RNA, 19 nt, Homo sapiens
  misc_RNA (1)...(19): siRNA sense strand
ggaaagugugaaugcugaa

SEQ ID NO: 223143 - RNA, 19 nt, Homo sapiens
  misc_RNA (1)...(19): siRNA sense strand
gccgaaacaagaagaagga

SEQ ID NO: 223144 - RNA, 19 nt, Homo sapiens
  misc_RNA (1)...(19): siRNA sense strand
cugaagaagaugaaaggaa

SEQ ID NO: 223145 - RNA, 19 nt, Homo sapiens
  misc_RNA (1)...(19): siRNA sense strand
gauauacaugcucaaccuu

SEQ ID NO: 223146 - RNA, 19 nt, Homo sapiens
  misc_RNA (1)...(19): siRNA sense strand
aggcgacgagaaagaaaua

SEQ ID NO: 223147 - RNA, 19 nt, Homo sapiens
  misc_RNA (1)...(19): siRNA sense strand
cuucaucggcccacgugua

SEQ ID NO: 223148 - RNA, 19 nt, Homo sapiens
  misc_RNA (1)...(19): siRNA sense strand
cacugguguuugaggauuu

SEQ ID NO: 223149 - RNA, 19 nt, Homo sapiens
  misc_RNA (1)...(19): siRNA sense strand
gaggcgacgagaaagaaau

SEQ ID NO: 223150 - RNA, 19 nt, Homo sapiens
  misc_RNA (1)...(19): siRNA sense strand
acaagaagaaggagaagac

SEQ ID NO: 223151 - RNA, 19 nt, Homo sapiens
  misc_RNA (1)...(19): siRNA sense strand
ugaagaagaugaaaggaaa

SEQ ID NO: 223152 - RNA, 19 nt, Homo sapiens
  misc_RNA (1)...(19): siRNA sense strand
gcaaagugccgaaacaaga

SEQ ID NO: 223153 - RNA, 19 nt, Homo sapiens
  misc_RNA (1)...(19): siRNA sense strand
gaaacaagaagaaggagaa

SEQ ID NO: 223154 - RNA, 19 nt, Homo sapiens
  misc_RNA (1)...(19): siRNA sense strand
cgagaaagaaauaagauug

SEQ ID NO: 223155 - RNA, 19 nt, Homo sapiens
  misc_RNA (1)...(19): siRNA sense strand
caaagugccgaaacaagaa

SEQ ID NO: 223156 - RNA, 19 nt, Homo sapiens
  misc_RNA (1)...(19): siRNA sense strand
ccucugcgcuggaaucagu

SEQ ID NO: 223157 - RNA, 19 nt, Homo sapiens
  misc_RNA (1)...(19): siRNA sense strand
caaggaagagcugagguuu

SEQ ID NO: 223158 - RNA, 19 nt, Homo sapiens
  misc_RNA (1)...(19): siRNA sense strand
cgacgagaaagaaauaaga

SEQ ID NO: 223159 - RNA, 19 nt, Homo sapiens
  misc_RNA (1)...(19): siRNA sense strand
gcugcaaagugccgaaaca

SEQ ID NO: 223160 - RNA, 19 nt, Homo sapiens
  misc_RNA (1)...(19): siRNA sense strand
ucacugguguuugaggauu

SEQ ID NO: 223161 - RNA, 19 nt, Homo sapiens
  misc_RNA (1)...(19): siRNA sense strand
gguuugccauccagaacaa

SEQ ID NO: 223162 - RNA, 19 nt, Homo sapiens
  misc_RNA (1)...(19): siRNA sense strand
gauguccucugcgcuggaa

SEQ ID NO: 223163 - RNA, 19 nt, Homo sapiens
  misc_RNA (1)...(19): siRNA sense strand
cugggucacugguguuuga

SEQ ID NO: 223164 - RNA, 19 nt, Homo sapiens
  misc_RNA (1)...(19): siRNA sense strand
gagaaagaaauaagauugc

SEQ ID NO: 223165 - RNA, 19 nt, Homo sapiens
  misc_RNA (1)...(19): siRNA sense strand
ucaaggaagagcugagguu

SEQ ID NO: 223166 - RNA, 19 nt, Homo sapiens
  misc_RNA (1)...(19): siRNA sense strand
cgagguagccccugaagaa

SEQ ID NO: 223167 - RNA, 19 nt, Homo sapiens
  misc_RNA (1)...(19): siRNA sense strand
aaagaggcgacgagaaaga

SEQ ID NO: 223168 - RNA, 19 nt, Homo sapiens
  misc_RNA (1)...(19): siRNA sense strand
aggaagagcugagguuugc

SEQ ID NO: 223169 - RNA, 19 nt, Homo sapiens
  misc_RNA (1)...(19): siRNA sense strand
gacgagaaagaaauaagau

SEQ ID NO: 223170 - RNA, 19 nt, Homo sapiens
  misc_RNA (1)...(19): siRNA sense strand
gccgaaacaagaagaagga

SEQ ID NO: 223171 - RNA, 19 nt, Homo sapiens
  misc_RNA (1)...(19): siRNA sense strand
cugaagaagaugaaaggaa

SEQ ID NO: 223172 - RNA, 19 nt, Homo sapiens
  misc_RNA (1)...(19): siRNA sense strand
aggcgacgagaaagaaaua

SEQ ID NO: 223173 - RNA, 19 nt, Homo sapiens
  misc_RNA (1)...(19): siRNA sense strand
cacugguguuugaggauuu

SEQ ID NO: 223174 - RNA, 19 nt, Homo sapiens
  misc_RNA (1)...(19): siRNA sense strand
gaggcgacgagaaagaaau

SEQ ID NO: 223175 - RNA, 19 nt, Homo sapiens
  misc_RNA (1)...(19): siRNA sense strand
acaagaagaaggagaagac

SEQ ID NO: 223176 - RNA, 19 nt, Homo sapiens
  misc_RNA (1)...(19): siRNA sense strand
caucauagguugcauuuaa

SEQ ID NO: 223177 - RNA, 19 nt, Homo sapiens
  misc_RNA (1)...(19): siRNA sense strand
gaacguucauugucaaaga

SEQ ID NO: 223178 - RNA, 19 nt, Homo sapiens
  misc_RNA (1)...(19): siRNA sense strand
gaagagaccaagaaacauu

SEQ ID NO: 223179 - RNA, 19 nt, Homo sapiens
  misc_RNA (1)...(19): siRNA sense strand
gcgguuaaauuccuacuuu

SEQ ID NO: 223180 - RNA, 19 nt, Homo sapiens
  misc_RNA (1)...(19): siRNA sense strand
ugaccgaccuccaucagua

SEQ ID NO: 223181 - RNA, 19 nt, Homo sapiens
  misc_RNA (1)...(19): siRNA sense strand
gaaccaacaauccuauauu

SEQ ID NO: 223182 - RNA, 19 nt, Homo sapiens
  misc_RNA (1)...(19): siRNA sense strand
gaucgaaagccaaauaguu

SEQ ID NO: 223183 - RNA, 19 nt, Homo sapiens
  misc_RNA (1)...(19): siRNA sense strand
gaacgugaccuucaaaguc

SEQ ID NO: 223184 - RNA, 19 nt, Homo sapiens
  misc_RNA (1)...(19): siRNA sense strand
gaugagaguucaagacgau

SEQ ID NO: 223185 - RNA, 19 nt, Homo sapiens
  misc_RNA (1)...(19): siRNA sense strand
ggaaaucgcgacggguuua

SEQ ID NO: 223186 - RNA, 19 nt, Homo sapiens
  misc_RNA (1)...(19): siRNA sense strand
gaauaagaacgucgacauu

SEQ ID NO: 223187 - RNA, 19 nt, Homo sapiens
  misc_RNA (1)...(19): siRNA sense strand
ccacaaacuugcacauaca

SEQ ID NO: 223188 - RNA, 19 nt, Homo sapiens
  misc_RNA (1)...(19): siRNA sense strand
ucaagacgauggaggauca

SEQ ID NO: 223189 - RNA, 19 nt, Homo sapiens
  misc_RNA (1)...(19): siRNA sense strand
gcacagacggagaucauug

SEQ ID NO: 223190 - RNA, 19 nt, Homo sapiens
  misc_RNA (1)...(19): siRNA sense strand
gugcaugcccggaagaaua

SEQ ID NO: 223191 - RNA, 19 nt, Homo sapiens
  misc_RNA (1)...(19): siRNA sense strand
ccaagaaggccaugguauu

SEQ ID NO: 223192 - RNA, 19 nt, Homo sapiens
  misc_RNA (1)...(19): siRNA sense strand
ucaaucagaugacacaagu

SEQ ID NO: 223193 - RNA, 19 nt, Homo sapiens
  misc_RNA (1)...(19): siRNA sense strand
gccgagagguuuggcgaua

SEQ ID NO: 223194 - RNA, 19 nt, Homo sapiens
  misc_RNA (1)...(19): siRNA sense strand
gccaaauugucacccagua

SEQ ID NO: 223195 - RNA, 19 nt, Homo sapiens
  misc_RNA (1)...(19): siRNA sense strand
ggaaccaacaauccuauau

SEQ ID NO: 223196 - RNA, 19 nt, Homo sapiens
  misc_RNA (1)...(19): siRNA sense strand
gagccuagagugcaucauu

SEQ ID NO: 223197 - RNA, 19 nt, Homo sapiens
  misc_RNA (1)...(19): siRNA sense strand
gcuggcagauggaggagaa

SEQ ID NO: 223198 - RNA, 19 nt, Homo sapiens
  misc_RNA (1)...(19): siRNA sense strand
acacuaaggucugcagaga

SEQ ID NO: 223199 - RNA, 19 nt, Homo sapiens
  misc_RNA (1)...(19): siRNA sense strand
gggaggagcuggcaaugcu

SEQ ID NO: 223200 - RNA, 19 nt, Homo sapiens
  misc_RNA (1)...(19): siRNA sense strand
uguaugaugucaaagauag

SEQ ID NO: 223201 - RNA, 19 nt, Homo sapiens
  misc_RNA (1)...(19): siRNA sense strand
ucaucaacguggagaguuu

SEQ ID NO: 223202 - RNA, 19 nt, Homo sapiens
  misc_RNA (1)...(19): siRNA sense strand
caagaaggccaugguauuc

SEQ ID NO: 223203 - RNA, 19 nt, Homo sapiens
  misc_RNA (1)...(19): siRNA sense strand
gagagugaccguguaggua

SEQ ID NO: 223204 - RNA, 19 nt, Homo sapiens
  misc_RNA (1)...(19): siRNA sense strand
gaucucagggaacaaugua

SEQ ID NO: 223205 - RNA, 19 nt, Homo sapiens
  misc_RNA (1)...(19): siRNA sense strand
gaagaugcagccagagugu

SEQ ID NO: 223206 - RNA, 19 nt, Homo sapiens
  misc_RNA (1)...(19): siRNA sense strand
cuagaucgaaagccaaaua

SEQ ID NO: 223207 - RNA, 19 nt, Homo sapiens
  misc_RNA (1)...(19): siRNA sense strand
ccaacaauccuauauuucu

SEQ ID NO: 223208 - RNA, 19 nt, Homo sapiens
  misc_RNA (1)...(19): siRNA sense strand
ugaggaacgugaccuucaa

SEQ ID NO: 223209 - RNA, 19 nt, Homo sapiens
  misc_RNA (1)...(19): siRNA sense strand
gacaugagccuugggauca

SEQ ID NO: 223210 - RNA, 19 nt, Homo sapiens
  misc_RNA (1)...(19): siRNA sense strand
uaaagcaagcaguuugaaa

SEQ ID NO: 223211 - RNA, 19 nt, Homo sapiens
  misc_RNA (1)...(19): siRNA sense strand
ggaauccgauccaaauacg

SEQ ID NO: 223212 - RNA, 19 nt, Homo sapiens
  misc_RNA (1)...(19): siRNA sense strand
uagguugcauuuaacacua

SEQ ID NO: 223213 - RNA, 19 nt, Homo sapiens
  misc_RNA (1)...(19): siRNA sense strand
gagcuugacggaggcguua

SEQ ID NO: 223214 - RNA, 19 nt, Homo sapiens
  misc_RNA (1)...(19): siRNA sense strand
ggcgauacgucuuuacaag

SEQ ID NO: 223215 - RNA, 19 nt, Homo sapiens
  misc_RNA (1)...(19): siRNA sense strand
ucauuaagcugaggaacug

SEQ ID NO: 223216 - RNA, 19 nt, Homo sapiens
  misc_RNA (1)...(19): siRNA sense strand
aaacccaagugaguuacua

SEQ ID NO: 223217 - RNA, 19 nt, Homo sapiens
  misc_RNA (1)...(19): siRNA sense strand
ugaggaguguuguacauca

SEQ ID NO: 223218 - RNA, 19 nt, Homo sapiens
  misc_RNA (1)...(19): siRNA sense strand
ucagggaacaauguauuua

SEQ ID NO: 223219 - RNA, 19 nt, Homo sapiens
  misc_RNA (1)...(19): siRNA sense strand
caucugcggcuucaucauu

SEQ ID NO: 223220 - RNA, 19 nt, Homo sapiens
  misc_RNA (1)...(19): siRNA sense strand
gcaguuugaaagcagauaa

SEQ ID NO: 223221 - RNA, 19 nt, Homo sapiens
  misc_RNA (1)...(19): siRNA sense strand
agaccaucauccucacaua

SEQ ID NO: 223222 - RNA, 19 nt, Homo sapiens
  misc_RNA (1)...(19): siRNA sense strand
gguuaaauuccuacuuuga

SEQ ID NO: 223223 - RNA, 19 nt, Homo sapiens
  misc_RNA (1)...(19): siRNA sense strand
gcacauacaaaggaugaga

SEQ ID NO: 223224 - RNA, 19 nt, Homo sapiens
  misc_RNA (1)...(19): siRNA sense strand
gagggaaccaacaauccua

SEQ ID NO: 223225 - RNA, 19 nt, Homo sapiens
  misc_RNA (1)...(19): siRNA sense strand
gaaaucgcgacggguuuaa

SEQ ID NO: 223226 - RNA, 19 nt, Homo sapiens
  misc_RNA (1)...(19): siRNA sense strand
gcaccagcaagaaagauug

SEQ ID NO: 223227 - RNA, 19 nt, Homo sapiens
  misc_RNA (1)...(19): siRNA sense strand
gggagaaaguguggcugaa

SEQ ID NO: 223228 - RNA, 19 nt, Homo sapiens
  misc_RNA (1)...(19): siRNA sense strand
aagcaguauugccuucuuu

SEQ ID NO: 223229 - RNA, 19 nt, Homo sapiens
  misc_RNA (1)...(19): siRNA sense strand
gaaccugaccgaccuccau

SEQ ID NO: 223230 - RNA, 19 nt, Homo sapiens
  misc_RNA (1)...(19): siRNA sense strand
caggugaugcuuagaaaug

SEQ ID NO: 223231 - RNA, 19 nt, Homo sapiens
  misc_RNA (1)...(19): siRNA sense strand
uaagcaguauugccuucuu

SEQ ID NO: 223232 - RNA, 19 nt, Homo sapiens
  misc_RNA (1)...(19): siRNA sense strand
gcguggccaugaugaguga

SEQ ID NO: 223233 - RNA, 19 nt, Homo sapiens
  misc_RNA (1)...(19): siRNA sense strand
ggagaaacagccgaucuuc

SEQ ID NO: 223234 - RNA, 19 nt, Homo sapiens
  misc_RNA (1)...(19): siRNA sense strand
gcaagcuccuggccaacuc

SEQ ID NO: 223235 - RNA, 19 nt, Homo sapiens
  misc_RNA (1)...(19): siRNA sense strand
auacaaaggaugagaguuc

SEQ ID NO: 223236 - RNA, 19 nt, Homo sapiens
  misc_RNA (1)...(19): siRNA sense strand
ucgugaagcuccuacuaga

SEQ ID NO: 223237 - RNA, 19 nt, Homo sapiens
  misc_RNA (1)...(19): siRNA sense strand
agagugaccguguagguaa

SEQ ID NO: 223238 - RNA, 19 nt, Homo sapiens
  misc_RNA (1)...(19): siRNA sense strand
cuccaucgcuagaucgaaa

SEQ ID NO: 223239 - RNA, 19 nt, Homo sapiens
  misc_RNA (1)...(19): siRNA sense strand
uacaagaagucaucaacgu

SEQ ID NO: 223240 - RNA, 19 nt, Homo sapiens
  misc_RNA (1)...(19): siRNA sense strand
gauccaaauacgcuucauu

SEQ ID NO: 223241 - RNA, 19 nt, Homo sapiens
  misc_RNA (1)...(19): siRNA sense strand
ugacggaggcguuaggaau

SEQ ID NO: 223242 - RNA, 19 nt, Homo sapiens
  misc_RNA (1)...(19): siRNA sense strand
gggaaccaacaauccuaua

SEQ ID NO: 223243 - RNA, 19 nt, Homo sapiens
  misc_RNA (1)...(19): siRNA sense strand
ggaacgugaccuucaaagu

SEQ ID NO: 223244 - RNA, 19 nt, Homo sapiens
  misc_RNA (1)...(19): siRNA sense strand
gggagaaacagccgaucuu

SEQ ID NO: 223245 - RNA, 19 nt, Homo sapiens
  misc_RNA (1)...(19): siRNA sense strand
agaggacacucgccaucuu

SEQ ID NO: 223246 - RNA, 19 nt, Homo sapiens
  misc_RNA (1)...(19): siRNA sense strand
gcagauggaggagaaguca

SEQ ID NO: 223247 - RNA, 19 nt, Homo sapiens
  misc_RNA (1)...(19): siRNA sense strand
gcagagagugaccguguag

SEQ ID NO: 223248 - RNA, 19 nt, Homo sapiens
  misc_RNA (1)...(19): siRNA sense strand
ucuggaacguucauuguca

SEQ ID NO: 223249 - RNA, 19 nt, Homo sapiens
  misc_RNA (1)...(19): siRNA sense strand
acuaaggucugcagagagu

SEQ ID NO: 223250 - RNA, 19 nt, Homo sapiens
  misc_RNA (1)...(19): siRNA sense strand
gaggacacucgccaucuug

SEQ ID NO: 223251 - RNA, 19 nt, Homo sapiens
  misc_RNA (1)...(19): siRNA sense strand
ccagaucaacacccugaaa

SEQ ID NO: 223252 - RNA, 19 nt, Homo sapiens
  misc_RNA (1)...(19): siRNA sense strand
gaggaguguuguacaucau

SEQ ID NO: 223253 - RNA, 19 nt, Homo sapiens
  misc_RNA (1)...(19): siRNA sense strand
ggugccaucugccgcaugu

SEQ ID NO: 223254 - RNA, 19 nt, Homo sapiens
  misc_RNA (1)...(19): siRNA sense strand
uuaggaauccgauccaaau

SEQ ID NO: 223255 - RNA, 19 nt, Homo sapiens
  misc_RNA (1)...(19): siRNA sense strand
gcaguauugccuucuuuca

SEQ ID NO: 223256 - RNA, 19 nt, Homo sapiens
  misc_RNA (1)...(19): siRNA sense strand
aagucaaacucuccgugua

SEQ ID NO: 223257 - RNA, 19 nt, Homo sapiens
  misc_RNA (1)...(19): siRNA sense strand
aguauugccuucuuucaag

SEQ ID NO: 223258 - RNA, 19 nt, Homo sapiens
  misc_RNA (1)...(19): siRNA sense strand
ucaaugagcagcagacacu

SEQ ID NO: 223259 - RNA, 19 nt, Homo sapiens
  misc_RNA (1)...(19): siRNA sense strand
ggaguguuguacaucaucu

SEQ ID NO: 223260 - RNA, 19 nt, Homo sapiens
  misc_RNA (1)...(19): siRNA sense strand
uugaagagaccaagaaaca

SEQ ID NO: 223261 - RNA, 19 nt, Homo sapiens
  misc_RNA (1)...(19): siRNA sense strand
ggcaucauagguugcauuu

SEQ ID NO: 223262 - RNA, 19 nt, Homo sapiens
  misc_RNA (1)...(19): siRNA sense strand
ucucuuaucaaucagauga

SEQ ID NO: 223263 - RNA, 19 nt, Homo sapiens
  misc_RNA (1)...(19): siRNA sense strand
gaggaacgugaccuucaaa

SEQ ID NO: 223264 - RNA, 19 nt, Homo sapiens
  misc_RNA (1)...(19): siRNA sense strand
gaggaggagugggagaaag

SEQ ID NO: 223265 - RNA, 19 nt, Homo sapiens
  misc_RNA (1)...(19): siRNA sense strand
aaagcaagcaguuugaaag

SEQ ID NO: 223266 - RNA, 19 nt, Homo sapiens
  misc_RNA (1)...(19): siRNA sense strand
gcucuggaacguucauugu

SEQ ID NO: 223267 - RNA, 19 nt, Homo sapiens
  misc_RNA (1)...(19): siRNA sense strand
gagcccauuuuagaauuua

SEQ ID NO: 223268 - RNA, 19 nt, Homo sapiens
  misc_RNA (1)...(19): siRNA sense strand
ugagugacaaggccaagaa

SEQ ID NO: 223269 - RNA, 19 nt, Homo sapiens
  misc_RNA (1)...(19): siRNA sense strand
ugaaaacccaagugaguua

SEQ ID NO: 223270 - RNA, 19 nt, Homo sapiens
  misc_RNA (1)...(19): siRNA sense strand
uacaaaggaugagaguuca

SEQ ID NO: 223271 - RNA, 19 nt, Homo sapiens
  misc_RNA (1)...(19): siRNA sense strand
caaacuugcacauacaaag

SEQ ID NO: 223272 - RNA, 19 nt, Homo sapiens
  misc_RNA (1)...(19): siRNA sense strand
guuuaaagcaagcaguuug

SEQ ID NO: 223273 - RNA, 19 nt, Homo sapiens
  misc_RNA (1)...(19): siRNA sense strand
cgaccuccaucaguacaga

SEQ ID NO: 223274 - RNA, 19 nt, Homo sapiens
  misc_RNA (1)...(19): siRNA sense strand
uaggaauccgauccaaaua

SEQ ID NO: 223275 - RNA, 19 nt, Homo sapiens
  misc_RNA (1)...(19): siRNA sense strand
cagaugagcccauuuuaga

SEQ ID NO: 223276 - RNA, 19 nt, Homo sapiens
  misc_RNA (1)...(19): siRNA sense strand
caucauagguugcauuuaa

SEQ ID NO: 223277 - RNA, 19 nt, Homo sapiens
  misc_RNA (1)...(19): siRNA sense strand
gaacguucauugucaaaga

SEQ ID NO: 223278 - RNA, 19 nt, Homo sapiens
  misc_RNA (1)...(19): siRNA sense strand
gaagagaccaagaaacauu

SEQ ID NO: 223279 - RNA, 19 nt, Homo sapiens
  misc_RNA (1)...(19): siRNA sense strand
gcgguuaaauuccuacuuu

SEQ ID NO: 223280 - RNA, 19 nt, Homo sapiens
  misc_RNA (1)...(19): siRNA sense strand
ugaccgaccuccaucagua

SEQ ID NO: 223281 - RNA, 19 nt, Homo sapiens
  misc_RNA (1)...(19): siRNA sense strand
gaaccaacaauccuauauu

SEQ ID NO: 223282 - RNA, 19 nt, Homo sapiens
  misc_RNA (1)...(19): siRNA sense strand
gaucgaaagccaaauaguu

SEQ ID NO: 223283 - RNA, 19 nt, Homo sapiens
  misc_RNA (1)...(19): siRNA sense strand
gaacgugaccuucaaaguc

SEQ ID NO: 223284 - RNA, 19 nt, Homo sapiens
  misc_RNA (1)...(19): siRNA sense strand
gaugagaguucaagacgau

SEQ ID NO: 223285 - RNA, 19 nt, Homo sapiens
  misc_RNA (1)...(19): siRNA sense strand
ggaaaucgcgacggguuua

SEQ ID NO: 223286 - RNA, 19 nt, Homo sapiens
  misc_RNA (1)...(19): siRNA sense strand
gaauaagaacgucgacauu

SEQ ID NO: 223287 - RNA, 19 nt, Homo sapiens
  misc_RNA (1)...(19): siRNA sense strand
ccacaaacuugcacauaca

SEQ ID NO: 223288 - RNA, 19 nt, Homo sapiens
  misc_RNA (1)...(19): siRNA sense strand
ucaagacgauggaggauca

SEQ ID NO: 223289 - RNA, 19 nt, Homo sapiens
  misc_RNA (1)...(19): siRNA sense strand
gcacagacggagaucauug

SEQ ID NO: 223290 - RNA, 19 nt, Homo sapiens
  misc_RNA (1)...(19): siRNA sense strand
gugcaugcccggaagaaua

SEQ ID NO: 223291 - RNA, 19 nt, Homo sapiens
  misc_RNA (1)...(19): siRNA sense strand
ccaagaaggccaugguauu

SEQ ID NO: 223292 - RNA, 19 nt, Homo sapiens
  misc_RNA (1)...(19): siRNA sense strand
ucaaucagaugacacaagu

SEQ ID NO: 223293 - RNA, 19 nt, Homo sapiens
  misc_RNA (1)...(19): siRNA sense strand
gccgagagguuuggcgaua

SEQ ID NO: 223294 - RNA, 19 nt, Homo sapiens
  misc_RNA (1)...(19): siRNA sense strand
gccaaauugucacccagua

SEQ ID NO: 223295 - RNA, 19 nt, Homo sapiens
  misc_RNA (1)...(19): siRNA sense strand
ggaaccaacaauccuauau

SEQ ID NO: 223296 - RNA, 19 nt, Homo sapiens
  misc_RNA (1)...(19): siRNA sense strand
gagccuagagugcaucauu

SEQ ID NO: 223297 - RNA, 19 nt, Homo sapiens
  misc_RNA (1)...(19): siRNA sense strand
gcuggcagauggaggagaa

SEQ ID NO: 223298 - RNA, 19 nt, Homo sapiens
  misc_RNA (1)...(19): siRNA sense strand
acacuaaggucugcagaga

SEQ ID NO: 223299 - RNA, 19 nt, Homo sapiens
  misc_RNA (1)...(19): siRNA sense strand
gggaggagcuggcaaugcu

SEQ ID NO: 223300 - RNA, 19 nt, Homo sapiens
  misc_RNA (1)...(19): siRNA sense strand
uguaugaugucaaagauag

SEQ ID NO: 223301 - RNA, 19 nt, Homo sapiens
  misc_RNA (1)...(19): siRNA sense strand
ucaucaacguggagaguuu

SEQ ID NO: 223302 - RNA, 19 nt, Homo sapiens
  misc_RNA (1)...(19): siRNA sense strand
caagaaggccaugguauuc

SEQ ID NO: 223303 - RNA, 19 nt, Homo sapiens
  misc_RNA (1)...(19): siRNA sense strand
gagagugaccguguaggua

SEQ ID NO: 223304 - RNA, 19 nt, Homo sapiens
  misc_RNA (1)...(19): siRNA sense strand
gaucucagggaacaaugua

SEQ ID NO: 223305 - RNA, 19 nt, Homo sapiens
  misc_RNA (1)...(19): siRNA sense strand
gaagaugcagccagagugu

SEQ ID NO: 223306 - RNA, 19 nt, Homo sapiens
  misc_RNA (1)...(19): siRNA sense strand
cuagaucgaaagccaaaua

SEQ ID NO: 223307 - RNA, 19 nt, Homo sapiens
  misc_RNA (1)...(19): siRNA sense strand
ccaacaauccuauauuucu

SEQ ID NO: 223308 - RNA, 19 nt, Homo sapiens
  misc_RNA (1)...(19): siRNA sense strand
ugaggaacgugaccuucaa

SEQ ID NO: 223309 - RNA, 19 nt, Homo sapiens
  misc_RNA (1)...(19): siRNA sense strand
gacaugagccuugggauca

SEQ ID NO: 223310 - RNA, 19 nt, Homo sapiens
  misc_RNA (1)...(19): siRNA sense strand
uaaagcaagcaguuugaaa

SEQ ID NO: 223311 - RNA, 19 nt, Homo sapiens
  misc_RNA (1)...(19): siRNA sense strand
ggaauccgauccaaauacg

SEQ ID NO: 223312 - RNA, 19 nt, Homo sapiens
  misc_RNA (1)...(19): siRNA sense strand
uagguugcauuuaacacua

SEQ ID NO: 223313 - RNA, 19 nt, Homo sapiens
  misc_RNA (1)...(19): siRNA sense strand
gagcuugacggaggcguua

SEQ ID NO: 223314 - RNA, 19 nt, Homo sapiens
  misc_RNA (1)...(19): siRNA sense strand
ggcgauacgucuuuacaag

SEQ ID NO: 223315 - RNA, 19 nt, Homo sapiens
  misc_RNA (1)...(19): siRNA sense strand
ucauuaagcugaggaacug

SEQ ID NO: 223316 - RNA, 19 nt, Homo sapiens
  misc_RNA (1)...(19): siRNA sense strand
aaacccaagugaguuacua

SEQ ID NO: 223317 - RNA, 19 nt, Homo sapiens
  misc_RNA (1)...(19): siRNA sense strand
ugaggaguguuguacauca

SEQ ID NO: 223318 - RNA, 19 nt, Homo sapiens
  misc_RNA (1)...(19): siRNA sense strand
ucagggaacaauguauuua

SEQ ID NO: 223319 - RNA, 19 nt, Homo sapiens
  misc_RNA (1)...(19): siRNA sense strand
caucugcggcuucaucauu

SEQ ID NO: 223320 - RNA, 19 nt, Homo sapiens
  misc_RNA (1)...(19): siRNA sense strand
gcaguuugaaagcagauaa

SEQ ID NO: 223321 - RNA, 19 nt, Homo sapiens
  misc_RNA (1)...(19): siRNA sense strand
agaccaucauccucacaua

SEQ ID NO: 223322 - RNA, 19 nt, Homo sapiens
  misc_RNA (1)...(19): siRNA sense strand
gguuaaauuccuacuuuga

SEQ ID NO: 223323 - RNA, 19 nt, Homo sapiens
  misc_RNA (1)...(19): siRNA sense strand
gcacauacaaaggaugaga

SEQ ID NO: 223324 - RNA, 19 nt, Homo sapiens
  misc_RNA (1)...(19): siRNA sense strand
gagggaaccaacaauccua

SEQ ID NO: 223325 - RNA, 19 nt, Homo sapiens
  misc_RNA (1)...(19): siRNA sense strand
gaaaucgcgacggguuuaa

SEQ ID NO: 223326 - RNA, 19 nt, Homo sapiens
  misc_RNA (1)...(19): siRNA sense strand
gcaccagcaagaaagauug

SEQ ID NO: 223327 - RNA, 19 nt, Homo sapiens
  misc_RNA (1)...(19): siRNA sense strand
gggagaaaguguggcugaa

SEQ ID NO: 223328 - RNA, 19 nt, Homo sapiens
  misc_RNA (1)...(19): siRNA sense strand
aagcaguauugccuucuuu

SEQ ID NO: 223329 - RNA, 19 nt, Homo sapiens
  misc_RNA (1)...(19): siRNA sense strand
gaaccugaccgaccuccau

SEQ ID NO: 223330 - RNA, 19 nt, Homo sapiens
  misc_RNA (1)...(19): siRNA sense strand
caggugaugcuuagaaaug

SEQ ID NO: 223331 - RNA, 19 nt, Homo sapiens
  misc_RNA (1)...(19): siRNA sense strand
uaagcaguauugccuucuu

SEQ ID NO: 223332 - RNA, 19 nt, Homo sapiens
  misc_RNA (1)...(19): siRNA sense strand
gcguggccaugaugaguga

SEQ ID NO: 223333 - RNA, 19 nt, Homo sapiens
  misc_RNA (1)...(19): siRNA sense strand
ggagaaacagccgaucuuc

SEQ ID NO: 223334 - RNA, 19 nt, Homo sapiens
  misc_RNA (1)...(19): siRNA sense strand
gcaagcuccuggccaacuc

SEQ ID NO: 223335 - RNA, 19 nt, Homo sapiens
  misc_RNA (1)...(19): siRNA sense strand
auacaaaggaugagaguuc

SEQ ID NO: 223336 - RNA, 19 nt, Homo sapiens
  misc_RNA (1)...(19): siRNA sense strand
ucgugaagcuccuacuaga

SEQ ID NO: 223337 - RNA, 19 nt, Homo sapiens
  misc_RNA (1)...(19): siRNA sense strand
agagugaccguguagguaa

SEQ ID NO: 223338 - RNA, 19 nt, Homo sapiens
  misc_RNA (1)...(19): siRNA sense strand
cuccaucgcuagaucgaaa

SEQ ID NO: 223339 - RNA, 19 nt, Homo sapiens
  misc_RNA (1)...(19): siRNA sense strand
uacaagaagucaucaacgu

SEQ ID NO: 223340 - RNA, 19 nt, Homo sapiens
  misc_RNA (1)...(19): siRNA sense strand
gauccaaauacgcuucauu

SEQ ID NO: 223341 - RNA, 19 nt, Homo sapiens
  misc_RNA (1)...(19): siRNA sense strand
ugacggaggcguuaggaau

SEQ ID NO: 223342 - RNA, 19 nt, Homo sapiens
  misc_RNA (1)...(19): siRNA sense strand
gggaaccaacaauccuaua

SEQ ID NO: 223343 - RNA, 19 nt, Homo sapiens
  misc_RNA (1)...(19): siRNA sense strand
ggaacgugaccuucaaagu

SEQ ID NO: 223344 - RNA, 19 nt, Homo sapiens
  misc_RNA (1)...(19): siRNA sense strand
gggagaaacagccgaucuu

SEQ ID NO: 223345 - RNA, 19 nt, Homo sapiens
  misc_RNA (1)...(19): siRNA sense strand
agaggacacucgccaucuu

SEQ ID NO: 223346 - RNA, 19 nt, Homo sapiens
  misc_RNA (1)...(19): siRNA sense strand
gcagauggaggagaaguca

SEQ ID NO: 223347 - RNA, 19 nt, Homo sapiens
  misc_RNA (1)...(19): siRNA sense strand
gcagagagugaccguguag

SEQ ID NO: 223348 - RNA, 19 nt, Homo sapiens
  misc_RNA (1)...(19): siRNA sense strand
ucuggaacguucauuguca

SEQ ID NO: 223349 - RNA, 19 nt, Homo sapiens
  misc_RNA (1)...(19): siRNA sense strand
acuaaggucugcagagagu

SEQ ID NO: 223350 - RNA, 19 nt, Homo sapiens
  misc_RNA (1)...(19): siRNA sense strand
gaggacacucgccaucuug

SEQ ID NO: 223351 - RNA, 19 nt, Homo sapiens
  misc_RNA (1)...(19): siRNA sense strand
ccagaucaacacccugaaa

SEQ ID NO: 223352 - RNA, 19 nt, Homo sapiens
  misc_RNA (1)...(19): siRNA sense strand
gaggaguguuguacaucau

SEQ ID NO: 223353 - RNA, 19 nt, Homo sapiens
  misc_RNA (1)...(19): siRNA sense strand
ggugccaucugccgcaugu

SEQ ID NO: 223354 - RNA, 19 nt, Homo sapiens
  misc_RNA (1)...(19): siRNA sense strand
uuaggaauccgauccaaau

SEQ ID NO: 223355 - RNA, 19 nt, Homo sapiens
  misc_RNA (1)...(19): siRNA sense strand
gcaguauugccuucuuuca

SEQ ID NO: 223356 - RNA, 19 nt, Homo sapiens
  misc_RNA (1)...(19): siRNA sense strand
aagucaaacucuccgugua

SEQ ID NO: 223357 - RNA, 19 nt, Homo sapiens
  misc_RNA (1)...(19): siRNA sense strand
aguauugccuucuuucaag

SEQ ID NO: 223358 - RNA, 19 nt, Homo sapiens
  misc_RNA (1)...(19): siRNA sense strand
ucaaugagcagcagacacu

SEQ ID NO: 223359 - RNA, 19 nt, Homo sapiens
  misc_RNA (1)...(19): siRNA sense strand
ggaguguuguacaucaucu

SEQ ID NO: 223360 - RNA, 19 nt, Homo sapiens
  misc_RNA (1)...(19): siRNA sense strand
uugaagagaccaagaaaca

SEQ ID NO: 223361 - RNA, 19 nt, Homo sapiens
  misc_RNA (1)...(19): siRNA sense strand
ggcaucauagguugcauuu

SEQ ID NO: 223362 - RNA, 19 nt, Homo sapiens
  misc_RNA (1)...(19): siRNA sense strand
ucucuuaucaaucagauga

SEQ ID NO: 223363 - RNA, 19 nt, Homo sapiens
  misc_RNA (1)...(19): siRNA sense strand
gaggaacgugaccuucaaa

SEQ ID NO: 223364 - RNA, 19 nt, Homo sapiens
  misc_RNA (1)...(19): siRNA sense strand
gaggaggagugggagaaag

SEQ ID NO: 223365 - RNA, 19 nt, Homo sapiens
  misc_RNA (1)...(19): siRNA sense strand
aaagcaagcaguuugaaag

SEQ ID NO: 223366 - RNA, 19 nt, Homo sapiens
  misc_RNA (1)...(19): siRNA sense strand
gcucuggaacguucauugu

SEQ ID NO: 223367 - RNA, 19 nt, Homo sapiens
  misc_RNA (1)...(19): siRNA sense strand
gagcccauuuuagaauuua

SEQ ID NO: 223368 - RNA, 19 nt, Homo sapiens
  misc_RNA (1)...(19): siRNA sense strand
ugagugacaaggccaagaa

SEQ ID NO: 223369 - RNA, 19 nt, Homo sapiens
  misc_RNA (1)...(19): siRNA sense strand
ugaaaacccaagugaguua

SEQ ID NO: 223370 - RNA, 19 nt, Homo sapiens
  misc_RNA (1)...(19): siRNA sense strand
uacaaaggaugagaguuca

SEQ ID NO: 223371 - RNA, 19 nt, Homo sapiens
  misc_RNA (1)...(19): siRNA sense strand
caaacuugcacauacaaag

SEQ ID NO: 223372 - RNA, 19 nt, Homo sapiens
  misc_RNA (1)...(19): siRNA sense strand
guuuaaagcaagcaguuug

SEQ ID NO: 223373 - RNA, 19 nt, Homo sapiens
  misc_RNA (1)...(19): siRNA sense strand
cgaccuccaucaguacaga

SEQ ID NO: 223374 - RNA, 19 nt, Homo sapiens
  misc_RNA (1)...(19): siRNA sense strand
uaggaauccgauccaaaua

SEQ ID NO: 223375 - RNA, 19 nt, Homo sapiens
  misc_RNA (1)...(19): siRNA sense strand
cagaugagcccauuuuaga

SEQ ID NO: 223376 - RNA, 19 nt, Homo sapiens
  misc_RNA (1)...(19): siRNA sense strand
gcaaggacuucaucuuugu

SEQ ID NO: 223377 - RNA, 19 nt, Homo sapiens
  misc_RNA (1)...(19): siRNA sense strand
caagcuggguguuguguuu

SEQ ID NO: 223378 - RNA, 19 nt, Homo sapiens
  misc_RNA (1)...(19): siRNA sense strand
ucacacaccucuucugguu

SEQ ID NO: 223379 - RNA, 19 nt, Homo sapiens
  misc_RNA (1)...(19): siRNA sense strand
ucaaggagcuuacggaucu

SEQ ID NO: 223380 - RNA, 19 nt, Homo sapiens
  misc_RNA (1)...(19): siRNA sense strand
caacaucaacuuccucaaa

SEQ ID NO: 223381 - RNA, 19 nt, Homo sapiens
  misc_RNA (1)...(19): siRNA sense strand
ggaccaaugugcccucaug

SEQ ID NO: 223382 - RNA, 19 nt, Homo sapiens
  misc_RNA (1)...(19): siRNA sense strand
ccaagaacagcuucaauaa

SEQ ID NO: 223383 - RNA, 19 nt, Homo sapiens
  misc_RNA (1)...(19): siRNA sense strand
gcgcaaggacuucaucuuu

SEQ ID NO: 223384 - RNA, 19 nt, Homo sapiens
  misc_RNA (1)...(19): siRNA sense strand
gaacaaaguggccauuaca

SEQ ID NO: 223385 - RNA, 19 nt, Homo sapiens
  misc_RNA (1)...(19): siRNA sense strand
ucaauaacccugccuacua

SEQ ID NO: 223386 - RNA, 19 nt, Homo sapiens
  misc_RNA (1)...(19): siRNA sense strand
aagaagagcuuugagaaug

SEQ ID NO: 223387 - RNA, 19 nt, Homo sapiens
  misc_RNA (1)...(19): siRNA sense strand
cuaccugccuggaggaaua

SEQ ID NO: 223388 - RNA, 19 nt, Homo sapiens
  misc_RNA (1)...(19): siRNA sense strand
gcaccaaguucuucaucga

SEQ ID NO: 223389 - RNA, 19 nt, Homo sapiens
  misc_RNA (1)...(19): siRNA sense strand
gggcgucuccuucauguuu

SEQ ID NO: 223390 - RNA, 19 nt, Homo sapiens
  misc_RNA (1)...(19): siRNA sense strand
caauaacccugccuacuac

SEQ ID NO: 223391 - RNA, 19 nt, Homo sapiens
  misc_RNA (1)...(19): siRNA sense strand
agaaagggcucucaaagac

SEQ ID NO: 223392 - RNA, 19 nt, Homo sapiens
  misc_RNA (1)...(19): siRNA sense strand
agaagagcuuugagaauga

SEQ ID NO: 223393 - RNA, 19 nt, Homo sapiens
  misc_RNA (1)...(19): siRNA sense strand
agaagcaugugcacacgua

SEQ ID NO: 223394 - RNA, 19 nt, Homo sapiens
  misc_RNA (1)...(19): siRNA sense strand
gacaugaucucagucuuca

SEQ ID NO: 223395 - RNA, 19 nt, Homo sapiens
  misc_RNA (1)...(19): siRNA sense strand
gcacacguaucgcauucug

SEQ ID NO: 223396 - RNA, 19 nt, Homo sapiens
  misc_RNA (1)...(19): siRNA sense strand
ggacugcccucggacuaug

SEQ ID NO: 223397 - RNA, 19 nt, Homo sapiens
  misc_RNA (1)...(19): siRNA sense strand
ggagacaggcaauaucaga

SEQ ID NO: 223398 - RNA, 19 nt, Homo sapiens
  misc_RNA (1)...(19): siRNA sense strand
acacaccucuucugguuug

SEQ ID NO: 223399 - RNA, 19 nt, Homo sapiens
  misc_RNA (1)...(19): siRNA sense strand
ucauuuggcuuugugaauu

SEQ ID NO: 223400 - RNA, 19 nt, Homo sapiens
  misc_RNA (1)...(19): siRNA sense strand
ggacucagcgcaaggacuu

SEQ ID NO: 223401 - RNA, 19 nt, Homo sapiens
  misc_RNA (1)...(19): siRNA sense strand
gaagagcuuugagaaugau

SEQ ID NO: 223402 - RNA, 19 nt, Homo sapiens
  misc_RNA (1)...(19): siRNA sense strand
aaacucacaucaucugcaa

SEQ ID NO: 223403 - RNA, 19 nt, Homo sapiens
  misc_RNA (1)...(19): siRNA sense strand
aaagggcucucaaagacuu

SEQ ID NO: 223404 - RNA, 19 nt, Homo sapiens
  misc_RNA (1)...(19): siRNA sense strand
gaggagggccuggugcaua

SEQ ID NO: 223405 - RNA, 19 nt, Homo sapiens
  misc_RNA (1)...(19): siRNA sense strand
gaggagacaggcaauauca

SEQ ID NO: 223406 - RNA, 19 nt, Homo sapiens
  misc_RNA (1)...(19): siRNA sense strand
cccaagaacagcuucaaua

SEQ ID NO: 223407 - RNA, 19 nt, Homo sapiens
  misc_RNA (1)...(19): siRNA sense strand
ccgcagccauccacacgua

SEQ ID NO: 223408 - RNA, 19 nt, Homo sapiens
  misc_RNA (1)...(19): siRNA sense strand
gggagagcauccaggaaga

SEQ ID NO: 223409 - RNA, 19 nt, Homo sapiens
  misc_RNA (1)...(19): siRNA sense strand
cgcaaggacuucaucuuug

SEQ ID NO: 223410 - RNA, 19 nt, Homo sapiens
  misc_RNA (1)...(19): siRNA sense strand
gcagugacaacaucaacuu

SEQ ID NO: 223411 - RNA, 19 nt, Homo sapiens
  misc_RNA (1)...(19): siRNA sense strand
caagaagagcuuugagaau

SEQ ID NO: 223412 - RNA, 19 nt, Homo sapiens
  misc_RNA (1)...(19): siRNA sense strand
gaccaggccuacauugagu

SEQ ID NO: 223413 - RNA, 19 nt, Homo sapiens
  misc_RNA (1)...(19): siRNA sense strand
ugacaucucucugcguuuc

SEQ ID NO: 223414 - RNA, 19 nt, Homo sapiens
  misc_RNA (1)...(19): siRNA sense strand
gucaguacguccaguguga

SEQ ID NO: 223415 - RNA, 19 nt, Homo sapiens
  misc_RNA (1)...(19): siRNA sense strand
caaucacuguggaauauca

SEQ ID NO: 223416 - RNA, 19 nt, Homo sapiens
  misc_RNA (1)...(19): siRNA sense strand
ggacgagcccgacaugauc

SEQ ID NO: 223417 - RNA, 19 nt, Homo sapiens
  misc_RNA (1)...(19): siRNA sense strand
ugucaggcauccagaagaa

SEQ ID NO: 223418 - RNA, 19 nt, Homo sapiens
  misc_RNA (1)...(19): siRNA sense strand
ccagagcagugacaacauc

SEQ ID NO: 223419 - RNA, 19 nt, Homo sapiens
  misc_RNA (1)...(19): siRNA sense strand
caagaaagggcucucaaag

SEQ ID NO: 223420 - RNA, 19 nt, Homo sapiens
  misc_RNA (1)...(19): siRNA sense strand
ccaagaaagggcucucaaa

SEQ ID NO: 223421 - RNA, 19 nt, Homo sapiens
  misc_RNA (1)...(19): siRNA sense strand
gaacuacaucagcaggaaa

SEQ ID NO: 223422 - RNA, 19 nt, Homo sapiens
  misc_RNA (1)...(19): siRNA sense strand
gggacgaccuggaguuucu

SEQ ID NO: 223423 - RNA, 19 nt, Homo sapiens
  misc_RNA (1)...(19): siRNA sense strand
cacaucaucugcaauucuu

SEQ ID NO: 223424 - RNA, 19 nt, Homo sapiens
  misc_RNA (1)...(19): siRNA sense strand
agagggagcuccugaacca

SEQ ID NO: 223425 - RNA, 19 nt, Homo sapiens
  misc_RNA (1)...(19): siRNA sense strand
aggagggccuggugcauaa

SEQ ID NO: 223426 - RNA, 19 nt, Homo sapiens
  misc_RNA (1)...(19): siRNA sense strand
uguugcagcucaugaagaa

SEQ ID NO: 223427 - RNA, 19 nt, Homo sapiens
  misc_RNA (1)...(19): siRNA sense strand
ggaaguguaccaccuccaa

SEQ ID NO: 223428 - RNA, 19 nt, Homo sapiens
  misc_RNA (1)...(19): siRNA sense strand
gaacaugggaaguguacca

SEQ ID NO: 223429 - RNA, 19 nt, Homo sapiens
  misc_RNA (1)...(19): siRNA sense strand
gaaguguaccaccuccaaa

SEQ ID NO: 223430 - RNA, 19 nt, Homo sapiens
  misc_RNA (1)...(19): siRNA sense strand
acaagaagagcuuugagaa

SEQ ID NO: 223431 - RNA, 19 nt, Homo sapiens
  misc_RNA (1)...(19): siRNA sense strand
acagugagguggacaaggu

SEQ ID NO: 223432 - RNA, 19 nt, Homo sapiens
  misc_RNA (1)...(19): siRNA sense strand
aagaacagcuucaauaacc

SEQ ID NO: 223433 - RNA, 19 nt, Homo sapiens
  misc_RNA (1)...(19): siRNA sense strand
aagaaagggcucucaaaga

SEQ ID NO: 223434 - RNA, 19 nt, Homo sapiens
  misc_RNA (1)...(19): siRNA sense strand
ggcgucuccuucauguuua

SEQ ID NO: 223435 - RNA, 19 nt, Homo sapiens
  misc_RNA (1)...(19): siRNA sense strand
ugcaaucacuguggaauau

SEQ ID NO: 223436 - RNA, 19 nt, Homo sapiens
  misc_RNA (1)...(19): siRNA sense strand
uagagagccuggugcugaa

SEQ ID NO: 223437 - RNA, 19 nt, Homo sapiens
  misc_RNA (1)...(19): siRNA sense strand
gaaauccuacccugaaacu

SEQ ID NO: 223438 - RNA, 19 nt, Homo sapiens
  misc_RNA (1)...(19): siRNA sense strand
ugaacuacaucagcaggaa

SEQ ID NO: 223439 - RNA, 19 nt, Homo sapiens
  misc_RNA (1)...(19): siRNA sense strand
aaccaauucuggcugauau

SEQ ID NO: 223440 - RNA, 19 nt, Homo sapiens
  misc_RNA (1)...(19): siRNA sense strand
gaggugaagcuagauguga

SEQ ID NO: 223441 - RNA, 19 nt, Homo sapiens
  misc_RNA (1)...(19): siRNA sense strand
ccaaguucuucaucgaguu

SEQ ID NO: 223442 - RNA, 19 nt, Homo sapiens
  misc_RNA (1)...(19): siRNA sense strand
gagcaucgaggccauugug

SEQ ID NO: 223443 - RNA, 19 nt, Homo sapiens
  misc_RNA (1)...(19): siRNA sense strand
uggaaauccuacccugaaa

SEQ ID NO: 223444 - RNA, 19 nt, Homo sapiens
  misc_RNA (1)...(19): siRNA sense strand
guggaaauccuacccugaa

SEQ ID NO: 223445 - RNA, 19 nt, Homo sapiens
  misc_RNA (1)...(19): siRNA sense strand
gggagaagcacaaggucuu

SEQ ID NO: 223446 - RNA, 19 nt, Homo sapiens
  misc_RNA (1)...(19): siRNA sense strand
cauuuggcuuugugaauug

SEQ ID NO: 223447 - RNA, 19 nt, Homo sapiens
  misc_RNA (1)...(19): siRNA sense strand
gcgaguggcuggaccuacu

SEQ ID NO: 223448 - RNA, 19 nt, Homo sapiens
  misc_RNA (1)...(19): siRNA sense strand
ugggugaccugaccaagau

SEQ ID NO: 223449 - RNA, 19 nt, Homo sapiens
  misc_RNA (1)...(19): siRNA sense strand
gggagcuccugaaccagaa

SEQ ID NO: 223450 - RNA, 19 nt, Homo sapiens
  misc_RNA (1)...(19): siRNA sense strand
gcaagccagccuucacaga

SEQ ID NO: 223451 - RNA, 19 nt, Homo sapiens
  misc_RNA (1)...(19): siRNA sense strand
uaucagaggcuccaugaag

SEQ ID NO: 223452 - RNA, 19 nt, Homo sapiens
  misc_RNA (1)...(19): siRNA sense strand
gaauacaagaagagcuuug

SEQ ID NO: 223453 - RNA, 19 nt, Homo sapiens
  misc_RNA (1)...(19): siRNA sense strand
gugcacacguaucgcauuc

SEQ ID NO: 223454 - RNA, 19 nt, Homo sapiens
  misc_RNA (1)...(19): siRNA sense strand
cauccugguucacaucgaa

SEQ ID NO: 223455 - RNA, 19 nt, Homo sapiens
  misc_RNA (1)...(19): siRNA sense strand
ggacuucaucuuugucagu

SEQ ID NO: 223456 - RNA, 19 nt, Homo sapiens
  misc_RNA (1)...(19): siRNA sense strand
cagcacggcccaacaguuc

SEQ ID NO: 223457 - RNA, 19 nt, Homo sapiens
  misc_RNA (1)...(19): siRNA sense strand
cgacaugaucucagucuuc

SEQ ID NO: 223458 - RNA, 19 nt, Homo sapiens
  misc_RNA (1)...(19): siRNA sense strand
caucugcaauucuuauggu

SEQ ID NO: 223459 - RNA, 19 nt, Homo sapiens
  misc_RNA (1)...(19): siRNA sense strand
agaacaaaguggccauuac

SEQ ID NO: 223460 - RNA, 19 nt, Homo sapiens
  misc_RNA (1)...(19): siRNA sense strand
ccagagaaaccgccaccaa

SEQ ID NO: 223461 - RNA, 19 nt, Homo sapiens
  misc_RNA (1)...(19): siRNA sense strand
gcgaggagacaggcaauau

SEQ ID NO: 223462 - RNA, 19 nt, Homo sapiens
  misc_RNA (1)...(19): siRNA sense strand
aggccuacauugaguuuga

SEQ ID NO: 223463 - RNA, 19 nt, Homo sapiens
  misc_RNA (1)...(19): siRNA sense strand
gagcuuacggaucuggauu

SEQ ID NO: 223464 - RNA, 19 nt, Homo sapiens
  misc_RNA (1)...(19): siRNA sense strand
ugagcgagguggacuaugc

SEQ ID NO: 223465 - RNA, 19 nt, Homo sapiens
  misc_RNA (1)...(19): siRNA sense strand
gcagcacggcccaacaguu

SEQ ID NO: 223466 - RNA, 19 nt, Homo sapiens
  misc_RNA (1)...(19): siRNA sense strand
gcaucgaggccauugugaa

SEQ ID NO: 223467 - RNA, 19 nt, Homo sapiens
  misc_RNA (1)...(19): siRNA sense strand
ggucuuccuucgauucagu

SEQ ID NO: 223468 - RNA, 19 nt, Homo sapiens
  misc_RNA (1)...(19): siRNA sense strand
gcaccucauuuggcuuugu

SEQ ID NO: 223469 - RNA, 19 nt, Homo sapiens
  misc_RNA (1)...(19): siRNA sense strand
ugucagugcuaaaggacuu

SEQ ID NO: 223470 - RNA, 19 nt, Homo sapiens
  misc_RNA (1)...(19): siRNA sense strand
caagaacagcuucaauaac

SEQ ID NO: 223471 - RNA, 19 nt, Homo sapiens
  misc_RNA (1)...(19): siRNA sense strand
ggaauacaagaagagcuuu

SEQ ID NO: 223472 - RNA, 19 nt, Homo sapiens
  misc_RNA (1)...(19): siRNA sense strand
caucagcaggaaagaguuu

SEQ ID NO: 223473 - RNA, 19 nt, Homo sapiens
  misc_RNA (1)...(19): siRNA sense strand
caccucaccucgggaaaug

SEQ ID NO: 223474 - RNA, 19 nt, Homo sapiens
  misc_RNA (1)...(19): siRNA sense strand
ccuuugaggugaagcuaga

SEQ ID NO: 223475 - RNA, 19 nt, Homo sapiens
  misc_RNA (1)...(19): siRNA sense strand
gauccuguccaagguguuu

SEQ ID NO: 223476 - RNA, 19 nt, Homo sapiens
  misc_RNA (1)...(19): siRNA sense strand
ucaaauaacuggcagaauc

SEQ ID NO: 223477 - RNA, 19 nt, Homo sapiens
  misc_RNA (1)...(19): siRNA sense strand
gccaagaccugcaauguug

SEQ ID NO: 223478 - RNA, 19 nt, Homo sapiens
  misc_RNA (1)...(19): siRNA sense strand
acgaugacauggacuauua

SEQ ID NO: 223479 - RNA, 19 nt, Homo sapiens
  misc_RNA (1)...(19): siRNA sense strand
gcagaugggcucagaguuu

SEQ ID NO: 223480 - RNA, 19 nt, Homo sapiens
  misc_RNA (1)...(19): siRNA sense strand
ugacauggacuauuacuuu

SEQ ID NO: 223481 - RNA, 19 nt, Homo sapiens
  misc_RNA (1)...(19): siRNA sense strand
ccaagaagcccaaagagaa

SEQ ID NO: 223482 - RNA, 19 nt, Homo sapiens
  misc_RNA (1)...(19): siRNA sense strand
acacagagguggugacaga

SEQ ID NO: 223483 - RNA, 19 nt, Homo sapiens
  misc_RNA (1)...(19): siRNA sense strand
ggagggcuuugacaucuuu

SEQ ID NO: 223484 - RNA, 19 nt, Homo sapiens
  misc_RNA (1)...(19): siRNA sense strand
ccaagaagcccaaggagaa

SEQ ID NO: 223485 - RNA, 19 nt, Homo sapiens
  misc_RNA (1)...(19): siRNA sense strand
ggaagaaaggcaagaaaga

SEQ ID NO: 223486 - RNA, 19 nt, Homo sapiens
  misc_RNA (1)...(19): siRNA sense strand
ggacuacaaugaccagauc

SEQ ID NO: 223487 - RNA, 19 nt, Homo sapiens
  misc_RNA (1)...(19): siRNA sense strand
ggaggacuaugaggacuuu

SEQ ID NO: 223488 - RNA, 19 nt, Homo sapiens
  misc_RNA (1)...(19): siRNA sense strand
ggaccgggacuaucaauga

SEQ ID NO: 223489 - RNA, 19 nt, Homo sapiens
  misc_RNA (1)...(19): siRNA sense strand
ucaguuaccugcauaccaa

SEQ ID NO: 223490 - RNA, 19 nt, Homo sapiens
  misc_RNA (1)...(19): siRNA sense strand
gacauggacuauuacuuug

SEQ ID NO: 223491 - RNA, 19 nt, Homo sapiens
  misc_RNA (1)...(19): siRNA sense strand
caaguucccucaugagagu

SEQ ID NO: 223492 - RNA, 19 nt, Homo sapiens
  misc_RNA (1)...(19): siRNA sense strand
gaccugcaauguugacuau

SEQ ID NO: 223493 - RNA, 19 nt, Homo sapiens
  misc_RNA (1)...(19): siRNA sense strand
caacggcuaugaggaaaug

SEQ ID NO: 223494 - RNA, 19 nt, Homo sapiens
  misc_RNA (1)...(19): siRNA sense strand
gaaaggcaagaaagacaaa

SEQ ID NO: 223495 - RNA, 19 nt, Homo sapiens
  misc_RNA (1)...(19): siRNA sense strand
ggauugagccuccugugaa

SEQ ID NO: 223496 - RNA, 19 nt, Homo sapiens
  misc_RNA (1)...(19): siRNA sense strand
ccacugaggacgacuacua

SEQ ID NO: 223497 - RNA, 19 nt, Homo sapiens
  misc_RNA (1)...(19): siRNA sense strand
ccaaggagaagccaccuaa

SEQ ID NO: 223498 - RNA, 19 nt, Homo sapiens
  misc_RNA (1)...(19): siRNA sense strand
gaggagggcuuugacaucu

SEQ ID NO: 223499 - RNA, 19 nt, Homo sapiens
  misc_RNA (1)...(19): siRNA sense strand
ggugguggcucguuucauc

SEQ ID NO: 223500 - RNA, 19 nt, Homo sapiens
  misc_RNA (1)...(19): siRNA sense strand
gaggacgacuacuaugaug

SEQ ID NO: 223501 - RNA, 19 nt, Homo sapiens
  misc_RNA (1)...(19): siRNA sense strand
gcaaugacagccagacaug

SEQ ID NO: 223502 - RNA, 19 nt, Homo sapiens
  misc_RNA (1)...(19): siRNA sense strand
gcgagcggcuaguauccua

SEQ ID NO: 223503 - RNA, 19 nt, Homo sapiens
  misc_RNA (1)...(19): siRNA sense strand
ccauggagaucucagacaa

SEQ ID NO: 223504 - RNA, 19 nt, Homo sapiens
  misc_RNA (1)...(19): siRNA sense strand
gugacaaguucccucauga

SEQ ID NO: 223505 - RNA, 19 nt, Homo sapiens
  misc_RNA (1)...(19): siRNA sense strand
cagaugggcucagaguuug

SEQ ID NO: 223506 - RNA, 19 nt, Homo sapiens
  misc_RNA (1)...(19): siRNA sense strand
ggacugaggagggcuuuga

SEQ ID NO: 223507 - RNA, 19 nt, Homo sapiens
  misc_RNA (1)...(19): siRNA sense strand
gaagggcaaggaccacaaa

SEQ ID NO: 223508 - RNA, 19 nt, Homo sapiens
  misc_RNA (1)...(19): siRNA sense strand
cacgaggccucaagaucua

SEQ ID NO: 223509 - RNA, 19 nt, Homo sapiens
  misc_RNA (1)...(19): siRNA sense strand
ccugcaauguugacuauga

SEQ ID NO: 223510 - RNA, 19 nt, Homo sapiens
  misc_RNA (1)...(19): siRNA sense strand
gcagaagugccuccggaaa

SEQ ID NO: 223511 - RNA, 19 nt, Homo sapiens
  misc_RNA (1)...(19): siRNA sense strand
gaaggaggagcugaagaaa

SEQ ID NO: 223512 - RNA, 19 nt, Homo sapiens
  misc_RNA (1)...(19): siRNA sense strand
caagguggagcccgaguuu

SEQ ID NO: 223513 - RNA, 19 nt, Homo sapiens
  misc_RNA (1)...(19): siRNA sense strand
ucaugaagguggugaacga

SEQ ID NO: 223514 - RNA, 19 nt, Homo sapiens
  misc_RNA (1)...(19): siRNA sense strand
agacugagaccuacacaga

SEQ ID NO: 223515 - RNA, 19 nt, Homo sapiens
  misc_RNA (1)...(19): siRNA sense strand
ggaaaagaccaaagacaaa

SEQ ID NO: 223516 - RNA, 19 nt, Homo sapiens
  misc_RNA (1)...(19): siRNA sense strand
acacacccgugcugaguga

SEQ ID NO: 223517 - RNA, 19 nt, Homo sapiens
  misc_RNA (1)...(19): siRNA sense strand
ccaccaagaagcccaaaga

SEQ ID NO: 223518 - RNA, 19 nt, Homo sapiens
  misc_RNA (1)...(19): siRNA sense strand
gaagaaaggcaagaaagac

SEQ ID NO: 223519 - RNA, 19 nt, Homo sapiens
  misc_RNA (1)...(19): siRNA sense strand
gagcugaggagaggaaaug

SEQ ID NO: 223520 - RNA, 19 nt, Homo sapiens
  misc_RNA (1)...(19): siRNA sense strand
agaaggaggagcugaagaa

SEQ ID NO: 223521 - RNA, 19 nt, Homo sapiens
  misc_RNA (1)...(19): siRNA sense strand
gauugagccuccugugaag

SEQ ID NO: 223522 - RNA, 19 nt, Homo sapiens
  misc_RNA (1)...(19): siRNA sense strand
caccuaaggccaccaagaa

SEQ ID NO: 223523 - RNA, 19 nt, Homo sapiens
  misc_RNA (1)...(19): siRNA sense strand
cagagguggugacagaguu

SEQ ID NO: 223524 - RNA, 19 nt, Homo sapiens
  misc_RNA (1)...(19): siRNA sense strand
gacaaguucccucaugaga

SEQ ID NO: 223525 - RNA, 19 nt, Homo sapiens
  misc_RNA (1)...(19): siRNA sense strand
gaaagggcgaggaguugga

SEQ ID NO: 223526 - RNA, 19 nt, Homo sapiens
  misc_RNA (1)...(19): siRNA sense strand
cagcauccaugacgauuuu

SEQ ID NO: 223527 - RNA, 19 nt, Homo sapiens
  misc_RNA (1)...(19): siRNA sense strand
ggacacacccgugcugagu

SEQ ID NO: 223528 - RNA, 19 nt, Homo sapiens
  misc_RNA (1)...(19): siRNA sense strand
ccaccgaugaccuggauuu

SEQ ID NO: 223529 - RNA, 19 nt, Homo sapiens
  misc_RNA (1)...(19): siRNA sense strand
gcuacuacgcacagaauga

SEQ ID NO: 223530 - RNA, 19 nt, Homo sapiens
  misc_RNA (1)...(19): siRNA sense strand
ccacacuggacuacaauga

SEQ ID NO: 223531 - RNA, 19 nt, Homo sapiens
  misc_RNA (1)...(19): siRNA sense strand
gacuucaguuaccugcaua

SEQ ID NO: 223532 - RNA, 19 nt, Homo sapiens
  misc_RNA (1)...(19): siRNA sense strand
gacuaucaaugacuucagu

SEQ ID NO: 223533 - RNA, 19 nt, Homo sapiens
  misc_RNA (1)...(19): siRNA sense strand
caagaagcccaaagagaag

SEQ ID NO: 223534 - RNA, 19 nt, Homo sapiens
  misc_RNA (1)...(19): siRNA sense strand
gaccuacacagugaacuuu

SEQ ID NO: 223535 - RNA, 19 nt, Homo sapiens
  misc_RNA (1)...(19): siRNA sense strand
ucccggaucucaacucugu

SEQ ID NO: 223536 - RNA, 19 nt, Homo sapiens
  misc_RNA (1)...(19): siRNA sense strand
ccaaggaggagaccgacaa

SEQ ID NO: 223537 - RNA, 19 nt, Homo sapiens
  misc_RNA (1)...(19): siRNA sense strand
ugacuucaguuaccugcau

SEQ ID NO: 223538 - RNA, 19 nt, Homo sapiens
  misc_RNA (1)...(19): siRNA sense strand
caaagacaaagggaagaaa

SEQ ID NO: 223539 - RNA, 19 nt, Homo sapiens
  misc_RNA (1)...(19): siRNA sense strand
ucacgaggccucaagaucu

SEQ ID NO: 223540 - RNA, 19 nt, Homo sapiens
  misc_RNA (1)...(19): siRNA sense strand
ggacgacuacuaugauggu

SEQ ID NO: 223541 - RNA, 19 nt, Homo sapiens
  misc_RNA (1)...(19): siRNA sense strand
gauggagucacaccguauu

SEQ ID NO: 223542 - RNA, 19 nt, Homo sapiens
  misc_RNA (1)...(19): siRNA sense strand
gggcaaggaccacaaagag

SEQ ID NO: 223543 - RNA, 19 nt, Homo sapiens
  misc_RNA (1)...(19): siRNA sense strand
gaacguggacaaggacaca

SEQ ID NO: 223544 - RNA, 19 nt, Homo sapiens
  misc_RNA (1)...(19): siRNA sense strand
gggaagaaaggcaagaaag

SEQ ID NO: 223545 - RNA, 19 nt, Homo sapiens
  misc_RNA (1)...(19): siRNA sense strand
cgagguggagcccgaguuu

SEQ ID NO: 223546 - RNA, 19 nt, Homo sapiens
  misc_RNA (1)...(19): siRNA sense strand
acuaugaggacuuugagua

SEQ ID NO: 223547 - RNA, 19 nt, Homo sapiens
  misc_RNA (1)...(19): siRNA sense strand
uaacuugcccaucccugaa

SEQ ID NO: 223548 - RNA, 19 nt, Homo sapiens
  misc_RNA (1)...(19): siRNA sense strand
cagcgcagaugggcucaga

SEQ ID NO: 223549 - RNA, 19 nt, Homo sapiens
  misc_RNA (1)...(19): siRNA sense strand
ugacuauggugaugguuac

SEQ ID NO: 223550 - RNA, 19 nt, Homo sapiens
  misc_RNA (1)...(19): siRNA sense strand
gagcaaggcauccccauug

SEQ ID NO: 223551 - RNA, 19 nt, Homo sapiens
  misc_RNA (1)...(19): siRNA sense strand
cuaucaaugacuucaguua

SEQ ID NO: 223552 - RNA, 19 nt, Homo sapiens
  misc_RNA (1)...(19): siRNA sense strand
ccaaagacaaagggaagaa

SEQ ID NO: 223553 - RNA, 19 nt, Homo sapiens
  misc_RNA (1)...(19): siRNA sense strand
ccaccaagaagcccaagga

SEQ ID NO: 223554 - RNA, 19 nt, Homo sapiens
  misc_RNA (1)...(19): siRNA sense strand
caccaacggcuaugaggaa

SEQ ID NO: 223555 - RNA, 19 nt, Homo sapiens
  misc_RNA (1)...(19): siRNA sense strand
gauguacaccaacggcuau

SEQ ID NO: 223556 - RNA, 19 nt, Homo sapiens
  misc_RNA (1)...(19): siRNA sense strand
ccaccaagaagcccaagga

SEQ ID NO: 223557 - RNA, 19 nt, Homo sapiens
  misc_RNA (1)...(19): siRNA sense strand
ggacgccuacggagaaagu

SEQ ID NO: 223558 - RNA, 19 nt, Homo sapiens
  misc_RNA (1)...(19): siRNA sense strand
acgacgagaucgaggaguu

SEQ ID NO: 223559 - RNA, 19 nt, Homo sapiens
  misc_RNA (1)...(19): siRNA sense strand
ggaacccgaguuugaggaa

SEQ ID NO: 223560 - RNA, 19 nt, Homo sapiens
  misc_RNA (1)...(19): siRNA sense strand
gcgagugggagaacaacaa

SEQ ID NO: 223561 - RNA, 19 nt, Homo sapiens
  misc_RNA (1)...(19): siRNA sense strand
ugugacaaguucccucaug

SEQ ID NO: 223562 - RNA, 19 nt, Homo sapiens
  misc_RNA (1)...(19): siRNA sense strand
ggccaccgaugaccuggau

SEQ ID NO: 223563 - RNA, 19 nt, Homo sapiens
  misc_RNA (1)...(19): siRNA sense strand
ugaggacuuugaguacauu

SEQ ID NO: 223564 - RNA, 19 nt, Homo sapiens
  misc_RNA (1)...(19): siRNA sense strand
gcuaugaggaaaugaccuu

SEQ ID NO: 223565 - RNA, 19 nt, Homo sapiens
  misc_RNA (1)...(19): siRNA sense strand
gagaaggaggagcugaaga

SEQ ID NO: 223566 - RNA, 19 nt, Homo sapiens
  misc_RNA (1)...(19): siRNA sense strand
gagacuccagcauccauga

SEQ ID NO: 223567 - RNA, 19 nt, Homo sapiens
  misc_RNA (1)...(19): siRNA sense strand
aggaggcgcugcucaccuu

SEQ ID NO: 223568 - RNA, 19 nt, Homo sapiens
  misc_RNA (1)...(19): siRNA sense strand
ggauggagucacaccguau

SEQ ID NO: 223569 - RNA, 19 nt, Homo sapiens
  misc_RNA (1)...(19): siRNA sense strand
ggaagcgcauccgggagau

SEQ ID NO: 223570 - RNA, 19 nt, Homo sapiens
  misc_RNA (1)...(19): siRNA sense strand
caggagaggagacccaugu

SEQ ID NO: 223571 - RNA, 19 nt, Homo sapiens
  misc_RNA (1)...(19): siRNA sense strand
uaugaggacuuugaguaca

SEQ ID NO: 223572 - RNA, 19 nt, Homo sapiens
  misc_RNA (1)...(19): siRNA sense strand
gaacuuuggggacuucuga

SEQ ID NO: 223573 - RNA, 19 nt, Homo sapiens
  misc_RNA (1)...(19): siRNA sense strand
cacccaaggccaccaagaa

SEQ ID NO: 223574 - RNA, 19 nt, Homo sapiens
  misc_RNA (1)...(19): siRNA sense strand
cacccaaggccaccaagaa

SEQ ID NO: 223575 - RNA, 19 nt, Homo sapiens
  misc_RNA (1)...(19): siRNA sense strand
cacccaaggccaccaagaa

SEQ ID NO: 223576 - RNA, 19 nt, Homo sapiens
  misc_RNA (1)...(19): siRNA sense strand
gguauugucuucaguauga

SEQ ID NO: 223577 - RNA, 19 nt, Homo sapiens
  misc_RNA (1)...(19): siRNA sense strand
cucaauagcuuuagcaauu

SEQ ID NO: 223578 - RNA, 19 nt, Homo sapiens
  misc_RNA (1)...(19): siRNA sense strand
ggacauuuauuugcaauca

SEQ ID NO: 223579 - RNA, 19 nt, Homo sapiens
  misc_RNA (1)...(19): siRNA sense strand
gcaauuggacauuuauuug

SEQ ID NO: 223580 - RNA, 19 nt, Homo sapiens
  misc_RNA (1)...(19): siRNA sense strand
agaccaaucuggagaggua

SEQ ID NO: 223581 - RNA, 19 nt, Homo sapiens
  misc_RNA (1)...(19): siRNA sense strand
gcaauuggauuuucuguug

SEQ ID NO: 223582 - RNA, 19 nt, Homo sapiens
  misc_RNA (1)...(19): siRNA sense strand
ugaugucacuggcucaaua

SEQ ID NO: 223583 - RNA, 19 nt, Homo sapiens
  misc_RNA (1)...(19): siRNA sense strand
cggaugaccugauucuaaa

SEQ ID NO: 223584 - RNA, 19 nt, Homo sapiens
  misc_RNA (1)...(19): siRNA sense strand
gcaguuaucaugggaaauu

SEQ ID NO: 223585 - RNA, 19 nt, Homo sapiens
  misc_RNA (1)...(19): siRNA sense strand
gaauuucuggccaugcuua

SEQ ID NO: 223586 - RNA, 19 nt, Homo sapiens
  misc_RNA (1)...(19): siRNA sense strand
ggucuggacucaagcuuuc

SEQ ID NO: 223587 - RNA, 19 nt, Homo sapiens
  misc_RNA (1)...(19): siRNA sense strand
ggacucaagcuuucuggaa

SEQ ID NO: 223588 - RNA, 19 nt, Homo sapiens
  misc_RNA (1)...(19): siRNA sense strand
ggaaaaccauuggauauau

SEQ ID NO: 223589 - RNA, 19 nt, Homo sapiens
  misc_RNA (1)...(19): siRNA sense strand
gugcagugcuuuggccaua

SEQ ID NO: 223590 - RNA, 19 nt, Homo sapiens
  misc_RNA (1)...(19): siRNA sense strand
ggacaacaggagucaggua

SEQ ID NO: 223591 - RNA, 19 nt, Homo sapiens
  misc_RNA (1)...(19): siRNA sense strand
gagguauugucuucaguau

SEQ ID NO: 223592 - RNA, 19 nt, Homo sapiens
  misc_RNA (1)...(19): siRNA sense strand
caauugguguuuacuaucu

SEQ ID NO: 223593 - RNA, 19 nt, Homo sapiens
  misc_RNA (1)...(19): siRNA sense strand
ccaagucugucuucuacau

SEQ ID NO: 223594 - RNA, 19 nt, Homo sapiens
  misc_RNA (1)...(19): siRNA sense strand
agagacggaugaccugauu

SEQ ID NO: 223595 - RNA, 19 nt, Homo sapiens
  misc_RNA (1)...(19): siRNA sense strand
ggagagguauugucuucag

SEQ ID NO: 223596 - RNA, 19 nt, Homo sapiens
  misc_RNA (1)...(19): siRNA sense strand
caaacggacugaugucacu

SEQ ID NO: 223597 - RNA, 19 nt, Homo sapiens
  misc_RNA (1)...(19): siRNA sense strand
caacaggagucagguagag

SEQ ID NO: 223598 - RNA, 19 nt, Homo sapiens
  misc_RNA (1)...(19): siRNA sense strand
gcagugcuuuggccauauc

SEQ ID NO: 223599 - RNA, 19 nt, Homo sapiens
  misc_RNA (1)...(19): siRNA sense strand
caucaacccugcagugacu

SEQ ID NO: 223600 - RNA, 19 nt, Homo sapiens
  misc_RNA (1)...(19): siRNA sense strand
uaucagcgguggccacauc

SEQ ID NO: 223601 - RNA, 19 nt, Homo sapiens
  misc_RNA (1)...(19): siRNA sense strand
caacugggguggaacagaa

SEQ ID NO: 223602 - RNA, 19 nt, Homo sapiens
  misc_RNA (1)...(19): siRNA sense strand
cugguggccuuuaugagua

SEQ ID NO: 223603 - RNA, 19 nt, Homo sapiens
  misc_RNA (1)...(19): siRNA sense strand
gucauggucuccugguuga

SEQ ID NO: 223604 - RNA, 19 nt, Homo sapiens
  misc_RNA (1)...(19): siRNA sense strand
caaccauggugcagugcuu

SEQ ID NO: 223605 - RNA, 19 nt, Homo sapiens
  misc_RNA (1)...(19): siRNA sense strand
ucucaucucccuuugcuuu

SEQ ID NO: 223606 - RNA, 19 nt, Homo sapiens
  misc_RNA (1)...(19): siRNA sense strand
caucaugguggcuuucaaa

SEQ ID NO: 223607 - RNA, 19 nt, Homo sapiens
  misc_RNA (1)...(19): siRNA sense strand
uguugcaauuggacauuua

SEQ ID NO: 223608 - RNA, 19 nt, Homo sapiens
  misc_RNA (1)...(19): siRNA sense strand
cuggagagguauugucuuc

SEQ ID NO: 223609 - RNA, 19 nt, Homo sapiens
  misc_RNA (1)...(19): siRNA sense strand
gucacuggcucaauagcuu

SEQ ID NO: 223610 - RNA, 19 nt, Homo sapiens
  misc_RNA (1)...(19): siRNA sense strand
acauggagguggaggacaa

SEQ ID NO: 223611 - RNA, 19 nt, Homo sapiens
  misc_RNA (1)...(19): siRNA sense strand
cgccaagucugucuucuac

SEQ ID NO: 223612 - RNA, 19 nt, Homo sapiens
  misc_RNA (1)...(19): siRNA sense strand
acggaugaccugauucuaa

SEQ ID NO: 223613 - RNA, 19 nt, Homo sapiens
  misc_RNA (1)...(19): siRNA sense strand
gaaauugggaaaaccauug

SEQ ID NO: 223614 - RNA, 19 nt, Homo sapiens
  misc_RNA (1)...(19): siRNA sense strand
gagagguauugucuucagu

SEQ ID NO: 223615 - RNA, 19 nt, Homo sapiens
  misc_RNA (1)...(19): siRNA sense strand
gcugguggccuuuaugagu

SEQ ID NO: 223616 - RNA, 19 nt, Homo sapiens
  misc_RNA (1)...(19): siRNA sense strand
gggaaaaccauuggauaua

SEQ ID NO: 223617 - RNA, 19 nt, Homo sapiens
  misc_RNA (1)...(19): siRNA sense strand
ggacucagcauugcaacca

SEQ ID NO: 223618 - RNA, 19 nt, Homo sapiens
  misc_RNA (1)...(19): siRNA sense strand
agaacaucaugguggcuuu

SEQ ID NO: 223619 - RNA, 19 nt, Homo sapiens
  misc_RNA (1)...(19): siRNA sense strand
ugccagcugugauuccaaa

SEQ ID NO: 223620 - RNA, 19 nt, Homo sapiens
  misc_RNA (1)...(19): siRNA sense strand
gaguggugcaugugauuga

SEQ ID NO: 223621 - RNA, 19 nt, Homo sapiens
  misc_RNA (1)...(19): siRNA sense strand
gaacaucaugguggcuuuc

SEQ ID NO: 223622 - RNA, 19 nt, Homo sapiens
  misc_RNA (1)...(19): siRNA sense strand
ccagagagaacaucauggu

SEQ ID NO: 223623 - RNA, 19 nt, Homo sapiens
  misc_RNA (1)...(19): siRNA sense strand
uuucuggccaugcuuauuu

SEQ ID NO: 223624 - RNA, 19 nt, Homo sapiens
  misc_RNA (1)...(19): siRNA sense strand
guucucaucucccuuugcu

SEQ ID NO: 223625 - RNA, 19 nt, Homo sapiens
  misc_RNA (1)...(19): siRNA sense strand
cugcaguuaucaugggaaa

SEQ ID NO: 223626 - RNA, 19 nt, Homo sapiens
  misc_RNA (1)...(19): siRNA sense strand
ucuccugguugaguugaua

SEQ ID NO: 223627 - RNA, 19 nt, Homo sapiens
  misc_RNA (1)...(19): siRNA sense strand
gaucagcaucgccaagucu

SEQ ID NO: 223628 - RNA, 19 nt, Homo sapiens
  misc_RNA (1)...(19): siRNA sense strand
agagguauugucuucagua

SEQ ID NO: 223629 - RNA, 19 nt, Homo sapiens
  misc_RNA (1)...(19): siRNA sense strand
uuaugaguaugucuucugu

SEQ ID NO: 223630 - RNA, 19 nt, Homo sapiens
  misc_RNA (1)...(19): siRNA sense strand
gcucaauagcuuuagcaau

SEQ ID NO: 223631 - RNA, 19 nt, Homo sapiens
  misc_RNA (1)...(19): siRNA sense strand
ggaguggugcaugugauug

SEQ ID NO: 223632 - RNA, 19 nt, Homo sapiens
  misc_RNA (1)...(19): siRNA sense strand
gcaccaggaagaucagcau

SEQ ID NO: 223633 - RNA, 19 nt, Homo sapiens
  misc_RNA (1)...(19): siRNA sense strand
uaccagagagaacaucaug

SEQ ID NO: 223634 - RNA, 19 nt, Homo sapiens
  misc_RNA (1)...(19): siRNA sense strand
ugcaugugauugacguuga

SEQ ID NO: 223635 - RNA, 19 nt, Homo sapiens
  misc_RNA (1)...(19): siRNA sense strand
cuuuggaccugcaguuauc

SEQ ID NO: 223636 - RNA, 19 nt, Homo sapiens
  misc_RNA (1)...(19): siRNA sense strand
caucucccuuugcuuugga

SEQ ID NO: 223637 - RNA, 19 nt, Homo sapiens
  misc_RNA (1)...(19): siRNA sense strand
ccucgcugguggccuuuau

SEQ ID NO: 223638 - RNA, 19 nt, Homo sapiens
  misc_RNA (1)...(19): siRNA sense strand
caguuaucaugggaaauug

SEQ ID NO: 223639 - RNA, 19 nt, Homo sapiens
  misc_RNA (1)...(19): siRNA sense strand
caauuggacauuuauuugc

SEQ ID NO: 223640 - RNA, 19 nt, Homo sapiens
  misc_RNA (1)...(19): siRNA sense strand
ucacuggcucaauagcuuu

SEQ ID NO: 223641 - RNA, 19 nt, Homo sapiens
  misc_RNA (1)...(19): siRNA sense strand
ucacauuucaauugguguu

SEQ ID NO: 223642 - RNA, 19 nt, Homo sapiens
  misc_RNA (1)...(19): siRNA sense strand
gcaugugauugacguugac

SEQ ID NO: 223643 - RNA, 19 nt, Homo sapiens
  misc_RNA (1)...(19): siRNA sense strand
gaugucacuggcucaauag

SEQ ID NO: 223644 - RNA, 19 nt, Homo sapiens
  misc_RNA (1)...(19): siRNA sense strand
gguauugucuucaguauga

SEQ ID NO: 223645 - RNA, 19 nt, Homo sapiens
  misc_RNA (1)...(19): siRNA sense strand
cucaauagcuuuagcaauu

SEQ ID NO: 223646 - RNA, 19 nt, Homo sapiens
  misc_RNA (1)...(19): siRNA sense strand
ggacauuuauuugcaauca

SEQ ID NO: 223647 - RNA, 19 nt, Homo sapiens
  misc_RNA (1)...(19): siRNA sense strand
gcaauuggacauuuauuug

SEQ ID NO: 223648 - RNA, 19 nt, Homo sapiens
  misc_RNA (1)...(19): siRNA sense strand
agaccaaucuggagaggua

SEQ ID NO: 223649 - RNA, 19 nt, Homo sapiens
  misc_RNA (1)...(19): siRNA sense strand
gcaauuggauuuucuguug

SEQ ID NO: 223650 - RNA, 19 nt, Homo sapiens
  misc_RNA (1)...(19): siRNA sense strand
ugaugucacuggcucaaua

SEQ ID NO: 223651 - RNA, 19 nt, Homo sapiens
  misc_RNA (1)...(19): siRNA sense strand
cggaugaccugauucuaaa

SEQ ID NO: 223652 - RNA, 19 nt, Homo sapiens
  misc_RNA (1)...(19): siRNA sense strand
gcaguuaucaugggaaauu

SEQ ID NO: 223653 - RNA, 19 nt, Homo sapiens
  misc_RNA (1)...(19): siRNA sense strand
gaauuucuggccaugcuua

SEQ ID NO: 223654 - RNA, 19 nt, Homo sapiens
  misc_RNA (1)...(19): siRNA sense strand
ggucuggacucaagcuuuc

SEQ ID NO: 223655 - RNA, 19 nt, Homo sapiens
  misc_RNA (1)...(19): siRNA sense strand
ggacucaagcuuucuggaa

SEQ ID NO: 223656 - RNA, 19 nt, Homo sapiens
  misc_RNA (1)...(19): siRNA sense strand
ggaaaaccauuggauauau

SEQ ID NO: 223657 - RNA, 19 nt, Homo sapiens
  misc_RNA (1)...(19): siRNA sense strand
gugcagugcuuuggccaua

SEQ ID NO: 223658 - RNA, 19 nt, Homo sapiens
  misc_RNA (1)...(19): siRNA sense strand
ggacaacaggagucaggua

SEQ ID NO: 223659 - RNA, 19 nt, Homo sapiens
  misc_RNA (1)...(19): siRNA sense strand
gagguauugucuucaguau

SEQ ID NO: 223660 - RNA, 19 nt, Homo sapiens
  misc_RNA (1)...(19): siRNA sense strand
caauugguguuuacuaucu

SEQ ID NO: 223661 - RNA, 19 nt, Homo sapiens
  misc_RNA (1)...(19): siRNA sense strand
ccaagucugucuucuacau

SEQ ID NO: 223662 - RNA, 19 nt, Homo sapiens
  misc_RNA (1)...(19): siRNA sense strand
agagacggaugaccugauu

SEQ ID NO: 223663 - RNA, 19 nt, Homo sapiens
  misc_RNA (1)...(19): siRNA sense strand
ggagagguauugucuucag

SEQ ID NO: 223664 - RNA, 19 nt, Homo sapiens
  misc_RNA (1)...(19): siRNA sense strand
caaacggacugaugucacu

SEQ ID NO: 223665 - RNA, 19 nt, Homo sapiens
  misc_RNA (1)...(19): siRNA sense strand
caacaggagucagguagag

SEQ ID NO: 223666 - RNA, 19 nt, Homo sapiens
  misc_RNA (1)...(19): siRNA sense strand
gcagugcuuuggccauauc

SEQ ID NO: 223667 - RNA, 19 nt, Homo sapiens
  misc_RNA (1)...(19): siRNA sense strand
caucaacccugcagugacu

SEQ ID NO: 223668 - RNA, 19 nt, Homo sapiens
  misc_RNA (1)...(19): siRNA sense strand
uaucagcgguggccacauc

SEQ ID NO: 223669 - RNA, 19 nt, Homo sapiens
  misc_RNA (1)...(19): siRNA sense strand
caacugggguggaacagaa

SEQ ID NO: 223670 - RNA, 19 nt, Homo sapiens
  misc_RNA (1)...(19): siRNA sense strand
cugguggccuuuaugagua

SEQ ID NO: 223671 - RNA, 19 nt, Homo sapiens
  misc_RNA (1)...(19): siRNA sense strand
gucauggucuccugguuga

SEQ ID NO: 223672 - RNA, 19 nt, Homo sapiens
  misc_RNA (1)...(19): siRNA sense strand
caaccauggugcagugcuu

SEQ ID NO: 223673 - RNA, 19 nt, Homo sapiens
  misc_RNA (1)...(19): siRNA sense strand
ucucaucucccuuugcuuu

SEQ ID NO: 223674 - RNA, 19 nt, Homo sapiens
  misc_RNA (1)...(19): siRNA sense strand
uguugcaauuggacauuua

SEQ ID NO: 223675 - RNA, 19 nt, Homo sapiens
  misc_RNA (1)...(19): siRNA sense strand
cuggagagguauugucuuc

SEQ ID NO: 223676 - RNA, 19 nt, Homo sapiens
  misc_RNA (1)...(19): siRNA sense strand
gucacuggcucaauagcuu

SEQ ID NO: 223677 - RNA, 19 nt, Homo sapiens
  misc_RNA (1)...(19): siRNA sense strand
acauggagguggaggacaa

SEQ ID NO: 223678 - RNA, 19 nt, Homo sapiens
  misc_RNA (1)...(19): siRNA sense strand
cgccaagucugucuucuac

SEQ ID NO: 223679 - RNA, 19 nt, Homo sapiens
  misc_RNA (1)...(19): siRNA sense strand
acggaugaccugauucuaa

SEQ ID NO: 223680 - RNA, 19 nt, Homo sapiens
  misc_RNA (1)...(19): siRNA sense strand
gaaauugggaaaaccauug

SEQ ID NO: 223681 - RNA, 19 nt, Homo sapiens
  misc_RNA (1)...(19): siRNA sense strand
gagagguauugucuucagu

SEQ ID NO: 223682 - RNA, 19 nt, Homo sapiens
  misc_RNA (1)...(19): siRNA sense strand
gcugguggccuuuaugagu

SEQ ID NO: 223683 - RNA, 19 nt, Homo sapiens
  misc_RNA (1)...(19): siRNA sense strand
gggaaaaccauuggauaua

SEQ ID NO: 223684 - RNA, 19 nt, Homo sapiens
  misc_RNA (1)...(19): siRNA sense strand
ggacucagcauugcaacca

SEQ ID NO: 223685 - RNA, 19 nt, Homo sapiens
  misc_RNA (1)...(19): siRNA sense strand
ugccagcugugauuccaaa

SEQ ID NO: 223686 - RNA, 19 nt, Homo sapiens
  misc_RNA (1)...(19): siRNA sense strand
gaguggugcaugugauuga

SEQ ID NO: 223687 - RNA, 19 nt, Homo sapiens
  misc_RNA (1)...(19): siRNA sense strand
uuucuggccaugcuuauuu

SEQ ID NO: 223688 - RNA, 19 nt, Homo sapiens
  misc_RNA (1)...(19): siRNA sense strand
guucucaucucccuuugcu

SEQ ID NO: 223689 - RNA, 19 nt, Homo sapiens
  misc_RNA (1)...(19): siRNA sense strand
cugcaguuaucaugggaaa

SEQ ID NO: 223690 - RNA, 19 nt, Homo sapiens
  misc_RNA (1)...(19): siRNA sense strand
ucuccugguugaguugaua

SEQ ID NO: 223691 - RNA, 19 nt, Homo sapiens
  misc_RNA (1)...(19): siRNA sense strand
gaucagcaucgccaagucu

SEQ ID NO: 223692 - RNA, 19 nt, Homo sapiens
  misc_RNA (1)...(19): siRNA sense strand
agagguauugucuucagua

SEQ ID NO: 223693 - RNA, 19 nt, Homo sapiens
  misc_RNA (1)...(19): siRNA sense strand
uuaugaguaugucuucugu

SEQ ID NO: 223694 - RNA, 19 nt, Homo sapiens
  misc_RNA (1)...(19): siRNA sense strand
gcucaauagcuuuagcaau

SEQ ID NO: 223695 - RNA, 19 nt, Homo sapiens
  misc_RNA (1)...(19): siRNA sense strand
ggaguggugcaugugauug

SEQ ID NO: 223696 - RNA, 19 nt, Homo sapiens
  misc_RNA (1)...(19): siRNA sense strand
gcaccaggaagaucagcau

SEQ ID NO: 223697 - RNA, 19 nt, Homo sapiens
  misc_RNA (1)...(19): siRNA sense strand
ugcaugugauugacguuga

SEQ ID NO: 223698 - RNA, 19 nt, Homo sapiens
  misc_RNA (1)...(19): siRNA sense strand
cuuuggaccugcaguuauc

SEQ ID NO: 223699 - RNA, 19 nt, Homo sapiens
  misc_RNA (1)...(19): siRNA sense strand
caucucccuuugcuuugga

SEQ ID NO: 223700 - RNA, 19 nt, Homo sapiens
  misc_RNA (1)...(19): siRNA sense strand
ccucgcugguggccuuuau

SEQ ID NO: 223701 - RNA, 19 nt, Homo sapiens
  misc_RNA (1)...(19): siRNA sense strand
caguuaucaugggaaauug

SEQ ID NO: 223702 - RNA, 19 nt, Homo sapiens
  misc_RNA (1)...(19): siRNA sense strand
caauuggacauuuauuugc

SEQ ID NO: 223703 - RNA, 19 nt, Homo sapiens
  misc_RNA (1)...(19): siRNA sense strand
ucacuggcucaauagcuuu

SEQ ID NO: 223704 - RNA, 19 nt, Homo sapiens
  misc_RNA (1)...(19): siRNA sense strand
ucacauuucaauugguguu

SEQ ID NO: 223705 - RNA, 19 nt, Homo sapiens
  misc_RNA (1)...(19): siRNA sense strand
gcaugugauugacguugac

SEQ ID NO: 223706 - RNA, 19 nt, Homo sapiens
  misc_RNA (1)...(19): siRNA sense strand
gaugucacuggcucaauag

SEQ ID NO: 223707 - RNA, 19 nt, Homo sapiens
  misc_RNA (1)...(19): siRNA sense strand
gaacugacguuacaucaua

SEQ ID NO: 223708 - RNA, 19 nt, Homo sapiens
  misc_RNA (1)...(19): siRNA sense strand
gaaagugucuacccaguug

SEQ ID NO: 223709 - RNA, 19 nt, Homo sapiens
  misc_RNA (1)...(19): siRNA sense strand
ggaaguagauccaaacaca

SEQ ID NO: 223710 - RNA, 19 nt, Homo sapiens
  misc_RNA (1)...(19): siRNA sense strand
uaacguggcucauuguaaa

SEQ ID NO: 223711 - RNA, 19 nt, Homo sapiens
  misc_RNA (1)...(19): siRNA sense strand
ggaggaagcugagcauuau

SEQ ID NO: 223712 - RNA, 19 nt, Homo sapiens
  misc_RNA (1)...(19): siRNA sense strand
gaacuaggcacacugcuaa

SEQ ID NO: 223713 - RNA, 19 nt, Homo sapiens
  misc_RNA (1)...(19): siRNA sense strand
caaguugaaugaucuguuu

SEQ ID NO: 223714 - RNA, 19 nt, Homo sapiens
  misc_RNA (1)...(19): siRNA sense strand
ccagaaagaaggacaaaua

SEQ ID NO: 223715 - RNA, 19 nt, Homo sapiens
  misc_RNA (1)...(19): siRNA sense strand
gaaagaaccaggagaacaa

SEQ ID NO: 223716 - RNA, 19 nt, Homo sapiens
  misc_RNA (1)...(19): siRNA sense strand
gaacuauccucuggacgua

SEQ ID NO: 223717 - RNA, 19 nt, Homo sapiens
  misc_RNA (1)...(19): siRNA sense strand
caaagaaccgugcagauaa

SEQ ID NO: 223718 - RNA, 19 nt, Homo sapiens
  misc_RNA (1)...(19): siRNA sense strand
agaaggacauugugaaauu

SEQ ID NO: 223719 - RNA, 19 nt, Homo sapiens
  misc_RNA (1)...(19): siRNA sense strand
caagaaggacacaauauuu

SEQ ID NO: 223720 - RNA, 19 nt, Homo sapiens
  misc_RNA (1)...(19): siRNA sense strand
uaacagacgucacuaugga

SEQ ID NO: 223721 - RNA, 19 nt, Homo sapiens
  misc_RNA (1)...(19): siRNA sense strand
caagagacccgaagaauca

SEQ ID NO: 223722 - RNA, 19 nt, Homo sapiens
  misc_RNA (1)...(19): siRNA sense strand
gcuucuggcugcaaauuua

SEQ ID NO: 223723 - RNA, 19 nt, Homo sapiens
  misc_RNA (1)...(19): siRNA sense strand
ggaaaacacugaaggauga

SEQ ID NO: 223724 - RNA, 19 nt, Homo sapiens
  misc_RNA (1)...(19): siRNA sense strand
cagcaguguugauaaauuu

SEQ ID NO: 223725 - RNA, 19 nt, Homo sapiens
  misc_RNA (1)...(19): siRNA sense strand
guuugaaccucuuguuaua

SEQ ID NO: 223726 - RNA, 19 nt, Homo sapiens
  misc_RNA (1)...(19): siRNA sense strand
caucaaaggugacauugga

SEQ ID NO: 223727 - RNA, 19 nt, Homo sapiens
  misc_RNA (1)...(19): siRNA sense strand
gcuacuaaaugugcucuua

SEQ ID NO: 223728 - RNA, 19 nt, Homo sapiens
  misc_RNA (1)...(19): siRNA sense strand
acagauagcugacaucauc

SEQ ID NO: 223729 - RNA, 19 nt, Homo sapiens
  misc_RNA (1)...(19): siRNA sense strand
agacaaaccucacgagugu

SEQ ID NO: 223730 - RNA, 19 nt, Homo sapiens
  misc_RNA (1)...(19): siRNA sense strand
gaacgagugcucaauaaug

SEQ ID NO: 223731 - RNA, 19 nt, Homo sapiens
  misc_RNA (1)...(19): siRNA sense strand
ugacagcaguguugauaaa

SEQ ID NO: 223732 - RNA, 19 nt, Homo sapiens
  misc_RNA (1)...(19): siRNA sense strand
ucuaucaucuuccuucaua

SEQ ID NO: 223733 - RNA, 19 nt, Homo sapiens
  misc_RNA (1)...(19): siRNA sense strand
uaaagaauuugccagaaga

SEQ ID NO: 223734 - RNA, 19 nt, Homo sapiens
  misc_RNA (1)...(19): siRNA sense strand
gaagggaaacaaauaaaga

SEQ ID NO: 223735 - RNA, 19 nt, Homo sapiens
  misc_RNA (1)...(19): siRNA sense strand
ggaaacccuugcagagauu

SEQ ID NO: 223736 - RNA, 19 nt, Homo sapiens
  misc_RNA (1)...(19): siRNA sense strand
caacaugugugcaguuaca

SEQ ID NO: 223737 - RNA, 19 nt, Homo sapiens
  misc_RNA (1)...(19): siRNA sense strand
uaauuaggcuugucccaaa

SEQ ID NO: 223738 - RNA, 19 nt, Homo sapiens
  misc_RNA (1)...(19): siRNA sense strand
caagaacgagugcucaaua

SEQ ID NO: 223739 - RNA, 19 nt, Homo sapiens
  misc_RNA (1)...(19): siRNA sense strand
ucucagacaucuugaacua

SEQ ID NO: 223740 - RNA, 19 nt, Homo sapiens
  misc_RNA (1)...(19): siRNA sense strand
gcaagagauucaagcaaug

SEQ ID NO: 223741 - RNA, 19 nt, Homo sapiens
  misc_RNA (1)...(19): siRNA sense strand
gggaggaagcugagcauua

SEQ ID NO: 223742 - RNA, 19 nt, Homo sapiens
  misc_RNA (1)...(19): siRNA sense strand
gaacaagccucugaaagcu

SEQ ID NO: 223743 - RNA, 19 nt, Homo sapiens
  misc_RNA (1)...(19): siRNA sense strand
ccugcuagcuccaugcuua

SEQ ID NO: 223744 - RNA, 19 nt, Homo sapiens
  misc_RNA (1)...(19): siRNA sense strand
ggacaaagacugguacguu

SEQ ID NO: 223745 - RNA, 19 nt, Homo sapiens
  misc_RNA (1)...(19): siRNA sense strand
ggaaguguguugaagagau

SEQ ID NO: 223746 - RNA, 19 nt, Homo sapiens
  misc_RNA (1)...(19): siRNA sense strand
gcaccuuccuccugagaaa

SEQ ID NO: 223747 - RNA, 19 nt, Homo sapiens
  misc_RNA (1)...(19): siRNA sense strand
gcaauucagucucguugug

SEQ ID NO: 223748 - RNA, 19 nt, Homo sapiens
  misc_RNA (1)...(19): siRNA sense strand
ggauucagaucagguguuu

SEQ ID NO: 223749 - RNA, 19 nt, Homo sapiens
  misc_RNA (1)...(19): siRNA sense strand
aaggaugagucuucuguua

SEQ ID NO: 223750 - RNA, 19 nt, Homo sapiens
  misc_RNA (1)...(19): siRNA sense strand
ggagaaagaaccaggagaa

SEQ ID NO: 223751 - RNA, 19 nt, Homo sapiens
  misc_RNA (1)...(19): siRNA sense strand
gaacuaaucacaucaacca

SEQ ID NO: 223752 - RNA, 19 nt, Homo sapiens
  misc_RNA (1)...(19): siRNA sense strand
caagaaagaccgugugaau

SEQ ID NO: 223753 - RNA, 19 nt, Homo sapiens
  misc_RNA (1)...(19): siRNA sense strand
caacaaaguuaucaaagcu

SEQ ID NO: 223754 - RNA, 19 nt, Homo sapiens
  misc_RNA (1)...(19): siRNA sense strand
gugcagagcuggugaaucg

SEQ ID NO: 223755 - RNA, 19 nt, Homo sapiens
  misc_RNA (1)...(19): siRNA sense strand
ucaacagaauccaggaaua

SEQ ID NO: 223756 - RNA, 19 nt, Homo sapiens
  misc_RNA (1)...(19): siRNA sense strand
uggaagaacucaacagaau

SEQ ID NO: 223757 - RNA, 19 nt, Homo sapiens
  misc_RNA (1)...(19): siRNA sense strand
gcagcaacauacuuucuau

SEQ ID NO: 223758 - RNA, 19 nt, Homo sapiens
  misc_RNA (1)...(19): siRNA sense strand
ggaaucagaggcaaucauu

SEQ ID NO: 223759 - RNA, 19 nt, Homo sapiens
  misc_RNA (1)...(19): siRNA sense strand
uaccugaaauccugcuuua

SEQ ID NO: 223760 - RNA, 19 nt, Homo sapiens
  misc_RNA (1)...(19): siRNA sense strand
guucugaaauuguguuaga

SEQ ID NO: 223761 - RNA, 19 nt, Homo sapiens
  misc_RNA (1)...(19): siRNA sense strand
ucaaagagagagaauauug

SEQ ID NO: 223762 - RNA, 19 nt, Homo sapiens
  misc_RNA (1)...(19): siRNA sense strand
guacguucaucuugucaaa

SEQ ID NO: 223763 - RNA, 19 nt, Homo sapiens
  misc_RNA (1)...(19): siRNA sense strand
ccacgaccucuuuguauua

SEQ ID NO: 223764 - RNA, 19 nt, Homo sapiens
  misc_RNA (1)...(19): siRNA sense strand
ugaaggugauuaacauuug

SEQ ID NO: 223765 - RNA, 19 nt, Homo sapiens
  misc_RNA (1)...(19): siRNA sense strand
gcaccaagaccacaauguu

SEQ ID NO: 223766 - RNA, 19 nt, Homo sapiens
  misc_RNA (1)...(19): siRNA sense strand
gagcggguaucuguucuuu

SEQ ID NO: 223767 - RNA, 19 nt, Homo sapiens
  misc_RNA (1)...(19): siRNA sense strand
ggucagaucccuucuagug

SEQ ID NO: 223768 - RNA, 19 nt, Homo sapiens
  misc_RNA (1)...(19): siRNA sense strand
gaaggacauugugaaauuc

SEQ ID NO: 223769 - RNA, 19 nt, Homo sapiens
  misc_RNA (1)...(19): siRNA sense strand
gcacauugacucucaugaa

SEQ ID NO: 223770 - RNA, 19 nt, Homo sapiens
  misc_RNA (1)...(19): siRNA sense strand
gauggcaacuguuuguguu

SEQ ID NO: 223771 - RNA, 19 nt, Homo sapiens
  misc_RNA (1)...(19): siRNA sense strand
gcacaauaaccagaauaua

SEQ ID NO: 223772 - RNA, 19 nt, Homo sapiens
  misc_RNA (1)...(19): siRNA sense strand
ggaaaugagugagcagcaa

SEQ ID NO: 223773 - RNA, 19 nt, Homo sapiens
  misc_RNA (1)...(19): siRNA sense strand
guacacgacuacaacaugu

SEQ ID NO: 223774 - RNA, 19 nt, Homo sapiens
  misc_RNA (1)...(19): siRNA sense strand
acaaagaaccgugcagaua

SEQ ID NO: 223775 - RNA, 19 nt, Homo sapiens
  misc_RNA (1)...(19): siRNA sense strand
ucacgagugucacaaagaa

SEQ ID NO: 223776 - RNA, 19 nt, Homo sapiens
  misc_RNA (1)...(19): siRNA sense strand
caccagagcacucacauuu

SEQ ID NO: 223777 - RNA, 19 nt, Homo sapiens
  misc_RNA (1)...(19): siRNA sense strand
gaccuuggcugcagcuguu

SEQ ID NO: 223778 - RNA, 19 nt, Homo sapiens
  misc_RNA (1)...(19): siRNA sense strand
aaacuuggaaugugcaaua

SEQ ID NO: 223779 - RNA, 19 nt, Homo sapiens
  misc_RNA (1)...(19): siRNA sense strand
ucccaaagcuguuuuauaa

SEQ ID NO: 223780 - RNA, 19 nt, Homo sapiens
  misc_RNA (1)...(19): siRNA sense strand
ucagcaaacucuauaaagu

SEQ ID NO: 223781 - RNA, 19 nt, Homo sapiens
  misc_RNA (1)...(19): siRNA sense strand
ccacagacuucuacagaca

SEQ ID NO: 223782 - RNA, 19 nt, Homo sapiens
  misc_RNA (1)...(19): siRNA sense strand
gcacagcauucccugagau

SEQ ID NO: 223783 - RNA, 19 nt, Homo sapiens
  misc_RNA (1)...(19): siRNA sense strand
gcacuuaacguggcucauu

SEQ ID NO: 223784 - RNA, 19 nt, Homo sapiens
  misc_RNA (1)...(19): siRNA sense strand
gaugguggcugacgaaugc

SEQ ID NO: 223785 - RNA, 19 nt, Homo sapiens
  misc_RNA (1)...(19): siRNA sense strand
gaacagcacggaaaaguuu

SEQ ID NO: 223786 - RNA, 19 nt, Homo sapiens
  misc_RNA (1)...(19): siRNA sense strand
gaaggugauuaacauuugu

SEQ ID NO: 223787 - RNA, 19 nt, Homo sapiens
  misc_RNA (1)...(19): siRNA sense strand
aagaacgagugcucaauaa

SEQ ID NO: 223788 - RNA, 19 nt, Homo sapiens
  misc_RNA (1)...(19): siRNA sense strand
gugaggaacugugucauga

SEQ ID NO: 223789 - RNA, 19 nt, Homo sapiens
  misc_RNA (1)...(19): siRNA sense strand
gaaggacacaauauuucua

SEQ ID NO: 223790 - RNA, 19 nt, Homo sapiens
  misc_RNA (1)...(19): siRNA sense strand
gaaagucaguccggguaga

SEQ ID NO: 223791 - RNA, 19 nt, Homo sapiens
  misc_RNA (1)...(19): siRNA sense strand
cacagaauccuaaguauau

SEQ ID NO: 223792 - RNA, 19 nt, Homo sapiens
  misc_RNA (1)...(19): siRNA sense strand
aggacaagcugauccagua

SEQ ID NO: 223793 - RNA, 19 nt, Homo sapiens
  misc_RNA (1)...(19): siRNA sense strand
caacaggcacauuuauuga

SEQ ID NO: 223794 - RNA, 19 nt, Homo sapiens
  misc_RNA (1)...(19): siRNA sense strand
ggagugacaaggaaagaaa

SEQ ID NO: 223795 - RNA, 19 nt, Homo sapiens
  misc_RNA (1)...(19): siRNA sense strand
gcgacuaucuccucuccaa

SEQ ID NO: 223796 - RNA, 19 nt, Homo sapiens
  misc_RNA (1)...(19): siRNA sense strand
ggagagcccaccagaagaa

SEQ ID NO: 223797 - RNA, 19 nt, Homo sapiens
  misc_RNA (1)...(19): siRNA sense strand
acacacagaauccuaagua

SEQ ID NO: 223798 - RNA, 19 nt, Homo sapiens
  misc_RNA (1)...(19): siRNA sense strand
ccaaugauggcaacuguuu

SEQ ID NO: 223799 - RNA, 19 nt, Homo sapiens
  misc_RNA (1)...(19): siRNA sense strand
gaaguguguugaagagauc

SEQ ID NO: 223800 - RNA, 19 nt, Homo sapiens
  misc_RNA (1)...(19): siRNA sense strand
ggauguucuuucucagaua

SEQ ID NO: 223801 - RNA, 19 nt, Homo sapiens
  misc_RNA (1)...(19): siRNA sense strand
gccgcagcaucacuaauua

SEQ ID NO: 223802 - RNA, 19 nt, Homo sapiens
  misc_RNA (1)...(19): siRNA sense strand
gaaucgagaucggauguca

SEQ ID NO: 223803 - RNA, 19 nt, Homo sapiens
  misc_RNA (1)...(19): siRNA sense strand
ugaagcccuuggaguguua

SEQ ID NO: 223804 - RNA, 19 nt, Homo sapiens
  misc_RNA (1)...(19): siRNA sense strand
ggagcaaguugaaugaucu

SEQ ID NO: 223805 - RNA, 19 nt, Homo sapiens
  misc_RNA (1)...(19): siRNA sense strand
ggaaugugcaauagagaaa

SEQ ID NO: 223806 - RNA, 19 nt, Homo sapiens
  misc_RNA (1)...(19): siRNA sense strand
gaaugccucaacaaaguua

SEQ ID NO: 223807 - RNA, 19 nt, Homo sapiens
  misc_RNA (1)...(19): siRNA sense strand
gagcugugcuggcgagaag

SEQ ID NO: 223808 - RNA, 19 nt, Homo sapiens
  misc_RNA (1)...(19): siRNA sense strand
ggacgugaccaucauguac

SEQ ID NO: 223809 - RNA, 19 nt, Homo sapiens
  misc_RNA (1)...(19): siRNA sense strand
gagcugcacguuccuauac

SEQ ID NO: 223810 - RNA, 19 nt, Homo sapiens
  misc_RNA (1)...(19): siRNA sense strand
gcgccaacagccucuauga

SEQ ID NO: 223811 - RNA, 19 nt, Homo sapiens
  misc_RNA (1)...(19): siRNA sense strand
gcaagugcaagguguacug

SEQ ID NO: 223812 - RNA, 19 nt, Homo sapiens
  misc_RNA (1)...(19): siRNA sense strand
ggugugucuucccuggaua

SEQ ID NO: 223813 - RNA, 19 nt, Homo sapiens
  misc_RNA (1)...(19): siRNA sense strand
gggugugucuucccuggau

SEQ ID NO: 223814 - RNA, 19 nt, Homo sapiens
  misc_RNA (1)...(19): siRNA sense strand
gcgcuggacgugaccauca

SEQ ID NO: 223815 - RNA, 19 nt, Homo sapiens
  misc_RNA (1)...(19): siRNA sense strand
cgagcugcacguuccuaua

SEQ ID NO: 223816 - RNA, 19 nt, Homo sapiens
  misc_RNA (1)...(19): siRNA sense strand
caucgagugcuuccuuaug

SEQ ID NO: 223817 - RNA, 19 nt, Homo sapiens
  misc_RNA (1)...(19): siRNA sense strand
gacgugaccaucauguaca

SEQ ID NO: 223818 - RNA, 19 nt, Homo sapiens
  misc_RNA (1)...(19): siRNA sense strand
gagcugugcuggcgagaag

SEQ ID NO: 223819 - RNA, 19 nt, Homo sapiens
  misc_RNA (1)...(19): siRNA sense strand
ggacgugaccaucauguac

SEQ ID NO: 223820 - RNA, 19 nt, Homo sapiens
  misc_RNA (1)...(19): siRNA sense strand
gagcugcacguuccuauac

SEQ ID NO: 223821 - RNA, 19 nt, Homo sapiens
  misc_RNA (1)...(19): siRNA sense strand
gcgccaacagccucuauga

SEQ ID NO: 223822 - RNA, 19 nt, Homo sapiens
  misc_RNA (1)...(19): siRNA sense strand
gcaagugcaagguguacug

SEQ ID NO: 223823 - RNA, 19 nt, Homo sapiens
  misc_RNA (1)...(19): siRNA sense strand
ggugugucuucccuggaua

SEQ ID NO: 223824 - RNA, 19 nt, Homo sapiens
  misc_RNA (1)...(19): siRNA sense strand
gggugugucuucccuggau

SEQ ID NO: 223825 - RNA, 19 nt, Homo sapiens
  misc_RNA (1)...(19): siRNA sense strand
gcgcuggacgugaccauca

SEQ ID NO: 223826 - RNA, 19 nt, Homo sapiens
  misc_RNA (1)...(19): siRNA sense strand
cgagcugcacguuccuaua

SEQ ID NO: 223827 - RNA, 19 nt, Homo sapiens
  misc_RNA (1)...(19): siRNA sense strand
caucgagugcuuccuuaug

SEQ ID NO: 223828 - RNA, 19 nt, Homo sapiens
  misc_RNA (1)...(19): siRNA sense strand
gacgugaccaucauguaca

SEQ ID NO: 223829 - RNA, 19 nt, Homo sapiens
  misc_RNA (1)...(19): siRNA sense strand
gagcugugcuggcgagaag

SEQ ID NO: 223830 - RNA, 19 nt, Homo sapiens
  misc_RNA (1)...(19): siRNA sense strand
gagcugugcuggcgagaag

SEQ ID NO: 223831 - RNA, 19 nt, Homo sapiens
  misc_RNA (1)...(19): siRNA sense strand
ggacgugaccaucauguac

SEQ ID NO: 223832 - RNA, 19 nt, Homo sapiens
  misc_RNA (1)...(19): siRNA sense strand
gagcugcacguuccuauac

SEQ ID NO: 223833 - RNA, 19 nt, Homo sapiens
  misc_RNA (1)...(19): siRNA sense strand
gcgccaacagccucuauga

SEQ ID NO: 223834 - RNA, 19 nt, Homo sapiens
  misc_RNA (1)...(19): siRNA sense strand
gcaagugcaagguguacug

SEQ ID NO: 223835 - RNA, 19 nt, Homo sapiens
  misc_RNA (1)...(19): siRNA sense strand
ggugugucuucccuggaua

SEQ ID NO: 223836 - RNA, 19 nt, Homo sapiens
  misc_RNA (1)...(19): siRNA sense strand
gggugugucuucccuggau

SEQ ID NO: 223837 - RNA, 19 nt, Homo sapiens
  misc_RNA (1)...(19): siRNA sense strand
gcgcuggacgugaccauca

SEQ ID NO: 223838 - RNA, 19 nt, Homo sapiens
  misc_RNA (1)...(19): siRNA sense strand
cgagcugcacguuccuaua

SEQ ID NO: 223839 - RNA, 19 nt, Homo sapiens
  misc_RNA (1)...(19): siRNA sense strand
caucgagugcuuccuuaug

SEQ ID NO: 223840 - RNA, 19 nt, Homo sapiens
  misc_RNA (1)...(19): siRNA sense strand
gacgugaccaucauguaca

SEQ ID NO: 223841 - RNA, 19 nt, Homo sapiens
  misc_RNA (1)...(19): siRNA sense strand
gagcugugcuggcgagaag

SEQ ID NO: 223842 - RNA, 19 nt, Homo sapiens
  misc_RNA (1)...(19): siRNA sense strand
ggacgugaccaucauguac

SEQ ID NO: 223843 - RNA, 19 nt, Homo sapiens
  misc_RNA (1)...(19): siRNA sense strand
gagcugcacguuccuauac

SEQ ID NO: 223844 - RNA, 19 nt, Homo sapiens
  misc_RNA (1)...(19): siRNA sense strand
gcgccaacagccucuauga

SEQ ID NO: 223845 - RNA, 19 nt, Homo sapiens
  misc_RNA (1)...(19): siRNA sense strand
gcaagugcaagguguacug

SEQ ID NO: 223846 - RNA, 19 nt, Homo sapiens
  misc_RNA (1)...(19): siRNA sense strand
ggugugucuucccuggaua

SEQ ID NO: 223847 - RNA, 19 nt, Homo sapiens
  misc_RNA (1)...(19): siRNA sense strand
gggugugucuucccuggau

SEQ ID NO: 223848 - RNA, 19 nt, Homo sapiens
  misc_RNA (1)...(19): siRNA sense strand
gcgcuggacgugaccauca

SEQ ID NO: 223849 - RNA, 19 nt, Homo sapiens
  misc_RNA (1)...(19): siRNA sense strand
cgagcugcacguuccuaua

SEQ ID NO: 223850 - RNA, 19 nt, Homo sapiens
  misc_RNA (1)...(19): siRNA sense strand
caucgagugcuuccuuaug

SEQ ID NO: 223851 - RNA, 19 nt, Homo sapiens
  misc_RNA (1)...(19): siRNA sense strand
gacgugaccaucauguaca

SEQ ID NO: 223852 - RNA, 19 nt, Homo sapiens
  misc_RNA (1)...(19): siRNA sense strand
gagcugugcuggcgagaag

SEQ ID NO: 223853 - RNA, 19 nt, Homo sapiens
  misc_RNA (1)...(19): siRNA sense strand
ggacgugaccaucauguac

SEQ ID NO: 223854 - RNA, 19 nt, Homo sapiens
  misc_RNA (1)...(19): siRNA sense strand
gagcugcacguuccuauac

SEQ ID NO: 223855 - RNA, 19 nt, Homo sapiens
  misc_RNA (1)...(19): siRNA sense strand
gcgccaacagccucuauga

SEQ ID NO: 223856 - RNA, 19 nt, Homo sapiens
  misc_RNA (1)...(19): siRNA sense strand
gcaagugcaagguguacug

SEQ ID NO: 223857 - RNA, 19 nt, Homo sapiens
  misc_RNA (1)...(19): siRNA sense strand
ggugugucuucccuggaua

SEQ ID NO: 223858 - RNA, 19 nt, Homo sapiens
  misc_RNA (1)...(19): siRNA sense strand
gggugugucuucccuggau

SEQ ID NO: 223859 - RNA, 19 nt, Homo sapiens
  misc_RNA (1)...(19): siRNA sense strand
gcgcuggacgugaccauca

SEQ ID NO: 223860 - RNA, 19 nt, Homo sapiens
  misc_RNA (1)...(19): siRNA sense strand
cgagcugcacguuccuaua

SEQ ID NO: 223861 - RNA, 19 nt, Homo sapiens
  misc_RNA (1)...(19): siRNA sense strand
caucgagugcuuccuuaug

SEQ ID NO: 223862 - RNA, 19 nt, Homo sapiens
  misc_RNA (1)...(19): siRNA sense strand
gacgugaccaucauguaca

SEQ ID NO: 223863 - RNA, 19 nt, Homo sapiens
  misc_RNA (1)...(19): siRNA sense strand
gagcugugcuggcgagaag

SEQ ID NO: 223864 - RNA, 19 nt, Homo sapiens
  misc_RNA (1)...(19): siRNA sense strand
gagcugugcuggcgagaag

SEQ ID NO: 223865 - RNA, 19 nt, Homo sapiens
  misc_RNA (1)...(19): siRNA sense strand
ggacgugaccaucauguac

SEQ ID NO: 223866 - RNA, 19 nt, Homo sapiens
  misc_RNA (1)...(19): siRNA sense strand
gagcugcacguuccuauac

SEQ ID NO: 223867 - RNA, 19 nt, Homo sapiens
  misc_RNA (1)...(19): siRNA sense strand
gcgccaacagccucuauga

SEQ ID NO: 223868 - RNA, 19 nt, Homo sapiens
  misc_RNA (1)...(19): siRNA sense strand
gcaagugcaagguguacug

SEQ ID NO: 223869 - RNA, 19 nt, Homo sapiens
  misc_RNA (1)...(19): siRNA sense strand
ggugugucuucccuggaua

SEQ ID NO: 223870 - RNA, 19 nt, Homo sapiens
  misc_RNA (1)...(19): siRNA sense strand
gggugugucuucccuggau

SEQ ID NO: 223871 - RNA, 19 nt, Homo sapiens
  misc_RNA (1)...(19): siRNA sense strand
gcgcuggacgugaccauca

SEQ ID NO: 223872 - RNA, 19 nt, Homo sapiens
  misc_RNA (1)...(19): siRNA sense strand
cgagcugcacguuccuaua

SEQ ID NO: 223873 - RNA, 19 nt, Homo sapiens
  misc_RNA (1)...(19): siRNA sense strand
caucgagugcuuccuuaug

SEQ ID NO: 223874 - RNA, 19 nt, Homo sapiens
  misc_RNA (1)...(19): siRNA sense strand
gacgugaccaucauguaca

SEQ ID NO: 223875 - RNA, 19 nt, Homo sapiens
  misc_RNA (1)...(19): siRNA sense strand
gagcugugcuggcgagaag

SEQ ID NO: 223876 - RNA, 19 nt, Homo sapiens
  misc_RNA (1)...(19): siRNA sense strand
ggacgugaccaucauguac

SEQ ID NO: 223877 - RNA, 19 nt, Homo sapiens
  misc_RNA (1)...(19): siRNA sense strand
gagcugcacguuccuauac

SEQ ID NO: 223878 - RNA, 19 nt, Homo sapiens
  misc_RNA (1)...(19): siRNA sense strand
gcgccaacagccucuauga

SEQ ID NO: 223879 - RNA, 19 nt, Homo sapiens
  misc_RNA (1)...(19): siRNA sense strand
gcaagugcaagguguacug

SEQ ID NO: 223880 - RNA, 19 nt, Homo sapiens
  misc_RNA (1)...(19): siRNA sense strand
ggugugucuucccuggaua

SEQ ID NO: 223881 - RNA, 19 nt, Homo sapiens
  misc_RNA (1)...(19): siRNA sense strand
gggugugucuucccuggau

SEQ ID NO: 223882 - RNA, 19 nt, Homo sapiens
  misc_RNA (1)...(19): siRNA sense strand
gcgcuggacgugaccauca

SEQ ID NO: 223883 - RNA, 19 nt, Homo sapiens
  misc_RNA (1)...(19): siRNA sense strand
cgagcugcacguuccuaua

SEQ ID NO: 223884 - RNA, 19 nt, Homo sapiens
  misc_RNA (1)...(19): siRNA sense strand
caucgagugcuuccuuaug

SEQ ID NO: 223885 - RNA, 19 nt, Homo sapiens
  misc_RNA (1)...(19): siRNA sense strand
gacgugaccaucauguaca

SEQ ID NO: 223886 - RNA, 19 nt, Homo sapiens
  misc_RNA (1)...(19): siRNA sense strand
gagcugugcuggcgagaag

SEQ ID NO: 223887 - RNA, 19 nt, Homo sapiens
  misc_RNA (1)...(19): siRNA sense strand
ggacgugaccaucauguac

SEQ ID NO: 223888 - RNA, 19 nt, Homo sapiens
  misc_RNA (1)...(19): siRNA sense strand
gagcugcacguuccuauac

SEQ ID NO: 223889 - RNA, 19 nt, Homo sapiens
  misc_RNA (1)...(19): siRNA sense strand
gcgccaacagccucuauga

SEQ ID NO: 223890 - RNA, 19 nt, Homo sapiens
  misc_RNA (1)...(19): siRNA sense strand
gcaagugcaagguguacug

SEQ ID NO: 223891 - RNA, 19 nt, Homo sapiens
  misc_RNA (1)...(19): siRNA sense strand
ggugugucuucccuggaua

SEQ ID NO: 223892 - RNA, 19 nt, Homo sapiens
  misc_RNA (1)...(19): siRNA sense strand
gggugugucuucccuggau

SEQ ID NO: 223893 - RNA, 19 nt, Homo sapiens
  misc_RNA (1)...(19): siRNA sense strand
gcgcuggacgugaccauca

SEQ ID NO: 223894 - RNA, 19 nt, Homo sapiens
  misc_RNA (1)...(19): siRNA sense strand
cgagcugcacguuccuaua

SEQ ID NO: 223895 - RNA, 19 nt, Homo sapiens
  misc_RNA (1)...(19): siRNA sense strand
caucgagugcuuccuuaug

SEQ ID NO: 223896 - RNA, 19 nt, Homo sapiens
  misc_RNA (1)...(19): siRNA sense strand
gacgugaccaucauguaca

SEQ ID NO: 223897 - RNA, 19 nt, Homo sapiens
  misc_RNA (1)...(19): siRNA sense strand
gagcugugcuggcgagaag

SEQ ID NO: 223898 - RNA, 19 nt, Homo sapiens
  misc_RNA (1)...(19): siRNA sense strand
gagcugugcuggcgagaag

SEQ ID NO: 223899 - RNA, 19 nt, Homo sapiens
  misc_RNA (1)...(19): siRNA sense strand
ggacgugaccaucauguac

SEQ ID NO: 223900 - RNA, 19 nt, Homo sapiens
  misc_RNA (1)...(19): siRNA sense strand
gagcugcacguuccuauac

SEQ ID NO: 223901 - RNA, 19 nt, Homo sapiens
  misc_RNA (1)...(19): siRNA sense strand
gcgccaacagccucuauga

SEQ ID NO: 223902 - RNA, 19 nt, Homo sapiens
  misc_RNA (1)...(19): siRNA sense strand
gcaagugcaagguguacug

SEQ ID NO: 223903 - RNA, 19 nt, Homo sapiens
  misc_RNA (1)...(19): siRNA sense strand
ggugugucuucccuggaua

SEQ ID NO: 223904 - RNA, 19 nt, Homo sapiens
  misc_RNA (1)...(19): siRNA sense strand
gggugugucuucccuggau

SEQ ID NO: 223905 - RNA, 19 nt, Homo sapiens
  misc_RNA (1)...(19): siRNA sense strand
gcgcuggacgugaccauca

SEQ ID NO: 223906 - RNA, 19 nt, Homo sapiens
  misc_RNA (1)...(19): siRNA sense strand
cgagcugcacguuccuaua

SEQ ID NO: 223907 - RNA, 19 nt, Homo sapiens
  misc_RNA (1)...(19): siRNA sense strand
caucgagugcuuccuuaug

SEQ ID NO: 223908 - RNA, 19 nt, Homo sapiens
  misc_RNA (1)...(19): siRNA sense strand
gacgugaccaucauguaca

SEQ ID NO: 223909 - RNA, 19 nt, Homo sapiens
  misc_RNA (1)...(19): siRNA sense strand
gcagugggcugacauauau

SEQ ID NO: 223910 - RNA, 19 nt, Homo sapiens
  misc_RNA (1)...(19): siRNA sense strand
gcaggagacucaaagauuu

SEQ ID NO: 223911 - RNA, 19 nt, Homo sapiens
  misc_RNA (1)...(19): siRNA sense strand
ucagagaaaccuuuaauca

SEQ ID NO: 223912 - RNA, 19 nt, Homo sapiens
  misc_RNA (1)...(19): siRNA sense strand
gacacucacucggcgaaua

SEQ ID NO: 223913 - RNA, 19 nt, Homo sapiens
  misc_RNA (1)...(19): siRNA sense strand
gaacuucauccguccuuug

SEQ ID NO: 223914 - RNA, 19 nt, Homo sapiens
  misc_RNA (1)...(19): siRNA sense strand
ccacggagccugcaacauc

SEQ ID NO: 223915 - RNA, 19 nt, Homo sapiens
  misc_RNA (1)...(19): siRNA sense strand
gaaaauagcagagagauuc

SEQ ID NO: 223916 - RNA, 19 nt, Homo sapiens
  misc_RNA (1)...(19): siRNA sense strand
gggcugacauauauuuauc

SEQ ID NO: 223917 - RNA, 19 nt, Homo sapiens
  misc_RNA (1)...(19): siRNA sense strand
ucaaagauuuucccuguaa

SEQ ID NO: 223918 - RNA, 19 nt, Homo sapiens
  misc_RNA (1)...(19): siRNA sense strand
gagaugcugguguucauuu

SEQ ID NO: 223919 - RNA, 19 nt, Homo sapiens
  misc_RNA (1)...(19): siRNA sense strand
aagcagugguucagagaaa

SEQ ID NO: 223920 - RNA, 19 nt, Homo sapiens
  misc_RNA (1)...(19): siRNA sense strand
uuaaucaccucuuugcaau

SEQ ID NO: 223921 - RNA, 19 nt, Homo sapiens
  misc_RNA (1)...(19): siRNA sense strand
caucauuucagacaaguuu

SEQ ID NO: 223922 - RNA, 19 nt, Homo sapiens
  misc_RNA (1)...(19): siRNA sense strand
aaucaccucuuugcaauug

SEQ ID NO: 223923 - RNA, 19 nt, Homo sapiens
  misc_RNA (1)...(19): siRNA sense strand
ccagauaccaccagugaug

SEQ ID NO: 223924 - RNA, 19 nt, Homo sapiens
  misc_RNA (1)...(19): siRNA sense strand
ggcagugggcugacauaua

SEQ ID NO: 223925 - RNA, 19 nt, Homo sapiens
  misc_RNA (1)...(19): siRNA sense strand
gcuuauuccucacacuuau

SEQ ID NO: 223926 - RNA, 19 nt, Homo sapiens
  misc_RNA (1)...(19): siRNA sense strand
ggaacuucauccguccuuu

SEQ ID NO: 223927 - RNA, 19 nt, Homo sapiens
  misc_RNA (1)...(19): siRNA sense strand
cagcacggauugcaguugu

SEQ ID NO: 223928 - RNA, 19 nt, Homo sapiens
  misc_RNA (1)...(19): siRNA sense strand
ccagauacacccauucaca

SEQ ID NO: 223929 - RNA, 19 nt, Homo sapiens
  misc_RNA (1)...(19): siRNA sense strand
gccaaguccuccaaguuca

SEQ ID NO: 223930 - RNA, 19 nt, Homo sapiens
  misc_RNA (1)...(19): siRNA sense strand
ggccaaguccuccaaguuc

SEQ ID NO: 223931 - RNA, 19 nt, Homo sapiens
  misc_RNA (1)...(19): siRNA sense strand
ggacacagcacggauugca

SEQ ID NO: 223932 - RNA, 19 nt, Homo sapiens
  misc_RNA (1)...(19): siRNA sense strand
gaagcagugguucagagaa

SEQ ID NO: 223933 - RNA, 19 nt, Homo sapiens
  misc_RNA (1)...(19): siRNA sense strand
uagaagaccugugggaacu

SEQ ID NO: 223934 - RNA, 19 nt, Homo sapiens
  misc_RNA (1)...(19): siRNA sense strand
guucagagaaaccuuuaau

SEQ ID NO: 223935 - RNA, 19 nt, Homo sapiens
  misc_RNA (1)...(19): siRNA sense strand
gggccaaguccuccaaguu

SEQ ID NO: 223936 - RNA, 19 nt, Homo sapiens
  misc_RNA (1)...(19): siRNA sense strand
gacaaguuuacuccagaua

SEQ ID NO: 223937 - RNA, 19 nt, Homo sapiens
  misc_RNA (1)...(19): siRNA sense strand
aaccuuuaaucaccucuuu

SEQ ID NO: 223938 - RNA, 19 nt, Homo sapiens
  misc_RNA (1)...(19): siRNA sense strand
cacggagccugcaacauca

SEQ ID NO: 223939 - RNA, 19 nt, Homo sapiens
  misc_RNA (1)...(19): siRNA sense strand
gggagaaggugggcuugag

SEQ ID NO: 223940 - RNA, 19 nt, Homo sapiens
  misc_RNA (1)...(19): siRNA sense strand
ugcaggagacucaaagauu

SEQ ID NO: 223941 - RNA, 19 nt, Homo sapiens
  misc_RNA (1)...(19): siRNA sense strand
agacaaguuuacuccagau

SEQ ID NO: 223942 - RNA, 19 nt, Homo sapiens
  misc_RNA (1)...(19): siRNA sense strand
gcgugcgacugcagacaga

SEQ ID NO: 223943 - RNA, 19 nt, Homo sapiens
  misc_RNA (1)...(19): siRNA sense strand
gcagaagcagugguucaga

SEQ ID NO: 223944 - RNA, 19 nt, Homo sapiens
  misc_RNA (1)...(19): siRNA sense strand
ggagaugcugguguucauu

SEQ ID NO: 223945 - RNA, 19 nt, Homo sapiens
  misc_RNA (1)...(19): siRNA sense strand
aauagcagagagauucuuu

SEQ ID NO: 223946 - RNA, 19 nt, Homo sapiens
  misc_RNA (1)...(19): siRNA sense strand
cauguaacccuagguggaa

SEQ ID NO: 223947 - RNA, 19 nt, Homo sapiens
  misc_RNA (1)...(19): siRNA sense strand
cuucauccguccuuugaca

SEQ ID NO: 223948 - RNA, 19 nt, Homo sapiens
  misc_RNA (1)...(19): siRNA sense strand
caacuguucaggccuugga

SEQ ID NO: 223949 - RNA, 19 nt, Homo sapiens
  misc_RNA (1)...(19): siRNA sense strand
gagauucuuucccgaugcu

SEQ ID NO: 223950 - RNA, 19 nt, Homo sapiens
  misc_RNA (1)...(19): siRNA sense strand
caaguuuacuccagauacc

SEQ ID NO: 223951 - RNA, 19 nt, Homo sapiens
  misc_RNA (1)...(19): siRNA sense strand
ccguuaccaucauuucaga

SEQ ID NO: 223952 - RNA, 19 nt, Homo sapiens
  misc_RNA (1)...(19): siRNA sense strand
uaccaucauuucagacaag

SEQ ID NO: 223953 - RNA, 19 nt, Homo sapiens
  misc_RNA (1)...(19): siRNA sense strand
ucagagacaggcucaugga

SEQ ID NO: 223954 - RNA, 19 nt, Homo sapiens
  misc_RNA (1)...(19): siRNA sense strand
ucacucggcgaauagaaga

SEQ ID NO: 223955 - RNA, 19 nt, Homo sapiens
  misc_RNA (1)...(19): siRNA sense strand
uuuaaucaccucuuugcaa

SEQ ID NO: 223956 - RNA, 19 nt, Homo sapiens
  misc_RNA (1)...(19): siRNA sense strand
cagagaaaccuuuaaucac

SEQ ID NO: 223957 - RNA, 19 nt, Homo sapiens
  misc_RNA (1)...(19): siRNA sense strand
ugcagaagcuggagaugcu

SEQ ID NO: 223958 - RNA, 19 nt, Homo sapiens
  misc_RNA (1)...(19): siRNA sense strand
cuccagauaccaccaguga

SEQ ID NO: 223959 - RNA, 19 nt, Homo sapiens
  misc_RNA (1)...(19): siRNA sense strand
aaaggggacuggaaucugu

SEQ ID NO: 223960 - RNA, 19 nt, Homo sapiens
  misc_RNA (1)...(19): siRNA sense strand
gugggcugacauauauuua

SEQ ID NO: 223961 - RNA, 19 nt, Homo sapiens
  misc_RNA (1)...(19): siRNA sense strand
agaugcugguguucauuug

SEQ ID NO: 223962 - RNA, 19 nt, Homo sapiens
  misc_RNA (1)...(19): siRNA sense strand
uggagaugcugguguucau

SEQ ID NO: 223963 - RNA, 19 nt, Homo sapiens
  misc_RNA (1)...(19): siRNA sense strand
acacgcagaagcagugguu

SEQ ID NO: 223964 - RNA, 19 nt, Homo sapiens
  misc_RNA (1)...(19): siRNA sense strand
guggcagccggaaugcuua

SEQ ID NO: 223965 - RNA, 19 nt, Homo sapiens
  misc_RNA (1)...(19): siRNA sense strand
gcagugggcugacauauau

SEQ ID NO: 223966 - RNA, 19 nt, Homo sapiens
  misc_RNA (1)...(19): siRNA sense strand
gcaggagacucaaagauuu

SEQ ID NO: 223967 - RNA, 19 nt, Homo sapiens
  misc_RNA (1)...(19): siRNA sense strand
ucagagaaaccuuuaauca

SEQ ID NO: 223968 - RNA, 19 nt, Homo sapiens
  misc_RNA (1)...(19): siRNA sense strand
gacacucacucggcgaaua

SEQ ID NO: 223969 - RNA, 19 nt, Homo sapiens
  misc_RNA (1)...(19): siRNA sense strand
gaacuucauccguccuuug

SEQ ID NO: 223970 - RNA, 19 nt, Homo sapiens
  misc_RNA (1)...(19): siRNA sense strand
ccacggagccugcaacauc

SEQ ID NO: 223971 - RNA, 19 nt, Homo sapiens
  misc_RNA (1)...(19): siRNA sense strand
gaaaauagcagagagauuc

SEQ ID NO: 223972 - RNA, 19 nt, Homo sapiens
  misc_RNA (1)...(19): siRNA sense strand
gggcugacauauauuuauc

SEQ ID NO: 223973 - RNA, 19 nt, Homo sapiens
  misc_RNA (1)...(19): siRNA sense strand
ucaaagauuuucccuguaa

SEQ ID NO: 223974 - RNA, 19 nt, Homo sapiens
  misc_RNA (1)...(19): siRNA sense strand
gagaugcugguguucauuu

SEQ ID NO: 223975 - RNA, 19 nt, Homo sapiens
  misc_RNA (1)...(19): siRNA sense strand
aagcagugguucagagaaa

SEQ ID NO: 223976 - RNA, 19 nt, Homo sapiens
  misc_RNA (1)...(19): siRNA sense strand
uuaaucaccucuuugcaau

SEQ ID NO: 223977 - RNA, 19 nt, Homo sapiens
  misc_RNA (1)...(19): siRNA sense strand
caucauuucagacaaguuu

SEQ ID NO: 223978 - RNA, 19 nt, Homo sapiens
  misc_RNA (1)...(19): siRNA sense strand
aaucaccucuuugcaauug

SEQ ID NO: 223979 - RNA, 19 nt, Homo sapiens
  misc_RNA (1)...(19): siRNA sense strand
ccagauaccaccagugaug

SEQ ID NO: 223980 - RNA, 19 nt, Homo sapiens
  misc_RNA (1)...(19): siRNA sense strand
ggcagugggcugacauaua

SEQ ID NO: 223981 - RNA, 19 nt, Homo sapiens
  misc_RNA (1)...(19): siRNA sense strand
gcuuauuccucacacuuau

SEQ ID NO: 223982 - RNA, 19 nt, Homo sapiens
  misc_RNA (1)...(19): siRNA sense strand
ggaacuucauccguccuuu

SEQ ID NO: 223983 - RNA, 19 nt, Homo sapiens
  misc_RNA (1)...(19): siRNA sense strand
cagcacggauugcaguugu

SEQ ID NO: 223984 - RNA, 19 nt, Homo sapiens
  misc_RNA (1)...(19): siRNA sense strand
ccagauacacccauucaca

SEQ ID NO: 223985 - RNA, 19 nt, Homo sapiens
  misc_RNA (1)...(19): siRNA sense strand
gccaaguccuccaaguuca

SEQ ID NO: 223986 - RNA, 19 nt, Homo sapiens
  misc_RNA (1)...(19): siRNA sense strand
ggccaaguccuccaaguuc

SEQ ID NO: 223987 - RNA, 19 nt, Homo sapiens
  misc_RNA (1)...(19): siRNA sense strand
ggacacagcacggauugca

SEQ ID NO: 223988 - RNA, 19 nt, Homo sapiens
  misc_RNA (1)...(19): siRNA sense strand
gaagcagugguucagagaa

SEQ ID NO: 223989 - RNA, 19 nt, Homo sapiens
  misc_RNA (1)...(19): siRNA sense strand
uagaagaccugugggaacu

SEQ ID NO: 223990 - RNA, 19 nt, Homo sapiens
  misc_RNA (1)...(19): siRNA sense strand
guucagagaaaccuuuaau

SEQ ID NO: 223991 - RNA, 19 nt, Homo sapiens
  misc_RNA (1)...(19): siRNA sense strand
gggccaaguccuccaaguu

SEQ ID NO: 223992 - RNA, 19 nt, Homo sapiens
  misc_RNA (1)...(19): siRNA sense strand
gacaaguuuacuccagaua

SEQ ID NO: 223993 - RNA, 19 nt, Homo sapiens
  misc_RNA (1)...(19): siRNA sense strand
aaccuuuaaucaccucuuu

SEQ ID NO: 223994 - RNA, 19 nt, Homo sapiens
  misc_RNA (1)...(19): siRNA sense strand
cacggagccugcaacauca

SEQ ID NO: 223995 - RNA, 19 nt, Homo sapiens
  misc_RNA (1)...(19): siRNA sense strand
gggagaaggugggcuugag

SEQ ID NO: 223996 - RNA, 19 nt, Homo sapiens
  misc_RNA (1)...(19): siRNA sense strand
ugcaggagacucaaagauu

SEQ ID NO: 223997 - RNA, 19 nt, Homo sapiens
  misc_RNA (1)...(19): siRNA sense strand
agacaaguuuacuccagau

SEQ ID NO: 223998 - RNA, 19 nt, Homo sapiens
  misc_RNA (1)...(19): siRNA sense strand
gcgugcgacugcagacaga

SEQ ID NO: 223999 - RNA, 19 nt, Homo sapiens
  misc_RNA (1)...(19): siRNA sense strand
gcagaagcagugguucaga

SEQ ID NO: 224000 - RNA, 19 nt, Homo sapiens
  misc_RNA (1)...(19): siRNA sense strand
ggagaugcugguguucauu

SEQ ID NO: 224001 - RNA, 19 nt, Homo sapiens
  misc_RNA (1)...(19): siRNA sense strand
aauagcagagagauucuuu

SEQ ID NO: 224002 - RNA, 19 nt, Homo sapiens
  misc_RNA (1)...(19): siRNA sense strand
cauguaacccuagguggaa

SEQ ID NO: 224003 - RNA, 19 nt, Homo sapiens
  misc_RNA (1)...(19): siRNA sense strand
cuucauccguccuuugaca

SEQ ID NO: 224004 - RNA, 19 nt, Homo sapiens
  misc_RNA (1)...(19): siRNA sense strand
caacuguucaggccuugga

SEQ ID NO: 224005 - RNA, 19 nt, Homo sapiens
  misc_RNA (1)...(19): siRNA sense strand
gagauucuuucccgaugcu

SEQ ID NO: 224006 - RNA, 19 nt, Homo sapiens
  misc_RNA (1)...(19): siRNA sense strand
caaguuuacuccagauacc

SEQ ID NO: 224007 - RNA, 19 nt, Homo sapiens
  misc_RNA (1)...(19): siRNA sense strand
ccguuaccaucauuucaga

SEQ ID NO: 224008 - RNA, 19 nt, Homo sapiens
  misc_RNA (1)...(19): siRNA sense strand
uaccaucauuucagacaag

SEQ ID NO: 224009 - RNA, 19 nt, Homo sapiens
  misc_RNA (1)...(19): siRNA sense strand
ucagagacaggcucaugga

SEQ ID NO: 224010 - RNA, 19 nt, Homo sapiens
  misc_RNA (1)...(19): siRNA sense strand
ucacucggcgaauagaaga

SEQ ID NO: 224011 - RNA, 19 nt, Homo sapiens
  misc_RNA (1)...(19): siRNA sense strand
uuuaaucaccucuuugcaa

SEQ ID NO: 224012 - RNA, 19 nt, Homo sapiens
  misc_RNA (1)...(19): siRNA sense strand
cagagaaaccuuuaaucac

SEQ ID NO: 224013 - RNA, 19 nt, Homo sapiens
  misc_RNA (1)...(19): siRNA sense strand
ugcagaagcuggagaugcu

SEQ ID NO: 224014 - RNA, 19 nt, Homo sapiens
  misc_RNA (1)...(19): siRNA sense strand
cuccagauaccaccaguga

SEQ ID NO: 224015 - RNA, 19 nt, Homo sapiens
  misc_RNA (1)...(19): siRNA sense strand
aaaggggacuggaaucugu

SEQ ID NO: 224016 - RNA, 19 nt, Homo sapiens
  misc_RNA (1)...(19): siRNA sense strand
gugggcugacauauauuua

SEQ ID NO: 224017 - RNA, 19 nt, Homo sapiens
  misc_RNA (1)...(19): siRNA sense strand
agaugcugguguucauuug

SEQ ID NO: 224018 - RNA, 19 nt, Homo sapiens
  misc_RNA (1)...(19): siRNA sense strand
uggagaugcugguguucau

SEQ ID NO: 224019 - RNA, 19 nt, Homo sapiens
  misc_RNA (1)...(19): siRNA sense strand
acacgcagaagcagugguu

SEQ ID NO: 224020 - RNA, 19 nt, Homo sapiens
  misc_RNA (1)...(19): siRNA sense strand
guggcagccggaaugcuua

SEQ ID NO: 224021 - RNA, 19 nt, Homo sapiens
  misc_RNA (1)...(19): siRNA sense strand
gagcugugcuggcgagaag

SEQ ID NO: 224022 - RNA, 19 nt, Homo sapiens
  misc_RNA (1)...(19): siRNA sense strand
ggacgugaccaucauguac

SEQ ID NO: 224023 - RNA, 19 nt, Homo sapiens
  misc_RNA (1)...(19): siRNA sense strand
gagcugcacguuccuauac

SEQ ID NO: 224024 - RNA, 19 nt, Homo sapiens
  misc_RNA (1)...(19): siRNA sense strand
gcgccaacagccucuauga

SEQ ID NO: 224025 - RNA, 19 nt, Homo sapiens
  misc_RNA (1)...(19): siRNA sense strand
gcaagugcaagguguacug

SEQ ID NO: 224026 - RNA, 19 nt, Homo sapiens
  misc_RNA (1)...(19): siRNA sense strand
ggugugucuucccuggaua

SEQ ID NO: 224027 - RNA, 19 nt, Homo sapiens
  misc_RNA (1)...(19): siRNA sense strand
gggugugucuucccuggau

SEQ ID NO: 224028 - RNA, 19 nt, Homo sapiens
  misc_RNA (1)...(19): siRNA sense strand
gcgcuggacgugaccauca

SEQ ID NO: 224029 - RNA, 19 nt, Homo sapiens
  misc_RNA (1)...(19): siRNA sense strand
cgagcugcacguuccuaua

SEQ ID NO: 224030 - RNA, 19 nt, Homo sapiens
  misc_RNA (1)...(19): siRNA sense strand
caucgagugcuuccuuaug

SEQ ID NO: 224031 - RNA, 19 nt, Homo sapiens
  misc_RNA (1)...(19): siRNA sense strand
gacgugaccaucauguaca

SEQ ID NO: 224032 - RNA, 19 nt, Homo sapiens
  misc_RNA (1)...(19): siRNA sense strand
gagcugugcuggcgagaag

SEQ ID NO: 224033 - RNA, 19 nt, Homo sapiens
  misc_RNA (1)...(19): siRNA sense strand
ggacgugaccaucauguac

SEQ ID NO: 224034 - RNA, 19 nt, Homo sapiens
  misc_RNA (1)...(19): siRNA sense strand
gagcugcacguuccuauac

SEQ ID NO: 224035 - RNA, 19 nt, Homo sapiens
  misc_RNA (1)...(19): siRNA sense strand
gcgccaacagccucuauga

SEQ ID NO: 224036 - RNA, 19 nt, Homo sapiens
  misc_RNA (1)...(19): siRNA sense strand
gcaagugcaagguguacug

SEQ ID NO: 224037 - RNA, 19 nt, Homo sapiens
  misc_RNA (1)...(19): siRNA sense strand
ggugugucuucccuggaua

SEQ ID NO: 224038 - RNA, 19 nt, Homo sapiens
  misc_RNA (1)...(19): siRNA sense strand
gggugugucuucccuggau

SEQ ID NO: 224039 - RNA, 19 nt, Homo sapiens
  misc_RNA (1)...(19): siRNA sense strand
gcgcuggacgugaccauca

SEQ ID NO: 224040 - RNA, 19 nt, Homo sapiens
  misc_RNA (1)...(19): siRNA sense strand
cgagcugcacguuccuaua

SEQ ID NO: 224041 - RNA, 19 nt, Homo sapiens
  misc_RNA (1)...(19): siRNA sense strand
caucgagugcuuccuuaug

SEQ ID NO: 224042 - RNA, 19 nt, Homo sapiens
  misc_RNA (1)...(19): siRNA sense strand
gacgugaccaucauguaca

SEQ ID NO: 224043 - RNA, 19 nt, Homo sapiens
  misc_RNA (1)...(19): siRNA sense strand
gagcugugcuggcgagaag

SEQ ID NO: 224044 - RNA, 19 nt, Homo sapiens
  misc_RNA (1)...(19): siRNA sense strand
gagcugugcuggcgagaag

SEQ ID NO: 224045 - RNA, 19 nt, Homo sapiens
  misc_RNA (1)...(19): siRNA sense strand
ggacgugaccaucauguac

SEQ ID NO: 224046 - RNA, 19 nt, Homo sapiens
  misc_RNA (1)...(19): siRNA sense strand
gagcugcacguuccuauac

SEQ ID NO: 224047 - RNA, 19 nt, Homo sapiens
  misc_RNA (1)...(19): siRNA sense strand
gcgccaacagccucuauga

SEQ ID NO: 224048 - RNA, 19 nt, Homo sapiens
  misc_RNA (1)...(19): siRNA sense strand
gcaagugcaagguguacug

SEQ ID NO: 224049 - RNA, 19 nt, Homo sapiens
  misc_RNA (1)...(19): siRNA sense strand
ggugugucuucccuggaua

SEQ ID NO: 224050 - RNA, 19 nt, Homo sapiens
  misc_RNA (1)...(19): siRNA sense strand
gggugugucuucccuggau

SEQ ID NO: 224051 - RNA, 19 nt, Homo sapiens
  misc_RNA (1)...(19): siRNA sense strand
gcgcuggacgugaccauca

SEQ ID NO: 224052 - RNA, 19 nt, Homo sapiens
  misc_RNA (1)...(19): siRNA sense strand
cgagcugcacguuccuaua

SEQ ID NO: 224053 - RNA, 19 nt, Homo sapiens
  misc_RNA (1)...(19): siRNA sense strand
caucgagugcuuccuuaug

SEQ ID NO: 224054 - RNA, 19 nt, Homo sapiens
  misc_RNA (1)...(19): siRNA sense strand
gacgugaccaucauguaca

SEQ ID NO: 224055 - RNA, 19 nt, Homo sapiens
  misc_RNA (1)...(19): siRNA sense strand
gaaagaaacuacaagaaga

SEQ ID NO: 224056 - RNA, 19 nt, Homo sapiens
  misc_RNA (1)...(19): siRNA sense strand
gaaagaaaguggccauugu

SEQ ID NO: 224057 - RNA, 19 nt, Homo sapiens
  misc_RNA (1)...(19): siRNA sense strand
gaaaguccuuaguggaaua

SEQ ID NO: 224058 - RNA, 19 nt, Homo sapiens
  misc_RNA (1)...(19): siRNA sense strand
gacaagcacucauagauau

SEQ ID NO: 224059 - RNA, 19 nt, Homo sapiens
  misc_RNA (1)...(19): siRNA sense strand
gcaaaggccaugaauauug

SEQ ID NO: 224060 - RNA, 19 nt, Homo sapiens
  misc_RNA (1)...(19): siRNA sense strand
uagacucacugcugaauua

SEQ ID NO: 224061 - RNA, 19 nt, Homo sapiens
  misc_RNA (1)...(19): siRNA sense strand
gaaaggcuguggaaacugu

SEQ ID NO: 224062 - RNA, 19 nt, Homo sapiens
  misc_RNA (1)...(19): siRNA sense strand
gaacgaggacucaagcuuu

SEQ ID NO: 224063 - RNA, 19 nt, Homo sapiens
  misc_RNA (1)...(19): siRNA sense strand
gcuguccucuuccauaaua

SEQ ID NO: 224064 - RNA, 19 nt, Homo sapiens
  misc_RNA (1)...(19): siRNA sense strand
gaaaguggccauuguagga

SEQ ID NO: 224065 - RNA, 19 nt, Homo sapiens
  misc_RNA (1)...(19): siRNA sense strand
gcacacagauugucaacag

SEQ ID NO: 224066 - RNA, 19 nt, Homo sapiens
  misc_RNA (1)...(19): siRNA sense strand
gaaauugaccaagcagaua

SEQ ID NO: 224067 - RNA, 19 nt, Homo sapiens
  misc_RNA (1)...(19): siRNA sense strand
gcagguacccuuacuguug

SEQ ID NO: 224068 - RNA, 19 nt, Homo sapiens
  misc_RNA (1)...(19): siRNA sense strand
caaaugcugugcccaguug

SEQ ID NO: 224069 - RNA, 19 nt, Homo sapiens
  misc_RNA (1)...(19): siRNA sense strand
gcacagagauaugauggau

SEQ ID NO: 224070 - RNA, 19 nt, Homo sapiens
  misc_RNA (1)...(19): siRNA sense strand
caaaggccaugaauauugu

SEQ ID NO: 224071 - RNA, 19 nt, Homo sapiens
  misc_RNA (1)...(19): siRNA sense strand
gcuauuauuucgcuucuau

SEQ ID NO: 224072 - RNA, 19 nt, Homo sapiens
  misc_RNA (1)...(19): siRNA sense strand
caaaggcucuccagguaug

SEQ ID NO: 224073 - RNA, 19 nt, Homo sapiens
  misc_RNA (1)...(19): siRNA sense strand
gauaugaagcacagagaua

SEQ ID NO: 224074 - RNA, 19 nt, Homo sapiens
  misc_RNA (1)...(19): siRNA sense strand
gugguucccuucauguuua

SEQ ID NO: 224075 - RNA, 19 nt, Homo sapiens
  misc_RNA (1)...(19): siRNA sense strand
gcaaugcuuucuuaugugu

SEQ ID NO: 224076 - RNA, 19 nt, Homo sapiens
  misc_RNA (1)...(19): siRNA sense strand
gugcaaaggccaugaauau

SEQ ID NO: 224077 - RNA, 19 nt, Homo sapiens
  misc_RNA (1)...(19): siRNA sense strand
caacagcaguucugauugg

SEQ ID NO: 224078 - RNA, 19 nt, Homo sapiens
  misc_RNA (1)...(19): siRNA sense strand
caagguagacacccaaauu

SEQ ID NO: 224079 - RNA, 19 nt, Homo sapiens
  misc_RNA (1)...(19): siRNA sense strand
ggaaagaaagaaacuacaa

SEQ ID NO: 224080 - RNA, 19 nt, Homo sapiens
  misc_RNA (1)...(19): siRNA sense strand
gagcuagaguucccauuuc

SEQ ID NO: 224081 - RNA, 19 nt, Homo sapiens
  misc_RNA (1)...(19): siRNA sense strand
ugaaggauguggucaaaca

SEQ ID NO: 224082 - RNA, 19 nt, Homo sapiens
  misc_RNA (1)...(19): siRNA sense strand
guggagaacuagauuuaga

SEQ ID NO: 224083 - RNA, 19 nt, Homo sapiens
  misc_RNA (1)...(19): siRNA sense strand
ggaacuguauauagagaga

SEQ ID NO: 224084 - RNA, 19 nt, Homo sapiens
  misc_RNA (1)...(19): siRNA sense strand
caaaugggaagcaaagaaa

SEQ ID NO: 224085 - RNA, 19 nt, Homo sapiens
  misc_RNA (1)...(19): siRNA sense strand
uagauucgauuacugaaga

SEQ ID NO: 224086 - RNA, 19 nt, Homo sapiens
  misc_RNA (1)...(19): siRNA sense strand
ugcaaaggcucuccaggua

SEQ ID NO: 224087 - RNA, 19 nt, Homo sapiens
  misc_RNA (1)...(19): siRNA sense strand
gguagacacccaaauuaaa

SEQ ID NO: 224088 - RNA, 19 nt, Homo sapiens
  misc_RNA (1)...(19): siRNA sense strand
gacgggagcuuuaucuaag

SEQ ID NO: 224089 - RNA, 19 nt, Homo sapiens
  misc_RNA (1)...(19): siRNA sense strand
agacaagcacucauagaua

SEQ ID NO: 224090 - RNA, 19 nt, Homo sapiens
  misc_RNA (1)...(19): siRNA sense strand
ggaaagaaaguggccauug

SEQ ID NO: 224091 - RNA, 19 nt, Homo sapiens
  misc_RNA (1)...(19): siRNA sense strand
guucuuagaugcugcaaag

SEQ ID NO: 224092 - RNA, 19 nt, Homo sapiens
  misc_RNA (1)...(19): siRNA sense strand
ugagugcuuugguauuuaa

SEQ ID NO: 224093 - RNA, 19 nt, Homo sapiens
  misc_RNA (1)...(19): siRNA sense strand
ccugagugcuuugguauuu

SEQ ID NO: 224094 - RNA, 19 nt, Homo sapiens
  misc_RNA (1)...(19): siRNA sense strand
caaauacaguugcaaccau

SEQ ID NO: 224095 - RNA, 19 nt, Homo sapiens
  misc_RNA (1)...(19): siRNA sense strand
gauuggcuaugguguauca

SEQ ID NO: 224096 - RNA, 19 nt, Homo sapiens
  misc_RNA (1)...(19): siRNA sense strand
caugaaggauguggucaaa

SEQ ID NO: 224097 - RNA, 19 nt, Homo sapiens
  misc_RNA (1)...(19): siRNA sense strand
acucacugcugaauuauga

SEQ ID NO: 224098 - RNA, 19 nt, Homo sapiens
  misc_RNA (1)...(19): siRNA sense strand
caagguagcccagaauuca

SEQ ID NO: 224099 - RNA, 19 nt, Homo sapiens
  misc_RNA (1)...(19): siRNA sense strand
uuaauccucucccuaauca

SEQ ID NO: 224100 - RNA, 19 nt, Homo sapiens
  misc_RNA (1)...(19): siRNA sense strand
gaaagaaagaaacuacaag

SEQ ID NO: 224101 - RNA, 19 nt, Homo sapiens
  misc_RNA (1)...(19): siRNA sense strand
aaagaaaguggccauugua

SEQ ID NO: 224102 - RNA, 19 nt, Homo sapiens
  misc_RNA (1)...(19): siRNA sense strand
cagaaaguccuuaguggaa

SEQ ID NO: 224103 - RNA, 19 nt, Homo sapiens
  misc_RNA (1)...(19): siRNA sense strand
ucugggaacuguauauaga

SEQ ID NO: 224104 - RNA, 19 nt, Homo sapiens
  misc_RNA (1)...(19): siRNA sense strand
ucagugguguuuuguauua

SEQ ID NO: 224105 - RNA, 19 nt, Homo sapiens
  misc_RNA (1)...(19): siRNA sense strand
ucaaccagaugucgggaaa

SEQ ID NO: 224106 - RNA, 19 nt, Homo sapiens
  misc_RNA (1)...(19): siRNA sense strand
ggcaacagcaguucugauu

SEQ ID NO: 224107 - RNA, 19 nt, Homo sapiens
  misc_RNA (1)...(19): siRNA sense strand
gcagacagacgggagcuuu

SEQ ID NO: 224108 - RNA, 19 nt, Homo sapiens
  misc_RNA (1)...(19): siRNA sense strand
gcucgagccuaccagauuc

SEQ ID NO: 224109 - RNA, 19 nt, Homo sapiens
  misc_RNA (1)...(19): siRNA sense strand
caccaugguuugcuugcua

SEQ ID NO: 224110 - RNA, 19 nt, Homo sapiens
  misc_RNA (1)...(19): siRNA sense strand
uacaaccucuuauauggaa

SEQ ID NO: 224111 - RNA, 19 nt, Homo sapiens
  misc_RNA (1)...(19): siRNA sense strand
gauccggccuuuagucucu

SEQ ID NO: 224112 - RNA, 19 nt, Homo sapiens
  misc_RNA (1)...(19): siRNA sense strand
ugaaaucauugucuuggau

SEQ ID NO: 224113 - RNA, 19 nt, Homo sapiens
  misc_RNA (1)...(19): siRNA sense strand
ccucuuauauggaaacauc

SEQ ID NO: 224114 - RNA, 19 nt, Homo sapiens
  misc_RNA (1)...(19): siRNA sense strand
ugaagucccugcaggaaag

SEQ ID NO: 224115 - RNA, 19 nt, Homo sapiens
  misc_RNA (1)...(19): siRNA sense strand
cagcuaccguggccuuuga

SEQ ID NO: 224116 - RNA, 19 nt, Homo sapiens
  misc_RNA (1)...(19): siRNA sense strand
gaugcuguccucuuccaua

SEQ ID NO: 224117 - RNA, 19 nt, Homo sapiens
  misc_RNA (1)...(19): siRNA sense strand
ccagguauggccacugaua

SEQ ID NO: 224118 - RNA, 19 nt, Homo sapiens
  misc_RNA (1)...(19): siRNA sense strand
ccaaaugggaagcaaagaa

SEQ ID NO: 224119 - RNA, 19 nt, Homo sapiens
  misc_RNA (1)...(19): siRNA sense strand
gcaauugcaagagccauuu

SEQ ID NO: 224120 - RNA, 19 nt, Homo sapiens
  misc_RNA (1)...(19): siRNA sense strand
gcaaaggcucuccagguau

SEQ ID NO: 224121 - RNA, 19 nt, Homo sapiens
  misc_RNA (1)...(19): siRNA sense strand
ggccaugaauauugugguu

SEQ ID NO: 224122 - RNA, 19 nt, Homo sapiens
  misc_RNA (1)...(19): siRNA sense strand
ucaggacaguucuuagaug

SEQ ID NO: 224123 - RNA, 19 nt, Homo sapiens
  misc_RNA (1)...(19): siRNA sense strand
gggaaaagcacaauaguga

SEQ ID NO: 224124 - RNA, 19 nt, Homo sapiens
  misc_RNA (1)...(19): siRNA sense strand
guagacacccaaauuaaag

SEQ ID NO: 224125 - RNA, 19 nt, Homo sapiens
  misc_RNA (1)...(19): siRNA sense strand
aagguagacacccaaauua

SEQ ID NO: 224126 - RNA, 19 nt, Homo sapiens
  misc_RNA (1)...(19): siRNA sense strand
uguuggagaucuaguaaug

SEQ ID NO: 224127 - RNA, 19 nt, Homo sapiens
  misc_RNA (1)...(19): siRNA sense strand
cgagcuagaguucccauuu

SEQ ID NO: 224128 - RNA, 19 nt, Homo sapiens
  misc_RNA (1)...(19): siRNA sense strand
gugaaaggcuguggaaacu

SEQ ID NO: 224129 - RNA, 19 nt, Homo sapiens
  misc_RNA (1)...(19): siRNA sense strand
gcuacuucaucguuagauu

SEQ ID NO: 224130 - RNA, 19 nt, Homo sapiens
  misc_RNA (1)...(19): siRNA sense strand
gacuagacaagcacucaua

SEQ ID NO: 224131 - RNA, 19 nt, Homo sapiens
  misc_RNA (1)...(19): siRNA sense strand
uaauggugcucgccaguca

SEQ ID NO: 224132 - RNA, 19 nt, Homo sapiens
  misc_RNA (1)...(19): siRNA sense strand
ccaagcagauaaugaugca

SEQ ID NO: 224133 - RNA, 19 nt, Homo sapiens
  misc_RNA (1)...(19): siRNA sense strand
caauucaggacaguucuua

SEQ ID NO: 224134 - RNA, 19 nt, Homo sapiens
  misc_RNA (1)...(19): siRNA sense strand
gcaagguagcccagaauuc

SEQ ID NO: 224135 - RNA, 19 nt, Homo sapiens
  misc_RNA (1)...(19): siRNA sense strand
cagauaaugaugcagguaa

SEQ ID NO: 224136 - RNA, 19 nt, Homo sapiens
  misc_RNA (1)...(19): siRNA sense strand
ggaacgaggacucaagcuu

SEQ ID NO: 224137 - RNA, 19 nt, Homo sapiens
  misc_RNA (1)...(19): siRNA sense strand
aaaauuagcuggacuucau

SEQ ID NO: 224138 - RNA, 19 nt, Homo sapiens
  misc_RNA (1)...(19): siRNA sense strand
caaaagaaggguuaaaaga

SEQ ID NO: 224139 - RNA, 19 nt, Homo sapiens
  misc_RNA (1)...(19): siRNA sense strand
agaaagaaacuacaagaag

SEQ ID NO: 224140 - RNA, 19 nt, Homo sapiens
  misc_RNA (1)...(19): siRNA sense strand
gaacuucuauuuucauugc

SEQ ID NO: 224141 - RNA, 19 nt, Homo sapiens
  misc_RNA (1)...(19): siRNA sense strand
ggauaugacacccaaguag

SEQ ID NO: 224142 - RNA, 19 nt, Homo sapiens
  misc_RNA (1)...(19): siRNA sense strand
agacgggagcuuuaucuaa

SEQ ID NO: 224143 - RNA, 19 nt, Homo sapiens
  misc_RNA (1)...(19): siRNA sense strand
gcaacagcaguucugauug

SEQ ID NO: 224144 - RNA, 19 nt, Homo sapiens
  misc_RNA (1)...(19): siRNA sense strand
caaagacaggccagaucua

SEQ ID NO: 224145 - RNA, 19 nt, Homo sapiens
  misc_RNA (1)...(19): siRNA sense strand
aaggguagcauuuaucuug

SEQ ID NO: 224146 - RNA, 19 nt, Homo sapiens
  misc_RNA (1)...(19): siRNA sense strand
uggaauauccuuugaaguc

SEQ ID NO: 224147 - RNA, 19 nt, Homo sapiens
  misc_RNA (1)...(19): siRNA sense strand
ccagauuccagagucauua

SEQ ID NO: 224148 - RNA, 19 nt, Homo sapiens
  misc_RNA (1)...(19): siRNA sense strand
uuggaacacuugguacaua

SEQ ID NO: 224149 - RNA, 19 nt, Homo sapiens
  misc_RNA (1)...(19): siRNA sense strand
uauuuaauccucucccuaa

SEQ ID NO: 224150 - RNA, 19 nt, Homo sapiens
  misc_RNA (1)...(19): siRNA sense strand
aaagaaggguuaaaagaug

SEQ ID NO: 224151 - RNA, 19 nt, Homo sapiens
  misc_RNA (1)...(19): siRNA sense strand
aaauugaccaagcagauaa

SEQ ID NO: 224152 - RNA, 19 nt, Homo sapiens
  misc_RNA (1)...(19): siRNA sense strand
gcagucacacgguggagaa

SEQ ID NO: 224153 - RNA, 19 nt, Homo sapiens
  misc_RNA (1)...(19): siRNA sense strand
ucagaaauguggcauacac

SEQ ID NO: 224154 - RNA, 19 nt, Homo sapiens
  misc_RNA (1)...(19): siRNA sense strand
gaggaaagaaagaaacuac

SEQ ID NO: 224155 - RNA, 19 nt, Homo sapiens
  misc_RNA (1)...(19): siRNA sense strand
ggaaauagauggcgauaaa

SEQ ID NO: 224156 - RNA, 19 nt, Homo sapiens
  misc_RNA (1)...(19): siRNA sense strand
gcaagaauaugaagaagga

SEQ ID NO: 224157 - RNA, 19 nt, Homo sapiens
  misc_RNA (1)...(19): siRNA sense strand
caacaucccugccuucuuc

SEQ ID NO: 224158 - RNA, 19 nt, Homo sapiens
  misc_RNA (1)...(19): siRNA sense strand
ggaagcacauuaauggaaa

SEQ ID NO: 224159 - RNA, 19 nt, Homo sapiens
  misc_RNA (1)...(19): siRNA sense strand
gcacauuaauggaaauaga

SEQ ID NO: 224160 - RNA, 19 nt, Homo sapiens
  misc_RNA (1)...(19): siRNA sense strand
gaacggagguuuagcucau

SEQ ID NO: 224161 - RNA, 19 nt, Homo sapiens
  misc_RNA (1)...(19): siRNA sense strand
ugacagaguuaauguuuga

SEQ ID NO: 224162 - RNA, 19 nt, Homo sapiens
  misc_RNA (1)...(19): siRNA sense strand
gcaaagagagagaaacuga

SEQ ID NO: 224163 - RNA, 19 nt, Homo sapiens
  misc_RNA (1)...(19): siRNA sense strand
gcuggagacuuuauuacua

SEQ ID NO: 224164 - RNA, 19 nt, Homo sapiens
  misc_RNA (1)...(19): siRNA sense strand
gaagcaguguguagaaaga

SEQ ID NO: 224165 - RNA, 19 nt, Homo sapiens
  misc_RNA (1)...(19): siRNA sense strand
ggaaacacacuaauacaga

SEQ ID NO: 224166 - RNA, 19 nt, Homo sapiens
  misc_RNA (1)...(19): siRNA sense strand
gaaguuggagcccuuguuu

SEQ ID NO: 224167 - RNA, 19 nt, Homo sapiens
  misc_RNA (1)...(19): siRNA sense strand
gaugccaacuguucauuau

SEQ ID NO: 224168 - RNA, 19 nt, Homo sapiens
  misc_RNA (1)...(19): siRNA sense strand
ggucuuggcacaauuauau

SEQ ID NO: 224169 - RNA, 19 nt, Homo sapiens
  misc_RNA (1)...(19): siRNA sense strand
acaaguggcugcacagaug

SEQ ID NO: 224170 - RNA, 19 nt, Homo sapiens
  misc_RNA (1)...(19): siRNA sense strand
ugaauugguuccuccauau

SEQ ID NO: 224171 - RNA, 19 nt, Homo sapiens
  misc_RNA (1)...(19): siRNA sense strand
gcagagcggcuaaagauuc

SEQ ID NO: 224172 - RNA, 19 nt, Homo sapiens
  misc_RNA (1)...(19): siRNA sense strand
caaaaugcaugucaaauca

SEQ ID NO: 224173 - RNA, 19 nt, Homo sapiens
  misc_RNA (1)...(19): siRNA sense strand
gcuaaagauuccagaagga

SEQ ID NO: 224174 - RNA, 19 nt, Homo sapiens
  misc_RNA (1)...(19): siRNA sense strand
gagaaguugccucagguua

SEQ ID NO: 224175 - RNA, 19 nt, Homo sapiens
  misc_RNA (1)...(19): siRNA sense strand
gacauuggauccuauacug

SEQ ID NO: 224176 - RNA, 19 nt, Homo sapiens
  misc_RNA (1)...(19): siRNA sense strand
gaauugguuccuccauaua

SEQ ID NO: 224177 - RNA, 19 nt, Homo sapiens
  misc_RNA (1)...(19): siRNA sense strand
caaguaugcgguugaaauu

SEQ ID NO: 224178 - RNA, 19 nt, Homo sapiens
  misc_RNA (1)...(19): siRNA sense strand
ggaggaaacacacuaauac

SEQ ID NO: 224179 - RNA, 19 nt, Homo sapiens
  misc_RNA (1)...(19): siRNA sense strand
aaagauuccagaaggauua

SEQ ID NO: 224180 - RNA, 19 nt, Homo sapiens
  misc_RNA (1)...(19): siRNA sense strand
gggaagcaguguguagaaa

SEQ ID NO: 224181 - RNA, 19 nt, Homo sapiens
  misc_RNA (1)...(19): siRNA sense strand
ugaaggaucuccagcaaac

SEQ ID NO: 224182 - RNA, 19 nt, Homo sapiens
  misc_RNA (1)...(19): siRNA sense strand
caagcaagaauaugaagaa

SEQ ID NO: 224183 - RNA, 19 nt, Homo sapiens
  misc_RNA (1)...(19): siRNA sense strand
ccuacuacauagauacuaa

SEQ ID NO: 224184 - RNA, 19 nt, Homo sapiens
  misc_RNA (1)...(19): siRNA sense strand
guaaagggguuaucaggaa

SEQ ID NO: 224185 - RNA, 19 nt, Homo sapiens
  misc_RNA (1)...(19): siRNA sense strand
aaaagaagcuguucgugaa

SEQ ID NO: 224186 - RNA, 19 nt, Homo sapiens
  misc_RNA (1)...(19): siRNA sense strand
gaggcaccguggaauacua

SEQ ID NO: 224187 - RNA, 19 nt, Homo sapiens
  misc_RNA (1)...(19): siRNA sense strand
gaugacggaagcacauuaa

SEQ ID NO: 224188 - RNA, 19 nt, Homo sapiens
  misc_RNA (1)...(19): siRNA sense strand
ggauuuccaagcaagaaua

SEQ ID NO: 224189 - RNA, 19 nt, Homo sapiens
  misc_RNA (1)...(19): siRNA sense strand
gcaggaggaaacacacuaa

SEQ ID NO: 224190 - RNA, 19 nt, Homo sapiens
  misc_RNA (1)...(19): siRNA sense strand
ugggauaguuuccaagcua

SEQ ID NO: 224191 - RNA, 19 nt, Homo sapiens
  misc_RNA (1)...(19): siRNA sense strand
guugaagacugggauaguu

SEQ ID NO: 224192 - RNA, 19 nt, Homo sapiens
  misc_RNA (1)...(19): siRNA sense strand
gaagcacauuaauggaaau

SEQ ID NO: 224193 - RNA, 19 nt, Homo sapiens
  misc_RNA (1)...(19): siRNA sense strand
agguuuagcucauggauug

SEQ ID NO: 224194 - RNA, 19 nt, Homo sapiens
  misc_RNA (1)...(19): siRNA sense strand
aguaugcgguugaaauuga

SEQ ID NO: 224195 - RNA, 19 nt, Homo sapiens
  misc_RNA (1)...(19): siRNA sense strand
gaucauaccuacaaaaugc

SEQ ID NO: 224196 - RNA, 19 nt, Homo sapiens
  misc_RNA (1)...(19): siRNA sense strand
gguugaaauugauugcaaa

SEQ ID NO: 224197 - RNA, 19 nt, Homo sapiens
  misc_RNA (1)...(19): siRNA sense strand
ccaaguaugcgguugaaau

SEQ ID NO: 224198 - RNA, 19 nt, Homo sapiens
  misc_RNA (1)...(19): siRNA sense strand
guugggaugugugauauug

SEQ ID NO: 224199 - RNA, 19 nt, Homo sapiens
  misc_RNA (1)...(19): siRNA sense strand
gugcagagcggcuaaagau

SEQ ID NO: 224200 - RNA, 19 nt, Homo sapiens
  misc_RNA (1)...(19): siRNA sense strand
cuacauagauacuaaugcu

SEQ ID NO: 224201 - RNA, 19 nt, Homo sapiens
  misc_RNA (1)...(19): siRNA sense strand
gcuccauucuagccucuuu

SEQ ID NO: 224202 - RNA, 19 nt, Homo sapiens
  misc_RNA (1)...(19): siRNA sense strand
ucagaggcaccguggaaua

SEQ ID NO: 224203 - RNA, 19 nt, Homo sapiens
  misc_RNA (1)...(19): siRNA sense strand
gaacaaguggcugcacaga

SEQ ID NO: 224204 - RNA, 19 nt, Homo sapiens
  misc_RNA (1)...(19): siRNA sense strand
cagauucaacuuaugauga

SEQ ID NO: 224205 - RNA, 19 nt, Homo sapiens
  misc_RNA (1)...(19): siRNA sense strand
aaaugcaugucaaaucaga

SEQ ID NO: 224206 - RNA, 19 nt, Homo sapiens
  misc_RNA (1)...(19): siRNA sense strand
gacggaagcacauuaaugg

SEQ ID NO: 224207 - RNA, 19 nt, Homo sapiens
  misc_RNA (1)...(19): siRNA sense strand
gaaaacuccuccaaguaug

SEQ ID NO: 224208 - RNA, 19 nt, Homo sapiens
  misc_RNA (1)...(19): siRNA sense strand
gauuccagaaggauuauuu

SEQ ID NO: 224209 - RNA, 19 nt, Homo sapiens
  misc_RNA (1)...(19): siRNA sense strand
cgaggucuuggcacaauua

SEQ ID NO: 224210 - RNA, 19 nt, Homo sapiens
  misc_RNA (1)...(19): siRNA sense strand
uugaauugguuccuccaua

SEQ ID NO: 224211 - RNA, 19 nt, Homo sapiens
  misc_RNA (1)...(19): siRNA sense strand
gagcaaagagagagaaacu

SEQ ID NO: 224212 - RNA, 19 nt, Homo sapiens
  misc_RNA (1)...(19): siRNA sense strand
acacacuaauacagaguuu

SEQ ID NO: 224213 - RNA, 19 nt, Homo sapiens
  misc_RNA (1)...(19): siRNA sense strand
gaaaagaaaagagaaguug

SEQ ID NO: 224214 - RNA, 19 nt, Homo sapiens
  misc_RNA (1)...(19): siRNA sense strand
cuggagacuuuauuacuau

SEQ ID NO: 224215 - RNA, 19 nt, Homo sapiens
  misc_RNA (1)...(19): siRNA sense strand
agacugggauaguuuccaa

SEQ ID NO: 224216 - RNA, 19 nt, Homo sapiens
  misc_RNA (1)...(19): siRNA sense strand
gaggaaacacacuaauaca

SEQ ID NO: 224217 - RNA, 19 nt, Homo sapiens
  misc_RNA (1)...(19): siRNA sense strand
gaaguugccucagguuacg

SEQ ID NO: 224218 - RNA, 19 nt, Homo sapiens
  misc_RNA (1)...(19): siRNA sense strand
ugacggaagcacauuaaug

SEQ ID NO: 224219 - RNA, 19 nt, Homo sapiens
  misc_RNA (1)...(19): siRNA sense strand
ggucccaccuacuacauag

SEQ ID NO: 224220 - RNA, 19 nt, Homo sapiens
  misc_RNA (1)...(19): siRNA sense strand
cgugaaggaucuccagcaa

SEQ ID NO: 224221 - RNA, 19 nt, Homo sapiens
  misc_RNA (1)...(19): siRNA sense strand
aaaaugggaugguugaaga

SEQ ID NO: 224222 - RNA, 19 nt, Homo sapiens
  misc_RNA (1)...(19): siRNA sense strand
uuggguaccuuucaacaga

SEQ ID NO: 224223 - RNA, 19 nt, Homo sapiens
  misc_RNA (1)...(19): siRNA sense strand
uaaagauuccagaaggauu

SEQ ID NO: 224224 - RNA, 19 nt, Homo sapiens
  misc_RNA (1)...(19): siRNA sense strand
gcuaauggucguucuacug

SEQ ID NO: 224225 - RNA, 19 nt, Homo sapiens
  misc_RNA (1)...(19): siRNA sense strand
ggagggaagcaguguguag

SEQ ID NO: 224226 - RNA, 19 nt, Homo sapiens
  misc_RNA (1)...(19): siRNA sense strand
aggaggaaacacacuaaua

SEQ ID NO: 224227 - RNA, 19 nt, Homo sapiens
  misc_RNA (1)...(19): siRNA sense strand
ugugagagcugguuaugcu

SEQ ID NO: 224228 - RNA, 19 nt, Homo sapiens
  misc_RNA (1)...(19): siRNA sense strand
guuccuccauauaugauug

SEQ ID NO: 224229 - RNA, 19 nt, Homo sapiens
  misc_RNA (1)...(19): siRNA sense strand
ugucagauucaacuuauga

SEQ ID NO: 224230 - RNA, 19 nt, Homo sapiens
  misc_RNA (1)...(19): siRNA sense strand
ggaagcaguguguagaaag

SEQ ID NO: 224231 - RNA, 19 nt, Homo sapiens
  misc_RNA (1)...(19): siRNA sense strand
gagacuuuauuacuaugca

SEQ ID NO: 224232 - RNA, 19 nt, Homo sapiens
  misc_RNA (1)...(19): siRNA sense strand
gauuggcggcuccauucua

SEQ ID NO: 224233 - RNA, 19 nt, Homo sapiens
  misc_RNA (1)...(19): siRNA sense strand
acaguggaacggagguuua

SEQ ID NO: 224234 - RNA, 19 nt, Homo sapiens
  misc_RNA (1)...(19): siRNA sense strand
ucagaaaacuccuccaagu

SEQ ID NO: 224235 - RNA, 19 nt, Homo sapiens
  misc_RNA (1)...(19): siRNA sense strand
guauggugguagaaagaga

SEQ ID NO: 224236 - RNA, 19 nt, Homo sapiens
  misc_RNA (1)...(19): siRNA sense strand
cggaagcacauuaauggaa

SEQ ID NO: 224237 - RNA, 19 nt, Homo sapiens
  misc_RNA (1)...(19): siRNA sense strand
uauuugacccuuccaaugu

SEQ ID NO: 224238 - RNA, 19 nt, Homo sapiens
  misc_RNA (1)...(19): siRNA sense strand
gagggaagcaguguguaga

SEQ ID NO: 224239 - RNA, 19 nt, Homo sapiens
  misc_RNA (1)...(19): siRNA sense strand
aaagagagagaaacugaca

SEQ ID NO: 224240 - RNA, 19 nt, Homo sapiens
  misc_RNA (1)...(19): siRNA sense strand
gaaauagauggcgauaaag

SEQ ID NO: 224241 - RNA, 19 nt, Homo sapiens
  misc_RNA (1)...(19): siRNA sense strand
agugucagauucaacuuau

SEQ ID NO: 224242 - RNA, 19 nt, Homo sapiens
  misc_RNA (1)...(19): siRNA sense strand
cgauggcuauguccuucaa

SEQ ID NO: 224243 - RNA, 19 nt, Homo sapiens
  misc_RNA (1)...(19): siRNA sense strand
uuacugacagguugaauag

SEQ ID NO: 224244 - RNA, 19 nt, Homo sapiens
  misc_RNA (1)...(19): siRNA sense strand
cgguugaaauugauugcaa

SEQ ID NO: 224245 - RNA, 19 nt, Homo sapiens
  misc_RNA (1)...(19): siRNA sense strand
caagcuauuuuggaucaua

SEQ ID NO: 224246 - RNA, 19 nt, Homo sapiens
  misc_RNA (1)...(19): siRNA sense strand
cuacugggcugauuuugga

SEQ ID NO: 224247 - RNA, 19 nt, Homo sapiens
  misc_RNA (1)...(19): siRNA sense strand
acugacagaguuaauguuu

SEQ ID NO: 224248 - RNA, 19 nt, Homo sapiens
  misc_RNA (1)...(19): siRNA sense strand
agagagagaaacugacaga

SEQ ID NO: 224249 - RNA, 19 nt, Homo sapiens
  misc_RNA (1)...(19): siRNA sense strand
ucucuauggcaguguaaua

SEQ ID NO: 224250 - RNA, 19 nt, Homo sapiens
  misc_RNA (1)...(19): siRNA sense strand
agauggcgauaaaggcaaa

SEQ ID NO: 224251 - RNA, 19 nt, Homo sapiens
  misc_RNA (1)...(19): siRNA sense strand
agagagaaacugacagagu

SEQ ID NO: 224252 - RNA, 19 nt, Homo sapiens
  misc_RNA (1)...(19): siRNA sense strand
guaugcgguugaaauugau

SEQ ID NO: 224253 - RNA, 19 nt, Homo sapiens
  misc_RNA (1)...(19): siRNA sense strand
acugacagguugaauagag

SEQ ID NO: 224254 - RNA, 19 nt, Homo sapiens
  misc_RNA (1)...(19): siRNA sense strand
ccacucauaccacugcaau

SEQ ID NO: 224255 - RNA, 19 nt, Homo sapiens
  misc_RNA (1)...(19): siRNA sense strand
ggaaauagauggcgauaaa

SEQ ID NO: 224256 - RNA, 19 nt, Homo sapiens
  misc_RNA (1)...(19): siRNA sense strand
gcaagaauaugaagaagga

SEQ ID NO: 224257 - RNA, 19 nt, Homo sapiens
  misc_RNA (1)...(19): siRNA sense strand
caacaucccugccuucuuc

SEQ ID NO: 224258 - RNA, 19 nt, Homo sapiens
  misc_RNA (1)...(19): siRNA sense strand
ggaagcacauuaauggaaa

SEQ ID NO: 224259 - RNA, 19 nt, Homo sapiens
  misc_RNA (1)...(19): siRNA sense strand
gcacauuaauggaaauaga

SEQ ID NO: 224260 - RNA, 19 nt, Homo sapiens
  misc_RNA (1)...(19): siRNA sense strand
gaacggagguuuagcucau

SEQ ID NO: 224261 - RNA, 19 nt, Homo sapiens
  misc_RNA (1)...(19): siRNA sense strand
ugacagaguuaauguuuga

SEQ ID NO: 224262 - RNA, 19 nt, Homo sapiens
  misc_RNA (1)...(19): siRNA sense strand
gcaaagagagagaaacuga

SEQ ID NO: 224263 - RNA, 19 nt, Homo sapiens
  misc_RNA (1)...(19): siRNA sense strand
gcuggagacuuuauuacua

SEQ ID NO: 224264 - RNA, 19 nt, Homo sapiens
  misc_RNA (1)...(19): siRNA sense strand
gaagcaguguguagaaaga

SEQ ID NO: 224265 - RNA, 19 nt, Homo sapiens
  misc_RNA (1)...(19): siRNA sense strand
ggaaacacacuaauacaga

SEQ ID NO: 224266 - RNA, 19 nt, Homo sapiens
  misc_RNA (1)...(19): siRNA sense strand
gaugccaacuguucauuau

SEQ ID NO: 224267 - RNA, 19 nt, Homo sapiens
  misc_RNA (1)...(19): siRNA sense strand
ggucuuggcacaauuauau

SEQ ID NO: 224268 - RNA, 19 nt, Homo sapiens
  misc_RNA (1)...(19): siRNA sense strand
acaaguggcugcacagaug

SEQ ID NO: 224269 - RNA, 19 nt, Homo sapiens
  misc_RNA (1)...(19): siRNA sense strand
ugaauugguuccuccauau

SEQ ID NO: 224270 - RNA, 19 nt, Homo sapiens
  misc_RNA (1)...(19): siRNA sense strand
gcagagcggcuaaagauuc

SEQ ID NO: 224271 - RNA, 19 nt, Homo sapiens
  misc_RNA (1)...(19): siRNA sense strand
caaaaugcaugucaaauca

SEQ ID NO: 224272 - RNA, 19 nt, Homo sapiens
  misc_RNA (1)...(19): siRNA sense strand
gcuaaagauuccagaagga

SEQ ID NO: 224273 - RNA, 19 nt, Homo sapiens
  misc_RNA (1)...(19): siRNA sense strand
gagaaguugccucagguua

SEQ ID NO: 224274 - RNA, 19 nt, Homo sapiens
  misc_RNA (1)...(19): siRNA sense strand
gaauugguuccuccauaua

SEQ ID NO: 224275 - RNA, 19 nt, Homo sapiens
  misc_RNA (1)...(19): siRNA sense strand
caaguaugcgguugaaauu

SEQ ID NO: 224276 - RNA, 19 nt, Homo sapiens
  misc_RNA (1)...(19): siRNA sense strand
ggaggaaacacacuaauac

SEQ ID NO: 224277 - RNA, 19 nt, Homo sapiens
  misc_RNA (1)...(19): siRNA sense strand
aaagauuccagaaggauua

SEQ ID NO: 224278 - RNA, 19 nt, Homo sapiens
  misc_RNA (1)...(19): siRNA sense strand
gggaagcaguguguagaaa

SEQ ID NO: 224279 - RNA, 19 nt, Homo sapiens
  misc_RNA (1)...(19): siRNA sense strand
ugaaggaucuccagcaaac

SEQ ID NO: 224280 - RNA, 19 nt, Homo sapiens
  misc_RNA (1)...(19): siRNA sense strand
caagcaagaauaugaagaa

SEQ ID NO: 224281 - RNA, 19 nt, Homo sapiens
  misc_RNA (1)...(19): siRNA sense strand
ccuacuacauagauacuaa

SEQ ID NO: 224282 - RNA, 19 nt, Homo sapiens
  misc_RNA (1)...(19): siRNA sense strand
guaaagggguuaucaggaa

SEQ ID NO: 224283 - RNA, 19 nt, Homo sapiens
  misc_RNA (1)...(19): siRNA sense strand
aaaagaagcuguucgugaa

SEQ ID NO: 224284 - RNA, 19 nt, Homo sapiens
  misc_RNA (1)...(19): siRNA sense strand
gaggcaccguggaauacua

SEQ ID NO: 224285 - RNA, 19 nt, Homo sapiens
  misc_RNA (1)...(19): siRNA sense strand
guugaagacugggauaguu

SEQ ID NO: 224286 - RNA, 19 nt, Homo sapiens
  misc_RNA (1)...(19): siRNA sense strand
ggauuuccaagcaagaaua

SEQ ID NO: 224287 - RNA, 19 nt, Homo sapiens
  misc_RNA (1)...(19): siRNA sense strand
gaugacggaagcacauuaa

SEQ ID NO: 224288 - RNA, 19 nt, Homo sapiens
  misc_RNA (1)...(19): siRNA sense strand
gcaggaggaaacacacuaa

SEQ ID NO: 224289 - RNA, 19 nt, Homo sapiens
  misc_RNA (1)...(19): siRNA sense strand
ugggauaguuuccaagcua

SEQ ID NO: 224290 - RNA, 19 nt, Homo sapiens
  misc_RNA (1)...(19): siRNA sense strand
gaagcacauuaauggaaau

SEQ ID NO: 224291 - RNA, 19 nt, Homo sapiens
  misc_RNA (1)...(19): siRNA sense strand
agguuuagcucauggauug

SEQ ID NO: 224292 - RNA, 19 nt, Homo sapiens
  misc_RNA (1)...(19): siRNA sense strand
aguaugcgguugaaauuga

SEQ ID NO: 224293 - RNA, 19 nt, Homo sapiens
  misc_RNA (1)...(19): siRNA sense strand
gaucauaccuacaaaaugc

SEQ ID NO: 224294 - RNA, 19 nt, Homo sapiens
  misc_RNA (1)...(19): siRNA sense strand
gguugaaauugauugcaaa

SEQ ID NO: 224295 - RNA, 19 nt, Homo sapiens
  misc_RNA (1)...(19): siRNA sense strand
ccaaguaugcgguugaaau

SEQ ID NO: 224296 - RNA, 19 nt, Homo sapiens
  misc_RNA (1)...(19): siRNA sense strand
guugggaugugugauauug

SEQ ID NO: 224297 - RNA, 19 nt, Homo sapiens
  misc_RNA (1)...(19): siRNA sense strand
gugcagagcggcuaaagau

SEQ ID NO: 224298 - RNA, 19 nt, Homo sapiens
  misc_RNA (1)...(19): siRNA sense strand
cuacauagauacuaaugcu

SEQ ID NO: 224299 - RNA, 19 nt, Homo sapiens
  misc_RNA (1)...(19): siRNA sense strand
gcuccauucuagccucuuu

SEQ ID NO: 224300 - RNA, 19 nt, Homo sapiens
  misc_RNA (1)...(19): siRNA sense strand
ucagaggcaccguggaaua

SEQ ID NO: 224301 - RNA, 19 nt, Homo sapiens
  misc_RNA (1)...(19): siRNA sense strand
gaacaaguggcugcacaga

SEQ ID NO: 224302 - RNA, 19 nt, Homo sapiens
  misc_RNA (1)...(19): siRNA sense strand
cagauucaacuuaugauga

SEQ ID NO: 224303 - RNA, 19 nt, Homo sapiens
  misc_RNA (1)...(19): siRNA sense strand
aaaugcaugucaaaucaga

SEQ ID NO: 224304 - RNA, 19 nt, Homo sapiens
  misc_RNA (1)...(19): siRNA sense strand
gacggaagcacauuaaugg

SEQ ID NO: 224305 - RNA, 19 nt, Homo sapiens
  misc_RNA (1)...(19): siRNA sense strand
gaaaacuccuccaaguaug

SEQ ID NO: 224306 - RNA, 19 nt, Homo sapiens
  misc_RNA (1)...(19): siRNA sense strand
gauuccagaaggauuauuu

SEQ ID NO: 224307 - RNA, 19 nt, Homo sapiens
  misc_RNA (1)...(19): siRNA sense strand
cgaggucuuggcacaauua

SEQ ID NO: 224308 - RNA, 19 nt, Homo sapiens
  misc_RNA (1)...(19): siRNA sense strand
uugaauugguuccuccaua

SEQ ID NO: 224309 - RNA, 19 nt, Homo sapiens
  misc_RNA (1)...(19): siRNA sense strand
gagcaaagagagagaaacu

SEQ ID NO: 224310 - RNA, 19 nt, Homo sapiens
  misc_RNA (1)...(19): siRNA sense strand
acacacuaauacagaguuu

SEQ ID NO: 224311 - RNA, 19 nt, Homo sapiens
  misc_RNA (1)...(19): siRNA sense strand
gaaaagaaaagagaaguug

SEQ ID NO: 224312 - RNA, 19 nt, Homo sapiens
  misc_RNA (1)...(19): siRNA sense strand
cuggagacuuuauuacuau

SEQ ID NO: 224313 - RNA, 19 nt, Homo sapiens
  misc_RNA (1)...(19): siRNA sense strand
agacugggauaguuuccaa

SEQ ID NO: 224314 - RNA, 19 nt, Homo sapiens
  misc_RNA (1)...(19): siRNA sense strand
gaggaaacacacuaauaca

SEQ ID NO: 224315 - RNA, 19 nt, Homo sapiens
  misc_RNA (1)...(19): siRNA sense strand
gaaguugccucagguuacg

SEQ ID NO: 224316 - RNA, 19 nt, Homo sapiens
  misc_RNA (1)...(19): siRNA sense strand
ugacggaagcacauuaaug

SEQ ID NO: 224317 - RNA, 19 nt, Homo sapiens
  misc_RNA (1)...(19): siRNA sense strand
cgugaaggaucuccagcaa

SEQ ID NO: 224318 - RNA, 19 nt, Homo sapiens
  misc_RNA (1)...(19): siRNA sense strand
ggucccaccuacuacauag

SEQ ID NO: 224319 - RNA, 19 nt, Homo sapiens
  misc_RNA (1)...(19): siRNA sense strand
aaaaugggaugguugaaga

SEQ ID NO: 224320 - RNA, 19 nt, Homo sapiens
  misc_RNA (1)...(19): siRNA sense strand
uuggguaccuuucaacaga

SEQ ID NO: 224321 - RNA, 19 nt, Homo sapiens
  misc_RNA (1)...(19): siRNA sense strand
uaaagauuccagaaggauu

SEQ ID NO: 224322 - RNA, 19 nt, Homo sapiens
  misc_RNA (1)...(19): siRNA sense strand
gcuaauggucguucuacug

SEQ ID NO: 224323 - RNA, 19 nt, Homo sapiens
  misc_RNA (1)...(19): siRNA sense strand
ggagggaagcaguguguag

SEQ ID NO: 224324 - RNA, 19 nt, Homo sapiens
  misc_RNA (1)...(19): siRNA sense strand
aggaggaaacacacuaaua

SEQ ID NO: 224325 - RNA, 19 nt, Homo sapiens
  misc_RNA (1)...(19): siRNA sense strand
guuccuccauauaugauug

SEQ ID NO: 224326 - RNA, 19 nt, Homo sapiens
  misc_RNA (1)...(19): siRNA sense strand
ugucagauucaacuuauga

SEQ ID NO: 224327 - RNA, 19 nt, Homo sapiens
  misc_RNA (1)...(19): siRNA sense strand
ggaagcaguguguagaaag

SEQ ID NO: 224328 - RNA, 19 nt, Homo sapiens
  misc_RNA (1)...(19): siRNA sense strand
gagacuuuauuacuaugca

SEQ ID NO: 224329 - RNA, 19 nt, Homo sapiens
  misc_RNA (1)...(19): siRNA sense strand
gauuggcggcuccauucua

SEQ ID NO: 224330 - RNA, 19 nt, Homo sapiens
  misc_RNA (1)...(19): siRNA sense strand
acaguggaacggagguuua

SEQ ID NO: 224331 - RNA, 19 nt, Homo sapiens
  misc_RNA (1)...(19): siRNA sense strand
ucagaaaacuccuccaagu

SEQ ID NO: 224332 - RNA, 19 nt, Homo sapiens
  misc_RNA (1)...(19): siRNA sense strand
cggaagcacauuaauggaa

SEQ ID NO: 224333 - RNA, 19 nt, Homo sapiens
  misc_RNA (1)...(19): siRNA sense strand
uauuugacccuuccaaugu

SEQ ID NO: 224334 - RNA, 19 nt, Homo sapiens
  misc_RNA (1)...(19): siRNA sense strand
gagggaagcaguguguaga

SEQ ID NO: 224335 - RNA, 19 nt, Homo sapiens
  misc_RNA (1)...(19): siRNA sense strand
gaaauagauggcgauaaag

SEQ ID NO: 224336 - RNA, 19 nt, Homo sapiens
  misc_RNA (1)...(19): siRNA sense strand
agugucagauucaacuuau

SEQ ID NO: 224337 - RNA, 19 nt, Homo sapiens
  misc_RNA (1)...(19): siRNA sense strand
cgauggcuauguccuucaa

SEQ ID NO: 224338 - RNA, 19 nt, Homo sapiens
  misc_RNA (1)...(19): siRNA sense strand
aaagagagagaaacugaca

SEQ ID NO: 224339 - RNA, 19 nt, Homo sapiens
  misc_RNA (1)...(19): siRNA sense strand
uuacugacagguugaauag

SEQ ID NO: 224340 - RNA, 19 nt, Homo sapiens
  misc_RNA (1)...(19): siRNA sense strand
cgguugaaauugauugcaa

SEQ ID NO: 224341 - RNA, 19 nt, Homo sapiens
  misc_RNA (1)...(19): siRNA sense strand
acugacagaguuaauguuu

SEQ ID NO: 224342 - RNA, 19 nt, Homo sapiens
  misc_RNA (1)...(19): siRNA sense strand
caagcuauuuuggaucaua

SEQ ID NO: 224343 - RNA, 19 nt, Homo sapiens
  misc_RNA (1)...(19): siRNA sense strand
cuacugggcugauuuugga

SEQ ID NO: 224344 - RNA, 19 nt, Homo sapiens
  misc_RNA (1)...(19): siRNA sense strand
agagagagaaacugacaga

SEQ ID NO: 224345 - RNA, 19 nt, Homo sapiens
  misc_RNA (1)...(19): siRNA sense strand
agauggcgauaaaggcaaa

SEQ ID NO: 224346 - RNA, 19 nt, Homo sapiens
  misc_RNA (1)...(19): siRNA sense strand
ucucuauggcaguguaaua

SEQ ID NO: 224347 - RNA, 19 nt, Homo sapiens
  misc_RNA (1)...(19): siRNA sense strand
ggaauacuagagcaaagag

SEQ ID NO: 224348 - RNA, 19 nt, Homo sapiens
  misc_RNA (1)...(19): siRNA sense strand
guaugcgguugaaauugau

SEQ ID NO: 224349 - RNA, 19 nt, Homo sapiens
  misc_RNA (1)...(19): siRNA sense strand
acugacagguugaauagag

SEQ ID NO: 224350 - RNA, 19 nt, Homo sapiens
  misc_RNA (1)...(19): siRNA sense strand
ccacucauaccacugcaau

SEQ ID NO: 224351 - RNA, 19 nt, Homo sapiens
  misc_RNA (1)...(19): siRNA sense strand
agagagaaacugacagagu

SEQ ID NO: 224352 - RNA, 19 nt, Homo sapiens
  misc_RNA (1)...(19): siRNA sense strand
agaugccaacuguucauua

SEQ ID NO: 224353 - RNA, 19 nt, Homo sapiens
  misc_RNA (1)...(19): siRNA sense strand
cagaaaacuccuccaagua

SEQ ID NO: 224354 - RNA, 19 nt, Homo sapiens
  misc_RNA (1)...(19): siRNA sense strand
gagaugacggaagcacauu

SEQ ID NO: 224355 - RNA, 19 nt, Homo sapiens
  misc_RNA (1)...(19): siRNA sense strand
ggaaauagauggcgauaaa

SEQ ID NO: 224356 - RNA, 19 nt, Homo sapiens
  misc_RNA (1)...(19): siRNA sense strand
gcaagaauaugaagaagga

SEQ ID NO: 224357 - RNA, 19 nt, Homo sapiens
  misc_RNA (1)...(19): siRNA sense strand
caacaucccugccuucuuc

SEQ ID NO: 224358 - RNA, 19 nt, Homo sapiens
  misc_RNA (1)...(19): siRNA sense strand
ggaagcacauuaauggaaa

SEQ ID NO: 224359 - RNA, 19 nt, Homo sapiens
  misc_RNA (1)...(19): siRNA sense strand
gcacauuaauggaaauaga

SEQ ID NO: 224360 - RNA, 19 nt, Homo sapiens
  misc_RNA (1)...(19): siRNA sense strand
gaacggagguuuagcucau

SEQ ID NO: 224361 - RNA, 19 nt, Homo sapiens
  misc_RNA (1)...(19): siRNA sense strand
ugacagaguuaauguuuga

SEQ ID NO: 224362 - RNA, 19 nt, Homo sapiens
  misc_RNA (1)...(19): siRNA sense strand
gcaaagagagagaaacuga

SEQ ID NO: 224363 - RNA, 19 nt, Homo sapiens
  misc_RNA (1)...(19): siRNA sense strand
gcuggagacuuuauuacua

SEQ ID NO: 224364 - RNA, 19 nt, Homo sapiens
  misc_RNA (1)...(19): siRNA sense strand
gaagcaguguguagaaaga

SEQ ID NO: 224365 - RNA, 19 nt, Homo sapiens
  misc_RNA (1)...(19): siRNA sense strand
ggaaacacacuaauacaga

SEQ ID NO: 224366 - RNA, 19 nt, Homo sapiens
  misc_RNA (1)...(19): siRNA sense strand
gaugccaacuguucauuau

SEQ ID NO: 224367 - RNA, 19 nt, Homo sapiens
  misc_RNA (1)...(19): siRNA sense strand
ggucuuggcacaauuauau

SEQ ID NO: 224368 - RNA, 19 nt, Homo sapiens
  misc_RNA (1)...(19): siRNA sense strand
acaaguggcugcacagaug

SEQ ID NO: 224369 - RNA, 19 nt, Homo sapiens
  misc_RNA (1)...(19): siRNA sense strand
ugaauugguuccuccauau

SEQ ID NO: 224370 - RNA, 19 nt, Homo sapiens
  misc_RNA (1)...(19): siRNA sense strand
gcagagcggcuaaagauuc

SEQ ID NO: 224371 - RNA, 19 nt, Homo sapiens
  misc_RNA (1)...(19): siRNA sense strand
caaaaugcaugucaaauca

SEQ ID NO: 224372 - RNA, 19 nt, Homo sapiens
  misc_RNA (1)...(19): siRNA sense strand
gcuaaagauuccagaagga

SEQ ID NO: 224373 - RNA, 19 nt, Homo sapiens
  misc_RNA (1)...(19): siRNA sense strand
gagaaguugccucagguua

SEQ ID NO: 224374 - RNA, 19 nt, Homo sapiens
  misc_RNA (1)...(19): siRNA sense strand
gaauugguuccuccauaua

SEQ ID NO: 224375 - RNA, 19 nt, Homo sapiens
  misc_RNA (1)...(19): siRNA sense strand
caaguaugcgguugaaauu

SEQ ID NO: 224376 - RNA, 19 nt, Homo sapiens
  misc_RNA (1)...(19): siRNA sense strand
ggaggaaacacacuaauac

SEQ ID NO: 224377 - RNA, 19 nt, Homo sapiens
  misc_RNA (1)...(19): siRNA sense strand
aaagauuccagaaggauua

SEQ ID NO: 224378 - RNA, 19 nt, Homo sapiens
  misc_RNA (1)...(19): siRNA sense strand
gggaagcaguguguagaaa

SEQ ID NO: 224379 - RNA, 19 nt, Homo sapiens
  misc_RNA (1)...(19): siRNA sense strand
ugaaggaucuccagcaaac

SEQ ID NO: 224380 - RNA, 19 nt, Homo sapiens
  misc_RNA (1)...(19): siRNA sense strand
caagcaagaauaugaagaa

SEQ ID NO: 224381 - RNA, 19 nt, Homo sapiens
  misc_RNA (1)...(19): siRNA sense strand
ccuacuacauagauacuaa

SEQ ID NO: 224382 - RNA, 19 nt, Homo sapiens
  misc_RNA (1)...(19): siRNA sense strand
guaaagggguuaucaggaa

SEQ ID NO: 224383 - RNA, 19 nt, Homo sapiens
  misc_RNA (1)...(19): siRNA sense strand
aaaagaagcuguucgugaa

SEQ ID NO: 224384 - RNA, 19 nt, Homo sapiens
  misc_RNA (1)...(19): siRNA sense strand
gaggcaccguggaauacua

SEQ ID NO: 224385 - RNA, 19 nt, Homo sapiens
  misc_RNA (1)...(19): siRNA sense strand
guugaagacugggauaguu

SEQ ID NO: 224386 - RNA, 19 nt, Homo sapiens
  misc_RNA (1)...(19): siRNA sense strand
ggauuuccaagcaagaaua

SEQ ID NO: 224387 - RNA, 19 nt, Homo sapiens
  misc_RNA (1)...(19): siRNA sense strand
gaugacggaagcacauuaa

SEQ ID NO: 224388 - RNA, 19 nt, Homo sapiens
  misc_RNA (1)...(19): siRNA sense strand
gcaggaggaaacacacuaa

SEQ ID NO: 224389 - RNA, 19 nt, Homo sapiens
  misc_RNA (1)...(19): siRNA sense strand
ugggauaguuuccaagcua

SEQ ID NO: 224390 - RNA, 19 nt, Homo sapiens
  misc_RNA (1)...(19): siRNA sense strand
gaagcacauuaauggaaau

SEQ ID NO: 224391 - RNA, 19 nt, Homo sapiens
  misc_RNA (1)...(19): siRNA sense strand
agguuuagcucauggauug

SEQ ID NO: 224392 - RNA, 19 nt, Homo sapiens
  misc_RNA (1)...(19): siRNA sense strand
aguaugcgguugaaauuga

SEQ ID NO: 224393 - RNA, 19 nt, Homo sapiens
  misc_RNA (1)...(19): siRNA sense strand
gaucauaccuacaaaaugc

SEQ ID NO: 224394 - RNA, 19 nt, Homo sapiens
  misc_RNA (1)...(19): siRNA sense strand
gguugaaauugauugcaaa

SEQ ID NO: 224395 - RNA, 19 nt, Homo sapiens
  misc_RNA (1)...(19): siRNA sense strand
ccaaguaugcgguugaaau

SEQ ID NO: 224396 - RNA, 19 nt, Homo sapiens
  misc_RNA (1)...(19): siRNA sense strand
guugggaugugugauauug

SEQ ID NO: 224397 - RNA, 19 nt, Homo sapiens
  misc_RNA (1)...(19): siRNA sense strand
gugcagagcggcuaaagau

SEQ ID NO: 224398 - RNA, 19 nt, Homo sapiens
  misc_RNA (1)...(19): siRNA sense strand
cuacauagauacuaaugcu

SEQ ID NO: 224399 - RNA, 19 nt, Homo sapiens
  misc_RNA (1)...(19): siRNA sense strand
gcuccauucuagccucuuu

SEQ ID NO: 224400 - RNA, 19 nt, Homo sapiens
  misc_RNA (1)...(19): siRNA sense strand
ucagaggcaccguggaaua

SEQ ID NO: 224401 - RNA, 19 nt, Homo sapiens
  misc_RNA (1)...(19): siRNA sense strand
gaacaaguggcugcacaga

SEQ ID NO: 224402 - RNA, 19 nt, Homo sapiens
  misc_RNA (1)...(19): siRNA sense strand
cagauucaacuuaugauga

SEQ ID NO: 224403 - RNA, 19 nt, Homo sapiens
  misc_RNA (1)...(19): siRNA sense strand
aaaugcaugucaaaucaga

SEQ ID NO: 224404 - RNA, 19 nt, Homo sapiens
  misc_RNA (1)...(19): siRNA sense strand
gacggaagcacauuaaugg

SEQ ID NO: 224405 - RNA, 19 nt, Homo sapiens
  misc_RNA (1)...(19): siRNA sense strand
gaaaacuccuccaaguaug

SEQ ID NO: 224406 - RNA, 19 nt, Homo sapiens
  misc_RNA (1)...(19): siRNA sense strand
gauuccagaaggauuauuu

SEQ ID NO: 224407 - RNA, 19 nt, Homo sapiens
  misc_RNA (1)...(19): siRNA sense strand
cgaggucuuggcacaauua

SEQ ID NO: 224408 - RNA, 19 nt, Homo sapiens
  misc_RNA (1)...(19): siRNA sense strand
uugaauugguuccuccaua

SEQ ID NO: 224409 - RNA, 19 nt, Homo sapiens
  misc_RNA (1)...(19): siRNA sense strand
gagcaaagagagagaaacu

SEQ ID NO: 224410 - RNA, 19 nt, Homo sapiens
  misc_RNA (1)...(19): siRNA sense strand
acacacuaauacagaguuu

SEQ ID NO: 224411 - RNA, 19 nt, Homo sapiens
  misc_RNA (1)...(19): siRNA sense strand
gaaaagaaaagagaaguug

SEQ ID NO: 224412 - RNA, 19 nt, Homo sapiens
  misc_RNA (1)...(19): siRNA sense strand
cuggagacuuuauuacuau

SEQ ID NO: 224413 - RNA, 19 nt, Homo sapiens
  misc_RNA (1)...(19): siRNA sense strand
agacugggauaguuuccaa

SEQ ID NO: 224414 - RNA, 19 nt, Homo sapiens
  misc_RNA (1)...(19): siRNA sense strand
gaggaaacacacuaauaca

SEQ ID NO: 224415 - RNA, 19 nt, Homo sapiens
  misc_RNA (1)...(19): siRNA sense strand
gaaguugccucagguuacg

SEQ ID NO: 224416 - RNA, 19 nt, Homo sapiens
  misc_RNA (1)...(19): siRNA sense strand
ugacggaagcacauuaaug

SEQ ID NO: 224417 - RNA, 19 nt, Homo sapiens
  misc_RNA (1)...(19): siRNA sense strand
cgugaaggaucuccagcaa

SEQ ID NO: 224418 - RNA, 19 nt, Homo sapiens
  misc_RNA (1)...(19): siRNA sense strand
ggucccaccuacuacauag

SEQ ID NO: 224419 - RNA, 19 nt, Homo sapiens
  misc_RNA (1)...(19): siRNA sense strand
aaaaugggaugguugaaga

SEQ ID NO: 224420 - RNA, 19 nt, Homo sapiens
  misc_RNA (1)...(19): siRNA sense strand
uuggguaccuuucaacaga

SEQ ID NO: 224421 - RNA, 19 nt, Homo sapiens
  misc_RNA (1)...(19): siRNA sense strand
uaaagauuccagaaggauu

SEQ ID NO: 224422 - RNA, 19 nt, Homo sapiens
  misc_RNA (1)...(19): siRNA sense strand
gcuaauggucguucuacug

SEQ ID NO: 224423 - RNA, 19 nt, Homo sapiens
  misc_RNA (1)...(19): siRNA sense strand
ggagggaagcaguguguag

SEQ ID NO: 224424 - RNA, 19 nt, Homo sapiens
  misc_RNA (1)...(19): siRNA sense strand
aggaggaaacacacuaaua

SEQ ID NO: 224425 - RNA, 19 nt, Homo sapiens
  misc_RNA (1)...(19): siRNA sense strand
guuccuccauauaugauug

SEQ ID NO: 224426 - RNA, 19 nt, Homo sapiens
  misc_RNA (1)...(19): siRNA sense strand
ugucagauucaacuuauga

SEQ ID NO: 224427 - RNA, 19 nt, Homo sapiens
  misc_RNA (1)...(19): siRNA sense strand
ggaagcaguguguagaaag

SEQ ID NO: 224428 - RNA, 19 nt, Homo sapiens
  misc_RNA (1)...(19): siRNA sense strand
gagacuuuauuacuaugca

SEQ ID NO: 224429 - RNA, 19 nt, Homo sapiens
  misc_RNA (1)...(19): siRNA sense strand
gauuggcggcuccauucua

SEQ ID NO: 224430 - RNA, 19 nt, Homo sapiens
  misc_RNA (1)...(19): siRNA sense strand
acaguggaacggagguuua

SEQ ID NO: 224431 - RNA, 19 nt, Homo sapiens
  misc_RNA (1)...(19): siRNA sense strand
ucagaaaacuccuccaagu

SEQ ID NO: 224432 - RNA, 19 nt, Homo sapiens
  misc_RNA (1)...(19): siRNA sense strand
cggaagcacauuaauggaa

SEQ ID NO: 224433 - RNA, 19 nt, Homo sapiens
  misc_RNA (1)...(19): siRNA sense strand
uauuugacccuuccaaugu

SEQ ID NO: 224434 - RNA, 19 nt, Homo sapiens
  misc_RNA (1)...(19): siRNA sense strand
gagggaagcaguguguaga

SEQ ID NO: 224435 - RNA, 19 nt, Homo sapiens
  misc_RNA (1)...(19): siRNA sense strand
gaaauagauggcgauaaag

SEQ ID NO: 224436 - RNA, 19 nt, Homo sapiens
  misc_RNA (1)...(19): siRNA sense strand
agugucagauucaacuuau

SEQ ID NO: 224437 - RNA, 19 nt, Homo sapiens
  misc_RNA (1)...(19): siRNA sense strand
cgauggcuauguccuucaa

SEQ ID NO: 224438 - RNA, 19 nt, Homo sapiens
  misc_RNA (1)...(19): siRNA sense strand
aaagagagagaaacugaca

SEQ ID NO: 224439 - RNA, 19 nt, Homo sapiens
  misc_RNA (1)...(19): siRNA sense strand
uuacugacagguugaauag

SEQ ID NO: 224440 - RNA, 19 nt, Homo sapiens
  misc_RNA (1)...(19): siRNA sense strand
cgguugaaauugauugcaa

SEQ ID NO: 224441 - RNA, 19 nt, Homo sapiens
  misc_RNA (1)...(19): siRNA sense strand
acugacagaguuaauguuu

SEQ ID NO: 224442 - RNA, 19 nt, Homo sapiens
  misc_RNA (1)...(19): siRNA sense strand
caagcuauuuuggaucaua

SEQ ID NO: 224443 - RNA, 19 nt, Homo sapiens
  misc_RNA (1)...(19): siRNA sense strand
cuacugggcugauuuugga

SEQ ID NO: 224444 - RNA, 19 nt, Homo sapiens
  misc_RNA (1)...(19): siRNA sense strand
agagagagaaacugacaga

SEQ ID NO: 224445 - RNA, 19 nt, Homo sapiens
  misc_RNA (1)...(19): siRNA sense strand
agauggcgauaaaggcaaa

SEQ ID NO: 224446 - RNA, 19 nt, Homo sapiens
  misc_RNA (1)...(19): siRNA sense strand
ucucuauggcaguguaaua

SEQ ID NO: 224447 - RNA, 19 nt, Homo sapiens
  misc_RNA (1)...(19): siRNA sense strand
ggaauacuagagcaaagag

SEQ ID NO: 224448 - RNA, 19 nt, Homo sapiens
  misc_RNA (1)...(19): siRNA sense strand
guaugcgguugaaauugau

SEQ ID NO: 224449 - RNA, 19 nt, Homo sapiens
  misc_RNA (1)...(19): siRNA sense strand
acugacagguugaauagag

SEQ ID NO: 224450 - RNA, 19 nt, Homo sapiens
  misc_RNA (1)...(19): siRNA sense strand
ccacucauaccacugcaau

SEQ ID NO: 224451 - RNA, 19 nt, Homo sapiens
  misc_RNA (1)...(19): siRNA sense strand
agagagaaacugacagagu

SEQ ID NO: 224452 - RNA, 19 nt, Homo sapiens
  misc_RNA (1)...(19): siRNA sense strand
agaugccaacuguucauua

SEQ ID NO: 224453 - RNA, 19 nt, Homo sapiens
  misc_RNA (1)...(19): siRNA sense strand
cagaaaacuccuccaagua

SEQ ID NO: 224454 - RNA, 19 nt, Homo sapiens
  misc_RNA (1)...(19): siRNA sense strand
gagaugacggaagcacauu

SEQ ID NO: 224455 - RNA, 19 nt, Homo sapiens
  misc_RNA (1)...(19): siRNA sense strand
gaaacacuuugacuccuuu

SEQ ID NO: 224456 - RNA, 19 nt, Homo sapiens
  misc_RNA (1)...(19): siRNA sense strand
gagcacgggucccuguuug

SEQ ID NO: 224457 - RNA, 19 nt, Homo sapiens
  misc_RNA (1)...(19): siRNA sense strand
gcucgaagaugcaauucug

SEQ ID NO: 224458 - RNA, 19 nt, Homo sapiens
  misc_RNA (1)...(19): siRNA sense strand
gguacacagugacaauuga

SEQ ID NO: 224459 - RNA, 19 nt, Homo sapiens
  misc_RNA (1)...(19): siRNA sense strand
acgggucccuguuugauua

SEQ ID NO: 224460 - RNA, 19 nt, Homo sapiens
  misc_RNA (1)...(19): siRNA sense strand
gcaacaggaucgacuugag

SEQ ID NO: 224461 - RNA, 19 nt, Homo sapiens
  misc_RNA (1)...(19): siRNA sense strand
uggaagaucccucauguga

SEQ ID NO: 224462 - RNA, 19 nt, Homo sapiens
  misc_RNA (1)...(19): siRNA sense strand
acaagacgcuccaggaucu

SEQ ID NO: 224463 - RNA, 19 nt, Homo sapiens
  misc_RNA (1)...(19): siRNA sense strand
guucagggaagcagagaua

SEQ ID NO: 224464 - RNA, 19 nt, Homo sapiens
  misc_RNA (1)...(19): siRNA sense strand
aauauucucuucucgugaa

SEQ ID NO: 224465 - RNA, 19 nt, Homo sapiens
  misc_RNA (1)...(19): siRNA sense strand
ugaaacacuuugacuccuu

SEQ ID NO: 224466 - RNA, 19 nt, Homo sapiens
  misc_RNA (1)...(19): siRNA sense strand
guacuugaugaaaccauua

SEQ ID NO: 224467 - RNA, 19 nt, Homo sapiens
  misc_RNA (1)...(19): siRNA sense strand
ugauuaagcuggccuuguc

SEQ ID NO: 224468 - RNA, 19 nt, Homo sapiens
  misc_RNA (1)...(19): siRNA sense strand
agaugugucucuccaaaga

SEQ ID NO: 224469 - RNA, 19 nt, Homo sapiens
  misc_RNA (1)...(19): siRNA sense strand
caagggaagccuggaauug

SEQ ID NO: 224470 - RNA, 19 nt, Homo sapiens
  misc_RNA (1)...(19): siRNA sense strand
gcuuguauauugggagauu

SEQ ID NO: 224471 - RNA, 19 nt, Homo sapiens
  misc_RNA (1)...(19): siRNA sense strand
ucagggaagcagagauaua

SEQ ID NO: 224472 - RNA, 19 nt, Homo sapiens
  misc_RNA (1)...(19): siRNA sense strand
caacuacacgugugagaca

SEQ ID NO: 224473 - RNA, 19 nt, Homo sapiens
  misc_RNA (1)...(19): siRNA sense strand
cacuuugacuccuuuaaau

SEQ ID NO: 224474 - RNA, 19 nt, Homo sapiens
  misc_RNA (1)...(19): siRNA sense strand
gcuccaggaucuugucuac

SEQ ID NO: 224475 - RNA, 19 nt, Homo sapiens
  misc_RNA (1)...(19): siRNA sense strand
uggcacaccugcacaugga

SEQ ID NO: 224476 - RNA, 19 nt, Homo sapiens
  misc_RNA (1)...(19): siRNA sense strand
gguccaggcucugcugugu

SEQ ID NO: 224477 - RNA, 19 nt, Homo sapiens
  misc_RNA (1)...(19): siRNA sense strand
uccaggaucuugucuacga

SEQ ID NO: 224478 - RNA, 19 nt, Homo sapiens
  misc_RNA (1)...(19): siRNA sense strand
acacuuugacuccuuuaaa

SEQ ID NO: 224479 - RNA, 19 nt, Homo sapiens
  misc_RNA (1)...(19): siRNA sense strand
ugauguggcugugaaaaua

SEQ ID NO: 224480 - RNA, 19 nt, Homo sapiens
  misc_RNA (1)...(19): siRNA sense strand
guggugauguggcugugaa

SEQ ID NO: 224481 - RNA, 19 nt, Homo sapiens
  misc_RNA (1)...(19): siRNA sense strand
gauggggccugcaugguuu

SEQ ID NO: 224482 - RNA, 19 nt, Homo sapiens
  misc_RNA (1)...(19): siRNA sense strand
gaaccaucguuuuacaaga

SEQ ID NO: 224483 - RNA, 19 nt, Homo sapiens
  misc_RNA (1)...(19): siRNA sense strand
cugcugacaauaaagauaa

SEQ ID NO: 224484 - RNA, 19 nt, Homo sapiens
  misc_RNA (1)...(19): siRNA sense strand
ccaagggaagccuggaauu

SEQ ID NO: 224485 - RNA, 19 nt, Homo sapiens
  misc_RNA (1)...(19): siRNA sense strand
gcacgggucccuguuugau

SEQ ID NO: 224486 - RNA, 19 nt, Homo sapiens
  misc_RNA (1)...(19): siRNA sense strand
gcugcugacaauaaagaua

SEQ ID NO: 224487 - RNA, 19 nt, Homo sapiens
  misc_RNA (1)...(19): siRNA sense strand
ggccuugucugcugcuagu

SEQ ID NO: 224488 - RNA, 19 nt, Homo sapiens
  misc_RNA (1)...(19): siRNA sense strand
ugaaguacuugaugaaacc

SEQ ID NO: 224489 - RNA, 19 nt, Homo sapiens
  misc_RNA (1)...(19): siRNA sense strand
cccucgggcuuguauauug

SEQ ID NO: 224490 - RNA, 19 nt, Homo sapiens
  misc_RNA (1)...(19): siRNA sense strand
gcccaguggucaccucaag

SEQ ID NO: 224491 - RNA, 19 nt, Homo sapiens
  misc_RNA (1)...(19): siRNA sense strand
gaaccgguacacagugaca

SEQ ID NO: 224492 - RNA, 19 nt, Homo sapiens
  misc_RNA (1)...(19): siRNA sense strand
cugaaccgguacacaguga

SEQ ID NO: 224493 - RNA, 19 nt, Homo sapiens
  misc_RNA (1)...(19): siRNA sense strand
gcaacacccacugcugcua

SEQ ID NO: 224494 - RNA, 19 nt, Homo sapiens
  misc_RNA (1)...(19): siRNA sense strand
auacauggccccugaagua

SEQ ID NO: 224495 - RNA, 19 nt, Homo sapiens
  misc_RNA (1)...(19): siRNA sense strand
caauugaggggaugauuaa

SEQ ID NO: 224496 - RNA, 19 nt, Homo sapiens
  misc_RNA (1)...(19): siRNA sense strand
ccaguggucaccucaagga

SEQ ID NO: 224497 - RNA, 19 nt, Homo sapiens
  misc_RNA (1)...(19): siRNA sense strand
ucacugacaccauugacau

SEQ ID NO: 224498 - RNA, 19 nt, Homo sapiens
  misc_RNA (1)...(19): siRNA sense strand
gaauugcucaucgagacuu

SEQ ID NO: 224499 - RNA, 19 nt, Homo sapiens
  misc_RNA (1)...(19): siRNA sense strand
agcuguggcuuguuucuga

SEQ ID NO: 224500 - RNA, 19 nt, Homo sapiens
  misc_RNA (1)...(19): siRNA sense strand
uccuuuaaaugugcugaua

SEQ ID NO: 224501 - RNA, 19 nt, Homo sapiens
  misc_RNA (1)...(19): siRNA sense strand
aauugcucaucgagacuua

SEQ ID NO: 224502 - RNA, 19 nt, Homo sapiens
  misc_RNA (1)...(19): siRNA sense strand
cugaaguacuugaugaaac

SEQ ID NO: 224503 - RNA, 19 nt, Homo sapiens
  misc_RNA (1)...(19): siRNA sense strand
cucaucaucaucauuguuu

SEQ ID NO: 224504 - RNA, 19 nt, Homo sapiens
  misc_RNA (1)...(19): siRNA sense strand
gcuuguuucugacuaucau

SEQ ID NO: 224505 - RNA, 19 nt, Homo sapiens
  misc_RNA (1)...(19): siRNA sense strand
cagggaagcagagauauac

SEQ ID NO: 224506 - RNA, 19 nt, Homo sapiens
  misc_RNA (1)...(19): siRNA sense strand
agacaagacgcuccaggau

SEQ ID NO: 224507 - RNA, 19 nt, Homo sapiens
  misc_RNA (1)...(19): siRNA sense strand
gcaccugcauccccaaagu

SEQ ID NO: 224508 - RNA, 19 nt, Homo sapiens
  misc_RNA (1)...(19): siRNA sense strand
aguacuugaugaaaccauu

SEQ ID NO: 224509 - RNA, 19 nt, Homo sapiens
  misc_RNA (1)...(19): siRNA sense strand
ugagcacgggucccuguuu

SEQ ID NO: 224510 - RNA, 19 nt, Homo sapiens
  misc_RNA (1)...(19): siRNA sense strand
gaaacacuuugacuccuuu

SEQ ID NO: 224511 - RNA, 19 nt, Homo sapiens
  misc_RNA (1)...(19): siRNA sense strand
gagcacgggucccuguuug

SEQ ID NO: 224512 - RNA, 19 nt, Homo sapiens
  misc_RNA (1)...(19): siRNA sense strand
gcucgaagaugcaauucug

SEQ ID NO: 224513 - RNA, 19 nt, Homo sapiens
  misc_RNA (1)...(19): siRNA sense strand
gguacacagugacaauuga

SEQ ID NO: 224514 - RNA, 19 nt, Homo sapiens
  misc_RNA (1)...(19): siRNA sense strand
acgggucccuguuugauua

SEQ ID NO: 224515 - RNA, 19 nt, Homo sapiens
  misc_RNA (1)...(19): siRNA sense strand
gcaacaggaucgacuugag

SEQ ID NO: 224516 - RNA, 19 nt, Homo sapiens
  misc_RNA (1)...(19): siRNA sense strand
uggaagaucccucauguga

SEQ ID NO: 224517 - RNA, 19 nt, Homo sapiens
  misc_RNA (1)...(19): siRNA sense strand
acaagacgcuccaggaucu

SEQ ID NO: 224518 - RNA, 19 nt, Homo sapiens
  misc_RNA (1)...(19): siRNA sense strand
guucagggaagcagagaua

SEQ ID NO: 224519 - RNA, 19 nt, Homo sapiens
  misc_RNA (1)...(19): siRNA sense strand
aauauucucuucucgugaa

SEQ ID NO: 224520 - RNA, 19 nt, Homo sapiens
  misc_RNA (1)...(19): siRNA sense strand
ugaaacacuuugacuccuu

SEQ ID NO: 224521 - RNA, 19 nt, Homo sapiens
  misc_RNA (1)...(19): siRNA sense strand
guacuugaugaaaccauua

SEQ ID NO: 224522 - RNA, 19 nt, Homo sapiens
  misc_RNA (1)...(19): siRNA sense strand
ugauuaagcuggccuuguc

SEQ ID NO: 224523 - RNA, 19 nt, Homo sapiens
  misc_RNA (1)...(19): siRNA sense strand
agaugugucucuccaaaga

SEQ ID NO: 224524 - RNA, 19 nt, Homo sapiens
  misc_RNA (1)...(19): siRNA sense strand
caagggaagccuggaauug

SEQ ID NO: 224525 - RNA, 19 nt, Homo sapiens
  misc_RNA (1)...(19): siRNA sense strand
gcuuguauauugggagauu

SEQ ID NO: 224526 - RNA, 19 nt, Homo sapiens
  misc_RNA (1)...(19): siRNA sense strand
ucagggaagcagagauaua

SEQ ID NO: 224527 - RNA, 19 nt, Homo sapiens
  misc_RNA (1)...(19): siRNA sense strand
caacuacacgugugagaca

SEQ ID NO: 224528 - RNA, 19 nt, Homo sapiens
  misc_RNA (1)...(19): siRNA sense strand
cacuuugacuccuuuaaau

SEQ ID NO: 224529 - RNA, 19 nt, Homo sapiens
  misc_RNA (1)...(19): siRNA sense strand
gcuccaggaucuugucuac

SEQ ID NO: 224530 - RNA, 19 nt, Homo sapiens
  misc_RNA (1)...(19): siRNA sense strand
uggcacaccugcacaugga

SEQ ID NO: 224531 - RNA, 19 nt, Homo sapiens
  misc_RNA (1)...(19): siRNA sense strand
gguccaggcucugcugugu

SEQ ID NO: 224532 - RNA, 19 nt, Homo sapiens
  misc_RNA (1)...(19): siRNA sense strand
uccaggaucuugucuacga

SEQ ID NO: 224533 - RNA, 19 nt, Homo sapiens
  misc_RNA (1)...(19): siRNA sense strand
acacuuugacuccuuuaaa

SEQ ID NO: 224534 - RNA, 19 nt, Homo sapiens
  misc_RNA (1)...(19): siRNA sense strand
ugauguggcugugaaaaua

SEQ ID NO: 224535 - RNA, 19 nt, Homo sapiens
  misc_RNA (1)...(19): siRNA sense strand
guggugauguggcugugaa

SEQ ID NO: 224536 - RNA, 19 nt, Homo sapiens
  misc_RNA (1)...(19): siRNA sense strand
gauggggccugcaugguuu

SEQ ID NO: 224537 - RNA, 19 nt, Homo sapiens
  misc_RNA (1)...(19): siRNA sense strand
gaaccaucguuuuacaaga

SEQ ID NO: 224538 - RNA, 19 nt, Homo sapiens
  misc_RNA (1)...(19): siRNA sense strand
cugcugacaauaaagauaa

SEQ ID NO: 224539 - RNA, 19 nt, Homo sapiens
  misc_RNA (1)...(19): siRNA sense strand
ccaagggaagccuggaauu

SEQ ID NO: 224540 - RNA, 19 nt, Homo sapiens
  misc_RNA (1)...(19): siRNA sense strand
gcacgggucccuguuugau

SEQ ID NO: 224541 - RNA, 19 nt, Homo sapiens
  misc_RNA (1)...(19): siRNA sense strand
gcugcugacaauaaagaua

SEQ ID NO: 224542 - RNA, 19 nt, Homo sapiens
  misc_RNA (1)...(19): siRNA sense strand
ggccuugucugcugcuagu

SEQ ID NO: 224543 - RNA, 19 nt, Homo sapiens
  misc_RNA (1)...(19): siRNA sense strand
ugaaguacuugaugaaacc

SEQ ID NO: 224544 - RNA, 19 nt, Homo sapiens
  misc_RNA (1)...(19): siRNA sense strand
cccucgggcuuguauauug

SEQ ID NO: 224545 - RNA, 19 nt, Homo sapiens
  misc_RNA (1)...(19): siRNA sense strand
gcccaguggucaccucaag

SEQ ID NO: 224546 - RNA, 19 nt, Homo sapiens
  misc_RNA (1)...(19): siRNA sense strand
gaaccgguacacagugaca

SEQ ID NO: 224547 - RNA, 19 nt, Homo sapiens
  misc_RNA (1)...(19): siRNA sense strand
cugaaccgguacacaguga

SEQ ID NO: 224548 - RNA, 19 nt, Homo sapiens
  misc_RNA (1)...(19): siRNA sense strand
gcaacacccacugcugcua

SEQ ID NO: 224549 - RNA, 19 nt, Homo sapiens
  misc_RNA (1)...(19): siRNA sense strand
auacauggccccugaagua

SEQ ID NO: 224550 - RNA, 19 nt, Homo sapiens
  misc_RNA (1)...(19): siRNA sense strand
caauugaggggaugauuaa

SEQ ID NO: 224551 - RNA, 19 nt, Homo sapiens
  misc_RNA (1)...(19): siRNA sense strand
ccaguggucaccucaagga

SEQ ID NO: 224552 - RNA, 19 nt, Homo sapiens
  misc_RNA (1)...(19): siRNA sense strand
ucacugacaccauugacau

SEQ ID NO: 224553 - RNA, 19 nt, Homo sapiens
  misc_RNA (1)...(19): siRNA sense strand
gaauugcucaucgagacuu

SEQ ID NO: 224554 - RNA, 19 nt, Homo sapiens
  misc_RNA (1)...(19): siRNA sense strand
agcuguggcuuguuucuga

SEQ ID NO: 224555 - RNA, 19 nt, Homo sapiens
  misc_RNA (1)...(19): siRNA sense strand
uccuuuaaaugugcugaua

SEQ ID NO: 224556 - RNA, 19 nt, Homo sapiens
  misc_RNA (1)...(19): siRNA sense strand
aauugcucaucgagacuua

SEQ ID NO: 224557 - RNA, 19 nt, Homo sapiens
  misc_RNA (1)...(19): siRNA sense strand
cugaaguacuugaugaaac

SEQ ID NO: 224558 - RNA, 19 nt, Homo sapiens
  misc_RNA (1)...(19): siRNA sense strand
cucaucaucaucauuguuu

SEQ ID NO: 224559 - RNA, 19 nt, Homo sapiens
  misc_RNA (1)...(19): siRNA sense strand
gcuuguuucugacuaucau

SEQ ID NO: 224560 - RNA, 19 nt, Homo sapiens
  misc_RNA (1)...(19): siRNA sense strand
cagggaagcagagauauac

SEQ ID NO: 224561 - RNA, 19 nt, Homo sapiens
  misc_RNA (1)...(19): siRNA sense strand
agacaagacgcuccaggau

SEQ ID NO: 224562 - RNA, 19 nt, Homo sapiens
  misc_RNA (1)...(19): siRNA sense strand
gcaccugcauccccaaagu

SEQ ID NO: 224563 - RNA, 19 nt, Homo sapiens
  misc_RNA (1)...(19): siRNA sense strand
aguacuugaugaaaccauu

SEQ ID NO: 224564 - RNA, 19 nt, Homo sapiens
  misc_RNA (1)...(19): siRNA sense strand
ugagcacgggucccuguuu

SEQ ID NO: 224565 - RNA, 19 nt, Homo sapiens
  misc_RNA (1)...(19): siRNA sense strand
gaaacacuuugacuccuuu

SEQ ID NO: 224566 - RNA, 19 nt, Homo sapiens
  misc_RNA (1)...(19): siRNA sense strand
gagcacgggucccuguuug

SEQ ID NO: 224567 - RNA, 19 nt, Homo sapiens
  misc_RNA (1)...(19): siRNA sense strand
gcucgaagaugcaauucug

SEQ ID NO: 224568 - RNA, 19 nt, Homo sapiens
  misc_RNA (1)...(19): siRNA sense strand
gguacacagugacaauuga

SEQ ID NO: 224569 - RNA, 19 nt, Homo sapiens
  misc_RNA (1)...(19): siRNA sense strand
acgggucccuguuugauua

SEQ ID NO: 224570 - RNA, 19 nt, Homo sapiens
  misc_RNA (1)...(19): siRNA sense strand
gcaacaggaucgacuugag

SEQ ID NO: 224571 - RNA, 19 nt, Homo sapiens
  misc_RNA (1)...(19): siRNA sense strand
uggaagaucccucauguga

SEQ ID NO: 224572 - RNA, 19 nt, Homo sapiens
  misc_RNA (1)...(19): siRNA sense strand
acaagacgcuccaggaucu

SEQ ID NO: 224573 - RNA, 19 nt, Homo sapiens
  misc_RNA (1)...(19): siRNA sense strand
guucagggaagcagagaua

SEQ ID NO: 224574 - RNA, 19 nt, Homo sapiens
  misc_RNA (1)...(19): siRNA sense strand
aauauucucuucucgugaa

SEQ ID NO: 224575 - RNA, 19 nt, Homo sapiens
  misc_RNA (1)...(19): siRNA sense strand
ugaaacacuuugacuccuu

SEQ ID NO: 224576 - RNA, 19 nt, Homo sapiens
  misc_RNA (1)...(19): siRNA sense strand
guacuugaugaaaccauua

SEQ ID NO: 224577 - RNA, 19 nt, Homo sapiens
  misc_RNA (1)...(19): siRNA sense strand
ugauuaagcuggccuuguc

SEQ ID NO: 224578 - RNA, 19 nt, Homo sapiens
  misc_RNA (1)...(19): siRNA sense strand
agaugugucucuccaaaga

SEQ ID NO: 224579 - RNA, 19 nt, Homo sapiens
  misc_RNA (1)...(19): siRNA sense strand
caagggaagccuggaauug

SEQ ID NO: 224580 - RNA, 19 nt, Homo sapiens
  misc_RNA (1)...(19): siRNA sense strand
gcuuguauauugggagauu

SEQ ID NO: 224581 - RNA, 19 nt, Homo sapiens
  misc_RNA (1)...(19): siRNA sense strand
ucagggaagcagagauaua

SEQ ID NO: 224582 - RNA, 19 nt, Homo sapiens
  misc_RNA (1)...(19): siRNA sense strand
caacuacacgugugagaca

SEQ ID NO: 224583 - RNA, 19 nt, Homo sapiens
  misc_RNA (1)...(19): siRNA sense strand
cacuuugacuccuuuaaau

SEQ ID NO: 224584 - RNA, 19 nt, Homo sapiens
  misc_RNA (1)...(19): siRNA sense strand
gcuccaggaucuugucuac

SEQ ID NO: 224585 - RNA, 19 nt, Homo sapiens
  misc_RNA (1)...(19): siRNA sense strand
uggcacaccugcacaugga

SEQ ID NO: 224586 - RNA, 19 nt, Homo sapiens
  misc_RNA (1)...(19): siRNA sense strand
gguccaggcucugcugugu

SEQ ID NO: 224587 - RNA, 19 nt, Homo sapiens
  misc_RNA (1)...(19): siRNA sense strand
uccaggaucuugucuacga

SEQ ID NO: 224588 - RNA, 19 nt, Homo sapiens
  misc_RNA (1)...(19): siRNA sense strand
acacuuugacuccuuuaaa

SEQ ID NO: 224589 - RNA, 19 nt, Homo sapiens
  misc_RNA (1)...(19): siRNA sense strand
ugauguggcugugaaaaua

SEQ ID NO: 224590 - RNA, 19 nt, Homo sapiens
  misc_RNA (1)...(19): siRNA sense strand
guggugauguggcugugaa

SEQ ID NO: 224591 - RNA, 19 nt, Homo sapiens
  misc_RNA (1)...(19): siRNA sense strand
gauggggccugcaugguuu

SEQ ID NO: 224592 - RNA, 19 nt, Homo sapiens
  misc_RNA (1)...(19): siRNA sense strand
gaaccaucguuuuacaaga

SEQ ID NO: 224593 - RNA, 19 nt, Homo sapiens
  misc_RNA (1)...(19): siRNA sense strand
cugcugacaauaaagauaa

SEQ ID NO: 224594 - RNA, 19 nt, Homo sapiens
  misc_RNA (1)...(19): siRNA sense strand
ccaagggaagccuggaauu

SEQ ID NO: 224595 - RNA, 19 nt, Homo sapiens
  misc_RNA (1)...(19): siRNA sense strand
gcacgggucccuguuugau

SEQ ID NO: 224596 - RNA, 19 nt, Homo sapiens
  misc_RNA (1)...(19): siRNA sense strand
gcugcugacaauaaagaua

SEQ ID NO: 224597 - RNA, 19 nt, Homo sapiens
  misc_RNA (1)...(19): siRNA sense strand
ggccuugucugcugcuagu

SEQ ID NO: 224598 - RNA, 19 nt, Homo sapiens
  misc_RNA (1)...(19): siRNA sense strand
ugaaguacuugaugaaacc

SEQ ID NO: 224599 - RNA, 19 nt, Homo sapiens
  misc_RNA (1)...(19): siRNA sense strand
cccucgggcuuguauauug

SEQ ID NO: 224600 - RNA, 19 nt, Homo sapiens
  misc_RNA (1)...(19): siRNA sense strand
gcccaguggucaccucaag

SEQ ID NO: 224601 - RNA, 19 nt, Homo sapiens
  misc_RNA (1)...(19): siRNA sense strand
gaaccgguacacagugaca

SEQ ID NO: 224602 - RNA, 19 nt, Homo sapiens
  misc_RNA (1)...(19): siRNA sense strand
cugaaccgguacacaguga

SEQ ID NO: 224603 - RNA, 19 nt, Homo sapiens
  misc_RNA (1)...(19): siRNA sense strand
gcaacacccacugcugcua

SEQ ID NO: 224604 - RNA, 19 nt, Homo sapiens
  misc_RNA (1)...(19): siRNA sense strand
auacauggccccugaagua

SEQ ID NO: 224605 - RNA, 19 nt, Homo sapiens
  misc_RNA (1)...(19): siRNA sense strand
caauugaggggaugauuaa

SEQ ID NO: 224606 - RNA, 19 nt, Homo sapiens
  misc_RNA (1)...(19): siRNA sense strand
ccaguggucaccucaagga

SEQ ID NO: 224607 - RNA, 19 nt, Homo sapiens
  misc_RNA (1)...(19): siRNA sense strand
ucacugacaccauugacau

SEQ ID NO: 224608 - RNA, 19 nt, Homo sapiens
  misc_RNA (1)...(19): siRNA sense strand
gaauugcucaucgagacuu

SEQ ID NO: 224609 - RNA, 19 nt, Homo sapiens
  misc_RNA (1)...(19): siRNA sense strand
agcuguggcuuguuucuga

SEQ ID NO: 224610 - RNA, 19 nt, Homo sapiens
  misc_RNA (1)...(19): siRNA sense strand
uccuuuaaaugugcugaua

SEQ ID NO: 224611 - RNA, 19 nt, Homo sapiens
  misc_RNA (1)...(19): siRNA sense strand
aauugcucaucgagacuua

SEQ ID NO: 224612 - RNA, 19 nt, Homo sapiens
  misc_RNA (1)...(19): siRNA sense strand
cugaaguacuugaugaaac

SEQ ID NO: 224613 - RNA, 19 nt, Homo sapiens
  misc_RNA (1)...(19): siRNA sense strand
cucaucaucaucauuguuu

SEQ ID NO: 224614 - RNA, 19 nt, Homo sapiens
  misc_RNA (1)...(19): siRNA sense strand
gcuuguuucugacuaucau

SEQ ID NO: 224615 - RNA, 19 nt, Homo sapiens
  misc_RNA (1)...(19): siRNA sense strand
cagggaagcagagauauac

SEQ ID NO: 224616 - RNA, 19 nt, Homo sapiens
  misc_RNA (1)...(19): siRNA sense strand
agacaagacgcuccaggau

SEQ ID NO: 224617 - RNA, 19 nt, Homo sapiens
  misc_RNA (1)...(19): siRNA sense strand
gcaccugcauccccaaagu

SEQ ID NO: 224618 - RNA, 19 nt, Homo sapiens
  misc_RNA (1)...(19): siRNA sense strand
aguacuugaugaaaccauu

SEQ ID NO: 224619 - RNA, 19 nt, Homo sapiens
  misc_RNA (1)...(19): siRNA sense strand
ugagcacgggucccuguuu

SEQ ID NO: 224620 - RNA, 19 nt, Homo sapiens
  misc_RNA (1)...(19): siRNA sense strand
ugaaagacaugaagaaaga

SEQ ID NO: 224621 - RNA, 19 nt, Homo sapiens
  misc_RNA (1)...(19): siRNA sense strand
gcacguggcugacgagaug

SEQ ID NO: 224622 - RNA, 19 nt, Homo sapiens
  misc_RNA (1)...(19): siRNA sense strand
gaagagaaggguauugaaa

SEQ ID NO: 224623 - RNA, 19 nt, Homo sapiens
  misc_RNA (1)...(19): siRNA sense strand
gagaaacaccuuccucuug

SEQ ID NO: 224624 - RNA, 19 nt, Homo sapiens
  misc_RNA (1)...(19): siRNA sense strand
gaauuggacugguguugga

SEQ ID NO: 224625 - RNA, 19 nt, Homo sapiens
  misc_RNA (1)...(19): siRNA sense strand
caacuuugcugacuucuac

SEQ ID NO: 224626 - RNA, 19 nt, Homo sapiens
  misc_RNA (1)...(19): siRNA sense strand
gagcacgacuuaccuaugg

SEQ ID NO: 224627 - RNA, 19 nt, Homo sapiens
  misc_RNA (1)...(19): siRNA sense strand
gaaggaacgugucuaugag

SEQ ID NO: 224628 - RNA, 19 nt, Homo sapiens
  misc_RNA (1)...(19): siRNA sense strand
gaacgucagcauccucuuu

SEQ ID NO: 224629 - RNA, 19 nt, Homo sapiens
  misc_RNA (1)...(19): siRNA sense strand
gggauaagcuagccaccuu

SEQ ID NO: 224630 - RNA, 19 nt, Homo sapiens
  misc_RNA (1)...(19): siRNA sense strand
gaggagagcaucaacaaug

SEQ ID NO: 224631 - RNA, 19 nt, Homo sapiens
  misc_RNA (1)...(19): siRNA sense strand
gugauuaccuagaagagaa

SEQ ID NO: 224632 - RNA, 19 nt, Homo sapiens
  misc_RNA (1)...(19): siRNA sense strand
caucaacaauggugguauu

SEQ ID NO: 224633 - RNA, 19 nt, Homo sapiens
  misc_RNA (1)...(19): siRNA sense strand
caggagaaccucaugcuuu

SEQ ID NO: 224634 - RNA, 19 nt, Homo sapiens
  misc_RNA (1)...(19): siRNA sense strand
gaguacggcuuccgcuuug

SEQ ID NO: 224635 - RNA, 19 nt, Homo sapiens
  misc_RNA (1)...(19): siRNA sense strand
ccagacguaugaugagauu

SEQ ID NO: 224636 - RNA, 19 nt, Homo sapiens
  misc_RNA (1)...(19): siRNA sense strand
gagaugaggagcuguauag

SEQ ID NO: 224637 - RNA, 19 nt, Homo sapiens
  misc_RNA (1)...(19): siRNA sense strand
agaaacaccuuccucuugu

SEQ ID NO: 224638 - RNA, 19 nt, Homo sapiens
  misc_RNA (1)...(19): siRNA sense strand
agaaggaacgugucuauga

SEQ ID NO: 224639 - RNA, 19 nt, Homo sapiens
  misc_RNA (1)...(19): siRNA sense strand
ggacugguguuggacauca

SEQ ID NO: 224640 - RNA, 19 nt, Homo sapiens
  misc_RNA (1)...(19): siRNA sense strand
gcgagaguccgcccaagua

SEQ ID NO: 224641 - RNA, 19 nt, Homo sapiens
  misc_RNA (1)...(19): siRNA sense strand
agaaggguauugaaaccua

SEQ ID NO: 224642 - RNA, 19 nt, Homo sapiens
  misc_RNA (1)...(19): siRNA sense strand
caaacuaugugaccuucau

SEQ ID NO: 224643 - RNA, 19 nt, Homo sapiens
  misc_RNA (1)...(19): siRNA sense strand
ucagcugucuccaguacua

SEQ ID NO: 224644 - RNA, 19 nt, Homo sapiens
  misc_RNA (1)...(19): siRNA sense strand
uagagcagaugcaaggauu

SEQ ID NO: 224645 - RNA, 19 nt, Homo sapiens
  misc_RNA (1)...(19): siRNA sense strand
gcauaggcaugaacaaagg

SEQ ID NO: 224646 - RNA, 19 nt, Homo sapiens
  misc_RNA (1)...(19): siRNA sense strand
gcucauaaccgcccagauc

SEQ ID NO: 224647 - RNA, 19 nt, Homo sapiens
  misc_RNA (1)...(19): siRNA sense strand
gugaugguguuccucauga

SEQ ID NO: 224648 - RNA, 19 nt, Homo sapiens
  misc_RNA (1)...(19): siRNA sense strand
ucaaccagcugcucaacga

SEQ ID NO: 224649 - RNA, 19 nt, Homo sapiens
  misc_RNA (1)...(19): siRNA sense strand
gaaaccuaccucaucauug

SEQ ID NO: 224650 - RNA, 19 nt, Homo sapiens
  misc_RNA (1)...(19): siRNA sense strand
cugcugaccuucuucuuga

SEQ ID NO: 224651 - RNA, 19 nt, Homo sapiens
  misc_RNA (1)...(19): siRNA sense strand
aaaccuaccucaucauugc

SEQ ID NO: 224652 - RNA, 19 nt, Homo sapiens
  misc_RNA (1)...(19): siRNA sense strand
gcuggcaggucuucuuugu

SEQ ID NO: 224653 - RNA, 19 nt, Homo sapiens
  misc_RNA (1)...(19): siRNA sense strand
gcuacucgguggagaagga

SEQ ID NO: 224654 - RNA, 19 nt, Homo sapiens
  misc_RNA (1)...(19): siRNA sense strand
gaaacaccuuccucuuguc

SEQ ID NO: 224655 - RNA, 19 nt, Homo sapiens
  misc_RNA (1)...(19): siRNA sense strand
gggcaacauucagguggua

SEQ ID NO: 224656 - RNA, 19 nt, Homo sapiens
  misc_RNA (1)...(19): siRNA sense strand
gagauuggagucauguuug

SEQ ID NO: 224657 - RNA, 19 nt, Homo sapiens
  misc_RNA (1)...(19): siRNA sense strand
gcaccagcuuccucaaagu

SEQ ID NO: 224658 - RNA, 19 nt, Homo sapiens
  misc_RNA (1)...(19): siRNA sense strand
aaacuggcacggacacuuu

SEQ ID NO: 224659 - RNA, 19 nt, Homo sapiens
  misc_RNA (1)...(19): siRNA sense strand
gcucagcugucuccaguac

SEQ ID NO: 224660 - RNA, 19 nt, Homo sapiens
  misc_RNA (1)...(19): siRNA sense strand
gaaaacagccacccagaau

SEQ ID NO: 224661 - RNA, 19 nt, Homo sapiens
  misc_RNA (1)...(19): siRNA sense strand
gcgcauaggcaugaacaaa

SEQ ID NO: 224662 - RNA, 19 nt, Homo sapiens
  misc_RNA (1)...(19): siRNA sense strand
aacaaccaguccuucaaua

SEQ ID NO: 224663 - RNA, 19 nt, Homo sapiens
  misc_RNA (1)...(19): siRNA sense strand
caacaaccaguccuucaau

SEQ ID NO: 224664 - RNA, 19 nt, Homo sapiens
  misc_RNA (1)...(19): siRNA sense strand
gagcaccagcuuccucaaa

SEQ ID NO: 224665 - RNA, 19 nt, Homo sapiens
  misc_RNA (1)...(19): siRNA sense strand
cugacgagaugcugaaaga

SEQ ID NO: 224666 - RNA, 19 nt, Homo sapiens
  misc_RNA (1)...(19): siRNA sense strand
gaaaccacacuacgacauc

SEQ ID NO: 224667 - RNA, 19 nt, Homo sapiens
  misc_RNA (1)...(19): siRNA sense strand
ggucuuugcagcccucuuu

SEQ ID NO: 224668 - RNA, 19 nt, Homo sapiens
  misc_RNA (1)...(19): siRNA sense strand
gcugaaagacaugaagaaa

SEQ ID NO: 224669 - RNA, 19 nt, Homo sapiens
  misc_RNA (1)...(19): siRNA sense strand
ggaagacaaguccgagaga

SEQ ID NO: 224670 - RNA, 19 nt, Homo sapiens
  misc_RNA (1)...(19): siRNA sense strand
cuacuucucccgccacgua

SEQ ID NO: 224671 - RNA, 19 nt, Homo sapiens
  misc_RNA (1)...(19): siRNA sense strand
ccgcugugauuaccuagaa

SEQ ID NO: 224672 - RNA, 19 nt, Homo sapiens
  misc_RNA (1)...(19): siRNA sense strand
uaaagaagagaaacaccuu

SEQ ID NO: 224673 - RNA, 19 nt, Homo sapiens
  misc_RNA (1)...(19): siRNA sense strand
agaagaaacccaagucauc

SEQ ID NO: 224674 - RNA, 19 nt, Homo sapiens
  misc_RNA (1)...(19): siRNA sense strand
gcgcuggccaugaaggaua

SEQ ID NO: 224675 - RNA, 19 nt, Homo sapiens
  misc_RNA (1)...(19): siRNA sense strand
ccaaguauuacaacuaugu

SEQ ID NO: 224676 - RNA, 19 nt, Homo sapiens
  misc_RNA (1)...(19): siRNA sense strand
ugaaaccuaccucaucauu

SEQ ID NO: 224677 - RNA, 19 nt, Homo sapiens
  misc_RNA (1)...(19): siRNA sense strand
acaaccaguccuucaauaa

SEQ ID NO: 224678 - RNA, 19 nt, Homo sapiens
  misc_RNA (1)...(19): siRNA sense strand
ccagaaggaacgugucuau

SEQ ID NO: 224679 - RNA, 19 nt, Homo sapiens
  misc_RNA (1)...(19): siRNA sense strand
agaguccgcccaaguagua

SEQ ID NO: 224680 - RNA, 19 nt, Homo sapiens
  misc_RNA (1)...(19): siRNA sense strand
aggagaaccucaugcuuuc

SEQ ID NO: 224681 - RNA, 19 nt, Homo sapiens
  misc_RNA (1)...(19): siRNA sense strand
gcccaacuuugcugacuuc

SEQ ID NO: 224682 - RNA, 19 nt, Homo sapiens
  misc_RNA (1)...(19): siRNA sense strand
uggcaggucuucuuugucu

SEQ ID NO: 224683 - RNA, 19 nt, Homo sapiens
  misc_RNA (1)...(19): siRNA sense strand
acauucaggugguagaaga

SEQ ID NO: 224684 - RNA, 19 nt, Homo sapiens
  misc_RNA (1)...(19): siRNA sense strand
cagaggagagcaucaacaa

SEQ ID NO: 224685 - RNA, 19 nt, Homo sapiens
  misc_RNA (1)...(19): siRNA sense strand
caccauggacugccugaaa

SEQ ID NO: 224686 - RNA, 19 nt, Homo sapiens
  misc_RNA (1)...(19): siRNA sense strand
gaaagacgagagccagaag

SEQ ID NO: 224687 - RNA, 19 nt, Homo sapiens
  misc_RNA (1)...(19): siRNA sense strand
cuaccagaccuacuucaaa

SEQ ID NO: 224688 - RNA, 19 nt, Homo sapiens
  misc_RNA (1)...(19): siRNA sense strand
gggagcugcugaccuucuu

SEQ ID NO: 224689 - RNA, 19 nt, Homo sapiens
  misc_RNA (1)...(19): siRNA sense strand
ucaccaacaucaacaacca

SEQ ID NO: 224690 - RNA, 19 nt, Homo sapiens
  misc_RNA (1)...(19): siRNA sense strand
ugagauuggagucauguuu

SEQ ID NO: 224691 - RNA, 19 nt, Homo sapiens
  misc_RNA (1)...(19): siRNA sense strand
uagaagagaaggguauuga

SEQ ID NO: 224692 - RNA, 19 nt, Homo sapiens
  misc_RNA (1)...(19): siRNA sense strand
gauccuggccaacgucuuc

SEQ ID NO: 224693 - RNA, 19 nt, Homo sapiens
  misc_RNA (1)...(19): siRNA sense strand
uggcugaccuggccgacuu

SEQ ID NO: 224694 - RNA, 19 nt, Homo sapiens
  misc_RNA (1)...(19): siRNA sense strand
uggagaaccccaaguauua

SEQ ID NO: 224695 - RNA, 19 nt, Homo sapiens
  misc_RNA (1)...(19): siRNA sense strand
guggaugccucugaagaug

SEQ ID NO: 224696 - RNA, 19 nt, Homo sapiens
  misc_RNA (1)...(19): siRNA sense strand
gaagaugaaccuggaagag

SEQ ID NO: 224697 - RNA, 19 nt, Homo sapiens
  misc_RNA (1)...(19): siRNA sense strand
ccgcccagaucuucuccua

SEQ ID NO: 224698 - RNA, 19 nt, Homo sapiens
  misc_RNA (1)...(19): siRNA sense strand
caagucauccuccgagagu

SEQ ID NO: 224699 - RNA, 19 nt, Homo sapiens
  misc_RNA (1)...(19): siRNA sense strand
ggaaaccacacuacgacau

SEQ ID NO: 224700 - RNA, 19 nt, Homo sapiens
  misc_RNA (1)...(19): siRNA sense strand
guauugagugucugcguuu

SEQ ID NO: 224701 - RNA, 19 nt, Homo sapiens
  misc_RNA (1)...(19): siRNA sense strand
gcaggucuucuuugucuuc

SEQ ID NO: 224702 - RNA, 19 nt, Homo sapiens
  misc_RNA (1)...(19): siRNA sense strand
gcaggagaaccucaugcuu

SEQ ID NO: 224703 - RNA, 19 nt, Homo sapiens
  misc_RNA (1)...(19): siRNA sense strand
guagaagaaacccaaguca

SEQ ID NO: 224704 - RNA, 19 nt, Homo sapiens
  misc_RNA (1)...(19): siRNA sense strand
ggucaucggagcccggaaa

SEQ ID NO: 224705 - RNA, 19 nt, Homo sapiens
  misc_RNA (1)...(19): siRNA sense strand
aggauacgcucaccaacau

SEQ ID NO: 224706 - RNA, 19 nt, Homo sapiens
  misc_RNA (1)...(19): siRNA sense strand
ugaaggauacgcucaccaa

SEQ ID NO: 224707 - RNA, 19 nt, Homo sapiens
  misc_RNA (1)...(19): siRNA sense strand
gugccugccucgcuucaug

SEQ ID NO: 224708 - RNA, 19 nt, Homo sapiens
  misc_RNA (1)...(19): siRNA sense strand
gagcagaugcaaggauuca

SEQ ID NO: 224709 - RNA, 19 nt, Homo sapiens
  misc_RNA (1)...(19): siRNA sense strand
gggccaugcucgccaucuu

SEQ ID NO: 224710 - RNA, 19 nt, Homo sapiens
  misc_RNA (1)...(19): siRNA sense strand
cuaaugacaaacuauguga

SEQ ID NO: 224711 - RNA, 19 nt, Homo sapiens
  misc_RNA (1)...(19): siRNA sense strand
ggaugccucugaagaugag

SEQ ID NO: 224712 - RNA, 19 nt, Homo sapiens
  misc_RNA (1)...(19): siRNA sense strand
aaacagccacccagaaugg

SEQ ID NO: 224713 - RNA, 19 nt, Homo sapiens
  misc_RNA (1)...(19): siRNA sense strand
gacguguggucgacugaug

SEQ ID NO: 224714 - RNA, 19 nt, Homo sapiens
  misc_RNA (1)...(19): siRNA sense strand
gacgagaugcugaaagaca

SEQ ID NO: 224715 - RNA, 19 nt, Homo sapiens
  misc_RNA (1)...(19): siRNA sense strand
agaaggaccagcagcaguu

SEQ ID NO: 224716 - RNA, 19 nt, Homo sapiens
  misc_RNA (1)...(19): siRNA sense strand
gauacgcucaccaacauca

SEQ ID NO: 224717 - RNA, 19 nt, Homo sapiens
  misc_RNA (1)...(19): siRNA sense strand
gcucagcuucuacuacuuc

SEQ ID NO: 224718 - RNA, 19 nt, Homo sapiens
  misc_RNA (1)...(19): siRNA sense strand
ggagcacgacuuaccuaug

SEQ ID NO: 224719 - RNA, 19 nt, Homo sapiens
  misc_RNA (1)...(19): siRNA sense strand
gcuaaugacaaacuaugug

SEQ ID NO: 224720 - RNA, 19 nt, Homo sapiens
  misc_RNA (1)...(19): siRNA sense strand
ggagguggcuggaaugaua

SEQ ID NO: 224721 - RNA, 19 nt, Homo sapiens
  misc_RNA (1)...(19): siRNA sense strand
ggucauagcuccuuggaau

SEQ ID NO: 224722 - RNA, 19 nt, Homo sapiens
  misc_RNA (1)...(19): siRNA sense strand
gacaagauccugcagaaua

SEQ ID NO: 224723 - RNA, 19 nt, Homo sapiens
  misc_RNA (1)...(19): siRNA sense strand
ggaagagucuggcaguuga

SEQ ID NO: 224724 - RNA, 19 nt, Homo sapiens
  misc_RNA (1)...(19): siRNA sense strand
cagagagacuggagaauaa

SEQ ID NO: 224725 - RNA, 19 nt, Homo sapiens
  misc_RNA (1)...(19): siRNA sense strand
caacaccgcuuugccgaua

SEQ ID NO: 224726 - RNA, 19 nt, Homo sapiens
  misc_RNA (1)...(19): siRNA sense strand
gcacguggcucgggacauu

SEQ ID NO: 224727 - RNA, 19 nt, Homo sapiens
  misc_RNA (1)...(19): siRNA sense strand
gaacugcagugaaggaaca

SEQ ID NO: 224728 - RNA, 19 nt, Homo sapiens
  misc_RNA (1)...(19): siRNA sense strand
gauagaauaugguccacuu

SEQ ID NO: 224729 - RNA, 19 nt, Homo sapiens
  misc_RNA (1)...(19): siRNA sense strand
gaagagaaagugccuguga

SEQ ID NO: 224730 - RNA, 19 nt, Homo sapiens
  misc_RNA (1)...(19): siRNA sense strand
ccaagaccaugcucuauug

SEQ ID NO: 224731 - RNA, 19 nt, Homo sapiens
  misc_RNA (1)...(19): siRNA sense strand
gaauacagcacccaaauca

SEQ ID NO: 224732 - RNA, 19 nt, Homo sapiens
  misc_RNA (1)...(19): siRNA sense strand
caagagagauccuccugau

SEQ ID NO: 224733 - RNA, 19 nt, Homo sapiens
  misc_RNA (1)...(19): siRNA sense strand
uggcaaggcugcaaagaaa

SEQ ID NO: 224734 - RNA, 19 nt, Homo sapiens
  misc_RNA (1)...(19): siRNA sense strand
gaagacaggcccaacuuug

SEQ ID NO: 224735 - RNA, 19 nt, Homo sapiens
  misc_RNA (1)...(19): siRNA sense strand
ggcaagaccuccuccauca

SEQ ID NO: 224736 - RNA, 19 nt, Homo sapiens
  misc_RNA (1)...(19): siRNA sense strand
aaucucaccuggauaauga

SEQ ID NO: 224737 - RNA, 19 nt, Homo sapiens
  misc_RNA (1)...(19): siRNA sense strand
ccugugagcuggaguauuc

SEQ ID NO: 224738 - RNA, 19 nt, Homo sapiens
  misc_RNA (1)...(19): siRNA sense strand
ggagccaccuacguauuua

SEQ ID NO: 224739 - RNA, 19 nt, Homo sapiens
  misc_RNA (1)...(19): siRNA sense strand
gaagaagaaauccguguga

SEQ ID NO: 224740 - RNA, 19 nt, Homo sapiens
  misc_RNA (1)...(19): siRNA sense strand
gccagaaacugccucuuga

SEQ ID NO: 224741 - RNA, 19 nt, Homo sapiens
  misc_RNA (1)...(19): siRNA sense strand
gaagaaauccgugugaaca

SEQ ID NO: 224742 - RNA, 19 nt, Homo sapiens
  misc_RNA (1)...(19): siRNA sense strand
gaacaggacgaacuggauu

SEQ ID NO: 224743 - RNA, 19 nt, Homo sapiens
  misc_RNA (1)...(19): siRNA sense strand
gggcagagcguucuaagga

SEQ ID NO: 224744 - RNA, 19 nt, Homo sapiens
  misc_RNA (1)...(19): siRNA sense strand
gaauaauccuauagcaaag

SEQ ID NO: 224745 - RNA, 19 nt, Homo sapiens
  misc_RNA (1)...(19): siRNA sense strand
ugaagacgcugccugaagu

SEQ ID NO: 224746 - RNA, 19 nt, Homo sapiens
  misc_RNA (1)...(19): siRNA sense strand
cugcagagcuccuucacuu

SEQ ID NO: 224747 - RNA, 19 nt, Homo sapiens
  misc_RNA (1)...(19): siRNA sense strand
cgaacuggauuuccucaug

SEQ ID NO: 224748 - RNA, 19 nt, Homo sapiens
  misc_RNA (1)...(19): siRNA sense strand
gauggcgucuccugcauug

SEQ ID NO: 224749 - RNA, 19 nt, Homo sapiens
  misc_RNA (1)...(19): siRNA sense strand
aaacaugccuucuccuucu

SEQ ID NO: 224750 - RNA, 19 nt, Homo sapiens
  misc_RNA (1)...(19): siRNA sense strand
gaacaaugugauagaagaa

SEQ ID NO: 224751 - RNA, 19 nt, Homo sapiens
  misc_RNA (1)...(19): siRNA sense strand
gcucauucguggagucuug

SEQ ID NO: 224752 - RNA, 19 nt, Homo sapiens
  misc_RNA (1)...(19): siRNA sense strand
ggaagugaauauuaagcau

SEQ ID NO: 224753 - RNA, 19 nt, Homo sapiens
  misc_RNA (1)...(19): siRNA sense strand
gaauaacuccucgguucua

SEQ ID NO: 224754 - RNA, 19 nt, Homo sapiens
  misc_RNA (1)...(19): siRNA sense strand
agaacaaugugauagaaga

SEQ ID NO: 224755 - RNA, 19 nt, Homo sapiens
  misc_RNA (1)...(19): siRNA sense strand
caacaacgccuaccagaac

SEQ ID NO: 224756 - RNA, 19 nt, Homo sapiens
  misc_RNA (1)...(19): siRNA sense strand
gaagaaggcgucggaagug

SEQ ID NO: 224757 - RNA, 19 nt, Homo sapiens
  misc_RNA (1)...(19): siRNA sense strand
gcagagcccugaguacaag

SEQ ID NO: 224758 - RNA, 19 nt, Homo sapiens
  misc_RNA (1)...(19): siRNA sense strand
gcaaugcagccucaaacaa

SEQ ID NO: 224759 - RNA, 19 nt, Homo sapiens
  misc_RNA (1)...(19): siRNA sense strand
ggaggaggcggaggauaua

SEQ ID NO: 224760 - RNA, 19 nt, Homo sapiens
  misc_RNA (1)...(19): siRNA sense strand
ucaccuggauaaugaaaga

SEQ ID NO: 224761 - RNA, 19 nt, Homo sapiens
  misc_RNA (1)...(19): siRNA sense strand
caaaccaguuaauccagaa

SEQ ID NO: 224762 - RNA, 19 nt, Homo sapiens
  misc_RNA (1)...(19): siRNA sense strand
gaagaacugcagugaagga

SEQ ID NO: 224763 - RNA, 19 nt, Homo sapiens
  misc_RNA (1)...(19): siRNA sense strand
gcagagcuccuucacuugu

SEQ ID NO: 224764 - RNA, 19 nt, Homo sapiens
  misc_RNA (1)...(19): siRNA sense strand
gcuguacugucccaccuaa

SEQ ID NO: 224765 - RNA, 19 nt, Homo sapiens
  misc_RNA (1)...(19): siRNA sense strand
gcaacaacgccuaccagaa

SEQ ID NO: 224766 - RNA, 19 nt, Homo sapiens
  misc_RNA (1)...(19): siRNA sense strand
cauggaaucucaccuggau

SEQ ID NO: 224767 - RNA, 19 nt, Homo sapiens
  misc_RNA (1)...(19): siRNA sense strand
gagagaacaaugugauaga

SEQ ID NO: 224768 - RNA, 19 nt, Homo sapiens
  misc_RNA (1)...(19): siRNA sense strand
ggacugcuaccucaccauu

SEQ ID NO: 224769 - RNA, 19 nt, Homo sapiens
  misc_RNA (1)...(19): siRNA sense strand
gaagaugagagccagaugu

SEQ ID NO: 224770 - RNA, 19 nt, Homo sapiens
  misc_RNA (1)...(19): siRNA sense strand
gcccaacuuugccaucauu

SEQ ID NO: 224771 - RNA, 19 nt, Homo sapiens
  misc_RNA (1)...(19): siRNA sense strand
ggaagaguggccaagauug

SEQ ID NO: 224772 - RNA, 19 nt, Homo sapiens
  misc_RNA (1)...(19): siRNA sense strand
ccaccuacguauuuaagau

SEQ ID NO: 224773 - RNA, 19 nt, Homo sapiens
  misc_RNA (1)...(19): siRNA sense strand
ggaaucaccaacaaacaug

SEQ ID NO: 224774 - RNA, 19 nt, Homo sapiens
  misc_RNA (1)...(19): siRNA sense strand
uaucuaaacugcagucacu

SEQ ID NO: 224775 - RNA, 19 nt, Homo sapiens
  misc_RNA (1)...(19): siRNA sense strand
gaucaagagcucuccaugu

SEQ ID NO: 224776 - RNA, 19 nt, Homo sapiens
  misc_RNA (1)...(19): siRNA sense strand
ggucuggagugcagcuuug

SEQ ID NO: 224777 - RNA, 19 nt, Homo sapiens
  misc_RNA (1)...(19): siRNA sense strand
cugaagaacugcagugaag

SEQ ID NO: 224778 - RNA, 19 nt, Homo sapiens
  misc_RNA (1)...(19): siRNA sense strand
cuacgucacuucccuugug

SEQ ID NO: 224779 - RNA, 19 nt, Homo sapiens
  misc_RNA (1)...(19): siRNA sense strand
ggauggacccacccaagaa

SEQ ID NO: 224780 - RNA, 19 nt, Homo sapiens
  misc_RNA (1)...(19): siRNA sense strand
caaugcagccucaaacaau

SEQ ID NO: 224781 - RNA, 19 nt, Homo sapiens
  misc_RNA (1)...(19): siRNA sense strand
gaaauccgugugaacagaa

SEQ ID NO: 224782 - RNA, 19 nt, Homo sapiens
  misc_RNA (1)...(19): siRNA sense strand
guacaaaccaguuaaucca

SEQ ID NO: 224783 - RNA, 19 nt, Homo sapiens
  misc_RNA (1)...(19): siRNA sense strand
agagaacaaugugauagaa

SEQ ID NO: 224784 - RNA, 19 nt, Homo sapiens
  misc_RNA (1)...(19): siRNA sense strand
gaacagaagcgugcaugag

SEQ ID NO: 224785 - RNA, 19 nt, Homo sapiens
  misc_RNA (1)...(19): siRNA sense strand
gcuccugguuuacagagaa

SEQ ID NO: 224786 - RNA, 19 nt, Homo sapiens
  misc_RNA (1)...(19): siRNA sense strand
gaggaagagucuggcaguu

SEQ ID NO: 224787 - RNA, 19 nt, Homo sapiens
  misc_RNA (1)...(19): siRNA sense strand
ccgcuuugccgauagaaua

SEQ ID NO: 224788 - RNA, 19 nt, Homo sapiens
  misc_RNA (1)...(19): siRNA sense strand
gggccuguauaccggauaa

SEQ ID NO: 224789 - RNA, 19 nt, Homo sapiens
  misc_RNA (1)...(19): siRNA sense strand
gugccaugcugccaguuaa

SEQ ID NO: 224790 - RNA, 19 nt, Homo sapiens
  misc_RNA (1)...(19): siRNA sense strand
gcagaauacagcacccaaa

SEQ ID NO: 224791 - RNA, 19 nt, Homo sapiens
  misc_RNA (1)...(19): siRNA sense strand
acagacacaugguccuuug

SEQ ID NO: 224792 - RNA, 19 nt, Homo sapiens
  misc_RNA (1)...(19): siRNA sense strand
gcaaauucaaccaccagaa

SEQ ID NO: 224793 - RNA, 19 nt, Homo sapiens
  misc_RNA (1)...(19): siRNA sense strand
ugaaaggcauccagaucug

SEQ ID NO: 224794 - RNA, 19 nt, Homo sapiens
  misc_RNA (1)...(19): siRNA sense strand
caugcucuauugcucagua

SEQ ID NO: 224795 - RNA, 19 nt, Homo sapiens
  misc_RNA (1)...(19): siRNA sense strand
gcaagaauagcaugaacca

SEQ ID NO: 224796 - RNA, 19 nt, Homo sapiens
  misc_RNA (1)...(19): siRNA sense strand
ggagugcugcuaugggaaa

SEQ ID NO: 224797 - RNA, 19 nt, Homo sapiens
  misc_RNA (1)...(19): siRNA sense strand
agacauugcugccagaaac

SEQ ID NO: 224798 - RNA, 19 nt, Homo sapiens
  misc_RNA (1)...(19): siRNA sense strand
gccacaaggucaucugcuu

SEQ ID NO: 224799 - RNA, 19 nt, Homo sapiens
  misc_RNA (1)...(19): siRNA sense strand
ggagugcagcuuugacuuc

SEQ ID NO: 224800 - RNA, 19 nt, Homo sapiens
  misc_RNA (1)...(19): siRNA sense strand
caacguacggcuccugguu

SEQ ID NO: 224801 - RNA, 19 nt, Homo sapiens
  misc_RNA (1)...(19): siRNA sense strand
gccuguggcugucaguauu

SEQ ID NO: 224802 - RNA, 19 nt, Homo sapiens
  misc_RNA (1)...(19): siRNA sense strand
agaaauccgugugaacaga

SEQ ID NO: 224803 - RNA, 19 nt, Homo sapiens
  misc_RNA (1)...(19): siRNA sense strand
acaagauccugcagaauac

SEQ ID NO: 224804 - RNA, 19 nt, Homo sapiens
  misc_RNA (1)...(19): siRNA sense strand
ccacaacgaggcugcaaga

SEQ ID NO: 224805 - RNA, 19 nt, Homo sapiens
  misc_RNA (1)...(19): siRNA sense strand
gaguggcccuggaauacau

SEQ ID NO: 224806 - RNA, 19 nt, Homo sapiens
  misc_RNA (1)...(19): siRNA sense strand
ggacccggauguaaucaac

SEQ ID NO: 224807 - RNA, 19 nt, Homo sapiens
  misc_RNA (1)...(19): siRNA sense strand
acaaugugauagaagaaga

SEQ ID NO: 224808 - RNA, 19 nt, Homo sapiens
  misc_RNA (1)...(19): siRNA sense strand
ggagagaacaaugugauag

SEQ ID NO: 224809 - RNA, 19 nt, Homo sapiens
  misc_RNA (1)...(19): siRNA sense strand
gggaaaggcgggaagaaca

SEQ ID NO: 224810 - RNA, 19 nt, Homo sapiens
  misc_RNA (1)...(19): siRNA sense strand
gguguugccucuccucgau

SEQ ID NO: 224811 - RNA, 19 nt, Homo sapiens
  misc_RNA (1)...(19): siRNA sense strand
ccaccaagaccaugcucua

SEQ ID NO: 224812 - RNA, 19 nt, Homo sapiens
  misc_RNA (1)...(19): siRNA sense strand
agagaaacccaaacaagga

SEQ ID NO: 224813 - RNA, 19 nt, Homo sapiens
  misc_RNA (1)...(19): siRNA sense strand
gggccucacugcuccuaga

SEQ ID NO: 224814 - RNA, 19 nt, Homo sapiens
  misc_RNA (1)...(19): siRNA sense strand
acguacggcuccugguuua

SEQ ID NO: 224815 - RNA, 19 nt, Homo sapiens
  misc_RNA (1)...(19): siRNA sense strand
uggaaucucaccuggauaa

SEQ ID NO: 224816 - RNA, 19 nt, Homo sapiens
  misc_RNA (1)...(19): siRNA sense strand
ggacugugcccagggagaa

SEQ ID NO: 224817 - RNA, 19 nt, Homo sapiens
  misc_RNA (1)...(19): siRNA sense strand
gcgaggaggcgaucuugga

SEQ ID NO: 224818 - RNA, 19 nt, Homo sapiens
  misc_RNA (1)...(19): siRNA sense strand
ggaagaggaagagaaagug

SEQ ID NO: 224819 - RNA, 19 nt, Homo sapiens
  misc_RNA (1)...(19): siRNA sense strand
gaaucucaccuggauaaug

SEQ ID NO: 224820 - RNA, 19 nt, Homo sapiens
  misc_RNA (1)...(19): siRNA sense strand
caaacaagaucgcagagaa

SEQ ID NO: 224821 - RNA, 19 nt, Homo sapiens
  misc_RNA (1)...(19): siRNA sense strand
gcucaaggcuggugaugug

SEQ ID NO: 224822 - RNA, 19 nt, Homo sapiens
  misc_RNA (1)...(19): siRNA sense strand
gaccaaggaugagcaguuu

SEQ ID NO: 224823 - RNA, 19 nt, Homo sapiens
  misc_RNA (1)...(19): siRNA sense strand
aaagaaggaugaagccaaa

SEQ ID NO: 224824 - RNA, 19 nt, Homo sapiens
  misc_RNA (1)...(19): siRNA sense strand
gacaucaagucacgcauug

SEQ ID NO: 224825 - RNA, 19 nt, Homo sapiens
  misc_RNA (1)...(19): siRNA sense strand
gaacagccgcguagguuuc

SEQ ID NO: 224826 - RNA, 19 nt, Homo sapiens
  misc_RNA (1)...(19): siRNA sense strand
cagaugagaccaaggauga

SEQ ID NO: 224827 - RNA, 19 nt, Homo sapiens
  misc_RNA (1)...(19): siRNA sense strand
gagcagugcguccagaauu

SEQ ID NO: 224828 - RNA, 19 nt, Homo sapiens
  misc_RNA (1)...(19): siRNA sense strand
ccagcaacgugcagaagaa

SEQ ID NO: 224829 - RNA, 19 nt, Homo sapiens
  misc_RNA (1)...(19): siRNA sense strand
agaaggaucuccggaccua

SEQ ID NO: 224830 - RNA, 19 nt, Homo sapiens
  misc_RNA (1)...(19): siRNA sense strand
guggagaccuucccagcaa

SEQ ID NO: 224831 - RNA, 19 nt, Homo sapiens
  misc_RNA (1)...(19): siRNA sense strand
ggcgcaagcugguggacua

SEQ ID NO: 224832 - RNA, 19 nt, Homo sapiens
  misc_RNA (1)...(19): siRNA sense strand
gaccugcuguggauggauu

SEQ ID NO: 224833 - RNA, 19 nt, Homo sapiens
  misc_RNA (1)...(19): siRNA sense strand
gaagguguuugaggagaug

SEQ ID NO: 224834 - RNA, 19 nt, Homo sapiens
  misc_RNA (1)...(19): siRNA sense strand
gcagagaugggcaguaaag

SEQ ID NO: 224835 - RNA, 19 nt, Homo sapiens
  misc_RNA (1)...(19): siRNA sense strand
cccgagaacuucacugaga

SEQ ID NO: 224836 - RNA, 19 nt, Homo sapiens
  misc_RNA (1)...(19): siRNA sense strand
gcaagcugguggacuacga

SEQ ID NO: 224837 - RNA, 19 nt, Homo sapiens
  misc_RNA (1)...(19): siRNA sense strand
ggaacagccgcguagguuu

SEQ ID NO: 224838 - RNA, 19 nt, Homo sapiens
  misc_RNA (1)...(19): siRNA sense strand
cgggaaagaucgccagcaa

SEQ ID NO: 224839 - RNA, 19 nt, Homo sapiens
  misc_RNA (1)...(19): siRNA sense strand
ccaaggaugagcaguuuga

SEQ ID NO: 224840 - RNA, 19 nt, Homo sapiens
  misc_RNA (1)...(19): siRNA sense strand
gcagggaugaggcaaacaa

SEQ ID NO: 224841 - RNA, 19 nt, Homo sapiens
  misc_RNA (1)...(19): siRNA sense strand
acaacgaccugcuguggau

SEQ ID NO: 224842 - RNA, 19 nt, Homo sapiens
  misc_RNA (1)...(19): siRNA sense strand
gggaugaggcaaacaagau

SEQ ID NO: 224843 - RNA, 19 nt, Homo sapiens
  misc_RNA (1)...(19): siRNA sense strand
ugaaggagagcgacuggaa

SEQ ID NO: 224844 - RNA, 19 nt, Homo sapiens
  misc_RNA (1)...(19): siRNA sense strand
gcaaacaagaucgcagaga

SEQ ID NO: 224845 - RNA, 19 nt, Homo sapiens
  misc_RNA (1)...(19): siRNA sense strand
cuaccuggccuccgucaaa

SEQ ID NO: 224846 - RNA, 19 nt, Homo sapiens
  misc_RNA (1)...(19): siRNA sense strand
ucaaccagaaccucaauga

SEQ ID NO: 224847 - RNA, 19 nt, Homo sapiens
  misc_RNA (1)...(19): siRNA sense strand
cgacaucaagucacgcauu

SEQ ID NO: 224848 - RNA, 19 nt, Homo sapiens
  misc_RNA (1)...(19): siRNA sense strand
aaccagaaccucaaugaug

SEQ ID NO: 224849 - RNA, 19 nt, Homo sapiens
  misc_RNA (1)...(19): siRNA sense strand
gcaacaccuucacggucaa

SEQ ID NO: 224850 - RNA, 19 nt, Homo sapiens
  misc_RNA (1)...(19): siRNA sense strand
accagaaccucaaugaugu

SEQ ID NO: 224851 - RNA, 19 nt, Homo sapiens
  misc_RNA (1)...(19): siRNA sense strand
aggaggagcucaucaaagc

SEQ ID NO: 224852 - RNA, 19 nt, Homo sapiens
  misc_RNA (1)...(19): siRNA sense strand
cgaggaggagcucaucaaa

SEQ ID NO: 224853 - RNA, 19 nt, Homo sapiens
  misc_RNA (1)...(19): siRNA sense strand
agcagugcguccagaauuu

SEQ ID NO: 224854 - RNA, 19 nt, Homo sapiens
  misc_RNA (1)...(19): siRNA sense strand
ggaaggcagaugagaccaa

SEQ ID NO: 224855 - RNA, 19 nt, Homo sapiens
  misc_RNA (1)...(19): siRNA sense strand
ucaaagcccagaagguguu

SEQ ID NO: 224856 - RNA, 19 nt, Homo sapiens
  misc_RNA (1)...(19): siRNA sense strand
gaggaggagcucaucaaag

SEQ ID NO: 224857 - RNA, 19 nt, Homo sapiens
  misc_RNA (1)...(19): siRNA sense strand
acaaggagaugagcaagcu

SEQ ID NO: 224858 - RNA, 19 nt, Homo sapiens
  misc_RNA (1)...(19): siRNA sense strand
ggaugaggcaaacaagauc

SEQ ID NO: 224859 - RNA, 19 nt, Homo sapiens
  misc_RNA (1)...(19): siRNA sense strand
gaaggaugaagccaaaauu

SEQ ID NO: 224860 - RNA, 19 nt, Homo sapiens
  misc_RNA (1)...(19): siRNA sense strand
ccacuacgagucccuucaa

SEQ ID NO: 224861 - RNA, 19 nt, Homo sapiens
  misc_RNA (1)...(19): siRNA sense strand
ggauggauuaccaccagaa

SEQ ID NO: 224862 - RNA, 19 nt, Homo sapiens
  misc_RNA (1)...(19): siRNA sense strand
caaccagaaccucaaugau

SEQ ID NO: 224863 - RNA, 19 nt, Homo sapiens
  misc_RNA (1)...(19): siRNA sense strand
gcagugcguccagaauuuc

SEQ ID NO: 224864 - RNA, 19 nt, Homo sapiens
  misc_RNA (1)...(19): siRNA sense strand
caagaucgcagagaacaac

SEQ ID NO: 224865 - RNA, 19 nt, Homo sapiens
  misc_RNA (1)...(19): siRNA sense strand
agaccaaggaugagcaguu

SEQ ID NO: 224866 - RNA, 19 nt, Homo sapiens
  misc_RNA (1)...(19): siRNA sense strand
ugacaacgcgccugcaaaa

SEQ ID NO: 224867 - RNA, 19 nt, Homo sapiens
  misc_RNA (1)...(19): siRNA sense strand
agaagguguuugaggagau

SEQ ID NO: 224868 - RNA, 19 nt, Homo sapiens
  misc_RNA (1)...(19): siRNA sense strand
cacuacgagucccuucaaa

SEQ ID NO: 224869 - RNA, 19 nt, Homo sapiens
  misc_RNA (1)...(19): siRNA sense strand
ucaacacguuccagagcau

SEQ ID NO: 224870 - RNA, 19 nt, Homo sapiens
  misc_RNA (1)...(19): siRNA sense strand
gccagcaacgugcagaaga

SEQ ID NO: 224871 - RNA, 19 nt, Homo sapiens
  misc_RNA (1)...(19): siRNA sense strand
cguccagaauuucaacaag

SEQ ID NO: 224872 - RNA, 19 nt, Homo sapiens
  misc_RNA (1)...(19): siRNA sense strand
uccagaauuucaacaagca

SEQ ID NO: 224873 - RNA, 19 nt, Homo sapiens
  misc_RNA (1)...(19): siRNA sense strand
cuacacggccacugacaca

SEQ ID NO: 224874 - RNA, 19 nt, Homo sapiens
  misc_RNA (1)...(19): siRNA sense strand
gcucaaccagaaccucaau

SEQ ID NO: 224875 - RNA, 19 nt, Homo sapiens
  misc_RNA (1)...(19): siRNA sense strand
uggaacagccgcguagguu

SEQ ID NO: 224876 - RNA, 19 nt, Homo sapiens
  misc_RNA (1)...(19): siRNA sense strand
gcucaucaaagcccagaag

SEQ ID NO: 224877 - RNA, 19 nt, Homo sapiens
  misc_RNA (1)...(19): siRNA sense strand
caaacaagaucgcagagaa

SEQ ID NO: 224878 - RNA, 19 nt, Homo sapiens
  misc_RNA (1)...(19): siRNA sense strand
gcucaaggcuggugaugug

SEQ ID NO: 224879 - RNA, 19 nt, Homo sapiens
  misc_RNA (1)...(19): siRNA sense strand
gaccaaggaugagcaguuu

SEQ ID NO: 224880 - RNA, 19 nt, Homo sapiens
  misc_RNA (1)...(19): siRNA sense strand
aaagaaggaugaagccaaa

SEQ ID NO: 224881 - RNA, 19 nt, Homo sapiens
  misc_RNA (1)...(19): siRNA sense strand
gacaucaagucacgcauug

SEQ ID NO: 224882 - RNA, 19 nt, Homo sapiens
  misc_RNA (1)...(19): siRNA sense strand
gaacagccgcguagguuuc

SEQ ID NO: 224883 - RNA, 19 nt, Homo sapiens
  misc_RNA (1)...(19): siRNA sense strand
cagaugagaccaaggauga

SEQ ID NO: 224884 - RNA, 19 nt, Homo sapiens
  misc_RNA (1)...(19): siRNA sense strand
gagcagugcguccagaauu

SEQ ID NO: 224885 - RNA, 19 nt, Homo sapiens
  misc_RNA (1)...(19): siRNA sense strand
ccagcaacgugcagaagaa

SEQ ID NO: 224886 - RNA, 19 nt, Homo sapiens
  misc_RNA (1)...(19): siRNA sense strand
agaaggaucuccggaccua

SEQ ID NO: 224887 - RNA, 19 nt, Homo sapiens
  misc_RNA (1)...(19): siRNA sense strand
guggagaccuucccagcaa

SEQ ID NO: 224888 - RNA, 19 nt, Homo sapiens
  misc_RNA (1)...(19): siRNA sense strand
ggcgcaagcugguggacua

SEQ ID NO: 224889 - RNA, 19 nt, Homo sapiens
  misc_RNA (1)...(19): siRNA sense strand
gaccugcuguggauggauu

SEQ ID NO: 224890 - RNA, 19 nt, Homo sapiens
  misc_RNA (1)...(19): siRNA sense strand
gaagguguuugaggagaug

SEQ ID NO: 224891 - RNA, 19 nt, Homo sapiens
  misc_RNA (1)...(19): siRNA sense strand
gcagagaugggcaguaaag

SEQ ID NO: 224892 - RNA, 19 nt, Homo sapiens
  misc_RNA (1)...(19): siRNA sense strand
cccgagaacuucacugaga

SEQ ID NO: 224893 - RNA, 19 nt, Homo sapiens
  misc_RNA (1)...(19): siRNA sense strand
gcaagcugguggacuacga

SEQ ID NO: 224894 - RNA, 19 nt, Homo sapiens
  misc_RNA (1)...(19): siRNA sense strand
ggaacagccgcguagguuu

SEQ ID NO: 224895 - RNA, 19 nt, Homo sapiens
  misc_RNA (1)...(19): siRNA sense strand
cgggaaagaucgccagcaa

SEQ ID NO: 224896 - RNA, 19 nt, Homo sapiens
  misc_RNA (1)...(19): siRNA sense strand
ccaaggaugagcaguuuga

SEQ ID NO: 224897 - RNA, 19 nt, Homo sapiens
  misc_RNA (1)...(19): siRNA sense strand
gcagggaugaggcaaacaa

SEQ ID NO: 224898 - RNA, 19 nt, Homo sapiens
  misc_RNA (1)...(19): siRNA sense strand
acaacgaccugcuguggau

SEQ ID NO: 224899 - RNA, 19 nt, Homo sapiens
  misc_RNA (1)...(19): siRNA sense strand
gggaugaggcaaacaagau

SEQ ID NO: 224900 - RNA, 19 nt, Homo sapiens
  misc_RNA (1)...(19): siRNA sense strand
ugaaggagagcgacuggaa

SEQ ID NO: 224901 - RNA, 19 nt, Homo sapiens
  misc_RNA (1)...(19): siRNA sense strand
gcaaacaagaucgcagaga

SEQ ID NO: 224902 - RNA, 19 nt, Homo sapiens
  misc_RNA (1)...(19): siRNA sense strand
cuaccuggccuccgucaaa

SEQ ID NO: 224903 - RNA, 19 nt, Homo sapiens
  misc_RNA (1)...(19): siRNA sense strand
ucaaccagaaccucaauga

SEQ ID NO: 224904 - RNA, 19 nt, Homo sapiens
  misc_RNA (1)...(19): siRNA sense strand
cgacaucaagucacgcauu

SEQ ID NO: 224905 - RNA, 19 nt, Homo sapiens
  misc_RNA (1)...(19): siRNA sense strand
aaccagaaccucaaugaug

SEQ ID NO: 224906 - RNA, 19 nt, Homo sapiens
  misc_RNA (1)...(19): siRNA sense strand
gcaacaccuucacggucaa

SEQ ID NO: 224907 - RNA, 19 nt, Homo sapiens
  misc_RNA (1)...(19): siRNA sense strand
accagaaccucaaugaugu

SEQ ID NO: 224908 - RNA, 19 nt, Homo sapiens
  misc_RNA (1)...(19): siRNA sense strand
aggaggagcucaucaaagc

SEQ ID NO: 224909 - RNA, 19 nt, Homo sapiens
  misc_RNA (1)...(19): siRNA sense strand
cgaggaggagcucaucaaa

SEQ ID NO: 224910 - RNA, 19 nt, Homo sapiens
  misc_RNA (1)...(19): siRNA sense strand
agcagugcguccagaauuu

SEQ ID NO: 224911 - RNA, 19 nt, Homo sapiens
  misc_RNA (1)...(19): siRNA sense strand
ggaaggcagaugagaccaa

SEQ ID NO: 224912 - RNA, 19 nt, Homo sapiens
  misc_RNA (1)...(19): siRNA sense strand
ucaaagcccagaagguguu

SEQ ID NO: 224913 - RNA, 19 nt, Homo sapiens
  misc_RNA (1)...(19): siRNA sense strand
gaggaggagcucaucaaag

SEQ ID NO: 224914 - RNA, 19 nt, Homo sapiens
  misc_RNA (1)...(19): siRNA sense strand
acaaggagaugagcaagcu

SEQ ID NO: 224915 - RNA, 19 nt, Homo sapiens
  misc_RNA (1)...(19): siRNA sense strand
ggaugaggcaaacaagauc

SEQ ID NO: 224916 - RNA, 19 nt, Homo sapiens
  misc_RNA (1)...(19): siRNA sense strand
gaaggaugaagccaaaauu

SEQ ID NO: 224917 - RNA, 19 nt, Homo sapiens
  misc_RNA (1)...(19): siRNA sense strand
ccacuacgagucccuucaa

SEQ ID NO: 224918 - RNA, 19 nt, Homo sapiens
  misc_RNA (1)...(19): siRNA sense strand
ggauggauuaccaccagaa

SEQ ID NO: 224919 - RNA, 19 nt, Homo sapiens
  misc_RNA (1)...(19): siRNA sense strand
caaccagaaccucaaugau

SEQ ID NO: 224920 - RNA, 19 nt, Homo sapiens
  misc_RNA (1)...(19): siRNA sense strand
gcagugcguccagaauuuc

SEQ ID NO: 224921 - RNA, 19 nt, Homo sapiens
  misc_RNA (1)...(19): siRNA sense strand
caagaucgcagagaacaac

SEQ ID NO: 224922 - RNA, 19 nt, Homo sapiens
  misc_RNA (1)...(19): siRNA sense strand
agaccaaggaugagcaguu

SEQ ID NO: 224923 - RNA, 19 nt, Homo sapiens
  misc_RNA (1)...(19): siRNA sense strand
ugacaacgcgccugcaaaa

SEQ ID NO: 224924 - RNA, 19 nt, Homo sapiens
  misc_RNA (1)...(19): siRNA sense strand
agaagguguuugaggagau

SEQ ID NO: 224925 - RNA, 19 nt, Homo sapiens
  misc_RNA (1)...(19): siRNA sense strand
cacuacgagucccuucaaa

SEQ ID NO: 224926 - RNA, 19 nt, Homo sapiens
  misc_RNA (1)...(19): siRNA sense strand
ucaacacguuccagagcau

SEQ ID NO: 224927 - RNA, 19 nt, Homo sapiens
  misc_RNA (1)...(19): siRNA sense strand
gccagcaacgugcagaaga

SEQ ID NO: 224928 - RNA, 19 nt, Homo sapiens
  misc_RNA (1)...(19): siRNA sense strand
cguccagaauuucaacaag

SEQ ID NO: 224929 - RNA, 19 nt, Homo sapiens
  misc_RNA (1)...(19): siRNA sense strand
uccagaauuucaacaagca

SEQ ID NO: 224930 - RNA, 19 nt, Homo sapiens
  misc_RNA (1)...(19): siRNA sense strand
cuacacggccacugacaca

SEQ ID NO: 224931 - RNA, 19 nt, Homo sapiens
  misc_RNA (1)...(19): siRNA sense strand
gcucaaccagaaccucaau

SEQ ID NO: 224932 - RNA, 19 nt, Homo sapiens
  misc_RNA (1)...(19): siRNA sense strand
uggaacagccgcguagguu

SEQ ID NO: 224933 - RNA, 19 nt, Homo sapiens
  misc_RNA (1)...(19): siRNA sense strand
gcucaucaaagcccagaag

SEQ ID NO: 224934 - RNA, 19 nt, Homo sapiens
  misc_RNA (1)...(19): siRNA sense strand
caaacaagaucgcagagaa

SEQ ID NO: 224935 - RNA, 19 nt, Homo sapiens
  misc_RNA (1)...(19): siRNA sense strand
gcucaaggcuggugaugug

SEQ ID NO: 224936 - RNA, 19 nt, Homo sapiens
  misc_RNA (1)...(19): siRNA sense strand
gaccaaggaugagcaguuu

SEQ ID NO: 224937 - RNA, 19 nt, Homo sapiens
  misc_RNA (1)...(19): siRNA sense strand
aaagaaggaugaagccaaa

SEQ ID NO: 224938 - RNA, 19 nt, Homo sapiens
  misc_RNA (1)...(19): siRNA sense strand
gacaucaagucacgcauug

SEQ ID NO: 224939 - RNA, 19 nt, Homo sapiens
  misc_RNA (1)...(19): siRNA sense strand
gaacagccgcguagguuuc

SEQ ID NO: 224940 - RNA, 19 nt, Homo sapiens
  misc_RNA (1)...(19): siRNA sense strand
cagaugagaccaaggauga

SEQ ID NO: 224941 - RNA, 19 nt, Homo sapiens
  misc_RNA (1)...(19): siRNA sense strand
gagcagugcguccagaauu

SEQ ID NO: 224942 - RNA, 19 nt, Homo sapiens
  misc_RNA (1)...(19): siRNA sense strand
ccagcaacgugcagaagaa

SEQ ID NO: 224943 - RNA, 19 nt, Homo sapiens
  misc_RNA (1)...(19): siRNA sense strand
agaaggaucuccggaccua

SEQ ID NO: 224944 - RNA, 19 nt, Homo sapiens
  misc_RNA (1)...(19): siRNA sense strand
guggagaccuucccagcaa

SEQ ID NO: 224945 - RNA, 19 nt, Homo sapiens
  misc_RNA (1)...(19): siRNA sense strand
ggcgcaagcugguggacua

SEQ ID NO: 224946 - RNA, 19 nt, Homo sapiens
  misc_RNA (1)...(19): siRNA sense strand
gaccugcuguggauggauu

SEQ ID NO: 224947 - RNA, 19 nt, Homo sapiens
  misc_RNA (1)...(19): siRNA sense strand
gaagguguuugaggagaug

SEQ ID NO: 224948 - RNA, 19 nt, Homo sapiens
  misc_RNA (1)...(19): siRNA sense strand
gcagagaugggcaguaaag

SEQ ID NO: 224949 - RNA, 19 nt, Homo sapiens
  misc_RNA (1)...(19): siRNA sense strand
cccgagaacuucacugaga

SEQ ID NO: 224950 - RNA, 19 nt, Homo sapiens
  misc_RNA (1)...(19): siRNA sense strand
gcaagcugguggacuacga

SEQ ID NO: 224951 - RNA, 19 nt, Homo sapiens
  misc_RNA (1)...(19): siRNA sense strand
ggaacagccgcguagguuu

SEQ ID NO: 224952 - RNA, 19 nt, Homo sapiens
  misc_RNA (1)...(19): siRNA sense strand
cgggaaagaucgccagcaa

SEQ ID NO: 224953 - RNA, 19 nt, Homo sapiens
  misc_RNA (1)...(19): siRNA sense strand
ccaaggaugagcaguuuga

SEQ ID NO: 224954 - RNA, 19 nt, Homo sapiens
  misc_RNA (1)...(19): siRNA sense strand
gcagggaugaggcaaacaa

SEQ ID NO: 224955 - RNA, 19 nt, Homo sapiens
  misc_RNA (1)...(19): siRNA sense strand
acaacgaccugcuguggau

SEQ ID NO: 224956 - RNA, 19 nt, Homo sapiens
  misc_RNA (1)...(19): siRNA sense strand
gggaugaggcaaacaagau

SEQ ID NO: 224957 - RNA, 19 nt, Homo sapiens
  misc_RNA (1)...(19): siRNA sense strand
ugaaggagagcgacuggaa

SEQ ID NO: 224958 - RNA, 19 nt, Homo sapiens
  misc_RNA (1)...(19): siRNA sense strand
gcaaacaagaucgcagaga

SEQ ID NO: 224959 - RNA, 19 nt, Homo sapiens
  misc_RNA (1)...(19): siRNA sense strand
cuaccuggccuccgucaaa

SEQ ID NO: 224960 - RNA, 19 nt, Homo sapiens
  misc_RNA (1)...(19): siRNA sense strand
ucaaccagaaccucaauga

SEQ ID NO: 224961 - RNA, 19 nt, Homo sapiens
  misc_RNA (1)...(19): siRNA sense strand
cgacaucaagucacgcauu

SEQ ID NO: 224962 - RNA, 19 nt, Homo sapiens
  misc_RNA (1)...(19): siRNA sense strand
aaccagaaccucaaugaug

SEQ ID NO: 224963 - RNA, 19 nt, Homo sapiens
  misc_RNA (1)...(19): siRNA sense strand
gcaacaccuucacggucaa

SEQ ID NO: 224964 - RNA, 19 nt, Homo sapiens
  misc_RNA (1)...(19): siRNA sense strand
accagaaccucaaugaugu

SEQ ID NO: 224965 - RNA, 19 nt, Homo sapiens
  misc_RNA (1)...(19): siRNA sense strand
aggaggagcucaucaaagc

SEQ ID NO: 224966 - RNA, 19 nt, Homo sapiens
  misc_RNA (1)...(19): siRNA sense strand
cgaggaggagcucaucaaa

SEQ ID NO: 224967 - RNA, 19 nt, Homo sapiens
  misc_RNA (1)...(19): siRNA sense strand
agcagugcguccagaauuu

SEQ ID NO: 224968 - RNA, 19 nt, Homo sapiens
  misc_RNA (1)...(19): siRNA sense strand
ggaaggcagaugagaccaa

SEQ ID NO: 224969 - RNA, 19 nt, Homo sapiens
  misc_RNA (1)...(19): siRNA sense strand
ucaaagcccagaagguguu

SEQ ID NO: 224970 - RNA, 19 nt, Homo sapiens
  misc_RNA (1)...(19): siRNA sense strand
gaggaggagcucaucaaag

SEQ ID NO: 224971 - RNA, 19 nt, Homo sapiens
  misc_RNA (1)...(19): siRNA sense strand
acaaggagaugagcaagcu

SEQ ID NO: 224972 - RNA, 19 nt, Homo sapiens
  misc_RNA (1)...(19): siRNA sense strand
ggaugaggcaaacaagauc

SEQ ID NO: 224973 - RNA, 19 nt, Homo sapiens
  misc_RNA (1)...(19): siRNA sense strand
gaaggaugaagccaaaauu

SEQ ID NO: 224974 - RNA, 19 nt, Homo sapiens
  misc_RNA (1)...(19): siRNA sense strand
ccacuacgagucccuucaa

SEQ ID NO: 224975 - RNA, 19 nt, Homo sapiens
  misc_RNA (1)...(19): siRNA sense strand
ggauggauuaccaccagaa

SEQ ID NO: 224976 - RNA, 19 nt, Homo sapiens
  misc_RNA (1)...(19): siRNA sense strand
caaccagaaccucaaugau

SEQ ID NO: 224977 - RNA, 19 nt, Homo sapiens
  misc_RNA (1)...(19): siRNA sense strand
gcagugcguccagaauuuc

SEQ ID NO: 224978 - RNA, 19 nt, Homo sapiens
  misc_RNA (1)...(19): siRNA sense strand
caagaucgcagagaacaac

SEQ ID NO: 224979 - RNA, 19 nt, Homo sapiens
  misc_RNA (1)...(19): siRNA sense strand
agaccaaggaugagcaguu

SEQ ID NO: 224980 - RNA, 19 nt, Homo sapiens
  misc_RNA (1)...(19): siRNA sense strand
ugacaacgcgccugcaaaa

SEQ ID NO: 224981 - RNA, 19 nt, Homo sapiens
  misc_RNA (1)...(19): siRNA sense strand
agaagguguuugaggagau

SEQ ID NO: 224982 - RNA, 19 nt, Homo sapiens
  misc_RNA (1)...(19): siRNA sense strand
cacuacgagucccuucaaa

SEQ ID NO: 224983 - RNA, 19 nt, Homo sapiens
  misc_RNA (1)...(19): siRNA sense strand
ucaacacguuccagagcau

SEQ ID NO: 224984 - RNA, 19 nt, Homo sapiens
  misc_RNA (1)...(19): siRNA sense strand
gccagcaacgugcagaaga

SEQ ID NO: 224985 - RNA, 19 nt, Homo sapiens
  misc_RNA (1)...(19): siRNA sense strand
cguccagaauuucaacaag

SEQ ID NO: 224986 - RNA, 19 nt, Homo sapiens
  misc_RNA (1)...(19): siRNA sense strand
uccagaauuucaacaagca

SEQ ID NO: 224987 - RNA, 19 nt, Homo sapiens
  misc_RNA (1)...(19): siRNA sense strand
cuacacggccacugacaca

SEQ ID NO: 224988 - RNA, 19 nt, Homo sapiens
  misc_RNA (1)...(19): siRNA sense strand
gcucaaccagaaccucaau

SEQ ID NO: 224989 - RNA, 19 nt, Homo sapiens
  misc_RNA (1)...(19): siRNA sense strand
uggaacagccgcguagguu

SEQ ID NO: 224990 - RNA, 19 nt, Homo sapiens
  misc_RNA (1)...(19): siRNA sense strand
gcucaucaaagcccagaag

SEQ ID NO: 224991 - RNA, 19 nt, Homo sapiens
  misc_RNA (1)...(19): siRNA sense strand
caaacaagaucgcagagaa

SEQ ID NO: 224992 - RNA, 19 nt, Homo sapiens
  misc_RNA (1)...(19): siRNA sense strand
gcucaaggcuggugaugug

SEQ ID NO: 224993 - RNA, 19 nt, Homo sapiens
  misc_RNA (1)...(19): siRNA sense strand
gaccaaggaugagcaguuu

SEQ ID NO: 224994 - RNA, 19 nt, Homo sapiens
  misc_RNA (1)...(19): siRNA sense strand
aaagaaggaugaagccaaa

SEQ ID NO: 224995 - RNA, 19 nt, Homo sapiens
  misc_RNA (1)...(19): siRNA sense strand
gacaucaagucacgcauug

SEQ ID NO: 224996 - RNA, 19 nt, Homo sapiens
  misc_RNA (1)...(19): siRNA sense strand
gaacagccgcguagguuuc

SEQ ID NO: 224997 - RNA, 19 nt, Homo sapiens
  misc_RNA (1)...(19): siRNA sense strand
cagaugagaccaaggauga

SEQ ID NO: 224998 - RNA, 19 nt, Homo sapiens
  misc_RNA (1)...(19): siRNA sense strand
gagcagugcguccagaauu

SEQ ID NO: 224999 - RNA, 19 nt, Homo sapiens
  misc_RNA (1)...(19): siRNA sense strand
ccagcaacgugcagaagaa

SEQ ID NO: 225000 - RNA, 19 nt, Homo sapiens
  misc_RNA (1)...(19): siRNA sense strand
agaaggaucuccggaccua

SEQ ID NO: 225001 - RNA, 19 nt, Homo sapiens
  misc_RNA (1)...(19): siRNA sense strand
guggagaccuucccagcaa

SEQ ID NO: 225002 - RNA, 19 nt, Homo sapiens
  misc_RNA (1)...(19): siRNA sense strand
ggcgcaagcugguggacua

SEQ ID NO: 225003 - RNA, 19 nt, Homo sapiens
  misc_RNA (1)...(19): siRNA sense strand
gaccugcuguggauggauu

SEQ ID NO: 225004 - RNA, 19 nt, Homo sapiens
  misc_RNA (1)...(19): siRNA sense strand
gaagguguuugaggagaug

SEQ ID NO: 225005 - RNA, 19 nt, Homo sapiens
  misc_RNA (1)...(19): siRNA sense strand
gcagagaugggcaguaaag

SEQ ID NO: 225006 - RNA, 19 nt, Homo sapiens
  misc_RNA (1)...(19): siRNA sense strand
cccgagaacuucacugaga

SEQ ID NO: 225007 - RNA, 19 nt, Homo sapiens
  misc_RNA (1)...(19): siRNA sense strand
gcaagcugguggacuacga

SEQ ID NO: 225008 - RNA, 19 nt, Homo sapiens
  misc_RNA (1)...(19): siRNA sense strand
ggaacagccgcguagguuu

SEQ ID NO: 225009 - RNA, 19 nt, Homo sapiens
  misc_RNA (1)...(19): siRNA sense strand
cgggaaagaucgccagcaa

SEQ ID NO: 225010 - RNA, 19 nt, Homo sapiens
  misc_RNA (1)...(19): siRNA sense strand
ccaaggaugagcaguuuga

SEQ ID NO: 225011 - RNA, 19 nt, Homo sapiens
  misc_RNA (1)...(19): siRNA sense strand
gcagggaugaggcaaacaa

SEQ ID NO: 225012 - RNA, 19 nt, Homo sapiens
  misc_RNA (1)...(19): siRNA sense strand
acaacgaccugcuguggau

SEQ ID NO: 225013 - RNA, 19 nt, Homo sapiens
  misc_RNA (1)...(19): siRNA sense strand
gggaugaggcaaacaagau

SEQ ID NO: 225014 - RNA, 19 nt, Homo sapiens
  misc_RNA (1)...(19): siRNA sense strand
ugaaggagagcgacuggaa

SEQ ID NO: 225015 - RNA, 19 nt, Homo sapiens
  misc_RNA (1)...(19): siRNA sense strand
gcaaacaagaucgcagaga

SEQ ID NO: 225016 - RNA, 19 nt, Homo sapiens
  misc_RNA (1)...(19): siRNA sense strand
cuaccuggccuccgucaaa

SEQ ID NO: 225017 - RNA, 19 nt, Homo sapiens
  misc_RNA (1)...(19): siRNA sense strand
ucaaccagaaccucaauga

SEQ ID NO: 225018 - RNA, 19 nt, Homo sapiens
  misc_RNA (1)...(19): siRNA sense strand
cgacaucaagucacgcauu

SEQ ID NO: 225019 - RNA, 19 nt, Homo sapiens
  misc_RNA (1)...(19): siRNA sense strand
aaccagaaccucaaugaug

SEQ ID NO: 225020 - RNA, 19 nt, Homo sapiens
  misc_RNA (1)...(19): siRNA sense strand
gcaacaccuucacggucaa

SEQ ID NO: 225021 - RNA, 19 nt, Homo sapiens
  misc_RNA (1)...(19): siRNA sense strand
accagaaccucaaugaugu

SEQ ID NO: 225022 - RNA, 19 nt, Homo sapiens
  misc_RNA (1)...(19): siRNA sense strand
aggaggagcucaucaaagc

SEQ ID NO: 225023 - RNA, 19 nt, Homo sapiens
  misc_RNA (1)...(19): siRNA sense strand
cgaggaggagcucaucaaa

SEQ ID NO: 225024 - RNA, 19 nt, Homo sapiens
  misc_RNA (1)...(19): siRNA sense strand
agcagugcguccagaauuu

SEQ ID NO: 225025 - RNA, 19 nt, Homo sapiens
  misc_RNA (1)...(19): siRNA sense strand
ggaaggcagaugagaccaa

SEQ ID NO: 225026 - RNA, 19 nt, Homo sapiens
  misc_RNA (1)...(19): siRNA sense strand
ucaaagcccagaagguguu

SEQ ID NO: 225027 - RNA, 19 nt, Homo sapiens
  misc_RNA (1)...(19): siRNA sense strand
gaggaggagcucaucaaag

SEQ ID NO: 225028 - RNA, 19 nt, Homo sapiens
  misc_RNA (1)...(19): siRNA sense strand
acaaggagaugagcaagcu

SEQ ID NO: 225029 - RNA, 19 nt, Homo sapiens
  misc_RNA (1)...(19): siRNA sense strand
ggaugaggcaaacaagauc

SEQ ID NO: 225030 - RNA, 19 nt, Homo sapiens
  misc_RNA (1)...(19): siRNA sense strand
gaaggaugaagccaaaauu

SEQ ID NO: 225031 - RNA, 19 nt, Homo sapiens
  misc_RNA (1)...(19): siRNA sense strand
ccacuacgagucccuucaa

SEQ ID NO: 225032 - RNA, 19 nt, Homo sapiens
  misc_RNA (1)...(19): siRNA sense strand
ggauggauuaccaccagaa

SEQ ID NO: 225033 - RNA, 19 nt, Homo sapiens
  misc_RNA (1)...(19): siRNA sense strand
caaccagaaccucaaugau

SEQ ID NO: 225034 - RNA, 19 nt, Homo sapiens
  misc_RNA (1)...(19): siRNA sense strand
gcagugcguccagaauuuc

SEQ ID NO: 225035 - RNA, 19 nt, Homo sapiens
  misc_RNA (1)...(19): siRNA sense strand
caagaucgcagagaacaac

SEQ ID NO: 225036 - RNA, 19 nt, Homo sapiens
  misc_RNA (1)...(19): siRNA sense strand
agaccaaggaugagcaguu

SEQ ID NO: 225037 - RNA, 19 nt, Homo sapiens
  misc_RNA (1)...(19): siRNA sense strand
ugacaacgcgccugcaaaa

SEQ ID NO: 225038 - RNA, 19 nt, Homo sapiens
  misc_RNA (1)...(19): siRNA sense strand
agaagguguuugaggagau

SEQ ID NO: 225039 - RNA, 19 nt, Homo sapiens
  misc_RNA (1)...(19): siRNA sense strand
cacuacgagucccuucaaa

SEQ ID NO: 225040 - RNA, 19 nt, Homo sapiens
  misc_RNA (1)...(19): siRNA sense strand
ucaacacguuccagagcau

SEQ ID NO: 225041 - RNA, 19 nt, Homo sapiens
  misc_RNA (1)...(19): siRNA sense strand
gccagcaacgugcagaaga

SEQ ID NO: 225042 - RNA, 19 nt, Homo sapiens
  misc_RNA (1)...(19): siRNA sense strand
cguccagaauuucaacaag

SEQ ID NO: 225043 - RNA, 19 nt, Homo sapiens
  misc_RNA (1)...(19): siRNA sense strand
uccagaauuucaacaagca

SEQ ID NO: 225044 - RNA, 19 nt, Homo sapiens
  misc_RNA (1)...(19): siRNA sense strand
cuacacggccacugacaca

SEQ ID NO: 225045 - RNA, 19 nt, Homo sapiens
  misc_RNA (1)...(19): siRNA sense strand
gcucaaccagaaccucaau

SEQ ID NO: 225046 - RNA, 19 nt, Homo sapiens
  misc_RNA (1)...(19): siRNA sense strand
uggaacagccgcguagguu

SEQ ID NO: 225047 - RNA, 19 nt, Homo sapiens
  misc_RNA (1)...(19): siRNA sense strand
gcucaucaaagcccagaag

SEQ ID NO: 225048 - RNA, 19 nt, Homo sapiens
  misc_RNA (1)...(19): siRNA sense strand
caaacaagaucgcagagaa

SEQ ID NO: 225049 - RNA, 19 nt, Homo sapiens
  misc_RNA (1)...(19): siRNA sense strand
gcucaaggcuggugaugug

SEQ ID NO: 225050 - RNA, 19 nt, Homo sapiens
  misc_RNA (1)...(19): siRNA sense strand
gaccaaggaugagcaguuu

SEQ ID NO: 225051 - RNA, 19 nt, Homo sapiens
  misc_RNA (1)...(19): siRNA sense strand
aaagaaggaugaagccaaa

SEQ ID NO: 225052 - RNA, 19 nt, Homo sapiens
  misc_RNA (1)...(19): siRNA sense strand
gacaucaagucacgcauug

SEQ ID NO: 225053 - RNA, 19 nt, Homo sapiens
  misc_RNA (1)...(19): siRNA sense strand
gaacagccgcguagguuuc

SEQ ID NO: 225054 - RNA, 19 nt, Homo sapiens
  misc_RNA (1)...(19): siRNA sense strand
cagaugagaccaaggauga

SEQ ID NO: 225055 - RNA, 19 nt, Homo sapiens
  misc_RNA (1)...(19): siRNA sense strand
gagcagugcguccagaauu

SEQ ID NO: 225056 - RNA, 19 nt, Homo sapiens
  misc_RNA (1)...(19): siRNA sense strand
ccagcaacgugcagaagaa

SEQ ID NO: 225057 - RNA, 19 nt, Homo sapiens
  misc_RNA (1)...(19): siRNA sense strand
agaaggaucuccggaccua

SEQ ID NO: 225058 - RNA, 19 nt, Homo sapiens
  misc_RNA (1)...(19): siRNA sense strand
guggagaccuucccagcaa

SEQ ID NO: 225059 - RNA, 19 nt, Homo sapiens
  misc_RNA (1)...(19): siRNA sense strand
ggcgcaagcugguggacua

SEQ ID NO: 225060 - RNA, 19 nt, Homo sapiens
  misc_RNA (1)...(19): siRNA sense strand
gaccugcuguggauggauu

SEQ ID NO: 225061 - RNA, 19 nt, Homo sapiens
  misc_RNA (1)...(19): siRNA sense strand
gaagguguuugaggagaug

SEQ ID NO: 225062 - RNA, 19 nt, Homo sapiens
  misc_RNA (1)...(19): siRNA sense strand
gcagagaugggcaguaaag

SEQ ID NO: 225063 - RNA, 19 nt, Homo sapiens
  misc_RNA (1)...(19): siRNA sense strand
cccgagaacuucacugaga

SEQ ID NO: 225064 - RNA, 19 nt, Homo sapiens
  misc_RNA (1)...(19): siRNA sense strand
gcaagcugguggacuacga

SEQ ID NO: 225065 - RNA, 19 nt, Homo sapiens
  misc_RNA (1)...(19): siRNA sense strand
ggaacagccgcguagguuu

SEQ ID NO: 225066 - RNA, 19 nt, Homo sapiens
  misc_RNA (1)...(19): siRNA sense strand
cgggaaagaucgccagcaa

SEQ ID NO: 225067 - RNA, 19 nt, Homo sapiens
  misc_RNA (1)...(19): siRNA sense strand
ccaaggaugagcaguuuga

SEQ ID NO: 225068 - RNA, 19 nt, Homo sapiens
  misc_RNA (1)...(19): siRNA sense strand
gcagggaugaggcaaacaa

SEQ ID NO: 225069 - RNA, 19 nt, Homo sapiens
  misc_RNA (1)...(19): siRNA sense strand
acaacgaccugcuguggau

SEQ ID NO: 225070 - RNA, 19 nt, Homo sapiens
  misc_RNA (1)...(19): siRNA sense strand
gggaugaggcaaacaagau

SEQ ID NO: 225071 - RNA, 19 nt, Homo sapiens
  misc_RNA (1)...(19): siRNA sense strand
ugaaggagagcgacuggaa

SEQ ID NO: 225072 - RNA, 19 nt, Homo sapiens
  misc_RNA (1)...(19): siRNA sense strand
gcaaacaagaucgcagaga

SEQ ID NO: 225073 - RNA, 19 nt, Homo sapiens
  misc_RNA (1)...(19): siRNA sense strand
cuaccuggccuccgucaaa

SEQ ID NO: 225074 - RNA, 19 nt, Homo sapiens
  misc_RNA (1)...(19): siRNA sense strand
ucaaccagaaccucaauga

SEQ ID NO: 225075 - RNA, 19 nt, Homo sapiens
  misc_RNA (1)...(19): siRNA sense strand
cgacaucaagucacgcauu

SEQ ID NO: 225076 - RNA, 19 nt, Homo sapiens
  misc_RNA (1)...(19): siRNA sense strand
aaccagaaccucaaugaug

SEQ ID NO: 225077 - RNA, 19 nt, Homo sapiens
  misc_RNA (1)...(19): siRNA sense strand
gcaacaccuucacggucaa

SEQ ID NO: 225078 - RNA, 19 nt, Homo sapiens
  misc_RNA (1)...(19): siRNA sense strand
accagaaccucaaugaugu

SEQ ID NO: 225079 - RNA, 19 nt, Homo sapiens
  misc_RNA (1)...(19): siRNA sense strand
aggaggagcucaucaaagc

SEQ ID NO: 225080 - RNA, 19 nt, Homo sapiens
  misc_RNA (1)...(19): siRNA sense strand
cgaggaggagcucaucaaa

SEQ ID NO: 225081 - RNA, 19 nt, Homo sapiens
  misc_RNA (1)...(19): siRNA sense strand
agcagugcguccagaauuu

SEQ ID NO: 225082 - RNA, 19 nt, Homo sapiens
  misc_RNA (1)...(19): siRNA sense strand
ggaaggcagaugagaccaa

SEQ ID NO: 225083 - RNA, 19 nt, Homo sapiens
  misc_RNA (1)...(19): siRNA sense strand
ucaaagcccagaagguguu

SEQ ID NO: 225084 - RNA, 19 nt, Homo sapiens
  misc_RNA (1)...(19): siRNA sense strand
gaggaggagcucaucaaag

SEQ ID NO: 225085 - RNA, 19 nt, Homo sapiens
  misc_RNA (1)...(19): siRNA sense strand
acaaggagaugagcaagcu

SEQ ID NO: 225086 - RNA, 19 nt, Homo sapiens
  misc_RNA (1)...(19): siRNA sense strand
ggaugaggcaaacaagauc

SEQ ID NO: 225087 - RNA, 19 nt, Homo sapiens
  misc_RNA (1)...(19): siRNA sense strand
gaaggaugaagccaaaauu

SEQ ID NO: 225088 - RNA, 19 nt, Homo sapiens
  misc_RNA (1)...(19): siRNA sense strand
ccacuacgagucccuucaa

SEQ ID NO: 225089 - RNA, 19 nt, Homo sapiens
  misc_RNA (1)...(19): siRNA sense strand
ggauggauuaccaccagaa

SEQ ID NO: 225090 - RNA, 19 nt, Homo sapiens
  misc_RNA (1)...(19): siRNA sense strand
caaccagaaccucaaugau

SEQ ID NO: 225091 - RNA, 19 nt, Homo sapiens
  misc_RNA (1)...(19): siRNA sense strand
gcagugcguccagaauuuc

SEQ ID NO: 225092 - RNA, 19 nt, Homo sapiens
  misc_RNA (1)...(19): siRNA sense strand
caagaucgcagagaacaac

SEQ ID NO: 225093 - RNA, 19 nt, Homo sapiens
  misc_RNA (1)...(19): siRNA sense strand
agaccaaggaugagcaguu

SEQ ID NO: 225094 - RNA, 19 nt, Homo sapiens
  misc_RNA (1)...(19): siRNA sense strand
ugacaacgcgccugcaaaa

SEQ ID NO: 225095 - RNA, 19 nt, Homo sapiens
  misc_RNA (1)...(19): siRNA sense strand
agaagguguuugaggagau

SEQ ID NO: 225096 - RNA, 19 nt, Homo sapiens
  misc_RNA (1)...(19): siRNA sense strand
cacuacgagucccuucaaa

SEQ ID NO: 225097 - RNA, 19 nt, Homo sapiens
  misc_RNA (1)...(19): siRNA sense strand
ucaacacguuccagagcau

SEQ ID NO: 225098 - RNA, 19 nt, Homo sapiens
  misc_RNA (1)...(19): siRNA sense strand
gccagcaacgugcagaaga

SEQ ID NO: 225099 - RNA, 19 nt, Homo sapiens
  misc_RNA (1)...(19): siRNA sense strand
cguccagaauuucaacaag

SEQ ID NO: 225100 - RNA, 19 nt, Homo sapiens
  misc_RNA (1)...(19): siRNA sense strand
uccagaauuucaacaagca

SEQ ID NO: 225101 - RNA, 19 nt, Homo sapiens
  misc_RNA (1)...(19): siRNA sense strand
cuacacggccacugacaca

SEQ ID NO: 225102 - RNA, 19 nt, Homo sapiens
  misc_RNA (1)...(19): siRNA sense strand
gcucaaccagaaccucaau

SEQ ID NO: 225103 - RNA, 19 nt, Homo sapiens
  misc_RNA (1)...(19): siRNA sense strand
uggaacagccgcguagguu

SEQ ID NO: 225104 - RNA, 19 nt, Homo sapiens
  misc_RNA (1)...(19): siRNA sense strand
gcucaucaaagcccagaag

SEQ ID NO: 225105 - RNA, 19 nt, Homo sapiens
  misc_RNA (1)...(19): siRNA sense strand
caaacaagaucgcagagaa

SEQ ID NO: 225106 - RNA, 19 nt, Homo sapiens
  misc_RNA (1)...(19): siRNA sense strand
gcucaaggcuggugaugug

SEQ ID NO: 225107 - RNA, 19 nt, Homo sapiens
  misc_RNA (1)...(19): siRNA sense strand
gaccaaggaugagcaguuu

SEQ ID NO: 225108 - RNA, 19 nt, Homo sapiens
  misc_RNA (1)...(19): siRNA sense strand
aaagaaggaugaagccaaa

SEQ ID NO: 225109 - RNA, 19 nt, Homo sapiens
  misc_RNA (1)...(19): siRNA sense strand
gacaucaagucacgcauug

SEQ ID NO: 225110 - RNA, 19 nt, Homo sapiens
  misc_RNA (1)...(19): siRNA sense strand
gaacagccgcguagguuuc

SEQ ID NO: 225111 - RNA, 19 nt, Homo sapiens
  misc_RNA (1)...(19): siRNA sense strand
cagaugagaccaaggauga

SEQ ID NO: 225112 - RNA, 19 nt, Homo sapiens
  misc_RNA (1)...(19): siRNA sense strand
gagcagugcguccagaauu

SEQ ID NO: 225113 - RNA, 19 nt, Homo sapiens
  misc_RNA (1)...(19): siRNA sense strand
ccagcaacgugcagaagaa

SEQ ID NO: 225114 - RNA, 19 nt, Homo sapiens
  misc_RNA (1)...(19): siRNA sense strand
agaaggaucuccggaccua

SEQ ID NO: 225115 - RNA, 19 nt, Homo sapiens
  misc_RNA (1)...(19): siRNA sense strand
guggagaccuucccagcaa

SEQ ID NO: 225116 - RNA, 19 nt, Homo sapiens
  misc_RNA (1)...(19): siRNA sense strand
ggcgcaagcugguggacua

SEQ ID NO: 225117 - RNA, 19 nt, Homo sapiens
  misc_RNA (1)...(19): siRNA sense strand
gaccugcuguggauggauu

SEQ ID NO: 225118 - RNA, 19 nt, Homo sapiens
  misc_RNA (1)...(19): siRNA sense strand
gaagguguuugaggagaug

SEQ ID NO: 225119 - RNA, 19 nt, Homo sapiens
  misc_RNA (1)...(19): siRNA sense strand
gcagagaugggcaguaaag

SEQ ID NO: 225120 - RNA, 19 nt, Homo sapiens
  misc_RNA (1)...(19): siRNA sense strand
cccgagaacuucacugaga

SEQ ID NO: 225121 - RNA, 19 nt, Homo sapiens
  misc_RNA (1)...(19): siRNA sense strand
gcaagcugguggacuacga

SEQ ID NO: 225122 - RNA, 19 nt, Homo sapiens
  misc_RNA (1)...(19): siRNA sense strand
ggaacagccgcguagguuu

SEQ ID NO: 225123 - RNA, 19 nt, Homo sapiens
  misc_RNA (1)...(19): siRNA sense strand
cgggaaagaucgccagcaa

SEQ ID NO: 225124 - RNA, 19 nt, Homo sapiens
  misc_RNA (1)...(19): siRNA sense strand
ccaaggaugagcaguuuga

SEQ ID NO: 225125 - RNA, 19 nt, Homo sapiens
  misc_RNA (1)...(19): siRNA sense strand
gcagggaugaggcaaacaa

SEQ ID NO: 225126 - RNA, 19 nt, Homo sapiens
  misc_RNA (1)...(19): siRNA sense strand
acaacgaccugcuguggau

SEQ ID NO: 225127 - RNA, 19 nt, Homo sapiens
  misc_RNA (1)...(19): siRNA sense strand
gggaugaggcaaacaagau

SEQ ID NO: 225128 - RNA, 19 nt, Homo sapiens
  misc_RNA (1)...(19): siRNA sense strand
ugaaggagagcgacuggaa

SEQ ID NO: 225129 - RNA, 19 nt, Homo sapiens
  misc_RNA (1)...(19): siRNA sense strand
gcaaacaagaucgcagaga

SEQ ID NO: 225130 - RNA, 19 nt, Homo sapiens
  misc_RNA (1)...(19): siRNA sense strand
cuaccuggccuccgucaaa

SEQ ID NO: 225131 - RNA, 19 nt, Homo sapiens
  misc_RNA (1)...(19): siRNA sense strand
ucaaccagaaccucaauga

SEQ ID NO: 225132 - RNA, 19 nt, Homo sapiens
  misc_RNA (1)...(19): siRNA sense strand
cgacaucaagucacgcauu

SEQ ID NO: 225133 - RNA, 19 nt, Homo sapiens
  misc_RNA (1)...(19): siRNA sense strand
aaccagaaccucaaugaug

SEQ ID NO: 225134 - RNA, 19 nt, Homo sapiens
  misc_RNA (1)...(19): siRNA sense strand
gcaacaccuucacggucaa

SEQ ID NO: 225135 - RNA, 19 nt, Homo sapiens
  misc_RNA (1)...(19): siRNA sense strand
accagaaccucaaugaugu

SEQ ID NO: 225136 - RNA, 19 nt, Homo sapiens
  misc_RNA (1)...(19): siRNA sense strand
aggaggagcucaucaaagc

SEQ ID NO: 225137 - RNA, 19 nt, Homo sapiens
  misc_RNA (1)...(19): siRNA sense strand
cgaggaggagcucaucaaa

SEQ ID NO: 225138 - RNA, 19 nt, Homo sapiens
  misc_RNA (1)...(19): siRNA sense strand
agcagugcguccagaauuu

SEQ ID NO: 225139 - RNA, 19 nt, Homo sapiens
  misc_RNA (1)...(19): siRNA sense strand
ggaaggcagaugagaccaa

SEQ ID NO: 225140 - RNA, 19 nt, Homo sapiens
  misc_RNA (1)...(19): siRNA sense strand
ucaaagcccagaagguguu

SEQ ID NO: 225141 - RNA, 19 nt, Homo sapiens
  misc_RNA (1)...(19): siRNA sense strand
gaggaggagcucaucaaag

SEQ ID NO: 225142 - RNA, 19 nt, Homo sapiens
  misc_RNA (1)...(19): siRNA sense strand
acaaggagaugagcaagcu

SEQ ID NO: 225143 - RNA, 19 nt, Homo sapiens
  misc_RNA (1)...(19): siRNA sense strand
ggaugaggcaaacaagauc

SEQ ID NO: 225144 - RNA, 19 nt, Homo sapiens
  misc_RNA (1)...(19): siRNA sense strand
gaaggaugaagccaaaauu

SEQ ID NO: 225145 - RNA, 19 nt, Homo sapiens
  misc_RNA (1)...(19): siRNA sense strand
ccacuacgagucccuucaa

SEQ ID NO: 225146 - RNA, 19 nt, Homo sapiens
  misc_RNA (1)...(19): siRNA sense strand
ggauggauuaccaccagaa

SEQ ID NO: 225147 - RNA, 19 nt, Homo sapiens
  misc_RNA (1)...(19): siRNA sense strand
caaccagaaccucaaugau

SEQ ID NO: 225148 - RNA, 19 nt, Homo sapiens
  misc_RNA (1)...(19): siRNA sense strand
gcagugcguccagaauuuc

SEQ ID NO: 225149 - RNA, 19 nt, Homo sapiens
  misc_RNA (1)...(19): siRNA sense strand
caagaucgcagagaacaac

SEQ ID NO: 225150 - RNA, 19 nt, Homo sapiens
  misc_RNA (1)...(19): siRNA sense strand
agaccaaggaugagcaguu

SEQ ID NO: 225151 - RNA, 19 nt, Homo sapiens
  misc_RNA (1)...(19): siRNA sense strand
ugacaacgcgccugcaaaa

SEQ ID NO: 225152 - RNA, 19 nt, Homo sapiens
  misc_RNA (1)...(19): siRNA sense strand
agaagguguuugaggagau

SEQ ID NO: 225153 - RNA, 19 nt, Homo sapiens
  misc_RNA (1)...(19): siRNA sense strand
cacuacgagucccuucaaa

SEQ ID NO: 225154 - RNA, 19 nt, Homo sapiens
  misc_RNA (1)...(19): siRNA sense strand
ucaacacguuccagagcau

SEQ ID NO: 225155 - RNA, 19 nt, Homo sapiens
  misc_RNA (1)...(19): siRNA sense strand
gccagcaacgugcagaaga

SEQ ID NO: 225156 - RNA, 19 nt, Homo sapiens
  misc_RNA (1)...(19): siRNA sense strand
cguccagaauuucaacaag

SEQ ID NO: 225157 - RNA, 19 nt, Homo sapiens
  misc_RNA (1)...(19): siRNA sense strand
uccagaauuucaacaagca

SEQ ID NO: 225158 - RNA, 19 nt, Homo sapiens
  misc_RNA (1)...(19): siRNA sense strand
cuacacggccacugacaca

SEQ ID NO: 225159 - RNA, 19 nt, Homo sapiens
  misc_RNA (1)...(19): siRNA sense strand
gcucaaccagaaccucaau

SEQ ID NO: 225160 - RNA, 19 nt, Homo sapiens
  misc_RNA (1)...(19): siRNA sense strand
uggaacagccgcguagguu

SEQ ID NO: 225161 - RNA, 19 nt, Homo sapiens
  misc_RNA (1)...(19): siRNA sense strand
gcucaucaaagcccagaag

SEQ ID NO: 225162 - RNA, 19 nt, Homo sapiens
  misc_RNA (1)...(19): siRNA sense strand
caaacaagaucgcagagaa

SEQ ID NO: 225163 - RNA, 19 nt, Homo sapiens
  misc_RNA (1)...(19): siRNA sense strand
gcucaaggcuggugaugug

SEQ ID NO: 225164 - RNA, 19 nt, Homo sapiens
  misc_RNA (1)...(19): siRNA sense strand
gaccaaggaugagcaguuu

SEQ ID NO: 225165 - RNA, 19 nt, Homo sapiens
  misc_RNA (1)...(19): siRNA sense strand
aaagaaggaugaagccaaa

SEQ ID NO: 225166 - RNA, 19 nt, Homo sapiens
  misc_RNA (1)...(19): siRNA sense strand
gacaucaagucacgcauug

SEQ ID NO: 225167 - RNA, 19 nt, Homo sapiens
  misc_RNA (1)...(19): siRNA sense strand
gaacagccgcguagguuuc

SEQ ID NO: 225168 - RNA, 19 nt, Homo sapiens
  misc_RNA (1)...(19): siRNA sense strand
cagaugagaccaaggauga

SEQ ID NO: 225169 - RNA, 19 nt, Homo sapiens
  misc_RNA (1)...(19): siRNA sense strand
gagcagugcguccagaauu

SEQ ID NO: 225170 - RNA, 19 nt, Homo sapiens
  misc_RNA (1)...(19): siRNA sense strand
ccagcaacgugcagaagaa

SEQ ID NO: 225171 - RNA, 19 nt, Homo sapiens
  misc_RNA (1)...(19): siRNA sense strand
agaaggaucuccggaccua

SEQ ID NO: 225172 - RNA, 19 nt, Homo sapiens
  misc_RNA (1)...(19): siRNA sense strand
guggagaccuucccagcaa

SEQ ID NO: 225173 - RNA, 19 nt, Homo sapiens
  misc_RNA (1)...(19): siRNA sense strand
ggcgcaagcugguggacua

SEQ ID NO: 225174 - RNA, 19 nt, Homo sapiens
  misc_RNA (1)...(19): siRNA sense strand
gaccugcuguggauggauu

SEQ ID NO: 225175 - RNA, 19 nt, Homo sapiens
  misc_RNA (1)...(19): siRNA sense strand
gaagguguuugaggagaug

SEQ ID NO: 225176 - RNA, 19 nt, Homo sapiens
  misc_RNA (1)...(19): siRNA sense strand
gcagagaugggcaguaaag

SEQ ID NO: 225177 - RNA, 19 nt, Homo sapiens
  misc_RNA (1)...(19): siRNA sense strand
cccgagaacuucacugaga

SEQ ID NO: 225178 - RNA, 19 nt, Homo sapiens
  misc_RNA (1)...(19): siRNA sense strand
gcaagcugguggacuacga

SEQ ID NO: 225179 - RNA, 19 nt, Homo sapiens
  misc_RNA (1)...(19): siRNA sense strand
ggaacagccgcguagguuu

SEQ ID NO: 225180 - RNA, 19 nt, Homo sapiens
  misc_RNA (1)...(19): siRNA sense strand
cgggaaagaucgccagcaa

SEQ ID NO: 225181 - RNA, 19 nt, Homo sapiens
  misc_RNA (1)...(19): siRNA sense strand
ccaaggaugagcaguuuga

SEQ ID NO: 225182 - RNA, 19 nt, Homo sapiens
  misc_RNA (1)...(19): siRNA sense strand
gcagggaugaggcaaacaa

SEQ ID NO: 225183 - RNA, 19 nt, Homo sapiens
  misc_RNA (1)...(19): siRNA sense strand
acaacgaccugcuguggau

SEQ ID NO: 225184 - RNA, 19 nt, Homo sapiens
  misc_RNA (1)...(19): siRNA sense strand
gggaugaggcaaacaagau

SEQ ID NO: 225185 - RNA, 19 nt, Homo sapiens
  misc_RNA (1)...(19): siRNA sense strand
ugaaggagagcgacuggaa

SEQ ID NO: 225186 - RNA, 19 nt, Homo sapiens
  misc_RNA (1)...(19): siRNA sense strand
gcaaacaagaucgcagaga

SEQ ID NO: 225187 - RNA, 19 nt, Homo sapiens
  misc_RNA (1)...(19): siRNA sense strand
cuaccuggccuccgucaaa

SEQ ID NO: 225188 - RNA, 19 nt, Homo sapiens
  misc_RNA (1)...(19): siRNA sense strand
ucaaccagaaccucaauga

SEQ ID NO: 225189 - RNA, 19 nt, Homo sapiens
  misc_RNA (1)...(19): siRNA sense strand
cgacaucaagucacgcauu

SEQ ID NO: 225190 - RNA, 19 nt, Homo sapiens
  misc_RNA (1)...(19): siRNA sense strand
aaccagaaccucaaugaug

SEQ ID NO: 225191 - RNA, 19 nt, Homo sapiens
  misc_RNA (1)...(19): siRNA sense strand
gcaacaccuucacggucaa

SEQ ID NO: 225192 - RNA, 19 nt, Homo sapiens
  misc_RNA (1)...(19): siRNA sense strand
accagaaccucaaugaugu

SEQ ID NO: 225193 - RNA, 19 nt, Homo sapiens
  misc_RNA (1)...(19): siRNA sense strand
aggaggagcucaucaaagc

SEQ ID NO: 225194 - RNA, 19 nt, Homo sapiens
  misc_RNA (1)...(19): siRNA sense strand
cgaggaggagcucaucaaa

SEQ ID NO: 225195 - RNA, 19 nt, Homo sapiens
  misc_RNA (1)...(19): siRNA sense strand
agcagugcguccagaauuu

SEQ ID NO: 225196 - RNA, 19 nt, Homo sapiens
  misc_RNA (1)...(19): siRNA sense strand
ggaaggcagaugagaccaa

SEQ ID NO: 225197 - RNA, 19 nt, Homo sapiens
  misc_RNA (1)...(19): siRNA sense strand
ucaaagcccagaagguguu

SEQ ID NO: 225198 - RNA, 19 nt, Homo sapiens
  misc_RNA (1)...(19): siRNA sense strand
gaggaggagcucaucaaag

SEQ ID NO: 225199 - RNA, 19 nt, Homo sapiens
  misc_RNA (1)...(19): siRNA sense strand
acaaggagaugagcaagcu

SEQ ID NO: 225200 - RNA, 19 nt, Homo sapiens
  misc_RNA (1)...(19): siRNA sense strand
ggaugaggcaaacaagauc

SEQ ID NO: 225201 - RNA, 19 nt, Homo sapiens
  misc_RNA (1)...(19): siRNA sense strand
gaaggaugaagccaaaauu

SEQ ID NO: 225202 - RNA, 19 nt, Homo sapiens
  misc_RNA (1)...(19): siRNA sense strand
ccacuacgagucccuucaa

SEQ ID NO: 225203 - RNA, 19 nt, Homo sapiens
  misc_RNA (1)...(19): siRNA sense strand
ggauggauuaccaccagaa

SEQ ID NO: 225204 - RNA, 19 nt, Homo sapiens
  misc_RNA (1)...(19): siRNA sense strand
caaccagaaccucaaugau

SEQ ID NO: 225205 - RNA, 19 nt, Homo sapiens
  misc_RNA (1)...(19): siRNA sense strand
gcagugcguccagaauuuc

SEQ ID NO: 225206 - RNA, 19 nt, Homo sapiens
  misc_RNA (1)...(19): siRNA sense strand
caagaucgcagagaacaac

SEQ ID NO: 225207 - RNA, 19 nt, Homo sapiens
  misc_RNA (1)...(19): siRNA sense strand
agaccaaggaugagcaguu

SEQ ID NO: 225208 - RNA, 19 nt, Homo sapiens
  misc_RNA (1)...(19): siRNA sense strand
ugacaacgcgccugcaaaa

SEQ ID NO: 225209 - RNA, 19 nt, Homo sapiens
  misc_RNA (1)...(19): siRNA sense strand
agaagguguuugaggagau

SEQ ID NO: 225210 - RNA, 19 nt, Homo sapiens
  misc_RNA (1)...(19): siRNA sense strand
cacuacgagucccuucaaa

SEQ ID NO: 225211 - RNA, 19 nt, Homo sapiens
  misc_RNA (1)...(19): siRNA sense strand
ucaacacguuccagagcau

SEQ ID NO: 225212 - RNA, 19 nt, Homo sapiens
  misc_RNA (1)...(19): siRNA sense strand
gccagcaacgugcagaaga

SEQ ID NO: 225213 - RNA, 19 nt, Homo sapiens
  misc_RNA (1)...(19): siRNA sense strand
cguccagaauuucaacaag

SEQ ID NO: 225214 - RNA, 19 nt, Homo sapiens
  misc_RNA (1)...(19): siRNA sense strand
uccagaauuucaacaagca

SEQ ID NO: 225215 - RNA, 19 nt, Homo sapiens
  misc_RNA (1)...(19): siRNA sense strand
cuacacggccacugacaca

SEQ ID NO: 225216 - RNA, 19 nt, Homo sapiens
  misc_RNA (1)...(19): siRNA sense strand
gcucaaccagaaccucaau

SEQ ID NO: 225217 - RNA, 19 nt, Homo sapiens
  misc_RNA (1)...(19): siRNA sense strand
uggaacagccgcguagguu

SEQ ID NO: 225218 - RNA, 19 nt, Homo sapiens
  misc_RNA (1)...(19): siRNA sense strand
gcucaucaaagcccagaag

SEQ ID NO: 225219 - RNA, 19 nt, Homo sapiens
  misc_RNA (1)...(19): siRNA sense strand
caaacaagaucgcagagaa

SEQ ID NO: 225220 - RNA, 19 nt, Homo sapiens
  misc_RNA (1)...(19): siRNA sense strand
gcucaaggcuggugaugug

SEQ ID NO: 225221 - RNA, 19 nt, Homo sapiens
  misc_RNA (1)...(19): siRNA sense strand
gaccaaggaugagcaguuu

SEQ ID NO: 225222 - RNA, 19 nt, Homo sapiens
  misc_RNA (1)...(19): siRNA sense strand
aaagaaggaugaagccaaa

SEQ ID NO: 225223 - RNA, 19 nt, Homo sapiens
  misc_RNA (1)...(19): siRNA sense strand
gacaucaagucacgcauug

SEQ ID NO: 225224 - RNA, 19 nt, Homo sapiens
  misc_RNA (1)...(19): siRNA sense strand
gaacagccgcguagguuuc

SEQ ID NO: 225225 - RNA, 19 nt, Homo sapiens
  misc_RNA (1)...(19): siRNA sense strand
cagaugagaccaaggauga

SEQ ID NO: 225226 - RNA, 19 nt, Homo sapiens
  misc_RNA (1)...(19): siRNA sense strand
gagcagugcguccagaauu

SEQ ID NO: 225227 - RNA, 19 nt, Homo sapiens
  misc_RNA (1)...(19): siRNA sense strand
ccagcaacgugcagaagaa

SEQ ID NO: 225228 - RNA, 19 nt, Homo sapiens
  misc_RNA (1)...(19): siRNA sense strand
agaaggaucuccggaccua

SEQ ID NO: 225229 - RNA, 19 nt, Homo sapiens
  misc_RNA (1)...(19): siRNA sense strand
guggagaccuucccagcaa

SEQ ID NO: 225230 - RNA, 19 nt, Homo sapiens
  misc_RNA (1)...(19): siRNA sense strand
ggcgcaagcugguggacua

SEQ ID NO: 225231 - RNA, 19 nt, Homo sapiens
  misc_RNA (1)...(19): siRNA sense strand
gaccugcuguggauggauu

SEQ ID NO: 225232 - RNA, 19 nt, Homo sapiens
  misc_RNA (1)...(19): siRNA sense strand
gaagguguuugaggagaug

SEQ ID NO: 225233 - RNA, 19 nt, Homo sapiens
  misc_RNA (1)...(19): siRNA sense strand
gcagagaugggcaguaaag

SEQ ID NO: 225234 - RNA, 19 nt, Homo sapiens
  misc_RNA (1)...(19): siRNA sense strand
cccgagaacuucacugaga

SEQ ID NO: 225235 - RNA, 19 nt, Homo sapiens
  misc_RNA (1)...(19): siRNA sense strand
gcaagcugguggacuacga

SEQ ID NO: 225236 - RNA, 19 nt, Homo sapiens
  misc_RNA (1)...(19): siRNA sense strand
ggaacagccgcguagguuu

SEQ ID NO: 225237 - RNA, 19 nt, Homo sapiens
  misc_RNA (1)...(19): siRNA sense strand
cgggaaagaucgccagcaa

SEQ ID NO: 225238 - RNA, 19 nt, Homo sapiens
  misc_RNA (1)...(19): siRNA sense strand
ccaaggaugagcaguuuga

SEQ ID NO: 225239 - RNA, 19 nt, Homo sapiens
  misc_RNA (1)...(19): siRNA sense strand
gcagggaugaggcaaacaa

SEQ ID NO: 225240 - RNA, 19 nt, Homo sapiens
  misc_RNA (1)...(19): siRNA sense strand
acaacgaccugcuguggau

SEQ ID NO: 225241 - RNA, 19 nt, Homo sapiens
  misc_RNA (1)...(19): siRNA sense strand
gggaugaggcaaacaagau

SEQ ID NO: 225242 - RNA, 19 nt, Homo sapiens
  misc_RNA (1)...(19): siRNA sense strand
ugaaggagagcgacuggaa

SEQ ID NO: 225243 - RNA, 19 nt, Homo sapiens
  misc_RNA (1)...(19): siRNA sense strand
gcaaacaagaucgcagaga

SEQ ID NO: 225244 - RNA, 19 nt, Homo sapiens
  misc_RNA (1)...(19): siRNA sense strand
cuaccuggccuccgucaaa

SEQ ID NO: 225245 - RNA, 19 nt, Homo sapiens
  misc_RNA (1)...(19): siRNA sense strand
ucaaccagaaccucaauga

SEQ ID NO: 225246 - RNA, 19 nt, Homo sapiens
  misc_RNA (1)...(19): siRNA sense strand
cgacaucaagucacgcauu

SEQ ID NO: 225247 - RNA, 19 nt, Homo sapiens
  misc_RNA (1)...(19): siRNA sense strand
aaccagaaccucaaugaug

SEQ ID NO: 225248 - RNA, 19 nt, Homo sapiens
  misc_RNA (1)...(19): siRNA sense strand
gcaacaccuucacggucaa

SEQ ID NO: 225249 - RNA, 19 nt, Homo sapiens
  misc_RNA (1)...(19): siRNA sense strand
accagaaccucaaugaugu

SEQ ID NO: 225250 - RNA, 19 nt, Homo sapiens
  misc_RNA (1)...(19): siRNA sense strand
aggaggagcucaucaaagc

SEQ ID NO: 225251 - RNA, 19 nt, Homo sapiens
  misc_RNA (1)...(19): siRNA sense strand
cgaggaggagcucaucaaa

SEQ ID NO: 225252 - RNA, 19 nt, Homo sapiens
  misc_RNA (1)...(19): siRNA sense strand
agcagugcguccagaauuu

SEQ ID NO: 225253 - RNA, 19 nt, Homo sapiens
  misc_RNA (1)...(19): siRNA sense strand
ggaaggcagaugagaccaa

SEQ ID NO: 225254 - RNA, 19 nt, Homo sapiens
  misc_RNA (1)...(19): siRNA sense strand
ucaaagcccagaagguguu

SEQ ID NO: 225255 - RNA, 19 nt, Homo sapiens
  misc_RNA (1)...(19): siRNA sense strand
gaggaggagcucaucaaag

SEQ ID NO: 225256 - RNA, 19 nt, Homo sapiens
  misc_RNA (1)...(19): siRNA sense strand
acaaggagaugagcaagcu

SEQ ID NO: 225257 - RNA, 19 nt, Homo sapiens
  misc_RNA (1)...(19): siRNA sense strand
ggaugaggcaaacaagauc

SEQ ID NO: 225258 - RNA, 19 nt, Homo sapiens
  misc_RNA (1)...(19): siRNA sense strand
gaaggaugaagccaaaauu

SEQ ID NO: 225259 - RNA, 19 nt, Homo sapiens
  misc_RNA (1)...(19): siRNA sense strand
ccacuacgagucccuucaa

SEQ ID NO: 225260 - RNA, 19 nt, Homo sapiens
  misc_RNA (1)...(19): siRNA sense strand
ggauggauuaccaccagaa

SEQ ID NO: 225261 - RNA, 19 nt, Homo sapiens
  misc_RNA (1)...(19): siRNA sense strand
caaccagaaccucaaugau

SEQ ID NO: 225262 - RNA, 19 nt, Homo sapiens
  misc_RNA (1)...(19): siRNA sense strand
gcagugcguccagaauuuc

SEQ ID NO: 225263 - RNA, 19 nt, Homo sapiens
  misc_RNA (1)...(19): siRNA sense strand
caagaucgcagagaacaac

SEQ ID NO: 225264 - RNA, 19 nt, Homo sapiens
  misc_RNA (1)...(19): siRNA sense strand
agaccaaggaugagcaguu

SEQ ID NO: 225265 - RNA, 19 nt, Homo sapiens
  misc_RNA (1)...(19): siRNA sense strand
ugacaacgcgccugcaaaa

SEQ ID NO: 225266 - RNA, 19 nt, Homo sapiens
  misc_RNA (1)...(19): siRNA sense strand
agaagguguuugaggagau

SEQ ID NO: 225267 - RNA, 19 nt, Homo sapiens
  misc_RNA (1)...(19): siRNA sense strand
cacuacgagucccuucaaa

SEQ ID NO: 225268 - RNA, 19 nt, Homo sapiens
  misc_RNA (1)...(19): siRNA sense strand
ucaacacguuccagagcau

SEQ ID NO: 225269 - RNA, 19 nt, Homo sapiens
  misc_RNA (1)...(19): siRNA sense strand
gccagcaacgugcagaaga

SEQ ID NO: 225270 - RNA, 19 nt, Homo sapiens
  misc_RNA (1)...(19): siRNA sense strand
cguccagaauuucaacaag

SEQ ID NO: 225271 - RNA, 19 nt, Homo sapiens
  misc_RNA (1)...(19): siRNA sense strand
uccagaauuucaacaagca

SEQ ID NO: 225272 - RNA, 19 nt, Homo sapiens
  misc_RNA (1)...(19): siRNA sense strand
cuacacggccacugacaca

SEQ ID NO: 225273 - RNA, 19 nt, Homo sapiens
  misc_RNA (1)...(19): siRNA sense strand
gcucaaccagaaccucaau

SEQ ID NO: 225274 - RNA, 19 nt, Homo sapiens
  misc_RNA (1)...(19): siRNA sense strand
uggaacagccgcguagguu

SEQ ID NO: 225275 - RNA, 19 nt, Homo sapiens
  misc_RNA (1)...(19): siRNA sense strand
gcucaucaaagcccagaag

SEQ ID NO: 225276 - RNA, 19 nt, Homo sapiens
  misc_RNA (1)...(19): siRNA sense strand
caaacaagaucgcagagaa

SEQ ID NO: 225277 - RNA, 19 nt, Homo sapiens
  misc_RNA (1)...(19): siRNA sense strand
gcucaaggcuggugaugug

SEQ ID NO: 225278 - RNA, 19 nt, Homo sapiens
  misc_RNA (1)...(19): siRNA sense strand
gaccaaggaugagcaguuu

SEQ ID NO: 225279 - RNA, 19 nt, Homo sapiens
  misc_RNA (1)...(19): siRNA sense strand
aaagaaggaugaagccaaa

SEQ ID NO: 225280 - RNA, 19 nt, Homo sapiens
  misc_RNA (1)...(19): siRNA sense strand
gacaucaagucacgcauug

SEQ ID NO: 225281 - RNA, 19 nt, Homo sapiens
  misc_RNA (1)...(19): siRNA sense strand
gaacagccgcguagguuuc

SEQ ID NO: 225282 - RNA, 19 nt, Homo sapiens
  misc_RNA (1)...(19): siRNA sense strand
cagaugagaccaaggauga

SEQ ID NO: 225283 - RNA, 19 nt, Homo sapiens
  misc_RNA (1)...(19): siRNA sense strand
gagcagugcguccagaauu

SEQ ID NO: 225284 - RNA, 19 nt, Homo sapiens
  misc_RNA (1)...(19): siRNA sense strand
ccagcaacgugcagaagaa

SEQ ID NO: 225285 - RNA, 19 nt, Homo sapiens
  misc_RNA (1)...(19): siRNA sense strand
agaaggaucuccggaccua

SEQ ID NO: 225286 - RNA, 19 nt, Homo sapiens
  misc_RNA (1)...(19): siRNA sense strand
guggagaccuucccagcaa

SEQ ID NO: 225287 - RNA, 19 nt, Homo sapiens
  misc_RNA (1)...(19): siRNA sense strand
ggcgcaagcugguggacua

SEQ ID NO: 225288 - RNA, 19 nt, Homo sapiens
  misc_RNA (1)...(19): siRNA sense strand
gaccugcuguggauggauu

SEQ ID NO: 225289 - RNA, 19 nt, Homo sapiens
  misc_RNA (1)...(19): siRNA sense strand
gaagguguuugaggagaug

SEQ ID NO: 225290 - RNA, 19 nt, Homo sapiens
  misc_RNA (1)...(19): siRNA sense strand
gcagagaugggcaguaaag

SEQ ID NO: 225291 - RNA, 19 nt, Homo sapiens
  misc_RNA (1)...(19): siRNA sense strand
cccgagaacuucacugaga

SEQ ID NO: 225292 - RNA, 19 nt, Homo sapiens
  misc_RNA (1)...(19): siRNA sense strand
gcaagcugguggacuacga

SEQ ID NO: 225293 - RNA, 19 nt, Homo sapiens
  misc_RNA (1)...(19): siRNA sense strand
ggaacagccgcguagguuu

SEQ ID NO: 225294 - RNA, 19 nt, Homo sapiens
  misc_RNA (1)...(19): siRNA sense strand
cgggaaagaucgccagcaa

SEQ ID NO: 225295 - RNA, 19 nt, Homo sapiens
  misc_RNA (1)...(19): siRNA sense strand
ccaaggaugagcaguuuga

SEQ ID NO: 225296 - RNA, 19 nt, Homo sapiens
  misc_RNA (1)...(19): siRNA sense strand
gcagggaugaggcaaacaa

SEQ ID NO: 225297 - RNA, 19 nt, Homo sapiens
  misc_RNA (1)...(19): siRNA sense strand
acaacgaccugcuguggau

SEQ ID NO: 225298 - RNA, 19 nt, Homo sapiens
  misc_RNA (1)...(19): siRNA sense strand
gggaugaggcaaacaagau

SEQ ID NO: 225299 - RNA, 19 nt, Homo sapiens
  misc_RNA (1)...(19): siRNA sense strand
ugaaggagagcgacuggaa

SEQ ID NO: 225300 - RNA, 19 nt, Homo sapiens
  misc_RNA (1)...(19): siRNA sense strand
gcaaacaagaucgcagaga

SEQ ID NO: 225301 - RNA, 19 nt, Homo sapiens
  misc_RNA (1)...(19): siRNA sense strand
cuaccuggccuccgucaaa

SEQ ID NO: 225302 - RNA, 19 nt, Homo sapiens
  misc_RNA (1)...(19): siRNA sense strand
ucaaccagaaccucaauga

SEQ ID NO: 225303 - RNA, 19 nt, Homo sapiens
  misc_RNA (1)...(19): siRNA sense strand
cgacaucaagucacgcauu

SEQ ID NO: 225304 - RNA, 19 nt, Homo sapiens
  misc_RNA (1)...(19): siRNA sense strand
aaccagaaccucaaugaug

SEQ ID NO: 225305 - RNA, 19 nt, Homo sapiens
  misc_RNA (1)...(19): siRNA sense strand
gcaacaccuucacggucaa

SEQ ID NO: 225306 - RNA, 19 nt, Homo sapiens
  misc_RNA (1)...(19): siRNA sense strand
accagaaccucaaugaugu

SEQ ID NO: 225307 - RNA, 19 nt, Homo sapiens
  misc_RNA (1)...(19): siRNA sense strand
aggaggagcucaucaaagc

SEQ ID NO: 225308 - RNA, 19 nt, Homo sapiens
  misc_RNA (1)...(19): siRNA sense strand
cgaggaggagcucaucaaa

SEQ ID NO: 225309 - RNA, 19 nt, Homo sapiens
  misc_RNA (1)...(19): siRNA sense strand
agcagugcguccagaauuu

SEQ ID NO: 225310 - RNA, 19 nt, Homo sapiens
  misc_RNA (1)...(19): siRNA sense strand
ggaaggcagaugagaccaa

SEQ ID NO: 225311 - RNA, 19 nt, Homo sapiens
  misc_RNA (1)...(19): siRNA sense strand
ucaaagcccagaagguguu

SEQ ID NO: 225312 - RNA, 19 nt, Homo sapiens
  misc_RNA (1)...(19): siRNA sense strand
gaggaggagcucaucaaag

SEQ ID NO: 225313 - RNA, 19 nt, Homo sapiens
  misc_RNA (1)...(19): siRNA sense strand
acaaggagaugagcaagcu

SEQ ID NO: 225314 - RNA, 19 nt, Homo sapiens
  misc_RNA (1)...(19): siRNA sense strand
ggaugaggcaaacaagauc

SEQ ID NO: 225315 - RNA, 19 nt, Homo sapiens
  misc_RNA (1)...(19): siRNA sense strand
gaaggaugaagccaaaauu

SEQ ID NO: 225316 - RNA, 19 nt, Homo sapiens
  misc_RNA (1)...(19): siRNA sense strand
ccacuacgagucccuucaa

SEQ ID NO: 225317 - RNA, 19 nt, Homo sapiens
  misc_RNA (1)...(19): siRNA sense strand
ggauggauuaccaccagaa

SEQ ID NO: 225318 - RNA, 19 nt, Homo sapiens
  misc_RNA (1)...(19): siRNA sense strand
caaccagaaccucaaugau

SEQ ID NO: 225319 - RNA, 19 nt, Homo sapiens
  misc_RNA (1)...(19): siRNA sense strand
gcagugcguccagaauuuc

SEQ ID NO: 225320 - RNA, 19 nt, Homo sapiens
  misc_RNA (1)...(19): siRNA sense strand
caagaucgcagagaacaac

SEQ ID NO: 225321 - RNA, 19 nt, Homo sapiens
  misc_RNA (1)...(19): siRNA sense strand
agaccaaggaugagcaguu

SEQ ID NO: 225322 - RNA, 19 nt, Homo sapiens
  misc_RNA (1)...(19): siRNA sense strand
ugacaacgcgccugcaaaa

SEQ ID NO: 225323 - RNA, 19 nt, Homo sapiens
  misc_RNA (1)...(19): siRNA sense strand
agaagguguuugaggagau

SEQ ID NO: 225324 - RNA, 19 nt, Homo sapiens
  misc_RNA (1)...(19): siRNA sense strand
cacuacgagucccuucaaa

SEQ ID NO: 225325 - RNA, 19 nt, Homo sapiens
  misc_RNA (1)...(19): siRNA sense strand
ucaacacguuccagagcau

SEQ ID NO: 225326 - RNA, 19 nt, Homo sapiens
  misc_RNA (1)...(19): siRNA sense strand
gccagcaacgugcagaaga

SEQ ID NO: 225327 - RNA, 19 nt, Homo sapiens
  misc_RNA (1)...(19): siRNA sense strand
cguccagaauuucaacaag

SEQ ID NO: 225328 - RNA, 19 nt, Homo sapiens
  misc_RNA (1)...(19): siRNA sense strand
uccagaauuucaacaagca

SEQ ID NO: 225329 - RNA, 19 nt, Homo sapiens
  misc_RNA (1)...(19): siRNA sense strand
cuacacggccacugacaca

SEQ ID NO: 225330 - RNA, 19 nt, Homo sapiens
  misc_RNA (1)...(19): siRNA sense strand
gcucaaccagaaccucaau

SEQ ID NO: 225331 - RNA, 19 nt, Homo sapiens
  misc_RNA (1)...(19): siRNA sense strand
uggaacagccgcguagguu

SEQ ID NO: 225332 - RNA, 19 nt, Homo sapiens
  misc_RNA (1)...(19): siRNA sense strand
gcucaucaaagcccagaag

SEQ ID NO: 225333 - RNA, 19 nt, Homo sapiens
  misc_RNA (1)...(19): siRNA sense strand
caaacaagaucgcagagaa

SEQ ID NO: 225334 - RNA, 19 nt, Homo sapiens
  misc_RNA (1)...(19): siRNA sense strand
gcucaaggcuggugaugug

SEQ ID NO: 225335 - RNA, 19 nt, Homo sapiens
  misc_RNA (1)...(19): siRNA sense strand
gaccaaggaugagcaguuu

SEQ ID NO: 225336 - RNA, 19 nt, Homo sapiens
  misc_RNA (1)...(19): siRNA sense strand
aaagaaggaugaagccaaa

SEQ ID NO: 225337 - RNA, 19 nt, Homo sapiens
  misc_RNA (1)...(19): siRNA sense strand
gacaucaagucacgcauug

SEQ ID NO: 225338 - RNA, 19 nt, Homo sapiens
  misc_RNA (1)...(19): siRNA sense strand
gaacagccgcguagguuuc

SEQ ID NO: 225339 - RNA, 19 nt, Homo sapiens
  misc_RNA (1)...(19): siRNA sense strand
cagaugagaccaaggauga

SEQ ID NO: 225340 - RNA, 19 nt, Homo sapiens
  misc_RNA (1)...(19): siRNA sense strand
gagcagugcguccagaauu

SEQ ID NO: 225341 - RNA, 19 nt, Homo sapiens
  misc_RNA (1)...(19): siRNA sense strand
ccagcaacgugcagaagaa

SEQ ID NO: 225342 - RNA, 19 nt, Homo sapiens
  misc_RNA (1)...(19): siRNA sense strand
agaaggaucuccggaccua

SEQ ID NO: 225343 - RNA, 19 nt, Homo sapiens
  misc_RNA (1)...(19): siRNA sense strand
guggagaccuucccagcaa

SEQ ID NO: 225344 - RNA, 19 nt, Homo sapiens
  misc_RNA (1)...(19): siRNA sense strand
ggcgcaagcugguggacua

SEQ ID NO: 225345 - RNA, 19 nt, Homo sapiens
  misc_RNA (1)...(19): siRNA sense strand
gaccugcuguggauggauu

SEQ ID NO: 225346 - RNA, 19 nt, Homo sapiens
  misc_RNA (1)...(19): siRNA sense strand
gaagguguuugaggagaug

SEQ ID NO: 225347 - RNA, 19 nt, Homo sapiens
  misc_RNA (1)...(19): siRNA sense strand
gcagagaugggcaguaaag

SEQ ID NO: 225348 - RNA, 19 nt, Homo sapiens
  misc_RNA (1)...(19): siRNA sense strand
cccgagaacuucacugaga

SEQ ID NO: 225349 - RNA, 19 nt, Homo sapiens
  misc_RNA (1)...(19): siRNA sense strand
gcaagcugguggacuacga

SEQ ID NO: 225350 - RNA, 19 nt, Homo sapiens
  misc_RNA (1)...(19): siRNA sense strand
ggaacagccgcguagguuu

SEQ ID NO: 225351 - RNA, 19 nt, Homo sapiens
  misc_RNA (1)...(19): siRNA sense strand
cgggaaagaucgccagcaa

SEQ ID NO: 225352 - RNA, 19 nt, Homo sapiens
  misc_RNA (1)...(19): siRNA sense strand
ccaaggaugagcaguuuga

SEQ ID NO: 225353 - RNA, 19 nt, Homo sapiens
  misc_RNA (1)...(19): siRNA sense strand
gcagggaugaggcaaacaa

SEQ ID NO: 225354 - RNA, 19 nt, Homo sapiens
  misc_RNA (1)...(19): siRNA sense strand
acaacgaccugcuguggau

SEQ ID NO: 225355 - RNA, 19 nt, Homo sapiens
  misc_RNA (1)...(19): siRNA sense strand
gggaugaggcaaacaagau

SEQ ID NO: 225356 - RNA, 19 nt, Homo sapiens
  misc_RNA (1)...(19): siRNA sense strand
ugaaggagagcgacuggaa

SEQ ID NO: 225357 - RNA, 19 nt, Homo sapiens
  misc_RNA (1)...(19): siRNA sense strand
gcaaacaagaucgcagaga

SEQ ID NO: 225358 - RNA, 19 nt, Homo sapiens
  misc_RNA (1)...(19): siRNA sense strand
cuaccuggccuccgucaaa

SEQ ID NO: 225359 - RNA, 19 nt, Homo sapiens
  misc_RNA (1)...(19): siRNA sense strand
ucaaccagaaccucaauga

SEQ ID NO: 225360 - RNA, 19 nt, Homo sapiens
  misc_RNA (1)...(19): siRNA sense strand
cgacaucaagucacgcauu

SEQ ID NO: 225361 - RNA, 19 nt, Homo sapiens
  misc_RNA (1)...(19): siRNA sense strand
aaccagaaccucaaugaug

SEQ ID NO: 225362 - RNA, 19 nt, Homo sapiens
  misc_RNA (1)...(19): siRNA sense strand
gcaacaccuucacggucaa

SEQ ID NO: 225363 - RNA, 19 nt, Homo sapiens
  misc_RNA (1)...(19): siRNA sense strand
accagaaccucaaugaugu

SEQ ID NO: 225364 - RNA, 19 nt, Homo sapiens
  misc_RNA (1)...(19): siRNA sense strand
aggaggagcucaucaaagc

SEQ ID NO: 225365 - RNA, 19 nt, Homo sapiens
  misc_RNA (1)...(19): siRNA sense strand
cgaggaggagcucaucaaa

SEQ ID NO: 225366 - RNA, 19 nt, Homo sapiens
  misc_RNA (1)...(19): siRNA sense strand
agcagugcguccagaauuu

SEQ ID NO: 225367 - RNA, 19 nt, Homo sapiens
  misc_RNA (1)...(19): siRNA sense strand
ggaaggcagaugagaccaa

SEQ ID NO: 225368 - RNA, 19 nt, Homo sapiens
  misc_RNA (1)...(19): siRNA sense strand
ucaaagcccagaagguguu

SEQ ID NO: 225369 - RNA, 19 nt, Homo sapiens
  misc_RNA (1)...(19): siRNA sense strand
gaggaggagcucaucaaag

SEQ ID NO: 225370 - RNA, 19 nt, Homo sapiens
  misc_RNA (1)...(19): siRNA sense strand
acaaggagaugagcaagcu

SEQ ID NO: 225371 - RNA, 19 nt, Homo sapiens
  misc_RNA (1)...(19): siRNA sense strand
ggaugaggcaaacaagauc

SEQ ID NO: 225372 - RNA, 19 nt, Homo sapiens
  misc_RNA (1)...(19): siRNA sense strand
gaaggaugaagccaaaauu

SEQ ID NO: 225373 - RNA, 19 nt, Homo sapiens
  misc_RNA (1)...(19): siRNA sense strand
ccacuacgagucccuucaa

SEQ ID NO: 225374 - RNA, 19 nt, Homo sapiens
  misc_RNA (1)...(19): siRNA sense strand
ggauggauuaccaccagaa

SEQ ID NO: 225375 - RNA, 19 nt, Homo sapiens
  misc_RNA (1)...(19): siRNA sense strand
caaccagaaccucaaugau

SEQ ID NO: 225376 - RNA, 19 nt, Homo sapiens
  misc_RNA (1)...(19): siRNA sense strand
gcagugcguccagaauuuc

SEQ ID NO: 225377 - RNA, 19 nt, Homo sapiens
  misc_RNA (1)...(19): siRNA sense strand
caagaucgcagagaacaac

SEQ ID NO: 225378 - RNA, 19 nt, Homo sapiens
  misc_RNA (1)...(19): siRNA sense strand
agaccaaggaugagcaguu

SEQ ID NO: 225379 - RNA, 19 nt, Homo sapiens
  misc_RNA (1)...(19): siRNA sense strand
ugacaacgcgccugcaaaa

SEQ ID NO: 225380 - RNA, 19 nt, Homo sapiens
  misc_RNA (1)...(19): siRNA sense strand
agaagguguuugaggagau

SEQ ID NO: 225381 - RNA, 19 nt, Homo sapiens
  misc_RNA (1)...(19): siRNA sense strand
cacuacgagucccuucaaa

SEQ ID NO: 225382 - RNA, 19 nt, Homo sapiens
  misc_RNA (1)...(19): siRNA sense strand
ucaacacguuccagagcau

SEQ ID NO: 225383 - RNA, 19 nt, Homo sapiens
  misc_RNA (1)...(19): siRNA sense strand
gccagcaacgugcagaaga

SEQ ID NO: 225384 - RNA, 19 nt, Homo sapiens
  misc_RNA (1)...(19): siRNA sense strand
cguccagaauuucaacaag

SEQ ID NO: 225385 - RNA, 19 nt, Homo sapiens
  misc_RNA (1)...(19): siRNA sense strand
uccagaauuucaacaagca

SEQ ID NO: 225386 - RNA, 19 nt, Homo sapiens
  misc_RNA (1)...(19): siRNA sense strand
cuacacggccacugacaca

SEQ ID NO: 225387 - RNA, 19 nt, Homo sapiens
  misc_RNA (1)...(19): siRNA sense strand
gcucaaccagaaccucaau

SEQ ID NO: 225388 - RNA, 19 nt, Homo sapiens
  misc_RNA (1)...(19): siRNA sense strand
uggaacagccgcguagguu

SEQ ID NO: 225389 - RNA, 19 nt, Homo sapiens
  misc_RNA (1)...(19): siRNA sense strand
gcucaucaaagcccagaag

SEQ ID NO: 225390 - RNA, 19 nt, Homo sapiens
  misc_RNA (1)...(19): siRNA sense strand
gaacaaagccugcaaagga

SEQ ID NO: 225391 - RNA, 19 nt, Homo sapiens
  misc_RNA (1)...(19): siRNA sense strand
gcaaggagcuggaggaagu

SEQ ID NO: 225392 - RNA, 19 nt, Homo sapiens
  misc_RNA (1)...(19): siRNA sense strand
gagaugacguggacaaaga

SEQ ID NO: 225393 - RNA, 19 nt, Homo sapiens
  misc_RNA (1)...(19): siRNA sense strand
gaaaucaucgccauuaaag

SEQ ID NO: 225394 - RNA, 19 nt, Homo sapiens
  misc_RNA (1)...(19): siRNA sense strand
ggaaaucaucgccauuaaa

SEQ ID NO: 225395 - RNA, 19 nt, Homo sapiens
  misc_RNA (1)...(19): siRNA sense strand
gcagaaggccuauuuaacu

SEQ ID NO: 225396 - RNA, 19 nt, Homo sapiens
  misc_RNA (1)...(19): siRNA sense strand
caagagaaguaucagaagu

SEQ ID NO: 225397 - RNA, 19 nt, Homo sapiens
  misc_RNA (1)...(19): siRNA sense strand
gaugagaggcaacaaauca

SEQ ID NO: 225398 - RNA, 19 nt, Homo sapiens
  misc_RNA (1)...(19): siRNA sense strand
gcacgaggaccaauaagga

SEQ ID NO: 225399 - RNA, 19 nt, Homo sapiens
  misc_RNA (1)...(19): siRNA sense strand
cgaaucagaugucaaaggu

SEQ ID NO: 225400 - RNA, 19 nt, Homo sapiens
  misc_RNA (1)...(19): siRNA sense strand
aagcaaaguuccaagagaa

SEQ ID NO: 225401 - RNA, 19 nt, Homo sapiens
  misc_RNA (1)...(19): siRNA sense strand
agaagaagccauugaagaa

SEQ ID NO: 225402 - RNA, 19 nt, Homo sapiens
  misc_RNA (1)...(19): siRNA sense strand
gaagcagccaucauugaaa

SEQ ID NO: 225403 - RNA, 19 nt, Homo sapiens
  misc_RNA (1)...(19): siRNA sense strand
ugucaaaggugauacaagu

SEQ ID NO: 225404 - RNA, 19 nt, Homo sapiens
  misc_RNA (1)...(19): siRNA sense strand
agagugagcugaguggaaa

SEQ ID NO: 225405 - RNA, 19 nt, Homo sapiens
  misc_RNA (1)...(19): siRNA sense strand
cugaugagcuugcguucaa

SEQ ID NO: 225406 - RNA, 19 nt, Homo sapiens
  misc_RNA (1)...(19): siRNA sense strand
aaagcaaaguuccaagaga

SEQ ID NO: 225407 - RNA, 19 nt, Homo sapiens
  misc_RNA (1)...(19): siRNA sense strand
gggcaaucgucaugcuaaa

SEQ ID NO: 225408 - RNA, 19 nt, Homo sapiens
  misc_RNA (1)...(19): siRNA sense strand
gcaguuacgagccaccuuu

SEQ ID NO: 225409 - RNA, 19 nt, Homo sapiens
  misc_RNA (1)...(19): siRNA sense strand
ugauacaaguggaaaccua

SEQ ID NO: 225410 - RNA, 19 nt, Homo sapiens
  misc_RNA (1)...(19): siRNA sense strand
uaaagaggccuaccaaagg

SEQ ID NO: 225411 - RNA, 19 nt, Homo sapiens
  misc_RNA (1)...(19): siRNA sense strand
caaaguuccaagagaagua

SEQ ID NO: 225412 - RNA, 19 nt, Homo sapiens
  misc_RNA (1)...(19): siRNA sense strand
aagaagccauugaagaaga

SEQ ID NO: 225413 - RNA, 19 nt, Homo sapiens
  misc_RNA (1)...(19): siRNA sense strand
agacauagaagaagccauu

SEQ ID NO: 225414 - RNA, 19 nt, Homo sapiens
  misc_RNA (1)...(19): siRNA sense strand
gauacaaguggaaaccuaa

SEQ ID NO: 225415 - RNA, 19 nt, Homo sapiens
  misc_RNA (1)...(19): siRNA sense strand
agccaucauugaaaucuua

SEQ ID NO: 225416 - RNA, 19 nt, Homo sapiens
  misc_RNA (1)...(19): siRNA sense strand
ugacaugguucgcucagau

SEQ ID NO: 225417 - RNA, 19 nt, Homo sapiens
  misc_RNA (1)...(19): siRNA sense strand
gaucaaagcaaaguuccaa

SEQ ID NO: 225418 - RNA, 19 nt, Homo sapiens
  misc_RNA (1)...(19): siRNA sense strand
aacaaagccugcaaaggaa

SEQ ID NO: 225419 - RNA, 19 nt, Homo sapiens
  misc_RNA (1)...(19): siRNA sense strand
uagaagaagccauugaaga

SEQ ID NO: 225420 - RNA, 19 nt, Homo sapiens
  misc_RNA (1)...(19): siRNA sense strand
uuucaagccuaucaaauuc

SEQ ID NO: 225421 - RNA, 19 nt, Homo sapiens
  misc_RNA (1)...(19): siRNA sense strand
cagaaggccuauuuaacuc

SEQ ID NO: 225422 - RNA, 19 nt, Homo sapiens
  misc_RNA (1)...(19): siRNA sense strand
ugaagcagccaucauugaa

SEQ ID NO: 225423 - RNA, 19 nt, Homo sapiens
  misc_RNA (1)...(19): siRNA sense strand
cauagaagaagccauugaa

SEQ ID NO: 225424 - RNA, 19 nt, Homo sapiens
  misc_RNA (1)...(19): siRNA sense strand
aagcagccaucauugaaau

SEQ ID NO: 225425 - RNA, 19 nt, Homo sapiens
  misc_RNA (1)...(19): siRNA sense strand
aaggaaaucaucgccauua

SEQ ID NO: 225426 - RNA, 19 nt, Homo sapiens
  misc_RNA (1)...(19): siRNA sense strand
uggcaaagacauagaagaa

SEQ ID NO: 225427 - RNA, 19 nt, Homo sapiens
  misc_RNA (1)...(19): siRNA sense strand
gaggagcuacaagcaguua

SEQ ID NO: 225428 - RNA, 19 nt, Homo sapiens
  misc_RNA (1)...(19): siRNA sense strand
ccucgaaucagaugucaaa

SEQ ID NO: 225429 - RNA, 19 nt, Homo sapiens
  misc_RNA (1)...(19): siRNA sense strand
gaugugcccaggauuguga

SEQ ID NO: 225430 - RNA, 19 nt, Homo sapiens
  misc_RNA (1)...(19): siRNA sense strand
agaaacaucaggcgacuug

SEQ ID NO: 225431 - RNA, 19 nt, Homo sapiens
  misc_RNA (1)...(19): siRNA sense strand
gaagaagccauugaagaag

SEQ ID NO: 225432 - RNA, 19 nt, Homo sapiens
  misc_RNA (1)...(19): siRNA sense strand
gcaggcuaaucgcaaugaa

SEQ ID NO: 225433 - RNA, 19 nt, Homo sapiens
  misc_RNA (1)...(19): siRNA sense strand
aggaaaucaucgccauuaa

SEQ ID NO: 225434 - RNA, 19 nt, Homo sapiens
  misc_RNA (1)...(19): siRNA sense strand
gacaugguucgcucagaua

SEQ ID NO: 225435 - RNA, 19 nt, Homo sapiens
  misc_RNA (1)...(19): siRNA sense strand
agaagucucucucugacau

SEQ ID NO: 225436 - RNA, 19 nt, Homo sapiens
  misc_RNA (1)...(19): siRNA sense strand
uuaaagaggccuaccaaag

SEQ ID NO: 225437 - RNA, 19 nt, Homo sapiens
  misc_RNA (1)...(19): siRNA sense strand
cagaugagaggcaacaaau

SEQ ID NO: 225438 - RNA, 19 nt, Homo sapiens
  misc_RNA (1)...(19): siRNA sense strand
ggaccgaugaggagacguu

SEQ ID NO: 225439 - RNA, 19 nt, Homo sapiens
  misc_RNA (1)...(19): siRNA sense strand
agaagccauugaagaagaa

SEQ ID NO: 225440 - RNA, 19 nt, Homo sapiens
  misc_RNA (1)...(19): siRNA sense strand
auaggagccucgaaucaga

SEQ ID NO: 225441 - RNA, 19 nt, Homo sapiens
  misc_RNA (1)...(19): siRNA sense strand
ucaaagcaaaguuccaaga

SEQ ID NO: 225442 - RNA, 19 nt, Homo sapiens
  misc_RNA (1)...(19): siRNA sense strand
ugacguggacaaagaucua

SEQ ID NO: 225443 - RNA, 19 nt, Homo sapiens
  misc_RNA (1)...(19): siRNA sense strand
ggacuuccggaaacugcua

SEQ ID NO: 225444 - RNA, 19 nt, Homo sapiens
  misc_RNA (1)...(19): siRNA sense strand
agaucuagcuggucaggau

SEQ ID NO: 225445 - RNA, 19 nt, Homo sapiens
  misc_RNA (1)...(19): siRNA sense strand
ggcaacaaaucaagcaaaa

SEQ ID NO: 225446 - RNA, 19 nt, Homo sapiens
  misc_RNA (1)...(19): siRNA sense strand
ugagaugugcccaggauug

SEQ ID NO: 225447 - RNA, 19 nt, Homo sapiens
  misc_RNA (1)...(19): siRNA sense strand
ccuaucaaauucucauugg

SEQ ID NO: 225448 - RNA, 19 nt, Homo sapiens
  misc_RNA (1)...(19): siRNA sense strand
gaugaggagacguugauuc

SEQ ID NO: 225449 - RNA, 19 nt, Homo sapiens
  misc_RNA (1)...(19): siRNA sense strand
gcugcaggcuaaucgcaau

SEQ ID NO: 225450 - RNA, 19 nt, Homo sapiens
  misc_RNA (1)...(19): siRNA sense strand
cgugagaugugcccaggau

SEQ ID NO: 225451 - RNA, 19 nt, Homo sapiens
  misc_RNA (1)...(19): siRNA sense strand
ugagcugaguggaaacuuc

SEQ ID NO: 225452 - RNA, 19 nt, Homo sapiens
  misc_RNA (1)...(19): siRNA sense strand
cuuucaagccuaucaaauu

SEQ ID NO: 225453 - RNA, 19 nt, Homo sapiens
  misc_RNA (1)...(19): siRNA sense strand
ucagaugucaaaggugaua

SEQ ID NO: 225454 - RNA, 19 nt, Homo sapiens
  misc_RNA (1)...(19): siRNA sense strand
ucagaugagaggcaacaaa

SEQ ID NO: 225455 - RNA, 19 nt, Homo sapiens
  misc_RNA (1)...(19): siRNA sense strand
gauaggagccucgaaucag

SEQ ID NO: 225456 - RNA, 19 nt, Homo sapiens
  misc_RNA (1)...(19): siRNA sense strand
cgagcaguccucaggguuu

SEQ ID NO: 225457 - RNA, 19 nt, Homo sapiens
  misc_RNA (1)...(19): siRNA sense strand
ggaccaauaaggaaaucau

SEQ ID NO: 225458 - RNA, 19 nt, Homo sapiens
  misc_RNA (1)...(19): siRNA sense strand
caacaaaucaagcaaaagu

SEQ ID NO: 225459 - RNA, 19 nt, Homo sapiens
  misc_RNA (1)...(19): siRNA sense strand
agaaguaucagaagucucu

SEQ ID NO: 225460 - RNA, 19 nt, Homo sapiens
  misc_RNA (1)...(19): siRNA sense strand
caaagcaaaguuccaagag

SEQ ID NO: 225461 - RNA, 19 nt, Homo sapiens
  misc_RNA (1)...(19): siRNA sense strand
uugcagaaggccuauuuaa

SEQ ID NO: 225462 - RNA, 19 nt, Homo sapiens
  misc_RNA (1)...(19): siRNA sense strand
ucucauuggcaaagacaua

SEQ ID NO: 225463 - RNA, 19 nt, Homo sapiens
  misc_RNA (1)...(19): siRNA sense strand
gaggaccaauaaggaaauc

SEQ ID NO: 225464 - RNA, 19 nt, Homo sapiens
  misc_RNA (1)...(19): siRNA sense strand
cugaacgucuguacaaguc

SEQ ID NO: 225465 - RNA, 19 nt, Homo sapiens
  misc_RNA (1)...(19): siRNA sense strand
gagaugugcccaggauugu

SEQ ID NO: 225466 - RNA, 19 nt, Homo sapiens
  misc_RNA (1)...(19): siRNA sense strand
caaauucucauuggcaaag

SEQ ID NO: 225467 - RNA, 19 nt, Homo sapiens
  misc_RNA (1)...(19): siRNA sense strand
ugccaaagaucuguaugau

SEQ ID NO: 225468 - RNA, 19 nt, Homo sapiens
  misc_RNA (1)...(19): siRNA sense strand
aaucaucgccauuaaagag

SEQ ID NO: 225469 - RNA, 19 nt, Homo sapiens
  misc_RNA (1)...(19): siRNA sense strand
gcaaaguuccaagagaagu

SEQ ID NO: 225470 - RNA, 19 nt, Homo sapiens
  misc_RNA (1)...(19): siRNA sense strand
ggagaugacguggacaaag

SEQ ID NO: 225471 - RNA, 19 nt, Homo sapiens
  misc_RNA (1)...(19): siRNA sense strand
uaaggaaaucaucgccauu

SEQ ID NO: 225472 - RNA, 19 nt, Homo sapiens
  misc_RNA (1)...(19): siRNA sense strand
uccaagagaaguaucagaa

SEQ ID NO: 225473 - RNA, 19 nt, Homo sapiens
  misc_RNA (1)...(19): siRNA sense strand
gacguugauucgcauaguc

SEQ ID NO: 225474 - RNA, 19 nt, Homo sapiens
  misc_RNA (1)...(19): siRNA sense strand
cauugaagaagaaacauca

SEQ ID NO: 225475 - RNA, 19 nt, Homo sapiens
  misc_RNA (1)...(19): siRNA sense strand
ccaagaggagcuacaagca

SEQ ID NO: 225476 - RNA, 19 nt, Homo sapiens
  misc_RNA (1)...(19): siRNA sense strand
gcaaucgucaugcuaaagc

SEQ ID NO: 225477 - RNA, 19 nt, Homo sapiens
  misc_RNA (1)...(19): siRNA sense strand
gagcaguccucaggguuuu

SEQ ID NO: 225478 - RNA, 19 nt, Homo sapiens
  misc_RNA (1)...(19): siRNA sense strand
gcugaacaaagccugcaaa

SEQ ID NO: 225479 - RNA, 19 nt, Homo sapiens
  misc_RNA (1)...(19): siRNA sense strand
gcaaaggaauggggaccaa

SEQ ID NO: 225480 - RNA, 19 nt, Homo sapiens
  misc_RNA (1)...(19): siRNA sense strand
agacagcguuggcccuucu

SEQ ID NO: 225481 - RNA, 19 nt, Homo sapiens
  misc_RNA (1)...(19): siRNA sense strand
ggagacguugauucgcaua

SEQ ID NO: 225482 - RNA, 19 nt, Homo sapiens
  misc_RNA (1)...(19): siRNA sense strand
guuacgagccaccuuucaa

SEQ ID NO: 225483 - RNA, 19 nt, Homo sapiens
  misc_RNA (1)...(19): siRNA sense strand
gccaaagaucuguaugaug

SEQ ID NO: 225484 - RNA, 19 nt, Homo sapiens
  misc_RNA (1)...(19): siRNA sense strand
cauuaaagaggccuaccaa

SEQ ID NO: 225485 - RNA, 19 nt, Homo sapiens
  misc_RNA (1)...(19): siRNA sense strand
ccaggauugugaggacuau

SEQ ID NO: 225486 - RNA, 19 nt, Homo sapiens
  misc_RNA (1)...(19): siRNA sense strand
gaugagcuugcguucaaug

SEQ ID NO: 225487 - RNA, 19 nt, Homo sapiens
  misc_RNA (1)...(19): siRNA sense strand
uaaucgcaaugaaggagau

SEQ ID NO: 225488 - RNA, 19 nt, Homo sapiens
  misc_RNA (1)...(19): siRNA sense strand
caaagccugcaaaggaaug

SEQ ID NO: 225489 - RNA, 19 nt, Homo sapiens
  misc_RNA (1)...(19): siRNA sense strand
gcugaacgucuguacaagu

SEQ ID NO: 225490 - RNA, 19 nt, Homo sapiens
  misc_RNA (1)...(19): siRNA sense strand
ggaucaagcugcccaucua

SEQ ID NO: 225491 - RNA, 19 nt, Homo sapiens
  misc_RNA (1)...(19): siRNA sense strand
uaugaucaauggcuucuuu

SEQ ID NO: 225492 - RNA, 19 nt, Homo sapiens
  misc_RNA (1)...(19): siRNA sense strand
caaccuggccuuuggcuuu

SEQ ID NO: 225493 - RNA, 19 nt, Homo sapiens
  misc_RNA (1)...(19): siRNA sense strand
cuucuugggugcuggaaua

SEQ ID NO: 225494 - RNA, 19 nt, Homo sapiens
  misc_RNA (1)...(19): siRNA sense strand
gcacaaggagcagaucuga

SEQ ID NO: 225495 - RNA, 19 nt, Homo sapiens
  misc_RNA (1)...(19): siRNA sense strand
uggcacagccggcaucuuu

SEQ ID NO: 225496 - RNA, 19 nt, Homo sapiens
  misc_RNA (1)...(19): siRNA sense strand
gaagcuggcccaugugaag

SEQ ID NO: 225497 - RNA, 19 nt, Homo sapiens
  misc_RNA (1)...(19): siRNA sense strand
ucuggacacuuggauauga

SEQ ID NO: 225498 - RNA, 19 nt, Homo sapiens
  misc_RNA (1)...(19): siRNA sense strand
gaacccugccgugaccuuu

SEQ ID NO: 225499 - RNA, 19 nt, Homo sapiens
  misc_RNA (1)...(19): siRNA sense strand
gcaccuccaugggcuucaa

SEQ ID NO: 225500 - RNA, 19 nt, Homo sapiens
  misc_RNA (1)...(19): siRNA sense strand
gccgugaccuuugccaugu

SEQ ID NO: 225501 - RNA, 19 nt, Homo sapiens
  misc_RNA (1)...(19): siRNA sense strand
ccaucaaccuggccuuugg

SEQ ID NO: 225502 - RNA, 19 nt, Homo sapiens
  misc_RNA (1)...(19): siRNA sense strand
acacuuggauaugaucaau

SEQ ID NO: 225503 - RNA, 19 nt, Homo sapiens
  misc_RNA (1)...(19): siRNA sense strand
cuugggugcuggaauaguu

SEQ ID NO: 225504 - RNA, 19 nt, Homo sapiens
  misc_RNA (1)...(19): siRNA sense strand
gcuguauuaugaugcaauc

SEQ ID NO: 225505 - RNA, 19 nt, Homo sapiens
  misc_RNA (1)...(19): siRNA sense strand
ccaacgaggaagagaaugu

SEQ ID NO: 225506 - RNA, 19 nt, Homo sapiens
  misc_RNA (1)...(19): siRNA sense strand
gccuuuggcuuugcuguca

SEQ ID NO: 225507 - RNA, 19 nt, Homo sapiens
  misc_RNA (1)...(19): siRNA sense strand
gcacagccggcaucuuugc

SEQ ID NO: 225508 - RNA, 19 nt, Homo sapiens
  misc_RNA (1)...(19): siRNA sense strand
gggcuucaacuccggcuau

SEQ ID NO: 225509 - RNA, 19 nt, Homo sapiens
  misc_RNA (1)...(19): siRNA sense strand
gugaagcuggcccauguga

SEQ ID NO: 225510 - RNA, 19 nt, Homo sapiens
  misc_RNA (1)...(19): siRNA sense strand
ccucuggacacuuggauau

SEQ ID NO: 225511 - RNA, 19 nt, Homo sapiens
  misc_RNA (1)...(19): siRNA sense strand
caacgaggaagagaaugug

SEQ ID NO: 225512 - RNA, 19 nt, Homo sapiens
  misc_RNA (1)...(19): siRNA sense strand
ugugugugcuggccauugu

SEQ ID NO: 225513 - RNA, 19 nt, Homo sapiens
  misc_RNA (1)...(19): siRNA sense strand
ggcacagccucccuuaucg

SEQ ID NO: 225514 - RNA, 19 nt, Homo sapiens
  misc_RNA (1)...(19): siRNA sense strand
ggacacuuggauaugauca

SEQ ID NO: 225515 - RNA, 19 nt, Homo sapiens
  misc_RNA (1)...(19): siRNA sense strand
uggcuucuuugaccaguuc

SEQ ID NO: 225516 - RNA, 19 nt, Homo sapiens
  misc_RNA (1)...(19): siRNA sense strand
gcacagccucccuuaucgu

SEQ ID NO: 225517 - RNA, 19 nt, Homo sapiens
  misc_RNA (1)...(19): siRNA sense strand
uugcgggugucuucgugua

SEQ ID NO: 225518 - RNA, 19 nt, Homo sapiens
  misc_RNA (1)...(19): siRNA sense strand
acuuggauaugaucaaugg

SEQ ID NO: 225519 - RNA, 19 nt, Homo sapiens
  misc_RNA (1)...(19): siRNA sense strand
augugaagcuggcccaugu

SEQ ID NO: 225520 - RNA, 19 nt, Homo sapiens
  misc_RNA (1)...(19): siRNA sense strand
cgaggaagagaaugugaag

SEQ ID NO: 225521 - RNA, 19 nt, Homo sapiens
  misc_RNA (1)...(19): siRNA sense strand
gaucaagcugcccaucuac

SEQ ID NO: 225522 - RNA, 19 nt, Homo sapiens
  misc_RNA (1)...(19): siRNA sense strand
ucacgaccggccagcauug

SEQ ID NO: 225523 - RNA, 19 nt, Homo sapiens
  misc_RNA (1)...(19): siRNA sense strand
caaguggauuggugaaauu

SEQ ID NO: 225524 - RNA, 19 nt, Homo sapiens
  misc_RNA (1)...(19): siRNA sense strand
gaguacagcagguguuuga

SEQ ID NO: 225525 - RNA, 19 nt, Homo sapiens
  misc_RNA (1)...(19): siRNA sense strand
ggacacagccggcaaugac

SEQ ID NO: 225526 - RNA, 19 nt, Homo sapiens
  misc_RNA (1)...(19): siRNA sense strand
gaacaaguggauuggugaa

SEQ ID NO: 225527 - RNA, 19 nt, Homo sapiens
  misc_RNA (1)...(19): siRNA sense strand
ggccaaccauaacucauuc

SEQ ID NO: 225528 - RNA, 19 nt, Homo sapiens
  misc_RNA (1)...(19): siRNA sense strand
gccaggagacgaaacagaa

SEQ ID NO: 225529 - RNA, 19 nt, Homo sapiens
  misc_RNA (1)...(19): siRNA sense strand
acaaguggauuggugaaau

SEQ ID NO: 225530 - RNA, 19 nt, Homo sapiens
  misc_RNA (1)...(19): siRNA sense strand
gcucagcccuuagcaaucg

SEQ ID NO: 225531 - RNA, 19 nt, Homo sapiens
  misc_RNA (1)...(19): siRNA sense strand
acucauuccugaacuugaa

SEQ ID NO: 225532 - RNA, 19 nt, Homo sapiens
  misc_RNA (1)...(19): siRNA sense strand
ggguggacgucuucaugga

SEQ ID NO: 225533 - RNA, 19 nt, Homo sapiens
  misc_RNA (1)...(19): siRNA sense strand
cuggagugcucagcccuua

SEQ ID NO: 225534 - RNA, 19 nt, Homo sapiens
  misc_RNA (1)...(19): siRNA sense strand
ggcaaugacgccuucagaa

SEQ ID NO: 225535 - RNA, 19 nt, Homo sapiens
  misc_RNA (1)...(19): siRNA sense strand
gggaguacagcagguguuu

SEQ ID NO: 225536 - RNA, 19 nt, Homo sapiens
  misc_RNA (1)...(19): siRNA sense strand
guacagcagguguuugagu

SEQ ID NO: 225537 - RNA, 19 nt, Homo sapiens
  misc_RNA (1)...(19): siRNA sense strand
ucaaugagugcaagaucuu

SEQ ID NO: 225538 - RNA, 19 nt, Homo sapiens
  misc_RNA (1)...(19): siRNA sense strand
uuccugaacuugaagaaca

SEQ ID NO: 225539 - RNA, 19 nt, Homo sapiens
  misc_RNA (1)...(19): siRNA sense strand
ggggaaaaccucucuguug

SEQ ID NO: 225540 - RNA, 19 nt, Homo sapiens
  misc_RNA (1)...(19): siRNA sense strand
uaacucauuccugaacuug

SEQ ID NO: 225541 - RNA, 19 nt, Homo sapiens
  misc_RNA (1)...(19): siRNA sense strand
gcagacguggugcugaugu

SEQ ID NO: 225542 - RNA, 19 nt, Homo sapiens
  misc_RNA (1)...(19): siRNA sense strand
cugcgucaaugccauggaa

SEQ ID NO: 225543 - RNA, 19 nt, Homo sapiens
  misc_RNA (1)...(19): siRNA sense strand
guggauuggugaaauuagg

SEQ ID NO: 225544 - RNA, 19 nt, Homo sapiens
  misc_RNA (1)...(19): siRNA sense strand
uugaagaacaaguggauug

SEQ ID NO: 225545 - RNA, 19 nt, Homo sapiens
  misc_RNA (1)...(19): siRNA sense strand
ugagugcaagaucuucuaa

SEQ ID NO: 225546 - RNA, 19 nt, Homo sapiens
  misc_RNA (1)...(19): siRNA sense strand
gaagaacaaguggauuggu

SEQ ID NO: 225547 - RNA, 19 nt, Homo sapiens
  misc_RNA (1)...(19): siRNA sense strand
uggccaaccauaacucauu

SEQ ID NO: 225548 - RNA, 19 nt, Homo sapiens
  misc_RNA (1)...(19): siRNA sense strand
cguccgaacugccgucaac

SEQ ID NO: 225549 - RNA, 19 nt, Homo sapiens
  misc_RNA (1)...(19): siRNA sense strand
gcuacucuguggccaacca

SEQ ID NO: 225550 - RNA, 19 nt, Homo sapiens
  misc_RNA (1)...(19): siRNA sense strand
auaacucauuccugaacuu

SEQ ID NO: 225551 - RNA, 19 nt, Homo sapiens
  misc_RNA (1)...(19): siRNA sense strand
ugaaauuaggagcaacuug

SEQ ID NO: 225552 - RNA, 19 nt, Homo sapiens
  misc_RNA (1)...(19): siRNA sense strand
aggcagacguggugcugau

SEQ ID NO: 225553 - RNA, 19 nt, Homo sapiens
  misc_RNA (1)...(19): siRNA sense strand
caucaaugagugcaagauc

SEQ ID NO: 225554 - RNA, 19 nt, Homo sapiens
  misc_RNA (1)...(19): siRNA sense strand
cagacguggugcugaugug

SEQ ID NO: 225555 - RNA, 19 nt, Homo sapiens
  misc_RNA (1)...(19): siRNA sense strand
gaccauacuggaagaauua

SEQ ID NO: 225556 - RNA, 19 nt, Homo sapiens
  misc_RNA (1)...(19): siRNA sense strand
gugcucaucuuugcuaaua

SEQ ID NO: 225557 - RNA, 19 nt, Homo sapiens
  misc_RNA (1)...(19): siRNA sense strand
gaagacaucagccacauca

SEQ ID NO: 225558 - RNA, 19 nt, Homo sapiens
  misc_RNA (1)...(19): siRNA sense strand
ggaacuagcggaauuacug

SEQ ID NO: 225559 - RNA, 19 nt, Homo sapiens
  misc_RNA (1)...(19): siRNA sense strand
ggacugaaccugcauacca

SEQ ID NO: 225560 - RNA, 19 nt, Homo sapiens
  misc_RNA (1)...(19): siRNA sense strand
acacaggguuucaacauca

SEQ ID NO: 225561 - RNA, 19 nt, Homo sapiens
  misc_RNA (1)...(19): siRNA sense strand
gucaggaacuagcggaauu

SEQ ID NO: 225562 - RNA, 19 nt, Homo sapiens
  misc_RNA (1)...(19): siRNA sense strand
caucaaaaguguacaauca

SEQ ID NO: 225563 - RNA, 19 nt, Homo sapiens
  misc_RNA (1)...(19): siRNA sense strand
gcucaucuuugcuaauaag

SEQ ID NO: 225564 - RNA, 19 nt, Homo sapiens
  misc_RNA (1)...(19): siRNA sense strand
cggaauuacuggaggaaga

SEQ ID NO: 225565 - RNA, 19 nt, Homo sapiens
  misc_RNA (1)...(19): siRNA sense strand
agaccauacuggaagaauu

SEQ ID NO: 225566 - RNA, 19 nt, Homo sapiens
  misc_RNA (1)...(19): siRNA sense strand
gaaggacugaaccugcaua

SEQ ID NO: 225567 - RNA, 19 nt, Homo sapiens
  misc_RNA (1)...(19): siRNA sense strand
ggaauuacuggaggaagaa

SEQ ID NO: 225568 - RNA, 19 nt, Homo sapiens
  misc_RNA (1)...(19): siRNA sense strand
gcuugcaucugaagacauc

SEQ ID NO: 225569 - RNA, 19 nt, Homo sapiens
  misc_RNA (1)...(19): siRNA sense strand
gaaauugcagaaggacuga

SEQ ID NO: 225570 - RNA, 19 nt, Homo sapiens
  misc_RNA (1)...(19): siRNA sense strand
gacugaaccugcauaccau

SEQ ID NO: 225571 - RNA, 19 nt, Homo sapiens
  misc_RNA (1)...(19): siRNA sense strand
agagacgggucaggaacua

SEQ ID NO: 225572 - RNA, 19 nt, Homo sapiens
  misc_RNA (1)...(19): siRNA sense strand
ccagugcucaucuuugcua

SEQ ID NO: 225573 - RNA, 19 nt, Homo sapiens
  misc_RNA (1)...(19): siRNA sense strand
aaucgacagugcagacaga

SEQ ID NO: 225574 - RNA, 19 nt, Homo sapiens
  misc_RNA (1)...(19): siRNA sense strand
ucaggaacuagcggaauua

SEQ ID NO: 225575 - RNA, 19 nt, Homo sapiens
  misc_RNA (1)...(19): siRNA sense strand
aaaugucaaugcaaagaag

SEQ ID NO: 225576 - RNA, 19 nt, Homo sapiens
  misc_RNA (1)...(19): siRNA sense strand
ugaagagacgggucaggaa

SEQ ID NO: 225577 - RNA, 19 nt, Homo sapiens
  misc_RNA (1)...(19): siRNA sense strand
cuacacaggguuucaacau

SEQ ID NO: 225578 - RNA, 19 nt, Homo sapiens
  misc_RNA (1)...(19): siRNA sense strand
cuccugggcuuggauaaug

SEQ ID NO: 225579 - RNA, 19 nt, Homo sapiens
  misc_RNA (1)...(19): siRNA sense strand
ucacaccuacacaggguuu

SEQ ID NO: 225580 - RNA, 19 nt, Homo sapiens
  misc_RNA (1)...(19): siRNA sense strand
gaccaggaggugagaauac

SEQ ID NO: 225581 - RNA, 19 nt, Homo sapiens
  misc_RNA (1)...(19): siRNA sense strand
cagcuugcaucugaagaca

SEQ ID NO: 225582 - RNA, 19 nt, Homo sapiens
  misc_RNA (1)...(19): siRNA sense strand
uacacaggguuucaacauc

SEQ ID NO: 225583 - RNA, 19 nt, Homo sapiens
  misc_RNA (1)...(19): siRNA sense strand
agacaucagccacaucaca

SEQ ID NO: 225584 - RNA, 19 nt, Homo sapiens
  misc_RNA (1)...(19): siRNA sense strand
cacaggguuucaacaucaa

SEQ ID NO: 225585 - RNA, 19 nt, Homo sapiens
  misc_RNA (1)...(19): siRNA sense strand
gaauuacuggaggaagaaa

SEQ ID NO: 225586 - RNA, 19 nt, Homo sapiens
  misc_RNA (1)...(19): siRNA sense strand
aguguacaaucacaagguu

SEQ ID NO: 225587 - RNA, 19 nt, Homo sapiens
  misc_RNA (1)...(19): siRNA sense strand
cgacagugcagacagaaaa

SEQ ID NO: 225588 - RNA, 19 nt, Homo sapiens
  misc_RNA (1)...(19): siRNA sense strand
caugaacugggucugcaaa

SEQ ID NO: 225589 - RNA, 19 nt, Homo sapiens
  misc_RNA (1)...(19): siRNA sense strand
cgaacaagaugaccaggua

SEQ ID NO: 225590 - RNA, 19 nt, Homo sapiens
  misc_RNA (1)...(19): siRNA sense strand
gaugaaggaugacgacuau

SEQ ID NO: 225591 - RNA, 19 nt, Homo sapiens
  misc_RNA (1)...(19): siRNA sense strand
acaccaaccucauugaauu

SEQ ID NO: 225592 - RNA, 19 nt, Homo sapiens
  misc_RNA (1)...(19): siRNA sense strand
cuaaaucacuagaagagaa

SEQ ID NO: 225593 - RNA, 19 nt, Homo sapiens
  misc_RNA (1)...(19): siRNA sense strand
gaaggagggugccaacaag

SEQ ID NO: 225594 - RNA, 19 nt, Homo sapiens
  misc_RNA (1)...(19): siRNA sense strand
ggacaaaguggacccugua

SEQ ID NO: 225595 - RNA, 19 nt, Homo sapiens
  misc_RNA (1)...(19): siRNA sense strand
acaaggagcuguacuacca

SEQ ID NO: 225596 - RNA, 19 nt, Homo sapiens
  misc_RNA (1)...(19): siRNA sense strand
ccaagaccgucaagaagau

SEQ ID NO: 225597 - RNA, 19 nt, Homo sapiens
  misc_RNA (1)...(19): siRNA sense strand
ccaccaagaccgucaagaa

SEQ ID NO: 225598 - RNA, 19 nt, Homo sapiens
  misc_RNA (1)...(19): siRNA sense strand
ggacaccaaccucauugaa

SEQ ID NO: 225599 - RNA, 19 nt, Homo sapiens
  misc_RNA (1)...(19): siRNA sense strand
uagaucaccuggacaaagu

SEQ ID NO: 225600 - RNA, 19 nt, Homo sapiens
  misc_RNA (1)...(19): siRNA sense strand
acaaggaggugcugggaau

SEQ ID NO: 225601 - RNA, 19 nt, Homo sapiens
  misc_RNA (1)...(19): siRNA sense strand
ggaugaaggaugacgacua

SEQ ID NO: 225602 - RNA, 19 nt, Homo sapiens
  misc_RNA (1)...(19): siRNA sense strand
ugaaggaugacgacuauga

SEQ ID NO: 225603 - RNA, 19 nt, Homo sapiens
  misc_RNA (1)...(19): siRNA sense strand
ugccacagaugaugacauu

SEQ ID NO: 225604 - RNA, 19 nt, Homo sapiens
  misc_RNA (1)...(19): siRNA sense strand
ccaacuaugccacagauga

SEQ ID NO: 225605 - RNA, 19 nt, Homo sapiens
  misc_RNA (1)...(19): siRNA sense strand
ccacagaugaugacauugu

SEQ ID NO: 225606 - RNA, 19 nt, Homo sapiens
  misc_RNA (1)...(19): siRNA sense strand
cggcguagacuuugagauu

SEQ ID NO: 225607 - RNA, 19 nt, Homo sapiens
  misc_RNA (1)...(19): siRNA sense strand
gagaaaagccacaaaagga

SEQ ID NO: 225608 - RNA, 19 nt, Homo sapiens
  misc_RNA (1)...(19): siRNA sense strand
gaagagaaaagccacaaaa

SEQ ID NO: 225609 - RNA, 19 nt, Homo sapiens
  misc_RNA (1)...(19): siRNA sense strand
uggcucaacucgaacaaga

SEQ ID NO: 225610 - RNA, 19 nt, Homo sapiens
  misc_RNA (1)...(19): siRNA sense strand
caaccucauugaauuugau

SEQ ID NO: 225611 - RNA, 19 nt, Homo sapiens
  misc_RNA (1)...(19): siRNA sense strand
gaacaagaugaccagguau

SEQ ID NO: 225612 - RNA, 19 nt, Homo sapiens
  misc_RNA (1)...(19): siRNA sense strand
gaaggaugacgacuaugau

SEQ ID NO: 225613 - RNA, 19 nt, Homo sapiens
  misc_RNA (1)...(19): siRNA sense strand
gggcuuguccuuccgcaaa

SEQ ID NO: 225614 - RNA, 19 nt, Homo sapiens
  misc_RNA (1)...(19): siRNA sense strand
augaugacauuguguuuga

SEQ ID NO: 225615 - RNA, 19 nt, Homo sapiens
  misc_RNA (1)...(19): siRNA sense strand
gccgacaucugccucuuca

SEQ ID NO: 225616 - RNA, 19 nt, Homo sapiens
  misc_RNA (1)...(19): siRNA sense strand
gcccagaggauacaggaaa

SEQ ID NO: 225617 - RNA, 19 nt, Homo sapiens
  misc_RNA (1)...(19): siRNA sense strand
acacgccacuuccucaugu

SEQ ID NO: 225618 - RNA, 19 nt, Homo sapiens
  misc_RNA (1)...(19): siRNA sense strand
ugaaggagggugccaacaa

SEQ ID NO: 225619 - RNA, 19 nt, Homo sapiens
  misc_RNA (1)...(19): siRNA sense strand
acugcaagcucaccgugua

SEQ ID NO: 225620 - RNA, 19 nt, Homo sapiens
  misc_RNA (1)...(19): siRNA sense strand
ggccugcggcguagacuuu

SEQ ID NO: 225621 - RNA, 19 nt, Homo sapiens
  misc_RNA (1)...(19): siRNA sense strand
ccaaccucauugaauuuga

SEQ ID NO: 225622 - RNA, 19 nt, Homo sapiens
  misc_RNA (1)...(19): siRNA sense strand
gccacuuccucaugucuga

SEQ ID NO: 225623 - RNA, 19 nt, Homo sapiens
  misc_RNA (1)...(19): siRNA sense strand
gggcaagcgggacuucgua

SEQ ID NO: 225624 - RNA, 19 nt, Homo sapiens
  misc_RNA (1)...(19): siRNA sense strand
ugaaggggaugaaggauga

SEQ ID NO: 225625 - RNA, 19 nt, Homo sapiens
  misc_RNA (1)...(19): siRNA sense strand
gaugaugacauuguguuug

SEQ ID NO: 225626 - RNA, 19 nt, Homo sapiens
  misc_RNA (1)...(19): siRNA sense strand
cuucugugcuaaaucacua

SEQ ID NO: 225627 - RNA, 19 nt, Homo sapiens
  misc_RNA (1)...(19): siRNA sense strand
ggaugacgacuaugaugau

SEQ ID NO: 225628 - RNA, 19 nt, Homo sapiens
  misc_RNA (1)...(19): siRNA sense strand
caacuaugccacagaugau

SEQ ID NO: 225629 - RNA, 19 nt, Homo sapiens
  misc_RNA (1)...(19): siRNA sense strand
gagcugccuuuuguucuua

SEQ ID NO: 225630 - RNA, 19 nt, Homo sapiens
  misc_RNA (1)...(19): siRNA sense strand
gcucaacucgaacaagaug

SEQ ID NO: 225631 - RNA, 19 nt, Homo sapiens
  misc_RNA (1)...(19): siRNA sense strand
gcaccgcccaguacaagug

SEQ ID NO: 225632 - RNA, 19 nt, Homo sapiens
  misc_RNA (1)...(19): siRNA sense strand
accaacaacuccaccaaga

SEQ ID NO: 225633 - RNA, 19 nt, Homo sapiens
  misc_RNA (1)...(19): siRNA sense strand
ggacaaggagcuguacuac

SEQ ID NO: 225634 - RNA, 19 nt, Homo sapiens
  misc_RNA (1)...(19): siRNA sense strand
gaugacgacuaugaugauc

SEQ ID NO: 225635 - RNA, 19 nt, Homo sapiens
  misc_RNA (1)...(19): siRNA sense strand
ucaagaagucgagcccuaa

SEQ ID NO: 225636 - RNA, 19 nt, Homo sapiens
  misc_RNA (1)...(19): siRNA sense strand
ccagcaccaucgugaagga

SEQ ID NO: 225637 - RNA, 19 nt, Homo sapiens
  misc_RNA (1)...(19): siRNA sense strand
ggcguagacuuugagauuc

SEQ ID NO: 225638 - RNA, 19 nt, Homo sapiens
  misc_RNA (1)...(19): siRNA sense strand
gacaccaaccucauugaau

SEQ ID NO: 225639 - RNA, 19 nt, Homo sapiens
  misc_RNA (1)...(19): siRNA sense strand
cgaaaccacacgccacuuc

SEQ ID NO: 225640 - RNA, 19 nt, Homo sapiens
  misc_RNA (1)...(19): siRNA sense strand
caccaaccucauugaauuu

SEQ ID NO: 225641 - RNA, 19 nt, Homo sapiens
  misc_RNA (1)...(19): siRNA sense strand
ugggaauccugguguccua

SEQ ID NO: 225642 - RNA, 19 nt, Homo sapiens
  misc_RNA (1)...(19): siRNA sense strand
aggcuucccuggacaagga

SEQ ID NO: 225643 - RNA, 19 nt, Homo sapiens
  misc_RNA (1)...(19): siRNA sense strand
uaccaacuaugccacagau

SEQ ID NO: 225644 - RNA, 19 nt, Homo sapiens
  misc_RNA (1)...(19): siRNA sense strand
gcaagcgggacuucguaga

SEQ ID NO: 225645 - RNA, 19 nt, Homo sapiens
  misc_RNA (1)...(19): siRNA sense strand
auucgagccuucugugcua

SEQ ID NO: 225646 - RNA, 19 nt, Homo sapiens
  misc_RNA (1)...(19): siRNA sense strand
caagcgggacuucguagau

SEQ ID NO: 225647 - RNA, 19 nt, Homo sapiens
  misc_RNA (1)...(19): siRNA sense strand
guagaucaccuggacaaag

SEQ ID NO: 225648 - RNA, 19 nt, Homo sapiens
  misc_RNA (1)...(19): siRNA sense strand
ccuacagggucaaggugaa

SEQ ID NO: 225649 - RNA, 19 nt, Homo sapiens
  misc_RNA (1)...(19): siRNA sense strand
cagaugaugacauuguguu

SEQ ID NO: 225650 - RNA, 19 nt, Homo sapiens
  misc_RNA (1)...(19): siRNA sense strand
gcaagcucaccguguacuu

SEQ ID NO: 225651 - RNA, 19 nt, Homo sapiens
  misc_RNA (1)...(19): siRNA sense strand
gaauuugauaccaacuaug

SEQ ID NO: 225652 - RNA, 19 nt, Homo sapiens
  misc_RNA (1)...(19): siRNA sense strand
ggagcugccuuuuguucuu

SEQ ID NO: 225653 - RNA, 19 nt, Homo sapiens
  misc_RNA (1)...(19): siRNA sense strand
cagccaggcccagaggaua

SEQ ID NO: 225654 - RNA, 19 nt, Homo sapiens
  misc_RNA (1)...(19): siRNA sense strand
caccugcgccuuccgcuau

SEQ ID NO: 225655 - RNA, 19 nt, Homo sapiens
  misc_RNA (1)...(19): siRNA sense strand
ucucccagcuccacauucu

SEQ ID NO: 225656 - RNA, 19 nt, Homo sapiens
  misc_RNA (1)...(19): siRNA sense strand
caaguguccuguggcucaa

SEQ ID NO: 225657 - RNA, 19 nt, Homo sapiens
  misc_RNA (1)...(19): siRNA sense strand
uaaauguccacgucaccaa

SEQ ID NO: 225658 - RNA, 19 nt, Homo sapiens
  misc_RNA (1)...(19): siRNA sense strand
gcguagacuuugagauucg

SEQ ID NO: 225659 - RNA, 19 nt, Homo sapiens
  misc_RNA (1)...(19): siRNA sense strand
cauuguguuugaggacuuu

SEQ ID NO: 225660 - RNA, 19 nt, Homo sapiens
  misc_RNA (1)...(19): siRNA sense strand
agccuucugugcuaaauca

SEQ ID NO: 225661 - RNA, 19 nt, Homo sapiens
  misc_RNA (1)...(19): siRNA sense strand
ccacauucuguaaggugua

SEQ ID NO: 225662 - RNA, 19 nt, Homo sapiens
  misc_RNA (1)...(19): siRNA sense strand
ccagcuccacauucuguaa

SEQ ID NO: 225663 - RNA, 19 nt, Homo sapiens
  misc_RNA (1)...(19): siRNA sense strand
caccaagaccgucaagaag

SEQ ID NO: 225664 - RNA, 19 nt, Homo sapiens
  misc_RNA (1)...(19): siRNA sense strand
gcuaaaucacuagaagaga

SEQ ID NO: 225665 - RNA, 19 nt, Homo sapiens
  misc_RNA (1)...(19): siRNA sense strand
uggacaaggagcuguacua

SEQ ID NO: 225666 - RNA, 19 nt, Homo sapiens
  misc_RNA (1)...(19): siRNA sense strand
ccgcaaagaccuguucauc

SEQ ID NO: 225667 - RNA, 19 nt, Homo sapiens
  misc_RNA (1)...(19): siRNA sense strand
gacaguacgccgacaucug

SEQ ID NO: 225668 - RNA, 19 nt, Homo sapiens
  misc_RNA (1)...(19): siRNA sense strand
gugcuaaaucacuagaaga

SEQ ID NO: 225669 - RNA, 19 nt, Homo sapiens
  misc_RNA (1)...(19): siRNA sense strand
uccuguggcucaacucgaa

SEQ ID NO: 225670 - RNA, 19 nt, Homo sapiens
  misc_RNA (1)...(19): siRNA sense strand
gggagccccucaauguaaa

SEQ ID NO: 225671 - RNA, 19 nt, Homo sapiens
  misc_RNA (1)...(19): siRNA sense strand
caagaagaucaaagucucu

SEQ ID NO: 225672 - RNA, 19 nt, Homo sapiens
  misc_RNA (1)...(19): siRNA sense strand
aagcgggacuucguagauc

SEQ ID NO: 225673 - RNA, 19 nt, Homo sapiens
  misc_RNA (1)...(19): siRNA sense strand
aagaucaaagucucuguga

SEQ ID NO: 225674 - RNA, 19 nt, Homo sapiens
  misc_RNA (1)...(19): siRNA sense strand
cgaacaagaugaccaggua

SEQ ID NO: 225675 - RNA, 19 nt, Homo sapiens
  misc_RNA (1)...(19): siRNA sense strand
gaugaaggaugacgacuau

SEQ ID NO: 225676 - RNA, 19 nt, Homo sapiens
  misc_RNA (1)...(19): siRNA sense strand
acaccaaccucauugaauu

SEQ ID NO: 225677 - RNA, 19 nt, Homo sapiens
  misc_RNA (1)...(19): siRNA sense strand
cuaaaucacuagaagagaa

SEQ ID NO: 225678 - RNA, 19 nt, Homo sapiens
  misc_RNA (1)...(19): siRNA sense strand
gaaggagggugccaacaag

SEQ ID NO: 225679 - RNA, 19 nt, Homo sapiens
  misc_RNA (1)...(19): siRNA sense strand
ggacaaaguggacccugua

SEQ ID NO: 225680 - RNA, 19 nt, Homo sapiens
  misc_RNA (1)...(19): siRNA sense strand
acaaggagcuguacuacca

SEQ ID NO: 225681 - RNA, 19 nt, Homo sapiens
  misc_RNA (1)...(19): siRNA sense strand
ccaagaccgucaagaagau

SEQ ID NO: 225682 - RNA, 19 nt, Homo sapiens
  misc_RNA (1)...(19): siRNA sense strand
ccaccaagaccgucaagaa

SEQ ID NO: 225683 - RNA, 19 nt, Homo sapiens
  misc_RNA (1)...(19): siRNA sense strand
ggacaccaaccucauugaa

SEQ ID NO: 225684 - RNA, 19 nt, Homo sapiens
  misc_RNA (1)...(19): siRNA sense strand
uagaucaccuggacaaagu

SEQ ID NO: 225685 - RNA, 19 nt, Homo sapiens
  misc_RNA (1)...(19): siRNA sense strand
acaaggaggugcugggaau

SEQ ID NO: 225686 - RNA, 19 nt, Homo sapiens
  misc_RNA (1)...(19): siRNA sense strand
ggaugaaggaugacgacua

SEQ ID NO: 225687 - RNA, 19 nt, Homo sapiens
  misc_RNA (1)...(19): siRNA sense strand
ugaaggaugacgacuauga

SEQ ID NO: 225688 - RNA, 19 nt, Homo sapiens
  misc_RNA (1)...(19): siRNA sense strand
ugccacagaugaugacauu

SEQ ID NO: 225689 - RNA, 19 nt, Homo sapiens
  misc_RNA (1)...(19): siRNA sense strand
ccaacuaugccacagauga

SEQ ID NO: 225690 - RNA, 19 nt, Homo sapiens
  misc_RNA (1)...(19): siRNA sense strand
ccacagaugaugacauugu

SEQ ID NO: 225691 - RNA, 19 nt, Homo sapiens
  misc_RNA (1)...(19): siRNA sense strand
cggcguagacuuugagauu

SEQ ID NO: 225692 - RNA, 19 nt, Homo sapiens
  misc_RNA (1)...(19): siRNA sense strand
gagaaaagccacaaaagga

SEQ ID NO: 225693 - RNA, 19 nt, Homo sapiens
  misc_RNA (1)...(19): siRNA sense strand
gaagagaaaagccacaaaa

SEQ ID NO: 225694 - RNA, 19 nt, Homo sapiens
  misc_RNA (1)...(19): siRNA sense strand
uggcucaacucgaacaaga

SEQ ID NO: 225695 - RNA, 19 nt, Homo sapiens
  misc_RNA (1)...(19): siRNA sense strand
caaccucauugaauuugau

SEQ ID NO: 225696 - RNA, 19 nt, Homo sapiens
  misc_RNA (1)...(19): siRNA sense strand
gaacaagaugaccagguau

SEQ ID NO: 225697 - RNA, 19 nt, Homo sapiens
  misc_RNA (1)...(19): siRNA sense strand
gaaggaugacgacuaugau

SEQ ID NO: 225698 - RNA, 19 nt, Homo sapiens
  misc_RNA (1)...(19): siRNA sense strand
gggcuuguccuuccgcaaa

SEQ ID NO: 225699 - RNA, 19 nt, Homo sapiens
  misc_RNA (1)...(19): siRNA sense strand
augaugacauuguguuuga

SEQ ID NO: 225700 - RNA, 19 nt, Homo sapiens
  misc_RNA (1)...(19): siRNA sense strand
gccgacaucugccucuuca

SEQ ID NO: 225701 - RNA, 19 nt, Homo sapiens
  misc_RNA (1)...(19): siRNA sense strand
gcccagaggauacaggaaa

SEQ ID NO: 225702 - RNA, 19 nt, Homo sapiens
  misc_RNA (1)...(19): siRNA sense strand
acacgccacuuccucaugu

SEQ ID NO: 225703 - RNA, 19 nt, Homo sapiens
  misc_RNA (1)...(19): siRNA sense strand
ugaaggagggugccaacaa

SEQ ID NO: 225704 - RNA, 19 nt, Homo sapiens
  misc_RNA (1)...(19): siRNA sense strand
acugcaagcucaccgugua

SEQ ID NO: 225705 - RNA, 19 nt, Homo sapiens
  misc_RNA (1)...(19): siRNA sense strand
ggccugcggcguagacuuu

SEQ ID NO: 225706 - RNA, 19 nt, Homo sapiens
  misc_RNA (1)...(19): siRNA sense strand
ccaaccucauugaauuuga

SEQ ID NO: 225707 - RNA, 19 nt, Homo sapiens
  misc_RNA (1)...(19): siRNA sense strand
gccacuuccucaugucuga

SEQ ID NO: 225708 - RNA, 19 nt, Homo sapiens
  misc_RNA (1)...(19): siRNA sense strand
gggcaagcgggacuucgua

SEQ ID NO: 225709 - RNA, 19 nt, Homo sapiens
  misc_RNA (1)...(19): siRNA sense strand
ugaaggggaugaaggauga

SEQ ID NO: 225710 - RNA, 19 nt, Homo sapiens
  misc_RNA (1)...(19): siRNA sense strand
gaugaugacauuguguuug

SEQ ID NO: 225711 - RNA, 19 nt, Homo sapiens
  misc_RNA (1)...(19): siRNA sense strand
cuucugugcuaaaucacua

SEQ ID NO: 225712 - RNA, 19 nt, Homo sapiens
  misc_RNA (1)...(19): siRNA sense strand
ggaugacgacuaugaugau

SEQ ID NO: 225713 - RNA, 19 nt, Homo sapiens
  misc_RNA (1)...(19): siRNA sense strand
caacuaugccacagaugau

SEQ ID NO: 225714 - RNA, 19 nt, Homo sapiens
  misc_RNA (1)...(19): siRNA sense strand
gagcugccuuuuguucuua

SEQ ID NO: 225715 - RNA, 19 nt, Homo sapiens
  misc_RNA (1)...(19): siRNA sense strand
gcucaacucgaacaagaug

SEQ ID NO: 225716 - RNA, 19 nt, Homo sapiens
  misc_RNA (1)...(19): siRNA sense strand
gcaccgcccaguacaagug

SEQ ID NO: 225717 - RNA, 19 nt, Homo sapiens
  misc_RNA (1)...(19): siRNA sense strand
accaacaacuccaccaaga

SEQ ID NO: 225718 - RNA, 19 nt, Homo sapiens
  misc_RNA (1)...(19): siRNA sense strand
ggacaaggagcuguacuac

SEQ ID NO: 225719 - RNA, 19 nt, Homo sapiens
  misc_RNA (1)...(19): siRNA sense strand
gaugacgacuaugaugauc

SEQ ID NO: 225720 - RNA, 19 nt, Homo sapiens
  misc_RNA (1)...(19): siRNA sense strand
ucaagaagucgagcccuaa

SEQ ID NO: 225721 - RNA, 19 nt, Homo sapiens
  misc_RNA (1)...(19): siRNA sense strand
ccagcaccaucgugaagga

SEQ ID NO: 225722 - RNA, 19 nt, Homo sapiens
  misc_RNA (1)...(19): siRNA sense strand
ggcguagacuuugagauuc

SEQ ID NO: 225723 - RNA, 19 nt, Homo sapiens
  misc_RNA (1)...(19): siRNA sense strand
gacaccaaccucauugaau

SEQ ID NO: 225724 - RNA, 19 nt, Homo sapiens
  misc_RNA (1)...(19): siRNA sense strand
cgaaaccacacgccacuuc

SEQ ID NO: 225725 - RNA, 19 nt, Homo sapiens
  misc_RNA (1)...(19): siRNA sense strand
caccaaccucauugaauuu

SEQ ID NO: 225726 - RNA, 19 nt, Homo sapiens
  misc_RNA (1)...(19): siRNA sense strand
ugggaauccugguguccua

SEQ ID NO: 225727 - RNA, 19 nt, Homo sapiens
  misc_RNA (1)...(19): siRNA sense strand
aggcuucccuggacaagga

SEQ ID NO: 225728 - RNA, 19 nt, Homo sapiens
  misc_RNA (1)...(19): siRNA sense strand
uaccaacuaugccacagau

SEQ ID NO: 225729 - RNA, 19 nt, Homo sapiens
  misc_RNA (1)...(19): siRNA sense strand
gcaagcgggacuucguaga

SEQ ID NO: 225730 - RNA, 19 nt, Homo sapiens
  misc_RNA (1)...(19): siRNA sense strand
auucgagccuucugugcua

SEQ ID NO: 225731 - RNA, 19 nt, Homo sapiens
  misc_RNA (1)...(19): siRNA sense strand
caagcgggacuucguagau

SEQ ID NO: 225732 - RNA, 19 nt, Homo sapiens
  misc_RNA (1)...(19): siRNA sense strand
guagaucaccuggacaaag

SEQ ID NO: 225733 - RNA, 19 nt, Homo sapiens
  misc_RNA (1)...(19): siRNA sense strand
ccuacagggucaaggugaa

SEQ ID NO: 225734 - RNA, 19 nt, Homo sapiens
  misc_RNA (1)...(19): siRNA sense strand
cagaugaugacauuguguu

SEQ ID NO: 225735 - RNA, 19 nt, Homo sapiens
  misc_RNA (1)...(19): siRNA sense strand
gcaagcucaccguguacuu

SEQ ID NO: 225736 - RNA, 19 nt, Homo sapiens
  misc_RNA (1)...(19): siRNA sense strand
gaauuugauaccaacuaug

SEQ ID NO: 225737 - RNA, 19 nt, Homo sapiens
  misc_RNA (1)...(19): siRNA sense strand
ggagcugccuuuuguucuu

SEQ ID NO: 225738 - RNA, 19 nt, Homo sapiens
  misc_RNA (1)...(19): siRNA sense strand
cagccaggcccagaggaua

SEQ ID NO: 225739 - RNA, 19 nt, Homo sapiens
  misc_RNA (1)...(19): siRNA sense strand
caccugcgccuuccgcuau

SEQ ID NO: 225740 - RNA, 19 nt, Homo sapiens
  misc_RNA (1)...(19): siRNA sense strand
ucucccagcuccacauucu

SEQ ID NO: 225741 - RNA, 19 nt, Homo sapiens
  misc_RNA (1)...(19): siRNA sense strand
caaguguccuguggcucaa

SEQ ID NO: 225742 - RNA, 19 nt, Homo sapiens
  misc_RNA (1)...(19): siRNA sense strand
uaaauguccacgucaccaa

SEQ ID NO: 225743 - RNA, 19 nt, Homo sapiens
  misc_RNA (1)...(19): siRNA sense strand
gcguagacuuugagauucg

SEQ ID NO: 225744 - RNA, 19 nt, Homo sapiens
  misc_RNA (1)...(19): siRNA sense strand
cauuguguuugaggacuuu

SEQ ID NO: 225745 - RNA, 19 nt, Homo sapiens
  misc_RNA (1)...(19): siRNA sense strand
agccuucugugcuaaauca

SEQ ID NO: 225746 - RNA, 19 nt, Homo sapiens
  misc_RNA (1)...(19): siRNA sense strand
ccacauucuguaaggugua

SEQ ID NO: 225747 - RNA, 19 nt, Homo sapiens
  misc_RNA (1)...(19): siRNA sense strand
ccagcuccacauucuguaa

SEQ ID NO: 225748 - RNA, 19 nt, Homo sapiens
  misc_RNA (1)...(19): siRNA sense strand
caccaagaccgucaagaag

SEQ ID NO: 225749 - RNA, 19 nt, Homo sapiens
  misc_RNA (1)...(19): siRNA sense strand
gcuaaaucacuagaagaga

SEQ ID NO: 225750 - RNA, 19 nt, Homo sapiens
  misc_RNA (1)...(19): siRNA sense strand
uggacaaggagcuguacua

SEQ ID NO: 225751 - RNA, 19 nt, Homo sapiens
  misc_RNA (1)...(19): siRNA sense strand
ccgcaaagaccuguucauc

SEQ ID NO: 225752 - RNA, 19 nt, Homo sapiens
  misc_RNA (1)...(19): siRNA sense strand
gacaguacgccgacaucug

SEQ ID NO: 225753 - RNA, 19 nt, Homo sapiens
  misc_RNA (1)...(19): siRNA sense strand
gugcuaaaucacuagaaga

SEQ ID NO: 225754 - RNA, 19 nt, Homo sapiens
  misc_RNA (1)...(19): siRNA sense strand
uccuguggcucaacucgaa

SEQ ID NO: 225755 - RNA, 19 nt, Homo sapiens
  misc_RNA (1)...(19): siRNA sense strand
gggagccccucaauguaaa

SEQ ID NO: 225756 - RNA, 19 nt, Homo sapiens
  misc_RNA (1)...(19): siRNA sense strand
caagaagaucaaagucucu

SEQ ID NO: 225757 - RNA, 19 nt, Homo sapiens
  misc_RNA (1)...(19): siRNA sense strand
aagcgggacuucguagauc

SEQ ID NO: 225758 - RNA, 19 nt, Homo sapiens
  misc_RNA (1)...(19): siRNA sense strand
aagaucaaagucucuguga

SEQ ID NO: 225759 - RNA, 19 nt, Homo sapiens
  misc_RNA (1)...(19): siRNA sense strand
uaaggaaccuacaaguuua

SEQ ID NO: 225760 - RNA, 19 nt, Homo sapiens
  misc_RNA (1)...(19): siRNA sense strand
ggaauuagccuuugagagu

SEQ ID NO: 225761 - RNA, 19 nt, Homo sapiens
  misc_RNA (1)...(19): siRNA sense strand
gaucagguaugguuucuag

SEQ ID NO: 225762 - RNA, 19 nt, Homo sapiens
  misc_RNA (1)...(19): siRNA sense strand
caacacccuugucuacuuu

SEQ ID NO: 225763 - RNA, 19 nt, Homo sapiens
  misc_RNA (1)...(19): siRNA sense strand
ugaacgagcuggauccauu

SEQ ID NO: 225764 - RNA, 19 nt, Homo sapiens
  misc_RNA (1)...(19): siRNA sense strand
gaacgagcuggauccauua

SEQ ID NO: 225765 - RNA, 19 nt, Homo sapiens
  misc_RNA (1)...(19): siRNA sense strand
gaaaggcacaguaaggaaa

SEQ ID NO: 225766 - RNA, 19 nt, Homo sapiens
  misc_RNA (1)...(19): siRNA sense strand
uuaaggaaccuacaaguuu

SEQ ID NO: 225767 - RNA, 19 nt, Homo sapiens
  misc_RNA (1)...(19): siRNA sense strand
gcacucggagcaugaauuu

SEQ ID NO: 225768 - RNA, 19 nt, Homo sapiens
  misc_RNA (1)...(19): siRNA sense strand
gguaugguuucuaguggua

SEQ ID NO: 225769 - RNA, 19 nt, Homo sapiens
  misc_RNA (1)...(19): siRNA sense strand
gaaaccaucgugccuguga

SEQ ID NO: 225770 - RNA, 19 nt, Homo sapiens
  misc_RNA (1)...(19): siRNA sense strand
ccuacaaguuuaauggaua

SEQ ID NO: 225771 - RNA, 19 nt, Homo sapiens
  misc_RNA (1)...(19): siRNA sense strand
uaauagacgugucauccaa

SEQ ID NO: 225772 - RNA, 19 nt, Homo sapiens
  misc_RNA (1)...(19): siRNA sense strand
ggaauggaauauacaaagg

SEQ ID NO: 225773 - RNA, 19 nt, Homo sapiens
  misc_RNA (1)...(19): siRNA sense strand
gggauaauguggaagagau

SEQ ID NO: 225774 - RNA, 19 nt, Homo sapiens
  misc_RNA (1)...(19): siRNA sense strand
ccgcaggccucccucuuaa

SEQ ID NO: 225775 - RNA, 19 nt, Homo sapiens
  misc_RNA (1)...(19): siRNA sense strand
ccgauggccuggaaaggua

SEQ ID NO: 225776 - RNA, 19 nt, Homo sapiens
  misc_RNA (1)...(19): siRNA sense strand
gaaccuacaaguuuaaugg

SEQ ID NO: 225777 - RNA, 19 nt, Homo sapiens
  misc_RNA (1)...(19): siRNA sense strand
gaacugcgacucccgaagu

SEQ ID NO: 225778 - RNA, 19 nt, Homo sapiens
  misc_RNA (1)...(19): siRNA sense strand
gccaccauccauauaauua

SEQ ID NO: 225779 - RNA, 19 nt, Homo sapiens
  misc_RNA (1)...(19): siRNA sense strand
gcugcuaugucaccucauu

SEQ ID NO: 225780 - RNA, 19 nt, Homo sapiens
  misc_RNA (1)...(19): siRNA sense strand
ggacgacagugggucaguu

SEQ ID NO: 225781 - RNA, 19 nt, Homo sapiens
  misc_RNA (1)...(19): siRNA sense strand
uaacacggaauuagccuuu

SEQ ID NO: 225782 - RNA, 19 nt, Homo sapiens
  misc_RNA (1)...(19): siRNA sense strand
ccagcuggacgguugauua

SEQ ID NO: 225783 - RNA, 19 nt, Homo sapiens
  misc_RNA (1)...(19): siRNA sense strand
gacgacaagccuaauauug

SEQ ID NO: 225784 - RNA, 19 nt, Homo sapiens
  misc_RNA (1)...(19): siRNA sense strand
cuccugaucuucuccauga

SEQ ID NO: 225785 - RNA, 19 nt, Homo sapiens
  misc_RNA (1)...(19): siRNA sense strand
ggaauccgcgucccaggaa

SEQ ID NO: 225786 - RNA, 19 nt, Homo sapiens
  misc_RNA (1)...(19): siRNA sense strand
gcaggccucccucuuaaug

SEQ ID NO: 225787 - RNA, 19 nt, Homo sapiens
  misc_RNA (1)...(19): siRNA sense strand
ucacggagcagcccaugaa

SEQ ID NO: 225788 - RNA, 19 nt, Homo sapiens
  misc_RNA (1)...(19): siRNA sense strand
acacggaauuagccuuuga

SEQ ID NO: 225789 - RNA, 19 nt, Homo sapiens
  misc_RNA (1)...(19): siRNA sense strand
ccacagagccccuccauga

SEQ ID NO: 225790 - RNA, 19 nt, Homo sapiens
  misc_RNA (1)...(19): siRNA sense strand
cagcuggacgguugauuaa

SEQ ID NO: 225791 - RNA, 19 nt, Homo sapiens
  misc_RNA (1)...(19): siRNA sense strand
ccaacgcccugaaggaaca

SEQ ID NO: 225792 - RNA, 19 nt, Homo sapiens
  misc_RNA (1)...(19): siRNA sense strand
uugaugcuaucgaugauuu

SEQ ID NO: 225793 - RNA, 19 nt, Homo sapiens
  misc_RNA (1)...(19): siRNA sense strand
ggagggcauuuggaagcua

SEQ ID NO: 225794 - RNA, 19 nt, Homo sapiens
  misc_RNA (1)...(19): siRNA sense strand
gcuggacgguugauuaagg

SEQ ID NO: 225795 - RNA, 19 nt, Homo sapiens
  misc_RNA (1)...(19): siRNA sense strand
ucacggagggcauuuggaa

SEQ ID NO: 225796 - RNA, 19 nt, Homo sapiens
  misc_RNA (1)...(19): siRNA sense strand
ucugguggcugcuauguca

SEQ ID NO: 225797 - RNA, 19 nt, Homo sapiens
  misc_RNA (1)...(19): siRNA sense strand
caacuugguggauggaaug

SEQ ID NO: 225798 - RNA, 19 nt, Homo sapiens
  misc_RNA (1)...(19): siRNA sense strand
gacagugggucaguuugga

SEQ ID NO: 225799 - RNA, 19 nt, Homo sapiens
  misc_RNA (1)...(19): siRNA sense strand
gaauauacaaagguggaaa

SEQ ID NO: 225800 - RNA, 19 nt, Homo sapiens
  misc_RNA (1)...(19): siRNA sense strand
augcagauguuucggagaa

SEQ ID NO: 225801 - RNA, 19 nt, Homo sapiens
  misc_RNA (1)...(19): siRNA sense strand
cauccucacccuaaccuuu

SEQ ID NO: 225802 - RNA, 19 nt, Homo sapiens
  misc_RNA (1)...(19): siRNA sense strand
caugacgacaagccuaaua

SEQ ID NO: 225803 - RNA, 19 nt, Homo sapiens
  misc_RNA (1)...(19): siRNA sense strand
gauggaauggaauauacaa

SEQ ID NO: 225804 - RNA, 19 nt, Homo sapiens
  misc_RNA (1)...(19): siRNA sense strand
ccuaauauuguccuaauca

SEQ ID NO: 225805 - RNA, 19 nt, Homo sapiens
  misc_RNA (1)...(19): siRNA sense strand
guccuaacgagaagagaua

SEQ ID NO: 225806 - RNA, 19 nt, Homo sapiens
  misc_RNA (1)...(19): siRNA sense strand
gacgacagugggucaguuu

SEQ ID NO: 225807 - RNA, 19 nt, Homo sapiens
  misc_RNA (1)...(19): siRNA sense strand
ugacgacaagccuaauauu

SEQ ID NO: 225808 - RNA, 19 nt, Homo sapiens
  misc_RNA (1)...(19): siRNA sense strand
uaugucaccucauuaugca

SEQ ID NO: 225809 - RNA, 19 nt, Homo sapiens
  misc_RNA (1)...(19): siRNA sense strand
uuggaaggcucacuaugug

SEQ ID NO: 225810 - RNA, 19 nt, Homo sapiens
  misc_RNA (1)...(19): siRNA sense strand
gaauggaauauacaaaggu

SEQ ID NO: 225811 - RNA, 19 nt, Homo sapiens
  misc_RNA (1)...(19): siRNA sense strand
uggauggaauggaauauac

SEQ ID NO: 225812 - RNA, 19 nt, Homo sapiens
  misc_RNA (1)...(19): siRNA sense strand
guugaugaccuggguauug

SEQ ID NO: 225813 - RNA, 19 nt, Homo sapiens
  misc_RNA (1)...(19): siRNA sense strand
auuauggguuugacuacua

SEQ ID NO: 225814 - RNA, 19 nt, Homo sapiens
  misc_RNA (1)...(19): siRNA sense strand
ggguuugacuacuacuaug

SEQ ID NO: 225815 - RNA, 19 nt, Homo sapiens
  misc_RNA (1)...(19): siRNA sense strand
cuucaugucuuuggugugu

SEQ ID NO: 225816 - RNA, 19 nt, Homo sapiens
  misc_RNA (1)...(19): siRNA sense strand
guggauggaauggaauaua

SEQ ID NO: 225817 - RNA, 19 nt, Homo sapiens
  misc_RNA (1)...(19): siRNA sense strand
gugccaccauccauauaau

SEQ ID NO: 225818 - RNA, 19 nt, Homo sapiens
  misc_RNA (1)...(19): siRNA sense strand
ggccaacgcccugaaggaa

SEQ ID NO: 225819 - RNA, 19 nt, Homo sapiens
  misc_RNA (1)...(19): siRNA sense strand
uugcagccuugcuaaagaa

SEQ ID NO: 225820 - RNA, 19 nt, Homo sapiens
  misc_RNA (1)...(19): siRNA sense strand
cuugguggauggaauggaa

SEQ ID NO: 225821 - RNA, 19 nt, Homo sapiens
  misc_RNA (1)...(19): siRNA sense strand
uagaaaggcacaguaagga

SEQ ID NO: 225822 - RNA, 19 nt, Homo sapiens
  misc_RNA (1)...(19): siRNA sense strand
ucuccaugauucuguuuau

SEQ ID NO: 225823 - RNA, 19 nt, Homo sapiens
  misc_RNA (1)...(19): siRNA sense strand
cauccgaucagguaugguu

SEQ ID NO: 225824 - RNA, 19 nt, Homo sapiens
  misc_RNA (1)...(19): siRNA sense strand
ccagugccaccauccauau

SEQ ID NO: 225825 - RNA, 19 nt, Homo sapiens
  misc_RNA (1)...(19): siRNA sense strand
ccaccauccauauaauuau

SEQ ID NO: 225826 - RNA, 19 nt, Homo sapiens
  misc_RNA (1)...(19): siRNA sense strand
ugaccuggguauuggagau

SEQ ID NO: 225827 - RNA, 19 nt, Homo sapiens
  misc_RNA (1)...(19): siRNA sense strand
gauuaaggaaccuacaagu

SEQ ID NO: 225828 - RNA, 19 nt, Homo sapiens
  misc_RNA (1)...(19): siRNA sense strand
uuggagaucugggcugcua

SEQ ID NO: 225829 - RNA, 19 nt, Homo sapiens
  misc_RNA (1)...(19): siRNA sense strand
cuugcagccuugcuaaaga

SEQ ID NO: 225830 - RNA, 19 nt, Homo sapiens
  misc_RNA (1)...(19): siRNA sense strand
cagagccccuccaugauuu

SEQ ID NO: 225831 - RNA, 19 nt, Homo sapiens
  misc_RNA (1)...(19): siRNA sense strand
ucagguaugguuucuagug

SEQ ID NO: 225832 - RNA, 19 nt, Homo sapiens
  misc_RNA (1)...(19): siRNA sense strand
gcaucagugucaggaggaa

SEQ ID NO: 225833 - RNA, 19 nt, Homo sapiens
  misc_RNA (1)...(19): siRNA sense strand
gcuaaagaagcaaggauac

SEQ ID NO: 225834 - RNA, 19 nt, Homo sapiens
  misc_RNA (1)...(19): siRNA sense strand
agaaaggcacaguaaggaa

SEQ ID NO: 225835 - RNA, 19 nt, Homo sapiens
  misc_RNA (1)...(19): siRNA sense strand
ccugugaccuaccaacucu

SEQ ID NO: 225836 - RNA, 19 nt, Homo sapiens
  misc_RNA (1)...(19): siRNA sense strand
gauucuugaugcuaucgau

SEQ ID NO: 225837 - RNA, 19 nt, Homo sapiens
  misc_RNA (1)...(19): siRNA sense strand
ggauaauguggaagagaug

SEQ ID NO: 225838 - RNA, 19 nt, Homo sapiens
  misc_RNA (1)...(19): siRNA sense strand
guaauagacgugucaucca

SEQ ID NO: 225839 - RNA, 19 nt, Homo sapiens
  misc_RNA (1)...(19): siRNA sense strand
ugaaggaacaccaggaaac

SEQ ID NO: 225840 - RNA, 19 nt, Homo sapiens
  misc_RNA (1)...(19): siRNA sense strand
gaauccgcgucccaggaau

SEQ ID NO: 225841 - RNA, 19 nt, Homo sapiens
  misc_RNA (1)...(19): siRNA sense strand
ggaauauacaaagguggaa

SEQ ID NO: 225842 - RNA, 19 nt, Homo sapiens
  misc_RNA (1)...(19): siRNA sense strand
gaucacggagggcauuugg

SEQ ID NO: 225843 - RNA, 19 nt, Homo sapiens
  misc_RNA (1)...(19): siRNA sense strand
acacuugcagccuugcuaa

SEQ ID NO: 225844 - RNA, 19 nt, Homo sapiens
  misc_RNA (1)...(19): siRNA sense strand
gaccuaccaacucucagaa

SEQ ID NO: 225845 - RNA, 19 nt, Homo sapiens
  misc_RNA (1)...(19): siRNA sense strand
gcuaugucaccucauuaug

SEQ ID NO: 225846 - RNA, 19 nt, Homo sapiens
  misc_RNA (1)...(19): siRNA sense strand
ggaaccuacaaguuuaaug

SEQ ID NO: 225847 - RNA, 19 nt, Homo sapiens
  misc_RNA (1)...(19): siRNA sense strand
ggauggaauggaauauaca

SEQ ID NO: 225848 - RNA, 19 nt, Homo sapiens
  misc_RNA (1)...(19): siRNA sense strand
caagccuaauauuguccua

SEQ ID NO: 225849 - RNA, 19 nt, Homo sapiens
  misc_RNA (1)...(19): siRNA sense strand
uaaagaagcaaggauacag

SEQ ID NO: 225850 - RNA, 19 nt, Homo sapiens
  misc_RNA (1)...(19): siRNA sense strand
agccuaauauuguccuaau

SEQ ID NO: 225851 - RNA, 19 nt, Homo sapiens
  misc_RNA (1)...(19): siRNA sense strand
ugaccuaccaacucucaga

SEQ ID NO: 225852 - RNA, 19 nt, Homo sapiens
  misc_RNA (1)...(19): siRNA sense strand
uuuaccaacugucgcauca

SEQ ID NO: 225853 - RNA, 19 nt, Homo sapiens
  misc_RNA (1)...(19): siRNA sense strand
cagggugcaugacgacaag

SEQ ID NO: 225854 - RNA, 19 nt, Homo sapiens
  misc_RNA (1)...(19): siRNA sense strand
ggauacagcacggggcuua

SEQ ID NO: 225855 - RNA, 19 nt, Homo sapiens
  misc_RNA (1)...(19): siRNA sense strand
ggcacaguaaggaaacuuu

SEQ ID NO: 225856 - RNA, 19 nt, Homo sapiens
  misc_RNA (1)...(19): siRNA sense strand
uuagaaaggcacaguaagg

SEQ ID NO: 225857 - RNA, 19 nt, Homo sapiens
  misc_RNA (1)...(19): siRNA sense strand
cuuaaugagacaacacuug

SEQ ID NO: 225858 - RNA, 19 nt, Homo sapiens
  misc_RNA (1)...(19): siRNA sense strand
ccuaccaacucucagaacu

SEQ ID NO: 225859 - RNA, 19 nt, Homo sapiens
  misc_RNA (1)...(19): siRNA sense strand
gcgaguacaucaaagacaa

SEQ ID NO: 225860 - RNA, 19 nt, Homo sapiens
  misc_RNA (1)...(19): siRNA sense strand
caacugcgaguacaucaaa

SEQ ID NO: 225861 - RNA, 19 nt, Homo sapiens
  misc_RNA (1)...(19): siRNA sense strand
uuugagaccuuccaaguga

SEQ ID NO: 225862 - RNA, 19 nt, Homo sapiens
  misc_RNA (1)...(19): siRNA sense strand
gugagggccuuuccagaug

SEQ ID NO: 225863 - RNA, 19 nt, Homo sapiens
  misc_RNA (1)...(19): siRNA sense strand
gcacaaggaguucaaugca

SEQ ID NO: 225864 - RNA, 19 nt, Homo sapiens
  misc_RNA (1)...(19): siRNA sense strand
gcccuggccuccuuugaug

SEQ ID NO: 225865 - RNA, 19 nt, Homo sapiens
  misc_RNA (1)...(19): siRNA sense strand
gcaagcacagcaccuacaa

SEQ ID NO: 225866 - RNA, 19 nt, Homo sapiens
  misc_RNA (1)...(19): siRNA sense strand
ccacuucuccuucaagaca

SEQ ID NO: 225867 - RNA, 19 nt, Homo sapiens
  misc_RNA (1)...(19): siRNA sense strand
ucaaagacaagaagugcaa

SEQ ID NO: 225868 - RNA, 19 nt, Homo sapiens
  misc_RNA (1)...(19): siRNA sense strand
ggugagggccuuuccagau

SEQ ID NO: 225869 - RNA, 19 nt, Homo sapiens
  misc_RNA (1)...(19): siRNA sense strand
gcaccuacaacugcgagua

SEQ ID NO: 225870 - RNA, 19 nt, Homo sapiens
  misc_RNA (1)...(19): siRNA sense strand
ggccuugccaucuggauaa

SEQ ID NO: 225871 - RNA, 19 nt, Homo sapiens
  misc_RNA (1)...(19): siRNA sense strand
cagcugcucucccggaucu

SEQ ID NO: 225872 - RNA, 19 nt, Homo sapiens
  misc_RNA (1)...(19): siRNA sense strand
guacaucaaagacaagaag

SEQ ID NO: 225873 - RNA, 19 nt, Homo sapiens
  misc_RNA (1)...(19): siRNA sense strand
ugaugucucugcuucuugu

SEQ ID NO: 225874 - RNA, 19 nt, Homo sapiens
  misc_RNA (1)...(19): siRNA sense strand
caccacuucuccuucaaga

SEQ ID NO: 225875 - RNA, 19 nt, Homo sapiens
  misc_RNA (1)...(19): siRNA sense strand
uaugaugucucugcuucuu

SEQ ID NO: 225876 - RNA, 19 nt, Homo sapiens
  misc_RNA (1)...(19): siRNA sense strand
ucaagacacuccauuuccu

SEQ ID NO: 225877 - RNA, 19 nt, Homo sapiens
  misc_RNA (1)...(19): siRNA sense strand
ucucugcagucuggucuuu

SEQ ID NO: 225878 - RNA, 19 nt, Homo sapiens
  misc_RNA (1)...(19): siRNA sense strand
cuugccaucuggauaauuc

SEQ ID NO: 225879 - RNA, 19 nt, Homo sapiens
  misc_RNA (1)...(19): siRNA sense strand
uccauuuccugcugacuga

SEQ ID NO: 225880 - RNA, 19 nt, Homo sapiens
  misc_RNA (1)...(19): siRNA sense strand
gggccuugccaucuggaua

SEQ ID NO: 225881 - RNA, 19 nt, Homo sapiens
  misc_RNA (1)...(19): siRNA sense strand
gaugguccaggccuccuuu

SEQ ID NO: 225882 - RNA, 19 nt, Homo sapiens
  misc_RNA (1)...(19): siRNA sense strand
cccacuaccuccaccacuu

SEQ ID NO: 225883 - RNA, 19 nt, Homo sapiens
  misc_RNA (1)...(19): siRNA sense strand
gagaggaagaggugcugau

SEQ ID NO: 225884 - RNA, 19 nt, Homo sapiens
  misc_RNA (1)...(19): siRNA sense strand
ccacuaccuccaccacuuc

SEQ ID NO: 225885 - RNA, 19 nt, Homo sapiens
  misc_RNA (1)...(19): siRNA sense strand
cuucaagacacuccauuuc

SEQ ID NO: 225886 - RNA, 19 nt, Homo sapiens
  misc_RNA (1)...(19): siRNA sense strand
caccauaaaucuugacuua

SEQ ID NO: 225887 - RNA, 19 nt, Homo sapiens
  misc_RNA (1)...(19): siRNA sense strand
ucaacaagcugaccguaua

SEQ ID NO: 225888 - RNA, 19 nt, Homo sapiens
  misc_RNA (1)...(19): siRNA sense strand
ggucauaacugagcaacua

SEQ ID NO: 225889 - RNA, 19 nt, Homo sapiens
  misc_RNA (1)...(19): siRNA sense strand
uauaugaacucgaugcuaa

SEQ ID NO: 225890 - RNA, 19 nt, Homo sapiens
  misc_RNA (1)...(19): siRNA sense strand
gguggaacauaaauaauga

SEQ ID NO: 225891 - RNA, 19 nt, Homo sapiens
  misc_RNA (1)...(19): siRNA sense strand
ugaagaagccaagaauuua

SEQ ID NO: 225892 - RNA, 19 nt, Homo sapiens
  misc_RNA (1)...(19): siRNA sense strand
gaaaauagcacaaguuaug

SEQ ID NO: 225893 - RNA, 19 nt, Homo sapiens
  misc_RNA (1)...(19): siRNA sense strand
gaacguuucaguauaaaug

SEQ ID NO: 225894 - RNA, 19 nt, Homo sapiens
  misc_RNA (1)...(19): siRNA sense strand
uagcacaaguuaugaagaa

SEQ ID NO: 225895 - RNA, 19 nt, Homo sapiens
  misc_RNA (1)...(19): siRNA sense strand
ggacugcccugacccuugu

SEQ ID NO: 225896 - RNA, 19 nt, Homo sapiens
  misc_RNA (1)...(19): siRNA sense strand
uaccaaaggucaauucgaa

SEQ ID NO: 225897 - RNA, 19 nt, Homo sapiens
  misc_RNA (1)...(19): siRNA sense strand
gaagaagccaagaauuuau

SEQ ID NO: 225898 - RNA, 19 nt, Homo sapiens
  misc_RNA (1)...(19): siRNA sense strand
guacagaggugcaguucca

SEQ ID NO: 225899 - RNA, 19 nt, Homo sapiens
  misc_RNA (1)...(19): siRNA sense strand
gaggugcaguuccauggua

SEQ ID NO: 225900 - RNA, 19 nt, Homo sapiens
  misc_RNA (1)...(19): siRNA sense strand
ggacagaggacugcagaaa

SEQ ID NO: 225901 - RNA, 19 nt, Homo sapiens
  misc_RNA (1)...(19): siRNA sense strand
caacaaaacugucuucaag

SEQ ID NO: 225902 - RNA, 19 nt, Homo sapiens
  misc_RNA (1)...(19): siRNA sense strand
ggauguauaugaacucgau

SEQ ID NO: 225903 - RNA, 19 nt, Homo sapiens
  misc_RNA (1)...(19): siRNA sense strand
aaacauggauuuuggagua

SEQ ID NO: 225904 - RNA, 19 nt, Homo sapiens
  misc_RNA (1)...(19): siRNA sense strand
gaaagaugccauguggaua

SEQ ID NO: 225905 - RNA, 19 nt, Homo sapiens
  misc_RNA (1)...(19): siRNA sense strand
gaaagaaagaugccaugug

SEQ ID NO: 225906 - RNA, 19 nt, Homo sapiens
  misc_RNA (1)...(19): siRNA sense strand
gcuaaagguuauagugaau

SEQ ID NO: 225907 - RNA, 19 nt, Homo sapiens
  misc_RNA (1)...(19): siRNA sense strand
cuugauagauguuaccaaa

SEQ ID NO: 225908 - RNA, 19 nt, Homo sapiens
  misc_RNA (1)...(19): siRNA sense strand
ggauaggguuccucacuag

SEQ ID NO: 225909 - RNA, 19 nt, Homo sapiens
  misc_RNA (1)...(19): siRNA sense strand
gaaaggaaucauuggaugu

SEQ ID NO: 225910 - RNA, 19 nt, Homo sapiens
  misc_RNA (1)...(19): siRNA sense strand
ggaaucauuggauguauau

SEQ ID NO: 225911 - RNA, 19 nt, Homo sapiens
  misc_RNA (1)...(19): siRNA sense strand
gguaugugguacaaacaaa

SEQ ID NO: 225912 - RNA, 19 nt, Homo sapiens
  misc_RNA (1)...(19): siRNA sense strand
ugacuuaccacccuacaaa

SEQ ID NO: 225913 - RNA, 19 nt, Homo sapiens
  misc_RNA (1)...(19): siRNA sense strand
cagaacgccugcaaagaug

SEQ ID NO: 225914 - RNA, 19 nt, Homo sapiens
  misc_RNA (1)...(19): siRNA sense strand
ggagagauuauuucauuca

SEQ ID NO: 225915 - RNA, 19 nt, Homo sapiens
  misc_RNA (1)...(19): siRNA sense strand
aauaguagcagaagacaaa

SEQ ID NO: 225916 - RNA, 19 nt, Homo sapiens
  misc_RNA (1)...(19): siRNA sense strand
ccaagaauuuauugaccaa

SEQ ID NO: 225917 - RNA, 19 nt, Homo sapiens
  misc_RNA (1)...(19): siRNA sense strand
ugaccaagaccaagauauu

SEQ ID NO: 225918 - RNA, 19 nt, Homo sapiens
  misc_RNA (1)...(19): siRNA sense strand
uuucuuggguggaacauaa

SEQ ID NO: 225919 - RNA, 19 nt, Homo sapiens
  misc_RNA (1)...(19): siRNA sense strand
aaggucaauucgaaacuua

SEQ ID NO: 225920 - RNA, 19 nt, Homo sapiens
  misc_RNA (1)...(19): siRNA sense strand
gaugguaugugguacaaac

SEQ ID NO: 225921 - RNA, 19 nt, Homo sapiens
  misc_RNA (1)...(19): siRNA sense strand
cauguuaacaggauucaaa

SEQ ID NO: 225922 - RNA, 19 nt, Homo sapiens
  misc_RNA (1)...(19): siRNA sense strand
agacagaaaggaaucauug

SEQ ID NO: 225923 - RNA, 19 nt, Homo sapiens
  misc_RNA (1)...(19): siRNA sense strand
aagaggaaaugaaggguau

SEQ ID NO: 225924 - RNA, 19 nt, Homo sapiens
  misc_RNA (1)...(19): siRNA sense strand
uacacaaccuugauagaug

SEQ ID NO: 225925 - RNA, 19 nt, Homo sapiens
  misc_RNA (1)...(19): siRNA sense strand
gauauaccuuuaggagaga

SEQ ID NO: 225926 - RNA, 19 nt, Homo sapiens
  misc_RNA (1)...(19): siRNA sense strand
ugauagauguuaccaaagg

SEQ ID NO: 225927 - RNA, 19 nt, Homo sapiens
  misc_RNA (1)...(19): siRNA sense strand
acacaaccuugauagaugu

SEQ ID NO: 225928 - RNA, 19 nt, Homo sapiens
  misc_RNA (1)...(19): siRNA sense strand
gaaacaucccuucuuccuu

SEQ ID NO: 225929 - RNA, 19 nt, Homo sapiens
  misc_RNA (1)...(19): siRNA sense strand
caaaagauggcaugaauug

SEQ ID NO: 225930 - RNA, 19 nt, Homo sapiens
  misc_RNA (1)...(19): siRNA sense strand
uggauaggguuccucacua

SEQ ID NO: 225931 - RNA, 19 nt, Homo sapiens
  misc_RNA (1)...(19): siRNA sense strand
ggagaaacauggauuuugg

SEQ ID NO: 225932 - RNA, 19 nt, Homo sapiens
  misc_RNA (1)...(19): siRNA sense strand
gaccaagaccaagauauug

SEQ ID NO: 225933 - RNA, 19 nt, Homo sapiens
  misc_RNA (1)...(19): siRNA sense strand
gcaccagccaagagaauau

SEQ ID NO: 225934 - RNA, 19 nt, Homo sapiens
  misc_RNA (1)...(19): siRNA sense strand
aggaaucauuggauguaua

SEQ ID NO: 225935 - RNA, 19 nt, Homo sapiens
  misc_RNA (1)...(19): siRNA sense strand
auaccugggucauaacuga

SEQ ID NO: 225936 - RNA, 19 nt, Homo sapiens
  misc_RNA (1)...(19): siRNA sense strand
cauuugaaaccauguauga

SEQ ID NO: 225937 - RNA, 19 nt, Homo sapiens
  misc_RNA (1)...(19): siRNA sense strand
aaagauggcaugaauugau

SEQ ID NO: 225938 - RNA, 19 nt, Homo sapiens
  misc_RNA (1)...(19): siRNA sense strand
aaaggaaucauuggaugua

SEQ ID NO: 225939 - RNA, 19 nt, Homo sapiens
  misc_RNA (1)...(19): siRNA sense strand
augaagaagccaagaauuu

SEQ ID NO: 225940 - RNA, 19 nt, Homo sapiens
  misc_RNA (1)...(19): siRNA sense strand
gaaggguauugccgcuguu

SEQ ID NO: 225941 - RNA, 19 nt, Homo sapiens
  misc_RNA (1)...(19): siRNA sense strand
ggguggaacauaaauaaug

SEQ ID NO: 225942 - RNA, 19 nt, Homo sapiens
  misc_RNA (1)...(19): siRNA sense strand
ccauaaaucuugacuuacc

SEQ ID NO: 225943 - RNA, 19 nt, Homo sapiens
  misc_RNA (1)...(19): siRNA sense strand
gaguauuucuuggguggaa

SEQ ID NO: 225944 - RNA, 19 nt, Homo sapiens
  misc_RNA (1)...(19): siRNA sense strand
gguacaccauaaaucuuga

SEQ ID NO: 225945 - RNA, 19 nt, Homo sapiens
  misc_RNA (1)...(19): siRNA sense strand
caacuuuccuggcccuuuu

SEQ ID NO: 225946 - RNA, 19 nt, Homo sapiens
  misc_RNA (1)...(19): siRNA sense strand
caaauuaugaccguuggaa

SEQ ID NO: 225947 - RNA, 19 nt, Homo sapiens
  misc_RNA (1)...(19): siRNA sense strand
aagauggcaugaauugaug

SEQ ID NO: 225948 - RNA, 19 nt, Homo sapiens
  misc_RNA (1)...(19): siRNA sense strand
ggaagguugugugauuaca

SEQ ID NO: 225949 - RNA, 19 nt, Homo sapiens
  misc_RNA (1)...(19): siRNA sense strand
gaagccaagaauuuauuga

SEQ ID NO: 225950 - RNA, 19 nt, Homo sapiens
  misc_RNA (1)...(19): siRNA sense strand
ggaaagaaagaugccaugu

SEQ ID NO: 225951 - RNA, 19 nt, Homo sapiens
  misc_RNA (1)...(19): siRNA sense strand
uauagugaauucucugaag

SEQ ID NO: 225952 - RNA, 19 nt, Homo sapiens
  misc_RNA (1)...(19): siRNA sense strand
uaagcaggguagaugguau

SEQ ID NO: 225953 - RNA, 19 nt, Homo sapiens
  misc_RNA (1)...(19): siRNA sense strand
uuaugcaggugguggauga

SEQ ID NO: 225954 - RNA, 19 nt, Homo sapiens
  misc_RNA (1)...(19): siRNA sense strand
aaaggucaauucgaaacuu

SEQ ID NO: 225955 - RNA, 19 nt, Homo sapiens
  misc_RNA (1)...(19): siRNA sense strand
uaugauguccugucaacaa

SEQ ID NO: 225956 - RNA, 19 nt, Homo sapiens
  misc_RNA (1)...(19): siRNA sense strand
cauguaugauguccuguca

SEQ ID NO: 225957 - RNA, 19 nt, Homo sapiens
  misc_RNA (1)...(19): siRNA sense strand
cugcaaagaugugucugaa

SEQ ID NO: 225958 - RNA, 19 nt, Homo sapiens
  misc_RNA (1)...(19): siRNA sense strand
ggguagaugguauguggua

SEQ ID NO: 225959 - RNA, 19 nt, Homo sapiens
  misc_RNA (1)...(19): siRNA sense strand
uggccuacuuggcaacuuu

SEQ ID NO: 225960 - RNA, 19 nt, Homo sapiens
  misc_RNA (1)...(19): siRNA sense strand
gauagauguuaccaaaggu

SEQ ID NO: 225961 - RNA, 19 nt, Homo sapiens
  misc_RNA (1)...(19): siRNA sense strand
caaaaccuguccucaacaa

SEQ ID NO: 225962 - RNA, 19 nt, Homo sapiens
  misc_RNA (1)...(19): siRNA sense strand
gaauaucucauuugaaacc

SEQ ID NO: 225963 - RNA, 19 nt, Homo sapiens
  misc_RNA (1)...(19): siRNA sense strand
auagugaauucucugaaga

SEQ ID NO: 225964 - RNA, 19 nt, Homo sapiens
  misc_RNA (1)...(19): siRNA sense strand
gagacagaaaggaaucauu

SEQ ID NO: 225965 - RNA, 19 nt, Homo sapiens
  misc_RNA (1)...(19): siRNA sense strand
agaaagaugccauguggau

SEQ ID NO: 225966 - RNA, 19 nt, Homo sapiens
  misc_RNA (1)...(19): siRNA sense strand
gaggaaaugaaggguauug

SEQ ID NO: 225967 - RNA, 19 nt, Homo sapiens
  misc_RNA (1)...(19): siRNA sense strand
aaaauugccuggccuacuu

SEQ ID NO: 225968 - RNA, 19 nt, Homo sapiens
  misc_RNA (1)...(19): siRNA sense strand
cguauacacaaccuugaua

SEQ ID NO: 225969 - RNA, 19 nt, Homo sapiens
  misc_RNA (1)...(19): siRNA sense strand
caacaaaaccuguccucaa

SEQ ID NO: 225970 - RNA, 19 nt, Homo sapiens
  misc_RNA (1)...(19): siRNA sense strand
uugaaaccauguaugaugu

SEQ ID NO: 225971 - RNA, 19 nt, Homo sapiens
  misc_RNA (1)...(19): siRNA sense strand
aaagaugccauguggauag

SEQ ID NO: 225972 - RNA, 19 nt, Homo sapiens
  misc_RNA (1)...(19): siRNA sense strand
aagcuuugcuggcuaugug

SEQ ID NO: 225973 - RNA, 19 nt, Homo sapiens
  misc_RNA (1)...(19): siRNA sense strand
ugcuaaagguuauagugaa

SEQ ID NO: 225974 - RNA, 19 nt, Homo sapiens
  misc_RNA (1)...(19): siRNA sense strand
aaaucaaccuauccuccuu

SEQ ID NO: 225975 - RNA, 19 nt, Homo sapiens
  misc_RNA (1)...(19): siRNA sense strand
uuggaaacaucccuucuuc

SEQ ID NO: 225976 - RNA, 19 nt, Homo sapiens
  misc_RNA (1)...(19): siRNA sense strand
ggggaagguugugugauua

SEQ ID NO: 225977 - RNA, 19 nt, Homo sapiens
  misc_RNA (1)...(19): siRNA sense strand
gaaccgcaccagccaagag

SEQ ID NO: 225978 - RNA, 19 nt, Homo sapiens
  misc_RNA (1)...(19): siRNA sense strand
guauugccgcuguuacuga

SEQ ID NO: 225979 - RNA, 19 nt, Homo sapiens
  misc_RNA (1)...(19): siRNA sense strand
gcaacuuuccuggcccuuu

SEQ ID NO: 225980 - RNA, 19 nt, Homo sapiens
  misc_RNA (1)...(19): siRNA sense strand
uacaaaagauggcaugaau

SEQ ID NO: 225981 - RNA, 19 nt, Homo sapiens
  misc_RNA (1)...(19): siRNA sense strand
uagaugguaugugguacaa

SEQ ID NO: 225982 - RNA, 19 nt, Homo sapiens
  misc_RNA (1)...(19): siRNA sense strand
cagaaaggaaucauuggau

SEQ ID NO: 225983 - RNA, 19 nt, Homo sapiens
  misc_RNA (1)...(19): siRNA sense strand
gugguuaucuggguauucu

SEQ ID NO: 225984 - RNA, 19 nt, Homo sapiens
  misc_RNA (1)...(19): siRNA sense strand
caagcugaccguauacaca

SEQ ID NO: 225985 - RNA, 19 nt, Homo sapiens
  misc_RNA (1)...(19): siRNA sense strand
caaccuugauagauguuac

SEQ ID NO: 225986 - RNA, 19 nt, Homo sapiens
  misc_RNA (1)...(19): siRNA sense strand
caccauaaaucuugacuua

SEQ ID NO: 225987 - RNA, 19 nt, Homo sapiens
  misc_RNA (1)...(19): siRNA sense strand
ucaacaagcugaccguaua

SEQ ID NO: 225988 - RNA, 19 nt, Homo sapiens
  misc_RNA (1)...(19): siRNA sense strand
ggucauaacugagcaacua

SEQ ID NO: 225989 - RNA, 19 nt, Homo sapiens
  misc_RNA (1)...(19): siRNA sense strand
uauaugaacucgaugcuaa

SEQ ID NO: 225990 - RNA, 19 nt, Homo sapiens
  misc_RNA (1)...(19): siRNA sense strand
gguggaacauaaauaauga

SEQ ID NO: 225991 - RNA, 19 nt, Homo sapiens
  misc_RNA (1)...(19): siRNA sense strand
ugaagaagccaagaauuua

SEQ ID NO: 225992 - RNA, 19 nt, Homo sapiens
  misc_RNA (1)...(19): siRNA sense strand
gaaaauagcacaaguuaug

SEQ ID NO: 225993 - RNA, 19 nt, Homo sapiens
  misc_RNA (1)...(19): siRNA sense strand
gaacguuucaguauaaaug

SEQ ID NO: 225994 - RNA, 19 nt, Homo sapiens
  misc_RNA (1)...(19): siRNA sense strand
uagcacaaguuaugaagaa

SEQ ID NO: 225995 - RNA, 19 nt, Homo sapiens
  misc_RNA (1)...(19): siRNA sense strand
ggacugcccugacccuugu

SEQ ID NO: 225996 - RNA, 19 nt, Homo sapiens
  misc_RNA (1)...(19): siRNA sense strand
uaccaaaggucaauucgaa

SEQ ID NO: 225997 - RNA, 19 nt, Homo sapiens
  misc_RNA (1)...(19): siRNA sense strand
gaagaagccaagaauuuau

SEQ ID NO: 225998 - RNA, 19 nt, Homo sapiens
  misc_RNA (1)...(19): siRNA sense strand
guacagaggugcaguucca

SEQ ID NO: 225999 - RNA, 19 nt, Homo sapiens
  misc_RNA (1)...(19): siRNA sense strand
gaggugcaguuccauggua

SEQ ID NO: 226000 - RNA, 19 nt, Homo sapiens
  misc_RNA (1)...(19): siRNA sense strand
ggacagaggacugcagaaa

SEQ ID NO: 226001 - RNA, 19 nt, Homo sapiens
  misc_RNA (1)...(19): siRNA sense strand
caacaaaacugucuucaag

SEQ ID NO: 226002 - RNA, 19 nt, Homo sapiens
  misc_RNA (1)...(19): siRNA sense strand
ggauguauaugaacucgau

SEQ ID NO: 226003 - RNA, 19 nt, Homo sapiens
  misc_RNA (1)...(19): siRNA sense strand
aaacauggauuuuggagua

SEQ ID NO: 226004 - RNA, 19 nt, Homo sapiens
  misc_RNA (1)...(19): siRNA sense strand
gaaagaugccauguggaua

SEQ ID NO: 226005 - RNA, 19 nt, Homo sapiens
  misc_RNA (1)...(19): siRNA sense strand
gaaagaaagaugccaugug

SEQ ID NO: 226006 - RNA, 19 nt, Homo sapiens
  misc_RNA (1)...(19): siRNA sense strand
gcuaaagguuauagugaau

SEQ ID NO: 226007 - RNA, 19 nt, Homo sapiens
  misc_RNA (1)...(19): siRNA sense strand
cuugauagauguuaccaaa

SEQ ID NO: 226008 - RNA, 19 nt, Homo sapiens
  misc_RNA (1)...(19): siRNA sense strand
ggauaggguuccucacuag

SEQ ID NO: 226009 - RNA, 19 nt, Homo sapiens
  misc_RNA (1)...(19): siRNA sense strand
gaaaggaaucauuggaugu

SEQ ID NO: 226010 - RNA, 19 nt, Homo sapiens
  misc_RNA (1)...(19): siRNA sense strand
ggaaucauuggauguauau

SEQ ID NO: 226011 - RNA, 19 nt, Homo sapiens
  misc_RNA (1)...(19): siRNA sense strand
gguaugugguacaaacaaa

SEQ ID NO: 226012 - RNA, 19 nt, Homo sapiens
  misc_RNA (1)...(19): siRNA sense strand
ugacuuaccacccuacaaa

SEQ ID NO: 226013 - RNA, 19 nt, Homo sapiens
  misc_RNA (1)...(19): siRNA sense strand
cagaacgccugcaaagaug

SEQ ID NO: 226014 - RNA, 19 nt, Homo sapiens
  misc_RNA (1)...(19): siRNA sense strand
ggagagauuauuucauuca

SEQ ID NO: 226015 - RNA, 19 nt, Homo sapiens
  misc_RNA (1)...(19): siRNA sense strand
aauaguagcagaagacaaa

SEQ ID NO: 226016 - RNA, 19 nt, Homo sapiens
  misc_RNA (1)...(19): siRNA sense strand
ccaagaauuuauugaccaa

SEQ ID NO: 226017 - RNA, 19 nt, Homo sapiens
  misc_RNA (1)...(19): siRNA sense strand
ugaccaagaccaagauauu

SEQ ID NO: 226018 - RNA, 19 nt, Homo sapiens
  misc_RNA (1)...(19): siRNA sense strand
uuucuuggguggaacauaa

SEQ ID NO: 226019 - RNA, 19 nt, Homo sapiens
  misc_RNA (1)...(19): siRNA sense strand
aaggucaauucgaaacuua

SEQ ID NO: 226020 - RNA, 19 nt, Homo sapiens
  misc_RNA (1)...(19): siRNA sense strand
gaugguaugugguacaaac

SEQ ID NO: 226021 - RNA, 19 nt, Homo sapiens
  misc_RNA (1)...(19): siRNA sense strand
cauguuaacaggauucaaa

SEQ ID NO: 226022 - RNA, 19 nt, Homo sapiens
  misc_RNA (1)...(19): siRNA sense strand
agacagaaaggaaucauug

SEQ ID NO: 226023 - RNA, 19 nt, Homo sapiens
  misc_RNA (1)...(19): siRNA sense strand
aagaggaaaugaaggguau

SEQ ID NO: 226024 - RNA, 19 nt, Homo sapiens
  misc_RNA (1)...(19): siRNA sense strand
uacacaaccuugauagaug

SEQ ID NO: 226025 - RNA, 19 nt, Homo sapiens
  misc_RNA (1)...(19): siRNA sense strand
gauauaccuuuaggagaga

SEQ ID NO: 226026 - RNA, 19 nt, Homo sapiens
  misc_RNA (1)...(19): siRNA sense strand
ugauagauguuaccaaagg

SEQ ID NO: 226027 - RNA, 19 nt, Homo sapiens
  misc_RNA (1)...(19): siRNA sense strand
acacaaccuugauagaugu

SEQ ID NO: 226028 - RNA, 19 nt, Homo sapiens
  misc_RNA (1)...(19): siRNA sense strand
gaaacaucccuucuuccuu

SEQ ID NO: 226029 - RNA, 19 nt, Homo sapiens
  misc_RNA (1)...(19): siRNA sense strand
caaaagauggcaugaauug

SEQ ID NO: 226030 - RNA, 19 nt, Homo sapiens
  misc_RNA (1)...(19): siRNA sense strand
uggauaggguuccucacua

SEQ ID NO: 226031 - RNA, 19 nt, Homo sapiens
  misc_RNA (1)...(19): siRNA sense strand
ggagaaacauggauuuugg

SEQ ID NO: 226032 - RNA, 19 nt, Homo sapiens
  misc_RNA (1)...(19): siRNA sense strand
gaccaagaccaagauauug

SEQ ID NO: 226033 - RNA, 19 nt, Homo sapiens
  misc_RNA (1)...(19): siRNA sense strand
gcaccagccaagagaauau

SEQ ID NO: 226034 - RNA, 19 nt, Homo sapiens
  misc_RNA (1)...(19): siRNA sense strand
aggaaucauuggauguaua

SEQ ID NO: 226035 - RNA, 19 nt, Homo sapiens
  misc_RNA (1)...(19): siRNA sense strand
auaccugggucauaacuga

SEQ ID NO: 226036 - RNA, 19 nt, Homo sapiens
  misc_RNA (1)...(19): siRNA sense strand
cauuugaaaccauguauga

SEQ ID NO: 226037 - RNA, 19 nt, Homo sapiens
  misc_RNA (1)...(19): siRNA sense strand
aaagauggcaugaauugau

SEQ ID NO: 226038 - RNA, 19 nt, Homo sapiens
  misc_RNA (1)...(19): siRNA sense strand
aaaggaaucauuggaugua

SEQ ID NO: 226039 - RNA, 19 nt, Homo sapiens
  misc_RNA (1)...(19): siRNA sense strand
augaagaagccaagaauuu

SEQ ID NO: 226040 - RNA, 19 nt, Homo sapiens
  misc_RNA (1)...(19): siRNA sense strand
gaaggguauugccgcuguu

SEQ ID NO: 226041 - RNA, 19 nt, Homo sapiens
  misc_RNA (1)...(19): siRNA sense strand
ggguggaacauaaauaaug

SEQ ID NO: 226042 - RNA, 19 nt, Homo sapiens
  misc_RNA (1)...(19): siRNA sense strand
ccauaaaucuugacuuacc

SEQ ID NO: 226043 - RNA, 19 nt, Homo sapiens
  misc_RNA (1)...(19): siRNA sense strand
gaguauuucuuggguggaa

SEQ ID NO: 226044 - RNA, 19 nt, Homo sapiens
  misc_RNA (1)...(19): siRNA sense strand
gguacaccauaaaucuuga

SEQ ID NO: 226045 - RNA, 19 nt, Homo sapiens
  misc_RNA (1)...(19): siRNA sense strand
caacuuuccuggcccuuuu

SEQ ID NO: 226046 - RNA, 19 nt, Homo sapiens
  misc_RNA (1)...(19): siRNA sense strand
caaauuaugaccguuggaa

SEQ ID NO: 226047 - RNA, 19 nt, Homo sapiens
  misc_RNA (1)...(19): siRNA sense strand
aagauggcaugaauugaug

SEQ ID NO: 226048 - RNA, 19 nt, Homo sapiens
  misc_RNA (1)...(19): siRNA sense strand
ggaagguugugugauuaca

SEQ ID NO: 226049 - RNA, 19 nt, Homo sapiens
  misc_RNA (1)...(19): siRNA sense strand
gaagccaagaauuuauuga

SEQ ID NO: 226050 - RNA, 19 nt, Homo sapiens
  misc_RNA (1)...(19): siRNA sense strand
ggaaagaaagaugccaugu

SEQ ID NO: 226051 - RNA, 19 nt, Homo sapiens
  misc_RNA (1)...(19): siRNA sense strand
uauagugaauucucugaag

SEQ ID NO: 226052 - RNA, 19 nt, Homo sapiens
  misc_RNA (1)...(19): siRNA sense strand
uaagcaggguagaugguau

SEQ ID NO: 226053 - RNA, 19 nt, Homo sapiens
  misc_RNA (1)...(19): siRNA sense strand
uuaugcaggugguggauga

SEQ ID NO: 226054 - RNA, 19 nt, Homo sapiens
  misc_RNA (1)...(19): siRNA sense strand
aaaggucaauucgaaacuu

SEQ ID NO: 226055 - RNA, 19 nt, Homo sapiens
  misc_RNA (1)...(19): siRNA sense strand
uaugauguccugucaacaa

SEQ ID NO: 226056 - RNA, 19 nt, Homo sapiens
  misc_RNA (1)...(19): siRNA sense strand
cauguaugauguccuguca

SEQ ID NO: 226057 - RNA, 19 nt, Homo sapiens
  misc_RNA (1)...(19): siRNA sense strand
cugcaaagaugugucugaa

SEQ ID NO: 226058 - RNA, 19 nt, Homo sapiens
  misc_RNA (1)...(19): siRNA sense strand
ggguagaugguauguggua

SEQ ID NO: 226059 - RNA, 19 nt, Homo sapiens
  misc_RNA (1)...(19): siRNA sense strand
uggccuacuuggcaacuuu

SEQ ID NO: 226060 - RNA, 19 nt, Homo sapiens
  misc_RNA (1)...(19): siRNA sense strand
gauagauguuaccaaaggu

SEQ ID NO: 226061 - RNA, 19 nt, Homo sapiens
  misc_RNA (1)...(19): siRNA sense strand
caaaaccuguccucaacaa

SEQ ID NO: 226062 - RNA, 19 nt, Homo sapiens
  misc_RNA (1)...(19): siRNA sense strand
gaauaucucauuugaaacc

SEQ ID NO: 226063 - RNA, 19 nt, Homo sapiens
  misc_RNA (1)...(19): siRNA sense strand
auagugaauucucugaaga

SEQ ID NO: 226064 - RNA, 19 nt, Homo sapiens
  misc_RNA (1)...(19): siRNA sense strand
gagacagaaaggaaucauu

SEQ ID NO: 226065 - RNA, 19 nt, Homo sapiens
  misc_RNA (1)...(19): siRNA sense strand
agaaagaugccauguggau

SEQ ID NO: 226066 - RNA, 19 nt, Homo sapiens
  misc_RNA (1)...(19): siRNA sense strand
gaggaaaugaaggguauug

SEQ ID NO: 226067 - RNA, 19 nt, Homo sapiens
  misc_RNA (1)...(19): siRNA sense strand
aaaauugccuggccuacuu

SEQ ID NO: 226068 - RNA, 19 nt, Homo sapiens
  misc_RNA (1)...(19): siRNA sense strand
cguauacacaaccuugaua

SEQ ID NO: 226069 - RNA, 19 nt, Homo sapiens
  misc_RNA (1)...(19): siRNA sense strand
caacaaaaccuguccucaa

SEQ ID NO: 226070 - RNA, 19 nt, Homo sapiens
  misc_RNA (1)...(19): siRNA sense strand
uugaaaccauguaugaugu

SEQ ID NO: 226071 - RNA, 19 nt, Homo sapiens
  misc_RNA (1)...(19): siRNA sense strand
aaagaugccauguggauag

SEQ ID NO: 226072 - RNA, 19 nt, Homo sapiens
  misc_RNA (1)...(19): siRNA sense strand
aagcuuugcuggcuaugug

SEQ ID NO: 226073 - RNA, 19 nt, Homo sapiens
  misc_RNA (1)...(19): siRNA sense strand
ugcuaaagguuauagugaa

SEQ ID NO: 226074 - RNA, 19 nt, Homo sapiens
  misc_RNA (1)...(19): siRNA sense strand
aaaucaaccuauccuccuu

SEQ ID NO: 226075 - RNA, 19 nt, Homo sapiens
  misc_RNA (1)...(19): siRNA sense strand
uuggaaacaucccuucuuc

SEQ ID NO: 226076 - RNA, 19 nt, Homo sapiens
  misc_RNA (1)...(19): siRNA sense strand
ggggaagguugugugauua

SEQ ID NO: 226077 - RNA, 19 nt, Homo sapiens
  misc_RNA (1)...(19): siRNA sense strand
gaaccgcaccagccaagag

SEQ ID NO: 226078 - RNA, 19 nt, Homo sapiens
  misc_RNA (1)...(19): siRNA sense strand
guauugccgcuguuacuga

SEQ ID NO: 226079 - RNA, 19 nt, Homo sapiens
  misc_RNA (1)...(19): siRNA sense strand
gcaacuuuccuggcccuuu

SEQ ID NO: 226080 - RNA, 19 nt, Homo sapiens
  misc_RNA (1)...(19): siRNA sense strand
uacaaaagauggcaugaau

SEQ ID NO: 226081 - RNA, 19 nt, Homo sapiens
  misc_RNA (1)...(19): siRNA sense strand
uagaugguaugugguacaa

SEQ ID NO: 226082 - RNA, 19 nt, Homo sapiens
  misc_RNA (1)...(19): siRNA sense strand
cagaaaggaaucauuggau

SEQ ID NO: 226083 - RNA, 19 nt, Homo sapiens
  misc_RNA (1)...(19): siRNA sense strand
gugguuaucuggguauucu

SEQ ID NO: 226084 - RNA, 19 nt, Homo sapiens
  misc_RNA (1)...(19): siRNA sense strand
caagcugaccguauacaca

SEQ ID NO: 226085 - RNA, 19 nt, Homo sapiens
  misc_RNA (1)...(19): siRNA sense strand
caaccuugauagauguuac

SEQ ID NO: 226086 - RNA, 19 nt, Homo sapiens
  misc_RNA (1)...(19): siRNA sense strand
ggaaagcucugccaagaug

SEQ ID NO: 226087 - RNA, 19 nt, Homo sapiens
  misc_RNA (1)...(19): siRNA sense strand
ccaacaagaagaugaguaa

SEQ ID NO: 226088 - RNA, 19 nt, Homo sapiens
  misc_RNA (1)...(19): siRNA sense strand
caacuacuccaacgacuug

SEQ ID NO: 226089 - RNA, 19 nt, Homo sapiens
  misc_RNA (1)...(19): siRNA sense strand
gcccgcagccuguuucuuu

SEQ ID NO: 226090 - RNA, 19 nt, Homo sapiens
  misc_RNA (1)...(19): siRNA sense strand
gaacugaugcgcugcaaac

SEQ ID NO: 226091 - RNA, 19 nt, Homo sapiens
  misc_RNA (1)...(19): siRNA sense strand
gcaggagcuucucgacuuc

SEQ ID NO: 226092 - RNA, 19 nt, Homo sapiens
  misc_RNA (1)...(19): siRNA sense strand
gcucgccggucucauccua

SEQ ID NO: 226093 - RNA, 19 nt, Homo sapiens
  misc_RNA (1)...(19): siRNA sense strand
acaagaagaugaguaaggu

SEQ ID NO: 226094 - RNA, 19 nt, Homo sapiens
  misc_RNA (1)...(19): siRNA sense strand
caagucagcgcccaagcaa

SEQ ID NO: 226095 - RNA, 19 nt, Homo sapiens
  misc_RNA (1)...(19): siRNA sense strand
agcaggagcuucucgacuu

SEQ ID NO: 226096 - RNA, 19 nt, Homo sapiens
  misc_RNA (1)...(19): siRNA sense strand
ccaacgacuugaacuccau

SEQ ID NO: 226097 - RNA, 19 nt, Homo sapiens
  misc_RNA (1)...(19): siRNA sense strand
gcucaacuucagcggcuuu

SEQ ID NO: 226098 - RNA, 19 nt, Homo sapiens
  misc_RNA (1)...(19): siRNA sense strand
gccaacaagaagaugagua

SEQ ID NO: 226099 - RNA, 19 nt, Homo sapiens
  misc_RNA (1)...(19): siRNA sense strand
ccaacuacuccaacgacuu

SEQ ID NO: 226100 - RNA, 19 nt, Homo sapiens
  misc_RNA (1)...(19): siRNA sense strand
gagcgcaaccgcgucaagu

SEQ ID NO: 226101 - RNA, 19 nt, Homo sapiens
  misc_RNA (1)...(19): siRNA sense strand
gguuugaucuuguugacua

SEQ ID NO: 226102 - RNA, 19 nt, Homo sapiens
  misc_RNA (1)...(19): siRNA sense strand
gaggaaaggcggacucuca

SEQ ID NO: 226103 - RNA, 19 nt, Homo sapiens
  misc_RNA (1)...(19): siRNA sense strand
ugauguggaugaugccaaa

SEQ ID NO: 226104 - RNA, 19 nt, Homo sapiens
  misc_RNA (1)...(19): siRNA sense strand
acacaagaaugggaggaaa

SEQ ID NO: 226105 - RNA, 19 nt, Homo sapiens
  misc_RNA (1)...(19): siRNA sense strand
aaacuaggaaucuaugaug

SEQ ID NO: 226106 - RNA, 19 nt, Homo sapiens
  misc_RNA (1)...(19): siRNA sense strand
cucaggaacuucauucuuc

SEQ ID NO: 226107 - RNA, 19 nt, Homo sapiens
  misc_RNA (1)...(19): siRNA sense strand
gcauggaggacacaagaau

SEQ ID NO: 226108 - RNA, 19 nt, Homo sapiens
  misc_RNA (1)...(19): siRNA sense strand
ucaggaacuucauucuuca

SEQ ID NO: 226109 - RNA, 19 nt, Homo sapiens
  misc_RNA (1)...(19): siRNA sense strand
gguuuauggugauugcauu

SEQ ID NO: 226110 - RNA, 19 nt, Homo sapiens
  misc_RNA (1)...(19): siRNA sense strand
ggaugaugccaaaguuuua

SEQ ID NO: 226111 - RNA, 19 nt, Homo sapiens
  misc_RNA (1)...(19): siRNA sense strand
uguggaugaugccaaaguu

SEQ ID NO: 226112 - RNA, 19 nt, Homo sapiens
  misc_RNA (1)...(19): siRNA sense strand
ugacuaugaggaaguucua

SEQ ID NO: 226113 - RNA, 19 nt, Homo sapiens
  misc_RNA (1)...(19): siRNA sense strand
guagcugucguuugguuug

SEQ ID NO: 226114 - RNA, 19 nt, Homo sapiens
  misc_RNA (1)...(19): siRNA sense strand
ggcggacucucaggaacuu

SEQ ID NO: 226115 - RNA, 19 nt, Homo sapiens
  misc_RNA (1)...(19): siRNA sense strand
aagcauggaggacacaaga

SEQ ID NO: 226116 - RNA, 19 nt, Homo sapiens
  misc_RNA (1)...(19): siRNA sense strand
uagcugucguuugguuuga

SEQ ID NO: 226117 - RNA, 19 nt, Homo sapiens
  misc_RNA (1)...(19): siRNA sense strand
aggaaucuaugaugcugau

SEQ ID NO: 226118 - RNA, 19 nt, Homo sapiens
  misc_RNA (1)...(19): siRNA sense strand
guggaugaugccaaaguuu

SEQ ID NO: 226119 - RNA, 19 nt, Homo sapiens
  misc_RNA (1)...(19): siRNA sense strand
uugaucuuguugacuauga

SEQ ID NO: 226120 - RNA, 19 nt, Homo sapiens
  misc_RNA (1)...(19): siRNA sense strand
cuaugaugcugauggugau

SEQ ID NO: 226121 - RNA, 19 nt, Homo sapiens
  misc_RNA (1)...(19): siRNA sense strand
aaaggcggacucucaggaa

SEQ ID NO: 226122 - RNA, 19 nt, Homo sapiens
  misc_RNA (1)...(19): siRNA sense strand
gaaaacuaggaaucuauga

SEQ ID NO: 226123 - RNA, 19 nt, Homo sapiens
  misc_RNA (1)...(19): siRNA sense strand
ggaaaacuaggaaucuaug

SEQ ID NO: 226124 - RNA, 19 nt, Homo sapiens
  misc_RNA (1)...(19): siRNA sense strand
gguuugaucuuguugacua

SEQ ID NO: 226125 - RNA, 19 nt, Homo sapiens
  misc_RNA (1)...(19): siRNA sense strand
gaggaaaggcggacucuca

SEQ ID NO: 226126 - RNA, 19 nt, Homo sapiens
  misc_RNA (1)...(19): siRNA sense strand
ugauguggaugaugccaaa

SEQ ID NO: 226127 - RNA, 19 nt, Homo sapiens
  misc_RNA (1)...(19): siRNA sense strand
acacaagaaugggaggaaa

SEQ ID NO: 226128 - RNA, 19 nt, Homo sapiens
  misc_RNA (1)...(19): siRNA sense strand
aaacuaggaaucuaugaug

SEQ ID NO: 226129 - RNA, 19 nt, Homo sapiens
  misc_RNA (1)...(19): siRNA sense strand
cucaggaacuucauucuuc

SEQ ID NO: 226130 - RNA, 19 nt, Homo sapiens
  misc_RNA (1)...(19): siRNA sense strand
gcauggaggacacaagaau

SEQ ID NO: 226131 - RNA, 19 nt, Homo sapiens
  misc_RNA (1)...(19): siRNA sense strand
ucaggaacuucauucuuca

SEQ ID NO: 226132 - RNA, 19 nt, Homo sapiens
  misc_RNA (1)...(19): siRNA sense strand
gguuuauggugauugcauu

SEQ ID NO: 226133 - RNA, 19 nt, Homo sapiens
  misc_RNA (1)...(19): siRNA sense strand
ggaugaugccaaaguuuua

SEQ ID NO: 226134 - RNA, 19 nt, Homo sapiens
  misc_RNA (1)...(19): siRNA sense strand
uguggaugaugccaaaguu

SEQ ID NO: 226135 - RNA, 19 nt, Homo sapiens
  misc_RNA (1)...(19): siRNA sense strand
ugacuaugaggaaguucua

SEQ ID NO: 226136 - RNA, 19 nt, Homo sapiens
  misc_RNA (1)...(19): siRNA sense strand
guagcugucguuugguuug

SEQ ID NO: 226137 - RNA, 19 nt, Homo sapiens
  misc_RNA (1)...(19): siRNA sense strand
ggcggacucucaggaacuu

SEQ ID NO: 226138 - RNA, 19 nt, Homo sapiens
  misc_RNA (1)...(19): siRNA sense strand
aagcauggaggacacaaga

SEQ ID NO: 226139 - RNA, 19 nt, Homo sapiens
  misc_RNA (1)...(19): siRNA sense strand
uagcugucguuugguuuga

SEQ ID NO: 226140 - RNA, 19 nt, Homo sapiens
  misc_RNA (1)...(19): siRNA sense strand
aggaaucuaugaugcugau

SEQ ID NO: 226141 - RNA, 19 nt, Homo sapiens
  misc_RNA (1)...(19): siRNA sense strand
guggaugaugccaaaguuu

SEQ ID NO: 226142 - RNA, 19 nt, Homo sapiens
  misc_RNA (1)...(19): siRNA sense strand
uugaucuuguugacuauga

SEQ ID NO: 226143 - RNA, 19 nt, Homo sapiens
  misc_RNA (1)...(19): siRNA sense strand
cuaugaugcugauggugau

SEQ ID NO: 226144 - RNA, 19 nt, Homo sapiens
  misc_RNA (1)...(19): siRNA sense strand
aaaggcggacucucaggaa

SEQ ID NO: 226145 - RNA, 19 nt, Homo sapiens
  misc_RNA (1)...(19): siRNA sense strand
gaaaacuaggaaucuauga

SEQ ID NO: 226146 - RNA, 19 nt, Homo sapiens
  misc_RNA (1)...(19): siRNA sense strand
ggaaaacuaggaaucuaug

SEQ ID NO: 226147 - RNA, 19 nt, Homo sapiens
  misc_RNA (1)...(19): siRNA sense strand
gguuugaucuuguugacua

SEQ ID NO: 226148 - RNA, 19 nt, Homo sapiens
  misc_RNA (1)...(19): siRNA sense strand
gaggaaaggcggacucuca

SEQ ID NO: 226149 - RNA, 19 nt, Homo sapiens
  misc_RNA (1)...(19): siRNA sense strand
ugauguggaugaugccaaa

SEQ ID NO: 226150 - RNA, 19 nt, Homo sapiens
  misc_RNA (1)...(19): siRNA sense strand
acacaagaaugggaggaaa

SEQ ID NO: 226151 - RNA, 19 nt, Homo sapiens
  misc_RNA (1)...(19): siRNA sense strand
aaacuaggaaucuaugaug

SEQ ID NO: 226152 - RNA, 19 nt, Homo sapiens
  misc_RNA (1)...(19): siRNA sense strand
cucaggaacuucauucuuc

SEQ ID NO: 226153 - RNA, 19 nt, Homo sapiens
  misc_RNA (1)...(19): siRNA sense strand
gcauggaggacacaagaau

SEQ ID NO: 226154 - RNA, 19 nt, Homo sapiens
  misc_RNA (1)...(19): siRNA sense strand
ucaggaacuucauucuuca

SEQ ID NO: 226155 - RNA, 19 nt, Homo sapiens
  misc_RNA (1)...(19): siRNA sense strand
gguuuauggugauugcauu

SEQ ID NO: 226156 - RNA, 19 nt, Homo sapiens
  misc_RNA (1)...(19): siRNA sense strand
ggaugaugccaaaguuuua

SEQ ID NO: 226157 - RNA, 19 nt, Homo sapiens
  misc_RNA (1)...(19): siRNA sense strand
uguggaugaugccaaaguu

SEQ ID NO: 226158 - RNA, 19 nt, Homo sapiens
  misc_RNA (1)...(19): siRNA sense strand
ugacuaugaggaaguucua

SEQ ID NO: 226159 - RNA, 19 nt, Homo sapiens
  misc_RNA (1)...(19): siRNA sense strand
guagcugucguuugguuug

SEQ ID NO: 226160 - RNA, 19 nt, Homo sapiens
  misc_RNA (1)...(19): siRNA sense strand
ggcggacucucaggaacuu

SEQ ID NO: 226161 - RNA, 19 nt, Homo sapiens
  misc_RNA (1)...(19): siRNA sense strand
aagcauggaggacacaaga

SEQ ID NO: 226162 - RNA, 19 nt, Homo sapiens
  misc_RNA (1)...(19): siRNA sense strand
uagcugucguuugguuuga

SEQ ID NO: 226163 - RNA, 19 nt, Homo sapiens
  misc_RNA (1)...(19): siRNA sense strand
aggaaucuaugaugcugau

SEQ ID NO: 226164 - RNA, 19 nt, Homo sapiens
  misc_RNA (1)...(19): siRNA sense strand
guggaugaugccaaaguuu

SEQ ID NO: 226165 - RNA, 19 nt, Homo sapiens
  misc_RNA (1)...(19): siRNA sense strand
uugaucuuguugacuauga

SEQ ID NO: 226166 - RNA, 19 nt, Homo sapiens
  misc_RNA (1)...(19): siRNA sense strand
cuaugaugcugauggugau

SEQ ID NO: 226167 - RNA, 19 nt, Homo sapiens
  misc_RNA (1)...(19): siRNA sense strand
aaaggcggacucucaggaa

SEQ ID NO: 226168 - RNA, 19 nt, Homo sapiens
  misc_RNA (1)...(19): siRNA sense strand
gaaaacuaggaaucuauga

SEQ ID NO: 226169 - RNA, 19 nt, Homo sapiens
  misc_RNA (1)...(19): siRNA sense strand
ggaaaacuaggaaucuaug

SEQ ID NO: 226170 - RNA, 19 nt, Homo sapiens
  misc_RNA (1)...(19): siRNA sense strand
gguuugaucuuguugacua

SEQ ID NO: 226171 - RNA, 19 nt, Homo sapiens
  misc_RNA (1)...(19): siRNA sense strand
gaggaaaggcggacucuca

SEQ ID NO: 226172 - RNA, 19 nt, Homo sapiens
  misc_RNA (1)...(19): siRNA sense strand
ugauguggaugaugccaaa

SEQ ID NO: 226173 - RNA, 19 nt, Homo sapiens
  misc_RNA (1)...(19): siRNA sense strand
acacaagaaugggaggaaa

SEQ ID NO: 226174 - RNA, 19 nt, Homo sapiens
  misc_RNA (1)...(19): siRNA sense strand
aaacuaggaaucuaugaug

SEQ ID NO: 226175 - RNA, 19 nt, Homo sapiens
  misc_RNA (1)...(19): siRNA sense strand
cucaggaacuucauucuuc

SEQ ID NO: 226176 - RNA, 19 nt, Homo sapiens
  misc_RNA (1)...(19): siRNA sense strand
gcauggaggacacaagaau

SEQ ID NO: 226177 - RNA, 19 nt, Homo sapiens
  misc_RNA (1)...(19): siRNA sense strand
ucaggaacuucauucuuca

SEQ ID NO: 226178 - RNA, 19 nt, Homo sapiens
  misc_RNA (1)...(19): siRNA sense strand
gguuuauggugauugcauu

SEQ ID NO: 226179 - RNA, 19 nt, Homo sapiens
  misc_RNA (1)...(19): siRNA sense strand
ggaugaugccaaaguuuua

SEQ ID NO: 226180 - RNA, 19 nt, Homo sapiens
  misc_RNA (1)...(19): siRNA sense strand
uguggaugaugccaaaguu

SEQ ID NO: 226181 - RNA, 19 nt, Homo sapiens
  misc_RNA (1)...(19): siRNA sense strand
ugacuaugaggaaguucua

SEQ ID NO: 226182 - RNA, 19 nt, Homo sapiens
  misc_RNA (1)...(19): siRNA sense strand
guagcugucguuugguuug

SEQ ID NO: 226183 - RNA, 19 nt, Homo sapiens
  misc_RNA (1)...(19): siRNA sense strand
ggcggacucucaggaacuu

SEQ ID NO: 226184 - RNA, 19 nt, Homo sapiens
  misc_RNA (1)...(19): siRNA sense strand
aagcauggaggacacaaga

SEQ ID NO: 226185 - RNA, 19 nt, Homo sapiens
  misc_RNA (1)...(19): siRNA sense strand
uagcugucguuugguuuga

SEQ ID NO: 226186 - RNA, 19 nt, Homo sapiens
  misc_RNA (1)...(19): siRNA sense strand
aggaaucuaugaugcugau

SEQ ID NO: 226187 - RNA, 19 nt, Homo sapiens
  misc_RNA (1)...(19): siRNA sense strand
guggaugaugccaaaguuu

SEQ ID NO: 226188 - RNA, 19 nt, Homo sapiens
  misc_RNA (1)...(19): siRNA sense strand
uugaucuuguugacuauga

SEQ ID NO: 226189 - RNA, 19 nt, Homo sapiens
  misc_RNA (1)...(19): siRNA sense strand
cuaugaugcugauggugau

SEQ ID NO: 226190 - RNA, 19 nt, Homo sapiens
  misc_RNA (1)...(19): siRNA sense strand
aaaggcggacucucaggaa

SEQ ID NO: 226191 - RNA, 19 nt, Homo sapiens
  misc_RNA (1)...(19): siRNA sense strand
gaaaacuaggaaucuauga

SEQ ID NO: 226192 - RNA, 19 nt, Homo sapiens
  misc_RNA (1)...(19): siRNA sense strand
ggaaaacuaggaaucuaug

SEQ ID NO: 226193 - RNA, 19 nt, Homo sapiens
  misc_RNA (1)...(19): siRNA sense strand
gguuugaucuuguugacua

SEQ ID NO: 226194 - RNA, 19 nt, Homo sapiens
  misc_RNA (1)...(19): siRNA sense strand
gaggaaaggcggacucuca

SEQ ID NO: 226195 - RNA, 19 nt, Homo sapiens
  misc_RNA (1)...(19): siRNA sense strand
ugauguggaugaugccaaa

SEQ ID NO: 226196 - RNA, 19 nt, Homo sapiens
  misc_RNA (1)...(19): siRNA sense strand
acacaagaaugggaggaaa

SEQ ID NO: 226197 - RNA, 19 nt, Homo sapiens
  misc_RNA (1)...(19): siRNA sense strand
aaacuaggaaucuaugaug

SEQ ID NO: 226198 - RNA, 19 nt, Homo sapiens
  misc_RNA (1)...(19): siRNA sense strand
cucaggaacuucauucuuc

SEQ ID NO: 226199 - RNA, 19 nt, Homo sapiens
  misc_RNA (1)...(19): siRNA sense strand
gcauggaggacacaagaau

SEQ ID NO: 226200 - RNA, 19 nt, Homo sapiens
  misc_RNA (1)...(19): siRNA sense strand
ucaggaacuucauucuuca

SEQ ID NO: 226201 - RNA, 19 nt, Homo sapiens
  misc_RNA (1)...(19): siRNA sense strand
gguuuauggugauugcauu

SEQ ID NO: 226202 - RNA, 19 nt, Homo sapiens
  misc_RNA (1)...(19): siRNA sense strand
ggaugaugccaaaguuuua

SEQ ID NO: 226203 - RNA, 19 nt, Homo sapiens
  misc_RNA (1)...(19): siRNA sense strand
uguggaugaugccaaaguu

SEQ ID NO: 226204 - RNA, 19 nt, Homo sapiens
  misc_RNA (1)...(19): siRNA sense strand
ugacuaugaggaaguucua

SEQ ID NO: 226205 - RNA, 19 nt, Homo sapiens
  misc_RNA (1)...(19): siRNA sense strand
guagcugucguuugguuug

SEQ ID NO: 226206 - RNA, 19 nt, Homo sapiens
  misc_RNA (1)...(19): siRNA sense strand
ggcggacucucaggaacuu

SEQ ID NO: 226207 - RNA, 19 nt, Homo sapiens
  misc_RNA (1)...(19): siRNA sense strand
aagcauggaggacacaaga

SEQ ID NO: 226208 - RNA, 19 nt, Homo sapiens
  misc_RNA (1)...(19): siRNA sense strand
uagcugucguuugguuuga

SEQ ID NO: 226209 - RNA, 19 nt, Homo sapiens
  misc_RNA (1)...(19): siRNA sense strand
aggaaucuaugaugcugau

SEQ ID NO: 226210 - RNA, 19 nt, Homo sapiens
  misc_RNA (1)...(19): siRNA sense strand
guggaugaugccaaaguuu

SEQ ID NO: 226211 - RNA, 19 nt, Homo sapiens
  misc_RNA (1)...(19): siRNA sense strand
uugaucuuguugacuauga

SEQ ID NO: 226212 - RNA, 19 nt, Homo sapiens
  misc_RNA (1)...(19): siRNA sense strand
cuaugaugcugauggugau

SEQ ID NO: 226213 - RNA, 19 nt, Homo sapiens
  misc_RNA (1)...(19): siRNA sense strand
aaaggcggacucucaggaa

SEQ ID NO: 226214 - RNA, 19 nt, Homo sapiens
  misc_RNA (1)...(19): siRNA sense strand
gaaaacuaggaaucuauga

SEQ ID NO: 226215 - RNA, 19 nt, Homo sapiens
  misc_RNA (1)...(19): siRNA sense strand
ggaaaacuaggaaucuaug

SEQ ID NO: 226216 - RNA, 19 nt, Homo sapiens
  misc_RNA (1)...(19): siRNA sense strand
ggagucugcuacaccauuu

SEQ ID NO: 226217 - RNA, 19 nt, Homo sapiens
  misc_RNA (1)...(19): siRNA sense strand
cuucagaccuccagaguga

SEQ ID NO: 226218 - RNA, 19 nt, Homo sapiens
  misc_RNA (1)...(19): siRNA sense strand
gauuugggcuuccgcuuug

SEQ ID NO: 226219 - RNA, 19 nt, Homo sapiens
  misc_RNA (1)...(19): siRNA sense strand
ccaagaaccuggucagcau

SEQ ID NO: 226220 - RNA, 19 nt, Homo sapiens
  misc_RNA (1)...(19): siRNA sense strand
gcaauugucauuagcaaca

SEQ ID NO: 226221 - RNA, 19 nt, Homo sapiens
  misc_RNA (1)...(19): siRNA sense strand
gagugaagaugggugacua

SEQ ID NO: 226222 - RNA, 19 nt, Homo sapiens
  misc_RNA (1)...(19): siRNA sense strand
gcaggcuacuccauguuug

SEQ ID NO: 226223 - RNA, 19 nt, Homo sapiens
  misc_RNA (1)...(19): siRNA sense strand
caucauggcaauugucauu

SEQ ID NO: 226224 - RNA, 19 nt, Homo sapiens
  misc_RNA (1)...(19): siRNA sense strand
gcuuugauguggcaugguu

SEQ ID NO: 226225 - RNA, 19 nt, Homo sapiens
  misc_RNA (1)...(19): siRNA sense strand
gugaggcuguggccaucua

SEQ ID NO: 226226 - RNA, 19 nt, Homo sapiens
  misc_RNA (1)...(19): siRNA sense strand
agacuucgcccuucaugug

SEQ ID NO: 226227 - RNA, 19 nt, Homo sapiens
  misc_RNA (1)...(19): siRNA sense strand
ggucaucgucgcaauucuu

SEQ ID NO: 226228 - RNA, 19 nt, Homo sapiens
  misc_RNA (1)...(19): siRNA sense strand
ucauggcaauugucauuag

SEQ ID NO: 226229 - RNA, 19 nt, Homo sapiens
  misc_RNA (1)...(19): siRNA sense strand
gggagucugcuacaccauu

SEQ ID NO: 226230 - RNA, 19 nt, Homo sapiens
  misc_RNA (1)...(19): siRNA sense strand
gcauuggccuagcuaucuc

SEQ ID NO: 226231 - RNA, 19 nt, Homo sapiens
  misc_RNA (1)...(19): siRNA sense strand
gcaucaucauggcaauugu

SEQ ID NO: 226232 - RNA, 19 nt, Homo sapiens
  misc_RNA (1)...(19): siRNA sense strand
ucagcaucaucuucuguga

SEQ ID NO: 226233 - RNA, 19 nt, Homo sapiens
  misc_RNA (1)...(19): siRNA sense strand
gaaccuggucagcaucauc

SEQ ID NO: 226234 - RNA, 19 nt, Homo sapiens
  misc_RNA (1)...(19): siRNA sense strand
ugauuugggcuuccgcuuu

SEQ ID NO: 226235 - RNA, 19 nt, Homo sapiens
  misc_RNA (1)...(19): siRNA sense strand
ggagacuucgcccuucaug

SEQ ID NO: 226236 - RNA, 19 nt, Homo sapiens
  misc_RNA (1)...(19): siRNA sense strand
uggcaauugucauuagcaa

SEQ ID NO: 226237 - RNA, 19 nt, Homo sapiens
  misc_RNA (1)...(19): siRNA sense strand
caucuacggcaucaucaug

SEQ ID NO: 226238 - RNA, 19 nt, Homo sapiens
  misc_RNA (1)...(19): siRNA sense strand
ggcaucaucauggcaauug

SEQ ID NO: 226239 - RNA, 19 nt, Homo sapiens
  misc_RNA (1)...(19): siRNA sense strand
uaccggcuccuccaucauu

SEQ ID NO: 226240 - RNA, 19 nt, Homo sapiens
  misc_RNA (1)...(19): siRNA sense strand
ggcauuggccuagcuaucu

SEQ ID NO: 226241 - RNA, 19 nt, Homo sapiens
  misc_RNA (1)...(19): siRNA sense strand
gggcuuccgcuuugaugug

SEQ ID NO: 226242 - RNA, 19 nt, Homo sapiens
  misc_RNA (1)...(19): siRNA sense strand
ggucagcaucaucuucugu

SEQ ID NO: 226243 - RNA, 19 nt, Homo sapiens
  misc_RNA (1)...(19): siRNA sense strand
ggacagagcgggaguguga

SEQ ID NO: 226244 - RNA, 19 nt, Homo sapiens
  misc_RNA (1)...(19): siRNA sense strand
gaagaagacagauuucauu

SEQ ID NO: 226245 - RNA, 19 nt, Homo sapiens
  misc_RNA (1)...(19): siRNA sense strand
cagcaucucugccgaauau

SEQ ID NO: 226246 - RNA, 19 nt, Homo sapiens
  misc_RNA (1)...(19): siRNA sense strand
guaccgagauuccguguug

SEQ ID NO: 226247 - RNA, 19 nt, Homo sapiens
  misc_RNA (1)...(19): siRNA sense strand
gaagguacaauuccaguuu

SEQ ID NO: 226248 - RNA, 19 nt, Homo sapiens
  misc_RNA (1)...(19): siRNA sense strand
ucagcuacauggagauuua

SEQ ID NO: 226249 - RNA, 19 nt, Homo sapiens
  misc_RNA (1)...(19): siRNA sense strand
caacagagacagacaagga

SEQ ID NO: 226250 - RNA, 19 nt, Homo sapiens
  misc_RNA (1)...(19): siRNA sense strand
ccaaguccuucauugagua

SEQ ID NO: 226251 - RNA, 19 nt, Homo sapiens
  misc_RNA (1)...(19): siRNA sense strand
ggaaacagagaagaucaua

SEQ ID NO: 226252 - RNA, 19 nt, Homo sapiens
  misc_RNA (1)...(19): siRNA sense strand
acauggagauuuacuguga

SEQ ID NO: 226253 - RNA, 19 nt, Homo sapiens
  misc_RNA (1)...(19): siRNA sense strand
gcuaaaaucuccuuugaug

SEQ ID NO: 226254 - RNA, 19 nt, Homo sapiens
  misc_RNA (1)...(19): siRNA sense strand
ccaaugcccugguggguau

SEQ ID NO: 226255 - RNA, 19 nt, Homo sapiens
  misc_RNA (1)...(19): siRNA sense strand
gguccaagcucuccagaag

SEQ ID NO: 226256 - RNA, 19 nt, Homo sapiens
  misc_RNA (1)...(19): siRNA sense strand
ggaagcaccaccaccauug

SEQ ID NO: 226257 - RNA, 19 nt, Homo sapiens
  misc_RNA (1)...(19): siRNA sense strand
cuacgucaauggcaagaaa

SEQ ID NO: 226258 - RNA, 19 nt, Homo sapiens
  misc_RNA (1)...(19): siRNA sense strand
gcagacaccuacgucaaug

SEQ ID NO: 226259 - RNA, 19 nt, Homo sapiens
  misc_RNA (1)...(19): siRNA sense strand
acaugacacucuccgcuua

SEQ ID NO: 226260 - RNA, 19 nt, Homo sapiens
  misc_RNA (1)...(19): siRNA sense strand
gcugucaccuccuacaaug

SEQ ID NO: 226261 - RNA, 19 nt, Homo sapiens
  misc_RNA (1)...(19): siRNA sense strand
caucuugucucucaacauc

SEQ ID NO: 226262 - RNA, 19 nt, Homo sapiens
  misc_RNA (1)...(19): siRNA sense strand
cagaaggccuccuccuaga

SEQ ID NO: 226263 - RNA, 19 nt, Homo sapiens
  misc_RNA (1)...(19): siRNA sense strand
ccgaugaagucaacaacaa

SEQ ID NO: 226264 - RNA, 19 nt, Homo sapiens
  misc_RNA (1)...(19): siRNA sense strand
cgagucagcccgaucguuu

SEQ ID NO: 226265 - RNA, 19 nt, Homo sapiens
  misc_RNA (1)...(19): siRNA sense strand
ucaagacacccaacacauu

SEQ ID NO: 226266 - RNA, 19 nt, Homo sapiens
  misc_RNA (1)...(19): siRNA sense strand
gcaccaccaccauuguuaa

SEQ ID NO: 226267 - RNA, 19 nt, Homo sapiens
  misc_RNA (1)...(19): siRNA sense strand
ccaagugcaucauucagau

SEQ ID NO: 226268 - RNA, 19 nt, Homo sapiens
  misc_RNA (1)...(19): siRNA sense strand
ucacugacaugaccaaugc

SEQ ID NO: 226269 - RNA, 19 nt, Homo sapiens
  misc_RNA (1)...(19): siRNA sense strand
gcgaagcuguggugaccuu

SEQ ID NO: 226270 - RNA, 19 nt, Homo sapiens
  misc_RNA (1)...(19): siRNA sense strand
gaaggaaacagagaagauc

SEQ ID NO: 226271 - RNA, 19 nt, Homo sapiens
  misc_RNA (1)...(19): siRNA sense strand
caagacacccaacacauuc

SEQ ID NO: 226272 - RNA, 19 nt, Homo sapiens
  misc_RNA (1)...(19): siRNA sense strand
cccaacaucuugucucuca

SEQ ID NO: 226273 - RNA, 19 nt, Homo sapiens
  misc_RNA (1)...(19): siRNA sense strand
ccacagagccccugaagaa

SEQ ID NO: 226274 - RNA, 19 nt, Homo sapiens
  misc_RNA (1)...(19): siRNA sense strand
gaacgaggacccgcugaug

SEQ ID NO: 226275 - RNA, 19 nt, Homo sapiens
  misc_RNA (1)...(19): siRNA sense strand
ggcaaguccuacaccauga

SEQ ID NO: 226276 - RNA, 19 nt, Homo sapiens
  misc_RNA (1)...(19): siRNA sense strand
ggagaagacuaggcacuac

SEQ ID NO: 226277 - RNA, 19 nt, Homo sapiens
  misc_RNA (1)...(19): siRNA sense strand
cgaauaugccgacaucuuc

SEQ ID NO: 226278 - RNA, 19 nt, Homo sapiens
  misc_RNA (1)...(19): siRNA sense strand
gcaacgccaucuuccucaa

SEQ ID NO: 226279 - RNA, 19 nt, Homo sapiens
  misc_RNA (1)...(19): siRNA sense strand
cugagugccugcucuacua

SEQ ID NO: 226280 - RNA, 19 nt, Homo sapiens
  misc_RNA (1)...(19): siRNA sense strand
gcaggacauuguucugagu

SEQ ID NO: 226281 - RNA, 19 nt, Homo sapiens
  misc_RNA (1)...(19): siRNA sense strand
ccacuucccucgggucaug

SEQ ID NO: 226282 - RNA, 19 nt, Homo sapiens
  misc_RNA (1)...(19): siRNA sense strand
gggccaacaucaacaaguc

SEQ ID NO: 226283 - RNA, 19 nt, Homo sapiens
  misc_RNA (1)...(19): siRNA sense strand
cgaggaggccauugaaaga

SEQ ID NO: 226284 - RNA, 19 nt, Homo sapiens
  misc_RNA (1)...(19): siRNA sense strand
gauacaacgugugcaucuu

SEQ ID NO: 226285 - RNA, 19 nt, Homo sapiens
  misc_RNA (1)...(19): siRNA sense strand
ccgcuuauaucgagaugga

SEQ ID NO: 226286 - RNA, 19 nt, Homo sapiens
  misc_RNA (1)...(19): siRNA sense strand
ucaggaaaccgcaucauca

SEQ ID NO: 226287 - RNA, 19 nt, Homo sapiens
  misc_RNA (1)...(19): siRNA sense strand
gcagcgaggaggccauuga

SEQ ID NO: 226288 - RNA, 19 nt, Homo sapiens
  misc_RNA (1)...(19): siRNA sense strand
cugcaaugcugucaucaau

SEQ ID NO: 226289 - RNA, 19 nt, Homo sapiens
  misc_RNA (1)...(19): siRNA sense strand
cuagacagcucugagaaag

SEQ ID NO: 226290 - RNA, 19 nt, Homo sapiens
  misc_RNA (1)...(19): siRNA sense strand
gggaaaaccugggcgguaa

SEQ ID NO: 226291 - RNA, 19 nt, Homo sapiens
  misc_RNA (1)...(19): siRNA sense strand
ugaccaaguccuucauuga

SEQ ID NO: 226292 - RNA, 19 nt, Homo sapiens
  misc_RNA (1)...(19): siRNA sense strand
cugcagacaucaacuacga

SEQ ID NO: 226293 - RNA, 19 nt, Homo sapiens
  misc_RNA (1)...(19): siRNA sense strand
gcgacaaggacaugcauga

SEQ ID NO: 226294 - RNA, 19 nt, Homo sapiens
  misc_RNA (1)...(19): siRNA sense strand
gugaccaaguccuucauug

SEQ ID NO: 226295 - RNA, 19 nt, Homo sapiens
  misc_RNA (1)...(19): siRNA sense strand
gaaggccuccuccuagaca

SEQ ID NO: 226296 - RNA, 19 nt, Homo sapiens
  misc_RNA (1)...(19): siRNA sense strand
acaacucucuccugcugaa

SEQ ID NO: 226297 - RNA, 19 nt, Homo sapiens
  misc_RNA (1)...(19): siRNA sense strand
uccaagcucuccagaagga

SEQ ID NO: 226298 - RNA, 19 nt, Homo sapiens
  misc_RNA (1)...(19): siRNA sense strand
ccacgagcgcaucuuguuu

SEQ ID NO: 226299 - RNA, 19 nt, Homo sapiens
  misc_RNA (1)...(19): siRNA sense strand
caugagacaggcagccaua

SEQ ID NO: 226300 - RNA, 19 nt, Homo sapiens
  misc_RNA (1)...(19): siRNA sense strand
ccaccaagcucagcacacu

SEQ ID NO: 226301 - RNA, 19 nt, Homo sapiens
  misc_RNA (1)...(19): siRNA sense strand
caccugaggacaucaacua

SEQ ID NO: 226302 - RNA, 19 nt, Homo sapiens
  misc_RNA (1)...(19): siRNA sense strand
gcgaggaggccauugaaag

SEQ ID NO: 226303 - RNA, 19 nt, Homo sapiens
  misc_RNA (1)...(19): siRNA sense strand
gaccucuucucucggauca

SEQ ID NO: 226304 - RNA, 19 nt, Homo sapiens
  misc_RNA (1)...(19): siRNA sense strand
ggucuucuauucccgugau

SEQ ID NO: 226305 - RNA, 19 nt, Homo sapiens
  misc_RNA (1)...(19): siRNA sense strand
ggauuacggugacacuacu

SEQ ID NO: 226306 - RNA, 19 nt, Homo sapiens
  misc_RNA (1)...(19): siRNA sense strand
ccacggagaaggugagcaa

SEQ ID NO: 226307 - RNA, 19 nt, Homo sapiens
  misc_RNA (1)...(19): siRNA sense strand
gcccgaucguuuccaagaa

SEQ ID NO: 226308 - RNA, 19 nt, Homo sapiens
  misc_RNA (1)...(19): siRNA sense strand
gaagcaccaccaccauugu

SEQ ID NO: 226309 - RNA, 19 nt, Homo sapiens
  misc_RNA (1)...(19): siRNA sense strand
aggaggagcccgaggauga

SEQ ID NO: 226310 - RNA, 19 nt, Homo sapiens
  misc_RNA (1)...(19): siRNA sense strand
gaagcagggcaucgacaug

SEQ ID NO: 226311 - RNA, 19 nt, Homo sapiens
  misc_RNA (1)...(19): siRNA sense strand
ggaggagcacugcgucuuc

SEQ ID NO: 226312 - RNA, 19 nt, Homo sapiens
  misc_RNA (1)...(19): siRNA sense strand
uccgcgagcugaaggauga

SEQ ID NO: 226313 - RNA, 19 nt, Homo sapiens
  misc_RNA (1)...(19): siRNA sense strand
ggacccaacaagaacaaga

SEQ ID NO: 226314 - RNA, 19 nt, Homo sapiens
  misc_RNA (1)...(19): siRNA sense strand
gaaacagagaagaucauag

SEQ ID NO: 226315 - RNA, 19 nt, Homo sapiens
  misc_RNA (1)...(19): siRNA sense strand
gaccaaguccuucauugag

SEQ ID NO: 226316 - RNA, 19 nt, Homo sapiens
  misc_RNA (1)...(19): siRNA sense strand
caguggaggugaccaaguc

SEQ ID NO: 226317 - RNA, 19 nt, Homo sapiens
  misc_RNA (1)...(19): siRNA sense strand
gacccaacaagaacaagaa

SEQ ID NO: 226318 - RNA, 19 nt, Homo sapiens
  misc_RNA (1)...(19): siRNA sense strand
gcucaagacacccaacaca

SEQ ID NO: 226319 - RNA, 19 nt, Homo sapiens
  misc_RNA (1)...(19): siRNA sense strand
ggagugacagucucauucu

SEQ ID NO: 226320 - RNA, 19 nt, Homo sapiens
  misc_RNA (1)...(19): siRNA sense strand
ggauacaacgugugcaucu

SEQ ID NO: 226321 - RNA, 19 nt, Homo sapiens
  misc_RNA (1)...(19): siRNA sense strand
caagagccagcccauuguu

SEQ ID NO: 226322 - RNA, 19 nt, Homo sapiens
  misc_RNA (1)...(19): siRNA sense strand
cgacaucuucugccaguuc

SEQ ID NO: 226323 - RNA, 19 nt, Homo sapiens
  misc_RNA (1)...(19): siRNA sense strand
gcggagaccccuucuauga

SEQ ID NO: 226324 - RNA, 19 nt, Homo sapiens
  misc_RNA (1)...(19): siRNA sense strand
gggcagacaccuacgucaa

SEQ ID NO: 226325 - RNA, 19 nt, Homo sapiens
  misc_RNA (1)...(19): siRNA sense strand
gggcguauucucucccaaa

SEQ ID NO: 226326 - RNA, 19 nt, Homo sapiens
  misc_RNA (1)...(19): siRNA sense strand
ugaaggaaacagagaagau

SEQ ID NO: 226327 - RNA, 19 nt, Homo sapiens
  misc_RNA (1)...(19): siRNA sense strand
gaccggaccuuuuaccaau

SEQ ID NO: 226328 - RNA, 19 nt, Homo sapiens
  misc_RNA (1)...(19): siRNA sense strand
caagaugaccggaccuuuu

SEQ ID NO: 226329 - RNA, 19 nt, Homo sapiens
  misc_RNA (1)...(19): siRNA sense strand
gacaucuucugccaguuca

SEQ ID NO: 226330 - RNA, 19 nt, Homo sapiens
  misc_RNA (1)...(19): siRNA sense strand
gaugaagucaacaacaaca

SEQ ID NO: 226331 - RNA, 19 nt, Homo sapiens
  misc_RNA (1)...(19): siRNA sense strand
ggaggagcccgaggaugaa

SEQ ID NO: 226332 - RNA, 19 nt, Homo sapiens
  misc_RNA (1)...(19): siRNA sense strand
gcuggaggcucugcagaag

SEQ ID NO: 226333 - RNA, 19 nt, Homo sapiens
  misc_RNA (1)...(19): siRNA sense strand
agcgugagcugcuggagaa

SEQ ID NO: 226334 - RNA, 19 nt, Homo sapiens
  misc_RNA (1)...(19): siRNA sense strand
aaacagagaagaucauagc

SEQ ID NO: 226335 - RNA, 19 nt, Homo sapiens
  misc_RNA (1)...(19): siRNA sense strand
aagguacaauuccaguuug

SEQ ID NO: 226336 - RNA, 19 nt, Homo sapiens
  misc_RNA (1)...(19): siRNA sense strand
gcgagaagggcgaggugaa

SEQ ID NO: 226337 - RNA, 19 nt, Homo sapiens
  misc_RNA (1)...(19): siRNA sense strand
ccgaauaugccgacaucuu

SEQ ID NO: 226338 - RNA, 19 nt, Homo sapiens
  misc_RNA (1)...(19): siRNA sense strand
gagugacagucucauucug

SEQ ID NO: 226339 - RNA, 19 nt, Homo sapiens
  misc_RNA (1)...(19): siRNA sense strand
ucagagaguaaccguguga

SEQ ID NO: 226340 - RNA, 19 nt, Homo sapiens
  misc_RNA (1)...(19): siRNA sense strand
cuucgggccucagagagua

SEQ ID NO: 226341 - RNA, 19 nt, Homo sapiens
  misc_RNA (1)...(19): siRNA sense strand
cuacauggagauuuacugu

SEQ ID NO: 226342 - RNA, 19 nt, Homo sapiens
  misc_RNA (1)...(19): siRNA sense strand
ggccaacggcgauuacauc

SEQ ID NO: 226343 - RNA, 19 nt, Homo sapiens
  misc_RNA (1)...(19): siRNA sense strand
gaagcucucugcaaacuug

SEQ ID NO: 226344 - RNA, 19 nt, Homo sapiens
  misc_RNA (1)...(19): siRNA sense strand
gaaaaucucugaaggaaau

SEQ ID NO: 226345 - RNA, 19 nt, Homo sapiens
  misc_RNA (1)...(19): siRNA sense strand
ggaagagguugaacuaaag

SEQ ID NO: 226346 - RNA, 19 nt, Homo sapiens
  misc_RNA (1)...(19): siRNA sense strand
caaagacaguagauugaaa

SEQ ID NO: 226347 - RNA, 19 nt, Homo sapiens
  misc_RNA (1)...(19): siRNA sense strand
auaaagagcuuacuggaau

SEQ ID NO: 226348 - RNA, 19 nt, Homo sapiens
  misc_RNA (1)...(19): siRNA sense strand
gaagcgaccuggagugaag

SEQ ID NO: 226349 - RNA, 19 nt, Homo sapiens
  misc_RNA (1)...(19): siRNA sense strand
uggaagaguugaauaaaga

SEQ ID NO: 226350 - RNA, 19 nt, Homo sapiens
  misc_RNA (1)...(19): siRNA sense strand
caauagagcaguuuaugaa

SEQ ID NO: 226351 - RNA, 19 nt, Homo sapiens
  misc_RNA (1)...(19): siRNA sense strand
aggaagagguugaacuaaa

SEQ ID NO: 226352 - RNA, 19 nt, Homo sapiens
  misc_RNA (1)...(19): siRNA sense strand
gggcagcagugaaccaguu

SEQ ID NO: 226353 - RNA, 19 nt, Homo sapiens
  misc_RNA (1)...(19): siRNA sense strand
ggagaagucuguggagaag

SEQ ID NO: 226354 - RNA, 19 nt, Homo sapiens
  misc_RNA (1)...(19): siRNA sense strand
aaagaacaguccacaggaa

SEQ ID NO: 226355 - RNA, 19 nt, Homo sapiens
  misc_RNA (1)...(19): siRNA sense strand
acacugauccugccagaaa

SEQ ID NO: 226356 - RNA, 19 nt, Homo sapiens
  misc_RNA (1)...(19): siRNA sense strand
gcugcagucuacaaacuuu

SEQ ID NO: 226357 - RNA, 19 nt, Homo sapiens
  misc_RNA (1)...(19): siRNA sense strand
aagcacgaccuucauguua

SEQ ID NO: 226358 - RNA, 19 nt, Homo sapiens
  misc_RNA (1)...(19): siRNA sense strand
ugaaacauuuggagaaguc

SEQ ID NO: 226359 - RNA, 19 nt, Homo sapiens
  misc_RNA (1)...(19): siRNA sense strand
gacaguagauugaaaagga

SEQ ID NO: 226360 - RNA, 19 nt, Homo sapiens
  misc_RNA (1)...(19): siRNA sense strand
guugucagcacuuggaaua

SEQ ID NO: 226361 - RNA, 19 nt, Homo sapiens
  misc_RNA (1)...(19): siRNA sense strand
gaagagguugaacuaaaga

SEQ ID NO: 226362 - RNA, 19 nt, Homo sapiens
  misc_RNA (1)...(19): siRNA sense strand
gaaauggaaacaccguugu

SEQ ID NO: 226363 - RNA, 19 nt, Homo sapiens
  misc_RNA (1)...(19): siRNA sense strand
uagagcaguuuaugaagau

SEQ ID NO: 226364 - RNA, 19 nt, Homo sapiens
  misc_RNA (1)...(19): siRNA sense strand
caaacuugauaggagagua

SEQ ID NO: 226365 - RNA, 19 nt, Homo sapiens
  misc_RNA (1)...(19): siRNA sense strand
gaaaaggaaaggcuuggua

SEQ ID NO: 226366 - RNA, 19 nt, Homo sapiens
  misc_RNA (1)...(19): siRNA sense strand
gggaaaaucucugaaggaa

SEQ ID NO: 226367 - RNA, 19 nt, Homo sapiens
  misc_RNA (1)...(19): siRNA sense strand
auagagcaguuuaugaaga

SEQ ID NO: 226368 - RNA, 19 nt, Homo sapiens
  misc_RNA (1)...(19): siRNA sense strand
agaagucuguggagaagau

SEQ ID NO: 226369 - RNA, 19 nt, Homo sapiens
  misc_RNA (1)...(19): siRNA sense strand
gugaaccaguuguccaaga

SEQ ID NO: 226370 - RNA, 19 nt, Homo sapiens
  misc_RNA (1)...(19): siRNA sense strand
acaggaagagguugaacua

SEQ ID NO: 226371 - RNA, 19 nt, Homo sapiens
  misc_RNA (1)...(19): siRNA sense strand
uaaagagcuuacuggaauc

SEQ ID NO: 226372 - RNA, 19 nt, Homo sapiens
  misc_RNA (1)...(19): siRNA sense strand
acaauagagcaguuuauga

SEQ ID NO: 226373 - RNA, 19 nt, Homo sapiens
  misc_RNA (1)...(19): siRNA sense strand
aaacuugauaggagaguaa

SEQ ID NO: 226374 - RNA, 19 nt, Homo sapiens
  misc_RNA (1)...(19): siRNA sense strand
cagaaacucauauuuaagg

SEQ ID NO: 226375 - RNA, 19 nt, Homo sapiens
  misc_RNA (1)...(19): siRNA sense strand
gagaguaaaagccacaaua

SEQ ID NO: 226376 - RNA, 19 nt, Homo sapiens
  misc_RNA (1)...(19): siRNA sense strand
gcuggaagaguugaauaaa

SEQ ID NO: 226377 - RNA, 19 nt, Homo sapiens
  misc_RNA (1)...(19): siRNA sense strand
guugaaacauuuggagaag

SEQ ID NO: 226378 - RNA, 19 nt, Homo sapiens
  misc_RNA (1)...(19): siRNA sense strand
uuucaaagacaguagauug

SEQ ID NO: 226379 - RNA, 19 nt, Homo sapiens
  misc_RNA (1)...(19): siRNA sense strand
cugaccagcuggaagaguu

SEQ ID NO: 226380 - RNA, 19 nt, Homo sapiens
  misc_RNA (1)...(19): siRNA sense strand
gcucucugcaaacuugaua

SEQ ID NO: 226381 - RNA, 19 nt, Homo sapiens
  misc_RNA (1)...(19): siRNA sense strand
gaggagauugacacacuga

SEQ ID NO: 226382 - RNA, 19 nt, Homo sapiens
  misc_RNA (1)...(19): siRNA sense strand
aauaaagagcuuacuggaa

SEQ ID NO: 226383 - RNA, 19 nt, Homo sapiens
  misc_RNA (1)...(19): siRNA sense strand
gaacaucugccaggagacu

SEQ ID NO: 226384 - RNA, 19 nt, Homo sapiens
  misc_RNA (1)...(19): siRNA sense strand
aaaggaaaggcuugguaaa

SEQ ID NO: 226385 - RNA, 19 nt, Homo sapiens
  misc_RNA (1)...(19): siRNA sense strand
ggagauugacacacugauc

SEQ ID NO: 226386 - RNA, 19 nt, Homo sapiens
  misc_RNA (1)...(19): siRNA sense strand
ccacaauagagcaguuuau

SEQ ID NO: 226387 - RNA, 19 nt, Homo sapiens
  misc_RNA (1)...(19): siRNA sense strand
gaacaguccacaggaagag

SEQ ID NO: 226388 - RNA, 19 nt, Homo sapiens
  misc_RNA (1)...(19): siRNA sense strand
uggaggagauugacacacu

SEQ ID NO: 226389 - RNA, 19 nt, Homo sapiens
  misc_RNA (1)...(19): siRNA sense strand
ugucagcacuuggaauaca

SEQ ID NO: 226390 - RNA, 19 nt, Homo sapiens
  misc_RNA (1)...(19): siRNA sense strand
gugacacaguggagcagaa

SEQ ID NO: 226391 - RNA, 19 nt, Homo sapiens
  misc_RNA (1)...(19): siRNA sense strand
gagguugaacuaaagaagu

SEQ ID NO: 226392 - RNA, 19 nt, Homo sapiens
  misc_RNA (1)...(19): siRNA sense strand
cagcuggaagaguugaaua

SEQ ID NO: 226393 - RNA, 19 nt, Homo sapiens
  misc_RNA (1)...(19): siRNA sense strand
cuggaagaguugaauaaag

SEQ ID NO: 226394 - RNA, 19 nt, Homo sapiens
  misc_RNA (1)...(19): siRNA sense strand
gaagucuguggagaagaua

SEQ ID NO: 226395 - RNA, 19 nt, Homo sapiens
  misc_RNA (1)...(19): siRNA sense strand
uggcccagguuguugaaga

SEQ ID NO: 226396 - RNA, 19 nt, Homo sapiens
  misc_RNA (1)...(19): siRNA sense strand
gaggugaccagggaggaaa

SEQ ID NO: 226397 - RNA, 19 nt, Homo sapiens
  misc_RNA (1)...(19): siRNA sense strand
cacaauagagcaguuuaug

SEQ ID NO: 226398 - RNA, 19 nt, Homo sapiens
  misc_RNA (1)...(19): siRNA sense strand
ggaagcgaccuggagugaa

SEQ ID NO: 226399 - RNA, 19 nt, Homo sapiens
  misc_RNA (1)...(19): siRNA sense strand
agaguugaauaaagagcuu

SEQ ID NO: 226400 - RNA, 19 nt, Homo sapiens
  misc_RNA (1)...(19): siRNA sense strand
gucagcacuuggaauacaa

SEQ ID NO: 226401 - RNA, 19 nt, Homo sapiens
  misc_RNA (1)...(19): siRNA sense strand
gagcggcugcagucuacaa

SEQ ID NO: 226402 - RNA, 19 nt, Homo sapiens
  misc_RNA (1)...(19): siRNA sense strand
gcacgaccuucauguuacc

SEQ ID NO: 226403 - RNA, 19 nt, Homo sapiens
  misc_RNA (1)...(19): siRNA sense strand
gccacaauagagcaguuua

SEQ ID NO: 226404 - RNA, 19 nt, Homo sapiens
  misc_RNA (1)...(19): siRNA sense strand
aagaggcgacccagaguga

SEQ ID NO: 226405 - RNA, 19 nt, Homo sapiens
  misc_RNA (1)...(19): siRNA sense strand
gcccaaggauuugcaagcu

SEQ ID NO: 226406 - RNA, 19 nt, Homo sapiens
  misc_RNA (1)...(19): siRNA sense strand
uggagaagucuguggagaa

SEQ ID NO: 226407 - RNA, 19 nt, Homo sapiens
  misc_RNA (1)...(19): siRNA sense strand
ggaggugaccagggaggaa

SEQ ID NO: 226408 - RNA, 19 nt, Homo sapiens
  misc_RNA (1)...(19): siRNA sense strand
gacccagggcgaagagaug

SEQ ID NO: 226409 - RNA, 19 nt, Homo sapiens
  misc_RNA (1)...(19): siRNA sense strand
cggcugcagucuacaaacu

SEQ ID NO: 226410 - RNA, 19 nt, Homo sapiens
  misc_RNA (1)...(19): siRNA sense strand
caggaagagguugaacuaa

SEQ ID NO: 226411 - RNA, 19 nt, Homo sapiens
  misc_RNA (1)...(19): siRNA sense strand
ugaaccaguuguccaagac

SEQ ID NO: 226412 - RNA, 19 nt, Homo sapiens
  misc_RNA (1)...(19): siRNA sense strand
ggucauguuaauugggaaa

SEQ ID NO: 226413 - RNA, 19 nt, Homo sapiens
  misc_RNA (1)...(19): siRNA sense strand
ggaagaguugaauaaagag

SEQ ID NO: 226414 - RNA, 19 nt, Homo sapiens
  misc_RNA (1)...(19): siRNA sense strand
cagcagggcagcagugaac

SEQ ID NO: 226415 - RNA, 19 nt, Homo sapiens
  misc_RNA (1)...(19): siRNA sense strand
gggaagaauuguaaccaua

SEQ ID NO: 226416 - RNA, 19 nt, Homo sapiens
  misc_RNA (1)...(19): siRNA sense strand
ggaaagaucugugaaaugc

SEQ ID NO: 226417 - RNA, 19 nt, Homo sapiens
  misc_RNA (1)...(19): siRNA sense strand
guaaagaaguuugaaccua

SEQ ID NO: 226418 - RNA, 19 nt, Homo sapiens
  misc_RNA (1)...(19): siRNA sense strand
aaagaucugugaaaugcua

SEQ ID NO: 226419 - RNA, 19 nt, Homo sapiens
  misc_RNA (1)...(19): siRNA sense strand
uaacacaggagaauggaua

SEQ ID NO: 226420 - RNA, 19 nt, Homo sapiens
  misc_RNA (1)...(19): siRNA sense strand
gaagguauucucaucaaga

SEQ ID NO: 226421 - RNA, 19 nt, Homo sapiens
  misc_RNA (1)...(19): siRNA sense strand
ggaagaauuguaaccauau

SEQ ID NO: 226422 - RNA, 19 nt, Homo sapiens
  misc_RNA (1)...(19): siRNA sense strand
ccuauaaggagauuucaua

SEQ ID NO: 226423 - RNA, 19 nt, Homo sapiens
  misc_RNA (1)...(19): siRNA sense strand
caggaaagaucugugaaau

SEQ ID NO: 226424 - RNA, 19 nt, Homo sapiens
  misc_RNA (1)...(19): siRNA sense strand
gaacacuauucaaccaagu

SEQ ID NO: 226425 - RNA, 19 nt, Homo sapiens
  misc_RNA (1)...(19): siRNA sense strand
gaauaacacaggagaaugg

SEQ ID NO: 226426 - RNA, 19 nt, Homo sapiens
  misc_RNA (1)...(19): siRNA sense strand
aaaagaaucugaagucaug

SEQ ID NO: 226427 - RNA, 19 nt, Homo sapiens
  misc_RNA (1)...(19): siRNA sense strand
uaucucuccugaagcaaua

SEQ ID NO: 226428 - RNA, 19 nt, Homo sapiens
  misc_RNA (1)...(19): siRNA sense strand
guaaccauauuugcauuug

SEQ ID NO: 226429 - RNA, 19 nt, Homo sapiens
  misc_RNA (1)...(19): siRNA sense strand
gaaguuacaggaaagaucu

SEQ ID NO: 226430 - RNA, 19 nt, Homo sapiens
  misc_RNA (1)...(19): siRNA sense strand
ccagaacacuauucaacca

SEQ ID NO: 226431 - RNA, 19 nt, Homo sapiens
  misc_RNA (1)...(19): siRNA sense strand
ggauguggauaccuauaag

SEQ ID NO: 226432 - RNA, 19 nt, Homo sapiens
  misc_RNA (1)...(19): siRNA sense strand
gacugugaauuuggauaua

SEQ ID NO: 226433 - RNA, 19 nt, Homo sapiens
  misc_RNA (1)...(19): siRNA sense strand
ggagaauggauaaggcaaa

SEQ ID NO: 226434 - RNA, 19 nt, Homo sapiens
  misc_RNA (1)...(19): siRNA sense strand
gaaguuugaaccuaaaucu

SEQ ID NO: 226435 - RNA, 19 nt, Homo sapiens
  misc_RNA (1)...(19): siRNA sense strand
ggaaaagaaucugaaguca

SEQ ID NO: 226436 - RNA, 19 nt, Homo sapiens
  misc_RNA (1)...(19): siRNA sense strand
aaacuucuacgacagcaaa

SEQ ID NO: 226437 - RNA, 19 nt, Homo sapiens
  misc_RNA (1)...(19): siRNA sense strand
aaaucuggcuggaugacuu

SEQ ID NO: 226438 - RNA, 19 nt, Homo sapiens
  misc_RNA (1)...(19): siRNA sense strand
ggauaccuauaaggagauu

SEQ ID NO: 226439 - RNA, 19 nt, Homo sapiens
  misc_RNA (1)...(19): siRNA sense strand
cguagacacugccagaaca

SEQ ID NO: 226440 - RNA, 19 nt, Homo sapiens
  misc_RNA (1)...(19): siRNA sense strand
gaagucaugcuuggacaau

SEQ ID NO: 226441 - RNA, 19 nt, Homo sapiens
  misc_RNA (1)...(19): siRNA sense strand
gagaauggauaaggcaaaa

SEQ ID NO: 226442 - RNA, 19 nt, Homo sapiens
  misc_RNA (1)...(19): siRNA sense strand
gcauuugaagguauucuca

SEQ ID NO: 226443 - RNA, 19 nt, Homo sapiens
  misc_RNA (1)...(19): siRNA sense strand
caggcuggcucaggacuau

SEQ ID NO: 226444 - RNA, 19 nt, Homo sapiens
  misc_RNA (1)...(19): siRNA sense strand
agucaugcuuggacaaugu

SEQ ID NO: 226445 - RNA, 19 nt, Homo sapiens
  misc_RNA (1)...(19): siRNA sense strand
cggauguggauaccuauaa

SEQ ID NO: 226446 - RNA, 19 nt, Homo sapiens
  misc_RNA (1)...(19): siRNA sense strand
aaugcuaucucuccugaag

SEQ ID NO: 226447 - RNA, 19 nt, Homo sapiens
  misc_RNA (1)...(19): siRNA sense strand
cuuggacaauguuaauguu

SEQ ID NO: 226448 - RNA, 19 nt, Homo sapiens
  misc_RNA (1)...(19): siRNA sense strand
ucugugaaaugcuaucucu

SEQ ID NO: 226449 - RNA, 19 nt, Homo sapiens
  misc_RNA (1)...(19): siRNA sense strand
ucuagaaguuacaggaaag

SEQ ID NO: 226450 - RNA, 19 nt, Homo sapiens
  misc_RNA (1)...(19): siRNA sense strand
gacacugccagaacacuau

SEQ ID NO: 226451 - RNA, 19 nt, Homo sapiens
  misc_RNA (1)...(19): siRNA sense strand
gcuuggacaauguuaaugu

SEQ ID NO: 226452 - RNA, 19 nt, Homo sapiens
  misc_RNA (1)...(19): siRNA sense strand
uuaauguuguguccguaga

SEQ ID NO: 226453 - RNA, 19 nt, Homo sapiens
  misc_RNA (1)...(19): siRNA sense strand
cauauuugcauuugaaggu

SEQ ID NO: 226454 - RNA, 19 nt, Homo sapiens
  misc_RNA (1)...(19): siRNA sense strand
gaaaagaaucugaagucau

SEQ ID NO: 226455 - RNA, 19 nt, Homo sapiens
  misc_RNA (1)...(19): siRNA sense strand
ugaagguauucucaucaag

SEQ ID NO: 226456 - RNA, 19 nt, Homo sapiens
  misc_RNA (1)...(19): siRNA sense strand
agacugugaauuuggauau

SEQ ID NO: 226457 - RNA, 19 nt, Homo sapiens
  misc_RNA (1)...(19): siRNA sense strand
agacacugccagaacacua

SEQ ID NO: 226458 - RNA, 19 nt, Homo sapiens
  misc_RNA (1)...(19): siRNA sense strand
cuucuacgacagcaaauug

SEQ ID NO: 226459 - RNA, 19 nt, Homo sapiens
  misc_RNA (1)...(19): siRNA sense strand
ucaaccaagugauggaaaa

SEQ ID NO: 226460 - RNA, 19 nt, Homo sapiens
  misc_RNA (1)...(19): siRNA sense strand
ugaauaacacaggagaaug

SEQ ID NO: 226461 - RNA, 19 nt, Homo sapiens
  misc_RNA (1)...(19): siRNA sense strand
gauaccacaaccuggauca

SEQ ID NO: 226462 - RNA, 19 nt, Homo sapiens
  misc_RNA (1)...(19): siRNA sense strand
gaauuguaaccauauuugc

SEQ ID NO: 226463 - RNA, 19 nt, Homo sapiens
  misc_RNA (1)...(19): siRNA sense strand
cuggaugacuuuucuagaa

SEQ ID NO: 226464 - RNA, 19 nt, Homo sapiens
  misc_RNA (1)...(19): siRNA sense strand
gggaaaauggcuuuguaaa

SEQ ID NO: 226465 - RNA, 19 nt, Homo sapiens
  misc_RNA (1)...(19): siRNA sense strand
uucuagaaguuacaggaaa

SEQ ID NO: 226466 - RNA, 19 nt, Homo sapiens
  misc_RNA (1)...(19): siRNA sense strand
guuauaagcugaggcagaa

SEQ ID NO: 226467 - RNA, 19 nt, Homo sapiens
  misc_RNA (1)...(19): siRNA sense strand
uggcagacuuuguagguua

SEQ ID NO: 226468 - RNA, 19 nt, Homo sapiens
  misc_RNA (1)...(19): siRNA sense strand
ggaguucacagcucuauac

SEQ ID NO: 226469 - RNA, 19 nt, Homo sapiens
  misc_RNA (1)...(19): siRNA sense strand
gugcugagagugucaacaa

SEQ ID NO: 226470 - RNA, 19 nt, Homo sapiens
  misc_RNA (1)...(19): siRNA sense strand
ggcagacuuuguagguuau

SEQ ID NO: 226471 - RNA, 19 nt, Homo sapiens
  misc_RNA (1)...(19): siRNA sense strand
cggcgcaccuucucugauc

SEQ ID NO: 226472 - RNA, 19 nt, Homo sapiens
  misc_RNA (1)...(19): siRNA sense strand
gggcaucagugaggacagu

SEQ ID NO: 226473 - RNA, 19 nt, Homo sapiens
  misc_RNA (1)...(19): siRNA sense strand
cagacuuuguagguuauaa

SEQ ID NO: 226474 - RNA, 19 nt, Homo sapiens
  misc_RNA (1)...(19): siRNA sense strand
cugagagugucaacaagga

SEQ ID NO: 226475 - RNA, 19 nt, Homo sapiens
  misc_RNA (1)...(19): siRNA sense strand
gacaagugcaggaguggau

SEQ ID NO: 226476 - RNA, 19 nt, Homo sapiens
  misc_RNA (1)...(19): siRNA sense strand
gguggcagacuuuguaggu

SEQ ID NO: 226477 - RNA, 19 nt, Homo sapiens
  misc_RNA (1)...(19): siRNA sense strand
gcagacuuuguagguuaua

SEQ ID NO: 226478 - RNA, 19 nt, Homo sapiens
  misc_RNA (1)...(19): siRNA sense strand
guggcagacuuuguagguu

SEQ ID NO: 226479 - RNA, 19 nt, Homo sapiens
  misc_RNA (1)...(19): siRNA sense strand
cuuguagccuucuuugucu

SEQ ID NO: 226480 - RNA, 19 nt, Homo sapiens
  misc_RNA (1)...(19): siRNA sense strand
guagccuucuuugucuuug

SEQ ID NO: 226481 - RNA, 19 nt, Homo sapiens
  misc_RNA (1)...(19): siRNA sense strand
gauaaacucugaaauggaa

SEQ ID NO: 226482 - RNA, 19 nt, Homo sapiens
  misc_RNA (1)...(19): siRNA sense strand
caacacagcuccuccaguu

SEQ ID NO: 226483 - RNA, 19 nt, Homo sapiens
  misc_RNA (1)...(19): siRNA sense strand
cuacugagauggccaauaa

SEQ ID NO: 226484 - RNA, 19 nt, Homo sapiens
  misc_RNA (1)...(19): siRNA sense strand
gccagacgcugcaauauuu

SEQ ID NO: 226485 - RNA, 19 nt, Homo sapiens
  misc_RNA (1)...(19): siRNA sense strand
gaacauuucuaacaacaag

SEQ ID NO: 226486 - RNA, 19 nt, Homo sapiens
  misc_RNA (1)...(19): siRNA sense strand
caacucaacucccaacaau

SEQ ID NO: 226487 - RNA, 19 nt, Homo sapiens
  misc_RNA (1)...(19): siRNA sense strand
ggaaugacccagccacuuu

SEQ ID NO: 226488 - RNA, 19 nt, Homo sapiens
  misc_RNA (1)...(19): siRNA sense strand
ggacaucccucuugguaca

SEQ ID NO: 226489 - RNA, 19 nt, Homo sapiens
  misc_RNA (1)...(19): siRNA sense strand
gaugauaccucagaagaug

SEQ ID NO: 226490 - RNA, 19 nt, Homo sapiens
  misc_RNA (1)...(19): siRNA sense strand
gaauaucccuggaagucuu

SEQ ID NO: 226491 - RNA, 19 nt, Homo sapiens
  misc_RNA (1)...(19): siRNA sense strand
gcagauagcguggcugaaa

SEQ ID NO: 226492 - RNA, 19 nt, Homo sapiens
  misc_RNA (1)...(19): siRNA sense strand
gcauggagaugaacaggau

SEQ ID NO: 226493 - RNA, 19 nt, Homo sapiens
  misc_RNA (1)...(19): siRNA sense strand
ggauccaacucucagauga

SEQ ID NO: 226494 - RNA, 19 nt, Homo sapiens
  misc_RNA (1)...(19): siRNA sense strand
cgaugacucugacauuaaa

SEQ ID NO: 226495 - RNA, 19 nt, Homo sapiens
  misc_RNA (1)...(19): siRNA sense strand
cagcaugccuucgguguuu

SEQ ID NO: 226496 - RNA, 19 nt, Homo sapiens
  misc_RNA (1)...(19): siRNA sense strand
cugaggagaugcugaaauu

SEQ ID NO: 226497 - RNA, 19 nt, Homo sapiens
  misc_RNA (1)...(19): siRNA sense strand
ucagaagacuccagccaaa

SEQ ID NO: 226498 - RNA, 19 nt, Homo sapiens
  misc_RNA (1)...(19): siRNA sense strand
uaauucugcugaccacaua

SEQ ID NO: 226499 - RNA, 19 nt, Homo sapiens
  misc_RNA (1)...(19): siRNA sense strand
cagaugcccucuccaaaug

SEQ ID NO: 226500 - RNA, 19 nt, Homo sapiens
  misc_RNA (1)...(19): siRNA sense strand
gcagccaacuccacccauu

SEQ ID NO: 226501 - RNA, 19 nt, Homo sapiens
  misc_RNA (1)...(19): siRNA sense strand
acacagaauccucgaauuu

SEQ ID NO: 226502 - RNA, 19 nt, Homo sapiens
  misc_RNA (1)...(19): siRNA sense strand
ugaauaauaugccaggaau

SEQ ID NO: 226503 - RNA, 19 nt, Homo sapiens
  misc_RNA (1)...(19): siRNA sense strand
cagaacccacucucuauua

SEQ ID NO: 226504 - RNA, 19 nt, Homo sapiens
  misc_RNA (1)...(19): siRNA sense strand
ggaggaagccggaacaagu

SEQ ID NO: 226505 - RNA, 19 nt, Homo sapiens
  misc_RNA (1)...(19): siRNA sense strand
caauagcucuucagcagau

SEQ ID NO: 226506 - RNA, 19 nt, Homo sapiens
  misc_RNA (1)...(19): siRNA sense strand
gaaaugguuccaccuucua

SEQ ID NO: 226507 - RNA, 19 nt, Homo sapiens
  misc_RNA (1)...(19): siRNA sense strand
gagaugaacaggaugauuc

SEQ ID NO: 226508 - RNA, 19 nt, Homo sapiens
  misc_RNA (1)...(19): siRNA sense strand
ggagucaguuggccagaug

SEQ ID NO: 226509 - RNA, 19 nt, Homo sapiens
  misc_RNA (1)...(19): siRNA sense strand
gcagaauccugggguauua

SEQ ID NO: 226510 - RNA, 19 nt, Homo sapiens
  misc_RNA (1)...(19): siRNA sense strand
caaacugauuccuucugua

SEQ ID NO: 226511 - RNA, 19 nt, Homo sapiens
  misc_RNA (1)...(19): siRNA sense strand
ccaaagugguguacguguu

SEQ ID NO: 226512 - RNA, 19 nt, Homo sapiens
  misc_RNA (1)...(19): siRNA sense strand
gcugggaaauguagaguca

SEQ ID NO: 226513 - RNA, 19 nt, Homo sapiens
  misc_RNA (1)...(19): siRNA sense strand
cgaaaccucucccacaaca

SEQ ID NO: 226514 - RNA, 19 nt, Homo sapiens
  misc_RNA (1)...(19): siRNA sense strand
caaagugguguacguguuu

SEQ ID NO: 226515 - RNA, 19 nt, Homo sapiens
  misc_RNA (1)...(19): siRNA sense strand
caugauaaacucugaaaug

SEQ ID NO: 226516 - RNA, 19 nt, Homo sapiens
  misc_RNA (1)...(19): siRNA sense strand
cggaagcccuuggauauau

SEQ ID NO: 226517 - RNA, 19 nt, Homo sapiens
  misc_RNA (1)...(19): siRNA sense strand
aacgaugacucugacauua

SEQ ID NO: 226518 - RNA, 19 nt, Homo sapiens
  misc_RNA (1)...(19): siRNA sense strand
gaucuaucccgcauuauuc

SEQ ID NO: 226519 - RNA, 19 nt, Homo sapiens
  misc_RNA (1)...(19): siRNA sense strand
uuugaucuaucccgcauua

SEQ ID NO: 226520 - RNA, 19 nt, Homo sapiens
  misc_RNA (1)...(19): siRNA sense strand
uaucugcccuucggaauga

SEQ ID NO: 226521 - RNA, 19 nt, Homo sapiens
  misc_RNA (1)...(19): siRNA sense strand
uugaaacuaucgucucuuu

SEQ ID NO: 226522 - RNA, 19 nt, Homo sapiens
  misc_RNA (1)...(19): siRNA sense strand
cacauaaagucccaggauu

SEQ ID NO: 226523 - RNA, 19 nt, Homo sapiens
  misc_RNA (1)...(19): siRNA sense strand
caacuugccaucaaugaau

SEQ ID NO: 226524 - RNA, 19 nt, Homo sapiens
  misc_RNA (1)...(19): siRNA sense strand
gaaauggaagggccgaaug

SEQ ID NO: 226525 - RNA, 19 nt, Homo sapiens
  misc_RNA (1)...(19): siRNA sense strand
ucaggaaacacacagagua

SEQ ID NO: 226526 - RNA, 19 nt, Homo sapiens
  misc_RNA (1)...(19): siRNA sense strand
gcauuaacccucugaaguc

SEQ ID NO: 226527 - RNA, 19 nt, Homo sapiens
  misc_RNA (1)...(19): siRNA sense strand
gcacagcgccucugaacac

SEQ ID NO: 226528 - RNA, 19 nt, Homo sapiens
  misc_RNA (1)...(19): siRNA sense strand
cagccugccucugugaaua

SEQ ID NO: 226529 - RNA, 19 nt, Homo sapiens
  misc_RNA (1)...(19): siRNA sense strand
uaucgucucuuuccacauc

SEQ ID NO: 226530 - RNA, 19 nt, Homo sapiens
  misc_RNA (1)...(19): siRNA sense strand
acagaauccucgaauuuca

SEQ ID NO: 226531 - RNA, 19 nt, Homo sapiens
  misc_RNA (1)...(19): siRNA sense strand
gguaucaacaugccacauu

SEQ ID NO: 226532 - RNA, 19 nt, Homo sapiens
  misc_RNA (1)...(19): siRNA sense strand
cggaauaccugaguuugau

SEQ ID NO: 226533 - RNA, 19 nt, Homo sapiens
  misc_RNA (1)...(19): siRNA sense strand
guaucaacaugccacauuc

SEQ ID NO: 226534 - RNA, 19 nt, Homo sapiens
  misc_RNA (1)...(19): siRNA sense strand
gaaucccgauggcuuaucu

SEQ ID NO: 226535 - RNA, 19 nt, Homo sapiens
  misc_RNA (1)...(19): siRNA sense strand
cagaguagcccuaagucaa

SEQ ID NO: 226536 - RNA, 19 nt, Homo sapiens
  misc_RNA (1)...(19): siRNA sense strand
ucucgaauguccaaguuug

SEQ ID NO: 226537 - RNA, 19 nt, Homo sapiens
  misc_RNA (1)...(19): siRNA sense strand
aacccacucucuauuauga

SEQ ID NO: 226538 - RNA, 19 nt, Homo sapiens
  misc_RNA (1)...(19): siRNA sense strand
ggaagcccuuggauauauc

SEQ ID NO: 226539 - RNA, 19 nt, Homo sapiens
  misc_RNA (1)...(19): siRNA sense strand
gcggaagcccuuggauaua

SEQ ID NO: 226540 - RNA, 19 nt, Homo sapiens
  misc_RNA (1)...(19): siRNA sense strand
gaggagaugcugaaauuac

SEQ ID NO: 226541 - RNA, 19 nt, Homo sapiens
  misc_RNA (1)...(19): siRNA sense strand
gcccacaccugcucagaag

SEQ ID NO: 226542 - RNA, 19 nt, Homo sapiens
  misc_RNA (1)...(19): siRNA sense strand
caugagaccaccagccuuu

SEQ ID NO: 226543 - RNA, 19 nt, Homo sapiens
  misc_RNA (1)...(19): siRNA sense strand
gaacccacucucuauuaug

SEQ ID NO: 226544 - RNA, 19 nt, Homo sapiens
  misc_RNA (1)...(19): siRNA sense strand
ggcggaagcccuuggauau

SEQ ID NO: 226545 - RNA, 19 nt, Homo sapiens
  misc_RNA (1)...(19): siRNA sense strand
ggauuugcaggcaugauaa

SEQ ID NO: 226546 - RNA, 19 nt, Homo sapiens
  misc_RNA (1)...(19): siRNA sense strand
acauggagccugggaauaa

SEQ ID NO: 226547 - RNA, 19 nt, Homo sapiens
  misc_RNA (1)...(19): siRNA sense strand
agaacccacucucuauuau

SEQ ID NO: 226548 - RNA, 19 nt, Homo sapiens
  misc_RNA (1)...(19): siRNA sense strand
aaacgaugacucugacauu

SEQ ID NO: 226549 - RNA, 19 nt, Homo sapiens
  misc_RNA (1)...(19): siRNA sense strand
gggcauuaauacacagaau

SEQ ID NO: 226550 - RNA, 19 nt, Homo sapiens
  misc_RNA (1)...(19): siRNA sense strand
gaaaagggagcgaaguauu

SEQ ID NO: 226551 - RNA, 19 nt, Homo sapiens
  misc_RNA (1)...(19): siRNA sense strand
gaccauuccuucccauguc

SEQ ID NO: 226552 - RNA, 19 nt, Homo sapiens
  misc_RNA (1)...(19): siRNA sense strand
cagaugauaccucagaaga

SEQ ID NO: 226553 - RNA, 19 nt, Homo sapiens
  misc_RNA (1)...(19): siRNA sense strand
caacaugggauccaacucu

SEQ ID NO: 226554 - RNA, 19 nt, Homo sapiens
  misc_RNA (1)...(19): siRNA sense strand
gaugaagggagaugucaau

SEQ ID NO: 226555 - RNA, 19 nt, Homo sapiens
  misc_RNA (1)...(19): siRNA sense strand
ugaaaugguuccaccuucu

SEQ ID NO: 226556 - RNA, 19 nt, Homo sapiens
  misc_RNA (1)...(19): siRNA sense strand
agagaaucccgauggcuua

SEQ ID NO: 226557 - RNA, 19 nt, Homo sapiens
  misc_RNA (1)...(19): siRNA sense strand
acaaacugauuccuucugu

SEQ ID NO: 226558 - RNA, 19 nt, Homo sapiens
  misc_RNA (1)...(19): siRNA sense strand
gaaaacaaacugauuccuu

SEQ ID NO: 226559 - RNA, 19 nt, Homo sapiens
  misc_RNA (1)...(19): siRNA sense strand
gaugaaaugguuccaccuu

SEQ ID NO: 226560 - RNA, 19 nt, Homo sapiens
  misc_RNA (1)...(19): siRNA sense strand
gauauccagcgcaugcuuu

SEQ ID NO: 226561 - RNA, 19 nt, Homo sapiens
  misc_RNA (1)...(19): siRNA sense strand
aggauugucugaagagaug

SEQ ID NO: 226562 - RNA, 19 nt, Homo sapiens
  misc_RNA (1)...(19): siRNA sense strand
gaggaagccggaacaagug

SEQ ID NO: 226563 - RNA, 19 nt, Homo sapiens
  misc_RNA (1)...(19): siRNA sense strand
ccgaccaccuugaccauau

SEQ ID NO: 226564 - RNA, 19 nt, Homo sapiens
  misc_RNA (1)...(19): siRNA sense strand
guacugggcccaacucaac

SEQ ID NO: 226565 - RNA, 19 nt, Homo sapiens
  misc_RNA (1)...(19): siRNA sense strand
gaugaugucaccagcacaa

SEQ ID NO: 226566 - RNA, 19 nt, Homo sapiens
  misc_RNA (1)...(19): siRNA sense strand
gggcuucccuccaguacag

SEQ ID NO: 226567 - RNA, 19 nt, Homo sapiens
  misc_RNA (1)...(19): siRNA sense strand
ccagaacccacucucuauu

SEQ ID NO: 226568 - RNA, 19 nt, Homo sapiens
  misc_RNA (1)...(19): siRNA sense strand
ccucucaacccuuccagua

SEQ ID NO: 226569 - RNA, 19 nt, Homo sapiens
  misc_RNA (1)...(19): siRNA sense strand
cgacuccuuugaucagaga

SEQ ID NO: 226570 - RNA, 19 nt, Homo sapiens
  misc_RNA (1)...(19): siRNA sense strand
ccacauaaagucccaggau

SEQ ID NO: 226571 - RNA, 19 nt, Homo sapiens
  misc_RNA (1)...(19): siRNA sense strand
ucagaugcccucuccaaau

SEQ ID NO: 226572 - RNA, 19 nt, Homo sapiens
  misc_RNA (1)...(19): siRNA sense strand
agaguagcccuaagucaaa

SEQ ID NO: 226573 - RNA, 19 nt, Homo sapiens
  misc_RNA (1)...(19): siRNA sense strand
ggagaugaacaggaugauu

SEQ ID NO: 226574 - RNA, 19 nt, Homo sapiens
  misc_RNA (1)...(19): siRNA sense strand
gguugaaacuaucgucucu

SEQ ID NO: 226575 - RNA, 19 nt, Homo sapiens
  misc_RNA (1)...(19): siRNA sense strand
gaagacuccagccaaagug

SEQ ID NO: 226576 - RNA, 19 nt, Homo sapiens
  misc_RNA (1)...(19): siRNA sense strand
aaacugauuccuucuguag

SEQ ID NO: 226577 - RNA, 19 nt, Homo sapiens
  misc_RNA (1)...(19): siRNA sense strand
auuaugaugucucgaaugu

SEQ ID NO: 226578 - RNA, 19 nt, Homo sapiens
  misc_RNA (1)...(19): siRNA sense strand
guccugggaucccuccaaa

SEQ ID NO: 226579 - RNA, 19 nt, Homo sapiens
  misc_RNA (1)...(19): siRNA sense strand
gcauuccaguaacccuaaa

SEQ ID NO: 226580 - RNA, 19 nt, Homo sapiens
  misc_RNA (1)...(19): siRNA sense strand
ccggacaucccucuuggua

SEQ ID NO: 226581 - RNA, 19 nt, Homo sapiens
  misc_RNA (1)...(19): siRNA sense strand
ccaagcaucugcauucaaa

SEQ ID NO: 226582 - RNA, 19 nt, Homo sapiens
  misc_RNA (1)...(19): siRNA sense strand
gcgaagagguggagaaagu

SEQ ID NO: 226583 - RNA, 19 nt, Homo sapiens
  misc_RNA (1)...(19): siRNA sense strand
gcaagaaguacuuugauga

SEQ ID NO: 226584 - RNA, 19 nt, Homo sapiens
  misc_RNA (1)...(19): siRNA sense strand
ggcaagaaguacuuugaug

SEQ ID NO: 226585 - RNA, 19 nt, Homo sapiens
  misc_RNA (1)...(19): siRNA sense strand
caagaaguacuuugaugaa

SEQ ID NO: 226586 - RNA, 19 nt, Homo sapiens
  misc_RNA (1)...(19): siRNA sense strand
ccuaaacagugaccgauug

SEQ ID NO: 226587 - RNA, 19 nt, Homo sapiens
  misc_RNA (1)...(19): siRNA sense strand
ggauuuggguucucauugg

SEQ ID NO: 226588 - RNA, 19 nt, Homo sapiens
  misc_RNA (1)...(19): siRNA sense strand
ggagcaagacgcccacuau

SEQ ID NO: 226589 - RNA, 19 nt, Homo sapiens
  misc_RNA (1)...(19): siRNA sense strand
gagcaagacgcccacuauu

SEQ ID NO: 226590 - RNA, 19 nt, Homo sapiens
  misc_RNA (1)...(19): siRNA sense strand
uggcagaagugaaccuuug

SEQ ID NO: 226591 - RNA, 19 nt, Homo sapiens
  misc_RNA (1)...(19): siRNA sense strand
agaaagugguggagauugu

SEQ ID NO: 226592 - RNA, 19 nt, Homo sapiens
  misc_RNA (1)...(19): siRNA sense strand
ggagaaagugguggagauu

SEQ ID NO: 226593 - RNA, 19 nt, Homo sapiens
  misc_RNA (1)...(19): siRNA sense strand
ugucacggcucccaggaaa

SEQ ID NO: 226594 - RNA, 19 nt, Homo sapiens
  misc_RNA (1)...(19): siRNA sense strand
uuacagcccugagagcauu

SEQ ID NO: 226595 - RNA, 19 nt, Homo sapiens
  misc_RNA (1)...(19): siRNA sense strand
aaacagugaccgauugaga

SEQ ID NO: 226596 - RNA, 19 nt, Homo sapiens
  misc_RNA (1)...(19): siRNA sense strand
ucgccaagauggagaccua

SEQ ID NO: 226597 - RNA, 19 nt, Homo sapiens
  misc_RNA (1)...(19): siRNA sense strand
gaaccguccagcucaaugu

SEQ ID NO: 226598 - RNA, 19 nt, Homo sapiens
  misc_RNA (1)...(19): siRNA sense strand
ugucaucgaugcugucaca

SEQ ID NO: 226599 - RNA, 19 nt, Homo sapiens
  misc_RNA (1)...(19): siRNA sense strand
acaagcagguggcagaagu

SEQ ID NO: 226600 - RNA, 19 nt, Homo sapiens
  misc_RNA (1)...(19): siRNA sense strand
ugaaggacccugagaaagg

SEQ ID NO: 226601 - RNA, 19 nt, Homo sapiens
  misc_RNA (1)...(19): siRNA sense strand
ggagccgguuggcagcaaa

SEQ ID NO: 226602 - RNA, 19 nt, Homo sapiens
  misc_RNA (1)...(19): siRNA sense strand
ccuaagugccugugauaga

SEQ ID NO: 226603 - RNA, 19 nt, Homo sapiens
  misc_RNA (1)...(19): siRNA sense strand
gagaaagugguggagauug

SEQ ID NO: 226604 - RNA, 19 nt, Homo sapiens
  misc_RNA (1)...(19): siRNA sense strand
gcuugguucuacuuccuuu

SEQ ID NO: 226605 - RNA, 19 nt, Homo sapiens
  misc_RNA (1)...(19): siRNA sense strand
gcaaggacuacggcaagaa

SEQ ID NO: 226606 - RNA, 19 nt, Homo sapiens
  misc_RNA (1)...(19): siRNA sense strand
cguacugcaucaccaaguu

SEQ ID NO: 226607 - RNA, 19 nt, Homo sapiens
  misc_RNA (1)...(19): siRNA sense strand
ggccaagcaucugcauuca

SEQ ID NO: 226608 - RNA, 19 nt, Homo sapiens
  misc_RNA (1)...(19): siRNA sense strand
cuaagugccugugauagag

SEQ ID NO: 226609 - RNA, 19 nt, Homo sapiens
  misc_RNA (1)...(19): siRNA sense strand
gcagguggcagaagugaac

SEQ ID NO: 226610 - RNA, 19 nt, Homo sapiens
  misc_RNA (1)...(19): siRNA sense strand
ccugaaggacccugagaaa

SEQ ID NO: 226611 - RNA, 19 nt, Homo sapiens
  misc_RNA (1)...(19): siRNA sense strand
gaaggacaaaggccaugau

SEQ ID NO: 226612 - RNA, 19 nt, Homo sapiens
  misc_RNA (1)...(19): siRNA sense strand
uggagaaagugguggagau

SEQ ID NO: 226613 - RNA, 19 nt, Homo sapiens
  misc_RNA (1)...(19): siRNA sense strand
uuugcuggcugcuugauga

SEQ ID NO: 226614 - RNA, 19 nt, Homo sapiens
  misc_RNA (1)...(19): siRNA sense strand
cggacugccugcgcuauga

SEQ ID NO: 226615 - RNA, 19 nt, Homo sapiens
  misc_RNA (1)...(19): siRNA sense strand
gcagcgaagagguggagaa

SEQ ID NO: 226616 - RNA, 19 nt, Homo sapiens
  misc_RNA (1)...(19): siRNA sense strand
uggacagccuaaacaguga

SEQ ID NO: 226617 - RNA, 19 nt, Homo sapiens
  misc_RNA (1)...(19): siRNA sense strand
gcagaucaugacccacuug

SEQ ID NO: 226618 - RNA, 19 nt, Homo sapiens
  misc_RNA (1)...(19): siRNA sense strand
cagcgaagagguggagaaa

SEQ ID NO: 226619 - RNA, 19 nt, Homo sapiens
  misc_RNA (1)...(19): siRNA sense strand
cgauuggccgucggacuua

SEQ ID NO: 226620 - RNA, 19 nt, Homo sapiens
  misc_RNA (1)...(19): siRNA sense strand
uagagaaaauggagcaaga

SEQ ID NO: 226621 - RNA, 19 nt, Homo sapiens
  misc_RNA (1)...(19): siRNA sense strand
cuaaacagugaccgauuga

SEQ ID NO: 226622 - RNA, 19 nt, Homo sapiens
  misc_RNA (1)...(19): siRNA sense strand
gcugcuugaugaaggacaa

SEQ ID NO: 226623 - RNA, 19 nt, Homo sapiens
  misc_RNA (1)...(19): siRNA sense strand
ggcugugacucuggauuug

SEQ ID NO: 226624 - RNA, 19 nt, Homo sapiens
  misc_RNA (1)...(19): siRNA sense strand
gaaagugguggagauuguc

SEQ ID NO: 226625 - RNA, 19 nt, Homo sapiens
  misc_RNA (1)...(19): siRNA sense strand
ggacuacggcaagaaguac

SEQ ID NO: 226626 - RNA, 19 nt, Homo sapiens
  misc_RNA (1)...(19): siRNA sense strand
caaggacuacggcaagaag

SEQ ID NO: 226627 - RNA, 19 nt, Homo sapiens
  misc_RNA (1)...(19): siRNA sense strand
agcaagacgcccacuauug

SEQ ID NO: 226628 - RNA, 19 nt, Homo sapiens
  misc_RNA (1)...(19): siRNA sense strand
cagugcggaugacgaaauc

SEQ ID NO: 226629 - RNA, 19 nt, Homo sapiens
  misc_RNA (1)...(19): siRNA sense strand
ucuccgacaugaucuacau

SEQ ID NO: 226630 - RNA, 19 nt, Homo sapiens
  misc_RNA (1)...(19): siRNA sense strand
gauuggccgucggacuuau

SEQ ID NO: 226631 - RNA, 19 nt, Homo sapiens
  misc_RNA (1)...(19): siRNA sense strand
guacugcaucaccaaguuc

SEQ ID NO: 226632 - RNA, 19 nt, Homo sapiens
  misc_RNA (1)...(19): siRNA sense strand
uggccaagcaucugcauuc

SEQ ID NO: 226633 - RNA, 19 nt, Homo sapiens
  misc_RNA (1)...(19): siRNA sense strand
gaacagugaugaaugucua

SEQ ID NO: 226634 - RNA, 19 nt, Homo sapiens
  misc_RNA (1)...(19): siRNA sense strand
ggaacaggaugaagcauuu

SEQ ID NO: 226635 - RNA, 19 nt, Homo sapiens
  misc_RNA (1)...(19): siRNA sense strand
ggacucagcucuauuugau

SEQ ID NO: 226636 - RNA, 19 nt, Homo sapiens
  misc_RNA (1)...(19): siRNA sense strand
gcacugggaugaaaucaga

SEQ ID NO: 226637 - RNA, 19 nt, Homo sapiens
  misc_RNA (1)...(19): siRNA sense strand
ccagagcccugcuuaaauu

SEQ ID NO: 226638 - RNA, 19 nt, Homo sapiens
  misc_RNA (1)...(19): siRNA sense strand
ggagauggcucgucguugu

SEQ ID NO: 226639 - RNA, 19 nt, Homo sapiens
  misc_RNA (1)...(19): siRNA sense strand
ggacauugcuuugccauca

SEQ ID NO: 226640 - RNA, 19 nt, Homo sapiens
  misc_RNA (1)...(19): siRNA sense strand
acucagcucuauuugauua

SEQ ID NO: 226641 - RNA, 19 nt, Homo sapiens
  misc_RNA (1)...(19): siRNA sense strand
cuacauggcucccgaagug

SEQ ID NO: 226642 - RNA, 19 nt, Homo sapiens
  misc_RNA (1)...(19): siRNA sense strand
gaaaauggaucucucuaug

SEQ ID NO: 226643 - RNA, 19 nt, Homo sapiens
  misc_RNA (1)...(19): siRNA sense strand
caucauggcugacaucuac

SEQ ID NO: 226644 - RNA, 19 nt, Homo sapiens
  misc_RNA (1)...(19): siRNA sense strand
ggucuggacuaccuuuauu

SEQ ID NO: 226645 - RNA, 19 nt, Homo sapiens
  misc_RNA (1)...(19): siRNA sense strand
aaacagaaaucuaccaaac

SEQ ID NO: 226646 - RNA, 19 nt, Homo sapiens
  misc_RNA (1)...(19): siRNA sense strand
ggagaaaccacauuagcuu

SEQ ID NO: 226647 - RNA, 19 nt, Homo sapiens
  misc_RNA (1)...(19): siRNA sense strand
ccaaacagauucagauggu

SEQ ID NO: 226648 - RNA, 19 nt, Homo sapiens
  misc_RNA (1)...(19): siRNA sense strand
caggguguaugaaauauga

SEQ ID NO: 226649 - RNA, 19 nt, Homo sapiens
  misc_RNA (1)...(19): siRNA sense strand
gagggaucguggaagaaua

SEQ ID NO: 226650 - RNA, 19 nt, Homo sapiens
  misc_RNA (1)...(19): siRNA sense strand
ugaagaagccagcugguuu

SEQ ID NO: 226651 - RNA, 19 nt, Homo sapiens
  misc_RNA (1)...(19): siRNA sense strand
gggccuugcuguuaaauuc

SEQ ID NO: 226652 - RNA, 19 nt, Homo sapiens
  misc_RNA (1)...(19): siRNA sense strand
gaacaggaugaagcauuua

SEQ ID NO: 226653 - RNA, 19 nt, Homo sapiens
  misc_RNA (1)...(19): siRNA sense strand
ucacagcauugagaauuaa

SEQ ID NO: 226654 - RNA, 19 nt, Homo sapiens
  misc_RNA (1)...(19): siRNA sense strand
ucacaaaguucugguagug

SEQ ID NO: 226655 - RNA, 19 nt, Homo sapiens
  misc_RNA (1)...(19): siRNA sense strand
ugacacaaaugaaguugau

SEQ ID NO: 226656 - RNA, 19 nt, Homo sapiens
  misc_RNA (1)...(19): siRNA sense strand
ggacgaaagccugaacaaa

SEQ ID NO: 226657 - RNA, 19 nt, Homo sapiens
  misc_RNA (1)...(19): siRNA sense strand
gaagaugaccagggagaaa

SEQ ID NO: 226658 - RNA, 19 nt, Homo sapiens
  misc_RNA (1)...(19): siRNA sense strand
gcauugagaauuaagaaga

SEQ ID NO: 226659 - RNA, 19 nt, Homo sapiens
  misc_RNA (1)...(19): siRNA sense strand
gcuauacauuuacaucaga

SEQ ID NO: 226660 - RNA, 19 nt, Homo sapiens
  misc_RNA (1)...(19): siRNA sense strand
ccagggagaaaccacauua

SEQ ID NO: 226661 - RNA, 19 nt, Homo sapiens
  misc_RNA (1)...(19): siRNA sense strand
acagaaaucuaccaaacug

SEQ ID NO: 226662 - RNA, 19 nt, Homo sapiens
  misc_RNA (1)...(19): siRNA sense strand
ccagaugaugcuauuaaua

SEQ ID NO: 226663 - RNA, 19 nt, Homo sapiens
  misc_RNA (1)...(19): siRNA sense strand
caucauuucucguguucaa

SEQ ID NO: 226664 - RNA, 19 nt, Homo sapiens
  misc_RNA (1)...(19): siRNA sense strand
gaagaagccagcugguuuc

SEQ ID NO: 226665 - RNA, 19 nt, Homo sapiens
  misc_RNA (1)...(19): siRNA sense strand
gugcaaagauucuccaaaa

SEQ ID NO: 226666 - RNA, 19 nt, Homo sapiens
  misc_RNA (1)...(19): siRNA sense strand
gaaacagaaaucuaccaaa

SEQ ID NO: 226667 - RNA, 19 nt, Homo sapiens
  misc_RNA (1)...(19): siRNA sense strand
cuaccaaacugugcuaaug

SEQ ID NO: 226668 - RNA, 19 nt, Homo sapiens
  misc_RNA (1)...(19): siRNA sense strand
aagcagacgucguuacaau

SEQ ID NO: 226669 - RNA, 19 nt, Homo sapiens
  misc_RNA (1)...(19): siRNA sense strand
gguugaaucccaagaugua

SEQ ID NO: 226670 - RNA, 19 nt, Homo sapiens
  misc_RNA (1)...(19): siRNA sense strand
caggagggaucguggaaga

SEQ ID NO: 226671 - RNA, 19 nt, Homo sapiens
  misc_RNA (1)...(19): siRNA sense strand
gaaucuggauaguaugcuu

SEQ ID NO: 226672 - RNA, 19 nt, Homo sapiens
  misc_RNA (1)...(19): siRNA sense strand
gaugugcccuugaauacca

SEQ ID NO: 226673 - RNA, 19 nt, Homo sapiens
  misc_RNA (1)...(19): siRNA sense strand
uggacuaccuuuauugguu

SEQ ID NO: 226674 - RNA, 19 nt, Homo sapiens
  misc_RNA (1)...(19): siRNA sense strand
guggaacagugaugaaugu

SEQ ID NO: 226675 - RNA, 19 nt, Homo sapiens
  misc_RNA (1)...(19): siRNA sense strand
gauuacugauuaccaugaa

SEQ ID NO: 226676 - RNA, 19 nt, Homo sapiens
  misc_RNA (1)...(19): siRNA sense strand
ucagggcacuguccagaug

SEQ ID NO: 226677 - RNA, 19 nt, Homo sapiens
  misc_RNA (1)...(19): siRNA sense strand
caacagugacacaaaugaa

SEQ ID NO: 226678 - RNA, 19 nt, Homo sapiens
  misc_RNA (1)...(19): siRNA sense strand
ucagcgaacuauugccaaa

SEQ ID NO: 226679 - RNA, 19 nt, Homo sapiens
  misc_RNA (1)...(19): siRNA sense strand
cagaggauaccuugccuuu

SEQ ID NO: 226680 - RNA, 19 nt, Homo sapiens
  misc_RNA (1)...(19): siRNA sense strand
gaaugucuacgagcaguuu

SEQ ID NO: 226681 - RNA, 19 nt, Homo sapiens
  misc_RNA (1)...(19): siRNA sense strand
aagaauaccaauugccaua

SEQ ID NO: 226682 - RNA, 19 nt, Homo sapiens
  misc_RNA (1)...(19): siRNA sense strand
caccagagcccugcuuaaa

SEQ ID NO: 226683 - RNA, 19 nt, Homo sapiens
  misc_RNA (1)...(19): siRNA sense strand
ucuaugacuuccugaaaug

SEQ ID NO: 226684 - RNA, 19 nt, Homo sapiens
  misc_RNA (1)...(19): siRNA sense strand
gaacuauugccaaacagau

SEQ ID NO: 226685 - RNA, 19 nt, Homo sapiens
  misc_RNA (1)...(19): siRNA sense strand
cagcuacgccggacaauag

SEQ ID NO: 226686 - RNA, 19 nt, Homo sapiens
  misc_RNA (1)...(19): siRNA sense strand
acacaugcauaacuaaugg

SEQ ID NO: 226687 - RNA, 19 nt, Homo sapiens
  misc_RNA (1)...(19): siRNA sense strand
gccuauuuguucaucauuu

SEQ ID NO: 226688 - RNA, 19 nt, Homo sapiens
  misc_RNA (1)...(19): siRNA sense strand
guugaugugcccuugaaua

SEQ ID NO: 226689 - RNA, 19 nt, Homo sapiens
  misc_RNA (1)...(19): siRNA sense strand
caaggaaagcccgcaauug

SEQ ID NO: 226690 - RNA, 19 nt, Homo sapiens
  misc_RNA (1)...(19): siRNA sense strand
aggccgauauggagaagua

SEQ ID NO: 226691 - RNA, 19 nt, Homo sapiens
  misc_RNA (1)...(19): siRNA sense strand
cagcuucggccuaaucauu

SEQ ID NO: 226692 - RNA, 19 nt, Homo sapiens
  misc_RNA (1)...(19): siRNA sense strand
gacgaaagccugaacaaaa

SEQ ID NO: 226693 - RNA, 19 nt, Homo sapiens
  misc_RNA (1)...(19): siRNA sense strand
ccaaggaaagcccgcaauu

SEQ ID NO: 226694 - RNA, 19 nt, Homo sapiens
  misc_RNA (1)...(19): siRNA sense strand
guccagaugaugcuauuaa

SEQ ID NO: 226695 - RNA, 19 nt, Homo sapiens
  misc_RNA (1)...(19): siRNA sense strand
cgagugauccgucauacga

SEQ ID NO: 226696 - RNA, 19 nt, Homo sapiens
  misc_RNA (1)...(19): siRNA sense strand
gagccuauuuguucaucau

SEQ ID NO: 226697 - RNA, 19 nt, Homo sapiens
  misc_RNA (1)...(19): siRNA sense strand
gagauggcucgucguugua

SEQ ID NO: 226698 - RNA, 19 nt, Homo sapiens
  misc_RNA (1)...(19): siRNA sense strand
gcucaucgagaccuaaaga

SEQ ID NO: 226699 - RNA, 19 nt, Homo sapiens
  misc_RNA (1)...(19): siRNA sense strand
gacauuaaagguacagguu

SEQ ID NO: 226700 - RNA, 19 nt, Homo sapiens
  misc_RNA (1)...(19): siRNA sense strand
uuucauagcggcagacauu

SEQ ID NO: 226701 - RNA, 19 nt, Homo sapiens
  misc_RNA (1)...(19): siRNA sense strand
gugcuaaugcgccaugaaa

SEQ ID NO: 226702 - RNA, 19 nt, Homo sapiens
  misc_RNA (1)...(19): siRNA sense strand
guucaucauuucucguguu

SEQ ID NO: 226703 - RNA, 19 nt, Homo sapiens
  misc_RNA (1)...(19): siRNA sense strand
gaaauaugaaggaucugau

SEQ ID NO: 226704 - RNA, 19 nt, Homo sapiens
  misc_RNA (1)...(19): siRNA sense strand
acauugcuuugccaucaua

SEQ ID NO: 226705 - RNA, 19 nt, Homo sapiens
  misc_RNA (1)...(19): siRNA sense strand
gaucguggaagaauaccaa

SEQ ID NO: 226706 - RNA, 19 nt, Homo sapiens
  misc_RNA (1)...(19): siRNA sense strand
cagaugguccggcaaguug

SEQ ID NO: 226707 - RNA, 19 nt, Homo sapiens
  misc_RNA (1)...(19): siRNA sense strand
ugaagcauuuauuccaguu

SEQ ID NO: 226708 - RNA, 19 nt, Homo sapiens
  misc_RNA (1)...(19): siRNA sense strand
ggaugaagcauuuauucca

SEQ ID NO: 226709 - RNA, 19 nt, Homo sapiens
  misc_RNA (1)...(19): siRNA sense strand
gaauguugucggaccaauu

SEQ ID NO: 226710 - RNA, 19 nt, Homo sapiens
  misc_RNA (1)...(19): siRNA sense strand
gcuuugccaucauagaaga

SEQ ID NO: 226711 - RNA, 19 nt, Homo sapiens
  misc_RNA (1)...(19): siRNA sense strand
ccgaagugcuggacgaaag

SEQ ID NO: 226712 - RNA, 19 nt, Homo sapiens
  misc_RNA (1)...(19): siRNA sense strand
ccaguuggagaaucacuaa

SEQ ID NO: 226713 - RNA, 19 nt, Homo sapiens
  misc_RNA (1)...(19): siRNA sense strand
caauugccauauuacaaca

SEQ ID NO: 226714 - RNA, 19 nt, Homo sapiens
  misc_RNA (1)...(19): siRNA sense strand
cguggaagaauaccaauug

SEQ ID NO: 226715 - RNA, 19 nt, Homo sapiens
  misc_RNA (1)...(19): siRNA sense strand
aaacauccucaucaagaaa

SEQ ID NO: 226716 - RNA, 19 nt, Homo sapiens
  misc_RNA (1)...(19): siRNA sense strand
cugcuuaaauuggcuuauu

SEQ ID NO: 226717 - RNA, 19 nt, Homo sapiens
  misc_RNA (1)...(19): siRNA sense strand
cauagcggcagacauuaaa

SEQ ID NO: 226718 - RNA, 19 nt, Homo sapiens
  misc_RNA (1)...(19): siRNA sense strand
aaauggaucucucuaugac

SEQ ID NO: 226719 - RNA, 19 nt, Homo sapiens
  misc_RNA (1)...(19): siRNA sense strand
ccuccagacucacagcauu

SEQ ID NO: 226720 - RNA, 19 nt, Homo sapiens
  misc_RNA (1)...(19): siRNA sense strand
ggagggaucguggaagaau

SEQ ID NO: 226721 - RNA, 19 nt, Homo sapiens
  misc_RNA (1)...(19): siRNA sense strand
gauuauugggagccuauuu

SEQ ID NO: 226722 - RNA, 19 nt, Homo sapiens
  misc_RNA (1)...(19): siRNA sense strand
gaaguugaugugcccuuga

SEQ ID NO: 226723 - RNA, 19 nt, Homo sapiens
  misc_RNA (1)...(19): siRNA sense strand
caucuucuccagcugcuuu

SEQ ID NO: 226724 - RNA, 19 nt, Homo sapiens
  misc_RNA (1)...(19): siRNA sense strand
gauccgucauacgaagaua

SEQ ID NO: 226725 - RNA, 19 nt, Homo sapiens
  misc_RNA (1)...(19): siRNA sense strand
gaaaauggaguaaccuuag

SEQ ID NO: 226726 - RNA, 19 nt, Homo sapiens
  misc_RNA (1)...(19): siRNA sense strand
gacaccagagcccugcuua

SEQ ID NO: 226727 - RNA, 19 nt, Homo sapiens
  misc_RNA (1)...(19): siRNA sense strand
ucauagcggcagacauuaa

SEQ ID NO: 226728 - RNA, 19 nt, Homo sapiens
  misc_RNA (1)...(19): siRNA sense strand
gaaaccacauuagcuucag

SEQ ID NO: 226729 - RNA, 19 nt, Homo sapiens
  misc_RNA (1)...(19): siRNA sense strand
ccuauuuguucaucauuuc

SEQ ID NO: 226730 - RNA, 19 nt, Homo sapiens
  misc_RNA (1)...(19): siRNA sense strand
aauguugucggaccaauuu

SEQ ID NO: 226731 - RNA, 19 nt, Homo sapiens
  misc_RNA (1)...(19): siRNA sense strand
aaacguuugcggccaauug

SEQ ID NO: 226732 - RNA, 19 nt, Homo sapiens
  misc_RNA (1)...(19): siRNA sense strand
ugaagcuaaugucagaaug

SEQ ID NO: 226733 - RNA, 19 nt, Homo sapiens
  misc_RNA (1)...(19): siRNA sense strand
gcaaauugauagaagguua

SEQ ID NO: 226734 - RNA, 19 nt, Homo sapiens
  misc_RNA (1)...(19): siRNA sense strand
guacauccuucuugguuua

SEQ ID NO: 226735 - RNA, 19 nt, Homo sapiens
  misc_RNA (1)...(19): siRNA sense strand
ggaaauaaagugagaaaga

SEQ ID NO: 226736 - RNA, 19 nt, Homo sapiens
  misc_RNA (1)...(19): siRNA sense strand
gauagaagguuacggaaaa

SEQ ID NO: 226737 - RNA, 19 nt, Homo sapiens
  misc_RNA (1)...(19): siRNA sense strand
gaaggcaauugaacccuau

SEQ ID NO: 226738 - RNA, 19 nt, Homo sapiens
  misc_RNA (1)...(19): siRNA sense strand
gaucaagaacuuaauggaa

SEQ ID NO: 226739 - RNA, 19 nt, Homo sapiens
  misc_RNA (1)...(19): siRNA sense strand
aaagaagaauggcaagaug

SEQ ID NO: 226740 - RNA, 19 nt, Homo sapiens
  misc_RNA (1)...(19): siRNA sense strand
caggaaauguuaucagcaa

SEQ ID NO: 226741 - RNA, 19 nt, Homo sapiens
  misc_RNA (1)...(19): siRNA sense strand
ggaauacguuggcauacca

SEQ ID NO: 226742 - RNA, 19 nt, Homo sapiens
  misc_RNA (1)...(19): siRNA sense strand
gcuguuacaagaccauuua

SEQ ID NO: 226743 - RNA, 19 nt, Homo sapiens
  misc_RNA (1)...(19): siRNA sense strand
gcagaaaacuacaugauag

SEQ ID NO: 226744 - RNA, 19 nt, Homo sapiens
  misc_RNA (1)...(19): siRNA sense strand
ugacuuagauggcuuagac

SEQ ID NO: 226745 - RNA, 19 nt, Homo sapiens
  misc_RNA (1)...(19): siRNA sense strand
ccacaggguugauaugaag

SEQ ID NO: 226746 - RNA, 19 nt, Homo sapiens
  misc_RNA (1)...(19): siRNA sense strand
auagauaccugauggacaa

SEQ ID NO: 226747 - RNA, 19 nt, Homo sapiens
  misc_RNA (1)...(19): siRNA sense strand
ggaaaggcucaauuacuga

SEQ ID NO: 226748 - RNA, 19 nt, Homo sapiens
  misc_RNA (1)...(19): siRNA sense strand
guguggaacuuaaagaaga

SEQ ID NO: 226749 - RNA, 19 nt, Homo sapiens
  misc_RNA (1)...(19): siRNA sense strand
gaaaggcucaauuacugaa

SEQ ID NO: 226750 - RNA, 19 nt, Homo sapiens
  misc_RNA (1)...(19): siRNA sense strand
gaaaguagucagccuaacu

SEQ ID NO: 226751 - RNA, 19 nt, Homo sapiens
  misc_RNA (1)...(19): siRNA sense strand
aggaaaggcucaauuacug

SEQ ID NO: 226752 - RNA, 19 nt, Homo sapiens
  misc_RNA (1)...(19): siRNA sense strand
uggcguauguucaggauug

SEQ ID NO: 226753 - RNA, 19 nt, Homo sapiens
  misc_RNA (1)...(19): siRNA sense strand
aagcagauauacuagcuau

SEQ ID NO: 226754 - RNA, 19 nt, Homo sapiens
  misc_RNA (1)...(19): siRNA sense strand
ggaaauguuaucagcaaau

SEQ ID NO: 226755 - RNA, 19 nt, Homo sapiens
  misc_RNA (1)...(19): siRNA sense strand
uccgauaccuuuaccagaa

SEQ ID NO: 226756 - RNA, 19 nt, Homo sapiens
  misc_RNA (1)...(19): siRNA sense strand
cacuagaaguuaauggaaa

SEQ ID NO: 226757 - RNA, 19 nt, Homo sapiens
  misc_RNA (1)...(19): siRNA sense strand
ugauggcucuguauuguca

SEQ ID NO: 226758 - RNA, 19 nt, Homo sapiens
  misc_RNA (1)...(19): siRNA sense strand
gcaauugaacccuauaaaa

SEQ ID NO: 226759 - RNA, 19 nt, Homo sapiens
  misc_RNA (1)...(19): siRNA sense strand
gacacaccgucagagaaua

SEQ ID NO: 226760 - RNA, 19 nt, Homo sapiens
  misc_RNA (1)...(19): siRNA sense strand
cagaugauuuggaugaaag

SEQ ID NO: 226761 - RNA, 19 nt, Homo sapiens
  misc_RNA (1)...(19): siRNA sense strand
cauggaauacguuggcaua

SEQ ID NO: 226762 - RNA, 19 nt, Homo sapiens
  misc_RNA (1)...(19): siRNA sense strand
cgucagagaauaguaauga

SEQ ID NO: 226763 - RNA, 19 nt, Homo sapiens
  misc_RNA (1)...(19): siRNA sense strand
accagaagaugauaguauu

SEQ ID NO: 226764 - RNA, 19 nt, Homo sapiens
  misc_RNA (1)...(19): siRNA sense strand
ucagaugauuuggaugaaa

SEQ ID NO: 226765 - RNA, 19 nt, Homo sapiens
  misc_RNA (1)...(19): siRNA sense strand
gaagaugauaguauugaag

SEQ ID NO: 226766 - RNA, 19 nt, Homo sapiens
  misc_RNA (1)...(19): siRNA sense strand
ggaagguguggaacuuaaa

SEQ ID NO: 226767 - RNA, 19 nt, Homo sapiens
  misc_RNA (1)...(19): siRNA sense strand
gaccacaggguugauauga

SEQ ID NO: 226768 - RNA, 19 nt, Homo sapiens
  misc_RNA (1)...(19): siRNA sense strand
aaggcucaauuacugaaua

SEQ ID NO: 226769 - RNA, 19 nt, Homo sapiens
  misc_RNA (1)...(19): siRNA sense strand
ugggauggcucaggaaaug

SEQ ID NO: 226770 - RNA, 19 nt, Homo sapiens
  misc_RNA (1)...(19): siRNA sense strand
aaaacaagaugaaccgaaa

SEQ ID NO: 226771 - RNA, 19 nt, Homo sapiens
  misc_RNA (1)...(19): siRNA sense strand
gaccauuuauuagcucgaa

SEQ ID NO: 226772 - RNA, 19 nt, Homo sapiens
  misc_RNA (1)...(19): siRNA sense strand
uaaagaagaauggcaagau

SEQ ID NO: 226773 - RNA, 19 nt, Homo sapiens
  misc_RNA (1)...(19): siRNA sense strand
cagaagaugauaguauuga

SEQ ID NO: 226774 - RNA, 19 nt, Homo sapiens
  misc_RNA (1)...(19): siRNA sense strand
ggguugauaugaaggcaau

SEQ ID NO: 226775 - RNA, 19 nt, Homo sapiens
  misc_RNA (1)...(19): siRNA sense strand
cagagaauaguaaugaguu

SEQ ID NO: 226776 - RNA, 19 nt, Homo sapiens
  misc_RNA (1)...(19): siRNA sense strand
gauaguauugaagcagaua

SEQ ID NO: 226777 - RNA, 19 nt, Homo sapiens
  misc_RNA (1)...(19): siRNA sense strand
gcagaacuagcagaacuug

SEQ ID NO: 226778 - RNA, 19 nt, Homo sapiens
  misc_RNA (1)...(19): siRNA sense strand
gagaauaguaaugaguuug

SEQ ID NO: 226779 - RNA, 19 nt, Homo sapiens
  misc_RNA (1)...(19): siRNA sense strand
auuaggaaaggcucaauua

SEQ ID NO: 226780 - RNA, 19 nt, Homo sapiens
  misc_RNA (1)...(19): siRNA sense strand
ugaagcagauauacuagcu

SEQ ID NO: 226781 - RNA, 19 nt, Homo sapiens
  misc_RNA (1)...(19): siRNA sense strand
ggauggcucaggaaauguu

SEQ ID NO: 226782 - RNA, 19 nt, Homo sapiens
  misc_RNA (1)...(19): siRNA sense strand
gauaccugauggacaaucu

SEQ ID NO: 226783 - RNA, 19 nt, Homo sapiens
  misc_RNA (1)...(19): siRNA sense strand
gaauaguaaugaguuugag

SEQ ID NO: 226784 - RNA, 19 nt, Homo sapiens
  misc_RNA (1)...(19): siRNA sense strand
ugucagaugauuuggauga

SEQ ID NO: 226785 - RNA, 19 nt, Homo sapiens
  misc_RNA (1)...(19): siRNA sense strand
gaagcagauauacuagcua

SEQ ID NO: 226786 - RNA, 19 nt, Homo sapiens
  misc_RNA (1)...(19): siRNA sense strand
agaugaagauuuuccgaua

SEQ ID NO: 226787 - RNA, 19 nt, Homo sapiens
  misc_RNA (1)...(19): siRNA sense strand
auacacagcagcagaggaa

SEQ ID NO: 226788 - RNA, 19 nt, Homo sapiens
  misc_RNA (1)...(19): siRNA sense strand
acaagaccauuuauuagcu

SEQ ID NO: 226789 - RNA, 19 nt, Homo sapiens
  misc_RNA (1)...(19): siRNA sense strand
gaagguguggaacuuaaag

SEQ ID NO: 226790 - RNA, 19 nt, Homo sapiens
  misc_RNA (1)...(19): siRNA sense strand
uguacauccuucuugguuu

SEQ ID NO: 226791 - RNA, 19 nt, Homo sapiens
  misc_RNA (1)...(19): siRNA sense strand
gauaugaaggcaauugaac

SEQ ID NO: 226792 - RNA, 19 nt, Homo sapiens
  misc_RNA (1)...(19): siRNA sense strand
ucacuagaaguuaauggaa

SEQ ID NO: 226793 - RNA, 19 nt, Homo sapiens
  misc_RNA (1)...(19): siRNA sense strand
agaagaauggcaagaugaa

SEQ ID NO: 226794 - RNA, 19 nt, Homo sapiens
  misc_RNA (1)...(19): siRNA sense strand
gcacuuuggagcuauuagu

SEQ ID NO: 226795 - RNA, 19 nt, Homo sapiens
  misc_RNA (1)...(19): siRNA sense strand
ggcaauugaacccuauaaa

SEQ ID NO: 226796 - RNA, 19 nt, Homo sapiens
  misc_RNA (1)...(19): siRNA sense strand
agacacaccgucagagaau

SEQ ID NO: 226797 - RNA, 19 nt, Homo sapiens
  misc_RNA (1)...(19): siRNA sense strand
gaacuuguccccauggaau

SEQ ID NO: 226798 - RNA, 19 nt, Homo sapiens
  misc_RNA (1)...(19): siRNA sense strand
uggcagaacuagcagaacu

SEQ ID NO: 226799 - RNA, 19 nt, Homo sapiens
  misc_RNA (1)...(19): siRNA sense strand
uaccagaagaugauaguau

SEQ ID NO: 226800 - RNA, 19 nt, Homo sapiens
  misc_RNA (1)...(19): siRNA sense strand
gauggcucaggaaauguua

SEQ ID NO: 226801 - RNA, 19 nt, Homo sapiens
  misc_RNA (1)...(19): siRNA sense strand
agugauggcucuguauugu

SEQ ID NO: 226802 - RNA, 19 nt, Homo sapiens
  misc_RNA (1)...(19): siRNA sense strand
ggaccacaggguugauaug

SEQ ID NO: 226803 - RNA, 19 nt, Homo sapiens
  misc_RNA (1)...(19): siRNA sense strand
aagaauggcaagaugaaga

SEQ ID NO: 226804 - RNA, 19 nt, Homo sapiens
  misc_RNA (1)...(19): siRNA sense strand
uguggaacuuaaagaagaa

SEQ ID NO: 226805 - RNA, 19 nt, Homo sapiens
  misc_RNA (1)...(19): siRNA sense strand
gauugacuuagauggcuua

SEQ ID NO: 226806 - RNA, 19 nt, Homo sapiens
  misc_RNA (1)...(19): siRNA sense strand
uguauugucagaugauuug

SEQ ID NO: 226807 - RNA, 19 nt, Homo sapiens
  misc_RNA (1)...(19): siRNA sense strand
uaauuuggcagaacuagca

SEQ ID NO: 226808 - RNA, 19 nt, Homo sapiens
  misc_RNA (1)...(19): siRNA sense strand
ugauagaagguuacggaaa

SEQ ID NO: 226809 - RNA, 19 nt, Homo sapiens
  misc_RNA (1)...(19): siRNA sense strand
aagaagaauggcaagauga

SEQ ID NO: 226810 - RNA, 19 nt, Homo sapiens
  misc_RNA (1)...(19): siRNA sense strand
aaacuaauggcuccagaca

SEQ ID NO: 226811 - RNA, 19 nt, Homo sapiens
  misc_RNA (1)...(19): siRNA sense strand
gaguuugagugggaagaug

SEQ ID NO: 226812 - RNA, 19 nt, Homo sapiens
  misc_RNA (1)...(19): siRNA sense strand
ccagaagaugauaguauug

SEQ ID NO: 226813 - RNA, 19 nt, Homo sapiens
  misc_RNA (1)...(19): siRNA sense strand
gugcaacaacucgaagaaa

SEQ ID NO: 226814 - RNA, 19 nt, Homo sapiens
  misc_RNA (1)...(19): siRNA sense strand
gaagaauggcaagaugaag

SEQ ID NO: 226815 - RNA, 19 nt, Homo sapiens
  misc_RNA (1)...(19): siRNA sense strand
cauccuucuugguuuauca

SEQ ID NO: 226816 - RNA, 19 nt, Homo sapiens
  misc_RNA (1)...(19): siRNA sense strand
uaacuauagauaccugaug

SEQ ID NO: 226817 - RNA, 19 nt, Homo sapiens
  misc_RNA (1)...(19): siRNA sense strand
ggaugaaaguggggagauu

SEQ ID NO: 226818 - RNA, 19 nt, Homo sapiens
  misc_RNA (1)...(19): siRNA sense strand
uauuggcacuuuggagcua

SEQ ID NO: 226819 - RNA, 19 nt, Homo sapiens
  misc_RNA (1)...(19): siRNA sense strand
cucaauuacugaauacaca

SEQ ID NO: 226820 - RNA, 19 nt, Homo sapiens
  misc_RNA (1)...(19): siRNA sense strand
uaggaaaggcucaauuacu

SEQ ID NO: 226821 - RNA, 19 nt, Homo sapiens
  misc_RNA (1)...(19): siRNA sense strand
caccgucagagaauaguaa

SEQ ID NO: 226822 - RNA, 19 nt, Homo sapiens
  misc_RNA (1)...(19): siRNA sense strand
ggugcaacaacucgaagaa

SEQ ID NO: 226823 - RNA, 19 nt, Homo sapiens
  misc_RNA (1)...(19): siRNA sense strand
agaacuagcagaacuuguc

SEQ ID NO: 226824 - RNA, 19 nt, Homo sapiens
  misc_RNA (1)...(19): siRNA sense strand
ggaacuuaaagaagaaugg

SEQ ID NO: 226825 - RNA, 19 nt, Homo sapiens
  misc_RNA (1)...(19): siRNA sense strand
guggggagauugacuuaga

SEQ ID NO: 226826 - RNA, 19 nt, Homo sapiens
  misc_RNA (1)...(19): siRNA sense strand
ugcaacaacucgaagaaaa

SEQ ID NO: 226827 - RNA, 19 nt, Homo sapiens
  misc_RNA (1)...(19): siRNA sense strand
cacuuuggagcuauuagua

SEQ ID NO: 226828 - RNA, 19 nt, Homo sapiens
  misc_RNA (1)...(19): siRNA sense strand
gcuggcguauguucaggau

SEQ ID NO: 226829 - RNA, 19 nt, Homo sapiens
  misc_RNA (1)...(19): siRNA sense strand
gaacuuaauggaaaacaag

SEQ ID NO: 226830 - RNA, 19 nt, Homo sapiens
  misc_RNA (1)...(19): siRNA sense strand
gcauaaaacaaguugauca

SEQ ID NO: 226831 - RNA, 19 nt, Homo sapiens
  misc_RNA (1)...(19): siRNA sense strand
agauacguguuuaauuugg

SEQ ID NO: 226832 - RNA, 19 nt, Homo sapiens
  misc_RNA (1)...(19): siRNA sense strand
cuagugauggcucuguauu

SEQ ID NO: 226833 - RNA, 19 nt, Homo sapiens
  misc_RNA (1)...(19): siRNA sense strand
caacaugaaucaggacaga

SEQ ID NO: 226834 - RNA, 19 nt, Homo sapiens
  misc_RNA (1)...(19): siRNA sense strand
agaagaaguuguagaagga

SEQ ID NO: 226835 - RNA, 19 nt, Homo sapiens
  misc_RNA (1)...(19): siRNA sense strand
agaaggaagucgaggcuuu

SEQ ID NO: 226836 - RNA, 19 nt, Homo sapiens
  misc_RNA (1)...(19): siRNA sense strand
gggcuaggcaucuauauug

SEQ ID NO: 226837 - RNA, 19 nt, Homo sapiens
  misc_RNA (1)...(19): siRNA sense strand
gaagaugggcagaucaugu

SEQ ID NO: 226838 - RNA, 19 nt, Homo sapiens
  misc_RNA (1)...(19): siRNA sense strand
caacaacaacugcgaggaa

SEQ ID NO: 226839 - RNA, 19 nt, Homo sapiens
  misc_RNA (1)...(19): siRNA sense strand
gcagcaauggcaaugauaa

SEQ ID NO: 226840 - RNA, 19 nt, Homo sapiens
  misc_RNA (1)...(19): siRNA sense strand
agaagaagaaguuguagaa

SEQ ID NO: 226841 - RNA, 19 nt, Homo sapiens
  misc_RNA (1)...(19): siRNA sense strand
gaacagcagcaauggcaau

SEQ ID NO: 226842 - RNA, 19 nt, Homo sapiens
  misc_RNA (1)...(19): siRNA sense strand
gaaggaagucgaggcuuug

SEQ ID NO: 226843 - RNA, 19 nt, Homo sapiens
  misc_RNA (1)...(19): siRNA sense strand
cuaggcaucuauauuggaa

SEQ ID NO: 226844 - RNA, 19 nt, Homo sapiens
  misc_RNA (1)...(19): siRNA sense strand
ccauagcucucagucagaa

SEQ ID NO: 226845 - RNA, 19 nt, Homo sapiens
  misc_RNA (1)...(19): siRNA sense strand
cagcagcaauggcaaugau

SEQ ID NO: 226846 - RNA, 19 nt, Homo sapiens
  misc_RNA (1)...(19): siRNA sense strand
gcaauggcaaugauaaugg

SEQ ID NO: 226847 - RNA, 19 nt, Homo sapiens
  misc_RNA (1)...(19): siRNA sense strand
ugacagcccuucgccacaa

SEQ ID NO: 226848 - RNA, 19 nt, Homo sapiens
  misc_RNA (1)...(19): siRNA sense strand
acaagaagaugggcagauc

SEQ ID NO: 226849 - RNA, 19 nt, Homo sapiens
  misc_RNA (1)...(19): siRNA sense strand
agucgaggcuuugaagaaa

SEQ ID NO: 226850 - RNA, 19 nt, Homo sapiens
  misc_RNA (1)...(19): siRNA sense strand
gaaucaggacagaguaguu

SEQ ID NO: 226851 - RNA, 19 nt, Homo sapiens
  misc_RNA (1)...(19): siRNA sense strand
ggaagucgaggcuuugaag

SEQ ID NO: 226852 - RNA, 19 nt, Homo sapiens
  misc_RNA (1)...(19): siRNA sense strand
gcaaugauaauggcaaugg

SEQ ID NO: 226853 - RNA, 19 nt, Homo sapiens
  misc_RNA (1)...(19): siRNA sense strand
ccaaggaguuccacuucag

SEQ ID NO: 226854 - RNA, 19 nt, Homo sapiens
  misc_RNA (1)...(19): siRNA sense strand
gucagaagaagaaguugua

SEQ ID NO: 226855 - RNA, 19 nt, Homo sapiens
  misc_RNA (1)...(19): siRNA sense strand
gcacaacaacaacaacaac

SEQ ID NO: 226856 - RNA, 19 nt, Homo sapiens
  misc_RNA (1)...(19): siRNA sense strand
gcagggaccauagcucuca

SEQ ID NO: 226857 - RNA, 19 nt, Homo sapiens
  misc_RNA (1)...(19): siRNA sense strand
gaagucgaggcuuugaaga

SEQ ID NO: 226858 - RNA, 19 nt, Homo sapiens
  misc_RNA (1)...(19): siRNA sense strand
gaacacguaccauccucau

SEQ ID NO: 226859 - RNA, 19 nt, Homo sapiens
  misc_RNA (1)...(19): siRNA sense strand
aaaguggagccaugaagaa

SEQ ID NO: 226860 - RNA, 19 nt, Homo sapiens
  misc_RNA (1)...(19): siRNA sense strand
cuaaacguucugugucuuu

SEQ ID NO: 226861 - RNA, 19 nt, Homo sapiens
  misc_RNA (1)...(19): siRNA sense strand
gaagaagaaguuguagaag

SEQ ID NO: 226862 - RNA, 19 nt, Homo sapiens
  misc_RNA (1)...(19): siRNA sense strand
ucagucagaagaagaaguu

SEQ ID NO: 226863 - RNA, 19 nt, Homo sapiens
  misc_RNA (1)...(19): siRNA sense strand
ggaugcacaacaugaauca

SEQ ID NO: 226864 - RNA, 19 nt, Homo sapiens
  misc_RNA (1)...(19): siRNA sense strand
cauguuugauguggaaaug

SEQ ID NO: 226865 - RNA, 19 nt, Homo sapiens
  misc_RNA (1)...(19): siRNA sense strand
aacaacaacugcgaggaaa

SEQ ID NO: 226866 - RNA, 19 nt, Homo sapiens
  misc_RNA (1)...(19): siRNA sense strand
caaggaguuccacuucaga

SEQ ID NO: 226867 - RNA, 19 nt, Homo sapiens
  misc_RNA (1)...(19): siRNA sense strand
guggagccaugaagaaagg

SEQ ID NO: 226868 - RNA, 19 nt, Homo sapiens
  misc_RNA (1)...(19): siRNA sense strand
ccacuucagacacccuaaa

SEQ ID NO: 226869 - RNA, 19 nt, Homo sapiens
  misc_RNA (1)...(19): siRNA sense strand
caagaagaugggcagauca

SEQ ID NO: 226870 - RNA, 19 nt, Homo sapiens
  misc_RNA (1)...(19): siRNA sense strand
ucucuuccuuucucauguu

SEQ ID NO: 226871 - RNA, 19 nt, Homo sapiens
  misc_RNA (1)...(19): siRNA sense strand
aagaugggcagaucauguu

SEQ ID NO: 226872 - RNA, 19 nt, Homo sapiens
  misc_RNA (1)...(19): siRNA sense strand
ggaccauagcucucaguca

SEQ ID NO: 226873 - RNA, 19 nt, Homo sapiens
  misc_RNA (1)...(19): siRNA sense strand
cagaagaagaaguuguaga

SEQ ID NO: 226874 - RNA, 19 nt, Homo sapiens
  misc_RNA (1)...(19): siRNA sense strand
gaugggcagaucauguuug

SEQ ID NO: 226875 - RNA, 19 nt, Homo sapiens
  misc_RNA (1)...(19): siRNA sense strand
uuccaucucucuuccuuuc

SEQ ID NO: 226876 - RNA, 19 nt, Homo sapiens
  misc_RNA (1)...(19): siRNA sense strand
cauuccaucucucuuccuu

SEQ ID NO: 226877 - RNA, 19 nt, Homo sapiens
  misc_RNA (1)...(19): siRNA sense strand
aaacguucugugucuuuaa

SEQ ID NO: 226878 - RNA, 19 nt, Homo sapiens
  misc_RNA (1)...(19): siRNA sense strand
cccaaggaguuccacuuca

SEQ ID NO: 226879 - RNA, 19 nt, Homo sapiens
  misc_RNA (1)...(19): siRNA sense strand
gcucucagucagaagaaga

SEQ ID NO: 226880 - RNA, 19 nt, Homo sapiens
  misc_RNA (1)...(19): siRNA sense strand
augggcagaucauguuuga

SEQ ID NO: 226881 - RNA, 19 nt, Homo sapiens
  misc_RNA (1)...(19): siRNA sense strand
gaaguuguagaaggagaga

SEQ ID NO: 226882 - RNA, 19 nt, Homo sapiens
  misc_RNA (1)...(19): siRNA sense strand
uauauuggaaagcgacuga

SEQ ID NO: 226883 - RNA, 19 nt, Homo sapiens
  misc_RNA (1)...(19): siRNA sense strand
guucauuccaucucucuuc

SEQ ID NO: 226884 - RNA, 19 nt, Homo sapiens
  misc_RNA (1)...(19): siRNA sense strand
gaagguguucauuccaucu

SEQ ID NO: 226885 - RNA, 19 nt, Homo sapiens
  misc_RNA (1)...(19): siRNA sense strand
cagcaauggcaaugauaau

SEQ ID NO: 226886 - RNA, 19 nt, Homo sapiens
  misc_RNA (1)...(19): siRNA sense strand
ggcuaggcaucuauauugg

SEQ ID NO: 226887 - RNA, 19 nt, Homo sapiens
  misc_RNA (1)...(19): siRNA sense strand
uggcaaugauaauggcaau

SEQ ID NO: 226888 - RNA, 19 nt, Homo sapiens
  misc_RNA (1)...(19): siRNA sense strand
gcuaggcaucuauauugga

SEQ ID NO: 226889 - RNA, 19 nt, Homo sapiens
  misc_RNA (1)...(19): siRNA sense strand
caugaaucaggacagagua

SEQ ID NO: 226890 - RNA, 19 nt, Homo sapiens
  misc_RNA (1)...(19): siRNA sense strand
ccuaaacguucugugucuu

SEQ ID NO: 226891 - RNA, 19 nt, Homo sapiens
  misc_RNA (1)...(19): siRNA sense strand
gauaauggcaaugggaaaa

SEQ ID NO: 226892 - RNA, 19 nt, Homo sapiens
  misc_RNA (1)...(19): siRNA sense strand
guaacaagaugcucaacua

SEQ ID NO: 226893 - RNA, 19 nt, Homo sapiens
  misc_RNA (1)...(19): siRNA sense strand
acaagaugcucaacuauag

SEQ ID NO: 226894 - RNA, 19 nt, Homo sapiens
  misc_RNA (1)...(19): siRNA sense strand
cagcagacuuuccaucuca

SEQ ID NO: 226895 - RNA, 19 nt, Homo sapiens
  misc_RNA (1)...(19): siRNA sense strand
gcuccaaguuccaccagaa

SEQ ID NO: 226896 - RNA, 19 nt, Homo sapiens
  misc_RNA (1)...(19): siRNA sense strand
ggagcuggcaagccucuuu

SEQ ID NO: 226897 - RNA, 19 nt, Homo sapiens
  misc_RNA (1)...(19): siRNA sense strand
uaacaagaugcucaacuau

SEQ ID NO: 226898 - RNA, 19 nt, Homo sapiens
  misc_RNA (1)...(19): siRNA sense strand
aacaagaugcucaacuaua

SEQ ID NO: 226899 - RNA, 19 nt, Homo sapiens
  misc_RNA (1)...(19): siRNA sense strand
ggaaaacggugccuguaag

SEQ ID NO: 226900 - RNA, 19 nt, Homo sapiens
  misc_RNA (1)...(19): siRNA sense strand
ucaagacgccugcccaucu

SEQ ID NO: 226901 - RNA, 19 nt, Homo sapiens
  misc_RNA (1)...(19): siRNA sense strand
aaacggugccuguaaguac

SEQ ID NO: 226902 - RNA, 19 nt, Homo sapiens
  misc_RNA (1)...(19): siRNA sense strand
cgaguccccucacauguuu

SEQ ID NO: 226903 - RNA, 19 nt, Homo sapiens
  misc_RNA (1)...(19): siRNA sense strand
gccaccaucuucgacuuga

SEQ ID NO: 226904 - RNA, 19 nt, Homo sapiens
  misc_RNA (1)...(19): siRNA sense strand
gagcuggcaagccucuuug

SEQ ID NO: 226905 - RNA, 19 nt, Homo sapiens
  misc_RNA (1)...(19): siRNA sense strand
guugccugcuggacagaaa

SEQ ID NO: 226906 - RNA, 19 nt, Homo sapiens
  misc_RNA (1)...(19): siRNA sense strand
augcaaggguaacaagaug

SEQ ID NO: 226907 - RNA, 19 nt, Homo sapiens
  misc_RNA (1)...(19): siRNA sense strand
gcagacuuuccaucucaga

SEQ ID NO: 226908 - RNA, 19 nt, Homo sapiens
  misc_RNA (1)...(19): siRNA sense strand
caagaugcucaacuauagu

SEQ ID NO: 226909 - RNA, 19 nt, Homo sapiens
  misc_RNA (1)...(19): siRNA sense strand
ucagcagacuuuccaucuc

SEQ ID NO: 226910 - RNA, 19 nt, Homo sapiens
  misc_RNA (1)...(19): siRNA sense strand
gaccaccacccucgugucu

SEQ ID NO: 226911 - RNA, 19 nt, Homo sapiens
  misc_RNA (1)...(19): siRNA sense strand
gagcuggugucgacagaaa

SEQ ID NO: 226912 - RNA, 19 nt, Homo sapiens
  misc_RNA (1)...(19): siRNA sense strand
gggcauccauccaguauuc

SEQ ID NO: 226913 - RNA, 19 nt, Homo sapiens
  misc_RNA (1)...(19): siRNA sense strand
gaaucgagaucuggguuau

SEQ ID NO: 226914 - RNA, 19 nt, Homo sapiens
  misc_RNA (1)...(19): siRNA sense strand
guuaacagcuuugcagaca

SEQ ID NO: 226915 - RNA, 19 nt, Homo sapiens
  misc_RNA (1)...(19): siRNA sense strand
ccugagcgauguucuguau

SEQ ID NO: 226916 - RNA, 19 nt, Homo sapiens
  misc_RNA (1)...(19): siRNA sense strand
gcagacaacacccgucguu

SEQ ID NO: 226917 - RNA, 19 nt, Homo sapiens
  misc_RNA (1)...(19): siRNA sense strand
ucagaagacugugaaaaua

SEQ ID NO: 226918 - RNA, 19 nt, Homo sapiens
  misc_RNA (1)...(19): siRNA sense strand
gacaacacccgucguuuua

SEQ ID NO: 226919 - RNA, 19 nt, Homo sapiens
  misc_RNA (1)...(19): siRNA sense strand
gcaugaaaguccuggaaaa

SEQ ID NO: 226920 - RNA, 19 nt, Homo sapiens
  misc_RNA (1)...(19): siRNA sense strand
aauagccaccuccuuguua

SEQ ID NO: 226921 - RNA, 19 nt, Homo sapiens
  misc_RNA (1)...(19): siRNA sense strand
uaacagcuuugcagacaac

SEQ ID NO: 226922 - RNA, 19 nt, Homo sapiens
  misc_RNA (1)...(19): siRNA sense strand
gagccuaucccaucaaagg

SEQ ID NO: 226923 - RNA, 19 nt, Homo sapiens
  misc_RNA (1)...(19): siRNA sense strand
cauccugacugugccuuaa

SEQ ID NO: 226924 - RNA, 19 nt, Homo sapiens
  misc_RNA (1)...(19): siRNA sense strand
gaucuggguuaugcaugaa

SEQ ID NO: 226925 - RNA, 19 nt, Homo sapiens
  misc_RNA (1)...(19): siRNA sense strand
uuccaaaccuccagaagga

SEQ ID NO: 226926 - RNA, 19 nt, Homo sapiens
  misc_RNA (1)...(19): siRNA sense strand
gagauaagucccuguucug

SEQ ID NO: 226927 - RNA, 19 nt, Homo sapiens
  misc_RNA (1)...(19): siRNA sense strand
gcagcagccgcuacucaaa

SEQ ID NO: 226928 - RNA, 19 nt, Homo sapiens
  misc_RNA (1)...(19): siRNA sense strand
ccuaucccaucaaagguuu

SEQ ID NO: 226929 - RNA, 19 nt, Homo sapiens
  misc_RNA (1)...(19): siRNA sense strand
ugagcgauguucuguaugg

SEQ ID NO: 226930 - RNA, 19 nt, Homo sapiens
  misc_RNA (1)...(19): siRNA sense strand
agagauaagucccuguucu

SEQ ID NO: 226931 - RNA, 19 nt, Homo sapiens
  misc_RNA (1)...(19): siRNA sense strand
ccaaaccuccagaaggaaa

SEQ ID NO: 226932 - RNA, 19 nt, Homo sapiens
  misc_RNA (1)...(19): siRNA sense strand
aaaugacucuggacucgau

SEQ ID NO: 226933 - RNA, 19 nt, Homo sapiens
  misc_RNA (1)...(19): siRNA sense strand
caucugggaagccuuuaaa

SEQ ID NO: 226934 - RNA, 19 nt, Homo sapiens
  misc_RNA (1)...(19): siRNA sense strand
cgaaucgagaucuggguua

SEQ ID NO: 226935 - RNA, 19 nt, Homo sapiens
  misc_RNA (1)...(19): siRNA sense strand
auagccaccuccuuguuaa

SEQ ID NO: 226936 - RNA, 19 nt, Homo sapiens
  misc_RNA (1)...(19): siRNA sense strand
cagcacccauccugacugu

SEQ ID NO: 226937 - RNA, 19 nt, Homo sapiens
  misc_RNA (1)...(19): siRNA sense strand
agaucuggguuaugcauga

SEQ ID NO: 226938 - RNA, 19 nt, Homo sapiens
  misc_RNA (1)...(19): siRNA sense strand
uggcaggguugcagauuuc

SEQ ID NO: 226939 - RNA, 19 nt, Homo sapiens
  misc_RNA (1)...(19): siRNA sense strand
acaggagccuaucccauca

SEQ ID NO: 226940 - RNA, 19 nt, Homo sapiens
  misc_RNA (1)...(19): siRNA sense strand
ccgagcagcggaacaagaa

SEQ ID NO: 226941 - RNA, 19 nt, Homo sapiens
  misc_RNA (1)...(19): siRNA sense strand
ccagagauaagucccuguu

SEQ ID NO: 226942 - RNA, 19 nt, Homo sapiens
  misc_RNA (1)...(19): siRNA sense strand
caacacccgucguuuuaug

SEQ ID NO: 226943 - RNA, 19 nt, Homo sapiens
  misc_RNA (1)...(19): siRNA sense strand
cugggaagccuuuaaagug

SEQ ID NO: 226944 - RNA, 19 nt, Homo sapiens
  misc_RNA (1)...(19): siRNA sense strand
aaguggcgcuggacaagga

SEQ ID NO: 226945 - RNA, 19 nt, Homo sapiens
  misc_RNA (1)...(19): siRNA sense strand
ccagugaagcucuuacagu

SEQ ID NO: 226946 - RNA, 19 nt, Homo sapiens
  misc_RNA (1)...(19): siRNA sense strand
cagaagacugugaaaauaa

SEQ ID NO: 226947 - RNA, 19 nt, Homo sapiens
  misc_RNA (1)...(19): siRNA sense strand
aaaagaggcugaaggacau

SEQ ID NO: 226948 - RNA, 19 nt, Homo sapiens
  misc_RNA (1)...(19): siRNA sense strand
cagcaugaaaguccuggaa

SEQ ID NO: 226949 - RNA, 19 nt, Homo sapiens
  misc_RNA (1)...(19): siRNA sense strand
gggaaggcagcaugaaagu

SEQ ID NO: 226950 - RNA, 19 nt, Homo sapiens
  misc_RNA (1)...(19): siRNA sense strand
cuacaucagaagacuguga

SEQ ID NO: 226951 - RNA, 19 nt, Homo sapiens
  misc_RNA (1)...(19): siRNA sense strand
ccaagucuuuauacagaac

SEQ ID NO: 226952 - RNA, 19 nt, Homo sapiens
  misc_RNA (1)...(19): siRNA sense strand
gugcugcccucagacuaug

SEQ ID NO: 226953 - RNA, 19 nt, Homo sapiens
  misc_RNA (1)...(19): siRNA sense strand
aaagggcauccauccagua

SEQ ID NO: 226954 - RNA, 19 nt, Homo sapiens
  misc_RNA (1)...(19): siRNA sense strand
caggguugcagauuucuug

SEQ ID NO: 226955 - RNA, 19 nt, Homo sapiens
  misc_RNA (1)...(19): siRNA sense strand
uuacacgaaucgagaucug

SEQ ID NO: 226956 - RNA, 19 nt, Homo sapiens
  misc_RNA (1)...(19): siRNA sense strand
uaccaauccugcccuacau

SEQ ID NO: 226957 - RNA, 19 nt, Homo sapiens
  misc_RNA (1)...(19): siRNA sense strand
aaauagccaccuccuuguu

SEQ ID NO: 226958 - RNA, 19 nt, Homo sapiens
  misc_RNA (1)...(19): siRNA sense strand
cagccgcuacucaaagaaa

SEQ ID NO: 226959 - RNA, 19 nt, Homo sapiens
  misc_RNA (1)...(19): siRNA sense strand
aaugauuaccgaccaguga

SEQ ID NO: 226960 - RNA, 19 nt, Homo sapiens
  misc_RNA (1)...(19): siRNA sense strand
cagcuucugcuucuacugu

SEQ ID NO: 226961 - RNA, 19 nt, Homo sapiens
  misc_RNA (1)...(19): siRNA sense strand
ccaauccugcccuacauca

SEQ ID NO: 226962 - RNA, 19 nt, Homo sapiens
  misc_RNA (1)...(19): siRNA sense strand
gcccucagacuaugaccuu

SEQ ID NO: 226963 - RNA, 19 nt, Homo sapiens
  misc_RNA (1)...(19): siRNA sense strand
gcuucugcuucuacuguug

SEQ ID NO: 226964 - RNA, 19 nt, Homo sapiens
  misc_RNA (1)...(19): siRNA sense strand
uaaaguggcgcuggacaag

SEQ ID NO: 226965 - RNA, 19 nt, Homo sapiens
  misc_RNA (1)...(19): siRNA sense strand
aggagccuaucccaucaaa

SEQ ID NO: 226966 - RNA, 19 nt, Homo sapiens
  misc_RNA (1)...(19): siRNA sense strand
cccaagucuuuauacagaa

SEQ ID NO: 226967 - RNA, 19 nt, Homo sapiens
  misc_RNA (1)...(19): siRNA sense strand
ggcagcagccgcuacucaa

SEQ ID NO: 226968 - RNA, 19 nt, Homo sapiens
  misc_RNA (1)...(19): siRNA sense strand
acucuggacucgauuacca

SEQ ID NO: 226969 - RNA, 19 nt, Homo sapiens
  misc_RNA (1)...(19): siRNA sense strand
ccccaagucuuuauacaga

SEQ ID NO: 226970 - RNA, 19 nt, Homo sapiens
  misc_RNA (1)...(19): siRNA sense strand
ggagagaucacuacauuaa

SEQ ID NO: 226971 - RNA, 19 nt, Homo sapiens
  misc_RNA (1)...(19): siRNA sense strand
gcagagugcccauggaaga

SEQ ID NO: 226972 - RNA, 19 nt, Homo sapiens
  misc_RNA (1)...(19): siRNA sense strand
ccuaauggcuucccuggau

SEQ ID NO: 226973 - RNA, 19 nt, Homo sapiens
  misc_RNA (1)...(19): siRNA sense strand
agggagagaucacuacauu

SEQ ID NO: 226974 - RNA, 19 nt, Homo sapiens
  misc_RNA (1)...(19): siRNA sense strand
gagaaucgcggacaagaag

SEQ ID NO: 226975 - RNA, 19 nt, Homo sapiens
  misc_RNA (1)...(19): siRNA sense strand
gaaucgcggacaagaagua

SEQ ID NO: 226976 - RNA, 19 nt, Homo sapiens
  misc_RNA (1)...(19): siRNA sense strand
gagagaucacuacauuaaa

SEQ ID NO: 226977 - RNA, 19 nt, Homo sapiens
  misc_RNA (1)...(19): siRNA sense strand
gggagagaucacuacauua

SEQ ID NO: 226978 - RNA, 19 nt, Homo sapiens
  misc_RNA (1)...(19): siRNA sense strand
agagaucacuacauuaaac

SEQ ID NO: 226979 - RNA, 19 nt, Homo sapiens
  misc_RNA (1)...(19): siRNA sense strand
gagaaggcccaaggacaaa

SEQ ID NO: 226980 - RNA, 19 nt, Homo sapiens
  misc_RNA (1)...(19): siRNA sense strand
gagcgacugagaagagaaa

SEQ ID NO: 226981 - RNA, 19 nt, Homo sapiens
  misc_RNA (1)...(19): siRNA sense strand
gugauggagugucgcaaug

SEQ ID NO: 226982 - RNA, 19 nt, Homo sapiens
  misc_RNA (1)...(19): siRNA sense strand
ucacccaucuccugcaaca

SEQ ID NO: 226983 - RNA, 19 nt, Homo sapiens
  misc_RNA (1)...(19): siRNA sense strand
gaagggcuuucaggaugug

SEQ ID NO: 226984 - RNA, 19 nt, Homo sapiens
  misc_RNA (1)...(19): siRNA sense strand
gauggagugucgcaauguc

SEQ ID NO: 226985 - RNA, 19 nt, Homo sapiens
  misc_RNA (1)...(19): siRNA sense strand
cuacuucguaugacuauug

SEQ ID NO: 226986 - RNA, 19 nt, Homo sapiens
  misc_RNA (1)...(19): siRNA sense strand
agagaaggcccaaggacaa

SEQ ID NO: 226987 - RNA, 19 nt, Homo sapiens
  misc_RNA (1)...(19): siRNA sense strand
ccagaagggcuuucaggau

SEQ ID NO: 226988 - RNA, 19 nt, Homo sapiens
  misc_RNA (1)...(19): siRNA sense strand
gcagagguggagcgacuga

SEQ ID NO: 226989 - RNA, 19 nt, Homo sapiens
  misc_RNA (1)...(19): siRNA sense strand
gaauucuggugcuccugau

SEQ ID NO: 226990 - RNA, 19 nt, Homo sapiens
  misc_RNA (1)...(19): siRNA sense strand
agaagggcuuucaggaugu

SEQ ID NO: 226991 - RNA, 19 nt, Homo sapiens
  misc_RNA (1)...(19): siRNA sense strand
cauuaaaccauaagcuuca

SEQ ID NO: 226992 - RNA, 19 nt, Homo sapiens
  misc_RNA (1)...(19): siRNA sense strand
acacugugauggcccuaau

SEQ ID NO: 226993 - RNA, 19 nt, Homo sapiens
  misc_RNA (1)...(19): siRNA sense strand
gagguggagcgacugagaa

SEQ ID NO: 226994 - RNA, 19 nt, Homo sapiens
  misc_RNA (1)...(19): siRNA sense strand
gcaucuacuucguaugacu

SEQ ID NO: 226995 - RNA, 19 nt, Homo sapiens
  misc_RNA (1)...(19): siRNA sense strand
caucuacuucguaugacua

SEQ ID NO: 226996 - RNA, 19 nt, Homo sapiens
  misc_RNA (1)...(19): siRNA sense strand
gaaaguggaggagcuugag

SEQ ID NO: 226997 - RNA, 19 nt, Homo sapiens
  misc_RNA (1)...(19): siRNA sense strand
ugagaaucgcggacaagaa

SEQ ID NO: 226998 - RNA, 19 nt, Homo sapiens
  misc_RNA (1)...(19): siRNA sense strand
gcgugagaaucgcggacaa

SEQ ID NO: 226999 - RNA, 19 nt, Homo sapiens
  misc_RNA (1)...(19): siRNA sense strand
ucgcggacaagaaguacua

SEQ ID NO: 227000 - RNA, 19 nt, Homo sapiens
  misc_RNA (1)...(19): siRNA sense strand
gaucacuacauuaaaccau

SEQ ID NO: 227001 - RNA, 19 nt, Homo sapiens
  misc_RNA (1)...(19): siRNA sense strand
agaaaguggaggagcuuga

SEQ ID NO: 227002 - RNA, 19 nt, Homo sapiens
  misc_RNA (1)...(19): siRNA sense strand
ugucacccaucuccugcaa

SEQ ID NO: 227003 - RNA, 19 nt, Homo sapiens
  misc_RNA (1)...(19): siRNA sense strand
gugagaaucgcggacaaga

SEQ ID NO: 227004 - RNA, 19 nt, Homo sapiens
  misc_RNA (1)...(19): siRNA sense strand
gggauaagcgcuguaagcu

SEQ ID NO: 227005 - RNA, 19 nt, Homo sapiens
  misc_RNA (1)...(19): siRNA sense strand
caacuuccaucucuacaug

SEQ ID NO: 227006 - RNA, 19 nt, Homo sapiens
  misc_RNA (1)...(19): siRNA sense strand
cuacauggcucucaagaag

SEQ ID NO: 227007 - RNA, 19 nt, Homo sapiens
  misc_RNA (1)...(19): siRNA sense strand
uggagaagcugacugagaa

SEQ ID NO: 227008 - RNA, 19 nt, Homo sapiens
  misc_RNA (1)...(19): siRNA sense strand
agacagagguugagacagu

SEQ ID NO: 227009 - RNA, 19 nt, Homo sapiens
  misc_RNA (1)...(19): siRNA sense strand
ccacagcuaucgcccgaaa

SEQ ID NO: 227010 - RNA, 19 nt, Homo sapiens
  misc_RNA (1)...(19): siRNA sense strand
gaaaauugcugagauggaa

SEQ ID NO: 227011 - RNA, 19 nt, Homo sapiens
  misc_RNA (1)...(19): siRNA sense strand
ggacugcagcugccaugua

SEQ ID NO: 227012 - RNA, 19 nt, Homo sapiens
  misc_RNA (1)...(19): siRNA sense strand
cgacucaacuuccaucucu

SEQ ID NO: 227013 - RNA, 19 nt, Homo sapiens
  misc_RNA (1)...(19): siRNA sense strand
gggagguauuaucuaagua

SEQ ID NO: 227014 - RNA, 19 nt, Homo sapiens
  misc_RNA (1)...(19): siRNA sense strand
agaaguaugcacugccuua

SEQ ID NO: 227015 - RNA, 19 nt, Homo sapiens
  misc_RNA (1)...(19): siRNA sense strand
gcaaauccucuacgucaca

SEQ ID NO: 227016 - RNA, 19 nt, Homo sapiens
  misc_RNA (1)...(19): siRNA sense strand
gcagacagagguugagaca

SEQ ID NO: 227017 - RNA, 19 nt, Homo sapiens
  misc_RNA (1)...(19): siRNA sense strand
ugacugagaagcagacaga

SEQ ID NO: 227018 - RNA, 19 nt, Homo sapiens
  misc_RNA (1)...(19): siRNA sense strand
guucaaagggauccugauu

SEQ ID NO: 227019 - RNA, 19 nt, Homo sapiens
  misc_RNA (1)...(19): siRNA sense strand
ucaaagggauccugauucc

SEQ ID NO: 227020 - RNA, 19 nt, Homo sapiens
  misc_RNA (1)...(19): siRNA sense strand
uccgggagguauuaucuaa

SEQ ID NO: 227021 - RNA, 19 nt, Homo sapiens
  misc_RNA (1)...(19): siRNA sense strand
cccaaggcauuuaagauca

SEQ ID NO: 227022 - RNA, 19 nt, Homo sapiens
  misc_RNA (1)...(19): siRNA sense strand
gacugcugcuggauaagaa

SEQ ID NO: 227023 - RNA, 19 nt, Homo sapiens
  misc_RNA (1)...(19): siRNA sense strand
cgggagguauuaucuaagu

SEQ ID NO: 227024 - RNA, 19 nt, Homo sapiens
  misc_RNA (1)...(19): siRNA sense strand
gaauacagcggugccaaca

SEQ ID NO: 227025 - RNA, 19 nt, Homo sapiens
  misc_RNA (1)...(19): siRNA sense strand
gaauacaaacgacucaacu

SEQ ID NO: 227026 - RNA, 19 nt, Homo sapiens
  misc_RNA (1)...(19): siRNA sense strand
gacugcagcugccauguac

SEQ ID NO: 227027 - RNA, 19 nt, Homo sapiens
  misc_RNA (1)...(19): siRNA sense strand
gcccaaggcauuuaagauc

SEQ ID NO: 227028 - RNA, 19 nt, Homo sapiens
  misc_RNA (1)...(19): siRNA sense strand
accagugccuccugacuuu

SEQ ID NO: 227029 - RNA, 19 nt, Homo sapiens
  misc_RNA (1)...(19): siRNA sense strand
ccaaggcauuuaagaucau

SEQ ID NO: 227030 - RNA, 19 nt, Homo sapiens
  misc_RNA (1)...(19): siRNA sense strand
guaccaggccaccaggauu

SEQ ID NO: 227031 - RNA, 19 nt, Homo sapiens
  misc_RNA (1)...(19): siRNA sense strand
uggcugacaucaucaugga

SEQ ID NO: 227032 - RNA, 19 nt, Homo sapiens
  misc_RNA (1)...(19): siRNA sense strand
ggacagagaagcgugaacu

SEQ ID NO: 227033 - RNA, 19 nt, Homo sapiens
  misc_RNA (1)...(19): siRNA sense strand
cacccuggcugacaucauc

SEQ ID NO: 227034 - RNA, 19 nt, Homo sapiens
  misc_RNA (1)...(19): siRNA sense strand
acaaacgacucaacuucca

SEQ ID NO: 227035 - RNA, 19 nt, Homo sapiens
  misc_RNA (1)...(19): siRNA sense strand
gggagcaaauccucuacgu

SEQ ID NO: 227036 - RNA, 19 nt, Homo sapiens
  misc_RNA (1)...(19): siRNA sense strand
ggagguauuaucuaaguac

SEQ ID NO: 227037 - RNA, 19 nt, Homo sapiens
  misc_RNA (1)...(19): siRNA sense strand
aaauugcugagauggaaua

SEQ ID NO: 227038 - RNA, 19 nt, Homo sapiens
  misc_RNA (1)...(19): siRNA sense strand
uaccaggccaccaggauuu

SEQ ID NO: 227039 - RNA, 19 nt, Homo sapiens
  misc_RNA (1)...(19): siRNA sense strand
ucauggagaagcugacuga

SEQ ID NO: 227040 - RNA, 19 nt, Homo sapiens
  misc_RNA (1)...(19): siRNA sense strand
ugcgacugcugcuggauaa

SEQ ID NO: 227041 - RNA, 19 nt, Homo sapiens
  misc_RNA (1)...(19): siRNA sense strand
guagcaucaucaccaagug

SEQ ID NO: 227042 - RNA, 19 nt, Homo sapiens
  misc_RNA (1)...(19): siRNA sense strand
auacaaacgacucaacuuc

SEQ ID NO: 227043 - RNA, 19 nt, Homo sapiens
  misc_RNA (1)...(19): siRNA sense strand
gcuggaugcccuagucuuc

SEQ ID NO: 227044 - RNA, 19 nt, Homo sapiens
  misc_RNA (1)...(19): siRNA sense strand
ggugcuggaugcccuaguc

SEQ ID NO: 227045 - RNA, 19 nt, Homo sapiens
  misc_RNA (1)...(19): siRNA sense strand
gcugaaaauugcugagaug

SEQ ID NO: 227046 - RNA, 19 nt, Homo sapiens
  misc_RNA (1)...(19): siRNA sense strand
cgaaaucaggcgugagcuu

SEQ ID NO: 227047 - RNA, 19 nt, Homo sapiens
  misc_RNA (1)...(19): siRNA sense strand
cgacugcugcuggauaaga

SEQ ID NO: 227048 - RNA, 19 nt, Homo sapiens
  misc_RNA (1)...(19): siRNA sense strand
cuaaguaccgcaguggaaa

SEQ ID NO: 227049 - RNA, 19 nt, Homo sapiens
  misc_RNA (1)...(19): siRNA sense strand
gcugcuggauaagaaguau

SEQ ID NO: 227050 - RNA, 19 nt, Homo sapiens
  misc_RNA (1)...(19): siRNA sense strand
gguagcaucaucaccaagu

SEQ ID NO: 227051 - RNA, 19 nt, Homo sapiens
  misc_RNA (1)...(19): siRNA sense strand
ccuggagccugguucaaag

SEQ ID NO: 227052 - RNA, 19 nt, Homo sapiens
  misc_RNA (1)...(19): siRNA sense strand
uugcugagauggaauacag

SEQ ID NO: 227053 - RNA, 19 nt, Homo sapiens
  misc_RNA (1)...(19): siRNA sense strand
agaagcagacagagguuga

SEQ ID NO: 227054 - RNA, 19 nt, Homo sapiens
  misc_RNA (1)...(19): siRNA sense strand
gacucaacuuccaucucua

SEQ ID NO: 227055 - RNA, 19 nt, Homo sapiens
  misc_RNA (1)...(19): siRNA sense strand
ccagugcggccaugcugaa

SEQ ID NO: 227056 - RNA, 19 nt, Homo sapiens
  misc_RNA (1)...(19): siRNA sense strand
caaggcauuuaagaucauc

SEQ ID NO: 227057 - RNA, 19 nt, Homo sapiens
  misc_RNA (1)...(19): siRNA sense strand
cauuguggguagcaucauc

SEQ ID NO: 227058 - RNA, 19 nt, Homo sapiens
  misc_RNA (1)...(19): siRNA sense strand
caccagugccuccugacuu

SEQ ID NO: 227059 - RNA, 19 nt, Homo sapiens
  misc_RNA (1)...(19): siRNA sense strand
gaaguaugcacugccuuac

SEQ ID NO: 227060 - RNA, 19 nt, Homo sapiens
  misc_RNA (1)...(19): siRNA sense strand
ucuaaguaccgcaguggaa

SEQ ID NO: 227061 - RNA, 19 nt, Homo sapiens
  misc_RNA (1)...(19): siRNA sense strand
gcgccaagauccauucguu

SEQ ID NO: 227062 - RNA, 19 nt, Homo sapiens
  misc_RNA (1)...(19): siRNA sense strand
ugucacaccuggagaccua

SEQ ID NO: 227063 - RNA, 19 nt, Homo sapiens
  misc_RNA (1)...(19): siRNA sense strand
gaauuggccguugggcuua

SEQ ID NO: 227064 - RNA, 19 nt, Homo sapiens
  misc_RNA (1)...(19): siRNA sense strand
cuacaggaggccagaguga

SEQ ID NO: 227065 - RNA, 19 nt, Homo sapiens
  misc_RNA (1)...(19): siRNA sense strand
gagcagagaugaagacaag

SEQ ID NO: 227066 - RNA, 19 nt, Homo sapiens
  misc_RNA (1)...(19): siRNA sense strand
gacaagacaugaugaaauc

SEQ ID NO: 227067 - RNA, 19 nt, Homo sapiens
  misc_RNA (1)...(19): siRNA sense strand
gaacggagagcagagauga

SEQ ID NO: 227068 - RNA, 19 nt, Homo sapiens
  misc_RNA (1)...(19): siRNA sense strand
aauauggccuguuuaaaga

SEQ ID NO: 227069 - RNA, 19 nt, Homo sapiens
  misc_RNA (1)...(19): siRNA sense strand
gaacgucuccugucuuugg

SEQ ID NO: 227070 - RNA, 19 nt, Homo sapiens
  misc_RNA (1)...(19): siRNA sense strand
gaagaaaacccguaugcua

SEQ ID NO: 227071 - RNA, 19 nt, Homo sapiens
  misc_RNA (1)...(19): siRNA sense strand
gaagacaagacaugaugaa

SEQ ID NO: 227072 - RNA, 19 nt, Homo sapiens
  misc_RNA (1)...(19): siRNA sense strand
cggcuucccuuuguaaauu

SEQ ID NO: 227073 - RNA, 19 nt, Homo sapiens
  misc_RNA (1)...(19): siRNA sense strand
aaacccguaugcuagauuu

SEQ ID NO: 227074 - RNA, 19 nt, Homo sapiens
  misc_RNA (1)...(19): siRNA sense strand
ggacaggagugaggagaag

SEQ ID NO: 227075 - RNA, 19 nt, Homo sapiens
  misc_RNA (1)...(19): siRNA sense strand
ugaagaacgucuccugucu

SEQ ID NO: 227076 - RNA, 19 nt, Homo sapiens
  misc_RNA (1)...(19): siRNA sense strand
aaauauggccuguuuaaag

SEQ ID NO: 227077 - RNA, 19 nt, Homo sapiens
  misc_RNA (1)...(19): siRNA sense strand
gagaugaagacaagacaug

SEQ ID NO: 227078 - RNA, 19 nt, Homo sapiens
  misc_RNA (1)...(19): siRNA sense strand
ggagcugcuuguucucaga

SEQ ID NO: 227079 - RNA, 19 nt, Homo sapiens
  misc_RNA (1)...(19): siRNA sense strand
ccaccggcuucccuuugua

SEQ ID NO: 227080 - RNA, 19 nt, Homo sapiens
  misc_RNA (1)...(19): siRNA sense strand
gugaagagugccugaagaa

SEQ ID NO: 227081 - RNA, 19 nt, Homo sapiens
  misc_RNA (1)...(19): siRNA sense strand
agacaagacaugaugaaau

SEQ ID NO: 227082 - RNA, 19 nt, Homo sapiens
  misc_RNA (1)...(19): siRNA sense strand
ugucuuuggugcaacacua

SEQ ID NO: 227083 - RNA, 19 nt, Homo sapiens
  misc_RNA (1)...(19): siRNA sense strand
uuuguugggugaacuuuga

SEQ ID NO: 227084 - RNA, 19 nt, Homo sapiens
  misc_RNA (1)...(19): siRNA sense strand
ugugaagagugccugaaga

SEQ ID NO: 227085 - RNA, 19 nt, Homo sapiens
  misc_RNA (1)...(19): siRNA sense strand
gccaccggcuucccuuugu

SEQ ID NO: 227086 - RNA, 19 nt, Homo sapiens
  misc_RNA (1)...(19): siRNA sense strand
gaugaagacaagacaugau

SEQ ID NO: 227087 - RNA, 19 nt, Homo sapiens
  misc_RNA (1)...(19): siRNA sense strand
aagagugccugaagaacgu

SEQ ID NO: 227088 - RNA, 19 nt, Homo sapiens
  misc_RNA (1)...(19): siRNA sense strand
aaacaaaaccugugaagag

SEQ ID NO: 227089 - RNA, 19 nt, Homo sapiens
  misc_RNA (1)...(19): siRNA sense strand
ggaacggagagcagagaug

SEQ ID NO: 227090 - RNA, 19 nt, Homo sapiens
  misc_RNA (1)...(19): siRNA sense strand
ggaagccggacaggaguga

SEQ ID NO: 227091 - RNA, 19 nt, Homo sapiens
  misc_RNA (1)...(19): siRNA sense strand
gcagagaugaagacaagac

SEQ ID NO: 227092 - RNA, 19 nt, Homo sapiens
  misc_RNA (1)...(19): siRNA sense strand
ucccggagcugcuuguucu

SEQ ID NO: 227093 - RNA, 19 nt, Homo sapiens
  misc_RNA (1)...(19): siRNA sense strand
ugaagacaagacaugauga

SEQ ID NO: 227094 - RNA, 19 nt, Homo sapiens
  misc_RNA (1)...(19): siRNA sense strand
gaacuuugaggcgcugauc

SEQ ID NO: 227095 - RNA, 19 nt, Homo sapiens
  misc_RNA (1)...(19): siRNA sense strand
gaggaacggagagcagaga

SEQ ID NO: 227096 - RNA, 19 nt, Homo sapiens
  misc_RNA (1)...(19): siRNA sense strand
ggagagcagagaugaagac

SEQ ID NO: 227097 - RNA, 19 nt, Homo sapiens
  misc_RNA (1)...(19): siRNA sense strand
ggcuucccuuuguaaauug

SEQ ID NO: 227098 - RNA, 19 nt, Homo sapiens
  misc_RNA (1)...(19): siRNA sense strand
gaaaacccguaugcuagau

SEQ ID NO: 227099 - RNA, 19 nt, Homo sapiens
  misc_RNA (1)...(19): siRNA sense strand
cccguaugcuagauuugaa

SEQ ID NO: 227100 - RNA, 19 nt, Homo sapiens
  misc_RNA (1)...(19): siRNA sense strand
ggacauaccauucagguua

SEQ ID NO: 227101 - RNA, 19 nt, Homo sapiens
  misc_RNA (1)...(19): siRNA sense strand
gcacacgguuaauuucaaa

SEQ ID NO: 227102 - RNA, 19 nt, Homo sapiens
  misc_RNA (1)...(19): siRNA sense strand
ggaaggcugugaugggauu

SEQ ID NO: 227103 - RNA, 19 nt, Homo sapiens
  misc_RNA (1)...(19): siRNA sense strand
ccgauacccuuuaacuaua

SEQ ID NO: 227104 - RNA, 19 nt, Homo sapiens
  misc_RNA (1)...(19): siRNA sense strand
ggaagaggaugaggaggaa

SEQ ID NO: 227105 - RNA, 19 nt, Homo sapiens
  misc_RNA (1)...(19): siRNA sense strand
caagagaggcuagguauga

SEQ ID NO: 227106 - RNA, 19 nt, Homo sapiens
  misc_RNA (1)...(19): siRNA sense strand
ugacugaaauccuccaaga

SEQ ID NO: 227107 - RNA, 19 nt, Homo sapiens
  misc_RNA (1)...(19): siRNA sense strand
gcuuuaauccuaacacuuu

SEQ ID NO: 227108 - RNA, 19 nt, Homo sapiens
  misc_RNA (1)...(19): siRNA sense strand
gcacggaaucgccaucauu

SEQ ID NO: 227109 - RNA, 19 nt, Homo sapiens
  misc_RNA (1)...(19): siRNA sense strand
gacauaccauucagguuau

SEQ ID NO: 227110 - RNA, 19 nt, Homo sapiens
  misc_RNA (1)...(19): siRNA sense strand
caucauugcucuguuuguu

SEQ ID NO: 227111 - RNA, 19 nt, Homo sapiens
  misc_RNA (1)...(19): siRNA sense strand
gggaauaccagucuccuau

SEQ ID NO: 227112 - RNA, 19 nt, Homo sapiens
  misc_RNA (1)...(19): siRNA sense strand
guucugagcacacgguuaa

SEQ ID NO: 227113 - RNA, 19 nt, Homo sapiens
  misc_RNA (1)...(19): siRNA sense strand
ggucugguguuuccugaug

SEQ ID NO: 227114 - RNA, 19 nt, Homo sapiens
  misc_RNA (1)...(19): siRNA sense strand
acugaaauccuccaagaua

SEQ ID NO: 227115 - RNA, 19 nt, Homo sapiens
  misc_RNA (1)...(19): siRNA sense strand
gauaggaaaggaacauguu

SEQ ID NO: 227116 - RNA, 19 nt, Homo sapiens
  misc_RNA (1)...(19): siRNA sense strand
gaaauccuccaagauauuc

SEQ ID NO: 227117 - RNA, 19 nt, Homo sapiens
  misc_RNA (1)...(19): siRNA sense strand
ugaaggcugugacugaaau

SEQ ID NO: 227118 - RNA, 19 nt, Homo sapiens
  misc_RNA (1)...(19): siRNA sense strand
ccuccaagauauucaguau

SEQ ID NO: 227119 - RNA, 19 nt, Homo sapiens
  misc_RNA (1)...(19): siRNA sense strand
cgauacccuuuaacuauau

SEQ ID NO: 227120 - RNA, 19 nt, Homo sapiens
  misc_RNA (1)...(19): siRNA sense strand
cauuagagcugcauuucag

SEQ ID NO: 227121 - RNA, 19 nt, Homo sapiens
  misc_RNA (1)...(19): siRNA sense strand
gagcacacgguuaauuuca

SEQ ID NO: 227122 - RNA, 19 nt, Homo sapiens
  misc_RNA (1)...(19): siRNA sense strand
auaccuugcuuuaauccua

SEQ ID NO: 227123 - RNA, 19 nt, Homo sapiens
  misc_RNA (1)...(19): siRNA sense strand
ugaaauccuccaagauauu

SEQ ID NO: 227124 - RNA, 19 nt, Homo sapiens
  misc_RNA (1)...(19): siRNA sense strand
cugaaauccuccaagauau

SEQ ID NO: 227125 - RNA, 19 nt, Homo sapiens
  misc_RNA (1)...(19): siRNA sense strand
acaauaccuugcuuuaauc

SEQ ID NO: 227126 - RNA, 19 nt, Homo sapiens
  misc_RNA (1)...(19): siRNA sense strand
gggauuacuggguguauga

SEQ ID NO: 227127 - RNA, 19 nt, Homo sapiens
  misc_RNA (1)...(19): siRNA sense strand
cgccaucauugcucuguuu

SEQ ID NO: 227128 - RNA, 19 nt, Homo sapiens
  misc_RNA (1)...(19): siRNA sense strand
ggaccugagcuucaucgaa

SEQ ID NO: 227129 - RNA, 19 nt, Homo sapiens
  misc_RNA (1)...(19): siRNA sense strand
aggcugaggacacauguua

SEQ ID NO: 227130 - RNA, 19 nt, Homo sapiens
  misc_RNA (1)...(19): siRNA sense strand
gcuugaaggcugugacuga

SEQ ID NO: 227131 - RNA, 19 nt, Homo sapiens
  misc_RNA (1)...(19): siRNA sense strand
ucauugcucuguuuguuca

SEQ ID NO: 227132 - RNA, 19 nt, Homo sapiens
  misc_RNA (1)...(19): siRNA sense strand
ggaacauguuggcuugaag

SEQ ID NO: 227133 - RNA, 19 nt, Homo sapiens
  misc_RNA (1)...(19): siRNA sense strand
caucccaccuugcagugaa

SEQ ID NO: 227134 - RNA, 19 nt, Homo sapiens
  misc_RNA (1)...(19): siRNA sense strand
cuauuaaccuaaacucaag

SEQ ID NO: 227135 - RNA, 19 nt, Homo sapiens
  misc_RNA (1)...(19): siRNA sense strand
uaccuugcuuuaauccuaa

SEQ ID NO: 227136 - RNA, 19 nt, Homo sapiens
  misc_RNA (1)...(19): siRNA sense strand
cgguuaauuucaaagcuuu

SEQ ID NO: 227137 - RNA, 19 nt, Homo sapiens
  misc_RNA (1)...(19): siRNA sense strand
ccuauuaaccuaaacucaa

SEQ ID NO: 227138 - RNA, 19 nt, Homo sapiens
  misc_RNA (1)...(19): siRNA sense strand
gguguuuccugaugcuaau

SEQ ID NO: 227139 - RNA, 19 nt, Homo sapiens
  misc_RNA (1)...(19): siRNA sense strand
caagauauucaguauaagg

SEQ ID NO: 227140 - RNA, 19 nt, Homo sapiens
  misc_RNA (1)...(19): siRNA sense strand
ccagucuccuauuaaccua

SEQ ID NO: 227141 - RNA, 19 nt, Homo sapiens
  misc_RNA (1)...(19): siRNA sense strand
gcuacagauagaagaauuu

SEQ ID NO: 227142 - RNA, 19 nt, Homo sapiens
  misc_RNA (1)...(19): siRNA sense strand
uccgauacccuuuaacuau

SEQ ID NO: 227143 - RNA, 19 nt, Homo sapiens
  misc_RNA (1)...(19): siRNA sense strand
uuauuccgauacccuuuaa

SEQ ID NO: 227144 - RNA, 19 nt, Homo sapiens
  misc_RNA (1)...(19): siRNA sense strand
cugagcacacgguuaauuu

SEQ ID NO: 227145 - RNA, 19 nt, Homo sapiens
  misc_RNA (1)...(19): siRNA sense strand
acagauagaagaauuucga

SEQ ID NO: 227146 - RNA, 19 nt, Homo sapiens
  misc_RNA (1)...(19): siRNA sense strand
ggaacuccacucuguuugg

SEQ ID NO: 227147 - RNA, 19 nt, Homo sapiens
  misc_RNA (1)...(19): siRNA sense strand
ugaagucaccaaugaugga

SEQ ID NO: 227148 - RNA, 19 nt, Homo sapiens
  misc_RNA (1)...(19): siRNA sense strand
cuugaaggcugugacugaa

SEQ ID NO: 227149 - RNA, 19 nt, Homo sapiens
  misc_RNA (1)...(19): siRNA sense strand
cacggaaucgccaucauug

SEQ ID NO: 227150 - RNA, 19 nt, Homo sapiens
  misc_RNA (1)...(19): siRNA sense strand
uuagagcugcauuucagua

SEQ ID NO: 227151 - RNA, 19 nt, Homo sapiens
  misc_RNA (1)...(19): siRNA sense strand
ggggaaguccaaaacaaua

SEQ ID NO: 227152 - RNA, 19 nt, Homo sapiens
  misc_RNA (1)...(19): siRNA sense strand
gcugaggacacauguuaag

SEQ ID NO: 227153 - RNA, 19 nt, Homo sapiens
  misc_RNA (1)...(19): siRNA sense strand
gaaggcugaggacacaugu

SEQ ID NO: 227154 - RNA, 19 nt, Homo sapiens
  misc_RNA (1)...(19): siRNA sense strand
ccgagaaggaagaggauga

SEQ ID NO: 227155 - RNA, 19 nt, Homo sapiens
  misc_RNA (1)...(19): siRNA sense strand
agucuccuauuaaccuaaa

SEQ ID NO: 227156 - RNA, 19 nt, Homo sapiens
  misc_RNA (1)...(19): siRNA sense strand
ugaacuguacgaagugaga

SEQ ID NO: 227157 - RNA, 19 nt, Homo sapiens
  misc_RNA (1)...(19): siRNA sense strand
ccaaaacaauaccuugcuu

SEQ ID NO: 227158 - RNA, 19 nt, Homo sapiens
  misc_RNA (1)...(19): siRNA sense strand
ggaugaggaggaagaagag

SEQ ID NO: 227159 - RNA, 19 nt, Homo sapiens
  misc_RNA (1)...(19): siRNA sense strand
cgaaggcugaggacacaug

SEQ ID NO: 227160 - RNA, 19 nt, Homo sapiens
  misc_RNA (1)...(19): siRNA sense strand
gggcuacgaggaagguguu

SEQ ID NO: 227161 - RNA, 19 nt, Homo sapiens
  misc_RNA (1)...(19): siRNA sense strand
aggaacauguuggcuugaa

SEQ ID NO: 227162 - RNA, 19 nt, Homo sapiens
  misc_RNA (1)...(19): siRNA sense strand
uguacgaagugagauuuca

SEQ ID NO: 227163 - RNA, 19 nt, Homo sapiens
  misc_RNA (1)...(19): siRNA sense strand
auaccagucuccuauuaac

SEQ ID NO: 227164 - RNA, 19 nt, Homo sapiens
  misc_RNA (1)...(19): siRNA sense strand
ccagcuacagauagaagaa

SEQ ID NO: 227165 - RNA, 19 nt, Homo sapiens
  misc_RNA (1)...(19): siRNA sense strand
caaaacaauaccuugcuuu

SEQ ID NO: 227166 - RNA, 19 nt, Homo sapiens
  misc_RNA (1)...(19): siRNA sense strand
gaacuguacgaagugagau

SEQ ID NO: 227167 - RNA, 19 nt, Homo sapiens
  misc_RNA (1)...(19): siRNA sense strand
cuacagauagaagaauuuc

SEQ ID NO: 227168 - RNA, 19 nt, Homo sapiens
  misc_RNA (1)...(19): siRNA sense strand
acgguuaauuucaaagcuu

SEQ ID NO: 227169 - RNA, 19 nt, Homo sapiens
  misc_RNA (1)...(19): siRNA sense strand
gagggucucuucuuaagua

SEQ ID NO: 227170 - RNA, 19 nt, Homo sapiens
  misc_RNA (1)...(19): siRNA sense strand
ggaaggagauugaguacga

SEQ ID NO: 227171 - RNA, 19 nt, Homo sapiens
  misc_RNA (1)...(19): siRNA sense strand
guaugagggucucuucuua

SEQ ID NO: 227172 - RNA, 19 nt, Homo sapiens
  misc_RNA (1)...(19): siRNA sense strand
gagcaugaguggacaauuc

SEQ ID NO: 227173 - RNA, 19 nt, Homo sapiens
  misc_RNA (1)...(19): siRNA sense strand
ccagaggucuccauuaaga

SEQ ID NO: 227174 - RNA, 19 nt, Homo sapiens
  misc_RNA (1)...(19): siRNA sense strand
gcaccaagcuggcccuuca

SEQ ID NO: 227175 - RNA, 19 nt, Homo sapiens
  misc_RNA (1)...(19): siRNA sense strand
uaccagaggucuccauuaa

SEQ ID NO: 227176 - RNA, 19 nt, Homo sapiens
  misc_RNA (1)...(19): siRNA sense strand
gcacacacacugcguauga

SEQ ID NO: 227177 - RNA, 19 nt, Homo sapiens
  misc_RNA (1)...(19): siRNA sense strand
uggccaagcuggagaauuu

SEQ ID NO: 227178 - RNA, 19 nt, Homo sapiens
  misc_RNA (1)...(19): siRNA sense strand
gaguaaaggugccucaguu

SEQ ID NO: 227179 - RNA, 19 nt, Homo sapiens
  misc_RNA (1)...(19): siRNA sense strand
gcucugcccuggccaguaa

SEQ ID NO: 227180 - RNA, 19 nt, Homo sapiens
  misc_RNA (1)...(19): siRNA sense strand
gaagagcguuggugaaguc

SEQ ID NO: 227181 - RNA, 19 nt, Homo sapiens
  misc_RNA (1)...(19): siRNA sense strand
ugagaaccguuucaaguuu

SEQ ID NO: 227182 - RNA, 19 nt, Homo sapiens
  misc_RNA (1)...(19): siRNA sense strand
gaaggugcauguugacugu

SEQ ID NO: 227183 - RNA, 19 nt, Homo sapiens
  misc_RNA (1)...(19): siRNA sense strand
uaacccaggugauacguaa

SEQ ID NO: 227184 - RNA, 19 nt, Homo sapiens
  misc_RNA (1)...(19): siRNA sense strand
gagcauggcgucaagguaa

SEQ ID NO: 227185 - RNA, 19 nt, Homo sapiens
  misc_RNA (1)...(19): siRNA sense strand
gaugggaccuuagcaaguu

SEQ ID NO: 227186 - RNA, 19 nt, Homo sapiens
  misc_RNA (1)...(19): siRNA sense strand
gcaccaagcaggaggaauu

SEQ ID NO: 227187 - RNA, 19 nt, Homo sapiens
  misc_RNA (1)...(19): siRNA sense strand
gaaguccucucggaaggua

SEQ ID NO: 227188 - RNA, 19 nt, Homo sapiens
  misc_RNA (1)...(19): siRNA sense strand
gaaacagauugacacaguu

SEQ ID NO: 227189 - RNA, 19 nt, Homo sapiens
  misc_RNA (1)...(19): siRNA sense strand
gaucgacucuacuuugaug

SEQ ID NO: 227190 - RNA, 19 nt, Homo sapiens
  misc_RNA (1)...(19): siRNA sense strand
ccacguagcagcacuggua

SEQ ID NO: 227191 - RNA, 19 nt, Homo sapiens
  misc_RNA (1)...(19): siRNA sense strand
gcucuagcguugaauuuga

SEQ ID NO: 227192 - RNA, 19 nt, Homo sapiens
  misc_RNA (1)...(19): siRNA sense strand
ccaguaaggccacagguua

SEQ ID NO: 227193 - RNA, 19 nt, Homo sapiens
  misc_RNA (1)...(19): siRNA sense strand
cagaugaaauggaugaguu

SEQ ID NO: 227194 - RNA, 19 nt, Homo sapiens
  misc_RNA (1)...(19): siRNA sense strand
gagcggugcugcuaugaau

SEQ ID NO: 227195 - RNA, 19 nt, Homo sapiens
  misc_RNA (1)...(19): siRNA sense strand
ugaaacagauugacacagu

SEQ ID NO: 227196 - RNA, 19 nt, Homo sapiens
  misc_RNA (1)...(19): siRNA sense strand
ggccaagacuuacaagaug

SEQ ID NO: 227197 - RNA, 19 nt, Homo sapiens
  misc_RNA (1)...(19): siRNA sense strand
caagcuggcccuucagaua

SEQ ID NO: 227198 - RNA, 19 nt, Homo sapiens
  misc_RNA (1)...(19): siRNA sense strand
ggccagcccagacaaauua

SEQ ID NO: 227199 - RNA, 19 nt, Homo sapiens
  misc_RNA (1)...(19): siRNA sense strand
caaauuaccuauaccuaac

SEQ ID NO: 227200 - RNA, 19 nt, Homo sapiens
  misc_RNA (1)...(19): siRNA sense strand
ucagaugucucaccuguuc

SEQ ID NO: 227201 - RNA, 19 nt, Homo sapiens
  misc_RNA (1)...(19): siRNA sense strand
cgaaagaugggauauaaga

SEQ ID NO: 227202 - RNA, 19 nt, Homo sapiens
  misc_RNA (1)...(19): siRNA sense strand
gaugaccagcugaaaguua

SEQ ID NO: 227203 - RNA, 19 nt, Homo sapiens
  misc_RNA (1)...(19): siRNA sense strand
gauggaaggagauugagua

SEQ ID NO: 227204 - RNA, 19 nt, Homo sapiens
  misc_RNA (1)...(19): siRNA sense strand
cuacaaggcacagaucuua

SEQ ID NO: 227205 - RNA, 19 nt, Homo sapiens
  misc_RNA (1)...(19): siRNA sense strand
ccagacaaauuaccuauac

SEQ ID NO: 227206 - RNA, 19 nt, Homo sapiens
  misc_RNA (1)...(19): siRNA sense strand
agacugggcuccucucuuc

SEQ ID NO: 227207 - RNA, 19 nt, Homo sapiens
  misc_RNA (1)...(19): siRNA sense strand
ccaaugaugguuccaauga

SEQ ID NO: 227208 - RNA, 19 nt, Homo sapiens
  misc_RNA (1)...(19): siRNA sense strand
gaaccaggugggacacaua

SEQ ID NO: 227209 - RNA, 19 nt, Homo sapiens
  misc_RNA (1)...(19): siRNA sense strand
acuuugagcuggugauuaa

SEQ ID NO: 227210 - RNA, 19 nt, Homo sapiens
  misc_RNA (1)...(19): siRNA sense strand
gaucaaagccauugugcau

SEQ ID NO: 227211 - RNA, 19 nt, Homo sapiens
  misc_RNA (1)...(19): siRNA sense strand
guggacagcugcccaacaa

SEQ ID NO: 227212 - RNA, 19 nt, Homo sapiens
  misc_RNA (1)...(19): siRNA sense strand
gcucuggcuuugccucuaa

SEQ ID NO: 227213 - RNA, 19 nt, Homo sapiens
  misc_RNA (1)...(19): siRNA sense strand
cagcugacuucuacacuga

SEQ ID NO: 227214 - RNA, 19 nt, Homo sapiens
  misc_RNA (1)...(19): siRNA sense strand
cagcagccgucuccaaaga

SEQ ID NO: 227215 - RNA, 19 nt, Homo sapiens
  misc_RNA (1)...(19): siRNA sense strand
gagcguuggugaagucaug

SEQ ID NO: 227216 - RNA, 19 nt, Homo sapiens
  misc_RNA (1)...(19): siRNA sense strand
ggucucuucuuaaguaaug

SEQ ID NO: 227217 - RNA, 19 nt, Homo sapiens
  misc_RNA (1)...(19): siRNA sense strand
caagugcaccaaacucuuu

SEQ ID NO: 227218 - RNA, 19 nt, Homo sapiens
  misc_RNA (1)...(19): siRNA sense strand
ucgaacaccucauguccua

SEQ ID NO: 227219 - RNA, 19 nt, Homo sapiens
  misc_RNA (1)...(19): siRNA sense strand
gcuagugcgugcagccuuu

SEQ ID NO: 227220 - RNA, 19 nt, Homo sapiens
  misc_RNA (1)...(19): siRNA sense strand
gccaagacuuacaagauga

SEQ ID NO: 227221 - RNA, 19 nt, Homo sapiens
  misc_RNA (1)...(19): siRNA sense strand
gugaucgacucuacuuuga

SEQ ID NO: 227222 - RNA, 19 nt, Homo sapiens
  misc_RNA (1)...(19): siRNA sense strand
gcauugggcguucauuuga

SEQ ID NO: 227223 - RNA, 19 nt, Homo sapiens
  misc_RNA (1)...(19): siRNA sense strand
gaacccagcguggauuauu

SEQ ID NO: 227224 - RNA, 19 nt, Homo sapiens
  misc_RNA (1)...(19): siRNA sense strand
uccgaaagaugggauauaa

SEQ ID NO: 227225 - RNA, 19 nt, Homo sapiens
  misc_RNA (1)...(19): siRNA sense strand
ucacugaucccuccuacaa

SEQ ID NO: 227226 - RNA, 19 nt, Homo sapiens
  misc_RNA (1)...(19): siRNA sense strand
gagcaguauuacaucauug

SEQ ID NO: 227227 - RNA, 19 nt, Homo sapiens
  misc_RNA (1)...(19): siRNA sense strand
cacaacagcuugccuuucu

SEQ ID NO: 227228 - RNA, 19 nt, Homo sapiens
  misc_RNA (1)...(19): siRNA sense strand
agacuuacaagaugagaua

SEQ ID NO: 227229 - RNA, 19 nt, Homo sapiens
  misc_RNA (1)...(19): siRNA sense strand
acuguggccucaaguauaa

SEQ ID NO: 227230 - RNA, 19 nt, Homo sapiens
  misc_RNA (1)...(19): siRNA sense strand
cggcacagcugacuucuac

SEQ ID NO: 227231 - RNA, 19 nt, Homo sapiens
  misc_RNA (1)...(19): siRNA sense strand
gcuguggacuggcacuuug

SEQ ID NO: 227232 - RNA, 19 nt, Homo sapiens
  misc_RNA (1)...(19): siRNA sense strand
gaauggaacagaaccuuca

SEQ ID NO: 227233 - RNA, 19 nt, Homo sapiens
  misc_RNA (1)...(19): siRNA sense strand
gugaggagcugggaacugu

SEQ ID NO: 227234 - RNA, 19 nt, Homo sapiens
  misc_RNA (1)...(19): siRNA sense strand
gcugaaaguuauugaaugc

SEQ ID NO: 227235 - RNA, 19 nt, Homo sapiens
  misc_RNA (1)...(19): siRNA sense strand
guuauccacuggcuuaugu

SEQ ID NO: 227236 - RNA, 19 nt, Homo sapiens
  misc_RNA (1)...(19): siRNA sense strand
gaugguguguuacugacuu

SEQ ID NO: 227237 - RNA, 19 nt, Homo sapiens
  misc_RNA (1)...(19): siRNA sense strand
caaugaugguuccaaugaa

SEQ ID NO: 227238 - RNA, 19 nt, Homo sapiens
  misc_RNA (1)...(19): siRNA sense strand
ggacuguggccucaaguau

SEQ ID NO: 227239 - RNA, 19 nt, Homo sapiens
  misc_RNA (1)...(19): siRNA sense strand
cagguuauccacuggcuua

SEQ ID NO: 227240 - RNA, 19 nt, Homo sapiens
  misc_RNA (1)...(19): siRNA sense strand
agaagaagaugguggugau

SEQ ID NO: 227241 - RNA, 19 nt, Homo sapiens
  misc_RNA (1)...(19): siRNA sense strand
ugucucaccuguucaaugu

SEQ ID NO: 227242 - RNA, 19 nt, Homo sapiens
  misc_RNA (1)...(19): siRNA sense strand
ccaaggaucagaugucuca

SEQ ID NO: 227243 - RNA, 19 nt, Homo sapiens
  misc_RNA (1)...(19): siRNA sense strand
gaggggagguugccuauau

SEQ ID NO: 227244 - RNA, 19 nt, Homo sapiens
  misc_RNA (1)...(19): siRNA sense strand
gugcucaccuauccucuga

SEQ ID NO: 227245 - RNA, 19 nt, Homo sapiens
  misc_RNA (1)...(19): siRNA sense strand
guaccagaggucuccauua

SEQ ID NO: 227246 - RNA, 19 nt, Homo sapiens
  misc_RNA (1)...(19): siRNA sense strand
gaagcacggacgcacagua

SEQ ID NO: 227247 - RNA, 19 nt, Homo sapiens
  misc_RNA (1)...(19): siRNA sense strand
ggagauccugcuaauuaaa

SEQ ID NO: 227248 - RNA, 19 nt, Homo sapiens
  misc_RNA (1)...(19): siRNA sense strand
gauaucaagugcaccaaac

SEQ ID NO: 227249 - RNA, 19 nt, Homo sapiens
  misc_RNA (1)...(19): siRNA sense strand
ccaggaggcuaaggagauu

SEQ ID NO: 227250 - RNA, 19 nt, Homo sapiens
  misc_RNA (1)...(19): siRNA sense strand
cgagucagcacaaagauug

SEQ ID NO: 227251 - RNA, 19 nt, Homo sapiens
  misc_RNA (1)...(19): siRNA sense strand
caauuaaggcccugaagga

SEQ ID NO: 227252 - RNA, 19 nt, Homo sapiens
  misc_RNA (1)...(19): siRNA sense strand
ggacuuccaccaccacgaa

SEQ ID NO: 227253 - RNA, 19 nt, Homo sapiens
  misc_RNA (1)...(19): siRNA sense strand
cagcuugccuuucuucagu

SEQ ID NO: 227254 - RNA, 19 nt, Homo sapiens
  misc_RNA (1)...(19): siRNA sense strand
uuagagagcggcugacuga

SEQ ID NO: 227255 - RNA, 19 nt, Homo sapiens
  misc_RNA (1)...(19): siRNA sense strand
gauggugggugaccugaag

SEQ ID NO: 227256 - RNA, 19 nt, Homo sapiens
  misc_RNA (1)...(19): siRNA sense strand
gcugagcggugcugcuaug

SEQ ID NO: 227257 - RNA, 19 nt, Homo sapiens
  misc_RNA (1)...(19): siRNA sense strand
ggacagcugcccaacaaca

SEQ ID NO: 227258 - RNA, 19 nt, Homo sapiens
  misc_RNA (1)...(19): siRNA sense strand
ugagcaguauuacaucauu

SEQ ID NO: 227259 - RNA, 19 nt, Homo sapiens
  misc_RNA (1)...(19): siRNA sense strand
ggcagcaaauucucuugaa

SEQ ID NO: 227260 - RNA, 19 nt, Homo sapiens
  misc_RNA (1)...(19): siRNA sense strand
gcacaccaguggagaccau

SEQ ID NO: 227261 - RNA, 19 nt, Homo sapiens
  misc_RNA (1)...(19): siRNA sense strand
ucugggcgcugcuuucuga

SEQ ID NO: 227262 - RNA, 19 nt, Homo sapiens
  misc_RNA (1)...(19): siRNA sense strand
gauggagcauuucgagaca

SEQ ID NO: 227263 - RNA, 19 nt, Homo sapiens
  misc_RNA (1)...(19): siRNA sense strand
gcugagaaccguuucaagu

SEQ ID NO: 227264 - RNA, 19 nt, Homo sapiens
  misc_RNA (1)...(19): siRNA sense strand
ccacacuggugaguccaua

SEQ ID NO: 227265 - RNA, 19 nt, Homo sapiens
  misc_RNA (1)...(19): siRNA sense strand
ggccuuugcugccagaaug

SEQ ID NO: 227266 - RNA, 19 nt, Homo sapiens
  misc_RNA (1)...(19): siRNA sense strand
gcucuggcgucuaccguau

SEQ ID NO: 227267 - RNA, 19 nt, Homo sapiens
  misc_RNA (1)...(19): siRNA sense strand
gaucuuagugcucaccuau

SEQ ID NO: 227268 - RNA, 19 nt, Homo sapiens
  misc_RNA (1)...(19): siRNA sense strand
ggacacauaaggaggacuu

SEQ ID NO: 227269 - RNA, 19 nt, Homo sapiens
  misc_RNA (1)...(19): siRNA sense strand
gaauggagauggagaaguu

SEQ ID NO: 227270 - RNA, 19 nt, Homo sapiens
  misc_RNA (1)...(19): siRNA sense strand
gaacugaagcuauugauuc

SEQ ID NO: 227271 - RNA, 19 nt, Homo sapiens
  misc_RNA (1)...(19): siRNA sense strand
ggacaagaauggagaugga

SEQ ID NO: 227272 - RNA, 19 nt, Homo sapiens
  misc_RNA (1)...(19): siRNA sense strand
uucaagaacuggacaagaa

SEQ ID NO: 227273 - RNA, 19 nt, Homo sapiens
  misc_RNA (1)...(19): siRNA sense strand
aggaugaacugaagcuauu

SEQ ID NO: 227274 - RNA, 19 nt, Homo sapiens
  misc_RNA (1)...(19): siRNA sense strand
gucaaaggaugaacugaag

SEQ ID NO: 227275 - RNA, 19 nt, Homo sapiens
  misc_RNA (1)...(19): siRNA sense strand
gagauggagaaguuaguuu

SEQ ID NO: 227276 - RNA, 19 nt, Homo sapiens
  misc_RNA (1)...(19): siRNA sense strand
gaagaauuccaaguauuag

SEQ ID NO: 227277 - RNA, 19 nt, Homo sapiens
  misc_RNA (1)...(19): siRNA sense strand
guccaaacacccuagauga

SEQ ID NO: 227278 - RNA, 19 nt, Homo sapiens
  misc_RNA (1)...(19): siRNA sense strand
gaggaacugaagaggauuu

SEQ ID NO: 227279 - RNA, 19 nt, Homo sapiens
  misc_RNA (1)...(19): siRNA sense strand
cugaggaacugaagaggau

SEQ ID NO: 227280 - RNA, 19 nt, Homo sapiens
  misc_RNA (1)...(19): siRNA sense strand
ggagauggagaaguuaguu

SEQ ID NO: 227281 - RNA, 19 nt, Homo sapiens
  misc_RNA (1)...(19): siRNA sense strand
cagaccaguugucaaagga

SEQ ID NO: 227282 - RNA, 19 nt, Homo sapiens
  misc_RNA (1)...(19): siRNA sense strand
caagaauggagauggagaa

SEQ ID NO: 227283 - RNA, 19 nt, Homo sapiens
  misc_RNA (1)...(19): siRNA sense strand
gaugaacugaagcuauuga

SEQ ID NO: 227284 - RNA, 19 nt, Homo sapiens
  misc_RNA (1)...(19): siRNA sense strand
ccaaacacccuagaugauc

SEQ ID NO: 227285 - RNA, 19 nt, Homo sapiens
  misc_RNA (1)...(19): siRNA sense strand
ccagaccaguugucaaagg

SEQ ID NO: 227286 - RNA, 19 nt, Homo sapiens
  misc_RNA (1)...(19): siRNA sense strand
gguccaaacacccuagaug

SEQ ID NO: 227287 - RNA, 19 nt, Homo sapiens
  misc_RNA (1)...(19): siRNA sense strand
ugucaaaggaugaacugaa

SEQ ID NO: 227288 - RNA, 19 nt, Homo sapiens
  misc_RNA (1)...(19): siRNA sense strand
caagaacuggacaagaaug

SEQ ID NO: 227289 - RNA, 19 nt, Homo sapiens
  misc_RNA (1)...(19): siRNA sense strand
ugaacugaagcuauugauu

SEQ ID NO: 227290 - RNA, 19 nt, Homo sapiens
  misc_RNA (1)...(19): siRNA sense strand
ucaagaacuggacaagaau

SEQ ID NO: 227291 - RNA, 19 nt, Homo sapiens
  misc_RNA (1)...(19): siRNA sense strand
caaaggaugaacugaagcu

SEQ ID NO: 227292 - RNA, 19 nt, Homo sapiens
  misc_RNA (1)...(19): siRNA sense strand
gauccagaccaguugucaa

SEQ ID NO: 227293 - RNA, 19 nt, Homo sapiens
  misc_RNA (1)...(19): siRNA sense strand
ggagaaagauaaagguuug

SEQ ID NO: 227294 - RNA, 19 nt, Homo sapiens
  misc_RNA (1)...(19): siRNA sense strand
gugaagcuguuuccuaaua

SEQ ID NO: 227295 - RNA, 19 nt, Homo sapiens
  misc_RNA (1)...(19): siRNA sense strand
ggacugggaugaagagaug

SEQ ID NO: 227296 - RNA, 19 nt, Homo sapiens
  misc_RNA (1)...(19): siRNA sense strand
gcaagaacgugcugaucaa

SEQ ID NO: 227297 - RNA, 19 nt, Homo sapiens
  misc_RNA (1)...(19): siRNA sense strand
gcaaauucguucucaguuc

SEQ ID NO: 227298 - RNA, 19 nt, Homo sapiens
  misc_RNA (1)...(19): siRNA sense strand
gauaaagguuugcagacaa

SEQ ID NO: 227299 - RNA, 19 nt, Homo sapiens
  misc_RNA (1)...(19): siRNA sense strand
ccuaugaggugaagauuga

SEQ ID NO: 227300 - RNA, 19 nt, Homo sapiens
  misc_RNA (1)...(19): siRNA sense strand
ggacaaagaugaggaugag

SEQ ID NO: 227301 - RNA, 19 nt, Homo sapiens
  misc_RNA (1)...(19): siRNA sense strand
ggaggaagaugaggaggaa

SEQ ID NO: 227302 - RNA, 19 nt, Homo sapiens
  misc_RNA (1)...(19): siRNA sense strand
gcacggagacucagaauac

SEQ ID NO: 227303 - RNA, 19 nt, Homo sapiens
  misc_RNA (1)...(19): siRNA sense strand
ggaggaagaagacaagaaa

SEQ ID NO: 227304 - RNA, 19 nt, Homo sapiens
  misc_RNA (1)...(19): siRNA sense strand
caagaagguucaugucauc

SEQ ID NO: 227305 - RNA, 19 nt, Homo sapiens
  misc_RNA (1)...(19): siRNA sense strand
ggcauacgcugaggaguuu

SEQ ID NO: 227306 - RNA, 19 nt, Homo sapiens
  misc_RNA (1)...(19): siRNA sense strand
uaacaaaggcagcagagaa

SEQ ID NO: 227307 - RNA, 19 nt, Homo sapiens
  misc_RNA (1)...(19): siRNA sense strand
uugcaaggaugaugaguuu

SEQ ID NO: 227308 - RNA, 19 nt, Homo sapiens
  misc_RNA (1)...(19): siRNA sense strand
ccaaacacaagucagauuu

SEQ ID NO: 227309 - RNA, 19 nt, Homo sapiens
  misc_RNA (1)...(19): siRNA sense strand
gauaaaggauccugaugcu

SEQ ID NO: 227310 - RNA, 19 nt, Homo sapiens
  misc_RNA (1)...(19): siRNA sense strand
ccaagaagguucaugucau

SEQ ID NO: 227311 - RNA, 19 nt, Homo sapiens
  misc_RNA (1)...(19): siRNA sense strand
agaaacaaaugaaggacaa

SEQ ID NO: 227312 - RNA, 19 nt, Homo sapiens
  misc_RNA (1)...(19): siRNA sense strand
ggaggaugaugaggacaaa

SEQ ID NO: 227313 - RNA, 19 nt, Homo sapiens
  misc_RNA (1)...(19): siRNA sense strand
gcauaucccugacccugau

SEQ ID NO: 227314 - RNA, 19 nt, Homo sapiens
  misc_RNA (1)...(19): siRNA sense strand
gaagauaaaggauccugau

SEQ ID NO: 227315 - RNA, 19 nt, Homo sapiens
  misc_RNA (1)...(19): siRNA sense strand
gggacaagcccgagcauau

SEQ ID NO: 227316 - RNA, 19 nt, Homo sapiens
  misc_RNA (1)...(19): siRNA sense strand
gcaccaagaagguucaugu

SEQ ID NO: 227317 - RNA, 19 nt, Homo sapiens
  misc_RNA (1)...(19): siRNA sense strand
gaagcuguuuccuaauagu

SEQ ID NO: 227318 - RNA, 19 nt, Homo sapiens
  misc_RNA (1)...(19): siRNA sense strand
gaucgaauccaaacacaag

SEQ ID NO: 227319 - RNA, 19 nt, Homo sapiens
  misc_RNA (1)...(19): siRNA sense strand
gcaaggaugaugaguuuac

SEQ ID NO: 227320 - RNA, 19 nt, Homo sapiens
  misc_RNA (1)...(19): siRNA sense strand
agaacgugcugaucaacaa

SEQ ID NO: 227321 - RNA, 19 nt, Homo sapiens
  misc_RNA (1)...(19): siRNA sense strand
ggccagacaacaccuauga

SEQ ID NO: 227322 - RNA, 19 nt, Homo sapiens
  misc_RNA (1)...(19): siRNA sense strand
ggacaagcccgagcauauc

SEQ ID NO: 227323 - RNA, 19 nt, Homo sapiens
  misc_RNA (1)...(19): siRNA sense strand
gcaccaucuuugacaacuu

SEQ ID NO: 227324 - RNA, 19 nt, Homo sapiens
  misc_RNA (1)...(19): siRNA sense strand
ggcaagaacgugcugauca

SEQ ID NO: 227325 - RNA, 19 nt, Homo sapiens
  misc_RNA (1)...(19): siRNA sense strand
ggacaaggaggaagaugag

SEQ ID NO: 227326 - RNA, 19 nt, Homo sapiens
  misc_RNA (1)...(19): siRNA sense strand
ggacaaggaggaugaugag

SEQ ID NO: 227327 - RNA, 19 nt, Homo sapiens
  misc_RNA (1)...(19): siRNA sense strand
cagcagagaaacaaaugaa

SEQ ID NO: 227328 - RNA, 19 nt, Homo sapiens
  misc_RNA (1)...(19): siRNA sense strand
gugacgaggagaaagauaa

SEQ ID NO: 227329 - RNA, 19 nt, Homo sapiens
  misc_RNA (1)...(19): siRNA sense strand
caugucaucuucaacuaca

SEQ ID NO: 227330 - RNA, 19 nt, Homo sapiens
  misc_RNA (1)...(19): siRNA sense strand
gcuguuuccuaauaguuug

SEQ ID NO: 227331 - RNA, 19 nt, Homo sapiens
  misc_RNA (1)...(19): siRNA sense strand
augugaagcuguuuccuaa

SEQ ID NO: 227332 - RNA, 19 nt, Homo sapiens
  misc_RNA (1)...(19): siRNA sense strand
gaggagaaagauaaagguu

SEQ ID NO: 227333 - RNA, 19 nt, Homo sapiens
  misc_RNA (1)...(19): siRNA sense strand
acacaccuguacacacuga

SEQ ID NO: 227334 - RNA, 19 nt, Homo sapiens
  misc_RNA (1)...(19): siRNA sense strand
cuaugccuaugauaacuuu

SEQ ID NO: 227335 - RNA, 19 nt, Homo sapiens
  misc_RNA (1)...(19): siRNA sense strand
gcagaucgacaacccagau

SEQ ID NO: 227336 - RNA, 19 nt, Homo sapiens
  misc_RNA (1)...(19): siRNA sense strand
caccaucuuugacaacuuc

SEQ ID NO: 227337 - RNA, 19 nt, Homo sapiens
  misc_RNA (1)...(19): siRNA sense strand
aaaggauccugaugcuuca

SEQ ID NO: 227338 - RNA, 19 nt, Homo sapiens
  misc_RNA (1)...(19): siRNA sense strand
cgacaacccagauuacaag

SEQ ID NO: 227339 - RNA, 19 nt, Homo sapiens
  misc_RNA (1)...(19): siRNA sense strand
agauaaagguuugcagaca

SEQ ID NO: 227340 - RNA, 19 nt, Homo sapiens
  misc_RNA (1)...(19): siRNA sense strand
cagagaaacaaaugaagga

SEQ ID NO: 227341 - RNA, 19 nt, Homo sapiens
  misc_RNA (1)...(19): siRNA sense strand
uuugacaacuuccucauca

SEQ ID NO: 227342 - RNA, 19 nt, Homo sapiens
  misc_RNA (1)...(19): siRNA sense strand
caaggaugaugaguuuaca

SEQ ID NO: 227343 - RNA, 19 nt, Homo sapiens
  misc_RNA (1)...(19): siRNA sense strand
ugaagcuguuuccuaauag

SEQ ID NO: 227344 - RNA, 19 nt, Homo sapiens
  misc_RNA (1)...(19): siRNA sense strand
gcggcuaugugaagcuguu

SEQ ID NO: 227345 - RNA, 19 nt, Homo sapiens
  misc_RNA (1)...(19): siRNA sense strand
gaaacaaaugaaggacaaa

SEQ ID NO: 227346 - RNA, 19 nt, Homo sapiens
  misc_RNA (1)...(19): siRNA sense strand
gacgaggagcagaggcuua

SEQ ID NO: 227347 - RNA, 19 nt, Homo sapiens
  misc_RNA (1)...(19): siRNA sense strand
gaagacaagaaacgcaaag

SEQ ID NO: 227348 - RNA, 19 nt, Homo sapiens
  misc_RNA (1)...(19): siRNA sense strand
acaaggacauccguugcaa

SEQ ID NO: 227349 - RNA, 19 nt, Homo sapiens
  misc_RNA (1)...(19): siRNA sense strand
cagaggacaaggaggauga

SEQ ID NO: 227350 - RNA, 19 nt, Homo sapiens
  misc_RNA (1)...(19): siRNA sense strand
uuaaggaggaggaagaaga

SEQ ID NO: 227351 - RNA, 19 nt, Homo sapiens
  misc_RNA (1)...(19): siRNA sense strand
caaaggcagcagagaaaca

SEQ ID NO: 227352 - RNA, 19 nt, Homo sapiens
  misc_RNA (1)...(19): siRNA sense strand
aacaaaggcagcagagaaa

SEQ ID NO: 227353 - RNA, 19 nt, Homo sapiens
  misc_RNA (1)...(19): siRNA sense strand
ugacgaggagaaagauaaa

SEQ ID NO: 227354 - RNA, 19 nt, Homo sapiens
  misc_RNA (1)...(19): siRNA sense strand
ggugaaacaugagcagaac

SEQ ID NO: 227355 - RNA, 19 nt, Homo sapiens
  misc_RNA (1)...(19): siRNA sense strand
gcagcagagaaacaaauga

SEQ ID NO: 227356 - RNA, 19 nt, Homo sapiens
  misc_RNA (1)...(19): siRNA sense strand
ucaccaacgaugaggcaua

SEQ ID NO: 227357 - RNA, 19 nt, Homo sapiens
  misc_RNA (1)...(19): siRNA sense strand
ggauccacccagaaauuga

SEQ ID NO: 227358 - RNA, 19 nt, Homo sapiens
  misc_RNA (1)...(19): siRNA sense strand
uaugugaagcuguuuccua

SEQ ID NO: 227359 - RNA, 19 nt, Homo sapiens
  misc_RNA (1)...(19): siRNA sense strand
gaucgacaacccagauuac

SEQ ID NO: 227360 - RNA, 19 nt, Homo sapiens
  misc_RNA (1)...(19): siRNA sense strand
ggaggaggaagaagacaag

SEQ ID NO: 227361 - RNA, 19 nt, Homo sapiens
  misc_RNA (1)...(19): siRNA sense strand
caguaucuaugccuaugau

SEQ ID NO: 227362 - RNA, 19 nt, Homo sapiens
  misc_RNA (1)...(19): siRNA sense strand
aaacacaagucagauuuug

SEQ ID NO: 227363 - RNA, 19 nt, Homo sapiens
  misc_RNA (1)...(19): siRNA sense strand
acaacuuccucaucaccaa

SEQ ID NO: 227364 - RNA, 19 nt, Homo sapiens
  misc_RNA (1)...(19): siRNA sense strand
agacaugcacggagacuca

SEQ ID NO: 227365 - RNA, 19 nt, Homo sapiens
  misc_RNA (1)...(19): siRNA sense strand
gaagaugaggaggaagaug

SEQ ID NO: 227366 - RNA, 19 nt, Homo sapiens
  misc_RNA (1)...(19): siRNA sense strand
ucccugacccugaugcuaa

SEQ ID NO: 227367 - RNA, 19 nt, Homo sapiens
  misc_RNA (1)...(19): siRNA sense strand
caagucuggcaccaucuuu

SEQ ID NO: 227368 - RNA, 19 nt, Homo sapiens
  misc_RNA (1)...(19): siRNA sense strand
gaugaugaggacaaagaug

SEQ ID NO: 227369 - RNA, 19 nt, Homo sapiens
  misc_RNA (1)...(19): siRNA sense strand
auaaagguuugcagacaag

SEQ ID NO: 227370 - RNA, 19 nt, Homo sapiens
  misc_RNA (1)...(19): siRNA sense strand
caccaacgaugaggcauac

SEQ ID NO: 227371 - RNA, 19 nt, Homo sapiens
  misc_RNA (1)...(19): siRNA sense strand
ggcaaauucguucucaguu

SEQ ID NO: 227372 - RNA, 19 nt, Homo sapiens
  misc_RNA (1)...(19): siRNA sense strand
gaagagauggacggagagu

SEQ ID NO: 227373 - RNA, 19 nt, Homo sapiens
  misc_RNA (1)...(19): siRNA sense strand
agaucgacaacccagauua

SEQ ID NO: 227374 - RNA, 19 nt, Homo sapiens
  misc_RNA (1)...(19): siRNA sense strand
aagaugaggaggaagaugu

SEQ ID NO: 227375 - RNA, 19 nt, Homo sapiens
  misc_RNA (1)...(19): siRNA sense strand
agacgcugguggugcaguu

SEQ ID NO: 227376 - RNA, 19 nt, Homo sapiens
  misc_RNA (1)...(19): siRNA sense strand
ugaaacaugagcagaacau

SEQ ID NO: 227377 - RNA, 19 nt, Homo sapiens
  misc_RNA (1)...(19): siRNA sense strand
aaaggcagcagagaaacaa

SEQ ID NO: 227378 - RNA, 19 nt, Homo sapiens
  misc_RNA (1)...(19): siRNA sense strand
agacucagaauacaacauc

SEQ ID NO: 227379 - RNA, 19 nt, Homo sapiens
  misc_RNA (1)...(19): siRNA sense strand
ggaagaugaggaggaagau

SEQ ID NO: 227380 - RNA, 19 nt, Homo sapiens
  misc_RNA (1)...(19): siRNA sense strand
aauccaaacacaagucaga

SEQ ID NO: 227381 - RNA, 19 nt, Homo sapiens
  misc_RNA (1)...(19): siRNA sense strand
ggugacgaggagaaagaua

SEQ ID NO: 227382 - RNA, 19 nt, Homo sapiens
  misc_RNA (1)...(19): siRNA sense strand
aggagaaagauaaagguuu

SEQ ID NO: 227383 - RNA, 19 nt, Homo sapiens
  misc_RNA (1)...(19): siRNA sense strand
gaacgugcugaucaacaag

SEQ ID NO: 227384 - RNA, 19 nt, Homo sapiens
  misc_RNA (1)...(19): siRNA sense strand
ggaggaggcagaggacaag

SEQ ID NO: 227385 - RNA, 19 nt, Homo sapiens
  misc_RNA (1)...(19): siRNA sense strand
ggaugaugaggacaaagau

SEQ ID NO: 227386 - RNA, 19 nt, Homo sapiens
  misc_RNA (1)...(19): siRNA sense strand
cacccaagaagauaaagga

SEQ ID NO: 227387 - RNA, 19 nt, Homo sapiens
  misc_RNA (1)...(19): siRNA sense strand
gaaacaugagcagaacauc

SEQ ID NO: 227388 - RNA, 19 nt, Homo sapiens
  misc_RNA (1)...(19): siRNA sense strand
ggcagcagagaaacaaaug

SEQ ID NO: 227389 - RNA, 19 nt, Homo sapiens
  misc_RNA (1)...(19): siRNA sense strand
aggcauacgcugaggaguu

SEQ ID NO: 227390 - RNA, 19 nt, Homo sapiens
  misc_RNA (1)...(19): siRNA sense strand
cuacuucaaggagcaguuu

SEQ ID NO: 227391 - RNA, 19 nt, Homo sapiens
  misc_RNA (1)...(19): siRNA sense strand
cggccaguuucgagccuuu

SEQ ID NO: 227392 - RNA, 19 nt, Homo sapiens
  misc_RNA (1)...(19): siRNA sense strand
guaacaaaggcagcagaga

SEQ ID NO: 227393 - RNA, 19 nt, Homo sapiens
  misc_RNA (1)...(19): siRNA sense strand
gaagaaauccugaaagcuu

SEQ ID NO: 227394 - RNA, 19 nt, Homo sapiens
  misc_RNA (1)...(19): siRNA sense strand
caccauagauguuaaagaa

SEQ ID NO: 227395 - RNA, 19 nt, Homo sapiens
  misc_RNA (1)...(19): siRNA sense strand
gugagaaccugacugauga

SEQ ID NO: 227396 - RNA, 19 nt, Homo sapiens
  misc_RNA (1)...(19): siRNA sense strand
gaacugaagguggcaauga

SEQ ID NO: 227397 - RNA, 19 nt, Homo sapiens
  misc_RNA (1)...(19): siRNA sense strand
gcaaacauggcaucaaguu

SEQ ID NO: 227398 - RNA, 19 nt, Homo sapiens
  misc_RNA (1)...(19): siRNA sense strand
gaaaaugucugagaaagau

SEQ ID NO: 227399 - RNA, 19 nt, Homo sapiens
  misc_RNA (1)...(19): siRNA sense strand
uaacugugaugacccagaa

SEQ ID NO: 227400 - RNA, 19 nt, Homo sapiens
  misc_RNA (1)...(19): siRNA sense strand
gaacuggcaccauagaugu

SEQ ID NO: 227401 - RNA, 19 nt, Homo sapiens
  misc_RNA (1)...(19): siRNA sense strand
ggaaaugauugaugaagcu

SEQ ID NO: 227402 - RNA, 19 nt, Homo sapiens
  misc_RNA (1)...(19): siRNA sense strand
aagaaauccugaaagcuuu

SEQ ID NO: 227403 - RNA, 19 nt, Homo sapiens
  misc_RNA (1)...(19): siRNA sense strand
gcucuuugaugaugaugaa

SEQ ID NO: 227404 - RNA, 19 nt, Homo sapiens
  misc_RNA (1)...(19): siRNA sense strand
gaugaaacugggaagauuu

SEQ ID NO: 227405 - RNA, 19 nt, Homo sapiens
  misc_RNA (1)...(19): siRNA sense strand
ugaugaagcugaucgagau

SEQ ID NO: 227406 - RNA, 19 nt, Homo sapiens
  misc_RNA (1)...(19): siRNA sense strand
ggugagaaccugacugaug

SEQ ID NO: 227407 - RNA, 19 nt, Homo sapiens
  misc_RNA (1)...(19): siRNA sense strand
ggaacuggcaccauagaug

SEQ ID NO: 227408 - RNA, 19 nt, Homo sapiens
  misc_RNA (1)...(19): siRNA sense strand
ugaugaaacugggaagauu

SEQ ID NO: 227409 - RNA, 19 nt, Homo sapiens
  misc_RNA (1)...(19): siRNA sense strand
agccugagcuuacugaaga

SEQ ID NO: 227410 - RNA, 19 nt, Homo sapiens
  misc_RNA (1)...(19): siRNA sense strand
aaugaacuuuggugacuuu

SEQ ID NO: 227411 - RNA, 19 nt, Homo sapiens
  misc_RNA (1)...(19): siRNA sense strand
ccauagauguuaaagaacu

SEQ ID NO: 227412 - RNA, 19 nt, Homo sapiens
  misc_RNA (1)...(19): siRNA sense strand
gggaagauuucguucaaaa

SEQ ID NO: 227413 - RNA, 19 nt, Homo sapiens
  misc_RNA (1)...(19): siRNA sense strand
ugcaggaaaugauugauga

SEQ ID NO: 227414 - RNA, 19 nt, Homo sapiens
  misc_RNA (1)...(19): siRNA sense strand
gauaaggaagggacaggaa

SEQ ID NO: 227415 - RNA, 19 nt, Homo sapiens
  misc_RNA (1)...(19): siRNA sense strand
ugaaacgcguggccaagga

SEQ ID NO: 227416 - RNA, 19 nt, Homo sapiens
  misc_RNA (1)...(19): siRNA sense strand
aaagaccagccucuauuaa

SEQ ID NO: 227417 - RNA, 19 nt, Homo sapiens
  misc_RNA (1)...(19): siRNA sense strand
aagaagaaauccugaaagc

SEQ ID NO: 227418 - RNA, 19 nt, Homo sapiens
  misc_RNA (1)...(19): siRNA sense strand
caagaguuccugcgcauca

SEQ ID NO: 227419 - RNA, 19 nt, Homo sapiens
  misc_RNA (1)...(19): siRNA sense strand
augaggagcugcaggaaau

SEQ ID NO: 227420 - RNA, 19 nt, Homo sapiens
  misc_RNA (1)...(19): siRNA sense strand
gaugaggagcugcaggaaa

SEQ ID NO: 227421 - RNA, 19 nt, Homo sapiens
  misc_RNA (1)...(19): siRNA sense strand
aaacauggcaucaaguucu

SEQ ID NO: 227422 - RNA, 19 nt, Homo sapiens
  misc_RNA (1)...(19): siRNA sense strand
gagauggagaggucaguga

SEQ ID NO: 227423 - RNA, 19 nt, Homo sapiens
  misc_RNA (1)...(19): siRNA sense strand
aaacugggaagauuucguu

SEQ ID NO: 227424 - RNA, 19 nt, Homo sapiens
  misc_RNA (1)...(19): siRNA sense strand
ugucugagaaagauacuaa

SEQ ID NO: 227425 - RNA, 19 nt, Homo sapiens
  misc_RNA (1)...(19): siRNA sense strand
gggaagcuuuugaucuuuu

SEQ ID NO: 227426 - RNA, 19 nt, Homo sapiens
  misc_RNA (1)...(19): siRNA sense strand
ugaucgagauggagaugga

SEQ ID NO: 227427 - RNA, 19 nt, Homo sapiens
  misc_RNA (1)...(19): siRNA sense strand
cugggaagauuucguucaa

SEQ ID NO: 227428 - RNA, 19 nt, Homo sapiens
  misc_RNA (1)...(19): siRNA sense strand
cccaagaaagaagaaauua

SEQ ID NO: 227429 - RNA, 19 nt, Homo sapiens
  misc_RNA (1)...(19): siRNA sense strand
gcaccauagauguuaaaga

SEQ ID NO: 227430 - RNA, 19 nt, Homo sapiens
  misc_RNA (1)...(19): siRNA sense strand
aggcaaacauggcaucaag

SEQ ID NO: 227431 - RNA, 19 nt, Homo sapiens
  misc_RNA (1)...(19): siRNA sense strand
gcaggaaaugauugaugaa

SEQ ID NO: 227432 - RNA, 19 nt, Homo sapiens
  misc_RNA (1)...(19): siRNA sense strand
caagcucuuugaugaugau

SEQ ID NO: 227433 - RNA, 19 nt, Homo sapiens
  misc_RNA (1)...(19): siRNA sense strand
ggagcugcaggaaaugauu

SEQ ID NO: 227434 - RNA, 19 nt, Homo sapiens
  misc_RNA (1)...(19): siRNA sense strand
gagaaagauacuaaagaag

SEQ ID NO: 227435 - RNA, 19 nt, Homo sapiens
  misc_RNA (1)...(19): siRNA sense strand
gagcugcaggaaaugauug

SEQ ID NO: 227436 - RNA, 19 nt, Homo sapiens
  misc_RNA (1)...(19): siRNA sense strand
caucaaguucucagcgaaa

SEQ ID NO: 227437 - RNA, 19 nt, Homo sapiens
  misc_RNA (1)...(19): siRNA sense strand
aaaagaccagccucuauua

SEQ ID NO: 227438 - RNA, 19 nt, Homo sapiens
  misc_RNA (1)...(19): siRNA sense strand
ugaagcugaucgagaugga

SEQ ID NO: 227439 - RNA, 19 nt, Homo sapiens
  misc_RNA (1)...(19): siRNA sense strand
gaacccaagaaagaagaaa

SEQ ID NO: 227440 - RNA, 19 nt, Homo sapiens
  misc_RNA (1)...(19): siRNA sense strand
gggcuuugaacccaagaaa

SEQ ID NO: 227441 - RNA, 19 nt, Homo sapiens
  misc_RNA (1)...(19): siRNA sense strand
gaggagcugcaggaaauga

SEQ ID NO: 227442 - RNA, 19 nt, Homo sapiens
  misc_RNA (1)...(19): siRNA sense strand
cuaaagaagaaauccugaa

SEQ ID NO: 227443 - RNA, 19 nt, Homo sapiens
  misc_RNA (1)...(19): siRNA sense strand
ggucagugagcaagaguuc

SEQ ID NO: 227444 - RNA, 19 nt, Homo sapiens
  misc_RNA (1)...(19): siRNA sense strand
gaaggcaaacauggcauca

SEQ ID NO: 227445 - RNA, 19 nt, Homo sapiens
  misc_RNA (1)...(19): siRNA sense strand
ugagcuuacugaagagcaa

SEQ ID NO: 227446 - RNA, 19 nt, Homo sapiens
  misc_RNA (1)...(19): siRNA sense strand
cauagauguuaaagaacug

SEQ ID NO: 227447 - RNA, 19 nt, Homo sapiens
  misc_RNA (1)...(19): siRNA sense strand
cugagaaagauacuaaaga

SEQ ID NO: 227448 - RNA, 19 nt, Homo sapiens
  misc_RNA (1)...(19): siRNA sense strand
caaacauggcaucaaguuc

SEQ ID NO: 227449 - RNA, 19 nt, Homo sapiens
  misc_RNA (1)...(19): siRNA sense strand
gaugaugaaacugggaaga

SEQ ID NO: 227450 - RNA, 19 nt, Homo sapiens
  misc_RNA (1)...(19): siRNA sense strand
aaaugaacuuuggugacuu

SEQ ID NO: 227451 - RNA, 19 nt, Homo sapiens
  misc_RNA (1)...(19): siRNA sense strand
aaugauugaugaagcugau

SEQ ID NO: 227452 - RNA, 19 nt, Homo sapiens
  misc_RNA (1)...(19): siRNA sense strand
ccgggaagcuuuugaucuu

SEQ ID NO: 227453 - RNA, 19 nt, Homo sapiens
  misc_RNA (1)...(19): siRNA sense strand
aaagaagaaauccugaaag

SEQ ID NO: 227454 - RNA, 19 nt, Homo sapiens
  misc_RNA (1)...(19): siRNA sense strand
caggagauccgggaagcuu

SEQ ID NO: 227455 - RNA, 19 nt, Homo sapiens
  misc_RNA (1)...(19): siRNA sense strand
ugggaagauuucguucaaa

SEQ ID NO: 227456 - RNA, 19 nt, Homo sapiens
  misc_RNA (1)...(19): siRNA sense strand
gagaggucagugagcaaga

SEQ ID NO: 227457 - RNA, 19 nt, Homo sapiens
  misc_RNA (1)...(19): siRNA sense strand
ccuggacgcugaugaguuc

SEQ ID NO: 227458 - RNA, 19 nt, Homo sapiens
  misc_RNA (1)...(19): siRNA sense strand
ugucaucgcagcugcauuu

SEQ ID NO: 227459 - RNA, 19 nt, Homo sapiens
  misc_RNA (1)...(19): siRNA sense strand
gugagugccuccaugaaca

SEQ ID NO: 227460 - RNA, 19 nt, Homo sapiens
  misc_RNA (1)...(19): siRNA sense strand
gagggugugugcaggaagu

SEQ ID NO: 227461 - RNA, 19 nt, Homo sapiens
  misc_RNA (1)...(19): siRNA sense strand
ggaauuccaggacuacuac

SEQ ID NO: 227462 - RNA, 19 nt, Homo sapiens
  misc_RNA (1)...(19): siRNA sense strand
uggcggaauuccaggacua

SEQ ID NO: 227463 - RNA, 19 nt, Homo sapiens
  misc_RNA (1)...(19): siRNA sense strand
ggcagggucuggccaaacu

SEQ ID NO: 227464 - RNA, 19 nt, Homo sapiens
  misc_RNA (1)...(19): siRNA sense strand
gagaaacuccgggcacagu

SEQ ID NO: 227465 - RNA, 19 nt, Homo sapiens
  misc_RNA (1)...(19): siRNA sense strand
ggaguucguggccaugaug

SEQ ID NO: 227466 - RNA, 19 nt, Homo sapiens
  misc_RNA (1)...(19): siRNA sense strand
cagagggugugugcaggaa

SEQ ID NO: 227467 - RNA, 19 nt, Homo sapiens
  misc_RNA (1)...(19): siRNA sense strand
cggaauuccaggacuacua

SEQ ID NO: 227468 - RNA, 19 nt, Homo sapiens
  misc_RNA (1)...(19): siRNA sense strand
ggaagugggaccgcaaugg

SEQ ID NO: 227469 - RNA, 19 nt, Homo sapiens
  misc_RNA (1)...(19): siRNA sense strand
cgcuggaucuggaggaguu

SEQ ID NO: 227470 - RNA, 19 nt, Homo sapiens
  misc_RNA (1)...(19): siRNA sense strand
gaggaguucguggccauga

SEQ ID NO: 227471 - RNA, 19 nt, Homo sapiens
  misc_RNA (1)...(19): siRNA sense strand
ugaacacggaugaggaguu

SEQ ID NO: 227472 - RNA, 19 nt, Homo sapiens
  misc_RNA (1)...(19): siRNA sense strand
ccuggacgcugaugaguuc

SEQ ID NO: 227473 - RNA, 19 nt, Homo sapiens
  misc_RNA (1)...(19): siRNA sense strand
ugucaucgcagcugcauuu

SEQ ID NO: 227474 - RNA, 19 nt, Homo sapiens
  misc_RNA (1)...(19): siRNA sense strand
gugagugccuccaugaaca

SEQ ID NO: 227475 - RNA, 19 nt, Homo sapiens
  misc_RNA (1)...(19): siRNA sense strand
gagggugugugcaggaagu

SEQ ID NO: 227476 - RNA, 19 nt, Homo sapiens
  misc_RNA (1)...(19): siRNA sense strand
ggaauuccaggacuacuac

SEQ ID NO: 227477 - RNA, 19 nt, Homo sapiens
  misc_RNA (1)...(19): siRNA sense strand
uggcggaauuccaggacua

SEQ ID NO: 227478 - RNA, 19 nt, Homo sapiens
  misc_RNA (1)...(19): siRNA sense strand
ggcagggucuggccaaacu

SEQ ID NO: 227479 - RNA, 19 nt, Homo sapiens
  misc_RNA (1)...(19): siRNA sense strand
gagaaacuccgggcacagu

SEQ ID NO: 227480 - RNA, 19 nt, Homo sapiens
  misc_RNA (1)...(19): siRNA sense strand
ggaguucguggccaugaug

SEQ ID NO: 227481 - RNA, 19 nt, Homo sapiens
  misc_RNA (1)...(19): siRNA sense strand
cagagggugugugcaggaa

SEQ ID NO: 227482 - RNA, 19 nt, Homo sapiens
  misc_RNA (1)...(19): siRNA sense strand
cggaauuccaggacuacua

SEQ ID NO: 227483 - RNA, 19 nt, Homo sapiens
  misc_RNA (1)...(19): siRNA sense strand
ggaagugggaccgcaaugg

SEQ ID NO: 227484 - RNA, 19 nt, Homo sapiens
  misc_RNA (1)...(19): siRNA sense strand
cgcuggaucuggaggaguu

SEQ ID NO: 227485 - RNA, 19 nt, Homo sapiens
  misc_RNA (1)...(19): siRNA sense strand
gaggaguucguggccauga

SEQ ID NO: 227486 - RNA, 19 nt, Homo sapiens
  misc_RNA (1)...(19): siRNA sense strand
ugaacacggaugaggaguu

SEQ ID NO: 227487 - RNA, 19 nt, Homo sapiens
  misc_RNA (1)...(19): siRNA sense strand
uaaagaagaucacagcaaa

SEQ ID NO: 227488 - RNA, 19 nt, Homo sapiens
  misc_RNA (1)...(19): siRNA sense strand
gaacuggacuguggcauug

SEQ ID NO: 227489 - RNA, 19 nt, Homo sapiens
  misc_RNA (1)...(19): siRNA sense strand
ugagauggguuuauguaua

SEQ ID NO: 227490 - RNA, 19 nt, Homo sapiens
  misc_RNA (1)...(19): siRNA sense strand
ccacagcaccugguuauua

SEQ ID NO: 227491 - RNA, 19 nt, Homo sapiens
  misc_RNA (1)...(19): siRNA sense strand
agaaacagauuccauguau

SEQ ID NO: 227492 - RNA, 19 nt, Homo sapiens
  misc_RNA (1)...(19): siRNA sense strand
caacagaauuugaguccuu

SEQ ID NO: 227493 - RNA, 19 nt, Homo sapiens
  misc_RNA (1)...(19): siRNA sense strand
gaaacagauuccauguauu

SEQ ID NO: 227494 - RNA, 19 nt, Homo sapiens
  misc_RNA (1)...(19): siRNA sense strand
cagauuccauguauuguuu

SEQ ID NO: 227495 - RNA, 19 nt, Homo sapiens
  misc_RNA (1)...(19): siRNA sense strand
ccgacaagcuugaauuuau

SEQ ID NO: 227496 - RNA, 19 nt, Homo sapiens
  misc_RNA (1)...(19): siRNA sense strand
ccaaagaucauacauggaa

SEQ ID NO: 227497 - RNA, 19 nt, Homo sapiens
  misc_RNA (1)...(19): siRNA sense strand
ggacaacaguuauaaaaug

SEQ ID NO: 227498 - RNA, 19 nt, Homo sapiens
  misc_RNA (1)...(19): siRNA sense strand
gaauaucccuggacaacag

SEQ ID NO: 227499 - RNA, 19 nt, Homo sapiens
  misc_RNA (1)...(19): siRNA sense strand
aaacagauuccauguauug

SEQ ID NO: 227500 - RNA, 19 nt, Homo sapiens
  misc_RNA (1)...(19): siRNA sense strand
ucaauggacucuggaauau

SEQ ID NO: 227501 - RNA, 19 nt, Homo sapiens
  misc_RNA (1)...(19): siRNA sense strand
cgacaagcuugaauuuaug

SEQ ID NO: 227502 - RNA, 19 nt, Homo sapiens
  misc_RNA (1)...(19): siRNA sense strand
gaaacaguaugccgacaag

SEQ ID NO: 227503 - RNA, 19 nt, Homo sapiens
  misc_RNA (1)...(19): siRNA sense strand
gaauugaugcgugauguuu

SEQ ID NO: 227504 - RNA, 19 nt, Homo sapiens
  misc_RNA (1)...(19): siRNA sense strand
gaaccaaagaucauacaug

SEQ ID NO: 227505 - RNA, 19 nt, Homo sapiens
  misc_RNA (1)...(19): siRNA sense strand
gaaagguggcaacagaauu

SEQ ID NO: 227506 - RNA, 19 nt, Homo sapiens
  misc_RNA (1)...(19): siRNA sense strand
ggaaacauucagaaacuug

SEQ ID NO: 227507 - RNA, 19 nt, Homo sapiens
  misc_RNA (1)...(19): siRNA sense strand
ggugaagaaggaauaauuu

SEQ ID NO: 227508 - RNA, 19 nt, Homo sapiens
  misc_RNA (1)...(19): siRNA sense strand
ggagaacacugaaaacuca

SEQ ID NO: 227509 - RNA, 19 nt, Homo sapiens
  misc_RNA (1)...(19): siRNA sense strand
gcagcaaaccucagggaaa

SEQ ID NO: 227510 - RNA, 19 nt, Homo sapiens
  misc_RNA (1)...(19): siRNA sense strand
cacagcaccugguuauuau

SEQ ID NO: 227511 - RNA, 19 nt, Homo sapiens
  misc_RNA (1)...(19): siRNA sense strand
gugccaugcugaaacagua

SEQ ID NO: 227512 - RNA, 19 nt, Homo sapiens
  misc_RNA (1)...(19): siRNA sense strand
gaaacauucagaaacuuga

SEQ ID NO: 227513 - RNA, 19 nt, Homo sapiens
  misc_RNA (1)...(19): siRNA sense strand
aaagguggcaacagaauuu

SEQ ID NO: 227514 - RNA, 19 nt, Homo sapiens
  misc_RNA (1)...(19): siRNA sense strand
gcaccugguuauuauucuu

SEQ ID NO: 227515 - RNA, 19 nt, Homo sapiens
  misc_RNA (1)...(19): siRNA sense strand
gcaaagaaacagauuccau

SEQ ID NO: 227516 - RNA, 19 nt, Homo sapiens
  misc_RNA (1)...(19): siRNA sense strand
gaaauaugaagucaggaau

SEQ ID NO: 227517 - RNA, 19 nt, Homo sapiens
  misc_RNA (1)...(19): siRNA sense strand
gaugcgugauguuucuaaa

SEQ ID NO: 227518 - RNA, 19 nt, Homo sapiens
  misc_RNA (1)...(19): siRNA sense strand
acagugguguugaugauga

SEQ ID NO: 227519 - RNA, 19 nt, Homo sapiens
  misc_RNA (1)...(19): siRNA sense strand
gagccauggugaagaagga

SEQ ID NO: 227520 - RNA, 19 nt, Homo sapiens
  misc_RNA (1)...(19): siRNA sense strand
uaaaagcacuggaaugaca

SEQ ID NO: 227521 - RNA, 19 nt, Homo sapiens
  misc_RNA (1)...(19): siRNA sense strand
gggaaacauucagaaacuu

SEQ ID NO: 227522 - RNA, 19 nt, Homo sapiens
  misc_RNA (1)...(19): siRNA sense strand
ggaggccgacuucuuguau

SEQ ID NO: 227523 - RNA, 19 nt, Homo sapiens
  misc_RNA (1)...(19): siRNA sense strand
cagcaaaccucagggaaac

SEQ ID NO: 227524 - RNA, 19 nt, Homo sapiens
  misc_RNA (1)...(19): siRNA sense strand
gacagacagugguguugau

SEQ ID NO: 227525 - RNA, 19 nt, Homo sapiens
  misc_RNA (1)...(19): siRNA sense strand
agacagugguguugaugau

SEQ ID NO: 227526 - RNA, 19 nt, Homo sapiens
  misc_RNA (1)...(19): siRNA sense strand
ugaaauaugaagucaggaa

SEQ ID NO: 227527 - RNA, 19 nt, Homo sapiens
  misc_RNA (1)...(19): siRNA sense strand
ucugagccauggugaagaa

SEQ ID NO: 227528 - RNA, 19 nt, Homo sapiens
  misc_RNA (1)...(19): siRNA sense strand
auucaggccugccguggua

SEQ ID NO: 227529 - RNA, 19 nt, Homo sapiens
  misc_RNA (1)...(19): siRNA sense strand
ggaauugaugcgugauguu

SEQ ID NO: 227530 - RNA, 19 nt, Homo sapiens
  misc_RNA (1)...(19): siRNA sense strand
ugcgugauguuucuaaaga

SEQ ID NO: 227531 - RNA, 19 nt, Homo sapiens
  misc_RNA (1)...(19): siRNA sense strand
gccgacaagcuugaauuua

SEQ ID NO: 227532 - RNA, 19 nt, Homo sapiens
  misc_RNA (1)...(19): siRNA sense strand
gaagaucacagcaaaagga

SEQ ID NO: 227533 - RNA, 19 nt, Homo sapiens
  misc_RNA (1)...(19): siRNA sense strand
ucagggaaacauucagaaa

SEQ ID NO: 227534 - RNA, 19 nt, Homo sapiens
  misc_RNA (1)...(19): siRNA sense strand
ggccugccgugguacagaa

SEQ ID NO: 227535 - RNA, 19 nt, Homo sapiens
  misc_RNA (1)...(19): siRNA sense strand
cuaaagaagaucacagcaa

SEQ ID NO: 227536 - RNA, 19 nt, Homo sapiens
  misc_RNA (1)...(19): siRNA sense strand
ccugagauggguuuaugua

SEQ ID NO: 227537 - RNA, 19 nt, Homo sapiens
  misc_RNA (1)...(19): siRNA sense strand
gaggccgacuucuuguaug

SEQ ID NO: 227538 - RNA, 19 nt, Homo sapiens
  misc_RNA (1)...(19): siRNA sense strand
cgaaagguggcaacagaau

SEQ ID NO: 227539 - RNA, 19 nt, Homo sapiens
  misc_RNA (1)...(19): siRNA sense strand
cauaaaagcacuggaauga

SEQ ID NO: 227540 - RNA, 19 nt, Homo sapiens
  misc_RNA (1)...(19): siRNA sense strand
aagaaacagauuccaugua

SEQ ID NO: 227541 - RNA, 19 nt, Homo sapiens
  misc_RNA (1)...(19): siRNA sense strand
accgaaagguggcaacaga

SEQ ID NO: 227542 - RNA, 19 nt, Homo sapiens
  misc_RNA (1)...(19): siRNA sense strand
aaagaaacagauuccaugu

SEQ ID NO: 227543 - RNA, 19 nt, Homo sapiens
  misc_RNA (1)...(19): siRNA sense strand
ggaauaucccuggacaaca

SEQ ID NO: 227544 - RNA, 19 nt, Homo sapiens
  misc_RNA (1)...(19): siRNA sense strand
agggaaacauucagaaacu

SEQ ID NO: 227545 - RNA, 19 nt, Homo sapiens
  misc_RNA (1)...(19): siRNA sense strand
cauggaagcgaaucaaugg

SEQ ID NO: 227546 - RNA, 19 nt, Homo sapiens
  misc_RNA (1)...(19): siRNA sense strand
uuacccggguuaaccgaaa

SEQ ID NO: 227547 - RNA, 19 nt, Homo sapiens
  misc_RNA (1)...(19): siRNA sense strand
ggacuguggcauugagaca

SEQ ID NO: 227548 - RNA, 19 nt, Homo sapiens
  misc_RNA (1)...(19): siRNA sense strand
gaaucaauggacucuggaa

SEQ ID NO: 227549 - RNA, 19 nt, Homo sapiens
  misc_RNA (1)...(19): siRNA sense strand
gcaaaccucagggaaacau

SEQ ID NO: 227550 - RNA, 19 nt, Homo sapiens
  misc_RNA (1)...(19): siRNA sense strand
gcuugaauuuaugcacauu

SEQ ID NO: 227551 - RNA, 19 nt, Homo sapiens
  misc_RNA (1)...(19): siRNA sense strand
cauggcgugucauaaaaua

SEQ ID NO: 227552 - RNA, 19 nt, Homo sapiens
  misc_RNA (1)...(19): siRNA sense strand
aaaacucaguggauucaaa

SEQ ID NO: 227553 - RNA, 19 nt, Homo sapiens
  misc_RNA (1)...(19): siRNA sense strand
ccauggugaagaaggaaua

SEQ ID NO: 227554 - RNA, 19 nt, Homo sapiens
  misc_RNA (1)...(19): siRNA sense strand
cagcaccugguuauuauuc

SEQ ID NO: 227555 - RNA, 19 nt, Homo sapiens
  misc_RNA (1)...(19): siRNA sense strand
aacagaauuugaguccuuu

SEQ ID NO: 227556 - RNA, 19 nt, Homo sapiens
  misc_RNA (1)...(19): siRNA sense strand
ugaaacaguaugccgacaa

SEQ ID NO: 227557 - RNA, 19 nt, Homo sapiens
  misc_RNA (1)...(19): siRNA sense strand
aucaauggacucuggaaua

SEQ ID NO: 227558 - RNA, 19 nt, Homo sapiens
  misc_RNA (1)...(19): siRNA sense strand
gacaacaguuauaaaaugg

SEQ ID NO: 227559 - RNA, 19 nt, Homo sapiens
  misc_RNA (1)...(19): siRNA sense strand
uggugaagaaggaauaauu

SEQ ID NO: 227560 - RNA, 19 nt, Homo sapiens
  misc_RNA (1)...(19): siRNA sense strand
gagacagacagugguguug

SEQ ID NO: 227561 - RNA, 19 nt, Homo sapiens
  misc_RNA (1)...(19): siRNA sense strand
agaacuggacuguggcauu

SEQ ID NO: 227562 - RNA, 19 nt, Homo sapiens
  misc_RNA (1)...(19): siRNA sense strand
uggaauugaugcgugaugu

SEQ ID NO: 227563 - RNA, 19 nt, Homo sapiens
  misc_RNA (1)...(19): siRNA sense strand
acagauuccauguauuguu

SEQ ID NO: 227564 - RNA, 19 nt, Homo sapiens
  misc_RNA (1)...(19): siRNA sense strand
ugagacagacagugguguu

SEQ ID NO: 227565 - RNA, 19 nt, Homo sapiens
  misc_RNA (1)...(19): siRNA sense strand
agacagacagugguguuga

SEQ ID NO: 227566 - RNA, 19 nt, Homo sapiens
  misc_RNA (1)...(19): siRNA sense strand
ccgacuucuuguaugcaua

SEQ ID NO: 227567 - RNA, 19 nt, Homo sapiens
  misc_RNA (1)...(19): siRNA sense strand
guuauuauucuuggcgaaa

SEQ ID NO: 227568 - RNA, 19 nt, Homo sapiens
  misc_RNA (1)...(19): siRNA sense strand
aauggacucuggaauaucc

SEQ ID NO: 227569 - RNA, 19 nt, Homo sapiens
  misc_RNA (1)...(19): siRNA sense strand
uaaagaagaucacagcaaa

SEQ ID NO: 227570 - RNA, 19 nt, Homo sapiens
  misc_RNA (1)...(19): siRNA sense strand
gaacuggacuguggcauug

SEQ ID NO: 227571 - RNA, 19 nt, Homo sapiens
  misc_RNA (1)...(19): siRNA sense strand
ugagauggguuuauguaua

SEQ ID NO: 227572 - RNA, 19 nt, Homo sapiens
  misc_RNA (1)...(19): siRNA sense strand
ccacagcaccugguuauua

SEQ ID NO: 227573 - RNA, 19 nt, Homo sapiens
  misc_RNA (1)...(19): siRNA sense strand
agaaacagauuccauguau

SEQ ID NO: 227574 - RNA, 19 nt, Homo sapiens
  misc_RNA (1)...(19): siRNA sense strand
caacagaauuugaguccuu

SEQ ID NO: 227575 - RNA, 19 nt, Homo sapiens
  misc_RNA (1)...(19): siRNA sense strand
gaaacagauuccauguauu

SEQ ID NO: 227576 - RNA, 19 nt, Homo sapiens
  misc_RNA (1)...(19): siRNA sense strand
cagauuccauguauuguuu

SEQ ID NO: 227577 - RNA, 19 nt, Homo sapiens
  misc_RNA (1)...(19): siRNA sense strand
ccgacaagcuugaauuuau

SEQ ID NO: 227578 - RNA, 19 nt, Homo sapiens
  misc_RNA (1)...(19): siRNA sense strand
ccaaagaucauacauggaa

SEQ ID NO: 227579 - RNA, 19 nt, Homo sapiens
  misc_RNA (1)...(19): siRNA sense strand
ggacaacaguuauaaaaug

SEQ ID NO: 227580 - RNA, 19 nt, Homo sapiens
  misc_RNA (1)...(19): siRNA sense strand
gaauaucccuggacaacag

SEQ ID NO: 227581 - RNA, 19 nt, Homo sapiens
  misc_RNA (1)...(19): siRNA sense strand
aaacagauuccauguauug

SEQ ID NO: 227582 - RNA, 19 nt, Homo sapiens
  misc_RNA (1)...(19): siRNA sense strand
ucaauggacucuggaauau

SEQ ID NO: 227583 - RNA, 19 nt, Homo sapiens
  misc_RNA (1)...(19): siRNA sense strand
cgacaagcuugaauuuaug

SEQ ID NO: 227584 - RNA, 19 nt, Homo sapiens
  misc_RNA (1)...(19): siRNA sense strand
gaaacaguaugccgacaag

SEQ ID NO: 227585 - RNA, 19 nt, Homo sapiens
  misc_RNA (1)...(19): siRNA sense strand
gaauugaugcgugauguuu

SEQ ID NO: 227586 - RNA, 19 nt, Homo sapiens
  misc_RNA (1)...(19): siRNA sense strand
gaaccaaagaucauacaug

SEQ ID NO: 227587 - RNA, 19 nt, Homo sapiens
  misc_RNA (1)...(19): siRNA sense strand
gaaagguggcaacagaauu

SEQ ID NO: 227588 - RNA, 19 nt, Homo sapiens
  misc_RNA (1)...(19): siRNA sense strand
ggaaacauucagaaacuug

SEQ ID NO: 227589 - RNA, 19 nt, Homo sapiens
  misc_RNA (1)...(19): siRNA sense strand
ggugaagaaggaauaauuu

SEQ ID NO: 227590 - RNA, 19 nt, Homo sapiens
  misc_RNA (1)...(19): siRNA sense strand
ggagaacacugaaaacuca

SEQ ID NO: 227591 - RNA, 19 nt, Homo sapiens
  misc_RNA (1)...(19): siRNA sense strand
gcagcaaaccucagggaaa

SEQ ID NO: 227592 - RNA, 19 nt, Homo sapiens
  misc_RNA (1)...(19): siRNA sense strand
cacagcaccugguuauuau

SEQ ID NO: 227593 - RNA, 19 nt, Homo sapiens
  misc_RNA (1)...(19): siRNA sense strand
gugccaugcugaaacagua

SEQ ID NO: 227594 - RNA, 19 nt, Homo sapiens
  misc_RNA (1)...(19): siRNA sense strand
gaaacauucagaaacuuga

SEQ ID NO: 227595 - RNA, 19 nt, Homo sapiens
  misc_RNA (1)...(19): siRNA sense strand
aaagguggcaacagaauuu

SEQ ID NO: 227596 - RNA, 19 nt, Homo sapiens
  misc_RNA (1)...(19): siRNA sense strand
gcaccugguuauuauucuu

SEQ ID NO: 227597 - RNA, 19 nt, Homo sapiens
  misc_RNA (1)...(19): siRNA sense strand
gcaaagaaacagauuccau

SEQ ID NO: 227598 - RNA, 19 nt, Homo sapiens
  misc_RNA (1)...(19): siRNA sense strand
gaaauaugaagucaggaau

SEQ ID NO: 227599 - RNA, 19 nt, Homo sapiens
  misc_RNA (1)...(19): siRNA sense strand
gaugcgugauguuucuaaa

SEQ ID NO: 227600 - RNA, 19 nt, Homo sapiens
  misc_RNA (1)...(19): siRNA sense strand
acagugguguugaugauga

SEQ ID NO: 227601 - RNA, 19 nt, Homo sapiens
  misc_RNA (1)...(19): siRNA sense strand
gagccauggugaagaagga

SEQ ID NO: 227602 - RNA, 19 nt, Homo sapiens
  misc_RNA (1)...(19): siRNA sense strand
uaaaagcacuggaaugaca

SEQ ID NO: 227603 - RNA, 19 nt, Homo sapiens
  misc_RNA (1)...(19): siRNA sense strand
gggaaacauucagaaacuu

SEQ ID NO: 227604 - RNA, 19 nt, Homo sapiens
  misc_RNA (1)...(19): siRNA sense strand
ggaggccgacuucuuguau

SEQ ID NO: 227605 - RNA, 19 nt, Homo sapiens
  misc_RNA (1)...(19): siRNA sense strand
cagcaaaccucagggaaac

SEQ ID NO: 227606 - RNA, 19 nt, Homo sapiens
  misc_RNA (1)...(19): siRNA sense strand
gacagacagugguguugau

SEQ ID NO: 227607 - RNA, 19 nt, Homo sapiens
  misc_RNA (1)...(19): siRNA sense strand
agacagugguguugaugau

SEQ ID NO: 227608 - RNA, 19 nt, Homo sapiens
  misc_RNA (1)...(19): siRNA sense strand
ugaaauaugaagucaggaa

SEQ ID NO: 227609 - RNA, 19 nt, Homo sapiens
  misc_RNA (1)...(19): siRNA sense strand
ucugagccauggugaagaa

SEQ ID NO: 227610 - RNA, 19 nt, Homo sapiens
  misc_RNA (1)...(19): siRNA sense strand
auucaggccugccguggua

SEQ ID NO: 227611 - RNA, 19 nt, Homo sapiens
  misc_RNA (1)...(19): siRNA sense strand
ggaauugaugcgugauguu

SEQ ID NO: 227612 - RNA, 19 nt, Homo sapiens
  misc_RNA (1)...(19): siRNA sense strand
ugcgugauguuucuaaaga

SEQ ID NO: 227613 - RNA, 19 nt, Homo sapiens
  misc_RNA (1)...(19): siRNA sense strand
gccgacaagcuugaauuua

SEQ ID NO: 227614 - RNA, 19 nt, Homo sapiens
  misc_RNA (1)...(19): siRNA sense strand
gaagaucacagcaaaagga

SEQ ID NO: 227615 - RNA, 19 nt, Homo sapiens
  misc_RNA (1)...(19): siRNA sense strand
ucagggaaacauucagaaa

SEQ ID NO: 227616 - RNA, 19 nt, Homo sapiens
  misc_RNA (1)...(19): siRNA sense strand
ggccugccgugguacagaa

SEQ ID NO: 227617 - RNA, 19 nt, Homo sapiens
  misc_RNA (1)...(19): siRNA sense strand
cuaaagaagaucacagcaa

SEQ ID NO: 227618 - RNA, 19 nt, Homo sapiens
  misc_RNA (1)...(19): siRNA sense strand
ccugagauggguuuaugua

SEQ ID NO: 227619 - RNA, 19 nt, Homo sapiens
  misc_RNA (1)...(19): siRNA sense strand
gaggccgacuucuuguaug

SEQ ID NO: 227620 - RNA, 19 nt, Homo sapiens
  misc_RNA (1)...(19): siRNA sense strand
cgaaagguggcaacagaau

SEQ ID NO: 227621 - RNA, 19 nt, Homo sapiens
  misc_RNA (1)...(19): siRNA sense strand
cauaaaagcacuggaauga

SEQ ID NO: 227622 - RNA, 19 nt, Homo sapiens
  misc_RNA (1)...(19): siRNA sense strand
aagaaacagauuccaugua

SEQ ID NO: 227623 - RNA, 19 nt, Homo sapiens
  misc_RNA (1)...(19): siRNA sense strand
accgaaagguggcaacaga

SEQ ID NO: 227624 - RNA, 19 nt, Homo sapiens
  misc_RNA (1)...(19): siRNA sense strand
aaagaaacagauuccaugu

SEQ ID NO: 227625 - RNA, 19 nt, Homo sapiens
  misc_RNA (1)...(19): siRNA sense strand
ggaauaucccuggacaaca

SEQ ID NO: 227626 - RNA, 19 nt, Homo sapiens
  misc_RNA (1)...(19): siRNA sense strand
agggaaacauucagaaacu

SEQ ID NO: 227627 - RNA, 19 nt, Homo sapiens
  misc_RNA (1)...(19): siRNA sense strand
cauggaagcgaaucaaugg

SEQ ID NO: 227628 - RNA, 19 nt, Homo sapiens
  misc_RNA (1)...(19): siRNA sense strand
uuacccggguuaaccgaaa

SEQ ID NO: 227629 - RNA, 19 nt, Homo sapiens
  misc_RNA (1)...(19): siRNA sense strand
ggacuguggcauugagaca

SEQ ID NO: 227630 - RNA, 19 nt, Homo sapiens
  misc_RNA (1)...(19): siRNA sense strand
gaaucaauggacucuggaa

SEQ ID NO: 227631 - RNA, 19 nt, Homo sapiens
  misc_RNA (1)...(19): siRNA sense strand
gcaaaccucagggaaacau

SEQ ID NO: 227632 - RNA, 19 nt, Homo sapiens
  misc_RNA (1)...(19): siRNA sense strand
gcuugaauuuaugcacauu

SEQ ID NO: 227633 - RNA, 19 nt, Homo sapiens
  misc_RNA (1)...(19): siRNA sense strand
cauggcgugucauaaaaua

SEQ ID NO: 227634 - RNA, 19 nt, Homo sapiens
  misc_RNA (1)...(19): siRNA sense strand
aaaacucaguggauucaaa

SEQ ID NO: 227635 - RNA, 19 nt, Homo sapiens
  misc_RNA (1)...(19): siRNA sense strand
ccauggugaagaaggaaua

SEQ ID NO: 227636 - RNA, 19 nt, Homo sapiens
  misc_RNA (1)...(19): siRNA sense strand
cagcaccugguuauuauuc

SEQ ID NO: 227637 - RNA, 19 nt, Homo sapiens
  misc_RNA (1)...(19): siRNA sense strand
aacagaauuugaguccuuu

SEQ ID NO: 227638 - RNA, 19 nt, Homo sapiens
  misc_RNA (1)...(19): siRNA sense strand
ugaaacaguaugccgacaa

SEQ ID NO: 227639 - RNA, 19 nt, Homo sapiens
  misc_RNA (1)...(19): siRNA sense strand
aucaauggacucuggaaua

SEQ ID NO: 227640 - RNA, 19 nt, Homo sapiens
  misc_RNA (1)...(19): siRNA sense strand
gacaacaguuauaaaaugg

SEQ ID NO: 227641 - RNA, 19 nt, Homo sapiens
  misc_RNA (1)...(19): siRNA sense strand
uggugaagaaggaauaauu

SEQ ID NO: 227642 - RNA, 19 nt, Homo sapiens
  misc_RNA (1)...(19): siRNA sense strand
gagacagacagugguguug

SEQ ID NO: 227643 - RNA, 19 nt, Homo sapiens
  misc_RNA (1)...(19): siRNA sense strand
agaacuggacuguggcauu

SEQ ID NO: 227644 - RNA, 19 nt, Homo sapiens
  misc_RNA (1)...(19): siRNA sense strand
uggaauugaugcgugaugu

SEQ ID NO: 227645 - RNA, 19 nt, Homo sapiens
  misc_RNA (1)...(19): siRNA sense strand
acagauuccauguauuguu

SEQ ID NO: 227646 - RNA, 19 nt, Homo sapiens
  misc_RNA (1)...(19): siRNA sense strand
ugagacagacagugguguu

SEQ ID NO: 227647 - RNA, 19 nt, Homo sapiens
  misc_RNA (1)...(19): siRNA sense strand
agacagacagugguguuga

SEQ ID NO: 227648 - RNA, 19 nt, Homo sapiens
  misc_RNA (1)...(19): siRNA sense strand
ccgacuucuuguaugcaua

SEQ ID NO: 227649 - RNA, 19 nt, Homo sapiens
  misc_RNA (1)...(19): siRNA sense strand
guuauuauucuuggcgaaa

SEQ ID NO: 227650 - RNA, 19 nt, Homo sapiens
  misc_RNA (1)...(19): siRNA sense strand
aauggacucuggaauaucc

SEQ ID NO: 227651 - RNA, 19 nt, Homo sapiens
  misc_RNA (1)...(19): siRNA sense strand
gaugagaucuauccaauaa

SEQ ID NO: 227652 - RNA, 19 nt, Homo sapiens
  misc_RNA (1)...(19): siRNA sense strand
caacguggcuggacaaaca

SEQ ID NO: 227653 - RNA, 19 nt, Homo sapiens
  misc_RNA (1)...(19): siRNA sense strand
ucacaugcuuccagaaaua

SEQ ID NO: 227654 - RNA, 19 nt, Homo sapiens
  misc_RNA (1)...(19): siRNA sense strand
caucaaauguuuacccaaa

SEQ ID NO: 227655 - RNA, 19 nt, Homo sapiens
  misc_RNA (1)...(19): siRNA sense strand
caguuaagauguuggaaua

SEQ ID NO: 227656 - RNA, 19 nt, Homo sapiens
  misc_RNA (1)...(19): siRNA sense strand
gcagucaucucuucacagu

SEQ ID NO: 227657 - RNA, 19 nt, Homo sapiens
  misc_RNA (1)...(19): siRNA sense strand
uaaaccacaugcuaaagaa

SEQ ID NO: 227658 - RNA, 19 nt, Homo sapiens
  misc_RNA (1)...(19): siRNA sense strand
ucagcagaaucuacaaaua

SEQ ID NO: 227659 - RNA, 19 nt, Homo sapiens
  misc_RNA (1)...(19): siRNA sense strand
cccaaacacuucucaauau

SEQ ID NO: 227660 - RNA, 19 nt, Homo sapiens
  misc_RNA (1)...(19): siRNA sense strand
uuacggaacucaucacaug

SEQ ID NO: 227661 - RNA, 19 nt, Homo sapiens
  misc_RNA (1)...(19): siRNA sense strand
ggacuucauugcuuucugu

SEQ ID NO: 227662 - RNA, 19 nt, Homo sapiens
  misc_RNA (1)...(19): siRNA sense strand
ccaaacacuucucaauaug

SEQ ID NO: 227663 - RNA, 19 nt, Homo sapiens
  misc_RNA (1)...(19): siRNA sense strand
cggaugugcugcuuuauga

SEQ ID NO: 227664 - RNA, 19 nt, Homo sapiens
  misc_RNA (1)...(19): siRNA sense strand
gaagaauuccugagacugu

SEQ ID NO: 227665 - RNA, 19 nt, Homo sapiens
  misc_RNA (1)...(19): siRNA sense strand
gcucucaucauaugcaaua

SEQ ID NO: 227666 - RNA, 19 nt, Homo sapiens
  misc_RNA (1)...(19): siRNA sense strand
gagcacaaguccucugaca

SEQ ID NO: 227667 - RNA, 19 nt, Homo sapiens
  misc_RNA (1)...(19): siRNA sense strand
caaaagaucaccaguguaa

SEQ ID NO: 227668 - RNA, 19 nt, Homo sapiens
  misc_RNA (1)...(19): siRNA sense strand
ucgcguggcucaucaaaug

SEQ ID NO: 227669 - RNA, 19 nt, Homo sapiens
  misc_RNA (1)...(19): siRNA sense strand
ggaagguacagaaaucauu

SEQ ID NO: 227670 - RNA, 19 nt, Homo sapiens
  misc_RNA (1)...(19): siRNA sense strand
cagcagaaucuacaaauau

SEQ ID NO: 227671 - RNA, 19 nt, Homo sapiens
  misc_RNA (1)...(19): siRNA sense strand
uggaauaccugggcaaaga

SEQ ID NO: 227672 - RNA, 19 nt, Homo sapiens
  misc_RNA (1)...(19): siRNA sense strand
ugacagcacguucuuggua

SEQ ID NO: 227673 - RNA, 19 nt, Homo sapiens
  misc_RNA (1)...(19): siRNA sense strand
gaacaacguggcuggacaa

SEQ ID NO: 227674 - RNA, 19 nt, Homo sapiens
  misc_RNA (1)...(19): siRNA sense strand
aaacacuucucaauaugga

SEQ ID NO: 227675 - RNA, 19 nt, Homo sapiens
  misc_RNA (1)...(19): siRNA sense strand
aaccggaugugcugcuuua

SEQ ID NO: 227676 - RNA, 19 nt, Homo sapiens
  misc_RNA (1)...(19): siRNA sense strand
uuggauaacuucgugauaa

SEQ ID NO: 227677 - RNA, 19 nt, Homo sapiens
  misc_RNA (1)...(19): siRNA sense strand
acgccuggcucucaucaua

SEQ ID NO: 227678 - RNA, 19 nt, Homo sapiens
  misc_RNA (1)...(19): siRNA sense strand
gugauaaaccacaugcuaa

SEQ ID NO: 227679 - RNA, 19 nt, Homo sapiens
  misc_RNA (1)...(19): siRNA sense strand
ccaccuaauggaaauauuu

SEQ ID NO: 227680 - RNA, 19 nt, Homo sapiens
  misc_RNA (1)...(19): siRNA sense strand
uggauaacuucgugauaaa

SEQ ID NO: 227681 - RNA, 19 nt, Homo sapiens
  misc_RNA (1)...(19): siRNA sense strand
ggacaaacccaaggucauc

SEQ ID NO: 227682 - RNA, 19 nt, Homo sapiens
  misc_RNA (1)...(19): siRNA sense strand
gagggaaucugcggaacug

SEQ ID NO: 227683 - RNA, 19 nt, Homo sapiens
  misc_RNA (1)...(19): siRNA sense strand
gaaggaagaggaaaagaaa

SEQ ID NO: 227684 - RNA, 19 nt, Homo sapiens
  misc_RNA (1)...(19): siRNA sense strand
agucaucucuucacaguca

SEQ ID NO: 227685 - RNA, 19 nt, Homo sapiens
  misc_RNA (1)...(19): siRNA sense strand
ccagggauauggagucagu

SEQ ID NO: 227686 - RNA, 19 nt, Homo sapiens
  misc_RNA (1)...(19): siRNA sense strand
gaacgagcaaccuugacaa

SEQ ID NO: 227687 - RNA, 19 nt, Homo sapiens
  misc_RNA (1)...(19): siRNA sense strand
caucacaugcuuccagaaa

SEQ ID NO: 227688 - RNA, 19 nt, Homo sapiens
  misc_RNA (1)...(19): siRNA sense strand
ccucuuuccuggcaauuga

SEQ ID NO: 227689 - RNA, 19 nt, Homo sapiens
  misc_RNA (1)...(19): siRNA sense strand
ggaauggggcucacuauga

SEQ ID NO: 227690 - RNA, 19 nt, Homo sapiens
  misc_RNA (1)...(19): siRNA sense strand
ccagaugcccaccauagaa

SEQ ID NO: 227691 - RNA, 19 nt, Homo sapiens
  misc_RNA (1)...(19): siRNA sense strand
uaaaaccucuucugcaaau

SEQ ID NO: 227692 - RNA, 19 nt, Homo sapiens
  misc_RNA (1)...(19): siRNA sense strand
ugauaaaccacaugcuaaa

SEQ ID NO: 227693 - RNA, 19 nt, Homo sapiens
  misc_RNA (1)...(19): siRNA sense strand
gcaagauccacgaggagaa

SEQ ID NO: 227694 - RNA, 19 nt, Homo sapiens
  misc_RNA (1)...(19): siRNA sense strand
gcagacgccuggcucucau

SEQ ID NO: 227695 - RNA, 19 nt, Homo sapiens
  misc_RNA (1)...(19): siRNA sense strand
gaagacaaggcccugaucu

SEQ ID NO: 227696 - RNA, 19 nt, Homo sapiens
  misc_RNA (1)...(19): siRNA sense strand
ucaccugccugcaaggaau

SEQ ID NO: 227697 - RNA, 19 nt, Homo sapiens
  misc_RNA (1)...(19): siRNA sense strand
acccaaacacuucucaaua

SEQ ID NO: 227698 - RNA, 19 nt, Homo sapiens
  misc_RNA (1)...(19): siRNA sense strand
gaucuugguagacucuuug

SEQ ID NO: 227699 - RNA, 19 nt, Homo sapiens
  misc_RNA (1)...(19): siRNA sense strand
cgugauaaaccacaugcua

SEQ ID NO: 227700 - RNA, 19 nt, Homo sapiens
  misc_RNA (1)...(19): siRNA sense strand
gugaagaauuccugagacu

SEQ ID NO: 227701 - RNA, 19 nt, Homo sapiens
  misc_RNA (1)...(19): siRNA sense strand
gaaccuggaggcagauucu

SEQ ID NO: 227702 - RNA, 19 nt, Homo sapiens
  misc_RNA (1)...(19): siRNA sense strand
caucauaugcaauacaaag

SEQ ID NO: 227703 - RNA, 19 nt, Homo sapiens
  misc_RNA (1)...(19): siRNA sense strand
guucuucaacaccacauaa

SEQ ID NO: 227704 - RNA, 19 nt, Homo sapiens
  misc_RNA (1)...(19): siRNA sense strand
gaauaccugggcaaagaug

SEQ ID NO: 227705 - RNA, 19 nt, Homo sapiens
  misc_RNA (1)...(19): siRNA sense strand
gcugccaccuaauggaaau

SEQ ID NO: 227706 - RNA, 19 nt, Homo sapiens
  misc_RNA (1)...(19): siRNA sense strand
cuucagaguggauuggaua

SEQ ID NO: 227707 - RNA, 19 nt, Homo sapiens
  misc_RNA (1)...(19): siRNA sense strand
gccuggcucucaucauaug

SEQ ID NO: 227708 - RNA, 19 nt, Homo sapiens
  misc_RNA (1)...(19): siRNA sense strand
augaugagaucuauccaau

SEQ ID NO: 227709 - RNA, 19 nt, Homo sapiens
  misc_RNA (1)...(19): siRNA sense strand
ggaauaccugggcaaagau

SEQ ID NO: 227710 - RNA, 19 nt, Homo sapiens
  misc_RNA (1)...(19): siRNA sense strand
cagaguggauuggauaacu

SEQ ID NO: 227711 - RNA, 19 nt, Homo sapiens
  misc_RNA (1)...(19): siRNA sense strand
aacccaaggucaucauugu

SEQ ID NO: 227712 - RNA, 19 nt, Homo sapiens
  misc_RNA (1)...(19): siRNA sense strand
agaguggauuggauaacuu

SEQ ID NO: 227713 - RNA, 19 nt, Homo sapiens
  misc_RNA (1)...(19): siRNA sense strand
uccagacccuaguaccuaa

SEQ ID NO: 227714 - RNA, 19 nt, Homo sapiens
  misc_RNA (1)...(19): siRNA sense strand
gcccagaugcccaccauag

SEQ ID NO: 227715 - RNA, 19 nt, Homo sapiens
  misc_RNA (1)...(19): siRNA sense strand
cuucauugcuuucuguucu

SEQ ID NO: 227716 - RNA, 19 nt, Homo sapiens
  misc_RNA (1)...(19): siRNA sense strand
gaauuccugagacugugua

SEQ ID NO: 227717 - RNA, 19 nt, Homo sapiens
  misc_RNA (1)...(19): siRNA sense strand
uguaaaaccucuucugcaa

SEQ ID NO: 227718 - RNA, 19 nt, Homo sapiens
  misc_RNA (1)...(19): siRNA sense strand
agaaucgcguggcucauca

SEQ ID NO: 227719 - RNA, 19 nt, Homo sapiens
  misc_RNA (1)...(19): siRNA sense strand
gaugugcugcuuuaugaca

SEQ ID NO: 227720 - RNA, 19 nt, Homo sapiens
  misc_RNA (1)...(19): siRNA sense strand
auaaaccacaugcuaaaga

SEQ ID NO: 227721 - RNA, 19 nt, Homo sapiens
  misc_RNA (1)...(19): siRNA sense strand
ugaugagaucuauccaaua

SEQ ID NO: 227722 - RNA, 19 nt, Homo sapiens
  misc_RNA (1)...(19): siRNA sense strand
caaacacuucucaauaugg

SEQ ID NO: 227723 - RNA, 19 nt, Homo sapiens
  misc_RNA (1)...(19): siRNA sense strand
gacauugaaggaagaggaa

SEQ ID NO: 227724 - RNA, 19 nt, Homo sapiens
  misc_RNA (1)...(19): siRNA sense strand
gauaaaccacaugcuaaag

SEQ ID NO: 227725 - RNA, 19 nt, Homo sapiens
  misc_RNA (1)...(19): siRNA sense strand
gcccugaucuugguagacu

SEQ ID NO: 227726 - RNA, 19 nt, Homo sapiens
  misc_RNA (1)...(19): siRNA sense strand
ugaucuugguagacucuuu

SEQ ID NO: 227727 - RNA, 19 nt, Homo sapiens
  misc_RNA (1)...(19): siRNA sense strand
gcagaaucuacaaauauac

SEQ ID NO: 227728 - RNA, 19 nt, Homo sapiens
  misc_RNA (1)...(19): siRNA sense strand
cucaucauaugcaauacaa

SEQ ID NO: 227729 - RNA, 19 nt, Homo sapiens
  misc_RNA (1)...(19): siRNA sense strand
caaacccaaggucaucauu

SEQ ID NO: 227730 - RNA, 19 nt, Homo sapiens
  misc_RNA (1)...(19): siRNA sense strand
gcacguucuugguacucau

SEQ ID NO: 227731 - RNA, 19 nt, Homo sapiens
  misc_RNA (1)...(19): siRNA sense strand
cagacccuaguaccuaaua

SEQ ID NO: 227732 - RNA, 19 nt, Homo sapiens
  misc_RNA (1)...(19): siRNA sense strand
ucucuucacagucaucuga

SEQ ID NO: 227733 - RNA, 19 nt, Homo sapiens
  misc_RNA (1)...(19): siRNA sense strand
aaagaucaccaguguaaaa

SEQ ID NO: 227734 - RNA, 19 nt, Homo sapiens
  misc_RNA (1)...(19): siRNA sense strand
cguggcucaucaaauguuu

SEQ ID NO: 227735 - RNA, 19 nt, Homo sapiens
  misc_RNA (1)...(19): siRNA sense strand
gaaguuccacaggcuaaag

SEQ ID NO: 227736 - RNA, 19 nt, Homo sapiens
  misc_RNA (1)...(19): siRNA sense strand
aaacccaaggucaucauug

SEQ ID NO: 227737 - RNA, 19 nt, Homo sapiens
  misc_RNA (1)...(19): siRNA sense strand
gaauggggcucacuaugac

SEQ ID NO: 227738 - RNA, 19 nt, Homo sapiens
  misc_RNA (1)...(19): siRNA sense strand
ccauagaacgagcaaccuu

SEQ ID NO: 227739 - RNA, 19 nt, Homo sapiens
  misc_RNA (1)...(19): siRNA sense strand
uaaaggacaaacccaaggu

SEQ ID NO: 227740 - RNA, 19 nt, Homo sapiens
  misc_RNA (1)...(19): siRNA sense strand
gccaccuaauggaaauauu

SEQ ID NO: 227741 - RNA, 19 nt, Homo sapiens
  misc_RNA (1)...(19): siRNA sense strand
guaccuaauacggaucaaa

SEQ ID NO: 227742 - RNA, 19 nt, Homo sapiens
  misc_RNA (1)...(19): siRNA sense strand
acaaggggcuccaucuuca

SEQ ID NO: 227743 - RNA, 19 nt, Homo sapiens
  misc_RNA (1)...(19): siRNA sense strand
ugagucagcagaaucuaca

SEQ ID NO: 227744 - RNA, 19 nt, Homo sapiens
  misc_RNA (1)...(19): siRNA sense strand
ucacagccagggauaugga

SEQ ID NO: 227745 - RNA, 19 nt, Homo sapiens
  misc_RNA (1)...(19): siRNA sense strand
gaucaccugccugcaagga

SEQ ID NO: 227746 - RNA, 19 nt, Homo sapiens
  misc_RNA (1)...(19): siRNA sense strand
gggcuacacugugguugac

SEQ ID NO: 227747 - RNA, 19 nt, Homo sapiens
  misc_RNA (1)...(19): siRNA sense strand
gaguggauuggauaacuuc

SEQ ID NO: 227748 - RNA, 19 nt, Homo sapiens
  misc_RNA (1)...(19): siRNA sense strand
gauguucuucaugguguuu

SEQ ID NO: 227749 - RNA, 19 nt, Homo sapiens
  misc_RNA (1)...(19): siRNA sense strand
acacugugguugacgaaaa

SEQ ID NO: 227750 - RNA, 19 nt, Homo sapiens
  misc_RNA (1)...(19): siRNA sense strand
ggaaacaucuugaccaucu

SEQ ID NO: 227751 - RNA, 19 nt, Homo sapiens
  misc_RNA (1)...(19): siRNA sense strand
gaacuccacuuugacaauu

SEQ ID NO: 227752 - RNA, 19 nt, Homo sapiens
  misc_RNA (1)...(19): siRNA sense strand
gcagucagcuccucuguca

SEQ ID NO: 227753 - RNA, 19 nt, Homo sapiens
  misc_RNA (1)...(19): siRNA sense strand
gcuacuaacuucccacuga

SEQ ID NO: 227754 - RNA, 19 nt, Homo sapiens
  misc_RNA (1)...(19): siRNA sense strand
gaggagaucuggaagaaag

SEQ ID NO: 227755 - RNA, 19 nt, Homo sapiens
  misc_RNA (1)...(19): siRNA sense strand
gagaagcacuccacaaugc

SEQ ID NO: 227756 - RNA, 19 nt, Homo sapiens
  misc_RNA (1)...(19): siRNA sense strand
gcaaugggccuuccucuuc

SEQ ID NO: 227757 - RNA, 19 nt, Homo sapiens
  misc_RNA (1)...(19): siRNA sense strand
aagcgaccaugcacuauua

SEQ ID NO: 227758 - RNA, 19 nt, Homo sapiens
  misc_RNA (1)...(19): siRNA sense strand
gcgcaagacuggccaaaca

SEQ ID NO: 227759 - RNA, 19 nt, Homo sapiens
  misc_RNA (1)...(19): siRNA sense strand
gcagaagaguggaaacauc

SEQ ID NO: 227760 - RNA, 19 nt, Homo sapiens
  misc_RNA (1)...(19): siRNA sense strand
gagaguugcuggaauugug

SEQ ID NO: 227761 - RNA, 19 nt, Homo sapiens
  misc_RNA (1)...(19): siRNA sense strand
gaggcgaacuccagacaga

SEQ ID NO: 227762 - RNA, 19 nt, Homo sapiens
  misc_RNA (1)...(19): siRNA sense strand
gaagcaccaucacaucugu

SEQ ID NO: 227763 - RNA, 19 nt, Homo sapiens
  misc_RNA (1)...(19): siRNA sense strand
caacagagagggccaagau

SEQ ID NO: 227764 - RNA, 19 nt, Homo sapiens
  misc_RNA (1)...(19): siRNA sense strand
gcggaaagcccacgacaug

SEQ ID NO: 227765 - RNA, 19 nt, Homo sapiens
  misc_RNA (1)...(19): siRNA sense strand
cgacaacguuaacuaaugg

SEQ ID NO: 227766 - RNA, 19 nt, Homo sapiens
  misc_RNA (1)...(19): siRNA sense strand
gaucacagacuaacagaca

SEQ ID NO: 227767 - RNA, 19 nt, Homo sapiens
  misc_RNA (1)...(19): siRNA sense strand
cccaauggcuucagcaaug

SEQ ID NO: 227768 - RNA, 19 nt, Homo sapiens
  misc_RNA (1)...(19): siRNA sense strand
ggacagaaacagaccuaug

SEQ ID NO: 227769 - RNA, 19 nt, Homo sapiens
  misc_RNA (1)...(19): siRNA sense strand
gcacaaagacugggagaag

SEQ ID NO: 227770 - RNA, 19 nt, Homo sapiens
  misc_RNA (1)...(19): siRNA sense strand
ccgauacuguggcucauuu

SEQ ID NO: 227771 - RNA, 19 nt, Homo sapiens
  misc_RNA (1)...(19): siRNA sense strand
cgagauaggagaaagaguu

SEQ ID NO: 227772 - RNA, 19 nt, Homo sapiens
  misc_RNA (1)...(19): siRNA sense strand
ugacauuucacccgagaua

SEQ ID NO: 227773 - RNA, 19 nt, Homo sapiens
  misc_RNA (1)...(19): siRNA sense strand
gacaugaucacaacagaga

SEQ ID NO: 227774 - RNA, 19 nt, Homo sapiens
  misc_RNA (1)...(19): siRNA sense strand
ggaaagcccacgacaugau

SEQ ID NO: 227775 - RNA, 19 nt, Homo sapiens
  misc_RNA (1)...(19): siRNA sense strand
ccgacaacguuaacuaaug

SEQ ID NO: 227776 - RNA, 19 nt, Homo sapiens
  misc_RNA (1)...(19): siRNA sense strand
guacuaaggcggugucaag

SEQ ID NO: 227777 - RNA, 19 nt, Homo sapiens
  misc_RNA (1)...(19): siRNA sense strand
ccagacagaaccaaagaaa

SEQ ID NO: 227778 - RNA, 19 nt, Homo sapiens
  misc_RNA (1)...(19): siRNA sense strand
uggcacacgucaagaagaa

SEQ ID NO: 227779 - RNA, 19 nt, Homo sapiens
  misc_RNA (1)...(19): siRNA sense strand
gcaagacuggccaaacaga

SEQ ID NO: 227780 - RNA, 19 nt, Homo sapiens
  misc_RNA (1)...(19): siRNA sense strand
ggagaagcaccaucacauc

SEQ ID NO: 227781 - RNA, 19 nt, Homo sapiens
  misc_RNA (1)...(19): siRNA sense strand
ccuccucucuggcuaauca

SEQ ID NO: 227782 - RNA, 19 nt, Homo sapiens
  misc_RNA (1)...(19): siRNA sense strand
gaugugaagacgcaaucua

SEQ ID NO: 227783 - RNA, 19 nt, Homo sapiens
  misc_RNA (1)...(19): siRNA sense strand
aagcagaccgggaagaauu

SEQ ID NO: 227784 - RNA, 19 nt, Homo sapiens
  misc_RNA (1)...(19): siRNA sense strand
cuaaggcggugucaagaag

SEQ ID NO: 227785 - RNA, 19 nt, Homo sapiens
  misc_RNA (1)...(19): siRNA sense strand
caucuugaccaucuguuaa

SEQ ID NO: 227786 - RNA, 19 nt, Homo sapiens
  misc_RNA (1)...(19): siRNA sense strand
gcacacgucaagaagaaau

SEQ ID NO: 227787 - RNA, 19 nt, Homo sapiens
  misc_RNA (1)...(19): siRNA sense strand
gacagaaacagaccuaugg

SEQ ID NO: 227788 - RNA, 19 nt, Homo sapiens
  misc_RNA (1)...(19): siRNA sense strand
gagagccuuugcacucaga

SEQ ID NO: 227789 - RNA, 19 nt, Homo sapiens
  misc_RNA (1)...(19): siRNA sense strand
gaaagcccacgacaugauc

SEQ ID NO: 227790 - RNA, 19 nt, Homo sapiens
  misc_RNA (1)...(19): siRNA sense strand
gcauggcacacgucaagaa

SEQ ID NO: 227791 - RNA, 19 nt, Homo sapiens
  misc_RNA (1)...(19): siRNA sense strand
cagcgguacaguccaaaua

SEQ ID NO: 227792 - RNA, 19 nt, Homo sapiens
  misc_RNA (1)...(19): siRNA sense strand
cagagagccuuugcacuca

SEQ ID NO: 227793 - RNA, 19 nt, Homo sapiens
  misc_RNA (1)...(19): siRNA sense strand
gagaagcaccaucacaucu

SEQ ID NO: 227794 - RNA, 19 nt, Homo sapiens
  misc_RNA (1)...(19): siRNA sense strand
gcugacuccuccaacaaug

SEQ ID NO: 227795 - RNA, 19 nt, Homo sapiens
  misc_RNA (1)...(19): siRNA sense strand
caccuccaccucagcauua

SEQ ID NO: 227796 - RNA, 19 nt, Homo sapiens
  misc_RNA (1)...(19): siRNA sense strand
acagaacccugcccaguac

SEQ ID NO: 227797 - RNA, 19 nt, Homo sapiens
  misc_RNA (1)...(19): siRNA sense strand
caucgggaauuccuucaca

SEQ ID NO: 227798 - RNA, 19 nt, Homo sapiens
  misc_RNA (1)...(19): siRNA sense strand
guggaaacaucuugaccau

SEQ ID NO: 227799 - RNA, 19 nt, Homo sapiens
  misc_RNA (1)...(19): siRNA sense strand
caagaagaaaugauugauc

SEQ ID NO: 227800 - RNA, 19 nt, Homo sapiens
  misc_RNA (1)...(19): siRNA sense strand
caagcgaccaugcacuauu

SEQ ID NO: 227801 - RNA, 19 nt, Homo sapiens
  misc_RNA (1)...(19): siRNA sense strand
cagagcugcuucucgaugu

SEQ ID NO: 227802 - RNA, 19 nt, Homo sapiens
  misc_RNA (1)...(19): siRNA sense strand
gaaacaucuugaccaucug

SEQ ID NO: 227803 - RNA, 19 nt, Homo sapiens
  misc_RNA (1)...(19): siRNA sense strand
gagauaggagaaagaguuc

SEQ ID NO: 227804 - RNA, 19 nt, Homo sapiens
  misc_RNA (1)...(19): siRNA sense strand
ggccagcgguacaguccaa

SEQ ID NO: 227805 - RNA, 19 nt, Homo sapiens
  misc_RNA (1)...(19): siRNA sense strand
gggagaagcaccaucacau

SEQ ID NO: 227806 - RNA, 19 nt, Homo sapiens
  misc_RNA (1)...(19): siRNA sense strand
cugaggaggccgucaauga

SEQ ID NO: 227807 - RNA, 19 nt, Homo sapiens
  misc_RNA (1)...(19): siRNA sense strand
uaauggacaugguagaaaa

SEQ ID NO: 227808 - RNA, 19 nt, Homo sapiens
  misc_RNA (1)...(19): siRNA sense strand
cauuaccguuuggaugaua

SEQ ID NO: 227809 - RNA, 19 nt, Homo sapiens
  misc_RNA (1)...(19): siRNA sense strand
caccucagcauuaccguuu

SEQ ID NO: 227810 - RNA, 19 nt, Homo sapiens
  misc_RNA (1)...(19): siRNA sense strand
caaugggccuuccucuucu

SEQ ID NO: 227811 - RNA, 19 nt, Homo sapiens
  misc_RNA (1)...(19): siRNA sense strand
caccgacaacguuaacuaa

SEQ ID NO: 227812 - RNA, 19 nt, Homo sapiens
  misc_RNA (1)...(19): siRNA sense strand
caagacuggccaaacagaa

SEQ ID NO: 227813 - RNA, 19 nt, Homo sapiens
  misc_RNA (1)...(19): siRNA sense strand
cagugacgccgaggacuua

SEQ ID NO: 227814 - RNA, 19 nt, Homo sapiens
  misc_RNA (1)...(19): siRNA sense strand
cauaauggacaugguagaa

SEQ ID NO: 227815 - RNA, 19 nt, Homo sapiens
  misc_RNA (1)...(19): siRNA sense strand
cuguuaaacugcauaaugg

SEQ ID NO: 227816 - RNA, 19 nt, Homo sapiens
  misc_RNA (1)...(19): siRNA sense strand
cagacuaacagacagagaa

SEQ ID NO: 227817 - RNA, 19 nt, Homo sapiens
  misc_RNA (1)...(19): siRNA sense strand
aacagaacccugcccagua

SEQ ID NO: 227818 - RNA, 19 nt, Homo sapiens
  misc_RNA (1)...(19): siRNA sense strand
ggcacgagccauucuccua

SEQ ID NO: 227819 - RNA, 19 nt, Homo sapiens
  misc_RNA (1)...(19): siRNA sense strand
gaagcagaccgggaagaau

SEQ ID NO: 227820 - RNA, 19 nt, Homo sapiens
  misc_RNA (1)...(19): siRNA sense strand
ccacuuugacaauugaaga

SEQ ID NO: 227821 - RNA, 19 nt, Homo sapiens
  misc_RNA (1)...(19): siRNA sense strand
ggagacacaccugcaguca

SEQ ID NO: 227822 - RNA, 19 nt, Homo sapiens
  misc_RNA (1)...(19): siRNA sense strand
agcgagaguugcuggaauu

SEQ ID NO: 227823 - RNA, 19 nt, Homo sapiens
  misc_RNA (1)...(19): siRNA sense strand
gcauuaccguuuggaugau

SEQ ID NO: 227824 - RNA, 19 nt, Homo sapiens
  misc_RNA (1)...(19): siRNA sense strand
guaccucgcccagcaugaa

SEQ ID NO: 227825 - RNA, 19 nt, Homo sapiens
  misc_RNA (1)...(19): siRNA sense strand
agacucaccuguggaugug

SEQ ID NO: 227826 - RNA, 19 nt, Homo sapiens
  misc_RNA (1)...(19): siRNA sense strand
ugagaagcacuccacaaug

SEQ ID NO: 227827 - RNA, 19 nt, Homo sapiens
  misc_RNA (1)...(19): siRNA sense strand
ggccguaaagcgagugaaa

SEQ ID NO: 227828 - RNA, 19 nt, Homo sapiens
  misc_RNA (1)...(19): siRNA sense strand
gcaagcgaccaugcacuau

SEQ ID NO: 227829 - RNA, 19 nt, Homo sapiens
  misc_RNA (1)...(19): siRNA sense strand
uaaacugcauaauggacau

SEQ ID NO: 227830 - RNA, 19 nt, Homo sapiens
  misc_RNA (1)...(19): siRNA sense strand
ucuguuaaacugcauaaug

SEQ ID NO: 227831 - RNA, 19 nt, Homo sapiens
  misc_RNA (1)...(19): siRNA sense strand
agacagagaaugggcagaa

SEQ ID NO: 227832 - RNA, 19 nt, Homo sapiens
  misc_RNA (1)...(19): siRNA sense strand
caguccaaauaacggcuua

SEQ ID NO: 227833 - RNA, 19 nt, Homo sapiens
  misc_RNA (1)...(19): siRNA sense strand
acaccgacaacguuaacua

SEQ ID NO: 227834 - RNA, 19 nt, Homo sapiens
  misc_RNA (1)...(19): siRNA sense strand
cagaagaguggaaacaucu

SEQ ID NO: 227835 - RNA, 19 nt, Homo sapiens
  misc_RNA (1)...(19): siRNA sense strand
gcgguacaguccaaauaac

SEQ ID NO: 227836 - RNA, 19 nt, Homo sapiens
  misc_RNA (1)...(19): siRNA sense strand
ccaauggcuucagcaaugg

SEQ ID NO: 227837 - RNA, 19 nt, Homo sapiens
  misc_RNA (1)...(19): siRNA sense strand
gcagcagagucccgucaac

SEQ ID NO: 227838 - RNA, 19 nt, Homo sapiens
  misc_RNA (1)...(19): siRNA sense strand
gcauaauggacaugguaga

SEQ ID NO: 227839 - RNA, 19 nt, Homo sapiens
  misc_RNA (1)...(19): siRNA sense strand
cuacagggacuccuaucga

SEQ ID NO: 227840 - RNA, 19 nt, Homo sapiens
  misc_RNA (1)...(19): siRNA sense strand
gaaaccugcaguggcugua

SEQ ID NO: 227841 - RNA, 19 nt, Homo sapiens
  misc_RNA (1)...(19): siRNA sense strand
cugagaagcacuccacaau

SEQ ID NO: 227842 - RNA, 19 nt, Homo sapiens
  misc_RNA (1)...(19): siRNA sense strand
ccacugagaccuuuuguca

SEQ ID NO: 227843 - RNA, 19 nt, Homo sapiens
  misc_RNA (1)...(19): siRNA sense strand
ugcaagaagcuacuaacuu

SEQ ID NO: 227844 - RNA, 19 nt, Homo sapiens
  misc_RNA (1)...(19): siRNA sense strand
uggaugauauggccauugc

SEQ ID NO: 227845 - RNA, 19 nt, Homo sapiens
  misc_RNA (1)...(19): siRNA sense strand
cagagagggccaagaugga

SEQ ID NO: 227846 - RNA, 19 nt, Homo sapiens
  misc_RNA (1)...(19): siRNA sense strand
gggcagaagaguggaaaca

SEQ ID NO: 227847 - RNA, 19 nt, Homo sapiens
  misc_RNA (1)...(19): siRNA sense strand
gacagagaaugggcagaag

SEQ ID NO: 227848 - RNA, 19 nt, Homo sapiens
  misc_RNA (1)...(19): siRNA sense strand
ucacagacuaacagacaga

SEQ ID NO: 227849 - RNA, 19 nt, Homo sapiens
  misc_RNA (1)...(19): siRNA sense strand
ccucagggacagaaacaga

SEQ ID NO: 227850 - RNA, 19 nt, Homo sapiens
  misc_RNA (1)...(19): siRNA sense strand
ggaaacaucuugaccaucu

SEQ ID NO: 227851 - RNA, 19 nt, Homo sapiens
  misc_RNA (1)...(19): siRNA sense strand
gaacuccacuuugacaauu

SEQ ID NO: 227852 - RNA, 19 nt, Homo sapiens
  misc_RNA (1)...(19): siRNA sense strand
gcagucagcuccucuguca

SEQ ID NO: 227853 - RNA, 19 nt, Homo sapiens
  misc_RNA (1)...(19): siRNA sense strand
gcuacuaacuucccacuga

SEQ ID NO: 227854 - RNA, 19 nt, Homo sapiens
  misc_RNA (1)...(19): siRNA sense strand
gaggagaucuggaagaaag

SEQ ID NO: 227855 - RNA, 19 nt, Homo sapiens
  misc_RNA (1)...(19): siRNA sense strand
gagaagcacuccacaaugc

SEQ ID NO: 227856 - RNA, 19 nt, Homo sapiens
  misc_RNA (1)...(19): siRNA sense strand
gcaaugggccuuccucuuc

SEQ ID NO: 227857 - RNA, 19 nt, Homo sapiens
  misc_RNA (1)...(19): siRNA sense strand
aagcgaccaugcacuauua

SEQ ID NO: 227858 - RNA, 19 nt, Homo sapiens
  misc_RNA (1)...(19): siRNA sense strand
gcgcaagacuggccaaaca

SEQ ID NO: 227859 - RNA, 19 nt, Homo sapiens
  misc_RNA (1)...(19): siRNA sense strand
gcagaagaguggaaacauc

SEQ ID NO: 227860 - RNA, 19 nt, Homo sapiens
  misc_RNA (1)...(19): siRNA sense strand
gagaguugcuggaauugug

SEQ ID NO: 227861 - RNA, 19 nt, Homo sapiens
  misc_RNA (1)...(19): siRNA sense strand
gaggcgaacuccagacaga

SEQ ID NO: 227862 - RNA, 19 nt, Homo sapiens
  misc_RNA (1)...(19): siRNA sense strand
gaagcaccaucacaucugu

SEQ ID NO: 227863 - RNA, 19 nt, Homo sapiens
  misc_RNA (1)...(19): siRNA sense strand
caacagagagggccaagau

SEQ ID NO: 227864 - RNA, 19 nt, Homo sapiens
  misc_RNA (1)...(19): siRNA sense strand
gcggaaagcccacgacaug

SEQ ID NO: 227865 - RNA, 19 nt, Homo sapiens
  misc_RNA (1)...(19): siRNA sense strand
cgacaacguuaacuaaugg

SEQ ID NO: 227866 - RNA, 19 nt, Homo sapiens
  misc_RNA (1)...(19): siRNA sense strand
gaucacagacuaacagaca

SEQ ID NO: 227867 - RNA, 19 nt, Homo sapiens
  misc_RNA (1)...(19): siRNA sense strand
cccaauggcuucagcaaug

SEQ ID NO: 227868 - RNA, 19 nt, Homo sapiens
  misc_RNA (1)...(19): siRNA sense strand
ggacagaaacagaccuaug

SEQ ID NO: 227869 - RNA, 19 nt, Homo sapiens
  misc_RNA (1)...(19): siRNA sense strand
gcacaaagacugggagaag

SEQ ID NO: 227870 - RNA, 19 nt, Homo sapiens
  misc_RNA (1)...(19): siRNA sense strand
ccgauacuguggcucauuu

SEQ ID NO: 227871 - RNA, 19 nt, Homo sapiens
  misc_RNA (1)...(19): siRNA sense strand
cgagauaggagaaagaguu

SEQ ID NO: 227872 - RNA, 19 nt, Homo sapiens
  misc_RNA (1)...(19): siRNA sense strand
ugacauuucacccgagaua

SEQ ID NO: 227873 - RNA, 19 nt, Homo sapiens
  misc_RNA (1)...(19): siRNA sense strand
gacaugaucacaacagaga

SEQ ID NO: 227874 - RNA, 19 nt, Homo sapiens
  misc_RNA (1)...(19): siRNA sense strand
ggaaagcccacgacaugau

SEQ ID NO: 227875 - RNA, 19 nt, Homo sapiens
  misc_RNA (1)...(19): siRNA sense strand
ccgacaacguuaacuaaug

SEQ ID NO: 227876 - RNA, 19 nt, Homo sapiens
  misc_RNA (1)...(19): siRNA sense strand
guacuaaggcggugucaag

SEQ ID NO: 227877 - RNA, 19 nt, Homo sapiens
  misc_RNA (1)...(19): siRNA sense strand
ccagacagaaccaaagaaa

SEQ ID NO: 227878 - RNA, 19 nt, Homo sapiens
  misc_RNA (1)...(19): siRNA sense strand
uggcacacgucaagaagaa

SEQ ID NO: 227879 - RNA, 19 nt, Homo sapiens
  misc_RNA (1)...(19): siRNA sense strand
gcaagacuggccaaacaga

SEQ ID NO: 227880 - RNA, 19 nt, Homo sapiens
  misc_RNA (1)...(19): siRNA sense strand
ggagaagcaccaucacauc

SEQ ID NO: 227881 - RNA, 19 nt, Homo sapiens
  misc_RNA (1)...(19): siRNA sense strand
ccuccucucuggcuaauca

SEQ ID NO: 227882 - RNA, 19 nt, Homo sapiens
  misc_RNA (1)...(19): siRNA sense strand
gaugugaagacgcaaucua

SEQ ID NO: 227883 - RNA, 19 nt, Homo sapiens
  misc_RNA (1)...(19): siRNA sense strand
aagcagaccgggaagaauu

SEQ ID NO: 227884 - RNA, 19 nt, Homo sapiens
  misc_RNA (1)...(19): siRNA sense strand
cuaaggcggugucaagaag

SEQ ID NO: 227885 - RNA, 19 nt, Homo sapiens
  misc_RNA (1)...(19): siRNA sense strand
caucuugaccaucuguuaa

SEQ ID NO: 227886 - RNA, 19 nt, Homo sapiens
  misc_RNA (1)...(19): siRNA sense strand
gcacacgucaagaagaaau

SEQ ID NO: 227887 - RNA, 19 nt, Homo sapiens
  misc_RNA (1)...(19): siRNA sense strand
gacagaaacagaccuaugg

SEQ ID NO: 227888 - RNA, 19 nt, Homo sapiens
  misc_RNA (1)...(19): siRNA sense strand
gagagccuuugcacucaga

SEQ ID NO: 227889 - RNA, 19 nt, Homo sapiens
  misc_RNA (1)...(19): siRNA sense strand
gaaagcccacgacaugauc

SEQ ID NO: 227890 - RNA, 19 nt, Homo sapiens
  misc_RNA (1)...(19): siRNA sense strand
gcauggcacacgucaagaa

SEQ ID NO: 227891 - RNA, 19 nt, Homo sapiens
  misc_RNA (1)...(19): siRNA sense strand
cagcgguacaguccaaaua

SEQ ID NO: 227892 - RNA, 19 nt, Homo sapiens
  misc_RNA (1)...(19): siRNA sense strand
cagagagccuuugcacuca

SEQ ID NO: 227893 - RNA, 19 nt, Homo sapiens
  misc_RNA (1)...(19): siRNA sense strand
gagaagcaccaucacaucu

SEQ ID NO: 227894 - RNA, 19 nt, Homo sapiens
  misc_RNA (1)...(19): siRNA sense strand
gcugacuccuccaacaaug

SEQ ID NO: 227895 - RNA, 19 nt, Homo sapiens
  misc_RNA (1)...(19): siRNA sense strand
caccuccaccucagcauua

SEQ ID NO: 227896 - RNA, 19 nt, Homo sapiens
  misc_RNA (1)...(19): siRNA sense strand
acagaacccugcccaguac

SEQ ID NO: 227897 - RNA, 19 nt, Homo sapiens
  misc_RNA (1)...(19): siRNA sense strand
caucgggaauuccuucaca

SEQ ID NO: 227898 - RNA, 19 nt, Homo sapiens
  misc_RNA (1)...(19): siRNA sense strand
guggaaacaucuugaccau

SEQ ID NO: 227899 - RNA, 19 nt, Homo sapiens
  misc_RNA (1)...(19): siRNA sense strand
caagaagaaaugauugauc

SEQ ID NO: 227900 - RNA, 19 nt, Homo sapiens
  misc_RNA (1)...(19): siRNA sense strand
caagcgaccaugcacuauu

SEQ ID NO: 227901 - RNA, 19 nt, Homo sapiens
  misc_RNA (1)...(19): siRNA sense strand
cagagcugcuucucgaugu

SEQ ID NO: 227902 - RNA, 19 nt, Homo sapiens
  misc_RNA (1)...(19): siRNA sense strand
gaaacaucuugaccaucug

SEQ ID NO: 227903 - RNA, 19 nt, Homo sapiens
  misc_RNA (1)...(19): siRNA sense strand
gagauaggagaaagaguuc

SEQ ID NO: 227904 - RNA, 19 nt, Homo sapiens
  misc_RNA (1)...(19): siRNA sense strand
ggccagcgguacaguccaa

SEQ ID NO: 227905 - RNA, 19 nt, Homo sapiens
  misc_RNA (1)...(19): siRNA sense strand
gggagaagcaccaucacau

SEQ ID NO: 227906 - RNA, 19 nt, Homo sapiens
  misc_RNA (1)...(19): siRNA sense strand
cugaggaggccgucaauga

SEQ ID NO: 227907 - RNA, 19 nt, Homo sapiens
  misc_RNA (1)...(19): siRNA sense strand
uaauggacaugguagaaaa

SEQ ID NO: 227908 - RNA, 19 nt, Homo sapiens
  misc_RNA (1)...(19): siRNA sense strand
cauuaccguuuggaugaua

SEQ ID NO: 227909 - RNA, 19 nt, Homo sapiens
  misc_RNA (1)...(19): siRNA sense strand
caccucagcauuaccguuu

SEQ ID NO: 227910 - RNA, 19 nt, Homo sapiens
  misc_RNA (1)...(19): siRNA sense strand
caaugggccuuccucuucu

SEQ ID NO: 227911 - RNA, 19 nt, Homo sapiens
  misc_RNA (1)...(19): siRNA sense strand
caccgacaacguuaacuaa

SEQ ID NO: 227912 - RNA, 19 nt, Homo sapiens
  misc_RNA (1)...(19): siRNA sense strand
caagacuggccaaacagaa

SEQ ID NO: 227913 - RNA, 19 nt, Homo sapiens
  misc_RNA (1)...(19): siRNA sense strand
cagugacgccgaggacuua

SEQ ID NO: 227914 - RNA, 19 nt, Homo sapiens
  misc_RNA (1)...(19): siRNA sense strand
cauaauggacaugguagaa

SEQ ID NO: 227915 - RNA, 19 nt, Homo sapiens
  misc_RNA (1)...(19): siRNA sense strand
cuguuaaacugcauaaugg

SEQ ID NO: 227916 - RNA, 19 nt, Homo sapiens
  misc_RNA (1)...(19): siRNA sense strand
cagacuaacagacagagaa

SEQ ID NO: 227917 - RNA, 19 nt, Homo sapiens
  misc_RNA (1)...(19): siRNA sense strand
aacagaacccugcccagua

SEQ ID NO: 227918 - RNA, 19 nt, Homo sapiens
  misc_RNA (1)...(19): siRNA sense strand
ggcacgagccauucuccua

SEQ ID NO: 227919 - RNA, 19 nt, Homo sapiens
  misc_RNA (1)...(19): siRNA sense strand
gaagcagaccgggaagaau

SEQ ID NO: 227920 - RNA, 19 nt, Homo sapiens
  misc_RNA (1)...(19): siRNA sense strand
ccacuuugacaauugaaga

SEQ ID NO: 227921 - RNA, 19 nt, Homo sapiens
  misc_RNA (1)...(19): siRNA sense strand
ggagacacaccugcaguca

SEQ ID NO: 227922 - RNA, 19 nt, Homo sapiens
  misc_RNA (1)...(19): siRNA sense strand
agcgagaguugcuggaauu

SEQ ID NO: 227923 - RNA, 19 nt, Homo sapiens
  misc_RNA (1)...(19): siRNA sense strand
gcauuaccguuuggaugau

SEQ ID NO: 227924 - RNA, 19 nt, Homo sapiens
  misc_RNA (1)...(19): siRNA sense strand
guaccucgcccagcaugaa

SEQ ID NO: 227925 - RNA, 19 nt, Homo sapiens
  misc_RNA (1)...(19): siRNA sense strand
agacucaccuguggaugug

SEQ ID NO: 227926 - RNA, 19 nt, Homo sapiens
  misc_RNA (1)...(19): siRNA sense strand
ugagaagcacuccacaaug

SEQ ID NO: 227927 - RNA, 19 nt, Homo sapiens
  misc_RNA (1)...(19): siRNA sense strand
ggccguaaagcgagugaaa

SEQ ID NO: 227928 - RNA, 19 nt, Homo sapiens
  misc_RNA (1)...(19): siRNA sense strand
gcaagcgaccaugcacuau

SEQ ID NO: 227929 - RNA, 19 nt, Homo sapiens
  misc_RNA (1)...(19): siRNA sense strand
uaaacugcauaauggacau

SEQ ID NO: 227930 - RNA, 19 nt, Homo sapiens
  misc_RNA (1)...(19): siRNA sense strand
ucuguuaaacugcauaaug

SEQ ID NO: 227931 - RNA, 19 nt, Homo sapiens
  misc_RNA (1)...(19): siRNA sense strand
agacagagaaugggcagaa

SEQ ID NO: 227932 - RNA, 19 nt, Homo sapiens
  misc_RNA (1)...(19): siRNA sense strand
caguccaaauaacggcuua

SEQ ID NO: 227933 - RNA, 19 nt, Homo sapiens
  misc_RNA (1)...(19): siRNA sense strand
acaccgacaacguuaacua

SEQ ID NO: 227934 - RNA, 19 nt, Homo sapiens
  misc_RNA (1)...(19): siRNA sense strand
cagaagaguggaaacaucu

SEQ ID NO: 227935 - RNA, 19 nt, Homo sapiens
  misc_RNA (1)...(19): siRNA sense strand
gcgguacaguccaaauaac

SEQ ID NO: 227936 - RNA, 19 nt, Homo sapiens
  misc_RNA (1)...(19): siRNA sense strand
ccaauggcuucagcaaugg

SEQ ID NO: 227937 - RNA, 19 nt, Homo sapiens
  misc_RNA (1)...(19): siRNA sense strand
gcagcagagucccgucaac

SEQ ID NO: 227938 - RNA, 19 nt, Homo sapiens
  misc_RNA (1)...(19): siRNA sense strand
gcauaauggacaugguaga

SEQ ID NO: 227939 - RNA, 19 nt, Homo sapiens
  misc_RNA (1)...(19): siRNA sense strand
cuacagggacuccuaucga

SEQ ID NO: 227940 - RNA, 19 nt, Homo sapiens
  misc_RNA (1)...(19): siRNA sense strand
gaaaccugcaguggcugua

SEQ ID NO: 227941 - RNA, 19 nt, Homo sapiens
  misc_RNA (1)...(19): siRNA sense strand
cugagaagcacuccacaau

SEQ ID NO: 227942 - RNA, 19 nt, Homo sapiens
  misc_RNA (1)...(19): siRNA sense strand
ccacugagaccuuuuguca

SEQ ID NO: 227943 - RNA, 19 nt, Homo sapiens
  misc_RNA (1)...(19): siRNA sense strand
ugcaagaagcuacuaacuu

SEQ ID NO: 227944 - RNA, 19 nt, Homo sapiens
  misc_RNA (1)...(19): siRNA sense strand
uggaugauauggccauugc

SEQ ID NO: 227945 - RNA, 19 nt, Homo sapiens
  misc_RNA (1)...(19): siRNA sense strand
cagagagggccaagaugga

SEQ ID NO: 227946 - RNA, 19 nt, Homo sapiens
  misc_RNA (1)...(19): siRNA sense strand
gggcagaagaguggaaaca

SEQ ID NO: 227947 - RNA, 19 nt, Homo sapiens
  misc_RNA (1)...(19): siRNA sense strand
gacagagaaugggcagaag

SEQ ID NO: 227948 - RNA, 19 nt, Homo sapiens
  misc_RNA (1)...(19): siRNA sense strand
ucacagacuaacagacaga

SEQ ID NO: 227949 - RNA, 19 nt, Homo sapiens
  misc_RNA (1)...(19): siRNA sense strand
ccucagggacagaaacaga

SEQ ID NO: 227950 - RNA, 19 nt, Homo sapiens
  misc_RNA (1)...(19): siRNA sense strand
ggaaacaucuugaccaucu

SEQ ID NO: 227951 - RNA, 19 nt, Homo sapiens
  misc_RNA (1)...(19): siRNA sense strand
gaacuccacuuugacaauu

SEQ ID NO: 227952 - RNA, 19 nt, Homo sapiens
  misc_RNA (1)...(19): siRNA sense strand
gcagucagcuccucuguca

SEQ ID NO: 227953 - RNA, 19 nt, Homo sapiens
  misc_RNA (1)...(19): siRNA sense strand
gcuacuaacuucccacuga

SEQ ID NO: 227954 - RNA, 19 nt, Homo sapiens
  misc_RNA (1)...(19): siRNA sense strand
gaggagaucuggaagaaag

SEQ ID NO: 227955 - RNA, 19 nt, Homo sapiens
  misc_RNA (1)...(19): siRNA sense strand
gcaaugggccuuccucuuc

SEQ ID NO: 227956 - RNA, 19 nt, Homo sapiens
  misc_RNA (1)...(19): siRNA sense strand
aagcgaccaugcacuauua

SEQ ID NO: 227957 - RNA, 19 nt, Homo sapiens
  misc_RNA (1)...(19): siRNA sense strand
gcgcaagacuggccaaaca

SEQ ID NO: 227958 - RNA, 19 nt, Homo sapiens
  misc_RNA (1)...(19): siRNA sense strand
gcagaagaguggaaacauc

SEQ ID NO: 227959 - RNA, 19 nt, Homo sapiens
  misc_RNA (1)...(19): siRNA sense strand
gagaguugcuggaauugug

SEQ ID NO: 227960 - RNA, 19 nt, Homo sapiens
  misc_RNA (1)...(19): siRNA sense strand
gaggcgaacuccagacaga

SEQ ID NO: 227961 - RNA, 19 nt, Homo sapiens
  misc_RNA (1)...(19): siRNA sense strand
gaagcaccaucacaucugu

SEQ ID NO: 227962 - RNA, 19 nt, Homo sapiens
  misc_RNA (1)...(19): siRNA sense strand
caacagagagggccaagau

SEQ ID NO: 227963 - RNA, 19 nt, Homo sapiens
  misc_RNA (1)...(19): siRNA sense strand
gcggaaagcccacgacaug

SEQ ID NO: 227964 - RNA, 19 nt, Homo sapiens
  misc_RNA (1)...(19): siRNA sense strand
cgacaacguuaacuaaugg

SEQ ID NO: 227965 - RNA, 19 nt, Homo sapiens
  misc_RNA (1)...(19): siRNA sense strand
gaucacagacuaacagaca

SEQ ID NO: 227966 - RNA, 19 nt, Homo sapiens
  misc_RNA (1)...(19): siRNA sense strand
cccaauggcuucagcaaug

SEQ ID NO: 227967 - RNA, 19 nt, Homo sapiens
  misc_RNA (1)...(19): siRNA sense strand
ggacagaaacagaccuaug

SEQ ID NO: 227968 - RNA, 19 nt, Homo sapiens
  misc_RNA (1)...(19): siRNA sense strand
gcacaaagacugggagaag

SEQ ID NO: 227969 - RNA, 19 nt, Homo sapiens
  misc_RNA (1)...(19): siRNA sense strand
ccgauacuguggcucauuu

SEQ ID NO: 227970 - RNA, 19 nt, Homo sapiens
  misc_RNA (1)...(19): siRNA sense strand
cgagauaggagaaagaguu

SEQ ID NO: 227971 - RNA, 19 nt, Homo sapiens
  misc_RNA (1)...(19): siRNA sense strand
ugacauuucacccgagaua

SEQ ID NO: 227972 - RNA, 19 nt, Homo sapiens
  misc_RNA (1)...(19): siRNA sense strand
gacaugaucacaacagaga

SEQ ID NO: 227973 - RNA, 19 nt, Homo sapiens
  misc_RNA (1)...(19): siRNA sense strand
ggaaagcccacgacaugau

SEQ ID NO: 227974 - RNA, 19 nt, Homo sapiens
  misc_RNA (1)...(19): siRNA sense strand
ccgacaacguuaacuaaug

SEQ ID NO: 227975 - RNA, 19 nt, Homo sapiens
  misc_RNA (1)...(19): siRNA sense strand
guacuaaggcggugucaag

SEQ ID NO: 227976 - RNA, 19 nt, Homo sapiens
  misc_RNA (1)...(19): siRNA sense strand
ccagacagaaccaaagaaa

SEQ ID NO: 227977 - RNA, 19 nt, Homo sapiens
  misc_RNA (1)...(19): siRNA sense strand
uggcacacgucaagaagaa

SEQ ID NO: 227978 - RNA, 19 nt, Homo sapiens
  misc_RNA (1)...(19): siRNA sense strand
gcaagacuggccaaacaga

SEQ ID NO: 227979 - RNA, 19 nt, Homo sapiens
  misc_RNA (1)...(19): siRNA sense strand
ggagaagcaccaucacauc

SEQ ID NO: 227980 - RNA, 19 nt, Homo sapiens
  misc_RNA (1)...(19): siRNA sense strand
ccuccucucuggcuaauca

SEQ ID NO: 227981 - RNA, 19 nt, Homo sapiens
  misc_RNA (1)...(19): siRNA sense strand
aagcagaccgggaagaauu

SEQ ID NO: 227982 - RNA, 19 nt, Homo sapiens
  misc_RNA (1)...(19): siRNA sense strand
cuaaggcggugucaagaag

SEQ ID NO: 227983 - RNA, 19 nt, Homo sapiens
  misc_RNA (1)...(19): siRNA sense strand
caucuugaccaucuguuaa

SEQ ID NO: 227984 - RNA, 19 nt, Homo sapiens
  misc_RNA (1)...(19): siRNA sense strand
gaugugaagacgcaaucua

SEQ ID NO: 227985 - RNA, 19 nt, Homo sapiens
  misc_RNA (1)...(19): siRNA sense strand
gcacacgucaagaagaaau

SEQ ID NO: 227986 - RNA, 19 nt, Homo sapiens
  misc_RNA (1)...(19): siRNA sense strand
gacagaaacagaccuaugg

SEQ ID NO: 227987 - RNA, 19 nt, Homo sapiens
  misc_RNA (1)...(19): siRNA sense strand
gagagccuuugcacucaga

SEQ ID NO: 227988 - RNA, 19 nt, Homo sapiens
  misc_RNA (1)...(19): siRNA sense strand
gaaagcccacgacaugauc

SEQ ID NO: 227989 - RNA, 19 nt, Homo sapiens
  misc_RNA (1)...(19): siRNA sense strand
gcauggcacacgucaagaa

SEQ ID NO: 227990 - RNA, 19 nt, Homo sapiens
  misc_RNA (1)...(19): siRNA sense strand
cagcgguacaguccaaaua

SEQ ID NO: 227991 - RNA, 19 nt, Homo sapiens
  misc_RNA (1)...(19): siRNA sense strand
cagagagccuuugcacuca

SEQ ID NO: 227992 - RNA, 19 nt, Homo sapiens
  misc_RNA (1)...(19): siRNA sense strand
gagaagcaccaucacaucu

SEQ ID NO: 227993 - RNA, 19 nt, Homo sapiens
  misc_RNA (1)...(19): siRNA sense strand
gcugacuccuccaacaaug

SEQ ID NO: 227994 - RNA, 19 nt, Homo sapiens
  misc_RNA (1)...(19): siRNA sense strand
caccuccaccucagcauua

SEQ ID NO: 227995 - RNA, 19 nt, Homo sapiens
  misc_RNA (1)...(19): siRNA sense strand
acagaacccugcccaguac

SEQ ID NO: 227996 - RNA, 19 nt, Homo sapiens
  misc_RNA (1)...(19): siRNA sense strand
caucgggaauuccuucaca

SEQ ID NO: 227997 - RNA, 19 nt, Homo sapiens
  misc_RNA (1)...(19): siRNA sense strand
guggaaacaucuugaccau

SEQ ID NO: 227998 - RNA, 19 nt, Homo sapiens
  misc_RNA (1)...(19): siRNA sense strand
caagaagaaaugauugauc

SEQ ID NO: 227999 - RNA, 19 nt, Homo sapiens
  misc_RNA (1)...(19): siRNA sense strand
caagcgaccaugcacuauu

SEQ ID NO: 228000 - RNA, 19 nt, Homo sapiens
  misc_RNA (1)...(19): siRNA sense strand
cagagcugcuucucgaugu

SEQ ID NO: 228001 - RNA, 19 nt, Homo sapiens
  misc_RNA (1)...(19): siRNA sense strand
gaaacaucuugaccaucug

SEQ ID NO: 228002 - RNA, 19 nt, Homo sapiens
  misc_RNA (1)...(19): siRNA sense strand
gagauaggagaaagaguuc

SEQ ID NO: 228003 - RNA, 19 nt, Homo sapiens
  misc_RNA (1)...(19): siRNA sense strand
caaugggccuuccucuucu

SEQ ID NO: 228004 - RNA, 19 nt, Homo sapiens
  misc_RNA (1)...(19): siRNA sense strand
gggagaagcaccaucacau

SEQ ID NO: 228005 - RNA, 19 nt, Homo sapiens
  misc_RNA (1)...(19): siRNA sense strand
cugaggaggccgucaauga

SEQ ID NO: 228006 - RNA, 19 nt, Homo sapiens
  misc_RNA (1)...(19): siRNA sense strand
uaauggacaugguagaaaa

SEQ ID NO: 228007 - RNA, 19 nt, Homo sapiens
  misc_RNA (1)...(19): siRNA sense strand
cauuaccguuuggaugaua

SEQ ID NO: 228008 - RNA, 19 nt, Homo sapiens
  misc_RNA (1)...(19): siRNA sense strand
caccucagcauuaccguuu

SEQ ID NO: 228009 - RNA, 19 nt, Homo sapiens
  misc_RNA (1)...(19): siRNA sense strand
ggccagcgguacaguccaa

SEQ ID NO: 228010 - RNA, 19 nt, Homo sapiens
  misc_RNA (1)...(19): siRNA sense strand
caccgacaacguuaacuaa

SEQ ID NO: 228011 - RNA, 19 nt, Homo sapiens
  misc_RNA (1)...(19): siRNA sense strand
caagacuggccaaacagaa

SEQ ID NO: 228012 - RNA, 19 nt, Homo sapiens
  misc_RNA (1)...(19): siRNA sense strand
cagugacgccgaggacuua

SEQ ID NO: 228013 - RNA, 19 nt, Homo sapiens
  misc_RNA (1)...(19): siRNA sense strand
cauaauggacaugguagaa

SEQ ID NO: 228014 - RNA, 19 nt, Homo sapiens
  misc_RNA (1)...(19): siRNA sense strand
cuguuaaacugcauaaugg

SEQ ID NO: 228015 - RNA, 19 nt, Homo sapiens
  misc_RNA (1)...(19): siRNA sense strand
cagacuaacagacagagaa

SEQ ID NO: 228016 - RNA, 19 nt, Homo sapiens
  misc_RNA (1)...(19): siRNA sense strand
aacagaacccugcccagua

SEQ ID NO: 228017 - RNA, 19 nt, Homo sapiens
  misc_RNA (1)...(19): siRNA sense strand
ggcacgagccauucuccua

SEQ ID NO: 228018 - RNA, 19 nt, Homo sapiens
  misc_RNA (1)...(19): siRNA sense strand
gaagcagaccgggaagaau

SEQ ID NO: 228019 - RNA, 19 nt, Homo sapiens
  misc_RNA (1)...(19): siRNA sense strand
ccacuuugacaauugaaga

SEQ ID NO: 228020 - RNA, 19 nt, Homo sapiens
  misc_RNA (1)...(19): siRNA sense strand
ggagacacaccugcaguca

SEQ ID NO: 228021 - RNA, 19 nt, Homo sapiens
  misc_RNA (1)...(19): siRNA sense strand
agcgagaguugcuggaauu

SEQ ID NO: 228022 - RNA, 19 nt, Homo sapiens
  misc_RNA (1)...(19): siRNA sense strand
gcauuaccguuuggaugau

SEQ ID NO: 228023 - RNA, 19 nt, Homo sapiens
  misc_RNA (1)...(19): siRNA sense strand
guaccucgcccagcaugaa

SEQ ID NO: 228024 - RNA, 19 nt, Homo sapiens
  misc_RNA (1)...(19): siRNA sense strand
ggccguaaagcgagugaaa

SEQ ID NO: 228025 - RNA, 19 nt, Homo sapiens
  misc_RNA (1)...(19): siRNA sense strand
agacucaccuguggaugug

SEQ ID NO: 228026 - RNA, 19 nt, Homo sapiens
  misc_RNA (1)...(19): siRNA sense strand
gcaagcgaccaugcacuau

SEQ ID NO: 228027 - RNA, 19 nt, Homo sapiens
  misc_RNA (1)...(19): siRNA sense strand
uaaacugcauaauggacau

SEQ ID NO: 228028 - RNA, 19 nt, Homo sapiens
  misc_RNA (1)...(19): siRNA sense strand
ucuguuaaacugcauaaug

SEQ ID NO: 228029 - RNA, 19 nt, Homo sapiens
  misc_RNA (1)...(19): siRNA sense strand
agacagagaaugggcagaa

SEQ ID NO: 228030 - RNA, 19 nt, Homo sapiens
  misc_RNA (1)...(19): siRNA sense strand
caguccaaauaacggcuua

SEQ ID NO: 228031 - RNA, 19 nt, Homo sapiens
  misc_RNA (1)...(19): siRNA sense strand
cagaagaguggaaacaucu

SEQ ID NO: 228032 - RNA, 19 nt, Homo sapiens
  misc_RNA (1)...(19): siRNA sense strand
acaccgacaacguuaacua

SEQ ID NO: 228033 - RNA, 19 nt, Homo sapiens
  misc_RNA (1)...(19): siRNA sense strand
ccaauggcuucagcaaugg

SEQ ID NO: 228034 - RNA, 19 nt, Homo sapiens
  misc_RNA (1)...(19): siRNA sense strand
gcagcagagucccgucaac

SEQ ID NO: 228035 - RNA, 19 nt, Homo sapiens
  misc_RNA (1)...(19): siRNA sense strand
gcauaauggacaugguaga

SEQ ID NO: 228036 - RNA, 19 nt, Homo sapiens
  misc_RNA (1)...(19): siRNA sense strand
cuacagggacuccuaucga

SEQ ID NO: 228037 - RNA, 19 nt, Homo sapiens
  misc_RNA (1)...(19): siRNA sense strand
gcgguacaguccaaauaac

SEQ ID NO: 228038 - RNA, 19 nt, Homo sapiens
  misc_RNA (1)...(19): siRNA sense strand
gaaaccugcaguggcugua

SEQ ID NO: 228039 - RNA, 19 nt, Homo sapiens
  misc_RNA (1)...(19): siRNA sense strand
ugcaagaagcuacuaacuu

SEQ ID NO: 228040 - RNA, 19 nt, Homo sapiens
  misc_RNA (1)...(19): siRNA sense strand
ccacugagaccuuuuguca

SEQ ID NO: 228041 - RNA, 19 nt, Homo sapiens
  misc_RNA (1)...(19): siRNA sense strand
gagcugcuucucgauguga

SEQ ID NO: 228042 - RNA, 19 nt, Homo sapiens
  misc_RNA (1)...(19): siRNA sense strand
cagagagggccaagaugga

SEQ ID NO: 228043 - RNA, 19 nt, Homo sapiens
  misc_RNA (1)...(19): siRNA sense strand
gggcagaagaguggaaaca

SEQ ID NO: 228044 - RNA, 19 nt, Homo sapiens
  misc_RNA (1)...(19): siRNA sense strand
gacagagaaugggcagaag

SEQ ID NO: 228045 - RNA, 19 nt, Homo sapiens
  misc_RNA (1)...(19): siRNA sense strand
ucacagacuaacagacaga

SEQ ID NO: 228046 - RNA, 19 nt, Homo sapiens
  misc_RNA (1)...(19): siRNA sense strand
ccucagggacagaaacaga

SEQ ID NO: 228047 - RNA, 19 nt, Homo sapiens
  misc_RNA (1)...(19): siRNA sense strand
uggaugauauggccauugc

SEQ ID NO: 228048 - RNA, 19 nt, Homo sapiens
  misc_RNA (1)...(19): siRNA sense strand
agacagaaccaaagaaaau

SEQ ID NO: 228049 - RNA, 19 nt, Homo sapiens
  misc_RNA (1)...(19): siRNA sense strand
aagcgagaguugcuggaau

SEQ ID NO: 228050 - RNA, 19 nt, Homo sapiens
  misc_RNA (1)...(19): siRNA sense strand
ggaaacaucuugaccaucu

SEQ ID NO: 228051 - RNA, 19 nt, Homo sapiens
  misc_RNA (1)...(19): siRNA sense strand
gaacuccacuuugacaauu

SEQ ID NO: 228052 - RNA, 19 nt, Homo sapiens
  misc_RNA (1)...(19): siRNA sense strand
gcagucagcuccucuguca

SEQ ID NO: 228053 - RNA, 19 nt, Homo sapiens
  misc_RNA (1)...(19): siRNA sense strand
gcuacuaacuucccacuga

SEQ ID NO: 228054 - RNA, 19 nt, Homo sapiens
  misc_RNA (1)...(19): siRNA sense strand
gaggagaucuggaagaaag

SEQ ID NO: 228055 - RNA, 19 nt, Homo sapiens
  misc_RNA (1)...(19): siRNA sense strand
gcaaugggccuuccucuuc

SEQ ID NO: 228056 - RNA, 19 nt, Homo sapiens
  misc_RNA (1)...(19): siRNA sense strand
aagcgaccaugcacuauua

SEQ ID NO: 228057 - RNA, 19 nt, Homo sapiens
  misc_RNA (1)...(19): siRNA sense strand
gcgcaagacuggccaaaca

SEQ ID NO: 228058 - RNA, 19 nt, Homo sapiens
  misc_RNA (1)...(19): siRNA sense strand
gcagaagaguggaaacauc

SEQ ID NO: 228059 - RNA, 19 nt, Homo sapiens
  misc_RNA (1)...(19): siRNA sense strand
gagaguugcuggaauugug

SEQ ID NO: 228060 - RNA, 19 nt, Homo sapiens
  misc_RNA (1)...(19): siRNA sense strand
gaggcgaacuccagacaga

SEQ ID NO: 228061 - RNA, 19 nt, Homo sapiens
  misc_RNA (1)...(19): siRNA sense strand
gaagcaccaucacaucugu

SEQ ID NO: 228062 - RNA, 19 nt, Homo sapiens
  misc_RNA (1)...(19): siRNA sense strand
caacagagagggccaagau

SEQ ID NO: 228063 - RNA, 19 nt, Homo sapiens
  misc_RNA (1)...(19): siRNA sense strand
gcggaaagcccacgacaug

SEQ ID NO: 228064 - RNA, 19 nt, Homo sapiens
  misc_RNA (1)...(19): siRNA sense strand
cgacaacguuaacuaaugg

SEQ ID NO: 228065 - RNA, 19 nt, Homo sapiens
  misc_RNA (1)...(19): siRNA sense strand
gaucacagacuaacagaca

SEQ ID NO: 228066 - RNA, 19 nt, Homo sapiens
  misc_RNA (1)...(19): siRNA sense strand
cccaauggcuucagcaaug

SEQ ID NO: 228067 - RNA, 19 nt, Homo sapiens
  misc_RNA (1)...(19): siRNA sense strand
ggacagaaacagaccuaug

SEQ ID NO: 228068 - RNA, 19 nt, Homo sapiens
  misc_RNA (1)...(19): siRNA sense strand
gcacaaagacugggagaag

SEQ ID NO: 228069 - RNA, 19 nt, Homo sapiens
  misc_RNA (1)...(19): siRNA sense strand
ccgauacuguggcucauuu

SEQ ID NO: 228070 - RNA, 19 nt, Homo sapiens
  misc_RNA (1)...(19): siRNA sense strand
cgagauaggagaaagaguu

SEQ ID NO: 228071 - RNA, 19 nt, Homo sapiens
  misc_RNA (1)...(19): siRNA sense strand
ugacauuucacccgagaua

SEQ ID NO: 228072 - RNA, 19 nt, Homo sapiens
  misc_RNA (1)...(19): siRNA sense strand
gacaugaucacaacagaga

SEQ ID NO: 228073 - RNA, 19 nt, Homo sapiens
  misc_RNA (1)...(19): siRNA sense strand
ggaaagcccacgacaugau

SEQ ID NO: 228074 - RNA, 19 nt, Homo sapiens
  misc_RNA (1)...(19): siRNA sense strand
ccgacaacguuaacuaaug

SEQ ID NO: 228075 - RNA, 19 nt, Homo sapiens
  misc_RNA (1)...(19): siRNA sense strand
guacuaaggcggugucaag

SEQ ID NO: 228076 - RNA, 19 nt, Homo sapiens
  misc_RNA (1)...(19): siRNA sense strand
ccagacagaaccaaagaaa

SEQ ID NO: 228077 - RNA, 19 nt, Homo sapiens
  misc_RNA (1)...(19): siRNA sense strand
uggcacacgucaagaagaa

SEQ ID NO: 228078 - RNA, 19 nt, Homo sapiens
  misc_RNA (1)...(19): siRNA sense strand
gcaagacuggccaaacaga

SEQ ID NO: 228079 - RNA, 19 nt, Homo sapiens
  misc_RNA (1)...(19): siRNA sense strand
ggagaagcaccaucacauc

SEQ ID NO: 228080 - RNA, 19 nt, Homo sapiens
  misc_RNA (1)...(19): siRNA sense strand
ccuccucucuggcuaauca

SEQ ID NO: 228081 - RNA, 19 nt, Homo sapiens
  misc_RNA (1)...(19): siRNA sense strand
aagcagaccgggaagaauu

SEQ ID NO: 228082 - RNA, 19 nt, Homo sapiens
  misc_RNA (1)...(19): siRNA sense strand
cuaaggcggugucaagaag

SEQ ID NO: 228083 - RNA, 19 nt, Homo sapiens
  misc_RNA (1)...(19): siRNA sense strand
caucuugaccaucuguuaa

SEQ ID NO: 228084 - RNA, 19 nt, Homo sapiens
  misc_RNA (1)...(19): siRNA sense strand
gaugugaagacgcaaucua

SEQ ID NO: 228085 - RNA, 19 nt, Homo sapiens
  misc_RNA (1)...(19): siRNA sense strand
gcacacgucaagaagaaau

SEQ ID NO: 228086 - RNA, 19 nt, Homo sapiens
  misc_RNA (1)...(19): siRNA sense strand
gacagaaacagaccuaugg

SEQ ID NO: 228087 - RNA, 19 nt, Homo sapiens
  misc_RNA (1)...(19): siRNA sense strand
gagagccuuugcacucaga

SEQ ID NO: 228088 - RNA, 19 nt, Homo sapiens
  misc_RNA (1)...(19): siRNA sense strand
gaaagcccacgacaugauc

SEQ ID NO: 228089 - RNA, 19 nt, Homo sapiens
  misc_RNA (1)...(19): siRNA sense strand
gcauggcacacgucaagaa

SEQ ID NO: 228090 - RNA, 19 nt, Homo sapiens
  misc_RNA (1)...(19): siRNA sense strand
cagcgguacaguccaaaua

SEQ ID NO: 228091 - RNA, 19 nt, Homo sapiens
  misc_RNA (1)...(19): siRNA sense strand
cagagagccuuugcacuca

SEQ ID NO: 228092 - RNA, 19 nt, Homo sapiens
  misc_RNA (1)...(19): siRNA sense strand
gagaagcaccaucacaucu

SEQ ID NO: 228093 - RNA, 19 nt, Homo sapiens
  misc_RNA (1)...(19): siRNA sense strand
gcugacuccuccaacaaug

SEQ ID NO: 228094 - RNA, 19 nt, Homo sapiens
  misc_RNA (1)...(19): siRNA sense strand
caccuccaccucagcauua

SEQ ID NO: 228095 - RNA, 19 nt, Homo sapiens
  misc_RNA (1)...(19): siRNA sense strand
acagaacccugcccaguac

SEQ ID NO: 228096 - RNA, 19 nt, Homo sapiens
  misc_RNA (1)...(19): siRNA sense strand
caucgggaauuccuucaca

SEQ ID NO: 228097 - RNA, 19 nt, Homo sapiens
  misc_RNA (1)...(19): siRNA sense strand
guggaaacaucuugaccau

SEQ ID NO: 228098 - RNA, 19 nt, Homo sapiens
  misc_RNA (1)...(19): siRNA sense strand
caagaagaaaugauugauc

SEQ ID NO: 228099 - RNA, 19 nt, Homo sapiens
  misc_RNA (1)...(19): siRNA sense strand
caagcgaccaugcacuauu

SEQ ID NO: 228100 - RNA, 19 nt, Homo sapiens
  misc_RNA (1)...(19): siRNA sense strand
cagagcugcuucucgaugu

SEQ ID NO: 228101 - RNA, 19 nt, Homo sapiens
  misc_RNA (1)...(19): siRNA sense strand
gaaacaucuugaccaucug

SEQ ID NO: 228102 - RNA, 19 nt, Homo sapiens
  misc_RNA (1)...(19): siRNA sense strand
gagauaggagaaagaguuc

SEQ ID NO: 228103 - RNA, 19 nt, Homo sapiens
  misc_RNA (1)...(19): siRNA sense strand
caaugggccuuccucuucu

SEQ ID NO: 228104 - RNA, 19 nt, Homo sapiens
  misc_RNA (1)...(19): siRNA sense strand
gggagaagcaccaucacau

SEQ ID NO: 228105 - RNA, 19 nt, Homo sapiens
  misc_RNA (1)...(19): siRNA sense strand
cugaggaggccgucaauga

SEQ ID NO: 228106 - RNA, 19 nt, Homo sapiens
  misc_RNA (1)...(19): siRNA sense strand
uaauggacaugguagaaaa

SEQ ID NO: 228107 - RNA, 19 nt, Homo sapiens
  misc_RNA (1)...(19): siRNA sense strand
cauuaccguuuggaugaua

SEQ ID NO: 228108 - RNA, 19 nt, Homo sapiens
  misc_RNA (1)...(19): siRNA sense strand
caccucagcauuaccguuu

SEQ ID NO: 228109 - RNA, 19 nt, Homo sapiens
  misc_RNA (1)...(19): siRNA sense strand
ggccagcgguacaguccaa

SEQ ID NO: 228110 - RNA, 19 nt, Homo sapiens
  misc_RNA (1)...(19): siRNA sense strand
caccgacaacguuaacuaa

SEQ ID NO: 228111 - RNA, 19 nt, Homo sapiens
  misc_RNA (1)...(19): siRNA sense strand
caagacuggccaaacagaa

SEQ ID NO: 228112 - RNA, 19 nt, Homo sapiens
  misc_RNA (1)...(19): siRNA sense strand
cagugacgccgaggacuua

SEQ ID NO: 228113 - RNA, 19 nt, Homo sapiens
  misc_RNA (1)...(19): siRNA sense strand
cauaauggacaugguagaa

SEQ ID NO: 228114 - RNA, 19 nt, Homo sapiens
  misc_RNA (1)...(19): siRNA sense strand
cuguuaaacugcauaaugg

SEQ ID NO: 228115 - RNA, 19 nt, Homo sapiens
  misc_RNA (1)...(19): siRNA sense strand
cagacuaacagacagagaa

SEQ ID NO: 228116 - RNA, 19 nt, Homo sapiens
  misc_RNA (1)...(19): siRNA sense strand
aacagaacccugcccagua

SEQ ID NO: 228117 - RNA, 19 nt, Homo sapiens
  misc_RNA (1)...(19): siRNA sense strand
ggcacgagccauucuccua

SEQ ID NO: 228118 - RNA, 19 nt, Homo sapiens
  misc_RNA (1)...(19): siRNA sense strand
gaagcagaccgggaagaau

SEQ ID NO: 228119 - RNA, 19 nt, Homo sapiens
  misc_RNA (1)...(19): siRNA sense strand
ccacuuugacaauugaaga

SEQ ID NO: 228120 - RNA, 19 nt, Homo sapiens
  misc_RNA (1)...(19): siRNA sense strand
ggagacacaccugcaguca

SEQ ID NO: 228121 - RNA, 19 nt, Homo sapiens
  misc_RNA (1)...(19): siRNA sense strand
agcgagaguugcuggaauu

SEQ ID NO: 228122 - RNA, 19 nt, Homo sapiens
  misc_RNA (1)...(19): siRNA sense strand
gcauuaccguuuggaugau

SEQ ID NO: 228123 - RNA, 19 nt, Homo sapiens
  misc_RNA (1)...(19): siRNA sense strand
guaccucgcccagcaugaa

SEQ ID NO: 228124 - RNA, 19 nt, Homo sapiens
  misc_RNA (1)...(19): siRNA sense strand
ggccguaaagcgagugaaa

SEQ ID NO: 228125 - RNA, 19 nt, Homo sapiens
  misc_RNA (1)...(19): siRNA sense strand
agacucaccuguggaugug

SEQ ID NO: 228126 - RNA, 19 nt, Homo sapiens
  misc_RNA (1)...(19): siRNA sense strand
gcaagcgaccaugcacuau

SEQ ID NO: 228127 - RNA, 19 nt, Homo sapiens
  misc_RNA (1)...(19): siRNA sense strand
uaaacugcauaauggacau

SEQ ID NO: 228128 - RNA, 19 nt, Homo sapiens
  misc_RNA (1)...(19): siRNA sense strand
ucuguuaaacugcauaaug

SEQ ID NO: 228129 - RNA, 19 nt, Homo sapiens
  misc_RNA (1)...(19): siRNA sense strand
agacagagaaugggcagaa

SEQ ID NO: 228130 - RNA, 19 nt, Homo sapiens
  misc_RNA (1)...(19): siRNA sense strand
caguccaaauaacggcuua

SEQ ID NO: 228131 - RNA, 19 nt, Homo sapiens
  misc_RNA (1)...(19): siRNA sense strand
cagaagaguggaaacaucu

SEQ ID NO: 228132 - RNA, 19 nt, Homo sapiens
  misc_RNA (1)...(19): siRNA sense strand
acaccgacaacguuaacua

SEQ ID NO: 228133 - RNA, 19 nt, Homo sapiens
  misc_RNA (1)...(19): siRNA sense strand
ccaauggcuucagcaaugg

SEQ ID NO: 228134 - RNA, 19 nt, Homo sapiens
  misc_RNA (1)...(19): siRNA sense strand
gcagcagagucccgucaac

SEQ ID NO: 228135 - RNA, 19 nt, Homo sapiens
  misc_RNA (1)...(19): siRNA sense strand
gcauaauggacaugguaga

SEQ ID NO: 228136 - RNA, 19 nt, Homo sapiens
  misc_RNA (1)...(19): siRNA sense strand
cuacagggacuccuaucga

SEQ ID NO: 228137 - RNA, 19 nt, Homo sapiens
  misc_RNA (1)...(19): siRNA sense strand
gcgguacaguccaaauaac

SEQ ID NO: 228138 - RNA, 19 nt, Homo sapiens
  misc_RNA (1)...(19): siRNA sense strand
gaaaccugcaguggcugua

SEQ ID NO: 228139 - RNA, 19 nt, Homo sapiens
  misc_RNA (1)...(19): siRNA sense strand
ugcaagaagcuacuaacuu

SEQ ID NO: 228140 - RNA, 19 nt, Homo sapiens
  misc_RNA (1)...(19): siRNA sense strand
ccacugagaccuuuuguca

SEQ ID NO: 228141 - RNA, 19 nt, Homo sapiens
  misc_RNA (1)...(19): siRNA sense strand
gagcugcuucucgauguga

SEQ ID NO: 228142 - RNA, 19 nt, Homo sapiens
  misc_RNA (1)...(19): siRNA sense strand
cagagagggccaagaugga

SEQ ID NO: 228143 - RNA, 19 nt, Homo sapiens
  misc_RNA (1)...(19): siRNA sense strand
gggcagaagaguggaaaca

SEQ ID NO: 228144 - RNA, 19 nt, Homo sapiens
  misc_RNA (1)...(19): siRNA sense strand
gacagagaaugggcagaag

SEQ ID NO: 228145 - RNA, 19 nt, Homo sapiens
  misc_RNA (1)...(19): siRNA sense strand
ucacagacuaacagacaga

SEQ ID NO: 228146 - RNA, 19 nt, Homo sapiens
  misc_RNA (1)...(19): siRNA sense strand
ccucagggacagaaacaga

SEQ ID NO: 228147 - RNA, 19 nt, Homo sapiens
  misc_RNA (1)...(19): siRNA sense strand
uggaugauauggccauugc

SEQ ID NO: 228148 - RNA, 19 nt, Homo sapiens
  misc_RNA (1)...(19): siRNA sense strand
agacagaaccaaagaaaau

SEQ ID NO: 228149 - RNA, 19 nt, Homo sapiens
  misc_RNA (1)...(19): siRNA sense strand
aagcgagaguugcuggaau

SEQ ID NO: 228150 - RNA, 19 nt, Homo sapiens
  misc_RNA (1)...(19): siRNA sense strand
gcaaagggaucuacaguuu

SEQ ID NO: 228151 - RNA, 19 nt, Homo sapiens
  misc_RNA (1)...(19): siRNA sense strand
gaacaacuuugauucagaa

SEQ ID NO: 228152 - RNA, 19 nt, Homo sapiens
  misc_RNA (1)...(19): siRNA sense strand
ggaacaacuuugauucaga

SEQ ID NO: 228153 - RNA, 19 nt, Homo sapiens
  misc_RNA (1)...(19): siRNA sense strand
gaacauugggaacaacuuu

SEQ ID NO: 228154 - RNA, 19 nt, Homo sapiens
  misc_RNA (1)...(19): siRNA sense strand
gcaccaugaucaucuacuu

SEQ ID NO: 228155 - RNA, 19 nt, Homo sapiens
  misc_RNA (1)...(19): siRNA sense strand
aaagggaucuacaguuuua

SEQ ID NO: 228156 - RNA, 19 nt, Homo sapiens
  misc_RNA (1)...(19): siRNA sense strand
gaaaggcgaccgagcauac

SEQ ID NO: 228157 - RNA, 19 nt, Homo sapiens
  misc_RNA (1)...(19): siRNA sense strand
caacggaguccuaauccaa

SEQ ID NO: 228158 - RNA, 19 nt, Homo sapiens
  misc_RNA (1)...(19): siRNA sense strand
cuacaacagacaaaccaua

SEQ ID NO: 228159 - RNA, 19 nt, Homo sapiens
  misc_RNA (1)...(19): siRNA sense strand
ucagaacgcagcacuuuca

SEQ ID NO: 228160 - RNA, 19 nt, Homo sapiens
  misc_RNA (1)...(19): siRNA sense strand
gggaacaacuuugauucag

SEQ ID NO: 228161 - RNA, 19 nt, Homo sapiens
  misc_RNA (1)...(19): siRNA sense strand
gcaacggaguccuaaucca

SEQ ID NO: 228162 - RNA, 19 nt, Homo sapiens
  misc_RNA (1)...(19): siRNA sense strand
cgaccgagcauaccucaag

SEQ ID NO: 228163 - RNA, 19 nt, Homo sapiens
  misc_RNA (1)...(19): siRNA sense strand
cuacuucgaccagguacua

SEQ ID NO: 228164 - RNA, 19 nt, Homo sapiens
  misc_RNA (1)...(19): siRNA sense strand
cagcaacggaguccuaauc

SEQ ID NO: 228165 - RNA, 19 nt, Homo sapiens
  misc_RNA (1)...(19): siRNA sense strand
gcgcaaagggaucuacagu

SEQ ID NO: 228166 - RNA, 19 nt, Homo sapiens
  misc_RNA (1)...(19): siRNA sense strand
caacagacaaaccauacag

SEQ ID NO: 228167 - RNA, 19 nt, Homo sapiens
  misc_RNA (1)...(19): siRNA sense strand
caucuacuucgaccaggua

SEQ ID NO: 228168 - RNA, 19 nt, Homo sapiens
  misc_RNA (1)...(19): siRNA sense strand
gagaaaggcgaccgagcau

SEQ ID NO: 228169 - RNA, 19 nt, Homo sapiens
  misc_RNA (1)...(19): siRNA sense strand
gguaaaagucuacaacaga

SEQ ID NO: 228170 - RNA, 19 nt, Homo sapiens
  misc_RNA (1)...(19): siRNA sense strand
aguaaucgcaccaugauca

SEQ ID NO: 228171 - RNA, 19 nt, Homo sapiens
  misc_RNA (1)...(19): siRNA sense strand
ugaguaaucgcaccaugau

SEQ ID NO: 228172 - RNA, 19 nt, Homo sapiens
  misc_RNA (1)...(19): siRNA sense strand
ccugguguuuccucucuga

SEQ ID NO: 228173 - RNA, 19 nt, Homo sapiens
  misc_RNA (1)...(19): siRNA sense strand
uagugaacauugggaacaa

SEQ ID NO: 228174 - RNA, 19 nt, Homo sapiens
  misc_RNA (1)...(19): siRNA sense strand
ggaguccuaauccaaaugg

SEQ ID NO: 228175 - RNA, 19 nt, Homo sapiens
  misc_RNA (1)...(19): siRNA sense strand
cagguacuagugaacauug

SEQ ID NO: 228176 - RNA, 19 nt, Homo sapiens
  misc_RNA (1)...(19): siRNA sense strand
cacgagccguccgagauga

SEQ ID NO: 228177 - RNA, 19 nt, Homo sapiens
  misc_RNA (1)...(19): siRNA sense strand
ggaaugugcuggugacugu

SEQ ID NO: 228178 - RNA, 19 nt, Homo sapiens
  misc_RNA (1)...(19): siRNA sense strand
ucaaguggaugaucaagaa

SEQ ID NO: 228179 - RNA, 19 nt, Homo sapiens
  misc_RNA (1)...(19): siRNA sense strand
cgaagauccuggcaaguuu

SEQ ID NO: 228180 - RNA, 19 nt, Homo sapiens
  misc_RNA (1)...(19): siRNA sense strand
ucacagacaucucagacuu

SEQ ID NO: 228181 - RNA, 19 nt, Homo sapiens
  misc_RNA (1)...(19): siRNA sense strand
gaagcacuuugaccacuau

SEQ ID NO: 228182 - RNA, 19 nt, Homo sapiens
  misc_RNA (1)...(19): siRNA sense strand
ccaaagcccugguccucaa

SEQ ID NO: 228183 - RNA, 19 nt, Homo sapiens
  misc_RNA (1)...(19): siRNA sense strand
gcagcuacuuugugcaguu

SEQ ID NO: 228184 - RNA, 19 nt, Homo sapiens
  misc_RNA (1)...(19): siRNA sense strand
guggagacuucaugcuuaa

SEQ ID NO: 228185 - RNA, 19 nt, Homo sapiens
  misc_RNA (1)...(19): siRNA sense strand
gagacgaggucaucaucau

SEQ ID NO: 228186 - RNA, 19 nt, Homo sapiens
  misc_RNA (1)...(19): siRNA sense strand
aguggagacuucaugcuua

SEQ ID NO: 228187 - RNA, 19 nt, Homo sapiens
  misc_RNA (1)...(19): siRNA sense strand
gauccuggcaaguuucuuu

SEQ ID NO: 228188 - RNA, 19 nt, Homo sapiens
  misc_RNA (1)...(19): siRNA sense strand
gcuacgagcccaugacaau

SEQ ID NO: 228189 - RNA, 19 nt, Homo sapiens
  misc_RNA (1)...(19): siRNA sense strand
agaggaagaugccugacuu

SEQ ID NO: 228190 - RNA, 19 nt, Homo sapiens
  misc_RNA (1)...(19): siRNA sense strand
ucucagacuucaagaggaa

SEQ ID NO: 228191 - RNA, 19 nt, Homo sapiens
  misc_RNA (1)...(19): siRNA sense strand
gcacuuugaccacuauauc

SEQ ID NO: 228192 - RNA, 19 nt, Homo sapiens
  misc_RNA (1)...(19): siRNA sense strand
caacccagcagcuacuuug

SEQ ID NO: 228193 - RNA, 19 nt, Homo sapiens
  misc_RNA (1)...(19): siRNA sense strand
ggaugagcccuaugacaga

SEQ ID NO: 228194 - RNA, 19 nt, Homo sapiens
  misc_RNA (1)...(19): siRNA sense strand
gcuacuuccucaucacaga

SEQ ID NO: 228195 - RNA, 19 nt, Homo sapiens
  misc_RNA (1)...(19): siRNA sense strand
gcugcugggucaggagaua

SEQ ID NO: 228196 - RNA, 19 nt, Homo sapiens
  misc_RNA (1)...(19): siRNA sense strand
agaagcacuuugaccacua

SEQ ID NO: 228197 - RNA, 19 nt, Homo sapiens
  misc_RNA (1)...(19): siRNA sense strand
cagaucacaucaugaagca

SEQ ID NO: 228198 - RNA, 19 nt, Homo sapiens
  misc_RNA (1)...(19): siRNA sense strand
uagacgggaucgacuacaa

SEQ ID NO: 228199 - RNA, 19 nt, Homo sapiens
  misc_RNA (1)...(19): siRNA sense strand
gccagggcuucccggauuu

SEQ ID NO: 228200 - RNA, 19 nt, Homo sapiens
  misc_RNA (1)...(19): siRNA sense strand
gaagauccuggcaaguuuc

SEQ ID NO: 228201 - RNA, 19 nt, Homo sapiens
  misc_RNA (1)...(19): siRNA sense strand
gcaccagaacuccgucuuc

SEQ ID NO: 228202 - RNA, 19 nt, Homo sapiens
  misc_RNA (1)...(19): siRNA sense strand
guccagaucacaucaugaa

SEQ ID NO: 228203 - RNA, 19 nt, Homo sapiens
  misc_RNA (1)...(19): siRNA sense strand
caucaucaucgaacccuuu

SEQ ID NO: 228204 - RNA, 19 nt, Homo sapiens
  misc_RNA (1)...(19): siRNA sense strand
acagacaucucagacuuca

SEQ ID NO: 228205 - RNA, 19 nt, Homo sapiens
  misc_RNA (1)...(19): siRNA sense strand
acgagaagcugcggaagug

SEQ ID NO: 228206 - RNA, 19 nt, Homo sapiens
  misc_RNA (1)...(19): siRNA sense strand
agauagacccgcucaggaa

SEQ ID NO: 228207 - RNA, 19 nt, Homo sapiens
  misc_RNA (1)...(19): siRNA sense strand
aguggaagguggaacucua

SEQ ID NO: 228208 - RNA, 19 nt, Homo sapiens
  misc_RNA (1)...(19): siRNA sense strand
ccaguacaccaagacauuu

SEQ ID NO: 228209 - RNA, 19 nt, Homo sapiens
  misc_RNA (1)...(19): siRNA sense strand
gauagacccgcucaggaau

SEQ ID NO: 228210 - RNA, 19 nt, Homo sapiens
  misc_RNA (1)...(19): siRNA sense strand
caccagcacaucagcauug

SEQ ID NO: 228211 - RNA, 19 nt, Homo sapiens
  misc_RNA (1)...(19): siRNA sense strand
uauauccgcuucuguuuug

SEQ ID NO: 228212 - RNA, 19 nt, Homo sapiens
  misc_RNA (1)...(19): siRNA sense strand
gcaguagccgagagcuuug

SEQ ID NO: 228213 - RNA, 19 nt, Homo sapiens
  misc_RNA (1)...(19): siRNA sense strand
ggguccagaucacaucaug

SEQ ID NO: 228214 - RNA, 19 nt, Homo sapiens
  misc_RNA (1)...(19): siRNA sense strand
ggagacgaggucaucauca

SEQ ID NO: 228215 - RNA, 19 nt, Homo sapiens
  misc_RNA (1)...(19): siRNA sense strand
ggaaguggaagguggaacu

SEQ ID NO: 228216 - RNA, 19 nt, Homo sapiens
  misc_RNA (1)...(19): siRNA sense strand
cgaaggagacgaggucauc

SEQ ID NO: 228217 - RNA, 19 nt, Homo sapiens
  misc_RNA (1)...(19): siRNA sense strand
gaggaagaugccugacuug

SEQ ID NO: 228218 - RNA, 19 nt, Homo sapiens
  misc_RNA (1)...(19): siRNA sense strand
gggcagcuacuuccucauc

SEQ ID NO: 228219 - RNA, 19 nt, Homo sapiens
  misc_RNA (1)...(19): siRNA sense strand
gcaccagcacaucagcauu

SEQ ID NO: 228220 - RNA, 19 nt, Homo sapiens
  misc_RNA (1)...(19): siRNA sense strand
agcaugacgugguguguau

SEQ ID NO: 228221 - RNA, 19 nt, Homo sapiens
  misc_RNA (1)...(19): siRNA sense strand
ccucaucacagacaucuca

SEQ ID NO: 228222 - RNA, 19 nt, Homo sapiens
  misc_RNA (1)...(19): siRNA sense strand
ggcagcuacuuccucauca

SEQ ID NO: 228223 - RNA, 19 nt, Homo sapiens
  misc_RNA (1)...(19): siRNA sense strand
acgaagauccuggcaaguu

SEQ ID NO: 228224 - RNA, 19 nt, Homo sapiens
  misc_RNA (1)...(19): siRNA sense strand
cacaucagaagcacuuuga

SEQ ID NO: 228225 - RNA, 19 nt, Homo sapiens
  misc_RNA (1)...(19): siRNA sense strand
agacaucucagacuucaag

SEQ ID NO: 228226 - RNA, 19 nt, Homo sapiens
  misc_RNA (1)...(19): siRNA sense strand
gagacuucaugcuuaacca

SEQ ID NO: 228227 - RNA, 19 nt, Homo sapiens
  misc_RNA (1)...(19): siRNA sense strand
gaaggagacgaggucauca

SEQ ID NO: 228228 - RNA, 19 nt, Homo sapiens
  misc_RNA (1)...(19): siRNA sense strand
uacgagcccaugacaauga

SEQ ID NO: 228229 - RNA, 19 nt, Homo sapiens
  misc_RNA (1)...(19): siRNA sense strand
gacgagaagcugcggaagu

SEQ ID NO: 228230 - RNA, 19 nt, Homo sapiens
  misc_RNA (1)...(19): siRNA sense strand
ccacaucagaagcacuuug

SEQ ID NO: 228231 - RNA, 19 nt, Homo sapiens
  misc_RNA (1)...(19): siRNA sense strand
uagacccgcucaggaaugu

SEQ ID NO: 228232 - RNA, 19 nt, Homo sapiens
  misc_RNA (1)...(19): siRNA sense strand
cagcaugacguggugugua

SEQ ID NO: 228233 - RNA, 19 nt, Homo sapiens
  misc_RNA (1)...(19): siRNA sense strand
ggugacuguugguggcuau

SEQ ID NO: 228234 - RNA, 19 nt, Homo sapiens
  misc_RNA (1)...(19): siRNA sense strand
agcaugacgucgugaacuu

SEQ ID NO: 228235 - RNA, 19 nt, Homo sapiens
  misc_RNA (1)...(19): siRNA sense strand
cacuauauccgcuucuguu

SEQ ID NO: 228236 - RNA, 19 nt, Homo sapiens
  misc_RNA (1)...(19): siRNA sense strand
gcaugacgucgugaacuug

SEQ ID NO: 228237 - RNA, 19 nt, Homo sapiens
  misc_RNA (1)...(19): siRNA sense strand
cagcuacuuugugcaguuc

SEQ ID NO: 228238 - RNA, 19 nt, Homo sapiens
  misc_RNA (1)...(19): siRNA sense strand
acuucaugcuuaaccagua

SEQ ID NO: 228239 - RNA, 19 nt, Homo sapiens
  misc_RNA (1)...(19): siRNA sense strand
cgugaccacaugauacgua

SEQ ID NO: 228240 - RNA, 19 nt, Homo sapiens
  misc_RNA (1)...(19): siRNA sense strand
ugcaguagccgagagcuuu

SEQ ID NO: 228241 - RNA, 19 nt, Homo sapiens
  misc_RNA (1)...(19): siRNA sense strand
ucacaucacgcaccaaagc

SEQ ID NO: 228242 - RNA, 19 nt, Homo sapiens
  misc_RNA (1)...(19): siRNA sense strand
caguggagacuucaugcuu

SEQ ID NO: 228243 - RNA, 19 nt, Homo sapiens
  misc_RNA (1)...(19): siRNA sense strand
gcagcuacuuccucaucac

SEQ ID NO: 228244 - RNA, 19 nt, Homo sapiens
  misc_RNA (1)...(19): siRNA sense strand
aguggaugaucaagaacaa

SEQ ID NO: 228245 - RNA, 19 nt, Homo sapiens
  misc_RNA (1)...(19): siRNA sense strand
caauauagguuuacgguuu

SEQ ID NO: 228246 - RNA, 19 nt, Homo sapiens
  misc_RNA (1)...(19): siRNA sense strand
gauaauggccucagaauga

SEQ ID NO: 228247 - RNA, 19 nt, Homo sapiens
  misc_RNA (1)...(19): siRNA sense strand
ucagaaacauuccaagaua

SEQ ID NO: 228248 - RNA, 19 nt, Homo sapiens
  misc_RNA (1)...(19): siRNA sense strand
gcacggcaauugaagcaua

SEQ ID NO: 228249 - RNA, 19 nt, Homo sapiens
  misc_RNA (1)...(19): siRNA sense strand
ggacugagcugcuuuuauu

SEQ ID NO: 228250 - RNA, 19 nt, Homo sapiens
  misc_RNA (1)...(19): siRNA sense strand
ggaauagaaugucuucaga

SEQ ID NO: 228251 - RNA, 19 nt, Homo sapiens
  misc_RNA (1)...(19): siRNA sense strand
gaacaggagucuagauguc

SEQ ID NO: 228252 - RNA, 19 nt, Homo sapiens
  misc_RNA (1)...(19): siRNA sense strand
acagaaguguguagaguua

SEQ ID NO: 228253 - RNA, 19 nt, Homo sapiens
  misc_RNA (1)...(19): siRNA sense strand
cagaaugacugcaagacua

SEQ ID NO: 228254 - RNA, 19 nt, Homo sapiens
  misc_RNA (1)...(19): siRNA sense strand
caagauaaauggcagagau

SEQ ID NO: 228255 - RNA, 19 nt, Homo sapiens
  misc_RNA (1)...(19): siRNA sense strand
uaacucaccuuccaacaau

SEQ ID NO: 228256 - RNA, 19 nt, Homo sapiens
  misc_RNA (1)...(19): siRNA sense strand
cagaaacauuccaagauaa

SEQ ID NO: 228257 - RNA, 19 nt, Homo sapiens
  misc_RNA (1)...(19): siRNA sense strand
aagcauagcuacuacagaa

SEQ ID NO: 228258 - RNA, 19 nt, Homo sapiens
  misc_RNA (1)...(19): siRNA sense strand
gagcuuguauccaaauguu

SEQ ID NO: 228259 - RNA, 19 nt, Homo sapiens
  misc_RNA (1)...(19): siRNA sense strand
uagaaugucuucagaaaca

SEQ ID NO: 228260 - RNA, 19 nt, Homo sapiens
  misc_RNA (1)...(19): siRNA sense strand
gcauagcuacuacagaaua

SEQ ID NO: 228261 - RNA, 19 nt, Homo sapiens
  misc_RNA (1)...(19): siRNA sense strand
ugaauuuacuggacagauu

SEQ ID NO: 228262 - RNA, 19 nt, Homo sapiens
  misc_RNA (1)...(19): siRNA sense strand
gagaagguguguuggaaag

SEQ ID NO: 228263 - RNA, 19 nt, Homo sapiens
  misc_RNA (1)...(19): siRNA sense strand
ucaaauaaguguuccaaac

SEQ ID NO: 228264 - RNA, 19 nt, Homo sapiens
  misc_RNA (1)...(19): siRNA sense strand
caacugacuugauccgaau

SEQ ID NO: 228265 - RNA, 19 nt, Homo sapiens
  misc_RNA (1)...(19): siRNA sense strand
caacugaaggcaugucauu

SEQ ID NO: 228266 - RNA, 19 nt, Homo sapiens
  misc_RNA (1)...(19): siRNA sense strand
cagaauaacucaccuucca

SEQ ID NO: 228267 - RNA, 19 nt, Homo sapiens
  misc_RNA (1)...(19): siRNA sense strand
aaccaaauguucagaaguu

SEQ ID NO: 228268 - RNA, 19 nt, Homo sapiens
  misc_RNA (1)...(19): siRNA sense strand
agaguuaacagaaggaaua

SEQ ID NO: 228269 - RNA, 19 nt, Homo sapiens
  misc_RNA (1)...(19): siRNA sense strand
cauagcuacuacagaauaa

SEQ ID NO: 228270 - RNA, 19 nt, Homo sapiens
  misc_RNA (1)...(19): siRNA sense strand
gaauagaaugucuucagaa

SEQ ID NO: 228271 - RNA, 19 nt, Homo sapiens
  misc_RNA (1)...(19): siRNA sense strand
gcuuguauccaaauguuua

SEQ ID NO: 228272 - RNA, 19 nt, Homo sapiens
  misc_RNA (1)...(19): siRNA sense strand
gaacuugccacuugaaagg

SEQ ID NO: 228273 - RNA, 19 nt, Homo sapiens
  misc_RNA (1)...(19): siRNA sense strand
gaagguguguuggaaaguc

SEQ ID NO: 228274 - RNA, 19 nt, Homo sapiens
  misc_RNA (1)...(19): siRNA sense strand
caaaccaaauguucagaag

SEQ ID NO: 228275 - RNA, 19 nt, Homo sapiens
  misc_RNA (1)...(19): siRNA sense strand
acuagaagcucaacugaag

SEQ ID NO: 228276 - RNA, 19 nt, Homo sapiens
  misc_RNA (1)...(19): siRNA sense strand
aagcaaagccuucuguguu

SEQ ID NO: 228277 - RNA, 19 nt, Homo sapiens
  misc_RNA (1)...(19): siRNA sense strand
aaaggucugugguuugaga

SEQ ID NO: 228278 - RNA, 19 nt, Homo sapiens
  misc_RNA (1)...(19): siRNA sense strand
uaacagaaggaauagaaug

SEQ ID NO: 228279 - RNA, 19 nt, Homo sapiens
  misc_RNA (1)...(19): siRNA sense strand
guuaacagaaggaauagaa

SEQ ID NO: 228280 - RNA, 19 nt, Homo sapiens
  misc_RNA (1)...(19): siRNA sense strand
ccgaauaagucaauauagg

SEQ ID NO: 228281 - RNA, 19 nt, Homo sapiens
  misc_RNA (1)...(19): siRNA sense strand
ggagaagguguguuggaaa

SEQ ID NO: 228282 - RNA, 19 nt, Homo sapiens
  misc_RNA (1)...(19): siRNA sense strand
guacugcacggcaauugaa

SEQ ID NO: 228283 - RNA, 19 nt, Homo sapiens
  misc_RNA (1)...(19): siRNA sense strand
caauagaagaggaaaggaa

SEQ ID NO: 228284 - RNA, 19 nt, Homo sapiens
  misc_RNA (1)...(19): siRNA sense strand
gcaugucauugcaggauca

SEQ ID NO: 228285 - RNA, 19 nt, Homo sapiens
  misc_RNA (1)...(19): siRNA sense strand
agcaaagccuucuguguug

SEQ ID NO: 228286 - RNA, 19 nt, Homo sapiens
  misc_RNA (1)...(19): siRNA sense strand
uuccugaaauggucccuua

SEQ ID NO: 228287 - RNA, 19 nt, Homo sapiens
  misc_RNA (1)...(19): siRNA sense strand
caacaauuccugaaauggu

SEQ ID NO: 228288 - RNA, 19 nt, Homo sapiens
  misc_RNA (1)...(19): siRNA sense strand
ugacaacaacugacucuca

SEQ ID NO: 228289 - RNA, 19 nt, Homo sapiens
  misc_RNA (1)...(19): siRNA sense strand
ggaacaggagucuagaugu

SEQ ID NO: 228290 - RNA, 19 nt, Homo sapiens
  misc_RNA (1)...(19): siRNA sense strand
gguuuacgguuucagacuu

SEQ ID NO: 228291 - RNA, 19 nt, Homo sapiens
  misc_RNA (1)...(19): siRNA sense strand
ccagcugaaugcccuguug

SEQ ID NO: 228292 - RNA, 19 nt, Homo sapiens
  misc_RNA (1)...(19): siRNA sense strand
cuacuacugccuuucaauu

SEQ ID NO: 228293 - RNA, 19 nt, Homo sapiens
  misc_RNA (1)...(19): siRNA sense strand
cagaaggaauagaaugucu

SEQ ID NO: 228294 - RNA, 19 nt, Homo sapiens
  misc_RNA (1)...(19): siRNA sense strand
gagaacuugccacuugaaa

SEQ ID NO: 228295 - RNA, 19 nt, Homo sapiens
  misc_RNA (1)...(19): siRNA sense strand
aagagaacuugccacuuga

SEQ ID NO: 228296 - RNA, 19 nt, Homo sapiens
  misc_RNA (1)...(19): siRNA sense strand
agaaugacugcaagacuaa

SEQ ID NO: 228297 - RNA, 19 nt, Homo sapiens
  misc_RNA (1)...(19): siRNA sense strand
gaaguugaaauggauuguu

SEQ ID NO: 228298 - RNA, 19 nt, Homo sapiens
  misc_RNA (1)...(19): siRNA sense strand
cauugucuaucauugcauu

SEQ ID NO: 228299 - RNA, 19 nt, Homo sapiens
  misc_RNA (1)...(19): siRNA sense strand
uggagaagguguguuggaa

SEQ ID NO: 228300 - RNA, 19 nt, Homo sapiens
  misc_RNA (1)...(19): siRNA sense strand
cgaauaagucaauauaggu

SEQ ID NO: 228301 - RNA, 19 nt, Homo sapiens
  misc_RNA (1)...(19): siRNA sense strand
gauccaagcacagaagugu

SEQ ID NO: 228302 - RNA, 19 nt, Homo sapiens
  misc_RNA (1)...(19): siRNA sense strand
aauauagguuuacgguuuc

SEQ ID NO: 228303 - RNA, 19 nt, Homo sapiens
  misc_RNA (1)...(19): siRNA sense strand
aaauaaguguuccaaacca

SEQ ID NO: 228304 - RNA, 19 nt, Homo sapiens
  misc_RNA (1)...(19): siRNA sense strand
agccaaaggucugugguuu

SEQ ID NO: 228305 - RNA, 19 nt, Homo sapiens
  misc_RNA (1)...(19): siRNA sense strand
auuauucacuccuucaaga

SEQ ID NO: 228306 - RNA, 19 nt, Homo sapiens
  misc_RNA (1)...(19): siRNA sense strand
uuucagacuugaugagaau

SEQ ID NO: 228307 - RNA, 19 nt, Homo sapiens
  misc_RNA (1)...(19): siRNA sense strand
gaagcauagcuacuacaga

SEQ ID NO: 228308 - RNA, 19 nt, Homo sapiens
  misc_RNA (1)...(19): siRNA sense strand
guauccaaauguuuaacug

SEQ ID NO: 228309 - RNA, 19 nt, Homo sapiens
  misc_RNA (1)...(19): siRNA sense strand
gcaggaucauauuuucuaa

SEQ ID NO: 228310 - RNA, 19 nt, Homo sapiens
  misc_RNA (1)...(19): siRNA sense strand
ccaaaccaaauguucagaa

SEQ ID NO: 228311 - RNA, 19 nt, Homo sapiens
  misc_RNA (1)...(19): siRNA sense strand
ccaaauguucagaaguuga

SEQ ID NO: 228312 - RNA, 19 nt, Homo sapiens
  misc_RNA (1)...(19): siRNA sense strand
gauccgaauaagucaauau

SEQ ID NO: 228313 - RNA, 19 nt, Homo sapiens
  misc_RNA (1)...(19): siRNA sense strand
uccaacaauuccugaaaug

SEQ ID NO: 228314 - RNA, 19 nt, Homo sapiens
  misc_RNA (1)...(19): siRNA sense strand
aauaaguguuccaaaccaa

SEQ ID NO: 228315 - RNA, 19 nt, Homo sapiens
  misc_RNA (1)...(19): siRNA sense strand
acacgauaauggccucaga

SEQ ID NO: 228316 - RNA, 19 nt, Homo sapiens
  misc_RNA (1)...(19): siRNA sense strand
ggcauugucuaucauugca

SEQ ID NO: 228317 - RNA, 19 nt, Homo sapiens
  misc_RNA (1)...(19): siRNA sense strand
guguuggcauugucuauca

SEQ ID NO: 228318 - RNA, 19 nt, Homo sapiens
  misc_RNA (1)...(19): siRNA sense strand
guuucagacuugaugagaa

SEQ ID NO: 228319 - RNA, 19 nt, Homo sapiens
  misc_RNA (1)...(19): siRNA sense strand
guuuacgguuucagacuug

SEQ ID NO: 228320 - RNA, 19 nt, Homo sapiens
  misc_RNA (1)...(19): siRNA sense strand
gguuugagacuaauugagu

SEQ ID NO: 228321 - RNA, 19 nt, Homo sapiens
  misc_RNA (1)...(19): siRNA sense strand
acuacugccuuucaauuuc

SEQ ID NO: 228322 - RNA, 19 nt, Homo sapiens
  misc_RNA (1)...(19): siRNA sense strand
gaaagucaaagcuacuacu

SEQ ID NO: 228323 - RNA, 19 nt, Homo sapiens
  misc_RNA (1)...(19): siRNA sense strand
uggaaaagauuguauugga

SEQ ID NO: 228324 - RNA, 19 nt, Homo sapiens
  misc_RNA (1)...(19): siRNA sense strand
uucucuagcugugaauuua

SEQ ID NO: 228325 - RNA, 19 nt, Homo sapiens
  misc_RNA (1)...(19): siRNA sense strand
uucaauuucugcaacugua

SEQ ID NO: 228326 - RNA, 19 nt, Homo sapiens
  misc_RNA (1)...(19): siRNA sense strand
cuacugccuuucaauuucu

SEQ ID NO: 228327 - RNA, 19 nt, Homo sapiens
  misc_RNA (1)...(19): siRNA sense strand
uaucauugcauuagagauc

SEQ ID NO: 228328 - RNA, 19 nt, Homo sapiens
  misc_RNA (1)...(19): siRNA sense strand
gcaagacuaagggacuuug

SEQ ID NO: 228329 - RNA, 19 nt, Homo sapiens
  misc_RNA (1)...(19): siRNA sense strand
gacuagaagcucaacugaa

SEQ ID NO: 228330 - RNA, 19 nt, Homo sapiens
  misc_RNA (1)...(19): siRNA sense strand
ugucauugcaggaucauau

SEQ ID NO: 228331 - RNA, 19 nt, Homo sapiens
  misc_RNA (1)...(19): siRNA sense strand
agacuagaagcucaacuga

SEQ ID NO: 228332 - RNA, 19 nt, Homo sapiens
  misc_RNA (1)...(19): siRNA sense strand
ggcaauugaagcauagcua

SEQ ID NO: 228333 - RNA, 19 nt, Homo sapiens
  misc_RNA (1)...(19): siRNA sense strand
caaauaaguguuccaaacc

SEQ ID NO: 228334 - RNA, 19 nt, Homo sapiens
  misc_RNA (1)...(19): siRNA sense strand
gcugaaugcccuguuggaa

SEQ ID NO: 228335 - RNA, 19 nt, Homo sapiens
  misc_RNA (1)...(19): siRNA sense strand
guacugacaacaacugacu

SEQ ID NO: 228336 - RNA, 19 nt, Homo sapiens
  misc_RNA (1)...(19): siRNA sense strand
uacuacugccuuucaauuu

SEQ ID NO: 228337 - RNA, 19 nt, Homo sapiens
  misc_RNA (1)...(19): siRNA sense strand
caagacuaagggacuuuga

SEQ ID NO: 228338 - RNA, 19 nt, Homo sapiens
  misc_RNA (1)...(19): siRNA sense strand
caucaaauaaguguuccaa

SEQ ID NO: 228339 - RNA, 19 nt, Homo sapiens
  misc_RNA (1)...(19): siRNA sense strand
cuaaagcaaagccuucugu

SEQ ID NO: 228340 - RNA, 19 nt, Homo sapiens
  misc_RNA (1)...(19): siRNA sense strand
caauuucugcaacuguauu

SEQ ID NO: 228341 - RNA, 19 nt, Homo sapiens
  misc_RNA (1)...(19): siRNA sense strand
gcuuugacacagagacauu

SEQ ID NO: 228342 - RNA, 19 nt, Homo sapiens
  misc_RNA (1)...(19): siRNA sense strand
aaagcaaagccuucugugu

SEQ ID NO: 228343 - RNA, 19 nt, Homo sapiens
  misc_RNA (1)...(19): siRNA sense strand
uaaguguuccaaaccaaau

SEQ ID NO: 228344 - RNA, 19 nt, Homo sapiens
  misc_RNA (1)...(19): siRNA sense strand
uagagguacugacaacaac

SEQ ID NO: 228345 - RNA, 19 nt, Homo sapiens
  misc_RNA (1)...(19): siRNA sense strand
gaaauucucuugcuaguua

SEQ ID NO: 228346 - RNA, 19 nt, Homo sapiens
  misc_RNA (1)...(19): siRNA sense strand
gaagaagacugcaauauuc

SEQ ID NO: 228347 - RNA, 19 nt, Homo sapiens
  misc_RNA (1)...(19): siRNA sense strand
ggagagaguugguuucuaa

SEQ ID NO: 228348 - RNA, 19 nt, Homo sapiens
  misc_RNA (1)...(19): siRNA sense strand
ggugaaaccuaaacauuug

SEQ ID NO: 228349 - RNA, 19 nt, Homo sapiens
  misc_RNA (1)...(19): siRNA sense strand
gaaauacugagccuugaua

SEQ ID NO: 228350 - RNA, 19 nt, Homo sapiens
  misc_RNA (1)...(19): siRNA sense strand
ugccaaaguugaagauuua

SEQ ID NO: 228351 - RNA, 19 nt, Homo sapiens
  misc_RNA (1)...(19): siRNA sense strand
gcacuuauaccauacuauu

SEQ ID NO: 228352 - RNA, 19 nt, Homo sapiens
  misc_RNA (1)...(19): siRNA sense strand
gagaguugguuucuaaaug

SEQ ID NO: 228353 - RNA, 19 nt, Homo sapiens
  misc_RNA (1)...(19): siRNA sense strand
gaaaggaaagaaauacuga

SEQ ID NO: 228354 - RNA, 19 nt, Homo sapiens
  misc_RNA (1)...(19): siRNA sense strand
ggaagcuacuacugccuua

SEQ ID NO: 228355 - RNA, 19 nt, Homo sapiens
  misc_RNA (1)...(19): siRNA sense strand
aaccagaucuuaagaaguu

SEQ ID NO: 228356 - RNA, 19 nt, Homo sapiens
  misc_RNA (1)...(19): siRNA sense strand
cuaaaugccuagccgagua

SEQ ID NO: 228357 - RNA, 19 nt, Homo sapiens
  misc_RNA (1)...(19): siRNA sense strand
ggagaaugauaacacuuug

SEQ ID NO: 228358 - RNA, 19 nt, Homo sapiens
  misc_RNA (1)...(19): siRNA sense strand
aaacauuugucuugcauug

SEQ ID NO: 228359 - RNA, 19 nt, Homo sapiens
  misc_RNA (1)...(19): siRNA sense strand
guaaauguacugcuucuga

SEQ ID NO: 228360 - RNA, 19 nt, Homo sapiens
  misc_RNA (1)...(19): siRNA sense strand
ugaagaagacugcaauauu

SEQ ID NO: 228361 - RNA, 19 nt, Homo sapiens
  misc_RNA (1)...(19): siRNA sense strand
gaucuugcacugaaacuuu

SEQ ID NO: 228362 - RNA, 19 nt, Homo sapiens
  misc_RNA (1)...(19): siRNA sense strand
gacagguucuuggcucuua

SEQ ID NO: 228363 - RNA, 19 nt, Homo sapiens
  misc_RNA (1)...(19): siRNA sense strand
gaaguugguuuggaucguu

SEQ ID NO: 228364 - RNA, 19 nt, Homo sapiens
  misc_RNA (1)...(19): siRNA sense strand
gcacuuggcaggucaugaa

SEQ ID NO: 228365 - RNA, 19 nt, Homo sapiens
  misc_RNA (1)...(19): siRNA sense strand
gaaaucuguugaauuacug

SEQ ID NO: 228366 - RNA, 19 nt, Homo sapiens
  misc_RNA (1)...(19): siRNA sense strand
caaaccagaucuuaagaag

SEQ ID NO: 228367 - RNA, 19 nt, Homo sapiens
  misc_RNA (1)...(19): siRNA sense strand
cacaacagcuacuauagug

SEQ ID NO: 228368 - RNA, 19 nt, Homo sapiens
  misc_RNA (1)...(19): siRNA sense strand
guucuuggcucuuaugaag

SEQ ID NO: 228369 - RNA, 19 nt, Homo sapiens
  misc_RNA (1)...(19): siRNA sense strand
gcauuggagucuguucuuu

SEQ ID NO: 228370 - RNA, 19 nt, Homo sapiens
  misc_RNA (1)...(19): siRNA sense strand
gagaaaugccaaaguugaa

SEQ ID NO: 228371 - RNA, 19 nt, Homo sapiens
  misc_RNA (1)...(19): siRNA sense strand
gcaaaccagaucuuaagaa

SEQ ID NO: 228372 - RNA, 19 nt, Homo sapiens
  misc_RNA (1)...(19): siRNA sense strand
ccuugugccuucucaauuu

SEQ ID NO: 228373 - RNA, 19 nt, Homo sapiens
  misc_RNA (1)...(19): siRNA sense strand
gagccuugauaaacuagaa

SEQ ID NO: 228374 - RNA, 19 nt, Homo sapiens
  misc_RNA (1)...(19): siRNA sense strand
gaucaagagugcaccuucu

SEQ ID NO: 228375 - RNA, 19 nt, Homo sapiens
  misc_RNA (1)...(19): siRNA sense strand
uguccuggcugucaauauu

SEQ ID NO: 228376 - RNA, 19 nt, Homo sapiens
  misc_RNA (1)...(19): siRNA sense strand
gaucuuaagaaguugguuu

SEQ ID NO: 228377 - RNA, 19 nt, Homo sapiens
  misc_RNA (1)...(19): siRNA sense strand
acacugaguucuucuacug

SEQ ID NO: 228378 - RNA, 19 nt, Homo sapiens
  misc_RNA (1)...(19): siRNA sense strand
caacugccgacucaucuuu

SEQ ID NO: 228379 - RNA, 19 nt, Homo sapiens
  misc_RNA (1)...(19): siRNA sense strand
uagaauaguugaagaagac

SEQ ID NO: 228380 - RNA, 19 nt, Homo sapiens
  misc_RNA (1)...(19): siRNA sense strand
gaaaugccaaaguugaaga

SEQ ID NO: 228381 - RNA, 19 nt, Homo sapiens
  misc_RNA (1)...(19): siRNA sense strand
gaugugauccggauuaguc

SEQ ID NO: 228382 - RNA, 19 nt, Homo sapiens
  misc_RNA (1)...(19): siRNA sense strand
ugagaaaugccaaaguuga

SEQ ID NO: 228383 - RNA, 19 nt, Homo sapiens
  misc_RNA (1)...(19): siRNA sense strand
uuaagaaguugguuuggau

SEQ ID NO: 228384 - RNA, 19 nt, Homo sapiens
  misc_RNA (1)...(19): siRNA sense strand
gaacgucuaccuggaacaa

SEQ ID NO: 228385 - RNA, 19 nt, Homo sapiens
  misc_RNA (1)...(19): siRNA sense strand
acacugugcuuuccaucuu

SEQ ID NO: 228386 - RNA, 19 nt, Homo sapiens
  misc_RNA (1)...(19): siRNA sense strand
caugaugugauccggauua

SEQ ID NO: 228387 - RNA, 19 nt, Homo sapiens
  misc_RNA (1)...(19): siRNA sense strand
aaagugaggacucuuguga

SEQ ID NO: 228388 - RNA, 19 nt, Homo sapiens
  misc_RNA (1)...(19): siRNA sense strand
gaagauuuaaggaguuuag

SEQ ID NO: 228389 - RNA, 19 nt, Homo sapiens
  misc_RNA (1)...(19): siRNA sense strand
gcagcucuccucccaguga

SEQ ID NO: 228390 - RNA, 19 nt, Homo sapiens
  misc_RNA (1)...(19): siRNA sense strand
cgaguauucuucuccugaa

SEQ ID NO: 228391 - RNA, 19 nt, Homo sapiens
  misc_RNA (1)...(19): siRNA sense strand
guacugcuucugacauaaa

SEQ ID NO: 228392 - RNA, 19 nt, Homo sapiens
  misc_RNA (1)...(19): siRNA sense strand
cuagaauaguugaagaaga

SEQ ID NO: 228393 - RNA, 19 nt, Homo sapiens
  misc_RNA (1)...(19): siRNA sense strand
gcaauauuccauccacuca

SEQ ID NO: 228394 - RNA, 19 nt, Homo sapiens
  misc_RNA (1)...(19): siRNA sense strand
guugaagauuuaaggaguu

SEQ ID NO: 228395 - RNA, 19 nt, Homo sapiens
  misc_RNA (1)...(19): siRNA sense strand
uaaugacacugaguucuuc

SEQ ID NO: 228396 - RNA, 19 nt, Homo sapiens
  misc_RNA (1)...(19): siRNA sense strand
uuugcuggcugcuagaaua

SEQ ID NO: 228397 - RNA, 19 nt, Homo sapiens
  misc_RNA (1)...(19): siRNA sense strand
ggaacaagaagagagauuc

SEQ ID NO: 228398 - RNA, 19 nt, Homo sapiens
  misc_RNA (1)...(19): siRNA sense strand
caaacacugugcuuuccau

SEQ ID NO: 228399 - RNA, 19 nt, Homo sapiens
  misc_RNA (1)...(19): siRNA sense strand
uguccaggauugagaaaug

SEQ ID NO: 228400 - RNA, 19 nt, Homo sapiens
  misc_RNA (1)...(19): siRNA sense strand
gcccagaaccuccacaaca

SEQ ID NO: 228401 - RNA, 19 nt, Homo sapiens
  misc_RNA (1)...(19): siRNA sense strand
gcuugcaacugccgacuca

SEQ ID NO: 228402 - RNA, 19 nt, Homo sapiens
  misc_RNA (1)...(19): siRNA sense strand
aauauuccauccacucaug

SEQ ID NO: 228403 - RNA, 19 nt, Homo sapiens
  misc_RNA (1)...(19): siRNA sense strand
gcuggcugcuagaauaguu

SEQ ID NO: 228404 - RNA, 19 nt, Homo sapiens
  misc_RNA (1)...(19): siRNA sense strand
cggagaaugauaacacuuu

SEQ ID NO: 228405 - RNA, 19 nt, Homo sapiens
  misc_RNA (1)...(19): siRNA sense strand
auugagaaaugccaaaguu

SEQ ID NO: 228406 - RNA, 19 nt, Homo sapiens
  misc_RNA (1)...(19): siRNA sense strand
gcaaaaccaucuguauuag

SEQ ID NO: 228407 - RNA, 19 nt, Homo sapiens
  misc_RNA (1)...(19): siRNA sense strand
ccacaacagcuacuauagu

SEQ ID NO: 228408 - RNA, 19 nt, Homo sapiens
  misc_RNA (1)...(19): siRNA sense strand
ggaaauucucuugcuaguu

SEQ ID NO: 228409 - RNA, 19 nt, Homo sapiens
  misc_RNA (1)...(19): siRNA sense strand
augccaaaguugaagauuu

SEQ ID NO: 228410 - RNA, 19 nt, Homo sapiens
  misc_RNA (1)...(19): siRNA sense strand
cacugugcuuuccaucuua

SEQ ID NO: 228411 - RNA, 19 nt, Homo sapiens
  misc_RNA (1)...(19): siRNA sense strand
uggaaacuuugaaaucugu

SEQ ID NO: 228412 - RNA, 19 nt, Homo sapiens
  misc_RNA (1)...(19): siRNA sense strand
acauuugucuugcauugga

SEQ ID NO: 228413 - RNA, 19 nt, Homo sapiens
  misc_RNA (1)...(19): siRNA sense strand
cuaaacauuugucuugcau

SEQ ID NO: 228414 - RNA, 19 nt, Homo sapiens
  misc_RNA (1)...(19): siRNA sense strand
guggaaacuuugaaaucug

SEQ ID NO: 228415 - RNA, 19 nt, Homo sapiens
  misc_RNA (1)...(19): siRNA sense strand
gaaagugaggacucuugug

SEQ ID NO: 228416 - RNA, 19 nt, Homo sapiens
  misc_RNA (1)...(19): siRNA sense strand
gaaacuuugaaaucuguug

SEQ ID NO: 228417 - RNA, 19 nt, Homo sapiens
  misc_RNA (1)...(19): siRNA sense strand
ggauuagucaguguaaaug

SEQ ID NO: 228418 - RNA, 19 nt, Homo sapiens
  misc_RNA (1)...(19): siRNA sense strand
gagauuccaaccucgagaa

SEQ ID NO: 228419 - RNA, 19 nt, Homo sapiens
  misc_RNA (1)...(19): siRNA sense strand
ugucauacuucagaaagga

SEQ ID NO: 228420 - RNA, 19 nt, Homo sapiens
  misc_RNA (1)...(19): siRNA sense strand
ucuguugaauuacuggaaa

SEQ ID NO: 228421 - RNA, 19 nt, Homo sapiens
  misc_RNA (1)...(19): siRNA sense strand
aagaaauacugagccuuga

SEQ ID NO: 228422 - RNA, 19 nt, Homo sapiens
  misc_RNA (1)...(19): siRNA sense strand
caaaguugaagauuuaagg

SEQ ID NO: 228423 - RNA, 19 nt, Homo sapiens
  misc_RNA (1)...(19): siRNA sense strand
acugagccuugauaaacua

SEQ ID NO: 228424 - RNA, 19 nt, Homo sapiens
  misc_RNA (1)...(19): siRNA sense strand
aaccuaaacauuugucuug

SEQ ID NO: 228425 - RNA, 19 nt, Homo sapiens
  misc_RNA (1)...(19): siRNA sense strand
cuacuacugccuuaaacuu

SEQ ID NO: 228426 - RNA, 19 nt, Homo sapiens
  misc_RNA (1)...(19): siRNA sense strand
cuuaagaaguugguuugga

SEQ ID NO: 228427 - RNA, 19 nt, Homo sapiens
  misc_RNA (1)...(19): siRNA sense strand
agaguugguuucuaaaugc

SEQ ID NO: 228428 - RNA, 19 nt, Homo sapiens
  misc_RNA (1)...(19): siRNA sense strand
gagagaguugguuucuaaa

SEQ ID NO: 228429 - RNA, 19 nt, Homo sapiens
  misc_RNA (1)...(19): siRNA sense strand
gaauuggaagcuacuacug

SEQ ID NO: 228430 - RNA, 19 nt, Homo sapiens
  misc_RNA (1)...(19): siRNA sense strand
uuaaugacacugaguucuu

SEQ ID NO: 228431 - RNA, 19 nt, Homo sapiens
  misc_RNA (1)...(19): siRNA sense strand
ccaagauuaaugacacuga

SEQ ID NO: 228432 - RNA, 19 nt, Homo sapiens
  misc_RNA (1)...(19): siRNA sense strand
gaagcuacuacugccuuaa

SEQ ID NO: 228433 - RNA, 19 nt, Homo sapiens
  misc_RNA (1)...(19): siRNA sense strand
gauccggauuagucagugu

SEQ ID NO: 228434 - RNA, 19 nt, Homo sapiens
  misc_RNA (1)...(19): siRNA sense strand
gugaaagugaggacucuug

SEQ ID NO: 228435 - RNA, 19 nt, Homo sapiens
  misc_RNA (1)...(19): siRNA sense strand
guugcaaaccagaucuuaa

SEQ ID NO: 228436 - RNA, 19 nt, Homo sapiens
  misc_RNA (1)...(19): siRNA sense strand
ccuaaacauuugucuugca

SEQ ID NO: 228437 - RNA, 19 nt, Homo sapiens
  misc_RNA (1)...(19): siRNA sense strand
acuggaaauucucuugcua

SEQ ID NO: 228438 - RNA, 19 nt, Homo sapiens
  misc_RNA (1)...(19): siRNA sense strand
gaagacugcaauauuccau

SEQ ID NO: 228439 - RNA, 19 nt, Homo sapiens
  misc_RNA (1)...(19): siRNA sense strand
guugaagaagacugcaaua

SEQ ID NO: 228440 - RNA, 19 nt, Homo sapiens
  misc_RNA (1)...(19): siRNA sense strand
uggaaauucucuugcuagu

SEQ ID NO: 228441 - RNA, 19 nt, Homo sapiens
  misc_RNA (1)...(19): siRNA sense strand
gagaaugauaacacuuugu

SEQ ID NO: 228442 - RNA, 19 nt, Homo sapiens
  misc_RNA (1)...(19): siRNA sense strand
uuccugagcugccaacgau

SEQ ID NO: 228443 - RNA, 19 nt, Homo sapiens
  misc_RNA (1)...(19): siRNA sense strand
agaaugauaacacuuugug

SEQ ID NO: 228444 - RNA, 19 nt, Homo sapiens
  misc_RNA (1)...(19): siRNA sense strand
gaauguugcaaaccagauc

SEQ ID NO: 228445 - RNA, 19 nt, Homo sapiens
  misc_RNA (1)...(19): siRNA sense strand
acacggagcucaaggagaa

SEQ ID NO: 228446 - RNA, 19 nt, Homo sapiens
  misc_RNA (1)...(19): siRNA sense strand
ucaaguaccugcuguuuac

SEQ ID NO: 228447 - RNA, 19 nt, Homo sapiens
  misc_RNA (1)...(19): siRNA sense strand
gaccaugccuccaacaucu

SEQ ID NO: 228448 - RNA, 19 nt, Homo sapiens
  misc_RNA (1)...(19): siRNA sense strand
ucacaggacuggcgagaca

SEQ ID NO: 228449 - RNA, 19 nt, Homo sapiens
  misc_RNA (1)...(19): siRNA sense strand
gugcaggucuuuggcauga

SEQ ID NO: 228450 - RNA, 19 nt, Homo sapiens
  misc_RNA (1)...(19): siRNA sense strand
gagaagaagacaacaugug

SEQ ID NO: 228451 - RNA, 19 nt, Homo sapiens
  misc_RNA (1)...(19): siRNA sense strand
gcaggucuuuggcaugauc

SEQ ID NO: 228452 - RNA, 19 nt, Homo sapiens
  misc_RNA (1)...(19): siRNA sense strand
caacauguggcaccguuug

SEQ ID NO: 228453 - RNA, 19 nt, Homo sapiens
  misc_RNA (1)...(19): siRNA sense strand
ucaaggagaaccugaagga

SEQ ID NO: 228454 - RNA, 19 nt, Homo sapiens
  misc_RNA (1)...(19): siRNA sense strand
ggaaccugcugcgccugua

SEQ ID NO: 228455 - RNA, 19 nt, Homo sapiens
  misc_RNA (1)...(19): siRNA sense strand
ccucaagagugacuacauc

SEQ ID NO: 228456 - RNA, 19 nt, Homo sapiens
  misc_RNA (1)...(19): siRNA sense strand
gcggcugcaucaccaaguu

SEQ ID NO: 228457 - RNA, 19 nt, Homo sapiens
  misc_RNA (1)...(19): siRNA sense strand
gucucaagcuggagcacua

SEQ ID NO: 228458 - RNA, 19 nt, Homo sapiens
  misc_RNA (1)...(19): siRNA sense strand
ugaaggacaccaugaccaa

SEQ ID NO: 228459 - RNA, 19 nt, Homo sapiens
  misc_RNA (1)...(19): siRNA sense strand
agacggugguggcucuuug

SEQ ID NO: 228460 - RNA, 19 nt, Homo sapiens
  misc_RNA (1)...(19): siRNA sense strand
caagcuggagcacuacuga

SEQ ID NO: 228461 - RNA, 19 nt, Homo sapiens
  misc_RNA (1)...(19): siRNA sense strand
ccuccaacaucuacaaggu

SEQ ID NO: 228462 - RNA, 19 nt, Homo sapiens
  misc_RNA (1)...(19): siRNA sense strand
gcaccguuugccucaagua

SEQ ID NO: 228463 - RNA, 19 nt, Homo sapiens
  misc_RNA (1)...(19): siRNA sense strand
ccucaaguaccugcuguuu

SEQ ID NO: 228464 - RNA, 19 nt, Homo sapiens
  misc_RNA (1)...(19): siRNA sense strand
ggagaucaucgcugguauc

SEQ ID NO: 228465 - RNA, 19 nt, Homo sapiens
  misc_RNA (1)...(19): siRNA sense strand
cucaaguaccugcuguuua

SEQ ID NO: 228466 - RNA, 19 nt, Homo sapiens
  misc_RNA (1)...(19): siRNA sense strand
ucuggacgcuggcccucaa

SEQ ID NO: 228467 - RNA, 19 nt, Homo sapiens
  misc_RNA (1)...(19): siRNA sense strand
gaguucaacgagaagaaga

SEQ ID NO: 228468 - RNA, 19 nt, Homo sapiens
  misc_RNA (1)...(19): siRNA sense strand
caaguuggagaccuucauc

SEQ ID NO: 228469 - RNA, 19 nt, Homo sapiens
  misc_RNA (1)...(19): siRNA sense strand
aguaccugcuguuuaccua

SEQ ID NO: 228470 - RNA, 19 nt, Homo sapiens
  misc_RNA (1)...(19): siRNA sense strand
gcucaaggagaaccugaag

SEQ ID NO: 228471 - RNA, 19 nt, Homo sapiens
  misc_RNA (1)...(19): siRNA sense strand
cgcuggcccucaagaguga

SEQ ID NO: 228472 - RNA, 19 nt, Homo sapiens
  misc_RNA (1)...(19): siRNA sense strand
acacggagcucaaggagaa

SEQ ID NO: 228473 - RNA, 19 nt, Homo sapiens
  misc_RNA (1)...(19): siRNA sense strand
ucaaguaccugcuguuuac

SEQ ID NO: 228474 - RNA, 19 nt, Homo sapiens
  misc_RNA (1)...(19): siRNA sense strand
gaccaugccuccaacaucu

SEQ ID NO: 228475 - RNA, 19 nt, Homo sapiens
  misc_RNA (1)...(19): siRNA sense strand
ucacaggacuggcgagaca

SEQ ID NO: 228476 - RNA, 19 nt, Homo sapiens
  misc_RNA (1)...(19): siRNA sense strand
gugcaggucuuuggcauga

SEQ ID NO: 228477 - RNA, 19 nt, Homo sapiens
  misc_RNA (1)...(19): siRNA sense strand
gagaagaagacaacaugug

SEQ ID NO: 228478 - RNA, 19 nt, Homo sapiens
  misc_RNA (1)...(19): siRNA sense strand
gcaggucuuuggcaugauc

SEQ ID NO: 228479 - RNA, 19 nt, Homo sapiens
  misc_RNA (1)...(19): siRNA sense strand
caacauguggcaccguuug

SEQ ID NO: 228480 - RNA, 19 nt, Homo sapiens
  misc_RNA (1)...(19): siRNA sense strand
ucaaggagaaccugaagga

SEQ ID NO: 228481 - RNA, 19 nt, Homo sapiens
  misc_RNA (1)...(19): siRNA sense strand
ggaaccugcugcgccugua

SEQ ID NO: 228482 - RNA, 19 nt, Homo sapiens
  misc_RNA (1)...(19): siRNA sense strand
ccucaagagugacuacauc

SEQ ID NO: 228483 - RNA, 19 nt, Homo sapiens
  misc_RNA (1)...(19): siRNA sense strand
gcggcugcaucaccaaguu

SEQ ID NO: 228484 - RNA, 19 nt, Homo sapiens
  misc_RNA (1)...(19): siRNA sense strand
gucucaagcuggagcacua

SEQ ID NO: 228485 - RNA, 19 nt, Homo sapiens
  misc_RNA (1)...(19): siRNA sense strand
ugaaggacaccaugaccaa

SEQ ID NO: 228486 - RNA, 19 nt, Homo sapiens
  misc_RNA (1)...(19): siRNA sense strand
agacggugguggcucuuug

SEQ ID NO: 228487 - RNA, 19 nt, Homo sapiens
  misc_RNA (1)...(19): siRNA sense strand
caagcuggagcacuacuga

SEQ ID NO: 228488 - RNA, 19 nt, Homo sapiens
  misc_RNA (1)...(19): siRNA sense strand
ccuccaacaucuacaaggu

SEQ ID NO: 228489 - RNA, 19 nt, Homo sapiens
  misc_RNA (1)...(19): siRNA sense strand
gcaccguuugccucaagua

SEQ ID NO: 228490 - RNA, 19 nt, Homo sapiens
  misc_RNA (1)...(19): siRNA sense strand
ccucaaguaccugcuguuu

SEQ ID NO: 228491 - RNA, 19 nt, Homo sapiens
  misc_RNA (1)...(19): siRNA sense strand
ggagaucaucgcugguauc

SEQ ID NO: 228492 - RNA, 19 nt, Homo sapiens
  misc_RNA (1)...(19): siRNA sense strand
cucaaguaccugcuguuua

SEQ ID NO: 228493 - RNA, 19 nt, Homo sapiens
  misc_RNA (1)...(19): siRNA sense strand
ucuggacgcuggcccucaa

SEQ ID NO: 228494 - RNA, 19 nt, Homo sapiens
  misc_RNA (1)...(19): siRNA sense strand
gaguucaacgagaagaaga

SEQ ID NO: 228495 - RNA, 19 nt, Homo sapiens
  misc_RNA (1)...(19): siRNA sense strand
caaguuggagaccuucauc

SEQ ID NO: 228496 - RNA, 19 nt, Homo sapiens
  misc_RNA (1)...(19): siRNA sense strand
aguaccugcuguuuaccua

SEQ ID NO: 228497 - RNA, 19 nt, Homo sapiens
  misc_RNA (1)...(19): siRNA sense strand
gcucaaggagaaccugaag

SEQ ID NO: 228498 - RNA, 19 nt, Homo sapiens
  misc_RNA (1)...(19): siRNA sense strand
cgcuggcccucaagaguga

SEQ ID NO: 228499 - RNA, 19 nt, Homo sapiens
  misc_RNA (1)...(19): siRNA sense strand
ugaggaagaugauggauuu

SEQ ID NO: 228500 - RNA, 19 nt, Homo sapiens
  misc_RNA (1)...(19): siRNA sense strand
gccgagagcuuccuacuga

SEQ ID NO: 228501 - RNA, 19 nt, Homo sapiens
  misc_RNA (1)...(19): siRNA sense strand
ggaagaugauggauuugug

SEQ ID NO: 228502 - RNA, 19 nt, Homo sapiens
  misc_RNA (1)...(19): siRNA sense strand
caacaucguggauaaguuu

SEQ ID NO: 228503 - RNA, 19 nt, Homo sapiens
  misc_RNA (1)...(19): siRNA sense strand
gcagauaccccuaugaaua

SEQ ID NO: 228504 - RNA, 19 nt, Homo sapiens
  misc_RNA (1)...(19): siRNA sense strand
cuaggucgcuucucucuga

SEQ ID NO: 228505 - RNA, 19 nt, Homo sapiens
  misc_RNA (1)...(19): siRNA sense strand
gagagcugauuggagauua

SEQ ID NO: 228506 - RNA, 19 nt, Homo sapiens
  misc_RNA (1)...(19): siRNA sense strand
ucagcaacaucguggauaa

SEQ ID NO: 228507 - RNA, 19 nt, Homo sapiens
  misc_RNA (1)...(19): siRNA sense strand
gcaacaucguggauaaguu

SEQ ID NO: 228508 - RNA, 19 nt, Homo sapiens
  misc_RNA (1)...(19): siRNA sense strand
ggauaaguuugugauugua

SEQ ID NO: 228509 - RNA, 19 nt, Homo sapiens
  misc_RNA (1)...(19): siRNA sense strand
aaaaggaccucgucaugua

SEQ ID NO: 228510 - RNA, 19 nt, Homo sapiens
  misc_RNA (1)...(19): siRNA sense strand
ugagauguauauccugaaa

SEQ ID NO: 228511 - RNA, 19 nt, Homo sapiens
  misc_RNA (1)...(19): siRNA sense strand
caagagagucauccucauu

SEQ ID NO: 228512 - RNA, 19 nt, Homo sapiens
  misc_RNA (1)...(19): siRNA sense strand
gauuggagauuacucuaag

SEQ ID NO: 228513 - RNA, 19 nt, Homo sapiens
  misc_RNA (1)...(19): siRNA sense strand
guggauaaguuugugauug

SEQ ID NO: 228514 - RNA, 19 nt, Homo sapiens
  misc_RNA (1)...(19): siRNA sense strand
gaacgagaccgugcuguca

SEQ ID NO: 228515 - RNA, 19 nt, Homo sapiens
  misc_RNA (1)...(19): siRNA sense strand
gcaccaagaccucaaguac

SEQ ID NO: 228516 - RNA, 19 nt, Homo sapiens
  misc_RNA (1)...(19): siRNA sense strand
cuacuacccugagauguau

SEQ ID NO: 228517 - RNA, 19 nt, Homo sapiens
  misc_RNA (1)...(19): siRNA sense strand
ggaagccuuugcccagaga

SEQ ID NO: 228518 - RNA, 19 nt, Homo sapiens
  misc_RNA (1)...(19): siRNA sense strand
aaguacaucucaccagaaa

SEQ ID NO: 228519 - RNA, 19 nt, Homo sapiens
  misc_RNA (1)...(19): siRNA sense strand
aaaggaugaugaugcaguu

SEQ ID NO: 228520 - RNA, 19 nt, Homo sapiens
  misc_RNA (1)...(19): siRNA sense strand
uggauaaguuugugauugu

SEQ ID NO: 228521 - RNA, 19 nt, Homo sapiens
  misc_RNA (1)...(19): siRNA sense strand
gcagccagccggaucauuc

SEQ ID NO: 228522 - RNA, 19 nt, Homo sapiens
  misc_RNA (1)...(19): siRNA sense strand
cauccuagagagugacuua

SEQ ID NO: 228523 - RNA, 19 nt, Homo sapiens
  misc_RNA (1)...(19): siRNA sense strand
aggaugagcuaaagaccuu

SEQ ID NO: 228524 - RNA, 19 nt, Homo sapiens
  misc_RNA (1)...(19): siRNA sense strand
agagugacuuaaaggauga

SEQ ID NO: 228525 - RNA, 19 nt, Homo sapiens
  misc_RNA (1)...(19): siRNA sense strand
aauccucccugucgucuga

SEQ ID NO: 228526 - RNA, 19 nt, Homo sapiens
  misc_RNA (1)...(19): siRNA sense strand
gaaagcaccaagaccucaa

SEQ ID NO: 228527 - RNA, 19 nt, Homo sapiens
  misc_RNA (1)...(19): siRNA sense strand
ccuagagagugacuuaaag

SEQ ID NO: 228528 - RNA, 19 nt, Homo sapiens
  misc_RNA (1)...(19): siRNA sense strand
ggaaaaggaccucgucaug

SEQ ID NO: 228529 - RNA, 19 nt, Homo sapiens
  misc_RNA (1)...(19): siRNA sense strand
ucuacuacccugagaugua

SEQ ID NO: 228530 - RNA, 19 nt, Homo sapiens
  misc_RNA (1)...(19): siRNA sense strand
gauuguagacugcagauac

SEQ ID NO: 228531 - RNA, 19 nt, Homo sapiens
  misc_RNA (1)...(19): siRNA sense strand
accaagaccucaaguacau

SEQ ID NO: 228532 - RNA, 19 nt, Homo sapiens
  misc_RNA (1)...(19): siRNA sense strand
ccagccggaucauucgaaa

SEQ ID NO: 228533 - RNA, 19 nt, Homo sapiens
  misc_RNA (1)...(19): siRNA sense strand
gaaccacgaggccuucaag

SEQ ID NO: 228534 - RNA, 19 nt, Homo sapiens
  misc_RNA (1)...(19): siRNA sense strand
aagagagucauccucauuu

SEQ ID NO: 228535 - RNA, 19 nt, Homo sapiens
  misc_RNA (1)...(19): siRNA sense strand
cuuaaaggaugaugaugca

SEQ ID NO: 228536 - RNA, 19 nt, Homo sapiens
  misc_RNA (1)...(19): siRNA sense strand
gcaggaggcugaggaaccu

SEQ ID NO: 228537 - RNA, 19 nt, Homo sapiens
  misc_RNA (1)...(19): siRNA sense strand
uggcggagcagacguuuga

SEQ ID NO: 228538 - RNA, 19 nt, Homo sapiens
  misc_RNA (1)...(19): siRNA sense strand
gggauacugaggaagauga

SEQ ID NO: 228539 - RNA, 19 nt, Homo sapiens
  misc_RNA (1)...(19): siRNA sense strand
gaaaaggaccucgucaugu

SEQ ID NO: 228540 - RNA, 19 nt, Homo sapiens
  misc_RNA (1)...(19): siRNA sense strand
acugugaauucucaucuga

SEQ ID NO: 228541 - RNA, 19 nt, Homo sapiens
  misc_RNA (1)...(19): siRNA sense strand
guacaucucaccagaaacg

SEQ ID NO: 228542 - RNA, 19 nt, Homo sapiens
  misc_RNA (1)...(19): siRNA sense strand
caaguacaucucaccagaa

SEQ ID NO: 228543 - RNA, 19 nt, Homo sapiens
  misc_RNA (1)...(19): siRNA sense strand
ggcccuaggucgcuucucu

SEQ ID NO: 228544 - RNA, 19 nt, Homo sapiens
  misc_RNA (1)...(19): siRNA sense strand
agauguauauccugaaagg

SEQ ID NO: 228545 - RNA, 19 nt, Homo sapiens
  misc_RNA (1)...(19): siRNA sense strand
caucaagacugcggugaac

SEQ ID NO: 228546 - RNA, 19 nt, Homo sapiens
  misc_RNA (1)...(19): siRNA sense strand
ugacuuaaaggaugaugau

SEQ ID NO: 228547 - RNA, 19 nt, Homo sapiens
  misc_RNA (1)...(19): siRNA sense strand
ucaagacugcggugaacuu

SEQ ID NO: 228548 - RNA, 19 nt, Homo sapiens
  misc_RNA (1)...(19): siRNA sense strand
cuucaaggaugagcuaaag

SEQ ID NO: 228549 - RNA, 19 nt, Homo sapiens
  misc_RNA (1)...(19): siRNA sense strand
ugaaaggcggcuacaagga

SEQ ID NO: 228550 - RNA, 19 nt, Homo sapiens
  misc_RNA (1)...(19): siRNA sense strand
agaaccuccuggacaguga

SEQ ID NO: 228551 - RNA, 19 nt, Homo sapiens
  misc_RNA (1)...(19): siRNA sense strand
cacccgaacuucugugaac

SEQ ID NO: 228552 - RNA, 19 nt, Homo sapiens
  misc_RNA (1)...(19): siRNA sense strand
gauaaguuugugauuguag

SEQ ID NO: 228553 - RNA, 19 nt, Homo sapiens
  misc_RNA (1)...(19): siRNA sense strand
caucguggauaaguuugug

SEQ ID NO: 228554 - RNA, 19 nt, Homo sapiens
  misc_RNA (1)...(19): siRNA sense strand
cgagcaguuugccaucaga

SEQ ID NO: 228555 - RNA, 19 nt, Homo sapiens
  misc_RNA (1)...(19): siRNA sense strand
ugauuggagauuacucuaa

SEQ ID NO: 228556 - RNA, 19 nt, Homo sapiens
  misc_RNA (1)...(19): siRNA sense strand
ccuguagccuggacaagag

SEQ ID NO: 228557 - RNA, 19 nt, Homo sapiens
  misc_RNA (1)...(19): siRNA sense strand
cuccgaaucuucugaugca

SEQ ID NO: 228558 - RNA, 19 nt, Homo sapiens
  misc_RNA (1)...(19): siRNA sense strand
gcacccgaacuucugugaa

SEQ ID NO: 228559 - RNA, 19 nt, Homo sapiens
  misc_RNA (1)...(19): siRNA sense strand
cagauaccccuaugaauau

SEQ ID NO: 228560 - RNA, 19 nt, Homo sapiens
  misc_RNA (1)...(19): siRNA sense strand
uacagacaguagacggaaa

SEQ ID NO: 228561 - RNA, 19 nt, Homo sapiens
  misc_RNA (1)...(19): siRNA sense strand
gaccaccgagagcugauug

SEQ ID NO: 228562 - RNA, 19 nt, Homo sapiens
  misc_RNA (1)...(19): siRNA sense strand
ccugaaaggcggcuacaag

SEQ ID NO: 228563 - RNA, 19 nt, Homo sapiens
  misc_RNA (1)...(19): siRNA sense strand
acaagagagucauccucau

SEQ ID NO: 228564 - RNA, 19 nt, Homo sapiens
  misc_RNA (1)...(19): siRNA sense strand
caccaagaccucaaguaca

SEQ ID NO: 228565 - RNA, 19 nt, Homo sapiens
  misc_RNA (1)...(19): siRNA sense strand
uaaagaccuuccgccucaa

SEQ ID NO: 228566 - RNA, 19 nt, Homo sapiens
  misc_RNA (1)...(19): siRNA sense strand
ggaggcugaggaaccuaaa

SEQ ID NO: 228567 - RNA, 19 nt, Homo sapiens
  misc_RNA (1)...(19): siRNA sense strand
ccgagagcuuccuacugaa

SEQ ID NO: 228568 - RNA, 19 nt, Homo sapiens
  misc_RNA (1)...(19): siRNA sense strand
cgagagcugauuggagauu

SEQ ID NO: 228569 - RNA, 19 nt, Homo sapiens
  misc_RNA (1)...(19): siRNA sense strand
ugaggaagaugauggauuu

SEQ ID NO: 228570 - RNA, 19 nt, Homo sapiens
  misc_RNA (1)...(19): siRNA sense strand
gccgagagcuuccuacuga

SEQ ID NO: 228571 - RNA, 19 nt, Homo sapiens
  misc_RNA (1)...(19): siRNA sense strand
ggaagaugauggauuugug

SEQ ID NO: 228572 - RNA, 19 nt, Homo sapiens
  misc_RNA (1)...(19): siRNA sense strand
caacaucguggauaaguuu

SEQ ID NO: 228573 - RNA, 19 nt, Homo sapiens
  misc_RNA (1)...(19): siRNA sense strand
gcagauaccccuaugaaua

SEQ ID NO: 228574 - RNA, 19 nt, Homo sapiens
  misc_RNA (1)...(19): siRNA sense strand
cuaggucgcuucucucuga

SEQ ID NO: 228575 - RNA, 19 nt, Homo sapiens
  misc_RNA (1)...(19): siRNA sense strand
gagagcugauuggagauua

SEQ ID NO: 228576 - RNA, 19 nt, Homo sapiens
  misc_RNA (1)...(19): siRNA sense strand
ucagcaacaucguggauaa

SEQ ID NO: 228577 - RNA, 19 nt, Homo sapiens
  misc_RNA (1)...(19): siRNA sense strand
gcaacaucguggauaaguu

SEQ ID NO: 228578 - RNA, 19 nt, Homo sapiens
  misc_RNA (1)...(19): siRNA sense strand
ggauaaguuugugauugua

SEQ ID NO: 228579 - RNA, 19 nt, Homo sapiens
  misc_RNA (1)...(19): siRNA sense strand
aaaaggaccucgucaugua

SEQ ID NO: 228580 - RNA, 19 nt, Homo sapiens
  misc_RNA (1)...(19): siRNA sense strand
ugagauguauauccugaaa

SEQ ID NO: 228581 - RNA, 19 nt, Homo sapiens
  misc_RNA (1)...(19): siRNA sense strand
caagagagucauccucauu

SEQ ID NO: 228582 - RNA, 19 nt, Homo sapiens
  misc_RNA (1)...(19): siRNA sense strand
gauuggagauuacucuaag

SEQ ID NO: 228583 - RNA, 19 nt, Homo sapiens
  misc_RNA (1)...(19): siRNA sense strand
guggauaaguuugugauug

SEQ ID NO: 228584 - RNA, 19 nt, Homo sapiens
  misc_RNA (1)...(19): siRNA sense strand
gaacgagaccgugcuguca

SEQ ID NO: 228585 - RNA, 19 nt, Homo sapiens
  misc_RNA (1)...(19): siRNA sense strand
gcaccaagaccucaaguac

SEQ ID NO: 228586 - RNA, 19 nt, Homo sapiens
  misc_RNA (1)...(19): siRNA sense strand
cuacuacccugagauguau

SEQ ID NO: 228587 - RNA, 19 nt, Homo sapiens
  misc_RNA (1)...(19): siRNA sense strand
ggaagccuuugcccagaga

SEQ ID NO: 228588 - RNA, 19 nt, Homo sapiens
  misc_RNA (1)...(19): siRNA sense strand
aaguacaucucaccagaaa

SEQ ID NO: 228589 - RNA, 19 nt, Homo sapiens
  misc_RNA (1)...(19): siRNA sense strand
aaaggaugaugaugcaguu

SEQ ID NO: 228590 - RNA, 19 nt, Homo sapiens
  misc_RNA (1)...(19): siRNA sense strand
uggauaaguuugugauugu

SEQ ID NO: 228591 - RNA, 19 nt, Homo sapiens
  misc_RNA (1)...(19): siRNA sense strand
gcagccagccggaucauuc

SEQ ID NO: 228592 - RNA, 19 nt, Homo sapiens
  misc_RNA (1)...(19): siRNA sense strand
cauccuagagagugacuua

SEQ ID NO: 228593 - RNA, 19 nt, Homo sapiens
  misc_RNA (1)...(19): siRNA sense strand
aggaugagcuaaagaccuu

SEQ ID NO: 228594 - RNA, 19 nt, Homo sapiens
  misc_RNA (1)...(19): siRNA sense strand
agagugacuuaaaggauga

SEQ ID NO: 228595 - RNA, 19 nt, Homo sapiens
  misc_RNA (1)...(19): siRNA sense strand
aauccucccugucgucuga

SEQ ID NO: 228596 - RNA, 19 nt, Homo sapiens
  misc_RNA (1)...(19): siRNA sense strand
gaaagcaccaagaccucaa

SEQ ID NO: 228597 - RNA, 19 nt, Homo sapiens
  misc_RNA (1)...(19): siRNA sense strand
ccuagagagugacuuaaag

SEQ ID NO: 228598 - RNA, 19 nt, Homo sapiens
  misc_RNA (1)...(19): siRNA sense strand
ggaaaaggaccucgucaug

SEQ ID NO: 228599 - RNA, 19 nt, Homo sapiens
  misc_RNA (1)...(19): siRNA sense strand
ucuacuacccugagaugua

SEQ ID NO: 228600 - RNA, 19 nt, Homo sapiens
  misc_RNA (1)...(19): siRNA sense strand
gauuguagacugcagauac

SEQ ID NO: 228601 - RNA, 19 nt, Homo sapiens
  misc_RNA (1)...(19): siRNA sense strand
accaagaccucaaguacau

SEQ ID NO: 228602 - RNA, 19 nt, Homo sapiens
  misc_RNA (1)...(19): siRNA sense strand
ccagccggaucauucgaaa

SEQ ID NO: 228603 - RNA, 19 nt, Homo sapiens
  misc_RNA (1)...(19): siRNA sense strand
gaaccacgaggccuucaag

SEQ ID NO: 228604 - RNA, 19 nt, Homo sapiens
  misc_RNA (1)...(19): siRNA sense strand
aagagagucauccucauuu

SEQ ID NO: 228605 - RNA, 19 nt, Homo sapiens
  misc_RNA (1)...(19): siRNA sense strand
cuuaaaggaugaugaugca

SEQ ID NO: 228606 - RNA, 19 nt, Homo sapiens
  misc_RNA (1)...(19): siRNA sense strand
gcaggaggcugaggaaccu

SEQ ID NO: 228607 - RNA, 19 nt, Homo sapiens
  misc_RNA (1)...(19): siRNA sense strand
uggcggagcagacguuuga

SEQ ID NO: 228608 - RNA, 19 nt, Homo sapiens
  misc_RNA (1)...(19): siRNA sense strand
gggauacugaggaagauga

SEQ ID NO: 228609 - RNA, 19 nt, Homo sapiens
  misc_RNA (1)...(19): siRNA sense strand
gaaaaggaccucgucaugu

SEQ ID NO: 228610 - RNA, 19 nt, Homo sapiens
  misc_RNA (1)...(19): siRNA sense strand
acugugaauucucaucuga

SEQ ID NO: 228611 - RNA, 19 nt, Homo sapiens
  misc_RNA (1)...(19): siRNA sense strand
guacaucucaccagaaacg

SEQ ID NO: 228612 - RNA, 19 nt, Homo sapiens
  misc_RNA (1)...(19): siRNA sense strand
caaguacaucucaccagaa

SEQ ID NO: 228613 - RNA, 19 nt, Homo sapiens
  misc_RNA (1)...(19): siRNA sense strand
ggcccuaggucgcuucucu

SEQ ID NO: 228614 - RNA, 19 nt, Homo sapiens
  misc_RNA (1)...(19): siRNA sense strand
agauguauauccugaaagg

SEQ ID NO: 228615 - RNA, 19 nt, Homo sapiens
  misc_RNA (1)...(19): siRNA sense strand
caucaagacugcggugaac

SEQ ID NO: 228616 - RNA, 19 nt, Homo sapiens
  misc_RNA (1)...(19): siRNA sense strand
ugacuuaaaggaugaugau

SEQ ID NO: 228617 - RNA, 19 nt, Homo sapiens
  misc_RNA (1)...(19): siRNA sense strand
ucaagacugcggugaacuu

SEQ ID NO: 228618 - RNA, 19 nt, Homo sapiens
  misc_RNA (1)...(19): siRNA sense strand
cuucaaggaugagcuaaag

SEQ ID NO: 228619 - RNA, 19 nt, Homo sapiens
  misc_RNA (1)...(19): siRNA sense strand
ugaaaggcggcuacaagga

SEQ ID NO: 228620 - RNA, 19 nt, Homo sapiens
  misc_RNA (1)...(19): siRNA sense strand
agaaccuccuggacaguga

SEQ ID NO: 228621 - RNA, 19 nt, Homo sapiens
  misc_RNA (1)...(19): siRNA sense strand
cacccgaacuucugugaac

SEQ ID NO: 228622 - RNA, 19 nt, Homo sapiens
  misc_RNA (1)...(19): siRNA sense strand
gauaaguuugugauuguag

SEQ ID NO: 228623 - RNA, 19 nt, Homo sapiens
  misc_RNA (1)...(19): siRNA sense strand
caucguggauaaguuugug

SEQ ID NO: 228624 - RNA, 19 nt, Homo sapiens
  misc_RNA (1)...(19): siRNA sense strand
cgagcaguuugccaucaga

SEQ ID NO: 228625 - RNA, 19 nt, Homo sapiens
  misc_RNA (1)...(19): siRNA sense strand
ugauuggagauuacucuaa

SEQ ID NO: 228626 - RNA, 19 nt, Homo sapiens
  misc_RNA (1)...(19): siRNA sense strand
ccuguagccuggacaagag

SEQ ID NO: 228627 - RNA, 19 nt, Homo sapiens
  misc_RNA (1)...(19): siRNA sense strand
cuccgaaucuucugaugca

SEQ ID NO: 228628 - RNA, 19 nt, Homo sapiens
  misc_RNA (1)...(19): siRNA sense strand
gcacccgaacuucugugaa

SEQ ID NO: 228629 - RNA, 19 nt, Homo sapiens
  misc_RNA (1)...(19): siRNA sense strand
cagauaccccuaugaauau

SEQ ID NO: 228630 - RNA, 19 nt, Homo sapiens
  misc_RNA (1)...(19): siRNA sense strand
uacagacaguagacggaaa

SEQ ID NO: 228631 - RNA, 19 nt, Homo sapiens
  misc_RNA (1)...(19): siRNA sense strand
gaccaccgagagcugauug

SEQ ID NO: 228632 - RNA, 19 nt, Homo sapiens
  misc_RNA (1)...(19): siRNA sense strand
ccugaaaggcggcuacaag

SEQ ID NO: 228633 - RNA, 19 nt, Homo sapiens
  misc_RNA (1)...(19): siRNA sense strand
acaagagagucauccucau

SEQ ID NO: 228634 - RNA, 19 nt, Homo sapiens
  misc_RNA (1)...(19): siRNA sense strand
caccaagaccucaaguaca

SEQ ID NO: 228635 - RNA, 19 nt, Homo sapiens
  misc_RNA (1)...(19): siRNA sense strand
uaaagaccuuccgccucaa

SEQ ID NO: 228636 - RNA, 19 nt, Homo sapiens
  misc_RNA (1)...(19): siRNA sense strand
ggaggcugaggaaccuaaa

SEQ ID NO: 228637 - RNA, 19 nt, Homo sapiens
  misc_RNA (1)...(19): siRNA sense strand
ccgagagcuuccuacugaa

SEQ ID NO: 228638 - RNA, 19 nt, Homo sapiens
  misc_RNA (1)...(19): siRNA sense strand
cgagagcugauuggagauu

SEQ ID NO: 228639 - RNA, 19 nt, Homo sapiens
  misc_RNA (1)...(19): siRNA sense strand
ugaggaagaugauggauuu

SEQ ID NO: 228640 - RNA, 19 nt, Homo sapiens
  misc_RNA (1)...(19): siRNA sense strand
gccgagagcuuccuacuga

SEQ ID NO: 228641 - RNA, 19 nt, Homo sapiens
  misc_RNA (1)...(19): siRNA sense strand
ggaagaugauggauuugug

SEQ ID NO: 228642 - RNA, 19 nt, Homo sapiens
  misc_RNA (1)...(19): siRNA sense strand
caacaucguggauaaguuu

SEQ ID NO: 228643 - RNA, 19 nt, Homo sapiens
  misc_RNA (1)...(19): siRNA sense strand
gcagauaccccuaugaaua

SEQ ID NO: 228644 - RNA, 19 nt, Homo sapiens
  misc_RNA (1)...(19): siRNA sense strand
cuaggucgcuucucucuga

SEQ ID NO: 228645 - RNA, 19 nt, Homo sapiens
  misc_RNA (1)...(19): siRNA sense strand
gagagcugauuggagauua

SEQ ID NO: 228646 - RNA, 19 nt, Homo sapiens
  misc_RNA (1)...(19): siRNA sense strand
ucagcaacaucguggauaa

SEQ ID NO: 228647 - RNA, 19 nt, Homo sapiens
  misc_RNA (1)...(19): siRNA sense strand
gcaacaucguggauaaguu

SEQ ID NO: 228648 - RNA, 19 nt, Homo sapiens
  misc_RNA (1)...(19): siRNA sense strand
ggauaaguuugugauugua

SEQ ID NO: 228649 - RNA, 19 nt, Homo sapiens
  misc_RNA (1)...(19): siRNA sense strand
aaaaggaccucgucaugua

SEQ ID NO: 228650 - RNA, 19 nt, Homo sapiens
  misc_RNA (1)...(19): siRNA sense strand
ugagauguauauccugaaa

SEQ ID NO: 228651 - RNA, 19 nt, Homo sapiens
  misc_RNA (1)...(19): siRNA sense strand
caagagagucauccucauu

SEQ ID NO: 228652 - RNA, 19 nt, Homo sapiens
  misc_RNA (1)...(19): siRNA sense strand
gauuggagauuacucuaag

SEQ ID NO: 228653 - RNA, 19 nt, Homo sapiens
  misc_RNA (1)...(19): siRNA sense strand
guggauaaguuugugauug

SEQ ID NO: 228654 - RNA, 19 nt, Homo sapiens
  misc_RNA (1)...(19): siRNA sense strand
gaacgagaccgugcuguca

SEQ ID NO: 228655 - RNA, 19 nt, Homo sapiens
  misc_RNA (1)...(19): siRNA sense strand
gcaccaagaccucaaguac

SEQ ID NO: 228656 - RNA, 19 nt, Homo sapiens
  misc_RNA (1)...(19): siRNA sense strand
cuacuacccugagauguau

SEQ ID NO: 228657 - RNA, 19 nt, Homo sapiens
  misc_RNA (1)...(19): siRNA sense strand
ggaagccuuugcccagaga

SEQ ID NO: 228658 - RNA, 19 nt, Homo sapiens
  misc_RNA (1)...(19): siRNA sense strand
aaguacaucucaccagaaa

SEQ ID NO: 228659 - RNA, 19 nt, Homo sapiens
  misc_RNA (1)...(19): siRNA sense strand
aaaggaugaugaugcaguu

SEQ ID NO: 228660 - RNA, 19 nt, Homo sapiens
  misc_RNA (1)...(19): siRNA sense strand
uggauaaguuugugauugu

SEQ ID NO: 228661 - RNA, 19 nt, Homo sapiens
  misc_RNA (1)...(19): siRNA sense strand
gcagccagccggaucauuc

SEQ ID NO: 228662 - RNA, 19 nt, Homo sapiens
  misc_RNA (1)...(19): siRNA sense strand
cauccuagagagugacuua

SEQ ID NO: 228663 - RNA, 19 nt, Homo sapiens
  misc_RNA (1)...(19): siRNA sense strand
aggaugagcuaaagaccuu

SEQ ID NO: 228664 - RNA, 19 nt, Homo sapiens
  misc_RNA (1)...(19): siRNA sense strand
agagugacuuaaaggauga

SEQ ID NO: 228665 - RNA, 19 nt, Homo sapiens
  misc_RNA (1)...(19): siRNA sense strand
aauccucccugucgucuga

SEQ ID NO: 228666 - RNA, 19 nt, Homo sapiens
  misc_RNA (1)...(19): siRNA sense strand
gaaagcaccaagaccucaa

SEQ ID NO: 228667 - RNA, 19 nt, Homo sapiens
  misc_RNA (1)...(19): siRNA sense strand
ccuagagagugacuuaaag

SEQ ID NO: 228668 - RNA, 19 nt, Homo sapiens
  misc_RNA (1)...(19): siRNA sense strand
ggaaaaggaccucgucaug

SEQ ID NO: 228669 - RNA, 19 nt, Homo sapiens
  misc_RNA (1)...(19): siRNA sense strand
ucuacuacccugagaugua

SEQ ID NO: 228670 - RNA, 19 nt, Homo sapiens
  misc_RNA (1)...(19): siRNA sense strand
gauuguagacugcagauac

SEQ ID NO: 228671 - RNA, 19 nt, Homo sapiens
  misc_RNA (1)...(19): siRNA sense strand
accaagaccucaaguacau

SEQ ID NO: 228672 - RNA, 19 nt, Homo sapiens
  misc_RNA (1)...(19): siRNA sense strand
ccagccggaucauucgaaa

SEQ ID NO: 228673 - RNA, 19 nt, Homo sapiens
  misc_RNA (1)...(19): siRNA sense strand
gaaccacgaggccuucaag

SEQ ID NO: 228674 - RNA, 19 nt, Homo sapiens
  misc_RNA (1)...(19): siRNA sense strand
aagagagucauccucauuu

SEQ ID NO: 228675 - RNA, 19 nt, Homo sapiens
  misc_RNA (1)...(19): siRNA sense strand
cuuaaaggaugaugaugca

SEQ ID NO: 228676 - RNA, 19 nt, Homo sapiens
  misc_RNA (1)...(19): siRNA sense strand
gcaggaggcugaggaaccu

SEQ ID NO: 228677 - RNA, 19 nt, Homo sapiens
  misc_RNA (1)...(19): siRNA sense strand
uggcggagcagacguuuga

SEQ ID NO: 228678 - RNA, 19 nt, Homo sapiens
  misc_RNA (1)...(19): siRNA sense strand
gggauacugaggaagauga

SEQ ID NO: 228679 - RNA, 19 nt, Homo sapiens
  misc_RNA (1)...(19): siRNA sense strand
gaaaaggaccucgucaugu

SEQ ID NO: 228680 - RNA, 19 nt, Homo sapiens
  misc_RNA (1)...(19): siRNA sense strand
acugugaauucucaucuga

SEQ ID NO: 228681 - RNA, 19 nt, Homo sapiens
  misc_RNA (1)...(19): siRNA sense strand
guacaucucaccagaaacg

SEQ ID NO: 228682 - RNA, 19 nt, Homo sapiens
  misc_RNA (1)...(19): siRNA sense strand
caaguacaucucaccagaa

SEQ ID NO: 228683 - RNA, 19 nt, Homo sapiens
  misc_RNA (1)...(19): siRNA sense strand
ggcccuaggucgcuucucu

SEQ ID NO: 228684 - RNA, 19 nt, Homo sapiens
  misc_RNA (1)...(19): siRNA sense strand
agauguauauccugaaagg

SEQ ID NO: 228685 - RNA, 19 nt, Homo sapiens
  misc_RNA (1)...(19): siRNA sense strand
caucaagacugcggugaac

SEQ ID NO: 228686 - RNA, 19 nt, Homo sapiens
  misc_RNA (1)...(19): siRNA sense strand
ugacuuaaaggaugaugau

SEQ ID NO: 228687 - RNA, 19 nt, Homo sapiens
  misc_RNA (1)...(19): siRNA sense strand
ucaagacugcggugaacuu

SEQ ID NO: 228688 - RNA, 19 nt, Homo sapiens
  misc_RNA (1)...(19): siRNA sense strand
cuucaaggaugagcuaaag

SEQ ID NO: 228689 - RNA, 19 nt, Homo sapiens
  misc_RNA (1)...(19): siRNA sense strand
ugaaaggcggcuacaagga

SEQ ID NO: 228690 - RNA, 19 nt, Homo sapiens
  misc_RNA (1)...(19): siRNA sense strand
agaaccuccuggacaguga

SEQ ID NO: 228691 - RNA, 19 nt, Homo sapiens
  misc_RNA (1)...(19): siRNA sense strand
cacccgaacuucugugaac

SEQ ID NO: 228692 - RNA, 19 nt, Homo sapiens
  misc_RNA (1)...(19): siRNA sense strand
gauaaguuugugauuguag

SEQ ID NO: 228693 - RNA, 19 nt, Homo sapiens
  misc_RNA (1)...(19): siRNA sense strand
caucguggauaaguuugug

SEQ ID NO: 228694 - RNA, 19 nt, Homo sapiens
  misc_RNA (1)...(19): siRNA sense strand
cgagcaguuugccaucaga

SEQ ID NO: 228695 - RNA, 19 nt, Homo sapiens
  misc_RNA (1)...(19): siRNA sense strand
ugauuggagauuacucuaa

SEQ ID NO: 228696 - RNA, 19 nt, Homo sapiens
  misc_RNA (1)...(19): siRNA sense strand
ccuguagccuggacaagag

SEQ ID NO: 228697 - RNA, 19 nt, Homo sapiens
  misc_RNA (1)...(19): siRNA sense strand
cuccgaaucuucugaugca

SEQ ID NO: 228698 - RNA, 19 nt, Homo sapiens
  misc_RNA (1)...(19): siRNA sense strand
gcacccgaacuucugugaa

SEQ ID NO: 228699 - RNA, 19 nt, Homo sapiens
  misc_RNA (1)...(19): siRNA sense strand
cagauaccccuaugaauau

SEQ ID NO: 228700 - RNA, 19 nt, Homo sapiens
  misc_RNA (1)...(19): siRNA sense strand
uacagacaguagacggaaa

SEQ ID NO: 228701 - RNA, 19 nt, Homo sapiens
  misc_RNA (1)...(19): siRNA sense strand
gaccaccgagagcugauug

SEQ ID NO: 228702 - RNA, 19 nt, Homo sapiens
  misc_RNA (1)...(19): siRNA sense strand
ccugaaaggcggcuacaag

SEQ ID NO: 228703 - RNA, 19 nt, Homo sapiens
  misc_RNA (1)...(19): siRNA sense strand
acaagagagucauccucau

SEQ ID NO: 228704 - RNA, 19 nt, Homo sapiens
  misc_RNA (1)...(19): siRNA sense strand
caccaagaccucaaguaca

SEQ ID NO: 228705 - RNA, 19 nt, Homo sapiens
  misc_RNA (1)...(19): siRNA sense strand
uaaagaccuuccgccucaa

SEQ ID NO: 228706 - RNA, 19 nt, Homo sapiens
  misc_RNA (1)...(19): siRNA sense strand
ggaggcugaggaaccuaaa

SEQ ID NO: 228707 - RNA, 19 nt, Homo sapiens
  misc_RNA (1)...(19): siRNA sense strand
ccgagagcuuccuacugaa

SEQ ID NO: 228708 - RNA, 19 nt, Homo sapiens
  misc_RNA (1)...(19): siRNA sense strand
cgagagcugauuggagauu

SEQ ID NO: 228709 - RNA, 19 nt, Homo sapiens
  misc_RNA (1)...(19): siRNA sense strand
ugaggaagaugauggauuu

SEQ ID NO: 228710 - RNA, 19 nt, Homo sapiens
  misc_RNA (1)...(19): siRNA sense strand
gccgagagcuuccuacuga

SEQ ID NO: 228711 - RNA, 19 nt, Homo sapiens
  misc_RNA (1)...(19): siRNA sense strand
ggaagaugauggauuugug

SEQ ID NO: 228712 - RNA, 19 nt, Homo sapiens
  misc_RNA (1)...(19): siRNA sense strand
caacaucguggauaaguuu

SEQ ID NO: 228713 - RNA, 19 nt, Homo sapiens
  misc_RNA (1)...(19): siRNA sense strand
gcagauaccccuaugaaua

SEQ ID NO: 228714 - RNA, 19 nt, Homo sapiens
  misc_RNA (1)...(19): siRNA sense strand
cuaggucgcuucucucuga

SEQ ID NO: 228715 - RNA, 19 nt, Homo sapiens
  misc_RNA (1)...(19): siRNA sense strand
gagagcugauuggagauua

SEQ ID NO: 228716 - RNA, 19 nt, Homo sapiens
  misc_RNA (1)...(19): siRNA sense strand
ucagcaacaucguggauaa

SEQ ID NO: 228717 - RNA, 19 nt, Homo sapiens
  misc_RNA (1)...(19): siRNA sense strand
gcaacaucguggauaaguu

SEQ ID NO: 228718 - RNA, 19 nt, Homo sapiens
  misc_RNA (1)...(19): siRNA sense strand
ggauaaguuugugauugua

SEQ ID NO: 228719 - RNA, 19 nt, Homo sapiens
  misc_RNA (1)...(19): siRNA sense strand
aaaaggaccucgucaugua

SEQ ID NO: 228720 - RNA, 19 nt, Homo sapiens
  misc_RNA (1)...(19): siRNA sense strand
ugagauguauauccugaaa

SEQ ID NO: 228721 - RNA, 19 nt, Homo sapiens
  misc_RNA (1)...(19): siRNA sense strand
caagagagucauccucauu

SEQ ID NO: 228722 - RNA, 19 nt, Homo sapiens
  misc_RNA (1)...(19): siRNA sense strand
gauuggagauuacucuaag

SEQ ID NO: 228723 - RNA, 19 nt, Homo sapiens
  misc_RNA (1)...(19): siRNA sense strand
guggauaaguuugugauug

SEQ ID NO: 228724 - RNA, 19 nt, Homo sapiens
  misc_RNA (1)...(19): siRNA sense strand
gaacgagaccgugcuguca

SEQ ID NO: 228725 - RNA, 19 nt, Homo sapiens
  misc_RNA (1)...(19): siRNA sense strand
gcaccaagaccucaaguac

SEQ ID NO: 228726 - RNA, 19 nt, Homo sapiens
  misc_RNA (1)...(19): siRNA sense strand
cuacuacccugagauguau

SEQ ID NO: 228727 - RNA, 19 nt, Homo sapiens
  misc_RNA (1)...(19): siRNA sense strand
ggaagccuuugcccagaga

SEQ ID NO: 228728 - RNA, 19 nt, Homo sapiens
  misc_RNA (1)...(19): siRNA sense strand
aaguacaucucaccagaaa

SEQ ID NO: 228729 - RNA, 19 nt, Homo sapiens
  misc_RNA (1)...(19): siRNA sense strand
aaaggaugaugaugcaguu

SEQ ID NO: 228730 - RNA, 19 nt, Homo sapiens
  misc_RNA (1)...(19): siRNA sense strand
uggauaaguuugugauugu

SEQ ID NO: 228731 - RNA, 19 nt, Homo sapiens
  misc_RNA (1)...(19): siRNA sense strand
gcagccagccggaucauuc

SEQ ID NO: 228732 - RNA, 19 nt, Homo sapiens
  misc_RNA (1)...(19): siRNA sense strand
cauccuagagagugacuua

SEQ ID NO: 228733 - RNA, 19 nt, Homo sapiens
  misc_RNA (1)...(19): siRNA sense strand
aggaugagcuaaagaccuu

SEQ ID NO: 228734 - RNA, 19 nt, Homo sapiens
  misc_RNA (1)...(19): siRNA sense strand
agagugacuuaaaggauga

SEQ ID NO: 228735 - RNA, 19 nt, Homo sapiens
  misc_RNA (1)...(19): siRNA sense strand
aauccucccugucgucuga

SEQ ID NO: 228736 - RNA, 19 nt, Homo sapiens
  misc_RNA (1)...(19): siRNA sense strand
gaaagcaccaagaccucaa

SEQ ID NO: 228737 - RNA, 19 nt, Homo sapiens
  misc_RNA (1)...(19): siRNA sense strand
ccuagagagugacuuaaag

SEQ ID NO: 228738 - RNA, 19 nt, Homo sapiens
  misc_RNA (1)...(19): siRNA sense strand
ggaaaaggaccucgucaug

SEQ ID NO: 228739 - RNA, 19 nt, Homo sapiens
  misc_RNA (1)...(19): siRNA sense strand
ucuacuacccugagaugua

SEQ ID NO: 228740 - RNA, 19 nt, Homo sapiens
  misc_RNA (1)...(19): siRNA sense strand
gauuguagacugcagauac

SEQ ID NO: 228741 - RNA, 19 nt, Homo sapiens
  misc_RNA (1)...(19): siRNA sense strand
accaagaccucaaguacau

SEQ ID NO: 228742 - RNA, 19 nt, Homo sapiens
  misc_RNA (1)...(19): siRNA sense strand
ccagccggaucauucgaaa

SEQ ID NO: 228743 - RNA, 19 nt, Homo sapiens
  misc_RNA (1)...(19): siRNA sense strand
gaaccacgaggccuucaag

SEQ ID NO: 228744 - RNA, 19 nt, Homo sapiens
  misc_RNA (1)...(19): siRNA sense strand
aagagagucauccucauuu

SEQ ID NO: 228745 - RNA, 19 nt, Homo sapiens
  misc_RNA (1)...(19): siRNA sense strand
cuuaaaggaugaugaugca

SEQ ID NO: 228746 - RNA, 19 nt, Homo sapiens
  misc_RNA (1)...(19): siRNA sense strand
gcaggaggcugaggaaccu

SEQ ID NO: 228747 - RNA, 19 nt, Homo sapiens
  misc_RNA (1)...(19): siRNA sense strand
uggcggagcagacguuuga

SEQ ID NO: 228748 - RNA, 19 nt, Homo sapiens
  misc_RNA (1)...(19): siRNA sense strand
gggauacugaggaagauga

SEQ ID NO: 228749 - RNA, 19 nt, Homo sapiens
  misc_RNA (1)...(19): siRNA sense strand
gaaaaggaccucgucaugu

SEQ ID NO: 228750 - RNA, 19 nt, Homo sapiens
  misc_RNA (1)...(19): siRNA sense strand
acugugaauucucaucuga

SEQ ID NO: 228751 - RNA, 19 nt, Homo sapiens
  misc_RNA (1)...(19): siRNA sense strand
guacaucucaccagaaacg

SEQ ID NO: 228752 - RNA, 19 nt, Homo sapiens
  misc_RNA (1)...(19): siRNA sense strand
caaguacaucucaccagaa

SEQ ID NO: 228753 - RNA, 19 nt, Homo sapiens
  misc_RNA (1)...(19): siRNA sense strand
ggcccuaggucgcuucucu

SEQ ID NO: 228754 - RNA, 19 nt, Homo sapiens
  misc_RNA (1)...(19): siRNA sense strand
agauguauauccugaaagg

SEQ ID NO: 228755 - RNA, 19 nt, Homo sapiens
  misc_RNA (1)...(19): siRNA sense strand
caucaagacugcggugaac

SEQ ID NO: 228756 - RNA, 19 nt, Homo sapiens
  misc_RNA (1)...(19): siRNA sense strand
ugacuuaaaggaugaugau

SEQ ID NO: 228757 - RNA, 19 nt, Homo sapiens
  misc_RNA (1)...(19): siRNA sense strand
ucaagacugcggugaacuu

SEQ ID NO: 228758 - RNA, 19 nt, Homo sapiens
  misc_RNA (1)...(19): siRNA sense strand
cuucaaggaugagcuaaag

SEQ ID NO: 228759 - RNA, 19 nt, Homo sapiens
  misc_RNA (1)...(19): siRNA sense strand
ugaaaggcggcuacaagga

SEQ ID NO: 228760 - RNA, 19 nt, Homo sapiens
  misc_RNA (1)...(19): siRNA sense strand
agaaccuccuggacaguga

SEQ ID NO: 228761 - RNA, 19 nt, Homo sapiens
  misc_RNA (1)...(19): siRNA sense strand
cacccgaacuucugugaac

SEQ ID NO: 228762 - RNA, 19 nt, Homo sapiens
  misc_RNA (1)...(19): siRNA sense strand
gauaaguuugugauuguag

SEQ ID NO: 228763 - RNA, 19 nt, Homo sapiens
  misc_RNA (1)...(19): siRNA sense strand
caucguggauaaguuugug

SEQ ID NO: 228764 - RNA, 19 nt, Homo sapiens
  misc_RNA (1)...(19): siRNA sense strand
cgagcaguuugccaucaga

SEQ ID NO: 228765 - RNA, 19 nt, Homo sapiens
  misc_RNA (1)...(19): siRNA sense strand
ugauuggagauuacucuaa

SEQ ID NO: 228766 - RNA, 19 nt, Homo sapiens
  misc_RNA (1)...(19): siRNA sense strand
ccuguagccuggacaagag

SEQ ID NO: 228767 - RNA, 19 nt, Homo sapiens
  misc_RNA (1)...(19): siRNA sense strand
cuccgaaucuucugaugca

SEQ ID NO: 228768 - RNA, 19 nt, Homo sapiens
  misc_RNA (1)...(19): siRNA sense strand
gcacccgaacuucugugaa

SEQ ID NO: 228769 - RNA, 19 nt, Homo sapiens
  misc_RNA (1)...(19): siRNA sense strand
cagauaccccuaugaauau

SEQ ID NO: 228770 - RNA, 19 nt, Homo sapiens
  misc_RNA (1)...(19): siRNA sense strand
uacagacaguagacggaaa

SEQ ID NO: 228771 - RNA, 19 nt, Homo sapiens
  misc_RNA (1)...(19): siRNA sense strand
gaccaccgagagcugauug

SEQ ID NO: 228772 - RNA, 19 nt, Homo sapiens
  misc_RNA (1)...(19): siRNA sense strand
ccugaaaggcggcuacaag

SEQ ID NO: 228773 - RNA, 19 nt, Homo sapiens
  misc_RNA (1)...(19): siRNA sense strand
acaagagagucauccucau

SEQ ID NO: 228774 - RNA, 19 nt, Homo sapiens
  misc_RNA (1)...(19): siRNA sense strand
caccaagaccucaaguaca

SEQ ID NO: 228775 - RNA, 19 nt, Homo sapiens
  misc_RNA (1)...(19): siRNA sense strand
uaaagaccuuccgccucaa

SEQ ID NO: 228776 - RNA, 19 nt, Homo sapiens
  misc_RNA (1)...(19): siRNA sense strand
ggaggcugaggaaccuaaa

SEQ ID NO: 228777 - RNA, 19 nt, Homo sapiens
  misc_RNA (1)...(19): siRNA sense strand
ccgagagcuuccuacugaa

SEQ ID NO: 228778 - RNA, 19 nt, Homo sapiens
  misc_RNA (1)...(19): siRNA sense strand
cgagagcugauuggagauu

SEQ ID NO: 228779 - RNA, 19 nt, Homo sapiens
  misc_RNA (1)...(19): siRNA sense strand
gcucagaccucuucuacga

SEQ ID NO: 228780 - RNA, 19 nt, Homo sapiens
  misc_RNA (1)...(19): siRNA sense strand
ggaccauucuccugagugu

SEQ ID NO: 228781 - RNA, 19 nt, Homo sapiens
  misc_RNA (1)...(19): siRNA sense strand
ggacgagggcgaucuauac

SEQ ID NO: 228782 - RNA, 19 nt, Homo sapiens
  misc_RNA (1)...(19): siRNA sense strand
uacaggaaguggaaagaga

SEQ ID NO: 228783 - RNA, 19 nt, Homo sapiens
  misc_RNA (1)...(19): siRNA sense strand
ugaacgagcccaacaccuu

SEQ ID NO: 228784 - RNA, 19 nt, Homo sapiens
  misc_RNA (1)...(19): siRNA sense strand
gaucgggaguacacagaca

SEQ ID NO: 228785 - RNA, 19 nt, Homo sapiens
  misc_RNA (1)...(19): siRNA sense strand
ggaguacacagacaucauc

SEQ ID NO: 228786 - RNA, 19 nt, Homo sapiens
  misc_RNA (1)...(19): siRNA sense strand
cgagggcgaucuauacaac

SEQ ID NO: 228787 - RNA, 19 nt, Homo sapiens
  misc_RNA (1)...(19): siRNA sense strand
ggaaguggaaagagagcaa

SEQ ID NO: 228788 - RNA, 19 nt, Homo sapiens
  misc_RNA (1)...(19): siRNA sense strand
ggaaggaucgggaguacac

SEQ ID NO: 228789 - RNA, 19 nt, Homo sapiens
  misc_RNA (1)...(19): siRNA sense strand
ucaaggggcugcaggaaga

SEQ ID NO: 228790 - RNA, 19 nt, Homo sapiens
  misc_RNA (1)...(19): siRNA sense strand
gggcucagaccucuucuac

SEQ ID NO: 228791 - RNA, 19 nt, Homo sapiens
  misc_RNA (1)...(19): siRNA sense strand
aagagccggucgagggauu

SEQ ID NO: 228792 - RNA, 19 nt, Homo sapiens
  misc_RNA (1)...(19): siRNA sense strand
ggacgaugaggaugacucu

SEQ ID NO: 228793 - RNA, 19 nt, Homo sapiens
  misc_RNA (1)...(19): siRNA sense strand
gcagaacgucaggaccauu

SEQ ID NO: 228794 - RNA, 19 nt, Homo sapiens
  misc_RNA (1)...(19): siRNA sense strand
cagaacgucaggaccauuc

SEQ ID NO: 228795 - RNA, 19 nt, Homo sapiens
  misc_RNA (1)...(19): siRNA sense strand
ugaucucccuccugaacga

SEQ ID NO: 228796 - RNA, 19 nt, Homo sapiens
  misc_RNA (1)...(19): siRNA sense strand
gccgaguacugcgugaaga

SEQ ID NO: 228797 - RNA, 19 nt, Homo sapiens
  misc_RNA (1)...(19): siRNA sense strand
ccuccgugauguacaggaa

SEQ ID NO: 228798 - RNA, 19 nt, Homo sapiens
  misc_RNA (1)...(19): siRNA sense strand
ccaagauguggcacccuaa

SEQ ID NO: 228799 - RNA, 19 nt, Homo sapiens
  misc_RNA (1)...(19): siRNA sense strand
gacgagggcgaucuauaca

SEQ ID NO: 228800 - RNA, 19 nt, Homo sapiens
  misc_RNA (1)...(19): siRNA sense strand
gguggacgagggcgaucua

SEQ ID NO: 228801 - RNA, 19 nt, Homo sapiens
  misc_RNA (1)...(19): siRNA sense strand
uggacgagggcgaucuaua

SEQ ID NO: 228802 - RNA, 19 nt, Homo sapiens
  misc_RNA (1)...(19): siRNA sense strand
ggacgccuccgugauguac

SEQ ID NO: 228803 - RNA, 19 nt, Homo sapiens
  misc_RNA (1)...(19): siRNA sense strand
ggacaacguuuauuacuau

SEQ ID NO: 228804 - RNA, 19 nt, Homo sapiens
  misc_RNA (1)...(19): siRNA sense strand
guacacagcccuaaucaua

SEQ ID NO: 228805 - RNA, 19 nt, Homo sapiens
  misc_RNA (1)...(19): siRNA sense strand
ggagagcgguggucaaaga

SEQ ID NO: 228806 - RNA, 19 nt, Homo sapiens
  misc_RNA (1)...(19): siRNA sense strand
ccaacuggcuggagauuaa

SEQ ID NO: 228807 - RNA, 19 nt, Homo sapiens
  misc_RNA (1)...(19): siRNA sense strand
gaagcaggauugcaaauuc

SEQ ID NO: 228808 - RNA, 19 nt, Homo sapiens
  misc_RNA (1)...(19): siRNA sense strand
gagaacgcauugccacaua

SEQ ID NO: 228809 - RNA, 19 nt, Homo sapiens
  misc_RNA (1)...(19): siRNA sense strand
gaaagugacugaugcugau

SEQ ID NO: 228810 - RNA, 19 nt, Homo sapiens
  misc_RNA (1)...(19): siRNA sense strand
gaacaacgauggcauuuug

SEQ ID NO: 228811 - RNA, 19 nt, Homo sapiens
  misc_RNA (1)...(19): siRNA sense strand
gaacuauauucuucuguga

SEQ ID NO: 228812 - RNA, 19 nt, Homo sapiens
  misc_RNA (1)...(19): siRNA sense strand
gaagagagacuggguuauu

SEQ ID NO: 228813 - RNA, 19 nt, Homo sapiens
  misc_RNA (1)...(19): siRNA sense strand
ugacgaaugugguaccuuu

SEQ ID NO: 228814 - RNA, 19 nt, Homo sapiens
  misc_RNA (1)...(19): siRNA sense strand
gggacaacguuuauuacua

SEQ ID NO: 228815 - RNA, 19 nt, Homo sapiens
  misc_RNA (1)...(19): siRNA sense strand
gcaguacauucuacacgua

SEQ ID NO: 228816 - RNA, 19 nt, Homo sapiens
  misc_RNA (1)...(19): siRNA sense strand
gaagcuggcugacauguac

SEQ ID NO: 228817 - RNA, 19 nt, Homo sapiens
  misc_RNA (1)...(19): siRNA sense strand
guuggugucuuuauuauug

SEQ ID NO: 228818 - RNA, 19 nt, Homo sapiens
  misc_RNA (1)...(19): siRNA sense strand
aaucauagcuacagacaau

SEQ ID NO: 228819 - RNA, 19 nt, Homo sapiens
  misc_RNA (1)...(19): siRNA sense strand
gacaaugguucuccaguug

SEQ ID NO: 228820 - RNA, 19 nt, Homo sapiens
  misc_RNA (1)...(19): siRNA sense strand
gcaaauuccugccauucug

SEQ ID NO: 228821 - RNA, 19 nt, Homo sapiens
  misc_RNA (1)...(19): siRNA sense strand
gagagaguuucccuacgua

SEQ ID NO: 228822 - RNA, 19 nt, Homo sapiens
  misc_RNA (1)...(19): siRNA sense strand
ucaagaagcuggcugacau

SEQ ID NO: 228823 - RNA, 19 nt, Homo sapiens
  misc_RNA (1)...(19): siRNA sense strand
gacaaaggacagccuauuu

SEQ ID NO: 228824 - RNA, 19 nt, Homo sapiens
  misc_RNA (1)...(19): siRNA sense strand
acaaagaccaggacuauga

SEQ ID NO: 228825 - RNA, 19 nt, Homo sapiens
  misc_RNA (1)...(19): siRNA sense strand
gauccugucugaugugaau

SEQ ID NO: 228826 - RNA, 19 nt, Homo sapiens
  misc_RNA (1)...(19): siRNA sense strand
caaaaggccucuacgguuu

SEQ ID NO: 228827 - RNA, 19 nt, Homo sapiens
  misc_RNA (1)...(19): siRNA sense strand
caauacaucucccuucaca

SEQ ID NO: 228828 - RNA, 19 nt, Homo sapiens
  misc_RNA (1)...(19): siRNA sense strand
cagcaucacuggccaagga

SEQ ID NO: 228829 - RNA, 19 nt, Homo sapiens
  misc_RNA (1)...(19): siRNA sense strand
ccacaaauccagugaacaa

SEQ ID NO: 228830 - RNA, 19 nt, Homo sapiens
  misc_RNA (1)...(19): siRNA sense strand
gcucauggauaaccagaau

SEQ ID NO: 228831 - RNA, 19 nt, Homo sapiens
  misc_RNA (1)...(19): siRNA sense strand
cagcaaagggcuuggauuu

SEQ ID NO: 228832 - RNA, 19 nt, Homo sapiens
  misc_RNA (1)...(19): siRNA sense strand
gaacacaggagucaucagu

SEQ ID NO: 228833 - RNA, 19 nt, Homo sapiens
  misc_RNA (1)...(19): siRNA sense strand
ggccugaagugacucguaa

SEQ ID NO: 228834 - RNA, 19 nt, Homo sapiens
  misc_RNA (1)...(19): siRNA sense strand
ucacugacaccaacgauaa

SEQ ID NO: 228835 - RNA, 19 nt, Homo sapiens
  misc_RNA (1)...(19): siRNA sense strand
gaccaggacuuugacuuga

SEQ ID NO: 228836 - RNA, 19 nt, Homo sapiens
  misc_RNA (1)...(19): siRNA sense strand
gaaugaugaugguggacaa

SEQ ID NO: 228837 - RNA, 19 nt, Homo sapiens
  misc_RNA (1)...(19): siRNA sense strand
ccaggacuaugacuacuug

SEQ ID NO: 228838 - RNA, 19 nt, Homo sapiens
  misc_RNA (1)...(19): siRNA sense strand
ugaaagcggcugauacuga

SEQ ID NO: 228839 - RNA, 19 nt, Homo sapiens
  misc_RNA (1)...(19): siRNA sense strand
ggaccaggacuuugacuug

SEQ ID NO: 228840 - RNA, 19 nt, Homo sapiens
  misc_RNA (1)...(19): siRNA sense strand
cagaagagagacuggguua

SEQ ID NO: 228841 - RNA, 19 nt, Homo sapiens
  misc_RNA (1)...(19): siRNA sense strand
gagaguuucccuacguaua

SEQ ID NO: 228842 - RNA, 19 nt, Homo sapiens
  misc_RNA (1)...(19): siRNA sense strand
ccacagacgcggacgauga

SEQ ID NO: 228843 - RNA, 19 nt, Homo sapiens
  misc_RNA (1)...(19): siRNA sense strand
ugaugaugguggacaauuu

SEQ ID NO: 228844 - RNA, 19 nt, Homo sapiens
  misc_RNA (1)...(19): siRNA sense strand
ccaagaaucuaucauuuug

SEQ ID NO: 228845 - RNA, 19 nt, Homo sapiens
  misc_RNA (1)...(19): siRNA sense strand
caaauccagugaacaacga

SEQ ID NO: 228846 - RNA, 19 nt, Homo sapiens
  misc_RNA (1)...(19): siRNA sense strand
gaggagagcgguggucaaa

SEQ ID NO: 228847 - RNA, 19 nt, Homo sapiens
  misc_RNA (1)...(19): siRNA sense strand
agaggugggugacuacaaa

SEQ ID NO: 228848 - RNA, 19 nt, Homo sapiens
  misc_RNA (1)...(19): siRNA sense strand
agacaaugguucuccaguu

SEQ ID NO: 228849 - RNA, 19 nt, Homo sapiens
  misc_RNA (1)...(19): siRNA sense strand
gaucaaauccaacaaagac

SEQ ID NO: 228850 - RNA, 19 nt, Homo sapiens
  misc_RNA (1)...(19): siRNA sense strand
gagaagaggaccaggacuu

SEQ ID NO: 228851 - RNA, 19 nt, Homo sapiens
  misc_RNA (1)...(19): siRNA sense strand
cccaucagcugcccagaaa

SEQ ID NO: 228852 - RNA, 19 nt, Homo sapiens
  misc_RNA (1)...(19): siRNA sense strand
caccaacccucaugagugu

SEQ ID NO: 228853 - RNA, 19 nt, Homo sapiens
  misc_RNA (1)...(19): siRNA sense strand
ggaauucuugcuuugcuaa

SEQ ID NO: 228854 - RNA, 19 nt, Homo sapiens
  misc_RNA (1)...(19): siRNA sense strand
accagaaccucgaacuaua

SEQ ID NO: 228855 - RNA, 19 nt, Homo sapiens
  misc_RNA (1)...(19): siRNA sense strand
ggagagacacugccaacug

SEQ ID NO: 228856 - RNA, 19 nt, Homo sapiens
  misc_RNA (1)...(19): siRNA sense strand
acacauuuauggaacagaa

SEQ ID NO: 228857 - RNA, 19 nt, Homo sapiens
  misc_RNA (1)...(19): siRNA sense strand
gccgagagcuacacguuca

SEQ ID NO: 228858 - RNA, 19 nt, Homo sapiens
  misc_RNA (1)...(19): siRNA sense strand
gaugugaacaccuacaaug

SEQ ID NO: 228859 - RNA, 19 nt, Homo sapiens
  misc_RNA (1)...(19): siRNA sense strand
cauacacucucuucucuca

SEQ ID NO: 228860 - RNA, 19 nt, Homo sapiens
  misc_RNA (1)...(19): siRNA sense strand
gcagaccuuccucccaaua

SEQ ID NO: 228861 - RNA, 19 nt, Homo sapiens
  misc_RNA (1)...(19): siRNA sense strand
gcucguguuugacuaugaa

SEQ ID NO: 228862 - RNA, 19 nt, Homo sapiens
  misc_RNA (1)...(19): siRNA sense strand
cgagagaguuucccuacgu

SEQ ID NO: 228863 - RNA, 19 nt, Homo sapiens
  misc_RNA (1)...(19): siRNA sense strand
caaagccucaggucauaaa

SEQ ID NO: 228864 - RNA, 19 nt, Homo sapiens
  misc_RNA (1)...(19): siRNA sense strand
ggaaaucacauccuacacu

SEQ ID NO: 228865 - RNA, 19 nt, Homo sapiens
  misc_RNA (1)...(19): siRNA sense strand
agacaaagaaggcaagguu

SEQ ID NO: 228866 - RNA, 19 nt, Homo sapiens
  misc_RNA (1)...(19): siRNA sense strand
uuacuaugaugaagaagga

SEQ ID NO: 228867 - RNA, 19 nt, Homo sapiens
  misc_RNA (1)...(19): siRNA sense strand
acccaagaaucuaucauuu

SEQ ID NO: 228868 - RNA, 19 nt, Homo sapiens
  misc_RNA (1)...(19): siRNA sense strand
gguucaagcugcugaccuu

SEQ ID NO: 228869 - RNA, 19 nt, Homo sapiens
  misc_RNA (1)...(19): siRNA sense strand
gaagaggaccaggacuuug

SEQ ID NO: 228870 - RNA, 19 nt, Homo sapiens
  misc_RNA (1)...(19): siRNA sense strand
gaugaugguggacaauuug

SEQ ID NO: 228871 - RNA, 19 nt, Homo sapiens
  misc_RNA (1)...(19): siRNA sense strand
agacaaagaccaggacuau

SEQ ID NO: 228872 - RNA, 19 nt, Homo sapiens
  misc_RNA (1)...(19): siRNA sense strand
ggucaaagagcccuuacug

SEQ ID NO: 228873 - RNA, 19 nt, Homo sapiens
  misc_RNA (1)...(19): siRNA sense strand
uccaaagccucaggucaua

SEQ ID NO: 228874 - RNA, 19 nt, Homo sapiens
  misc_RNA (1)...(19): siRNA sense strand
gaaccucgaacuauauucu

SEQ ID NO: 228875 - RNA, 19 nt, Homo sapiens
  misc_RNA (1)...(19): siRNA sense strand
gcagaauugcucacauuuc

SEQ ID NO: 228876 - RNA, 19 nt, Homo sapiens
  misc_RNA (1)...(19): siRNA sense strand
ucauggauaaccagaauaa

SEQ ID NO: 228877 - RNA, 19 nt, Homo sapiens
  misc_RNA (1)...(19): siRNA sense strand
guauacaccauauugaaug

SEQ ID NO: 228878 - RNA, 19 nt, Homo sapiens
  misc_RNA (1)...(19): siRNA sense strand
acgaugaugugaacaccua

SEQ ID NO: 228879 - RNA, 19 nt, Homo sapiens
  misc_RNA (1)...(19): siRNA sense strand
gacaaagaaggcaagguuu

SEQ ID NO: 228880 - RNA, 19 nt, Homo sapiens
  misc_RNA (1)...(19): siRNA sense strand
cagaucaaauccaacaaag

SEQ ID NO: 228881 - RNA, 19 nt, Homo sapiens
  misc_RNA (1)...(19): siRNA sense strand
caaauccaacaaagacaaa

SEQ ID NO: 228882 - RNA, 19 nt, Homo sapiens
  misc_RNA (1)...(19): siRNA sense strand
cagaauaaagaccaaguga

SEQ ID NO: 228883 - RNA, 19 nt, Homo sapiens
  misc_RNA (1)...(19): siRNA sense strand
caacgacccaacccaagaa

SEQ ID NO: 228884 - RNA, 19 nt, Homo sapiens
  misc_RNA (1)...(19): siRNA sense strand
ccaggagccagacacauuu

SEQ ID NO: 228885 - RNA, 19 nt, Homo sapiens
  misc_RNA (1)...(19): siRNA sense strand
ggacuccaccuacagaaag

SEQ ID NO: 228886 - RNA, 19 nt, Homo sapiens
  misc_RNA (1)...(19): siRNA sense strand
uaaccagaauaaagaccaa

SEQ ID NO: 228887 - RNA, 19 nt, Homo sapiens
  misc_RNA (1)...(19): siRNA sense strand
uggauaaccagaauaaaga

SEQ ID NO: 228888 - RNA, 19 nt, Homo sapiens
  misc_RNA (1)...(19): siRNA sense strand
ccagaaccucgaacuauau

SEQ ID NO: 228889 - RNA, 19 nt, Homo sapiens
  misc_RNA (1)...(19): siRNA sense strand
cgacaaaggacagccuauu

SEQ ID NO: 228890 - RNA, 19 nt, Homo sapiens
  misc_RNA (1)...(19): siRNA sense strand
ucaagcugcugaccuucaa

SEQ ID NO: 228891 - RNA, 19 nt, Homo sapiens
  misc_RNA (1)...(19): siRNA sense strand
uaaccgaucagaaugacaa

SEQ ID NO: 228892 - RNA, 19 nt, Homo sapiens
  misc_RNA (1)...(19): siRNA sense strand
aagagagacuggguuauuc

SEQ ID NO: 228893 - RNA, 19 nt, Homo sapiens
  misc_RNA (1)...(19): siRNA sense strand
cagauggugugauuacagu

SEQ ID NO: 228894 - RNA, 19 nt, Homo sapiens
  misc_RNA (1)...(19): siRNA sense strand
gaggcuguauacaccauau

SEQ ID NO: 228895 - RNA, 19 nt, Homo sapiens
  misc_RNA (1)...(19): siRNA sense strand
acaaugccgccaucgcuua

SEQ ID NO: 228896 - RNA, 19 nt, Homo sapiens
  misc_RNA (1)...(19): siRNA sense strand
cagaauugcucacauuucc

SEQ ID NO: 228897 - RNA, 19 nt, Homo sapiens
  misc_RNA (1)...(19): siRNA sense strand
ccuguuggugucuuuauua

SEQ ID NO: 228898 - RNA, 19 nt, Homo sapiens
  misc_RNA (1)...(19): siRNA sense strand
cauauugaaugaugauggu

SEQ ID NO: 228899 - RNA, 19 nt, Homo sapiens
  misc_RNA (1)...(19): siRNA sense strand
ugaagaaggaggcggagaa

SEQ ID NO: 228900 - RNA, 19 nt, Homo sapiens
  misc_RNA (1)...(19): siRNA sense strand
cgaagcaggauugcaaauu

SEQ ID NO: 228901 - RNA, 19 nt, Homo sapiens
  misc_RNA (1)...(19): siRNA sense strand
cccaauacaucucccuuca

SEQ ID NO: 228902 - RNA, 19 nt, Homo sapiens
  misc_RNA (1)...(19): siRNA sense strand
gcacguacacagcccuaau

SEQ ID NO: 228903 - RNA, 19 nt, Homo sapiens
  misc_RNA (1)...(19): siRNA sense strand
gauagaagcugcaaauaaa

SEQ ID NO: 228904 - RNA, 19 nt, Homo sapiens
  misc_RNA (1)...(19): siRNA sense strand
uaacugaugucaacgauaa

SEQ ID NO: 228905 - RNA, 19 nt, Homo sapiens
  misc_RNA (1)...(19): siRNA sense strand
gaaauggaguacaagauug

SEQ ID NO: 228906 - RNA, 19 nt, Homo sapiens
  misc_RNA (1)...(19): siRNA sense strand
gagagauacuucaauauug

SEQ ID NO: 228907 - RNA, 19 nt, Homo sapiens
  misc_RNA (1)...(19): siRNA sense strand
ucacucagcucuuuagauu

SEQ ID NO: 228908 - RNA, 19 nt, Homo sapiens
  misc_RNA (1)...(19): siRNA sense strand
uaggaaagcuucacucuga

SEQ ID NO: 228909 - RNA, 19 nt, Homo sapiens
  misc_RNA (1)...(19): siRNA sense strand
ggaugugacuccagaaauu

SEQ ID NO: 228910 - RNA, 19 nt, Homo sapiens
  misc_RNA (1)...(19): siRNA sense strand
ggauagaagcugcaaauaa

SEQ ID NO: 228911 - RNA, 19 nt, Homo sapiens
  misc_RNA (1)...(19): siRNA sense strand
ggagagauacuucaauauu

SEQ ID NO: 228912 - RNA, 19 nt, Homo sapiens
  misc_RNA (1)...(19): siRNA sense strand
gaaagagacaucagagaaa

SEQ ID NO: 228913 - RNA, 19 nt, Homo sapiens
  misc_RNA (1)...(19): siRNA sense strand
ugacauggcugcacugaga

SEQ ID NO: 228914 - RNA, 19 nt, Homo sapiens
  misc_RNA (1)...(19): siRNA sense strand
acacagacuuggagagaua

SEQ ID NO: 228915 - RNA, 19 nt, Homo sapiens
  misc_RNA (1)...(19): siRNA sense strand
gaagauaauuguggaagau

SEQ ID NO: 228916 - RNA, 19 nt, Homo sapiens
  misc_RNA (1)...(19): siRNA sense strand
caacggaugcaacaaauaa

SEQ ID NO: 228917 - RNA, 19 nt, Homo sapiens
  misc_RNA (1)...(19): siRNA sense strand
gaauaucauuggcacugua

SEQ ID NO: 228918 - RNA, 19 nt, Homo sapiens
  misc_RNA (1)...(19): siRNA sense strand
gaaggaaucauuacuauac

SEQ ID NO: 228919 - RNA, 19 nt, Homo sapiens
  misc_RNA (1)...(19): siRNA sense strand
caacgacaaugaacccaaa

SEQ ID NO: 228920 - RNA, 19 nt, Homo sapiens
  misc_RNA (1)...(19): siRNA sense strand
ucgaaggucuuaucaauau

SEQ ID NO: 228921 - RNA, 19 nt, Homo sapiens
  misc_RNA (1)...(19): siRNA sense strand
gaauccaucucaaguagga

SEQ ID NO: 228922 - RNA, 19 nt, Homo sapiens
  misc_RNA (1)...(19): siRNA sense strand
ggaacaaucaguuuacuau

SEQ ID NO: 228923 - RNA, 19 nt, Homo sapiens
  misc_RNA (1)...(19): siRNA sense strand
caacacagccucaauacug

SEQ ID NO: 228924 - RNA, 19 nt, Homo sapiens
  misc_RNA (1)...(19): siRNA sense strand
cgacaacugugaagauaau

SEQ ID NO: 228925 - RNA, 19 nt, Homo sapiens
  misc_RNA (1)...(19): siRNA sense strand
ggaaggaaucauuacuaua

SEQ ID NO: 228926 - RNA, 19 nt, Homo sapiens
  misc_RNA (1)...(19): siRNA sense strand
ugaaggaaauggcucaguu

SEQ ID NO: 228927 - RNA, 19 nt, Homo sapiens
  misc_RNA (1)...(19): siRNA sense strand
caacaaauaaccacaacuu

SEQ ID NO: 228928 - RNA, 19 nt, Homo sapiens
  misc_RNA (1)...(19): siRNA sense strand
gacaaaugcuauucacaau

SEQ ID NO: 228929 - RNA, 19 nt, Homo sapiens
  misc_RNA (1)...(19): siRNA sense strand
gaucaaagcccuauuucca

SEQ ID NO: 228930 - RNA, 19 nt, Homo sapiens
  misc_RNA (1)...(19): siRNA sense strand
ccaccucgcuuuccucgaa

SEQ ID NO: 228931 - RNA, 19 nt, Homo sapiens
  misc_RNA (1)...(19): siRNA sense strand
uaacaacggaugcaacaaa

SEQ ID NO: 228932 - RNA, 19 nt, Homo sapiens
  misc_RNA (1)...(19): siRNA sense strand
gaacuaugacuaccuaagu

SEQ ID NO: 228933 - RNA, 19 nt, Homo sapiens
  misc_RNA (1)...(19): siRNA sense strand
ucagaacuaugacuaccua

SEQ ID NO: 228934 - RNA, 19 nt, Homo sapiens
  misc_RNA (1)...(19): siRNA sense strand
cgacaaugaacccaaauuu

SEQ ID NO: 228935 - RNA, 19 nt, Homo sapiens
  misc_RNA (1)...(19): siRNA sense strand
gacaggaacaaucaguuua

SEQ ID NO: 228936 - RNA, 19 nt, Homo sapiens
  misc_RNA (1)...(19): siRNA sense strand
ccagaguggucuacaguau

SEQ ID NO: 228937 - RNA, 19 nt, Homo sapiens
  misc_RNA (1)...(19): siRNA sense strand
gguacucaauugacagaaa

SEQ ID NO: 228938 - RNA, 19 nt, Homo sapiens
  misc_RNA (1)...(19): siRNA sense strand
ccaauagcccugugaggua

SEQ ID NO: 228939 - RNA, 19 nt, Homo sapiens
  misc_RNA (1)...(19): siRNA sense strand
ccucgaaggucuuaucaau

SEQ ID NO: 228940 - RNA, 19 nt, Homo sapiens
  misc_RNA (1)...(19): siRNA sense strand
ggaggacugucaggaacua

SEQ ID NO: 228941 - RNA, 19 nt, Homo sapiens
  misc_RNA (1)...(19): siRNA sense strand
uuggagagauacuucaaua

SEQ ID NO: 228942 - RNA, 19 nt, Homo sapiens
  misc_RNA (1)...(19): siRNA sense strand
ucaaagcccuauuuccaau

SEQ ID NO: 228943 - RNA, 19 nt, Homo sapiens
  misc_RNA (1)...(19): siRNA sense strand
ggacuggccaagagaguuu

SEQ ID NO: 228944 - RNA, 19 nt, Homo sapiens
  misc_RNA (1)...(19): siRNA sense strand
agacaacacagccucaaua

SEQ ID NO: 228945 - RNA, 19 nt, Homo sapiens
  misc_RNA (1)...(19): siRNA sense strand
cagaauccaucucaaguag

SEQ ID NO: 228946 - RNA, 19 nt, Homo sapiens
  misc_RNA (1)...(19): siRNA sense strand
ucacaacugccaagucuuu

SEQ ID NO: 228947 - RNA, 19 nt, Homo sapiens
  misc_RNA (1)...(19): siRNA sense strand
ugaaauggaguacaagauu

SEQ ID NO: 228948 - RNA, 19 nt, Homo sapiens
  misc_RNA (1)...(19): siRNA sense strand
ggcaggaguucccgaaaug

SEQ ID NO: 228949 - RNA, 19 nt, Homo sapiens
  misc_RNA (1)...(19): siRNA sense strand
caucacaacugccaagucu

SEQ ID NO: 228950 - RNA, 19 nt, Homo sapiens
  misc_RNA (1)...(19): siRNA sense strand
cacgacaacugugaagaua

SEQ ID NO: 228951 - RNA, 19 nt, Homo sapiens
  misc_RNA (1)...(19): siRNA sense strand
agaaggagcuggauuuuga

SEQ ID NO: 228952 - RNA, 19 nt, Homo sapiens
  misc_RNA (1)...(19): siRNA sense strand
caaagaaacccaggaagga

SEQ ID NO: 228953 - RNA, 19 nt, Homo sapiens
  misc_RNA (1)...(19): siRNA sense strand
uaacgucccagagucauua

SEQ ID NO: 228954 - RNA, 19 nt, Homo sapiens
  misc_RNA (1)...(19): siRNA sense strand
ggugaugguuugggcauuu

SEQ ID NO: 228955 - RNA, 19 nt, Homo sapiens
  misc_RNA (1)...(19): siRNA sense strand
gaaggaaauggcucaguug

SEQ ID NO: 228956 - RNA, 19 nt, Homo sapiens
  misc_RNA (1)...(19): siRNA sense strand
ggaauuuauuugggaaaga

SEQ ID NO: 228957 - RNA, 19 nt, Homo sapiens
  misc_RNA (1)...(19): siRNA sense strand
gacccagauucuuccaaua

SEQ ID NO: 228958 - RNA, 19 nt, Homo sapiens
  misc_RNA (1)...(19): siRNA sense strand
ucacucugauguugauaaa

SEQ ID NO: 228959 - RNA, 19 nt, Homo sapiens
  misc_RNA (1)...(19): siRNA sense strand
ucagugcuguggauaaaga

SEQ ID NO: 228960 - RNA, 19 nt, Homo sapiens
  misc_RNA (1)...(19): siRNA sense strand
uggauaggcucaccaacaa

SEQ ID NO: 228961 - RNA, 19 nt, Homo sapiens
  misc_RNA (1)...(19): siRNA sense strand
ccagaucaaagcccuauuu

SEQ ID NO: 228962 - RNA, 19 nt, Homo sapiens
  misc_RNA (1)...(19): siRNA sense strand
gaaaaucagugcuguggau

SEQ ID NO: 228963 - RNA, 19 nt, Homo sapiens
  misc_RNA (1)...(19): siRNA sense strand
ucacaguccuugcaaugga

SEQ ID NO: 228964 - RNA, 19 nt, Homo sapiens
  misc_RNA (1)...(19): siRNA sense strand
cgaaggucuuaucaauaua

SEQ ID NO: 228965 - RNA, 19 nt, Homo sapiens
  misc_RNA (1)...(19): siRNA sense strand
gagcuaaugcugaaaugga

SEQ ID NO: 228966 - RNA, 19 nt, Homo sapiens
  misc_RNA (1)...(19): siRNA sense strand
gauaauuguggaagaugua

SEQ ID NO: 228967 - RNA, 19 nt, Homo sapiens
  misc_RNA (1)...(19): siRNA sense strand
gugaggagcaggccuacua

SEQ ID NO: 228968 - RNA, 19 nt, Homo sapiens
  misc_RNA (1)...(19): siRNA sense strand
ggaggacacggaagcguuu

SEQ ID NO: 228969 - RNA, 19 nt, Homo sapiens
  misc_RNA (1)...(19): siRNA sense strand
agaaagagacaucagagaa

SEQ ID NO: 228970 - RNA, 19 nt, Homo sapiens
  misc_RNA (1)...(19): siRNA sense strand
ugacagaaacacagacuug

SEQ ID NO: 228971 - RNA, 19 nt, Homo sapiens
  misc_RNA (1)...(19): siRNA sense strand
ggaccucagugguacaagu

SEQ ID NO: 228972 - RNA, 19 nt, Homo sapiens
  misc_RNA (1)...(19): siRNA sense strand
ggauaucaacgacaaugaa

SEQ ID NO: 228973 - RNA, 19 nt, Homo sapiens
  misc_RNA (1)...(19): siRNA sense strand
ucaguuguggccagaauua

SEQ ID NO: 228974 - RNA, 19 nt, Homo sapiens
  misc_RNA (1)...(19): siRNA sense strand
gcagacauaugcuuuugaa

SEQ ID NO: 228975 - RNA, 19 nt, Homo sapiens
  misc_RNA (1)...(19): siRNA sense strand
aaucagugcuguggauaaa

SEQ ID NO: 228976 - RNA, 19 nt, Homo sapiens
  misc_RNA (1)...(19): siRNA sense strand
ccagaauccaucucaagua

SEQ ID NO: 228977 - RNA, 19 nt, Homo sapiens
  misc_RNA (1)...(19): siRNA sense strand
gguguggaaucaguucuuu

SEQ ID NO: 228978 - RNA, 19 nt, Homo sapiens
  misc_RNA (1)...(19): siRNA sense strand
caauauugaugccaacagu

SEQ ID NO: 228979 - RNA, 19 nt, Homo sapiens
  misc_RNA (1)...(19): siRNA sense strand
gcagcuggguguggaauca

SEQ ID NO: 228980 - RNA, 19 nt, Homo sapiens
  misc_RNA (1)...(19): siRNA sense strand
ugaagauaauuguggaaga

SEQ ID NO: 228981 - RNA, 19 nt, Homo sapiens
  misc_RNA (1)...(19): siRNA sense strand
aaaguggaguucugccauu

SEQ ID NO: 228982 - RNA, 19 nt, Homo sapiens
  misc_RNA (1)...(19): siRNA sense strand
gcaaguuccauuuucauua

SEQ ID NO: 228983 - RNA, 19 nt, Homo sapiens
  misc_RNA (1)...(19): siRNA sense strand
agacaaaugcuauucacaa

SEQ ID NO: 228984 - RNA, 19 nt, Homo sapiens
  misc_RNA (1)...(19): siRNA sense strand
ggaauaucauuggcacugu

SEQ ID NO: 228985 - RNA, 19 nt, Homo sapiens
  misc_RNA (1)...(19): siRNA sense strand
aggaaggaaucauuacuau

SEQ ID NO: 228986 - RNA, 19 nt, Homo sapiens
  misc_RNA (1)...(19): siRNA sense strand
gacccuaacugaugucaac

SEQ ID NO: 228987 - RNA, 19 nt, Homo sapiens
  misc_RNA (1)...(19): siRNA sense strand
agaguggucuacaguauuc

SEQ ID NO: 228988 - RNA, 19 nt, Homo sapiens
  misc_RNA (1)...(19): siRNA sense strand
aauuaaagcugcugaugca

SEQ ID NO: 228989 - RNA, 19 nt, Homo sapiens
  misc_RNA (1)...(19): siRNA sense strand
ggaaucauuacuauacaga

SEQ ID NO: 228990 - RNA, 19 nt, Homo sapiens
  misc_RNA (1)...(19): siRNA sense strand
agacugcccuuccaaacau

SEQ ID NO: 228991 - RNA, 19 nt, Homo sapiens
  misc_RNA (1)...(19): siRNA sense strand
gcaaugcagaggccuaugu

SEQ ID NO: 228992 - RNA, 19 nt, Homo sapiens
  misc_RNA (1)...(19): siRNA sense strand
ggaucucccucacuuagca

SEQ ID NO: 228993 - RNA, 19 nt, Homo sapiens
  misc_RNA (1)...(19): siRNA sense strand
gaacaaucaguuuacuauc

SEQ ID NO: 228994 - RNA, 19 nt, Homo sapiens
  misc_RNA (1)...(19): siRNA sense strand
caggaaggaaucauuacua

SEQ ID NO: 228995 - RNA, 19 nt, Homo sapiens
  misc_RNA (1)...(19): siRNA sense strand
gauaauccaccucgcuuuc

SEQ ID NO: 228996 - RNA, 19 nt, Homo sapiens
  misc_RNA (1)...(19): siRNA sense strand
caucaaauacaucuuguca

SEQ ID NO: 228997 - RNA, 19 nt, Homo sapiens
  misc_RNA (1)...(19): siRNA sense strand
ugacaaagaaacccaggaa

SEQ ID NO: 228998 - RNA, 19 nt, Homo sapiens
  misc_RNA (1)...(19): siRNA sense strand
cgaagaaagagacaucaga

SEQ ID NO: 228999 - RNA, 19 nt, Homo sapiens
  misc_RNA (1)...(19): siRNA sense strand
ugacccagauucuuccaau

SEQ ID NO: 229000 - RNA, 19 nt, Homo sapiens
  misc_RNA (1)...(19): siRNA sense strand
ucuuugugcuggaggaaua

SEQ ID NO: 229001 - RNA, 19 nt, Homo sapiens
  misc_RNA (1)...(19): siRNA sense strand
cauacucgccugugucuug

SEQ ID NO: 229002 - RNA, 19 nt, Homo sapiens
  misc_RNA (1)...(19): siRNA sense strand
agacaggaacaaucaguuu

SEQ ID NO: 229003 - RNA, 19 nt, Homo sapiens
  misc_RNA (1)...(19): siRNA sense strand
gauagaagcugcaaauaaa

SEQ ID NO: 229004 - RNA, 19 nt, Homo sapiens
  misc_RNA (1)...(19): siRNA sense strand
uaacugaugucaacgauaa

SEQ ID NO: 229005 - RNA, 19 nt, Homo sapiens
  misc_RNA (1)...(19): siRNA sense strand
gaaauggaguacaagauug

SEQ ID NO: 229006 - RNA, 19 nt, Homo sapiens
  misc_RNA (1)...(19): siRNA sense strand
gagagauacuucaauauug

SEQ ID NO: 229007 - RNA, 19 nt, Homo sapiens
  misc_RNA (1)...(19): siRNA sense strand
ucacucagcucuuuagauu

SEQ ID NO: 229008 - RNA, 19 nt, Homo sapiens
  misc_RNA (1)...(19): siRNA sense strand
uaggaaagcuucacucuga

SEQ ID NO: 229009 - RNA, 19 nt, Homo sapiens
  misc_RNA (1)...(19): siRNA sense strand
ggaugugacuccagaaauu

SEQ ID NO: 229010 - RNA, 19 nt, Homo sapiens
  misc_RNA (1)...(19): siRNA sense strand
ggauagaagcugcaaauaa

SEQ ID NO: 229011 - RNA, 19 nt, Homo sapiens
  misc_RNA (1)...(19): siRNA sense strand
ggagagauacuucaauauu

SEQ ID NO: 229012 - RNA, 19 nt, Homo sapiens
  misc_RNA (1)...(19): siRNA sense strand
gaaagagacaucagagaaa

SEQ ID NO: 229013 - RNA, 19 nt, Homo sapiens
  misc_RNA (1)...(19): siRNA sense strand
ugacauggcugcacugaga

SEQ ID NO: 229014 - RNA, 19 nt, Homo sapiens
  misc_RNA (1)...(19): siRNA sense strand
acacagacuuggagagaua

SEQ ID NO: 229015 - RNA, 19 nt, Homo sapiens
  misc_RNA (1)...(19): siRNA sense strand
gaagauaauuguggaagau

SEQ ID NO: 229016 - RNA, 19 nt, Homo sapiens
  misc_RNA (1)...(19): siRNA sense strand
caacggaugcaacaaauaa

SEQ ID NO: 229017 - RNA, 19 nt, Homo sapiens
  misc_RNA (1)...(19): siRNA sense strand
gaauaucauuggcacugua

SEQ ID NO: 229018 - RNA, 19 nt, Homo sapiens
  misc_RNA (1)...(19): siRNA sense strand
gaaggaaucauuacuauac

SEQ ID NO: 229019 - RNA, 19 nt, Homo sapiens
  misc_RNA (1)...(19): siRNA sense strand
caacgacaaugaacccaaa

SEQ ID NO: 229020 - RNA, 19 nt, Homo sapiens
  misc_RNA (1)...(19): siRNA sense strand
ucgaaggucuuaucaauau

SEQ ID NO: 229021 - RNA, 19 nt, Homo sapiens
  misc_RNA (1)...(19): siRNA sense strand
gaauccaucucaaguagga

SEQ ID NO: 229022 - RNA, 19 nt, Homo sapiens
  misc_RNA (1)...(19): siRNA sense strand
ggaacaaucaguuuacuau

SEQ ID NO: 229023 - RNA, 19 nt, Homo sapiens
  misc_RNA (1)...(19): siRNA sense strand
caacacagccucaauacug

SEQ ID NO: 229024 - RNA, 19 nt, Homo sapiens
  misc_RNA (1)...(19): siRNA sense strand
cgacaacugugaagauaau

SEQ ID NO: 229025 - RNA, 19 nt, Homo sapiens
  misc_RNA (1)...(19): siRNA sense strand
ggaaggaaucauuacuaua

SEQ ID NO: 229026 - RNA, 19 nt, Homo sapiens
  misc_RNA (1)...(19): siRNA sense strand
ugaaggaaauggcucaguu

SEQ ID NO: 229027 - RNA, 19 nt, Homo sapiens
  misc_RNA (1)...(19): siRNA sense strand
caacaaauaaccacaacuu

SEQ ID NO: 229028 - RNA, 19 nt, Homo sapiens
  misc_RNA (1)...(19): siRNA sense strand
gacaaaugcuauucacaau

SEQ ID NO: 229029 - RNA, 19 nt, Homo sapiens
  misc_RNA (1)...(19): siRNA sense strand
gaucaaagcccuauuucca

SEQ ID NO: 229030 - RNA, 19 nt, Homo sapiens
  misc_RNA (1)...(19): siRNA sense strand
ccaccucgcuuuccucgaa

SEQ ID NO: 229031 - RNA, 19 nt, Homo sapiens
  misc_RNA (1)...(19): siRNA sense strand
uaacaacggaugcaacaaa

SEQ ID NO: 229032 - RNA, 19 nt, Homo sapiens
  misc_RNA (1)...(19): siRNA sense strand
gaacuaugacuaccuaagu

SEQ ID NO: 229033 - RNA, 19 nt, Homo sapiens
  misc_RNA (1)...(19): siRNA sense strand
ucagaacuaugacuaccua

SEQ ID NO: 229034 - RNA, 19 nt, Homo sapiens
  misc_RNA (1)...(19): siRNA sense strand
cgacaaugaacccaaauuu

SEQ ID NO: 229035 - RNA, 19 nt, Homo sapiens
  misc_RNA (1)...(19): siRNA sense strand
gacaggaacaaucaguuua

SEQ ID NO: 229036 - RNA, 19 nt, Homo sapiens
  misc_RNA (1)...(19): siRNA sense strand
ccagaguggucuacaguau

SEQ ID NO: 229037 - RNA, 19 nt, Homo sapiens
  misc_RNA (1)...(19): siRNA sense strand
gguacucaauugacagaaa

SEQ ID NO: 229038 - RNA, 19 nt, Homo sapiens
  misc_RNA (1)...(19): siRNA sense strand
ccaauagcccugugaggua

SEQ ID NO: 229039 - RNA, 19 nt, Homo sapiens
  misc_RNA (1)...(19): siRNA sense strand
ccucgaaggucuuaucaau

SEQ ID NO: 229040 - RNA, 19 nt, Homo sapiens
  misc_RNA (1)...(19): siRNA sense strand
ggaggacugucaggaacua

SEQ ID NO: 229041 - RNA, 19 nt, Homo sapiens
  misc_RNA (1)...(19): siRNA sense strand
uuggagagauacuucaaua

SEQ ID NO: 229042 - RNA, 19 nt, Homo sapiens
  misc_RNA (1)...(19): siRNA sense strand
ucaaagcccuauuuccaau

SEQ ID NO: 229043 - RNA, 19 nt, Homo sapiens
  misc_RNA (1)...(19): siRNA sense strand
ggacuggccaagagaguuu

SEQ ID NO: 229044 - RNA, 19 nt, Homo sapiens
  misc_RNA (1)...(19): siRNA sense strand
agacaacacagccucaaua

SEQ ID NO: 229045 - RNA, 19 nt, Homo sapiens
  misc_RNA (1)...(19): siRNA sense strand
cagaauccaucucaaguag

SEQ ID NO: 229046 - RNA, 19 nt, Homo sapiens
  misc_RNA (1)...(19): siRNA sense strand
ucacaacugccaagucuuu

SEQ ID NO: 229047 - RNA, 19 nt, Homo sapiens
  misc_RNA (1)...(19): siRNA sense strand
ugaaauggaguacaagauu

SEQ ID NO: 229048 - RNA, 19 nt, Homo sapiens
  misc_RNA (1)...(19): siRNA sense strand
ggcaggaguucccgaaaug

SEQ ID NO: 229049 - RNA, 19 nt, Homo sapiens
  misc_RNA (1)...(19): siRNA sense strand
caucacaacugccaagucu

SEQ ID NO: 229050 - RNA, 19 nt, Homo sapiens
  misc_RNA (1)...(19): siRNA sense strand
cacgacaacugugaagaua

SEQ ID NO: 229051 - RNA, 19 nt, Homo sapiens
  misc_RNA (1)...(19): siRNA sense strand
agaaggagcuggauuuuga

SEQ ID NO: 229052 - RNA, 19 nt, Homo sapiens
  misc_RNA (1)...(19): siRNA sense strand
caaagaaacccaggaagga

SEQ ID NO: 229053 - RNA, 19 nt, Homo sapiens
  misc_RNA (1)...(19): siRNA sense strand
uaacgucccagagucauua

SEQ ID NO: 229054 - RNA, 19 nt, Homo sapiens
  misc_RNA (1)...(19): siRNA sense strand
ggugaugguuugggcauuu

SEQ ID NO: 229055 - RNA, 19 nt, Homo sapiens
  misc_RNA (1)...(19): siRNA sense strand
gaaggaaauggcucaguug

SEQ ID NO: 229056 - RNA, 19 nt, Homo sapiens
  misc_RNA (1)...(19): siRNA sense strand
ggaauuuauuugggaaaga

SEQ ID NO: 229057 - RNA, 19 nt, Homo sapiens
  misc_RNA (1)...(19): siRNA sense strand
gacccagauucuuccaaua

SEQ ID NO: 229058 - RNA, 19 nt, Homo sapiens
  misc_RNA (1)...(19): siRNA sense strand
ucacucugauguugauaaa

SEQ ID NO: 229059 - RNA, 19 nt, Homo sapiens
  misc_RNA (1)...(19): siRNA sense strand
ucagugcuguggauaaaga

SEQ ID NO: 229060 - RNA, 19 nt, Homo sapiens
  misc_RNA (1)...(19): siRNA sense strand
uggauaggcucaccaacaa

SEQ ID NO: 229061 - RNA, 19 nt, Homo sapiens
  misc_RNA (1)...(19): siRNA sense strand
ccagaucaaagcccuauuu

SEQ ID NO: 229062 - RNA, 19 nt, Homo sapiens
  misc_RNA (1)...(19): siRNA sense strand
gaaaaucagugcuguggau

SEQ ID NO: 229063 - RNA, 19 nt, Homo sapiens
  misc_RNA (1)...(19): siRNA sense strand
ucacaguccuugcaaugga

SEQ ID NO: 229064 - RNA, 19 nt, Homo sapiens
  misc_RNA (1)...(19): siRNA sense strand
cgaaggucuuaucaauaua

SEQ ID NO: 229065 - RNA, 19 nt, Homo sapiens
  misc_RNA (1)...(19): siRNA sense strand
gagcuaaugcugaaaugga

SEQ ID NO: 229066 - RNA, 19 nt, Homo sapiens
  misc_RNA (1)...(19): siRNA sense strand
gauaauuguggaagaugua

SEQ ID NO: 229067 - RNA, 19 nt, Homo sapiens
  misc_RNA (1)...(19): siRNA sense strand
gugaggagcaggccuacua

SEQ ID NO: 229068 - RNA, 19 nt, Homo sapiens
  misc_RNA (1)...(19): siRNA sense strand
ggaggacacggaagcguuu

SEQ ID NO: 229069 - RNA, 19 nt, Homo sapiens
  misc_RNA (1)...(19): siRNA sense strand
agaaagagacaucagagaa

SEQ ID NO: 229070 - RNA, 19 nt, Homo sapiens
  misc_RNA (1)...(19): siRNA sense strand
ugacagaaacacagacuug

SEQ ID NO: 229071 - RNA, 19 nt, Homo sapiens
  misc_RNA (1)...(19): siRNA sense strand
ggaccucagugguacaagu

SEQ ID NO: 229072 - RNA, 19 nt, Homo sapiens
  misc_RNA (1)...(19): siRNA sense strand
ggauaucaacgacaaugaa

SEQ ID NO: 229073 - RNA, 19 nt, Homo sapiens
  misc_RNA (1)...(19): siRNA sense strand
ucaguuguggccagaauua

SEQ ID NO: 229074 - RNA, 19 nt, Homo sapiens
  misc_RNA (1)...(19): siRNA sense strand
gcagacauaugcuuuugaa

SEQ ID NO: 229075 - RNA, 19 nt, Homo sapiens
  misc_RNA (1)...(19): siRNA sense strand
aaucagugcuguggauaaa

SEQ ID NO: 229076 - RNA, 19 nt, Homo sapiens
  misc_RNA (1)...(19): siRNA sense strand
ccagaauccaucucaagua

SEQ ID NO: 229077 - RNA, 19 nt, Homo sapiens
  misc_RNA (1)...(19): siRNA sense strand
gguguggaaucaguucuuu

SEQ ID NO: 229078 - RNA, 19 nt, Homo sapiens
  misc_RNA (1)...(19): siRNA sense strand
caauauugaugccaacagu

SEQ ID NO: 229079 - RNA, 19 nt, Homo sapiens
  misc_RNA (1)...(19): siRNA sense strand
gcagcuggguguggaauca

SEQ ID NO: 229080 - RNA, 19 nt, Homo sapiens
  misc_RNA (1)...(19): siRNA sense strand
ugaagauaauuguggaaga

SEQ ID NO: 229081 - RNA, 19 nt, Homo sapiens
  misc_RNA (1)...(19): siRNA sense strand
aaaguggaguucugccauu

SEQ ID NO: 229082 - RNA, 19 nt, Homo sapiens
  misc_RNA (1)...(19): siRNA sense strand
gcaaguuccauuuucauua

SEQ ID NO: 229083 - RNA, 19 nt, Homo sapiens
  misc_RNA (1)...(19): siRNA sense strand
agacaaaugcuauucacaa

SEQ ID NO: 229084 - RNA, 19 nt, Homo sapiens
  misc_RNA (1)...(19): siRNA sense strand
ggaauaucauuggcacugu

SEQ ID NO: 229085 - RNA, 19 nt, Homo sapiens
  misc_RNA (1)...(19): siRNA sense strand
aggaaggaaucauuacuau

SEQ ID NO: 229086 - RNA, 19 nt, Homo sapiens
  misc_RNA (1)...(19): siRNA sense strand
gacccuaacugaugucaac

SEQ ID NO: 229087 - RNA, 19 nt, Homo sapiens
  misc_RNA (1)...(19): siRNA sense strand
agaguggucuacaguauuc

SEQ ID NO: 229088 - RNA, 19 nt, Homo sapiens
  misc_RNA (1)...(19): siRNA sense strand
aauuaaagcugcugaugca

SEQ ID NO: 229089 - RNA, 19 nt, Homo sapiens
  misc_RNA (1)...(19): siRNA sense strand
ggaaucauuacuauacaga

SEQ ID NO: 229090 - RNA, 19 nt, Homo sapiens
  misc_RNA (1)...(19): siRNA sense strand
agacugcccuuccaaacau

SEQ ID NO: 229091 - RNA, 19 nt, Homo sapiens
  misc_RNA (1)...(19): siRNA sense strand
gcaaugcagaggccuaugu

SEQ ID NO: 229092 - RNA, 19 nt, Homo sapiens
  misc_RNA (1)...(19): siRNA sense strand
ggaucucccucacuuagca

SEQ ID NO: 229093 - RNA, 19 nt, Homo sapiens
  misc_RNA (1)...(19): siRNA sense strand
gaacaaucaguuuacuauc

SEQ ID NO: 229094 - RNA, 19 nt, Homo sapiens
  misc_RNA (1)...(19): siRNA sense strand
caggaaggaaucauuacua

SEQ ID NO: 229095 - RNA, 19 nt, Homo sapiens
  misc_RNA (1)...(19): siRNA sense strand
gauaauccaccucgcuuuc

SEQ ID NO: 229096 - RNA, 19 nt, Homo sapiens
  misc_RNA (1)...(19): siRNA sense strand
caucaaauacaucuuguca

SEQ ID NO: 229097 - RNA, 19 nt, Homo sapiens
  misc_RNA (1)...(19): siRNA sense strand
ugacaaagaaacccaggaa

SEQ ID NO: 229098 - RNA, 19 nt, Homo sapiens
  misc_RNA (1)...(19): siRNA sense strand
cgaagaaagagacaucaga

SEQ ID NO: 229099 - RNA, 19 nt, Homo sapiens
  misc_RNA (1)...(19): siRNA sense strand
ugacccagauucuuccaau

SEQ ID NO: 229100 - RNA, 19 nt, Homo sapiens
  misc_RNA (1)...(19): siRNA sense strand
ucuuugugcuggaggaaua

SEQ ID NO: 229101 - RNA, 19 nt, Homo sapiens
  misc_RNA (1)...(19): siRNA sense strand
cauacucgccugugucuug

SEQ ID NO: 229102 - RNA, 19 nt, Homo sapiens
  misc_RNA (1)...(19): siRNA sense strand
agacaggaacaaucaguuu

SEQ ID NO: 229103 - RNA, 19 nt, Homo sapiens
  misc_RNA (1)...(19): siRNA sense strand
gagacaacgucauccauua

SEQ ID NO: 229104 - RNA, 19 nt, Homo sapiens
  misc_RNA (1)...(19): siRNA sense strand
ggacagcuacuuuacaaua

SEQ ID NO: 229105 - RNA, 19 nt, Homo sapiens
  misc_RNA (1)...(19): siRNA sense strand
gcaauaaggagccuagaua

SEQ ID NO: 229106 - RNA, 19 nt, Homo sapiens
  misc_RNA (1)...(19): siRNA sense strand
gggcaacaauucuccuuua

SEQ ID NO: 229107 - RNA, 19 nt, Homo sapiens
  misc_RNA (1)...(19): siRNA sense strand
gaagauaacacagacauaa

SEQ ID NO: 229108 - RNA, 19 nt, Homo sapiens
  misc_RNA (1)...(19): siRNA sense strand
ggacagagaagucaaagaa

SEQ ID NO: 229109 - RNA, 19 nt, Homo sapiens
  misc_RNA (1)...(19): siRNA sense strand
caagacagguguuauuaga

SEQ ID NO: 229110 - RNA, 19 nt, Homo sapiens
  misc_RNA (1)...(19): siRNA sense strand
caacaauucuccuuuagau

SEQ ID NO: 229111 - RNA, 19 nt, Homo sapiens
  misc_RNA (1)...(19): siRNA sense strand
gaacaacaauagucaacau

SEQ ID NO: 229112 - RNA, 19 nt, Homo sapiens
  misc_RNA (1)...(19): siRNA sense strand
gcaccauccugucuuguaa

SEQ ID NO: 229113 - RNA, 19 nt, Homo sapiens
  misc_RNA (1)...(19): siRNA sense strand
gcaguauaauuucuccaua

SEQ ID NO: 229114 - RNA, 19 nt, Homo sapiens
  misc_RNA (1)...(19): siRNA sense strand
gcacaaacacaaugacuau

SEQ ID NO: 229115 - RNA, 19 nt, Homo sapiens
  misc_RNA (1)...(19): siRNA sense strand
gagagggcacugugaaaua

SEQ ID NO: 229116 - RNA, 19 nt, Homo sapiens
  misc_RNA (1)...(19): siRNA sense strand
gaggacagcuuggaggauu

SEQ ID NO: 229117 - RNA, 19 nt, Homo sapiens
  misc_RNA (1)...(19): siRNA sense strand
ggacagauaauucagauag

SEQ ID NO: 229118 - RNA, 19 nt, Homo sapiens
  misc_RNA (1)...(19): siRNA sense strand
ggacaaccuuauuucucua

SEQ ID NO: 229119 - RNA, 19 nt, Homo sapiens
  misc_RNA (1)...(19): siRNA sense strand
gaccacccauggaagauaa

SEQ ID NO: 229120 - RNA, 19 nt, Homo sapiens
  misc_RNA (1)...(19): siRNA sense strand
gaccuuauguugcuacugu

SEQ ID NO: 229121 - RNA, 19 nt, Homo sapiens
  misc_RNA (1)...(19): siRNA sense strand
ccauggagguuuaugaaga

SEQ ID NO: 229122 - RNA, 19 nt, Homo sapiens
  misc_RNA (1)...(19): siRNA sense strand
aaagcuccauuccgacuua

SEQ ID NO: 229123 - RNA, 19 nt, Homo sapiens
  misc_RNA (1)...(19): siRNA sense strand
ggacauucaugcaauaagg

SEQ ID NO: 229124 - RNA, 19 nt, Homo sapiens
  misc_RNA (1)...(19): siRNA sense strand
ggacaacggucacauuucc

SEQ ID NO: 229125 - RNA, 19 nt, Homo sapiens
  misc_RNA (1)...(19): siRNA sense strand
ucaaagugcaggauauuaa

SEQ ID NO: 229126 - RNA, 19 nt, Homo sapiens
  misc_RNA (1)...(19): siRNA sense strand
gcaagccgcucuacaccau

SEQ ID NO: 229127 - RNA, 19 nt, Homo sapiens
  misc_RNA (1)...(19): siRNA sense strand
caucaaaggcuacaggaaa

SEQ ID NO: 229128 - RNA, 19 nt, Homo sapiens
  misc_RNA (1)...(19): siRNA sense strand
uaagggauuucauucauca

SEQ ID NO: 229129 - RNA, 19 nt, Homo sapiens
  misc_RNA (1)...(19): siRNA sense strand
ucacauuuccaacguguua

SEQ ID NO: 229130 - RNA, 19 nt, Homo sapiens
  misc_RNA (1)...(19): siRNA sense strand
guuagguacuucauagauu

SEQ ID NO: 229131 - RNA, 19 nt, Homo sapiens
  misc_RNA (1)...(19): siRNA sense strand
acacagacauaagggauuu

SEQ ID NO: 229132 - RNA, 19 nt, Homo sapiens
  misc_RNA (1)...(19): siRNA sense strand
gggacaaccuuauuucucu

SEQ ID NO: 229133 - RNA, 19 nt, Homo sapiens
  misc_RNA (1)...(19): siRNA sense strand
gcgaagaagagaguuauaa

SEQ ID NO: 229134 - RNA, 19 nt, Homo sapiens
  misc_RNA (1)...(19): siRNA sense strand
gaaggcauacacuuucaaa

SEQ ID NO: 229135 - RNA, 19 nt, Homo sapiens
  misc_RNA (1)...(19): siRNA sense strand
caaccuuauuucucuauug

SEQ ID NO: 229136 - RNA, 19 nt, Homo sapiens
  misc_RNA (1)...(19): siRNA sense strand
uaaggagccuagauagaga

SEQ ID NO: 229137 - RNA, 19 nt, Homo sapiens
  misc_RNA (1)...(19): siRNA sense strand
cauaagggauuucauucau

SEQ ID NO: 229138 - RNA, 19 nt, Homo sapiens
  misc_RNA (1)...(19): siRNA sense strand
guucgugacuucagaaaca

SEQ ID NO: 229139 - RNA, 19 nt, Homo sapiens
  misc_RNA (1)...(19): siRNA sense strand
gcuguuagguacuucauag

SEQ ID NO: 229140 - RNA, 19 nt, Homo sapiens
  misc_RNA (1)...(19): siRNA sense strand
ggacauagaaaccagaaag

SEQ ID NO: 229141 - RNA, 19 nt, Homo sapiens
  misc_RNA (1)...(19): siRNA sense strand
acgauucacuggccacaua

SEQ ID NO: 229142 - RNA, 19 nt, Homo sapiens
  misc_RNA (1)...(19): siRNA sense strand
ggaagauaacacagacaua

SEQ ID NO: 229143 - RNA, 19 nt, Homo sapiens
  misc_RNA (1)...(19): siRNA sense strand
gaccagcaaagucaauaua

SEQ ID NO: 229144 - RNA, 19 nt, Homo sapiens
  misc_RNA (1)...(19): siRNA sense strand
gaaauuuguuugacaucgu

SEQ ID NO: 229145 - RNA, 19 nt, Homo sapiens
  misc_RNA (1)...(19): siRNA sense strand
agacauguuuggcgaagaa

SEQ ID NO: 229146 - RNA, 19 nt, Homo sapiens
  misc_RNA (1)...(19): siRNA sense strand
gcaggcagcaagaguugua

SEQ ID NO: 229147 - RNA, 19 nt, Homo sapiens
  misc_RNA (1)...(19): siRNA sense strand
gaaccaucgccacuaauga

SEQ ID NO: 229148 - RNA, 19 nt, Homo sapiens
  misc_RNA (1)...(19): siRNA sense strand
acagagaagucaaagaaca

SEQ ID NO: 229149 - RNA, 19 nt, Homo sapiens
  misc_RNA (1)...(19): siRNA sense strand
ccauuacgaugaugaagga

SEQ ID NO: 229150 - RNA, 19 nt, Homo sapiens
  misc_RNA (1)...(19): siRNA sense strand
gaaggaaccaucgccacua

SEQ ID NO: 229151 - RNA, 19 nt, Homo sapiens
  misc_RNA (1)...(19): siRNA sense strand
aagagggagucaucaaauu

SEQ ID NO: 229152 - RNA, 19 nt, Homo sapiens
  misc_RNA (1)...(19): siRNA sense strand
gagccuagauagagaagag

SEQ ID NO: 229153 - RNA, 19 nt, Homo sapiens
  misc_RNA (1)...(19): siRNA sense strand
uuuccucccuguuguaaua

SEQ ID NO: 229154 - RNA, 19 nt, Homo sapiens
  misc_RNA (1)...(19): siRNA sense strand
gcagaugacccgaccuaug

SEQ ID NO: 229155 - RNA, 19 nt, Homo sapiens
  misc_RNA (1)...(19): siRNA sense strand
cagagucguuuacagcauu

SEQ ID NO: 229156 - RNA, 19 nt, Homo sapiens
  misc_RNA (1)...(19): siRNA sense strand
ggccacauaugccuacgaa

SEQ ID NO: 229157 - RNA, 19 nt, Homo sapiens
  misc_RNA (1)...(19): siRNA sense strand
agacauaagggauuucauu

SEQ ID NO: 229158 - RNA, 19 nt, Homo sapiens
  misc_RNA (1)...(19): siRNA sense strand
gcaacaauucuccuuuaga

SEQ ID NO: 229159 - RNA, 19 nt, Homo sapiens
  misc_RNA (1)...(19): siRNA sense strand
gacagcuacuuuacaauag

SEQ ID NO: 229160 - RNA, 19 nt, Homo sapiens
  misc_RNA (1)...(19): siRNA sense strand
aaacguggcuggguaugga

SEQ ID NO: 229161 - RNA, 19 nt, Homo sapiens
  misc_RNA (1)...(19): siRNA sense strand
ggaaccaucgccacuaaug

SEQ ID NO: 229162 - RNA, 19 nt, Homo sapiens
  misc_RNA (1)...(19): siRNA sense strand
ggauggaccuuauguugcu

SEQ ID NO: 229163 - RNA, 19 nt, Homo sapiens
  misc_RNA (1)...(19): siRNA sense strand
cagaauucaucaucaaagu

SEQ ID NO: 229164 - RNA, 19 nt, Homo sapiens
  misc_RNA (1)...(19): siRNA sense strand
gauugaaacccgaagaaau

SEQ ID NO: 229165 - RNA, 19 nt, Homo sapiens
  misc_RNA (1)...(19): siRNA sense strand
aaggaaccaucgccacuaa

SEQ ID NO: 229166 - RNA, 19 nt, Homo sapiens
  misc_RNA (1)...(19): siRNA sense strand
uuagguacuucauagauug

SEQ ID NO: 229167 - RNA, 19 nt, Homo sapiens
  misc_RNA (1)...(19): siRNA sense strand
gagaaaauguuauccaucu

SEQ ID NO: 229168 - RNA, 19 nt, Homo sapiens
  misc_RNA (1)...(19): siRNA sense strand
caaaagugauugaggagaa

SEQ ID NO: 229169 - RNA, 19 nt, Homo sapiens
  misc_RNA (1)...(19): siRNA sense strand
gagaagucaaagaacaaua

SEQ ID NO: 229170 - RNA, 19 nt, Homo sapiens
  misc_RNA (1)...(19): siRNA sense strand
guagaugagccaccgguuu

SEQ ID NO: 229171 - RNA, 19 nt, Homo sapiens
  misc_RNA (1)...(19): siRNA sense strand
caagagggagucaucaaau

SEQ ID NO: 229172 - RNA, 19 nt, Homo sapiens
  misc_RNA (1)...(19): siRNA sense strand
ggacuaugacuaucugaca

SEQ ID NO: 229173 - RNA, 19 nt, Homo sapiens
  misc_RNA (1)...(19): siRNA sense strand
gagcuguggauccugauuu

SEQ ID NO: 229174 - RNA, 19 nt, Homo sapiens
  misc_RNA (1)...(19): siRNA sense strand
caggacaacggucacauuu

SEQ ID NO: 229175 - RNA, 19 nt, Homo sapiens
  misc_RNA (1)...(19): siRNA sense strand
cauccugucuuguaaugug

SEQ ID NO: 229176 - RNA, 19 nt, Homo sapiens
  misc_RNA (1)...(19): siRNA sense strand
ggagagggcacugugaaau

SEQ ID NO: 229177 - RNA, 19 nt, Homo sapiens
  misc_RNA (1)...(19): siRNA sense strand
cuaaagaagacaucagaga

SEQ ID NO: 229178 - RNA, 19 nt, Homo sapiens
  misc_RNA (1)...(19): siRNA sense strand
agccauaguuguacuguau

SEQ ID NO: 229179 - RNA, 19 nt, Homo sapiens
  misc_RNA (1)...(19): siRNA sense strand
acucuuagccauaguugua

SEQ ID NO: 229180 - RNA, 19 nt, Homo sapiens
  misc_RNA (1)...(19): siRNA sense strand
guuauacucuuagccauag

SEQ ID NO: 229181 - RNA, 19 nt, Homo sapiens
  misc_RNA (1)...(19): siRNA sense strand
gagcagcacaaacacaaug

SEQ ID NO: 229182 - RNA, 19 nt, Homo sapiens
  misc_RNA (1)...(19): siRNA sense strand
caaagugcaggauauuaau

SEQ ID NO: 229183 - RNA, 19 nt, Homo sapiens
  misc_RNA (1)...(19): siRNA sense strand
uagacucucucaccacaga

SEQ ID NO: 229184 - RNA, 19 nt, Homo sapiens
  misc_RNA (1)...(19): siRNA sense strand
cugaugaccucuaaagaag

SEQ ID NO: 229185 - RNA, 19 nt, Homo sapiens
  misc_RNA (1)...(19): siRNA sense strand
caaacacaaugacuauucg

SEQ ID NO: 229186 - RNA, 19 nt, Homo sapiens
  misc_RNA (1)...(19): siRNA sense strand
ggcaacaauucuccuuuag

SEQ ID NO: 229187 - RNA, 19 nt, Homo sapiens
  misc_RNA (1)...(19): siRNA sense strand
caggacagauaauucagau

SEQ ID NO: 229188 - RNA, 19 nt, Homo sapiens
  misc_RNA (1)...(19): siRNA sense strand
ucuacaccauggagguuua

SEQ ID NO: 229189 - RNA, 19 nt, Homo sapiens
  misc_RNA (1)...(19): siRNA sense strand
cagaugaggauacacaaga

SEQ ID NO: 229190 - RNA, 19 nt, Homo sapiens
  misc_RNA (1)...(19): siRNA sense strand
ucaucaaagugcaggauau

SEQ ID NO: 229191 - RNA, 19 nt, Homo sapiens
  misc_RNA (1)...(19): siRNA sense strand
ggauuucauucaucaaagg

SEQ ID NO: 229192 - RNA, 19 nt, Homo sapiens
  misc_RNA (1)...(19): siRNA sense strand
ucagagaccacccauggaa

SEQ ID NO: 229193 - RNA, 19 nt, Homo sapiens
  misc_RNA (1)...(19): siRNA sense strand
ccugaugaccucuaaagaa

SEQ ID NO: 229194 - RNA, 19 nt, Homo sapiens
  misc_RNA (1)...(19): siRNA sense strand
ggauugaaacccgaagaaa

SEQ ID NO: 229195 - RNA, 19 nt, Homo sapiens
  misc_RNA (1)...(19): siRNA sense strand
cauaauugcgaguaaaguu

SEQ ID NO: 229196 - RNA, 19 nt, Homo sapiens
  misc_RNA (1)...(19): siRNA sense strand
gaauuacuagacagagaaa

SEQ ID NO: 229197 - RNA, 19 nt, Homo sapiens
  misc_RNA (1)...(19): siRNA sense strand
ccuauugguucagcuauug

SEQ ID NO: 229198 - RNA, 19 nt, Homo sapiens
  misc_RNA (1)...(19): siRNA sense strand
ugaaaguuccugagucuuc

SEQ ID NO: 229199 - RNA, 19 nt, Homo sapiens
  misc_RNA (1)...(19): siRNA sense strand
ugccaaacauggacagaga

SEQ ID NO: 229200 - RNA, 19 nt, Homo sapiens
  misc_RNA (1)...(19): siRNA sense strand
agacagguguuauuagaac

SEQ ID NO: 229201 - RNA, 19 nt, Homo sapiens
  misc_RNA (1)...(19): siRNA sense strand
gacauaagggauuucauuc

SEQ ID NO: 229202 - RNA, 19 nt, Homo sapiens
  misc_RNA (1)...(19): siRNA sense strand
cgaccaggacuaugacuau

SEQ ID NO: 229203 - RNA, 19 nt, Homo sapiens
  misc_RNA (1)...(19): siRNA sense strand
gcaagaaccucaguuauga

SEQ ID NO: 229204 - RNA, 19 nt, Homo sapiens
  misc_RNA (1)...(19): siRNA sense strand
guucaucacuucccagauu

SEQ ID NO: 229205 - RNA, 19 nt, Homo sapiens
  misc_RNA (1)...(19): siRNA sense strand
gagaggagcaggcagagua

SEQ ID NO: 229206 - RNA, 19 nt, Homo sapiens
  misc_RNA (1)...(19): siRNA sense strand
ggagccacgugaacacaua

SEQ ID NO: 229207 - RNA, 19 nt, Homo sapiens
  misc_RNA (1)...(19): siRNA sense strand
caacucggaucuucgauuc

SEQ ID NO: 229208 - RNA, 19 nt, Homo sapiens
  misc_RNA (1)...(19): siRNA sense strand
aaacuaugguggaaauuuc

SEQ ID NO: 229209 - RNA, 19 nt, Homo sapiens
  misc_RNA (1)...(19): siRNA sense strand
ggaagaaggacccggauca

SEQ ID NO: 229210 - RNA, 19 nt, Homo sapiens
  misc_RNA (1)...(19): siRNA sense strand
guacugaagugacuagacu

SEQ ID NO: 229211 - RNA, 19 nt, Homo sapiens
  misc_RNA (1)...(19): siRNA sense strand
gaagucgcagucacagaua

SEQ ID NO: 229212 - RNA, 19 nt, Homo sapiens
  misc_RNA (1)...(19): siRNA sense strand
cuuuauaccugaccaaguu

SEQ ID NO: 229213 - RNA, 19 nt, Homo sapiens
  misc_RNA (1)...(19): siRNA sense strand
gagcucaguccaccaggua

SEQ ID NO: 229214 - RNA, 19 nt, Homo sapiens
  misc_RNA (1)...(19): siRNA sense strand
gcagugggcauccuuguag

SEQ ID NO: 229215 - RNA, 19 nt, Homo sapiens
  misc_RNA (1)...(19): siRNA sense strand
gaagaaggacccggaucaa

SEQ ID NO: 229216 - RNA, 19 nt, Homo sapiens
  misc_RNA (1)...(19): siRNA sense strand
gcaggcagaguaccagcua

SEQ ID NO: 229217 - RNA, 19 nt, Homo sapiens
  misc_RNA (1)...(19): siRNA sense strand
ccaauucccacguugugua

SEQ ID NO: 229218 - RNA, 19 nt, Homo sapiens
  misc_RNA (1)...(19): siRNA sense strand
ggaagucuccaucauagag

SEQ ID NO: 229219 - RNA, 19 nt, Homo sapiens
  misc_RNA (1)...(19): siRNA sense strand
gaaauuucccuuuauaccu

SEQ ID NO: 229220 - RNA, 19 nt, Homo sapiens
  misc_RNA (1)...(19): siRNA sense strand
cagcacgugugaagucgaa

SEQ ID NO: 229221 - RNA, 19 nt, Homo sapiens
  misc_RNA (1)...(19): siRNA sense strand
gcacgugaaggaugagaau

SEQ ID NO: 229222 - RNA, 19 nt, Homo sapiens
  misc_RNA (1)...(19): siRNA sense strand
gguucucccuagucaauga

SEQ ID NO: 229223 - RNA, 19 nt, Homo sapiens
  misc_RNA (1)...(19): siRNA sense strand
gcucugcauugagaaauuc

SEQ ID NO: 229224 - RNA, 19 nt, Homo sapiens
  misc_RNA (1)...(19): siRNA sense strand
gcaggauggacaugucuug

SEQ ID NO: 229225 - RNA, 19 nt, Homo sapiens
  misc_RNA (1)...(19): siRNA sense strand
ggcuguggcugcuuugugu

SEQ ID NO: 229226 - RNA, 19 nt, Homo sapiens
  misc_RNA (1)...(19): siRNA sense strand
gaugcaggauggacauguc

SEQ ID NO: 229227 - RNA, 19 nt, Homo sapiens
  misc_RNA (1)...(19): siRNA sense strand
cgaagucgcagucacagau

SEQ ID NO: 229228 - RNA, 19 nt, Homo sapiens
  misc_RNA (1)...(19): siRNA sense strand
gcaacugagggcccauuug

SEQ ID NO: 229229 - RNA, 19 nt, Homo sapiens
  misc_RNA (1)...(19): siRNA sense strand
gaaggacccggaucaacca

SEQ ID NO: 229230 - RNA, 19 nt, Homo sapiens
  misc_RNA (1)...(19): siRNA sense strand
ugaggcagcuccaagucau

SEQ ID NO: 229231 - RNA, 19 nt, Homo sapiens
  misc_RNA (1)...(19): siRNA sense strand
gcacagccaacucggaucu

SEQ ID NO: 229232 - RNA, 19 nt, Homo sapiens
  misc_RNA (1)...(19): siRNA sense strand
gugauccacuuccuaaagg

SEQ ID NO: 229233 - RNA, 19 nt, Homo sapiens
  misc_RNA (1)...(19): siRNA sense strand
caacugagggcccauuugc

SEQ ID NO: 229234 - RNA, 19 nt, Homo sapiens
  misc_RNA (1)...(19): siRNA sense strand
ugcaagaaccucaguuaug

SEQ ID NO: 229235 - RNA, 19 nt, Homo sapiens
  misc_RNA (1)...(19): siRNA sense strand
gcucuuuccugcugaccau

SEQ ID NO: 229236 - RNA, 19 nt, Homo sapiens
  misc_RNA (1)...(19): siRNA sense strand
ucugcaagaaccucaguua

SEQ ID NO: 229237 - RNA, 19 nt, Homo sapiens
  misc_RNA (1)...(19): siRNA sense strand
ggcuggcucugcauugaga

SEQ ID NO: 229238 - RNA, 19 nt, Homo sapiens
  misc_RNA (1)...(19): siRNA sense strand
ggcucugcauugagaaauu

SEQ ID NO: 229239 - RNA, 19 nt, Homo sapiens
  misc_RNA (1)...(19): siRNA sense strand
gcuccugguucgagugauc

SEQ ID NO: 229240 - RNA, 19 nt, Homo sapiens
  misc_RNA (1)...(19): siRNA sense strand
cagccacaaugcccagaug

SEQ ID NO: 229241 - RNA, 19 nt, Homo sapiens
  misc_RNA (1)...(19): siRNA sense strand
ggugauccacuuccuaaag

SEQ ID NO: 229242 - RNA, 19 nt, Homo sapiens
  misc_RNA (1)...(19): siRNA sense strand
ccgggacccuuugaaguga

SEQ ID NO: 229243 - RNA, 19 nt, Homo sapiens
  misc_RNA (1)...(19): siRNA sense strand
gaaucuuccucauccucau

SEQ ID NO: 229244 - RNA, 19 nt, Homo sapiens
  misc_RNA (1)...(19): siRNA sense strand
acagaugagccgagacuga

SEQ ID NO: 229245 - RNA, 19 nt, Homo sapiens
  misc_RNA (1)...(19): siRNA sense strand
cauguuagacucagacucu

SEQ ID NO: 229246 - RNA, 19 nt, Homo sapiens
  misc_RNA (1)...(19): siRNA sense strand
gcagucacagauaucaaug

SEQ ID NO: 229247 - RNA, 19 nt, Homo sapiens
  misc_RNA (1)...(19): siRNA sense strand
agagcugucuguggaaguu

SEQ ID NO: 229248 - RNA, 19 nt, Homo sapiens
  misc_RNA (1)...(19): siRNA sense strand
gagccacgugaacacauaa

SEQ ID NO: 229249 - RNA, 19 nt, Homo sapiens
  misc_RNA (1)...(19): siRNA sense strand
ccaacucggaucuucgauu

SEQ ID NO: 229250 - RNA, 19 nt, Homo sapiens
  misc_RNA (1)...(19): siRNA sense strand
ggcagugggcauccuugua

SEQ ID NO: 229251 - RNA, 19 nt, Homo sapiens
  misc_RNA (1)...(19): siRNA sense strand
acugagggcccauuugcua

SEQ ID NO: 229252 - RNA, 19 nt, Homo sapiens
  misc_RNA (1)...(19): siRNA sense strand
gcaccacauggcccaggua

SEQ ID NO: 229253 - RNA, 19 nt, Homo sapiens
  misc_RNA (1)...(19): siRNA sense strand
gggugucccuagagccuau

SEQ ID NO: 229254 - RNA, 19 nt, Homo sapiens
  misc_RNA (1)...(19): siRNA sense strand
ccagaaaacuaugguggaa

SEQ ID NO: 229255 - RNA, 19 nt, Homo sapiens
  misc_RNA (1)...(19): siRNA sense strand
cuauccaccuggcagagaa

SEQ ID NO: 229256 - RNA, 19 nt, Homo sapiens
  misc_RNA (1)...(19): siRNA sense strand
agaaaacuaugguggaaau

SEQ ID NO: 229257 - RNA, 19 nt, Homo sapiens
  misc_RNA (1)...(19): siRNA sense strand
cagguucucccuagucaau

SEQ ID NO: 229258 - RNA, 19 nt, Homo sapiens
  misc_RNA (1)...(19): siRNA sense strand
gcuaacagccauugaugcu

SEQ ID NO: 229259 - RNA, 19 nt, Homo sapiens
  misc_RNA (1)...(19): siRNA sense strand
gaaucucaaaguccuauac

SEQ ID NO: 229260 - RNA, 19 nt, Homo sapiens
  misc_RNA (1)...(19): siRNA sense strand
cagcagcacgugugaaguc

SEQ ID NO: 229261 - RNA, 19 nt, Homo sapiens
  misc_RNA (1)...(19): siRNA sense strand
agaaugacaacgugccuau

SEQ ID NO: 229262 - RNA, 19 nt, Homo sapiens
  misc_RNA (1)...(19): siRNA sense strand
ggugauggaugagaaugac

SEQ ID NO: 229263 - RNA, 19 nt, Homo sapiens
  misc_RNA (1)...(19): siRNA sense strand
ggagaugcaggauggacau

SEQ ID NO: 229264 - RNA, 19 nt, Homo sapiens
  misc_RNA (1)...(19): siRNA sense strand
caauucccacguuguguau

SEQ ID NO: 229265 - RNA, 19 nt, Homo sapiens
  misc_RNA (1)...(19): siRNA sense strand
ccugaaggcgacugucuga

SEQ ID NO: 229266 - RNA, 19 nt, Homo sapiens
  misc_RNA (1)...(19): siRNA sense strand
ggacucugguggccaugcu

SEQ ID NO: 229267 - RNA, 19 nt, Homo sapiens
  misc_RNA (1)...(19): siRNA sense strand
gccuggcuguggcugcuuu

SEQ ID NO: 229268 - RNA, 19 nt, Homo sapiens
  misc_RNA (1)...(19): siRNA sense strand
gcuaguggagagagugaug

SEQ ID NO: 229269 - RNA, 19 nt, Homo sapiens
  misc_RNA (1)...(19): siRNA sense strand
uggaccaugucaaggaaga

SEQ ID NO: 229270 - RNA, 19 nt, Homo sapiens
  misc_RNA (1)...(19): siRNA sense strand
ccuuccgccucauggauuu

SEQ ID NO: 229271 - RNA, 19 nt, Homo sapiens
  misc_RNA (1)...(19): siRNA sense strand
gggacccuuugaagugaau

SEQ ID NO: 229272 - RNA, 19 nt, Homo sapiens
  misc_RNA (1)...(19): siRNA sense strand
gauguggcagcuccugguu

SEQ ID NO: 229273 - RNA, 19 nt, Homo sapiens
  misc_RNA (1)...(19): siRNA sense strand
gcacgugugaagucgaagu

SEQ ID NO: 229274 - RNA, 19 nt, Homo sapiens
  misc_RNA (1)...(19): siRNA sense strand
caggugcgggcucagaauu

SEQ ID NO: 229275 - RNA, 19 nt, Homo sapiens
  misc_RNA (1)...(19): siRNA sense strand
gggagggacuucuguauua

SEQ ID NO: 229276 - RNA, 19 nt, Homo sapiens
  misc_RNA (1)...(19): siRNA sense strand
gagaauuccuucagugaua

SEQ ID NO: 229277 - RNA, 19 nt, Homo sapiens
  misc_RNA (1)...(19): siRNA sense strand
gaaugaagcaccucaauuu

SEQ ID NO: 229278 - RNA, 19 nt, Homo sapiens
  misc_RNA (1)...(19): siRNA sense strand
gaaacaagaucuacucaca

SEQ ID NO: 229279 - RNA, 19 nt, Homo sapiens
  misc_RNA (1)...(19): siRNA sense strand
gacauaagcuauucacuga

SEQ ID NO: 229280 - RNA, 19 nt, Homo sapiens
  misc_RNA (1)...(19): siRNA sense strand
ggaaggcauuguuucuuua

SEQ ID NO: 229281 - RNA, 19 nt, Homo sapiens
  misc_RNA (1)...(19): siRNA sense strand
ggaaagcccuucuuguaug

SEQ ID NO: 229282 - RNA, 19 nt, Homo sapiens
  misc_RNA (1)...(19): siRNA sense strand
gaaagucagugaggaugua

SEQ ID NO: 229283 - RNA, 19 nt, Homo sapiens
  misc_RNA (1)...(19): siRNA sense strand
ggagacagacaacauauuu

SEQ ID NO: 229284 - RNA, 19 nt, Homo sapiens
  misc_RNA (1)...(19): siRNA sense strand
cuaagaauccuuccuauaa

SEQ ID NO: 229285 - RNA, 19 nt, Homo sapiens
  misc_RNA (1)...(19): siRNA sense strand
ucaagcaucugaagucaaa

SEQ ID NO: 229286 - RNA, 19 nt, Homo sapiens
  misc_RNA (1)...(19): siRNA sense strand
caagaaccgagucaaauua

SEQ ID NO: 229287 - RNA, 19 nt, Homo sapiens
  misc_RNA (1)...(19): siRNA sense strand
aagagaagcugccaagauu

SEQ ID NO: 229288 - RNA, 19 nt, Homo sapiens
  misc_RNA (1)...(19): siRNA sense strand
ccaauggccagcuuuauua

SEQ ID NO: 229289 - RNA, 19 nt, Homo sapiens
  misc_RNA (1)...(19): siRNA sense strand
gcacaauauuccuuaguug

SEQ ID NO: 229290 - RNA, 19 nt, Homo sapiens
  misc_RNA (1)...(19): siRNA sense strand
gaaccgagucaaauuauau

SEQ ID NO: 229291 - RNA, 19 nt, Homo sapiens
  misc_RNA (1)...(19): siRNA sense strand
caggaaagcccuucuugua

SEQ ID NO: 229292 - RNA, 19 nt, Homo sapiens
  misc_RNA (1)...(19): siRNA sense strand
gaaagcccuucuuguaugu

SEQ ID NO: 229293 - RNA, 19 nt, Homo sapiens
  misc_RNA (1)...(19): siRNA sense strand
gcuaaacaguccuugaaga

SEQ ID NO: 229294 - RNA, 19 nt, Homo sapiens
  misc_RNA (1)...(19): siRNA sense strand
ccacguuucuccagucaaa

SEQ ID NO: 229295 - RNA, 19 nt, Homo sapiens
  misc_RNA (1)...(19): siRNA sense strand
aaccuaugcuggaauguua

SEQ ID NO: 229296 - RNA, 19 nt, Homo sapiens
  misc_RNA (1)...(19): siRNA sense strand
ccaguuacauucugcaguu

SEQ ID NO: 229297 - RNA, 19 nt, Homo sapiens
  misc_RNA (1)...(19): siRNA sense strand
gggcauggcaguugguaua

SEQ ID NO: 229298 - RNA, 19 nt, Homo sapiens
  misc_RNA (1)...(19): siRNA sense strand
gcaaagauaauguugaaag

SEQ ID NO: 229299 - RNA, 19 nt, Homo sapiens
  misc_RNA (1)...(19): siRNA sense strand
aaagaaggauaaaggcaaa

SEQ ID NO: 229300 - RNA, 19 nt, Homo sapiens
  misc_RNA (1)...(19): siRNA sense strand
gcuaagaauccuuccuaua

SEQ ID NO: 229301 - RNA, 19 nt, Homo sapiens
  misc_RNA (1)...(19): siRNA sense strand
ugacagagaauauuuggaa

SEQ ID NO: 229302 - RNA, 19 nt, Homo sapiens
  misc_RNA (1)...(19): siRNA sense strand
uggaaggcauuguuucuuu

SEQ ID NO: 229303 - RNA, 19 nt, Homo sapiens
  misc_RNA (1)...(19): siRNA sense strand
cacaagagguuggcuuaaa

SEQ ID NO: 229304 - RNA, 19 nt, Homo sapiens
  misc_RNA (1)...(19): siRNA sense strand
gaaguacaaugcaaguucu

SEQ ID NO: 229305 - RNA, 19 nt, Homo sapiens
  misc_RNA (1)...(19): siRNA sense strand
ggaauugaauccugcuaag

SEQ ID NO: 229306 - RNA, 19 nt, Homo sapiens
  misc_RNA (1)...(19): siRNA sense strand
gagggaguaugucgucuug

SEQ ID NO: 229307 - RNA, 19 nt, Homo sapiens
  misc_RNA (1)...(19): siRNA sense strand
cauauccgcuggaaauuca

SEQ ID NO: 229308 - RNA, 19 nt, Homo sapiens
  misc_RNA (1)...(19): siRNA sense strand
ugaaggacaucaacgacaa

SEQ ID NO: 229309 - RNA, 19 nt, Homo sapiens
  misc_RNA (1)...(19): siRNA sense strand
gaagucaaaccucugagaa

SEQ ID NO: 229310 - RNA, 19 nt, Homo sapiens
  misc_RNA (1)...(19): siRNA sense strand
gagguuggcuuaaaauuga

SEQ ID NO: 229311 - RNA, 19 nt, Homo sapiens
  misc_RNA (1)...(19): siRNA sense strand
ccaagaaccgagucaaauu

SEQ ID NO: 229312 - RNA, 19 nt, Homo sapiens
  misc_RNA (1)...(19): siRNA sense strand
ggauaaaggcaaagauaau

SEQ ID NO: 229313 - RNA, 19 nt, Homo sapiens
  misc_RNA (1)...(19): siRNA sense strand
gcaccuggaagucucauuu

SEQ ID NO: 229314 - RNA, 19 nt, Homo sapiens
  misc_RNA (1)...(19): siRNA sense strand
agagggaucucaggaauug

SEQ ID NO: 229315 - RNA, 19 nt, Homo sapiens
  misc_RNA (1)...(19): siRNA sense strand
ccaaaccuaugcuggaaug

SEQ ID NO: 229316 - RNA, 19 nt, Homo sapiens
  misc_RNA (1)...(19): siRNA sense strand
ggacagagaagccggaagu

SEQ ID NO: 229317 - RNA, 19 nt, Homo sapiens
  misc_RNA (1)...(19): siRNA sense strand
ccacgugacuggugagauc

SEQ ID NO: 229318 - RNA, 19 nt, Homo sapiens
  misc_RNA (1)...(19): siRNA sense strand
gggaguaugucgucuugau

SEQ ID NO: 229319 - RNA, 19 nt, Homo sapiens
  misc_RNA (1)...(19): siRNA sense strand
gauaaaggcaaagauaaug

SEQ ID NO: 229320 - RNA, 19 nt, Homo sapiens
  misc_RNA (1)...(19): siRNA sense strand
gacagagaauauuuggaaa

SEQ ID NO: 229321 - RNA, 19 nt, Homo sapiens
  misc_RNA (1)...(19): siRNA sense strand
aggcaaagauaauguugaa

SEQ ID NO: 229322 - RNA, 19 nt, Homo sapiens
  misc_RNA (1)...(19): siRNA sense strand
gacacaagagguuggcuua

SEQ ID NO: 229323 - RNA, 19 nt, Homo sapiens
  misc_RNA (1)...(19): siRNA sense strand
gagcaaacucccaaacuuc

SEQ ID NO: 229324 - RNA, 19 nt, Homo sapiens
  misc_RNA (1)...(19): siRNA sense strand
caaaggaugaguacggaaa

SEQ ID NO: 229325 - RNA, 19 nt, Homo sapiens
  misc_RNA (1)...(19): siRNA sense strand
ccucggcaguggaagcuua

SEQ ID NO: 229326 - RNA, 19 nt, Homo sapiens
  misc_RNA (1)...(19): siRNA sense strand
cagugaggauguagcuaua

SEQ ID NO: 229327 - RNA, 19 nt, Homo sapiens
  misc_RNA (1)...(19): siRNA sense strand
caguacaacuuaacgauag

SEQ ID NO: 229328 - RNA, 19 nt, Homo sapiens
  misc_RNA (1)...(19): siRNA sense strand
gaauguuacaguuagcuaa

SEQ ID NO: 229329 - RNA, 19 nt, Homo sapiens
  misc_RNA (1)...(19): siRNA sense strand
ggacuacacgggcuuguuc

SEQ ID NO: 229330 - RNA, 19 nt, Homo sapiens
  misc_RNA (1)...(19): siRNA sense strand
aaaccugacucuugcugaa

SEQ ID NO: 229331 - RNA, 19 nt, Homo sapiens
  misc_RNA (1)...(19): siRNA sense strand
agaaccgagucaaauuaua

SEQ ID NO: 229332 - RNA, 19 nt, Homo sapiens
  misc_RNA (1)...(19): siRNA sense strand
gcauaaagaaggauaaagg

SEQ ID NO: 229333 - RNA, 19 nt, Homo sapiens
  misc_RNA (1)...(19): siRNA sense strand
gcuggaauguuacaguuag

SEQ ID NO: 229334 - RNA, 19 nt, Homo sapiens
  misc_RNA (1)...(19): siRNA sense strand
aacaagaucuacucacaau

SEQ ID NO: 229335 - RNA, 19 nt, Homo sapiens
  misc_RNA (1)...(19): siRNA sense strand
caaugugacugccaaggau

SEQ ID NO: 229336 - RNA, 19 nt, Homo sapiens
  misc_RNA (1)...(19): siRNA sense strand
gcaaugugacugccaagga

SEQ ID NO: 229337 - RNA, 19 nt, Homo sapiens
  misc_RNA (1)...(19): siRNA sense strand
cuaaacaguccuugaagaa

SEQ ID NO: 229338 - RNA, 19 nt, Homo sapiens
  misc_RNA (1)...(19): siRNA sense strand
uuucuaaacuacaggauug

SEQ ID NO: 229339 - RNA, 19 nt, Homo sapiens
  misc_RNA (1)...(19): siRNA sense strand
guacgaaggcucaguaagg

SEQ ID NO: 229340 - RNA, 19 nt, Homo sapiens
  misc_RNA (1)...(19): siRNA sense strand
ggacaucaacgacaaucga

SEQ ID NO: 229341 - RNA, 19 nt, Homo sapiens
  misc_RNA (1)...(19): siRNA sense strand
ccuggacgcuaauggaauu

SEQ ID NO: 229342 - RNA, 19 nt, Homo sapiens
  misc_RNA (1)...(19): siRNA sense strand
gcucaagcaucugaaguca

SEQ ID NO: 229343 - RNA, 19 nt, Homo sapiens
  misc_RNA (1)...(19): siRNA sense strand
gcugaagacacaaacauug

SEQ ID NO: 229344 - RNA, 19 nt, Homo sapiens
  misc_RNA (1)...(19): siRNA sense strand
gauggacucuuccuaaucc

SEQ ID NO: 229345 - RNA, 19 nt, Homo sapiens
  misc_RNA (1)...(19): siRNA sense strand
ggacucuuccuaauccaaa

SEQ ID NO: 229346 - RNA, 19 nt, Homo sapiens
  misc_RNA (1)...(19): siRNA sense strand
uauuugagguccaggagaa

SEQ ID NO: 229347 - RNA, 19 nt, Homo sapiens
  misc_RNA (1)...(19): siRNA sense strand
ugacagggaugaagaaaau

SEQ ID NO: 229348 - RNA, 19 nt, Homo sapiens
  misc_RNA (1)...(19): siRNA sense strand
gaacgggagggacuucugu

SEQ ID NO: 229349 - RNA, 19 nt, Homo sapiens
  misc_RNA (1)...(19): siRNA sense strand
gaguuccaccugauccuua

SEQ ID NO: 229350 - RNA, 19 nt, Homo sapiens
  misc_RNA (1)...(19): siRNA sense strand
uauggaaaccugacucuug

SEQ ID NO: 229351 - RNA, 19 nt, Homo sapiens
  misc_RNA (1)...(19): siRNA sense strand
gaaaaggaugcauauguuu

SEQ ID NO: 229352 - RNA, 19 nt, Homo sapiens
  misc_RNA (1)...(19): siRNA sense strand
ccauagaagugaaggacau

SEQ ID NO: 229353 - RNA, 19 nt, Homo sapiens
  misc_RNA (1)...(19): siRNA sense strand
aaggauaaaggcaaagaua

SEQ ID NO: 229354 - RNA, 19 nt, Homo sapiens
  misc_RNA (1)...(19): siRNA sense strand
ugaaugaagcaccucaauu

SEQ ID NO: 229355 - RNA, 19 nt, Homo sapiens
  misc_RNA (1)...(19): siRNA sense strand
ggugugaaguacaaugcaa

SEQ ID NO: 229356 - RNA, 19 nt, Homo sapiens
  misc_RNA (1)...(19): siRNA sense strand
ucaguacaacuuaacgaua

SEQ ID NO: 229357 - RNA, 19 nt, Homo sapiens
  misc_RNA (1)...(19): siRNA sense strand
gaauugaauccugcuaaga

SEQ ID NO: 229358 - RNA, 19 nt, Homo sapiens
  misc_RNA (1)...(19): siRNA sense strand
uugcagcccuggacgcuaa

SEQ ID NO: 229359 - RNA, 19 nt, Homo sapiens
  misc_RNA (1)...(19): siRNA sense strand
aaagagaagcugccaagau

SEQ ID NO: 229360 - RNA, 19 nt, Homo sapiens
  misc_RNA (1)...(19): siRNA sense strand
gauaucauagugacagaga

SEQ ID NO: 229361 - RNA, 19 nt, Homo sapiens
  misc_RNA (1)...(19): siRNA sense strand
ggacaugggaggccagagu

SEQ ID NO: 229362 - RNA, 19 nt, Homo sapiens
  misc_RNA (1)...(19): siRNA sense strand
ccuauaaucuggugaucuc

SEQ ID NO: 229363 - RNA, 19 nt, Homo sapiens
  misc_RNA (1)...(19): siRNA sense strand
aagaauccuuccuauaauc

SEQ ID NO: 229364 - RNA, 19 nt, Homo sapiens
  misc_RNA (1)...(19): siRNA sense strand
ggaauguuacaguuagcua

SEQ ID NO: 229365 - RNA, 19 nt, Homo sapiens
  misc_RNA (1)...(19): siRNA sense strand
gaccaggaaggagauauuu

SEQ ID NO: 229366 - RNA, 19 nt, Homo sapiens
  misc_RNA (1)...(19): siRNA sense strand
caauauuccuuaguugaca

SEQ ID NO: 229367 - RNA, 19 nt, Homo sapiens
  misc_RNA (1)...(19): siRNA sense strand
ggagggacuucuguauuac

SEQ ID NO: 229368 - RNA, 19 nt, Homo sapiens
  misc_RNA (1)...(19): siRNA sense strand
acauguccgucaccaguaa

SEQ ID NO: 229369 - RNA, 19 nt, Homo sapiens
  misc_RNA (1)...(19): siRNA sense strand
gauaauccaccuacauguc

SEQ ID NO: 229370 - RNA, 19 nt, Homo sapiens
  misc_RNA (1)...(19): siRNA sense strand
ucacucaggugcgguggaa

SEQ ID NO: 229371 - RNA, 19 nt, Homo sapiens
  misc_RNA (1)...(19): siRNA sense strand
gacaaucgacccacguuuc

SEQ ID NO: 229372 - RNA, 19 nt, Homo sapiens
  misc_RNA (1)...(19): siRNA sense strand
gugcaaaucaacguuauug

SEQ ID NO: 229373 - RNA, 19 nt, Homo sapiens
  misc_RNA (1)...(19): siRNA sense strand
cuggugagaucuuuagugu

SEQ ID NO: 229374 - RNA, 19 nt, Homo sapiens
  misc_RNA (1)...(19): siRNA sense strand
ggucuggacauaagcuauu

SEQ ID NO: 229375 - RNA, 19 nt, Homo sapiens
  misc_RNA (1)...(19): siRNA sense strand
gaacuuuccucagagauua

SEQ ID NO: 229376 - RNA, 19 nt, Homo sapiens
  misc_RNA (1)...(19): siRNA sense strand
gauaaacccuugauaguuc

SEQ ID NO: 229377 - RNA, 19 nt, Homo sapiens
  misc_RNA (1)...(19): siRNA sense strand
uaagacaccucaaccuaua

SEQ ID NO: 229378 - RNA, 19 nt, Homo sapiens
  misc_RNA (1)...(19): siRNA sense strand
gaucauccauuucuucuga

SEQ ID NO: 229379 - RNA, 19 nt, Homo sapiens
  misc_RNA (1)...(19): siRNA sense strand
uaucaaaccucccaaagaa

SEQ ID NO: 229380 - RNA, 19 nt, Homo sapiens
  misc_RNA (1)...(19): siRNA sense strand
guggaaaccucccaugaua

SEQ ID NO: 229381 - RNA, 19 nt, Homo sapiens
  misc_RNA (1)...(19): siRNA sense strand
gaauccagaugacacauuu

SEQ ID NO: 229382 - RNA, 19 nt, Homo sapiens
  misc_RNA (1)...(19): siRNA sense strand
gauggaagaugggaaauug

SEQ ID NO: 229383 - RNA, 19 nt, Homo sapiens
  misc_RNA (1)...(19): siRNA sense strand
ugacauggaugaggaaauu

SEQ ID NO: 229384 - RNA, 19 nt, Homo sapiens
  misc_RNA (1)...(19): siRNA sense strand
aaagaaagaugacauggau

SEQ ID NO: 229385 - RNA, 19 nt, Homo sapiens
  misc_RNA (1)...(19): siRNA sense strand
gaugggaaauugaagaguu

SEQ ID NO: 229386 - RNA, 19 nt, Homo sapiens
  misc_RNA (1)...(19): siRNA sense strand
ugacagaggacugguauua

SEQ ID NO: 229387 - RNA, 19 nt, Homo sapiens
  misc_RNA (1)...(19): siRNA sense strand
acagaggacugguauuaaa

SEQ ID NO: 229388 - RNA, 19 nt, Homo sapiens
  misc_RNA (1)...(19): siRNA sense strand
cagauuauuucgaagauga

SEQ ID NO: 229389 - RNA, 19 nt, Homo sapiens
  misc_RNA (1)...(19): siRNA sense strand
cgacauauguauaccacaa

SEQ ID NO: 229390 - RNA, 19 nt, Homo sapiens
  misc_RNA (1)...(19): siRNA sense strand
gaagggcacccauggcuuu

SEQ ID NO: 229391 - RNA, 19 nt, Homo sapiens
  misc_RNA (1)...(19): siRNA sense strand
aagugaaccugcccaaaua

SEQ ID NO: 229392 - RNA, 19 nt, Homo sapiens
  misc_RNA (1)...(19): siRNA sense strand
ggaaaagagugaagaagaa

SEQ ID NO: 229393 - RNA, 19 nt, Homo sapiens
  misc_RNA (1)...(19): siRNA sense strand
gcagaugguuggagaugga

SEQ ID NO: 229394 - RNA, 19 nt, Homo sapiens
  misc_RNA (1)...(19): siRNA sense strand
ggaaaccucccaugauaga

SEQ ID NO: 229395 - RNA, 19 nt, Homo sapiens
  misc_RNA (1)...(19): siRNA sense strand
ccucugauaucuacuuuga

SEQ ID NO: 229396 - RNA, 19 nt, Homo sapiens
  misc_RNA (1)...(19): siRNA sense strand
ugccaaaccuccagaugua

SEQ ID NO: 229397 - RNA, 19 nt, Homo sapiens
  misc_RNA (1)...(19): siRNA sense strand
cagaauuuauggaugauga

SEQ ID NO: 229398 - RNA, 19 nt, Homo sapiens
  misc_RNA (1)...(19): siRNA sense strand
gauaaagucaguacgcaaa

SEQ ID NO: 229399 - RNA, 19 nt, Homo sapiens
  misc_RNA (1)...(19): siRNA sense strand
uuucagugcucuugguuua

SEQ ID NO: 229400 - RNA, 19 nt, Homo sapiens
  misc_RNA (1)...(19): siRNA sense strand
gaagauucaaguguuguua

SEQ ID NO: 229401 - RNA, 19 nt, Homo sapiens
  misc_RNA (1)...(19): siRNA sense strand
gcaaaaugauggugaaaug

SEQ ID NO: 229402 - RNA, 19 nt, Homo sapiens
  misc_RNA (1)...(19): siRNA sense strand
gaagaugggaaauugaaga

SEQ ID NO: 229403 - RNA, 19 nt, Homo sapiens
  misc_RNA (1)...(19): siRNA sense strand
uagcagacacugaugauuu

SEQ ID NO: 229404 - RNA, 19 nt, Homo sapiens
  misc_RNA (1)...(19): siRNA sense strand
cauuugagguguuaguuga

SEQ ID NO: 229405 - RNA, 19 nt, Homo sapiens
  misc_RNA (1)...(19): siRNA sense strand
ggagaugggccgauaaagu

SEQ ID NO: 229406 - RNA, 19 nt, Homo sapiens
  misc_RNA (1)...(19): siRNA sense strand
gcaagaagaaaguaaucaa

SEQ ID NO: 229407 - RNA, 19 nt, Homo sapiens
  misc_RNA (1)...(19): siRNA sense strand
gugccaauagcauuaauua

SEQ ID NO: 229408 - RNA, 19 nt, Homo sapiens
  misc_RNA (1)...(19): siRNA sense strand
ccaaauagaagauucaagu

SEQ ID NO: 229409 - RNA, 19 nt, Homo sapiens
  misc_RNA (1)...(19): siRNA sense strand
gacggaagacuuugaagaa

SEQ ID NO: 229410 - RNA, 19 nt, Homo sapiens
  misc_RNA (1)...(19): siRNA sense strand
uugaagaucccaaugauaa

SEQ ID NO: 229411 - RNA, 19 nt, Homo sapiens
  misc_RNA (1)...(19): siRNA sense strand
agacacugaugauuugauu

SEQ ID NO: 229412 - RNA, 19 nt, Homo sapiens
  misc_RNA (1)...(19): siRNA sense strand
ggacugguauuaaaaucua

SEQ ID NO: 229413 - RNA, 19 nt, Homo sapiens
  misc_RNA (1)...(19): siRNA sense strand
ggucagaggaugagaugaa

SEQ ID NO: 229414 - RNA, 19 nt, Homo sapiens
  misc_RNA (1)...(19): siRNA sense strand
gagaugggccgauaaaguc

SEQ ID NO: 229415 - RNA, 19 nt, Homo sapiens
  misc_RNA (1)...(19): siRNA sense strand
ggaugaggaaauuucaaua

SEQ ID NO: 229416 - RNA, 19 nt, Homo sapiens
  misc_RNA (1)...(19): siRNA sense strand
gaaagugaaccugaggaaa

SEQ ID NO: 229417 - RNA, 19 nt, Homo sapiens
  misc_RNA (1)...(19): siRNA sense strand
gguuggagauggaaaauaa

SEQ ID NO: 229418 - RNA, 19 nt, Homo sapiens
  misc_RNA (1)...(19): siRNA sense strand
ggucgauaauccuaacuau

SEQ ID NO: 229419 - RNA, 19 nt, Homo sapiens
  misc_RNA (1)...(19): siRNA sense strand
ggaaauugaagaguugaaa

SEQ ID NO: 229420 - RNA, 19 nt, Homo sapiens
  misc_RNA (1)...(19): siRNA sense strand
agacugggaugaaagugaa

SEQ ID NO: 229421 - RNA, 19 nt, Homo sapiens
  misc_RNA (1)...(19): siRNA sense strand
ggaaagugaaccugaggaa

SEQ ID NO: 229422 - RNA, 19 nt, Homo sapiens
  misc_RNA (1)...(19): siRNA sense strand
uauaagacaccucaaccua

SEQ ID NO: 229423 - RNA, 19 nt, Homo sapiens
  misc_RNA (1)...(19): siRNA sense strand
gaagaguacgaaaggacua

SEQ ID NO: 229424 - RNA, 19 nt, Homo sapiens
  misc_RNA (1)...(19): siRNA sense strand
cauagaagggcaagaagaa

SEQ ID NO: 229425 - RNA, 19 nt, Homo sapiens
  misc_RNA (1)...(19): siRNA sense strand
guuaguugaucaaacaguu

SEQ ID NO: 229426 - RNA, 19 nt, Homo sapiens
  misc_RNA (1)...(19): siRNA sense strand
agauaaauguggagaagau

SEQ ID NO: 229427 - RNA, 19 nt, Homo sapiens
  misc_RNA (1)...(19): siRNA sense strand
agaaagaugacauggauga

SEQ ID NO: 229428 - RNA, 19 nt, Homo sapiens
  misc_RNA (1)...(19): siRNA sense strand
gaccucugauaucuacuuu

SEQ ID NO: 229429 - RNA, 19 nt, Homo sapiens
  misc_RNA (1)...(19): siRNA sense strand
aaaccucccaugauagaua

SEQ ID NO: 229430 - RNA, 19 nt, Homo sapiens
  misc_RNA (1)...(19): siRNA sense strand
gaaagugaaccugcccaaa

SEQ ID NO: 229431 - RNA, 19 nt, Homo sapiens
  misc_RNA (1)...(19): siRNA sense strand
cuggaugggucuuaucaaa

SEQ ID NO: 229432 - RNA, 19 nt, Homo sapiens
  misc_RNA (1)...(19): siRNA sense strand
ucacugggcugcagauggu

SEQ ID NO: 229433 - RNA, 19 nt, Homo sapiens
  misc_RNA (1)...(19): siRNA sense strand
caaagaaagaugacaugga

SEQ ID NO: 229434 - RNA, 19 nt, Homo sapiens
  misc_RNA (1)...(19): siRNA sense strand
gaggaaauuucaauauacg

SEQ ID NO: 229435 - RNA, 19 nt, Homo sapiens
  misc_RNA (1)...(19): siRNA sense strand
ccauggcuuugguugauuu

SEQ ID NO: 229436 - RNA, 19 nt, Homo sapiens
  misc_RNA (1)...(19): siRNA sense strand
gaucaaacaguuguaaaca

SEQ ID NO: 229437 - RNA, 19 nt, Homo sapiens
  misc_RNA (1)...(19): siRNA sense strand
ccagauaaauguggagaag

SEQ ID NO: 229438 - RNA, 19 nt, Homo sapiens
  misc_RNA (1)...(19): siRNA sense strand
ggaggugcauacauuaaac

SEQ ID NO: 229439 - RNA, 19 nt, Homo sapiens
  misc_RNA (1)...(19): siRNA sense strand
gcugauaaacccuugauag

SEQ ID NO: 229440 - RNA, 19 nt, Homo sapiens
  misc_RNA (1)...(19): siRNA sense strand
gcuaauaagccugguguau

SEQ ID NO: 229441 - RNA, 19 nt, Homo sapiens
  misc_RNA (1)...(19): siRNA sense strand
agacacggauggagaaugg

SEQ ID NO: 229442 - RNA, 19 nt, Homo sapiens
  misc_RNA (1)...(19): siRNA sense strand
aaagugaaccugcccaaau

SEQ ID NO: 229443 - RNA, 19 nt, Homo sapiens
  misc_RNA (1)...(19): siRNA sense strand
ggaagacuuugaagaaaau

SEQ ID NO: 229444 - RNA, 19 nt, Homo sapiens
  misc_RNA (1)...(19): siRNA sense strand
gagugaagaagaaauugaa

SEQ ID NO: 229445 - RNA, 19 nt, Homo sapiens
  misc_RNA (1)...(19): siRNA sense strand
agagaaagcagcccuggaa

SEQ ID NO: 229446 - RNA, 19 nt, Homo sapiens
  misc_RNA (1)...(19): siRNA sense strand
ggucuucuguucaucucaa

SEQ ID NO: 229447 - RNA, 19 nt, Homo sapiens
  misc_RNA (1)...(19): siRNA sense strand
gacagaggacugguauuaa

SEQ ID NO: 229448 - RNA, 19 nt, Homo sapiens
  misc_RNA (1)...(19): siRNA sense strand
ugauaaacccuugauaguu

SEQ ID NO: 229449 - RNA, 19 nt, Homo sapiens
  misc_RNA (1)...(19): siRNA sense strand
gccaauagcauuaauuacu

SEQ ID NO: 229450 - RNA, 19 nt, Homo sapiens
  misc_RNA (1)...(19): siRNA sense strand
gaaauugaagaguugaaag

SEQ ID NO: 229451 - RNA, 19 nt, Homo sapiens
  misc_RNA (1)...(19): siRNA sense strand
ucagugcucuugguuuaga

SEQ ID NO: 229452 - RNA, 19 nt, Homo sapiens
  misc_RNA (1)...(19): siRNA sense strand
caugauagauaacccaaaa

SEQ ID NO: 229453 - RNA, 19 nt, Homo sapiens
  misc_RNA (1)...(19): siRNA sense strand
gaaccugcccaaauagaag

SEQ ID NO: 229454 - RNA, 19 nt, Homo sapiens
  misc_RNA (1)...(19): siRNA sense strand
ucaaaccucccaaagaaau

SEQ ID NO: 229455 - RNA, 19 nt, Homo sapiens
  misc_RNA (1)...(19): siRNA sense strand
uuuauacccuugugaugaa

SEQ ID NO: 229456 - RNA, 19 nt, Homo sapiens
  misc_RNA (1)...(19): siRNA sense strand
augcagaauuuauggauga

SEQ ID NO: 229457 - RNA, 19 nt, Homo sapiens
  misc_RNA (1)...(19): siRNA sense strand
gaagggcaagaagaaagua

SEQ ID NO: 229458 - RNA, 19 nt, Homo sapiens
  misc_RNA (1)...(19): siRNA sense strand
gagaaagcagcccuggaaa

SEQ ID NO: 229459 - RNA, 19 nt, Homo sapiens
  misc_RNA (1)...(19): siRNA sense strand
auagaagauucaaguguug

SEQ ID NO: 229460 - RNA, 19 nt, Homo sapiens
  misc_RNA (1)...(19): siRNA sense strand
cauuucuucugacuucuuu

SEQ ID NO: 229461 - RNA, 19 nt, Homo sapiens
  misc_RNA (1)...(19): siRNA sense strand
gaguggaaaccucccauga

SEQ ID NO: 229462 - RNA, 19 nt, Homo sapiens
  misc_RNA (1)...(19): siRNA sense strand
ccugaugacuggaaugaag

SEQ ID NO: 229463 - RNA, 19 nt, Homo sapiens
  misc_RNA (1)...(19): siRNA sense strand
ucuaugaccucugauaucu

SEQ ID NO: 229464 - RNA, 19 nt, Homo sapiens
  misc_RNA (1)...(19): siRNA sense strand
gaugaaagaagcagaugag

SEQ ID NO: 229465 - RNA, 19 nt, Homo sapiens
  misc_RNA (1)...(19): siRNA sense strand
cagaggaugagaugaaaga

SEQ ID NO: 229466 - RNA, 19 nt, Homo sapiens
  misc_RNA (1)...(19): siRNA sense strand
gauggugaaaugcuugaaa

SEQ ID NO: 229467 - RNA, 19 nt, Homo sapiens
  misc_RNA (1)...(19): siRNA sense strand
caucucaauuaaugcagaa

SEQ ID NO: 229468 - RNA, 19 nt, Homo sapiens
  misc_RNA (1)...(19): siRNA sense strand
gucagaggaugagaugaaa

SEQ ID NO: 229469 - RNA, 19 nt, Homo sapiens
  misc_RNA (1)...(19): siRNA sense strand
ggagugccaauagcauuaa

SEQ ID NO: 229470 - RNA, 19 nt, Homo sapiens
  misc_RNA (1)...(19): siRNA sense strand
cuucuguucaucucaauua

SEQ ID NO: 229471 - RNA, 19 nt, Homo sapiens
  misc_RNA (1)...(19): siRNA sense strand
ggaugugguuccuccuauc

SEQ ID NO: 229472 - RNA, 19 nt, Homo sapiens
  misc_RNA (1)...(19): siRNA sense strand
uaugaccucugauaucuac

SEQ ID NO: 229473 - RNA, 19 nt, Homo sapiens
  misc_RNA (1)...(19): siRNA sense strand
caaauagaagauucaagug

SEQ ID NO: 229474 - RNA, 19 nt, Homo sapiens
  misc_RNA (1)...(19): siRNA sense strand
acggaagacuuugaagaaa

SEQ ID NO: 229475 - RNA, 19 nt, Homo sapiens
  misc_RNA (1)...(19): siRNA sense strand
gggagaaccucacggauga

SEQ ID NO: 229476 - RNA, 19 nt, Homo sapiens
  misc_RNA (1)...(19): siRNA sense strand
ggaaggaagagaugaagaa

SEQ ID NO: 229477 - RNA, 19 nt, Homo sapiens
  misc_RNA (1)...(19): siRNA sense strand
gaaggacaccaaagaagaa

SEQ ID NO: 229478 - RNA, 19 nt, Homo sapiens
  misc_RNA (1)...(19): siRNA sense strand
gggaagaucucguucaaaa

SEQ ID NO: 229479 - RNA, 19 nt, Homo sapiens
  misc_RNA (1)...(19): siRNA sense strand
gaagaccagccuuuacuga

SEQ ID NO: 229480 - RNA, 19 nt, Homo sapiens
  misc_RNA (1)...(19): siRNA sense strand
gcaagaaguucgggaagca

SEQ ID NO: 229481 - RNA, 19 nt, Homo sapiens
  misc_RNA (1)...(19): siRNA sense strand
ugaagaagaccagccuuua

SEQ ID NO: 229482 - RNA, 19 nt, Homo sapiens
  misc_RNA (1)...(19): siRNA sense strand
gaaggaagagaugaagaaa

SEQ ID NO: 229483 - RNA, 19 nt, Homo sapiens
  misc_RNA (1)...(19): siRNA sense strand
gaagaagaccagccuuuac

SEQ ID NO: 229484 - RNA, 19 nt, Homo sapiens
  misc_RNA (1)...(19): siRNA sense strand
cgcagaagauguccgagaa

SEQ ID NO: 229485 - RNA, 19 nt, Homo sapiens
  misc_RNA (1)...(19): siRNA sense strand
gaagagaugaagaaaauga

SEQ ID NO: 229486 - RNA, 19 nt, Homo sapiens
  misc_RNA (1)...(19): siRNA sense strand
cgagaaggacaccaaagaa

SEQ ID NO: 229487 - RNA, 19 nt, Homo sapiens
  misc_RNA (1)...(19): siRNA sense strand
ggacaccaaagaagaaauc

SEQ ID NO: 229488 - RNA, 19 nt, Homo sapiens
  misc_RNA (1)...(19): siRNA sense strand
gagaaggacaccaaagaag

SEQ ID NO: 229489 - RNA, 19 nt, Homo sapiens
  misc_RNA (1)...(19): siRNA sense strand
caaagaagaaauccugaag

SEQ ID NO: 229490 - RNA, 19 nt, Homo sapiens
  misc_RNA (1)...(19): siRNA sense strand
aagaucagcuucaaugacu

SEQ ID NO: 229491 - RNA, 19 nt, Homo sapiens
  misc_RNA (1)...(19): siRNA sense strand
gaugagaccgggaagaucu

SEQ ID NO: 229492 - RNA, 19 nt, Homo sapiens
  misc_RNA (1)...(19): siRNA sense strand
gaucagaagcaagaaguuc

SEQ ID NO: 229493 - RNA, 19 nt, Homo sapiens
  misc_RNA (1)...(19): siRNA sense strand
ccgggaagaucucguucaa

SEQ ID NO: 229494 - RNA, 19 nt, Homo sapiens
  misc_RNA (1)...(19): siRNA sense strand
gggaagcauuugaccucuu

SEQ ID NO: 229495 - RNA, 19 nt, Homo sapiens
  misc_RNA (1)...(19): siRNA sense strand
ccuucaggcucuuugauga

SEQ ID NO: 229496 - RNA, 19 nt, Homo sapiens
  misc_RNA (1)...(19): siRNA sense strand
agaaggacaccaaagaaga

SEQ ID NO: 229497 - RNA, 19 nt, Homo sapiens
  misc_RNA (1)...(19): siRNA sense strand
ggaguuccuucggaucaug

SEQ ID NO: 229498 - RNA, 19 nt, Homo sapiens
  misc_RNA (1)...(19): siRNA sense strand
ccaaagaagaaauccugaa

SEQ ID NO: 229499 - RNA, 19 nt, Homo sapiens
  misc_RNA (1)...(19): siRNA sense strand
gaaguucgggaagcauuug

SEQ ID NO: 229500 - RNA, 19 nt, Homo sapiens
  misc_RNA (1)...(19): siRNA sense strand
gaucagcuucaaugacuuc

SEQ ID NO: 229501 - RNA, 19 nt, Homo sapiens
  misc_RNA (1)...(19): siRNA sense strand
gaugaucgacgaagcugau

SEQ ID NO: 229502 - RNA, 19 nt, Homo sapiens
  misc_RNA (1)...(19): siRNA sense strand
ugagagcgcugggcuucga

SEQ ID NO: 229503 - RNA, 19 nt, Homo sapiens
  misc_RNA (1)...(19): siRNA sense strand
gcucuuugaugacgaugag

SEQ ID NO: 229504 - RNA, 19 nt, Homo sapiens
  misc_RNA (1)...(19): siRNA sense strand
ccgagaaggacaccaaaga

SEQ ID NO: 229505 - RNA, 19 nt, Homo sapiens
  misc_RNA (1)...(19): siRNA sense strand
aggaagagaugaagaaaau

SEQ ID NO: 229506 - RNA, 19 nt, Homo sapiens
  misc_RNA (1)...(19): siRNA sense strand
gagcugaagguggccauga

SEQ ID NO: 229507 - RNA, 19 nt, Homo sapiens
  misc_RNA (1)...(19): siRNA sense strand
augaggagcugcaggagau

SEQ ID NO: 229508 - RNA, 19 nt, Homo sapiens
  misc_RNA (1)...(19): siRNA sense strand
ccaggaaggaagagaugaa

SEQ ID NO: 229509 - RNA, 19 nt, Homo sapiens
  misc_RNA (1)...(19): siRNA sense strand
ugaagcguguggccaacga

SEQ ID NO: 229510 - RNA, 19 nt, Homo sapiens
  misc_RNA (1)...(19): siRNA sense strand
ggaucagaagcaagaaguu

SEQ ID NO: 229511 - RNA, 19 nt, Homo sapiens
  misc_RNA (1)...(19): siRNA sense strand
gaacccaggaaggaagaga

SEQ ID NO: 229512 - RNA, 19 nt, Homo sapiens
  misc_RNA (1)...(19): siRNA sense strand
gcagaagauguccgagaag

SEQ ID NO: 229513 - RNA, 19 nt, Homo sapiens
  misc_RNA (1)...(19): siRNA sense strand
gcugaagguggccaugaga

SEQ ID NO: 229514 - RNA, 19 nt, Homo sapiens
  misc_RNA (1)...(19): siRNA sense strand
ggagaugaucgacgaagcu

SEQ ID NO: 229515 - RNA, 19 nt, Homo sapiens
  misc_RNA (1)...(19): siRNA sense strand
gugaugacgcagaagaugu

SEQ ID NO: 229516 - RNA, 19 nt, Homo sapiens
  misc_RNA (1)...(19): siRNA sense strand
gaggagcugcaggagauga

SEQ ID NO: 229517 - RNA, 19 nt, Homo sapiens
  misc_RNA (1)...(19): siRNA sense strand
agaaguucgggaagcauuu

SEQ ID NO: 229518 - RNA, 19 nt, Homo sapiens
  misc_RNA (1)...(19): siRNA sense strand
agacaaagaugaagcaaua

SEQ ID NO: 229519 - RNA, 19 nt, Homo sapiens
  misc_RNA (1)...(19): siRNA sense strand
aaacaugagugaugaagaa

SEQ ID NO: 229520 - RNA, 19 nt, Homo sapiens
  misc_RNA (1)...(19): siRNA sense strand
ugacaaagauggugaugga

SEQ ID NO: 229521 - RNA, 19 nt, Homo sapiens
  misc_RNA (1)...(19): siRNA sense strand
caagaggaguucauugcua

SEQ ID NO: 229522 - RNA, 19 nt, Homo sapiens
  misc_RNA (1)...(19): siRNA sense strand
ggaaagagauccccaugaa

SEQ ID NO: 229523 - RNA, 19 nt, Homo sapiens
  misc_RNA (1)...(19): siRNA sense strand
caaagauggugauggagaa

SEQ ID NO: 229524 - RNA, 19 nt, Homo sapiens
  misc_RNA (1)...(19): siRNA sense strand
ggaguucauugcuauuaug

SEQ ID NO: 229525 - RNA, 19 nt, Homo sapiens
  misc_RNA (1)...(19): siRNA sense strand
uuaaugaaguugugacaga

SEQ ID NO: 229526 - RNA, 19 nt, Homo sapiens
  misc_RNA (1)...(19): siRNA sense strand
uauuaugacuggugacauu

SEQ ID NO: 229527 - RNA, 19 nt, Homo sapiens
  misc_RNA (1)...(19): siRNA sense strand
ggaacagaaacaagaaauu

SEQ ID NO: 229528 - RNA, 19 nt, Homo sapiens
  misc_RNA (1)...(19): siRNA sense strand
gaggaguucauugcuauua

SEQ ID NO: 229529 - RNA, 19 nt, Homo sapiens
  misc_RNA (1)...(19): siRNA sense strand
gaaaaucaccuuugaagau

SEQ ID NO: 229530 - RNA, 19 nt, Homo sapiens
  misc_RNA (1)...(19): siRNA sense strand
gaguuuagcucugagaagu

SEQ ID NO: 229531 - RNA, 19 nt, Homo sapiens
  misc_RNA (1)...(19): siRNA sense strand
agauggugauggagaaaua

SEQ ID NO: 229532 - RNA, 19 nt, Homo sapiens
  misc_RNA (1)...(19): siRNA sense strand
gaauuaaagguggcaauga

SEQ ID NO: 229533 - RNA, 19 nt, Homo sapiens
  misc_RNA (1)...(19): siRNA sense strand
aagaaauacucaaggcauu

SEQ ID NO: 229534 - RNA, 19 nt, Homo sapiens
  misc_RNA (1)...(19): siRNA sense strand
gcuagagaauugggugaaa

SEQ ID NO: 229535 - RNA, 19 nt, Homo sapiens
  misc_RNA (1)...(19): siRNA sense strand
caugagugaugaagaacuu

SEQ ID NO: 229536 - RNA, 19 nt, Homo sapiens
  misc_RNA (1)...(19): siRNA sense strand
uaugacuggugacauuuaa

SEQ ID NO: 229537 - RNA, 19 nt, Homo sapiens
  misc_RNA (1)...(19): siRNA sense strand
aagaggaguucauugcuau

SEQ ID NO: 229538 - RNA, 19 nt, Homo sapiens
  misc_RNA (1)...(19): siRNA sense strand
cagagaagccacagggaaa

SEQ ID NO: 229539 - RNA, 19 nt, Homo sapiens
  misc_RNA (1)...(19): siRNA sense strand
acucaaggcauuuaaacua

SEQ ID NO: 229540 - RNA, 19 nt, Homo sapiens
  misc_RNA (1)...(19): siRNA sense strand
gaagcaauagauuaucaug

SEQ ID NO: 229541 - RNA, 19 nt, Homo sapiens
  misc_RNA (1)...(19): siRNA sense strand
guuuagcucugagaaguga

SEQ ID NO: 229542 - RNA, 19 nt, Homo sapiens
  misc_RNA (1)...(19): siRNA sense strand
caaagaugaagcaauagau

SEQ ID NO: 229543 - RNA, 19 nt, Homo sapiens
  misc_RNA (1)...(19): siRNA sense strand
gcugauguacugaagauuc

SEQ ID NO: 229544 - RNA, 19 nt, Homo sapiens
  misc_RNA (1)...(19): siRNA sense strand
ugaugaugauucagguaaa

SEQ ID NO: 229545 - RNA, 19 nt, Homo sapiens
  misc_RNA (1)...(19): siRNA sense strand
cucaaggcauuuaaacuau

SEQ ID NO: 229546 - RNA, 19 nt, Homo sapiens
  misc_RNA (1)...(19): siRNA sense strand
gaggaacagaaacaagaaa

SEQ ID NO: 229547 - RNA, 19 nt, Homo sapiens
  misc_RNA (1)...(19): siRNA sense strand
aagcugauguacugaagau

SEQ ID NO: 229548 - RNA, 19 nt, Homo sapiens
  misc_RNA (1)...(19): siRNA sense strand
gugacagacuggauauugg

SEQ ID NO: 229549 - RNA, 19 nt, Homo sapiens
  misc_RNA (1)...(19): siRNA sense strand
aaauaaaccaagaggaguu

SEQ ID NO: 229550 - RNA, 19 nt, Homo sapiens
  misc_RNA (1)...(19): siRNA sense strand
gaugaugaugauucaggua

SEQ ID NO: 229551 - RNA, 19 nt, Homo sapiens
  misc_RNA (1)...(19): siRNA sense strand
acaaagaugaagcaauaga

SEQ ID NO: 229552 - RNA, 19 nt, Homo sapiens
  misc_RNA (1)...(19): siRNA sense strand
aauuaaagguggcaaugag

SEQ ID NO: 229553 - RNA, 19 nt, Homo sapiens
  misc_RNA (1)...(19): siRNA sense strand
aaaccaagaggaguucauu

SEQ ID NO: 229554 - RNA, 19 nt, Homo sapiens
  misc_RNA (1)...(19): siRNA sense strand
gaugaugauucagguaaaa

SEQ ID NO: 229555 - RNA, 19 nt, Homo sapiens
  misc_RNA (1)...(19): siRNA sense strand
gugaaaacaugagugauga

SEQ ID NO: 229556 - RNA, 19 nt, Homo sapiens
  misc_RNA (1)...(19): siRNA sense strand
gcgacguguugcuagagaa

SEQ ID NO: 229557 - RNA, 19 nt, Homo sapiens
  misc_RNA (1)...(19): siRNA sense strand
gauggugauggagaaauaa

SEQ ID NO: 229558 - RNA, 19 nt, Homo sapiens
  misc_RNA (1)...(19): siRNA sense strand
cagggaaaaucaccuuuga

SEQ ID NO: 229559 - RNA, 19 nt, Homo sapiens
  misc_RNA (1)...(19): siRNA sense strand
ugauacagacaaagaugaa

SEQ ID NO: 229560 - RNA, 19 nt, Homo sapiens
  misc_RNA (1)...(19): siRNA sense strand
agaauugggugaaaacaug

SEQ ID NO: 229561 - RNA, 19 nt, Homo sapiens
  misc_RNA (1)...(19): siRNA sense strand
cagacuggauauuggaaag

SEQ ID NO: 229562 - RNA, 19 nt, Homo sapiens
  misc_RNA (1)...(19): siRNA sense strand
ugacagacuggauauugga

SEQ ID NO: 229563 - RNA, 19 nt, Homo sapiens
  misc_RNA (1)...(19): siRNA sense strand
aaagaagagaacugucuga

SEQ ID NO: 229564 - RNA, 19 nt, Homo sapiens
  misc_RNA (1)...(19): siRNA sense strand
aaagagauccccaugaaga

SEQ ID NO: 229565 - RNA, 19 nt, Homo sapiens
  misc_RNA (1)...(19): siRNA sense strand
ugaggaacagaaacaagaa

SEQ ID NO: 229566 - RNA, 19 nt, Homo sapiens
  misc_RNA (1)...(19): siRNA sense strand
ggaaaaucaccuuugaaga

SEQ ID NO: 229567 - RNA, 19 nt, Homo sapiens
  misc_RNA (1)...(19): siRNA sense strand
uuaugacuggugacauuua

SEQ ID NO: 229568 - RNA, 19 nt, Homo sapiens
  misc_RNA (1)...(19): siRNA sense strand
ggacaaaacaaagaggaaa

SEQ ID NO: 229569 - RNA, 19 nt, Homo sapiens
  misc_RNA (1)...(19): siRNA sense strand
cugaggaacagaaacaaga

SEQ ID NO: 229570 - RNA, 19 nt, Homo sapiens
  misc_RNA (1)...(19): siRNA sense strand
aggaguucauugcuauuau

SEQ ID NO: 229571 - RNA, 19 nt, Homo sapiens
  misc_RNA (1)...(19): siRNA sense strand
ugaauuaaagguggcaaug

SEQ ID NO: 229572 - RNA, 19 nt, Homo sapiens
  misc_RNA (1)...(19): siRNA sense strand
auggagaaauaaaccaaga

SEQ ID NO: 229573 - RNA, 19 nt, Homo sapiens
  misc_RNA (1)...(19): siRNA sense strand
ugugacagacuggauauug

SEQ ID NO: 229574 - RNA, 19 nt, Homo sapiens
  misc_RNA (1)...(19): siRNA sense strand
gacuggauauuggaaagag

SEQ ID NO: 229575 - RNA, 19 nt, Homo sapiens
  misc_RNA (1)...(19): siRNA sense strand
gaacuauuugauacagaca

SEQ ID NO: 229576 - RNA, 19 nt, Homo sapiens
  misc_RNA (1)...(19): siRNA sense strand
acguguugcuagagaauug

SEQ ID NO: 229577 - RNA, 19 nt, Homo sapiens
  misc_RNA (1)...(19): siRNA sense strand
gagaacugucugaggaaca

SEQ ID NO: 229578 - RNA, 19 nt, Homo sapiens
  misc_RNA (1)...(19): siRNA sense strand
gaugaagcaauagauuauc

SEQ ID NO: 229579 - RNA, 19 nt, Homo sapiens
  misc_RNA (1)...(19): siRNA sense strand
agacgaaggugcugaaaca

SEQ ID NO: 229580 - RNA, 19 nt, Homo sapiens
  misc_RNA (1)...(19): siRNA sense strand
ggucuuaaacgaauauuuc

SEQ ID NO: 229581 - RNA, 19 nt, Homo sapiens
  misc_RNA (1)...(19): siRNA sense strand
gcaguuugaugaugaugag

SEQ ID NO: 229582 - RNA, 19 nt, Homo sapiens
  misc_RNA (1)...(19): siRNA sense strand
acgaauauuuccacaaugu

SEQ ID NO: 229583 - RNA, 19 nt, Homo sapiens
  misc_RNA (1)...(19): siRNA sense strand
guggaggucuuaaacgaau

SEQ ID NO: 229584 - RNA, 19 nt, Homo sapiens
  misc_RNA (1)...(19): siRNA sense strand
guuccuggcuggcgaaauc

SEQ ID NO: 229585 - RNA, 19 nt, Homo sapiens
  misc_RNA (1)...(19): siRNA sense strand
acaugcaguuugaugauga

SEQ ID NO: 229586 - RNA, 19 nt, Homo sapiens
  misc_RNA (1)...(19): siRNA sense strand
gcuuuauccucauccagaa

SEQ ID NO: 229587 - RNA, 19 nt, Homo sapiens
  misc_RNA (1)...(19): siRNA sense strand
agugguacaugcaguuuga

SEQ ID NO: 229588 - RNA, 19 nt, Homo sapiens
  misc_RNA (1)...(19): siRNA sense strand
guuugaugaugaugagaaa

SEQ ID NO: 229589 - RNA, 19 nt, Homo sapiens
  misc_RNA (1)...(19): siRNA sense strand
guacaugcaguuugaugau

SEQ ID NO: 229590 - RNA, 19 nt, Homo sapiens
  misc_RNA (1)...(19): siRNA sense strand
gaauauuuccacaaugucu

SEQ ID NO: 229591 - RNA, 19 nt, Homo sapiens
  misc_RNA (1)...(19): siRNA sense strand
gguacaugcaguuugauga

SEQ ID NO: 229592 - RNA, 19 nt, Homo sapiens
  misc_RNA (1)...(19): siRNA sense strand
gaccugguguucaacuucu

SEQ ID NO: 229593 - RNA, 19 nt, Homo sapiens
  misc_RNA (1)...(19): siRNA sense strand
ggaggucuuaaacgaauau

SEQ ID NO: 229594 - RNA, 19 nt, Homo sapiens
  misc_RNA (1)...(19): siRNA sense strand
ggaccugguguucaacuuc

SEQ ID NO: 229595 - RNA, 19 nt, Homo sapiens
  misc_RNA (1)...(19): siRNA sense strand
cgccaaacacaccaacuuu

SEQ ID NO: 229596 - RNA, 19 nt, Homo sapiens
  misc_RNA (1)...(19): siRNA sense strand
caagugguacaugcaguuu

SEQ ID NO: 229597 - RNA, 19 nt, Homo sapiens
  misc_RNA (1)...(19): siRNA sense strand
gagagaccagccagacgaa

SEQ ID NO: 229598 - RNA, 19 nt, Homo sapiens
  misc_RNA (1)...(19): siRNA sense strand
guucaacuucuacaagguu

SEQ ID NO: 229599 - RNA, 19 nt, Homo sapiens
  misc_RNA (1)...(19): siRNA sense strand
ccaagugguacaugcaguu

SEQ ID NO: 229600 - RNA, 19 nt, Homo sapiens
  misc_RNA (1)...(19): siRNA sense strand
gauccgcuuuauccucauc

SEQ ID NO: 229601 - RNA, 19 nt, Homo sapiens
  misc_RNA (1)...(19): siRNA sense strand
uggaggucuuaaacgaaua

SEQ ID NO: 229602 - RNA, 19 nt, Homo sapiens
  misc_RNA (1)...(19): siRNA sense strand
gcuacagucccuggaguga

SEQ ID NO: 229603 - RNA, 19 nt, Homo sapiens
  misc_RNA (1)...(19): siRNA sense strand
gaugaugaugagaaacaga

SEQ ID NO: 229604 - RNA, 19 nt, Homo sapiens
  misc_RNA (1)...(19): siRNA sense strand
agaaacagaagcugaucga

SEQ ID NO: 229605 - RNA, 19 nt, Homo sapiens
  misc_RNA (1)...(19): siRNA sense strand
uacaugcaguuugaugaug

SEQ ID NO: 229606 - RNA, 19 nt, Homo sapiens
  misc_RNA (1)...(19): siRNA sense strand
agacgaaggugcugaaaca

SEQ ID NO: 229607 - RNA, 19 nt, Homo sapiens
  misc_RNA (1)...(19): siRNA sense strand
ggucuuaaacgaauauuuc

SEQ ID NO: 229608 - RNA, 19 nt, Homo sapiens
  misc_RNA (1)...(19): siRNA sense strand
gcaguuugaugaugaugag

SEQ ID NO: 229609 - RNA, 19 nt, Homo sapiens
  misc_RNA (1)...(19): siRNA sense strand
acgaauauuuccacaaugu

SEQ ID NO: 229610 - RNA, 19 nt, Homo sapiens
  misc_RNA (1)...(19): siRNA sense strand
guggaggucuuaaacgaau

SEQ ID NO: 229611 - RNA, 19 nt, Homo sapiens
  misc_RNA (1)...(19): siRNA sense strand
guuccuggcuggcgaaauc

SEQ ID NO: 229612 - RNA, 19 nt, Homo sapiens
  misc_RNA (1)...(19): siRNA sense strand
acaugcaguuugaugauga

SEQ ID NO: 229613 - RNA, 19 nt, Homo sapiens
  misc_RNA (1)...(19): siRNA sense strand
gcuuuauccucauccagaa

SEQ ID NO: 229614 - RNA, 19 nt, Homo sapiens
  misc_RNA (1)...(19): siRNA sense strand
agugguacaugcaguuuga

SEQ ID NO: 229615 - RNA, 19 nt, Homo sapiens
  misc_RNA (1)...(19): siRNA sense strand
guuugaugaugaugagaaa

SEQ ID NO: 229616 - RNA, 19 nt, Homo sapiens
  misc_RNA (1)...(19): siRNA sense strand
guacaugcaguuugaugau

SEQ ID NO: 229617 - RNA, 19 nt, Homo sapiens
  misc_RNA (1)...(19): siRNA sense strand
gaauauuuccacaaugucu

SEQ ID NO: 229618 - RNA, 19 nt, Homo sapiens
  misc_RNA (1)...(19): siRNA sense strand
gguacaugcaguuugauga

SEQ ID NO: 229619 - RNA, 19 nt, Homo sapiens
  misc_RNA (1)...(19): siRNA sense strand
gaccugguguucaacuucu

SEQ ID NO: 229620 - RNA, 19 nt, Homo sapiens
  misc_RNA (1)...(19): siRNA sense strand
ggaggucuuaaacgaauau

SEQ ID NO: 229621 - RNA, 19 nt, Homo sapiens
  misc_RNA (1)...(19): siRNA sense strand
ggaccugguguucaacuuc

SEQ ID NO: 229622 - RNA, 19 nt, Homo sapiens
  misc_RNA (1)...(19): siRNA sense strand
cgccaaacacaccaacuuu

SEQ ID NO: 229623 - RNA, 19 nt, Homo sapiens
  misc_RNA (1)...(19): siRNA sense strand
caagugguacaugcaguuu

SEQ ID NO: 229624 - RNA, 19 nt, Homo sapiens
  misc_RNA (1)...(19): siRNA sense strand
gagagaccagccagacgaa

SEQ ID NO: 229625 - RNA, 19 nt, Homo sapiens
  misc_RNA (1)...(19): siRNA sense strand
guucaacuucuacaagguu

SEQ ID NO: 229626 - RNA, 19 nt, Homo sapiens
  misc_RNA (1)...(19): siRNA sense strand
ccaagugguacaugcaguu

SEQ ID NO: 229627 - RNA, 19 nt, Homo sapiens
  misc_RNA (1)...(19): siRNA sense strand
gauccgcuuuauccucauc

SEQ ID NO: 229628 - RNA, 19 nt, Homo sapiens
  misc_RNA (1)...(19): siRNA sense strand
uggaggucuuaaacgaaua

SEQ ID NO: 229629 - RNA, 19 nt, Homo sapiens
  misc_RNA (1)...(19): siRNA sense strand
gcuacagucccuggaguga

SEQ ID NO: 229630 - RNA, 19 nt, Homo sapiens
  misc_RNA (1)...(19): siRNA sense strand
gaugaugaugagaaacaga

SEQ ID NO: 229631 - RNA, 19 nt, Homo sapiens
  misc_RNA (1)...(19): siRNA sense strand
agaaacagaagcugaucga

SEQ ID NO: 229632 - RNA, 19 nt, Homo sapiens
  misc_RNA (1)...(19): siRNA sense strand
uacaugcaguuugaugaug

SEQ ID NO: 229633 - RNA, 19 nt, Homo sapiens
  misc_RNA (1)...(19): siRNA sense strand
gcgagaagauccuaaauga

SEQ ID NO: 229634 - RNA, 19 nt, Homo sapiens
  misc_RNA (1)...(19): siRNA sense strand
gcagaaagaagaagaguaa

SEQ ID NO: 229635 - RNA, 19 nt, Homo sapiens
  misc_RNA (1)...(19): siRNA sense strand
gaaagacugugcacuacaa

SEQ ID NO: 229636 - RNA, 19 nt, Homo sapiens
  misc_RNA (1)...(19): siRNA sense strand
gagaagauccuaaaugaga

SEQ ID NO: 229637 - RNA, 19 nt, Homo sapiens
  misc_RNA (1)...(19): siRNA sense strand
gcacaaagcacuucuccuu

SEQ ID NO: 229638 - RNA, 19 nt, Homo sapiens
  misc_RNA (1)...(19): siRNA sense strand
gggaugaggucuccgguuu

SEQ ID NO: 229639 - RNA, 19 nt, Homo sapiens
  misc_RNA (1)...(19): siRNA sense strand
gaaagaagaagaguaagaa

SEQ ID NO: 229640 - RNA, 19 nt, Homo sapiens
  misc_RNA (1)...(19): siRNA sense strand
gaaagucccuggcccacau

SEQ ID NO: 229641 - RNA, 19 nt, Homo sapiens
  misc_RNA (1)...(19): siRNA sense strand
gcaaguggguugacuacuc

SEQ ID NO: 229642 - RNA, 19 nt, Homo sapiens
  misc_RNA (1)...(19): siRNA sense strand
gcacauccguuggccauca

SEQ ID NO: 229643 - RNA, 19 nt, Homo sapiens
  misc_RNA (1)...(19): siRNA sense strand
guacuucgccuccuacaug

SEQ ID NO: 229644 - RNA, 19 nt, Homo sapiens
  misc_RNA (1)...(19): siRNA sense strand
ggaucaggcucuccucaug

SEQ ID NO: 229645 - RNA, 19 nt, Homo sapiens
  misc_RNA (1)...(19): siRNA sense strand
gcugacaacaucuacauuu

SEQ ID NO: 229646 - RNA, 19 nt, Homo sapiens
  misc_RNA (1)...(19): siRNA sense strand
guggagaucugcccagugu

SEQ ID NO: 229647 - RNA, 19 nt, Homo sapiens
  misc_RNA (1)...(19): siRNA sense strand
gaccucaaguugggaaauu

SEQ ID NO: 229648 - RNA, 19 nt, Homo sapiens
  misc_RNA (1)...(19): siRNA sense strand
ugaggacgcugacaacauc

SEQ ID NO: 229649 - RNA, 19 nt, Homo sapiens
  misc_RNA (1)...(19): siRNA sense strand
cagaagugcugcugagaca

SEQ ID NO: 229650 - RNA, 19 nt, Homo sapiens
  misc_RNA (1)...(19): siRNA sense strand
caguggagauggauuugaa

SEQ ID NO: 229651 - RNA, 19 nt, Homo sapiens
  misc_RNA (1)...(19): siRNA sense strand
gcaccgggaccucaaguug

SEQ ID NO: 229652 - RNA, 19 nt, Homo sapiens
  misc_RNA (1)...(19): siRNA sense strand
agaagaagaguaagaauca

SEQ ID NO: 229653 - RNA, 19 nt, Homo sapiens
  misc_RNA (1)...(19): siRNA sense strand
gcaucaagcagguucacua

SEQ ID NO: 229654 - RNA, 19 nt, Homo sapiens
  misc_RNA (1)...(19): siRNA sense strand
ucacugggcugugucaugu

SEQ ID NO: 229655 - RNA, 19 nt, Homo sapiens
  misc_RNA (1)...(19): siRNA sense strand
gaagauccuaaaugagauu

SEQ ID NO: 229656 - RNA, 19 nt, Homo sapiens
  misc_RNA (1)...(19): siRNA sense strand
ccucaaaggccgcuuguug

SEQ ID NO: 229657 - RNA, 19 nt, Homo sapiens
  misc_RNA (1)...(19): siRNA sense strand
gaagaagaguaagaaucau

SEQ ID NO: 229658 - RNA, 19 nt, Homo sapiens
  misc_RNA (1)...(19): siRNA sense strand
acaaagcacuucuccuucu

SEQ ID NO: 229659 - RNA, 19 nt, Homo sapiens
  misc_RNA (1)...(19): siRNA sense strand
cuauguggcuccagaagug

SEQ ID NO: 229660 - RNA, 19 nt, Homo sapiens
  misc_RNA (1)...(19): siRNA sense strand
uggguugacuacuccaaua

SEQ ID NO: 229661 - RNA, 19 nt, Homo sapiens
  misc_RNA (1)...(19): siRNA sense strand
ugagacggcugaccugaag

SEQ ID NO: 229662 - RNA, 19 nt, Homo sapiens
  misc_RNA (1)...(19): siRNA sense strand
gcucuccucaugcuguuua

SEQ ID NO: 229663 - RNA, 19 nt, Homo sapiens
  misc_RNA (1)...(19): siRNA sense strand
gcucugagaaauuguauag

SEQ ID NO: 229664 - RNA, 19 nt, Homo sapiens
  misc_RNA (1)...(19): siRNA sense strand
gaugaggucuccgguuugg

SEQ ID NO: 229665 - RNA, 19 nt, Homo sapiens
  misc_RNA (1)...(19): siRNA sense strand
guaguggagucagcccuuu

SEQ ID NO: 229666 - RNA, 19 nt, Homo sapiens
  misc_RNA (1)...(19): siRNA sense strand
gccaugacuucuuuaccaa

SEQ ID NO: 229667 - RNA, 19 nt, Homo sapiens
  misc_RNA (1)...(19): siRNA sense strand
cagaaagacugugcacuac

SEQ ID NO: 229668 - RNA, 19 nt, Homo sapiens
  misc_RNA (1)...(19): siRNA sense strand
agaaagaagaagaguaaga

SEQ ID NO: 229669 - RNA, 19 nt, Homo sapiens
  misc_RNA (1)...(19): siRNA sense strand
uaaguucggcuuuggguau

SEQ ID NO: 229670 - RNA, 19 nt, Homo sapiens
  misc_RNA (1)...(19): siRNA sense strand
ggcaagcaguggagaugga

SEQ ID NO: 229671 - RNA, 19 nt, Homo sapiens
  misc_RNA (1)...(19): siRNA sense strand
caugaaggguggagaucug

SEQ ID NO: 229672 - RNA, 19 nt, Homo sapiens
  misc_RNA (1)...(19): siRNA sense strand
uuaccucgcuucccaccuu

SEQ ID NO: 229673 - RNA, 19 nt, Homo sapiens
  misc_RNA (1)...(19): siRNA sense strand
gcacuguccaggugaacuu

SEQ ID NO: 229674 - RNA, 19 nt, Homo sapiens
  misc_RNA (1)...(19): siRNA sense strand
gauccuuucuggccucaag

SEQ ID NO: 229675 - RNA, 19 nt, Homo sapiens
  misc_RNA (1)...(19): siRNA sense strand
ugacuacuccaauaaguuc

SEQ ID NO: 229676 - RNA, 19 nt, Homo sapiens
  misc_RNA (1)...(19): siRNA sense strand
gauccuaaaugagauugag

SEQ ID NO: 229677 - RNA, 19 nt, Homo sapiens
  misc_RNA (1)...(19): siRNA sense strand
cgccuacgcugucaaaguc

SEQ ID NO: 229678 - RNA, 19 nt, Homo sapiens
  misc_RNA (1)...(19): siRNA sense strand
gaaaucguagugcuuguac

SEQ ID NO: 229679 - RNA, 19 nt, Homo sapiens
  misc_RNA (1)...(19): siRNA sense strand
cgaaaucguagugcuugua

SEQ ID NO: 229680 - RNA, 19 nt, Homo sapiens
  misc_RNA (1)...(19): siRNA sense strand
cugagaacauggaacugaa

SEQ ID NO: 229681 - RNA, 19 nt, Homo sapiens
  misc_RNA (1)...(19): siRNA sense strand
caaagcacuucuccuucuc

SEQ ID NO: 229682 - RNA, 19 nt, Homo sapiens
  misc_RNA (1)...(19): siRNA sense strand
ucaagcagguucacuacac

SEQ ID NO: 229683 - RNA, 19 nt, Homo sapiens
  misc_RNA (1)...(19): siRNA sense strand
uuucuggccucaaguacuu

SEQ ID NO: 229684 - RNA, 19 nt, Homo sapiens
  misc_RNA (1)...(19): siRNA sense strand
guugacuacuccaauaagu

SEQ ID NO: 229685 - RNA, 19 nt, Homo sapiens
  misc_RNA (1)...(19): siRNA sense strand
cgccaugacuucuuuacca

SEQ ID NO: 229686 - RNA, 19 nt, Homo sapiens
  misc_RNA (1)...(19): siRNA sense strand
ggaccacaccaagcugauu

SEQ ID NO: 229687 - RNA, 19 nt, Homo sapiens
  misc_RNA (1)...(19): siRNA sense strand
uuucaucacugagaacaug

SEQ ID NO: 229688 - RNA, 19 nt, Homo sapiens
  misc_RNA (1)...(19): siRNA sense strand
caacgauggcacacauaug

SEQ ID NO: 229689 - RNA, 19 nt, Homo sapiens
  misc_RNA (1)...(19): siRNA sense strand
ggguugacuacuccaauaa

SEQ ID NO: 229690 - RNA, 19 nt, Homo sapiens
  misc_RNA (1)...(19): siRNA sense strand
ucugagaaauuguauagcu

SEQ ID NO: 229691 - RNA, 19 nt, Homo sapiens
  misc_RNA (1)...(19): siRNA sense strand
agaagauccuaaaugagau

SEQ ID NO: 229692 - RNA, 19 nt, Homo sapiens
  misc_RNA (1)...(19): siRNA sense strand
ccugcgccaugacuucuuu

SEQ ID NO: 229693 - RNA, 19 nt, Homo sapiens
  misc_RNA (1)...(19): siRNA sense strand
uggcugugcucuucaacga

SEQ ID NO: 229694 - RNA, 19 nt, Homo sapiens
  misc_RNA (1)...(19): siRNA sense strand
cugagaaauuguauagcuu

SEQ ID NO: 229695 - RNA, 19 nt, Homo sapiens
  misc_RNA (1)...(19): siRNA sense strand
guagagacagcaccugaag

SEQ ID NO: 229696 - RNA, 19 nt, Homo sapiens
  misc_RNA (1)...(19): siRNA sense strand
ggcagaaagaagaagagua

SEQ ID NO: 229697 - RNA, 19 nt, Homo sapiens
  misc_RNA (1)...(19): siRNA sense strand
gaccacaccaagcugauuc

SEQ ID NO: 229698 - RNA, 19 nt, Homo sapiens
  misc_RNA (1)...(19): siRNA sense strand
caacaucuacauuuucuug

SEQ ID NO: 229699 - RNA, 19 nt, Homo sapiens
  misc_RNA (1)...(19): siRNA sense strand
ggaugaggucuccgguuug

SEQ ID NO: 229700 - RNA, 19 nt, Homo sapiens
  misc_RNA (1)...(19): siRNA sense strand
ucaacgauggcacacauau

SEQ ID NO: 229701 - RNA, 19 nt, Homo sapiens
  misc_RNA (1)...(19): siRNA sense strand
uccaauaaguucggcuuug

SEQ ID NO: 229702 - RNA, 19 nt, Homo sapiens
  misc_RNA (1)...(19): siRNA sense strand
uuugugcucugagaaauug

SEQ ID NO: 229703 - RNA, 19 nt, Homo sapiens
  misc_RNA (1)...(19): siRNA sense strand
gcaguggagauggauuuga

SEQ ID NO: 229704 - RNA, 19 nt, Homo sapiens
  misc_RNA (1)...(19): siRNA sense strand
gguagagacagcaccugaa

SEQ ID NO: 229705 - RNA, 19 nt, Homo sapiens
  misc_RNA (1)...(19): siRNA sense strand
cuucaacgauggcacacau

SEQ ID NO: 229706 - RNA, 19 nt, Homo sapiens
  misc_RNA (1)...(19): siRNA sense strand
caacuauguggcuccagaa

SEQ ID NO: 229707 - RNA, 19 nt, Homo sapiens
  misc_RNA (1)...(19): siRNA sense strand
uguggaagagguagaggua

SEQ ID NO: 229708 - RNA, 19 nt, Homo sapiens
  misc_RNA (1)...(19): siRNA sense strand
aagcaguggagauggauuu

SEQ ID NO: 229709 - RNA, 19 nt, Homo sapiens
  misc_RNA (1)...(19): siRNA sense strand
agccagaagugcgcuacua

SEQ ID NO: 229710 - RNA, 19 nt, Homo sapiens
  misc_RNA (1)...(19): siRNA sense strand
ccagcuaggagucuguuug

SEQ ID NO: 229711 - RNA, 19 nt, Homo sapiens
  misc_RNA (1)...(19): siRNA sense strand
gacaacaucuacauuuucu

SEQ ID NO: 229712 - RNA, 19 nt, Homo sapiens
  misc_RNA (1)...(19): siRNA sense strand
gauccugcgccaugacuuc

SEQ ID NO: 229713 - RNA, 19 nt, Homo sapiens
  misc_RNA (1)...(19): siRNA sense strand
aagaagaagaguaagaauc

SEQ ID NO: 229714 - RNA, 19 nt, Homo sapiens
  misc_RNA (1)...(19): siRNA sense strand
ggccgcaccuaccucaaag

SEQ ID NO: 229715 - RNA, 19 nt, Homo sapiens
  misc_RNA (1)...(19): siRNA sense strand
ucacugagaacauggaacu

SEQ ID NO: 229716 - RNA, 19 nt, Homo sapiens
  misc_RNA (1)...(19): siRNA sense strand
gcgccuacgcugucaaagu

SEQ ID NO: 229717 - RNA, 19 nt, Homo sapiens
  misc_RNA (1)...(19): siRNA sense strand
gagacguaccgcugcauca

SEQ ID NO: 229718 - RNA, 19 nt, Homo sapiens
  misc_RNA (1)...(19): siRNA sense strand
uauggucacugggcugugu

SEQ ID NO: 229719 - RNA, 19 nt, Homo sapiens
  misc_RNA (1)...(19): siRNA sense strand
cuacgaggccacugacaca

SEQ ID NO: 229720 - RNA, 19 nt, Homo sapiens
  misc_RNA (1)...(19): siRNA sense strand
aagaagaguaagaaucaug

SEQ ID NO: 229721 - RNA, 19 nt, Homo sapiens
  misc_RNA (1)...(19): siRNA sense strand
gaggaagaagaccaucugu

SEQ ID NO: 229722 - RNA, 19 nt, Homo sapiens
  misc_RNA (1)...(19): siRNA sense strand
aaucguagugcuuguacuu

SEQ ID NO: 229723 - RNA, 19 nt, Homo sapiens
  misc_RNA (1)...(19): siRNA sense strand
ggcuuuggguaucaacugu

SEQ ID NO: 229724 - RNA, 19 nt, Homo sapiens
  misc_RNA (1)...(19): siRNA sense strand
gcccugaagcggauguaug

SEQ ID NO: 229725 - RNA, 19 nt, Homo sapiens
  misc_RNA (1)...(19): siRNA sense strand
gagcucugcagccgaaagu

SEQ ID NO: 229726 - RNA, 19 nt, Homo sapiens
  misc_RNA (1)...(19): siRNA sense strand
gacagucccagaccugaca

SEQ ID NO: 229727 - RNA, 19 nt, Homo sapiens
  misc_RNA (1)...(19): siRNA sense strand
cucaugcuguuuagugaug

SEQ ID NO: 229728 - RNA, 19 nt, Homo sapiens
  misc_RNA (1)...(19): siRNA sense strand
uggagcagcaccucaugaa

SEQ ID NO: 229729 - RNA, 19 nt, Homo sapiens
  misc_RNA (1)...(19): siRNA sense strand
cgacauggcuuucaucuua

SEQ ID NO: 229730 - RNA, 19 nt, Homo sapiens
  misc_RNA (1)...(19): siRNA sense strand
caaagaaccuugugaaguu

SEQ ID NO: 229731 - RNA, 19 nt, Homo sapiens
  misc_RNA (1)...(19): siRNA sense strand
ggacuuggauuaugaacua

SEQ ID NO: 229732 - RNA, 19 nt, Homo sapiens
  misc_RNA (1)...(19): siRNA sense strand
ucaaugagaugaagaagua

SEQ ID NO: 229733 - RNA, 19 nt, Homo sapiens
  misc_RNA (1)...(19): siRNA sense strand
caacaaagccugugacuau

SEQ ID NO: 229734 - RNA, 19 nt, Homo sapiens
  misc_RNA (1)...(19): siRNA sense strand
ggagagaccucacagacuu

SEQ ID NO: 229735 - RNA, 19 nt, Homo sapiens
  misc_RNA (1)...(19): siRNA sense strand
ggacacaguuuaugaagau

SEQ ID NO: 229736 - RNA, 19 nt, Homo sapiens
  misc_RNA (1)...(19): siRNA sense strand
ggaggagguuggaaagaua

SEQ ID NO: 229737 - RNA, 19 nt, Homo sapiens
  misc_RNA (1)...(19): siRNA sense strand
gauguggucuugaguauug

SEQ ID NO: 229738 - RNA, 19 nt, Homo sapiens
  misc_RNA (1)...(19): siRNA sense strand
gaaagggaauccuggaaga

SEQ ID NO: 229739 - RNA, 19 nt, Homo sapiens
  misc_RNA (1)...(19): siRNA sense strand
gaacggcacucaagguuuc

SEQ ID NO: 229740 - RNA, 19 nt, Homo sapiens
  misc_RNA (1)...(19): siRNA sense strand
gcagggauuucauauuaaa

SEQ ID NO: 229741 - RNA, 19 nt, Homo sapiens
  misc_RNA (1)...(19): siRNA sense strand
gaauugcgguggcucagua

SEQ ID NO: 229742 - RNA, 19 nt, Homo sapiens
  misc_RNA (1)...(19): siRNA sense strand
gaagaaagcagacauugug

SEQ ID NO: 229743 - RNA, 19 nt, Homo sapiens
  misc_RNA (1)...(19): siRNA sense strand
uugcagggauuucauauua

SEQ ID NO: 229744 - RNA, 19 nt, Homo sapiens
  misc_RNA (1)...(19): siRNA sense strand
gaacuagccuuugcuuuag

SEQ ID NO: 229745 - RNA, 19 nt, Homo sapiens
  misc_RNA (1)...(19): siRNA sense strand
gcaggaaggugaacaucaa

SEQ ID NO: 229746 - RNA, 19 nt, Homo sapiens
  misc_RNA (1)...(19): siRNA sense strand
gaaagaguuuguccagaga

SEQ ID NO: 229747 - RNA, 19 nt, Homo sapiens
  misc_RNA (1)...(19): siRNA sense strand
gaagacacgccaacacuaa

SEQ ID NO: 229748 - RNA, 19 nt, Homo sapiens
  misc_RNA (1)...(19): siRNA sense strand
gaaggaacuugcagggauu

SEQ ID NO: 229749 - RNA, 19 nt, Homo sapiens
  misc_RNA (1)...(19): siRNA sense strand
gaagagaagcagcauaaug

SEQ ID NO: 229750 - RNA, 19 nt, Homo sapiens
  misc_RNA (1)...(19): siRNA sense strand
ucagagagcuucccaacau

SEQ ID NO: 229751 - RNA, 19 nt, Homo sapiens
  misc_RNA (1)...(19): siRNA sense strand
gaaagaaugugaaaagguu

SEQ ID NO: 229752 - RNA, 19 nt, Homo sapiens
  misc_RNA (1)...(19): siRNA sense strand
caacaaaguggucuacaaa

SEQ ID NO: 229753 - RNA, 19 nt, Homo sapiens
  misc_RNA (1)...(19): siRNA sense strand
gacuuucucuacaagauua

SEQ ID NO: 229754 - RNA, 19 nt, Homo sapiens
  misc_RNA (1)...(19): siRNA sense strand
agaacuagccuuugcuuua

SEQ ID NO: 229755 - RNA, 19 nt, Homo sapiens
  misc_RNA (1)...(19): siRNA sense strand
guacagcgaugaugucaag

SEQ ID NO: 229756 - RNA, 19 nt, Homo sapiens
  misc_RNA (1)...(19): siRNA sense strand
gaacaagggugccgaucag

SEQ ID NO: 229757 - RNA, 19 nt, Homo sapiens
  misc_RNA (1)...(19): siRNA sense strand
caacagaacuagccuuugc

SEQ ID NO: 229758 - RNA, 19 nt, Homo sapiens
  misc_RNA (1)...(19): siRNA sense strand
caacauagaagaaagaauc

SEQ ID NO: 229759 - RNA, 19 nt, Homo sapiens
  misc_RNA (1)...(19): siRNA sense strand
gcucuagacuuuguucgua

SEQ ID NO: 229760 - RNA, 19 nt, Homo sapiens
  misc_RNA (1)...(19): siRNA sense strand
cgacgucuucuucaaauua

SEQ ID NO: 229761 - RNA, 19 nt, Homo sapiens
  misc_RNA (1)...(19): siRNA sense strand
gagauguggucuugaguau

SEQ ID NO: 229762 - RNA, 19 nt, Homo sapiens
  misc_RNA (1)...(19): siRNA sense strand
guaagucccuagaugaaau

SEQ ID NO: 229763 - RNA, 19 nt, Homo sapiens
  misc_RNA (1)...(19): siRNA sense strand
gcuaaugcaucuggaguuu

SEQ ID NO: 229764 - RNA, 19 nt, Homo sapiens
  misc_RNA (1)...(19): siRNA sense strand
gaagaagaaagcagacauu

SEQ ID NO: 229765 - RNA, 19 nt, Homo sapiens
  misc_RNA (1)...(19): siRNA sense strand
uagagaggcugguugacua

SEQ ID NO: 229766 - RNA, 19 nt, Homo sapiens
  misc_RNA (1)...(19): siRNA sense strand
gaaaucggacaggaucuua

SEQ ID NO: 229767 - RNA, 19 nt, Homo sapiens
  misc_RNA (1)...(19): siRNA sense strand
caaagccugugacuauuau

SEQ ID NO: 229768 - RNA, 19 nt, Homo sapiens
  misc_RNA (1)...(19): siRNA sense strand
cgaauaacguuacuucaag

SEQ ID NO: 229769 - RNA, 19 nt, Homo sapiens
  misc_RNA (1)...(19): siRNA sense strand
gaaagcagacauuguguuc

SEQ ID NO: 229770 - RNA, 19 nt, Homo sapiens
  misc_RNA (1)...(19): siRNA sense strand
gggcucugcucuagacuuu

SEQ ID NO: 229771 - RNA, 19 nt, Homo sapiens
  misc_RNA (1)...(19): siRNA sense strand
gaggaaacaucggcacuug

SEQ ID NO: 229772 - RNA, 19 nt, Homo sapiens
  misc_RNA (1)...(19): siRNA sense strand
gaaauaguggacacaguuu

SEQ ID NO: 229773 - RNA, 19 nt, Homo sapiens
  misc_RNA (1)...(19): siRNA sense strand
gaucgaggauggagugcuu

SEQ ID NO: 229774 - RNA, 19 nt, Homo sapiens
  misc_RNA (1)...(19): siRNA sense strand
caaacgacgucuucuucaa

SEQ ID NO: 229775 - RNA, 19 nt, Homo sapiens
  misc_RNA (1)...(19): siRNA sense strand
gaaccugggcuaaauggaa

SEQ ID NO: 229776 - RNA, 19 nt, Homo sapiens
  misc_RNA (1)...(19): siRNA sense strand
cagagaugcucgagaaguu

SEQ ID NO: 229777 - RNA, 19 nt, Homo sapiens
  misc_RNA (1)...(19): siRNA sense strand
gaagaaagaaucaugaacu

SEQ ID NO: 229778 - RNA, 19 nt, Homo sapiens
  misc_RNA (1)...(19): siRNA sense strand
cagagucgcuucccaagau

SEQ ID NO: 229779 - RNA, 19 nt, Homo sapiens
  misc_RNA (1)...(19): siRNA sense strand
caacgaagccggugacuac

SEQ ID NO: 229780 - RNA, 19 nt, Homo sapiens
  misc_RNA (1)...(19): siRNA sense strand
ucacagacuuccuggagaa

SEQ ID NO: 229781 - RNA, 19 nt, Homo sapiens
  misc_RNA (1)...(19): siRNA sense strand
acggagaucuggcugauuu

SEQ ID NO: 229782 - RNA, 19 nt, Homo sapiens
  misc_RNA (1)...(19): siRNA sense strand
gaacagaaucagccagaug

SEQ ID NO: 229783 - RNA, 19 nt, Homo sapiens
  misc_RNA (1)...(19): siRNA sense strand
gcaaugcccuggaguacgu

SEQ ID NO: 229784 - RNA, 19 nt, Homo sapiens
  misc_RNA (1)...(19): siRNA sense strand
ucacagagaugcagaccau

SEQ ID NO: 229785 - RNA, 19 nt, Homo sapiens
  misc_RNA (1)...(19): siRNA sense strand
ucgaugagcucaaugugaa

SEQ ID NO: 229786 - RNA, 19 nt, Homo sapiens
  misc_RNA (1)...(19): siRNA sense strand
acaaagacggccacuguua

SEQ ID NO: 229787 - RNA, 19 nt, Homo sapiens
  misc_RNA (1)...(19): siRNA sense strand
ugacaacauugccgagaaa

SEQ ID NO: 229788 - RNA, 19 nt, Homo sapiens
  misc_RNA (1)...(19): siRNA sense strand
ccaagaggcagauuauuga

SEQ ID NO: 229789 - RNA, 19 nt, Homo sapiens
  misc_RNA (1)...(19): siRNA sense strand
ucuacaagauuaucgauga

SEQ ID NO: 229790 - RNA, 19 nt, Homo sapiens
  misc_RNA (1)...(19): siRNA sense strand
ggagagaggacccaaagga

SEQ ID NO: 229791 - RNA, 19 nt, Homo sapiens
  misc_RNA (1)...(19): siRNA sense strand
ggcgaggguuuauguauga

SEQ ID NO: 229792 - RNA, 19 nt, Homo sapiens
  misc_RNA (1)...(19): siRNA sense strand
ggaccaggcccgaguucua

SEQ ID NO: 229793 - RNA, 19 nt, Homo sapiens
  misc_RNA (1)...(19): siRNA sense strand
caaguaaauguuccgaaua

SEQ ID NO: 229794 - RNA, 19 nt, Homo sapiens
  misc_RNA (1)...(19): siRNA sense strand
cagagaggcugugcucaaa

SEQ ID NO: 229795 - RNA, 19 nt, Homo sapiens
  misc_RNA (1)...(19): siRNA sense strand
ggagaaagaggagauguug

SEQ ID NO: 229796 - RNA, 19 nt, Homo sapiens
  misc_RNA (1)...(19): siRNA sense strand
gguggaggccuuugacuuu

SEQ ID NO: 229797 - RNA, 19 nt, Homo sapiens
  misc_RNA (1)...(19): siRNA sense strand
ggaagacacgccaacacua

SEQ ID NO: 229798 - RNA, 19 nt, Homo sapiens
  misc_RNA (1)...(19): siRNA sense strand
ucaacaaaguggucuacaa

SEQ ID NO: 229799 - RNA, 19 nt, Homo sapiens
  misc_RNA (1)...(19): siRNA sense strand
ggaaguuucaguacaaaga

SEQ ID NO: 229800 - RNA, 19 nt, Homo sapiens
  misc_RNA (1)...(19): siRNA sense strand
ccacaaagacggccacugu

SEQ ID NO: 229801 - RNA, 19 nt, Homo sapiens
  misc_RNA (1)...(19): siRNA sense strand
ggaaacagugugauugguu

SEQ ID NO: 229802 - RNA, 19 nt, Homo sapiens
  misc_RNA (1)...(19): siRNA sense strand
cauagagaaugucuuugaa

SEQ ID NO: 229803 - RNA, 19 nt, Homo sapiens
  misc_RNA (1)...(19): siRNA sense strand
gauaggagaacaaggcauu

SEQ ID NO: 229804 - RNA, 19 nt, Homo sapiens
  misc_RNA (1)...(19): siRNA sense strand
aagaggagauguugggauu

SEQ ID NO: 229805 - RNA, 19 nt, Homo sapiens
  misc_RNA (1)...(19): siRNA sense strand
gacauucuguuccucuuug

SEQ ID NO: 229806 - RNA, 19 nt, Homo sapiens
  misc_RNA (1)...(19): siRNA sense strand
uaaaugcccuugcuguuac

SEQ ID NO: 229807 - RNA, 19 nt, Homo sapiens
  misc_RNA (1)...(19): siRNA sense strand
gauaaaugcccuugcuguu

SEQ ID NO: 229808 - RNA, 19 nt, Homo sapiens
  misc_RNA (1)...(19): siRNA sense strand
ggaaagauagcguccaaca

SEQ ID NO: 229809 - RNA, 19 nt, Homo sapiens
  misc_RNA (1)...(19): siRNA sense strand
cagagagcuucccaacaua

SEQ ID NO: 229810 - RNA, 19 nt, Homo sapiens
  misc_RNA (1)...(19): siRNA sense strand
gaagagggcgucccacagu

SEQ ID NO: 229811 - RNA, 19 nt, Homo sapiens
  misc_RNA (1)...(19): siRNA sense strand
caucaacgcuuugcagauc

SEQ ID NO: 229812 - RNA, 19 nt, Homo sapiens
  misc_RNA (1)...(19): siRNA sense strand
gaaaggagaaagaggagau

SEQ ID NO: 229813 - RNA, 19 nt, Homo sapiens
  misc_RNA (1)...(19): siRNA sense strand
ggugguaagucccuagaug

SEQ ID NO: 229814 - RNA, 19 nt, Homo sapiens
  misc_RNA (1)...(19): siRNA sense strand
acaaguaaauguuccgaau

SEQ ID NO: 229815 - RNA, 19 nt, Homo sapiens
  misc_RNA (1)...(19): siRNA sense strand
gaugcgagauguggucuug

SEQ ID NO: 229816 - RNA, 19 nt, Homo sapiens
  misc_RNA (1)...(19): siRNA sense strand
uccaaagcaucaaagauaa

SEQ ID NO: 229817 - RNA, 19 nt, Homo sapiens
  misc_RNA (1)...(19): siRNA sense strand
gggcgaggguuuauguaug

SEQ ID NO: 229818 - RNA, 19 nt, Homo sapiens
  misc_RNA (1)...(19): siRNA sense strand
ugaagagaaugaagaucaa

SEQ ID NO: 229819 - RNA, 19 nt, Homo sapiens
  misc_RNA (1)...(19): siRNA sense strand
ccacggaaguuucaguaca

SEQ ID NO: 229820 - RNA, 19 nt, Homo sapiens
  misc_RNA (1)...(19): siRNA sense strand
acaaagccugugacuauua

SEQ ID NO: 229821 - RNA, 19 nt, Homo sapiens
  misc_RNA (1)...(19): siRNA sense strand
ccaccacccuguuccaguu

SEQ ID NO: 229822 - RNA, 19 nt, Homo sapiens
  misc_RNA (1)...(19): siRNA sense strand
gagaggacccaaaggagaa

SEQ ID NO: 229823 - RNA, 19 nt, Homo sapiens
  misc_RNA (1)...(19): siRNA sense strand
gguggaagaugcacaggau

SEQ ID NO: 229824 - RNA, 19 nt, Homo sapiens
  misc_RNA (1)...(19): siRNA sense strand
gaagggcgaaguaggagaa

SEQ ID NO: 229825 - RNA, 19 nt, Homo sapiens
  misc_RNA (1)...(19): siRNA sense strand
aaagaaccuugugaaguuu

SEQ ID NO: 229826 - RNA, 19 nt, Homo sapiens
  misc_RNA (1)...(19): siRNA sense strand
gcucugcucuagacuuugu

SEQ ID NO: 229827 - RNA, 19 nt, Homo sapiens
  misc_RNA (1)...(19): siRNA sense strand
ccauagagaaugucuuuga

SEQ ID NO: 229828 - RNA, 19 nt, Homo sapiens
  misc_RNA (1)...(19): siRNA sense strand
gcagggaaccagggccuua

SEQ ID NO: 229829 - RNA, 19 nt, Homo sapiens
  misc_RNA (1)...(19): siRNA sense strand
cgacauggcuuucaucuua

SEQ ID NO: 229830 - RNA, 19 nt, Homo sapiens
  misc_RNA (1)...(19): siRNA sense strand
caaagaaccuugugaaguu

SEQ ID NO: 229831 - RNA, 19 nt, Homo sapiens
  misc_RNA (1)...(19): siRNA sense strand
ggacuuggauuaugaacua

SEQ ID NO: 229832 - RNA, 19 nt, Homo sapiens
  misc_RNA (1)...(19): siRNA sense strand
ucaaugagaugaagaagua

SEQ ID NO: 229833 - RNA, 19 nt, Homo sapiens
  misc_RNA (1)...(19): siRNA sense strand
caacaaagccugugacuau

SEQ ID NO: 229834 - RNA, 19 nt, Homo sapiens
  misc_RNA (1)...(19): siRNA sense strand
ggagagaccucacagacuu

SEQ ID NO: 229835 - RNA, 19 nt, Homo sapiens
  misc_RNA (1)...(19): siRNA sense strand
ggacacaguuuaugaagau

SEQ ID NO: 229836 - RNA, 19 nt, Homo sapiens
  misc_RNA (1)...(19): siRNA sense strand
ggaggagguuggaaagaua

SEQ ID NO: 229837 - RNA, 19 nt, Homo sapiens
  misc_RNA (1)...(19): siRNA sense strand
gauguggucuugaguauug

SEQ ID NO: 229838 - RNA, 19 nt, Homo sapiens
  misc_RNA (1)...(19): siRNA sense strand
gaaagggaauccuggaaga

SEQ ID NO: 229839 - RNA, 19 nt, Homo sapiens
  misc_RNA (1)...(19): siRNA sense strand
gaacggcacucaagguuuc

SEQ ID NO: 229840 - RNA, 19 nt, Homo sapiens
  misc_RNA (1)...(19): siRNA sense strand
gcagggauuucauauuaaa

SEQ ID NO: 229841 - RNA, 19 nt, Homo sapiens
  misc_RNA (1)...(19): siRNA sense strand
gaauugcgguggcucagua

SEQ ID NO: 229842 - RNA, 19 nt, Homo sapiens
  misc_RNA (1)...(19): siRNA sense strand
gaagaaagcagacauugug

SEQ ID NO: 229843 - RNA, 19 nt, Homo sapiens
  misc_RNA (1)...(19): siRNA sense strand
uugcagggauuucauauua

SEQ ID NO: 229844 - RNA, 19 nt, Homo sapiens
  misc_RNA (1)...(19): siRNA sense strand
gaacuagccuuugcuuuag

SEQ ID NO: 229845 - RNA, 19 nt, Homo sapiens
  misc_RNA (1)...(19): siRNA sense strand
gcaggaaggugaacaucaa

SEQ ID NO: 229846 - RNA, 19 nt, Homo sapiens
  misc_RNA (1)...(19): siRNA sense strand
gaaagaguuuguccagaga

SEQ ID NO: 229847 - RNA, 19 nt, Homo sapiens
  misc_RNA (1)...(19): siRNA sense strand
gaagacacgccaacacuaa

SEQ ID NO: 229848 - RNA, 19 nt, Homo sapiens
  misc_RNA (1)...(19): siRNA sense strand
gaaggaacuugcagggauu

SEQ ID NO: 229849 - RNA, 19 nt, Homo sapiens
  misc_RNA (1)...(19): siRNA sense strand
gaagagaagcagcauaaug

SEQ ID NO: 229850 - RNA, 19 nt, Homo sapiens
  misc_RNA (1)...(19): siRNA sense strand
ucagagagcuucccaacau

SEQ ID NO: 229851 - RNA, 19 nt, Homo sapiens
  misc_RNA (1)...(19): siRNA sense strand
gaaagaaugugaaaagguu

SEQ ID NO: 229852 - RNA, 19 nt, Homo sapiens
  misc_RNA (1)...(19): siRNA sense strand
caacaaaguggucuacaaa

SEQ ID NO: 229853 - RNA, 19 nt, Homo sapiens
  misc_RNA (1)...(19): siRNA sense strand
gacuuucucuacaagauua

SEQ ID NO: 229854 - RNA, 19 nt, Homo sapiens
  misc_RNA (1)...(19): siRNA sense strand
agaacuagccuuugcuuua

SEQ ID NO: 229855 - RNA, 19 nt, Homo sapiens
  misc_RNA (1)...(19): siRNA sense strand
guacagcgaugaugucaag

SEQ ID NO: 229856 - RNA, 19 nt, Homo sapiens
  misc_RNA (1)...(19): siRNA sense strand
gaacaagggugccgaucag

SEQ ID NO: 229857 - RNA, 19 nt, Homo sapiens
  misc_RNA (1)...(19): siRNA sense strand
caacagaacuagccuuugc

SEQ ID NO: 229858 - RNA, 19 nt, Homo sapiens
  misc_RNA (1)...(19): siRNA sense strand
caacauagaagaaagaauc

SEQ ID NO: 229859 - RNA, 19 nt, Homo sapiens
  misc_RNA (1)...(19): siRNA sense strand
gcucuagacuuuguucgua

SEQ ID NO: 229860 - RNA, 19 nt, Homo sapiens
  misc_RNA (1)...(19): siRNA sense strand
cgacgucuucuucaaauua

SEQ ID NO: 229861 - RNA, 19 nt, Homo sapiens
  misc_RNA (1)...(19): siRNA sense strand
gagauguggucuugaguau

SEQ ID NO: 229862 - RNA, 19 nt, Homo sapiens
  misc_RNA (1)...(19): siRNA sense strand
guaagucccuagaugaaau

SEQ ID NO: 229863 - RNA, 19 nt, Homo sapiens
  misc_RNA (1)...(19): siRNA sense strand
gcuaaugcaucuggaguuu

SEQ ID NO: 229864 - RNA, 19 nt, Homo sapiens
  misc_RNA (1)...(19): siRNA sense strand
gaagaagaaagcagacauu

SEQ ID NO: 229865 - RNA, 19 nt, Homo sapiens
  misc_RNA (1)...(19): siRNA sense strand
uagagaggcugguugacua

SEQ ID NO: 229866 - RNA, 19 nt, Homo sapiens
  misc_RNA (1)...(19): siRNA sense strand
gaaaucggacaggaucuua

SEQ ID NO: 229867 - RNA, 19 nt, Homo sapiens
  misc_RNA (1)...(19): siRNA sense strand
caaagccugugacuauuau

SEQ ID NO: 229868 - RNA, 19 nt, Homo sapiens
  misc_RNA (1)...(19): siRNA sense strand
cgaauaacguuacuucaag

SEQ ID NO: 229869 - RNA, 19 nt, Homo sapiens
  misc_RNA (1)...(19): siRNA sense strand
gaaagcagacauuguguuc

SEQ ID NO: 229870 - RNA, 19 nt, Homo sapiens
  misc_RNA (1)...(19): siRNA sense strand
gggcucugcucuagacuuu

SEQ ID NO: 229871 - RNA, 19 nt, Homo sapiens
  misc_RNA (1)...(19): siRNA sense strand
gaggaaacaucggcacuug

SEQ ID NO: 229872 - RNA, 19 nt, Homo sapiens
  misc_RNA (1)...(19): siRNA sense strand
gaaauaguggacacaguuu

SEQ ID NO: 229873 - RNA, 19 nt, Homo sapiens
  misc_RNA (1)...(19): siRNA sense strand
gaucgaggauggagugcuu

SEQ ID NO: 229874 - RNA, 19 nt, Homo sapiens
  misc_RNA (1)...(19): siRNA sense strand
caaacgacgucuucuucaa

SEQ ID NO: 229875 - RNA, 19 nt, Homo sapiens
  misc_RNA (1)...(19): siRNA sense strand
gaaccugggcuaaauggaa

SEQ ID NO: 229876 - RNA, 19 nt, Homo sapiens
  misc_RNA (1)...(19): siRNA sense strand
cagagaugcucgagaaguu

SEQ ID NO: 229877 - RNA, 19 nt, Homo sapiens
  misc_RNA (1)...(19): siRNA sense strand
gaagaaagaaucaugaacu

SEQ ID NO: 229878 - RNA, 19 nt, Homo sapiens
  misc_RNA (1)...(19): siRNA sense strand
cagagucgcuucccaagau

SEQ ID NO: 229879 - RNA, 19 nt, Homo sapiens
  misc_RNA (1)...(19): siRNA sense strand
caacgaagccggugacuac

SEQ ID NO: 229880 - RNA, 19 nt, Homo sapiens
  misc_RNA (1)...(19): siRNA sense strand
ucacagacuuccuggagaa

SEQ ID NO: 229881 - RNA, 19 nt, Homo sapiens
  misc_RNA (1)...(19): siRNA sense strand
acggagaucuggcugauuu

SEQ ID NO: 229882 - RNA, 19 nt, Homo sapiens
  misc_RNA (1)...(19): siRNA sense strand
gaacagaaucagccagaug

SEQ ID NO: 229883 - RNA, 19 nt, Homo sapiens
  misc_RNA (1)...(19): siRNA sense strand
gcaaugcccuggaguacgu

SEQ ID NO: 229884 - RNA, 19 nt, Homo sapiens
  misc_RNA (1)...(19): siRNA sense strand
ucacagagaugcagaccau

SEQ ID NO: 229885 - RNA, 19 nt, Homo sapiens
  misc_RNA (1)...(19): siRNA sense strand
ucgaugagcucaaugugaa

SEQ ID NO: 229886 - RNA, 19 nt, Homo sapiens
  misc_RNA (1)...(19): siRNA sense strand
acaaagacggccacuguua

SEQ ID NO: 229887 - RNA, 19 nt, Homo sapiens
  misc_RNA (1)...(19): siRNA sense strand
ugacaacauugccgagaaa

SEQ ID NO: 229888 - RNA, 19 nt, Homo sapiens
  misc_RNA (1)...(19): siRNA sense strand
ccaagaggcagauuauuga

SEQ ID NO: 229889 - RNA, 19 nt, Homo sapiens
  misc_RNA (1)...(19): siRNA sense strand
ucuacaagauuaucgauga

SEQ ID NO: 229890 - RNA, 19 nt, Homo sapiens
  misc_RNA (1)...(19): siRNA sense strand
ggagagaggacccaaagga

SEQ ID NO: 229891 - RNA, 19 nt, Homo sapiens
  misc_RNA (1)...(19): siRNA sense strand
ggcgaggguuuauguauga

SEQ ID NO: 229892 - RNA, 19 nt, Homo sapiens
  misc_RNA (1)...(19): siRNA sense strand
ggaccaggcccgaguucua

SEQ ID NO: 229893 - RNA, 19 nt, Homo sapiens
  misc_RNA (1)...(19): siRNA sense strand
caaguaaauguuccgaaua

SEQ ID NO: 229894 - RNA, 19 nt, Homo sapiens
  misc_RNA (1)...(19): siRNA sense strand
cagagaggcugugcucaaa

SEQ ID NO: 229895 - RNA, 19 nt, Homo sapiens
  misc_RNA (1)...(19): siRNA sense strand
ggagaaagaggagauguug

SEQ ID NO: 229896 - RNA, 19 nt, Homo sapiens
  misc_RNA (1)...(19): siRNA sense strand
gguggaggccuuugacuuu

SEQ ID NO: 229897 - RNA, 19 nt, Homo sapiens
  misc_RNA (1)...(19): siRNA sense strand
ggaagacacgccaacacua

SEQ ID NO: 229898 - RNA, 19 nt, Homo sapiens
  misc_RNA (1)...(19): siRNA sense strand
ucaacaaaguggucuacaa

SEQ ID NO: 229899 - RNA, 19 nt, Homo sapiens
  misc_RNA (1)...(19): siRNA sense strand
ggaaguuucaguacaaaga

SEQ ID NO: 229900 - RNA, 19 nt, Homo sapiens
  misc_RNA (1)...(19): siRNA sense strand
ccacaaagacggccacugu

SEQ ID NO: 229901 - RNA, 19 nt, Homo sapiens
  misc_RNA (1)...(19): siRNA sense strand
ggaaacagugugauugguu

SEQ ID NO: 229902 - RNA, 19 nt, Homo sapiens
  misc_RNA (1)...(19): siRNA sense strand
cauagagaaugucuuugaa

SEQ ID NO: 229903 - RNA, 19 nt, Homo sapiens
  misc_RNA (1)...(19): siRNA sense strand
gauaggagaacaaggcauu

SEQ ID NO: 229904 - RNA, 19 nt, Homo sapiens
  misc_RNA (1)...(19): siRNA sense strand
aagaggagauguugggauu

SEQ ID NO: 229905 - RNA, 19 nt, Homo sapiens
  misc_RNA (1)...(19): siRNA sense strand
gacauucuguuccucuuug

SEQ ID NO: 229906 - RNA, 19 nt, Homo sapiens
  misc_RNA (1)...(19): siRNA sense strand
uaaaugcccuugcuguuac

SEQ ID NO: 229907 - RNA, 19 nt, Homo sapiens
  misc_RNA (1)...(19): siRNA sense strand
gauaaaugcccuugcuguu

SEQ ID NO: 229908 - RNA, 19 nt, Homo sapiens
  misc_RNA (1)...(19): siRNA sense strand
ggaaagauagcguccaaca

SEQ ID NO: 229909 - RNA, 19 nt, Homo sapiens
  misc_RNA (1)...(19): siRNA sense strand
cagagagcuucccaacaua

SEQ ID NO: 229910 - RNA, 19 nt, Homo sapiens
  misc_RNA (1)...(19): siRNA sense strand
gaagagggcgucccacagu

SEQ ID NO: 229911 - RNA, 19 nt, Homo sapiens
  misc_RNA (1)...(19): siRNA sense strand
caucaacgcuuugcagauc

SEQ ID NO: 229912 - RNA, 19 nt, Homo sapiens
  misc_RNA (1)...(19): siRNA sense strand
gaaaggagaaagaggagau

SEQ ID NO: 229913 - RNA, 19 nt, Homo sapiens
  misc_RNA (1)...(19): siRNA sense strand
ggugguaagucccuagaug

SEQ ID NO: 229914 - RNA, 19 nt, Homo sapiens
  misc_RNA (1)...(19): siRNA sense strand
acaaguaaauguuccgaau

SEQ ID NO: 229915 - RNA, 19 nt, Homo sapiens
  misc_RNA (1)...(19): siRNA sense strand
gaugcgagauguggucuug

SEQ ID NO: 229916 - RNA, 19 nt, Homo sapiens
  misc_RNA (1)...(19): siRNA sense strand
uccaaagcaucaaagauaa

SEQ ID NO: 229917 - RNA, 19 nt, Homo sapiens
  misc_RNA (1)...(19): siRNA sense strand
gggcgaggguuuauguaug

SEQ ID NO: 229918 - RNA, 19 nt, Homo sapiens
  misc_RNA (1)...(19): siRNA sense strand
ugaagagaaugaagaucaa

SEQ ID NO: 229919 - RNA, 19 nt, Homo sapiens
  misc_RNA (1)...(19): siRNA sense strand
ccacggaaguuucaguaca

SEQ ID NO: 229920 - RNA, 19 nt, Homo sapiens
  misc_RNA (1)...(19): siRNA sense strand
acaaagccugugacuauua

SEQ ID NO: 229921 - RNA, 19 nt, Homo sapiens
  misc_RNA (1)...(19): siRNA sense strand
ccaccacccuguuccaguu

SEQ ID NO: 229922 - RNA, 19 nt, Homo sapiens
  misc_RNA (1)...(19): siRNA sense strand
gagaggacccaaaggagaa

SEQ ID NO: 229923 - RNA, 19 nt, Homo sapiens
  misc_RNA (1)...(19): siRNA sense strand
gguggaagaugcacaggau

SEQ ID NO: 229924 - RNA, 19 nt, Homo sapiens
  misc_RNA (1)...(19): siRNA sense strand
gaagggcgaaguaggagaa

SEQ ID NO: 229925 - RNA, 19 nt, Homo sapiens
  misc_RNA (1)...(19): siRNA sense strand
aaagaaccuugugaaguuu

SEQ ID NO: 229926 - RNA, 19 nt, Homo sapiens
  misc_RNA (1)...(19): siRNA sense strand
gcucugcucuagacuuugu

SEQ ID NO: 229927 - RNA, 19 nt, Homo sapiens
  misc_RNA (1)...(19): siRNA sense strand
ccauagagaaugucuuuga

SEQ ID NO: 229928 - RNA, 19 nt, Homo sapiens
  misc_RNA (1)...(19): siRNA sense strand
gcagggaaccagggccuua

SEQ ID NO: 229929 - RNA, 19 nt, Homo sapiens
  misc_RNA (1)...(19): siRNA sense strand
cgacauggcuuucaucuua

SEQ ID NO: 229930 - RNA, 19 nt, Homo sapiens
  misc_RNA (1)...(19): siRNA sense strand
caaagaaccuugugaaguu

SEQ ID NO: 229931 - RNA, 19 nt, Homo sapiens
  misc_RNA (1)...(19): siRNA sense strand
ggacuuggauuaugaacua

SEQ ID NO: 229932 - RNA, 19 nt, Homo sapiens
  misc_RNA (1)...(19): siRNA sense strand
ucaaugagaugaagaagua

SEQ ID NO: 229933 - RNA, 19 nt, Homo sapiens
  misc_RNA (1)...(19): siRNA sense strand
caacaaagccugugacuau

SEQ ID NO: 229934 - RNA, 19 nt, Homo sapiens
  misc_RNA (1)...(19): siRNA sense strand
ggagagaccucacagacuu

SEQ ID NO: 229935 - RNA, 19 nt, Homo sapiens
  misc_RNA (1)...(19): siRNA sense strand
ggacacaguuuaugaagau

SEQ ID NO: 229936 - RNA, 19 nt, Homo sapiens
  misc_RNA (1)...(19): siRNA sense strand
ggaggagguuggaaagaua

SEQ ID NO: 229937 - RNA, 19 nt, Homo sapiens
  misc_RNA (1)...(19): siRNA sense strand
gauguggucuugaguauug

SEQ ID NO: 229938 - RNA, 19 nt, Homo sapiens
  misc_RNA (1)...(19): siRNA sense strand
gaaagggaauccuggaaga

SEQ ID NO: 229939 - RNA, 19 nt, Homo sapiens
  misc_RNA (1)...(19): siRNA sense strand
gaacggcacucaagguuuc

SEQ ID NO: 229940 - RNA, 19 nt, Homo sapiens
  misc_RNA (1)...(19): siRNA sense strand
gcagggauuucauauuaaa

SEQ ID NO: 229941 - RNA, 19 nt, Homo sapiens
  misc_RNA (1)...(19): siRNA sense strand
gaauugcgguggcucagua

SEQ ID NO: 229942 - RNA, 19 nt, Homo sapiens
  misc_RNA (1)...(19): siRNA sense strand
gaagaaagcagacauugug

SEQ ID NO: 229943 - RNA, 19 nt, Homo sapiens
  misc_RNA (1)...(19): siRNA sense strand
uugcagggauuucauauua

SEQ ID NO: 229944 - RNA, 19 nt, Homo sapiens
  misc_RNA (1)...(19): siRNA sense strand
gaacuagccuuugcuuuag

SEQ ID NO: 229945 - RNA, 19 nt, Homo sapiens
  misc_RNA (1)...(19): siRNA sense strand
gcaggaaggugaacaucaa

SEQ ID NO: 229946 - RNA, 19 nt, Homo sapiens
  misc_RNA (1)...(19): siRNA sense strand
gaaagaguuuguccagaga

SEQ ID NO: 229947 - RNA, 19 nt, Homo sapiens
  misc_RNA (1)...(19): siRNA sense strand
gaagacacgccaacacuaa

SEQ ID NO: 229948 - RNA, 19 nt, Homo sapiens
  misc_RNA (1)...(19): siRNA sense strand
gaaggaacuugcagggauu

SEQ ID NO: 229949 - RNA, 19 nt, Homo sapiens
  misc_RNA (1)...(19): siRNA sense strand
gaagagaagcagcauaaug

SEQ ID NO: 229950 - RNA, 19 nt, Homo sapiens
  misc_RNA (1)...(19): siRNA sense strand
ucagagagcuucccaacau

SEQ ID NO: 229951 - RNA, 19 nt, Homo sapiens
  misc_RNA (1)...(19): siRNA sense strand
gaaagaaugugaaaagguu

SEQ ID NO: 229952 - RNA, 19 nt, Homo sapiens
  misc_RNA (1)...(19): siRNA sense strand
caacaaaguggucuacaaa

SEQ ID NO: 229953 - RNA, 19 nt, Homo sapiens
  misc_RNA (1)...(19): siRNA sense strand
gacuuucucuacaagauua

SEQ ID NO: 229954 - RNA, 19 nt, Homo sapiens
  misc_RNA (1)...(19): siRNA sense strand
agaacuagccuuugcuuua

SEQ ID NO: 229955 - RNA, 19 nt, Homo sapiens
  misc_RNA (1)...(19): siRNA sense strand
guacagcgaugaugucaag

SEQ ID NO: 229956 - RNA, 19 nt, Homo sapiens
  misc_RNA (1)...(19): siRNA sense strand
gaacaagggugccgaucag

SEQ ID NO: 229957 - RNA, 19 nt, Homo sapiens
  misc_RNA (1)...(19): siRNA sense strand
caacagaacuagccuuugc

SEQ ID NO: 229958 - RNA, 19 nt, Homo sapiens
  misc_RNA (1)...(19): siRNA sense strand
caacauagaagaaagaauc

SEQ ID NO: 229959 - RNA, 19 nt, Homo sapiens
  misc_RNA (1)...(19): siRNA sense strand
gcucuagacuuuguucgua

SEQ ID NO: 229960 - RNA, 19 nt, Homo sapiens
  misc_RNA (1)...(19): siRNA sense strand
cgacgucuucuucaaauua

SEQ ID NO: 229961 - RNA, 19 nt, Homo sapiens
  misc_RNA (1)...(19): siRNA sense strand
gagauguggucuugaguau

SEQ ID NO: 229962 - RNA, 19 nt, Homo sapiens
  misc_RNA (1)...(19): siRNA sense strand
guaagucccuagaugaaau

SEQ ID NO: 229963 - RNA, 19 nt, Homo sapiens
  misc_RNA (1)...(19): siRNA sense strand
gcuaaugcaucuggaguuu

SEQ ID NO: 229964 - RNA, 19 nt, Homo sapiens
  misc_RNA (1)...(19): siRNA sense strand
gaagaagaaagcagacauu

SEQ ID NO: 229965 - RNA, 19 nt, Homo sapiens
  misc_RNA (1)...(19): siRNA sense strand
uagagaggcugguugacua

SEQ ID NO: 229966 - RNA, 19 nt, Homo sapiens
  misc_RNA (1)...(19): siRNA sense strand
gaaaucggacaggaucuua

SEQ ID NO: 229967 - RNA, 19 nt, Homo sapiens
  misc_RNA (1)...(19): siRNA sense strand
caaagccugugacuauuau

SEQ ID NO: 229968 - RNA, 19 nt, Homo sapiens
  misc_RNA (1)...(19): siRNA sense strand
cgaauaacguuacuucaag

SEQ ID NO: 229969 - RNA, 19 nt, Homo sapiens
  misc_RNA (1)...(19): siRNA sense strand
gaaagcagacauuguguuc

SEQ ID NO: 229970 - RNA, 19 nt, Homo sapiens
  misc_RNA (1)...(19): siRNA sense strand
gggcucugcucuagacuuu

SEQ ID NO: 229971 - RNA, 19 nt, Homo sapiens
  misc_RNA (1)...(19): siRNA sense strand
gaggaaacaucggcacuug

SEQ ID NO: 229972 - RNA, 19 nt, Homo sapiens
  misc_RNA (1)...(19): siRNA sense strand
gaaauaguggacacaguuu

SEQ ID NO: 229973 - RNA, 19 nt, Homo sapiens
  misc_RNA (1)...(19): siRNA sense strand
gaucgaggauggagugcuu

SEQ ID NO: 229974 - RNA, 19 nt, Homo sapiens
  misc_RNA (1)...(19): siRNA sense strand
caaacgacgucuucuucaa

SEQ ID NO: 229975 - RNA, 19 nt, Homo sapiens
  misc_RNA (1)...(19): siRNA sense strand
gaaccugggcuaaauggaa

SEQ ID NO: 229976 - RNA, 19 nt, Homo sapiens
  misc_RNA (1)...(19): siRNA sense strand
cagagaugcucgagaaguu

SEQ ID NO: 229977 - RNA, 19 nt, Homo sapiens
  misc_RNA (1)...(19): siRNA sense strand
gaagaaagaaucaugaacu

SEQ ID NO: 229978 - RNA, 19 nt, Homo sapiens
  misc_RNA (1)...(19): siRNA sense strand
cagagucgcuucccaagau

SEQ ID NO: 229979 - RNA, 19 nt, Homo sapiens
  misc_RNA (1)...(19): siRNA sense strand
caacgaagccggugacuac

SEQ ID NO: 229980 - RNA, 19 nt, Homo sapiens
  misc_RNA (1)...(19): siRNA sense strand
ucacagacuuccuggagaa

SEQ ID NO: 229981 - RNA, 19 nt, Homo sapiens
  misc_RNA (1)...(19): siRNA sense strand
acggagaucuggcugauuu

SEQ ID NO: 229982 - RNA, 19 nt, Homo sapiens
  misc_RNA (1)...(19): siRNA sense strand
gaacagaaucagccagaug

SEQ ID NO: 229983 - RNA, 19 nt, Homo sapiens
  misc_RNA (1)...(19): siRNA sense strand
gcaaugcccuggaguacgu

SEQ ID NO: 229984 - RNA, 19 nt, Homo sapiens
  misc_RNA (1)...(19): siRNA sense strand
ucacagagaugcagaccau

SEQ ID NO: 229985 - RNA, 19 nt, Homo sapiens
  misc_RNA (1)...(19): siRNA sense strand
ucgaugagcucaaugugaa

SEQ ID NO: 229986 - RNA, 19 nt, Homo sapiens
  misc_RNA (1)...(19): siRNA sense strand
acaaagacggccacuguua

SEQ ID NO: 229987 - RNA, 19 nt, Homo sapiens
  misc_RNA (1)...(19): siRNA sense strand
ugacaacauugccgagaaa

SEQ ID NO: 229988 - RNA, 19 nt, Homo sapiens
  misc_RNA (1)...(19): siRNA sense strand
ccaagaggcagauuauuga

SEQ ID NO: 229989 - RNA, 19 nt, Homo sapiens
  misc_RNA (1)...(19): siRNA sense strand
ucuacaagauuaucgauga

SEQ ID NO: 229990 - RNA, 19 nt, Homo sapiens
  misc_RNA (1)...(19): siRNA sense strand
ggagagaggacccaaagga

SEQ ID NO: 229991 - RNA, 19 nt, Homo sapiens
  misc_RNA (1)...(19): siRNA sense strand
ggcgaggguuuauguauga

SEQ ID NO: 229992 - RNA, 19 nt, Homo sapiens
  misc_RNA (1)...(19): siRNA sense strand
ggaccaggcccgaguucua

SEQ ID NO: 229993 - RNA, 19 nt, Homo sapiens
  misc_RNA (1)...(19): siRNA sense strand
caaguaaauguuccgaaua

SEQ ID NO: 229994 - RNA, 19 nt, Homo sapiens
  misc_RNA (1)...(19): siRNA sense strand
cagagaggcugugcucaaa

SEQ ID NO: 229995 - RNA, 19 nt, Homo sapiens
  misc_RNA (1)...(19): siRNA sense strand
ggagaaagaggagauguug

SEQ ID NO: 229996 - RNA, 19 nt, Homo sapiens
  misc_RNA (1)...(19): siRNA sense strand
gguggaggccuuugacuuu

SEQ ID NO: 229997 - RNA, 19 nt, Homo sapiens
  misc_RNA (1)...(19): siRNA sense strand
ggaagacacgccaacacua

SEQ ID NO: 229998 - RNA, 19 nt, Homo sapiens
  misc_RNA (1)...(19): siRNA sense strand
ucaacaaaguggucuacaa

SEQ ID NO: 229999 - RNA, 19 nt, Homo sapiens
  misc_RNA (1)...(19): siRNA sense strand
ggaaguuucaguacaaaga

SEQ ID NO: 230000 - RNA, 19 nt, Homo sapiens
  misc_RNA (1)...(19): siRNA sense strand
ccacaaagacggccacugu

SEQ ID NO: 230001 - RNA, 19 nt, Homo sapiens
  misc_RNA (1)...(19): siRNA sense strand
ggaaacagugugauugguu

SEQ ID NO: 230002 - RNA, 19 nt, Homo sapiens
  misc_RNA (1)...(19): siRNA sense strand
cauagagaaugucuuugaa

SEQ ID NO: 230003 - RNA, 19 nt, Homo sapiens
  misc_RNA (1)...(19): siRNA sense strand
gauaggagaacaaggcauu

SEQ ID NO: 230004 - RNA, 19 nt, Homo sapiens
  misc_RNA (1)...(19): siRNA sense strand
aagaggagauguugggauu

SEQ ID NO: 230005 - RNA, 19 nt, Homo sapiens
  misc_RNA (1)...(19): siRNA sense strand
gacauucuguuccucuuug

SEQ ID NO: 230006 - RNA, 19 nt, Homo sapiens
  misc_RNA (1)...(19): siRNA sense strand
uaaaugcccuugcuguuac

SEQ ID NO: 230007 - RNA, 19 nt, Homo sapiens
  misc_RNA (1)...(19): siRNA sense strand
gauaaaugcccuugcuguu

SEQ ID NO: 230008 - RNA, 19 nt, Homo sapiens
  misc_RNA (1)...(19): siRNA sense strand
ggaaagauagcguccaaca

SEQ ID NO: 230009 - RNA, 19 nt, Homo sapiens
  misc_RNA (1)...(19): siRNA sense strand
cagagagcuucccaacaua

SEQ ID NO: 230010 - RNA, 19 nt, Homo sapiens
  misc_RNA (1)...(19): siRNA sense strand
gaagagggcgucccacagu

SEQ ID NO: 230011 - RNA, 19 nt, Homo sapiens
  misc_RNA (1)...(19): siRNA sense strand
caucaacgcuuugcagauc

SEQ ID NO: 230012 - RNA, 19 nt, Homo sapiens
  misc_RNA (1)...(19): siRNA sense strand
gaaaggagaaagaggagau

SEQ ID NO: 230013 - RNA, 19 nt, Homo sapiens
  misc_RNA (1)...(19): siRNA sense strand
ggugguaagucccuagaug

SEQ ID NO: 230014 - RNA, 19 nt, Homo sapiens
  misc_RNA (1)...(19): siRNA sense strand
acaaguaaauguuccgaau

SEQ ID NO: 230015 - RNA, 19 nt, Homo sapiens
  misc_RNA (1)...(19): siRNA sense strand
gaugcgagauguggucuug

SEQ ID NO: 230016 - RNA, 19 nt, Homo sapiens
  misc_RNA (1)...(19): siRNA sense strand
uccaaagcaucaaagauaa

SEQ ID NO: 230017 - RNA, 19 nt, Homo sapiens
  misc_RNA (1)...(19): siRNA sense strand
gggcgaggguuuauguaug

SEQ ID NO: 230018 - RNA, 19 nt, Homo sapiens
  misc_RNA (1)...(19): siRNA sense strand
ugaagagaaugaagaucaa

SEQ ID NO: 230019 - RNA, 19 nt, Homo sapiens
  misc_RNA (1)...(19): siRNA sense strand
ccacggaaguuucaguaca

SEQ ID NO: 230020 - RNA, 19 nt, Homo sapiens
  misc_RNA (1)...(19): siRNA sense strand
acaaagccugugacuauua

SEQ ID NO: 230021 - RNA, 19 nt, Homo sapiens
  misc_RNA (1)...(19): siRNA sense strand
ccaccacccuguuccaguu

SEQ ID NO: 230022 - RNA, 19 nt, Homo sapiens
  misc_RNA (1)...(19): siRNA sense strand
gagaggacccaaaggagaa

SEQ ID NO: 230023 - RNA, 19 nt, Homo sapiens
  misc_RNA (1)...(19): siRNA sense strand
gguggaagaugcacaggau

SEQ ID NO: 230024 - RNA, 19 nt, Homo sapiens
  misc_RNA (1)...(19): siRNA sense strand
gaagggcgaaguaggagaa

SEQ ID NO: 230025 - RNA, 19 nt, Homo sapiens
  misc_RNA (1)...(19): siRNA sense strand
aaagaaccuugugaaguuu

SEQ ID NO: 230026 - RNA, 19 nt, Homo sapiens
  misc_RNA (1)...(19): siRNA sense strand
gcucugcucuagacuuugu

SEQ ID NO: 230027 - RNA, 19 nt, Homo sapiens
  misc_RNA (1)...(19): siRNA sense strand
ccauagagaaugucuuuga

SEQ ID NO: 230028 - RNA, 19 nt, Homo sapiens
  misc_RNA (1)...(19): siRNA sense strand
gcagggaaccagggccuua

SEQ ID NO: 230029 - RNA, 19 nt, Homo sapiens
  misc_RNA (1)...(19): siRNA sense strand
cgacauggcuuucaucuua

SEQ ID NO: 230030 - RNA, 19 nt, Homo sapiens
  misc_RNA (1)...(19): siRNA sense strand
caaagaaccuugugaaguu

SEQ ID NO: 230031 - RNA, 19 nt, Homo sapiens
  misc_RNA (1)...(19): siRNA sense strand
ggacuuggauuaugaacua

SEQ ID NO: 230032 - RNA, 19 nt, Homo sapiens
  misc_RNA (1)...(19): siRNA sense strand
ucaaugagaugaagaagua

SEQ ID NO: 230033 - RNA, 19 nt, Homo sapiens
  misc_RNA (1)...(19): siRNA sense strand
caacaaagccugugacuau

SEQ ID NO: 230034 - RNA, 19 nt, Homo sapiens
  misc_RNA (1)...(19): siRNA sense strand
ggagagaccucacagacuu

SEQ ID NO: 230035 - RNA, 19 nt, Homo sapiens
  misc_RNA (1)...(19): siRNA sense strand
ggacacaguuuaugaagau

SEQ ID NO: 230036 - RNA, 19 nt, Homo sapiens
  misc_RNA (1)...(19): siRNA sense strand
ggaggagguuggaaagaua

SEQ ID NO: 230037 - RNA, 19 nt, Homo sapiens
  misc_RNA (1)...(19): siRNA sense strand
gauguggucuugaguauug

SEQ ID NO: 230038 - RNA, 19 nt, Homo sapiens
  misc_RNA (1)...(19): siRNA sense strand
gaaagggaauccuggaaga

SEQ ID NO: 230039 - RNA, 19 nt, Homo sapiens
  misc_RNA (1)...(19): siRNA sense strand
gaacggcacucaagguuuc

SEQ ID NO: 230040 - RNA, 19 nt, Homo sapiens
  misc_RNA (1)...(19): siRNA sense strand
gcagggauuucauauuaaa

SEQ ID NO: 230041 - RNA, 19 nt, Homo sapiens
  misc_RNA (1)...(19): siRNA sense strand
gaauugcgguggcucagua

SEQ ID NO: 230042 - RNA, 19 nt, Homo sapiens
  misc_RNA (1)...(19): siRNA sense strand
gaagaaagcagacauugug

SEQ ID NO: 230043 - RNA, 19 nt, Homo sapiens
  misc_RNA (1)...(19): siRNA sense strand
uugcagggauuucauauua

SEQ ID NO: 230044 - RNA, 19 nt, Homo sapiens
  misc_RNA (1)...(19): siRNA sense strand
gaacuagccuuugcuuuag

SEQ ID NO: 230045 - RNA, 19 nt, Homo sapiens
  misc_RNA (1)...(19): siRNA sense strand
gcaggaaggugaacaucaa

SEQ ID NO: 230046 - RNA, 19 nt, Homo sapiens
  misc_RNA (1)...(19): siRNA sense strand
gaaagaguuuguccagaga

SEQ ID NO: 230047 - RNA, 19 nt, Homo sapiens
  misc_RNA (1)...(19): siRNA sense strand
gaagacacgccaacacuaa

SEQ ID NO: 230048 - RNA, 19 nt, Homo sapiens
  misc_RNA (1)...(19): siRNA sense strand
gaaggaacuugcagggauu

SEQ ID NO: 230049 - RNA, 19 nt, Homo sapiens
  misc_RNA (1)...(19): siRNA sense strand
gaagagaagcagcauaaug

SEQ ID NO: 230050 - RNA, 19 nt, Homo sapiens
  misc_RNA (1)...(19): siRNA sense strand
ucagagagcuucccaacau

SEQ ID NO: 230051 - RNA, 19 nt, Homo sapiens
  misc_RNA (1)...(19): siRNA sense strand
gaaagaaugugaaaagguu

SEQ ID NO: 230052 - RNA, 19 nt, Homo sapiens
  misc_RNA (1)...(19): siRNA sense strand
caacaaaguggucuacaaa

SEQ ID NO: 230053 - RNA, 19 nt, Homo sapiens
  misc_RNA (1)...(19): siRNA sense strand
gacuuucucuacaagauua

SEQ ID NO: 230054 - RNA, 19 nt, Homo sapiens
  misc_RNA (1)...(19): siRNA sense strand
agaacuagccuuugcuuua

SEQ ID NO: 230055 - RNA, 19 nt, Homo sapiens
  misc_RNA (1)...(19): siRNA sense strand
guacagcgaugaugucaag

SEQ ID NO: 230056 - RNA, 19 nt, Homo sapiens
  misc_RNA (1)...(19): siRNA sense strand
gaacaagggugccgaucag

SEQ ID NO: 230057 - RNA, 19 nt, Homo sapiens
  misc_RNA (1)...(19): siRNA sense strand
caacagaacuagccuuugc

SEQ ID NO: 230058 - RNA, 19 nt, Homo sapiens
  misc_RNA (1)...(19): siRNA sense strand
caacauagaagaaagaauc

SEQ ID NO: 230059 - RNA, 19 nt, Homo sapiens
  misc_RNA (1)...(19): siRNA sense strand
gcucuagacuuuguucgua

SEQ ID NO: 230060 - RNA, 19 nt, Homo sapiens
  misc_RNA (1)...(19): siRNA sense strand
cgacgucuucuucaaauua

SEQ ID NO: 230061 - RNA, 19 nt, Homo sapiens
  misc_RNA (1)...(19): siRNA sense strand
gagauguggucuugaguau

SEQ ID NO: 230062 - RNA, 19 nt, Homo sapiens
  misc_RNA (1)...(19): siRNA sense strand
guaagucccuagaugaaau

SEQ ID NO: 230063 - RNA, 19 nt, Homo sapiens
  misc_RNA (1)...(19): siRNA sense strand
gcuaaugcaucuggaguuu

SEQ ID NO: 230064 - RNA, 19 nt, Homo sapiens
  misc_RNA (1)...(19): siRNA sense strand
gaagaagaaagcagacauu

SEQ ID NO: 230065 - RNA, 19 nt, Homo sapiens
  misc_RNA (1)...(19): siRNA sense strand
uagagaggcugguugacua

SEQ ID NO: 230066 - RNA, 19 nt, Homo sapiens
  misc_RNA (1)...(19): siRNA sense strand
gaaaucggacaggaucuua

SEQ ID NO: 230067 - RNA, 19 nt, Homo sapiens
  misc_RNA (1)...(19): siRNA sense strand
caaagccugugacuauuau

SEQ ID NO: 230068 - RNA, 19 nt, Homo sapiens
  misc_RNA (1)...(19): siRNA sense strand
cgaauaacguuacuucaag

SEQ ID NO: 230069 - RNA, 19 nt, Homo sapiens
  misc_RNA (1)...(19): siRNA sense strand
gaaagcagacauuguguuc

SEQ ID NO: 230070 - RNA, 19 nt, Homo sapiens
  misc_RNA (1)...(19): siRNA sense strand
gggcucugcucuagacuuu

SEQ ID NO: 230071 - RNA, 19 nt, Homo sapiens
  misc_RNA (1)...(19): siRNA sense strand
gaggaaacaucggcacuug

SEQ ID NO: 230072 - RNA, 19 nt, Homo sapiens
  misc_RNA (1)...(19): siRNA sense strand
gaaauaguggacacaguuu

SEQ ID NO: 230073 - RNA, 19 nt, Homo sapiens
  misc_RNA (1)...(19): siRNA sense strand
gaucgaggauggagugcuu

SEQ ID NO: 230074 - RNA, 19 nt, Homo sapiens
  misc_RNA (1)...(19): siRNA sense strand
caaacgacgucuucuucaa

SEQ ID NO: 230075 - RNA, 19 nt, Homo sapiens
  misc_RNA (1)...(19): siRNA sense strand
gaaccugggcuaaauggaa

SEQ ID NO: 230076 - RNA, 19 nt, Homo sapiens
  misc_RNA (1)...(19): siRNA sense strand
cagagaugcucgagaaguu

SEQ ID NO: 230077 - RNA, 19 nt, Homo sapiens
  misc_RNA (1)...(19): siRNA sense strand
gaagaaagaaucaugaacu

SEQ ID NO: 230078 - RNA, 19 nt, Homo sapiens
  misc_RNA (1)...(19): siRNA sense strand
cagagucgcuucccaagau

SEQ ID NO: 230079 - RNA, 19 nt, Homo sapiens
  misc_RNA (1)...(19): siRNA sense strand
caacgaagccggugacuac

SEQ ID NO: 230080 - RNA, 19 nt, Homo sapiens
  misc_RNA (1)...(19): siRNA sense strand
ucacagacuuccuggagaa

SEQ ID NO: 230081 - RNA, 19 nt, Homo sapiens
  misc_RNA (1)...(19): siRNA sense strand
acggagaucuggcugauuu

SEQ ID NO: 230082 - RNA, 19 nt, Homo sapiens
  misc_RNA (1)...(19): siRNA sense strand
gaacagaaucagccagaug

SEQ ID NO: 230083 - RNA, 19 nt, Homo sapiens
  misc_RNA (1)...(19): siRNA sense strand
gcaaugcccuggaguacgu

SEQ ID NO: 230084 - RNA, 19 nt, Homo sapiens
  misc_RNA (1)...(19): siRNA sense strand
ucacagagaugcagaccau

SEQ ID NO: 230085 - RNA, 19 nt, Homo sapiens
  misc_RNA (1)...(19): siRNA sense strand
ucgaugagcucaaugugaa

SEQ ID NO: 230086 - RNA, 19 nt, Homo sapiens
  misc_RNA (1)...(19): siRNA sense strand
acaaagacggccacuguua

SEQ ID NO: 230087 - RNA, 19 nt, Homo sapiens
  misc_RNA (1)...(19): siRNA sense strand
ugacaacauugccgagaaa

SEQ ID NO: 230088 - RNA, 19 nt, Homo sapiens
  misc_RNA (1)...(19): siRNA sense strand
ccaagaggcagauuauuga

SEQ ID NO: 230089 - RNA, 19 nt, Homo sapiens
  misc_RNA (1)...(19): siRNA sense strand
ucuacaagauuaucgauga

SEQ ID NO: 230090 - RNA, 19 nt, Homo sapiens
  misc_RNA (1)...(19): siRNA sense strand
ggagagaggacccaaagga

SEQ ID NO: 230091 - RNA, 19 nt, Homo sapiens
  misc_RNA (1)...(19): siRNA sense strand
ggcgaggguuuauguauga

SEQ ID NO: 230092 - RNA, 19 nt, Homo sapiens
  misc_RNA (1)...(19): siRNA sense strand
ggaccaggcccgaguucua

SEQ ID NO: 230093 - RNA, 19 nt, Homo sapiens
  misc_RNA (1)...(19): siRNA sense strand
caaguaaauguuccgaaua

SEQ ID NO: 230094 - RNA, 19 nt, Homo sapiens
  misc_RNA (1)...(19): siRNA sense strand
cagagaggcugugcucaaa

SEQ ID NO: 230095 - RNA, 19 nt, Homo sapiens
  misc_RNA (1)...(19): siRNA sense strand
ggagaaagaggagauguug

SEQ ID NO: 230096 - RNA, 19 nt, Homo sapiens
  misc_RNA (1)...(19): siRNA sense strand
gguggaggccuuugacuuu

SEQ ID NO: 230097 - RNA, 19 nt, Homo sapiens
  misc_RNA (1)...(19): siRNA sense strand
ggaagacacgccaacacua

SEQ ID NO: 230098 - RNA, 19 nt, Homo sapiens
  misc_RNA (1)...(19): siRNA sense strand
ucaacaaaguggucuacaa

SEQ ID NO: 230099 - RNA, 19 nt, Homo sapiens
  misc_RNA (1)...(19): siRNA sense strand
ggaaguuucaguacaaaga

SEQ ID NO: 230100 - RNA, 19 nt, Homo sapiens
  misc_RNA (1)...(19): siRNA sense strand
ccacaaagacggccacugu

SEQ ID NO: 230101 - RNA, 19 nt, Homo sapiens
  misc_RNA (1)...(19): siRNA sense strand
ggaaacagugugauugguu

SEQ ID NO: 230102 - RNA, 19 nt, Homo sapiens
  misc_RNA (1)...(19): siRNA sense strand
cauagagaaugucuuugaa

SEQ ID NO: 230103 - RNA, 19 nt, Homo sapiens
  misc_RNA (1)...(19): siRNA sense strand
gauaggagaacaaggcauu

SEQ ID NO: 230104 - RNA, 19 nt, Homo sapiens
  misc_RNA (1)...(19): siRNA sense strand
aagaggagauguugggauu

SEQ ID NO: 230105 - RNA, 19 nt, Homo sapiens
  misc_RNA (1)...(19): siRNA sense strand
gacauucuguuccucuuug

SEQ ID NO: 230106 - RNA, 19 nt, Homo sapiens
  misc_RNA (1)...(19): siRNA sense strand
uaaaugcccuugcuguuac

SEQ ID NO: 230107 - RNA, 19 nt, Homo sapiens
  misc_RNA (1)...(19): siRNA sense strand
gauaaaugcccuugcuguu

SEQ ID NO: 230108 - RNA, 19 nt, Homo sapiens
  misc_RNA (1)...(19): siRNA sense strand
ggaaagauagcguccaaca

SEQ ID NO: 230109 - RNA, 19 nt, Homo sapiens
  misc_RNA (1)...(19): siRNA sense strand
cagagagcuucccaacaua

SEQ ID NO: 230110 - RNA, 19 nt, Homo sapiens
  misc_RNA (1)...(19): siRNA sense strand
gaagagggcgucccacagu

SEQ ID NO: 230111 - RNA, 19 nt, Homo sapiens
  misc_RNA (1)...(19): siRNA sense strand
caucaacgcuuugcagauc

SEQ ID NO: 230112 - RNA, 19 nt, Homo sapiens
  misc_RNA (1)...(19): siRNA sense strand
gaaaggagaaagaggagau

SEQ ID NO: 230113 - RNA, 19 nt, Homo sapiens
  misc_RNA (1)...(19): siRNA sense strand
ggugguaagucccuagaug

SEQ ID NO: 230114 - RNA, 19 nt, Homo sapiens
  misc_RNA (1)...(19): siRNA sense strand
acaaguaaauguuccgaau

SEQ ID NO: 230115 - RNA, 19 nt, Homo sapiens
  misc_RNA (1)...(19): siRNA sense strand
gaugcgagauguggucuug

SEQ ID NO: 230116 - RNA, 19 nt, Homo sapiens
  misc_RNA (1)...(19): siRNA sense strand
uccaaagcaucaaagauaa

SEQ ID NO: 230117 - RNA, 19 nt, Homo sapiens
  misc_RNA (1)...(19): siRNA sense strand
gggcgaggguuuauguaug

SEQ ID NO: 230118 - RNA, 19 nt, Homo sapiens
  misc_RNA (1)...(19): siRNA sense strand
ugaagagaaugaagaucaa

SEQ ID NO: 230119 - RNA, 19 nt, Homo sapiens
  misc_RNA (1)...(19): siRNA sense strand
ccacggaaguuucaguaca

SEQ ID NO: 230120 - RNA, 19 nt, Homo sapiens
  misc_RNA (1)...(19): siRNA sense strand
acaaagccugugacuauua

SEQ ID NO: 230121 - RNA, 19 nt, Homo sapiens
  misc_RNA (1)...(19): siRNA sense strand
ccaccacccuguuccaguu

SEQ ID NO: 230122 - RNA, 19 nt, Homo sapiens
  misc_RNA (1)...(19): siRNA sense strand
gagaggacccaaaggagaa

SEQ ID NO: 230123 - RNA, 19 nt, Homo sapiens
  misc_RNA (1)...(19): siRNA sense strand
gguggaagaugcacaggau

SEQ ID NO: 230124 - RNA, 19 nt, Homo sapiens
  misc_RNA (1)...(19): siRNA sense strand
gaagggcgaaguaggagaa

SEQ ID NO: 230125 - RNA, 19 nt, Homo sapiens
  misc_RNA (1)...(19): siRNA sense strand
aaagaaccuugugaaguuu

SEQ ID NO: 230126 - RNA, 19 nt, Homo sapiens
  misc_RNA (1)...(19): siRNA sense strand
gcucugcucuagacuuugu

SEQ ID NO: 230127 - RNA, 19 nt, Homo sapiens
  misc_RNA (1)...(19): siRNA sense strand
ccauagagaaugucuuuga

SEQ ID NO: 230128 - RNA, 19 nt, Homo sapiens
  misc_RNA (1)...(19): siRNA sense strand
gcagggaaccagggccuua

SEQ ID NO: 230129 - RNA, 19 nt, Homo sapiens
  misc_RNA (1)...(19): siRNA sense strand
cgacauggcuuucaucuua

SEQ ID NO: 230130 - RNA, 19 nt, Homo sapiens
  misc_RNA (1)...(19): siRNA sense strand
caaagaaccuugugaaguu

SEQ ID NO: 230131 - RNA, 19 nt, Homo sapiens
  misc_RNA (1)...(19): siRNA sense strand
ggacuuggauuaugaacua

SEQ ID NO: 230132 - RNA, 19 nt, Homo sapiens
  misc_RNA (1)...(19): siRNA sense strand
ucaaugagaugaagaagua

SEQ ID NO: 230133 - RNA, 19 nt, Homo sapiens
  misc_RNA (1)...(19): siRNA sense strand
caacaaagccugugacuau

SEQ ID NO: 230134 - RNA, 19 nt, Homo sapiens
  misc_RNA (1)...(19): siRNA sense strand
ggagagaccucacagacuu

SEQ ID NO: 230135 - RNA, 19 nt, Homo sapiens
  misc_RNA (1)...(19): siRNA sense strand
ggacacaguuuaugaagau

SEQ ID NO: 230136 - RNA, 19 nt, Homo sapiens
  misc_RNA (1)...(19): siRNA sense strand
ggaggagguuggaaagaua

SEQ ID NO: 230137 - RNA, 19 nt, Homo sapiens
  misc_RNA (1)...(19): siRNA sense strand
gauguggucuugaguauug

SEQ ID NO: 230138 - RNA, 19 nt, Homo sapiens
  misc_RNA (1)...(19): siRNA sense strand
gaaagggaauccuggaaga

SEQ ID NO: 230139 - RNA, 19 nt, Homo sapiens
  misc_RNA (1)...(19): siRNA sense strand
gaacggcacucaagguuuc

SEQ ID NO: 230140 - RNA, 19 nt, Homo sapiens
  misc_RNA (1)...(19): siRNA sense strand
gcagggauuucauauuaaa

SEQ ID NO: 230141 - RNA, 19 nt, Homo sapiens
  misc_RNA (1)...(19): siRNA sense strand
gaauugcgguggcucagua

SEQ ID NO: 230142 - RNA, 19 nt, Homo sapiens
  misc_RNA (1)...(19): siRNA sense strand
gaagaaagcagacauugug

SEQ ID NO: 230143 - RNA, 19 nt, Homo sapiens
  misc_RNA (1)...(19): siRNA sense strand
uugcagggauuucauauua

SEQ ID NO: 230144 - RNA, 19 nt, Homo sapiens
  misc_RNA (1)...(19): siRNA sense strand
gaacuagccuuugcuuuag

SEQ ID NO: 230145 - RNA, 19 nt, Homo sapiens
  misc_RNA (1)...(19): siRNA sense strand
gcaggaaggugaacaucaa

SEQ ID NO: 230146 - RNA, 19 nt, Homo sapiens
  misc_RNA (1)...(19): siRNA sense strand
gaaagaguuuguccagaga

SEQ ID NO: 230147 - RNA, 19 nt, Homo sapiens
  misc_RNA (1)...(19): siRNA sense strand
gaagacacgccaacacuaa

SEQ ID NO: 230148 - RNA, 19 nt, Homo sapiens
  misc_RNA (1)...(19): siRNA sense strand
gaaggaacuugcagggauu

SEQ ID NO: 230149 - RNA, 19 nt, Homo sapiens
  misc_RNA (1)...(19): siRNA sense strand
gaagagaagcagcauaaug

SEQ ID NO: 230150 - RNA, 19 nt, Homo sapiens
  misc_RNA (1)...(19): siRNA sense strand
ucagagagcuucccaacau

SEQ ID NO: 230151 - RNA, 19 nt, Homo sapiens
  misc_RNA (1)...(19): siRNA sense strand
gaaagaaugugaaaagguu

SEQ ID NO: 230152 - RNA, 19 nt, Homo sapiens
  misc_RNA (1)...(19): siRNA sense strand
caacaaaguggucuacaaa

SEQ ID NO: 230153 - RNA, 19 nt, Homo sapiens
  misc_RNA (1)...(19): siRNA sense strand
gacuuucucuacaagauua

SEQ ID NO: 230154 - RNA, 19 nt, Homo sapiens
  misc_RNA (1)...(19): siRNA sense strand
agaacuagccuuugcuuua

SEQ ID NO: 230155 - RNA, 19 nt, Homo sapiens
  misc_RNA (1)...(19): siRNA sense strand
guacagcgaugaugucaag

SEQ ID NO: 230156 - RNA, 19 nt, Homo sapiens
  misc_RNA (1)...(19): siRNA sense strand
gaacaagggugccgaucag

SEQ ID NO: 230157 - RNA, 19 nt, Homo sapiens
  misc_RNA (1)...(19): siRNA sense strand
caacagaacuagccuuugc

SEQ ID NO: 230158 - RNA, 19 nt, Homo sapiens
  misc_RNA (1)...(19): siRNA sense strand
caacauagaagaaagaauc

SEQ ID NO: 230159 - RNA, 19 nt, Homo sapiens
  misc_RNA (1)...(19): siRNA sense strand
gcucuagacuuuguucgua

SEQ ID NO: 230160 - RNA, 19 nt, Homo sapiens
  misc_RNA (1)...(19): siRNA sense strand
cgacgucuucuucaaauua

SEQ ID NO: 230161 - RNA, 19 nt, Homo sapiens
  misc_RNA (1)...(19): siRNA sense strand
gagauguggucuugaguau

SEQ ID NO: 230162 - RNA, 19 nt, Homo sapiens
  misc_RNA (1)...(19): siRNA sense strand
guaagucccuagaugaaau

SEQ ID NO: 230163 - RNA, 19 nt, Homo sapiens
  misc_RNA (1)...(19): siRNA sense strand
gcuaaugcaucuggaguuu

SEQ ID NO: 230164 - RNA, 19 nt, Homo sapiens
  misc_RNA (1)...(19): siRNA sense strand
gaagaagaaagcagacauu

SEQ ID NO: 230165 - RNA, 19 nt, Homo sapiens
  misc_RNA (1)...(19): siRNA sense strand
uagagaggcugguugacua

SEQ ID NO: 230166 - RNA, 19 nt, Homo sapiens
  misc_RNA (1)...(19): siRNA sense strand
gaaaucggacaggaucuua

SEQ ID NO: 230167 - RNA, 19 nt, Homo sapiens
  misc_RNA (1)...(19): siRNA sense strand
caaagccugugacuauuau

SEQ ID NO: 230168 - RNA, 19 nt, Homo sapiens
  misc_RNA (1)...(19): siRNA sense strand
cgaauaacguuacuucaag

SEQ ID NO: 230169 - RNA, 19 nt, Homo sapiens
  misc_RNA (1)...(19): siRNA sense strand
gaaagcagacauuguguuc

SEQ ID NO: 230170 - RNA, 19 nt, Homo sapiens
  misc_RNA (1)...(19): siRNA sense strand
gggcucugcucuagacuuu

SEQ ID NO: 230171 - RNA, 19 nt, Homo sapiens
  misc_RNA (1)...(19): siRNA sense strand
gaggaaacaucggcacuug

SEQ ID NO: 230172 - RNA, 19 nt, Homo sapiens
  misc_RNA (1)...(19): siRNA sense strand
gaaauaguggacacaguuu

SEQ ID NO: 230173 - RNA, 19 nt, Homo sapiens
  misc_RNA (1)...(19): siRNA sense strand
gaucgaggauggagugcuu

SEQ ID NO: 230174 - RNA, 19 nt, Homo sapiens
  misc_RNA (1)...(19): siRNA sense strand
caaacgacgucuucuucaa

SEQ ID NO: 230175 - RNA, 19 nt, Homo sapiens
  misc_RNA (1)...(19): siRNA sense strand
gaaccugggcuaaauggaa

SEQ ID NO: 230176 - RNA, 19 nt, Homo sapiens
  misc_RNA (1)...(19): siRNA sense strand
cagagaugcucgagaaguu

SEQ ID NO: 230177 - RNA, 19 nt, Homo sapiens
  misc_RNA (1)...(19): siRNA sense strand
gaagaaagaaucaugaacu

SEQ ID NO: 230178 - RNA, 19 nt, Homo sapiens
  misc_RNA (1)...(19): siRNA sense strand
cagagucgcuucccaagau

SEQ ID NO: 230179 - RNA, 19 nt, Homo sapiens
  misc_RNA (1)...(19): siRNA sense strand
caacgaagccggugacuac

SEQ ID NO: 230180 - RNA, 19 nt, Homo sapiens
  misc_RNA (1)...(19): siRNA sense strand
ucacagacuuccuggagaa

SEQ ID NO: 230181 - RNA, 19 nt, Homo sapiens
  misc_RNA (1)...(19): siRNA sense strand
acggagaucuggcugauuu

SEQ ID NO: 230182 - RNA, 19 nt, Homo sapiens
  misc_RNA (1)...(19): siRNA sense strand
gaacagaaucagccagaug

SEQ ID NO: 230183 - RNA, 19 nt, Homo sapiens
  misc_RNA (1)...(19): siRNA sense strand
gcaaugcccuggaguacgu

SEQ ID NO: 230184 - RNA, 19 nt, Homo sapiens
  misc_RNA (1)...(19): siRNA sense strand
ucacagagaugcagaccau

SEQ ID NO: 230185 - RNA, 19 nt, Homo sapiens
  misc_RNA (1)...(19): siRNA sense strand
ucgaugagcucaaugugaa

SEQ ID NO: 230186 - RNA, 19 nt, Homo sapiens
  misc_RNA (1)...(19): siRNA sense strand
acaaagacggccacuguua

SEQ ID NO: 230187 - RNA, 19 nt, Homo sapiens
  misc_RNA (1)...(19): siRNA sense strand
ugacaacauugccgagaaa

SEQ ID NO: 230188 - RNA, 19 nt, Homo sapiens
  misc_RNA (1)...(19): siRNA sense strand
ccaagaggcagauuauuga

SEQ ID NO: 230189 - RNA, 19 nt, Homo sapiens
  misc_RNA (1)...(19): siRNA sense strand
ucuacaagauuaucgauga

SEQ ID NO: 230190 - RNA, 19 nt, Homo sapiens
  misc_RNA (1)...(19): siRNA sense strand
ggagagaggacccaaagga

SEQ ID NO: 230191 - RNA, 19 nt, Homo sapiens
  misc_RNA (1)...(19): siRNA sense strand
ggcgaggguuuauguauga

SEQ ID NO: 230192 - RNA, 19 nt, Homo sapiens
  misc_RNA (1)...(19): siRNA sense strand
ggaccaggcccgaguucua

SEQ ID NO: 230193 - RNA, 19 nt, Homo sapiens
  misc_RNA (1)...(19): siRNA sense strand
caaguaaauguuccgaaua

SEQ ID NO: 230194 - RNA, 19 nt, Homo sapiens
  misc_RNA (1)...(19): siRNA sense strand
cagagaggcugugcucaaa

SEQ ID NO: 230195 - RNA, 19 nt, Homo sapiens
  misc_RNA (1)...(19): siRNA sense strand
ggagaaagaggagauguug

SEQ ID NO: 230196 - RNA, 19 nt, Homo sapiens
  misc_RNA (1)...(19): siRNA sense strand
gguggaggccuuugacuuu

SEQ ID NO: 230197 - RNA, 19 nt, Homo sapiens
  misc_RNA (1)...(19): siRNA sense strand
ggaagacacgccaacacua

SEQ ID NO: 230198 - RNA, 19 nt, Homo sapiens
  misc_RNA (1)...(19): siRNA sense strand
ucaacaaaguggucuacaa

SEQ ID NO: 230199 - RNA, 19 nt, Homo sapiens
  misc_RNA (1)...(19): siRNA sense strand
ggaaguuucaguacaaaga

SEQ ID NO: 230200 - RNA, 19 nt, Homo sapiens
  misc_RNA (1)...(19): siRNA sense strand
ccacaaagacggccacugu

SEQ ID NO: 230201 - RNA, 19 nt, Homo sapiens
  misc_RNA (1)...(19): siRNA sense strand
ggaaacagugugauugguu

SEQ ID NO: 230202 - RNA, 19 nt, Homo sapiens
  misc_RNA (1)...(19): siRNA sense strand
cauagagaaugucuuugaa

SEQ ID NO: 230203 - RNA, 19 nt, Homo sapiens
  misc_RNA (1)...(19): siRNA sense strand
gauaggagaacaaggcauu

SEQ ID NO: 230204 - RNA, 19 nt, Homo sapiens
  misc_RNA (1)...(19): siRNA sense strand
aagaggagauguugggauu

SEQ ID NO: 230205 - RNA, 19 nt, Homo sapiens
  misc_RNA (1)...(19): siRNA sense strand
gacauucuguuccucuuug

SEQ ID NO: 230206 - RNA, 19 nt, Homo sapiens
  misc_RNA (1)...(19): siRNA sense strand
uaaaugcccuugcuguuac

SEQ ID NO: 230207 - RNA, 19 nt, Homo sapiens
  misc_RNA (1)...(19): siRNA sense strand
gauaaaugcccuugcuguu

SEQ ID NO: 230208 - RNA, 19 nt, Homo sapiens
  misc_RNA (1)...(19): siRNA sense strand
ggaaagauagcguccaaca

SEQ ID NO: 230209 - RNA, 19 nt, Homo sapiens
  misc_RNA (1)...(19): siRNA sense strand
cagagagcuucccaacaua

SEQ ID NO: 230210 - RNA, 19 nt, Homo sapiens
  misc_RNA (1)...(19): siRNA sense strand
gaagagggcgucccacagu

SEQ ID NO: 230211 - RNA, 19 nt, Homo sapiens
  misc_RNA (1)...(19): siRNA sense strand
caucaacgcuuugcagauc

SEQ ID NO: 230212 - RNA, 19 nt, Homo sapiens
  misc_RNA (1)...(19): siRNA sense strand
gaaaggagaaagaggagau

SEQ ID NO: 230213 - RNA, 19 nt, Homo sapiens
  misc_RNA (1)...(19): siRNA sense strand
ggugguaagucccuagaug

SEQ ID NO: 230214 - RNA, 19 nt, Homo sapiens
  misc_RNA (1)...(19): siRNA sense strand
acaaguaaauguuccgaau

SEQ ID NO: 230215 - RNA, 19 nt, Homo sapiens
  misc_RNA (1)...(19): siRNA sense strand
gaugcgagauguggucuug

SEQ ID NO: 230216 - RNA, 19 nt, Homo sapiens
  misc_RNA (1)...(19): siRNA sense strand
uccaaagcaucaaagauaa

SEQ ID NO: 230217 - RNA, 19 nt, Homo sapiens
  misc_RNA (1)...(19): siRNA sense strand
gggcgaggguuuauguaug

SEQ ID NO: 230218 - RNA, 19 nt, Homo sapiens
  misc_RNA (1)...(19): siRNA sense strand
ugaagagaaugaagaucaa

SEQ ID NO: 230219 - RNA, 19 nt, Homo sapiens
  misc_RNA (1)...(19): siRNA sense strand
ccacggaaguuucaguaca

SEQ ID NO: 230220 - RNA, 19 nt, Homo sapiens
  misc_RNA (1)...(19): siRNA sense strand
acaaagccugugacuauua

SEQ ID NO: 230221 - RNA, 19 nt, Homo sapiens
  misc_RNA (1)...(19): siRNA sense strand
ccaccacccuguuccaguu

SEQ ID NO: 230222 - RNA, 19 nt, Homo sapiens
  misc_RNA (1)...(19): siRNA sense strand
gagaggacccaaaggagaa

SEQ ID NO: 230223 - RNA, 19 nt, Homo sapiens
  misc_RNA (1)...(19): siRNA sense strand
gguggaagaugcacaggau

SEQ ID NO: 230224 - RNA, 19 nt, Homo sapiens
  misc_RNA (1)...(19): siRNA sense strand
gaagggcgaaguaggagaa

SEQ ID NO: 230225 - RNA, 19 nt, Homo sapiens
  misc_RNA (1)...(19): siRNA sense strand
aaagaaccuugugaaguuu

SEQ ID NO: 230226 - RNA, 19 nt, Homo sapiens
  misc_RNA (1)...(19): siRNA sense strand
gcucugcucuagacuuugu

SEQ ID NO: 230227 - RNA, 19 nt, Homo sapiens
  misc_RNA (1)...(19): siRNA sense strand
ccauagagaaugucuuuga

SEQ ID NO: 230228 - RNA, 19 nt, Homo sapiens
  misc_RNA (1)...(19): siRNA sense strand
gcagggaaccagggccuua

SEQ ID NO: 230229 - RNA, 19 nt, Homo sapiens
  misc_RNA (1)...(19): siRNA sense strand
caaggaagcuggaaauaua

SEQ ID NO: 230230 - RNA, 19 nt, Homo sapiens
  misc_RNA (1)...(19): siRNA sense strand
caaagaaacucaaggauga

SEQ ID NO: 230231 - RNA, 19 nt, Homo sapiens
  misc_RNA (1)...(19): siRNA sense strand
gauauaagguggaauacua

SEQ ID NO: 230232 - RNA, 19 nt, Homo sapiens
  misc_RNA (1)...(19): siRNA sense strand
caagaaauguccaaguaua

SEQ ID NO: 230233 - RNA, 19 nt, Homo sapiens
  misc_RNA (1)...(19): siRNA sense strand
ggcaagaaauguccaagua

SEQ ID NO: 230234 - RNA, 19 nt, Homo sapiens
  misc_RNA (1)...(19): siRNA sense strand
gcaaggcccucacguuuau

SEQ ID NO: 230235 - RNA, 19 nt, Homo sapiens
  misc_RNA (1)...(19): siRNA sense strand
gaacagaguggcaguuaaa

SEQ ID NO: 230236 - RNA, 19 nt, Homo sapiens
  misc_RNA (1)...(19): siRNA sense strand
gaagucgaauuaaagauga

SEQ ID NO: 230237 - RNA, 19 nt, Homo sapiens
  misc_RNA (1)...(19): siRNA sense strand
gggcaaagcuauccagguu

SEQ ID NO: 230238 - RNA, 19 nt, Homo sapiens
  misc_RNA (1)...(19): siRNA sense strand
gcaguuaaaugcacacaga

SEQ ID NO: 230239 - RNA, 19 nt, Homo sapiens
  misc_RNA (1)...(19): siRNA sense strand
caaguuguccucucauuua

SEQ ID NO: 230240 - RNA, 19 nt, Homo sapiens
  misc_RNA (1)...(19): siRNA sense strand
gcgaugaggucaagucuga

SEQ ID NO: 230241 - RNA, 19 nt, Homo sapiens
  misc_RNA (1)...(19): siRNA sense strand
ggugcaaacuguuacauuu

SEQ ID NO: 230242 - RNA, 19 nt, Homo sapiens
  misc_RNA (1)...(19): siRNA sense strand
gaccagcacuucccucaaa

SEQ ID NO: 230243 - RNA, 19 nt, Homo sapiens
  misc_RNA (1)...(19): siRNA sense strand
gaaaucagccgcauuccaa

SEQ ID NO: 230244 - RNA, 19 nt, Homo sapiens
  misc_RNA (1)...(19): siRNA sense strand
uaaagaugauugcaacuga

SEQ ID NO: 230245 - RNA, 19 nt, Homo sapiens
  misc_RNA (1)...(19): siRNA sense strand
ggaagaaugucccuaaggu

SEQ ID NO: 230246 - RNA, 19 nt, Homo sapiens
  misc_RNA (1)...(19): siRNA sense strand
gaagucaccuugccuuuac

SEQ ID NO: 230247 - RNA, 19 nt, Homo sapiens
  misc_RNA (1)...(19): siRNA sense strand
uggaugaucucaccauuaa

SEQ ID NO: 230248 - RNA, 19 nt, Homo sapiens
  misc_RNA (1)...(19): siRNA sense strand
gaguggagcuguuugcuau

SEQ ID NO: 230249 - RNA, 19 nt, Homo sapiens
  misc_RNA (1)...(19): siRNA sense strand
ggaaauauaacaacugaug

SEQ ID NO: 230250 - RNA, 19 nt, Homo sapiens
  misc_RNA (1)...(19): siRNA sense strand
gguagaagaugaauauagu

SEQ ID NO: 230251 - RNA, 19 nt, Homo sapiens
  misc_RNA (1)...(19): siRNA sense strand
gaucaaggcacuacauuau

SEQ ID NO: 230252 - RNA, 19 nt, Homo sapiens
  misc_RNA (1)...(19): siRNA sense strand
gacagaggcuucacuggaa

SEQ ID NO: 230253 - RNA, 19 nt, Homo sapiens
  misc_RNA (1)...(19): siRNA sense strand
cagaagaaguaaagacauu

SEQ ID NO: 230254 - RNA, 19 nt, Homo sapiens
  misc_RNA (1)...(19): siRNA sense strand
gaauaccaauuaugccauu

SEQ ID NO: 230255 - RNA, 19 nt, Homo sapiens
  misc_RNA (1)...(19): siRNA sense strand
ucaaggcacuacauuauau

SEQ ID NO: 230256 - RNA, 19 nt, Homo sapiens
  misc_RNA (1)...(19): siRNA sense strand
ugagaggacuggcaagaaa

SEQ ID NO: 230257 - RNA, 19 nt, Homo sapiens
  misc_RNA (1)...(19): siRNA sense strand
gacccaagcuggcaugaga

SEQ ID NO: 230258 - RNA, 19 nt, Homo sapiens
  misc_RNA (1)...(19): siRNA sense strand
gaccaggagucucuguuaa

SEQ ID NO: 230259 - RNA, 19 nt, Homo sapiens
  misc_RNA (1)...(19): siRNA sense strand
ggaagucaccuugccuuua

SEQ ID NO: 230260 - RNA, 19 nt, Homo sapiens
  misc_RNA (1)...(19): siRNA sense strand
cauacaauguggcagauuu

SEQ ID NO: 230261 - RNA, 19 nt, Homo sapiens
  misc_RNA (1)...(19): siRNA sense strand
acaaugagcuugccaacau

SEQ ID NO: 230262 - RNA, 19 nt, Homo sapiens
  misc_RNA (1)...(19): siRNA sense strand
gaugaucucaccauuaauu

SEQ ID NO: 230263 - RNA, 19 nt, Homo sapiens
  misc_RNA (1)...(19): siRNA sense strand
ggaauacuauccaguuucu

SEQ ID NO: 230264 - RNA, 19 nt, Homo sapiens
  misc_RNA (1)...(19): siRNA sense strand
ggauucagguuucauuugu

SEQ ID NO: 230265 - RNA, 19 nt, Homo sapiens
  misc_RNA (1)...(19): siRNA sense strand
ggaccaggagucucuguua

SEQ ID NO: 230266 - RNA, 19 nt, Homo sapiens
  misc_RNA (1)...(19): siRNA sense strand
gaccaaaccucuaaacacu

SEQ ID NO: 230267 - RNA, 19 nt, Homo sapiens
  misc_RNA (1)...(19): siRNA sense strand
cacgaaaccuucaagugua

SEQ ID NO: 230268 - RNA, 19 nt, Homo sapiens
  misc_RNA (1)...(19): siRNA sense strand
caauguguauucuguggua

SEQ ID NO: 230269 - RNA, 19 nt, Homo sapiens
  misc_RNA (1)...(19): siRNA sense strand
gcagauccuucuagcaaga

SEQ ID NO: 230270 - RNA, 19 nt, Homo sapiens
  misc_RNA (1)...(19): siRNA sense strand
cagcagaccuacacccaaa

SEQ ID NO: 230271 - RNA, 19 nt, Homo sapiens
  misc_RNA (1)...(19): siRNA sense strand
gcauacaaccugacagaaa

SEQ ID NO: 230272 - RNA, 19 nt, Homo sapiens
  misc_RNA (1)...(19): siRNA sense strand
guuguccucucauuuauuu

SEQ ID NO: 230273 - RNA, 19 nt, Homo sapiens
  misc_RNA (1)...(19): siRNA sense strand
uaaggaaccugagagugua

SEQ ID NO: 230274 - RNA, 19 nt, Homo sapiens
  misc_RNA (1)...(19): siRNA sense strand
ucauauaccuuacacaauc

SEQ ID NO: 230275 - RNA, 19 nt, Homo sapiens
  misc_RNA (1)...(19): siRNA sense strand
acaagucugugaacaauug

SEQ ID NO: 230276 - RNA, 19 nt, Homo sapiens
  misc_RNA (1)...(19): siRNA sense strand
gaagaaugcguuugugaau

SEQ ID NO: 230277 - RNA, 19 nt, Homo sapiens
  misc_RNA (1)...(19): siRNA sense strand
aaauugcucuugcucagua

SEQ ID NO: 230278 - RNA, 19 nt, Homo sapiens
  misc_RNA (1)...(19): siRNA sense strand
ccuacgaugugaauguuua

SEQ ID NO: 230279 - RNA, 19 nt, Homo sapiens
  misc_RNA (1)...(19): siRNA sense strand
gcacaagacccucagaauc

SEQ ID NO: 230280 - RNA, 19 nt, Homo sapiens
  misc_RNA (1)...(19): siRNA sense strand
agggaaacgucaagaauuu

SEQ ID NO: 230281 - RNA, 19 nt, Homo sapiens
  misc_RNA (1)...(19): siRNA sense strand
agaaagugaugaccugauu

SEQ ID NO: 230282 - RNA, 19 nt, Homo sapiens
  misc_RNA (1)...(19): siRNA sense strand
gcagcugacugaccuuguu

SEQ ID NO: 230283 - RNA, 19 nt, Homo sapiens
  misc_RNA (1)...(19): siRNA sense strand
caacugauccugaugauac

SEQ ID NO: 230284 - RNA, 19 nt, Homo sapiens
  misc_RNA (1)...(19): siRNA sense strand
ccaaauucuugcacaugua

SEQ ID NO: 230285 - RNA, 19 nt, Homo sapiens
  misc_RNA (1)...(19): siRNA sense strand
acacaucucugacgaaugg

SEQ ID NO: 230286 - RNA, 19 nt, Homo sapiens
  misc_RNA (1)...(19): siRNA sense strand
guaaggaaccugagagugu

SEQ ID NO: 230287 - RNA, 19 nt, Homo sapiens
  misc_RNA (1)...(19): siRNA sense strand
ggacacagagccaacaaga

SEQ ID NO: 230288 - RNA, 19 nt, Homo sapiens
  misc_RNA (1)...(19): siRNA sense strand
gugauccaauugaugaaua

SEQ ID NO: 230289 - RNA, 19 nt, Homo sapiens
  misc_RNA (1)...(19): siRNA sense strand
cauacaggauucagaagaa

SEQ ID NO: 230290 - RNA, 19 nt, Homo sapiens
  misc_RNA (1)...(19): siRNA sense strand
caaggcagauauuguguuc

SEQ ID NO: 230291 - RNA, 19 nt, Homo sapiens
  misc_RNA (1)...(19): siRNA sense strand
ucacaggcauggcuuugaa

SEQ ID NO: 230292 - RNA, 19 nt, Homo sapiens
  misc_RNA (1)...(19): siRNA sense strand
ugacuguaguucccguuua

SEQ ID NO: 230293 - RNA, 19 nt, Homo sapiens
  misc_RNA (1)...(19): siRNA sense strand
cagaggaacugguaccaau

SEQ ID NO: 230294 - RNA, 19 nt, Homo sapiens
  misc_RNA (1)...(19): siRNA sense strand
cugaauauguugucaaugu

SEQ ID NO: 230295 - RNA, 19 nt, Homo sapiens
  misc_RNA (1)...(19): siRNA sense strand
gagggaaacgucaagaauu

SEQ ID NO: 230296 - RNA, 19 nt, Homo sapiens
  misc_RNA (1)...(19): siRNA sense strand
uacauugacugcuaugaaa

SEQ ID NO: 230297 - RNA, 19 nt, Homo sapiens
  misc_RNA (1)...(19): siRNA sense strand
caaccugacacuccauaua

SEQ ID NO: 230298 - RNA, 19 nt, Homo sapiens
  misc_RNA (1)...(19): siRNA sense strand
gaaauccucgucaguacaa

SEQ ID NO: 230299 - RNA, 19 nt, Homo sapiens
  misc_RNA (1)...(19): siRNA sense strand
ggaaaagugcguaaauaua

SEQ ID NO: 230300 - RNA, 19 nt, Homo sapiens
  misc_RNA (1)...(19): siRNA sense strand
gaaugucccuaagguguug

SEQ ID NO: 230301 - RNA, 19 nt, Homo sapiens
  misc_RNA (1)...(19): siRNA sense strand
gaaauuacagugcguggau

SEQ ID NO: 230302 - RNA, 19 nt, Homo sapiens
  misc_RNA (1)...(19): siRNA sense strand
ccaaaccucuaaacacugu

SEQ ID NO: 230303 - RNA, 19 nt, Homo sapiens
  misc_RNA (1)...(19): siRNA sense strand
gugcagaaauauaggauca

SEQ ID NO: 230304 - RNA, 19 nt, Homo sapiens
  misc_RNA (1)...(19): siRNA sense strand
ccacgaaaccuucaagugu

SEQ ID NO: 230305 - RNA, 19 nt, Homo sapiens
  misc_RNA (1)...(19): siRNA sense strand
cagaagaggaugucaaaga

SEQ ID NO: 230306 - RNA, 19 nt, Homo sapiens
  misc_RNA (1)...(19): siRNA sense strand
ucauggagcuucagaugug

SEQ ID NO: 230307 - RNA, 19 nt, Homo sapiens
  misc_RNA (1)...(19): siRNA sense strand
agaaugcguuugugaauca

SEQ ID NO: 230308 - RNA, 19 nt, Homo sapiens
  misc_RNA (1)...(19): siRNA sense strand
gaaggcggcuuuggucauc

SEQ ID NO: 230309 - RNA, 19 nt, Homo sapiens
  misc_RNA (1)...(19): siRNA sense strand
ggcaaggcccucacguuua

SEQ ID NO: 230310 - RNA, 19 nt, Homo sapiens
  misc_RNA (1)...(19): siRNA sense strand
gcaagaaauguccaaguau

SEQ ID NO: 230311 - RNA, 19 nt, Homo sapiens
  misc_RNA (1)...(19): siRNA sense strand
ggaguuucauuucucguau

SEQ ID NO: 230312 - RNA, 19 nt, Homo sapiens
  misc_RNA (1)...(19): siRNA sense strand
gagcaaacgaccacaauag

SEQ ID NO: 230313 - RNA, 19 nt, Homo sapiens
  misc_RNA (1)...(19): siRNA sense strand
gaaacugaauauguuguca

SEQ ID NO: 230314 - RNA, 19 nt, Homo sapiens
  misc_RNA (1)...(19): siRNA sense strand
gaggcgaggugcaaacugu

SEQ ID NO: 230315 - RNA, 19 nt, Homo sapiens
  misc_RNA (1)...(19): siRNA sense strand
ggaagccuuuguuggagaa

SEQ ID NO: 230316 - RNA, 19 nt, Homo sapiens
  misc_RNA (1)...(19): siRNA sense strand
gagagucuuuggugaaaca

SEQ ID NO: 230317 - RNA, 19 nt, Homo sapiens
  misc_RNA (1)...(19): siRNA sense strand
gaauauagugagccucuga

SEQ ID NO: 230318 - RNA, 19 nt, Homo sapiens
  misc_RNA (1)...(19): siRNA sense strand
cugaugaagucgaauuaaa

SEQ ID NO: 230319 - RNA, 19 nt, Homo sapiens
  misc_RNA (1)...(19): siRNA sense strand
guggucagaugaacagauu

SEQ ID NO: 230320 - RNA, 19 nt, Homo sapiens
  misc_RNA (1)...(19): siRNA sense strand
gcugugauauucccucuag

SEQ ID NO: 230321 - RNA, 19 nt, Homo sapiens
  misc_RNA (1)...(19): siRNA sense strand
caacugaugguuaugaaau

SEQ ID NO: 230322 - RNA, 19 nt, Homo sapiens
  misc_RNA (1)...(19): siRNA sense strand
gcagauauuguguucuuga

SEQ ID NO: 230323 - RNA, 19 nt, Homo sapiens
  misc_RNA (1)...(19): siRNA sense strand
gaacauaccacugugaaac

SEQ ID NO: 230324 - RNA, 19 nt, Homo sapiens
  misc_RNA (1)...(19): siRNA sense strand
gcaaacgaccacaauagga

SEQ ID NO: 230325 - RNA, 19 nt, Homo sapiens
  misc_RNA (1)...(19): siRNA sense strand
gaucagagaccagcacuuc

SEQ ID NO: 230326 - RNA, 19 nt, Homo sapiens
  misc_RNA (1)...(19): siRNA sense strand
gcacacagagacaagaaga

SEQ ID NO: 230327 - RNA, 19 nt, Homo sapiens
  misc_RNA (1)...(19): siRNA sense strand
ucugaaaccugaaacugaa

SEQ ID NO: 230328 - RNA, 19 nt, Homo sapiens
  misc_RNA (1)...(19): siRNA sense strand
gaacaugaugcgagcaguu

SEQ ID NO: 230329 - RNA, 19 nt, Homo sapiens
  misc_RNA (1)...(19): siRNA sense strand
caaggaagcuggaaauaua

SEQ ID NO: 230330 - RNA, 19 nt, Homo sapiens
  misc_RNA (1)...(19): siRNA sense strand
caaagaaacucaaggauga

SEQ ID NO: 230331 - RNA, 19 nt, Homo sapiens
  misc_RNA (1)...(19): siRNA sense strand
gauauaagguggaauacua

SEQ ID NO: 230332 - RNA, 19 nt, Homo sapiens
  misc_RNA (1)...(19): siRNA sense strand
caagaaauguccaaguaua

SEQ ID NO: 230333 - RNA, 19 nt, Homo sapiens
  misc_RNA (1)...(19): siRNA sense strand
ggcaagaaauguccaagua

SEQ ID NO: 230334 - RNA, 19 nt, Homo sapiens
  misc_RNA (1)...(19): siRNA sense strand
gcaaggcccucacguuuau

SEQ ID NO: 230335 - RNA, 19 nt, Homo sapiens
  misc_RNA (1)...(19): siRNA sense strand
gaacagaguggcaguuaaa

SEQ ID NO: 230336 - RNA, 19 nt, Homo sapiens
  misc_RNA (1)...(19): siRNA sense strand
gaagucgaauuaaagauga

SEQ ID NO: 230337 - RNA, 19 nt, Homo sapiens
  misc_RNA (1)...(19): siRNA sense strand
gggcaaagcuauccagguu

SEQ ID NO: 230338 - RNA, 19 nt, Homo sapiens
  misc_RNA (1)...(19): siRNA sense strand
gcaguuaaaugcacacaga

SEQ ID NO: 230339 - RNA, 19 nt, Homo sapiens
  misc_RNA (1)...(19): siRNA sense strand
caaguuguccucucauuua

SEQ ID NO: 230340 - RNA, 19 nt, Homo sapiens
  misc_RNA (1)...(19): siRNA sense strand
gcgaugaggucaagucuga

SEQ ID NO: 230341 - RNA, 19 nt, Homo sapiens
  misc_RNA (1)...(19): siRNA sense strand
ggugcaaacuguuacauuu

SEQ ID NO: 230342 - RNA, 19 nt, Homo sapiens
  misc_RNA (1)...(19): siRNA sense strand
gaccagcacuucccucaaa

SEQ ID NO: 230343 - RNA, 19 nt, Homo sapiens
  misc_RNA (1)...(19): siRNA sense strand
gaaaucagccgcauuccaa

SEQ ID NO: 230344 - RNA, 19 nt, Homo sapiens
  misc_RNA (1)...(19): siRNA sense strand
uaaagaugauugcaacuga

SEQ ID NO: 230345 - RNA, 19 nt, Homo sapiens
  misc_RNA (1)...(19): siRNA sense strand
ggaagaaugucccuaaggu

SEQ ID NO: 230346 - RNA, 19 nt, Homo sapiens
  misc_RNA (1)...(19): siRNA sense strand
gaagucaccuugccuuuac

SEQ ID NO: 230347 - RNA, 19 nt, Homo sapiens
  misc_RNA (1)...(19): siRNA sense strand
uggaugaucucaccauuaa

SEQ ID NO: 230348 - RNA, 19 nt, Homo sapiens
  misc_RNA (1)...(19): siRNA sense strand
gaguggagcuguuugcuau

SEQ ID NO: 230349 - RNA, 19 nt, Homo sapiens
  misc_RNA (1)...(19): siRNA sense strand
ggaaauauaacaacugaug

SEQ ID NO: 230350 - RNA, 19 nt, Homo sapiens
  misc_RNA (1)...(19): siRNA sense strand
gguagaagaugaauauagu

SEQ ID NO: 230351 - RNA, 19 nt, Homo sapiens
  misc_RNA (1)...(19): siRNA sense strand
gaucaaggcacuacauuau

SEQ ID NO: 230352 - RNA, 19 nt, Homo sapiens
  misc_RNA (1)...(19): siRNA sense strand
gacagaggcuucacuggaa

SEQ ID NO: 230353 - RNA, 19 nt, Homo sapiens
  misc_RNA (1)...(19): siRNA sense strand
cagaagaaguaaagacauu

SEQ ID NO: 230354 - RNA, 19 nt, Homo sapiens
  misc_RNA (1)...(19): siRNA sense strand
gaauaccaauuaugccauu

SEQ ID NO: 230355 - RNA, 19 nt, Homo sapiens
  misc_RNA (1)...(19): siRNA sense strand
ucaaggcacuacauuauau

SEQ ID NO: 230356 - RNA, 19 nt, Homo sapiens
  misc_RNA (1)...(19): siRNA sense strand
ugagaggacuggcaagaaa

SEQ ID NO: 230357 - RNA, 19 nt, Homo sapiens
  misc_RNA (1)...(19): siRNA sense strand
gacccaagcuggcaugaga

SEQ ID NO: 230358 - RNA, 19 nt, Homo sapiens
  misc_RNA (1)...(19): siRNA sense strand
gaccaggagucucuguuaa

SEQ ID NO: 230359 - RNA, 19 nt, Homo sapiens
  misc_RNA (1)...(19): siRNA sense strand
ggaagucaccuugccuuua

SEQ ID NO: 230360 - RNA, 19 nt, Homo sapiens
  misc_RNA (1)...(19): siRNA sense strand
cauacaauguggcagauuu

SEQ ID NO: 230361 - RNA, 19 nt, Homo sapiens
  misc_RNA (1)...(19): siRNA sense strand
acaaugagcuugccaacau

SEQ ID NO: 230362 - RNA, 19 nt, Homo sapiens
  misc_RNA (1)...(19): siRNA sense strand
gaugaucucaccauuaauu

SEQ ID NO: 230363 - RNA, 19 nt, Homo sapiens
  misc_RNA (1)...(19): siRNA sense strand
ggaauacuauccaguuucu

SEQ ID NO: 230364 - RNA, 19 nt, Homo sapiens
  misc_RNA (1)...(19): siRNA sense strand
ggauucagguuucauuugu

SEQ ID NO: 230365 - RNA, 19 nt, Homo sapiens
  misc_RNA (1)...(19): siRNA sense strand
ggaccaggagucucuguua

SEQ ID NO: 230366 - RNA, 19 nt, Homo sapiens
  misc_RNA (1)...(19): siRNA sense strand
gaccaaaccucuaaacacu

SEQ ID NO: 230367 - RNA, 19 nt, Homo sapiens
  misc_RNA (1)...(19): siRNA sense strand
cacgaaaccuucaagugua

SEQ ID NO: 230368 - RNA, 19 nt, Homo sapiens
  misc_RNA (1)...(19): siRNA sense strand
caauguguauucuguggua

SEQ ID NO: 230369 - RNA, 19 nt, Homo sapiens
  misc_RNA (1)...(19): siRNA sense strand
gcagauccuucuagcaaga

SEQ ID NO: 230370 - RNA, 19 nt, Homo sapiens
  misc_RNA (1)...(19): siRNA sense strand
cagcagaccuacacccaaa

SEQ ID NO: 230371 - RNA, 19 nt, Homo sapiens
  misc_RNA (1)...(19): siRNA sense strand
gcauacaaccugacagaaa

SEQ ID NO: 230372 - RNA, 19 nt, Homo sapiens
  misc_RNA (1)...(19): siRNA sense strand
guuguccucucauuuauuu

SEQ ID NO: 230373 - RNA, 19 nt, Homo sapiens
  misc_RNA (1)...(19): siRNA sense strand
uaaggaaccugagagugua

SEQ ID NO: 230374 - RNA, 19 nt, Homo sapiens
  misc_RNA (1)...(19): siRNA sense strand
ucauauaccuuacacaauc

SEQ ID NO: 230375 - RNA, 19 nt, Homo sapiens
  misc_RNA (1)...(19): siRNA sense strand
acaagucugugaacaauug

SEQ ID NO: 230376 - RNA, 19 nt, Homo sapiens
  misc_RNA (1)...(19): siRNA sense strand
gaagaaugcguuugugaau

SEQ ID NO: 230377 - RNA, 19 nt, Homo sapiens
  misc_RNA (1)...(19): siRNA sense strand
aaauugcucuugcucagua

SEQ ID NO: 230378 - RNA, 19 nt, Homo sapiens
  misc_RNA (1)...(19): siRNA sense strand
ccuacgaugugaauguuua

SEQ ID NO: 230379 - RNA, 19 nt, Homo sapiens
  misc_RNA (1)...(19): siRNA sense strand
gcacaagacccucagaauc

SEQ ID NO: 230380 - RNA, 19 nt, Homo sapiens
  misc_RNA (1)...(19): siRNA sense strand
agggaaacgucaagaauuu

SEQ ID NO: 230381 - RNA, 19 nt, Homo sapiens
  misc_RNA (1)...(19): siRNA sense strand
agaaagugaugaccugauu

SEQ ID NO: 230382 - RNA, 19 nt, Homo sapiens
  misc_RNA (1)...(19): siRNA sense strand
gcagcugacugaccuuguu

SEQ ID NO: 230383 - RNA, 19 nt, Homo sapiens
  misc_RNA (1)...(19): siRNA sense strand
caacugauccugaugauac

SEQ ID NO: 230384 - RNA, 19 nt, Homo sapiens
  misc_RNA (1)...(19): siRNA sense strand
ccaaauucuugcacaugua

SEQ ID NO: 230385 - RNA, 19 nt, Homo sapiens
  misc_RNA (1)...(19): siRNA sense strand
acacaucucugacgaaugg

SEQ ID NO: 230386 - RNA, 19 nt, Homo sapiens
  misc_RNA (1)...(19): siRNA sense strand
guaaggaaccugagagugu

SEQ ID NO: 230387 - RNA, 19 nt, Homo sapiens
  misc_RNA (1)...(19): siRNA sense strand
ggacacagagccaacaaga

SEQ ID NO: 230388 - RNA, 19 nt, Homo sapiens
  misc_RNA (1)...(19): siRNA sense strand
gugauccaauugaugaaua

SEQ ID NO: 230389 - RNA, 19 nt, Homo sapiens
  misc_RNA (1)...(19): siRNA sense strand
cauacaggauucagaagaa

SEQ ID NO: 230390 - RNA, 19 nt, Homo sapiens
  misc_RNA (1)...(19): siRNA sense strand
caaggcagauauuguguuc

SEQ ID NO: 230391 - RNA, 19 nt, Homo sapiens
  misc_RNA (1)...(19): siRNA sense strand
ucacaggcauggcuuugaa

SEQ ID NO: 230392 - RNA, 19 nt, Homo sapiens
  misc_RNA (1)...(19): siRNA sense strand
ugacuguaguucccguuua

SEQ ID NO: 230393 - RNA, 19 nt, Homo sapiens
  misc_RNA (1)...(19): siRNA sense strand
cagaggaacugguaccaau

SEQ ID NO: 230394 - RNA, 19 nt, Homo sapiens
  misc_RNA (1)...(19): siRNA sense strand
cugaauauguugucaaugu

SEQ ID NO: 230395 - RNA, 19 nt, Homo sapiens
  misc_RNA (1)...(19): siRNA sense strand
gagggaaacgucaagaauu

SEQ ID NO: 230396 - RNA, 19 nt, Homo sapiens
  misc_RNA (1)...(19): siRNA sense strand
uacauugacugcuaugaaa

SEQ ID NO: 230397 - RNA, 19 nt, Homo sapiens
  misc_RNA (1)...(19): siRNA sense strand
caaccugacacuccauaua

SEQ ID NO: 230398 - RNA, 19 nt, Homo sapiens
  misc_RNA (1)...(19): siRNA sense strand
gaaauccucgucaguacaa

SEQ ID NO: 230399 - RNA, 19 nt, Homo sapiens
  misc_RNA (1)...(19): siRNA sense strand
ggaaaagugcguaaauaua

SEQ ID NO: 230400 - RNA, 19 nt, Homo sapiens
  misc_RNA (1)...(19): siRNA sense strand
gaaugucccuaagguguug

SEQ ID NO: 230401 - RNA, 19 nt, Homo sapiens
  misc_RNA (1)...(19): siRNA sense strand
gaaauuacagugcguggau

SEQ ID NO: 230402 - RNA, 19 nt, Homo sapiens
  misc_RNA (1)...(19): siRNA sense strand
ccaaaccucuaaacacugu

SEQ ID NO: 230403 - RNA, 19 nt, Homo sapiens
  misc_RNA (1)...(19): siRNA sense strand
gugcagaaauauaggauca

SEQ ID NO: 230404 - RNA, 19 nt, Homo sapiens
  misc_RNA (1)...(19): siRNA sense strand
ccacgaaaccuucaagugu

SEQ ID NO: 230405 - RNA, 19 nt, Homo sapiens
  misc_RNA (1)...(19): siRNA sense strand
cagaagaggaugucaaaga

SEQ ID NO: 230406 - RNA, 19 nt, Homo sapiens
  misc_RNA (1)...(19): siRNA sense strand
ucauggagcuucagaugug

SEQ ID NO: 230407 - RNA, 19 nt, Homo sapiens
  misc_RNA (1)...(19): siRNA sense strand
agaaugcguuugugaauca

SEQ ID NO: 230408 - RNA, 19 nt, Homo sapiens
  misc_RNA (1)...(19): siRNA sense strand
gaaggcggcuuuggucauc

SEQ ID NO: 230409 - RNA, 19 nt, Homo sapiens
  misc_RNA (1)...(19): siRNA sense strand
ggcaaggcccucacguuua

SEQ ID NO: 230410 - RNA, 19 nt, Homo sapiens
  misc_RNA (1)...(19): siRNA sense strand
gcaagaaauguccaaguau

SEQ ID NO: 230411 - RNA, 19 nt, Homo sapiens
  misc_RNA (1)...(19): siRNA sense strand
ggaguuucauuucucguau

SEQ ID NO: 230412 - RNA, 19 nt, Homo sapiens
  misc_RNA (1)...(19): siRNA sense strand
gagcaaacgaccacaauag

SEQ ID NO: 230413 - RNA, 19 nt, Homo sapiens
  misc_RNA (1)...(19): siRNA sense strand
gaaacugaauauguuguca

SEQ ID NO: 230414 - RNA, 19 nt, Homo sapiens
  misc_RNA (1)...(19): siRNA sense strand
gaggcgaggugcaaacugu

SEQ ID NO: 230415 - RNA, 19 nt, Homo sapiens
  misc_RNA (1)...(19): siRNA sense strand
ggaagccuuuguuggagaa

SEQ ID NO: 230416 - RNA, 19 nt, Homo sapiens
  misc_RNA (1)...(19): siRNA sense strand
gagagucuuuggugaaaca

SEQ ID NO: 230417 - RNA, 19 nt, Homo sapiens
  misc_RNA (1)...(19): siRNA sense strand
gaauauagugagccucuga

SEQ ID NO: 230418 - RNA, 19 nt, Homo sapiens
  misc_RNA (1)...(19): siRNA sense strand
cugaugaagucgaauuaaa

SEQ ID NO: 230419 - RNA, 19 nt, Homo sapiens
  misc_RNA (1)...(19): siRNA sense strand
guggucagaugaacagauu

SEQ ID NO: 230420 - RNA, 19 nt, Homo sapiens
  misc_RNA (1)...(19): siRNA sense strand
gcugugauauucccucuag

SEQ ID NO: 230421 - RNA, 19 nt, Homo sapiens
  misc_RNA (1)...(19): siRNA sense strand
caacugaugguuaugaaau

SEQ ID NO: 230422 - RNA, 19 nt, Homo sapiens
  misc_RNA (1)...(19): siRNA sense strand
gcagauauuguguucuuga

SEQ ID NO: 230423 - RNA, 19 nt, Homo sapiens
  misc_RNA (1)...(19): siRNA sense strand
gaacauaccacugugaaac

SEQ ID NO: 230424 - RNA, 19 nt, Homo sapiens
  misc_RNA (1)...(19): siRNA sense strand
gcaaacgaccacaauagga

SEQ ID NO: 230425 - RNA, 19 nt, Homo sapiens
  misc_RNA (1)...(19): siRNA sense strand
gaucagagaccagcacuuc

SEQ ID NO: 230426 - RNA, 19 nt, Homo sapiens
  misc_RNA (1)...(19): siRNA sense strand
gcacacagagacaagaaga

SEQ ID NO: 230427 - RNA, 19 nt, Homo sapiens
  misc_RNA (1)...(19): siRNA sense strand
ucugaaaccugaaacugaa

SEQ ID NO: 230428 - RNA, 19 nt, Homo sapiens
  misc_RNA (1)...(19): siRNA sense strand
gaacaugaugcgagcaguu

SEQ ID NO: 230429 - RNA, 19 nt, Homo sapiens
  misc_RNA (1)...(19): siRNA sense strand
ggagaugacuauaagauua

SEQ ID NO: 230430 - RNA, 19 nt, Homo sapiens
  misc_RNA (1)...(19): siRNA sense strand
ggaagaagcugcccaaaga

SEQ ID NO: 230431 - RNA, 19 nt, Homo sapiens
  misc_RNA (1)...(19): siRNA sense strand
gcaaagaugugauugguuu

SEQ ID NO: 230432 - RNA, 19 nt, Homo sapiens
  misc_RNA (1)...(19): siRNA sense strand
ucaagaaucugaagaauga

SEQ ID NO: 230433 - RNA, 19 nt, Homo sapiens
  misc_RNA (1)...(19): siRNA sense strand
caagacagcugccaccuuu

SEQ ID NO: 230434 - RNA, 19 nt, Homo sapiens
  misc_RNA (1)...(19): siRNA sense strand
uaacagggcacaaccauua

SEQ ID NO: 230435 - RNA, 19 nt, Homo sapiens
  misc_RNA (1)...(19): siRNA sense strand
acucagaucugguguaaua

SEQ ID NO: 230436 - RNA, 19 nt, Homo sapiens
  misc_RNA (1)...(19): siRNA sense strand
gacaagaacugcugggaaa

SEQ ID NO: 230437 - RNA, 19 nt, Homo sapiens
  misc_RNA (1)...(19): siRNA sense strand
gcaauaugcuacacuaugu

SEQ ID NO: 230438 - RNA, 19 nt, Homo sapiens
  misc_RNA (1)...(19): siRNA sense strand
gugaagaucuggcgcauga

SEQ ID NO: 230439 - RNA, 19 nt, Homo sapiens
  misc_RNA (1)...(19): siRNA sense strand
caacucagaucugguguaa

SEQ ID NO: 230440 - RNA, 19 nt, Homo sapiens
  misc_RNA (1)...(19): siRNA sense strand
caaacuggaugcuuuaugu

SEQ ID NO: 230441 - RNA, 19 nt, Homo sapiens
  misc_RNA (1)...(19): siRNA sense strand
ugacagagauuggcaaaga

SEQ ID NO: 230442 - RNA, 19 nt, Homo sapiens
  misc_RNA (1)...(19): siRNA sense strand
gcagagaccaugaucguuu

SEQ ID NO: 230443 - RNA, 19 nt, Homo sapiens
  misc_RNA (1)...(19): siRNA sense strand
ccaaagcacuggaugacaa

SEQ ID NO: 230444 - RNA, 19 nt, Homo sapiens
  misc_RNA (1)...(19): siRNA sense strand
gugaagauuucuaaaguga

SEQ ID NO: 230445 - RNA, 19 nt, Homo sapiens
  misc_RNA (1)...(19): siRNA sense strand
gaagggcuauccugaagug

SEQ ID NO: 230446 - RNA, 19 nt, Homo sapiens
  misc_RNA (1)...(19): siRNA sense strand
caagcaaccacaucaaaua

SEQ ID NO: 230447 - RNA, 19 nt, Homo sapiens
  misc_RNA (1)...(19): siRNA sense strand
gaacauucgugucaagagu

SEQ ID NO: 230448 - RNA, 19 nt, Homo sapiens
  misc_RNA (1)...(19): siRNA sense strand
caacagcuccaaagaugua

SEQ ID NO: 230449 - RNA, 19 nt, Homo sapiens
  misc_RNA (1)...(19): siRNA sense strand
gaucaguccucugcaguuu

SEQ ID NO: 230450 - RNA, 19 nt, Homo sapiens
  misc_RNA (1)...(19): siRNA sense strand
gccagucuauuauugcuua

SEQ ID NO: 230451 - RNA, 19 nt, Homo sapiens
  misc_RNA (1)...(19): siRNA sense strand
uacaagagcuagcaaucua

SEQ ID NO: 230452 - RNA, 19 nt, Homo sapiens
  misc_RNA (1)...(19): siRNA sense strand
caccacaguuggcaaauuu

SEQ ID NO: 230453 - RNA, 19 nt, Homo sapiens
  misc_RNA (1)...(19): siRNA sense strand
ccacugaguucaaauucaa

SEQ ID NO: 230454 - RNA, 19 nt, Homo sapiens
  misc_RNA (1)...(19): siRNA sense strand
ccuaccagcucaauuauga

SEQ ID NO: 230455 - RNA, 19 nt, Homo sapiens
  misc_RNA (1)...(19): siRNA sense strand
ggugaggaaugccaaacua

SEQ ID NO: 230456 - RNA, 19 nt, Homo sapiens
  misc_RNA (1)...(19): siRNA sense strand
gaagaagggcuauccugaa

SEQ ID NO: 230457 - RNA, 19 nt, Homo sapiens
  misc_RNA (1)...(19): siRNA sense strand
ucuuaucacuggcaacuua

SEQ ID NO: 230458 - RNA, 19 nt, Homo sapiens
  misc_RNA (1)...(19): siRNA sense strand
gugaguacauuguggguuu

SEQ ID NO: 230459 - RNA, 19 nt, Homo sapiens
  misc_RNA (1)...(19): siRNA sense strand
gaacaaguccaacucagau

SEQ ID NO: 230460 - RNA, 19 nt, Homo sapiens
  misc_RNA (1)...(19): siRNA sense strand
cuaguuggccagucuauua

SEQ ID NO: 230461 - RNA, 19 nt, Homo sapiens
  misc_RNA (1)...(19): siRNA sense strand
ggacugggguucagacuuu

SEQ ID NO: 230462 - RNA, 19 nt, Homo sapiens
  misc_RNA (1)...(19): siRNA sense strand
gaucaagaaucugaagaau

SEQ ID NO: 230463 - RNA, 19 nt, Homo sapiens
  misc_RNA (1)...(19): siRNA sense strand
gcggagugguuccaaguuu

SEQ ID NO: 230464 - RNA, 19 nt, Homo sapiens
  misc_RNA (1)...(19): siRNA sense strand
gcacucucauugacaaguu

SEQ ID NO: 230465 - RNA, 19 nt, Homo sapiens
  misc_RNA (1)...(19): siRNA sense strand
gcugugggccugaagcuua

SEQ ID NO: 230466 - RNA, 19 nt, Homo sapiens
  misc_RNA (1)...(19): siRNA sense strand
ggauaccaauuggccuuua

SEQ ID NO: 230467 - RNA, 19 nt, Homo sapiens
  misc_RNA (1)...(19): siRNA sense strand
ggagguggcugggauguag

SEQ ID NO: 230468 - RNA, 19 nt, Homo sapiens
  misc_RNA (1)...(19): siRNA sense strand
gaucagaccauccgagugu

SEQ ID NO: 230469 - RNA, 19 nt, Homo sapiens
  misc_RNA (1)...(19): siRNA sense strand
ugucaaggaccgauucuua

SEQ ID NO: 230470 - RNA, 19 nt, Homo sapiens
  misc_RNA (1)...(19): siRNA sense strand
gcgcaugaaugaaucaaag

SEQ ID NO: 230471 - RNA, 19 nt, Homo sapiens
  misc_RNA (1)...(19): siRNA sense strand
ggacaauaaacaagagauu

SEQ ID NO: 230472 - RNA, 19 nt, Homo sapiens
  misc_RNA (1)...(19): siRNA sense strand
gaccuuggauccugacuag

SEQ ID NO: 230473 - RNA, 19 nt, Homo sapiens
  misc_RNA (1)...(19): siRNA sense strand
uugcuuaucuccagaagaa

SEQ ID NO: 230474 - RNA, 19 nt, Homo sapiens
  misc_RNA (1)...(19): siRNA sense strand
cagaaaauaugaugaggua

SEQ ID NO: 230475 - RNA, 19 nt, Homo sapiens
  misc_RNA (1)...(19): siRNA sense strand
cauucgaacucuggauuua

SEQ ID NO: 230476 - RNA, 19 nt, Homo sapiens
  misc_RNA (1)...(19): siRNA sense strand
gcaaccacaucaaauaugc

SEQ ID NO: 230477 - RNA, 19 nt, Homo sapiens
  misc_RNA (1)...(19): siRNA sense strand
gugaugagaucuucuaugc

SEQ ID NO: 230478 - RNA, 19 nt, Homo sapiens
  misc_RNA (1)...(19): siRNA sense strand
gaguugauccucagcaauu

SEQ ID NO: 230479 - RNA, 19 nt, Homo sapiens
  misc_RNA (1)...(19): siRNA sense strand
gugguaugauuguguuuaa

SEQ ID NO: 230480 - RNA, 19 nt, Homo sapiens
  misc_RNA (1)...(19): siRNA sense strand
ggaacaaguccaacucaga

SEQ ID NO: 230481 - RNA, 19 nt, Homo sapiens
  misc_RNA (1)...(19): siRNA sense strand
caaaguuuccuuccuguau

SEQ ID NO: 230482 - RNA, 19 nt, Homo sapiens
  misc_RNA (1)...(19): siRNA sense strand
caaacuaguuggccagucu

SEQ ID NO: 230483 - RNA, 19 nt, Homo sapiens
  misc_RNA (1)...(19): siRNA sense strand
caaguuugaugaacaugau

SEQ ID NO: 230484 - RNA, 19 nt, Homo sapiens
  misc_RNA (1)...(19): siRNA sense strand
caucauaucggcccaucua

SEQ ID NO: 230485 - RNA, 19 nt, Homo sapiens
  misc_RNA (1)...(19): siRNA sense strand
gagaagaaucccacagaug

SEQ ID NO: 230486 - RNA, 19 nt, Homo sapiens
  misc_RNA (1)...(19): siRNA sense strand
ggaugaagauggguuugug

SEQ ID NO: 230487 - RNA, 19 nt, Homo sapiens
  misc_RNA (1)...(19): siRNA sense strand
gcagaugaucgucaaguga

SEQ ID NO: 230488 - RNA, 19 nt, Homo sapiens
  misc_RNA (1)...(19): siRNA sense strand
gaaccuguguuuguguguu

SEQ ID NO: 230489 - RNA, 19 nt, Homo sapiens
  misc_RNA (1)...(19): siRNA sense strand
ccaaagauguagcugugau

SEQ ID NO: 230490 - RNA, 19 nt, Homo sapiens
  misc_RNA (1)...(19): siRNA sense strand
cagcagcucaucaccauuu

SEQ ID NO: 230491 - RNA, 19 nt, Homo sapiens
  misc_RNA (1)...(19): siRNA sense strand
gauaccaauuggccuuuau

SEQ ID NO: 230492 - RNA, 19 nt, Homo sapiens
  misc_RNA (1)...(19): siRNA sense strand
caacugugaugagaucuuc

SEQ ID NO: 230493 - RNA, 19 nt, Homo sapiens
  misc_RNA (1)...(19): siRNA sense strand
gcauugacuuccauaagca

SEQ ID NO: 230494 - RNA, 19 nt, Homo sapiens
  misc_RNA (1)...(19): siRNA sense strand
ggcaggcucuuucgaaaca

SEQ ID NO: 230495 - RNA, 19 nt, Homo sapiens
  misc_RNA (1)...(19): siRNA sense strand
ggagacaaucccagacauu

SEQ ID NO: 230496 - RNA, 19 nt, Homo sapiens
  misc_RNA (1)...(19): siRNA sense strand
gaggaaugccaaacuaguu

SEQ ID NO: 230497 - RNA, 19 nt, Homo sapiens
  misc_RNA (1)...(19): siRNA sense strand
acagaagacuugguaguau

SEQ ID NO: 230498 - RNA, 19 nt, Homo sapiens
  misc_RNA (1)...(19): siRNA sense strand
gaagaucuggcgcaugaau

SEQ ID NO: 230499 - RNA, 19 nt, Homo sapiens
  misc_RNA (1)...(19): siRNA sense strand
uaaccaaauucgagaccaa

SEQ ID NO: 230500 - RNA, 19 nt, Homo sapiens
  misc_RNA (1)...(19): siRNA sense strand
gcuccuucaugaccaagua

SEQ ID NO: 230501 - RNA, 19 nt, Homo sapiens
  misc_RNA (1)...(19): siRNA sense strand
uaucggaugugcacucuca

SEQ ID NO: 230502 - RNA, 19 nt, Homo sapiens
  misc_RNA (1)...(19): siRNA sense strand
gaugaagauugcugagauc

SEQ ID NO: 230503 - RNA, 19 nt, Homo sapiens
  misc_RNA (1)...(19): siRNA sense strand
guugaucuauuuggaacua

SEQ ID NO: 230504 - RNA, 19 nt, Homo sapiens
  misc_RNA (1)...(19): siRNA sense strand
ugacauuugugcugcauca

SEQ ID NO: 230505 - RNA, 19 nt, Homo sapiens
  misc_RNA (1)...(19): siRNA sense strand
gcacaaccccuuugacauu

SEQ ID NO: 230506 - RNA, 19 nt, Homo sapiens
  misc_RNA (1)...(19): siRNA sense strand
gcuaccagcucaccacagu

SEQ ID NO: 230507 - RNA, 19 nt, Homo sapiens
  misc_RNA (1)...(19): siRNA sense strand
uggcugggauguagaagaa

SEQ ID NO: 230508 - RNA, 19 nt, Homo sapiens
  misc_RNA (1)...(19): siRNA sense strand
cugcugacauugacauuga

SEQ ID NO: 230509 - RNA, 19 nt, Homo sapiens
  misc_RNA (1)...(19): siRNA sense strand
ucccagacauugacccuaa

SEQ ID NO: 230510 - RNA, 19 nt, Homo sapiens
  misc_RNA (1)...(19): siRNA sense strand
aaacuucgcaagaugauga

SEQ ID NO: 230511 - RNA, 19 nt, Homo sapiens
  misc_RNA (1)...(19): siRNA sense strand
gauccugacuaguuuacau

SEQ ID NO: 230512 - RNA, 19 nt, Homo sapiens
  misc_RNA (1)...(19): siRNA sense strand
guuccaaguuuccaguauu

SEQ ID NO: 230513 - RNA, 19 nt, Homo sapiens
  misc_RNA (1)...(19): siRNA sense strand
caaucuagaaccuguguuu

SEQ ID NO: 230514 - RNA, 19 nt, Homo sapiens
  misc_RNA (1)...(19): siRNA sense strand
acucucagcuuccaguuga

SEQ ID NO: 230515 - RNA, 19 nt, Homo sapiens
  misc_RNA (1)...(19): siRNA sense strand
gcugggauguagaagaaga

SEQ ID NO: 230516 - RNA, 19 nt, Homo sapiens
  misc_RNA (1)...(19): siRNA sense strand
ugacaaguuugaugaacau

SEQ ID NO: 230517 - RNA, 19 nt, Homo sapiens
  misc_RNA (1)...(19): siRNA sense strand
ugaugaagauugcugagau

SEQ ID NO: 230518 - RNA, 19 nt, Homo sapiens
  misc_RNA (1)...(19): siRNA sense strand
gaagaaugagaucaccaaa

SEQ ID NO: 230519 - RNA, 19 nt, Homo sapiens
  misc_RNA (1)...(19): siRNA sense strand
uacgacagcuggauuucaa

SEQ ID NO: 230520 - RNA, 19 nt, Homo sapiens
  misc_RNA (1)...(19): siRNA sense strand
cauuugugcugcaucauau

SEQ ID NO: 230521 - RNA, 19 nt, Homo sapiens
  misc_RNA (1)...(19): siRNA sense strand
gaucugguguaauaacucu

SEQ ID NO: 230522 - RNA, 19 nt, Homo sapiens
  misc_RNA (1)...(19): siRNA sense strand
gaggagaugacuauaagau

SEQ ID NO: 230523 - RNA, 19 nt, Homo sapiens
  misc_RNA (1)...(19): siRNA sense strand
agaagucccuggccuaucu

SEQ ID NO: 230524 - RNA, 19 nt, Homo sapiens
  misc_RNA (1)...(19): siRNA sense strand
gaucagaaaggacaugagu

SEQ ID NO: 230525 - RNA, 19 nt, Homo sapiens
  misc_RNA (1)...(19): siRNA sense strand
ucacauugcuugggcacuu

SEQ ID NO: 230526 - RNA, 19 nt, Homo sapiens
  misc_RNA (1)...(19): siRNA sense strand
gaugcugacucccagaauc

SEQ ID NO: 230527 - RNA, 19 nt, Homo sapiens
  misc_RNA (1)...(19): siRNA sense strand
cagaagacuugguaguauc

SEQ ID NO: 230528 - RNA, 19 nt, Homo sapiens
  misc_RNA (1)...(19): siRNA sense strand
ggugaagggcaacaaugua

SEQ ID NO: 230529 - RNA, 19 nt, Homo sapiens
  misc_RNA (1)...(19): siRNA sense strand
ccauaacccucaugugaau

SEQ ID NO: 230530 - RNA, 19 nt, Homo sapiens
  misc_RNA (1)...(19): siRNA sense strand
gcucagcucgcauguggaa

SEQ ID NO: 230531 - RNA, 19 nt, Homo sapiens
  misc_RNA (1)...(19): siRNA sense strand
ccacggagagcacgagaga

SEQ ID NO: 230532 - RNA, 19 nt, Homo sapiens
  misc_RNA (1)...(19): siRNA sense strand
accauacucuauuccauaa

SEQ ID NO: 230533 - RNA, 19 nt, Homo sapiens
  misc_RNA (1)...(19): siRNA sense strand
ccaacuggcuacgaagaug

SEQ ID NO: 230534 - RNA, 19 nt, Homo sapiens
  misc_RNA (1)...(19): siRNA sense strand
uaaccauacucuauuccau

SEQ ID NO: 230535 - RNA, 19 nt, Homo sapiens
  misc_RNA (1)...(19): siRNA sense strand
uggcuacgaagaugaauaa

SEQ ID NO: 230536 - RNA, 19 nt, Homo sapiens
  misc_RNA (1)...(19): siRNA sense strand
guugguguguccucgguuu

SEQ ID NO: 230537 - RNA, 19 nt, Homo sapiens
  misc_RNA (1)...(19): siRNA sense strand
caacuggcuacgaagauga

SEQ ID NO: 230538 - RNA, 19 nt, Homo sapiens
  misc_RNA (1)...(19): siRNA sense strand
gcacgagagacccgaguuc

SEQ ID NO: 230539 - RNA, 19 nt, Homo sapiens
  misc_RNA (1)...(19): siRNA sense strand
aaccauacucuauuccaua

SEQ ID NO: 230540 - RNA, 19 nt, Homo sapiens
  misc_RNA (1)...(19): siRNA sense strand
cgagagacccgaguucauc

SEQ ID NO: 230541 - RNA, 19 nt, Homo sapiens
  misc_RNA (1)...(19): siRNA sense strand
uuccauaacccucauguga

SEQ ID NO: 230542 - RNA, 19 nt, Homo sapiens
  misc_RNA (1)...(19): siRNA sense strand
ucagcucgcauguggaaga

SEQ ID NO: 230543 - RNA, 19 nt, Homo sapiens
  misc_RNA (1)...(19): siRNA sense strand
uccauaacccucaugugaa

SEQ ID NO: 230544 - RNA, 19 nt, Homo sapiens
  misc_RNA (1)...(19): siRNA sense strand
gaagauccaagaaugauua

SEQ ID NO: 230545 - RNA, 19 nt, Homo sapiens
  misc_RNA (1)...(19): siRNA sense strand
cuacauugauccugaauuu

SEQ ID NO: 230546 - RNA, 19 nt, Homo sapiens
  misc_RNA (1)...(19): siRNA sense strand
gagcuaagaauccuacuga

SEQ ID NO: 230547 - RNA, 19 nt, Homo sapiens
  misc_RNA (1)...(19): siRNA sense strand
uaagaauccuacugacaaa

SEQ ID NO: 230548 - RNA, 19 nt, Homo sapiens
  misc_RNA (1)...(19): siRNA sense strand
acaagacgacccucacuua

SEQ ID NO: 230549 - RNA, 19 nt, Homo sapiens
  misc_RNA (1)...(19): siRNA sense strand
ggucaugccucagacaaga

SEQ ID NO: 230550 - RNA, 19 nt, Homo sapiens
  misc_RNA (1)...(19): siRNA sense strand
gaagaacaaaggcuuaauc

SEQ ID NO: 230551 - RNA, 19 nt, Homo sapiens
  misc_RNA (1)...(19): siRNA sense strand
gaucuuaucacucuuucuu

SEQ ID NO: 230552 - RNA, 19 nt, Homo sapiens
  misc_RNA (1)...(19): siRNA sense strand
ccaagaaugauuaaaguug

SEQ ID NO: 230553 - RNA, 19 nt, Homo sapiens
  misc_RNA (1)...(19): siRNA sense strand
caaaggaagggcacaaguu

SEQ ID NO: 230554 - RNA, 19 nt, Homo sapiens
  misc_RNA (1)...(19): siRNA sense strand
gcaaacagaaauauaugug

SEQ ID NO: 230555 - RNA, 19 nt, Homo sapiens
  misc_RNA (1)...(19): siRNA sense strand
ugacaaaccaguaauugga

SEQ ID NO: 230556 - RNA, 19 nt, Homo sapiens
  misc_RNA (1)...(19): siRNA sense strand
cauggugccuguuaaagau

SEQ ID NO: 230557 - RNA, 19 nt, Homo sapiens
  misc_RNA (1)...(19): siRNA sense strand
agacugcacuggcguuuua

SEQ ID NO: 230558 - RNA, 19 nt, Homo sapiens
  misc_RNA (1)...(19): siRNA sense strand
gaggugcguuccuuucugu

SEQ ID NO: 230559 - RNA, 19 nt, Homo sapiens
  misc_RNA (1)...(19): siRNA sense strand
gauccaagaaugauuaaag

SEQ ID NO: 230560 - RNA, 19 nt, Homo sapiens
  misc_RNA (1)...(19): siRNA sense strand
cuaagaauccuacugacaa

SEQ ID NO: 230561 - RNA, 19 nt, Homo sapiens
  misc_RNA (1)...(19): siRNA sense strand
ggauggaggugcguuccuu

SEQ ID NO: 230562 - RNA, 19 nt, Homo sapiens
  misc_RNA (1)...(19): siRNA sense strand
ggaggugcguuccuuucug

SEQ ID NO: 230563 - RNA, 19 nt, Homo sapiens
  misc_RNA (1)...(19): siRNA sense strand
gaagcuggacaguauuuca

SEQ ID NO: 230564 - RNA, 19 nt, Homo sapiens
  misc_RNA (1)...(19): siRNA sense strand
aaaggaagggcacaaguug

SEQ ID NO: 230565 - RNA, 19 nt, Homo sapiens
  misc_RNA (1)...(19): siRNA sense strand
gcugaagauccaagaauga

SEQ ID NO: 230566 - RNA, 19 nt, Homo sapiens
  misc_RNA (1)...(19): siRNA sense strand
ggguagagccguuucuuag

SEQ ID NO: 230567 - RNA, 19 nt, Homo sapiens
  misc_RNA (1)...(19): siRNA sense strand
ugaauuugcugaagaucca

SEQ ID NO: 230568 - RNA, 19 nt, Homo sapiens
  misc_RNA (1)...(19): siRNA sense strand
ugagguggcuugggacaug

SEQ ID NO: 230569 - RNA, 19 nt, Homo sapiens
  misc_RNA (1)...(19): siRNA sense strand
gaacaagacgacccucacu

SEQ ID NO: 230570 - RNA, 19 nt, Homo sapiens
  misc_RNA (1)...(19): siRNA sense strand
ccaguuccaggauauaauu

SEQ ID NO: 230571 - RNA, 19 nt, Homo sapiens
  misc_RNA (1)...(19): siRNA sense strand
gcaaaggaagggcacaagu

SEQ ID NO: 230572 - RNA, 19 nt, Homo sapiens
  misc_RNA (1)...(19): siRNA sense strand
ccaagaggaaguagauaug

SEQ ID NO: 230573 - RNA, 19 nt, Homo sapiens
  misc_RNA (1)...(19): siRNA sense strand
gacaaaccaguaauuggaa

SEQ ID NO: 230574 - RNA, 19 nt, Homo sapiens
  misc_RNA (1)...(19): siRNA sense strand
gcuaagaauccuacugaca

SEQ ID NO: 230575 - RNA, 19 nt, Homo sapiens
  misc_RNA (1)...(19): siRNA sense strand
gaacuuuagaccucagcaa

SEQ ID NO: 230576 - RNA, 19 nt, Homo sapiens
  misc_RNA (1)...(19): siRNA sense strand
cagcaaacagaaauauaug

SEQ ID NO: 230577 - RNA, 19 nt, Homo sapiens
  misc_RNA (1)...(19): siRNA sense strand
auuugaagcuggacaguau

SEQ ID NO: 230578 - RNA, 19 nt, Homo sapiens
  misc_RNA (1)...(19): siRNA sense strand
agacgacccucacuuacgu

SEQ ID NO: 230579 - RNA, 19 nt, Homo sapiens
  misc_RNA (1)...(19): siRNA sense strand
gaaguagauaugccagugu

SEQ ID NO: 230580 - RNA, 19 nt, Homo sapiens
  misc_RNA (1)...(19): siRNA sense strand
gaccucagcaaacagaaau

SEQ ID NO: 230581 - RNA, 19 nt, Homo sapiens
  misc_RNA (1)...(19): siRNA sense strand
aaguagauaugccaguguu

SEQ ID NO: 230582 - RNA, 19 nt, Homo sapiens
  misc_RNA (1)...(19): siRNA sense strand
gauggaggugcguuccuuu

SEQ ID NO: 230583 - RNA, 19 nt, Homo sapiens
  misc_RNA (1)...(19): siRNA sense strand
gauccugaauuugcugaag

SEQ ID NO: 230584 - RNA, 19 nt, Homo sapiens
  misc_RNA (1)...(19): siRNA sense strand
acaaaccaguaauuggaau

SEQ ID NO: 230585 - RNA, 19 nt, Homo sapiens
  misc_RNA (1)...(19): siRNA sense strand
gaauccuacugacaaacca

SEQ ID NO: 230586 - RNA, 19 nt, Homo sapiens
  misc_RNA (1)...(19): siRNA sense strand
guugccaguuccaggauau

SEQ ID NO: 230587 - RNA, 19 nt, Homo sapiens
  misc_RNA (1)...(19): siRNA sense strand
uagcuuuaaugcagaugug

SEQ ID NO: 230588 - RNA, 19 nt, Homo sapiens
  misc_RNA (1)...(19): siRNA sense strand
caagacgacccucacuuac

SEQ ID NO: 230589 - RNA, 19 nt, Homo sapiens
  misc_RNA (1)...(19): siRNA sense strand
cuuuagaccucagcaaaca

SEQ ID NO: 230590 - RNA, 19 nt, Homo sapiens
  misc_RNA (1)...(19): siRNA sense strand
ugaagauccaagaaugauu

SEQ ID NO: 230591 - RNA, 19 nt, Homo sapiens
  misc_RNA (1)...(19): siRNA sense strand
ugcugaagauccaagaaug

SEQ ID NO: 230592 - RNA, 19 nt, Homo sapiens
  misc_RNA (1)...(19): siRNA sense strand
uuacagagcuaagaauccu

SEQ ID NO: 230593 - RNA, 19 nt, Homo sapiens
  misc_RNA (1)...(19): siRNA sense strand
acauggugccuguuaaaga

SEQ ID NO: 230594 - RNA, 19 nt, Homo sapiens
  misc_RNA (1)...(19): siRNA sense strand
cuaagagcucgaacccuuu

SEQ ID NO: 230595 - RNA, 19 nt, Homo sapiens
  misc_RNA (1)...(19): siRNA sense strand
ucuuaucacucuuucuuac

SEQ ID NO: 230596 - RNA, 19 nt, Homo sapiens
  misc_RNA (1)...(19): siRNA sense strand
uaagagcucgaacccuuuc

SEQ ID NO: 230597 - RNA, 19 nt, Homo sapiens
  misc_RNA (1)...(19): siRNA sense strand
cagacaagauugaaaacau

SEQ ID NO: 230598 - RNA, 19 nt, Homo sapiens
  misc_RNA (1)...(19): siRNA sense strand
cccaagaggaaguagauau

SEQ ID NO: 230599 - RNA, 19 nt, Homo sapiens
  misc_RNA (1)...(19): siRNA sense strand
aggguagagccguuucuua

SEQ ID NO: 230600 - RNA, 19 nt, Homo sapiens
  misc_RNA (1)...(19): siRNA sense strand
agacaagauugaaaacaug

SEQ ID NO: 230601 - RNA, 19 nt, Homo sapiens
  misc_RNA (1)...(19): siRNA sense strand
ucacucuuucuuacacuuu

SEQ ID NO: 230602 - RNA, 19 nt, Homo sapiens
  misc_RNA (1)...(19): siRNA sense strand
gagcucgaacccuuucaca

SEQ ID NO: 230603 - RNA, 19 nt, Homo sapiens
  misc_RNA (1)...(19): siRNA sense strand
gaggguagagccguuucuu

SEQ ID NO: 230604 - RNA, 19 nt, Homo sapiens
  misc_RNA (1)...(19): siRNA sense strand
gcaaaggccucaucaagaa

SEQ ID NO: 230605 - RNA, 19 nt, Homo sapiens
  misc_RNA (1)...(19): siRNA sense strand
gaagaaaucaagccuguga

SEQ ID NO: 230606 - RNA, 19 nt, Homo sapiens
  misc_RNA (1)...(19): siRNA sense strand
gaugauggcuauggaguuu

SEQ ID NO: 230607 - RNA, 19 nt, Homo sapiens
  misc_RNA (1)...(19): siRNA sense strand
gaucauguaucgccguaaa

SEQ ID NO: 230608 - RNA, 19 nt, Homo sapiens
  misc_RNA (1)...(19): siRNA sense strand
gaccagcccugaugccuuu

SEQ ID NO: 230609 - RNA, 19 nt, Homo sapiens
  misc_RNA (1)...(19): siRNA sense strand
gcaaagcccugcuggacau

SEQ ID NO: 230610 - RNA, 19 nt, Homo sapiens
  misc_RNA (1)...(19): siRNA sense strand
ccagaaggcugcuaagaag

SEQ ID NO: 230611 - RNA, 19 nt, Homo sapiens
  misc_RNA (1)...(19): siRNA sense strand
gggaucaacuccuggaaga

SEQ ID NO: 230612 - RNA, 19 nt, Homo sapiens
  misc_RNA (1)...(19): siRNA sense strand
ggaguuuccuacaugauug

SEQ ID NO: 230613 - RNA, 19 nt, Homo sapiens
  misc_RNA (1)...(19): siRNA sense strand
cuaagaagcaccagaauau

SEQ ID NO: 230614 - RNA, 19 nt, Homo sapiens
  misc_RNA (1)...(19): siRNA sense strand
gcuaagaagcaccagaaua

SEQ ID NO: 230615 - RNA, 19 nt, Homo sapiens
  misc_RNA (1)...(19): siRNA sense strand
agaaauaccuggugcucaa

SEQ ID NO: 230616 - RNA, 19 nt, Homo sapiens
  misc_RNA (1)...(19): siRNA sense strand
ccaaagaauuccaggacaa

SEQ ID NO: 230617 - RNA, 19 nt, Homo sapiens
  misc_RNA (1)...(19): siRNA sense strand
gaacagcaacuauuauguc

SEQ ID NO: 230618 - RNA, 19 nt, Homo sapiens
  misc_RNA (1)...(19): siRNA sense strand
gacaaauccuucacucuca

SEQ ID NO: 230619 - RNA, 19 nt, Homo sapiens
  misc_RNA (1)...(19): siRNA sense strand
cagcaacuauuaugucaug

SEQ ID NO: 230620 - RNA, 19 nt, Homo sapiens
  misc_RNA (1)...(19): siRNA sense strand
ggacauugcugaucuuuuc

SEQ ID NO: 230621 - RNA, 19 nt, Homo sapiens
  misc_RNA (1)...(19): siRNA sense strand
gaucaacuccuggaagaaa

SEQ ID NO: 230622 - RNA, 19 nt, Homo sapiens
  misc_RNA (1)...(19): siRNA sense strand
cagacgacguggaguugua

SEQ ID NO: 230623 - RNA, 19 nt, Homo sapiens
  misc_RNA (1)...(19): siRNA sense strand
uggaugaugaggaauauua

SEQ ID NO: 230624 - RNA, 19 nt, Homo sapiens
  misc_RNA (1)...(19): siRNA sense strand
ggcaaaggccucaucaaga

SEQ ID NO: 230625 - RNA, 19 nt, Homo sapiens
  misc_RNA (1)...(19): siRNA sense strand
uaaacuggaccgugaagaa

SEQ ID NO: 230626 - RNA, 19 nt, Homo sapiens
  misc_RNA (1)...(19): siRNA sense strand
uaccauggguggauguuug

SEQ ID NO: 230627 - RNA, 19 nt, Homo sapiens
  misc_RNA (1)...(19): siRNA sense strand
gagcaugcgugggcagaug

SEQ ID NO: 230628 - RNA, 19 nt, Homo sapiens
  misc_RNA (1)...(19): siRNA sense strand
gcacgccaggccuucuuua

SEQ ID NO: 230629 - RNA, 19 nt, Homo sapiens
  misc_RNA (1)...(19): siRNA sense strand
gcuauggaguuuccuacau

SEQ ID NO: 230630 - RNA, 19 nt, Homo sapiens
  misc_RNA (1)...(19): siRNA sense strand
gaucugggcuauguguauc

SEQ ID NO: 230631 - RNA, 19 nt, Homo sapiens
  misc_RNA (1)...(19): siRNA sense strand
ccacaucuccagcaaguuc

SEQ ID NO: 230632 - RNA, 19 nt, Homo sapiens
  misc_RNA (1)...(19): siRNA sense strand
ugcgagaucucuuccagaa

SEQ ID NO: 230633 - RNA, 19 nt, Homo sapiens
  misc_RNA (1)...(19): siRNA sense strand
caaguaacuaugugaguga

SEQ ID NO: 230634 - RNA, 19 nt, Homo sapiens
  misc_RNA (1)...(19): siRNA sense strand
uggaguugcuggccaaaga

SEQ ID NO: 230635 - RNA, 19 nt, Homo sapiens
  misc_RNA (1)...(19): siRNA sense strand
ggagcccucucauggugaa

SEQ ID NO: 230636 - RNA, 19 nt, Homo sapiens
  misc_RNA (1)...(19): siRNA sense strand
agaagcaccagaauaugua

SEQ ID NO: 230637 - RNA, 19 nt, Homo sapiens
  misc_RNA (1)...(19): siRNA sense strand
cuucaagaauggccaguug

SEQ ID NO: 230638 - RNA, 19 nt, Homo sapiens
  misc_RNA (1)...(19): siRNA sense strand
ugacgggcaucuucuucuu

SEQ ID NO: 230639 - RNA, 19 nt, Homo sapiens
  misc_RNA (1)...(19): siRNA sense strand
uacaacaggugguuugaca

SEQ ID NO: 230640 - RNA, 19 nt, Homo sapiens
  misc_RNA (1)...(19): siRNA sense strand
cauggcaacugcuacaaca

SEQ ID NO: 230641 - RNA, 19 nt, Homo sapiens
  misc_RNA (1)...(19): siRNA sense strand
agacaucucugcccaagcu

SEQ ID NO: 230642 - RNA, 19 nt, Homo sapiens
  misc_RNA (1)...(19): siRNA sense strand
cuauggaguuuccuacaug

SEQ ID NO: 230643 - RNA, 19 nt, Homo sapiens
  misc_RNA (1)...(19): siRNA sense strand
aaacuggaccgugaagaaa

SEQ ID NO: 230644 - RNA, 19 nt, Homo sapiens
  misc_RNA (1)...(19): siRNA sense strand
ggaaaccacauccgcaaag

SEQ ID NO: 230645 - RNA, 19 nt, Homo sapiens
  misc_RNA (1)...(19): siRNA sense strand
gggcaccucugggaguuug

SEQ ID NO: 230646 - RNA, 19 nt, Homo sapiens
  misc_RNA (1)...(19): siRNA sense strand
ccaguugggucucaaugca

SEQ ID NO: 230647 - RNA, 19 nt, Homo sapiens
  misc_RNA (1)...(19): siRNA sense strand
ccacaagggacgcuucuuc

SEQ ID NO: 230648 - RNA, 19 nt, Homo sapiens
  misc_RNA (1)...(19): siRNA sense strand
gaaacacgucuaccugucu

SEQ ID NO: 230649 - RNA, 19 nt, Homo sapiens
  misc_RNA (1)...(19): siRNA sense strand
gcucaagccucaggaucug

SEQ ID NO: 230650 - RNA, 19 nt, Homo sapiens
  misc_RNA (1)...(19): siRNA sense strand
ggaagaguacaucuaccuu

SEQ ID NO: 230651 - RNA, 19 nt, Homo sapiens
  misc_RNA (1)...(19): siRNA sense strand
gugaacagcaacuauuaug

SEQ ID NO: 230652 - RNA, 19 nt, Homo sapiens
  misc_RNA (1)...(19): siRNA sense strand
agucagcucuccuuuccuu

SEQ ID NO: 230653 - RNA, 19 nt, Homo sapiens
  misc_RNA (1)...(19): siRNA sense strand
ggaucugggcuauguguau

SEQ ID NO: 230654 - RNA, 19 nt, Homo sapiens
  misc_RNA (1)...(19): siRNA sense strand
gacgaacgcccagcgcuuu

SEQ ID NO: 230655 - RNA, 19 nt, Homo sapiens
  misc_RNA (1)...(19): siRNA sense strand
uauggaguuuccuacauga

SEQ ID NO: 230656 - RNA, 19 nt, Homo sapiens
  misc_RNA (1)...(19): siRNA sense strand
gaaaccacauccgcaaagc

SEQ ID NO: 230657 - RNA, 19 nt, Homo sapiens
  misc_RNA (1)...(19): siRNA sense strand
gcaacuauuaugucaugga

SEQ ID NO: 230658 - RNA, 19 nt, Homo sapiens
  misc_RNA (1)...(19): siRNA sense strand
ggcaaggcccugcuacaug

SEQ ID NO: 230659 - RNA, 19 nt, Homo sapiens
  misc_RNA (1)...(19): siRNA sense strand
caagggacgcuucuucaag

SEQ ID NO: 230660 - RNA, 19 nt, Homo sapiens
  misc_RNA (1)...(19): siRNA sense strand
cuacagcaccucucagaca

SEQ ID NO: 230661 - RNA, 19 nt, Homo sapiens
  misc_RNA (1)...(19): siRNA sense strand
caauucagcgguaccuaga

SEQ ID NO: 230662 - RNA, 19 nt, Homo sapiens
  misc_RNA (1)...(19): siRNA sense strand
gagacugugcguuccugua

SEQ ID NO: 230663 - RNA, 19 nt, Homo sapiens
  misc_RNA (1)...(19): siRNA sense strand
aauauuaccgcauggaguu

SEQ ID NO: 230664 - RNA, 19 nt, Homo sapiens
  misc_RNA (1)...(19): siRNA sense strand
cuuguuggaugaugaggaa

SEQ ID NO: 230665 - RNA, 19 nt, Homo sapiens
  misc_RNA (1)...(19): siRNA sense strand
aagaagcaccagaauaugu

SEQ ID NO: 230666 - RNA, 19 nt, Homo sapiens
  misc_RNA (1)...(19): siRNA sense strand
aacagcaacuauuauguca

SEQ ID NO: 230667 - RNA, 19 nt, Homo sapiens
  misc_RNA (1)...(19): siRNA sense strand
ggugaacagcaacuauuau

SEQ ID NO: 230668 - RNA, 19 nt, Homo sapiens
  misc_RNA (1)...(19): siRNA sense strand
uggugaacagcaacuauua

SEQ ID NO: 230669 - RNA, 19 nt, Homo sapiens
  misc_RNA (1)...(19): siRNA sense strand
caacaguggguuccuccuu

SEQ ID NO: 230670 - RNA, 19 nt, Homo sapiens
  misc_RNA (1)...(19): siRNA sense strand
guuggaugaugaggaauau

SEQ ID NO: 230671 - RNA, 19 nt, Homo sapiens
  misc_RNA (1)...(19): siRNA sense strand
ggaguugcuggccaaagaa

SEQ ID NO: 230672 - RNA, 19 nt, Homo sapiens
  misc_RNA (1)...(19): siRNA sense strand
ggugggaagaguacaucua

SEQ ID NO: 230673 - RNA, 19 nt, Homo sapiens
  misc_RNA (1)...(19): siRNA sense strand
gcaggagcccucucauggu

SEQ ID NO: 230674 - RNA, 19 nt, Homo sapiens
  misc_RNA (1)...(19): siRNA sense strand
uaagaagcaccagaauaug

SEQ ID NO: 230675 - RNA, 19 nt, Homo sapiens
  misc_RNA (1)...(19): siRNA sense strand
cagcgaguccacagccuuu

SEQ ID NO: 230676 - RNA, 19 nt, Homo sapiens
  misc_RNA (1)...(19): siRNA sense strand
gccguggccuuccaguuca

SEQ ID NO: 230677 - RNA, 19 nt, Homo sapiens
  misc_RNA (1)...(19): siRNA sense strand
ucauggaccuugugcucau

SEQ ID NO: 230678 - RNA, 19 nt, Homo sapiens
  misc_RNA (1)...(19): siRNA sense strand
gcuggacauugcugaucuu

SEQ ID NO: 230679 - RNA, 19 nt, Homo sapiens
  misc_RNA (1)...(19): siRNA sense strand
gaucgacaggcaccucuuc

SEQ ID NO: 230680 - RNA, 19 nt, Homo sapiens
  misc_RNA (1)...(19): siRNA sense strand
uccagaaggcugcuaagaa

SEQ ID NO: 230681 - RNA, 19 nt, Homo sapiens
  misc_RNA (1)...(19): siRNA sense strand
caaauccuucacucucauu

SEQ ID NO: 230682 - RNA, 19 nt, Homo sapiens
  misc_RNA (1)...(19): siRNA sense strand
gaacgcccagcgcuuugga

SEQ ID NO: 230683 - RNA, 19 nt, Homo sapiens
  misc_RNA (1)...(19): siRNA sense strand
ccagcaacuugaccaggau

SEQ ID NO: 230684 - RNA, 19 nt, Homo sapiens
  misc_RNA (1)...(19): siRNA sense strand
ccucuucugccuuuacuug

SEQ ID NO: 230685 - RNA, 19 nt, Homo sapiens
  misc_RNA (1)...(19): siRNA sense strand
ggaggggucccacacaaaa

SEQ ID NO: 230686 - RNA, 19 nt, Homo sapiens
  misc_RNA (1)...(19): siRNA sense strand
uggcaaaggccucaucaag

SEQ ID NO: 230687 - RNA, 19 nt, Homo sapiens
  misc_RNA (1)...(19): siRNA sense strand
ucacucucauuuccuucaa

SEQ ID NO: 230688 - RNA, 19 nt, Homo sapiens
  misc_RNA (1)...(19): siRNA sense strand
caaagaauuccaggacaag

SEQ ID NO: 230689 - RNA, 19 nt, Homo sapiens
  misc_RNA (1)...(19): siRNA sense strand
cagggugucagccacaauu

SEQ ID NO: 230690 - RNA, 19 nt, Homo sapiens
  misc_RNA (1)...(19): siRNA sense strand
ucucauuuccuucaagaau

SEQ ID NO: 230691 - RNA, 19 nt, Homo sapiens
  misc_RNA (1)...(19): siRNA sense strand
acaaauccuucacucucau

SEQ ID NO: 230692 - RNA, 19 nt, Homo sapiens
  misc_RNA (1)...(19): siRNA sense strand
ccuaccagauggagaggau

SEQ ID NO: 230693 - RNA, 19 nt, Homo sapiens
  misc_RNA (1)...(19): siRNA sense strand
gcucuacagcuuccagaca

SEQ ID NO: 230694 - RNA, 19 nt, Homo sapiens
  misc_RNA (1)...(19): siRNA sense strand
uggaguuuccuacaugauu

SEQ ID NO: 230695 - RNA, 19 nt, Homo sapiens
  misc_RNA (1)...(19): siRNA sense strand
acucucauuuccuucaaga

SEQ ID NO: 230696 - RNA, 19 nt, Homo sapiens
  misc_RNA (1)...(19): siRNA sense strand
cacaagggacgcuucuuca

SEQ ID NO: 230697 - RNA, 19 nt, Homo sapiens
  misc_RNA (1)...(19): siRNA sense strand
uaugugcuccuaccagaug

SEQ ID NO: 230698 - RNA, 19 nt, Homo sapiens
  misc_RNA (1)...(19): siRNA sense strand
ugaacagcaacuauuaugu

SEQ ID NO: 230699 - RNA, 19 nt, Homo sapiens
  misc_RNA (1)...(19): siRNA sense strand
cgccaggccuucuuuagcu

SEQ ID NO: 230700 - RNA, 19 nt, Homo sapiens
  misc_RNA (1)...(19): siRNA sense strand
gcccagcgcuuuggaaacc

SEQ ID NO: 230701 - RNA, 19 nt, Homo sapiens
  misc_RNA (1)...(19): siRNA sense strand
aguucugccugaccuauga

SEQ ID NO: 230702 - RNA, 19 nt, Homo sapiens
  misc_RNA (1)...(19): siRNA sense strand
ggugggcaaguaacuaugu

SEQ ID NO: 230703 - RNA, 19 nt, Homo sapiens
  misc_RNA (1)...(19): siRNA sense strand
ucggaacccuggcgucucu

SEQ ID NO: 230704 - RNA, 19 nt, Homo sapiens
  misc_RNA (1)...(19): siRNA sense strand
gcaaaggccucaucaagaa

SEQ ID NO: 230705 - RNA, 19 nt, Homo sapiens
  misc_RNA (1)...(19): siRNA sense strand
gaagaaaucaagccuguga

SEQ ID NO: 230706 - RNA, 19 nt, Homo sapiens
  misc_RNA (1)...(19): siRNA sense strand
gaugauggcuauggaguuu

SEQ ID NO: 230707 - RNA, 19 nt, Homo sapiens
  misc_RNA (1)...(19): siRNA sense strand
gaucauguaucgccguaaa

SEQ ID NO: 230708 - RNA, 19 nt, Homo sapiens
  misc_RNA (1)...(19): siRNA sense strand
gaccagcccugaugccuuu

SEQ ID NO: 230709 - RNA, 19 nt, Homo sapiens
  misc_RNA (1)...(19): siRNA sense strand
gcaaagcccugcuggacau

SEQ ID NO: 230710 - RNA, 19 nt, Homo sapiens
  misc_RNA (1)...(19): siRNA sense strand
ccagaaggcugcuaagaag

SEQ ID NO: 230711 - RNA, 19 nt, Homo sapiens
  misc_RNA (1)...(19): siRNA sense strand
gggaucaacuccuggaaga

SEQ ID NO: 230712 - RNA, 19 nt, Homo sapiens
  misc_RNA (1)...(19): siRNA sense strand
ggaguuuccuacaugauug

SEQ ID NO: 230713 - RNA, 19 nt, Homo sapiens
  misc_RNA (1)...(19): siRNA sense strand
cuaagaagcaccagaauau

SEQ ID NO: 230714 - RNA, 19 nt, Homo sapiens
  misc_RNA (1)...(19): siRNA sense strand
gcuaagaagcaccagaaua

SEQ ID NO: 230715 - RNA, 19 nt, Homo sapiens
  misc_RNA (1)...(19): siRNA sense strand
agaaauaccuggugcucaa

SEQ ID NO: 230716 - RNA, 19 nt, Homo sapiens
  misc_RNA (1)...(19): siRNA sense strand
ccaaagaauuccaggacaa

SEQ ID NO: 230717 - RNA, 19 nt, Homo sapiens
  misc_RNA (1)...(19): siRNA sense strand
gaacagcaacuauuauguc

SEQ ID NO: 230718 - RNA, 19 nt, Homo sapiens
  misc_RNA (1)...(19): siRNA sense strand
gacaaauccuucacucuca

SEQ ID NO: 230719 - RNA, 19 nt, Homo sapiens
  misc_RNA (1)...(19): siRNA sense strand
cagcaacuauuaugucaug

SEQ ID NO: 230720 - RNA, 19 nt, Homo sapiens
  misc_RNA (1)...(19): siRNA sense strand
ggacauugcugaucuuuuc

SEQ ID NO: 230721 - RNA, 19 nt, Homo sapiens
  misc_RNA (1)...(19): siRNA sense strand
gaucaacuccuggaagaaa

SEQ ID NO: 230722 - RNA, 19 nt, Homo sapiens
  misc_RNA (1)...(19): siRNA sense strand
cagacgacguggaguugua

SEQ ID NO: 230723 - RNA, 19 nt, Homo sapiens
  misc_RNA (1)...(19): siRNA sense strand
uggaugaugaggaauauua

SEQ ID NO: 230724 - RNA, 19 nt, Homo sapiens
  misc_RNA (1)...(19): siRNA sense strand
ggcaaaggccucaucaaga

SEQ ID NO: 230725 - RNA, 19 nt, Homo sapiens
  misc_RNA (1)...(19): siRNA sense strand
uaaacuggaccgugaagaa

SEQ ID NO: 230726 - RNA, 19 nt, Homo sapiens
  misc_RNA (1)...(19): siRNA sense strand
uaccauggguggauguuug

SEQ ID NO: 230727 - RNA, 19 nt, Homo sapiens
  misc_RNA (1)...(19): siRNA sense strand
gagcaugcgugggcagaug

SEQ ID NO: 230728 - RNA, 19 nt, Homo sapiens
  misc_RNA (1)...(19): siRNA sense strand
gcacgccaggccuucuuua

SEQ ID NO: 230729 - RNA, 19 nt, Homo sapiens
  misc_RNA (1)...(19): siRNA sense strand
gcuauggaguuuccuacau

SEQ ID NO: 230730 - RNA, 19 nt, Homo sapiens
  misc_RNA (1)...(19): siRNA sense strand
gaucugggcuauguguauc

SEQ ID NO: 230731 - RNA, 19 nt, Homo sapiens
  misc_RNA (1)...(19): siRNA sense strand
ccacaucuccagcaaguuc

SEQ ID NO: 230732 - RNA, 19 nt, Homo sapiens
  misc_RNA (1)...(19): siRNA sense strand
ugcgagaucucuuccagaa

SEQ ID NO: 230733 - RNA, 19 nt, Homo sapiens
  misc_RNA (1)...(19): siRNA sense strand
caaguaacuaugugaguga

SEQ ID NO: 230734 - RNA, 19 nt, Homo sapiens
  misc_RNA (1)...(19): siRNA sense strand
uggaguugcuggccaaaga

SEQ ID NO: 230735 - RNA, 19 nt, Homo sapiens
  misc_RNA (1)...(19): siRNA sense strand
ggagcccucucauggugaa

SEQ ID NO: 230736 - RNA, 19 nt, Homo sapiens
  misc_RNA (1)...(19): siRNA sense strand
agaagcaccagaauaugua

SEQ ID NO: 230737 - RNA, 19 nt, Homo sapiens
  misc_RNA (1)...(19): siRNA sense strand
cuucaagaauggccaguug

SEQ ID NO: 230738 - RNA, 19 nt, Homo sapiens
  misc_RNA (1)...(19): siRNA sense strand
ugacgggcaucuucuucuu

SEQ ID NO: 230739 - RNA, 19 nt, Homo sapiens
  misc_RNA (1)...(19): siRNA sense strand
uacaacaggugguuugaca

SEQ ID NO: 230740 - RNA, 19 nt, Homo sapiens
  misc_RNA (1)...(19): siRNA sense strand
cauggcaacugcuacaaca

SEQ ID NO: 230741 - RNA, 19 nt, Homo sapiens
  misc_RNA (1)...(19): siRNA sense strand
agacaucucugcccaagcu

SEQ ID NO: 230742 - RNA, 19 nt, Homo sapiens
  misc_RNA (1)...(19): siRNA sense strand
cuauggaguuuccuacaug

SEQ ID NO: 230743 - RNA, 19 nt, Homo sapiens
  misc_RNA (1)...(19): siRNA sense strand
aaacuggaccgugaagaaa

SEQ ID NO: 230744 - RNA, 19 nt, Homo sapiens
  misc_RNA (1)...(19): siRNA sense strand
ggaaaccacauccgcaaag

SEQ ID NO: 230745 - RNA, 19 nt, Homo sapiens
  misc_RNA (1)...(19): siRNA sense strand
gggcaccucugggaguuug

SEQ ID NO: 230746 - RNA, 19 nt, Homo sapiens
  misc_RNA (1)...(19): siRNA sense strand
ccaguugggucucaaugca

SEQ ID NO: 230747 - RNA, 19 nt, Homo sapiens
  misc_RNA (1)...(19): siRNA sense strand
ccacaagggacgcuucuuc

SEQ ID NO: 230748 - RNA, 19 nt, Homo sapiens
  misc_RNA (1)...(19): siRNA sense strand
gaaacacgucuaccugucu

SEQ ID NO: 230749 - RNA, 19 nt, Homo sapiens
  misc_RNA (1)...(19): siRNA sense strand
gcucaagccucaggaucug

SEQ ID NO: 230750 - RNA, 19 nt, Homo sapiens
  misc_RNA (1)...(19): siRNA sense strand
ggaagaguacaucuaccuu

SEQ ID NO: 230751 - RNA, 19 nt, Homo sapiens
  misc_RNA (1)...(19): siRNA sense strand
gugaacagcaacuauuaug

SEQ ID NO: 230752 - RNA, 19 nt, Homo sapiens
  misc_RNA (1)...(19): siRNA sense strand
agucagcucuccuuuccuu

SEQ ID NO: 230753 - RNA, 19 nt, Homo sapiens
  misc_RNA (1)...(19): siRNA sense strand
ggaucugggcuauguguau

SEQ ID NO: 230754 - RNA, 19 nt, Homo sapiens
  misc_RNA (1)...(19): siRNA sense strand
gacgaacgcccagcgcuuu

SEQ ID NO: 230755 - RNA, 19 nt, Homo sapiens
  misc_RNA (1)...(19): siRNA sense strand
uauggaguuuccuacauga

SEQ ID NO: 230756 - RNA, 19 nt, Homo sapiens
  misc_RNA (1)...(19): siRNA sense strand
gaaaccacauccgcaaagc

SEQ ID NO: 230757 - RNA, 19 nt, Homo sapiens
  misc_RNA (1)...(19): siRNA sense strand
gcaacuauuaugucaugga

SEQ ID NO: 230758 - RNA, 19 nt, Homo sapiens
  misc_RNA (1)...(19): siRNA sense strand
ggcaaggcccugcuacaug

SEQ ID NO: 230759 - RNA, 19 nt, Homo sapiens
  misc_RNA (1)...(19): siRNA sense strand
caagggacgcuucuucaag

SEQ ID NO: 230760 - RNA, 19 nt, Homo sapiens
  misc_RNA (1)...(19): siRNA sense strand
cuacagcaccucucagaca

SEQ ID NO: 230761 - RNA, 19 nt, Homo sapiens
  misc_RNA (1)...(19): siRNA sense strand
caauucagcgguaccuaga

SEQ ID NO: 230762 - RNA, 19 nt, Homo sapiens
  misc_RNA (1)...(19): siRNA sense strand
gagacugugcguuccugua

SEQ ID NO: 230763 - RNA, 19 nt, Homo sapiens
  misc_RNA (1)...(19): siRNA sense strand
aauauuaccgcauggaguu

SEQ ID NO: 230764 - RNA, 19 nt, Homo sapiens
  misc_RNA (1)...(19): siRNA sense strand
cuuguuggaugaugaggaa

SEQ ID NO: 230765 - RNA, 19 nt, Homo sapiens
  misc_RNA (1)...(19): siRNA sense strand
aagaagcaccagaauaugu

SEQ ID NO: 230766 - RNA, 19 nt, Homo sapiens
  misc_RNA (1)...(19): siRNA sense strand
aacagcaacuauuauguca

SEQ ID NO: 230767 - RNA, 19 nt, Homo sapiens
  misc_RNA (1)...(19): siRNA sense strand
ggugaacagcaacuauuau

SEQ ID NO: 230768 - RNA, 19 nt, Homo sapiens
  misc_RNA (1)...(19): siRNA sense strand
uggugaacagcaacuauua

SEQ ID NO: 230769 - RNA, 19 nt, Homo sapiens
  misc_RNA (1)...(19): siRNA sense strand
caacaguggguuccuccuu

SEQ ID NO: 230770 - RNA, 19 nt, Homo sapiens
  misc_RNA (1)...(19): siRNA sense strand
guuggaugaugaggaauau

SEQ ID NO: 230771 - RNA, 19 nt, Homo sapiens
  misc_RNA (1)...(19): siRNA sense strand
ggaguugcuggccaaagaa

SEQ ID NO: 230772 - RNA, 19 nt, Homo sapiens
  misc_RNA (1)...(19): siRNA sense strand
ggugggaagaguacaucua

SEQ ID NO: 230773 - RNA, 19 nt, Homo sapiens
  misc_RNA (1)...(19): siRNA sense strand
gcaggagcccucucauggu

SEQ ID NO: 230774 - RNA, 19 nt, Homo sapiens
  misc_RNA (1)...(19): siRNA sense strand
uaagaagcaccagaauaug

SEQ ID NO: 230775 - RNA, 19 nt, Homo sapiens
  misc_RNA (1)...(19): siRNA sense strand
cagcgaguccacagccuuu

SEQ ID NO: 230776 - RNA, 19 nt, Homo sapiens
  misc_RNA (1)...(19): siRNA sense strand
gccguggccuuccaguuca

SEQ ID NO: 230777 - RNA, 19 nt, Homo sapiens
  misc_RNA (1)...(19): siRNA sense strand
ucauggaccuugugcucau

SEQ ID NO: 230778 - RNA, 19 nt, Homo sapiens
  misc_RNA (1)...(19): siRNA sense strand
gcuggacauugcugaucuu

SEQ ID NO: 230779 - RNA, 19 nt, Homo sapiens
  misc_RNA (1)...(19): siRNA sense strand
gaucgacaggcaccucuuc

SEQ ID NO: 230780 - RNA, 19 nt, Homo sapiens
  misc_RNA (1)...(19): siRNA sense strand
uccagaaggcugcuaagaa

SEQ ID NO: 230781 - RNA, 19 nt, Homo sapiens
  misc_RNA (1)...(19): siRNA sense strand
caaauccuucacucucauu

SEQ ID NO: 230782 - RNA, 19 nt, Homo sapiens
  misc_RNA (1)...(19): siRNA sense strand
gaacgcccagcgcuuugga

SEQ ID NO: 230783 - RNA, 19 nt, Homo sapiens
  misc_RNA (1)...(19): siRNA sense strand
ccagcaacuugaccaggau

SEQ ID NO: 230784 - RNA, 19 nt, Homo sapiens
  misc_RNA (1)...(19): siRNA sense strand
ccucuucugccuuuacuug

SEQ ID NO: 230785 - RNA, 19 nt, Homo sapiens
  misc_RNA (1)...(19): siRNA sense strand
ggaggggucccacacaaaa

SEQ ID NO: 230786 - RNA, 19 nt, Homo sapiens
  misc_RNA (1)...(19): siRNA sense strand
uggcaaaggccucaucaag

SEQ ID NO: 230787 - RNA, 19 nt, Homo sapiens
  misc_RNA (1)...(19): siRNA sense strand
ucacucucauuuccuucaa

SEQ ID NO: 230788 - RNA, 19 nt, Homo sapiens
  misc_RNA (1)...(19): siRNA sense strand
caaagaauuccaggacaag

SEQ ID NO: 230789 - RNA, 19 nt, Homo sapiens
  misc_RNA (1)...(19): siRNA sense strand
cagggugucagccacaauu

SEQ ID NO: 230790 - RNA, 19 nt, Homo sapiens
  misc_RNA (1)...(19): siRNA sense strand
ucucauuuccuucaagaau

SEQ ID NO: 230791 - RNA, 19 nt, Homo sapiens
  misc_RNA (1)...(19): siRNA sense strand
acaaauccuucacucucau

SEQ ID NO: 230792 - RNA, 19 nt, Homo sapiens
  misc_RNA (1)...(19): siRNA sense strand
ccuaccagauggagaggau

SEQ ID NO: 230793 - RNA, 19 nt, Homo sapiens
  misc_RNA (1)...(19): siRNA sense strand
gcucuacagcuuccagaca

SEQ ID NO: 230794 - RNA, 19 nt, Homo sapiens
  misc_RNA (1)...(19): siRNA sense strand
uggaguuuccuacaugauu

SEQ ID NO: 230795 - RNA, 19 nt, Homo sapiens
  misc_RNA (1)...(19): siRNA sense strand
acucucauuuccuucaaga

SEQ ID NO: 230796 - RNA, 19 nt, Homo sapiens
  misc_RNA (1)...(19): siRNA sense strand
cacaagggacgcuucuuca

SEQ ID NO: 230797 - RNA, 19 nt, Homo sapiens
  misc_RNA (1)...(19): siRNA sense strand
uaugugcuccuaccagaug

SEQ ID NO: 230798 - RNA, 19 nt, Homo sapiens
  misc_RNA (1)...(19): siRNA sense strand
ugaacagcaacuauuaugu

SEQ ID NO: 230799 - RNA, 19 nt, Homo sapiens
  misc_RNA (1)...(19): siRNA sense strand
cgccaggccuucuuuagcu

SEQ ID NO: 230800 - RNA, 19 nt, Homo sapiens
  misc_RNA (1)...(19): siRNA sense strand
gcccagcgcuuuggaaacc

SEQ ID NO: 230801 - RNA, 19 nt, Homo sapiens
  misc_RNA (1)...(19): siRNA sense strand
aguucugccugaccuauga

SEQ ID NO: 230802 - RNA, 19 nt, Homo sapiens
  misc_RNA (1)...(19): siRNA sense strand
ggugggcaaguaacuaugu

SEQ ID NO: 230803 - RNA, 19 nt, Homo sapiens
  misc_RNA (1)...(19): siRNA sense strand
ucggaacccuggcgucucu

SEQ ID NO: 230804 - RNA, 19 nt, Homo sapiens
  misc_RNA (1)...(19): siRNA sense strand
gcaaaggccucaucaagaa

SEQ ID NO: 230805 - RNA, 19 nt, Homo sapiens
  misc_RNA (1)...(19): siRNA sense strand
gaagaaaucaagccuguga

SEQ ID NO: 230806 - RNA, 19 nt, Homo sapiens
  misc_RNA (1)...(19): siRNA sense strand
gaugauggcuauggaguuu

SEQ ID NO: 230807 - RNA, 19 nt, Homo sapiens
  misc_RNA (1)...(19): siRNA sense strand
gaucauguaucgccguaaa

SEQ ID NO: 230808 - RNA, 19 nt, Homo sapiens
  misc_RNA (1)...(19): siRNA sense strand
gaccagcccugaugccuuu

SEQ ID NO: 230809 - RNA, 19 nt, Homo sapiens
  misc_RNA (1)...(19): siRNA sense strand
gcaaagcccugcuggacau

SEQ ID NO: 230810 - RNA, 19 nt, Homo sapiens
  misc_RNA (1)...(19): siRNA sense strand
ccagaaggcugcuaagaag

SEQ ID NO: 230811 - RNA, 19 nt, Homo sapiens
  misc_RNA (1)...(19): siRNA sense strand
gggaucaacuccuggaaga

SEQ ID NO: 230812 - RNA, 19 nt, Homo sapiens
  misc_RNA (1)...(19): siRNA sense strand
ggaguuuccuacaugauug

SEQ ID NO: 230813 - RNA, 19 nt, Homo sapiens
  misc_RNA (1)...(19): siRNA sense strand
cuaagaagcaccagaauau

SEQ ID NO: 230814 - RNA, 19 nt, Homo sapiens
  misc_RNA (1)...(19): siRNA sense strand
gcuaagaagcaccagaaua

SEQ ID NO: 230815 - RNA, 19 nt, Homo sapiens
  misc_RNA (1)...(19): siRNA sense strand
agaaauaccuggugcucaa

SEQ ID NO: 230816 - RNA, 19 nt, Homo sapiens
  misc_RNA (1)...(19): siRNA sense strand
ccaaagaauuccaggacaa

SEQ ID NO: 230817 - RNA, 19 nt, Homo sapiens
  misc_RNA (1)...(19): siRNA sense strand
gaacagcaacuauuauguc

SEQ ID NO: 230818 - RNA, 19 nt, Homo sapiens
  misc_RNA (1)...(19): siRNA sense strand
gacaaauccuucacucuca

SEQ ID NO: 230819 - RNA, 19 nt, Homo sapiens
  misc_RNA (1)...(19): siRNA sense strand
cagcaacuauuaugucaug

SEQ ID NO: 230820 - RNA, 19 nt, Homo sapiens
  misc_RNA (1)...(19): siRNA sense strand
ggacauugcugaucuuuuc

SEQ ID NO: 230821 - RNA, 19 nt, Homo sapiens
  misc_RNA (1)...(19): siRNA sense strand
gaucaacuccuggaagaaa

SEQ ID NO: 230822 - RNA, 19 nt, Homo sapiens
  misc_RNA (1)...(19): siRNA sense strand
cagacgacguggaguugua

SEQ ID NO: 230823 - RNA, 19 nt, Homo sapiens
  misc_RNA (1)...(19): siRNA sense strand
uggaugaugaggaauauua

SEQ ID NO: 230824 - RNA, 19 nt, Homo sapiens
  misc_RNA (1)...(19): siRNA sense strand
ggcaaaggccucaucaaga

SEQ ID NO: 230825 - RNA, 19 nt, Homo sapiens
  misc_RNA (1)...(19): siRNA sense strand
uaaacuggaccgugaagaa

SEQ ID NO: 230826 - RNA, 19 nt, Homo sapiens
  misc_RNA (1)...(19): siRNA sense strand
uaccauggguggauguuug

SEQ ID NO: 230827 - RNA, 19 nt, Homo sapiens
  misc_RNA (1)...(19): siRNA sense strand
gagcaugcgugggcagaug

SEQ ID NO: 230828 - RNA, 19 nt, Homo sapiens
  misc_RNA (1)...(19): siRNA sense strand
gcacgccaggccuucuuua

SEQ ID NO: 230829 - RNA, 19 nt, Homo sapiens
  misc_RNA (1)...(19): siRNA sense strand
gcuauggaguuuccuacau

SEQ ID NO: 230830 - RNA, 19 nt, Homo sapiens
  misc_RNA (1)...(19): siRNA sense strand
gaucugggcuauguguauc

SEQ ID NO: 230831 - RNA, 19 nt, Homo sapiens
  misc_RNA (1)...(19): siRNA sense strand
ccacaucuccagcaaguuc

SEQ ID NO: 230832 - RNA, 19 nt, Homo sapiens
  misc_RNA (1)...(19): siRNA sense strand
ugcgagaucucuuccagaa

SEQ ID NO: 230833 - RNA, 19 nt, Homo sapiens
  misc_RNA (1)...(19): siRNA sense strand
caaguaacuaugugaguga

SEQ ID NO: 230834 - RNA, 19 nt, Homo sapiens
  misc_RNA (1)...(19): siRNA sense strand
uggaguugcuggccaaaga

SEQ ID NO: 230835 - RNA, 19 nt, Homo sapiens
  misc_RNA (1)...(19): siRNA sense strand
ggagcccucucauggugaa

SEQ ID NO: 230836 - RNA, 19 nt, Homo sapiens
  misc_RNA (1)...(19): siRNA sense strand
agaagcaccagaauaugua

SEQ ID NO: 230837 - RNA, 19 nt, Homo sapiens
  misc_RNA (1)...(19): siRNA sense strand
cuucaagaauggccaguug

SEQ ID NO: 230838 - RNA, 19 nt, Homo sapiens
  misc_RNA (1)...(19): siRNA sense strand
ugacgggcaucuucuucuu

SEQ ID NO: 230839 - RNA, 19 nt, Homo sapiens
  misc_RNA (1)...(19): siRNA sense strand
uacaacaggugguuugaca

SEQ ID NO: 230840 - RNA, 19 nt, Homo sapiens
  misc_RNA (1)...(19): siRNA sense strand
cauggcaacugcuacaaca

SEQ ID NO: 230841 - RNA, 19 nt, Homo sapiens
  misc_RNA (1)...(19): siRNA sense strand
agacaucucugcccaagcu

SEQ ID NO: 230842 - RNA, 19 nt, Homo sapiens
  misc_RNA (1)...(19): siRNA sense strand
cuauggaguuuccuacaug

SEQ ID NO: 230843 - RNA, 19 nt, Homo sapiens
  misc_RNA (1)...(19): siRNA sense strand
aaacuggaccgugaagaaa

SEQ ID NO: 230844 - RNA, 19 nt, Homo sapiens
  misc_RNA (1)...(19): siRNA sense strand
ggaaaccacauccgcaaag

SEQ ID NO: 230845 - RNA, 19 nt, Homo sapiens
  misc_RNA (1)...(19): siRNA sense strand
gggcaccucugggaguuug

SEQ ID NO: 230846 - RNA, 19 nt, Homo sapiens
  misc_RNA (1)...(19): siRNA sense strand
ccaguugggucucaaugca

SEQ ID NO: 230847 - RNA, 19 nt, Homo sapiens
  misc_RNA (1)...(19): siRNA sense strand
ccacaagggacgcuucuuc

SEQ ID NO: 230848 - RNA, 19 nt, Homo sapiens
  misc_RNA (1)...(19): siRNA sense strand
gaaacacgucuaccugucu

SEQ ID NO: 230849 - RNA, 19 nt, Homo sapiens
  misc_RNA (1)...(19): siRNA sense strand
gcucaagccucaggaucug

SEQ ID NO: 230850 - RNA, 19 nt, Homo sapiens
  misc_RNA (1)...(19): siRNA sense strand
ggaagaguacaucuaccuu

SEQ ID NO: 230851 - RNA, 19 nt, Homo sapiens
  misc_RNA (1)...(19): siRNA sense strand
gugaacagcaacuauuaug

SEQ ID NO: 230852 - RNA, 19 nt, Homo sapiens
  misc_RNA (1)...(19): siRNA sense strand
agucagcucuccuuuccuu

SEQ ID NO: 230853 - RNA, 19 nt, Homo sapiens
  misc_RNA (1)...(19): siRNA sense strand
ggaucugggcuauguguau

SEQ ID NO: 230854 - RNA, 19 nt, Homo sapiens
  misc_RNA (1)...(19): siRNA sense strand
gacgaacgcccagcgcuuu

SEQ ID NO: 230855 - RNA, 19 nt, Homo sapiens
  misc_RNA (1)...(19): siRNA sense strand
uauggaguuuccuacauga

SEQ ID NO: 230856 - RNA, 19 nt, Homo sapiens
  misc_RNA (1)...(19): siRNA sense strand
gaaaccacauccgcaaagc

SEQ ID NO: 230857 - RNA, 19 nt, Homo sapiens
  misc_RNA (1)...(19): siRNA sense strand
gcaacuauuaugucaugga

SEQ ID NO: 230858 - RNA, 19 nt, Homo sapiens
  misc_RNA (1)...(19): siRNA sense strand
ggcaaggcccugcuacaug

SEQ ID NO: 230859 - RNA, 19 nt, Homo sapiens
  misc_RNA (1)...(19): siRNA sense strand
caagggacgcuucuucaag

SEQ ID NO: 230860 - RNA, 19 nt, Homo sapiens
  misc_RNA (1)...(19): siRNA sense strand
cuacagcaccucucagaca

SEQ ID NO: 230861 - RNA, 19 nt, Homo sapiens
  misc_RNA (1)...(19): siRNA sense strand
caauucagcgguaccuaga

SEQ ID NO: 230862 - RNA, 19 nt, Homo sapiens
  misc_RNA (1)...(19): siRNA sense strand
gagacugugcguuccugua

SEQ ID NO: 230863 - RNA, 19 nt, Homo sapiens
  misc_RNA (1)...(19): siRNA sense strand
aauauuaccgcauggaguu

SEQ ID NO: 230864 - RNA, 19 nt, Homo sapiens
  misc_RNA (1)...(19): siRNA sense strand
cuuguuggaugaugaggaa

SEQ ID NO: 230865 - RNA, 19 nt, Homo sapiens
  misc_RNA (1)...(19): siRNA sense strand
aagaagcaccagaauaugu

SEQ ID NO: 230866 - RNA, 19 nt, Homo sapiens
  misc_RNA (1)...(19): siRNA sense strand
aacagcaacuauuauguca

SEQ ID NO: 230867 - RNA, 19 nt, Homo sapiens
  misc_RNA (1)...(19): siRNA sense strand
ggugaacagcaacuauuau

SEQ ID NO: 230868 - RNA, 19 nt, Homo sapiens
  misc_RNA (1)...(19): siRNA sense strand
uggugaacagcaacuauua

SEQ ID NO: 230869 - RNA, 19 nt, Homo sapiens
  misc_RNA (1)...(19): siRNA sense strand
caacaguggguuccuccuu

SEQ ID NO: 230870 - RNA, 19 nt, Homo sapiens
  misc_RNA (1)...(19): siRNA sense strand
guuggaugaugaggaauau

SEQ ID NO: 230871 - RNA, 19 nt, Homo sapiens
  misc_RNA (1)...(19): siRNA sense strand
ggaguugcuggccaaagaa

SEQ ID NO: 230872 - RNA, 19 nt, Homo sapiens
  misc_RNA (1)...(19): siRNA sense strand
ggugggaagaguacaucua

SEQ ID NO: 230873 - RNA, 19 nt, Homo sapiens
  misc_RNA (1)...(19): siRNA sense strand
gcaggagcccucucauggu

SEQ ID NO: 230874 - RNA, 19 nt, Homo sapiens
  misc_RNA (1)...(19): siRNA sense strand
uaagaagcaccagaauaug

SEQ ID NO: 230875 - RNA, 19 nt, Homo sapiens
  misc_RNA (1)...(19): siRNA sense strand
cagcgaguccacagccuuu

SEQ ID NO: 230876 - RNA, 19 nt, Homo sapiens
  misc_RNA (1)...(19): siRNA sense strand
gccguggccuuccaguuca

SEQ ID NO: 230877 - RNA, 19 nt, Homo sapiens
  misc_RNA (1)...(19): siRNA sense strand
ucauggaccuugugcucau

SEQ ID NO: 230878 - RNA, 19 nt, Homo sapiens
  misc_RNA (1)...(19): siRNA sense strand
gcuggacauugcugaucuu

SEQ ID NO: 230879 - RNA, 19 nt, Homo sapiens
  misc_RNA (1)...(19): siRNA sense strand
gaucgacaggcaccucuuc

SEQ ID NO: 230880 - RNA, 19 nt, Homo sapiens
  misc_RNA (1)...(19): siRNA sense strand
uccagaaggcugcuaagaa

SEQ ID NO: 230881 - RNA, 19 nt, Homo sapiens
  misc_RNA (1)...(19): siRNA sense strand
caaauccuucacucucauu

SEQ ID NO: 230882 - RNA, 19 nt, Homo sapiens
  misc_RNA (1)...(19): siRNA sense strand
gaacgcccagcgcuuugga

SEQ ID NO: 230883 - RNA, 19 nt, Homo sapiens
  misc_RNA (1)...(19): siRNA sense strand
ccagcaacuugaccaggau

SEQ ID NO: 230884 - RNA, 19 nt, Homo sapiens
  misc_RNA (1)...(19): siRNA sense strand
ccucuucugccuuuacuug

SEQ ID NO: 230885 - RNA, 19 nt, Homo sapiens
  misc_RNA (1)...(19): siRNA sense strand
ggaggggucccacacaaaa

SEQ ID NO: 230886 - RNA, 19 nt, Homo sapiens
  misc_RNA (1)...(19): siRNA sense strand
uggcaaaggccucaucaag

SEQ ID NO: 230887 - RNA, 19 nt, Homo sapiens
  misc_RNA (1)...(19): siRNA sense strand
ucacucucauuuccuucaa

SEQ ID NO: 230888 - RNA, 19 nt, Homo sapiens
  misc_RNA (1)...(19): siRNA sense strand
caaagaauuccaggacaag

SEQ ID NO: 230889 - RNA, 19 nt, Homo sapiens
  misc_RNA (1)...(19): siRNA sense strand
cagggugucagccacaauu

SEQ ID NO: 230890 - RNA, 19 nt, Homo sapiens
  misc_RNA (1)...(19): siRNA sense strand
ucucauuuccuucaagaau

SEQ ID NO: 230891 - RNA, 19 nt, Homo sapiens
  misc_RNA (1)...(19): siRNA sense strand
acaaauccuucacucucau

SEQ ID NO: 230892 - RNA, 19 nt, Homo sapiens
  misc_RNA (1)...(19): siRNA sense strand
ccuaccagauggagaggau

SEQ ID NO: 230893 - RNA, 19 nt, Homo sapiens
  misc_RNA (1)...(19): siRNA sense strand
gcucuacagcuuccagaca

SEQ ID NO: 230894 - RNA, 19 nt, Homo sapiens
  misc_RNA (1)...(19): siRNA sense strand
uggaguuuccuacaugauu

SEQ ID NO: 230895 - RNA, 19 nt, Homo sapiens
  misc_RNA (1)...(19): siRNA sense strand
acucucauuuccuucaaga

SEQ ID NO: 230896 - RNA, 19 nt, Homo sapiens
  misc_RNA (1)...(19): siRNA sense strand
cacaagggacgcuucuuca

SEQ ID NO: 230897 - RNA, 19 nt, Homo sapiens
  misc_RNA (1)...(19): siRNA sense strand
uaugugcuccuaccagaug

SEQ ID NO: 230898 - RNA, 19 nt, Homo sapiens
  misc_RNA (1)...(19): siRNA sense strand
ugaacagcaacuauuaugu

SEQ ID NO: 230899 - RNA, 19 nt, Homo sapiens
  misc_RNA (1)...(19): siRNA sense strand
cgccaggccuucuuuagcu

SEQ ID NO: 230900 - RNA, 19 nt, Homo sapiens
  misc_RNA (1)...(19): siRNA sense strand
gcccagcgcuuuggaaacc

SEQ ID NO: 230901 - RNA, 19 nt, Homo sapiens
  misc_RNA (1)...(19): siRNA sense strand
aguucugccugaccuauga

SEQ ID NO: 230902 - RNA, 19 nt, Homo sapiens
  misc_RNA (1)...(19): siRNA sense strand
ggugggcaaguaacuaugu

SEQ ID NO: 230903 - RNA, 19 nt, Homo sapiens
  misc_RNA (1)...(19): siRNA sense strand
ucggaacccuggcgucucu

SEQ ID NO: 230904 - RNA, 19 nt, Homo sapiens
  misc_RNA (1)...(19): siRNA sense strand
gcaaaggccucaucaagaa

SEQ ID NO: 230905 - RNA, 19 nt, Homo sapiens
  misc_RNA (1)...(19): siRNA sense strand
gaagaaaucaagccuguga

SEQ ID NO: 230906 - RNA, 19 nt, Homo sapiens
  misc_RNA (1)...(19): siRNA sense strand
gaucauguaucgccguaaa

SEQ ID NO: 230907 - RNA, 19 nt, Homo sapiens
  misc_RNA (1)...(19): siRNA sense strand
gaccagcccugaugccuuu

SEQ ID NO: 230908 - RNA, 19 nt, Homo sapiens
  misc_RNA (1)...(19): siRNA sense strand
gggaucaacuccuggaaga

SEQ ID NO: 230909 - RNA, 19 nt, Homo sapiens
  misc_RNA (1)...(19): siRNA sense strand
agaaauaccuggugcucaa

SEQ ID NO: 230910 - RNA, 19 nt, Homo sapiens
  misc_RNA (1)...(19): siRNA sense strand
ccaaagaauuccaggacaa

SEQ ID NO: 230911 - RNA, 19 nt, Homo sapiens
  misc_RNA (1)...(19): siRNA sense strand
gaacagcaacuauuauguc

SEQ ID NO: 230912 - RNA, 19 nt, Homo sapiens
  misc_RNA (1)...(19): siRNA sense strand
gacaaauccuucacucuca

SEQ ID NO: 230913 - RNA, 19 nt, Homo sapiens
  misc_RNA (1)...(19): siRNA sense strand
cagcaacuauuaugucaug

SEQ ID NO: 230914 - RNA, 19 nt, Homo sapiens
  misc_RNA (1)...(19): siRNA sense strand
gaucaacuccuggaagaaa

SEQ ID NO: 230915 - RNA, 19 nt, Homo sapiens
  misc_RNA (1)...(19): siRNA sense strand
cagacgacguggaguugua

SEQ ID NO: 230916 - RNA, 19 nt, Homo sapiens
  misc_RNA (1)...(19): siRNA sense strand
uggaugaugaggaauauua

SEQ ID NO: 230917 - RNA, 19 nt, Homo sapiens
  misc_RNA (1)...(19): siRNA sense strand
ggcaaaggccucaucaaga

SEQ ID NO: 230918 - RNA, 19 nt, Homo sapiens
  misc_RNA (1)...(19): siRNA sense strand
uaaacuggaccgugaagaa

SEQ ID NO: 230919 - RNA, 19 nt, Homo sapiens
  misc_RNA (1)...(19): siRNA sense strand
uaccauggguggauguuug

SEQ ID NO: 230920 - RNA, 19 nt, Homo sapiens
  misc_RNA (1)...(19): siRNA sense strand
gagcaugcgugggcagaug

SEQ ID NO: 230921 - RNA, 19 nt, Homo sapiens
  misc_RNA (1)...(19): siRNA sense strand
gcacgccaggccuucuuua

SEQ ID NO: 230922 - RNA, 19 nt, Homo sapiens
  misc_RNA (1)...(19): siRNA sense strand
gaucugggcuauguguauc

SEQ ID NO: 230923 - RNA, 19 nt, Homo sapiens
  misc_RNA (1)...(19): siRNA sense strand
caaguaacuaugugaguga

SEQ ID NO: 230924 - RNA, 19 nt, Homo sapiens
  misc_RNA (1)...(19): siRNA sense strand
uggaguugcuggccaaaga

SEQ ID NO: 230925 - RNA, 19 nt, Homo sapiens
  misc_RNA (1)...(19): siRNA sense strand
ggagcccucucauggugaa

SEQ ID NO: 230926 - RNA, 19 nt, Homo sapiens
  misc_RNA (1)...(19): siRNA sense strand
cuucaagaauggccaguug

SEQ ID NO: 230927 - RNA, 19 nt, Homo sapiens
  misc_RNA (1)...(19): siRNA sense strand
ugacgggcaucuucuucuu

SEQ ID NO: 230928 - RNA, 19 nt, Homo sapiens
  misc_RNA (1)...(19): siRNA sense strand
uacaacaggugguuugaca

SEQ ID NO: 230929 - RNA, 19 nt, Homo sapiens
  misc_RNA (1)...(19): siRNA sense strand
cauggcaacugcuacaaca

SEQ ID NO: 230930 - RNA, 19 nt, Homo sapiens
  misc_RNA (1)...(19): siRNA sense strand
agacaucucugcccaagcu

SEQ ID NO: 230931 - RNA, 19 nt, Homo sapiens
  misc_RNA (1)...(19): siRNA sense strand
aaacuggaccgugaagaaa

SEQ ID NO: 230932 - RNA, 19 nt, Homo sapiens
  misc_RNA (1)...(19): siRNA sense strand
gggcaccucugggaguuug

SEQ ID NO: 230933 - RNA, 19 nt, Homo sapiens
  misc_RNA (1)...(19): siRNA sense strand
ccaguugggucucaaugca

SEQ ID NO: 230934 - RNA, 19 nt, Homo sapiens
  misc_RNA (1)...(19): siRNA sense strand
ccacaagggacgcuucuuc

SEQ ID NO: 230935 - RNA, 19 nt, Homo sapiens
  misc_RNA (1)...(19): siRNA sense strand
gaaacacgucuaccugucu

SEQ ID NO: 230936 - RNA, 19 nt, Homo sapiens
  misc_RNA (1)...(19): siRNA sense strand
gcucaagccucaggaucug

SEQ ID NO: 230937 - RNA, 19 nt, Homo sapiens
  misc_RNA (1)...(19): siRNA sense strand
ggaagaguacaucuaccuu

SEQ ID NO: 230938 - RNA, 19 nt, Homo sapiens
  misc_RNA (1)...(19): siRNA sense strand
gugaacagcaacuauuaug

SEQ ID NO: 230939 - RNA, 19 nt, Homo sapiens
  misc_RNA (1)...(19): siRNA sense strand
ggaucugggcuauguguau

SEQ ID NO: 230940 - RNA, 19 nt, Homo sapiens
  misc_RNA (1)...(19): siRNA sense strand
gcaacuauuaugucaugga

SEQ ID NO: 230941 - RNA, 19 nt, Homo sapiens
  misc_RNA (1)...(19): siRNA sense strand
ggcaaggcccugcuacaug

SEQ ID NO: 230942 - RNA, 19 nt, Homo sapiens
  misc_RNA (1)...(19): siRNA sense strand
caagggacgcuucuucaag

SEQ ID NO: 230943 - RNA, 19 nt, Homo sapiens
  misc_RNA (1)...(19): siRNA sense strand
cuacagcaccucucagaca

SEQ ID NO: 230944 - RNA, 19 nt, Homo sapiens
  misc_RNA (1)...(19): siRNA sense strand
caauucagcgguaccuaga

SEQ ID NO: 230945 - RNA, 19 nt, Homo sapiens
  misc_RNA (1)...(19): siRNA sense strand
aauauuaccgcauggaguu

SEQ ID NO: 230946 - RNA, 19 nt, Homo sapiens
  misc_RNA (1)...(19): siRNA sense strand
cuuguuggaugaugaggaa

SEQ ID NO: 230947 - RNA, 19 nt, Homo sapiens
  misc_RNA (1)...(19): siRNA sense strand
caacaguggguuccuccuu

SEQ ID NO: 230948 - RNA, 19 nt, Homo sapiens
  misc_RNA (1)...(19): siRNA sense strand
aacagcaacuauuauguca

SEQ ID NO: 230949 - RNA, 19 nt, Homo sapiens
  misc_RNA (1)...(19): siRNA sense strand
ggugaacagcaacuauuau

SEQ ID NO: 230950 - RNA, 19 nt, Homo sapiens
  misc_RNA (1)...(19): siRNA sense strand
uggugaacagcaacuauua

SEQ ID NO: 230951 - RNA, 19 nt, Homo sapiens
  misc_RNA (1)...(19): siRNA sense strand
guuggaugaugaggaauau

SEQ ID NO: 230952 - RNA, 19 nt, Homo sapiens
  misc_RNA (1)...(19): siRNA sense strand
ggaguugcuggccaaagaa

SEQ ID NO: 230953 - RNA, 19 nt, Homo sapiens
  misc_RNA (1)...(19): siRNA sense strand
ggugggaagaguacaucua

SEQ ID NO: 230954 - RNA, 19 nt, Homo sapiens
  misc_RNA (1)...(19): siRNA sense strand
gcaggagcccucucauggu

SEQ ID NO: 230955 - RNA, 19 nt, Homo sapiens
  misc_RNA (1)...(19): siRNA sense strand
gccguggccuuccaguuca

SEQ ID NO: 230956 - RNA, 19 nt, Homo sapiens
  misc_RNA (1)...(19): siRNA sense strand
ucauggaccuugugcucau

SEQ ID NO: 230957 - RNA, 19 nt, Homo sapiens
  misc_RNA (1)...(19): siRNA sense strand
caaauccuucacucucauu

SEQ ID NO: 230958 - RNA, 19 nt, Homo sapiens
  misc_RNA (1)...(19): siRNA sense strand
ccagcaacuugaccaggau

SEQ ID NO: 230959 - RNA, 19 nt, Homo sapiens
  misc_RNA (1)...(19): siRNA sense strand
uggcaaaggccucaucaag

SEQ ID NO: 230960 - RNA, 19 nt, Homo sapiens
  misc_RNA (1)...(19): siRNA sense strand
ucacucucauuuccuucaa

SEQ ID NO: 230961 - RNA, 19 nt, Homo sapiens
  misc_RNA (1)...(19): siRNA sense strand
caaagaauuccaggacaag

SEQ ID NO: 230962 - RNA, 19 nt, Homo sapiens
  misc_RNA (1)...(19): siRNA sense strand
cagggugucagccacaauu

SEQ ID NO: 230963 - RNA, 19 nt, Homo sapiens
  misc_RNA (1)...(19): siRNA sense strand
ucucauuuccuucaagaau

SEQ ID NO: 230964 - RNA, 19 nt, Homo sapiens
  misc_RNA (1)...(19): siRNA sense strand
acaaauccuucacucucau

SEQ ID NO: 230965 - RNA, 19 nt, Homo sapiens
  misc_RNA (1)...(19): siRNA sense strand
ccuaccagauggagaggau

SEQ ID NO: 230966 - RNA, 19 nt, Homo sapiens
  misc_RNA (1)...(19): siRNA sense strand
gcucuacagcuuccagaca

SEQ ID NO: 230967 - RNA, 19 nt, Homo sapiens
  misc_RNA (1)...(19): siRNA sense strand
acucucauuuccuucaaga

SEQ ID NO: 230968 - RNA, 19 nt, Homo sapiens
  misc_RNA (1)...(19): siRNA sense strand
cacaagggacgcuucuuca

SEQ ID NO: 230969 - RNA, 19 nt, Homo sapiens
  misc_RNA (1)...(19): siRNA sense strand
uaugugcuccuaccagaug

SEQ ID NO: 230970 - RNA, 19 nt, Homo sapiens
  misc_RNA (1)...(19): siRNA sense strand
ugaacagcaacuauuaugu

SEQ ID NO: 230971 - RNA, 19 nt, Homo sapiens
  misc_RNA (1)...(19): siRNA sense strand
cgccaggccuucuuuagcu

SEQ ID NO: 230972 - RNA, 19 nt, Homo sapiens
  misc_RNA (1)...(19): siRNA sense strand
guugcuggccaaagaauuc

SEQ ID NO: 230973 - RNA, 19 nt, Homo sapiens
  misc_RNA (1)...(19): siRNA sense strand
ggugggcaaguaacuaugu

SEQ ID NO: 230974 - RNA, 19 nt, Homo sapiens
  misc_RNA (1)...(19): siRNA sense strand
agucauggugggcaaguaa

SEQ ID NO: 230975 - RNA, 19 nt, Homo sapiens
  misc_RNA (1)...(19): siRNA sense strand
gcagugggacauuccaaaa

SEQ ID NO: 230976 - RNA, 19 nt, Homo sapiens
  misc_RNA (1)...(19): siRNA sense strand
cuacauggcaacugcuaca

SEQ ID NO: 230977 - RNA, 19 nt, Homo sapiens
  misc_RNA (1)...(19): siRNA sense strand
gcaacguggacaucuccuu

SEQ ID NO: 230978 - RNA, 19 nt, Homo sapiens
  misc_RNA (1)...(19): siRNA sense strand
acaagggacgcuucuucaa

SEQ ID NO: 230979 - RNA, 19 nt, Homo sapiens
  misc_RNA (1)...(19): siRNA sense strand
ggaccgugaagaaaucaag

SEQ ID NO: 230980 - RNA, 19 nt, Homo sapiens
  misc_RNA (1)...(19): siRNA sense strand
gaacuuauccugacguuug

SEQ ID NO: 230981 - RNA, 19 nt, Homo sapiens
  misc_RNA (1)...(19): siRNA sense strand
ccacugagaucaacuucaa

SEQ ID NO: 230982 - RNA, 19 nt, Homo sapiens
  misc_RNA (1)...(19): siRNA sense strand
gaucaguucuacaucaaga

SEQ ID NO: 230983 - RNA, 19 nt, Homo sapiens
  misc_RNA (1)...(19): siRNA sense strand
ggacgcaagugcaggaguu

SEQ ID NO: 230984 - RNA, 19 nt, Homo sapiens
  misc_RNA (1)...(19): siRNA sense strand
gaauuuauguccgggaaug

SEQ ID NO: 230985 - RNA, 19 nt, Homo sapiens
  misc_RNA (1)...(19): siRNA sense strand
ggccaacgaugaacuuauc

SEQ ID NO: 230986 - RNA, 19 nt, Homo sapiens
  misc_RNA (1)...(19): siRNA sense strand
cacccaaacucuucuugaa

SEQ ID NO: 230987 - RNA, 19 nt, Homo sapiens
  misc_RNA (1)...(19): siRNA sense strand
gggaucaguucuacaucaa

SEQ ID NO: 230988 - RNA, 19 nt, Homo sapiens
  misc_RNA (1)...(19): siRNA sense strand
gcaggaguuuagccacuug

SEQ ID NO: 230989 - RNA, 19 nt, Homo sapiens
  misc_RNA (1)...(19): siRNA sense strand
gcacccaaacucuucuuga

SEQ ID NO: 230990 - RNA, 19 nt, Homo sapiens
  misc_RNA (1)...(19): siRNA sense strand
caaggucggagaaggcuuu

SEQ ID NO: 230991 - RNA, 19 nt, Homo sapiens
  misc_RNA (1)...(19): siRNA sense strand
caacuucaaggucggagaa

SEQ ID NO: 230992 - RNA, 19 nt, Homo sapiens
  misc_RNA (1)...(19): siRNA sense strand
ccacuugggagaaugagaa

SEQ ID NO: 230993 - RNA, 19 nt, Homo sapiens
  misc_RNA (1)...(19): siRNA sense strand
ugaacgccaugcugaggaa

SEQ ID NO: 230994 - RNA, 19 nt, Homo sapiens
  misc_RNA (1)...(19): siRNA sense strand
aagauccacugcacccaaa

SEQ ID NO: 230995 - RNA, 19 nt, Homo sapiens
  misc_RNA (1)...(19): siRNA sense strand
gggagaaugagaacaagau

SEQ ID NO: 230996 - RNA, 19 nt, Homo sapiens
  misc_RNA (1)...(19): siRNA sense strand
gcaccacugagaucaacuu

SEQ ID NO: 230997 - RNA, 19 nt, Homo sapiens
  misc_RNA (1)...(19): siRNA sense strand
ccacugcacccaaacucuu

SEQ ID NO: 230998 - RNA, 19 nt, Homo sapiens
  misc_RNA (1)...(19): siRNA sense strand
ggagaaugagaacaagauc

SEQ ID NO: 230999 - RNA, 19 nt, Homo sapiens
  misc_RNA (1)...(19): siRNA sense strand
gcgcaccacugagaucaac

SEQ ID NO: 231000 - RNA, 19 nt, Homo sapiens
  misc_RNA (1)...(19): siRNA sense strand
ggggaucaguucuacauca

SEQ ID NO: 231001 - RNA, 19 nt, Homo sapiens
  misc_RNA (1)...(19): siRNA sense strand
ggucggagaaggcuuugag

SEQ ID NO: 231002 - RNA, 19 nt, Homo sapiens
  misc_RNA (1)...(19): siRNA sense strand
gcgcagcagcgagaauuuc

SEQ ID NO: 231003 - RNA, 19 nt, Homo sapiens
  misc_RNA (1)...(19): siRNA sense strand
ggacggggaucaguucuac

SEQ ID NO: 231004 - RNA, 19 nt, Homo sapiens
  misc_RNA (1)...(19): siRNA sense strand
ggaagcagcucgagagugu

SEQ ID NO: 231005 - RNA, 19 nt, Homo sapiens
  misc_RNA (1)...(19): siRNA sense strand
caauacagcuggcuaacaa

SEQ ID NO: 231006 - RNA, 19 nt, Homo sapiens
  misc_RNA (1)...(19): siRNA sense strand
guacaaacauaccagauuc

SEQ ID NO: 231007 - RNA, 19 nt, Homo sapiens
  misc_RNA (1)...(19): siRNA sense strand
gaguggagaugcagcugua

SEQ ID NO: 231008 - RNA, 19 nt, Homo sapiens
  misc_RNA (1)...(19): siRNA sense strand
ugacuuaucuucugaugca

SEQ ID NO: 231009 - RNA, 19 nt, Homo sapiens
  misc_RNA (1)...(19): siRNA sense strand
cugcaaacauuaaccauga

SEQ ID NO: 231010 - RNA, 19 nt, Homo sapiens
  misc_RNA (1)...(19): siRNA sense strand
gaagaagcagcacgaaaga

SEQ ID NO: 231011 - RNA, 19 nt, Homo sapiens
  misc_RNA (1)...(19): siRNA sense strand
ucaaguccauggagucauu

SEQ ID NO: 231012 - RNA, 19 nt, Homo sapiens
  misc_RNA (1)...(19): siRNA sense strand
ugaaugacuuaucuucuga

SEQ ID NO: 231013 - RNA, 19 nt, Homo sapiens
  misc_RNA (1)...(19): siRNA sense strand
gcucgagagugucguagaa

SEQ ID NO: 231014 - RNA, 19 nt, Homo sapiens
  misc_RNA (1)...(19): siRNA sense strand
gacaguauauugccauuac

SEQ ID NO: 231015 - RNA, 19 nt, Homo sapiens
  misc_RNA (1)...(19): siRNA sense strand
gcagacaguucaaguccau

SEQ ID NO: 231016 - RNA, 19 nt, Homo sapiens
  misc_RNA (1)...(19): siRNA sense strand
ucacaggagucaguggaua

SEQ ID NO: 231017 - RNA, 19 nt, Homo sapiens
  misc_RNA (1)...(19): siRNA sense strand
gauuucaacuauugcagaa

SEQ ID NO: 231018 - RNA, 19 nt, Homo sapiens
  misc_RNA (1)...(19): siRNA sense strand
gccagcagcucaugcaaca

SEQ ID NO: 231019 - RNA, 19 nt, Homo sapiens
  misc_RNA (1)...(19): siRNA sense strand
gaccuuuacugccacaaau

SEQ ID NO: 231020 - RNA, 19 nt, Homo sapiens
  misc_RNA (1)...(19): siRNA sense strand
agagagguccgucuaauga

SEQ ID NO: 231021 - RNA, 19 nt, Homo sapiens
  misc_RNA (1)...(19): siRNA sense strand
gccacagauugccacauua

SEQ ID NO: 231022 - RNA, 19 nt, Homo sapiens
  misc_RNA (1)...(19): siRNA sense strand
gagcaauacagcuggcuaa

SEQ ID NO: 231023 - RNA, 19 nt, Homo sapiens
  misc_RNA (1)...(19): siRNA sense strand
cuggagacguacaaacaua

SEQ ID NO: 231024 - RNA, 19 nt, Homo sapiens
  misc_RNA (1)...(19): siRNA sense strand
ccacaaguccaaacaguuc

SEQ ID NO: 231025 - RNA, 19 nt, Homo sapiens
  misc_RNA (1)...(19): siRNA sense strand
ggacaguauauugccauua

SEQ ID NO: 231026 - RNA, 19 nt, Homo sapiens
  misc_RNA (1)...(19): siRNA sense strand
gagagagguccgucuaaug

SEQ ID NO: 231027 - RNA, 19 nt, Homo sapiens
  misc_RNA (1)...(19): siRNA sense strand
uaguacagcugcccaaugg

SEQ ID NO: 231028 - RNA, 19 nt, Homo sapiens
  misc_RNA (1)...(19): siRNA sense strand
caacuccaauuuaccaaac

SEQ ID NO: 231029 - RNA, 19 nt, Homo sapiens
  misc_RNA (1)...(19): siRNA sense strand
ugccaaggauugaagaaga

SEQ ID NO: 231030 - RNA, 19 nt, Homo sapiens
  misc_RNA (1)...(19): siRNA sense strand
ugaagaagcagcacgaaag

SEQ ID NO: 231031 - RNA, 19 nt, Homo sapiens
  misc_RNA (1)...(19): siRNA sense strand
gagagugucguagaaagaa

SEQ ID NO: 231032 - RNA, 19 nt, Homo sapiens
  misc_RNA (1)...(19): siRNA sense strand
caccguaacucuaguacag

SEQ ID NO: 231033 - RNA, 19 nt, Homo sapiens
  misc_RNA (1)...(19): siRNA sense strand
aaagagagagguccgucua

SEQ ID NO: 231034 - RNA, 19 nt, Homo sapiens
  misc_RNA (1)...(19): siRNA sense strand
ggagucaguggauagugua

SEQ ID NO: 231035 - RNA, 19 nt, Homo sapiens
  misc_RNA (1)...(19): siRNA sense strand
gcccagccaucaguuauuc

SEQ ID NO: 231036 - RNA, 19 nt, Homo sapiens
  misc_RNA (1)...(19): siRNA sense strand
aagaagagaagucugaaga

SEQ ID NO: 231037 - RNA, 19 nt, Homo sapiens
  misc_RNA (1)...(19): siRNA sense strand
agccacagauugccacauu

SEQ ID NO: 231038 - RNA, 19 nt, Homo sapiens
  misc_RNA (1)...(19): siRNA sense strand
ccaaugggcagacaguuca

SEQ ID NO: 231039 - RNA, 19 nt, Homo sapiens
  misc_RNA (1)...(19): siRNA sense strand
ggaccuuuacugccacaaa

SEQ ID NO: 231040 - RNA, 19 nt, Homo sapiens
  misc_RNA (1)...(19): siRNA sense strand
agagagagguccgucuaau

SEQ ID NO: 231041 - RNA, 19 nt, Homo sapiens
  misc_RNA (1)...(19): siRNA sense strand
guggauaguguaacugauu

SEQ ID NO: 231042 - RNA, 19 nt, Homo sapiens
  misc_RNA (1)...(19): siRNA sense strand
caacuauugcagaaaguga

SEQ ID NO: 231043 - RNA, 19 nt, Homo sapiens
  misc_RNA (1)...(19): siRNA sense strand
gcaauacagcuggcuaaca

SEQ ID NO: 231044 - RNA, 19 nt, Homo sapiens
  misc_RNA (1)...(19): siRNA sense strand
caacaaaugacaguucaag

SEQ ID NO: 231045 - RNA, 19 nt, Homo sapiens
  misc_RNA (1)...(19): siRNA sense strand
agaagcagcacgaaagaga

SEQ ID NO: 231046 - RNA, 19 nt, Homo sapiens
  misc_RNA (1)...(19): siRNA sense strand
guuauucagucuccacaag

SEQ ID NO: 231047 - RNA, 19 nt, Homo sapiens
  misc_RNA (1)...(19): siRNA sense strand
gacauugauugaggagcua

SEQ ID NO: 231048 - RNA, 19 nt, Homo sapiens
  misc_RNA (1)...(19): siRNA sense strand
aaacagaguggcagugcuu

SEQ ID NO: 231049 - RNA, 19 nt, Homo sapiens
  misc_RNA (1)...(19): siRNA sense strand
gcugaaaaccaacaaauga

SEQ ID NO: 231050 - RNA, 19 nt, Homo sapiens
  misc_RNA (1)...(19): siRNA sense strand
ggugccaacuccaauuuac

SEQ ID NO: 231051 - RNA, 19 nt, Homo sapiens
  misc_RNA (1)...(19): siRNA sense strand
ccacagauugccacauuag

SEQ ID NO: 231052 - RNA, 19 nt, Homo sapiens
  misc_RNA (1)...(19): siRNA sense strand
gcacccacuagcacuauug

SEQ ID NO: 231053 - RNA, 19 nt, Homo sapiens
  misc_RNA (1)...(19): siRNA sense strand
gaagaagagaagucugaag

SEQ ID NO: 231054 - RNA, 19 nt, Homo sapiens
  misc_RNA (1)...(19): siRNA sense strand
uugaaugacuuaucuucug

SEQ ID NO: 231055 - RNA, 19 nt, Homo sapiens
  misc_RNA (1)...(19): siRNA sense strand
aagcgaagggaaauucuuu

SEQ ID NO: 231056 - RNA, 19 nt, Homo sapiens
  misc_RNA (1)...(19): siRNA sense strand
cguacaaacauaccagauu

SEQ ID NO: 231057 - RNA, 19 nt, Homo sapiens
  misc_RNA (1)...(19): siRNA sense strand
gagagguccgucuaaugaa

SEQ ID NO: 231058 - RNA, 19 nt, Homo sapiens
  misc_RNA (1)...(19): siRNA sense strand
gccaaggauugaagaagag

SEQ ID NO: 231059 - RNA, 19 nt, Homo sapiens
  misc_RNA (1)...(19): siRNA sense strand
cgagagugucguagaaaga

SEQ ID NO: 231060 - RNA, 19 nt, Homo sapiens
  misc_RNA (1)...(19): siRNA sense strand
caaacuagcaguggacagu

SEQ ID NO: 231061 - RNA, 19 nt, Homo sapiens
  misc_RNA (1)...(19): siRNA sense strand
aaacauuaaccaugaccaa

SEQ ID NO: 231062 - RNA, 19 nt, Homo sapiens
  misc_RNA (1)...(19): siRNA sense strand
ccaggagugccaaggauug

SEQ ID NO: 231063 - RNA, 19 nt, Homo sapiens
  misc_RNA (1)...(19): siRNA sense strand
caaaacaagacauugauug

SEQ ID NO: 231064 - RNA, 19 nt, Homo sapiens
  misc_RNA (1)...(19): siRNA sense strand
gcagcucgagagugucgua

SEQ ID NO: 231065 - RNA, 19 nt, Homo sapiens
  misc_RNA (1)...(19): siRNA sense strand
gcaguggacaguauauugc

SEQ ID NO: 231066 - RNA, 19 nt, Homo sapiens
  misc_RNA (1)...(19): siRNA sense strand
caccaggagugccaaggau

SEQ ID NO: 231067 - RNA, 19 nt, Homo sapiens
  misc_RNA (1)...(19): siRNA sense strand
ccaaguuguuguucaagcu

SEQ ID NO: 231068 - RNA, 19 nt, Homo sapiens
  misc_RNA (1)...(19): siRNA sense strand
guucaagcccagccacaga

SEQ ID NO: 231069 - RNA, 19 nt, Homo sapiens
  misc_RNA (1)...(19): siRNA sense strand
cacauuagcccagguaucu

SEQ ID NO: 231070 - RNA, 19 nt, Homo sapiens
  misc_RNA (1)...(19): siRNA sense strand
cagcagcucaugcaacauc

SEQ ID NO: 231071 - RNA, 19 nt, Homo sapiens
  misc_RNA (1)...(19): siRNA sense strand
ugauggacagcagaucuua

SEQ ID NO: 231072 - RNA, 19 nt, Homo sapiens
  misc_RNA (1)...(19): siRNA sense strand
caccugccaucaccacugu

SEQ ID NO: 231073 - RNA, 19 nt, Homo sapiens
  misc_RNA (1)...(19): siRNA sense strand
uggauaguguaacugauuc

SEQ ID NO: 231074 - RNA, 19 nt, Homo sapiens
  misc_RNA (1)...(19): siRNA sense strand
uaacggugccaacuccaau

SEQ ID NO: 231075 - RNA, 19 nt, Homo sapiens
  misc_RNA (1)...(19): siRNA sense strand
ccaacuccaauuuaccaaa

SEQ ID NO: 231076 - RNA, 19 nt, Homo sapiens
  misc_RNA (1)...(19): siRNA sense strand
uggcagugcuugaaaauca

SEQ ID NO: 231077 - RNA, 19 nt, Homo sapiens
  misc_RNA (1)...(19): siRNA sense strand
gagguccgucuaaugaaga

SEQ ID NO: 231078 - RNA, 19 nt, Homo sapiens
  misc_RNA (1)...(19): siRNA sense strand
agagguccgucuaaugaag

SEQ ID NO: 231079 - RNA, 19 nt, Homo sapiens
  misc_RNA (1)...(19): siRNA sense strand
cauuagcccagguaucuau

SEQ ID NO: 231080 - RNA, 19 nt, Homo sapiens
  misc_RNA (1)...(19): siRNA sense strand
acuccaauuuaccaaacua

SEQ ID NO: 231081 - RNA, 19 nt, Homo sapiens
  misc_RNA (1)...(19): siRNA sense strand
gccaucaguuauucagucu

SEQ ID NO: 231082 - RNA, 19 nt, Homo sapiens
  misc_RNA (1)...(19): siRNA sense strand
ccacucagccggguacuac

SEQ ID NO: 231083 - RNA, 19 nt, Homo sapiens
  misc_RNA (1)...(19): siRNA sense strand
aaacuagcaguggacagua

SEQ ID NO: 231084 - RNA, 19 nt, Homo sapiens
  misc_RNA (1)...(19): siRNA sense strand
ccaauuuaccaaacuagca

SEQ ID NO: 231085 - RNA, 19 nt, Homo sapiens
  misc_RNA (1)...(19): siRNA sense strand
uugaagaagagaagucuga

SEQ ID NO: 231086 - RNA, 19 nt, Homo sapiens
  misc_RNA (1)...(19): siRNA sense strand
aacagaagcugaaaaccaa

SEQ ID NO: 231087 - RNA, 19 nt, Homo sapiens
  misc_RNA (1)...(19): siRNA sense strand
aggagucaguggauagugu

SEQ ID NO: 231088 - RNA, 19 nt, Homo sapiens
  misc_RNA (1)...(19): siRNA sense strand
guaacggugccaacuccaa

SEQ ID NO: 231089 - RNA, 19 nt, Homo sapiens
  misc_RNA (1)...(19): siRNA sense strand
ggagugccaaggauugaag

SEQ ID NO: 231090 - RNA, 19 nt, Homo sapiens
  misc_RNA (1)...(19): siRNA sense strand
gucaguggauaguguaacu

SEQ ID NO: 231091 - RNA, 19 nt, Homo sapiens
  misc_RNA (1)...(19): siRNA sense strand
cagaguggcagugcuugaa

SEQ ID NO: 231092 - RNA, 19 nt, Homo sapiens
  misc_RNA (1)...(19): siRNA sense strand
accaacaaaugacaguuca

SEQ ID NO: 231093 - RNA, 19 nt, Homo sapiens
  misc_RNA (1)...(19): siRNA sense strand
ucgagagugucguagaaag

SEQ ID NO: 231094 - RNA, 19 nt, Homo sapiens
  misc_RNA (1)...(19): siRNA sense strand
ggauugaagaagagaaguc

SEQ ID NO: 231095 - RNA, 19 nt, Homo sapiens
  misc_RNA (1)...(19): siRNA sense strand
aaugacuuaucuucugaug

SEQ ID NO: 231096 - RNA, 19 nt, Homo sapiens
  misc_RNA (1)...(19): siRNA sense strand
aaacaagacauugauugag

SEQ ID NO: 231097 - RNA, 19 nt, Homo sapiens
  misc_RNA (1)...(19): siRNA sense strand
gaguggcagugcuugaaaa

SEQ ID NO: 231098 - RNA, 19 nt, Homo sapiens
  misc_RNA (1)...(19): siRNA sense strand
aagagagagguccgucuaa

SEQ ID NO: 231099 - RNA, 19 nt, Homo sapiens
  misc_RNA (1)...(19): siRNA sense strand
ccaaugcagcagccacuca

SEQ ID NO: 231100 - RNA, 19 nt, Homo sapiens
  misc_RNA (1)...(19): siRNA sense strand
ggaagcagcucgagagugu

SEQ ID NO: 231101 - RNA, 19 nt, Homo sapiens
  misc_RNA (1)...(19): siRNA sense strand
caauacagcuggcuaacaa

SEQ ID NO: 231102 - RNA, 19 nt, Homo sapiens
  misc_RNA (1)...(19): siRNA sense strand
guacaaacauaccagauuc

SEQ ID NO: 231103 - RNA, 19 nt, Homo sapiens
  misc_RNA (1)...(19): siRNA sense strand
gaguggagaugcagcugua

SEQ ID NO: 231104 - RNA, 19 nt, Homo sapiens
  misc_RNA (1)...(19): siRNA sense strand
ugacuuaucuucugaugca

SEQ ID NO: 231105 - RNA, 19 nt, Homo sapiens
  misc_RNA (1)...(19): siRNA sense strand
cugcaaacauuaaccauga

SEQ ID NO: 231106 - RNA, 19 nt, Homo sapiens
  misc_RNA (1)...(19): siRNA sense strand
gaagaagcagcacgaaaga

SEQ ID NO: 231107 - RNA, 19 nt, Homo sapiens
  misc_RNA (1)...(19): siRNA sense strand
ucaaguccauggagucauu

SEQ ID NO: 231108 - RNA, 19 nt, Homo sapiens
  misc_RNA (1)...(19): siRNA sense strand
ugaaugacuuaucuucuga

SEQ ID NO: 231109 - RNA, 19 nt, Homo sapiens
  misc_RNA (1)...(19): siRNA sense strand
gcucgagagugucguagaa

SEQ ID NO: 231110 - RNA, 19 nt, Homo sapiens
  misc_RNA (1)...(19): siRNA sense strand
gacaguauauugccauuac

SEQ ID NO: 231111 - RNA, 19 nt, Homo sapiens
  misc_RNA (1)...(19): siRNA sense strand
gcagacaguucaaguccau

SEQ ID NO: 231112 - RNA, 19 nt, Homo sapiens
  misc_RNA (1)...(19): siRNA sense strand
ucacaggagucaguggaua

SEQ ID NO: 231113 - RNA, 19 nt, Homo sapiens
  misc_RNA (1)...(19): siRNA sense strand
gauuucaacuauugcagaa

SEQ ID NO: 231114 - RNA, 19 nt, Homo sapiens
  misc_RNA (1)...(19): siRNA sense strand
gccagcagcucaugcaaca

SEQ ID NO: 231115 - RNA, 19 nt, Homo sapiens
  misc_RNA (1)...(19): siRNA sense strand
gaccuuuacugccacaaau

SEQ ID NO: 231116 - RNA, 19 nt, Homo sapiens
  misc_RNA (1)...(19): siRNA sense strand
agagagguccgucuaauga

SEQ ID NO: 231117 - RNA, 19 nt, Homo sapiens
  misc_RNA (1)...(19): siRNA sense strand
gccacagauugccacauua

SEQ ID NO: 231118 - RNA, 19 nt, Homo sapiens
  misc_RNA (1)...(19): siRNA sense strand
gagcaauacagcuggcuaa

SEQ ID NO: 231119 - RNA, 19 nt, Homo sapiens
  misc_RNA (1)...(19): siRNA sense strand
cuggagacguacaaacaua

SEQ ID NO: 231120 - RNA, 19 nt, Homo sapiens
  misc_RNA (1)...(19): siRNA sense strand
ccacaaguccaaacaguuc

SEQ ID NO: 231121 - RNA, 19 nt, Homo sapiens
  misc_RNA (1)...(19): siRNA sense strand
ggacaguauauugccauua

SEQ ID NO: 231122 - RNA, 19 nt, Homo sapiens
  misc_RNA (1)...(19): siRNA sense strand
gagagagguccgucuaaug

SEQ ID NO: 231123 - RNA, 19 nt, Homo sapiens
  misc_RNA (1)...(19): siRNA sense strand
uaguacagcugcccaaugg

SEQ ID NO: 231124 - RNA, 19 nt, Homo sapiens
  misc_RNA (1)...(19): siRNA sense strand
caacuccaauuuaccaaac

SEQ ID NO: 231125 - RNA, 19 nt, Homo sapiens
  misc_RNA (1)...(19): siRNA sense strand
ugccaaggauugaagaaga

SEQ ID NO: 231126 - RNA, 19 nt, Homo sapiens
  misc_RNA (1)...(19): siRNA sense strand
ugaagaagcagcacgaaag

SEQ ID NO: 231127 - RNA, 19 nt, Homo sapiens
  misc_RNA (1)...(19): siRNA sense strand
gagagugucguagaaagaa

SEQ ID NO: 231128 - RNA, 19 nt, Homo sapiens
  misc_RNA (1)...(19): siRNA sense strand
caccguaacucuaguacag

SEQ ID NO: 231129 - RNA, 19 nt, Homo sapiens
  misc_RNA (1)...(19): siRNA sense strand
aaagagagagguccgucua

SEQ ID NO: 231130 - RNA, 19 nt, Homo sapiens
  misc_RNA (1)...(19): siRNA sense strand
ggagucaguggauagugua

SEQ ID NO: 231131 - RNA, 19 nt, Homo sapiens
  misc_RNA (1)...(19): siRNA sense strand
gcccagccaucaguuauuc

SEQ ID NO: 231132 - RNA, 19 nt, Homo sapiens
  misc_RNA (1)...(19): siRNA sense strand
aagaagagaagucugaaga

SEQ ID NO: 231133 - RNA, 19 nt, Homo sapiens
  misc_RNA (1)...(19): siRNA sense strand
agccacagauugccacauu

SEQ ID NO: 231134 - RNA, 19 nt, Homo sapiens
  misc_RNA (1)...(19): siRNA sense strand
ccaaugggcagacaguuca

SEQ ID NO: 231135 - RNA, 19 nt, Homo sapiens
  misc_RNA (1)...(19): siRNA sense strand
ggaccuuuacugccacaaa

SEQ ID NO: 231136 - RNA, 19 nt, Homo sapiens
  misc_RNA (1)...(19): siRNA sense strand
agagagagguccgucuaau

SEQ ID NO: 231137 - RNA, 19 nt, Homo sapiens
  misc_RNA (1)...(19): siRNA sense strand
guggauaguguaacugauu

SEQ ID NO: 231138 - RNA, 19 nt, Homo sapiens
  misc_RNA (1)...(19): siRNA sense strand
caacuauugcagaaaguga

SEQ ID NO: 231139 - RNA, 19 nt, Homo sapiens
  misc_RNA (1)...(19): siRNA sense strand
gcaauacagcuggcuaaca

SEQ ID NO: 231140 - RNA, 19 nt, Homo sapiens
  misc_RNA (1)...(19): siRNA sense strand
caacaaaugacaguucaag

SEQ ID NO: 231141 - RNA, 19 nt, Homo sapiens
  misc_RNA (1)...(19): siRNA sense strand
agaagcagcacgaaagaga

SEQ ID NO: 231142 - RNA, 19 nt, Homo sapiens
  misc_RNA (1)...(19): siRNA sense strand
guuauucagucuccacaag

SEQ ID NO: 231143 - RNA, 19 nt, Homo sapiens
  misc_RNA (1)...(19): siRNA sense strand
gacauugauugaggagcua

SEQ ID NO: 231144 - RNA, 19 nt, Homo sapiens
  misc_RNA (1)...(19): siRNA sense strand
aaacagaguggcagugcuu

SEQ ID NO: 231145 - RNA, 19 nt, Homo sapiens
  misc_RNA (1)...(19): siRNA sense strand
gcugaaaaccaacaaauga

SEQ ID NO: 231146 - RNA, 19 nt, Homo sapiens
  misc_RNA (1)...(19): siRNA sense strand
ggugccaacuccaauuuac

SEQ ID NO: 231147 - RNA, 19 nt, Homo sapiens
  misc_RNA (1)...(19): siRNA sense strand
ccacagauugccacauuag

SEQ ID NO: 231148 - RNA, 19 nt, Homo sapiens
  misc_RNA (1)...(19): siRNA sense strand
gcacccacuagcacuauug

SEQ ID NO: 231149 - RNA, 19 nt, Homo sapiens
  misc_RNA (1)...(19): siRNA sense strand
gaagaagagaagucugaag

SEQ ID NO: 231150 - RNA, 19 nt, Homo sapiens
  misc_RNA (1)...(19): siRNA sense strand
uugaaugacuuaucuucug

SEQ ID NO: 231151 - RNA, 19 nt, Homo sapiens
  misc_RNA (1)...(19): siRNA sense strand
aagcgaagggaaauucuuu

SEQ ID NO: 231152 - RNA, 19 nt, Homo sapiens
  misc_RNA (1)...(19): siRNA sense strand
cguacaaacauaccagauu

SEQ ID NO: 231153 - RNA, 19 nt, Homo sapiens
  misc_RNA (1)...(19): siRNA sense strand
gagagguccgucuaaugaa

SEQ ID NO: 231154 - RNA, 19 nt, Homo sapiens
  misc_RNA (1)...(19): siRNA sense strand
gccaaggauugaagaagag

SEQ ID NO: 231155 - RNA, 19 nt, Homo sapiens
  misc_RNA (1)...(19): siRNA sense strand
cgagagugucguagaaaga

SEQ ID NO: 231156 - RNA, 19 nt, Homo sapiens
  misc_RNA (1)...(19): siRNA sense strand
caaacuagcaguggacagu

SEQ ID NO: 231157 - RNA, 19 nt, Homo sapiens
  misc_RNA (1)...(19): siRNA sense strand
aaacauuaaccaugaccaa

SEQ ID NO: 231158 - RNA, 19 nt, Homo sapiens
  misc_RNA (1)...(19): siRNA sense strand
ccaggagugccaaggauug

SEQ ID NO: 231159 - RNA, 19 nt, Homo sapiens
  misc_RNA (1)...(19): siRNA sense strand
caaaacaagacauugauug

SEQ ID NO: 231160 - RNA, 19 nt, Homo sapiens
  misc_RNA (1)...(19): siRNA sense strand
gcagcucgagagugucgua

SEQ ID NO: 231161 - RNA, 19 nt, Homo sapiens
  misc_RNA (1)...(19): siRNA sense strand
gcaguggacaguauauugc

SEQ ID NO: 231162 - RNA, 19 nt, Homo sapiens
  misc_RNA (1)...(19): siRNA sense strand
caccaggagugccaaggau

SEQ ID NO: 231163 - RNA, 19 nt, Homo sapiens
  misc_RNA (1)...(19): siRNA sense strand
ccaaguuguuguucaagcu

SEQ ID NO: 231164 - RNA, 19 nt, Homo sapiens
  misc_RNA (1)...(19): siRNA sense strand
guucaagcccagccacaga

SEQ ID NO: 231165 - RNA, 19 nt, Homo sapiens
  misc_RNA (1)...(19): siRNA sense strand
cacauuagcccagguaucu

SEQ ID NO: 231166 - RNA, 19 nt, Homo sapiens
  misc_RNA (1)...(19): siRNA sense strand
cagcagcucaugcaacauc

SEQ ID NO: 231167 - RNA, 19 nt, Homo sapiens
  misc_RNA (1)...(19): siRNA sense strand
ugauggacagcagaucuua

SEQ ID NO: 231168 - RNA, 19 nt, Homo sapiens
  misc_RNA (1)...(19): siRNA sense strand
caccugccaucaccacugu

SEQ ID NO: 231169 - RNA, 19 nt, Homo sapiens
  misc_RNA (1)...(19): siRNA sense strand
uggauaguguaacugauuc

SEQ ID NO: 231170 - RNA, 19 nt, Homo sapiens
  misc_RNA (1)...(19): siRNA sense strand
uaacggugccaacuccaau

SEQ ID NO: 231171 - RNA, 19 nt, Homo sapiens
  misc_RNA (1)...(19): siRNA sense strand
ccaacuccaauuuaccaaa

SEQ ID NO: 231172 - RNA, 19 nt, Homo sapiens
  misc_RNA (1)...(19): siRNA sense strand
uggcagugcuugaaaauca

SEQ ID NO: 231173 - RNA, 19 nt, Homo sapiens
  misc_RNA (1)...(19): siRNA sense strand
gagguccgucuaaugaaga

SEQ ID NO: 231174 - RNA, 19 nt, Homo sapiens
  misc_RNA (1)...(19): siRNA sense strand
agagguccgucuaaugaag

SEQ ID NO: 231175 - RNA, 19 nt, Homo sapiens
  misc_RNA (1)...(19): siRNA sense strand
cauuagcccagguaucuau

SEQ ID NO: 231176 - RNA, 19 nt, Homo sapiens
  misc_RNA (1)...(19): siRNA sense strand
acuccaauuuaccaaacua

SEQ ID NO: 231177 - RNA, 19 nt, Homo sapiens
  misc_RNA (1)...(19): siRNA sense strand
gccaucaguuauucagucu

SEQ ID NO: 231178 - RNA, 19 nt, Homo sapiens
  misc_RNA (1)...(19): siRNA sense strand
ccacucagccggguacuac

SEQ ID NO: 231179 - RNA, 19 nt, Homo sapiens
  misc_RNA (1)...(19): siRNA sense strand
aaacuagcaguggacagua

SEQ ID NO: 231180 - RNA, 19 nt, Homo sapiens
  misc_RNA (1)...(19): siRNA sense strand
ccaauuuaccaaacuagca

SEQ ID NO: 231181 - RNA, 19 nt, Homo sapiens
  misc_RNA (1)...(19): siRNA sense strand
uugaagaagagaagucuga

SEQ ID NO: 231182 - RNA, 19 nt, Homo sapiens
  misc_RNA (1)...(19): siRNA sense strand
aacagaagcugaaaaccaa

SEQ ID NO: 231183 - RNA, 19 nt, Homo sapiens
  misc_RNA (1)...(19): siRNA sense strand
aggagucaguggauagugu

SEQ ID NO: 231184 - RNA, 19 nt, Homo sapiens
  misc_RNA (1)...(19): siRNA sense strand
guaacggugccaacuccaa

SEQ ID NO: 231185 - RNA, 19 nt, Homo sapiens
  misc_RNA (1)...(19): siRNA sense strand
ggagugccaaggauugaag

SEQ ID NO: 231186 - RNA, 19 nt, Homo sapiens
  misc_RNA (1)...(19): siRNA sense strand
gucaguggauaguguaacu

SEQ ID NO: 231187 - RNA, 19 nt, Homo sapiens
  misc_RNA (1)...(19): siRNA sense strand
cagaguggcagugcuugaa

SEQ ID NO: 231188 - RNA, 19 nt, Homo sapiens
  misc_RNA (1)...(19): siRNA sense strand
accaacaaaugacaguuca

SEQ ID NO: 231189 - RNA, 19 nt, Homo sapiens
  misc_RNA (1)...(19): siRNA sense strand
ucgagagugucguagaaag

SEQ ID NO: 231190 - RNA, 19 nt, Homo sapiens
  misc_RNA (1)...(19): siRNA sense strand
ggauugaagaagagaaguc

SEQ ID NO: 231191 - RNA, 19 nt, Homo sapiens
  misc_RNA (1)...(19): siRNA sense strand
aaugacuuaucuucugaug

SEQ ID NO: 231192 - RNA, 19 nt, Homo sapiens
  misc_RNA (1)...(19): siRNA sense strand
aaacaagacauugauugag

SEQ ID NO: 231193 - RNA, 19 nt, Homo sapiens
  misc_RNA (1)...(19): siRNA sense strand
gaguggcagugcuugaaaa

SEQ ID NO: 231194 - RNA, 19 nt, Homo sapiens
  misc_RNA (1)...(19): siRNA sense strand
aagagagagguccgucuaa

SEQ ID NO: 231195 - RNA, 19 nt, Homo sapiens
  misc_RNA (1)...(19): siRNA sense strand
ccaaugcagcagccacuca

SEQ ID NO: 231196 - RNA, 19 nt, Homo sapiens
  misc_RNA (1)...(19): siRNA sense strand
ggacguggguuggcuauga

SEQ ID NO: 231197 - RNA, 19 nt, Homo sapiens
  misc_RNA (1)...(19): siRNA sense strand
ggccguggcuggcauuuga

SEQ ID NO: 231198 - RNA, 19 nt, Homo sapiens
  misc_RNA (1)...(19): siRNA sense strand
caagagccauggagaccuu

SEQ ID NO: 231199 - RNA, 19 nt, Homo sapiens
  misc_RNA (1)...(19): siRNA sense strand
gaaggugggcuccauccaa

SEQ ID NO: 231200 - RNA, 19 nt, Homo sapiens
  misc_RNA (1)...(19): siRNA sense strand
gaauauugauaguccacau

SEQ ID NO: 231201 - RNA, 19 nt, Homo sapiens
  misc_RNA (1)...(19): siRNA sense strand
agauggagauaguggauga

SEQ ID NO: 231202 - RNA, 19 nt, Homo sapiens
  misc_RNA (1)...(19): siRNA sense strand
gcgaguaccgccacuggaa

SEQ ID NO: 231203 - RNA, 19 nt, Homo sapiens
  misc_RNA (1)...(19): siRNA sense strand
uguacgaacuagagaacuu

SEQ ID NO: 231204 - RNA, 19 nt, Homo sapiens
  misc_RNA (1)...(19): siRNA sense strand
ucacaagcugcaucuguuu

SEQ ID NO: 231205 - RNA, 19 nt, Homo sapiens
  misc_RNA (1)...(19): siRNA sense strand
gaucuuguacgaacuagag

SEQ ID NO: 231206 - RNA, 19 nt, Homo sapiens
  misc_RNA (1)...(19): siRNA sense strand
ccaacagccgugauaguga

SEQ ID NO: 231207 - RNA, 19 nt, Homo sapiens
  misc_RNA (1)...(19): siRNA sense strand
caucacaagcugcaucugu

SEQ ID NO: 231208 - RNA, 19 nt, Homo sapiens
  misc_RNA (1)...(19): siRNA sense strand
ggugaucuuguacgaacua

SEQ ID NO: 231209 - RNA, 19 nt, Homo sapiens
  misc_RNA (1)...(19): siRNA sense strand
ggagauaguggaugaugac

SEQ ID NO: 231210 - RNA, 19 nt, Homo sapiens
  misc_RNA (1)...(19): siRNA sense strand
uggagauaguggaugauga

SEQ ID NO: 231211 - RNA, 19 nt, Homo sapiens
  misc_RNA (1)...(19): siRNA sense strand
gccgcaagauggagauagu

SEQ ID NO: 231212 - RNA, 19 nt, Homo sapiens
  misc_RNA (1)...(19): siRNA sense strand
caagauggagauaguggau

SEQ ID NO: 231213 - RNA, 19 nt, Homo sapiens
  misc_RNA (1)...(19): siRNA sense strand
ugggaugccugguccaaca

SEQ ID NO: 231214 - RNA, 19 nt, Homo sapiens
  misc_RNA (1)...(19): siRNA sense strand
ccuccggccucugaauauu

SEQ ID NO: 231215 - RNA, 19 nt, Homo sapiens
  misc_RNA (1)...(19): siRNA sense strand
ccgcauccgugaccagaag

SEQ ID NO: 231216 - RNA, 19 nt, Homo sapiens
  misc_RNA (1)...(19): siRNA sense strand
gcagcuacaaggugaucuu

SEQ ID NO: 231217 - RNA, 19 nt, Homo sapiens
  misc_RNA (1)...(19): siRNA sense strand
gaguaccgccacuggaaug

SEQ ID NO: 231218 - RNA, 19 nt, Homo sapiens
  misc_RNA (1)...(19): siRNA sense strand
cgaacuagagaacuuccaa

SEQ ID NO: 231219 - RNA, 19 nt, Homo sapiens
  misc_RNA (1)...(19): siRNA sense strand
acaagcugcaucuguuuga

SEQ ID NO: 231220 - RNA, 19 nt, Homo sapiens
  misc_RNA (1)...(19): siRNA sense strand
agccgcagcugcagucugu

SEQ ID NO: 231221 - RNA, 19 nt, Homo sapiens
  misc_RNA (1)...(19): siRNA sense strand
ugagaacccagcuuucagu

SEQ ID NO: 231222 - RNA, 19 nt, Homo sapiens
  misc_RNA (1)...(19): siRNA sense strand
guacgaacuagagaacuuc

SEQ ID NO: 231223 - RNA, 19 nt, Homo sapiens
  misc_RNA (1)...(19): siRNA sense strand
uccggccucugaauauuga

SEQ ID NO: 231224 - RNA, 19 nt, Homo sapiens
  misc_RNA (1)...(19): siRNA sense strand
gcgaguguccgugccauca

SEQ ID NO: 231225 - RNA, 19 nt, Homo sapiens
  misc_RNA (1)...(19): siRNA sense strand
aucacaagcugcaucuguu

SEQ ID NO: 231226 - RNA, 19 nt, Homo sapiens
  misc_RNA (1)...(19): siRNA sense strand
gacguggguuggcuaugag

SEQ ID NO: 231227 - RNA, 19 nt, Homo sapiens
  misc_RNA (1)...(19): siRNA sense strand
gaguguccgugccaucaac

SEQ ID NO: 231228 - RNA, 19 nt, Homo sapiens
  misc_RNA (1)...(19): siRNA sense strand
gcaaagaugugucagauga

SEQ ID NO: 231229 - RNA, 19 nt, Homo sapiens
  misc_RNA (1)...(19): siRNA sense strand
gcaaagaucuaccgaaauc

SEQ ID NO: 231230 - RNA, 19 nt, Homo sapiens
  misc_RNA (1)...(19): siRNA sense strand
cauauuggcugaccugaua

SEQ ID NO: 231231 - RNA, 19 nt, Homo sapiens
  misc_RNA (1)...(19): siRNA sense strand
uaacacagcugcagaagga

SEQ ID NO: 231232 - RNA, 19 nt, Homo sapiens
  misc_RNA (1)...(19): siRNA sense strand
ugaaacaccugccuaauga

SEQ ID NO: 231233 - RNA, 19 nt, Homo sapiens
  misc_RNA (1)...(19): siRNA sense strand
ugacggagaugaauuacua

SEQ ID NO: 231234 - RNA, 19 nt, Homo sapiens
  misc_RNA (1)...(19): siRNA sense strand
ggacuggucucacaauuuc

SEQ ID NO: 231235 - RNA, 19 nt, Homo sapiens
  misc_RNA (1)...(19): siRNA sense strand
gaaggaaguuggcaaagau

SEQ ID NO: 231236 - RNA, 19 nt, Homo sapiens
  misc_RNA (1)...(19): siRNA sense strand
cagcaaagaucuaccgaaa

SEQ ID NO: 231237 - RNA, 19 nt, Homo sapiens
  misc_RNA (1)...(19): siRNA sense strand
gaaugcaucuugucuuguu

SEQ ID NO: 231238 - RNA, 19 nt, Homo sapiens
  misc_RNA (1)...(19): siRNA sense strand
gcaaagcuaccuuguguug

SEQ ID NO: 231239 - RNA, 19 nt, Homo sapiens
  misc_RNA (1)...(19): siRNA sense strand
gcaugacggagaugaauua

SEQ ID NO: 231240 - RNA, 19 nt, Homo sapiens
  misc_RNA (1)...(19): siRNA sense strand
uuacagcccucaacaguga

SEQ ID NO: 231241 - RNA, 19 nt, Homo sapiens
  misc_RNA (1)...(19): siRNA sense strand
ccaaaucacuguggacaug

SEQ ID NO: 231242 - RNA, 19 nt, Homo sapiens
  misc_RNA (1)...(19): siRNA sense strand
caauuucaccaacauguua

SEQ ID NO: 231243 - RNA, 19 nt, Homo sapiens
  misc_RNA (1)...(19): siRNA sense strand
uggcugaccugauaccuaa

SEQ ID NO: 231244 - RNA, 19 nt, Homo sapiens
  misc_RNA (1)...(19): siRNA sense strand
gggugcugcuccaguauua

SEQ ID NO: 231245 - RNA, 19 nt, Homo sapiens
  misc_RNA (1)...(19): siRNA sense strand
ggacaacuuucccaccaau

SEQ ID NO: 231246 - RNA, 19 nt, Homo sapiens
  misc_RNA (1)...(19): siRNA sense strand
gagcaggccagaauuaaga

SEQ ID NO: 231247 - RNA, 19 nt, Homo sapiens
  misc_RNA (1)...(19): siRNA sense strand
gcugguaacuggacauauc

SEQ ID NO: 231248 - RNA, 19 nt, Homo sapiens
  misc_RNA (1)...(19): siRNA sense strand
caauguagaugcucacagu

SEQ ID NO: 231249 - RNA, 19 nt, Homo sapiens
  misc_RNA (1)...(19): siRNA sense strand
gcucagcuguacaagauug

SEQ ID NO: 231250 - RNA, 19 nt, Homo sapiens
  misc_RNA (1)...(19): siRNA sense strand
ugaagggauuggucuauga

SEQ ID NO: 231251 - RNA, 19 nt, Homo sapiens
  misc_RNA (1)...(19): siRNA sense strand
ugaaguuuguggacucuaa

SEQ ID NO: 231252 - RNA, 19 nt, Homo sapiens
  misc_RNA (1)...(19): siRNA sense strand
gaaaggcccaaguccauga

SEQ ID NO: 231253 - RNA, 19 nt, Homo sapiens
  misc_RNA (1)...(19): siRNA sense strand
gggaguugauuuaugaaga

SEQ ID NO: 231254 - RNA, 19 nt, Homo sapiens
  misc_RNA (1)...(19): siRNA sense strand
ucgcaaagcuaccuugugu

SEQ ID NO: 231255 - RNA, 19 nt, Homo sapiens
  misc_RNA (1)...(19): siRNA sense strand
gaugagaaguuacgagacu

SEQ ID NO: 231256 - RNA, 19 nt, Homo sapiens
  misc_RNA (1)...(19): siRNA sense strand
gaagacugauccgcgauau

SEQ ID NO: 231257 - RNA, 19 nt, Homo sapiens
  misc_RNA (1)...(19): siRNA sense strand
ccaugaggguggcaaugua

SEQ ID NO: 231258 - RNA, 19 nt, Homo sapiens
  misc_RNA (1)...(19): siRNA sense strand
gcagaaggaaguuggcaaa

SEQ ID NO: 231259 - RNA, 19 nt, Homo sapiens
  misc_RNA (1)...(19): siRNA sense strand
uaacuuugcccgagcauau

SEQ ID NO: 231260 - RNA, 19 nt, Homo sapiens
  misc_RNA (1)...(19): siRNA sense strand
gauguaugguggcaugaga

SEQ ID NO: 231261 - RNA, 19 nt, Homo sapiens
  misc_RNA (1)...(19): siRNA sense strand
ggaagacugauccgcgaua

SEQ ID NO: 231262 - RNA, 19 nt, Homo sapiens
  misc_RNA (1)...(19): siRNA sense strand
uaugaaacaucaguucuug

SEQ ID NO: 231263 - RNA, 19 nt, Homo sapiens
  misc_RNA (1)...(19): siRNA sense strand
ugagaggcaugaagggauu

SEQ ID NO: 231264 - RNA, 19 nt, Homo sapiens
  misc_RNA (1)...(19): siRNA sense strand
gaaguuacgagacuacauc

SEQ ID NO: 231265 - RNA, 19 nt, Homo sapiens
  misc_RNA (1)...(19): siRNA sense strand
agaaggaaguuggcaaaga

SEQ ID NO: 231266 - RNA, 19 nt, Homo sapiens
  misc_RNA (1)...(19): siRNA sense strand
cuaccgaaaucucuacaga

SEQ ID NO: 231267 - RNA, 19 nt, Homo sapiens
  misc_RNA (1)...(19): siRNA sense strand
gaagggauuggucuaugaa

SEQ ID NO: 231268 - RNA, 19 nt, Homo sapiens
  misc_RNA (1)...(19): siRNA sense strand
ugugucagaugagaaguua

SEQ ID NO: 231269 - RNA, 19 nt, Homo sapiens
  misc_RNA (1)...(19): siRNA sense strand
gagcauaugcacaggguau

SEQ ID NO: 231270 - RNA, 19 nt, Homo sapiens
  misc_RNA (1)...(19): siRNA sense strand
acugggaguugauuuauga

SEQ ID NO: 231271 - RNA, 19 nt, Homo sapiens
  misc_RNA (1)...(19): siRNA sense strand
cagaggaacagguaucuug

SEQ ID NO: 231272 - RNA, 19 nt, Homo sapiens
  misc_RNA (1)...(19): siRNA sense strand
ccacgaauuugaaagacau

SEQ ID NO: 231273 - RNA, 19 nt, Homo sapiens
  misc_RNA (1)...(19): siRNA sense strand
ucaccaugcuggacaacuu

SEQ ID NO: 231274 - RNA, 19 nt, Homo sapiens
  misc_RNA (1)...(19): siRNA sense strand
ugaagacucuauggaucua

SEQ ID NO: 231275 - RNA, 19 nt, Homo sapiens
  misc_RNA (1)...(19): siRNA sense strand
cuauggaucuaaucgcaaa

SEQ ID NO: 231276 - RNA, 19 nt, Homo sapiens
  misc_RNA (1)...(19): siRNA sense strand
aaagaugugucagaugaga

SEQ ID NO: 231277 - RNA, 19 nt, Homo sapiens
  misc_RNA (1)...(19): siRNA sense strand
ggaguugauuuaugaagac

SEQ ID NO: 231278 - RNA, 19 nt, Homo sapiens
  misc_RNA (1)...(19): siRNA sense strand
gaagugcuugucuggcuaa

SEQ ID NO: 231279 - RNA, 19 nt, Homo sapiens
  misc_RNA (1)...(19): siRNA sense strand
aaagcuaccuuguguugca

SEQ ID NO: 231280 - RNA, 19 nt, Homo sapiens
  misc_RNA (1)...(19): siRNA sense strand
acagguaucuuggcucuca

SEQ ID NO: 231281 - RNA, 19 nt, Homo sapiens
  misc_RNA (1)...(19): siRNA sense strand
gguaucagccgaaccaagu

SEQ ID NO: 231282 - RNA, 19 nt, Homo sapiens
  misc_RNA (1)...(19): siRNA sense strand
caacuuucccaccaaucua

SEQ ID NO: 231283 - RNA, 19 nt, Homo sapiens
  misc_RNA (1)...(19): siRNA sense strand
ccaaguccaugagcacaga

SEQ ID NO: 231284 - RNA, 19 nt, Homo sapiens
  misc_RNA (1)...(19): siRNA sense strand
cuaaggagcaggccagaau

SEQ ID NO: 231285 - RNA, 19 nt, Homo sapiens
  misc_RNA (1)...(19): siRNA sense strand
caacagaggaacagguauc

SEQ ID NO: 231286 - RNA, 19 nt, Homo sapiens
  misc_RNA (1)...(19): siRNA sense strand
caucuggagccgagccuua

SEQ ID NO: 231287 - RNA, 19 nt, Homo sapiens
  misc_RNA (1)...(19): siRNA sense strand
uugcucagcuguacaagau

SEQ ID NO: 231288 - RNA, 19 nt, Homo sapiens
  misc_RNA (1)...(19): siRNA sense strand
gaaguuggcaaagaugugu

SEQ ID NO: 231289 - RNA, 19 nt, Homo sapiens
  misc_RNA (1)...(19): siRNA sense strand
gcuuuaguaucccugaaug

SEQ ID NO: 231290 - RNA, 19 nt, Homo sapiens
  misc_RNA (1)...(19): siRNA sense strand
uuacuacacgguccuguuu

SEQ ID NO: 231291 - RNA, 19 nt, Homo sapiens
  misc_RNA (1)...(19): siRNA sense strand
gaaccaaguacugggaguu

SEQ ID NO: 231292 - RNA, 19 nt, Homo sapiens
  misc_RNA (1)...(19): siRNA sense strand
guacuaaggaagacugauc

SEQ ID NO: 231293 - RNA, 19 nt, Homo sapiens
  misc_RNA (1)...(19): siRNA sense strand
cuauggccaugcaguacua

SEQ ID NO: 231294 - RNA, 19 nt, Homo sapiens
  misc_RNA (1)...(19): siRNA sense strand
uggcaaagaugugucagau

SEQ ID NO: 231295 - RNA, 19 nt, Homo sapiens
  misc_RNA (1)...(19): siRNA sense strand
uccauggacuggcaaauca

SEQ ID NO: 231296 - RNA, 19 nt, Homo sapiens
  misc_RNA (1)...(19): siRNA sense strand
guacugggaguugauuuau

SEQ ID NO: 231297 - RNA, 19 nt, Homo sapiens
  misc_RNA (1)...(19): siRNA sense strand
cuaaugaccccauguuuaa

SEQ ID NO: 231298 - RNA, 19 nt, Homo sapiens
  misc_RNA (1)...(19): siRNA sense strand
aaggagcaggccagaauua

SEQ ID NO: 231299 - RNA, 19 nt, Homo sapiens
  misc_RNA (1)...(19): siRNA sense strand
gggauuggucuaugaaaca

SEQ ID NO: 231300 - RNA, 19 nt, Homo sapiens
  misc_RNA (1)...(19): siRNA sense strand
ggauuggucuaugaaacau

SEQ ID NO: 231301 - RNA, 19 nt, Homo sapiens
  misc_RNA (1)...(19): siRNA sense strand
aggccagaauuaagacuuu

SEQ ID NO: 231302 - RNA, 19 nt, Homo sapiens
  misc_RNA (1)...(19): siRNA sense strand
gccaugcaguacuaaggaa

SEQ ID NO: 231303 - RNA, 19 nt, Homo sapiens
  misc_RNA (1)...(19): siRNA sense strand
caugaggguggcaauguaa

SEQ ID NO: 231304 - RNA, 19 nt, Homo sapiens
  misc_RNA (1)...(19): siRNA sense strand
gugcuuccuccacgaauuu

SEQ ID NO: 231305 - RNA, 19 nt, Homo sapiens
  misc_RNA (1)...(19): siRNA sense strand
cugaaacaccugccuaaug

SEQ ID NO: 231306 - RNA, 19 nt, Homo sapiens
  misc_RNA (1)...(19): siRNA sense strand
ggaucuaaucgcaaagcua

SEQ ID NO: 231307 - RNA, 19 nt, Homo sapiens
  misc_RNA (1)...(19): siRNA sense strand
gcaugaagggauuggucua

SEQ ID NO: 231308 - RNA, 19 nt, Homo sapiens
  misc_RNA (1)...(19): siRNA sense strand
ggaaguuggcaaagaugug

SEQ ID NO: 231309 - RNA, 19 nt, Homo sapiens
  misc_RNA (1)...(19): siRNA sense strand
cagagaaggcagcgguauu

SEQ ID NO: 231310 - RNA, 19 nt, Homo sapiens
  misc_RNA (1)...(19): siRNA sense strand
agagaaggcagcgguauug

SEQ ID NO: 231311 - RNA, 19 nt, Homo sapiens
  misc_RNA (1)...(19): siRNA sense strand
uagaaaggcccaaguccau

SEQ ID NO: 231312 - RNA, 19 nt, Homo sapiens
  misc_RNA (1)...(19): siRNA sense strand
ggagcaggccagaauuaag

SEQ ID NO: 231313 - RNA, 19 nt, Homo sapiens
  misc_RNA (1)...(19): siRNA sense strand
gguaaagccaagaauccuu

SEQ ID NO: 231314 - RNA, 19 nt, Homo sapiens
  misc_RNA (1)...(19): siRNA sense strand
gcucagugcagcuguuaca

SEQ ID NO: 231315 - RNA, 19 nt, Homo sapiens
  misc_RNA (1)...(19): siRNA sense strand
gaugaaguuuguggacucu

SEQ ID NO: 231316 - RNA, 19 nt, Homo sapiens
  misc_RNA (1)...(19): siRNA sense strand
gcccucaacagugaaagua

SEQ ID NO: 231317 - RNA, 19 nt, Homo sapiens
  misc_RNA (1)...(19): siRNA sense strand
cuggacauaucccaacaga

SEQ ID NO: 231318 - RNA, 19 nt, Homo sapiens
  misc_RNA (1)...(19): siRNA sense strand
ccuaaugaccccauguuua

SEQ ID NO: 231319 - RNA, 19 nt, Homo sapiens
  misc_RNA (1)...(19): siRNA sense strand
uaaggagcaggccagaauu

SEQ ID NO: 231320 - RNA, 19 nt, Homo sapiens
  misc_RNA (1)...(19): siRNA sense strand
caaaucaggaagugcuugu

SEQ ID NO: 231321 - RNA, 19 nt, Homo sapiens
  misc_RNA (1)...(19): siRNA sense strand
gcccauaccagccauuugg

SEQ ID NO: 231322 - RNA, 19 nt, Homo sapiens
  misc_RNA (1)...(19): siRNA sense strand
ucucacaauuucaccaaca

SEQ ID NO: 231323 - RNA, 19 nt, Homo sapiens
  misc_RNA (1)...(19): siRNA sense strand
guugauuuaugaagacucu

SEQ ID NO: 231324 - RNA, 19 nt, Homo sapiens
  misc_RNA (1)...(19): siRNA sense strand
ugugcccaauguccucuua

SEQ ID NO: 231325 - RNA, 19 nt, Homo sapiens
  misc_RNA (1)...(19): siRNA sense strand
agacugauccgcgauauac

SEQ ID NO: 231326 - RNA, 19 nt, Homo sapiens
  misc_RNA (1)...(19): siRNA sense strand
cauguuaggcuauacugau

SEQ ID NO: 231327 - RNA, 19 nt, Homo sapiens
  misc_RNA (1)...(19): siRNA sense strand
gugcuugucuggcuaacac

SEQ ID NO: 231328 - RNA, 19 nt, Homo sapiens
  misc_RNA (1)...(19): siRNA sense strand
gcaaagaugugucagauga

SEQ ID NO: 231329 - RNA, 19 nt, Homo sapiens
  misc_RNA (1)...(19): siRNA sense strand
gcaaagaucuaccgaaauc

SEQ ID NO: 231330 - RNA, 19 nt, Homo sapiens
  misc_RNA (1)...(19): siRNA sense strand
uaacacagcugcagaagga

SEQ ID NO: 231331 - RNA, 19 nt, Homo sapiens
  misc_RNA (1)...(19): siRNA sense strand
ugaaacaccugccuaauga

SEQ ID NO: 231332 - RNA, 19 nt, Homo sapiens
  misc_RNA (1)...(19): siRNA sense strand
ugacggagaugaauuacua

SEQ ID NO: 231333 - RNA, 19 nt, Homo sapiens
  misc_RNA (1)...(19): siRNA sense strand
ggacuggucucacaauuuc

SEQ ID NO: 231334 - RNA, 19 nt, Homo sapiens
  misc_RNA (1)...(19): siRNA sense strand
gaaggaaguuggcaaagau

SEQ ID NO: 231335 - RNA, 19 nt, Homo sapiens
  misc_RNA (1)...(19): siRNA sense strand
cagcaaagaucuaccgaaa

SEQ ID NO: 231336 - RNA, 19 nt, Homo sapiens
  misc_RNA (1)...(19): siRNA sense strand
gcaaagcuaccuuguguug

SEQ ID NO: 231337 - RNA, 19 nt, Homo sapiens
  misc_RNA (1)...(19): siRNA sense strand
gcaugacggagaugaauua

SEQ ID NO: 231338 - RNA, 19 nt, Homo sapiens
  misc_RNA (1)...(19): siRNA sense strand
uuacagcccucaacaguga

SEQ ID NO: 231339 - RNA, 19 nt, Homo sapiens
  misc_RNA (1)...(19): siRNA sense strand
caauuucaccaacauguua

SEQ ID NO: 231340 - RNA, 19 nt, Homo sapiens
  misc_RNA (1)...(19): siRNA sense strand
ggacaacuuucccaccaau

SEQ ID NO: 231341 - RNA, 19 nt, Homo sapiens
  misc_RNA (1)...(19): siRNA sense strand
gggugcugcuccaguauua

SEQ ID NO: 231342 - RNA, 19 nt, Homo sapiens
  misc_RNA (1)...(19): siRNA sense strand
gcugguaacuggacauauc

SEQ ID NO: 231343 - RNA, 19 nt, Homo sapiens
  misc_RNA (1)...(19): siRNA sense strand
caauguagaugcucacagu

SEQ ID NO: 231344 - RNA, 19 nt, Homo sapiens
  misc_RNA (1)...(19): siRNA sense strand
gcucagcuguacaagauug

SEQ ID NO: 231345 - RNA, 19 nt, Homo sapiens
  misc_RNA (1)...(19): siRNA sense strand
gggaguugauuuaugaaga

SEQ ID NO: 231346 - RNA, 19 nt, Homo sapiens
  misc_RNA (1)...(19): siRNA sense strand
ugaaguuuguggacucuaa

SEQ ID NO: 231347 - RNA, 19 nt, Homo sapiens
  misc_RNA (1)...(19): siRNA sense strand
gaaaggcccaaguccauga

SEQ ID NO: 231348 - RNA, 19 nt, Homo sapiens
  misc_RNA (1)...(19): siRNA sense strand
ugaagggauuggucuauga

SEQ ID NO: 231349 - RNA, 19 nt, Homo sapiens
  misc_RNA (1)...(19): siRNA sense strand
ucgcaaagcuaccuugugu

SEQ ID NO: 231350 - RNA, 19 nt, Homo sapiens
  misc_RNA (1)...(19): siRNA sense strand
gaugagaaguuacgagacu

SEQ ID NO: 231351 - RNA, 19 nt, Homo sapiens
  misc_RNA (1)...(19): siRNA sense strand
gaagacugauccgcgauau

SEQ ID NO: 231352 - RNA, 19 nt, Homo sapiens
  misc_RNA (1)...(19): siRNA sense strand
ccaugaggguggcaaugua

SEQ ID NO: 231353 - RNA, 19 nt, Homo sapiens
  misc_RNA (1)...(19): siRNA sense strand
gcagaaggaaguuggcaaa

SEQ ID NO: 231354 - RNA, 19 nt, Homo sapiens
  misc_RNA (1)...(19): siRNA sense strand
uaacuuugcccgagcauau

SEQ ID NO: 231355 - RNA, 19 nt, Homo sapiens
  misc_RNA (1)...(19): siRNA sense strand
gauguaugguggcaugaga

SEQ ID NO: 231356 - RNA, 19 nt, Homo sapiens
  misc_RNA (1)...(19): siRNA sense strand
uaugaaacaucaguucuug

SEQ ID NO: 231357 - RNA, 19 nt, Homo sapiens
  misc_RNA (1)...(19): siRNA sense strand
ggaagacugauccgcgaua

SEQ ID NO: 231358 - RNA, 19 nt, Homo sapiens
  misc_RNA (1)...(19): siRNA sense strand
ugagaggcaugaagggauu

SEQ ID NO: 231359 - RNA, 19 nt, Homo sapiens
  misc_RNA (1)...(19): siRNA sense strand
gaaguuacgagacuacauc

SEQ ID NO: 231360 - RNA, 19 nt, Homo sapiens
  misc_RNA (1)...(19): siRNA sense strand
agaaggaaguuggcaaaga

SEQ ID NO: 231361 - RNA, 19 nt, Homo sapiens
  misc_RNA (1)...(19): siRNA sense strand
cuaccgaaaucucuacaga

SEQ ID NO: 231362 - RNA, 19 nt, Homo sapiens
  misc_RNA (1)...(19): siRNA sense strand
gaagggauuggucuaugaa

SEQ ID NO: 231363 - RNA, 19 nt, Homo sapiens
  misc_RNA (1)...(19): siRNA sense strand
ugugucagaugagaaguua

SEQ ID NO: 231364 - RNA, 19 nt, Homo sapiens
  misc_RNA (1)...(19): siRNA sense strand
gagcauaugcacaggguau

SEQ ID NO: 231365 - RNA, 19 nt, Homo sapiens
  misc_RNA (1)...(19): siRNA sense strand
acugggaguugauuuauga

SEQ ID NO: 231366 - RNA, 19 nt, Homo sapiens
  misc_RNA (1)...(19): siRNA sense strand
cagaggaacagguaucuug

SEQ ID NO: 231367 - RNA, 19 nt, Homo sapiens
  misc_RNA (1)...(19): siRNA sense strand
ucaccaugcuggacaacuu

SEQ ID NO: 231368 - RNA, 19 nt, Homo sapiens
  misc_RNA (1)...(19): siRNA sense strand
ugaagacucuauggaucua

SEQ ID NO: 231369 - RNA, 19 nt, Homo sapiens
  misc_RNA (1)...(19): siRNA sense strand
cuauggaucuaaucgcaaa

SEQ ID NO: 231370 - RNA, 19 nt, Homo sapiens
  misc_RNA (1)...(19): siRNA sense strand
aaagaugugucagaugaga

SEQ ID NO: 231371 - RNA, 19 nt, Homo sapiens
  misc_RNA (1)...(19): siRNA sense strand
ggaguugauuuaugaagac

SEQ ID NO: 231372 - RNA, 19 nt, Homo sapiens
  misc_RNA (1)...(19): siRNA sense strand
gaagugcuugucuggcuaa

SEQ ID NO: 231373 - RNA, 19 nt, Homo sapiens
  misc_RNA (1)...(19): siRNA sense strand
aaagcuaccuuguguugca

SEQ ID NO: 231374 - RNA, 19 nt, Homo sapiens
  misc_RNA (1)...(19): siRNA sense strand
acagguaucuuggcucuca

SEQ ID NO: 231375 - RNA, 19 nt, Homo sapiens
  misc_RNA (1)...(19): siRNA sense strand
gguaucagccgaaccaagu

SEQ ID NO: 231376 - RNA, 19 nt, Homo sapiens
  misc_RNA (1)...(19): siRNA sense strand
caacuuucccaccaaucua

SEQ ID NO: 231377 - RNA, 19 nt, Homo sapiens
  misc_RNA (1)...(19): siRNA sense strand
ccaaguccaugagcacaga

SEQ ID NO: 231378 - RNA, 19 nt, Homo sapiens
  misc_RNA (1)...(19): siRNA sense strand
caacagaggaacagguauc

SEQ ID NO: 231379 - RNA, 19 nt, Homo sapiens
  misc_RNA (1)...(19): siRNA sense strand
caucuggagccgagccuua

SEQ ID NO: 231380 - RNA, 19 nt, Homo sapiens
  misc_RNA (1)...(19): siRNA sense strand
uugcucagcuguacaagau

SEQ ID NO: 231381 - RNA, 19 nt, Homo sapiens
  misc_RNA (1)...(19): siRNA sense strand
gaaguuggcaaagaugugu

SEQ ID NO: 231382 - RNA, 19 nt, Homo sapiens
  misc_RNA (1)...(19): siRNA sense strand
gcuuuaguaucccugaaug

SEQ ID NO: 231383 - RNA, 19 nt, Homo sapiens
  misc_RNA (1)...(19): siRNA sense strand
uuacuacacgguccuguuu

SEQ ID NO: 231384 - RNA, 19 nt, Homo sapiens
  misc_RNA (1)...(19): siRNA sense strand
gaaccaaguacugggaguu

SEQ ID NO: 231385 - RNA, 19 nt, Homo sapiens
  misc_RNA (1)...(19): siRNA sense strand
guacuaaggaagacugauc

SEQ ID NO: 231386 - RNA, 19 nt, Homo sapiens
  misc_RNA (1)...(19): siRNA sense strand
cuauggccaugcaguacua

SEQ ID NO: 231387 - RNA, 19 nt, Homo sapiens
  misc_RNA (1)...(19): siRNA sense strand
uggcaaagaugugucagau

SEQ ID NO: 231388 - RNA, 19 nt, Homo sapiens
  misc_RNA (1)...(19): siRNA sense strand
uccauggacuggcaaauca

SEQ ID NO: 231389 - RNA, 19 nt, Homo sapiens
  misc_RNA (1)...(19): siRNA sense strand
guacugggaguugauuuau

SEQ ID NO: 231390 - RNA, 19 nt, Homo sapiens
  misc_RNA (1)...(19): siRNA sense strand
cuaaugaccccauguuuaa

SEQ ID NO: 231391 - RNA, 19 nt, Homo sapiens
  misc_RNA (1)...(19): siRNA sense strand
ggauuggucuaugaaacau

SEQ ID NO: 231392 - RNA, 19 nt, Homo sapiens
  misc_RNA (1)...(19): siRNA sense strand
gggauuggucuaugaaaca

SEQ ID NO: 231393 - RNA, 19 nt, Homo sapiens
  misc_RNA (1)...(19): siRNA sense strand
gccaugcaguacuaaggaa

SEQ ID NO: 231394 - RNA, 19 nt, Homo sapiens
  misc_RNA (1)...(19): siRNA sense strand
caugaggguggcaauguaa

SEQ ID NO: 231395 - RNA, 19 nt, Homo sapiens
  misc_RNA (1)...(19): siRNA sense strand
cugaaacaccugccuaaug

SEQ ID NO: 231396 - RNA, 19 nt, Homo sapiens
  misc_RNA (1)...(19): siRNA sense strand
ggaucuaaucgcaaagcua

SEQ ID NO: 231397 - RNA, 19 nt, Homo sapiens
  misc_RNA (1)...(19): siRNA sense strand
ggaaguuggcaaagaugug

SEQ ID NO: 231398 - RNA, 19 nt, Homo sapiens
  misc_RNA (1)...(19): siRNA sense strand
gcaugaagggauuggucua

SEQ ID NO: 231399 - RNA, 19 nt, Homo sapiens
  misc_RNA (1)...(19): siRNA sense strand
cagagaaggcagcgguauu

SEQ ID NO: 231400 - RNA, 19 nt, Homo sapiens
  misc_RNA (1)...(19): siRNA sense strand
agagaaggcagcgguauug

SEQ ID NO: 231401 - RNA, 19 nt, Homo sapiens
  misc_RNA (1)...(19): siRNA sense strand
uagaaaggcccaaguccau

SEQ ID NO: 231402 - RNA, 19 nt, Homo sapiens
  misc_RNA (1)...(19): siRNA sense strand
gguaaagccaagaauccuu

SEQ ID NO: 231403 - RNA, 19 nt, Homo sapiens
  misc_RNA (1)...(19): siRNA sense strand
gcucagugcagcuguuaca

SEQ ID NO: 231404 - RNA, 19 nt, Homo sapiens
  misc_RNA (1)...(19): siRNA sense strand
gaugaaguuuguggacucu

SEQ ID NO: 231405 - RNA, 19 nt, Homo sapiens
  misc_RNA (1)...(19): siRNA sense strand
gcccucaacagugaaagua

SEQ ID NO: 231406 - RNA, 19 nt, Homo sapiens
  misc_RNA (1)...(19): siRNA sense strand
ucucacaauuucaccaaca

SEQ ID NO: 231407 - RNA, 19 nt, Homo sapiens
  misc_RNA (1)...(19): siRNA sense strand
ccuaaugaccccauguuua

SEQ ID NO: 231408 - RNA, 19 nt, Homo sapiens
  misc_RNA (1)...(19): siRNA sense strand
cuggacauaucccaacaga

SEQ ID NO: 231409 - RNA, 19 nt, Homo sapiens
  misc_RNA (1)...(19): siRNA sense strand
caaaucaggaagugcuugu

SEQ ID NO: 231410 - RNA, 19 nt, Homo sapiens
  misc_RNA (1)...(19): siRNA sense strand
gcccauaccagccauuugg

SEQ ID NO: 231411 - RNA, 19 nt, Homo sapiens
  misc_RNA (1)...(19): siRNA sense strand
guugauuuaugaagacucu

SEQ ID NO: 231412 - RNA, 19 nt, Homo sapiens
  misc_RNA (1)...(19): siRNA sense strand
ugugcccaauguccucuua

SEQ ID NO: 231413 - RNA, 19 nt, Homo sapiens
  misc_RNA (1)...(19): siRNA sense strand
agacugauccgcgauauac

SEQ ID NO: 231414 - RNA, 19 nt, Homo sapiens
  misc_RNA (1)...(19): siRNA sense strand
cauguuaggcuauacugau

SEQ ID NO: 231415 - RNA, 19 nt, Homo sapiens
  misc_RNA (1)...(19): siRNA sense strand
gaagacucuauggaucuaa

SEQ ID NO: 231416 - RNA, 19 nt, Homo sapiens
  misc_RNA (1)...(19): siRNA sense strand
gugcuugucuggcuaacac

SEQ ID NO: 231417 - RNA, 19 nt, Homo sapiens
  misc_RNA (1)...(19): siRNA sense strand
cccaacagaggaacaggua

SEQ ID NO: 231418 - RNA, 19 nt, Homo sapiens
  misc_RNA (1)...(19): siRNA sense strand
ccucaacagugaaaguaac

SEQ ID NO: 231419 - RNA, 19 nt, Homo sapiens
  misc_RNA (1)...(19): siRNA sense strand
gagggucugaugaaguuug

SEQ ID NO: 231420 - RNA, 19 nt, Homo sapiens
  misc_RNA (1)...(19): siRNA sense strand
accaacauguuaggcuaua

SEQ ID NO: 231421 - RNA, 19 nt, Homo sapiens
  misc_RNA (1)...(19): siRNA sense strand
aguacugggaguugauuua

SEQ ID NO: 231422 - RNA, 19 nt, Homo sapiens
  misc_RNA (1)...(19): siRNA sense strand
caaguacugggaguugauu

SEQ ID NO: 231423 - RNA, 19 nt, Homo sapiens
  misc_RNA (1)...(19): siRNA sense strand
uggacuggucucacaauuu

SEQ ID NO: 231424 - RNA, 19 nt, Homo sapiens
  misc_RNA (1)...(19): siRNA sense strand
gagacuacaucuggaacac

SEQ ID NO: 231425 - RNA, 19 nt, Homo sapiens
  misc_RNA (1)...(19): siRNA sense strand
aggcuucccucuagaaagg

SEQ ID NO: 231426 - RNA, 19 nt, Homo sapiens
  misc_RNA (1)...(19): siRNA sense strand
gugcugcuccaguauuaug

SEQ ID NO: 231427 - RNA, 19 nt, Homo sapiens
  misc_RNA (1)...(19): siRNA sense strand
ucaaaagagugggcaaaga

SEQ ID NO: 231428 - RNA, 19 nt, Homo sapiens
  misc_RNA (1)...(19): siRNA sense strand
caaaggauguuaugcuaaa

SEQ ID NO: 231429 - RNA, 19 nt, Homo sapiens
  misc_RNA (1)...(19): siRNA sense strand
ggcaacagcuuccauaaau

SEQ ID NO: 231430 - RNA, 19 nt, Homo sapiens
  misc_RNA (1)...(19): siRNA sense strand
agacaaggauggcgagauu

SEQ ID NO: 231431 - RNA, 19 nt, Homo sapiens
  misc_RNA (1)...(19): siRNA sense strand
gcugggaaguccuggcaua

SEQ ID NO: 231432 - RNA, 19 nt, Homo sapiens
  misc_RNA (1)...(19): siRNA sense strand
agaagaaucuggacaguac

SEQ ID NO: 231433 - RNA, 19 nt, Homo sapiens
  misc_RNA (1)...(19): siRNA sense strand
gcaaaggauguuaugcuaa

SEQ ID NO: 231434 - RNA, 19 nt, Homo sapiens
  misc_RNA (1)...(19): siRNA sense strand
gagauuuacugcaaaggau

SEQ ID NO: 231435 - RNA, 19 nt, Homo sapiens
  misc_RNA (1)...(19): siRNA sense strand
cauaaggccugcuuucgau

SEQ ID NO: 231436 - RNA, 19 nt, Homo sapiens
  misc_RNA (1)...(19): siRNA sense strand
gcaacagcuuccauaaauc

SEQ ID NO: 231437 - RNA, 19 nt, Homo sapiens
  misc_RNA (1)...(19): siRNA sense strand
caaccacccuggcagacaa

SEQ ID NO: 231438 - RNA, 19 nt, Homo sapiens
  misc_RNA (1)...(19): siRNA sense strand
ucagaagacgguuuacuuu

SEQ ID NO: 231439 - RNA, 19 nt, Homo sapiens
  misc_RNA (1)...(19): siRNA sense strand
acaaggauggcgagauuua

SEQ ID NO: 231440 - RNA, 19 nt, Homo sapiens
  misc_RNA (1)...(19): siRNA sense strand
caagaaguaugggcccaaa

SEQ ID NO: 231441 - RNA, 19 nt, Homo sapiens
  misc_RNA (1)...(19): siRNA sense strand
ugcaaaggauguuaugcua

SEQ ID NO: 231442 - RNA, 19 nt, Homo sapiens
  misc_RNA (1)...(19): siRNA sense strand
gggagucgcuggguaucaa

SEQ ID NO: 231443 - RNA, 19 nt, Homo sapiens
  misc_RNA (1)...(19): siRNA sense strand
gcauaaggccugcuuucga

SEQ ID NO: 231444 - RNA, 19 nt, Homo sapiens
  misc_RNA (1)...(19): siRNA sense strand
gggaaguccuggcauaagg

SEQ ID NO: 231445 - RNA, 19 nt, Homo sapiens
  misc_RNA (1)...(19): siRNA sense strand
caagaagaaucuggacagu

SEQ ID NO: 231446 - RNA, 19 nt, Homo sapiens
  misc_RNA (1)...(19): siRNA sense strand
cagaagacgguuuacuuug

SEQ ID NO: 231447 - RNA, 19 nt, Homo sapiens
  misc_RNA (1)...(19): siRNA sense strand
gggccuugguccacucuga

SEQ ID NO: 231448 - RNA, 19 nt, Homo sapiens
  misc_RNA (1)...(19): siRNA sense strand
agaagacgguuuacuuugc

SEQ ID NO: 231449 - RNA, 19 nt, Homo sapiens
  misc_RNA (1)...(19): siRNA sense strand
uggcaaaggccuugaguca

SEQ ID NO: 231450 - RNA, 19 nt, Homo sapiens
  misc_RNA (1)...(19): siRNA sense strand
ggaggaggcaagaaaugug

SEQ ID NO: 231451 - RNA, 19 nt, Homo sapiens
  misc_RNA (1)...(19): siRNA sense strand
uuacuuugccgaagagguu

SEQ ID NO: 231452 - RNA, 19 nt, Homo sapiens
  misc_RNA (1)...(19): siRNA sense strand
gggaggaggcaagaaaugu

SEQ ID NO: 231453 - RNA, 19 nt, Homo sapiens
  misc_RNA (1)...(19): siRNA sense strand
cgagauuuacugcaaagga

SEQ ID NO: 231454 - RNA, 19 nt, Homo sapiens
  misc_RNA (1)...(19): siRNA sense strand
caacagcuuccauaaaucc

SEQ ID NO: 231455 - RNA, 19 nt, Homo sapiens
  misc_RNA (1)...(19): siRNA sense strand
aagaagaaucuggacagua

SEQ ID NO: 231456 - RNA, 19 nt, Homo sapiens
  misc_RNA (1)...(19): siRNA sense strand
uggcgagauuuacugcaaa

SEQ ID NO: 231457 - RNA, 19 nt, Homo sapiens
  misc_RNA (1)...(19): siRNA sense strand
ggcgagauuuacugcaaag

SEQ ID NO: 231458 - RNA, 19 nt, Homo sapiens
  misc_RNA (1)...(19): siRNA sense strand
aggcaacagcuuccauaaa

SEQ ID NO: 231459 - RNA, 19 nt, Homo sapiens
  misc_RNA (1)...(19): siRNA sense strand
gacaaggauggcgagauuu

SEQ ID NO: 231460 - RNA, 19 nt, Homo sapiens
  misc_RNA (1)...(19): siRNA sense strand
cgguuuacuuugccgaaga

SEQ ID NO: 231461 - RNA, 19 nt, Homo sapiens
  misc_RNA (1)...(19): siRNA sense strand
gcaagaagauccaccacua

SEQ ID NO: 231462 - RNA, 19 nt, Homo sapiens
  misc_RNA (1)...(19): siRNA sense strand
gcaacaugcuucaguuucu

SEQ ID NO: 231463 - RNA, 19 nt, Homo sapiens
  misc_RNA (1)...(19): siRNA sense strand
gcuacaggcaggagaguua

SEQ ID NO: 231464 - RNA, 19 nt, Homo sapiens
  misc_RNA (1)...(19): siRNA sense strand
gcacauggacccugacauc

SEQ ID NO: 231465 - RNA, 19 nt, Homo sapiens
  misc_RNA (1)...(19): siRNA sense strand
ucacacacuuugacuuaga

SEQ ID NO: 231466 - RNA, 19 nt, Homo sapiens
  misc_RNA (1)...(19): siRNA sense strand
guacuucaccuucgucaug

SEQ ID NO: 231467 - RNA, 19 nt, Homo sapiens
  misc_RNA (1)...(19): siRNA sense strand
caaacucggugcccugcaa

SEQ ID NO: 231468 - RNA, 19 nt, Homo sapiens
  misc_RNA (1)...(19): siRNA sense strand
gcaacuggcugggcaacau

SEQ ID NO: 231469 - RNA, 19 nt, Homo sapiens
  misc_RNA (1)...(19): siRNA sense strand
gcuugaaggaucuuaauga

SEQ ID NO: 231470 - RNA, 19 nt, Homo sapiens
  misc_RNA (1)...(19): siRNA sense strand
ucagugaggugaagcucuu

SEQ ID NO: 231471 - RNA, 19 nt, Homo sapiens
  misc_RNA (1)...(19): siRNA sense strand
gagaguuauucauggaguu

SEQ ID NO: 231472 - RNA, 19 nt, Homo sapiens
  misc_RNA (1)...(19): siRNA sense strand
aaacuagacuuugggcaau

SEQ ID NO: 231473 - RNA, 19 nt, Homo sapiens
  misc_RNA (1)...(19): siRNA sense strand
caggagaguuauucaugga

SEQ ID NO: 231474 - RNA, 19 nt, Homo sapiens
  misc_RNA (1)...(19): siRNA sense strand
gacuauacccugaagaugu

SEQ ID NO: 231475 - RNA, 19 nt, Homo sapiens
  misc_RNA (1)...(19): siRNA sense strand
gaagcacccagaagcuauu

SEQ ID NO: 231476 - RNA, 19 nt, Homo sapiens
  misc_RNA (1)...(19): siRNA sense strand
ucagguugguucaugaaga

SEQ ID NO: 231477 - RNA, 19 nt, Homo sapiens
  misc_RNA (1)...(19): siRNA sense strand
ucaaggacacacagagaaa

SEQ ID NO: 231478 - RNA, 19 nt, Homo sapiens
  misc_RNA (1)...(19): siRNA sense strand
cuucugcuauuacaucuug

SEQ ID NO: 231479 - RNA, 19 nt, Homo sapiens
  misc_RNA (1)...(19): siRNA sense strand
gcuauuacaucuuguucac

SEQ ID NO: 231480 - RNA, 19 nt, Homo sapiens
  misc_RNA (1)...(19): siRNA sense strand
caacaugcuucaguuucug

SEQ ID NO: 231481 - RNA, 19 nt, Homo sapiens
  misc_RNA (1)...(19): siRNA sense strand
gggcaacaugcuucaguuu

SEQ ID NO: 231482 - RNA, 19 nt, Homo sapiens
  misc_RNA (1)...(19): siRNA sense strand
ccucagcuaugcaggacaa

SEQ ID NO: 231483 - RNA, 19 nt, Homo sapiens
  misc_RNA (1)...(19): siRNA sense strand
ggcaggagaguuauucaug

SEQ ID NO: 231484 - RNA, 19 nt, Homo sapiens
  misc_RNA (1)...(19): siRNA sense strand
cagccuguccuuuguaaug

SEQ ID NO: 231485 - RNA, 19 nt, Homo sapiens
  misc_RNA (1)...(19): siRNA sense strand
acacuuugacuuagaguug

SEQ ID NO: 231486 - RNA, 19 nt, Homo sapiens
  misc_RNA (1)...(19): siRNA sense strand
gagguucuuugcacucagu

SEQ ID NO: 231487 - RNA, 19 nt, Homo sapiens
  misc_RNA (1)...(19): siRNA sense strand
gggagguucuuugcacuca

SEQ ID NO: 231488 - RNA, 19 nt, Homo sapiens
  misc_RNA (1)...(19): siRNA sense strand
gaauuucugaagcgcauga

SEQ ID NO: 231489 - RNA, 19 nt, Homo sapiens
  misc_RNA (1)...(19): siRNA sense strand
gaagcuauucgggcuguga

SEQ ID NO: 231490 - RNA, 19 nt, Homo sapiens
  misc_RNA (1)...(19): siRNA sense strand
ucauggaguuccgcaaguu

SEQ ID NO: 231491 - RNA, 19 nt, Homo sapiens
  misc_RNA (1)...(19): siRNA sense strand
aaacuggugcugaagguau

SEQ ID NO: 231492 - RNA, 19 nt, Homo sapiens
  misc_RNA (1)...(19): siRNA sense strand
ugaagacuauacccugaag

SEQ ID NO: 231493 - RNA, 19 nt, Homo sapiens
  misc_RNA (1)...(19): siRNA sense strand
cagcuaugcaggacaaguu

SEQ ID NO: 231494 - RNA, 19 nt, Homo sapiens
  misc_RNA (1)...(19): siRNA sense strand
guugguucaugaagacuau

SEQ ID NO: 231495 - RNA, 19 nt, Homo sapiens
  misc_RNA (1)...(19): siRNA sense strand
gacagccucuuucgcuucu

SEQ ID NO: 231496 - RNA, 19 nt, Homo sapiens
  misc_RNA (1)...(19): siRNA sense strand
gcuuauggucacacacuuu

SEQ ID NO: 231497 - RNA, 19 nt, Homo sapiens
  misc_RNA (1)...(19): siRNA sense strand
gagacauccuggcccucuu

SEQ ID NO: 231498 - RNA, 19 nt, Homo sapiens
  misc_RNA (1)...(19): siRNA sense strand
ugcugaagguauuuggaua

SEQ ID NO: 231499 - RNA, 19 nt, Homo sapiens
  misc_RNA (1)...(19): siRNA sense strand
gagcucugcugguggucau

SEQ ID NO: 231500 - RNA, 19 nt, Homo sapiens
  misc_RNA (1)...(19): siRNA sense strand
gccauggcuuuccggaaga

SEQ ID NO: 231501 - RNA, 19 nt, Homo sapiens
  misc_RNA (1)...(19): siRNA sense strand
ccgcaaguuugaccuucuu

SEQ ID NO: 231502 - RNA, 19 nt, Homo sapiens
  misc_RNA (1)...(19): siRNA sense strand
gggauggcuugaaggaucu

SEQ ID NO: 231503 - RNA, 19 nt, Homo sapiens
  misc_RNA (1)...(19): siRNA sense strand
ugaagcacccagaagcuau

SEQ ID NO: 231504 - RNA, 19 nt, Homo sapiens
  misc_RNA (1)...(19): siRNA sense strand
ccagugggcaggaguaucu

SEQ ID NO: 231505 - RNA, 19 nt, Homo sapiens
  misc_RNA (1)...(19): siRNA sense strand
cacccacccuccucagguu

SEQ ID NO: 231506 - RNA, 19 nt, Homo sapiens
  misc_RNA (1)...(19): siRNA sense strand
agaaggagggcaucagcaa

SEQ ID NO: 231507 - RNA, 19 nt, Homo sapiens
  misc_RNA (1)...(19): siRNA sense strand
caagaagauccaccacuac

SEQ ID NO: 231508 - RNA, 19 nt, Homo sapiens
  misc_RNA (1)...(19): siRNA sense strand
ucuuguaccuccugaagca

SEQ ID NO: 231509 - RNA, 19 nt, Homo sapiens
  misc_RNA (1)...(19): siRNA sense strand
uggauaccguucagugcaa

SEQ ID NO: 231510 - RNA, 19 nt, Homo sapiens
  misc_RNA (1)...(19): siRNA sense strand
gaggugaagcucuuuaucc

SEQ ID NO: 231511 - RNA, 19 nt, Homo sapiens
  misc_RNA (1)...(19): siRNA sense strand
agacauccuggcccucuuu

SEQ ID NO: 231512 - RNA, 19 nt, Homo sapiens
  misc_RNA (1)...(19): siRNA sense strand
acuauacccugaagauguc

SEQ ID NO: 231513 - RNA, 19 nt, Homo sapiens
  misc_RNA (1)...(19): siRNA sense strand
ggcaacaugcuucaguuuc

SEQ ID NO: 231514 - RNA, 19 nt, Homo sapiens
  misc_RNA (1)...(19): siRNA sense strand
ggacacacagagaaaacua

SEQ ID NO: 231515 - RNA, 19 nt, Homo sapiens
  misc_RNA (1)...(19): siRNA sense strand
cuugaaggaucuuaaugag

SEQ ID NO: 231516 - RNA, 19 nt, Homo sapiens
  misc_RNA (1)...(19): siRNA sense strand
gcaaggggaccaugagaug

SEQ ID NO: 231517 - RNA, 19 nt, Homo sapiens
  misc_RNA (1)...(19): siRNA sense strand
ggagaccaagcaguccuuu

SEQ ID NO: 231518 - RNA, 19 nt, Homo sapiens
  misc_RNA (1)...(19): siRNA sense strand
cggaagaauauguuugaau

SEQ ID NO: 231519 - RNA, 19 nt, Homo sapiens
  misc_RNA (1)...(19): siRNA sense strand
ccucaaggacacacagaga

SEQ ID NO: 231520 - RNA, 19 nt, Homo sapiens
  misc_RNA (1)...(19): siRNA sense strand
gaagacuauacccugaaga

SEQ ID NO: 231521 - RNA, 19 nt, Homo sapiens
  misc_RNA (1)...(19): siRNA sense strand
cauggaguuccgcaaguuu

SEQ ID NO: 231522 - RNA, 19 nt, Homo sapiens
  misc_RNA (1)...(19): siRNA sense strand
caagacaggcaagaagauc

SEQ ID NO: 231523 - RNA, 19 nt, Homo sapiens
  misc_RNA (1)...(19): siRNA sense strand
gcaacacaccccaguucua

SEQ ID NO: 231524 - RNA, 19 nt, Homo sapiens
  misc_RNA (1)...(19): siRNA sense strand
aacuagacuuugggcaaua

SEQ ID NO: 231525 - RNA, 19 nt, Homo sapiens
  misc_RNA (1)...(19): siRNA sense strand
ugggcaacaugcuucaguu

SEQ ID NO: 231526 - RNA, 19 nt, Homo sapiens
  misc_RNA (1)...(19): siRNA sense strand
gguggucauugcuggauac

SEQ ID NO: 231527 - RNA, 19 nt, Homo sapiens
  misc_RNA (1)...(19): siRNA sense strand
guaaugcugacguccaaag

SEQ ID NO: 231528 - RNA, 19 nt, Homo sapiens
  misc_RNA (1)...(19): siRNA sense strand
guucgggcguuuccaucug

SEQ ID NO: 231529 - RNA, 19 nt, Homo sapiens
  misc_RNA (1)...(19): siRNA sense strand
ccuaauggcagccggaaag

SEQ ID NO: 231530 - RNA, 19 nt, Homo sapiens
  misc_RNA (1)...(19): siRNA sense strand
caacuggcugggcaacaug

SEQ ID NO: 231531 - RNA, 19 nt, Homo sapiens
  misc_RNA (1)...(19): siRNA sense strand
gcuacacgaaggacaagga

SEQ ID NO: 231532 - RNA, 19 nt, Homo sapiens
  misc_RNA (1)...(19): siRNA sense strand
cucuuucgcuucugcuauu

SEQ ID NO: 231533 - RNA, 19 nt, Homo sapiens
  misc_RNA (1)...(19): siRNA sense strand
aagaagauccaccacuaca

SEQ ID NO: 231534 - RNA, 19 nt, Homo sapiens
  misc_RNA (1)...(19): siRNA sense strand
ucaagacaggcaagaagau

SEQ ID NO: 231535 - RNA, 19 nt, Homo sapiens
  misc_RNA (1)...(19): siRNA sense strand
cagguugguucaugaagac

SEQ ID NO: 231536 - RNA, 19 nt, Homo sapiens
  misc_RNA (1)...(19): siRNA sense strand
agagaaaacuagacuuugg

SEQ ID NO: 231537 - RNA, 19 nt, Homo sapiens
  misc_RNA (1)...(19): siRNA sense strand
ccggaagaauauguuugaa

SEQ ID NO: 231538 - RNA, 19 nt, Homo sapiens
  misc_RNA (1)...(19): siRNA sense strand
gcucauugcuggcaucauu

SEQ ID NO: 231539 - RNA, 19 nt, Homo sapiens
  misc_RNA (1)...(19): siRNA sense strand
gaaacuggccuucgccuuu

SEQ ID NO: 231540 - RNA, 19 nt, Homo sapiens
  misc_RNA (1)...(19): siRNA sense strand
ugaaugacauccacaagaa

SEQ ID NO: 231541 - RNA, 19 nt, Homo sapiens
  misc_RNA (1)...(19): siRNA sense strand
ggagauaucaucaagguau

SEQ ID NO: 231542 - RNA, 19 nt, Homo sapiens
  misc_RNA (1)...(19): siRNA sense strand
gcacugguguugaaugaca

SEQ ID NO: 231543 - RNA, 19 nt, Homo sapiens
  misc_RNA (1)...(19): siRNA sense strand
gaaggaggcuuugccaucu

SEQ ID NO: 231544 - RNA, 19 nt, Homo sapiens
  misc_RNA (1)...(19): siRNA sense strand
gcacaucgccaauaagaag

SEQ ID NO: 231545 - RNA, 19 nt, Homo sapiens
  misc_RNA (1)...(19): siRNA sense strand
gcccagagcucaagaacca

SEQ ID NO: 231546 - RNA, 19 nt, Homo sapiens
  misc_RNA (1)...(19): siRNA sense strand
cagcaacgccuucaacuga

SEQ ID NO: 231547 - RNA, 19 nt, Homo sapiens
  misc_RNA (1)...(19): siRNA sense strand
gaacagugugccugacauu

SEQ ID NO: 231548 - RNA, 19 nt, Homo sapiens
  misc_RNA (1)...(19): siRNA sense strand
gaagagcagugaggaugau

SEQ ID NO: 231549 - RNA, 19 nt, Homo sapiens
  misc_RNA (1)...(19): siRNA sense strand
cgucagacacuuucuauga

SEQ ID NO: 231550 - RNA, 19 nt, Homo sapiens
  misc_RNA (1)...(19): siRNA sense strand
ggaugaaccugugacuguu

SEQ ID NO: 231551 - RNA, 19 nt, Homo sapiens
  misc_RNA (1)...(19): siRNA sense strand
gaagauugccuugguaaag

SEQ ID NO: 231552 - RNA, 19 nt, Homo sapiens
  misc_RNA (1)...(19): siRNA sense strand
cagauucgcccaacgauga

SEQ ID NO: 231553 - RNA, 19 nt, Homo sapiens
  misc_RNA (1)...(19): siRNA sense strand
gcaacagccagcucaugua

SEQ ID NO: 231554 - RNA, 19 nt, Homo sapiens
  misc_RNA (1)...(19): siRNA sense strand
gcagugaggaugaugucua

SEQ ID NO: 231555 - RNA, 19 nt, Homo sapiens
  misc_RNA (1)...(19): siRNA sense strand
ccacaaccaccaccaagaa

SEQ ID NO: 231556 - RNA, 19 nt, Homo sapiens
  misc_RNA (1)...(19): siRNA sense strand
aaguagagcuucacaacau

SEQ ID NO: 231557 - RNA, 19 nt, Homo sapiens
  misc_RNA (1)...(19): siRNA sense strand
ccaucacccugcagaauau

SEQ ID NO: 231558 - RNA, 19 nt, Homo sapiens
  misc_RNA (1)...(19): siRNA sense strand
caacagccagcucauguau

SEQ ID NO: 231559 - RNA, 19 nt, Homo sapiens
  misc_RNA (1)...(19): siRNA sense strand
gaccauuccuggcuaugug

SEQ ID NO: 231560 - RNA, 19 nt, Homo sapiens
  misc_RNA (1)...(19): siRNA sense strand
uaacagacuauuugacaug

SEQ ID NO: 231561 - RNA, 19 nt, Homo sapiens
  misc_RNA (1)...(19): siRNA sense strand
ccaagaacaugaccccaua

SEQ ID NO: 231562 - RNA, 19 nt, Homo sapiens
  misc_RNA (1)...(19): siRNA sense strand
ccacgaguauccacaccaa

SEQ ID NO: 231563 - RNA, 19 nt, Homo sapiens
  misc_RNA (1)...(19): siRNA sense strand
gaagcuggcaccacaguuc

SEQ ID NO: 231564 - RNA, 19 nt, Homo sapiens
  misc_RNA (1)...(19): siRNA sense strand
cugauaagggugugcauua

SEQ ID NO: 231565 - RNA, 19 nt, Homo sapiens
  misc_RNA (1)...(19): siRNA sense strand
guggagauaucaucaaggu

SEQ ID NO: 231566 - RNA, 19 nt, Homo sapiens
  misc_RNA (1)...(19): siRNA sense strand
uaucaucuuugcagacgaa

SEQ ID NO: 231567 - RNA, 19 nt, Homo sapiens
  misc_RNA (1)...(19): siRNA sense strand
ggaauggaccaacaacaca

SEQ ID NO: 231568 - RNA, 19 nt, Homo sapiens
  misc_RNA (1)...(19): siRNA sense strand
aaacuggccuucgccuuug

SEQ ID NO: 231569 - RNA, 19 nt, Homo sapiens
  misc_RNA (1)...(19): siRNA sense strand
cggcacugguguugaauga

SEQ ID NO: 231570 - RNA, 19 nt, Homo sapiens
  misc_RNA (1)...(19): siRNA sense strand
gagugaccauuccaacaga

SEQ ID NO: 231571 - RNA, 19 nt, Homo sapiens
  misc_RNA (1)...(19): siRNA sense strand
aagauugccuugguaaaga

SEQ ID NO: 231572 - RNA, 19 nt, Homo sapiens
  misc_RNA (1)...(19): siRNA sense strand
gguggugaauaacagacua

SEQ ID NO: 231573 - RNA, 19 nt, Homo sapiens
  misc_RNA (1)...(19): siRNA sense strand
cccuagagccugacuuuaa

SEQ ID NO: 231574 - RNA, 19 nt, Homo sapiens
  misc_RNA (1)...(19): siRNA sense strand
caaacacgaguauuucaug

SEQ ID NO: 231575 - RNA, 19 nt, Homo sapiens
  misc_RNA (1)...(19): siRNA sense strand
gaugaaccugugacuguuu

SEQ ID NO: 231576 - RNA, 19 nt, Homo sapiens
  misc_RNA (1)...(19): siRNA sense strand
gagaaguccuggguacagu

SEQ ID NO: 231577 - RNA, 19 nt, Homo sapiens
  misc_RNA (1)...(19): siRNA sense strand
gaagaucccgucagacacu

SEQ ID NO: 231578 - RNA, 19 nt, Homo sapiens
  misc_RNA (1)...(19): siRNA sense strand
gugaagaucccgucagaca

SEQ ID NO: 231579 - RNA, 19 nt, Homo sapiens
  misc_RNA (1)...(19): siRNA sense strand
gcugcucccugaaccagaa

SEQ ID NO: 231580 - RNA, 19 nt, Homo sapiens
  misc_RNA (1)...(19): siRNA sense strand
uagugccgguggugaauaa

SEQ ID NO: 231581 - RNA, 19 nt, Homo sapiens
  misc_RNA (1)...(19): siRNA sense strand
ggucaccuccucccuaugu

SEQ ID NO: 231582 - RNA, 19 nt, Homo sapiens
  misc_RNA (1)...(19): siRNA sense strand
ccaggagagugcccucaga

SEQ ID NO: 231583 - RNA, 19 nt, Homo sapiens
  misc_RNA (1)...(19): siRNA sense strand
ugucggcaccuacaguuua

SEQ ID NO: 231584 - RNA, 19 nt, Homo sapiens
  misc_RNA (1)...(19): siRNA sense strand
ccagagcucaagaaccaua

SEQ ID NO: 231585 - RNA, 19 nt, Homo sapiens
  misc_RNA (1)...(19): siRNA sense strand
gaugaccauuccuggcuau

SEQ ID NO: 231586 - RNA, 19 nt, Homo sapiens
  misc_RNA (1)...(19): siRNA sense strand
gcaaacacgaguauuucau

SEQ ID NO: 231587 - RNA, 19 nt, Homo sapiens
  misc_RNA (1)...(19): siRNA sense strand
acagccagcucauguaugg

SEQ ID NO: 231588 - RNA, 19 nt, Homo sapiens
  misc_RNA (1)...(19): siRNA sense strand
gagcucaagaaccauauug

SEQ ID NO: 231589 - RNA, 19 nt, Homo sapiens
  misc_RNA (1)...(19): siRNA sense strand
ugacauucaugguguagag

SEQ ID NO: 231590 - RNA, 19 nt, Homo sapiens
  misc_RNA (1)...(19): siRNA sense strand
ccaccgcccuucacaguac

SEQ ID NO: 231591 - RNA, 19 nt, Homo sapiens
  misc_RNA (1)...(19): siRNA sense strand
ccuagagccugacuuuaag

SEQ ID NO: 231592 - RNA, 19 nt, Homo sapiens
  misc_RNA (1)...(19): siRNA sense strand
cacaguuccuggccagauu

SEQ ID NO: 231593 - RNA, 19 nt, Homo sapiens
  misc_RNA (1)...(19): siRNA sense strand
cgcaaugucugcucagcuu

SEQ ID NO: 231594 - RNA, 19 nt, Homo sapiens
  misc_RNA (1)...(19): siRNA sense strand
caggccaccuucaucaaga

SEQ ID NO: 231595 - RNA, 19 nt, Homo sapiens
  misc_RNA (1)...(19): siRNA sense strand
gggcaaacacgaguauuuc

SEQ ID NO: 231596 - RNA, 19 nt, Homo sapiens
  misc_RNA (1)...(19): siRNA sense strand
ggguacaguucaacagcaa

SEQ ID NO: 231597 - RNA, 19 nt, Homo sapiens
  misc_RNA (1)...(19): siRNA sense strand
gggugugcauuacauuuca

SEQ ID NO: 231598 - RNA, 19 nt, Homo sapiens
  misc_RNA (1)...(19): siRNA sense strand
ggaccaggccaccuucauc

SEQ ID NO: 231599 - RNA, 19 nt, Homo sapiens
  misc_RNA (1)...(19): siRNA sense strand
gauaagggugugcauuaca

SEQ ID NO: 231600 - RNA, 19 nt, Homo sapiens
  misc_RNA (1)...(19): siRNA sense strand
gugcauuacauuucaguga

SEQ ID NO: 231601 - RNA, 19 nt, Homo sapiens
  misc_RNA (1)...(19): siRNA sense strand
gaccaggccaccuucauca

SEQ ID NO: 231602 - RNA, 19 nt, Homo sapiens
  misc_RNA (1)...(19): siRNA sense strand
gacgggcucuggcaguugu

SEQ ID NO: 231603 - RNA, 19 nt, Homo sapiens
  misc_RNA (1)...(19): siRNA sense strand
acaacacacugcccuugga

SEQ ID NO: 231604 - RNA, 19 nt, Homo sapiens
  misc_RNA (1)...(19): siRNA sense strand
ggacaccaccacugacaag

SEQ ID NO: 231605 - RNA, 19 nt, Homo sapiens
  misc_RNA (1)...(19): siRNA sense strand
cggaugaaccugugacugu

SEQ ID NO: 231606 - RNA, 19 nt, Homo sapiens
  misc_RNA (1)...(19): siRNA sense strand
cgagaccacuccucugaac

SEQ ID NO: 231607 - RNA, 19 nt, Homo sapiens
  misc_RNA (1)...(19): siRNA sense strand
guagagcuucacaacauga

SEQ ID NO: 231608 - RNA, 19 nt, Homo sapiens
  misc_RNA (1)...(19): siRNA sense strand
ccaaugcgccucccuacca

SEQ ID NO: 231609 - RNA, 19 nt, Homo sapiens
  misc_RNA (1)...(19): siRNA sense strand
gggcgcucauuucgaguga

SEQ ID NO: 231610 - RNA, 19 nt, Homo sapiens
  misc_RNA (1)...(19): siRNA sense strand
acacgaguauuucaugcau

SEQ ID NO: 231611 - RNA, 19 nt, Homo sapiens
  misc_RNA (1)...(19): siRNA sense strand
cucccuaugucccaccuua

SEQ ID NO: 231612 - RNA, 19 nt, Homo sapiens
  misc_RNA (1)...(19): siRNA sense strand
gaaguccuggguacaguuc

SEQ ID NO: 231613 - RNA, 19 nt, Homo sapiens
  misc_RNA (1)...(19): siRNA sense strand
ggacucgaggcgccauuau

SEQ ID NO: 231614 - RNA, 19 nt, Homo sapiens
  misc_RNA (1)...(19): siRNA sense strand
gaggacaccaccacugaca

SEQ ID NO: 231615 - RNA, 19 nt, Homo sapiens
  misc_RNA (1)...(19): siRNA sense strand
caguggagauaucaucaag

SEQ ID NO: 231616 - RNA, 19 nt, Homo sapiens
  misc_RNA (1)...(19): siRNA sense strand
gcaacgccuucaacugacu

SEQ ID NO: 231617 - RNA, 19 nt, Homo sapiens
  misc_RNA (1)...(19): siRNA sense strand
ucaccaagaugaccccaaa

SEQ ID NO: 231618 - RNA, 19 nt, Homo sapiens
  misc_RNA (1)...(19): siRNA sense strand
cuccugcucucugugguua

SEQ ID NO: 231619 - RNA, 19 nt, Homo sapiens
  misc_RNA (1)...(19): siRNA sense strand
ccggucaccuccucccuau

SEQ ID NO: 231620 - RNA, 19 nt, Homo sapiens
  misc_RNA (1)...(19): siRNA sense strand
gaucugcuaccgcaagaag

SEQ ID NO: 231621 - RNA, 19 nt, Homo sapiens
  misc_RNA (1)...(19): siRNA sense strand
gugacgggcucuggcaguu

SEQ ID NO: 231622 - RNA, 19 nt, Homo sapiens
  misc_RNA (1)...(19): siRNA sense strand
agauugccuugguaaagaa

SEQ ID NO: 231623 - RNA, 19 nt, Homo sapiens
  misc_RNA (1)...(19): siRNA sense strand
aagaagauugccuugguaa

SEQ ID NO: 231624 - RNA, 19 nt, Homo sapiens
  misc_RNA (1)...(19): siRNA sense strand
gaccauuccaacagauuug

SEQ ID NO: 231625 - RNA, 19 nt, Homo sapiens
  misc_RNA (1)...(19): siRNA sense strand
gaagcugacccugaaacug

SEQ ID NO: 231626 - RNA, 19 nt, Homo sapiens
  misc_RNA (1)...(19): siRNA sense strand
ccauugcuccuccaacaga

SEQ ID NO: 231627 - RNA, 19 nt, Homo sapiens
  misc_RNA (1)...(19): siRNA sense strand
ugaccauuccaacagauuu

SEQ ID NO: 231628 - RNA, 19 nt, Homo sapiens
  misc_RNA (1)...(19): siRNA sense strand
ugggcaaacacgaguauuu

SEQ ID NO: 231629 - RNA, 19 nt, Homo sapiens
  misc_RNA (1)...(19): siRNA sense strand
gcagccacgugggcaaaca

SEQ ID NO: 231630 - RNA, 19 nt, Homo sapiens
  misc_RNA (1)...(19): siRNA sense strand
ccucaccgccuacucguau

SEQ ID NO: 231631 - RNA, 19 nt, Homo sapiens
  misc_RNA (1)...(19): siRNA sense strand
cuggugaggugguaucauc

SEQ ID NO: 231632 - RNA, 19 nt, Homo sapiens
  misc_RNA (1)...(19): siRNA sense strand
gcccaacgaugaccauucc

SEQ ID NO: 231633 - RNA, 19 nt, Homo sapiens
  misc_RNA (1)...(19): siRNA sense strand
cgaggcgccauuauucaaa

SEQ ID NO: 231634 - RNA, 19 nt, Homo sapiens
  misc_RNA (1)...(19): siRNA sense strand
aaguuuccaucaccagauu

SEQ ID NO: 231635 - RNA, 19 nt, Homo sapiens
  misc_RNA (1)...(19): siRNA sense strand
cagugaggaugaugucuac

SEQ ID NO: 231636 - RNA, 19 nt, Homo sapiens
  misc_RNA (1)...(19): siRNA sense strand
gucggcaccuacaguuuau

SEQ ID NO: 231637 - RNA, 19 nt, Homo sapiens
  misc_RNA (1)...(19): siRNA sense strand
ccggaucgcugaggaugau

SEQ ID NO: 231638 - RNA, 19 nt, Homo sapiens
  misc_RNA (1)...(19): siRNA sense strand
gaaagacaaucaacaguga

SEQ ID NO: 231639 - RNA, 19 nt, Homo sapiens
  misc_RNA (1)...(19): siRNA sense strand
gcacacagauuccacauca

SEQ ID NO: 231640 - RNA, 19 nt, Homo sapiens
  misc_RNA (1)...(19): siRNA sense strand
gcaagaagcuacaugaauc

SEQ ID NO: 231641 - RNA, 19 nt, Homo sapiens
  misc_RNA (1)...(19): siRNA sense strand
gcacagaaaucauguugga

SEQ ID NO: 231642 - RNA, 19 nt, Homo sapiens
  misc_RNA (1)...(19): siRNA sense strand
ccagagaaauucaacagua

SEQ ID NO: 231643 - RNA, 19 nt, Homo sapiens
  misc_RNA (1)...(19): siRNA sense strand
uaaaugugcuucucaucua

SEQ ID NO: 231644 - RNA, 19 nt, Homo sapiens
  misc_RNA (1)...(19): siRNA sense strand
gaaauugacuaugaucaug

SEQ ID NO: 231645 - RNA, 19 nt, Homo sapiens
  misc_RNA (1)...(19): siRNA sense strand
gagaacgaauuuacagaaa

SEQ ID NO: 231646 - RNA, 19 nt, Homo sapiens
  misc_RNA (1)...(19): siRNA sense strand
gcaacaaguuuccucauuc

SEQ ID NO: 231647 - RNA, 19 nt, Homo sapiens
  misc_RNA (1)...(19): siRNA sense strand
gaagguaacugcccaacca

SEQ ID NO: 231648 - RNA, 19 nt, Homo sapiens
  misc_RNA (1)...(19): siRNA sense strand
uggaagaaauugacuauga

SEQ ID NO: 231649 - RNA, 19 nt, Homo sapiens
  misc_RNA (1)...(19): siRNA sense strand
uaacaaaccugccuauugc

SEQ ID NO: 231650 - RNA, 19 nt, Homo sapiens
  misc_RNA (1)...(19): siRNA sense strand
ggaagaaauugacuaugau

SEQ ID NO: 231651 - RNA, 19 nt, Homo sapiens
  misc_RNA (1)...(19): siRNA sense strand
ucacugaacuuaauccaau

SEQ ID NO: 231652 - RNA, 19 nt, Homo sapiens
  misc_RNA (1)...(19): siRNA sense strand
ugacaaagaugagaaagga

SEQ ID NO: 231653 - RNA, 19 nt, Homo sapiens
  misc_RNA (1)...(19): siRNA sense strand
gaggaagaccugaggauaa

SEQ ID NO: 231654 - RNA, 19 nt, Homo sapiens
  misc_RNA (1)...(19): siRNA sense strand
caaacaaagugauugacaa

SEQ ID NO: 231655 - RNA, 19 nt, Homo sapiens
  misc_RNA (1)...(19): siRNA sense strand
ccacaaaacuguuaaaugu

SEQ ID NO: 231656 - RNA, 19 nt, Homo sapiens
  misc_RNA (1)...(19): siRNA sense strand
gaguuuauguuucgccuuu

SEQ ID NO: 231657 - RNA, 19 nt, Homo sapiens
  misc_RNA (1)...(19): siRNA sense strand
ggaugucacugaacuuaau

SEQ ID NO: 231658 - RNA, 19 nt, Homo sapiens
  misc_RNA (1)...(19): siRNA sense strand
ugacaggacugcauugugu

SEQ ID NO: 231659 - RNA, 19 nt, Homo sapiens
  misc_RNA (1)...(19): siRNA sense strand
gcaccucccucuugcauca

SEQ ID NO: 231660 - RNA, 19 nt, Homo sapiens
  misc_RNA (1)...(19): siRNA sense strand
guaauggugugcuugcaaa

SEQ ID NO: 231661 - RNA, 19 nt, Homo sapiens
  misc_RNA (1)...(19): siRNA sense strand
gcaagucucugccaaugca

SEQ ID NO: 231662 - RNA, 19 nt, Homo sapiens
  misc_RNA (1)...(19): siRNA sense strand
acaaagugauugacaagaa

SEQ ID NO: 231663 - RNA, 19 nt, Homo sapiens
  misc_RNA (1)...(19): siRNA sense strand
aauagaaugugauggagua

SEQ ID NO: 231664 - RNA, 19 nt, Homo sapiens
  misc_RNA (1)...(19): siRNA sense strand
gagcaagucucugccaaug

SEQ ID NO: 231665 - RNA, 19 nt, Homo sapiens
  misc_RNA (1)...(19): siRNA sense strand
gaggauaagcuugaguuua

SEQ ID NO: 231666 - RNA, 19 nt, Homo sapiens
  misc_RNA (1)...(19): siRNA sense strand
gaaaauaucaucagucaga

SEQ ID NO: 231667 - RNA, 19 nt, Homo sapiens
  misc_RNA (1)...(19): siRNA sense strand
aaacaucucucuggaagga

SEQ ID NO: 231668 - RNA, 19 nt, Homo sapiens
  misc_RNA (1)...(19): siRNA sense strand
caaagugauugacaagaau

SEQ ID NO: 231669 - RNA, 19 nt, Homo sapiens
  misc_RNA (1)...(19): siRNA sense strand
gcaaguacacaguccauga

SEQ ID NO: 231670 - RNA, 19 nt, Homo sapiens
  misc_RNA (1)...(19): siRNA sense strand
gaaaugauggaagaaauug

SEQ ID NO: 231671 - RNA, 19 nt, Homo sapiens
  misc_RNA (1)...(19): siRNA sense strand
aaacaaggagaacgaauuu

SEQ ID NO: 231672 - RNA, 19 nt, Homo sapiens
  misc_RNA (1)...(19): siRNA sense strand
ccucagcccuucggaauuu

SEQ ID NO: 231673 - RNA, 19 nt, Homo sapiens
  misc_RNA (1)...(19): siRNA sense strand
ggagaacgaauuuacagaa

SEQ ID NO: 231674 - RNA, 19 nt, Homo sapiens
  misc_RNA (1)...(19): siRNA sense strand
caacaaguuuccucauucu

SEQ ID NO: 231675 - RNA, 19 nt, Homo sapiens
  misc_RNA (1)...(19): siRNA sense strand
guggaaguuugaagucaua

SEQ ID NO: 231676 - RNA, 19 nt, Homo sapiens
  misc_RNA (1)...(19): siRNA sense strand
guauaauccugaagggaaa

SEQ ID NO: 231677 - RNA, 19 nt, Homo sapiens
  misc_RNA (1)...(19): siRNA sense strand
gggaggagguuacgaaggu

SEQ ID NO: 231678 - RNA, 19 nt, Homo sapiens
  misc_RNA (1)...(19): siRNA sense strand
cagaucacacugcauaaua

SEQ ID NO: 231679 - RNA, 19 nt, Homo sapiens
  misc_RNA (1)...(19): siRNA sense strand
gaacuacuucuccugcaaa

SEQ ID NO: 231680 - RNA, 19 nt, Homo sapiens
  misc_RNA (1)...(19): siRNA sense strand
agaucacacugcauaauaa

SEQ ID NO: 231681 - RNA, 19 nt, Homo sapiens
  misc_RNA (1)...(19): siRNA sense strand
ggaaggaauugcuauuuug

SEQ ID NO: 231682 - RNA, 19 nt, Homo sapiens
  misc_RNA (1)...(19): siRNA sense strand
ggaaggagccauggagaug

SEQ ID NO: 231683 - RNA, 19 nt, Homo sapiens
  misc_RNA (1)...(19): siRNA sense strand
gaaugugacuguggaccuu

SEQ ID NO: 231684 - RNA, 19 nt, Homo sapiens
  misc_RNA (1)...(19): siRNA sense strand
ucacagaugccaaagaguu

SEQ ID NO: 231685 - RNA, 19 nt, Homo sapiens
  misc_RNA (1)...(19): siRNA sense strand
ucagucagaugaugcaugu

SEQ ID NO: 231686 - RNA, 19 nt, Homo sapiens
  misc_RNA (1)...(19): siRNA sense strand
acgaagccaucgacgaaua

SEQ ID NO: 231687 - RNA, 19 nt, Homo sapiens
  misc_RNA (1)...(19): siRNA sense strand
cagagaaauucaacaguag

SEQ ID NO: 231688 - RNA, 19 nt, Homo sapiens
  misc_RNA (1)...(19): siRNA sense strand
ugacaacgauuccacuucu

SEQ ID NO: 231689 - RNA, 19 nt, Homo sapiens
  misc_RNA (1)...(19): siRNA sense strand
uuaacaaaccugccuauug

SEQ ID NO: 231690 - RNA, 19 nt, Homo sapiens
  misc_RNA (1)...(19): siRNA sense strand
aaaauaacgugaaggauga

SEQ ID NO: 231691 - RNA, 19 nt, Homo sapiens
  misc_RNA (1)...(19): siRNA sense strand
aaacagcacagaaaucaug

SEQ ID NO: 231692 - RNA, 19 nt, Homo sapiens
  misc_RNA (1)...(19): siRNA sense strand
gaucacacugcauaauaaa

SEQ ID NO: 231693 - RNA, 19 nt, Homo sapiens
  misc_RNA (1)...(19): siRNA sense strand
gaagaauuccaugguaaug

SEQ ID NO: 231694 - RNA, 19 nt, Homo sapiens
  misc_RNA (1)...(19): siRNA sense strand
aaaugugcuucucaucuaa

SEQ ID NO: 231695 - RNA, 19 nt, Homo sapiens
  misc_RNA (1)...(19): siRNA sense strand
aaggaacacugaugucaug

SEQ ID NO: 231696 - RNA, 19 nt, Homo sapiens
  misc_RNA (1)...(19): siRNA sense strand
ggucugagaaugaauaaag

SEQ ID NO: 231697 - RNA, 19 nt, Homo sapiens
  misc_RNA (1)...(19): siRNA sense strand
gagaaauucaacaguagaa

SEQ ID NO: 231698 - RNA, 19 nt, Homo sapiens
  misc_RNA (1)...(19): siRNA sense strand
gaaaacagcacagaaauca

SEQ ID NO: 231699 - RNA, 19 nt, Homo sapiens
  misc_RNA (1)...(19): siRNA sense strand
ugucagaucacacugcaua

SEQ ID NO: 231700 - RNA, 19 nt, Homo sapiens
  misc_RNA (1)...(19): siRNA sense strand
ugacuaugaucaugaugga

SEQ ID NO: 231701 - RNA, 19 nt, Homo sapiens
  misc_RNA (1)...(19): siRNA sense strand
gauggaagaaauugacuau

SEQ ID NO: 231702 - RNA, 19 nt, Homo sapiens
  misc_RNA (1)...(19): siRNA sense strand
uugaagaauuccaugguaa

SEQ ID NO: 231703 - RNA, 19 nt, Homo sapiens
  misc_RNA (1)...(19): siRNA sense strand
gaagaaauugacuaugauc

SEQ ID NO: 231704 - RNA, 19 nt, Homo sapiens
  misc_RNA (1)...(19): siRNA sense strand
agaaauagaaugugaugga

SEQ ID NO: 231705 - RNA, 19 nt, Homo sapiens
  misc_RNA (1)...(19): siRNA sense strand
gaguuuggcacaucugaaa

SEQ ID NO: 231706 - RNA, 19 nt, Homo sapiens
  misc_RNA (1)...(19): siRNA sense strand
caaaagugguggaaaacaa

SEQ ID NO: 231707 - RNA, 19 nt, Homo sapiens
  misc_RNA (1)...(19): siRNA sense strand
gcugaguauucuacaaaga

SEQ ID NO: 231708 - RNA, 19 nt, Homo sapiens
  misc_RNA (1)...(19): siRNA sense strand
aacaaucuguccaguggua

SEQ ID NO: 231709 - RNA, 19 nt, Homo sapiens
  misc_RNA (1)...(19): siRNA sense strand
caaguuuccucauucuagu

SEQ ID NO: 231710 - RNA, 19 nt, Homo sapiens
  misc_RNA (1)...(19): siRNA sense strand
acaguagaaugaagaacaa

SEQ ID NO: 231711 - RNA, 19 nt, Homo sapiens
  misc_RNA (1)...(19): siRNA sense strand
gugagaaucugaugaaaau

SEQ ID NO: 231712 - RNA, 19 nt, Homo sapiens
  misc_RNA (1)...(19): siRNA sense strand
gaaggugagaaucugauga

SEQ ID NO: 231713 - RNA, 19 nt, Homo sapiens
  misc_RNA (1)...(19): siRNA sense strand
cuugaagaauuccauggua

SEQ ID NO: 231714 - RNA, 19 nt, Homo sapiens
  misc_RNA (1)...(19): siRNA sense strand
gaccugaggauaagcuuga

SEQ ID NO: 231715 - RNA, 19 nt, Homo sapiens
  misc_RNA (1)...(19): siRNA sense strand
gaaguuugcaagucaagau

SEQ ID NO: 231716 - RNA, 19 nt, Homo sapiens
  misc_RNA (1)...(19): siRNA sense strand
ggaguacagauagauuuaa

SEQ ID NO: 231717 - RNA, 19 nt, Homo sapiens
  misc_RNA (1)...(19): siRNA sense strand
cgucagguuuacagucuuu

SEQ ID NO: 231718 - RNA, 19 nt, Homo sapiens
  misc_RNA (1)...(19): siRNA sense strand
ccaacucuguuacuguaga

SEQ ID NO: 231719 - RNA, 19 nt, Homo sapiens
  misc_RNA (1)...(19): siRNA sense strand
cagcacguguggcgacuga

SEQ ID NO: 231720 - RNA, 19 nt, Homo sapiens
  misc_RNA (1)...(19): siRNA sense strand
uaagccugcucuccuauca

SEQ ID NO: 231721 - RNA, 19 nt, Homo sapiens
  misc_RNA (1)...(19): siRNA sense strand
cgucacagaugccaaagag

SEQ ID NO: 231722 - RNA, 19 nt, Homo sapiens
  misc_RNA (1)...(19): siRNA sense strand
agacgaagccaucgacgaa

SEQ ID NO: 231723 - RNA, 19 nt, Homo sapiens
  misc_RNA (1)...(19): siRNA sense strand
guagaaauagaaugugaug

SEQ ID NO: 231724 - RNA, 19 nt, Homo sapiens
  misc_RNA (1)...(19): siRNA sense strand
ggaccaaugccaggguuaa

SEQ ID NO: 231725 - RNA, 19 nt, Homo sapiens
  misc_RNA (1)...(19): siRNA sense strand
ucacacugcauaauaaaug

SEQ ID NO: 231726 - RNA, 19 nt, Homo sapiens
  misc_RNA (1)...(19): siRNA sense strand
cugaugucaugcaccauua

SEQ ID NO: 231727 - RNA, 19 nt, Homo sapiens
  misc_RNA (1)...(19): siRNA sense strand
uuaauccaauccuccauga

SEQ ID NO: 231728 - RNA, 19 nt, Homo sapiens
  misc_RNA (1)...(19): siRNA sense strand
cgaacuacuucuccugcaa

SEQ ID NO: 231729 - RNA, 19 nt, Homo sapiens
  misc_RNA (1)...(19): siRNA sense strand
gaauauaccaagcaugcau

SEQ ID NO: 231730 - RNA, 19 nt, Homo sapiens
  misc_RNA (1)...(19): siRNA sense strand
agccaacucuguuacugua

SEQ ID NO: 231731 - RNA, 19 nt, Homo sapiens
  misc_RNA (1)...(19): siRNA sense strand
gaagggaaacaagacauuc

SEQ ID NO: 231732 - RNA, 19 nt, Homo sapiens
  misc_RNA (1)...(19): siRNA sense strand
gacugaagcacuuuaacaa

SEQ ID NO: 231733 - RNA, 19 nt, Homo sapiens
  misc_RNA (1)...(19): siRNA sense strand
gcaucaagaccuaugugaa

SEQ ID NO: 231734 - RNA, 19 nt, Homo sapiens
  misc_RNA (1)...(19): siRNA sense strand
uggcaaugaucuagcaaga

SEQ ID NO: 231735 - RNA, 19 nt, Homo sapiens
  misc_RNA (1)...(19): siRNA sense strand
caaccaagugugauaagug

SEQ ID NO: 231736 - RNA, 19 nt, Homo sapiens
  misc_RNA (1)...(19): siRNA sense strand
agaccuaugugaaguccaa

SEQ ID NO: 231737 - RNA, 19 nt, Homo sapiens
  misc_RNA (1)...(19): siRNA sense strand
caagucaagaucucaguga

SEQ ID NO: 231738 - RNA, 19 nt, Homo sapiens
  misc_RNA (1)...(19): siRNA sense strand
gaaagacaaucaacaguga

SEQ ID NO: 231739 - RNA, 19 nt, Homo sapiens
  misc_RNA (1)...(19): siRNA sense strand
gcacacagauuccacauca

SEQ ID NO: 231740 - RNA, 19 nt, Homo sapiens
  misc_RNA (1)...(19): siRNA sense strand
gcaagaagcuacaugaauc

SEQ ID NO: 231741 - RNA, 19 nt, Homo sapiens
  misc_RNA (1)...(19): siRNA sense strand
gcacagaaaucauguugga

SEQ ID NO: 231742 - RNA, 19 nt, Homo sapiens
  misc_RNA (1)...(19): siRNA sense strand
ccagagaaauucaacagua

SEQ ID NO: 231743 - RNA, 19 nt, Homo sapiens
  misc_RNA (1)...(19): siRNA sense strand
uaaaugugcuucucaucua

SEQ ID NO: 231744 - RNA, 19 nt, Homo sapiens
  misc_RNA (1)...(19): siRNA sense strand
gaaauugacuaugaucaug

SEQ ID NO: 231745 - RNA, 19 nt, Homo sapiens
  misc_RNA (1)...(19): siRNA sense strand
gagaacgaauuuacagaaa

SEQ ID NO: 231746 - RNA, 19 nt, Homo sapiens
  misc_RNA (1)...(19): siRNA sense strand
gcaacaaguuuccucauuc

SEQ ID NO: 231747 - RNA, 19 nt, Homo sapiens
  misc_RNA (1)...(19): siRNA sense strand
gaagguaacugcccaacca

SEQ ID NO: 231748 - RNA, 19 nt, Homo sapiens
  misc_RNA (1)...(19): siRNA sense strand
uggaagaaauugacuauga

SEQ ID NO: 231749 - RNA, 19 nt, Homo sapiens
  misc_RNA (1)...(19): siRNA sense strand
uaacaaaccugccuauugc

SEQ ID NO: 231750 - RNA, 19 nt, Homo sapiens
  misc_RNA (1)...(19): siRNA sense strand
ggaagaaauugacuaugau

SEQ ID NO: 231751 - RNA, 19 nt, Homo sapiens
  misc_RNA (1)...(19): siRNA sense strand
ucacugaacuuaauccaau

SEQ ID NO: 231752 - RNA, 19 nt, Homo sapiens
  misc_RNA (1)...(19): siRNA sense strand
ugacaaagaugagaaagga

SEQ ID NO: 231753 - RNA, 19 nt, Homo sapiens
  misc_RNA (1)...(19): siRNA sense strand
gaggaagaccugaggauaa

SEQ ID NO: 231754 - RNA, 19 nt, Homo sapiens
  misc_RNA (1)...(19): siRNA sense strand
caaacaaagugauugacaa

SEQ ID NO: 231755 - RNA, 19 nt, Homo sapiens
  misc_RNA (1)...(19): siRNA sense strand
ccacaaaacuguuaaaugu

SEQ ID NO: 231756 - RNA, 19 nt, Homo sapiens
  misc_RNA (1)...(19): siRNA sense strand
gaguuuauguuucgccuuu

SEQ ID NO: 231757 - RNA, 19 nt, Homo sapiens
  misc_RNA (1)...(19): siRNA sense strand
ggaugucacugaacuuaau

SEQ ID NO: 231758 - RNA, 19 nt, Homo sapiens
  misc_RNA (1)...(19): siRNA sense strand
ugacaggacugcauugugu

SEQ ID NO: 231759 - RNA, 19 nt, Homo sapiens
  misc_RNA (1)...(19): siRNA sense strand
gcaccucccucuugcauca

SEQ ID NO: 231760 - RNA, 19 nt, Homo sapiens
  misc_RNA (1)...(19): siRNA sense strand
guaauggugugcuugcaaa

SEQ ID NO: 231761 - RNA, 19 nt, Homo sapiens
  misc_RNA (1)...(19): siRNA sense strand
gcaagucucugccaaugca

SEQ ID NO: 231762 - RNA, 19 nt, Homo sapiens
  misc_RNA (1)...(19): siRNA sense strand
acaaagugauugacaagaa

SEQ ID NO: 231763 - RNA, 19 nt, Homo sapiens
  misc_RNA (1)...(19): siRNA sense strand
aauagaaugugauggagua

SEQ ID NO: 231764 - RNA, 19 nt, Homo sapiens
  misc_RNA (1)...(19): siRNA sense strand
gagcaagucucugccaaug

SEQ ID NO: 231765 - RNA, 19 nt, Homo sapiens
  misc_RNA (1)...(19): siRNA sense strand
gaggauaagcuugaguuua

SEQ ID NO: 231766 - RNA, 19 nt, Homo sapiens
  misc_RNA (1)...(19): siRNA sense strand
gaaaauaucaucagucaga

SEQ ID NO: 231767 - RNA, 19 nt, Homo sapiens
  misc_RNA (1)...(19): siRNA sense strand
aaacaucucucuggaagga

SEQ ID NO: 231768 - RNA, 19 nt, Homo sapiens
  misc_RNA (1)...(19): siRNA sense strand
caaagugauugacaagaau

SEQ ID NO: 231769 - RNA, 19 nt, Homo sapiens
  misc_RNA (1)...(19): siRNA sense strand
gcaaguacacaguccauga

SEQ ID NO: 231770 - RNA, 19 nt, Homo sapiens
  misc_RNA (1)...(19): siRNA sense strand
gaaaugauggaagaaauug

SEQ ID NO: 231771 - RNA, 19 nt, Homo sapiens
  misc_RNA (1)...(19): siRNA sense strand
aaacaaggagaacgaauuu

SEQ ID NO: 231772 - RNA, 19 nt, Homo sapiens
  misc_RNA (1)...(19): siRNA sense strand
ccucagcccuucggaauuu

SEQ ID NO: 231773 - RNA, 19 nt, Homo sapiens
  misc_RNA (1)...(19): siRNA sense strand
ggagaacgaauuuacagaa

SEQ ID NO: 231774 - RNA, 19 nt, Homo sapiens
  misc_RNA (1)...(19): siRNA sense strand
caacaaguuuccucauucu

SEQ ID NO: 231775 - RNA, 19 nt, Homo sapiens
  misc_RNA (1)...(19): siRNA sense strand
guggaaguuugaagucaua

SEQ ID NO: 231776 - RNA, 19 nt, Homo sapiens
  misc_RNA (1)...(19): siRNA sense strand
guauaauccugaagggaaa

SEQ ID NO: 231777 - RNA, 19 nt, Homo sapiens
  misc_RNA (1)...(19): siRNA sense strand
gggaggagguuacgaaggu

SEQ ID NO: 231778 - RNA, 19 nt, Homo sapiens
  misc_RNA (1)...(19): siRNA sense strand
cagaucacacugcauaaua

SEQ ID NO: 231779 - RNA, 19 nt, Homo sapiens
  misc_RNA (1)...(19): siRNA sense strand
gaacuacuucuccugcaaa

SEQ ID NO: 231780 - RNA, 19 nt, Homo sapiens
  misc_RNA (1)...(19): siRNA sense strand
agaucacacugcauaauaa

SEQ ID NO: 231781 - RNA, 19 nt, Homo sapiens
  misc_RNA (1)...(19): siRNA sense strand
ggaaggaauugcuauuuug

SEQ ID NO: 231782 - RNA, 19 nt, Homo sapiens
  misc_RNA (1)...(19): siRNA sense strand
ggaaggagccauggagaug

SEQ ID NO: 231783 - RNA, 19 nt, Homo sapiens
  misc_RNA (1)...(19): siRNA sense strand
gaaugugacuguggaccuu

SEQ ID NO: 231784 - RNA, 19 nt, Homo sapiens
  misc_RNA (1)...(19): siRNA sense strand
ucacagaugccaaagaguu

SEQ ID NO: 231785 - RNA, 19 nt, Homo sapiens
  misc_RNA (1)...(19): siRNA sense strand
ucagucagaugaugcaugu

SEQ ID NO: 231786 - RNA, 19 nt, Homo sapiens
  misc_RNA (1)...(19): siRNA sense strand
acgaagccaucgacgaaua

SEQ ID NO: 231787 - RNA, 19 nt, Homo sapiens
  misc_RNA (1)...(19): siRNA sense strand
cagagaaauucaacaguag

SEQ ID NO: 231788 - RNA, 19 nt, Homo sapiens
  misc_RNA (1)...(19): siRNA sense strand
ugacaacgauuccacuucu

SEQ ID NO: 231789 - RNA, 19 nt, Homo sapiens
  misc_RNA (1)...(19): siRNA sense strand
uuaacaaaccugccuauug

SEQ ID NO: 231790 - RNA, 19 nt, Homo sapiens
  misc_RNA (1)...(19): siRNA sense strand
aaaauaacgugaaggauga

SEQ ID NO: 231791 - RNA, 19 nt, Homo sapiens
  misc_RNA (1)...(19): siRNA sense strand
aaacagcacagaaaucaug

SEQ ID NO: 231792 - RNA, 19 nt, Homo sapiens
  misc_RNA (1)...(19): siRNA sense strand
gaucacacugcauaauaaa

SEQ ID NO: 231793 - RNA, 19 nt, Homo sapiens
  misc_RNA (1)...(19): siRNA sense strand
gaagaauuccaugguaaug

SEQ ID NO: 231794 - RNA, 19 nt, Homo sapiens
  misc_RNA (1)...(19): siRNA sense strand
aaaugugcuucucaucuaa

SEQ ID NO: 231795 - RNA, 19 nt, Homo sapiens
  misc_RNA (1)...(19): siRNA sense strand
aaggaacacugaugucaug

SEQ ID NO: 231796 - RNA, 19 nt, Homo sapiens
  misc_RNA (1)...(19): siRNA sense strand
ggucugagaaugaauaaag

SEQ ID NO: 231797 - RNA, 19 nt, Homo sapiens
  misc_RNA (1)...(19): siRNA sense strand
gagaaauucaacaguagaa

SEQ ID NO: 231798 - RNA, 19 nt, Homo sapiens
  misc_RNA (1)...(19): siRNA sense strand
gaaaacagcacagaaauca

SEQ ID NO: 231799 - RNA, 19 nt, Homo sapiens
  misc_RNA (1)...(19): siRNA sense strand
ugucagaucacacugcaua

SEQ ID NO: 231800 - RNA, 19 nt, Homo sapiens
  misc_RNA (1)...(19): siRNA sense strand
ugacuaugaucaugaugga

SEQ ID NO: 231801 - RNA, 19 nt, Homo sapiens
  misc_RNA (1)...(19): siRNA sense strand
gauggaagaaauugacuau

SEQ ID NO: 231802 - RNA, 19 nt, Homo sapiens
  misc_RNA (1)...(19): siRNA sense strand
uugaagaauuccaugguaa

SEQ ID NO: 231803 - RNA, 19 nt, Homo sapiens
  misc_RNA (1)...(19): siRNA sense strand
gaagaaauugacuaugauc

SEQ ID NO: 231804 - RNA, 19 nt, Homo sapiens
  misc_RNA (1)...(19): siRNA sense strand
agaaauagaaugugaugga

SEQ ID NO: 231805 - RNA, 19 nt, Homo sapiens
  misc_RNA (1)...(19): siRNA sense strand
gaguuuggcacaucugaaa

SEQ ID NO: 231806 - RNA, 19 nt, Homo sapiens
  misc_RNA (1)...(19): siRNA sense strand
caaaagugguggaaaacaa

SEQ ID NO: 231807 - RNA, 19 nt, Homo sapiens
  misc_RNA (1)...(19): siRNA sense strand
gcugaguauucuacaaaga

SEQ ID NO: 231808 - RNA, 19 nt, Homo sapiens
  misc_RNA (1)...(19): siRNA sense strand
aacaaucuguccaguggua

SEQ ID NO: 231809 - RNA, 19 nt, Homo sapiens
  misc_RNA (1)...(19): siRNA sense strand
caaguuuccucauucuagu

SEQ ID NO: 231810 - RNA, 19 nt, Homo sapiens
  misc_RNA (1)...(19): siRNA sense strand
acaguagaaugaagaacaa

SEQ ID NO: 231811 - RNA, 19 nt, Homo sapiens
  misc_RNA (1)...(19): siRNA sense strand
gugagaaucugaugaaaau

SEQ ID NO: 231812 - RNA, 19 nt, Homo sapiens
  misc_RNA (1)...(19): siRNA sense strand
gaaggugagaaucugauga

SEQ ID NO: 231813 - RNA, 19 nt, Homo sapiens
  misc_RNA (1)...(19): siRNA sense strand
cuugaagaauuccauggua

SEQ ID NO: 231814 - RNA, 19 nt, Homo sapiens
  misc_RNA (1)...(19): siRNA sense strand
gaccugaggauaagcuuga

SEQ ID NO: 231815 - RNA, 19 nt, Homo sapiens
  misc_RNA (1)...(19): siRNA sense strand
gaaguuugcaagucaagau

SEQ ID NO: 231816 - RNA, 19 nt, Homo sapiens
  misc_RNA (1)...(19): siRNA sense strand
ggaguacagauagauuuaa

SEQ ID NO: 231817 - RNA, 19 nt, Homo sapiens
  misc_RNA (1)...(19): siRNA sense strand
cgucagguuuacagucuuu

SEQ ID NO: 231818 - RNA, 19 nt, Homo sapiens
  misc_RNA (1)...(19): siRNA sense strand
ccaacucuguuacuguaga

SEQ ID NO: 231819 - RNA, 19 nt, Homo sapiens
  misc_RNA (1)...(19): siRNA sense strand
cagcacguguggcgacuga

SEQ ID NO: 231820 - RNA, 19 nt, Homo sapiens
  misc_RNA (1)...(19): siRNA sense strand
uaagccugcucuccuauca

SEQ ID NO: 231821 - RNA, 19 nt, Homo sapiens
  misc_RNA (1)...(19): siRNA sense strand
cgucacagaugccaaagag

SEQ ID NO: 231822 - RNA, 19 nt, Homo sapiens
  misc_RNA (1)...(19): siRNA sense strand
agacgaagccaucgacgaa

SEQ ID NO: 231823 - RNA, 19 nt, Homo sapiens
  misc_RNA (1)...(19): siRNA sense strand
guagaaauagaaugugaug

SEQ ID NO: 231824 - RNA, 19 nt, Homo sapiens
  misc_RNA (1)...(19): siRNA sense strand
ggaccaaugccaggguuaa

SEQ ID NO: 231825 - RNA, 19 nt, Homo sapiens
  misc_RNA (1)...(19): siRNA sense strand
ucacacugcauaauaaaug

SEQ ID NO: 231826 - RNA, 19 nt, Homo sapiens
  misc_RNA (1)...(19): siRNA sense strand
cugaugucaugcaccauua

SEQ ID NO: 231827 - RNA, 19 nt, Homo sapiens
  misc_RNA (1)...(19): siRNA sense strand
uuaauccaauccuccauga

SEQ ID NO: 231828 - RNA, 19 nt, Homo sapiens
  misc_RNA (1)...(19): siRNA sense strand
cgaacuacuucuccugcaa

SEQ ID NO: 231829 - RNA, 19 nt, Homo sapiens
  misc_RNA (1)...(19): siRNA sense strand
gaauauaccaagcaugcau

SEQ ID NO: 231830 - RNA, 19 nt, Homo sapiens
  misc_RNA (1)...(19): siRNA sense strand
agccaacucuguuacugua

SEQ ID NO: 231831 - RNA, 19 nt, Homo sapiens
  misc_RNA (1)...(19): siRNA sense strand
gaagggaaacaagacauuc

SEQ ID NO: 231832 - RNA, 19 nt, Homo sapiens
  misc_RNA (1)...(19): siRNA sense strand
gacugaagcacuuuaacaa

SEQ ID NO: 231833 - RNA, 19 nt, Homo sapiens
  misc_RNA (1)...(19): siRNA sense strand
gcaucaagaccuaugugaa

SEQ ID NO: 231834 - RNA, 19 nt, Homo sapiens
  misc_RNA (1)...(19): siRNA sense strand
uggcaaugaucuagcaaga

SEQ ID NO: 231835 - RNA, 19 nt, Homo sapiens
  misc_RNA (1)...(19): siRNA sense strand
caaccaagugugauaagug

SEQ ID NO: 231836 - RNA, 19 nt, Homo sapiens
  misc_RNA (1)...(19): siRNA sense strand
agaccuaugugaaguccaa

SEQ ID NO: 231837 - RNA, 19 nt, Homo sapiens
  misc_RNA (1)...(19): siRNA sense strand
caagucaagaucucaguga

SEQ ID NO: 231838 - RNA, 19 nt, Homo sapiens
  misc_RNA (1)...(19): siRNA sense strand
cgugaaagcugguggaaug

SEQ ID NO: 231839 - RNA, 19 nt, Homo sapiens
  misc_RNA (1)...(19): siRNA sense strand
agacaaggaugaccaggaa

SEQ ID NO: 231840 - RNA, 19 nt, Homo sapiens
  misc_RNA (1)...(19): siRNA sense strand
aagggaaacuagagacuaa

SEQ ID NO: 231841 - RNA, 19 nt, Homo sapiens
  misc_RNA (1)...(19): siRNA sense strand
gaagggaaacuagagacua

SEQ ID NO: 231842 - RNA, 19 nt, Homo sapiens
  misc_RNA (1)...(19): siRNA sense strand
gaaugcgaauugugcagaa

SEQ ID NO: 231843 - RNA, 19 nt, Homo sapiens
  misc_RNA (1)...(19): siRNA sense strand
gcagaaacacccacauaca

SEQ ID NO: 231844 - RNA, 19 nt, Homo sapiens
  misc_RNA (1)...(19): siRNA sense strand
gugcagaaacacccacaua

SEQ ID NO: 231845 - RNA, 19 nt, Homo sapiens
  misc_RNA (1)...(19): siRNA sense strand
ccaaagaagagaaagacaa

SEQ ID NO: 231846 - RNA, 19 nt, Homo sapiens
  misc_RNA (1)...(19): siRNA sense strand
caaagaagagaaagacaag

SEQ ID NO: 231847 - RNA, 19 nt, Homo sapiens
  misc_RNA (1)...(19): siRNA sense strand
caggagacaccaaagaaga

SEQ ID NO: 231848 - RNA, 19 nt, Homo sapiens
  misc_RNA (1)...(19): siRNA sense strand
gaaacuagagacuaaagcu

SEQ ID NO: 231849 - RNA, 19 nt, Homo sapiens
  misc_RNA (1)...(19): siRNA sense strand
gcugguggaaugcgaauug

SEQ ID NO: 231850 - RNA, 19 nt, Homo sapiens
  misc_RNA (1)...(19): siRNA sense strand
ggagacaccaaagaagaga

SEQ ID NO: 231851 - RNA, 19 nt, Homo sapiens
  misc_RNA (1)...(19): siRNA sense strand
caccuaaacccacuguguu

SEQ ID NO: 231852 - RNA, 19 nt, Homo sapiens
  misc_RNA (1)...(19): siRNA sense strand
ccaccuaaacccacugugu

SEQ ID NO: 231853 - RNA, 19 nt, Homo sapiens
  misc_RNA (1)...(19): siRNA sense strand
uaaacccacuguguucauc

SEQ ID NO: 231854 - RNA, 19 nt, Homo sapiens
  misc_RNA (1)...(19): siRNA sense strand
cagaaacacccacauacag

SEQ ID NO: 231855 - RNA, 19 nt, Homo sapiens
  misc_RNA (1)...(19): siRNA sense strand
aagagaaagacaaggauga

SEQ ID NO: 231856 - RNA, 19 nt, Homo sapiens
  misc_RNA (1)...(19): siRNA sense strand
aagaagagaaagacaagga

SEQ ID NO: 231857 - RNA, 19 nt, Homo sapiens
  misc_RNA (1)...(19): siRNA sense strand
uacaggagacaccaaagaa

SEQ ID NO: 231858 - RNA, 19 nt, Homo sapiens
  misc_RNA (1)...(19): siRNA sense strand
agacaccaaagaagagaaa

SEQ ID NO: 231859 - RNA, 19 nt, Homo sapiens
  misc_RNA (1)...(19): siRNA sense strand
acaaggaugaccaggaaug

SEQ ID NO: 231860 - RNA, 19 nt, Homo sapiens
  misc_RNA (1)...(19): siRNA sense strand
gggaaacuagagacuaaag

SEQ ID NO: 231861 - RNA, 19 nt, Homo sapiens
  misc_RNA (1)...(19): siRNA sense strand
auacaggagacaccaaaga

SEQ ID NO: 231862 - RNA, 19 nt, Homo sapiens
  misc_RNA (1)...(19): siRNA sense strand
caagaacccagcacaucca

SEQ ID NO: 231863 - RNA, 19 nt, Homo sapiens
  misc_RNA (1)...(19): siRNA sense strand
gaaagccccaguccaccua

SEQ ID NO: 231864 - RNA, 19 nt, Homo sapiens
  misc_RNA (1)...(19): siRNA sense strand
ccagcagccacgcaaguga

SEQ ID NO: 231865 - RNA, 19 nt, Homo sapiens
  misc_RNA (1)...(19): siRNA sense strand
ggugguaucuugucuguuu

SEQ ID NO: 231866 - RNA, 19 nt, Homo sapiens
  misc_RNA (1)...(19): siRNA sense strand
gauaucaguuccauguaua

SEQ ID NO: 231867 - RNA, 19 nt, Homo sapiens
  misc_RNA (1)...(19): siRNA sense strand
ggauuuguuucguuuguua

SEQ ID NO: 231868 - RNA, 19 nt, Homo sapiens
  misc_RNA (1)...(19): siRNA sense strand
gauaucaguugccuguaua

SEQ ID NO: 231869 - RNA, 19 nt, Homo sapiens
  misc_RNA (1)...(19): siRNA sense strand
gauaucaguugccuguaua

SEQ ID NO: 231870 - RNA, 19 nt, Homo sapiens
  misc_RNA (1)...(19): siRNA sense strand
gauaucaguugccuguaua

SEQ ID NO: 231871 - RNA, 19 nt, Homo sapiens
  misc_RNA (1)...(19): siRNA sense strand
gauaucaguugccuguaua

SEQ ID NO: 231872 - RNA, 19 nt, Homo sapiens
  misc_RNA (1)...(19): siRNA sense strand
gauaucaguugccuguaua

SEQ ID NO: 231873 - RNA, 19 nt, Homo sapiens
  misc_RNA (1)...(19): siRNA sense strand
gauaguaggaucacagaua

SEQ ID NO: 231874 - RNA, 19 nt, Homo sapiens
  misc_RNA (1)...(19): siRNA sense strand
ggauaucaguuccauguau

SEQ ID NO: 231875 - RNA, 19 nt, Homo sapiens
  misc_RNA (1)...(19): siRNA sense strand
gaugucaguugcuuguaua

SEQ ID NO: 231876 - RNA, 19 nt, Homo sapiens
  misc_RNA (1)...(19): siRNA sense strand
gucaguugcuuguauauaa

SEQ ID NO: 231877 - RNA, 19 nt, Homo sapiens
  misc_RNA (1)...(19): siRNA sense strand
ggauaucaguugccuguau

SEQ ID NO: 231878 - RNA, 19 nt, Homo sapiens
  misc_RNA (1)...(19): siRNA sense strand
ggauaucaguugccuguau

SEQ ID NO: 231879 - RNA, 19 nt, Homo sapiens
  misc_RNA (1)...(19): siRNA sense strand
ggauaucaguugccuguau

SEQ ID NO: 231880 - RNA, 19 nt, Homo sapiens
  misc_RNA (1)...(19): siRNA sense strand
ggauaucaguugccuguau

SEQ ID NO: 231881 - RNA, 19 nt, Homo sapiens
  misc_RNA (1)...(19): siRNA sense strand
ggauaucaguugccuguau

SEQ ID NO: 231882 - RNA, 19 nt, Homo sapiens
  misc_RNA (1)...(19): siRNA sense strand
gaacugguguguccaaagg

SEQ ID NO: 231883 - RNA, 19 nt, Homo sapiens
  misc_RNA (1)...(19): siRNA sense strand
gagcaaaggagaaaucugu

SEQ ID NO: 231884 - RNA, 19 nt, Homo sapiens
  misc_RNA (1)...(19): siRNA sense strand
ggaugucaguugcuuguau

SEQ ID NO: 231885 - RNA, 19 nt, Homo sapiens
  misc_RNA (1)...(19): siRNA sense strand
gcagccacguccuuuggua

SEQ ID NO: 231886 - RNA, 19 nt, Homo sapiens
  misc_RNA (1)...(19): siRNA sense strand
ggaugaaacugagauugga

SEQ ID NO: 231887 - RNA, 19 nt, Homo sapiens
  misc_RNA (1)...(19): siRNA sense strand
ccacguccuuugguaguua

SEQ ID NO: 231888 - RNA, 19 nt, Homo sapiens
  misc_RNA (1)...(19): siRNA sense strand
ucaguugccuguauauaau

SEQ ID NO: 231889 - RNA, 19 nt, Homo sapiens
  misc_RNA (1)...(19): siRNA sense strand
ucaguugccuguauauaau

SEQ ID NO: 231890 - RNA, 19 nt, Homo sapiens
  misc_RNA (1)...(19): siRNA sense strand
ucaguugccuguauauaau

SEQ ID NO: 231891 - RNA, 19 nt, Homo sapiens
  misc_RNA (1)...(19): siRNA sense strand
ucaguugccuguauauaau

SEQ ID NO: 231892 - RNA, 19 nt, Homo sapiens
  misc_RNA (1)...(19): siRNA sense strand
ucaguugccuguauauaau

SEQ ID NO: 231893 - RNA, 19 nt, Homo sapiens
  misc_RNA (1)...(19): siRNA sense strand
ucaggucacugcuggauau

SEQ ID NO: 231894 - RNA, 19 nt, Homo sapiens
  misc_RNA (1)...(19): siRNA sense strand
cagauacauuuccauggua

SEQ ID NO: 231895 - RNA, 19 nt, Homo sapiens
  misc_RNA (1)...(19): siRNA sense strand
gaucacagauacauuucca

SEQ ID NO: 231896 - RNA, 19 nt, Homo sapiens
  misc_RNA (1)...(19): siRNA sense strand
gcuauggauuuguuucguu

SEQ ID NO: 231897 - RNA, 19 nt, Homo sapiens
  misc_RNA (1)...(19): siRNA sense strand
gaccgaagcauacaaaugg

SEQ ID NO: 231898 - RNA, 19 nt, Homo sapiens
  misc_RNA (1)...(19): siRNA sense strand
ggaccgaagcauacaaaug

SEQ ID NO: 231899 - RNA, 19 nt, Homo sapiens
  misc_RNA (1)...(19): siRNA sense strand
uacaaauggugguaucuug

SEQ ID NO: 231900 - RNA, 19 nt, Homo sapiens
  misc_RNA (1)...(19): siRNA sense strand
gugaaagaagugaagauaa

SEQ ID NO: 231901 - RNA, 19 nt, Homo sapiens
  misc_RNA (1)...(19): siRNA sense strand
ucaguuccauguauacaau

SEQ ID NO: 231902 - RNA, 19 nt, Homo sapiens
  misc_RNA (1)...(19): siRNA sense strand
gaaagaagugaagauaauc

SEQ ID NO: 231903 - RNA, 19 nt, Homo sapiens
  misc_RNA (1)...(19): siRNA sense strand
cuauggauuuguuucguuu

SEQ ID NO: 231904 - RNA, 19 nt, Homo sapiens
  misc_RNA (1)...(19): siRNA sense strand
uauccaaguucaccauuuc

SEQ ID NO: 231905 - RNA, 19 nt, Homo sapiens
  misc_RNA (1)...(19): siRNA sense strand
uauccaaguucaccauuuc

SEQ ID NO: 231906 - RNA, 19 nt, Homo sapiens
  misc_RNA (1)...(19): siRNA sense strand
uauccaaguucaccauuuc

SEQ ID NO: 231907 - RNA, 19 nt, Homo sapiens
  misc_RNA (1)...(19): siRNA sense strand
uauccaaguucaccauuuc

SEQ ID NO: 231908 - RNA, 19 nt, Homo sapiens
  misc_RNA (1)...(19): siRNA sense strand
uaggaucacagauacauuu

SEQ ID NO: 231909 - RNA, 19 nt, Homo sapiens
  misc_RNA (1)...(19): siRNA sense strand
guuaugugcucgucaugug

SEQ ID NO: 231910 - RNA, 19 nt, Homo sapiens
  misc_RNA (1)...(19): siRNA sense strand
uaucagccauuuccugcuu

SEQ ID NO: 231911 - RNA, 19 nt, Homo sapiens
  misc_RNA (1)...(19): siRNA sense strand
acagauacauuuccauggu

SEQ ID NO: 231912 - RNA, 19 nt, Homo sapiens
  misc_RNA (1)...(19): siRNA sense strand
agauacauuuccaugguaa

SEQ ID NO: 231913 - RNA, 19 nt, Homo sapiens
  misc_RNA (1)...(19): siRNA sense strand
uguauacaauuaccagaug

SEQ ID NO: 231914 - RNA, 19 nt, Homo sapiens
  misc_RNA (1)...(19): siRNA sense strand
uaucuugucuguuuaaucc

SEQ ID NO: 231915 - RNA, 19 nt, Homo sapiens
  misc_RNA (1)...(19): siRNA sense strand
gguguuaccagaaggcaaa

SEQ ID NO: 231916 - RNA, 19 nt, Homo sapiens
  misc_RNA (1)...(19): siRNA sense strand
aagauaaucacgaaucgaa

SEQ ID NO: 231917 - RNA, 19 nt, Homo sapiens
  misc_RNA (1)...(19): siRNA sense strand
gugguaucuugucuguuua

SEQ ID NO: 231918 - RNA, 19 nt, Homo sapiens
  misc_RNA (1)...(19): siRNA sense strand
gaauugaugcuaggaugga

SEQ ID NO: 231919 - RNA, 19 nt, Homo sapiens
  misc_RNA (1)...(19): siRNA sense strand
ggucaccacuggauaucag

SEQ ID NO: 231920 - RNA, 19 nt, Homo sapiens
  misc_RNA (1)...(19): siRNA sense strand
ggucaccacuggauaucag

SEQ ID NO: 231921 - RNA, 19 nt, Homo sapiens
  misc_RNA (1)...(19): siRNA sense strand
ggucaccacuggauaucag

SEQ ID NO: 231922 - RNA, 19 nt, Homo sapiens
  misc_RNA (1)...(19): siRNA sense strand
ggucaccacuggauaucag

SEQ ID NO: 231923 - RNA, 19 nt, Homo sapiens
  misc_RNA (1)...(19): siRNA sense strand
ggucaccacuggauaucag

SEQ ID NO: 231924 - RNA, 19 nt, Homo sapiens
  misc_RNA (1)...(19): siRNA sense strand
aaaguuaugugcucgucau

SEQ ID NO: 231925 - RNA, 19 nt, Homo sapiens
  misc_RNA (1)...(19): siRNA sense strand
gaagcugggcccugcaauc

SEQ ID NO: 231926 - RNA, 19 nt, Homo sapiens
  misc_RNA (1)...(19): siRNA sense strand
gguagauacgguucaguga

SEQ ID NO: 231927 - RNA, 19 nt, Homo sapiens
  misc_RNA (1)...(19): siRNA sense strand
ggcggaauccaaacacuga

SEQ ID NO: 231928 - RNA, 19 nt, Homo sapiens
  misc_RNA (1)...(19): siRNA sense strand
gaugaaacugagauuggaa

SEQ ID NO: 231929 - RNA, 19 nt, Homo sapiens
  misc_RNA (1)...(19): siRNA sense strand
uuauccaaguucaccauuu

SEQ ID NO: 231930 - RNA, 19 nt, Homo sapiens
  misc_RNA (1)...(19): siRNA sense strand
uuauccaaguucaccauuu

SEQ ID NO: 231931 - RNA, 19 nt, Homo sapiens
  misc_RNA (1)...(19): siRNA sense strand
uuauccaaguucaccauuu

SEQ ID NO: 231932 - RNA, 19 nt, Homo sapiens
  misc_RNA (1)...(19): siRNA sense strand
ggucacugcuggauaucag

SEQ ID NO: 231933 - RNA, 19 nt, Homo sapiens
  misc_RNA (1)...(19): siRNA sense strand
uuauccaaguucaccauuu

SEQ ID NO: 231934 - RNA, 19 nt, Homo sapiens
  misc_RNA (1)...(19): siRNA sense strand
cucagcacguucaggcuua

SEQ ID NO: 231935 - RNA, 19 nt, Homo sapiens
  misc_RNA (1)...(19): siRNA sense strand
ggucaggucaucacuggau

SEQ ID NO: 231936 - RNA, 19 nt, Homo sapiens
  misc_RNA (1)...(19): siRNA sense strand
ugaagauaaucacgaaucg

SEQ ID NO: 231937 - RNA, 19 nt, Homo sapiens
  misc_RNA (1)...(19): siRNA sense strand
gauaaucacgaaucgaacu

SEQ ID NO: 231938 - RNA, 19 nt, Homo sapiens
  misc_RNA (1)...(19): siRNA sense strand
caaauccugagacuccaaa

SEQ ID NO: 231939 - RNA, 19 nt, Homo sapiens
  misc_RNA (1)...(19): siRNA sense strand
gaagauaaucacgaaucga

SEQ ID NO: 231940 - RNA, 19 nt, Homo sapiens
  misc_RNA (1)...(19): siRNA sense strand
gaugcuaggauggaugaaa

SEQ ID NO: 231941 - RNA, 19 nt, Homo sapiens
  misc_RNA (1)...(19): siRNA sense strand
auaguaggaucacagauac

SEQ ID NO: 231942 - RNA, 19 nt, Homo sapiens
  misc_RNA (1)...(19): siRNA sense strand
uuaucccgauucaccauuu

SEQ ID NO: 231943 - RNA, 19 nt, Homo sapiens
  misc_RNA (1)...(19): siRNA sense strand
agugaaagaagugaagaua

SEQ ID NO: 231944 - RNA, 19 nt, Homo sapiens
  misc_RNA (1)...(19): siRNA sense strand
caccacaguuucagaacgu

SEQ ID NO: 231945 - RNA, 19 nt, Homo sapiens
  misc_RNA (1)...(19): siRNA sense strand
acuccaaacucaaccaucu

SEQ ID NO: 231946 - RNA, 19 nt, Homo sapiens
  misc_RNA (1)...(19): siRNA sense strand
uaucaguugccuguauaua

SEQ ID NO: 231947 - RNA, 19 nt, Homo sapiens
  misc_RNA (1)...(19): siRNA sense strand
gcaaauccugagacuccaa

SEQ ID NO: 231948 - RNA, 19 nt, Homo sapiens
  misc_RNA (1)...(19): siRNA sense strand
uaucaguugccuguauaua

SEQ ID NO: 231949 - RNA, 19 nt, Homo sapiens
  misc_RNA (1)...(19): siRNA sense strand
uaucaguugccuguauaua

SEQ ID NO: 231950 - RNA, 19 nt, Homo sapiens
  misc_RNA (1)...(19): siRNA sense strand
uaucaguugccuguauaua

SEQ ID NO: 231951 - RNA, 19 nt, Homo sapiens
  misc_RNA (1)...(19): siRNA sense strand
uaucaguugccuguauaua

SEQ ID NO: 231952 - RNA, 19 nt, Homo sapiens
  misc_RNA (1)...(19): siRNA sense strand
guucaggcuuauucugcuu

SEQ ID NO: 231953 - RNA, 19 nt, Homo sapiens
  misc_RNA (1)...(19): siRNA sense strand
cgccgaauccuguaacuca

SEQ ID NO: 231954 - RNA, 19 nt, Homo sapiens
  misc_RNA (1)...(19): siRNA sense strand
caaauggugguaucuuguc

SEQ ID NO: 231955 - RNA, 19 nt, Homo sapiens
  misc_RNA (1)...(19): siRNA sense strand
ucaggucaccacuggauau

SEQ ID NO: 231956 - RNA, 19 nt, Homo sapiens
  misc_RNA (1)...(19): siRNA sense strand
ucaggucaccacuggauau

SEQ ID NO: 231957 - RNA, 19 nt, Homo sapiens
  misc_RNA (1)...(19): siRNA sense strand
ucaggucaccacuggauau

SEQ ID NO: 231958 - RNA, 19 nt, Homo sapiens
  misc_RNA (1)...(19): siRNA sense strand
ucaggucaccacuggauau

SEQ ID NO: 231959 - RNA, 19 nt, Homo sapiens
  misc_RNA (1)...(19): siRNA sense strand
ucaggucaccacuggauau

SEQ ID NO: 231960 - RNA, 19 nt, Homo sapiens
  misc_RNA (1)...(19): siRNA sense strand
uauccuacuuaucccgauu

SEQ ID NO: 231961 - RNA, 19 nt, Homo sapiens
  misc_RNA (1)...(19): siRNA sense strand
gauggaugaaacugagauu

SEQ ID NO: 231962 - RNA, 19 nt, Homo sapiens
  misc_RNA (1)...(19): siRNA sense strand
guaggaucacagauacauu

SEQ ID NO: 231963 - RNA, 19 nt, Homo sapiens
  misc_RNA (1)...(19): siRNA sense strand
aucaguugccuguauauaa

SEQ ID NO: 231964 - RNA, 19 nt, Homo sapiens
  misc_RNA (1)...(19): siRNA sense strand
uauccaaauucagcaguuc

SEQ ID NO: 231965 - RNA, 19 nt, Homo sapiens
  misc_RNA (1)...(19): siRNA sense strand
ggaaacagcagacuuuaga

SEQ ID NO: 231966 - RNA, 19 nt, Homo sapiens
  misc_RNA (1)...(19): siRNA sense strand
gcagaggacuugauguuca

SEQ ID NO: 231967 - RNA, 19 nt, Homo sapiens
  misc_RNA (1)...(19): siRNA sense strand
ggaagaaggcccuggauga

SEQ ID NO: 231968 - RNA, 19 nt, Homo sapiens
  misc_RNA (1)...(19): siRNA sense strand
caacaagccuccagagauc

SEQ ID NO: 231969 - RNA, 19 nt, Homo sapiens
  misc_RNA (1)...(19): siRNA sense strand
gaagagacccacaugaaga

SEQ ID NO: 231970 - RNA, 19 nt, Homo sapiens
  misc_RNA (1)...(19): siRNA sense strand
ggaggaaacagcagacuuu

SEQ ID NO: 231971 - RNA, 19 nt, Homo sapiens
  misc_RNA (1)...(19): siRNA sense strand
ggaugcagcuguggaaaug

SEQ ID NO: 231972 - RNA, 19 nt, Homo sapiens
  misc_RNA (1)...(19): siRNA sense strand
gaaggagcagucuaucuuu

SEQ ID NO: 231973 - RNA, 19 nt, Homo sapiens
  misc_RNA (1)...(19): siRNA sense strand
ggaggcagcagcuauuauu

SEQ ID NO: 231974 - RNA, 19 nt, Homo sapiens
  misc_RNA (1)...(19): siRNA sense strand
caagggaguucuucaagca

SEQ ID NO: 231975 - RNA, 19 nt, Homo sapiens
  misc_RNA (1)...(19): siRNA sense strand
aagaagagcugcggaagga

SEQ ID NO: 231976 - RNA, 19 nt, Homo sapiens
  misc_RNA (1)...(19): siRNA sense strand
cgaugcagcugacaccauu

SEQ ID NO: 231977 - RNA, 19 nt, Homo sapiens
  misc_RNA (1)...(19): siRNA sense strand
caaaauacgugcucaucaa

SEQ ID NO: 231978 - RNA, 19 nt, Homo sapiens
  misc_RNA (1)...(19): siRNA sense strand
gaggaaacagcagacuuua

SEQ ID NO: 231979 - RNA, 19 nt, Homo sapiens
  misc_RNA (1)...(19): siRNA sense strand
gauguacccucgcccuuca

SEQ ID NO: 231980 - RNA, 19 nt, Homo sapiens
  misc_RNA (1)...(19): siRNA sense strand
ggaagagacccacaugaag

SEQ ID NO: 231981 - RNA, 19 nt, Homo sapiens
  misc_RNA (1)...(19): siRNA sense strand
ggaggaggcagcagcuauu

SEQ ID NO: 231982 - RNA, 19 nt, Homo sapiens
  misc_RNA (1)...(19): siRNA sense strand
uugaggagcuggagcaaga

SEQ ID NO: 231983 - RNA, 19 nt, Homo sapiens
  misc_RNA (1)...(19): siRNA sense strand
uggcuaagguggcagaguu

SEQ ID NO: 231984 - RNA, 19 nt, Homo sapiens
  misc_RNA (1)...(19): siRNA sense strand
gaggaggcagcagcuauua

SEQ ID NO: 231985 - RNA, 19 nt, Homo sapiens
  misc_RNA (1)...(19): siRNA sense strand
gaaaugaagcggauuaacc

SEQ ID NO: 231986 - RNA, 19 nt, Homo sapiens
  misc_RNA (1)...(19): siRNA sense strand
ugaaggagcagucuaucuu

SEQ ID NO: 231987 - RNA, 19 nt, Homo sapiens
  misc_RNA (1)...(19): siRNA sense strand
gaaacagcagacuuuagaa

SEQ ID NO: 231988 - RNA, 19 nt, Homo sapiens
  misc_RNA (1)...(19): siRNA sense strand
ccaagaggcgguugaagga

SEQ ID NO: 231989 - RNA, 19 nt, Homo sapiens
  misc_RNA (1)...(19): siRNA sense strand
gaagaaggcccuggaugag

SEQ ID NO: 231990 - RNA, 19 nt, Homo sapiens
  misc_RNA (1)...(19): siRNA sense strand
gcagcugacaccauugaaa

SEQ ID NO: 231991 - RNA, 19 nt, Homo sapiens
  misc_RNA (1)...(19): siRNA sense strand
cagcagcguggaagacaua

SEQ ID NO: 231992 - RNA, 19 nt, Homo sapiens
  misc_RNA (1)...(19): siRNA sense strand
guggaaaugaagcggauua

SEQ ID NO: 231993 - RNA, 19 nt, Homo sapiens
  misc_RNA (1)...(19): siRNA sense strand
aagcugcucugccaaaaua

SEQ ID NO: 231994 - RNA, 19 nt, Homo sapiens
  misc_RNA (1)...(19): siRNA sense strand
ggaggaagagacccacaug

SEQ ID NO: 231995 - RNA, 19 nt, Homo sapiens
  misc_RNA (1)...(19): siRNA sense strand
gugccacccuucucaacuu

SEQ ID NO: 231996 - RNA, 19 nt, Homo sapiens
  misc_RNA (1)...(19): siRNA sense strand
gaggaagagacccacauga

SEQ ID NO: 231997 - RNA, 19 nt, Homo sapiens
  misc_RNA (1)...(19): siRNA sense strand
ggauuaaccgagagcaguu

SEQ ID NO: 231998 - RNA, 19 nt, Homo sapiens
  misc_RNA (1)...(19): siRNA sense strand
ggagcagucuaucuuuggu

SEQ ID NO: 231999 - RNA, 19 nt, Homo sapiens
  misc_RNA (1)...(19): siRNA sense strand
aaggagcagucuaucuuug

SEQ ID NO: 232000 - RNA, 19 nt, Homo sapiens
  misc_RNA (1)...(19): siRNA sense strand
ggaggaguuugcccaaucg

SEQ ID NO: 232001 - RNA, 19 nt, Homo sapiens
  misc_RNA (1)...(19): siRNA sense strand
gggcgaagaugugccugau

SEQ ID NO: 232002 - RNA, 19 nt, Homo sapiens
  misc_RNA (1)...(19): siRNA sense strand
ggagcuuucgggacacuuu

SEQ ID NO: 232003 - RNA, 19 nt, Homo sapiens
  misc_RNA (1)...(19): siRNA sense strand
gggagcaggccaagaagga

SEQ ID NO: 232004 - RNA, 19 nt, Homo sapiens
  misc_RNA (1)...(19): siRNA sense strand
gaggaggaguuugcccaau

SEQ ID NO: 232005 - RNA, 19 nt, Homo sapiens
  misc_RNA (1)...(19): siRNA sense strand
acaacaagccuccagagau

SEQ ID NO: 232006 - RNA, 19 nt, Homo sapiens
  misc_RNA (1)...(19): siRNA sense strand
aggaagagacccacaugaa

SEQ ID NO: 232007 - RNA, 19 nt, Homo sapiens
  misc_RNA (1)...(19): siRNA sense strand
ccucaagcuugcagcauca

SEQ ID NO: 232008 - RNA, 19 nt, Homo sapiens
  misc_RNA (1)...(19): siRNA sense strand
gcgggcagcugugauguac

SEQ ID NO: 232009 - RNA, 19 nt, Homo sapiens
  misc_RNA (1)...(19): siRNA sense strand
cagaggacuugauguucau

SEQ ID NO: 232010 - RNA, 19 nt, Homo sapiens
  misc_RNA (1)...(19): siRNA sense strand
ucaagcagcaggaaagagu

SEQ ID NO: 232011 - RNA, 19 nt, Homo sapiens
  misc_RNA (1)...(19): siRNA sense strand
ucaacugggugggcgaaga

SEQ ID NO: 232012 - RNA, 19 nt, Homo sapiens
  misc_RNA (1)...(19): siRNA sense strand
cuucgaggguggugauuag

SEQ ID NO: 232013 - RNA, 19 nt, Homo sapiens
  misc_RNA (1)...(19): siRNA sense strand
gaggcagcagcuauuauug

SEQ ID NO: 232014 - RNA, 19 nt, Homo sapiens
  misc_RNA (1)...(19): siRNA sense strand
gguugaaggagcagucuau

SEQ ID NO: 232015 - RNA, 19 nt, Homo sapiens
  misc_RNA (1)...(19): siRNA sense strand
ggcaccaccuaccagaaga

SEQ ID NO: 232016 - RNA, 19 nt, Homo sapiens
  misc_RNA (1)...(19): siRNA sense strand
cugacaccauugaaacuga

SEQ ID NO: 232017 - RNA, 19 nt, Homo sapiens
  misc_RNA (1)...(19): siRNA sense strand
aauacgugcucaucaacug

SEQ ID NO: 232018 - RNA, 19 nt, Homo sapiens
  misc_RNA (1)...(19): siRNA sense strand
cccugucgcugagcagaua

SEQ ID NO: 232019 - RNA, 19 nt, Homo sapiens
  misc_RNA (1)...(19): siRNA sense strand
aaacagcagacuuuagaag

SEQ ID NO: 232020 - RNA, 19 nt, Homo sapiens
  misc_RNA (1)...(19): siRNA sense strand
agaaccagaaggugaugua

SEQ ID NO: 232021 - RNA, 19 nt, Homo sapiens
  misc_RNA (1)...(19): siRNA sense strand
uaagguggcagaguucuuc

SEQ ID NO: 232022 - RNA, 19 nt, Homo sapiens
  misc_RNA (1)...(19): siRNA sense strand
caacugggugggcgaagau

SEQ ID NO: 232023 - RNA, 19 nt, Homo sapiens
  misc_RNA (1)...(19): siRNA sense strand
ucugggagcaggccaagaa

SEQ ID NO: 232024 - RNA, 19 nt, Homo sapiens
  misc_RNA (1)...(19): siRNA sense strand
gcgagaccacccagaagga

SEQ ID NO: 232025 - RNA, 19 nt, Homo sapiens
  misc_RNA (1)...(19): siRNA sense strand
agacccacaugaagaaguc

SEQ ID NO: 232026 - RNA, 19 nt, Homo sapiens
  misc_RNA (1)...(19): siRNA sense strand
aagagacccacaugaagaa

SEQ ID NO: 232027 - RNA, 19 nt, Homo sapiens
  misc_RNA (1)...(19): siRNA sense strand
augcagcuguggaaaugaa

SEQ ID NO: 232028 - RNA, 19 nt, Homo sapiens
  misc_RNA (1)...(19): siRNA sense strand
aggaggaguuugcccaauc

SEQ ID NO: 232029 - RNA, 19 nt, Homo sapiens
  misc_RNA (1)...(19): siRNA sense strand
gcuugcagcaucaggagaa

SEQ ID NO: 232030 - RNA, 19 nt, Homo sapiens
  misc_RNA (1)...(19): siRNA sense strand
cugcagaggacuugauguu

SEQ ID NO: 232031 - RNA, 19 nt, Homo sapiens
  misc_RNA (1)...(19): siRNA sense strand
ggagcaggccaagaaggaa

SEQ ID NO: 232032 - RNA, 19 nt, Homo sapiens
  misc_RNA (1)...(19): siRNA sense strand
gggcaccaccuaccagaag

SEQ ID NO: 232033 - RNA, 19 nt, Homo sapiens
  misc_RNA (1)...(19): siRNA sense strand
gcuucgaggguggugauua

SEQ ID NO: 232034 - RNA, 19 nt, Homo sapiens
  misc_RNA (1)...(19): siRNA sense strand
cagacccaguuccagaaga

SEQ ID NO: 232035 - RNA, 19 nt, Homo sapiens
  misc_RNA (1)...(19): siRNA sense strand
ggaaaugaagcggauuaac

SEQ ID NO: 232036 - RNA, 19 nt, Homo sapiens
  misc_RNA (1)...(19): siRNA sense strand
ccagagaucgacaucacau

SEQ ID NO: 232037 - RNA, 19 nt, Homo sapiens
  misc_RNA (1)...(19): siRNA sense strand
ugccacccuucucaacuuu

SEQ ID NO: 232038 - RNA, 19 nt, Homo sapiens
  misc_RNA (1)...(19): siRNA sense strand
aaucacaggaggaggaguu

SEQ ID NO: 232039 - RNA, 19 nt, Homo sapiens
  misc_RNA (1)...(19): siRNA sense strand
ucgggcagcggcucucuaa

SEQ ID NO: 232040 - RNA, 19 nt, Homo sapiens
  misc_RNA (1)...(19): siRNA sense strand
cagccucauugaccuaugg

SEQ ID NO: 232041 - RNA, 19 nt, Homo sapiens
  misc_RNA (1)...(19): siRNA sense strand
gaggagcacaggaggaaac

SEQ ID NO: 232042 - RNA, 19 nt, Homo sapiens
  misc_RNA (1)...(19): siRNA sense strand
cagcugacaccauugaaac

SEQ ID NO: 232043 - RNA, 19 nt, Homo sapiens
  misc_RNA (1)...(19): siRNA sense strand
agacccaguuccagaagag

SEQ ID NO: 232044 - RNA, 19 nt, Homo sapiens
  misc_RNA (1)...(19): siRNA sense strand
ggaaacagcagacuuuaga

SEQ ID NO: 232045 - RNA, 19 nt, Homo sapiens
  misc_RNA (1)...(19): siRNA sense strand
gcagaggacuugauguuca

SEQ ID NO: 232046 - RNA, 19 nt, Homo sapiens
  misc_RNA (1)...(19): siRNA sense strand
ggaagaaggcccuggauga

SEQ ID NO: 232047 - RNA, 19 nt, Homo sapiens
  misc_RNA (1)...(19): siRNA sense strand
caacaagccuccagagauc

SEQ ID NO: 232048 - RNA, 19 nt, Homo sapiens
  misc_RNA (1)...(19): siRNA sense strand
gaagagacccacaugaaga

SEQ ID NO: 232049 - RNA, 19 nt, Homo sapiens
  misc_RNA (1)...(19): siRNA sense strand
ggaggaaacagcagacuuu

SEQ ID NO: 232050 - RNA, 19 nt, Homo sapiens
  misc_RNA (1)...(19): siRNA sense strand
ggaugcagcuguggaaaug

SEQ ID NO: 232051 - RNA, 19 nt, Homo sapiens
  misc_RNA (1)...(19): siRNA sense strand
gaaggagcagucuaucuuu

SEQ ID NO: 232052 - RNA, 19 nt, Homo sapiens
  misc_RNA (1)...(19): siRNA sense strand
ggaggcagcagcuauuauu

SEQ ID NO: 232053 - RNA, 19 nt, Homo sapiens
  misc_RNA (1)...(19): siRNA sense strand
caagggaguucuucaagca

SEQ ID NO: 232054 - RNA, 19 nt, Homo sapiens
  misc_RNA (1)...(19): siRNA sense strand
aagaagagcugcggaagga

SEQ ID NO: 232055 - RNA, 19 nt, Homo sapiens
  misc_RNA (1)...(19): siRNA sense strand
cgaugcagcugacaccauu

SEQ ID NO: 232056 - RNA, 19 nt, Homo sapiens
  misc_RNA (1)...(19): siRNA sense strand
caaaauacgugcucaucaa

SEQ ID NO: 232057 - RNA, 19 nt, Homo sapiens
  misc_RNA (1)...(19): siRNA sense strand
gaggaaacagcagacuuua

SEQ ID NO: 232058 - RNA, 19 nt, Homo sapiens
  misc_RNA (1)...(19): siRNA sense strand
gauguacccucgcccuuca

SEQ ID NO: 232059 - RNA, 19 nt, Homo sapiens
  misc_RNA (1)...(19): siRNA sense strand
ggaagagacccacaugaag

SEQ ID NO: 232060 - RNA, 19 nt, Homo sapiens
  misc_RNA (1)...(19): siRNA sense strand
ggaggaggcagcagcuauu

SEQ ID NO: 232061 - RNA, 19 nt, Homo sapiens
  misc_RNA (1)...(19): siRNA sense strand
uugaggagcuggagcaaga

SEQ ID NO: 232062 - RNA, 19 nt, Homo sapiens
  misc_RNA (1)...(19): siRNA sense strand
uggcuaagguggcagaguu

SEQ ID NO: 232063 - RNA, 19 nt, Homo sapiens
  misc_RNA (1)...(19): siRNA sense strand
gaggaggcagcagcuauua

SEQ ID NO: 232064 - RNA, 19 nt, Homo sapiens
  misc_RNA (1)...(19): siRNA sense strand
gaaaugaagcggauuaacc

SEQ ID NO: 232065 - RNA, 19 nt, Homo sapiens
  misc_RNA (1)...(19): siRNA sense strand
ugaaggagcagucuaucuu

SEQ ID NO: 232066 - RNA, 19 nt, Homo sapiens
  misc_RNA (1)...(19): siRNA sense strand
gaaacagcagacuuuagaa

SEQ ID NO: 232067 - RNA, 19 nt, Homo sapiens
  misc_RNA (1)...(19): siRNA sense strand
ccaagaggcgguugaagga

SEQ ID NO: 232068 - RNA, 19 nt, Homo sapiens
  misc_RNA (1)...(19): siRNA sense strand
gaagaaggcccuggaugag

SEQ ID NO: 232069 - RNA, 19 nt, Homo sapiens
  misc_RNA (1)...(19): siRNA sense strand
gcagcugacaccauugaaa

SEQ ID NO: 232070 - RNA, 19 nt, Homo sapiens
  misc_RNA (1)...(19): siRNA sense strand
cagcagcguggaagacaua

SEQ ID NO: 232071 - RNA, 19 nt, Homo sapiens
  misc_RNA (1)...(19): siRNA sense strand
guggaaaugaagcggauua

SEQ ID NO: 232072 - RNA, 19 nt, Homo sapiens
  misc_RNA (1)...(19): siRNA sense strand
aagcugcucugccaaaaua

SEQ ID NO: 232073 - RNA, 19 nt, Homo sapiens
  misc_RNA (1)...(19): siRNA sense strand
ggaggaagagacccacaug

SEQ ID NO: 232074 - RNA, 19 nt, Homo sapiens
  misc_RNA (1)...(19): siRNA sense strand
gugccacccuucucaacuu

SEQ ID NO: 232075 - RNA, 19 nt, Homo sapiens
  misc_RNA (1)...(19): siRNA sense strand
gaggaagagacccacauga

SEQ ID NO: 232076 - RNA, 19 nt, Homo sapiens
  misc_RNA (1)...(19): siRNA sense strand
ggauuaaccgagagcaguu

SEQ ID NO: 232077 - RNA, 19 nt, Homo sapiens
  misc_RNA (1)...(19): siRNA sense strand
ggagcagucuaucuuuggu

SEQ ID NO: 232078 - RNA, 19 nt, Homo sapiens
  misc_RNA (1)...(19): siRNA sense strand
aaggagcagucuaucuuug

SEQ ID NO: 232079 - RNA, 19 nt, Homo sapiens
  misc_RNA (1)...(19): siRNA sense strand
ggaggaguuugcccaaucg

SEQ ID NO: 232080 - RNA, 19 nt, Homo sapiens
  misc_RNA (1)...(19): siRNA sense strand
gggcgaagaugugccugau

SEQ ID NO: 232081 - RNA, 19 nt, Homo sapiens
  misc_RNA (1)...(19): siRNA sense strand
ggagcuuucgggacacuuu

SEQ ID NO: 232082 - RNA, 19 nt, Homo sapiens
  misc_RNA (1)...(19): siRNA sense strand
gggagcaggccaagaagga

SEQ ID NO: 232083 - RNA, 19 nt, Homo sapiens
  misc_RNA (1)...(19): siRNA sense strand
gaggaggaguuugcccaau

SEQ ID NO: 232084 - RNA, 19 nt, Homo sapiens
  misc_RNA (1)...(19): siRNA sense strand
acaacaagccuccagagau

SEQ ID NO: 232085 - RNA, 19 nt, Homo sapiens
  misc_RNA (1)...(19): siRNA sense strand
aggaagagacccacaugaa

SEQ ID NO: 232086 - RNA, 19 nt, Homo sapiens
  misc_RNA (1)...(19): siRNA sense strand
ccucaagcuugcagcauca

SEQ ID NO: 232087 - RNA, 19 nt, Homo sapiens
  misc_RNA (1)...(19): siRNA sense strand
gcgggcagcugugauguac

SEQ ID NO: 232088 - RNA, 19 nt, Homo sapiens
  misc_RNA (1)...(19): siRNA sense strand
cagaggacuugauguucau

SEQ ID NO: 232089 - RNA, 19 nt, Homo sapiens
  misc_RNA (1)...(19): siRNA sense strand
ucaagcagcaggaaagagu

SEQ ID NO: 232090 - RNA, 19 nt, Homo sapiens
  misc_RNA (1)...(19): siRNA sense strand
ucaacugggugggcgaaga

SEQ ID NO: 232091 - RNA, 19 nt, Homo sapiens
  misc_RNA (1)...(19): siRNA sense strand
cuucgaggguggugauuag

SEQ ID NO: 232092 - RNA, 19 nt, Homo sapiens
  misc_RNA (1)...(19): siRNA sense strand
gaggcagcagcuauuauug

SEQ ID NO: 232093 - RNA, 19 nt, Homo sapiens
  misc_RNA (1)...(19): siRNA sense strand
gguugaaggagcagucuau

SEQ ID NO: 232094 - RNA, 19 nt, Homo sapiens
  misc_RNA (1)...(19): siRNA sense strand
ggcaccaccuaccagaaga

SEQ ID NO: 232095 - RNA, 19 nt, Homo sapiens
  misc_RNA (1)...(19): siRNA sense strand
cugacaccauugaaacuga

SEQ ID NO: 232096 - RNA, 19 nt, Homo sapiens
  misc_RNA (1)...(19): siRNA sense strand
aauacgugcucaucaacug

SEQ ID NO: 232097 - RNA, 19 nt, Homo sapiens
  misc_RNA (1)...(19): siRNA sense strand
cccugucgcugagcagaua

SEQ ID NO: 232098 - RNA, 19 nt, Homo sapiens
  misc_RNA (1)...(19): siRNA sense strand
aaacagcagacuuuagaag

SEQ ID NO: 232099 - RNA, 19 nt, Homo sapiens
  misc_RNA (1)...(19): siRNA sense strand
agaaccagaaggugaugua

SEQ ID NO: 232100 - RNA, 19 nt, Homo sapiens
  misc_RNA (1)...(19): siRNA sense strand
uaagguggcagaguucuuc

SEQ ID NO: 232101 - RNA, 19 nt, Homo sapiens
  misc_RNA (1)...(19): siRNA sense strand
caacugggugggcgaagau

SEQ ID NO: 232102 - RNA, 19 nt, Homo sapiens
  misc_RNA (1)...(19): siRNA sense strand
ucugggagcaggccaagaa

SEQ ID NO: 232103 - RNA, 19 nt, Homo sapiens
  misc_RNA (1)...(19): siRNA sense strand
gcgagaccacccagaagga

SEQ ID NO: 232104 - RNA, 19 nt, Homo sapiens
  misc_RNA (1)...(19): siRNA sense strand
agacccacaugaagaaguc

SEQ ID NO: 232105 - RNA, 19 nt, Homo sapiens
  misc_RNA (1)...(19): siRNA sense strand
aagagacccacaugaagaa

SEQ ID NO: 232106 - RNA, 19 nt, Homo sapiens
  misc_RNA (1)...(19): siRNA sense strand
augcagcuguggaaaugaa

SEQ ID NO: 232107 - RNA, 19 nt, Homo sapiens
  misc_RNA (1)...(19): siRNA sense strand
aggaggaguuugcccaauc

SEQ ID NO: 232108 - RNA, 19 nt, Homo sapiens
  misc_RNA (1)...(19): siRNA sense strand
gcuugcagcaucaggagaa

SEQ ID NO: 232109 - RNA, 19 nt, Homo sapiens
  misc_RNA (1)...(19): siRNA sense strand
cugcagaggacuugauguu

SEQ ID NO: 232110 - RNA, 19 nt, Homo sapiens
  misc_RNA (1)...(19): siRNA sense strand
ggagcaggccaagaaggaa

SEQ ID NO: 232111 - RNA, 19 nt, Homo sapiens
  misc_RNA (1)...(19): siRNA sense strand
gggcaccaccuaccagaag

SEQ ID NO: 232112 - RNA, 19 nt, Homo sapiens
  misc_RNA (1)...(19): siRNA sense strand
gcuucgaggguggugauua

SEQ ID NO: 232113 - RNA, 19 nt, Homo sapiens
  misc_RNA (1)...(19): siRNA sense strand
cagacccaguuccagaaga

SEQ ID NO: 232114 - RNA, 19 nt, Homo sapiens
  misc_RNA (1)...(19): siRNA sense strand
ggaaaugaagcggauuaac

SEQ ID NO: 232115 - RNA, 19 nt, Homo sapiens
  misc_RNA (1)...(19): siRNA sense strand
ccagagaucgacaucacau

SEQ ID NO: 232116 - RNA, 19 nt, Homo sapiens
  misc_RNA (1)...(19): siRNA sense strand
ugccacccuucucaacuuu

SEQ ID NO: 232117 - RNA, 19 nt, Homo sapiens
  misc_RNA (1)...(19): siRNA sense strand
aaucacaggaggaggaguu

SEQ ID NO: 232118 - RNA, 19 nt, Homo sapiens
  misc_RNA (1)...(19): siRNA sense strand
ucgggcagcggcucucuaa

SEQ ID NO: 232119 - RNA, 19 nt, Homo sapiens
  misc_RNA (1)...(19): siRNA sense strand
cagccucauugaccuaugg

SEQ ID NO: 232120 - RNA, 19 nt, Homo sapiens
  misc_RNA (1)...(19): siRNA sense strand
gaggagcacaggaggaaac

SEQ ID NO: 232121 - RNA, 19 nt, Homo sapiens
  misc_RNA (1)...(19): siRNA sense strand
cagcugacaccauugaaac

SEQ ID NO: 232122 - RNA, 19 nt, Homo sapiens
  misc_RNA (1)...(19): siRNA sense strand
agacccaguuccagaagag

SEQ ID NO: 232123 - RNA, 19 nt, Homo sapiens
  misc_RNA (1)...(19): siRNA sense strand
gcaaguagcugcugaauau

SEQ ID NO: 232124 - RNA, 19 nt, Homo sapiens
  misc_RNA (1)...(19): siRNA sense strand
gcagauagaaugcuugaua

SEQ ID NO: 232125 - RNA, 19 nt, Homo sapiens
  misc_RNA (1)...(19): siRNA sense strand
cacaagagguggaaacaua

SEQ ID NO: 232126 - RNA, 19 nt, Homo sapiens
  misc_RNA (1)...(19): siRNA sense strand
gugaugagcuuaccagaaa

SEQ ID NO: 232127 - RNA, 19 nt, Homo sapiens
  misc_RNA (1)...(19): siRNA sense strand
gcaaaugucauggauguua

SEQ ID NO: 232128 - RNA, 19 nt, Homo sapiens
  misc_RNA (1)...(19): siRNA sense strand
gcaaggaaauuacaguuag

SEQ ID NO: 232129 - RNA, 19 nt, Homo sapiens
  misc_RNA (1)...(19): siRNA sense strand
caaccuaccuuguccuuga

SEQ ID NO: 232130 - RNA, 19 nt, Homo sapiens
  misc_RNA (1)...(19): siRNA sense strand
gaagagaucaugagugaga

SEQ ID NO: 232131 - RNA, 19 nt, Homo sapiens
  misc_RNA (1)...(19): siRNA sense strand
uaaggaagauuguggauca

SEQ ID NO: 232132 - RNA, 19 nt, Homo sapiens
  misc_RNA (1)...(19): siRNA sense strand
ggagagagguguggaaauc

SEQ ID NO: 232133 - RNA, 19 nt, Homo sapiens
  misc_RNA (1)...(19): siRNA sense strand
gaagauuguggaucaaaua

SEQ ID NO: 232134 - RNA, 19 nt, Homo sapiens
  misc_RNA (1)...(19): siRNA sense strand
cgaagccaguucuaaauuu

SEQ ID NO: 232135 - RNA, 19 nt, Homo sapiens
  misc_RNA (1)...(19): siRNA sense strand
gcaugucgcuugaagucua

SEQ ID NO: 232136 - RNA, 19 nt, Homo sapiens
  misc_RNA (1)...(19): siRNA sense strand
gcagggcccuuaucuggaa

SEQ ID NO: 232137 - RNA, 19 nt, Homo sapiens
  misc_RNA (1)...(19): siRNA sense strand
gagcgugacuggguucuaa

SEQ ID NO: 232138 - RNA, 19 nt, Homo sapiens
  misc_RNA (1)...(19): siRNA sense strand
uggaagagaucaugaguga

SEQ ID NO: 232139 - RNA, 19 nt, Homo sapiens
  misc_RNA (1)...(19): siRNA sense strand
uugaugagcugccuaaauu

SEQ ID NO: 232140 - RNA, 19 nt, Homo sapiens
  misc_RNA (1)...(19): siRNA sense strand
gauuguggaucaaauaaga

SEQ ID NO: 232141 - RNA, 19 nt, Homo sapiens
  misc_RNA (1)...(19): siRNA sense strand
gcucagggauggccaguug

SEQ ID NO: 232142 - RNA, 19 nt, Homo sapiens
  misc_RNA (1)...(19): siRNA sense strand
gcgaugggccuauuuguuu

SEQ ID NO: 232143 - RNA, 19 nt, Homo sapiens
  misc_RNA (1)...(19): siRNA sense strand
ccacaacauucuucagauu

SEQ ID NO: 232144 - RNA, 19 nt, Homo sapiens
  misc_RNA (1)...(19): siRNA sense strand
ggaaaucuguauugcaaca

SEQ ID NO: 232145 - RNA, 19 nt, Homo sapiens
  misc_RNA (1)...(19): siRNA sense strand
gaggaggcaugaaggauga

SEQ ID NO: 232146 - RNA, 19 nt, Homo sapiens
  misc_RNA (1)...(19): siRNA sense strand
ggaugugugucaugacgua

SEQ ID NO: 232147 - RNA, 19 nt, Homo sapiens
  misc_RNA (1)...(19): siRNA sense strand
guggaaaucuguauugcaa

SEQ ID NO: 232148 - RNA, 19 nt, Homo sapiens
  misc_RNA (1)...(19): siRNA sense strand
caacagggacuuaccagaa

SEQ ID NO: 232149 - RNA, 19 nt, Homo sapiens
  misc_RNA (1)...(19): siRNA sense strand
aaacauuggugcacuugaa

SEQ ID NO: 232150 - RNA, 19 nt, Homo sapiens
  misc_RNA (1)...(19): siRNA sense strand
ccaaauaugcacaauggua

SEQ ID NO: 232151 - RNA, 19 nt, Homo sapiens
  misc_RNA (1)...(19): siRNA sense strand
ggaagauuguggaucaaau

SEQ ID NO: 232152 - RNA, 19 nt, Homo sapiens
  misc_RNA (1)...(19): siRNA sense strand
aaugggagcuuuggaagua

SEQ ID NO: 232153 - RNA, 19 nt, Homo sapiens
  misc_RNA (1)...(19): siRNA sense strand
agaagaagcaaggaaauua

SEQ ID NO: 232154 - RNA, 19 nt, Homo sapiens
  misc_RNA (1)...(19): siRNA sense strand
caagacagaauuucacuga

SEQ ID NO: 232155 - RNA, 19 nt, Homo sapiens
  misc_RNA (1)...(19): siRNA sense strand
cagauagaaugcuugauau

SEQ ID NO: 232156 - RNA, 19 nt, Homo sapiens
  misc_RNA (1)...(19): siRNA sense strand
gugacuggguucuaaauga

SEQ ID NO: 232157 - RNA, 19 nt, Homo sapiens
  misc_RNA (1)...(19): siRNA sense strand
ugagugagaaggagaauaa

SEQ ID NO: 232158 - RNA, 19 nt, Homo sapiens
  misc_RNA (1)...(19): siRNA sense strand
caaaugucauggauguuau

SEQ ID NO: 232159 - RNA, 19 nt, Homo sapiens
  misc_RNA (1)...(19): siRNA sense strand
gaaguggaaucuugaugag

SEQ ID NO: 232160 - RNA, 19 nt, Homo sapiens
  misc_RNA (1)...(19): siRNA sense strand
caaggaaauuacaguuaga

SEQ ID NO: 232161 - RNA, 19 nt, Homo sapiens
  misc_RNA (1)...(19): siRNA sense strand
uguggaagaugugaaauuu

SEQ ID NO: 232162 - RNA, 19 nt, Homo sapiens
  misc_RNA (1)...(19): siRNA sense strand
guggaaacauacagaagaa

SEQ ID NO: 232163 - RNA, 19 nt, Homo sapiens
  misc_RNA (1)...(19): siRNA sense strand
ugacuggguucuaaaugaa

SEQ ID NO: 232164 - RNA, 19 nt, Homo sapiens
  misc_RNA (1)...(19): siRNA sense strand
caucagccauuccuagaga

SEQ ID NO: 232165 - RNA, 19 nt, Homo sapiens
  misc_RNA (1)...(19): siRNA sense strand
gggaaaacauugucuuauu

SEQ ID NO: 232166 - RNA, 19 nt, Homo sapiens
  misc_RNA (1)...(19): siRNA sense strand
gcccuuaucuggaaagaag

SEQ ID NO: 232167 - RNA, 19 nt, Homo sapiens
  misc_RNA (1)...(19): siRNA sense strand
uggaagaugugaaauuugu

SEQ ID NO: 232168 - RNA, 19 nt, Homo sapiens
  misc_RNA (1)...(19): siRNA sense strand
gaagccaguucuaaauuuu

SEQ ID NO: 232169 - RNA, 19 nt, Homo sapiens
  misc_RNA (1)...(19): siRNA sense strand
caaaagggguggauuuaau

SEQ ID NO: 232170 - RNA, 19 nt, Homo sapiens
  misc_RNA (1)...(19): siRNA sense strand
gaugagcugccuaaauuug

SEQ ID NO: 232171 - RNA, 19 nt, Homo sapiens
  misc_RNA (1)...(19): siRNA sense strand
gcucuaaguggauuggaua

SEQ ID NO: 232172 - RNA, 19 nt, Homo sapiens
  misc_RNA (1)...(19): siRNA sense strand
caaauaugcacaaugguau

SEQ ID NO: 232173 - RNA, 19 nt, Homo sapiens
  misc_RNA (1)...(19): siRNA sense strand
aagaagaugugaugagcuu

SEQ ID NO: 232174 - RNA, 19 nt, Homo sapiens
  misc_RNA (1)...(19): siRNA sense strand
gaagaugugaaauuuguca

SEQ ID NO: 232175 - RNA, 19 nt, Homo sapiens
  misc_RNA (1)...(19): siRNA sense strand
uuacagugcugcaaauuac

SEQ ID NO: 232176 - RNA, 19 nt, Homo sapiens
  misc_RNA (1)...(19): siRNA sense strand
ugagcgaccuuaucucugu

SEQ ID NO: 232177 - RNA, 19 nt, Homo sapiens
  misc_RNA (1)...(19): siRNA sense strand
ucacugaacccacugcuau

SEQ ID NO: 232178 - RNA, 19 nt, Homo sapiens
  misc_RNA (1)...(19): siRNA sense strand
ucaauuaugacuacccuaa

SEQ ID NO: 232179 - RNA, 19 nt, Homo sapiens
  misc_RNA (1)...(19): siRNA sense strand
gagaagaacaaccuaccuu

SEQ ID NO: 232180 - RNA, 19 nt, Homo sapiens
  misc_RNA (1)...(19): siRNA sense strand
gcaauacggaaguaauguu

SEQ ID NO: 232181 - RNA, 19 nt, Homo sapiens
  misc_RNA (1)...(19): siRNA sense strand
gaagaagcaaggaaauuac

SEQ ID NO: 232182 - RNA, 19 nt, Homo sapiens
  misc_RNA (1)...(19): siRNA sense strand
cugcaccuaugauugguua

SEQ ID NO: 232183 - RNA, 19 nt, Homo sapiens
  misc_RNA (1)...(19): siRNA sense strand
gaagccaauuucccugcaa

SEQ ID NO: 232184 - RNA, 19 nt, Homo sapiens
  misc_RNA (1)...(19): siRNA sense strand
cugcaaaugucauggaugu

SEQ ID NO: 232185 - RNA, 19 nt, Homo sapiens
  misc_RNA (1)...(19): siRNA sense strand
gcaaaccacaacauucuuc

SEQ ID NO: 232186 - RNA, 19 nt, Homo sapiens
  misc_RNA (1)...(19): siRNA sense strand
ccugauaggcaaacucuaa

SEQ ID NO: 232187 - RNA, 19 nt, Homo sapiens
  misc_RNA (1)...(19): siRNA sense strand
gagcaugucgcuugaaguc

SEQ ID NO: 232188 - RNA, 19 nt, Homo sapiens
  misc_RNA (1)...(19): siRNA sense strand
caagugagcgaccuuaucu

SEQ ID NO: 232189 - RNA, 19 nt, Homo sapiens
  misc_RNA (1)...(19): siRNA sense strand
ggaccacaaauacgugauu

SEQ ID NO: 232190 - RNA, 19 nt, Homo sapiens
  misc_RNA (1)...(19): siRNA sense strand
ucagaaugguguuuacagu

SEQ ID NO: 232191 - RNA, 19 nt, Homo sapiens
  misc_RNA (1)...(19): siRNA sense strand
ugaagcuaaucaagcaauu

SEQ ID NO: 232192 - RNA, 19 nt, Homo sapiens
  misc_RNA (1)...(19): siRNA sense strand
gguggaaacauacagaaga

SEQ ID NO: 232193 - RNA, 19 nt, Homo sapiens
  misc_RNA (1)...(19): siRNA sense strand
gauaggcaaacucuaaugu

SEQ ID NO: 232194 - RNA, 19 nt, Homo sapiens
  misc_RNA (1)...(19): siRNA sense strand
gcccgaagccaguucuaaa

SEQ ID NO: 232195 - RNA, 19 nt, Homo sapiens
  misc_RNA (1)...(19): siRNA sense strand
gcaagugagcgaccuuauc

SEQ ID NO: 232196 - RNA, 19 nt, Homo sapiens
  misc_RNA (1)...(19): siRNA sense strand
ggggagaaauuaguuaaaa

SEQ ID NO: 232197 - RNA, 19 nt, Homo sapiens
  misc_RNA (1)...(19): siRNA sense strand
gauagaaugcuugauaugg

SEQ ID NO: 232198 - RNA, 19 nt, Homo sapiens
  misc_RNA (1)...(19): siRNA sense strand
cuaaguggauuggauaugg

SEQ ID NO: 232199 - RNA, 19 nt, Homo sapiens
  misc_RNA (1)...(19): siRNA sense strand
cagcauacacuuucuuuac

SEQ ID NO: 232200 - RNA, 19 nt, Homo sapiens
  misc_RNA (1)...(19): siRNA sense strand
ggcuagauguggaagaugu

SEQ ID NO: 232201 - RNA, 19 nt, Homo sapiens
  misc_RNA (1)...(19): siRNA sense strand
gaaggagaauaaaaccauu

SEQ ID NO: 232202 - RNA, 19 nt, Homo sapiens
  misc_RNA (1)...(19): siRNA sense strand
uauaaacauuggugcacuu

SEQ ID NO: 232203 - RNA, 19 nt, Homo sapiens
  misc_RNA (1)...(19): siRNA sense strand
cgaugggccuauuuguuug

SEQ ID NO: 232204 - RNA, 19 nt, Homo sapiens
  misc_RNA (1)...(19): siRNA sense strand
ggguggauuuaauaccuuu

SEQ ID NO: 232205 - RNA, 19 nt, Homo sapiens
  misc_RNA (1)...(19): siRNA sense strand
acacuuucuuuacaccuaa

SEQ ID NO: 232206 - RNA, 19 nt, Homo sapiens
  misc_RNA (1)...(19): siRNA sense strand
cagaagaagcaaggaaauu

SEQ ID NO: 232207 - RNA, 19 nt, Homo sapiens
  misc_RNA (1)...(19): siRNA sense strand
aaacuuauucgucuaaugg

SEQ ID NO: 232208 - RNA, 19 nt, Homo sapiens
  misc_RNA (1)...(19): siRNA sense strand
ugaugaagcagauagaaug

SEQ ID NO: 232209 - RNA, 19 nt, Homo sapiens
  misc_RNA (1)...(19): siRNA sense strand
ugccuaaauuugagaagaa

SEQ ID NO: 232210 - RNA, 19 nt, Homo sapiens
  misc_RNA (1)...(19): siRNA sense strand
ccaacaggauauucccaau

SEQ ID NO: 232211 - RNA, 19 nt, Homo sapiens
  misc_RNA (1)...(19): siRNA sense strand
gcagcugcaccuaugauug

SEQ ID NO: 232212 - RNA, 19 nt, Homo sapiens
  misc_RNA (1)...(19): siRNA sense strand
gaagcaaggaaauuacagu

SEQ ID NO: 232213 - RNA, 19 nt, Homo sapiens
  misc_RNA (1)...(19): siRNA sense strand
gaaaagcuccuauucugau

SEQ ID NO: 232214 - RNA, 19 nt, Homo sapiens
  misc_RNA (1)...(19): siRNA sense strand
agaaguggaaucuugauga

SEQ ID NO: 232215 - RNA, 19 nt, Homo sapiens
  misc_RNA (1)...(19): siRNA sense strand
gaaacauacagaagaagca

SEQ ID NO: 232216 - RNA, 19 nt, Homo sapiens
  misc_RNA (1)...(19): siRNA sense strand
caacaggugcagcaaguag

SEQ ID NO: 232217 - RNA, 19 nt, Homo sapiens
  misc_RNA (1)...(19): siRNA sense strand
gaaccaacaggcauaugca

SEQ ID NO: 232218 - RNA, 19 nt, Homo sapiens
  misc_RNA (1)...(19): siRNA sense strand
uaugauagcacucagcaau

SEQ ID NO: 232219 - RNA, 19 nt, Homo sapiens
  misc_RNA (1)...(19): siRNA sense strand
gcacagcauacacuuucuu

SEQ ID NO: 232220 - RNA, 19 nt, Homo sapiens
  misc_RNA (1)...(19): siRNA sense strand
gaagaugugaugagcuuac

SEQ ID NO: 232221 - RNA, 19 nt, Homo sapiens
  misc_RNA (1)...(19): siRNA sense strand
aaaccaaucugagaagaac

SEQ ID NO: 232222 - RNA, 19 nt, Homo sapiens
  misc_RNA (1)...(19): siRNA sense strand
ucaagagcacccugauuug

SEQ ID NO: 232223 - RNA, 19 nt, Homo sapiens
  misc_RNA (1)...(19): siRNA sense strand
guacagaaguucaugaauu

SEQ ID NO: 232224 - RNA, 19 nt, Homo sapiens
  misc_RNA (1)...(19): siRNA sense strand
gcagaaacccuaugagauu

SEQ ID NO: 232225 - RNA, 19 nt, Homo sapiens
  misc_RNA (1)...(19): siRNA sense strand
ggaaaugaguuugaagauu

SEQ ID NO: 232226 - RNA, 19 nt, Homo sapiens
  misc_RNA (1)...(19): siRNA sense strand
cagaaacccuaugagauua

SEQ ID NO: 232227 - RNA, 19 nt, Homo sapiens
  misc_RNA (1)...(19): siRNA sense strand
uagcaaagguugaucaugu

SEQ ID NO: 232228 - RNA, 19 nt, Homo sapiens
  misc_RNA (1)...(19): siRNA sense strand
gaagaaggacaauauacaa

SEQ ID NO: 232229 - RNA, 19 nt, Homo sapiens
  misc_RNA (1)...(19): siRNA sense strand
gaggagagcauucccauug

SEQ ID NO: 232230 - RNA, 19 nt, Homo sapiens
  misc_RNA (1)...(19): siRNA sense strand
gaacaucgaaaucguguau

SEQ ID NO: 232231 - RNA, 19 nt, Homo sapiens
  misc_RNA (1)...(19): siRNA sense strand
gaaaagccaucuccuauuc

SEQ ID NO: 232232 - RNA, 19 nt, Homo sapiens
  misc_RNA (1)...(19): siRNA sense strand
gaaaggaguagcaaagguu

SEQ ID NO: 232233 - RNA, 19 nt, Homo sapiens
  misc_RNA (1)...(19): siRNA sense strand
caaaggaucuaagaaucaa

SEQ ID NO: 232234 - RNA, 19 nt, Homo sapiens
  misc_RNA (1)...(19): siRNA sense strand
guucaugaauucccauuug

SEQ ID NO: 232235 - RNA, 19 nt, Homo sapiens
  misc_RNA (1)...(19): siRNA sense strand
cuacaggucagucaaauuu

SEQ ID NO: 232236 - RNA, 19 nt, Homo sapiens
  misc_RNA (1)...(19): siRNA sense strand
gaaccaauuuacgagauga

SEQ ID NO: 232237 - RNA, 19 nt, Homo sapiens
  misc_RNA (1)...(19): siRNA sense strand
gaaggacaauauacaagca

SEQ ID NO: 232238 - RNA, 19 nt, Homo sapiens
  misc_RNA (1)...(19): siRNA sense strand
uagaagaugagaaaccuua

SEQ ID NO: 232239 - RNA, 19 nt, Homo sapiens
  misc_RNA (1)...(19): siRNA sense strand
ggaaccaauuuacgagaug

SEQ ID NO: 232240 - RNA, 19 nt, Homo sapiens
  misc_RNA (1)...(19): siRNA sense strand
uaaugaggcuugaugauac

SEQ ID NO: 232241 - RNA, 19 nt, Homo sapiens
  misc_RNA (1)...(19): siRNA sense strand
aguaugaccaccacuauua

SEQ ID NO: 232242 - RNA, 19 nt, Homo sapiens
  misc_RNA (1)...(19): siRNA sense strand
agaccuaucuccaucguau

SEQ ID NO: 232243 - RNA, 19 nt, Homo sapiens
  misc_RNA (1)...(19): siRNA sense strand
uacagaaguucaugaauuc

SEQ ID NO: 232244 - RNA, 19 nt, Homo sapiens
  misc_RNA (1)...(19): siRNA sense strand
caauuuacgagaugacaua

SEQ ID NO: 232245 - RNA, 19 nt, Homo sapiens
  misc_RNA (1)...(19): siRNA sense strand
gcugagaggcccugugaaa

SEQ ID NO: 232246 - RNA, 19 nt, Homo sapiens
  misc_RNA (1)...(19): siRNA sense strand
guuugaagauuacuguuug

SEQ ID NO: 232247 - RNA, 19 nt, Homo sapiens
  misc_RNA (1)...(19): siRNA sense strand
gccuguauguggcagaaua

SEQ ID NO: 232248 - RNA, 19 nt, Homo sapiens
  misc_RNA (1)...(19): siRNA sense strand
gcuucuauauucaugcuaa

SEQ ID NO: 232249 - RNA, 19 nt, Homo sapiens
  misc_RNA (1)...(19): siRNA sense strand
auaaaccagucgaucauuu

SEQ ID NO: 232250 - RNA, 19 nt, Homo sapiens
  misc_RNA (1)...(19): siRNA sense strand
ggaugaggcagauaaguug

SEQ ID NO: 232251 - RNA, 19 nt, Homo sapiens
  misc_RNA (1)...(19): siRNA sense strand
ggcuagaccugaagaagga

SEQ ID NO: 232252 - RNA, 19 nt, Homo sapiens
  misc_RNA (1)...(19): siRNA sense strand
gaaacgggaguuacugaug

SEQ ID NO: 232253 - RNA, 19 nt, Homo sapiens
  misc_RNA (1)...(19): siRNA sense strand
cagauaaguugcugucaca

SEQ ID NO: 232254 - RNA, 19 nt, Homo sapiens
  misc_RNA (1)...(19): siRNA sense strand
gagcggugccuaccucauu

SEQ ID NO: 232255 - RNA, 19 nt, Homo sapiens
  misc_RNA (1)...(19): siRNA sense strand
cagcgagccuguagaagau

SEQ ID NO: 232256 - RNA, 19 nt, Homo sapiens
  misc_RNA (1)...(19): siRNA sense strand
gcugggaacagaaauuaaa

SEQ ID NO: 232257 - RNA, 19 nt, Homo sapiens
  misc_RNA (1)...(19): siRNA sense strand
ucuccaggcuucagauaaa

SEQ ID NO: 232258 - RNA, 19 nt, Homo sapiens
  misc_RNA (1)...(19): siRNA sense strand
ugaagggaguaacccagua

SEQ ID NO: 232259 - RNA, 19 nt, Homo sapiens
  misc_RNA (1)...(19): siRNA sense strand
gaauucccauuugcagaaa

SEQ ID NO: 232260 - RNA, 19 nt, Homo sapiens
  misc_RNA (1)...(19): siRNA sense strand
ccaacacaaucaauaaugg

SEQ ID NO: 232261 - RNA, 19 nt, Homo sapiens
  misc_RNA (1)...(19): siRNA sense strand
gcaggaacaucgaaaucgu

SEQ ID NO: 232262 - RNA, 19 nt, Homo sapiens
  misc_RNA (1)...(19): siRNA sense strand
aaaguacacugccucaaca

SEQ ID NO: 232263 - RNA, 19 nt, Homo sapiens
  misc_RNA (1)...(19): siRNA sense strand
gcacacagacacagcaaca

SEQ ID NO: 232264 - RNA, 19 nt, Homo sapiens
  misc_RNA (1)...(19): siRNA sense strand
ucagcgaguugaauugcua

SEQ ID NO: 232265 - RNA, 19 nt, Homo sapiens
  misc_RNA (1)...(19): siRNA sense strand
ccaaaggaucuaagaauca

SEQ ID NO: 232266 - RNA, 19 nt, Homo sapiens
  misc_RNA (1)...(19): siRNA sense strand
ccacaggaggaaccaauuu

SEQ ID NO: 232267 - RNA, 19 nt, Homo sapiens
  misc_RNA (1)...(19): siRNA sense strand
ggaacagaaauuaaaccua

SEQ ID NO: 232268 - RNA, 19 nt, Homo sapiens
  misc_RNA (1)...(19): siRNA sense strand
cagcugggaacagaaauua

SEQ ID NO: 232269 - RNA, 19 nt, Homo sapiens
  misc_RNA (1)...(19): siRNA sense strand
gagcagcugggaacagaaa

SEQ ID NO: 232270 - RNA, 19 nt, Homo sapiens
  misc_RNA (1)...(19): siRNA sense strand
ccuaugagauuaaccugau

SEQ ID NO: 232271 - RNA, 19 nt, Homo sapiens
  misc_RNA (1)...(19): siRNA sense strand
uaucuuagcuagagcaaaa

SEQ ID NO: 232272 - RNA, 19 nt, Homo sapiens
  misc_RNA (1)...(19): siRNA sense strand
guacuacgcauauguaacu

SEQ ID NO: 232273 - RNA, 19 nt, Homo sapiens
  misc_RNA (1)...(19): siRNA sense strand
uuuacgagaugacauaaug

SEQ ID NO: 232274 - RNA, 19 nt, Homo sapiens
  misc_RNA (1)...(19): siRNA sense strand
uauacaagcugugaaugug

SEQ ID NO: 232275 - RNA, 19 nt, Homo sapiens
  misc_RNA (1)...(19): siRNA sense strand
uaagaaaggaguagcaaag

SEQ ID NO: 232276 - RNA, 19 nt, Homo sapiens
  misc_RNA (1)...(19): siRNA sense strand
auaaugaggcuugaugaua

SEQ ID NO: 232277 - RNA, 19 nt, Homo sapiens
  misc_RNA (1)...(19): siRNA sense strand
cacaggaggaaccaauuua

SEQ ID NO: 232278 - RNA, 19 nt, Homo sapiens
  misc_RNA (1)...(19): siRNA sense strand
uguuugcacugaucuguuu

SEQ ID NO: 232279 - RNA, 19 nt, Homo sapiens
  misc_RNA (1)...(19): siRNA sense strand
ggguuauucuugcuucuau

SEQ ID NO: 232280 - RNA, 19 nt, Homo sapiens
  misc_RNA (1)...(19): siRNA sense strand
acaccaacacaaucaauaa

SEQ ID NO: 232281 - RNA, 19 nt, Homo sapiens
  misc_RNA (1)...(19): siRNA sense strand
gggaguuacugaugggaau

SEQ ID NO: 232282 - RNA, 19 nt, Homo sapiens
  misc_RNA (1)...(19): siRNA sense strand
guaugaccaccacuauuaa

SEQ ID NO: 232283 - RNA, 19 nt, Homo sapiens
  misc_RNA (1)...(19): siRNA sense strand
ccaguacuacgcauaugua

SEQ ID NO: 232284 - RNA, 19 nt, Homo sapiens
  misc_RNA (1)...(19): siRNA sense strand
gcagauaauggaggauauu

SEQ ID NO: 232285 - RNA, 19 nt, Homo sapiens
  misc_RNA (1)...(19): siRNA sense strand
gguuauucuugcuucuaua

SEQ ID NO: 232286 - RNA, 19 nt, Homo sapiens
  misc_RNA (1)...(19): siRNA sense strand
cgagcaacauugauaagag

SEQ ID NO: 232287 - RNA, 19 nt, Homo sapiens
  misc_RNA (1)...(19): siRNA sense strand
gaacggcuagaccugaaga

SEQ ID NO: 232288 - RNA, 19 nt, Homo sapiens
  misc_RNA (1)...(19): siRNA sense strand
gauaaaccagucgaucauu

SEQ ID NO: 232289 - RNA, 19 nt, Homo sapiens
  misc_RNA (1)...(19): siRNA sense strand
cagauaaaccagucgauca

SEQ ID NO: 232290 - RNA, 19 nt, Homo sapiens
  misc_RNA (1)...(19): siRNA sense strand
ugaagaaggacaauauaca

SEQ ID NO: 232291 - RNA, 19 nt, Homo sapiens
  misc_RNA (1)...(19): siRNA sense strand
ugaauucccauuugcagaa

SEQ ID NO: 232292 - RNA, 19 nt, Homo sapiens
  misc_RNA (1)...(19): siRNA sense strand
uggaagaucaggucgcuuu

SEQ ID NO: 232293 - RNA, 19 nt, Homo sapiens
  misc_RNA (1)...(19): siRNA sense strand
uugaauugcuagccaagaa

SEQ ID NO: 232294 - RNA, 19 nt, Homo sapiens
  misc_RNA (1)...(19): siRNA sense strand
cagcaagcacagaguauga

SEQ ID NO: 232295 - RNA, 19 nt, Homo sapiens
  misc_RNA (1)...(19): siRNA sense strand
uggaggaacuaacucugaa

SEQ ID NO: 232296 - RNA, 19 nt, Homo sapiens
  misc_RNA (1)...(19): siRNA sense strand
gcauucccauugcuuuauc

SEQ ID NO: 232297 - RNA, 19 nt, Homo sapiens
  misc_RNA (1)...(19): siRNA sense strand
gcgagccuguagaagauga

SEQ ID NO: 232298 - RNA, 19 nt, Homo sapiens
  misc_RNA (1)...(19): siRNA sense strand
gaauugcuagccaagaaga

SEQ ID NO: 232299 - RNA, 19 nt, Homo sapiens
  misc_RNA (1)...(19): siRNA sense strand
cagcugagaggcccuguga

SEQ ID NO: 232300 - RNA, 19 nt, Homo sapiens
  misc_RNA (1)...(19): siRNA sense strand
ucaggucgcuuuggucauc

SEQ ID NO: 232301 - RNA, 19 nt, Homo sapiens
  misc_RNA (1)...(19): siRNA sense strand
uccaaaggaucuaagaauc

SEQ ID NO: 232302 - RNA, 19 nt, Homo sapiens
  misc_RNA (1)...(19): siRNA sense strand
ggacaauauacaagcaaug

SEQ ID NO: 232303 - RNA, 19 nt, Homo sapiens
  misc_RNA (1)...(19): siRNA sense strand
uuaaaccuauuccgagcaa

SEQ ID NO: 232304 - RNA, 19 nt, Homo sapiens
  misc_RNA (1)...(19): siRNA sense strand
gcagcugggaacagaaauu

SEQ ID NO: 232305 - RNA, 19 nt, Homo sapiens
  misc_RNA (1)...(19): siRNA sense strand
gacauaaugaggcuugaug

SEQ ID NO: 232306 - RNA, 19 nt, Homo sapiens
  misc_RNA (1)...(19): siRNA sense strand
agacacagcaacagaugaa

SEQ ID NO: 232307 - RNA, 19 nt, Homo sapiens
  misc_RNA (1)...(19): siRNA sense strand
gaaaugggcugggaaaagc

SEQ ID NO: 232308 - RNA, 19 nt, Homo sapiens
  misc_RNA (1)...(19): siRNA sense strand
gagccuguauguggcagaa

SEQ ID NO: 232309 - RNA, 19 nt, Homo sapiens
  misc_RNA (1)...(19): siRNA sense strand
gaguaugaccaccacuauu

SEQ ID NO: 232310 - RNA, 19 nt, Homo sapiens
  misc_RNA (1)...(19): siRNA sense strand
cagcagcaagcacagagua

SEQ ID NO: 232311 - RNA, 19 nt, Homo sapiens
  misc_RNA (1)...(19): siRNA sense strand
ggugauuguucccacuaga

SEQ ID NO: 232312 - RNA, 19 nt, Homo sapiens
  misc_RNA (1)...(19): siRNA sense strand
ggaaaagccaucuccuauu

SEQ ID NO: 232313 - RNA, 19 nt, Homo sapiens
  misc_RNA (1)...(19): siRNA sense strand
cugugaaugugguaauaaa

SEQ ID NO: 232314 - RNA, 19 nt, Homo sapiens
  misc_RNA (1)...(19): siRNA sense strand
agaaaggaguagcaaaggu

SEQ ID NO: 232315 - RNA, 19 nt, Homo sapiens
  misc_RNA (1)...(19): siRNA sense strand
cccauugcuuuaucuggua

SEQ ID NO: 232316 - RNA, 19 nt, Homo sapiens
  misc_RNA (1)...(19): siRNA sense strand
uaacccaguacuacgcaua

SEQ ID NO: 232317 - RNA, 19 nt, Homo sapiens
  misc_RNA (1)...(19): siRNA sense strand
gaaacccuaugagauuaac

SEQ ID NO: 232318 - RNA, 19 nt, Homo sapiens
  misc_RNA (1)...(19): siRNA sense strand
acaggcagauuuuacuaua

SEQ ID NO: 232319 - RNA, 19 nt, Homo sapiens
  misc_RNA (1)...(19): siRNA sense strand
acacagacacagcaacaga

SEQ ID NO: 232320 - RNA, 19 nt, Homo sapiens
  misc_RNA (1)...(19): siRNA sense strand
gcauccaggucagcaaaca

SEQ ID NO: 232321 - RNA, 19 nt, Homo sapiens
  misc_RNA (1)...(19): siRNA sense strand
gcucuacaggucagucaaa

SEQ ID NO: 232322 - RNA, 19 nt, Homo sapiens
  misc_RNA (1)...(19): siRNA sense strand
ccugaagaaggacaauaua

SEQ ID NO: 232323 - RNA, 19 nt, Homo sapiens
  misc_RNA (1)...(19): siRNA sense strand
gaauggaagucuauaauga

SEQ ID NO: 232324 - RNA, 19 nt, Homo sapiens
  misc_RNA (1)...(19): siRNA sense strand
gcaaagagguccaguaucu

SEQ ID NO: 232325 - RNA, 19 nt, Homo sapiens
  misc_RNA (1)...(19): siRNA sense strand
ggaagaagaugcugauuuc

SEQ ID NO: 232326 - RNA, 19 nt, Homo sapiens
  misc_RNA (1)...(19): siRNA sense strand
gaaaguaccugugaaggaa

SEQ ID NO: 232327 - RNA, 19 nt, Homo sapiens
  misc_RNA (1)...(19): siRNA sense strand
gauaugggcuuugcugaua

SEQ ID NO: 232328 - RNA, 19 nt, Homo sapiens
  misc_RNA (1)...(19): siRNA sense strand
gaugaaggauaaagaagua

SEQ ID NO: 232329 - RNA, 19 nt, Homo sapiens
  misc_RNA (1)...(19): siRNA sense strand
gcuaagaagucaaagcuaa

SEQ ID NO: 232330 - RNA, 19 nt, Homo sapiens
  misc_RNA (1)...(19): siRNA sense strand
caagaaacgucagacuuua

SEQ ID NO: 232331 - RNA, 19 nt, Homo sapiens
  misc_RNA (1)...(19): siRNA sense strand
ggaagucuauaaugaguuu

SEQ ID NO: 232332 - RNA, 19 nt, Homo sapiens
  misc_RNA (1)...(19): siRNA sense strand
gaagccaucugaagaagaa

SEQ ID NO: 232333 - RNA, 19 nt, Homo sapiens
  misc_RNA (1)...(19): siRNA sense strand
ggacagagaugaggaggaa

SEQ ID NO: 232334 - RNA, 19 nt, Homo sapiens
  misc_RNA (1)...(19): siRNA sense strand
gaauuggguucuucaguuu

SEQ ID NO: 232335 - RNA, 19 nt, Homo sapiens
  misc_RNA (1)...(19): siRNA sense strand
cgagagaacuggccuauca

SEQ ID NO: 232336 - RNA, 19 nt, Homo sapiens
  misc_RNA (1)...(19): siRNA sense strand
gagccaagccgauaaagua

SEQ ID NO: 232337 - RNA, 19 nt, Homo sapiens
  misc_RNA (1)...(19): siRNA sense strand
gaagaagagcauuguauuu

SEQ ID NO: 232338 - RNA, 19 nt, Homo sapiens
  misc_RNA (1)...(19): siRNA sense strand
acacauggaugaaacagua

SEQ ID NO: 232339 - RNA, 19 nt, Homo sapiens
  misc_RNA (1)...(19): siRNA sense strand
gcaauggacuucaacagau

SEQ ID NO: 232340 - RNA, 19 nt, Homo sapiens
  misc_RNA (1)...(19): siRNA sense strand
uaagagagcugcaguacuc

SEQ ID NO: 232341 - RNA, 19 nt, Homo sapiens
  misc_RNA (1)...(19): siRNA sense strand
caacacauauauucacaga

SEQ ID NO: 232342 - RNA, 19 nt, Homo sapiens
  misc_RNA (1)...(19): siRNA sense strand
gaggaagccuuucuggauu

SEQ ID NO: 232343 - RNA, 19 nt, Homo sapiens
  misc_RNA (1)...(19): siRNA sense strand
gauagaaucuuggauaugg

SEQ ID NO: 232344 - RNA, 19 nt, Homo sapiens
  misc_RNA (1)...(19): siRNA sense strand
caacaagucauaacagaaa

SEQ ID NO: 232345 - RNA, 19 nt, Homo sapiens
  misc_RNA (1)...(19): siRNA sense strand
ggccaaagaugaagaggaa

SEQ ID NO: 232346 - RNA, 19 nt, Homo sapiens
  misc_RNA (1)...(19): siRNA sense strand
gaaacaacccaccaaagaa

SEQ ID NO: 232347 - RNA, 19 nt, Homo sapiens
  misc_RNA (1)...(19): siRNA sense strand
gagcaacagugaaguggaa

SEQ ID NO: 232348 - RNA, 19 nt, Homo sapiens
  misc_RNA (1)...(19): siRNA sense strand
ggugaagcuuugcuaauuu

SEQ ID NO: 232349 - RNA, 19 nt, Homo sapiens
  misc_RNA (1)...(19): siRNA sense strand
gguaucaacuuacauaaag

SEQ ID NO: 232350 - RNA, 19 nt, Homo sapiens
  misc_RNA (1)...(19): siRNA sense strand
gaauaugcccugucucuug

SEQ ID NO: 232351 - RNA, 19 nt, Homo sapiens
  misc_RNA (1)...(19): siRNA sense strand
gcagaacuaugaaaagaua

SEQ ID NO: 232352 - RNA, 19 nt, Homo sapiens
  misc_RNA (1)...(19): siRNA sense strand
gaagcggcauaauguguuu

SEQ ID NO: 232353 - RNA, 19 nt, Homo sapiens
  misc_RNA (1)...(19): siRNA sense strand
caaguuaccuauaccugaa

SEQ ID NO: 232354 - RNA, 19 nt, Homo sapiens
  misc_RNA (1)...(19): siRNA sense strand
gaagaauggaagucuauaa

SEQ ID NO: 232355 - RNA, 19 nt, Homo sapiens
  misc_RNA (1)...(19): siRNA sense strand
ccaagaaacgucagacuuu

SEQ ID NO: 232356 - RNA, 19 nt, Homo sapiens
  misc_RNA (1)...(19): siRNA sense strand
agaagacgaugaagaagaa

SEQ ID NO: 232357 - RNA, 19 nt, Homo sapiens
  misc_RNA (1)...(19): siRNA sense strand
gagaggaucaacaacauaa

SEQ ID NO: 232358 - RNA, 19 nt, Homo sapiens
  misc_RNA (1)...(19): siRNA sense strand
caugaaugcuguuauugaa

SEQ ID NO: 232359 - RNA, 19 nt, Homo sapiens
  misc_RNA (1)...(19): siRNA sense strand
caacuuacauaaagcaaag

SEQ ID NO: 232360 - RNA, 19 nt, Homo sapiens
  misc_RNA (1)...(19): siRNA sense strand
ccaagccgauaaaguaauu

SEQ ID NO: 232361 - RNA, 19 nt, Homo sapiens
  misc_RNA (1)...(19): siRNA sense strand
aagaagaaauggaagagaa

SEQ ID NO: 232362 - RNA, 19 nt, Homo sapiens
  misc_RNA (1)...(19): siRNA sense strand
gaccaaaguugcagaagca

SEQ ID NO: 232363 - RNA, 19 nt, Homo sapiens
  misc_RNA (1)...(19): siRNA sense strand
gaagagaagccaacaagag

SEQ ID NO: 232364 - RNA, 19 nt, Homo sapiens
  misc_RNA (1)...(19): siRNA sense strand
caacacaaacuaaaucugu

SEQ ID NO: 232365 - RNA, 19 nt, Homo sapiens
  misc_RNA (1)...(19): siRNA sense strand
gagaaaacauuacagaaga

SEQ ID NO: 232366 - RNA, 19 nt, Homo sapiens
  misc_RNA (1)...(19): siRNA sense strand
ggcauaauguguuuggauu

SEQ ID NO: 232367 - RNA, 19 nt, Homo sapiens
  misc_RNA (1)...(19): siRNA sense strand
gaacugccagguacaaaga

SEQ ID NO: 232368 - RNA, 19 nt, Homo sapiens
  misc_RNA (1)...(19): siRNA sense strand
auaaugaguuuguccguaa

SEQ ID NO: 232369 - RNA, 19 nt, Homo sapiens
  misc_RNA (1)...(19): siRNA sense strand
gaagaagaagagcauugua

SEQ ID NO: 232370 - RNA, 19 nt, Homo sapiens
  misc_RNA (1)...(19): siRNA sense strand
ucaggaagaggacaaauuu

SEQ ID NO: 232371 - RNA, 19 nt, Homo sapiens
  misc_RNA (1)...(19): siRNA sense strand
guacaaagaggauggugaa

SEQ ID NO: 232372 - RNA, 19 nt, Homo sapiens
  misc_RNA (1)...(19): siRNA sense strand
ugacgaaguggaagaauuu

SEQ ID NO: 232373 - RNA, 19 nt, Homo sapiens
  misc_RNA (1)...(19): siRNA sense strand
uaagugugcuguauuccuu

SEQ ID NO: 232374 - RNA, 19 nt, Homo sapiens
  misc_RNA (1)...(19): siRNA sense strand
ggaagcaacugaagaaacc

SEQ ID NO: 232375 - RNA, 19 nt, Homo sapiens
  misc_RNA (1)...(19): siRNA sense strand
uaagugauaccaagaagaa

SEQ ID NO: 232376 - RNA, 19 nt, Homo sapiens
  misc_RNA (1)...(19): siRNA sense strand
ggagugaugaugaugauga

SEQ ID NO: 232377 - RNA, 19 nt, Homo sapiens
  misc_RNA (1)...(19): siRNA sense strand
agaagaagacgaugaagaa

SEQ ID NO: 232378 - RNA, 19 nt, Homo sapiens
  misc_RNA (1)...(19): siRNA sense strand
gagccuacuucaaugagaa

SEQ ID NO: 232379 - RNA, 19 nt, Homo sapiens
  misc_RNA (1)...(19): siRNA sense strand
ggauuggcuuugcaaggua

SEQ ID NO: 232380 - RNA, 19 nt, Homo sapiens
  misc_RNA (1)...(19): siRNA sense strand
ggaugaagagcugguguua

SEQ ID NO: 232381 - RNA, 19 nt, Homo sapiens
  misc_RNA (1)...(19): siRNA sense strand
gagaaaagacugaaagaaa

SEQ ID NO: 232382 - RNA, 19 nt, Homo sapiens
  misc_RNA (1)...(19): siRNA sense strand
ugaggaagaugaugacaca

SEQ ID NO: 232383 - RNA, 19 nt, Homo sapiens
  misc_RNA (1)...(19): siRNA sense strand
ggaagaagaagaagacgau

SEQ ID NO: 232384 - RNA, 19 nt, Homo sapiens
  misc_RNA (1)...(19): siRNA sense strand
guaaggagccaagccgaua

SEQ ID NO: 232385 - RNA, 19 nt, Homo sapiens
  misc_RNA (1)...(19): siRNA sense strand
cuaccgaccuccaaauguu

SEQ ID NO: 232386 - RNA, 19 nt, Homo sapiens
  misc_RNA (1)...(19): siRNA sense strand
caaagaggauggugaagcu

SEQ ID NO: 232387 - RNA, 19 nt, Homo sapiens
  misc_RNA (1)...(19): siRNA sense strand
guucagcaguggccacaaa

SEQ ID NO: 232388 - RNA, 19 nt, Homo sapiens
  misc_RNA (1)...(19): siRNA sense strand
gcacagacaggauaaugau

SEQ ID NO: 232389 - RNA, 19 nt, Homo sapiens
  misc_RNA (1)...(19): siRNA sense strand
gcagaaacaacccaccaaa

SEQ ID NO: 232390 - RNA, 19 nt, Homo sapiens
  misc_RNA (1)...(19): siRNA sense strand
gaagaaaguaccugugaag

SEQ ID NO: 232391 - RNA, 19 nt, Homo sapiens
  misc_RNA (1)...(19): siRNA sense strand
ugacugagauacagaagca

SEQ ID NO: 232392 - RNA, 19 nt, Homo sapiens
  misc_RNA (1)...(19): siRNA sense strand
gagaugaggaggaagaaga

SEQ ID NO: 232393 - RNA, 19 nt, Homo sapiens
  misc_RNA (1)...(19): siRNA sense strand
agaaacaacccaccaaaga

SEQ ID NO: 232394 - RNA, 19 nt, Homo sapiens
  misc_RNA (1)...(19): siRNA sense strand
gaggaugccaacacauaua

SEQ ID NO: 232395 - RNA, 19 nt, Homo sapiens
  misc_RNA (1)...(19): siRNA sense strand
ugagaagaauggaagucua

SEQ ID NO: 232396 - RNA, 19 nt, Homo sapiens
  misc_RNA (1)...(19): siRNA sense strand
aagcaaaggccaaagauga

SEQ ID NO: 232397 - RNA, 19 nt, Homo sapiens
  misc_RNA (1)...(19): siRNA sense strand
gaugugagcaaguuaccua

SEQ ID NO: 232398 - RNA, 19 nt, Homo sapiens
  misc_RNA (1)...(19): siRNA sense strand
gagaagaauggaagucuau

SEQ ID NO: 232399 - RNA, 19 nt, Homo sapiens
  misc_RNA (1)...(19): siRNA sense strand
uaccaugaaugcuguuauu

SEQ ID NO: 232400 - RNA, 19 nt, Homo sapiens
  misc_RNA (1)...(19): siRNA sense strand
gguguuacaucugcuaaga

SEQ ID NO: 232401 - RNA, 19 nt, Homo sapiens
  misc_RNA (1)...(19): siRNA sense strand
ggugguaucaacuuacaua

SEQ ID NO: 232402 - RNA, 19 nt, Homo sapiens
  misc_RNA (1)...(19): siRNA sense strand
gaauuuagagccuacuuca

SEQ ID NO: 232403 - RNA, 19 nt, Homo sapiens
  misc_RNA (1)...(19): siRNA sense strand
caauggacuucaacagaug

SEQ ID NO: 232404 - RNA, 19 nt, Homo sapiens
  misc_RNA (1)...(19): siRNA sense strand
ucccagauccagauaaaua

SEQ ID NO: 232405 - RNA, 19 nt, Homo sapiens
  misc_RNA (1)...(19): siRNA sense strand
ugaugaugaugauggauuu

SEQ ID NO: 232406 - RNA, 19 nt, Homo sapiens
  misc_RNA (1)...(19): siRNA sense strand
gaagaggacaaauuugaca

SEQ ID NO: 232407 - RNA, 19 nt, Homo sapiens
  misc_RNA (1)...(19): siRNA sense strand
cacaggugguaucaacuua

SEQ ID NO: 232408 - RNA, 19 nt, Homo sapiens
  misc_RNA (1)...(19): siRNA sense strand
ggccacaaaugcagaaauc

SEQ ID NO: 232409 - RNA, 19 nt, Homo sapiens
  misc_RNA (1)...(19): siRNA sense strand
gaagcagaccauuggauug

SEQ ID NO: 232410 - RNA, 19 nt, Homo sapiens
  misc_RNA (1)...(19): siRNA sense strand
gcaccacgcguaagauuuc

SEQ ID NO: 232411 - RNA, 19 nt, Homo sapiens
  misc_RNA (1)...(19): siRNA sense strand
acuuauagauguccagaaa

SEQ ID NO: 232412 - RNA, 19 nt, Homo sapiens
  misc_RNA (1)...(19): siRNA sense strand
caaacuaaaucuguaaagg

SEQ ID NO: 232413 - RNA, 19 nt, Homo sapiens
  misc_RNA (1)...(19): siRNA sense strand
ugacacaggugguaucaac

SEQ ID NO: 232414 - RNA, 19 nt, Homo sapiens
  misc_RNA (1)...(19): siRNA sense strand
gaguaugucuggguucaug

SEQ ID NO: 232415 - RNA, 19 nt, Homo sapiens
  misc_RNA (1)...(19): siRNA sense strand
cacagaagaucaaggaagu

SEQ ID NO: 232416 - RNA, 19 nt, Homo sapiens
  misc_RNA (1)...(19): siRNA sense strand
cagaagaaaguaccuguga

SEQ ID NO: 232417 - RNA, 19 nt, Homo sapiens
  misc_RNA (1)...(19): siRNA sense strand
gcaaaugagaagaauggaa

SEQ ID NO: 232418 - RNA, 19 nt, Homo sapiens
  misc_RNA (1)...(19): siRNA sense strand
uggugaagcuuugcuaauu

SEQ ID NO: 232419 - RNA, 19 nt, Homo sapiens
  misc_RNA (1)...(19): siRNA sense strand
uaauaucaccuacgagaga

SEQ ID NO: 232420 - RNA, 19 nt, Homo sapiens
  misc_RNA (1)...(19): siRNA sense strand
augaagagcugguguuaca

SEQ ID NO: 232421 - RNA, 19 nt, Homo sapiens
  misc_RNA (1)...(19): siRNA sense strand
caaggaugcugaggaagau

SEQ ID NO: 232422 - RNA, 19 nt, Homo sapiens
  misc_RNA (1)...(19): siRNA sense strand
ggauaaugauacugguaau

SEQ ID NO: 232423 - RNA, 19 nt, Homo sapiens
  misc_RNA (1)...(19): siRNA sense strand
ugaagcagauccuguauuu

SEQ ID NO: 232424 - RNA, 19 nt, Homo sapiens
  misc_RNA (1)...(19): siRNA sense strand
caacuucucugacaaccua

SEQ ID NO: 232425 - RNA, 19 nt, Homo sapiens
  misc_RNA (1)...(19): siRNA sense strand
gaagaacacauaacuaaga

SEQ ID NO: 232426 - RNA, 19 nt, Homo sapiens
  misc_RNA (1)...(19): siRNA sense strand
ggacggagcugaagaccau

SEQ ID NO: 232427 - RNA, 19 nt, Homo sapiens
  misc_RNA (1)...(19): siRNA sense strand
ggaaggcucugguggagaa

SEQ ID NO: 232428 - RNA, 19 nt, Homo sapiens
  misc_RNA (1)...(19): siRNA sense strand
aaagagagcugccucagau

SEQ ID NO: 232429 - RNA, 19 nt, Homo sapiens
  misc_RNA (1)...(19): siRNA sense strand
gcagaaccuuuguguaaau

SEQ ID NO: 232430 - RNA, 19 nt, Homo sapiens
  misc_RNA (1)...(19): siRNA sense strand
gaagauggccuacuuggau

SEQ ID NO: 232431 - RNA, 19 nt, Homo sapiens
  misc_RNA (1)...(19): siRNA sense strand
gaauccagcugugcacuuu

SEQ ID NO: 232432 - RNA, 19 nt, Homo sapiens
  misc_RNA (1)...(19): siRNA sense strand
gaagaagcgugaagaagag

SEQ ID NO: 232433 - RNA, 19 nt, Homo sapiens
  misc_RNA (1)...(19): siRNA sense strand
gaaccuuuguguaaaugaa

SEQ ID NO: 232434 - RNA, 19 nt, Homo sapiens
  misc_RNA (1)...(19): siRNA sense strand
gcaggaagaagaagaaaga

SEQ ID NO: 232435 - RNA, 19 nt, Homo sapiens
  misc_RNA (1)...(19): siRNA sense strand
gcagagcuguaccggguuu

SEQ ID NO: 232436 - RNA, 19 nt, Homo sapiens
  misc_RNA (1)...(19): siRNA sense strand
cggcagaaccuuuguguaa

SEQ ID NO: 232437 - RNA, 19 nt, Homo sapiens
  misc_RNA (1)...(19): siRNA sense strand
gaaauucguggcugugcua

SEQ ID NO: 232438 - RNA, 19 nt, Homo sapiens
  misc_RNA (1)...(19): siRNA sense strand
gggaucaacuucucugaca

SEQ ID NO: 232439 - RNA, 19 nt, Homo sapiens
  misc_RNA (1)...(19): siRNA sense strand
ggcagaaccuuuguguaaa

SEQ ID NO: 232440 - RNA, 19 nt, Homo sapiens
  misc_RNA (1)...(19): siRNA sense strand
ccaagaaccugauguaccu

SEQ ID NO: 232441 - RNA, 19 nt, Homo sapiens
  misc_RNA (1)...(19): siRNA sense strand
agaagaagcgugaagaaga

SEQ ID NO: 232442 - RNA, 19 nt, Homo sapiens
  misc_RNA (1)...(19): siRNA sense strand
gaacagaagaagcgugaag

SEQ ID NO: 232443 - RNA, 19 nt, Homo sapiens
  misc_RNA (1)...(19): siRNA sense strand
guggagaaccugugcauga

SEQ ID NO: 232444 - RNA, 19 nt, Homo sapiens
  misc_RNA (1)...(19): siRNA sense strand
aggaagaacacauaacuaa

SEQ ID NO: 232445 - RNA, 19 nt, Homo sapiens
  misc_RNA (1)...(19): siRNA sense strand
gaagaagaagaaagagaga

SEQ ID NO: 232446 - RNA, 19 nt, Homo sapiens
  misc_RNA (1)...(19): siRNA sense strand
gaaagaugaaucccugugu

SEQ ID NO: 232447 - RNA, 19 nt, Homo sapiens
  misc_RNA (1)...(19): siRNA sense strand
gaagguuggugccauccau

SEQ ID NO: 232448 - RNA, 19 nt, Homo sapiens
  misc_RNA (1)...(19): siRNA sense strand
gaggaagaacacauaacua

SEQ ID NO: 232449 - RNA, 19 nt, Homo sapiens
  misc_RNA (1)...(19): siRNA sense strand
gaagaccaucaacgacuuu

SEQ ID NO: 232450 - RNA, 19 nt, Homo sapiens
  misc_RNA (1)...(19): siRNA sense strand
gugcagcgauacugugaga

SEQ ID NO: 232451 - RNA, 19 nt, Homo sapiens
  misc_RNA (1)...(19): siRNA sense strand
caucaacgacuuucucuuc

SEQ ID NO: 232452 - RNA, 19 nt, Homo sapiens
  misc_RNA (1)...(19): siRNA sense strand
gaacuggccccuuacauga

SEQ ID NO: 232453 - RNA, 19 nt, Homo sapiens
  misc_RNA (1)...(19): siRNA sense strand
cgagagugaugaggagaaa

SEQ ID NO: 232454 - RNA, 19 nt, Homo sapiens
  misc_RNA (1)...(19): siRNA sense strand
ggaggaagcagcgagaaga

SEQ ID NO: 232455 - RNA, 19 nt, Homo sapiens
  misc_RNA (1)...(19): siRNA sense strand
uuacucaguuugugcagaa

SEQ ID NO: 232456 - RNA, 19 nt, Homo sapiens
  misc_RNA (1)...(19): siRNA sense strand
ugaagaccaucaacgacuu

SEQ ID NO: 232457 - RNA, 19 nt, Homo sapiens
  misc_RNA (1)...(19): siRNA sense strand
ugauguaccugaagcagau

SEQ ID NO: 232458 - RNA, 19 nt, Homo sapiens
  misc_RNA (1)...(19): siRNA sense strand
aggaugaccuggaggaaga

SEQ ID NO: 232459 - RNA, 19 nt, Homo sapiens
  misc_RNA (1)...(19): siRNA sense strand
gaauucacguuccagaaaa

SEQ ID NO: 232460 - RNA, 19 nt, Homo sapiens
  misc_RNA (1)...(19): siRNA sense strand
guacggagcaguguucuca

SEQ ID NO: 232461 - RNA, 19 nt, Homo sapiens
  misc_RNA (1)...(19): siRNA sense strand
ggaggaagaacacauaacu

SEQ ID NO: 232462 - RNA, 19 nt, Homo sapiens
  misc_RNA (1)...(19): siRNA sense strand
ggccuggguuacucaguuu

SEQ ID NO: 232463 - RNA, 19 nt, Homo sapiens
  misc_RNA (1)...(19): siRNA sense strand
aggagaagauggccuacuu

SEQ ID NO: 232464 - RNA, 19 nt, Homo sapiens
  misc_RNA (1)...(19): siRNA sense strand
ggaagaacacauaacuaag

SEQ ID NO: 232465 - RNA, 19 nt, Homo sapiens
  misc_RNA (1)...(19): siRNA sense strand
ggaucaacuucucugacaa

SEQ ID NO: 232466 - RNA, 19 nt, Homo sapiens
  misc_RNA (1)...(19): siRNA sense strand
ggagagaggccaggugaca

SEQ ID NO: 232467 - RNA, 19 nt, Homo sapiens
  misc_RNA (1)...(19): siRNA sense strand
gcacgacuccuugaaacug

SEQ ID NO: 232468 - RNA, 19 nt, Homo sapiens
  misc_RNA (1)...(19): siRNA sense strand
ggagaagauggccuacuug

SEQ ID NO: 232469 - RNA, 19 nt, Homo sapiens
  misc_RNA (1)...(19): siRNA sense strand
cgaccagcuucuccacuga

SEQ ID NO: 232470 - RNA, 19 nt, Homo sapiens
  misc_RNA (1)...(19): siRNA sense strand
ugcaguacguggagcgaua

SEQ ID NO: 232471 - RNA, 19 nt, Homo sapiens
  misc_RNA (1)...(19): siRNA sense strand
gggugcagcucaaguaugc

SEQ ID NO: 232472 - RNA, 19 nt, Homo sapiens
  misc_RNA (1)...(19): siRNA sense strand
gaugaaucccugugucugu

SEQ ID NO: 232473 - RNA, 19 nt, Homo sapiens
  misc_RNA (1)...(19): siRNA sense strand
uggagaaccugugcaugaa

SEQ ID NO: 232474 - RNA, 19 nt, Homo sapiens
  misc_RNA (1)...(19): siRNA sense strand
gcacugggaaguccuuaag

SEQ ID NO: 232475 - RNA, 19 nt, Homo sapiens
  misc_RNA (1)...(19): siRNA sense strand
gcagcgggaucuccaacca

SEQ ID NO: 232476 - RNA, 19 nt, Homo sapiens
  misc_RNA (1)...(19): siRNA sense strand
ccaugcagccggugucuga

SEQ ID NO: 232477 - RNA, 19 nt, Homo sapiens
  misc_RNA (1)...(19): siRNA sense strand
uggcagaggugaaggacau

SEQ ID NO: 232478 - RNA, 19 nt, Homo sapiens
  misc_RNA (1)...(19): siRNA sense strand
ggaggaggcaggagaagca

SEQ ID NO: 232479 - RNA, 19 nt, Homo sapiens
  misc_RNA (1)...(19): siRNA sense strand
gaggaagcagcgagaagaa

SEQ ID NO: 232480 - RNA, 19 nt, Homo sapiens
  misc_RNA (1)...(19): siRNA sense strand
gaggcacgacuccuugaaa

SEQ ID NO: 232481 - RNA, 19 nt, Homo sapiens
  misc_RNA (1)...(19): siRNA sense strand
ucaggcaccagaaggauuu

SEQ ID NO: 232482 - RNA, 19 nt, Homo sapiens
  misc_RNA (1)...(19): siRNA sense strand
gaagaagaaagagagaauc

SEQ ID NO: 232483 - RNA, 19 nt, Homo sapiens
  misc_RNA (1)...(19): siRNA sense strand
ggaggaaagaugagugaag

SEQ ID NO: 232484 - RNA, 19 nt, Homo sapiens
  misc_RNA (1)...(19): siRNA sense strand
cagaaccuuuguguaaaug

SEQ ID NO: 232485 - RNA, 19 nt, Homo sapiens
  misc_RNA (1)...(19): siRNA sense strand
uguucaaggugcagcgaua

SEQ ID NO: 232486 - RNA, 19 nt, Homo sapiens
  misc_RNA (1)...(19): siRNA sense strand
cagcgauacugugagaaga

SEQ ID NO: 232487 - RNA, 19 nt, Homo sapiens
  misc_RNA (1)...(19): siRNA sense strand
gcaugaaggccgucaacca

SEQ ID NO: 232488 - RNA, 19 nt, Homo sapiens
  misc_RNA (1)...(19): siRNA sense strand
cggccuggguuacucaguu

SEQ ID NO: 232489 - RNA, 19 nt, Homo sapiens
  misc_RNA (1)...(19): siRNA sense strand
gcagcgauacugugagaag

SEQ ID NO: 232490 - RNA, 19 nt, Homo sapiens
  misc_RNA (1)...(19): siRNA sense strand
gaggcaggaagaagaagaa

SEQ ID NO: 232491 - RNA, 19 nt, Homo sapiens
  misc_RNA (1)...(19): siRNA sense strand
uggaugaggaugaggauga

SEQ ID NO: 232492 - RNA, 19 nt, Homo sapiens
  misc_RNA (1)...(19): siRNA sense strand
cccaaguggugaaggaaug

SEQ ID NO: 232493 - RNA, 19 nt, Homo sapiens
  misc_RNA (1)...(19): siRNA sense strand
caggacgacugaagcucuu

SEQ ID NO: 232494 - RNA, 19 nt, Homo sapiens
  misc_RNA (1)...(19): siRNA sense strand
uagguucugugcagcuuau

SEQ ID NO: 232495 - RNA, 19 nt, Homo sapiens
  misc_RNA (1)...(19): siRNA sense strand
ugcaugaggugaagaagag

SEQ ID NO: 232496 - RNA, 19 nt, Homo sapiens
  misc_RNA (1)...(19): siRNA sense strand
ggaccugguggaccgacua

SEQ ID NO: 232497 - RNA, 19 nt, Homo sapiens
  misc_RNA (1)...(19): siRNA sense strand
agagagcugccucagauga

SEQ ID NO: 232498 - RNA, 19 nt, Homo sapiens
  misc_RNA (1)...(19): siRNA sense strand
agacagggacggagcugaa

SEQ ID NO: 232499 - RNA, 19 nt, Homo sapiens
  misc_RNA (1)...(19): siRNA sense strand
aagcagauccuguauuugc

SEQ ID NO: 232500 - RNA, 19 nt, Homo sapiens
  misc_RNA (1)...(19): siRNA sense strand
agaagaagaaagagagaau

SEQ ID NO: 232501 - RNA, 19 nt, Homo sapiens
  misc_RNA (1)...(19): siRNA sense strand
acagggugcagcucaagua

SEQ ID NO: 232502 - RNA, 19 nt, Homo sapiens
  misc_RNA (1)...(19): siRNA sense strand
uacaugaugagaaagauga

SEQ ID NO: 232503 - RNA, 19 nt, Homo sapiens
  misc_RNA (1)...(19): siRNA sense strand
gcuccucucugugguugga

SEQ ID NO: 232504 - RNA, 19 nt, Homo sapiens
  misc_RNA (1)...(19): siRNA sense strand
gaacgguacggagcagugu

SEQ ID NO: 232505 - RNA, 19 nt, Homo sapiens
  misc_RNA (1)...(19): siRNA sense strand
gaagcagauccuguauuug

SEQ ID NO: 232506 - RNA, 19 nt, Homo sapiens
  misc_RNA (1)...(19): siRNA sense strand
ccuggaggaagaacacaua

SEQ ID NO: 232507 - RNA, 19 nt, Homo sapiens
  misc_RNA (1)...(19): siRNA sense strand
gaaucccugugucugucuu

SEQ ID NO: 232508 - RNA, 19 nt, Homo sapiens
  misc_RNA (1)...(19): siRNA sense strand
ucucuuggcuccgugacuu

SEQ ID NO: 232509 - RNA, 19 nt, Homo sapiens
  misc_RNA (1)...(19): siRNA sense strand
gaucaacuucucugacaac

SEQ ID NO: 232510 - RNA, 19 nt, Homo sapiens
  misc_RNA (1)...(19): siRNA sense strand
uaaugaaacacagaagguu

SEQ ID NO: 232511 - RNA, 19 nt, Homo sapiens
  misc_RNA (1)...(19): siRNA sense strand
gaggaggagaagccaaaga

SEQ ID NO: 232512 - RNA, 19 nt, Homo sapiens
  misc_RNA (1)...(19): siRNA sense strand
acagaagaagcgugaagaa

SEQ ID NO: 232513 - RNA, 19 nt, Homo sapiens
  misc_RNA (1)...(19): siRNA sense strand
ggaacuggccccuuacaug

SEQ ID NO: 232514 - RNA, 19 nt, Homo sapiens
  misc_RNA (1)...(19): siRNA sense strand
ugagugaagggaucaacuu

SEQ ID NO: 232515 - RNA, 19 nt, Homo sapiens
  misc_RNA (1)...(19): siRNA sense strand
gagagcugccucagaugau

SEQ ID NO: 232516 - RNA, 19 nt, Homo sapiens
  misc_RNA (1)...(19): siRNA sense strand
cgugaucccuccagacaac

SEQ ID NO: 232517 - RNA, 19 nt, Homo sapiens
  misc_RNA (1)...(19): siRNA sense strand
uggcccaguuugugcauga

SEQ ID NO: 232518 - RNA, 19 nt, Homo sapiens
  misc_RNA (1)...(19): siRNA sense strand
agaagaggcacgacuccuu

SEQ ID NO: 232519 - RNA, 19 nt, Homo sapiens
  misc_RNA (1)...(19): siRNA sense strand
gugcaugaggugaagaaga

SEQ ID NO: 232520 - RNA, 19 nt, Homo sapiens
  misc_RNA (1)...(19): siRNA sense strand
gugguuggaggaaagauga

SEQ ID NO: 232521 - RNA, 19 nt, Homo sapiens
  misc_RNA (1)...(19): siRNA sense strand
uguaaaugaagacgugaaa

SEQ ID NO: 232522 - RNA, 19 nt, Homo sapiens
  misc_RNA (1)...(19): siRNA sense strand
caaggugcagcgauacugu

SEQ ID NO: 232523 - RNA, 19 nt, Homo sapiens
  misc_RNA (1)...(19): siRNA sense strand
ugaagcagauccuguauuu

SEQ ID NO: 232524 - RNA, 19 nt, Homo sapiens
  misc_RNA (1)...(19): siRNA sense strand
caacuucucugacaaccua

SEQ ID NO: 232525 - RNA, 19 nt, Homo sapiens
  misc_RNA (1)...(19): siRNA sense strand
gaagaacacauaacuaaga

SEQ ID NO: 232526 - RNA, 19 nt, Homo sapiens
  misc_RNA (1)...(19): siRNA sense strand
ggacggagcugaagaccau

SEQ ID NO: 232527 - RNA, 19 nt, Homo sapiens
  misc_RNA (1)...(19): siRNA sense strand
ggaaggcucugguggagaa

SEQ ID NO: 232528 - RNA, 19 nt, Homo sapiens
  misc_RNA (1)...(19): siRNA sense strand
aaagagagcugccucagau

SEQ ID NO: 232529 - RNA, 19 nt, Homo sapiens
  misc_RNA (1)...(19): siRNA sense strand
gcagaaccuuuguguaaau

SEQ ID NO: 232530 - RNA, 19 nt, Homo sapiens
  misc_RNA (1)...(19): siRNA sense strand
gaagauggccuacuuggau

SEQ ID NO: 232531 - RNA, 19 nt, Homo sapiens
  misc_RNA (1)...(19): siRNA sense strand
gaauccagcugugcacuuu

SEQ ID NO: 232532 - RNA, 19 nt, Homo sapiens
  misc_RNA (1)...(19): siRNA sense strand
gaagaagcgugaagaagag

SEQ ID NO: 232533 - RNA, 19 nt, Homo sapiens
  misc_RNA (1)...(19): siRNA sense strand
gaaccuuuguguaaaugaa

SEQ ID NO: 232534 - RNA, 19 nt, Homo sapiens
  misc_RNA (1)...(19): siRNA sense strand
gcaggaagaagaagaaaga

SEQ ID NO: 232535 - RNA, 19 nt, Homo sapiens
  misc_RNA (1)...(19): siRNA sense strand
gcagagcuguaccggguuu

SEQ ID NO: 232536 - RNA, 19 nt, Homo sapiens
  misc_RNA (1)...(19): siRNA sense strand
cggcagaaccuuuguguaa

SEQ ID NO: 232537 - RNA, 19 nt, Homo sapiens
  misc_RNA (1)...(19): siRNA sense strand
gaaauucguggcugugcua

SEQ ID NO: 232538 - RNA, 19 nt, Homo sapiens
  misc_RNA (1)...(19): siRNA sense strand
gggaucaacuucucugaca

SEQ ID NO: 232539 - RNA, 19 nt, Homo sapiens
  misc_RNA (1)...(19): siRNA sense strand
ggcagaaccuuuguguaaa

SEQ ID NO: 232540 - RNA, 19 nt, Homo sapiens
  misc_RNA (1)...(19): siRNA sense strand
ccaagaaccugauguaccu

SEQ ID NO: 232541 - RNA, 19 nt, Homo sapiens
  misc_RNA (1)...(19): siRNA sense strand
agaagaagcgugaagaaga

SEQ ID NO: 232542 - RNA, 19 nt, Homo sapiens
  misc_RNA (1)...(19): siRNA sense strand
gaacagaagaagcgugaag

SEQ ID NO: 232543 - RNA, 19 nt, Homo sapiens
  misc_RNA (1)...(19): siRNA sense strand
guggagaaccugugcauga

SEQ ID NO: 232544 - RNA, 19 nt, Homo sapiens
  misc_RNA (1)...(19): siRNA sense strand
aggaagaacacauaacuaa

SEQ ID NO: 232545 - RNA, 19 nt, Homo sapiens
  misc_RNA (1)...(19): siRNA sense strand
gaagaagaagaaagagaga

SEQ ID NO: 232546 - RNA, 19 nt, Homo sapiens
  misc_RNA (1)...(19): siRNA sense strand
gaaagaugaaucccugugu

SEQ ID NO: 232547 - RNA, 19 nt, Homo sapiens
  misc_RNA (1)...(19): siRNA sense strand
gaagguuggugccauccau

SEQ ID NO: 232548 - RNA, 19 nt, Homo sapiens
  misc_RNA (1)...(19): siRNA sense strand
gaggaagaacacauaacua

SEQ ID NO: 232549 - RNA, 19 nt, Homo sapiens
  misc_RNA (1)...(19): siRNA sense strand
gaagaccaucaacgacuuu

SEQ ID NO: 232550 - RNA, 19 nt, Homo sapiens
  misc_RNA (1)...(19): siRNA sense strand
gugcagcgauacugugaga

SEQ ID NO: 232551 - RNA, 19 nt, Homo sapiens
  misc_RNA (1)...(19): siRNA sense strand
caucaacgacuuucucuuc

SEQ ID NO: 232552 - RNA, 19 nt, Homo sapiens
  misc_RNA (1)...(19): siRNA sense strand
gaacuggccccuuacauga

SEQ ID NO: 232553 - RNA, 19 nt, Homo sapiens
  misc_RNA (1)...(19): siRNA sense strand
cgagagugaugaggagaaa

SEQ ID NO: 232554 - RNA, 19 nt, Homo sapiens
  misc_RNA (1)...(19): siRNA sense strand
ggaggaagcagcgagaaga

SEQ ID NO: 232555 - RNA, 19 nt, Homo sapiens
  misc_RNA (1)...(19): siRNA sense strand
uuacucaguuugugcagaa

SEQ ID NO: 232556 - RNA, 19 nt, Homo sapiens
  misc_RNA (1)...(19): siRNA sense strand
ugaagaccaucaacgacuu

SEQ ID NO: 232557 - RNA, 19 nt, Homo sapiens
  misc_RNA (1)...(19): siRNA sense strand
ugauguaccugaagcagau

SEQ ID NO: 232558 - RNA, 19 nt, Homo sapiens
  misc_RNA (1)...(19): siRNA sense strand
aggaugaccuggaggaaga

SEQ ID NO: 232559 - RNA, 19 nt, Homo sapiens
  misc_RNA (1)...(19): siRNA sense strand
gaauucacguuccagaaaa

SEQ ID NO: 232560 - RNA, 19 nt, Homo sapiens
  misc_RNA (1)...(19): siRNA sense strand
guacggagcaguguucuca

SEQ ID NO: 232561 - RNA, 19 nt, Homo sapiens
  misc_RNA (1)...(19): siRNA sense strand
ggaggaagaacacauaacu

SEQ ID NO: 232562 - RNA, 19 nt, Homo sapiens
  misc_RNA (1)...(19): siRNA sense strand
ggccuggguuacucaguuu

SEQ ID NO: 232563 - RNA, 19 nt, Homo sapiens
  misc_RNA (1)...(19): siRNA sense strand
aggagaagauggccuacuu

SEQ ID NO: 232564 - RNA, 19 nt, Homo sapiens
  misc_RNA (1)...(19): siRNA sense strand
ggaagaacacauaacuaag

SEQ ID NO: 232565 - RNA, 19 nt, Homo sapiens
  misc_RNA (1)...(19): siRNA sense strand
ggaucaacuucucugacaa

SEQ ID NO: 232566 - RNA, 19 nt, Homo sapiens
  misc_RNA (1)...(19): siRNA sense strand
ggagagaggccaggugaca

SEQ ID NO: 232567 - RNA, 19 nt, Homo sapiens
  misc_RNA (1)...(19): siRNA sense strand
gcacgacuccuugaaacug

SEQ ID NO: 232568 - RNA, 19 nt, Homo sapiens
  misc_RNA (1)...(19): siRNA sense strand
ggagaagauggccuacuug

SEQ ID NO: 232569 - RNA, 19 nt, Homo sapiens
  misc_RNA (1)...(19): siRNA sense strand
cgaccagcuucuccacuga

SEQ ID NO: 232570 - RNA, 19 nt, Homo sapiens
  misc_RNA (1)...(19): siRNA sense strand
ugcaguacguggagcgaua

SEQ ID NO: 232571 - RNA, 19 nt, Homo sapiens
  misc_RNA (1)...(19): siRNA sense strand
gggugcagcucaaguaugc

SEQ ID NO: 232572 - RNA, 19 nt, Homo sapiens
  misc_RNA (1)...(19): siRNA sense strand
gaugaaucccugugucugu

SEQ ID NO: 232573 - RNA, 19 nt, Homo sapiens
  misc_RNA (1)...(19): siRNA sense strand
uggagaaccugugcaugaa

SEQ ID NO: 232574 - RNA, 19 nt, Homo sapiens
  misc_RNA (1)...(19): siRNA sense strand
gcacugggaaguccuuaag

SEQ ID NO: 232575 - RNA, 19 nt, Homo sapiens
  misc_RNA (1)...(19): siRNA sense strand
gcagcgggaucuccaacca

SEQ ID NO: 232576 - RNA, 19 nt, Homo sapiens
  misc_RNA (1)...(19): siRNA sense strand
ccaugcagccggugucuga

SEQ ID NO: 232577 - RNA, 19 nt, Homo sapiens
  misc_RNA (1)...(19): siRNA sense strand
uggcagaggugaaggacau

SEQ ID NO: 232578 - RNA, 19 nt, Homo sapiens
  misc_RNA (1)...(19): siRNA sense strand
ggaggaggcaggagaagca

SEQ ID NO: 232579 - RNA, 19 nt, Homo sapiens
  misc_RNA (1)...(19): siRNA sense strand
gaggaagcagcgagaagaa

SEQ ID NO: 232580 - RNA, 19 nt, Homo sapiens
  misc_RNA (1)...(19): siRNA sense strand
gaggcacgacuccuugaaa

SEQ ID NO: 232581 - RNA, 19 nt, Homo sapiens
  misc_RNA (1)...(19): siRNA sense strand
ucaggcaccagaaggauuu

SEQ ID NO: 232582 - RNA, 19 nt, Homo sapiens
  misc_RNA (1)...(19): siRNA sense strand
gaagaagaaagagagaauc

SEQ ID NO: 232583 - RNA, 19 nt, Homo sapiens
  misc_RNA (1)...(19): siRNA sense strand
ggaggaaagaugagugaag

SEQ ID NO: 232584 - RNA, 19 nt, Homo sapiens
  misc_RNA (1)...(19): siRNA sense strand
cagaaccuuuguguaaaug

SEQ ID NO: 232585 - RNA, 19 nt, Homo sapiens
  misc_RNA (1)...(19): siRNA sense strand
uguucaaggugcagcgaua

SEQ ID NO: 232586 - RNA, 19 nt, Homo sapiens
  misc_RNA (1)...(19): siRNA sense strand
cagcgauacugugagaaga

SEQ ID NO: 232587 - RNA, 19 nt, Homo sapiens
  misc_RNA (1)...(19): siRNA sense strand
gcaugaaggccgucaacca

SEQ ID NO: 232588 - RNA, 19 nt, Homo sapiens
  misc_RNA (1)...(19): siRNA sense strand
cggccuggguuacucaguu

SEQ ID NO: 232589 - RNA, 19 nt, Homo sapiens
  misc_RNA (1)...(19): siRNA sense strand
gcagcgauacugugagaag

SEQ ID NO: 232590 - RNA, 19 nt, Homo sapiens
  misc_RNA (1)...(19): siRNA sense strand
gaggcaggaagaagaagaa

SEQ ID NO: 232591 - RNA, 19 nt, Homo sapiens
  misc_RNA (1)...(19): siRNA sense strand
uggaugaggaugaggauga

SEQ ID NO: 232592 - RNA, 19 nt, Homo sapiens
  misc_RNA (1)...(19): siRNA sense strand
cccaaguggugaaggaaug

SEQ ID NO: 232593 - RNA, 19 nt, Homo sapiens
  misc_RNA (1)...(19): siRNA sense strand
caggacgacugaagcucuu

SEQ ID NO: 232594 - RNA, 19 nt, Homo sapiens
  misc_RNA (1)...(19): siRNA sense strand
uagguucugugcagcuuau

SEQ ID NO: 232595 - RNA, 19 nt, Homo sapiens
  misc_RNA (1)...(19): siRNA sense strand
ugcaugaggugaagaagag

SEQ ID NO: 232596 - RNA, 19 nt, Homo sapiens
  misc_RNA (1)...(19): siRNA sense strand
ggaccugguggaccgacua

SEQ ID NO: 232597 - RNA, 19 nt, Homo sapiens
  misc_RNA (1)...(19): siRNA sense strand
agagagcugccucagauga

SEQ ID NO: 232598 - RNA, 19 nt, Homo sapiens
  misc_RNA (1)...(19): siRNA sense strand
agacagggacggagcugaa

SEQ ID NO: 232599 - RNA, 19 nt, Homo sapiens
  misc_RNA (1)...(19): siRNA sense strand
aagcagauccuguauuugc

SEQ ID NO: 232600 - RNA, 19 nt, Homo sapiens
  misc_RNA (1)...(19): siRNA sense strand
agaagaagaaagagagaau

SEQ ID NO: 232601 - RNA, 19 nt, Homo sapiens
  misc_RNA (1)...(19): siRNA sense strand
acagggugcagcucaagua

SEQ ID NO: 232602 - RNA, 19 nt, Homo sapiens
  misc_RNA (1)...(19): siRNA sense strand
uacaugaugagaaagauga

SEQ ID NO: 232603 - RNA, 19 nt, Homo sapiens
  misc_RNA (1)...(19): siRNA sense strand
gcuccucucugugguugga

SEQ ID NO: 232604 - RNA, 19 nt, Homo sapiens
  misc_RNA (1)...(19): siRNA sense strand
gaacgguacggagcagugu

SEQ ID NO: 232605 - RNA, 19 nt, Homo sapiens
  misc_RNA (1)...(19): siRNA sense strand
gaagcagauccuguauuug

SEQ ID NO: 232606 - RNA, 19 nt, Homo sapiens
  misc_RNA (1)...(19): siRNA sense strand
ccuggaggaagaacacaua

SEQ ID NO: 232607 - RNA, 19 nt, Homo sapiens
  misc_RNA (1)...(19): siRNA sense strand
gaaucccugugucugucuu

SEQ ID NO: 232608 - RNA, 19 nt, Homo sapiens
  misc_RNA (1)...(19): siRNA sense strand
ucucuuggcuccgugacuu

SEQ ID NO: 232609 - RNA, 19 nt, Homo sapiens
  misc_RNA (1)...(19): siRNA sense strand
gaucaacuucucugacaac

SEQ ID NO: 232610 - RNA, 19 nt, Homo sapiens
  misc_RNA (1)...(19): siRNA sense strand
uaaugaaacacagaagguu

SEQ ID NO: 232611 - RNA, 19 nt, Homo sapiens
  misc_RNA (1)...(19): siRNA sense strand
gaggaggagaagccaaaga

SEQ ID NO: 232612 - RNA, 19 nt, Homo sapiens
  misc_RNA (1)...(19): siRNA sense strand
acagaagaagcgugaagaa

SEQ ID NO: 232613 - RNA, 19 nt, Homo sapiens
  misc_RNA (1)...(19): siRNA sense strand
ggaacuggccccuuacaug

SEQ ID NO: 232614 - RNA, 19 nt, Homo sapiens
  misc_RNA (1)...(19): siRNA sense strand
ugagugaagggaucaacuu

SEQ ID NO: 232615 - RNA, 19 nt, Homo sapiens
  misc_RNA (1)...(19): siRNA sense strand
gagagcugccucagaugau

SEQ ID NO: 232616 - RNA, 19 nt, Homo sapiens
  misc_RNA (1)...(19): siRNA sense strand
cgugaucccuccagacaac

SEQ ID NO: 232617 - RNA, 19 nt, Homo sapiens
  misc_RNA (1)...(19): siRNA sense strand
uggcccaguuugugcauga

SEQ ID NO: 232618 - RNA, 19 nt, Homo sapiens
  misc_RNA (1)...(19): siRNA sense strand
agaagaggcacgacuccuu

SEQ ID NO: 232619 - RNA, 19 nt, Homo sapiens
  misc_RNA (1)...(19): siRNA sense strand
gugcaugaggugaagaaga

SEQ ID NO: 232620 - RNA, 19 nt, Homo sapiens
  misc_RNA (1)...(19): siRNA sense strand
gugguuggaggaaagauga

SEQ ID NO: 232621 - RNA, 19 nt, Homo sapiens
  misc_RNA (1)...(19): siRNA sense strand
uguaaaugaagacgugaaa

SEQ ID NO: 232622 - RNA, 19 nt, Homo sapiens
  misc_RNA (1)...(19): siRNA sense strand
caaggugcagcgauacugu

SEQ ID NO: 232623 - RNA, 19 nt, Homo sapiens
  misc_RNA (1)...(19): siRNA sense strand
gaagaagcgugaagaagag

SEQ ID NO: 232624 - RNA, 19 nt, Homo sapiens
  misc_RNA (1)...(19): siRNA sense strand
gcaggaagaagaagaaaga

SEQ ID NO: 232625 - RNA, 19 nt, Homo sapiens
  misc_RNA (1)...(19): siRNA sense strand
gcagagcuguaccggguuu

SEQ ID NO: 232626 - RNA, 19 nt, Homo sapiens
  misc_RNA (1)...(19): siRNA sense strand
agaagaagcgugaagaaga

SEQ ID NO: 232627 - RNA, 19 nt, Homo sapiens
  misc_RNA (1)...(19): siRNA sense strand
gaacagaagaagcgugaag

SEQ ID NO: 232628 - RNA, 19 nt, Homo sapiens
  misc_RNA (1)...(19): siRNA sense strand
gaagaagaagaaagagaga

SEQ ID NO: 232629 - RNA, 19 nt, Homo sapiens
  misc_RNA (1)...(19): siRNA sense strand
gaagguuggugccauccau

SEQ ID NO: 232630 - RNA, 19 nt, Homo sapiens
  misc_RNA (1)...(19): siRNA sense strand
gaaagaugaaucccugugu

SEQ ID NO: 232631 - RNA, 19 nt, Homo sapiens
  misc_RNA (1)...(19): siRNA sense strand
gaacuggccccuuacauga

SEQ ID NO: 232632 - RNA, 19 nt, Homo sapiens
  misc_RNA (1)...(19): siRNA sense strand
cgagagugaugaggagaaa

SEQ ID NO: 232633 - RNA, 19 nt, Homo sapiens
  misc_RNA (1)...(19): siRNA sense strand
ggaggaagcagcgagaaga

SEQ ID NO: 232634 - RNA, 19 nt, Homo sapiens
  misc_RNA (1)...(19): siRNA sense strand
uuacucaguuugugcagaa

SEQ ID NO: 232635 - RNA, 19 nt, Homo sapiens
  misc_RNA (1)...(19): siRNA sense strand
aggaugaccuggaggaaga

SEQ ID NO: 232636 - RNA, 19 nt, Homo sapiens
  misc_RNA (1)...(19): siRNA sense strand
ggccuggguuacucaguuu

SEQ ID NO: 232637 - RNA, 19 nt, Homo sapiens
  misc_RNA (1)...(19): siRNA sense strand
gcacgacuccuugaaacug

SEQ ID NO: 232638 - RNA, 19 nt, Homo sapiens
  misc_RNA (1)...(19): siRNA sense strand
gggugcagcucaaguaugc

SEQ ID NO: 232639 - RNA, 19 nt, Homo sapiens
  misc_RNA (1)...(19): siRNA sense strand
gcacugggaaguccuuaag

SEQ ID NO: 232640 - RNA, 19 nt, Homo sapiens
  misc_RNA (1)...(19): siRNA sense strand
gaggaagcagcgagaagaa

SEQ ID NO: 232641 - RNA, 19 nt, Homo sapiens
  misc_RNA (1)...(19): siRNA sense strand
gaugaaucccugugucugu

SEQ ID NO: 232642 - RNA, 19 nt, Homo sapiens
  misc_RNA (1)...(19): siRNA sense strand
gaggcacgacuccuugaaa

SEQ ID NO: 232643 - RNA, 19 nt, Homo sapiens
  misc_RNA (1)...(19): siRNA sense strand
gaagaagaaagagagaauc

SEQ ID NO: 232644 - RNA, 19 nt, Homo sapiens
  misc_RNA (1)...(19): siRNA sense strand
cggccuggguuacucaguu

SEQ ID NO: 232645 - RNA, 19 nt, Homo sapiens
  misc_RNA (1)...(19): siRNA sense strand
gaggcaggaagaagaagaa

SEQ ID NO: 232646 - RNA, 19 nt, Homo sapiens
  misc_RNA (1)...(19): siRNA sense strand
uggaugaggaugaggauga

SEQ ID NO: 232647 - RNA, 19 nt, Homo sapiens
  misc_RNA (1)...(19): siRNA sense strand
ggaccugguggaccgacua

SEQ ID NO: 232648 - RNA, 19 nt, Homo sapiens
  misc_RNA (1)...(19): siRNA sense strand
agaagaagaaagagagaau

SEQ ID NO: 232649 - RNA, 19 nt, Homo sapiens
  misc_RNA (1)...(19): siRNA sense strand
acagggugcagcucaagua

SEQ ID NO: 232650 - RNA, 19 nt, Homo sapiens
  misc_RNA (1)...(19): siRNA sense strand
uacaugaugagaaagauga

SEQ ID NO: 232651 - RNA, 19 nt, Homo sapiens
  misc_RNA (1)...(19): siRNA sense strand
ccuggaggaagaacacaua

SEQ ID NO: 232652 - RNA, 19 nt, Homo sapiens
  misc_RNA (1)...(19): siRNA sense strand
ucucuuggcuccgugacuu

SEQ ID NO: 232653 - RNA, 19 nt, Homo sapiens
  misc_RNA (1)...(19): siRNA sense strand
gaaucccugugucugucuu

SEQ ID NO: 232654 - RNA, 19 nt, Homo sapiens
  misc_RNA (1)...(19): siRNA sense strand
uaaugaaacacagaagguu

SEQ ID NO: 232655 - RNA, 19 nt, Homo sapiens
  misc_RNA (1)...(19): siRNA sense strand
acagaagaagcgugaagaa

SEQ ID NO: 232656 - RNA, 19 nt, Homo sapiens
  misc_RNA (1)...(19): siRNA sense strand
ggaacuggccccuuacaug

SEQ ID NO: 232657 - RNA, 19 nt, Homo sapiens
  misc_RNA (1)...(19): siRNA sense strand
agaagaggcacgacuccuu

SEQ ID NO: 232658 - RNA, 19 nt, Homo sapiens
  misc_RNA (1)...(19): siRNA sense strand
gaccugguggaccgacuaa

SEQ ID NO: 232659 - RNA, 19 nt, Homo sapiens
  misc_RNA (1)...(19): siRNA sense strand
ccgaauacgagagugauga

SEQ ID NO: 232660 - RNA, 19 nt, Homo sapiens
  misc_RNA (1)...(19): siRNA sense strand
cuaaugaaacacagaaggu

SEQ ID NO: 232661 - RNA, 19 nt, Homo sapiens
  misc_RNA (1)...(19): siRNA sense strand
cagaagaagcgugaagaag

SEQ ID NO: 232662 - RNA, 19 nt, Homo sapiens
  misc_RNA (1)...(19): siRNA sense strand
ggaugaggaugaggaugac

SEQ ID NO: 232663 - RNA, 19 nt, Homo sapiens
  misc_RNA (1)...(19): siRNA sense strand
cagaguggaugaggaugag

SEQ ID NO: 232664 - RNA, 19 nt, Homo sapiens
  misc_RNA (1)...(19): siRNA sense strand
acugggaaguccuuaaguc

SEQ ID NO: 232665 - RNA, 19 nt, Homo sapiens
  misc_RNA (1)...(19): siRNA sense strand
gagcugguccucgccgaau

SEQ ID NO: 232666 - RNA, 19 nt, Homo sapiens
  misc_RNA (1)...(19): siRNA sense strand
gaagaucuguccagcauca

SEQ ID NO: 232667 - RNA, 19 nt, Homo sapiens
  misc_RNA (1)...(19): siRNA sense strand
gagcaaggccugugacauu

SEQ ID NO: 232668 - RNA, 19 nt, Homo sapiens
  misc_RNA (1)...(19): siRNA sense strand
gaaaugggcauacaacaau

SEQ ID NO: 232669 - RNA, 19 nt, Homo sapiens
  misc_RNA (1)...(19): siRNA sense strand
ccaggcagcugaaagaaga

SEQ ID NO: 232670 - RNA, 19 nt, Homo sapiens
  misc_RNA (1)...(19): siRNA sense strand
gagcuuaucuagucaggau

SEQ ID NO: 232671 - RNA, 19 nt, Homo sapiens
  misc_RNA (1)...(19): siRNA sense strand
ccaagaguccuuugaugua

SEQ ID NO: 232672 - RNA, 19 nt, Homo sapiens
  misc_RNA (1)...(19): siRNA sense strand
ggagguacagcuuggauuu

SEQ ID NO: 232673 - RNA, 19 nt, Homo sapiens
  misc_RNA (1)...(19): siRNA sense strand
gcaccauaguggaugauga

SEQ ID NO: 232674 - RNA, 19 nt, Homo sapiens
  misc_RNA (1)...(19): siRNA sense strand
uaaagaagacggagacugu

SEQ ID NO: 232675 - RNA, 19 nt, Homo sapiens
  misc_RNA (1)...(19): siRNA sense strand
gggcaggguugaaguggaa

SEQ ID NO: 232676 - RNA, 19 nt, Homo sapiens
  misc_RNA (1)...(19): siRNA sense strand
ggcgagauccggacucuaa

SEQ ID NO: 232677 - RNA, 19 nt, Homo sapiens
  misc_RNA (1)...(19): siRNA sense strand
gaacugggacauaaagaag

SEQ ID NO: 232678 - RNA, 19 nt, Homo sapiens
  misc_RNA (1)...(19): siRNA sense strand
auacuaaguuuguggcauu

SEQ ID NO: 232679 - RNA, 19 nt, Homo sapiens
  misc_RNA (1)...(19): siRNA sense strand
ccagacaggaucccacaua

SEQ ID NO: 232680 - RNA, 19 nt, Homo sapiens
  misc_RNA (1)...(19): siRNA sense strand
ggaugaugacgauuacuuu

SEQ ID NO: 232681 - RNA, 19 nt, Homo sapiens
  misc_RNA (1)...(19): siRNA sense strand
caagaguccuuugauguag

SEQ ID NO: 232682 - RNA, 19 nt, Homo sapiens
  misc_RNA (1)...(19): siRNA sense strand
ggagguggaugcaguagac

SEQ ID NO: 232683 - RNA, 19 nt, Homo sapiens
  misc_RNA (1)...(19): siRNA sense strand
cauaguggaugaugacgau

SEQ ID NO: 232684 - RNA, 19 nt, Homo sapiens
  misc_RNA (1)...(19): siRNA sense strand
aagaagaucuguccagcau

SEQ ID NO: 232685 - RNA, 19 nt, Homo sapiens
  misc_RNA (1)...(19): siRNA sense strand
gggcauacaacaauucaga

SEQ ID NO: 232686 - RNA, 19 nt, Homo sapiens
  misc_RNA (1)...(19): siRNA sense strand
gccuugaacugggacauaa

SEQ ID NO: 232687 - RNA, 19 nt, Homo sapiens
  misc_RNA (1)...(19): siRNA sense strand
ggguugaaguggaagaaug

SEQ ID NO: 232688 - RNA, 19 nt, Homo sapiens
  misc_RNA (1)...(19): siRNA sense strand
guaaugagaaaugggcaua

SEQ ID NO: 232689 - RNA, 19 nt, Homo sapiens
  misc_RNA (1)...(19): siRNA sense strand
gacauucuggccauugaua

SEQ ID NO: 232690 - RNA, 19 nt, Homo sapiens
  misc_RNA (1)...(19): siRNA sense strand
auacaacaauucagaugga

SEQ ID NO: 232691 - RNA, 19 nt, Homo sapiens
  misc_RNA (1)...(19): siRNA sense strand
gcaucauccuccuaucaga

SEQ ID NO: 232692 - RNA, 19 nt, Homo sapiens
  misc_RNA (1)...(19): siRNA sense strand
caauucagauggagguaca

SEQ ID NO: 232693 - RNA, 19 nt, Homo sapiens
  misc_RNA (1)...(19): siRNA sense strand
gcauacaacaauucagaug

SEQ ID NO: 232694 - RNA, 19 nt, Homo sapiens
  misc_RNA (1)...(19): siRNA sense strand
caacaggugcuugaccaaa

SEQ ID NO: 232695 - RNA, 19 nt, Homo sapiens
  misc_RNA (1)...(19): siRNA sense strand
gcucaggaacuacgucaga

SEQ ID NO: 232696 - RNA, 19 nt, Homo sapiens
  misc_RNA (1)...(19): siRNA sense strand
acgcagagcuugcauucuc

SEQ ID NO: 232697 - RNA, 19 nt, Homo sapiens
  misc_RNA (1)...(19): siRNA sense strand
cagacaggaucccacauag

SEQ ID NO: 232698 - RNA, 19 nt, Homo sapiens
  misc_RNA (1)...(19): siRNA sense strand
ugucuaccuuccaauacua

SEQ ID NO: 232699 - RNA, 19 nt, Homo sapiens
  misc_RNA (1)...(19): siRNA sense strand
gugacauucuggccauuga

SEQ ID NO: 232700 - RNA, 19 nt, Homo sapiens
  misc_RNA (1)...(19): siRNA sense strand
aaaugggcauacaacaauu

SEQ ID NO: 232701 - RNA, 19 nt, Homo sapiens
  misc_RNA (1)...(19): siRNA sense strand
agaaaugggcauacaacaa

SEQ ID NO: 232702 - RNA, 19 nt, Homo sapiens
  misc_RNA (1)...(19): siRNA sense strand
ucgaagaccugaggagcaa

SEQ ID NO: 232703 - RNA, 19 nt, Homo sapiens
  misc_RNA (1)...(19): siRNA sense strand
uuacugcacugagggagaa

SEQ ID NO: 232704 - RNA, 19 nt, Homo sapiens
  misc_RNA (1)...(19): siRNA sense strand
gaugacgauuacuuucugu

SEQ ID NO: 232705 - RNA, 19 nt, Homo sapiens
  misc_RNA (1)...(19): siRNA sense strand
gcuuaucuagucaggauuu

SEQ ID NO: 232706 - RNA, 19 nt, Homo sapiens
  misc_RNA (1)...(19): siRNA sense strand
guccuuugauguagaugaa

SEQ ID NO: 232707 - RNA, 19 nt, Homo sapiens
  misc_RNA (1)...(19): siRNA sense strand
gagaaaugggcauacaaca

SEQ ID NO: 232708 - RNA, 19 nt, Homo sapiens
  misc_RNA (1)...(19): siRNA sense strand
gaugaugacgauuacuuuc

SEQ ID NO: 232709 - RNA, 19 nt, Homo sapiens
  misc_RNA (1)...(19): siRNA sense strand
gcaguagacacggguauca

SEQ ID NO: 232710 - RNA, 19 nt, Homo sapiens
  misc_RNA (1)...(19): siRNA sense strand
uaguggaugaugacgauua

SEQ ID NO: 232711 - RNA, 19 nt, Homo sapiens
  misc_RNA (1)...(19): siRNA sense strand
ugaacugggacauaaagaa

SEQ ID NO: 232712 - RNA, 19 nt, Homo sapiens
  misc_RNA (1)...(19): siRNA sense strand
gcaggaagaguccaaagcu

SEQ ID NO: 232713 - RNA, 19 nt, Homo sapiens
  misc_RNA (1)...(19): siRNA sense strand
acaggugcuugaccaaaga

SEQ ID NO: 232714 - RNA, 19 nt, Homo sapiens
  misc_RNA (1)...(19): siRNA sense strand
ugaugacgauuacuuucug

SEQ ID NO: 232715 - RNA, 19 nt, Homo sapiens
  misc_RNA (1)...(19): siRNA sense strand
cagcaucauccuccuauca

SEQ ID NO: 232716 - RNA, 19 nt, Homo sapiens
  misc_RNA (1)...(19): siRNA sense strand
ucccaagaguccuuugaug

SEQ ID NO: 232717 - RNA, 19 nt, Homo sapiens
  misc_RNA (1)...(19): siRNA sense strand
caaagcaggaagaguccaa

SEQ ID NO: 232718 - RNA, 19 nt, Homo sapiens
  misc_RNA (1)...(19): siRNA sense strand
caaggccugugacauucug

SEQ ID NO: 232719 - RNA, 19 nt, Homo sapiens
  misc_RNA (1)...(19): siRNA sense strand
acacggguaucagcagaga

SEQ ID NO: 232720 - RNA, 19 nt, Homo sapiens
  misc_RNA (1)...(19): siRNA sense strand
uaagcgagccagacaggau

SEQ ID NO: 232721 - RNA, 19 nt, Homo sapiens
  misc_RNA (1)...(19): siRNA sense strand
aaugagaaaugggcauaca

SEQ ID NO: 232722 - RNA, 19 nt, Homo sapiens
  misc_RNA (1)...(19): siRNA sense strand
ucagauggagguacagcuu

SEQ ID NO: 232723 - RNA, 19 nt, Homo sapiens
  misc_RNA (1)...(19): siRNA sense strand
gguugaaguggaagaaugu

SEQ ID NO: 232724 - RNA, 19 nt, Homo sapiens
  misc_RNA (1)...(19): siRNA sense strand
aagaguccuuugauguaga

SEQ ID NO: 232725 - RNA, 19 nt, Homo sapiens
  misc_RNA (1)...(19): siRNA sense strand
cccaagaguccuuugaugu

SEQ ID NO: 232726 - RNA, 19 nt, Homo sapiens
  misc_RNA (1)...(19): siRNA sense strand
caacuacagccgcgaacag

SEQ ID NO: 232727 - RNA, 19 nt, Homo sapiens
  misc_RNA (1)...(19): siRNA sense strand
agacgcagagcuugcauuc

SEQ ID NO: 232728 - RNA, 19 nt, Homo sapiens
  misc_RNA (1)...(19): siRNA sense strand
uaucuagucaggauuugga

SEQ ID NO: 232729 - RNA, 19 nt, Homo sapiens
  misc_RNA (1)...(19): siRNA sense strand
ugaggagguggaugcagua

SEQ ID NO: 232730 - RNA, 19 nt, Homo sapiens
  misc_RNA (1)...(19): siRNA sense strand
agggcagccucuugucaaa

SEQ ID NO: 232731 - RNA, 19 nt, Homo sapiens
  misc_RNA (1)...(19): siRNA sense strand
agcuguaccuccaggcuuu

SEQ ID NO: 232732 - RNA, 19 nt, Homo sapiens
  misc_RNA (1)...(19): siRNA sense strand
gcgagauccggacucuaaa

SEQ ID NO: 232733 - RNA, 19 nt, Homo sapiens
  misc_RNA (1)...(19): siRNA sense strand
aacaggugcuugaccaaag

SEQ ID NO: 232734 - RNA, 19 nt, Homo sapiens
  misc_RNA (1)...(19): siRNA sense strand
cggagcaucucagcaagca

SEQ ID NO: 232735 - RNA, 19 nt, Homo sapiens
  misc_RNA (1)...(19): siRNA sense strand
cuagucaggauuuggaguu

SEQ ID NO: 232736 - RNA, 19 nt, Homo sapiens
  misc_RNA (1)...(19): siRNA sense strand
ugacgauuacuuucugugu

SEQ ID NO: 232737 - RNA, 19 nt, Homo sapiens
  misc_RNA (1)...(19): siRNA sense strand
ggcagccucuugucaaagc

SEQ ID NO: 232738 - RNA, 19 nt, Homo sapiens
  misc_RNA (1)...(19): siRNA sense strand
acgauuacuuucugugucu

SEQ ID NO: 232739 - RNA, 19 nt, Homo sapiens
  misc_RNA (1)...(19): siRNA sense strand
gaaccuggaucacauaaua

SEQ ID NO: 232740 - RNA, 19 nt, Homo sapiens
  misc_RNA (1)...(19): siRNA sense strand
gcacggagcugacggaaga

SEQ ID NO: 232741 - RNA, 19 nt, Homo sapiens
  misc_RNA (1)...(19): siRNA sense strand
ggaacaagauggaagagaa

SEQ ID NO: 232742 - RNA, 19 nt, Homo sapiens
  misc_RNA (1)...(19): siRNA sense strand
gaaguggacugggaguauu

SEQ ID NO: 232743 - RNA, 19 nt, Homo sapiens
  misc_RNA (1)...(19): siRNA sense strand
gagcaagucuggcuaucug

SEQ ID NO: 232744 - RNA, 19 nt, Homo sapiens
  misc_RNA (1)...(19): siRNA sense strand
ggacagcugcuuaucaaga

SEQ ID NO: 232745 - RNA, 19 nt, Homo sapiens
  misc_RNA (1)...(19): siRNA sense strand
cacauugucugccauaaga

SEQ ID NO: 232746 - RNA, 19 nt, Homo sapiens
  misc_RNA (1)...(19): siRNA sense strand
ugacauggacagcugcuua

SEQ ID NO: 232747 - RNA, 19 nt, Homo sapiens
  misc_RNA (1)...(19): siRNA sense strand
gaagcagccugugcggaaa

SEQ ID NO: 232748 - RNA, 19 nt, Homo sapiens
  misc_RNA (1)...(19): siRNA sense strand
gaaaagaaacgcaccauca

SEQ ID NO: 232749 - RNA, 19 nt, Homo sapiens
  misc_RNA (1)...(19): siRNA sense strand
gcaauuaaggaacaagaug

SEQ ID NO: 232750 - RNA, 19 nt, Homo sapiens
  misc_RNA (1)...(19): siRNA sense strand
aaagaaacgcaccaucauu

SEQ ID NO: 232751 - RNA, 19 nt, Homo sapiens
  misc_RNA (1)...(19): siRNA sense strand
gaacaagauggaagagaag

SEQ ID NO: 232752 - RNA, 19 nt, Homo sapiens
  misc_RNA (1)...(19): siRNA sense strand
ggaagcaauuaaggaacaa

SEQ ID NO: 232753 - RNA, 19 nt, Homo sapiens
  misc_RNA (1)...(19): siRNA sense strand
aaacgcaccaucauuccua

SEQ ID NO: 232754 - RNA, 19 nt, Homo sapiens
  misc_RNA (1)...(19): siRNA sense strand
gguggaagcaauuaaggaa

SEQ ID NO: 232755 - RNA, 19 nt, Homo sapiens
  misc_RNA (1)...(19): siRNA sense strand
uggcugaccuccugcacaa

SEQ ID NO: 232756 - RNA, 19 nt, Homo sapiens
  misc_RNA (1)...(19): siRNA sense strand
uaaggaacaagauggaaga

SEQ ID NO: 232757 - RNA, 19 nt, Homo sapiens
  misc_RNA (1)...(19): siRNA sense strand
uggaagcaauuaaggaaca

SEQ ID NO: 232758 - RNA, 19 nt, Homo sapiens
  misc_RNA (1)...(19): siRNA sense strand
gcacauugucugccauaag

SEQ ID NO: 232759 - RNA, 19 nt, Homo sapiens
  misc_RNA (1)...(19): siRNA sense strand
guacaauggcagcuacuuc

SEQ ID NO: 232760 - RNA, 19 nt, Homo sapiens
  misc_RNA (1)...(19): siRNA sense strand
aagaaacgcaccaucauuc

SEQ ID NO: 232761 - RNA, 19 nt, Homo sapiens
  misc_RNA (1)...(19): siRNA sense strand
gcaccuggaaccuggauca

SEQ ID NO: 232762 - RNA, 19 nt, Homo sapiens
  misc_RNA (1)...(19): siRNA sense strand
gacagcugcuuaucaagac

SEQ ID NO: 232763 - RNA, 19 nt, Homo sapiens
  misc_RNA (1)...(19): siRNA sense strand
gagaaguggacugggagua

SEQ ID NO: 232764 - RNA, 19 nt, Homo sapiens
  misc_RNA (1)...(19): siRNA sense strand
ccuggaaccuggaucacau

SEQ ID NO: 232765 - RNA, 19 nt, Homo sapiens
  misc_RNA (1)...(19): siRNA sense strand
gacauggacagcugcuuau

SEQ ID NO: 232766 - RNA, 19 nt, Homo sapiens
  misc_RNA (1)...(19): siRNA sense strand
cuacacugguggaagcaau

SEQ ID NO: 232767 - RNA, 19 nt, Homo sapiens
  misc_RNA (1)...(19): siRNA sense strand
gcaccaucauuccuacacu

SEQ ID NO: 232768 - RNA, 19 nt, Homo sapiens
  misc_RNA (1)...(19): siRNA sense strand
auggacagcugcuuaucaa

SEQ ID NO: 232769 - RNA, 19 nt, Homo sapiens
  misc_RNA (1)...(19): siRNA sense strand
uaucaagacacuccaucaa

SEQ ID NO: 232770 - RNA, 19 nt, Homo sapiens
  misc_RNA (1)...(19): siRNA sense strand
gcacaacgucagccagaac

SEQ ID NO: 232771 - RNA, 19 nt, Homo sapiens
  misc_RNA (1)...(19): siRNA sense strand
cggagcugacggaagauua

SEQ ID NO: 232772 - RNA, 19 nt, Homo sapiens
  misc_RNA (1)...(19): siRNA sense strand
cuggaucacauaauagaaa

SEQ ID NO: 232773 - RNA, 19 nt, Homo sapiens
  misc_RNA (1)...(19): siRNA sense strand
caagucuggcuaucugaga

SEQ ID NO: 232774 - RNA, 19 nt, Homo sapiens
  misc_RNA (1)...(19): siRNA sense strand
gugcacauugucugccaua

SEQ ID NO: 232775 - RNA, 19 nt, Homo sapiens
  misc_RNA (1)...(19): siRNA sense strand
acacugguggaagcaauua

SEQ ID NO: 232776 - RNA, 19 nt, Homo sapiens
  misc_RNA (1)...(19): siRNA sense strand
gcgcuuccucagugcauuu

SEQ ID NO: 232777 - RNA, 19 nt, Homo sapiens
  misc_RNA (1)...(19): siRNA sense strand
cauggacagcugcuuauca

SEQ ID NO: 232778 - RNA, 19 nt, Homo sapiens
  misc_RNA (1)...(19): siRNA sense strand
ucagagaaccuaaaacuag

SEQ ID NO: 232779 - RNA, 19 nt, Homo sapiens
  misc_RNA (1)...(19): siRNA sense strand
ggagcugacggaagauuac

SEQ ID NO: 232780 - RNA, 19 nt, Homo sapiens
  misc_RNA (1)...(19): siRNA sense strand
guucccggcugugccugua

SEQ ID NO: 232781 - RNA, 19 nt, Homo sapiens
  misc_RNA (1)...(19): siRNA sense strand
agaaguggacugggaguau

SEQ ID NO: 232782 - RNA, 19 nt, Homo sapiens
  misc_RNA (1)...(19): siRNA sense strand
cauugucugccauaagaaa

SEQ ID NO: 232783 - RNA, 19 nt, Homo sapiens
  misc_RNA (1)...(19): siRNA sense strand
cggaggcucaggaggaauu

SEQ ID NO: 232784 - RNA, 19 nt, Homo sapiens
  misc_RNA (1)...(19): siRNA sense strand
caacgucagccagaacauc

SEQ ID NO: 232785 - RNA, 19 nt, Homo sapiens
  misc_RNA (1)...(19): siRNA sense strand
ccagaugacugaacuuugu

SEQ ID NO: 232786 - RNA, 19 nt, Homo sapiens
  misc_RNA (1)...(19): siRNA sense strand
ggacaagccugggccaaag

SEQ ID NO: 232787 - RNA, 19 nt, Homo sapiens
  misc_RNA (1)...(19): siRNA sense strand
gauacaagccaguucaucu

SEQ ID NO: 232788 - RNA, 19 nt, Homo sapiens
  misc_RNA (1)...(19): siRNA sense strand
gcugaggccuguuuuguga

SEQ ID NO: 232789 - RNA, 19 nt, Homo sapiens
  misc_RNA (1)...(19): siRNA sense strand
ccagaaauccaagccaguu

SEQ ID NO: 232790 - RNA, 19 nt, Homo sapiens
  misc_RNA (1)...(19): siRNA sense strand
cagaaauccaagccaguuu

SEQ ID NO: 232791 - RNA, 19 nt, Homo sapiens
  misc_RNA (1)...(19): siRNA sense strand
caccagaugacugaacuuu

SEQ ID NO: 232792 - RNA, 19 nt, Homo sapiens
  misc_RNA (1)...(19): siRNA sense strand
gggagaagugcauggacaa

SEQ ID NO: 232793 - RNA, 19 nt, Homo sapiens
  misc_RNA (1)...(19): siRNA sense strand
auacaagccaguucaucuu

SEQ ID NO: 232794 - RNA, 19 nt, Homo sapiens
  misc_RNA (1)...(19): siRNA sense strand
gaaugacucugauaaguua

SEQ ID NO: 232795 - RNA, 19 nt, Homo sapiens
  misc_RNA (1)...(19): siRNA sense strand
gaaauacgagggcaaguuu

SEQ ID NO: 232796 - RNA, 19 nt, Homo sapiens
  misc_RNA (1)...(19): siRNA sense strand
gcaagcagcuguuuaugac

SEQ ID NO: 232797 - RNA, 19 nt, Homo sapiens
  misc_RNA (1)...(19): siRNA sense strand
gaaagauacagaaagguuu

SEQ ID NO: 232798 - RNA, 19 nt, Homo sapiens
  misc_RNA (1)...(19): siRNA sense strand
gaauggacucugugcuuua

SEQ ID NO: 232799 - RNA, 19 nt, Homo sapiens
  misc_RNA (1)...(19): siRNA sense strand
ggaagcaggagguggauuu

SEQ ID NO: 232800 - RNA, 19 nt, Homo sapiens
  misc_RNA (1)...(19): siRNA sense strand
gagagaacaauaaaucuga

SEQ ID NO: 232801 - RNA, 19 nt, Homo sapiens
  misc_RNA (1)...(19): siRNA sense strand
uggaguaucugaucuugaa

SEQ ID NO: 232802 - RNA, 19 nt, Homo sapiens
  misc_RNA (1)...(19): siRNA sense strand
acagaaagguuugggauug

SEQ ID NO: 232803 - RNA, 19 nt, Homo sapiens
  misc_RNA (1)...(19): siRNA sense strand
gagagccagucuucauuug

SEQ ID NO: 232804 - RNA, 19 nt, Homo sapiens
  misc_RNA (1)...(19): siRNA sense strand
ugaaagcugucauucugaa

SEQ ID NO: 232805 - RNA, 19 nt, Homo sapiens
  misc_RNA (1)...(19): siRNA sense strand
gcgauguacucauagaaga

SEQ ID NO: 232806 - RNA, 19 nt, Homo sapiens
  misc_RNA (1)...(19): siRNA sense strand
ugaauggacucugugcuuu

SEQ ID NO: 232807 - RNA, 19 nt, Homo sapiens
  misc_RNA (1)...(19): siRNA sense strand
gagccagucuucauuugga

SEQ ID NO: 232808 - RNA, 19 nt, Homo sapiens
  misc_RNA (1)...(19): siRNA sense strand
ucacgacgaugcagaagug

SEQ ID NO: 232809 - RNA, 19 nt, Homo sapiens
  misc_RNA (1)...(19): siRNA sense strand
agaagugugugaucucuga

SEQ ID NO: 232810 - RNA, 19 nt, Homo sapiens
  misc_RNA (1)...(19): siRNA sense strand
ccacugcuucuuuguauaa

SEQ ID NO: 232811 - RNA, 19 nt, Homo sapiens
  misc_RNA (1)...(19): siRNA sense strand
ccuauuugaugaugaacua

SEQ ID NO: 232812 - RNA, 19 nt, Homo sapiens
  misc_RNA (1)...(19): siRNA sense strand
ccaaagcaaccaggaauuu

SEQ ID NO: 232813 - RNA, 19 nt, Homo sapiens
  misc_RNA (1)...(19): siRNA sense strand
acucauagaagaccaauuu

SEQ ID NO: 232814 - RNA, 19 nt, Homo sapiens
  misc_RNA (1)...(19): siRNA sense strand
gaagucaucugugaaagcu

SEQ ID NO: 232815 - RNA, 19 nt, Homo sapiens
  misc_RNA (1)...(19): siRNA sense strand
gauaaguuacagcuucuaa

SEQ ID NO: 232816 - RNA, 19 nt, Homo sapiens
  misc_RNA (1)...(19): siRNA sense strand
caagguggcuucgagaaca

SEQ ID NO: 232817 - RNA, 19 nt, Homo sapiens
  misc_RNA (1)...(19): siRNA sense strand
gagaacaagaagagaauug

SEQ ID NO: 232818 - RNA, 19 nt, Homo sapiens
  misc_RNA (1)...(19): siRNA sense strand
ugugaaagcugucauucug

SEQ ID NO: 232819 - RNA, 19 nt, Homo sapiens
  misc_RNA (1)...(19): siRNA sense strand
uaugacagccuacuucuug

SEQ ID NO: 232820 - RNA, 19 nt, Homo sapiens
  misc_RNA (1)...(19): siRNA sense strand
gguccuauuugaugaugaa

SEQ ID NO: 232821 - RNA, 19 nt, Homo sapiens
  misc_RNA (1)...(19): siRNA sense strand
gauggaguaucugaucuug

SEQ ID NO: 232822 - RNA, 19 nt, Homo sapiens
  misc_RNA (1)...(19): siRNA sense strand
ugaaagauacagaaagguu

SEQ ID NO: 232823 - RNA, 19 nt, Homo sapiens
  misc_RNA (1)...(19): siRNA sense strand
ugaaugacucugauaaguu

SEQ ID NO: 232824 - RNA, 19 nt, Homo sapiens
  misc_RNA (1)...(19): siRNA sense strand
ucgcagaaaugccagauag

SEQ ID NO: 232825 - RNA, 19 nt, Homo sapiens
  misc_RNA (1)...(19): siRNA sense strand
ccuuggcgauguacucaua

SEQ ID NO: 232826 - RNA, 19 nt, Homo sapiens
  misc_RNA (1)...(19): siRNA sense strand
cacagaagaucacgacgau

SEQ ID NO: 232827 - RNA, 19 nt, Homo sapiens
  misc_RNA (1)...(19): siRNA sense strand
ucagugcccucgcagaaau

SEQ ID NO: 232828 - RNA, 19 nt, Homo sapiens
  misc_RNA (1)...(19): siRNA sense strand
ucgagaguuugcauucaua

SEQ ID NO: 232829 - RNA, 19 nt, Homo sapiens
  misc_RNA (1)...(19): siRNA sense strand
gcagaagugugugaucucu

SEQ ID NO: 232830 - RNA, 19 nt, Homo sapiens
  misc_RNA (1)...(19): siRNA sense strand
guagagagccagucuucau

SEQ ID NO: 232831 - RNA, 19 nt, Homo sapiens
  misc_RNA (1)...(19): siRNA sense strand
ggucagugcccucgcagaa

SEQ ID NO: 232832 - RNA, 19 nt, Homo sapiens
  misc_RNA (1)...(19): siRNA sense strand
gaguuugcauucauagaca

SEQ ID NO: 232833 - RNA, 19 nt, Homo sapiens
  misc_RNA (1)...(19): siRNA sense strand
gagaauugacucugucuac

SEQ ID NO: 232834 - RNA, 19 nt, Homo sapiens
  misc_RNA (1)...(19): siRNA sense strand
ccugaaagauacagaaagg

SEQ ID NO: 232835 - RNA, 19 nt, Homo sapiens
  misc_RNA (1)...(19): siRNA sense strand
ugcagcagcucaucagaga

SEQ ID NO: 232836 - RNA, 19 nt, Homo sapiens
  misc_RNA (1)...(19): siRNA sense strand
cagaaagguuugggauugu

SEQ ID NO: 232837 - RNA, 19 nt, Homo sapiens
  misc_RNA (1)...(19): siRNA sense strand
gaugauggaguaucugauc

SEQ ID NO: 232838 - RNA, 19 nt, Homo sapiens
  misc_RNA (1)...(19): siRNA sense strand
uagagaaguugaugcugau

SEQ ID NO: 232839 - RNA, 19 nt, Homo sapiens
  misc_RNA (1)...(19): siRNA sense strand
gcugcaaacuccagaucau

SEQ ID NO: 232840 - RNA, 19 nt, Homo sapiens
  misc_RNA (1)...(19): siRNA sense strand
uaaguuacagcuucuaagu

SEQ ID NO: 232841 - RNA, 19 nt, Homo sapiens
  misc_RNA (1)...(19): siRNA sense strand
caaaucugaaugacucuga

SEQ ID NO: 232842 - RNA, 19 nt, Homo sapiens
  misc_RNA (1)...(19): siRNA sense strand
gccgagagaacaauaaauc

SEQ ID NO: 232843 - RNA, 19 nt, Homo sapiens
  misc_RNA (1)...(19): siRNA sense strand
ggacggccaguucgaguuc

SEQ ID NO: 232844 - RNA, 19 nt, Homo sapiens
  misc_RNA (1)...(19): siRNA sense strand
aggcagagaacauucauga

SEQ ID NO: 232845 - RNA, 19 nt, Homo sapiens
  misc_RNA (1)...(19): siRNA sense strand
ugacauuagucuggagaga

SEQ ID NO: 232846 - RNA, 19 nt, Homo sapiens
  misc_RNA (1)...(19): siRNA sense strand
ggagcugccugagccacaa

SEQ ID NO: 232847 - RNA, 19 nt, Homo sapiens
  misc_RNA (1)...(19): siRNA sense strand
ugaaauacgagggcaaguu

SEQ ID NO: 232848 - RNA, 19 nt, Homo sapiens
  misc_RNA (1)...(19): siRNA sense strand
cugaaugacucugauaagu

SEQ ID NO: 232849 - RNA, 19 nt, Homo sapiens
  misc_RNA (1)...(19): siRNA sense strand
uccaggcgguccuauuuga

SEQ ID NO: 232850 - RNA, 19 nt, Homo sapiens
  misc_RNA (1)...(19): siRNA sense strand
ccuggucuuucgagaguuu

SEQ ID NO: 232851 - RNA, 19 nt, Homo sapiens
  misc_RNA (1)...(19): siRNA sense strand
ucauugaguuauacgugaa

SEQ ID NO: 232852 - RNA, 19 nt, Homo sapiens
  misc_RNA (1)...(19): siRNA sense strand
aaagauacagaaagguuug

SEQ ID NO: 232853 - RNA, 19 nt, Homo sapiens
  misc_RNA (1)...(19): siRNA sense strand
ucccacugcuucuuuguau

SEQ ID NO: 232854 - RNA, 19 nt, Homo sapiens
  misc_RNA (1)...(19): siRNA sense strand
agagagccagucuucauuu

SEQ ID NO: 232855 - RNA, 19 nt, Homo sapiens
  misc_RNA (1)...(19): siRNA sense strand
gcaaccaggaauuuucuua

SEQ ID NO: 232856 - RNA, 19 nt, Homo sapiens
  misc_RNA (1)...(19): siRNA sense strand
gaacaagaagagaauugac

SEQ ID NO: 232857 - RNA, 19 nt, Homo sapiens
  misc_RNA (1)...(19): siRNA sense strand
acaugcaggucgaggagaa

SEQ ID NO: 232858 - RNA, 19 nt, Homo sapiens
  misc_RNA (1)...(19): siRNA sense strand
aaugagguccugugcguuu

SEQ ID NO: 232859 - RNA, 19 nt, Homo sapiens
  misc_RNA (1)...(19): siRNA sense strand
gagaacaauaaaucugaga

SEQ ID NO: 232860 - RNA, 19 nt, Homo sapiens
  misc_RNA (1)...(19): siRNA sense strand
gaagcaggagguggauuug

SEQ ID NO: 232861 - RNA, 19 nt, Homo sapiens
  misc_RNA (1)...(19): siRNA sense strand
uagagagccagucuucauu

SEQ ID NO: 232862 - RNA, 19 nt, Homo sapiens
  misc_RNA (1)...(19): siRNA sense strand
caguaucaaaucugaauga

SEQ ID NO: 232863 - RNA, 19 nt, Homo sapiens
  misc_RNA (1)...(19): siRNA sense strand
cuacggugucauugaguua

SEQ ID NO: 232864 - RNA, 19 nt, Homo sapiens
  misc_RNA (1)...(19): siRNA sense strand
ccucacccuuggcgaugua

SEQ ID NO: 232865 - RNA, 19 nt, Homo sapiens
  misc_RNA (1)...(19): siRNA sense strand
cgagagaacaauaaaucug

SEQ ID NO: 232866 - RNA, 19 nt, Homo sapiens
  misc_RNA (1)...(19): siRNA sense strand
cgacgaugcagaagugugu

SEQ ID NO: 232867 - RNA, 19 nt, Homo sapiens
  misc_RNA (1)...(19): siRNA sense strand
ugccucagcugacauuagu

SEQ ID NO: 232868 - RNA, 19 nt, Homo sapiens
  misc_RNA (1)...(19): siRNA sense strand
cgacggaggaugggaaugu

SEQ ID NO: 232869 - RNA, 19 nt, Homo sapiens
  misc_RNA (1)...(19): siRNA sense strand
gccaaagcaaccaggaauu

SEQ ID NO: 232870 - RNA, 19 nt, Homo sapiens
  misc_RNA (1)...(19): siRNA sense strand
aguuacagcuucuaagucu

SEQ ID NO: 232871 - RNA, 19 nt, Homo sapiens
  misc_RNA (1)...(19): siRNA sense strand
gauugugcagcgcuuguuu

SEQ ID NO: 232872 - RNA, 19 nt, Homo sapiens
  misc_RNA (1)...(19): siRNA sense strand
ccacaacagacagcuuuga

SEQ ID NO: 232873 - RNA, 19 nt, Homo sapiens
  misc_RNA (1)...(19): siRNA sense strand
gcguagagagccagucuuc

SEQ ID NO: 232874 - RNA, 19 nt, Homo sapiens
  misc_RNA (1)...(19): siRNA sense strand
ccuacggugucauugaguu

SEQ ID NO: 232875 - RNA, 19 nt, Homo sapiens
  misc_RNA (1)...(19): siRNA sense strand
gcuggcagagacccaagua

SEQ ID NO: 232876 - RNA, 19 nt, Homo sapiens
  misc_RNA (1)...(19): siRNA sense strand
ccaacguggugcuggagau

SEQ ID NO: 232877 - RNA, 19 nt, Homo sapiens
  misc_RNA (1)...(19): siRNA sense strand
gagacccaaguaccaguuu

SEQ ID NO: 232878 - RNA, 19 nt, Homo sapiens
  misc_RNA (1)...(19): siRNA sense strand
acggugucauugaguuaua

SEQ ID NO: 232879 - RNA, 19 nt, Homo sapiens
  misc_RNA (1)...(19): siRNA sense strand
gcaagguggcuucgagaac

SEQ ID NO: 232880 - RNA, 19 nt, Homo sapiens
  misc_RNA (1)...(19): siRNA sense strand
ccaggaauuuucuuagaga

SEQ ID NO: 232881 - RNA, 19 nt, Homo sapiens
  misc_RNA (1)...(19): siRNA sense strand
agaaguugaugcugauggu

SEQ ID NO: 232882 - RNA, 19 nt, Homo sapiens
  misc_RNA (1)...(19): siRNA sense strand
cuuccaggcgguccuauuu

SEQ ID NO: 232883 - RNA, 19 nt, Homo sapiens
  misc_RNA (1)...(19): siRNA sense strand
gagaguuugcauucauaga

SEQ ID NO: 232884 - RNA, 19 nt, Homo sapiens
  misc_RNA (1)...(19): siRNA sense strand
agaacaagaagagaauuga

SEQ ID NO: 232885 - RNA, 19 nt, Homo sapiens
  misc_RNA (1)...(19): siRNA sense strand
gugaaagcugucauucuga

SEQ ID NO: 232886 - RNA, 19 nt, Homo sapiens
  misc_RNA (1)...(19): siRNA sense strand
uaaagucuucccacugcuu

SEQ ID NO: 232887 - RNA, 19 nt, Homo sapiens
  misc_RNA (1)...(19): siRNA sense strand
aagcugucauucugaagga

SEQ ID NO: 232888 - RNA, 19 nt, Homo sapiens
  misc_RNA (1)...(19): siRNA sense strand
uucuaagucuggugacaaa

SEQ ID NO: 232889 - RNA, 19 nt, Homo sapiens
  misc_RNA (1)...(19): siRNA sense strand
agaaagguuugggauugug

SEQ ID NO: 232890 - RNA, 19 nt, Homo sapiens
  misc_RNA (1)...(19): siRNA sense strand
ucugucugaugauggagua

SEQ ID NO: 232891 - RNA, 19 nt, Homo sapiens
  misc_RNA (1)...(19): siRNA sense strand
aaucugaaugacucugaua

SEQ ID NO: 232892 - RNA, 19 nt, Homo sapiens
  misc_RNA (1)...(19): siRNA sense strand
cccacugcuucuuuguaua

SEQ ID NO: 232893 - RNA, 19 nt, Homo sapiens
  misc_RNA (1)...(19): siRNA sense strand
gcuuuaggcagagaacauu

SEQ ID NO: 232894 - RNA, 19 nt, Homo sapiens
  misc_RNA (1)...(19): siRNA sense strand
gauggaagcuuuaauauug

SEQ ID NO: 232895 - RNA, 19 nt, Homo sapiens
  misc_RNA (1)...(19): siRNA sense strand
gaacauugccuuucuaauu

SEQ ID NO: 232896 - RNA, 19 nt, Homo sapiens
  misc_RNA (1)...(19): siRNA sense strand
ugaaagauauggcuucuaa

SEQ ID NO: 232897 - RNA, 19 nt, Homo sapiens
  misc_RNA (1)...(19): siRNA sense strand
gaagaaaacuggcaauaaa

SEQ ID NO: 232898 - RNA, 19 nt, Homo sapiens
  misc_RNA (1)...(19): siRNA sense strand
caaaugaugugcagcaaga

SEQ ID NO: 232899 - RNA, 19 nt, Homo sapiens
  misc_RNA (1)...(19): siRNA sense strand
caagauagcugcuguacag

SEQ ID NO: 232900 - RNA, 19 nt, Homo sapiens
  misc_RNA (1)...(19): siRNA sense strand
caagagaguucacaggauu

SEQ ID NO: 232901 - RNA, 19 nt, Homo sapiens
  misc_RNA (1)...(19): siRNA sense strand
caacaagaacuuccuagua

SEQ ID NO: 232902 - RNA, 19 nt, Homo sapiens
  misc_RNA (1)...(19): siRNA sense strand
gauagcugcuguacaguuu

SEQ ID NO: 232903 - RNA, 19 nt, Homo sapiens
  misc_RNA (1)...(19): siRNA sense strand
gaaggagucucaugcuuuc

SEQ ID NO: 232904 - RNA, 19 nt, Homo sapiens
  misc_RNA (1)...(19): siRNA sense strand
aacaagaacuuccuaguaa

SEQ ID NO: 232905 - RNA, 19 nt, Homo sapiens
  misc_RNA (1)...(19): siRNA sense strand
ggaaaagccuugaagcaua

SEQ ID NO: 232906 - RNA, 19 nt, Homo sapiens
  misc_RNA (1)...(19): siRNA sense strand
gggcagcgccgauuuaauu

SEQ ID NO: 232907 - RNA, 19 nt, Homo sapiens
  misc_RNA (1)...(19): siRNA sense strand
gccauuuccuucacuguua

SEQ ID NO: 232908 - RNA, 19 nt, Homo sapiens
  misc_RNA (1)...(19): siRNA sense strand
gcacauccaccaacaggua

SEQ ID NO: 232909 - RNA, 19 nt, Homo sapiens
  misc_RNA (1)...(19): siRNA sense strand
gguagaugcuggaguaaga

SEQ ID NO: 232910 - RNA, 19 nt, Homo sapiens
  misc_RNA (1)...(19): siRNA sense strand
gcucuaauguugggaauug

SEQ ID NO: 232911 - RNA, 19 nt, Homo sapiens
  misc_RNA (1)...(19): siRNA sense strand
gacauugcauuucugauug

SEQ ID NO: 232912 - RNA, 19 nt, Homo sapiens
  misc_RNA (1)...(19): siRNA sense strand
agaaacauccgcuauauga

SEQ ID NO: 232913 - RNA, 19 nt, Homo sapiens
  misc_RNA (1)...(19): siRNA sense strand
gaaaagggauccccaaagu

SEQ ID NO: 232914 - RNA, 19 nt, Homo sapiens
  misc_RNA (1)...(19): siRNA sense strand
gcagcaagaccuguuauaa

SEQ ID NO: 232915 - RNA, 19 nt, Homo sapiens
  misc_RNA (1)...(19): siRNA sense strand
uggaugaccugaaagauau

SEQ ID NO: 232916 - RNA, 19 nt, Homo sapiens
  misc_RNA (1)...(19): siRNA sense strand
ggaaagagaaagcagaugu

SEQ ID NO: 232917 - RNA, 19 nt, Homo sapiens
  misc_RNA (1)...(19): siRNA sense strand
ucagaaacauccgcuauau

SEQ ID NO: 232918 - RNA, 19 nt, Homo sapiens
  misc_RNA (1)...(19): siRNA sense strand
ccaaagugguggugguauu

SEQ ID NO: 232919 - RNA, 19 nt, Homo sapiens
  misc_RNA (1)...(19): siRNA sense strand
uaaagcagacauugcauuu

SEQ ID NO: 232920 - RNA, 19 nt, Homo sapiens
  misc_RNA (1)...(19): siRNA sense strand
caagaccuguuauaacuca

SEQ ID NO: 232921 - RNA, 19 nt, Homo sapiens
  misc_RNA (1)...(19): siRNA sense strand
gaacagaaggaccacaugu

SEQ ID NO: 232922 - RNA, 19 nt, Homo sapiens
  misc_RNA (1)...(19): siRNA sense strand
caagaacuuccuaguaauu

SEQ ID NO: 232923 - RNA, 19 nt, Homo sapiens
  misc_RNA (1)...(19): siRNA sense strand
ccauugcuaucacauguuu

SEQ ID NO: 232924 - RNA, 19 nt, Homo sapiens
  misc_RNA (1)...(19): siRNA sense strand
aauaauggcuucuucucuu

SEQ ID NO: 232925 - RNA, 19 nt, Homo sapiens
  misc_RNA (1)...(19): siRNA sense strand
aacauugccuuucuaauug

SEQ ID NO: 232926 - RNA, 19 nt, Homo sapiens
  misc_RNA (1)...(19): siRNA sense strand
auaauggcuucuucucuua

SEQ ID NO: 232927 - RNA, 19 nt, Homo sapiens
  misc_RNA (1)...(19): siRNA sense strand
cacgguagaugcuggagua

SEQ ID NO: 232928 - RNA, 19 nt, Homo sapiens
  misc_RNA (1)...(19): siRNA sense strand
cacaguaacuaaaggcaaa

SEQ ID NO: 232929 - RNA, 19 nt, Homo sapiens
  misc_RNA (1)...(19): siRNA sense strand
cgaaggagucucaugcuuu

SEQ ID NO: 232930 - RNA, 19 nt, Homo sapiens
  misc_RNA (1)...(19): siRNA sense strand
gaaucacuaucuucucugu

SEQ ID NO: 232931 - RNA, 19 nt, Homo sapiens
  misc_RNA (1)...(19): siRNA sense strand
gcauacugcucagaaauuc

SEQ ID NO: 232932 - RNA, 19 nt, Homo sapiens
  misc_RNA (1)...(19): siRNA sense strand
aaaaguggcucuaauguug

SEQ ID NO: 232933 - RNA, 19 nt, Homo sapiens
  misc_RNA (1)...(19): siRNA sense strand
gaaauguguuuggcccuau

SEQ ID NO: 232934 - RNA, 19 nt, Homo sapiens
  misc_RNA (1)...(19): siRNA sense strand
ccaauggcauccagucuca

SEQ ID NO: 232935 - RNA, 19 nt, Homo sapiens
  misc_RNA (1)...(19): siRNA sense strand
ggacaucaggaaagagaaa

SEQ ID NO: 232936 - RNA, 19 nt, Homo sapiens
  misc_RNA (1)...(19): siRNA sense strand
uguccuagcugucaucaga

SEQ ID NO: 232937 - RNA, 19 nt, Homo sapiens
  misc_RNA (1)...(19): siRNA sense strand
gcagcgccgauuuaauuua

SEQ ID NO: 232938 - RNA, 19 nt, Homo sapiens
  misc_RNA (1)...(19): siRNA sense strand
ccacaugcccaacugguuu

SEQ ID NO: 232939 - RNA, 19 nt, Homo sapiens
  misc_RNA (1)...(19): siRNA sense strand
gaugggcaguccuaugaug

SEQ ID NO: 232940 - RNA, 19 nt, Homo sapiens
  misc_RNA (1)...(19): siRNA sense strand
gcuguacaguuuacuuaug

SEQ ID NO: 232941 - RNA, 19 nt, Homo sapiens
  misc_RNA (1)...(19): siRNA sense strand
cagaugggcaguccuauga

SEQ ID NO: 232942 - RNA, 19 nt, Homo sapiens
  misc_RNA (1)...(19): siRNA sense strand
uagccuaccuggucgagaa

SEQ ID NO: 232943 - RNA, 19 nt, Homo sapiens
  misc_RNA (1)...(19): siRNA sense strand
caaagagaauguccuagcu

SEQ ID NO: 232944 - RNA, 19 nt, Homo sapiens
  misc_RNA (1)...(19): siRNA sense strand
agaguuuggugucaaugua

SEQ ID NO: 232945 - RNA, 19 nt, Homo sapiens
  misc_RNA (1)...(19): siRNA sense strand
gacuauagcaccaaagaga

SEQ ID NO: 232946 - RNA, 19 nt, Homo sapiens
  misc_RNA (1)...(19): siRNA sense strand
uagauggucugcuucuuuc

SEQ ID NO: 232947 - RNA, 19 nt, Homo sapiens
  misc_RNA (1)...(19): siRNA sense strand
gagaauguccuagcuguca

SEQ ID NO: 232948 - RNA, 19 nt, Homo sapiens
  misc_RNA (1)...(19): siRNA sense strand
agacauugcauuucugauu

SEQ ID NO: 232949 - RNA, 19 nt, Homo sapiens
  misc_RNA (1)...(19): siRNA sense strand
guaaagcagacauugcauu

SEQ ID NO: 232950 - RNA, 19 nt, Homo sapiens
  misc_RNA (1)...(19): siRNA sense strand
gaaaacacccgagaagaaa

SEQ ID NO: 232951 - RNA, 19 nt, Homo sapiens
  misc_RNA (1)...(19): siRNA sense strand
caaagugguggugguauuu

SEQ ID NO: 232952 - RNA, 19 nt, Homo sapiens
  misc_RNA (1)...(19): siRNA sense strand
caaaugcuuucuagauggu

SEQ ID NO: 232953 - RNA, 19 nt, Homo sapiens
  misc_RNA (1)...(19): siRNA sense strand
ccaagccuaucccugaaga

SEQ ID NO: 232954 - RNA, 19 nt, Homo sapiens
  misc_RNA (1)...(19): siRNA sense strand
aagcagacauugcauuucu

SEQ ID NO: 232955 - RNA, 19 nt, Homo sapiens
  misc_RNA (1)...(19): siRNA sense strand
cauccagucucaaaugcuu

SEQ ID NO: 232956 - RNA, 19 nt, Homo sapiens
  misc_RNA (1)...(19): siRNA sense strand
aaggcugucugucggaaua

SEQ ID NO: 232957 - RNA, 19 nt, Homo sapiens
  misc_RNA (1)...(19): siRNA sense strand
cuagauggucugcuucuuu

SEQ ID NO: 232958 - RNA, 19 nt, Homo sapiens
  misc_RNA (1)...(19): siRNA sense strand
acaagaacuuccuaguaau

SEQ ID NO: 232959 - RNA, 19 nt, Homo sapiens
  misc_RNA (1)...(19): siRNA sense strand
gaggaauucucuguguaug

SEQ ID NO: 232960 - RNA, 19 nt, Homo sapiens
  misc_RNA (1)...(19): siRNA sense strand
ccucaugcuugaauuuguu

SEQ ID NO: 232961 - RNA, 19 nt, Homo sapiens
  misc_RNA (1)...(19): siRNA sense strand
ucugauugauggaagcuuu

SEQ ID NO: 232962 - RNA, 19 nt, Homo sapiens
  misc_RNA (1)...(19): siRNA sense strand
cuuagaaucccagcaauaa

SEQ ID NO: 232963 - RNA, 19 nt, Homo sapiens
  misc_RNA (1)...(19): siRNA sense strand
caucagaggcauuuguaga

SEQ ID NO: 232964 - RNA, 19 nt, Homo sapiens
  misc_RNA (1)...(19): siRNA sense strand
ggagucucaugcuuucuuc

SEQ ID NO: 232965 - RNA, 19 nt, Homo sapiens
  misc_RNA (1)...(19): siRNA sense strand
ucacagaugggcaguccua

SEQ ID NO: 232966 - RNA, 19 nt, Homo sapiens
  misc_RNA (1)...(19): siRNA sense strand
caacauagccaagacuuuu

SEQ ID NO: 232967 - RNA, 19 nt, Homo sapiens
  misc_RNA (1)...(19): siRNA sense strand
cuucuucucuuaccacaug

SEQ ID NO: 232968 - RNA, 19 nt, Homo sapiens
  misc_RNA (1)...(19): siRNA sense strand
gaauaauggcuucuucucu

SEQ ID NO: 232969 - RNA, 19 nt, Homo sapiens
  misc_RNA (1)...(19): siRNA sense strand
agaaaacuauuccucagua

SEQ ID NO: 232970 - RNA, 19 nt, Homo sapiens
  misc_RNA (1)...(19): siRNA sense strand
gaaaagccuugaagcauac

SEQ ID NO: 232971 - RNA, 19 nt, Homo sapiens
  misc_RNA (1)...(19): siRNA sense strand
gaaaaguggcucuaauguu

SEQ ID NO: 232972 - RNA, 19 nt, Homo sapiens
  misc_RNA (1)...(19): siRNA sense strand
gaaagagaaagcagauguc

SEQ ID NO: 232973 - RNA, 19 nt, Homo sapiens
  misc_RNA (1)...(19): siRNA sense strand
gaaagauauggcuucuaaa

SEQ ID NO: 232974 - RNA, 19 nt, Homo sapiens
  misc_RNA (1)...(19): siRNA sense strand
gcaggaaucacuaucuucu

SEQ ID NO: 232975 - RNA, 19 nt, Homo sapiens
  misc_RNA (1)...(19): siRNA sense strand
aaauguguuuggcccuaua

SEQ ID NO: 232976 - RNA, 19 nt, Homo sapiens
  misc_RNA (1)...(19): siRNA sense strand
cuguacaguuuacuuauga

SEQ ID NO: 232977 - RNA, 19 nt, Homo sapiens
  misc_RNA (1)...(19): siRNA sense strand
uuugaaaucucggacauug

SEQ ID NO: 232978 - RNA, 19 nt, Homo sapiens
  misc_RNA (1)...(19): siRNA sense strand
ggccaagccuaucccugaa

SEQ ID NO: 232979 - RNA, 19 nt, Homo sapiens
  misc_RNA (1)...(19): siRNA sense strand
guggugguauuuauugaug

SEQ ID NO: 232980 - RNA, 19 nt, Homo sapiens
  misc_RNA (1)...(19): siRNA sense strand
ccauaaaggaaguagguuu

SEQ ID NO: 232981 - RNA, 19 nt, Homo sapiens
  misc_RNA (1)...(19): siRNA sense strand
cucaaaugcuuucuagaug

SEQ ID NO: 232982 - RNA, 19 nt, Homo sapiens
  misc_RNA (1)...(19): siRNA sense strand
ucagaggcauuuguagaga

SEQ ID NO: 232983 - RNA, 19 nt, Homo sapiens
  misc_RNA (1)...(19): siRNA sense strand
cuggaugaccugaaagaua

SEQ ID NO: 232984 - RNA, 19 nt, Homo sapiens
  misc_RNA (1)...(19): siRNA sense strand
gcaguccuaugaugauguc

SEQ ID NO: 232985 - RNA, 19 nt, Homo sapiens
  misc_RNA (1)...(19): siRNA sense strand
ccagagaguuuggugucaa

SEQ ID NO: 232986 - RNA, 19 nt, Homo sapiens
  misc_RNA (1)...(19): siRNA sense strand
guugggaauuggaacagaa

SEQ ID NO: 232987 - RNA, 19 nt, Homo sapiens
  misc_RNA (1)...(19): siRNA sense strand
acagguaaacgacuaaaga

SEQ ID NO: 232988 - RNA, 19 nt, Homo sapiens
  misc_RNA (1)...(19): siRNA sense strand
ggaccuguacgagucuaua

SEQ ID NO: 232989 - RNA, 19 nt, Homo sapiens
  misc_RNA (1)...(19): siRNA sense strand
agaggcauuuguagagauu

SEQ ID NO: 232990 - RNA, 19 nt, Homo sapiens
  misc_RNA (1)...(19): siRNA sense strand
gcuuggacaucaggaaaga

SEQ ID NO: 232991 - RNA, 19 nt, Homo sapiens
  misc_RNA (1)...(19): siRNA sense strand
cagugaacaucccaaaaua

SEQ ID NO: 232992 - RNA, 19 nt, Homo sapiens
  misc_RNA (1)...(19): siRNA sense strand
agcaagaccuguuauaacu

SEQ ID NO: 232993 - RNA, 19 nt, Homo sapiens
  misc_RNA (1)...(19): siRNA sense strand
cgaggaagcaggcauugug

SEQ ID NO: 232994 - RNA, 19 nt, Homo sapiens
  misc_RNA (1)...(19): siRNA sense strand
gaacgggaagccaaagaaa

SEQ ID NO: 232995 - RNA, 19 nt, Homo sapiens
  misc_RNA (1)...(19): siRNA sense strand
gguccaaguucaagaagau

SEQ ID NO: 232996 - RNA, 19 nt, Homo sapiens
  misc_RNA (1)...(19): siRNA sense strand
ggaccuugagccugaaauu

SEQ ID NO: 232997 - RNA, 19 nt, Homo sapiens
  misc_RNA (1)...(19): siRNA sense strand
acaacgagccugagaagga

SEQ ID NO: 232998 - RNA, 19 nt, Homo sapiens
  misc_RNA (1)...(19): siRNA sense strand
caacaacgagccugagaag

SEQ ID NO: 232999 - RNA, 19 nt, Homo sapiens
  misc_RNA (1)...(19): siRNA sense strand
ucaacaacgucccuuacuc

SEQ ID NO: 233000 - RNA, 19 nt, Homo sapiens
  misc_RNA (1)...(19): siRNA sense strand
caaagaaaguccggaaacc

SEQ ID NO: 233001 - RNA, 19 nt, Homo sapiens
  misc_RNA (1)...(19): siRNA sense strand
ccugaaauucggauaguga

SEQ ID NO: 233002 - RNA, 19 nt, Homo sapiens
  misc_RNA (1)...(19): siRNA sense strand
gcuaugaccugggcuacac

SEQ ID NO: 233003 - RNA, 19 nt, Homo sapiens
  misc_RNA (1)...(19): siRNA sense strand
ccaaagaaaguccggaaac

SEQ ID NO: 233004 - RNA, 19 nt, Homo sapiens
  misc_RNA (1)...(19): siRNA sense strand
ggaggaccuugagccugaa

SEQ ID NO: 233005 - RNA, 19 nt, Homo sapiens
  misc_RNA (1)...(19): siRNA sense strand
ugaacgggaagccaaagaa

SEQ ID NO: 233006 - RNA, 19 nt, Homo sapiens
  misc_RNA (1)...(19): siRNA sense strand
aagaagauguggaaaagug

SEQ ID NO: 233007 - RNA, 19 nt, Homo sapiens
  misc_RNA (1)...(19): siRNA sense strand
cacccagacucaggucaaa

SEQ ID NO: 233008 - RNA, 19 nt, Homo sapiens
  misc_RNA (1)...(19): siRNA sense strand
gacagucuaguggcugaua

SEQ ID NO: 233009 - RNA, 19 nt, Homo sapiens
  misc_RNA (1)...(19): siRNA sense strand
ccaacaacgagccugagaa

SEQ ID NO: 233010 - RNA, 19 nt, Homo sapiens
  misc_RNA (1)...(19): siRNA sense strand
ucaagaagauguggaaaag

SEQ ID NO: 233011 - RNA, 19 nt, Homo sapiens
  misc_RNA (1)...(19): siRNA sense strand
cuccuacgcucccuaugga

SEQ ID NO: 233012 - RNA, 19 nt, Homo sapiens
  misc_RNA (1)...(19): siRNA sense strand
gcaccaucuacuccaguuu

SEQ ID NO: 233013 - RNA, 19 nt, Homo sapiens
  misc_RNA (1)...(19): siRNA sense strand
gaccuugagccugaaauuc

SEQ ID NO: 233014 - RNA, 19 nt, Homo sapiens
  misc_RNA (1)...(19): siRNA sense strand
gccaaagaaaguccggaaa

SEQ ID NO: 233015 - RNA, 19 nt, Homo sapiens
  misc_RNA (1)...(19): siRNA sense strand
ccagcggccucaacaacgu

SEQ ID NO: 233016 - RNA, 19 nt, Homo sapiens
  misc_RNA (1)...(19): siRNA sense strand
cuucagcggcguuuccaaa

SEQ ID NO: 233017 - RNA, 19 nt, Homo sapiens
  misc_RNA (1)...(19): siRNA sense strand
caagccagcggccucaaca

SEQ ID NO: 233018 - RNA, 19 nt, Homo sapiens
  misc_RNA (1)...(19): siRNA sense strand
uggagucuuugacagucua

SEQ ID NO: 233019 - RNA, 19 nt, Homo sapiens
  misc_RNA (1)...(19): siRNA sense strand
gccaacaacgagccugaga

SEQ ID NO: 233020 - RNA, 19 nt, Homo sapiens
  misc_RNA (1)...(19): siRNA sense strand
cagcggcguuuccaaaaga

SEQ ID NO: 233021 - RNA, 19 nt, Homo sapiens
  misc_RNA (1)...(19): siRNA sense strand
ggaaaccccgcaccaucua

SEQ ID NO: 233022 - RNA, 19 nt, Homo sapiens
  misc_RNA (1)...(19): siRNA sense strand
gagccugaaauucggauag

SEQ ID NO: 233023 - RNA, 19 nt, Homo sapiens
  misc_RNA (1)...(19): siRNA sense strand
gaagguggcugcaacuaug

SEQ ID NO: 233024 - RNA, 19 nt, Homo sapiens
  misc_RNA (1)...(19): siRNA sense strand
ggacagaccuccguauuca

SEQ ID NO: 233025 - RNA, 19 nt, Homo sapiens
  misc_RNA (1)...(19): siRNA sense strand
gggaaaaucuguaaugaua

SEQ ID NO: 233026 - RNA, 19 nt, Homo sapiens
  misc_RNA (1)...(19): siRNA sense strand
ggagucaacuguagcagaa

SEQ ID NO: 233027 - RNA, 19 nt, Homo sapiens
  misc_RNA (1)...(19): siRNA sense strand
ggagucaacuguagcagaa

SEQ ID NO: 233028 - RNA, 19 nt, Homo sapiens
  misc_RNA (1)...(19): siRNA sense strand
ccaaugacuucacgucuuu

SEQ ID NO: 233029 - RNA, 19 nt, Homo sapiens
  misc_RNA (1)...(19): siRNA sense strand
agacuacgcuucacugauu

SEQ ID NO: 233030 - RNA, 19 nt, Homo sapiens
  misc_RNA (1)...(19): siRNA sense strand
gcucaggacacgagucuua

SEQ ID NO: 233031 - RNA, 19 nt, Homo sapiens
  misc_RNA (1)...(19): siRNA sense strand
gaauucugguuaucgcaua

SEQ ID NO: 233032 - RNA, 19 nt, Homo sapiens
  misc_RNA (1)...(19): siRNA sense strand
gcucaggacacgagucuua

SEQ ID NO: 233033 - RNA, 19 nt, Homo sapiens
  misc_RNA (1)...(19): siRNA sense strand
gcaccaaccugcucugucu

SEQ ID NO: 233034 - RNA, 19 nt, Homo sapiens
  misc_RNA (1)...(19): siRNA sense strand
cgaagacgcuggugucauc

SEQ ID NO: 233035 - RNA, 19 nt, Homo sapiens
  misc_RNA (1)...(19): siRNA sense strand
gauaccaggcaaauauuua

SEQ ID NO: 233036 - RNA, 19 nt, Homo sapiens
  misc_RNA (1)...(19): siRNA sense strand
ccagaaaguuggccuguca

SEQ ID NO: 233037 - RNA, 19 nt, Homo sapiens
  misc_RNA (1)...(19): siRNA sense strand
aaauugugguggcuucuua

SEQ ID NO: 233038 - RNA, 19 nt, Homo sapiens
  misc_RNA (1)...(19): siRNA sense strand
ucacgucuuugacuuauga

SEQ ID NO: 233039 - RNA, 19 nt, Homo sapiens
  misc_RNA (1)...(19): siRNA sense strand
ucagagauguccagcuuga

SEQ ID NO: 233040 - RNA, 19 nt, Homo sapiens
  misc_RNA (1)...(19): siRNA sense strand
ggacaccaaugaugccaau

SEQ ID NO: 233041 - RNA, 19 nt, Homo sapiens
  misc_RNA (1)...(19): siRNA sense strand
ggacaccaaugaugccaau

SEQ ID NO: 233042 - RNA, 19 nt, Homo sapiens
  misc_RNA (1)...(19): siRNA sense strand
ugaagacgcuggugucauc

SEQ ID NO: 233043 - RNA, 19 nt, Homo sapiens
  misc_RNA (1)...(19): siRNA sense strand
ggacaccaaugaugccaau

SEQ ID NO: 233044 - RNA, 19 nt, Homo sapiens
  misc_RNA (1)...(19): siRNA sense strand
ugaagacgcuggugucauc

SEQ ID NO: 233045 - RNA, 19 nt, Homo sapiens
  misc_RNA (1)...(19): siRNA sense strand
ggacaccaaugaugccaau

SEQ ID NO: 233046 - RNA, 19 nt, Homo sapiens
  misc_RNA (1)...(19): siRNA sense strand
ugaagacgcuggugucauc

SEQ ID NO: 233047 - RNA, 19 nt, Homo sapiens
  misc_RNA (1)...(19): siRNA sense strand
ggacaccaaugaugccaau

SEQ ID NO: 233048 - RNA, 19 nt, Homo sapiens
  misc_RNA (1)...(19): siRNA sense strand
ugaagacgcuggugucauc

SEQ ID NO: 233049 - RNA, 19 nt, Homo sapiens
  misc_RNA (1)...(19): siRNA sense strand
ugaagacgcuggugucauc

SEQ ID NO: 233050 - RNA, 19 nt, Homo sapiens
  misc_RNA (1)...(19): siRNA sense strand
gaagugaauucugguuauc

SEQ ID NO: 233051 - RNA, 19 nt, Homo sapiens
  misc_RNA (1)...(19): siRNA sense strand
uaaguguguuugggaaaua

SEQ ID NO: 233052 - RNA, 19 nt, Homo sapiens
  misc_RNA (1)...(19): siRNA sense strand
gcagaaugcuucagaacac

SEQ ID NO: 233053 - RNA, 19 nt, Homo sapiens
  misc_RNA (1)...(19): siRNA sense strand
caugucagcuccaggaaau

SEQ ID NO: 233054 - RNA, 19 nt, Homo sapiens
  misc_RNA (1)...(19): siRNA sense strand
gaaauccuccauucugaug

SEQ ID NO: 233055 - RNA, 19 nt, Homo sapiens
  misc_RNA (1)...(19): siRNA sense strand
caaaacaacuaccguguga

SEQ ID NO: 233056 - RNA, 19 nt, Homo sapiens
  misc_RNA (1)...(19): siRNA sense strand
ggugucaucugcucaggaa

SEQ ID NO: 233057 - RNA, 19 nt, Homo sapiens
  misc_RNA (1)...(19): siRNA sense strand
ggacaccagugacgccaau

SEQ ID NO: 233058 - RNA, 19 nt, Homo sapiens
  misc_RNA (1)...(19): siRNA sense strand
ugagguuggucaauuuaaa

SEQ ID NO: 233059 - RNA, 19 nt, Homo sapiens
  misc_RNA (1)...(19): siRNA sense strand
ugaagaugcugguguuauc

SEQ ID NO: 233060 - RNA, 19 nt, Homo sapiens
  misc_RNA (1)...(19): siRNA sense strand
gaauggauacuacgagugu

SEQ ID NO: 233061 - RNA, 19 nt, Homo sapiens
  misc_RNA (1)...(19): siRNA sense strand
caacuguaaucaucgugaa

SEQ ID NO: 233062 - RNA, 19 nt, Homo sapiens
  misc_RNA (1)...(19): siRNA sense strand
cgccgaaccuggugauauu

SEQ ID NO: 233063 - RNA, 19 nt, Homo sapiens
  misc_RNA (1)...(19): siRNA sense strand
ccacagucauccuugaaau

SEQ ID NO: 233064 - RNA, 19 nt, Homo sapiens
  misc_RNA (1)...(19): siRNA sense strand
ccauccacguugcuaauaa

SEQ ID NO: 233065 - RNA, 19 nt, Homo sapiens
  misc_RNA (1)...(19): siRNA sense strand
caacuuaccggcauugaca

SEQ ID NO: 233066 - RNA, 19 nt, Homo sapiens
  misc_RNA (1)...(19): siRNA sense strand
gccagaggcuccuucacuu

SEQ ID NO: 233067 - RNA, 19 nt, Homo sapiens
  misc_RNA (1)...(19): siRNA sense strand
ugacugugaucuucagaga

SEQ ID NO: 233068 - RNA, 19 nt, Homo sapiens
  misc_RNA (1)...(19): siRNA sense strand
gaccacagcaucacaagga

SEQ ID NO: 233069 - RNA, 19 nt, Homo sapiens
  misc_RNA (1)...(19): siRNA sense strand
caucgacuauuccaacuuc

SEQ ID NO: 233070 - RNA, 19 nt, Homo sapiens
  misc_RNA (1)...(19): siRNA sense strand
ggaccugaauccaguuugg

SEQ ID NO: 233071 - RNA, 19 nt, Homo sapiens
  misc_RNA (1)...(19): siRNA sense strand
gaagugacaucaguuucca

SEQ ID NO: 233072 - RNA, 19 nt, Homo sapiens
  misc_RNA (1)...(19): siRNA sense strand
guugaaaucuuugauggau

SEQ ID NO: 233073 - RNA, 19 nt, Homo sapiens
  misc_RNA (1)...(19): siRNA sense strand
cauccuacccugcauacua

SEQ ID NO: 233074 - RNA, 19 nt, Homo sapiens
  misc_RNA (1)...(19): siRNA sense strand
uaaauucuacuacgacaga

SEQ ID NO: 233075 - RNA, 19 nt, Homo sapiens
  misc_RNA (1)...(19): siRNA sense strand
gcucagccacccaaauaaa

SEQ ID NO: 233076 - RNA, 19 nt, Homo sapiens
  misc_RNA (1)...(19): siRNA sense strand
gaugacuccuggaccauuc

SEQ ID NO: 233077 - RNA, 19 nt, Homo sapiens
  misc_RNA (1)...(19): siRNA sense strand
cuucagagauguccagcuu

SEQ ID NO: 233078 - RNA, 19 nt, Homo sapiens
  misc_RNA (1)...(19): siRNA sense strand
ggugucaucugcucagcuu

SEQ ID NO: 233079 - RNA, 19 nt, Homo sapiens
  misc_RNA (1)...(19): siRNA sense strand
gaaguccaguauggcaauu

SEQ ID NO: 233080 - RNA, 19 nt, Homo sapiens
  misc_RNA (1)...(19): siRNA sense strand
ucucauugcucgaguuugu

SEQ ID NO: 233081 - RNA, 19 nt, Homo sapiens
  misc_RNA (1)...(19): siRNA sense strand
ggaacuauccaaacaaugc

SEQ ID NO: 233082 - RNA, 19 nt, Homo sapiens
  misc_RNA (1)...(19): siRNA sense strand
ggugucaucugcucagcuu

SEQ ID NO: 233083 - RNA, 19 nt, Homo sapiens
  misc_RNA (1)...(19): siRNA sense strand
ggugucaucugcucagcuu

SEQ ID NO: 233084 - RNA, 19 nt, Homo sapiens
  misc_RNA (1)...(19): siRNA sense strand
gccaaccucucgugcauca

SEQ ID NO: 233085 - RNA, 19 nt, Homo sapiens
  misc_RNA (1)...(19): siRNA sense strand
guucagggccuuccacuuc

SEQ ID NO: 233086 - RNA, 19 nt, Homo sapiens
  misc_RNA (1)...(19): siRNA sense strand
cugaaauccuccauucuga

SEQ ID NO: 233087 - RNA, 19 nt, Homo sapiens
  misc_RNA (1)...(19): siRNA sense strand
gaaccaggacuuguacguu

SEQ ID NO: 233088 - RNA, 19 nt, Homo sapiens
  misc_RNA (1)...(19): siRNA sense strand
caaacaaugccaagugugu

SEQ ID NO: 233089 - RNA, 19 nt, Homo sapiens
  misc_RNA (1)...(19): siRNA sense strand
gaauccaguuuggcucuga

SEQ ID NO: 233090 - RNA, 19 nt, Homo sapiens
  misc_RNA (1)...(19): siRNA sense strand
gaguggagguccuauacca

SEQ ID NO: 233091 - RNA, 19 nt, Homo sapiens
  misc_RNA (1)...(19): siRNA sense strand
caacaucacccguccaaac

SEQ ID NO: 233092 - RNA, 19 nt, Homo sapiens
  misc_RNA (1)...(19): siRNA sense strand
aaugauaccaggcaaauau

SEQ ID NO: 233093 - RNA, 19 nt, Homo sapiens
  misc_RNA (1)...(19): siRNA sense strand
gaaauuggaggcacaccau

SEQ ID NO: 233094 - RNA, 19 nt, Homo sapiens
  misc_RNA (1)...(19): siRNA sense strand
gaguggagguccuguaucg

SEQ ID NO: 233095 - RNA, 19 nt, Homo sapiens
  misc_RNA (1)...(19): siRNA sense strand
gaguggagguccuauacca

SEQ ID NO: 233096 - RNA, 19 nt, Homo sapiens
  misc_RNA (1)...(19): siRNA sense strand
ccauugcccuggaugaugu

SEQ ID NO: 233097 - RNA, 19 nt, Homo sapiens
  misc_RNA (1)...(19): siRNA sense strand
ucaagcaggcagacaauga

SEQ ID NO: 233098 - RNA, 19 nt, Homo sapiens
  misc_RNA (1)...(19): siRNA sense strand
gaccucacaugcaucaaca

SEQ ID NO: 233099 - RNA, 19 nt, Homo sapiens
  misc_RNA (1)...(19): siRNA sense strand
caacuguggccaucaugaa

SEQ ID NO: 233100 - RNA, 19 nt, Homo sapiens
  misc_RNA (1)...(19): siRNA sense strand
aaccugggcuucaguaauc

SEQ ID NO: 233101 - RNA, 19 nt, Homo sapiens
  misc_RNA (1)...(19): siRNA sense strand
caacuguggccaucaugaa

SEQ ID NO: 233102 - RNA, 19 nt, Homo sapiens
  misc_RNA (1)...(19): siRNA sense strand
caacuguggccaucaugaa

SEQ ID NO: 233103 - RNA, 19 nt, Homo sapiens
  misc_RNA (1)...(19): siRNA sense strand
gggacaaguucuaucuaca

SEQ ID NO: 233104 - RNA, 19 nt, Homo sapiens
  misc_RNA (1)...(19): siRNA sense strand
gcugaaauccuccauucug

SEQ ID NO: 233105 - RNA, 19 nt, Homo sapiens
  misc_RNA (1)...(19): siRNA sense strand
acaaugacaccaucgacua

SEQ ID NO: 233106 - RNA, 19 nt, Homo sapiens
  misc_RNA (1)...(19): siRNA sense strand
gcauaaaccugggcuucag

SEQ ID NO: 233107 - RNA, 19 nt, Homo sapiens
  misc_RNA (1)...(19): siRNA sense strand
caacuguggccaucacgaa

SEQ ID NO: 233108 - RNA, 19 nt, Homo sapiens
  misc_RNA (1)...(19): siRNA sense strand
gauggaucauugaauagca

SEQ ID NO: 233109 - RNA, 19 nt, Homo sapiens
  misc_RNA (1)...(19): siRNA sense strand
ggcaaauauuuacaucuuc

SEQ ID NO: 233110 - RNA, 19 nt, Homo sapiens
  misc_RNA (1)...(19): siRNA sense strand
guaaugauaccaggcaaau

SEQ ID NO: 233111 - RNA, 19 nt, Homo sapiens
  misc_RNA (1)...(19): siRNA sense strand
cugcucagccacccaaaua

SEQ ID NO: 233112 - RNA, 19 nt, Homo sapiens
  misc_RNA (1)...(19): siRNA sense strand
ccguguaccugcguuguaa

SEQ ID NO: 233113 - RNA, 19 nt, Homo sapiens
  misc_RNA (1)...(19): siRNA sense strand
gacaccauguacauugcua

SEQ ID NO: 233114 - RNA, 19 nt, Homo sapiens
  misc_RNA (1)...(19): siRNA sense strand
uaucgacaccugcuccuuu

SEQ ID NO: 233115 - RNA, 19 nt, Homo sapiens
  misc_RNA (1)...(19): siRNA sense strand
ccaacaaugcuaagugugu

SEQ ID NO: 233116 - RNA, 19 nt, Homo sapiens
  misc_RNA (1)...(19): siRNA sense strand
gucuuugacuuaugaucua

SEQ ID NO: 233117 - RNA, 19 nt, Homo sapiens
  misc_RNA (1)...(19): siRNA sense strand
cgggaacuauccaaacaau

SEQ ID NO: 233118 - RNA, 19 nt, Homo sapiens
  misc_RNA (1)...(19): siRNA sense strand
ccaggcaaauauuuacauc

SEQ ID NO: 233119 - RNA, 19 nt, Homo sapiens
  misc_RNA (1)...(19): siRNA sense strand
ggacaaguucuaucuacag

SEQ ID NO: 233120 - RNA, 19 nt, Homo sapiens
  misc_RNA (1)...(19): siRNA sense strand
ucccacaacuguaaucauc

SEQ ID NO: 233121 - RNA, 19 nt, Homo sapiens
  misc_RNA (1)...(19): siRNA sense strand
cuaccgaggcuguguguug

SEQ ID NO: 233122 - RNA, 19 nt, Homo sapiens
  misc_RNA (1)...(19): siRNA sense strand
gcugcagaaugcuucagaa

SEQ ID NO: 233123 - RNA, 19 nt, Homo sapiens
  misc_RNA (1)...(19): siRNA sense strand
gaagguggcugcaacuaug

SEQ ID NO: 233124 - RNA, 19 nt, Homo sapiens
  misc_RNA (1)...(19): siRNA sense strand
ggacagaccuccguauuca

SEQ ID NO: 233125 - RNA, 19 nt, Homo sapiens
  misc_RNA (1)...(19): siRNA sense strand
gggaaaaucuguaaugaua

SEQ ID NO: 233126 - RNA, 19 nt, Homo sapiens
  misc_RNA (1)...(19): siRNA sense strand
ggagucaacuguagcagaa

SEQ ID NO: 233127 - RNA, 19 nt, Homo sapiens
  misc_RNA (1)...(19): siRNA sense strand
ggagucaacuguagcagaa

SEQ ID NO: 233128 - RNA, 19 nt, Homo sapiens
  misc_RNA (1)...(19): siRNA sense strand
ccaaugacuucacgucuuu

SEQ ID NO: 233129 - RNA, 19 nt, Homo sapiens
  misc_RNA (1)...(19): siRNA sense strand
agacuacgcuucacugauu

SEQ ID NO: 233130 - RNA, 19 nt, Homo sapiens
  misc_RNA (1)...(19): siRNA sense strand
gcucaggacacgagucuua

SEQ ID NO: 233131 - RNA, 19 nt, Homo sapiens
  misc_RNA (1)...(19): siRNA sense strand
gaauucugguuaucgcaua

SEQ ID NO: 233132 - RNA, 19 nt, Homo sapiens
  misc_RNA (1)...(19): siRNA sense strand
gcucaggacacgagucuua

SEQ ID NO: 233133 - RNA, 19 nt, Homo sapiens
  misc_RNA (1)...(19): siRNA sense strand
gcaccaaccugcucugucu

SEQ ID NO: 233134 - RNA, 19 nt, Homo sapiens
  misc_RNA (1)...(19): siRNA sense strand
cgaagacgcuggugucauc

SEQ ID NO: 233135 - RNA, 19 nt, Homo sapiens
  misc_RNA (1)...(19): siRNA sense strand
gauaccaggcaaauauuua

SEQ ID NO: 233136 - RNA, 19 nt, Homo sapiens
  misc_RNA (1)...(19): siRNA sense strand
ccagaaaguuggccuguca

SEQ ID NO: 233137 - RNA, 19 nt, Homo sapiens
  misc_RNA (1)...(19): siRNA sense strand
aaauugugguggcuucuua

SEQ ID NO: 233138 - RNA, 19 nt, Homo sapiens
  misc_RNA (1)...(19): siRNA sense strand
ucacgucuuugacuuauga

SEQ ID NO: 233139 - RNA, 19 nt, Homo sapiens
  misc_RNA (1)...(19): siRNA sense strand
ucagagauguccagcuuga

SEQ ID NO: 233140 - RNA, 19 nt, Homo sapiens
  misc_RNA (1)...(19): siRNA sense strand
ggacaccaaugaugccaau

SEQ ID NO: 233141 - RNA, 19 nt, Homo sapiens
  misc_RNA (1)...(19): siRNA sense strand
ggacaccaaugaugccaau

SEQ ID NO: 233142 - RNA, 19 nt, Homo sapiens
  misc_RNA (1)...(19): siRNA sense strand
ugaagacgcuggugucauc

SEQ ID NO: 233143 - RNA, 19 nt, Homo sapiens
  misc_RNA (1)...(19): siRNA sense strand
ggacaccaaugaugccaau

SEQ ID NO: 233144 - RNA, 19 nt, Homo sapiens
  misc_RNA (1)...(19): siRNA sense strand
ugaagacgcuggugucauc

SEQ ID NO: 233145 - RNA, 19 nt, Homo sapiens
  misc_RNA (1)...(19): siRNA sense strand
ggacaccaaugaugccaau

SEQ ID NO: 233146 - RNA, 19 nt, Homo sapiens
  misc_RNA (1)...(19): siRNA sense strand
ugaagacgcuggugucauc

SEQ ID NO: 233147 - RNA, 19 nt, Homo sapiens
  misc_RNA (1)...(19): siRNA sense strand
ggacaccaaugaugccaau

SEQ ID NO: 233148 - RNA, 19 nt, Homo sapiens
  misc_RNA (1)...(19): siRNA sense strand
ugaagacgcuggugucauc

SEQ ID NO: 233149 - RNA, 19 nt, Homo sapiens
  misc_RNA (1)...(19): siRNA sense strand
ggacaccaaugaugccaau

SEQ ID NO: 233150 - RNA, 19 nt, Homo sapiens
  misc_RNA (1)...(19): siRNA sense strand
ugaagacgcuggugucauc

SEQ ID NO: 233151 - RNA, 19 nt, Homo sapiens
  misc_RNA (1)...(19): siRNA sense strand
ggacaccaaugaugccaau

SEQ ID NO: 233152 - RNA, 19 nt, Homo sapiens
  misc_RNA (1)...(19): siRNA sense strand
ugaagacgcuggugucauc

SEQ ID NO: 233153 - RNA, 19 nt, Homo sapiens
  misc_RNA (1)...(19): siRNA sense strand
ugaagacgcuggugucauc

SEQ ID NO: 233154 - RNA, 19 nt, Homo sapiens
  misc_RNA (1)...(19): siRNA sense strand
ugaagacgcuggugucauc

SEQ ID NO: 233155 - RNA, 19 nt, Homo sapiens
  misc_RNA (1)...(19): siRNA sense strand
gaagugaauucugguuauc

SEQ ID NO: 233156 - RNA, 19 nt, Homo sapiens
  misc_RNA (1)...(19): siRNA sense strand
uaaguguguuugggaaaua

SEQ ID NO: 233157 - RNA, 19 nt, Homo sapiens
  misc_RNA (1)...(19): siRNA sense strand
gcagaaugcuucagaacac

SEQ ID NO: 233158 - RNA, 19 nt, Homo sapiens
  misc_RNA (1)...(19): siRNA sense strand
caugucagcuccaggaaau

SEQ ID NO: 233159 - RNA, 19 nt, Homo sapiens
  misc_RNA (1)...(19): siRNA sense strand
gaaauccuccauucugaug

SEQ ID NO: 233160 - RNA, 19 nt, Homo sapiens
  misc_RNA (1)...(19): siRNA sense strand
caaaacaacuaccguguga

SEQ ID NO: 233161 - RNA, 19 nt, Homo sapiens
  misc_RNA (1)...(19): siRNA sense strand
ggugucaucugcucaggaa

SEQ ID NO: 233162 - RNA, 19 nt, Homo sapiens
  misc_RNA (1)...(19): siRNA sense strand
ggacaccagugacgccaau

SEQ ID NO: 233163 - RNA, 19 nt, Homo sapiens
  misc_RNA (1)...(19): siRNA sense strand
ugagguuggucaauuuaaa

SEQ ID NO: 233164 - RNA, 19 nt, Homo sapiens
  misc_RNA (1)...(19): siRNA sense strand
ggacaccagugacgccaau

SEQ ID NO: 233165 - RNA, 19 nt, Homo sapiens
  misc_RNA (1)...(19): siRNA sense strand
ugaagaugcugguguuauc

SEQ ID NO: 233166 - RNA, 19 nt, Homo sapiens
  misc_RNA (1)...(19): siRNA sense strand
gaauggauacuacgagugu

SEQ ID NO: 233167 - RNA, 19 nt, Homo sapiens
  misc_RNA (1)...(19): siRNA sense strand
caacuguaaucaucgugaa

SEQ ID NO: 233168 - RNA, 19 nt, Homo sapiens
  misc_RNA (1)...(19): siRNA sense strand
cgccgaaccuggugauauu

SEQ ID NO: 233169 - RNA, 19 nt, Homo sapiens
  misc_RNA (1)...(19): siRNA sense strand
ccacagucauccuugaaau

SEQ ID NO: 233170 - RNA, 19 nt, Homo sapiens
  misc_RNA (1)...(19): siRNA sense strand
ccauccacguugcuaauaa

SEQ ID NO: 233171 - RNA, 19 nt, Homo sapiens
  misc_RNA (1)...(19): siRNA sense strand
caacuuaccggcauugaca

SEQ ID NO: 233172 - RNA, 19 nt, Homo sapiens
  misc_RNA (1)...(19): siRNA sense strand
gccagaggcuccuucacuu

SEQ ID NO: 233173 - RNA, 19 nt, Homo sapiens
  misc_RNA (1)...(19): siRNA sense strand
ugacugugaucuucagaga

SEQ ID NO: 233174 - RNA, 19 nt, Homo sapiens
  misc_RNA (1)...(19): siRNA sense strand
gaccacagcaucacaagga

SEQ ID NO: 233175 - RNA, 19 nt, Homo sapiens
  misc_RNA (1)...(19): siRNA sense strand
caucgacuauuccaacuuc

SEQ ID NO: 233176 - RNA, 19 nt, Homo sapiens
  misc_RNA (1)...(19): siRNA sense strand
ggaccugaauccaguuugg

SEQ ID NO: 233177 - RNA, 19 nt, Homo sapiens
  misc_RNA (1)...(19): siRNA sense strand
gaagugacaucaguuucca

SEQ ID NO: 233178 - RNA, 19 nt, Homo sapiens
  misc_RNA (1)...(19): siRNA sense strand
guugaaaucuuugauggau

SEQ ID NO: 233179 - RNA, 19 nt, Homo sapiens
  misc_RNA (1)...(19): siRNA sense strand
cauccuacccugcauacua

SEQ ID NO: 233180 - RNA, 19 nt, Homo sapiens
  misc_RNA (1)...(19): siRNA sense strand
uaaauucuacuacgacaga

SEQ ID NO: 233181 - RNA, 19 nt, Homo sapiens
  misc_RNA (1)...(19): siRNA sense strand
gcucagccacccaaauaaa

SEQ ID NO: 233182 - RNA, 19 nt, Homo sapiens
  misc_RNA (1)...(19): siRNA sense strand
ggaccugaauccaguuugg

SEQ ID NO: 233183 - RNA, 19 nt, Homo sapiens
  misc_RNA (1)...(19): siRNA sense strand
gaugacuccuggaccauuc

SEQ ID NO: 233184 - RNA, 19 nt, Homo sapiens
  misc_RNA (1)...(19): siRNA sense strand
cuucagagauguccagcuu

SEQ ID NO: 233185 - RNA, 19 nt, Homo sapiens
  misc_RNA (1)...(19): siRNA sense strand
ggugucaucugcucagcuu

SEQ ID NO: 233186 - RNA, 19 nt, Homo sapiens
  misc_RNA (1)...(19): siRNA sense strand
gaaguccaguauggcaauu

SEQ ID NO: 233187 - RNA, 19 nt, Homo sapiens
  misc_RNA (1)...(19): siRNA sense strand
ucucauugcucgaguuugu

SEQ ID NO: 233188 - RNA, 19 nt, Homo sapiens
  misc_RNA (1)...(19): siRNA sense strand
ggaacuauccaaacaaugc

SEQ ID NO: 233189 - RNA, 19 nt, Homo sapiens
  misc_RNA (1)...(19): siRNA sense strand
ggugucaucugcucagcuu

SEQ ID NO: 233190 - RNA, 19 nt, Homo sapiens
  misc_RNA (1)...(19): siRNA sense strand
ggugucaucugcucagcuu

SEQ ID NO: 233191 - RNA, 19 nt, Homo sapiens
  misc_RNA (1)...(19): siRNA sense strand
ggugucaucugcucagcuu

SEQ ID NO: 233192 - RNA, 19 nt, Homo sapiens
  misc_RNA (1)...(19): siRNA sense strand
gccaaccucucgugcauca

SEQ ID NO: 233193 - RNA, 19 nt, Homo sapiens
  misc_RNA (1)...(19): siRNA sense strand
guucagggccuuccacuuc

SEQ ID NO: 233194 - RNA, 19 nt, Homo sapiens
  misc_RNA (1)...(19): siRNA sense strand
cugaaauccuccauucuga

SEQ ID NO: 233195 - RNA, 19 nt, Homo sapiens
  misc_RNA (1)...(19): siRNA sense strand
gaaccaggacuuguacguu

SEQ ID NO: 233196 - RNA, 19 nt, Homo sapiens
  misc_RNA (1)...(19): siRNA sense strand
caaacaaugccaagugugu

SEQ ID NO: 233197 - RNA, 19 nt, Homo sapiens
  misc_RNA (1)...(19): siRNA sense strand
gaauccaguuuggcucuga

SEQ ID NO: 233198 - RNA, 19 nt, Homo sapiens
  misc_RNA (1)...(19): siRNA sense strand
gaguggagguccuauacca

SEQ ID NO: 233199 - RNA, 19 nt, Homo sapiens
  misc_RNA (1)...(19): siRNA sense strand
caacaucacccguccaaac

SEQ ID NO: 233200 - RNA, 19 nt, Homo sapiens
  misc_RNA (1)...(19): siRNA sense strand
aaugauaccaggcaaauau

SEQ ID NO: 233201 - RNA, 19 nt, Homo sapiens
  misc_RNA (1)...(19): siRNA sense strand
gaaauuggaggcacaccau

SEQ ID NO: 233202 - RNA, 19 nt, Homo sapiens
  misc_RNA (1)...(19): siRNA sense strand
gaguggagguccuguaucg

SEQ ID NO: 233203 - RNA, 19 nt, Homo sapiens
  misc_RNA (1)...(19): siRNA sense strand
gaguggagguccuauacca

SEQ ID NO: 233204 - RNA, 19 nt, Homo sapiens
  misc_RNA (1)...(19): siRNA sense strand
ccauugcccuggaugaugu

SEQ ID NO: 233205 - RNA, 19 nt, Homo sapiens
  misc_RNA (1)...(19): siRNA sense strand
ucaagcaggcagacaauga

SEQ ID NO: 233206 - RNA, 19 nt, Homo sapiens
  misc_RNA (1)...(19): siRNA sense strand
gaccucacaugcaucaaca

SEQ ID NO: 233207 - RNA, 19 nt, Homo sapiens
  misc_RNA (1)...(19): siRNA sense strand
gaccucacaugcaucaaca

SEQ ID NO: 233208 - RNA, 19 nt, Homo sapiens
  misc_RNA (1)...(19): siRNA sense strand
caacuguggccaucaugaa

SEQ ID NO: 233209 - RNA, 19 nt, Homo sapiens
  misc_RNA (1)...(19): siRNA sense strand
aaccugggcuucaguaauc

SEQ ID NO: 233210 - RNA, 19 nt, Homo sapiens
  misc_RNA (1)...(19): siRNA sense strand
caacuguggccaucaugaa

SEQ ID NO: 233211 - RNA, 19 nt, Homo sapiens
  misc_RNA (1)...(19): siRNA sense strand
caacuguggccaucaugaa

SEQ ID NO: 233212 - RNA, 19 nt, Homo sapiens
  misc_RNA (1)...(19): siRNA sense strand
caacuguggccaucaugaa

SEQ ID NO: 233213 - RNA, 19 nt, Homo sapiens
  misc_RNA (1)...(19): siRNA sense strand
caacuguggccaucaugaa

SEQ ID NO: 233214 - RNA, 19 nt, Homo sapiens
  misc_RNA (1)...(19): siRNA sense strand
caacuguggccaucaugaa

SEQ ID NO: 233215 - RNA, 19 nt, Homo sapiens
  misc_RNA (1)...(19): siRNA sense strand
gggacaaguucuaucuaca

SEQ ID NO: 233216 - RNA, 19 nt, Homo sapiens
  misc_RNA (1)...(19): siRNA sense strand
gcugaaauccuccauucug

SEQ ID NO: 233217 - RNA, 19 nt, Homo sapiens
  misc_RNA (1)...(19): siRNA sense strand
acaaugacaccaucgacua

SEQ ID NO: 233218 - RNA, 19 nt, Homo sapiens
  misc_RNA (1)...(19): siRNA sense strand
gcauaaaccugggcuucag

SEQ ID NO: 233219 - RNA, 19 nt, Homo sapiens
  misc_RNA (1)...(19): siRNA sense strand
caacuguggccaucacgaa

SEQ ID NO: 233220 - RNA, 19 nt, Homo sapiens
  misc_RNA (1)...(19): siRNA sense strand
gauggaucauugaauagca

SEQ ID NO: 233221 - RNA, 19 nt, Homo sapiens
  misc_RNA (1)...(19): siRNA sense strand
ggcaaauauuuacaucuuc

SEQ ID NO: 233222 - RNA, 19 nt, Homo sapiens
  misc_RNA (1)...(19): siRNA sense strand
guaaugauaccaggcaaau

SEQ ID NO: 233223 - RNA, 19 nt, Homo sapiens
  misc_RNA (1)...(19): siRNA sense strand
gaagguggcugcaacuaug

SEQ ID NO: 233224 - RNA, 19 nt, Homo sapiens
  misc_RNA (1)...(19): siRNA sense strand
ggacagaccuccguauuca

SEQ ID NO: 233225 - RNA, 19 nt, Homo sapiens
  misc_RNA (1)...(19): siRNA sense strand
gggaaaaucuguaaugaua

SEQ ID NO: 233226 - RNA, 19 nt, Homo sapiens
  misc_RNA (1)...(19): siRNA sense strand
ggagucaacuguagcagaa

SEQ ID NO: 233227 - RNA, 19 nt, Homo sapiens
  misc_RNA (1)...(19): siRNA sense strand
ggagucaacuguagcagaa

SEQ ID NO: 233228 - RNA, 19 nt, Homo sapiens
  misc_RNA (1)...(19): siRNA sense strand
ccaaugacuucacgucuuu

SEQ ID NO: 233229 - RNA, 19 nt, Homo sapiens
  misc_RNA (1)...(19): siRNA sense strand
agacuacgcuucacugauu

SEQ ID NO: 233230 - RNA, 19 nt, Homo sapiens
  misc_RNA (1)...(19): siRNA sense strand
gcucaggacacgagucuua

SEQ ID NO: 233231 - RNA, 19 nt, Homo sapiens
  misc_RNA (1)...(19): siRNA sense strand
gaauucugguuaucgcaua

SEQ ID NO: 233232 - RNA, 19 nt, Homo sapiens
  misc_RNA (1)...(19): siRNA sense strand
gcucaggacacgagucuua

SEQ ID NO: 233233 - RNA, 19 nt, Homo sapiens
  misc_RNA (1)...(19): siRNA sense strand
gcaccaaccugcucugucu

SEQ ID NO: 233234 - RNA, 19 nt, Homo sapiens
  misc_RNA (1)...(19): siRNA sense strand
cgaagacgcuggugucauc

SEQ ID NO: 233235 - RNA, 19 nt, Homo sapiens
  misc_RNA (1)...(19): siRNA sense strand
gauaccaggcaaauauuua

SEQ ID NO: 233236 - RNA, 19 nt, Homo sapiens
  misc_RNA (1)...(19): siRNA sense strand
ccagaaaguuggccuguca

SEQ ID NO: 233237 - RNA, 19 nt, Homo sapiens
  misc_RNA (1)...(19): siRNA sense strand
aaauugugguggcuucuua

SEQ ID NO: 233238 - RNA, 19 nt, Homo sapiens
  misc_RNA (1)...(19): siRNA sense strand
ucacgucuuugacuuauga

SEQ ID NO: 233239 - RNA, 19 nt, Homo sapiens
  misc_RNA (1)...(19): siRNA sense strand
ucagagauguccagcuuga

SEQ ID NO: 233240 - RNA, 19 nt, Homo sapiens
  misc_RNA (1)...(19): siRNA sense strand
ggacaccaaugaugccaau

SEQ ID NO: 233241 - RNA, 19 nt, Homo sapiens
  misc_RNA (1)...(19): siRNA sense strand
ggacaccaaugaugccaau

SEQ ID NO: 233242 - RNA, 19 nt, Homo sapiens
  misc_RNA (1)...(19): siRNA sense strand
ugaagacgcuggugucauc

SEQ ID NO: 233243 - RNA, 19 nt, Homo sapiens
  misc_RNA (1)...(19): siRNA sense strand
ggacaccaaugaugccaau

SEQ ID NO: 233244 - RNA, 19 nt, Homo sapiens
  misc_RNA (1)...(19): siRNA sense strand
ugaagacgcuggugucauc

SEQ ID NO: 233245 - RNA, 19 nt, Homo sapiens
  misc_RNA (1)...(19): siRNA sense strand
ggacaccaaugaugccaau

SEQ ID NO: 233246 - RNA, 19 nt, Homo sapiens
  misc_RNA (1)...(19): siRNA sense strand
ugaagacgcuggugucauc

SEQ ID NO: 233247 - RNA, 19 nt, Homo sapiens
  misc_RNA (1)...(19): siRNA sense strand
ggacaccaaugaugccaau

SEQ ID NO: 233248 - RNA, 19 nt, Homo sapiens
  misc_RNA (1)...(19): siRNA sense strand
ugaagacgcuggugucauc

SEQ ID NO: 233249 - RNA, 19 nt, Homo sapiens
  misc_RNA (1)...(19): siRNA sense strand
ggacaccaaugaugccaau

SEQ ID NO: 233250 - RNA, 19 nt, Homo sapiens
  misc_RNA (1)...(19): siRNA sense strand
ugaagacgcuggugucauc

SEQ ID NO: 233251 - RNA, 19 nt, Homo sapiens
  misc_RNA (1)...(19): siRNA sense strand
ggacaccaaugaugccaau

SEQ ID NO: 233252 - RNA, 19 nt, Homo sapiens
  misc_RNA (1)...(19): siRNA sense strand
ugaagacgcuggugucauc

SEQ ID NO: 233253 - RNA, 19 nt, Homo sapiens
  misc_RNA (1)...(19): siRNA sense strand
ugaagacgcuggugucauc

SEQ ID NO: 233254 - RNA, 19 nt, Homo sapiens
  misc_RNA (1)...(19): siRNA sense strand
ugaagacgcuggugucauc

SEQ ID NO: 233255 - RNA, 19 nt, Homo sapiens
  misc_RNA (1)...(19): siRNA sense strand
gaagugaauucugguuauc

SEQ ID NO: 233256 - RNA, 19 nt, Homo sapiens
  misc_RNA (1)...(19): siRNA sense strand
uaaguguguuugggaaaua

SEQ ID NO: 233257 - RNA, 19 nt, Homo sapiens
  misc_RNA (1)...(19): siRNA sense strand
gcagaaugcuucagaacac

SEQ ID NO: 233258 - RNA, 19 nt, Homo sapiens
  misc_RNA (1)...(19): siRNA sense strand
caugucagcuccaggaaau

SEQ ID NO: 233259 - RNA, 19 nt, Homo sapiens
  misc_RNA (1)...(19): siRNA sense strand
gaaauccuccauucugaug

SEQ ID NO: 233260 - RNA, 19 nt, Homo sapiens
  misc_RNA (1)...(19): siRNA sense strand
caaaacaacuaccguguga

SEQ ID NO: 233261 - RNA, 19 nt, Homo sapiens
  misc_RNA (1)...(19): siRNA sense strand
ggugucaucugcucaggaa

SEQ ID NO: 233262 - RNA, 19 nt, Homo sapiens
  misc_RNA (1)...(19): siRNA sense strand
ggacaccagugacgccaau

SEQ ID NO: 233263 - RNA, 19 nt, Homo sapiens
  misc_RNA (1)...(19): siRNA sense strand
ugagguuggucaauuuaaa

SEQ ID NO: 233264 - RNA, 19 nt, Homo sapiens
  misc_RNA (1)...(19): siRNA sense strand
ggacaccagugacgccaau

SEQ ID NO: 233265 - RNA, 19 nt, Homo sapiens
  misc_RNA (1)...(19): siRNA sense strand
ugaagaugcugguguuauc

SEQ ID NO: 233266 - RNA, 19 nt, Homo sapiens
  misc_RNA (1)...(19): siRNA sense strand
gaauggauacuacgagugu

SEQ ID NO: 233267 - RNA, 19 nt, Homo sapiens
  misc_RNA (1)...(19): siRNA sense strand
caacuguaaucaucgugaa

SEQ ID NO: 233268 - RNA, 19 nt, Homo sapiens
  misc_RNA (1)...(19): siRNA sense strand
cgccgaaccuggugauauu

SEQ ID NO: 233269 - RNA, 19 nt, Homo sapiens
  misc_RNA (1)...(19): siRNA sense strand
ccacagucauccuugaaau

SEQ ID NO: 233270 - RNA, 19 nt, Homo sapiens
  misc_RNA (1)...(19): siRNA sense strand
ccauccacguugcuaauaa

SEQ ID NO: 233271 - RNA, 19 nt, Homo sapiens
  misc_RNA (1)...(19): siRNA sense strand
caacuuaccggcauugaca

SEQ ID NO: 233272 - RNA, 19 nt, Homo sapiens
  misc_RNA (1)...(19): siRNA sense strand
gccagaggcuccuucacuu

SEQ ID NO: 233273 - RNA, 19 nt, Homo sapiens
  misc_RNA (1)...(19): siRNA sense strand
ugacugugaucuucagaga

SEQ ID NO: 233274 - RNA, 19 nt, Homo sapiens
  misc_RNA (1)...(19): siRNA sense strand
gaccacagcaucacaagga

SEQ ID NO: 233275 - RNA, 19 nt, Homo sapiens
  misc_RNA (1)...(19): siRNA sense strand
caucgacuauuccaacuuc

SEQ ID NO: 233276 - RNA, 19 nt, Homo sapiens
  misc_RNA (1)...(19): siRNA sense strand
ggaccugaauccaguuugg

SEQ ID NO: 233277 - RNA, 19 nt, Homo sapiens
  misc_RNA (1)...(19): siRNA sense strand
gaagugacaucaguuucca

SEQ ID NO: 233278 - RNA, 19 nt, Homo sapiens
  misc_RNA (1)...(19): siRNA sense strand
guugaaaucuuugauggau

SEQ ID NO: 233279 - RNA, 19 nt, Homo sapiens
  misc_RNA (1)...(19): siRNA sense strand
cauccuacccugcauacua

SEQ ID NO: 233280 - RNA, 19 nt, Homo sapiens
  misc_RNA (1)...(19): siRNA sense strand
uaaauucuacuacgacaga

SEQ ID NO: 233281 - RNA, 19 nt, Homo sapiens
  misc_RNA (1)...(19): siRNA sense strand
gcucagccacccaaauaaa

SEQ ID NO: 233282 - RNA, 19 nt, Homo sapiens
  misc_RNA (1)...(19): siRNA sense strand
ggaccugaauccaguuugg

SEQ ID NO: 233283 - RNA, 19 nt, Homo sapiens
  misc_RNA (1)...(19): siRNA sense strand
gaugacuccuggaccauuc

SEQ ID NO: 233284 - RNA, 19 nt, Homo sapiens
  misc_RNA (1)...(19): siRNA sense strand
cuucagagauguccagcuu

SEQ ID NO: 233285 - RNA, 19 nt, Homo sapiens
  misc_RNA (1)...(19): siRNA sense strand
ggugucaucugcucagcuu

SEQ ID NO: 233286 - RNA, 19 nt, Homo sapiens
  misc_RNA (1)...(19): siRNA sense strand
gaaguccaguauggcaauu

SEQ ID NO: 233287 - RNA, 19 nt, Homo sapiens
  misc_RNA (1)...(19): siRNA sense strand
ucucauugcucgaguuugu

SEQ ID NO: 233288 - RNA, 19 nt, Homo sapiens
  misc_RNA (1)...(19): siRNA sense strand
ggaacuauccaaacaaugc

SEQ ID NO: 233289 - RNA, 19 nt, Homo sapiens
  misc_RNA (1)...(19): siRNA sense strand
ggugucaucugcucagcuu

SEQ ID NO: 233290 - RNA, 19 nt, Homo sapiens
  misc_RNA (1)...(19): siRNA sense strand
ggugucaucugcucagcuu

SEQ ID NO: 233291 - RNA, 19 nt, Homo sapiens
  misc_RNA (1)...(19): siRNA sense strand
ggugucaucugcucagcuu

SEQ ID NO: 233292 - RNA, 19 nt, Homo sapiens
  misc_RNA (1)...(19): siRNA sense strand
gccaaccucucgugcauca

SEQ ID NO: 233293 - RNA, 19 nt, Homo sapiens
  misc_RNA (1)...(19): siRNA sense strand
guucagggccuuccacuuc

SEQ ID NO: 233294 - RNA, 19 nt, Homo sapiens
  misc_RNA (1)...(19): siRNA sense strand
cugaaauccuccauucuga

SEQ ID NO: 233295 - RNA, 19 nt, Homo sapiens
  misc_RNA (1)...(19): siRNA sense strand
gaaccaggacuuguacguu

SEQ ID NO: 233296 - RNA, 19 nt, Homo sapiens
  misc_RNA (1)...(19): siRNA sense strand
caaacaaugccaagugugu

SEQ ID NO: 233297 - RNA, 19 nt, Homo sapiens
  misc_RNA (1)...(19): siRNA sense strand
gaauccaguuuggcucuga

SEQ ID NO: 233298 - RNA, 19 nt, Homo sapiens
  misc_RNA (1)...(19): siRNA sense strand
gaguggagguccuauacca

SEQ ID NO: 233299 - RNA, 19 nt, Homo sapiens
  misc_RNA (1)...(19): siRNA sense strand
caacaucacccguccaaac

SEQ ID NO: 233300 - RNA, 19 nt, Homo sapiens
  misc_RNA (1)...(19): siRNA sense strand
aaugauaccaggcaaauau

SEQ ID NO: 233301 - RNA, 19 nt, Homo sapiens
  misc_RNA (1)...(19): siRNA sense strand
gaaauuggaggcacaccau

SEQ ID NO: 233302 - RNA, 19 nt, Homo sapiens
  misc_RNA (1)...(19): siRNA sense strand
gaguggagguccuguaucg

SEQ ID NO: 233303 - RNA, 19 nt, Homo sapiens
  misc_RNA (1)...(19): siRNA sense strand
gaguggagguccuauacca

SEQ ID NO: 233304 - RNA, 19 nt, Homo sapiens
  misc_RNA (1)...(19): siRNA sense strand
ccauugcccuggaugaugu

SEQ ID NO: 233305 - RNA, 19 nt, Homo sapiens
  misc_RNA (1)...(19): siRNA sense strand
ucaagcaggcagacaauga

SEQ ID NO: 233306 - RNA, 19 nt, Homo sapiens
  misc_RNA (1)...(19): siRNA sense strand
ccauugcccuggaugaugu

SEQ ID NO: 233307 - RNA, 19 nt, Homo sapiens
  misc_RNA (1)...(19): siRNA sense strand
gaccucacaugcaucaaca

SEQ ID NO: 233308 - RNA, 19 nt, Homo sapiens
  misc_RNA (1)...(19): siRNA sense strand
gaccucacaugcaucaaca

SEQ ID NO: 233309 - RNA, 19 nt, Homo sapiens
  misc_RNA (1)...(19): siRNA sense strand
caacuguggccaucaugaa

SEQ ID NO: 233310 - RNA, 19 nt, Homo sapiens
  misc_RNA (1)...(19): siRNA sense strand
aaccugggcuucaguaauc

SEQ ID NO: 233311 - RNA, 19 nt, Homo sapiens
  misc_RNA (1)...(19): siRNA sense strand
caacuguggccaucaugaa

SEQ ID NO: 233312 - RNA, 19 nt, Homo sapiens
  misc_RNA (1)...(19): siRNA sense strand
caacuguggccaucaugaa

SEQ ID NO: 233313 - RNA, 19 nt, Homo sapiens
  misc_RNA (1)...(19): siRNA sense strand
caacuguggccaucaugaa

SEQ ID NO: 233314 - RNA, 19 nt, Homo sapiens
  misc_RNA (1)...(19): siRNA sense strand
caacuguggccaucaugaa

SEQ ID NO: 233315 - RNA, 19 nt, Homo sapiens
  misc_RNA (1)...(19): siRNA sense strand
caacuguggccaucaugaa

SEQ ID NO: 233316 - RNA, 19 nt, Homo sapiens
  misc_RNA (1)...(19): siRNA sense strand
gggacaaguucuaucuaca

SEQ ID NO: 233317 - RNA, 19 nt, Homo sapiens
  misc_RNA (1)...(19): siRNA sense strand
gcugaaauccuccauucug

SEQ ID NO: 233318 - RNA, 19 nt, Homo sapiens
  misc_RNA (1)...(19): siRNA sense strand
acaaugacaccaucgacua

SEQ ID NO: 233319 - RNA, 19 nt, Homo sapiens
  misc_RNA (1)...(19): siRNA sense strand
gcauaaaccugggcuucag

SEQ ID NO: 233320 - RNA, 19 nt, Homo sapiens
  misc_RNA (1)...(19): siRNA sense strand
caacuguggccaucacgaa

SEQ ID NO: 233321 - RNA, 19 nt, Homo sapiens
  misc_RNA (1)...(19): siRNA sense strand
guaaugauaccaggcaaau

SEQ ID NO: 233322 - RNA, 19 nt, Homo sapiens
  misc_RNA (1)...(19): siRNA sense strand
ggcaaauauuuacaucuuc

SEQ ID NO: 233323 - RNA, 19 nt, Homo sapiens
  misc_RNA (1)...(19): siRNA sense strand
gugaagaacuugaauggua

SEQ ID NO: 233324 - RNA, 19 nt, Homo sapiens
  misc_RNA (1)...(19): siRNA sense strand
gaagauacaugcagaaggu

SEQ ID NO: 233325 - RNA, 19 nt, Homo sapiens
  misc_RNA (1)...(19): siRNA sense strand
ggaacgagauccaccacaa

SEQ ID NO: 233326 - RNA, 19 nt, Homo sapiens
  misc_RNA (1)...(19): siRNA sense strand
ccaagaagaagcaccuuaa

SEQ ID NO: 233327 - RNA, 19 nt, Homo sapiens
  misc_RNA (1)...(19): siRNA sense strand
caagaagaagcaccuuaaa

SEQ ID NO: 233328 - RNA, 19 nt, Homo sapiens
  misc_RNA (1)...(19): siRNA sense strand
gauauggacaucugcauca

SEQ ID NO: 233329 - RNA, 19 nt, Homo sapiens
  misc_RNA (1)...(19): siRNA sense strand
agacucaucuucacuaucg

SEQ ID NO: 233330 - RNA, 19 nt, Homo sapiens
  misc_RNA (1)...(19): siRNA sense strand
ggaugugguucgaagauac

SEQ ID NO: 233331 - RNA, 19 nt, Homo sapiens
  misc_RNA (1)...(19): siRNA sense strand
gaagaaguucaccgcaaga

SEQ ID NO: 233332 - RNA, 19 nt, Homo sapiens
  misc_RNA (1)...(19): siRNA sense strand
gcauggacggccuacgaua

SEQ ID NO: 233333 - RNA, 19 nt, Homo sapiens
  misc_RNA (1)...(19): siRNA sense strand
ccagaacgccuacgagaag

SEQ ID NO: 233334 - RNA, 19 nt, Homo sapiens
  misc_RNA (1)...(19): siRNA sense strand
guacuccaauggcaacaag

SEQ ID NO: 233335 - RNA, 19 nt, Homo sapiens
  misc_RNA (1)...(19): siRNA sense strand
gaacgagauccaccacaag

SEQ ID NO: 233336 - RNA, 19 nt, Homo sapiens
  misc_RNA (1)...(19): siRNA sense strand
ucugcuaccucaucuacuu

SEQ ID NO: 233337 - RNA, 19 nt, Homo sapiens
  misc_RNA (1)...(19): siRNA sense strand
gcaagaccaagaagaagca

SEQ ID NO: 233338 - RNA, 19 nt, Homo sapiens
  misc_RNA (1)...(19): siRNA sense strand
gagcaagagcgacgugaag

SEQ ID NO: 233339 - RNA, 19 nt, Homo sapiens
  misc_RNA (1)...(19): siRNA sense strand
ccacaagaccgaguuugga

SEQ ID NO: 233340 - RNA, 19 nt, Homo sapiens
  misc_RNA (1)...(19): siRNA sense strand
uugagaacgugcugaagga

SEQ ID NO: 233341 - RNA, 19 nt, Homo sapiens
  misc_RNA (1)...(19): siRNA sense strand
aacagcaugucgcagauga

SEQ ID NO: 233342 - RNA, 19 nt, Homo sapiens
  misc_RNA (1)...(19): siRNA sense strand
gcugaugccugugaauggu

SEQ ID NO: 233343 - RNA, 19 nt, Homo sapiens
  misc_RNA (1)...(19): siRNA sense strand
gaccauccgcaucgucuau

SEQ ID NO: 233344 - RNA, 19 nt, Homo sapiens
  misc_RNA (1)...(19): siRNA sense strand
gaggaugugguucgaagau

SEQ ID NO: 233345 - RNA, 19 nt, Homo sapiens
  misc_RNA (1)...(19): siRNA sense strand
ucaacagcaugucgcagau

SEQ ID NO: 233346 - RNA, 19 nt, Homo sapiens
  misc_RNA (1)...(19): siRNA sense strand
ccauccgcaucgucuauga

SEQ ID NO: 233347 - RNA, 19 nt, Homo sapiens
  misc_RNA (1)...(19): siRNA sense strand
gccgcaagaccaagaagaa

SEQ ID NO: 233348 - RNA, 19 nt, Homo sapiens
  misc_RNA (1)...(19): siRNA sense strand
cauggacggccuacgauau

SEQ ID NO: 233349 - RNA, 19 nt, Homo sapiens
  misc_RNA (1)...(19): siRNA sense strand
gauacaugcagaaggugaa

SEQ ID NO: 233350 - RNA, 19 nt, Homo sapiens
  misc_RNA (1)...(19): siRNA sense strand
aggaugugguucgaagaua

SEQ ID NO: 233351 - RNA, 19 nt, Homo sapiens
  misc_RNA (1)...(19): siRNA sense strand
uaccucaucuacuucaaca

SEQ ID NO: 233352 - RNA, 19 nt, Homo sapiens
  misc_RNA (1)...(19): siRNA sense strand
gcaguccaugcaccaguuu

SEQ ID NO: 233353 - RNA, 19 nt, Homo sapiens
  misc_RNA (1)...(19): siRNA sense strand
cccggacgcuagcuaccua

SEQ ID NO: 233354 - RNA, 19 nt, Homo sapiens
  misc_RNA (1)...(19): siRNA sense strand
ccuacgauauggacaucug

SEQ ID NO: 233355 - RNA, 19 nt, Homo sapiens
  misc_RNA (1)...(19): siRNA sense strand
gggcugaugccugugaaug

SEQ ID NO: 233356 - RNA, 19 nt, Homo sapiens
  misc_RNA (1)...(19): siRNA sense strand
cagcuugugcccuacauca

SEQ ID NO: 233357 - RNA, 19 nt, Homo sapiens
  misc_RNA (1)...(19): siRNA sense strand
caucacggccugggagaga

SEQ ID NO: 233358 - RNA, 19 nt, Homo sapiens
  misc_RNA (1)...(19): siRNA sense strand
ccucgccacugcuaucuac

SEQ ID NO: 233359 - RNA, 19 nt, Homo sapiens
  misc_RNA (1)...(19): siRNA sense strand
ucaucgaccugcaguccau

SEQ ID NO: 233360 - RNA, 19 nt, Homo sapiens
  misc_RNA (1)...(19): siRNA sense strand
gugcugcggcugcucauca

SEQ ID NO: 233361 - RNA, 19 nt, Homo sapiens
  misc_RNA (1)...(19): siRNA sense strand
ggacggccuacgauaugga

SEQ ID NO: 233362 - RNA, 19 nt, Homo sapiens
  misc_RNA (1)...(19): siRNA sense strand
acugcuaucuacccaacaa

SEQ ID NO: 233363 - RNA, 19 nt, Homo sapiens
  misc_RNA (1)...(19): siRNA sense strand
gugugggagugucugaaug

SEQ ID NO: 233364 - RNA, 19 nt, Homo sapiens
  misc_RNA (1)...(19): siRNA sense strand
ugugggagugucugaauga

SEQ ID NO: 233365 - RNA, 19 nt, Homo sapiens
  misc_RNA (1)...(19): siRNA sense strand
ggugugggagugucugaau

SEQ ID NO: 233366 - RNA, 19 nt, Homo sapiens
  misc_RNA (1)...(19): siRNA sense strand
ggacgaggccuuugaguuu

SEQ ID NO: 233367 - RNA, 19 nt, Homo sapiens
  misc_RNA (1)...(19): siRNA sense strand
caucaucucucccaacuuc

SEQ ID NO: 233368 - RNA, 19 nt, Homo sapiens
  misc_RNA (1)...(19): siRNA sense strand
ccaauugucccaaccauuu

SEQ ID NO: 233369 - RNA, 19 nt, Homo sapiens
  misc_RNA (1)...(19): siRNA sense strand
gacaucagcuccugguuca

SEQ ID NO: 233370 - RNA, 19 nt, Homo sapiens
  misc_RNA (1)...(19): siRNA sense strand
gcaagucuucuuccucaaa

SEQ ID NO: 233371 - RNA, 19 nt, Homo sapiens
  misc_RNA (1)...(19): siRNA sense strand
caacgaggccauugacuuc

SEQ ID NO: 233372 - RNA, 19 nt, Homo sapiens
  misc_RNA (1)...(19): siRNA sense strand
cgaggccauugacuucaua

SEQ ID NO: 233373 - RNA, 19 nt, Homo sapiens
  misc_RNA (1)...(19): siRNA sense strand
gacgaggccuuugaguuug

SEQ ID NO: 233374 - RNA, 19 nt, Homo sapiens
  misc_RNA (1)...(19): siRNA sense strand
caacgucucagccaauugu

SEQ ID NO: 233375 - RNA, 19 nt, Homo sapiens
  misc_RNA (1)...(19): siRNA sense strand
ggacugccgcuccuucuuc

SEQ ID NO: 233376 - RNA, 19 nt, Homo sapiens
  misc_RNA (1)...(19): siRNA sense strand
ccaccaccguguucaacuu

SEQ ID NO: 233377 - RNA, 19 nt, Homo sapiens
  misc_RNA (1)...(19): siRNA sense strand
gaucaacgucucagccaau

SEQ ID NO: 233378 - RNA, 19 nt, Homo sapiens
  misc_RNA (1)...(19): siRNA sense strand
caagucuucuuccucaaag

SEQ ID NO: 233379 - RNA, 19 nt, Homo sapiens
  misc_RNA (1)...(19): siRNA sense strand
gccauugacuucauagacu

SEQ ID NO: 233380 - RNA, 19 nt, Homo sapiens
  misc_RNA (1)...(19): siRNA sense strand
gcauaacugccuugaucaa

SEQ ID NO: 233381 - RNA, 19 nt, Homo sapiens
  misc_RNA (1)...(19): siRNA sense strand
aagcagaggcgaagcauca

SEQ ID NO: 233382 - RNA, 19 nt, Homo sapiens
  misc_RNA (1)...(19): siRNA sense strand
gagggucacuaccaguaca

SEQ ID NO: 233383 - RNA, 19 nt, Homo sapiens
  misc_RNA (1)...(19): siRNA sense strand
uaacugccuugaucaacgu

SEQ ID NO: 233384 - RNA, 19 nt, Homo sapiens
  misc_RNA (1)...(19): siRNA sense strand
ucauagacuccaucaagaa

SEQ ID NO: 233385 - RNA, 19 nt, Homo sapiens
  misc_RNA (1)...(19): siRNA sense strand
gccaccaucugccuugcuu

SEQ ID NO: 233386 - RNA, 19 nt, Homo sapiens
  misc_RNA (1)...(19): siRNA sense strand
cauagacuccaucaagaau

SEQ ID NO: 233387 - RNA, 19 nt, Homo sapiens
  misc_RNA (1)...(19): siRNA sense strand
caucugccuugcuuaccuu

SEQ ID NO: 233388 - RNA, 19 nt, Homo sapiens
  misc_RNA (1)...(19): siRNA sense strand
cuucauagacuccaucaag

SEQ ID NO: 233389 - RNA, 19 nt, Homo sapiens
  misc_RNA (1)...(19): siRNA sense strand
uucauagacuccaucaaga

SEQ ID NO: 233390 - RNA, 19 nt, Homo sapiens
  misc_RNA (1)...(19): siRNA sense strand
ccuuugaguuugugaagca

SEQ ID NO: 233391 - RNA, 19 nt, Homo sapiens
  misc_RNA (1)...(19): siRNA sense strand
cgaacagugcgcugagcua

SEQ ID NO: 233392 - RNA, 19 nt, Homo sapiens
  misc_RNA (1)...(19): siRNA sense strand
gaaucugggugcaguuccu

SEQ ID NO: 233393 - RNA, 19 nt, Homo sapiens
  misc_RNA (1)...(19): siRNA sense strand
ucucccaacuucagcuuca

SEQ ID NO: 233394 - RNA, 19 nt, Homo sapiens
  misc_RNA (1)...(19): siRNA sense strand
cugccuugcuuaccuuaug

SEQ ID NO: 233395 - RNA, 19 nt, Homo sapiens
  misc_RNA (1)...(19): siRNA sense strand
ccaugggccuggagcacau

SEQ ID NO: 233396 - RNA, 19 nt, Homo sapiens
  misc_RNA (1)...(19): siRNA sense strand
caagcuggacgaggccuuu

SEQ ID NO: 233397 - RNA, 19 nt, Homo sapiens
  misc_RNA (1)...(19): siRNA sense strand
aggaggauacgaagcguuu

SEQ ID NO: 233398 - RNA, 19 nt, Homo sapiens
  misc_RNA (1)...(19): siRNA sense strand
ggucacuaccaguacaaga

SEQ ID NO: 233399 - RNA, 19 nt, Homo sapiens
  misc_RNA (1)...(19): siRNA sense strand
uagacuccaucaagaaugc

SEQ ID NO: 233400 - RNA, 19 nt, Homo sapiens
  misc_RNA (1)...(19): siRNA sense strand
guaccugggcagugcguau

SEQ ID NO: 233401 - RNA, 19 nt, Homo sapiens
  misc_RNA (1)...(19): siRNA sense strand
gcaucccuguggaggacaa

SEQ ID NO: 233402 - RNA, 19 nt, Homo sapiens
  misc_RNA (1)...(19): siRNA sense strand
gccaauugucccaaccauu

SEQ ID NO: 233403 - RNA, 19 nt, Homo sapiens
  misc_RNA (1)...(19): siRNA sense strand
gcagaggcgaagcaucauc

SEQ ID NO: 233404 - RNA, 19 nt, Homo sapiens
  misc_RNA (1)...(19): siRNA sense strand
ggacgaggccuuugacuuc

SEQ ID NO: 233405 - RNA, 19 nt, Homo sapiens
  misc_RNA (1)...(19): siRNA sense strand
gaucuugcccuaccuguuc

SEQ ID NO: 233406 - RNA, 19 nt, Homo sapiens
  misc_RNA (1)...(19): siRNA sense strand
gccauaggcuucauugacu

SEQ ID NO: 233407 - RNA, 19 nt, Homo sapiens
  misc_RNA (1)...(19): siRNA sense strand
agacccaggugcuguguca

SEQ ID NO: 233408 - RNA, 19 nt, Homo sapiens
  misc_RNA (1)...(19): siRNA sense strand
ucacagccguccucaacgu

SEQ ID NO: 233409 - RNA, 19 nt, Homo sapiens
  misc_RNA (1)...(19): siRNA sense strand
caucacagccguccucaac

SEQ ID NO: 233410 - RNA, 19 nt, Homo sapiens
  misc_RNA (1)...(19): siRNA sense strand
gucccgaucugugcucuga

SEQ ID NO: 233411 - RNA, 19 nt, Homo sapiens
  misc_RNA (1)...(19): siRNA sense strand
cgaggccuuugacuucguu

SEQ ID NO: 233412 - RNA, 19 nt, Homo sapiens
  misc_RNA (1)...(19): siRNA sense strand
ggccauaggcuucauugac

SEQ ID NO: 233413 - RNA, 19 nt, Homo sapiens
  misc_RNA (1)...(19): siRNA sense strand
cugcaggccuguggcauca

SEQ ID NO: 233414 - RNA, 19 nt, Homo sapiens
  misc_RNA (1)...(19): siRNA sense strand
gaggccauaggcuucauug

SEQ ID NO: 233415 - RNA, 19 nt, Homo sapiens
  misc_RNA (1)...(19): siRNA sense strand
gcagcaggcucuucacuga

SEQ ID NO: 233416 - RNA, 19 nt, Homo sapiens
  misc_RNA (1)...(19): siRNA sense strand
gacauuagcucccacuuuc

SEQ ID NO: 233417 - RNA, 19 nt, Homo sapiens
  misc_RNA (1)...(19): siRNA sense strand
aagagaagauugagaguga

SEQ ID NO: 233418 - RNA, 19 nt, Homo sapiens
  misc_RNA (1)...(19): siRNA sense strand
gcaagaugcuccgcaagga

SEQ ID NO: 233419 - RNA, 19 nt, Homo sapiens
  misc_RNA (1)...(19): siRNA sense strand
cggaauauccugaguguug

SEQ ID NO: 233420 - RNA, 19 nt, Homo sapiens
  misc_RNA (1)...(19): siRNA sense strand
cugcauggcuuaccuuaug

SEQ ID NO: 233421 - RNA, 19 nt, Homo sapiens
  misc_RNA (1)...(19): siRNA sense strand
gauaugagacuuucuacuc

SEQ ID NO: 233422 - RNA, 19 nt, Homo sapiens
  misc_RNA (1)...(19): siRNA sense strand
ggaagugccuaccaugcau

SEQ ID NO: 233423 - RNA, 19 nt, Homo sapiens
  misc_RNA (1)...(19): siRNA sense strand
gcuacaggccagcuuauga

SEQ ID NO: 233424 - RNA, 19 nt, Homo sapiens
  misc_RNA (1)...(19): siRNA sense strand
ccacacggcugacauuagc

SEQ ID NO: 233425 - RNA, 19 nt, Homo sapiens
  misc_RNA (1)...(19): siRNA sense strand
gaagauugagagugagaga

SEQ ID NO: 233426 - RNA, 19 nt, Homo sapiens
  misc_RNA (1)...(19): siRNA sense strand
agcaggcucuucacugaua

SEQ ID NO: 233427 - RNA, 19 nt, Homo sapiens
  misc_RNA (1)...(19): siRNA sense strand
ugacauuagcucccacuuu

SEQ ID NO: 233428 - RNA, 19 nt, Homo sapiens
  misc_RNA (1)...(19): siRNA sense strand
ucucagagcucagcagaag

SEQ ID NO: 233429 - RNA, 19 nt, Homo sapiens
  misc_RNA (1)...(19): siRNA sense strand
ggccuucgauuacaucaag

SEQ ID NO: 233430 - RNA, 19 nt, Homo sapiens
  misc_RNA (1)...(19): siRNA sense strand
ugacccaccuacacuacaa

SEQ ID NO: 233431 - RNA, 19 nt, Homo sapiens
  misc_RNA (1)...(19): siRNA sense strand
aaacccauuucacaagaga

SEQ ID NO: 233432 - RNA, 19 nt, Homo sapiens
  misc_RNA (1)...(19): siRNA sense strand
gauaggccauuugcagaca

SEQ ID NO: 233433 - RNA, 19 nt, Homo sapiens
  misc_RNA (1)...(19): siRNA sense strand
ccacuuucaagaagcaaua

SEQ ID NO: 233434 - RNA, 19 nt, Homo sapiens
  misc_RNA (1)...(19): siRNA sense strand
ugaccaggguggcccaguu

SEQ ID NO: 233435 - RNA, 19 nt, Homo sapiens
  misc_RNA (1)...(19): siRNA sense strand
uggcuuaccuuaugaagac

SEQ ID NO: 233436 - RNA, 19 nt, Homo sapiens
  misc_RNA (1)...(19): siRNA sense strand
ggaggcagcaggcucuuca

SEQ ID NO: 233437 - RNA, 19 nt, Homo sapiens
  misc_RNA (1)...(19): siRNA sense strand
gagaagauugagagugaga

SEQ ID NO: 233438 - RNA, 19 nt, Homo sapiens
  misc_RNA (1)...(19): siRNA sense strand
caaauggaucccuguggaa

SEQ ID NO: 233439 - RNA, 19 nt, Homo sapiens
  misc_RNA (1)...(19): siRNA sense strand
gcaugacccaccuacacua

SEQ ID NO: 233440 - RNA, 19 nt, Homo sapiens
  misc_RNA (1)...(19): siRNA sense strand
uaaaacccauuucacaaga

SEQ ID NO: 233441 - RNA, 19 nt, Homo sapiens
  misc_RNA (1)...(19): siRNA sense strand
ugggccagcuccugcagua

SEQ ID NO: 233442 - RNA, 19 nt, Homo sapiens
  misc_RNA (1)...(19): siRNA sense strand
ccaccuacacuacaaaugg

SEQ ID NO: 233443 - RNA, 19 nt, Homo sapiens
  misc_RNA (1)...(19): siRNA sense strand
caccuacacuacaaaugga

SEQ ID NO: 233444 - RNA, 19 nt, Homo sapiens
  misc_RNA (1)...(19): siRNA sense strand
gagacuuucuacucggaau

SEQ ID NO: 233445 - RNA, 19 nt, Homo sapiens
  misc_RNA (1)...(19): siRNA sense strand
caacggccacauccugcua

SEQ ID NO: 233446 - RNA, 19 nt, Homo sapiens
  misc_RNA (1)...(19): siRNA sense strand
gcggcucgcucaacgucaa

SEQ ID NO: 233447 - RNA, 19 nt, Homo sapiens
  misc_RNA (1)...(19): siRNA sense strand
cauggucucgcccaacuuu

SEQ ID NO: 233448 - RNA, 19 nt, Homo sapiens
  misc_RNA (1)...(19): siRNA sense strand
ccaagcaguuccgccugaa

SEQ ID NO: 233449 - RNA, 19 nt, Homo sapiens
  misc_RNA (1)...(19): siRNA sense strand
gcgggucuacuuccucaaa

SEQ ID NO: 233450 - RNA, 19 nt, Homo sapiens
  misc_RNA (1)...(19): siRNA sense strand
ucacaagagaagauugaga

SEQ ID NO: 233451 - RNA, 19 nt, Homo sapiens
  misc_RNA (1)...(19): siRNA sense strand
gcaggcucuucacugauag

SEQ ID NO: 233452 - RNA, 19 nt, Homo sapiens
  misc_RNA (1)...(19): siRNA sense strand
uuaugaagaccaagcaguu

SEQ ID NO: 233453 - RNA, 19 nt, Homo sapiens
  misc_RNA (1)...(19): siRNA sense strand
caggguggcccaguugaaa

SEQ ID NO: 233454 - RNA, 19 nt, Homo sapiens
  misc_RNA (1)...(19): siRNA sense strand
gaguguugcguggauguaa

SEQ ID NO: 233455 - RNA, 19 nt, Homo sapiens
  misc_RNA (1)...(19): siRNA sense strand
cauuagcucccacuuucaa

SEQ ID NO: 233456 - RNA, 19 nt, Homo sapiens
  misc_RNA (1)...(19): siRNA sense strand
uagcucccacuuucaagaa

SEQ ID NO: 233457 - RNA, 19 nt, Homo sapiens
  misc_RNA (1)...(19): siRNA sense strand
aguguugcguggauguaaa

SEQ ID NO: 233458 - RNA, 19 nt, Homo sapiens
  misc_RNA (1)...(19): siRNA sense strand
uagacuucauugacugugu

SEQ ID NO: 233459 - RNA, 19 nt, Homo sapiens
  misc_RNA (1)...(19): siRNA sense strand
ggugauggaugccaagaag

SEQ ID NO: 233460 - RNA, 19 nt, Homo sapiens
  misc_RNA (1)...(19): siRNA sense strand
caacgacaacuacugugaa

SEQ ID NO: 233461 - RNA, 19 nt, Homo sapiens
  misc_RNA (1)...(19): siRNA sense strand
gcucagcuccgucaacauc

SEQ ID NO: 233462 - RNA, 19 nt, Homo sapiens
  misc_RNA (1)...(19): siRNA sense strand
caagccugcugcccugcua

SEQ ID NO: 233463 - RNA, 19 nt, Homo sapiens
  misc_RNA (1)...(19): siRNA sense strand
gccaucgccuacaucauga

SEQ ID NO: 233464 - RNA, 19 nt, Homo sapiens
  misc_RNA (1)...(19): siRNA sense strand
cacaggacgugguggucua

SEQ ID NO: 233465 - RNA, 19 nt, Homo sapiens
  misc_RNA (1)...(19): siRNA sense strand
aacgacaacuacugugaaa

SEQ ID NO: 233466 - RNA, 19 nt, Homo sapiens
  misc_RNA (1)...(19): siRNA sense strand
gugcucagcuccgucaaca

SEQ ID NO: 233467 - RNA, 19 nt, Homo sapiens
  misc_RNA (1)...(19): siRNA sense strand
caucaacgacaacuacugu

SEQ ID NO: 233468 - RNA, 19 nt, Homo sapiens
  misc_RNA (1)...(19): siRNA sense strand
ucaacgacaacuacuguga

SEQ ID NO: 233469 - RNA, 19 nt, Homo sapiens
  misc_RNA (1)...(19): siRNA sense strand
cauccugccucaccucuac

SEQ ID NO: 233470 - RNA, 19 nt, Homo sapiens
  misc_RNA (1)...(19): siRNA sense strand
cgccaucgccuacaucaug

SEQ ID NO: 233471 - RNA, 19 nt, Homo sapiens
  misc_RNA (1)...(19): siRNA sense strand
cuaaacaaggaucugauga

SEQ ID NO: 233472 - RNA, 19 nt, Homo sapiens
  misc_RNA (1)...(19): siRNA sense strand
gcagcugccagauggaguu

SEQ ID NO: 233473 - RNA, 19 nt, Homo sapiens
  misc_RNA (1)...(19): siRNA sense strand
acaaguccaucgaguucau

SEQ ID NO: 233474 - RNA, 19 nt, Homo sapiens
  misc_RNA (1)...(19): siRNA sense strand
ccuacagguucgugaagga

SEQ ID NO: 233475 - RNA, 19 nt, Homo sapiens
  misc_RNA (1)...(19): siRNA sense strand
guacaacagcuggcaugug

SEQ ID NO: 233476 - RNA, 19 nt, Homo sapiens
  misc_RNA (1)...(19): siRNA sense strand
gcugccagauggaguucga

SEQ ID NO: 233477 - RNA, 19 nt, Homo sapiens
  misc_RNA (1)...(19): siRNA sense strand
aggacgugguggucuauga

SEQ ID NO: 233478 - RNA, 19 nt, Homo sapiens
  misc_RNA (1)...(19): siRNA sense strand
ccuaaacaaggaucugaug

SEQ ID NO: 233479 - RNA, 19 nt, Homo sapiens
  misc_RNA (1)...(19): siRNA sense strand
ggacacuaaccgccucaag

SEQ ID NO: 233480 - RNA, 19 nt, Homo sapiens
  misc_RNA (1)...(19): siRNA sense strand
ccaagucaucguccacugu

SEQ ID NO: 233481 - RNA, 19 nt, Homo sapiens
  misc_RNA (1)...(19): siRNA sense strand
gaauaagcuacguccucaa

SEQ ID NO: 233482 - RNA, 19 nt, Homo sapiens
  misc_RNA (1)...(19): siRNA sense strand
gaucugaugacgcaaaaug

SEQ ID NO: 233483 - RNA, 19 nt, Homo sapiens
  misc_RNA (1)...(19): siRNA sense strand
uaaacaaggaucugaugac

SEQ ID NO: 233484 - RNA, 19 nt, Homo sapiens
  misc_RNA (1)...(19): siRNA sense strand
gcagugcuacuacgucuuc

SEQ ID NO: 233485 - RNA, 19 nt, Homo sapiens
  misc_RNA (1)...(19): siRNA sense strand
ucaacaagaucaccuucuc

SEQ ID NO: 233486 - RNA, 19 nt, Homo sapiens
  misc_RNA (1)...(19): siRNA sense strand
ggcacacggucaacaagau

SEQ ID NO: 233487 - RNA, 19 nt, Homo sapiens
  misc_RNA (1)...(19): siRNA sense strand
ggaaguacgccagcagcuu

SEQ ID NO: 233488 - RNA, 19 nt, Homo sapiens
  misc_RNA (1)...(19): siRNA sense strand
cgaccaaggccuauacagu

SEQ ID NO: 233489 - RNA, 19 nt, Homo sapiens
  misc_RNA (1)...(19): siRNA sense strand
ccagugggacuucggauca

SEQ ID NO: 233490 - RNA, 19 nt, Homo sapiens
  misc_RNA (1)...(19): siRNA sense strand
gcacacggucaacaagauc

SEQ ID NO: 233491 - RNA, 19 nt, Homo sapiens
  misc_RNA (1)...(19): siRNA sense strand
gcagagugaagggagcaaa

SEQ ID NO: 233492 - RNA, 19 nt, Homo sapiens
  misc_RNA (1)...(19): siRNA sense strand
ggggaucucugcagcaauc

SEQ ID NO: 233493 - RNA, 19 nt, Homo sapiens
  misc_RNA (1)...(19): siRNA sense strand
gcagugcuacuacgucuuc

SEQ ID NO: 233494 - RNA, 19 nt, Homo sapiens
  misc_RNA (1)...(19): siRNA sense strand
ucaacaagaucaccuucuc

SEQ ID NO: 233495 - RNA, 19 nt, Homo sapiens
  misc_RNA (1)...(19): siRNA sense strand
ggcacacggucaacaagau

SEQ ID NO: 233496 - RNA, 19 nt, Homo sapiens
  misc_RNA (1)...(19): siRNA sense strand
ggaaguacgccagcagcuu

SEQ ID NO: 233497 - RNA, 19 nt, Homo sapiens
  misc_RNA (1)...(19): siRNA sense strand
cgaccaaggccuauacagu

SEQ ID NO: 233498 - RNA, 19 nt, Homo sapiens
  misc_RNA (1)...(19): siRNA sense strand
ccagugggacuucggauca

SEQ ID NO: 233499 - RNA, 19 nt, Homo sapiens
  misc_RNA (1)...(19): siRNA sense strand
gcacacggucaacaagauc

SEQ ID NO: 233500 - RNA, 19 nt, Homo sapiens
  misc_RNA (1)...(19): siRNA sense strand
gcagagugaagggagcaaa

SEQ ID NO: 233501 - RNA, 19 nt, Homo sapiens
  misc_RNA (1)...(19): siRNA sense strand
ggggaucucugcagcaauc

SEQ ID NO: 233502 - RNA, 19 nt, Homo sapiens
  misc_RNA (1)...(19): siRNA sense strand
gcagugcuacuacgucuuc

SEQ ID NO: 233503 - RNA, 19 nt, Homo sapiens
  misc_RNA (1)...(19): siRNA sense strand
ucaacaagaucaccuucuc

SEQ ID NO: 233504 - RNA, 19 nt, Homo sapiens
  misc_RNA (1)...(19): siRNA sense strand
ggcacacggucaacaagau

SEQ ID NO: 233505 - RNA, 19 nt, Homo sapiens
  misc_RNA (1)...(19): siRNA sense strand
ggaaguacgccagcagcuu

SEQ ID NO: 233506 - RNA, 19 nt, Homo sapiens
  misc_RNA (1)...(19): siRNA sense strand
cgaccaaggccuauacagu

SEQ ID NO: 233507 - RNA, 19 nt, Homo sapiens
  misc_RNA (1)...(19): siRNA sense strand
ccagugggacuucggauca

SEQ ID NO: 233508 - RNA, 19 nt, Homo sapiens
  misc_RNA (1)...(19): siRNA sense strand
gcacacggucaacaagauc

SEQ ID NO: 233509 - RNA, 19 nt, Homo sapiens
  misc_RNA (1)...(19): siRNA sense strand
gcagagugaagggagcaaa

SEQ ID NO: 233510 - RNA, 19 nt, Homo sapiens
  misc_RNA (1)...(19): siRNA sense strand
ggggaucucugcagcaauc

SEQ ID NO: 233511 - RNA, 19 nt, Homo sapiens
  misc_RNA (1)...(19): siRNA sense strand
ugaaugacaugaacuuuga

SEQ ID NO: 233512 - RNA, 19 nt, Homo sapiens
  misc_RNA (1)...(19): siRNA sense strand
gaagaaauuucagaugaca

SEQ ID NO: 233513 - RNA, 19 nt, Homo sapiens
  misc_RNA (1)...(19): siRNA sense strand
gcagugcuauuacgucuuc

SEQ ID NO: 233514 - RNA, 19 nt, Homo sapiens
  misc_RNA (1)...(19): siRNA sense strand
aggaagaaauuucagauga

SEQ ID NO: 233515 - RNA, 19 nt, Homo sapiens
  misc_RNA (1)...(19): siRNA sense strand
uacauuggcuccaucauga

SEQ ID NO: 233516 - RNA, 19 nt, Homo sapiens
  misc_RNA (1)...(19): siRNA sense strand
gggagacgaaggugauuua

SEQ ID NO: 233517 - RNA, 19 nt, Homo sapiens
  misc_RNA (1)...(19): siRNA sense strand
gacaugaacuuugagaaca

SEQ ID NO: 233518 - RNA, 19 nt, Homo sapiens
  misc_RNA (1)...(19): siRNA sense strand
cgucacagauuccacaaug

SEQ ID NO: 233519 - RNA, 19 nt, Homo sapiens
  misc_RNA (1)...(19): siRNA sense strand
ggaagaaauuucagaugac

SEQ ID NO: 233520 - RNA, 19 nt, Homo sapiens
  misc_RNA (1)...(19): siRNA sense strand
cacaaugucucucaauauc

SEQ ID NO: 233521 - RNA, 19 nt, Homo sapiens
  misc_RNA (1)...(19): siRNA sense strand
caccaucccuaaugccuuu

SEQ ID NO: 233522 - RNA, 19 nt, Homo sapiens
  misc_RNA (1)...(19): siRNA sense strand
gaaggaagaaauuucagau

SEQ ID NO: 233523 - RNA, 19 nt, Homo sapiens
  misc_RNA (1)...(19): siRNA sense strand
gcacaagccuggccccauu

SEQ ID NO: 233524 - RNA, 19 nt, Homo sapiens
  misc_RNA (1)...(19): siRNA sense strand
agacgaaggugauuuacca

SEQ ID NO: 233525 - RNA, 19 nt, Homo sapiens
  misc_RNA (1)...(19): siRNA sense strand
ugugagagcuaccuaguca

SEQ ID NO: 233526 - RNA, 19 nt, Homo sapiens
  misc_RNA (1)...(19): siRNA sense strand
gcucaaagcaggccugauc

SEQ ID NO: 233527 - RNA, 19 nt, Homo sapiens
  misc_RNA (1)...(19): siRNA sense strand
gacagaaaccgagucagua

SEQ ID NO: 233528 - RNA, 19 nt, Homo sapiens
  misc_RNA (1)...(19): siRNA sense strand
ccagguuccuccuccauga

SEQ ID NO: 233529 - RNA, 19 nt, Homo sapiens
  misc_RNA (1)...(19): siRNA sense strand
gcuuucaucuuacaccuau

SEQ ID NO: 233530 - RNA, 19 nt, Homo sapiens
  misc_RNA (1)...(19): siRNA sense strand
ccacaaugucucucaauau

SEQ ID NO: 233531 - RNA, 19 nt, Homo sapiens
  misc_RNA (1)...(19): siRNA sense strand
cgcuaaacauggagaagua

SEQ ID NO: 233532 - RNA, 19 nt, Homo sapiens
  misc_RNA (1)...(19): siRNA sense strand
caaugucucucaauaucau

SEQ ID NO: 233533 - RNA, 19 nt, Homo sapiens
  misc_RNA (1)...(19): siRNA sense strand
gcaucacccucggcgauuu

SEQ ID NO: 233534 - RNA, 19 nt, Homo sapiens
  misc_RNA (1)...(19): siRNA sense strand
cuggguaucuccauuguug

SEQ ID NO: 233535 - RNA, 19 nt, Homo sapiens
  misc_RNA (1)...(19): siRNA sense strand
acucaaggccuccaucuuu

SEQ ID NO: 233536 - RNA, 19 nt, Homo sapiens
  misc_RNA (1)...(19): siRNA sense strand
gagcuccucuacccucaug

SEQ ID NO: 233537 - RNA, 19 nt, Homo sapiens
  misc_RNA (1)...(19): siRNA sense strand
cgacacaccgucaacaaga

SEQ ID NO: 233538 - RNA, 19 nt, Homo sapiens
  misc_RNA (1)...(19): siRNA sense strand
gaccgcauguggcucaaga

SEQ ID NO: 233539 - RNA, 19 nt, Homo sapiens
  misc_RNA (1)...(19): siRNA sense strand
gcaggugaaugacaugaac

SEQ ID NO: 233540 - RNA, 19 nt, Homo sapiens
  misc_RNA (1)...(19): siRNA sense strand
uggcugguguccucagaua

SEQ ID NO: 233541 - RNA, 19 nt, Homo sapiens
  misc_RNA (1)...(19): siRNA sense strand
uccacaaugucucucaaua

SEQ ID NO: 233542 - RNA, 19 nt, Homo sapiens
  misc_RNA (1)...(19): siRNA sense strand
gaaaccgagucaguagugu

SEQ ID NO: 233543 - RNA, 19 nt, Homo sapiens
  misc_RNA (1)...(19): siRNA sense strand
caaccugucucucaaugac

SEQ ID NO: 233544 - RNA, 19 nt, Homo sapiens
  misc_RNA (1)...(19): siRNA sense strand
gagcccauccagccaauug

SEQ ID NO: 233545 - RNA, 19 nt, Homo sapiens
  misc_RNA (1)...(19): siRNA sense strand
ucaacaagaucaccuucuc

SEQ ID NO: 233546 - RNA, 19 nt, Homo sapiens
  misc_RNA (1)...(19): siRNA sense strand
cauggcagcuccagagucu

SEQ ID NO: 233547 - RNA, 19 nt, Homo sapiens
  misc_RNA (1)...(19): siRNA sense strand
agacggaggcaucuacauu

SEQ ID NO: 233548 - RNA, 19 nt, Homo sapiens
  misc_RNA (1)...(19): siRNA sense strand
gcauguggcucaagaucac

SEQ ID NO: 233549 - RNA, 19 nt, Homo sapiens
  misc_RNA (1)...(19): siRNA sense strand
gugaaugacaugaacuuug

SEQ ID NO: 233550 - RNA, 19 nt, Homo sapiens
  misc_RNA (1)...(19): siRNA sense strand
gacggaggcaucuacauug

SEQ ID NO: 233551 - RNA, 19 nt, Homo sapiens
  misc_RNA (1)...(19): siRNA sense strand
gagaggaccagcggcauug

SEQ ID NO: 233552 - RNA, 19 nt, Homo sapiens
  misc_RNA (1)...(19): siRNA sense strand
gcaguggcagugagucuga

SEQ ID NO: 233553 - RNA, 19 nt, Homo sapiens
  misc_RNA (1)...(19): siRNA sense strand
caagaucaccaucccuaau

SEQ ID NO: 233554 - RNA, 19 nt, Homo sapiens
  misc_RNA (1)...(19): siRNA sense strand
gacacaccgucaacaagau

SEQ ID NO: 233555 - RNA, 19 nt, Homo sapiens
  misc_RNA (1)...(19): siRNA sense strand
ugauuuaccaccuggauga

SEQ ID NO: 233556 - RNA, 19 nt, Homo sapiens
  misc_RNA (1)...(19): siRNA sense strand
gaacaugagcaacgaugac

SEQ ID NO: 233557 - RNA, 19 nt, Homo sapiens
  misc_RNA (1)...(19): siRNA sense strand
gguggugaaggaagaaauu

SEQ ID NO: 233558 - RNA, 19 nt, Homo sapiens
  misc_RNA (1)...(19): siRNA sense strand
gcugguguccucagauaau

SEQ ID NO: 233559 - RNA, 19 nt, Homo sapiens
  misc_RNA (1)...(19): siRNA sense strand
agacagaaaccgagucagu

SEQ ID NO: 233560 - RNA, 19 nt, Homo sapiens
  misc_RNA (1)...(19): siRNA sense strand
cuacauuggcuccaucaug

SEQ ID NO: 233561 - RNA, 19 nt, Homo sapiens
  misc_RNA (1)...(19): siRNA sense strand
gagaaucuggagccugaga

SEQ ID NO: 233562 - RNA, 19 nt, Homo sapiens
  misc_RNA (1)...(19): siRNA sense strand
gucaaccugucucucaaug

SEQ ID NO: 233563 - RNA, 19 nt, Homo sapiens
  misc_RNA (1)...(19): siRNA sense strand
cgagaggaccagcggcauu

SEQ ID NO: 233564 - RNA, 19 nt, Homo sapiens
  misc_RNA (1)...(19): siRNA sense strand
gcgaguucuuuguggaugu

SEQ ID NO: 233565 - RNA, 19 nt, Homo sapiens
  misc_RNA (1)...(19): siRNA sense strand
uugacuggcucuaccauca

SEQ ID NO: 233566 - RNA, 19 nt, Homo sapiens
  misc_RNA (1)...(19): siRNA sense strand
ucaagaucaccaucccuaa

SEQ ID NO: 233567 - RNA, 19 nt, Homo sapiens
  misc_RNA (1)...(19): siRNA sense strand
ucagcagcgucacagauuc

SEQ ID NO: 233568 - RNA, 19 nt, Homo sapiens
  misc_RNA (1)...(19): siRNA sense strand
cuagucaaccugucucuca

SEQ ID NO: 233569 - RNA, 19 nt, Homo sapiens
  misc_RNA (1)...(19): siRNA sense strand
uuacaucuggaucgucuuu

SEQ ID NO: 233570 - RNA, 19 nt, Homo sapiens
  misc_RNA (1)...(19): siRNA sense strand
ucacagauuccacaauguc

SEQ ID NO: 233571 - RNA, 19 nt, Homo sapiens
  misc_RNA (1)...(19): siRNA sense strand
ccaugagccucgggcagaa

SEQ ID NO: 233572 - RNA, 19 nt, Homo sapiens
  misc_RNA (1)...(19): siRNA sense strand
cgaguucuuuguggauguu

SEQ ID NO: 233573 - RNA, 19 nt, Homo sapiens
  misc_RNA (1)...(19): siRNA sense strand
ccacuuucuccuaccagua

SEQ ID NO: 233574 - RNA, 19 nt, Homo sapiens
  misc_RNA (1)...(19): siRNA sense strand
ccucuccucaggccuauuu

SEQ ID NO: 233575 - RNA, 19 nt, Homo sapiens
  misc_RNA (1)...(19): siRNA sense strand
ugacaugaacuuugagaac

SEQ ID NO: 233576 - RNA, 19 nt, Homo sapiens
  misc_RNA (1)...(19): siRNA sense strand
ggacucaaggccuccaucu

SEQ ID NO: 233577 - RNA, 19 nt, Homo sapiens
  misc_RNA (1)...(19): siRNA sense strand
ggugaaugacaugaacuuu

SEQ ID NO: 233578 - RNA, 19 nt, Homo sapiens
  misc_RNA (1)...(19): siRNA sense strand
cucaaggccuccaucuuuc

SEQ ID NO: 233579 - RNA, 19 nt, Homo sapiens
  misc_RNA (1)...(19): siRNA sense strand
uaaacauggagaaguacaa

SEQ ID NO: 233580 - RNA, 19 nt, Homo sapiens
  misc_RNA (1)...(19): siRNA sense strand
gcauggcccuccccuacaa

SEQ ID NO: 233581 - RNA, 19 nt, Homo sapiens
  misc_RNA (1)...(19): siRNA sense strand
gccagcagccagcauagug

SEQ ID NO: 233582 - RNA, 19 nt, Homo sapiens
  misc_RNA (1)...(19): siRNA sense strand
ccaccuggaugaggaagag

SEQ ID NO: 233583 - RNA, 19 nt, Homo sapiens
  misc_RNA (1)...(19): siRNA sense strand
caacaagaucaccuucucu

SEQ ID NO: 233584 - RNA, 19 nt, Homo sapiens
  misc_RNA (1)...(19): siRNA sense strand
aagaucaccaucccuaaug

SEQ ID NO: 233585 - RNA, 19 nt, Homo sapiens
  misc_RNA (1)...(19): siRNA sense strand
cuccaucuuuccacccuaa

SEQ ID NO: 233586 - RNA, 19 nt, Homo sapiens
  misc_RNA (1)...(19): siRNA sense strand
acaugaacuuugagaacau

SEQ ID NO: 233587 - RNA, 19 nt, Homo sapiens
  misc_RNA (1)...(19): siRNA sense strand
ucaucacagucacgcuaaa

SEQ ID NO: 233588 - RNA, 19 nt, Homo sapiens
  misc_RNA (1)...(19): siRNA sense strand
acagaaaccgagucaguag

SEQ ID NO: 233589 - RNA, 19 nt, Homo sapiens
  misc_RNA (1)...(19): siRNA sense strand
caucuuuccacccuaaugu

SEQ ID NO: 233590 - RNA, 19 nt, Homo sapiens
  misc_RNA (1)...(19): siRNA sense strand
gcaaucccagcgaguucuu

SEQ ID NO: 233591 - RNA, 19 nt, Homo sapiens
  misc_RNA (1)...(19): siRNA sense strand
ccagcagccagcauaguga

SEQ ID NO: 233592 - RNA, 19 nt, Homo sapiens
  misc_RNA (1)...(19): siRNA sense strand
acaagaucaccuucucuga

SEQ ID NO: 233593 - RNA, 19 nt, Homo sapiens
  misc_RNA (1)...(19): siRNA sense strand
cucaauaucaucacaguca

SEQ ID NO: 233594 - RNA, 19 nt, Homo sapiens
  misc_RNA (1)...(19): siRNA sense strand
gcaggagagacagcaguga

SEQ ID NO: 233595 - RNA, 19 nt, Homo sapiens
  misc_RNA (1)...(19): siRNA sense strand
agaaaccgagucaguagug

SEQ ID NO: 233596 - RNA, 19 nt, Homo sapiens
  misc_RNA (1)...(19): siRNA sense strand
cagcagccaugagaaucug

SEQ ID NO: 233597 - RNA, 19 nt, Homo sapiens
  misc_RNA (1)...(19): siRNA sense strand
gaaucuggagccugagaca

SEQ ID NO: 233598 - RNA, 19 nt, Homo sapiens
  misc_RNA (1)...(19): siRNA sense strand
gggcaaucccagcgaguuc

SEQ ID NO: 233599 - RNA, 19 nt, Homo sapiens
  misc_RNA (1)...(19): siRNA sense strand
uagucaaccugucucucaa

SEQ ID NO: 233600 - RNA, 19 nt, Homo sapiens
  misc_RNA (1)...(19): siRNA sense strand
gcaucuacauuggcuccau

SEQ ID NO: 233601 - RNA, 19 nt, Homo sapiens
  misc_RNA (1)...(19): siRNA sense strand
ggagacggaggcaucuaca

SEQ ID NO: 233602 - RNA, 19 nt, Homo sapiens
  misc_RNA (1)...(19): siRNA sense strand
cagucacgcuaaacaugga

SEQ ID NO: 233603 - RNA, 19 nt, Homo sapiens
  misc_RNA (1)...(19): siRNA sense strand
cucccuaccuggugaagau

SEQ ID NO: 233604 - RNA, 19 nt, Homo sapiens
  misc_RNA (1)...(19): siRNA sense strand
cuuuguggauguuauguag

SEQ ID NO: 233605 - RNA, 19 nt, Homo sapiens
  misc_RNA (1)...(19): siRNA sense strand
cacagucacgcuaaacaug

SEQ ID NO: 233606 - RNA, 19 nt, Homo sapiens
  misc_RNA (1)...(19): siRNA sense strand
gcaagaaggccaagaacaa

SEQ ID NO: 233607 - RNA, 19 nt, Homo sapiens
  misc_RNA (1)...(19): siRNA sense strand
ucaccaagaaguucauuua

SEQ ID NO: 233608 - RNA, 19 nt, Homo sapiens
  misc_RNA (1)...(19): siRNA sense strand
gaggacaaccugcagauau

SEQ ID NO: 233609 - RNA, 19 nt, Homo sapiens
  misc_RNA (1)...(19): siRNA sense strand
ugaaggagcugaugaacac

SEQ ID NO: 233610 - RNA, 19 nt, Homo sapiens
  misc_RNA (1)...(19): siRNA sense strand
aggacaaccugcagauaua

SEQ ID NO: 233611 - RNA, 19 nt, Homo sapiens
  misc_RNA (1)...(19): siRNA sense strand
gggagaagacucgguauga

SEQ ID NO: 233612 - RNA, 19 nt, Homo sapiens
  misc_RNA (1)...(19): siRNA sense strand
ccaagaaguucauuuaccu

SEQ ID NO: 233613 - RNA, 19 nt, Homo sapiens
  misc_RNA (1)...(19): siRNA sense strand
gagaagacucgguaugaca

SEQ ID NO: 233614 - RNA, 19 nt, Homo sapiens
  misc_RNA (1)...(19): siRNA sense strand
gcaccugacugaggacaag

SEQ ID NO: 233615 - RNA, 19 nt, Homo sapiens
  misc_RNA (1)...(19): siRNA sense strand
ggagaagacucgguaugac

SEQ ID NO: 233616 - RNA, 19 nt, Homo sapiens
  misc_RNA (1)...(19): siRNA sense strand
ggacaaccugcagauauau

SEQ ID NO: 233617 - RNA, 19 nt, Homo sapiens
  misc_RNA (1)...(19): siRNA sense strand
uaugugacuuaccaggaua

SEQ ID NO: 233618 - RNA, 19 nt, Homo sapiens
  misc_RNA (1)...(19): siRNA sense strand
caggauauccgugcuguug

SEQ ID NO: 233619 - RNA, 19 nt, Homo sapiens
  misc_RNA (1)...(19): siRNA sense strand
cgacaggacugaggacaac

SEQ ID NO: 233620 - RNA, 19 nt, Homo sapiens
  misc_RNA (1)...(19): siRNA sense strand
cagcuacugcuaccuacua

SEQ ID NO: 233621 - RNA, 19 nt, Homo sapiens
  misc_RNA (1)...(19): siRNA sense strand
gggaccuguugauuaauug

SEQ ID NO: 233622 - RNA, 19 nt, Homo sapiens
  misc_RNA (1)...(19): siRNA sense strand
gggcaucagcgaucucuuc

SEQ ID NO: 233623 - RNA, 19 nt, Homo sapiens
  misc_RNA (1)...(19): siRNA sense strand
agacagugauugccgucaa

SEQ ID NO: 233624 - RNA, 19 nt, Homo sapiens
  misc_RNA (1)...(19): siRNA sense strand
gcaggggaauguuugaaga

SEQ ID NO: 233625 - RNA, 19 nt, Homo sapiens
  misc_RNA (1)...(19): siRNA sense strand
gaggacaaggccaacaaga

SEQ ID NO: 233626 - RNA, 19 nt, Homo sapiens
  misc_RNA (1)...(19): siRNA sense strand
cuaugugacuuaccaggau

SEQ ID NO: 233627 - RNA, 19 nt, Homo sapiens
  misc_RNA (1)...(19): siRNA sense strand
caccgacccuagcaucaug

SEQ ID NO: 233628 - RNA, 19 nt, Homo sapiens
  misc_RNA (1)...(19): siRNA sense strand
acacggagcaggccuugga

SEQ ID NO: 233629 - RNA, 19 nt, Homo sapiens
  misc_RNA (1)...(19): siRNA sense strand
gcccagcuacugcuaccua

SEQ ID NO: 233630 - RNA, 19 nt, Homo sapiens
  misc_RNA (1)...(19): siRNA sense strand
gacagugauugccgucaag

SEQ ID NO: 233631 - RNA, 19 nt, Homo sapiens
  misc_RNA (1)...(19): siRNA sense strand
ggggaccuguugauuaauu

SEQ ID NO: 233632 - RNA, 19 nt, Homo sapiens
  misc_RNA (1)...(19): siRNA sense strand
ggaccuguugauuaauuga

SEQ ID NO: 233633 - RNA, 19 nt, Homo sapiens
  misc_RNA (1)...(19): siRNA sense strand
ucuaugacaucaccaacgu

SEQ ID NO: 233634 - RNA, 19 nt, Homo sapiens
  misc_RNA (1)...(19): siRNA sense strand
uuaaggagcagacagugau

SEQ ID NO: 233635 - RNA, 19 nt, Homo sapiens
  misc_RNA (1)...(19): siRNA sense strand
ugaggacaaccugcagaua

SEQ ID NO: 233636 - RNA, 19 nt, Homo sapiens
  misc_RNA (1)...(19): siRNA sense strand
gcaccgacccuagcaucau

SEQ ID NO: 233637 - RNA, 19 nt, Homo sapiens
  misc_RNA (1)...(19): siRNA sense strand
caagaaggccaagaacaac

SEQ ID NO: 233638 - RNA, 19 nt, Homo sapiens
  misc_RNA (1)...(19): siRNA sense strand
gaagugcaucagaguggau

SEQ ID NO: 233639 - RNA, 19 nt, Homo sapiens
  misc_RNA (1)...(19): siRNA sense strand
gcgaucucuucgacuccua

SEQ ID NO: 233640 - RNA, 19 nt, Homo sapiens
  misc_RNA (1)...(19): siRNA sense strand
gcaucuaugacaucaccaa

SEQ ID NO: 233641 - RNA, 19 nt, Homo sapiens
  misc_RNA (1)...(19): siRNA sense strand
ccaagggcccaucgaaguc

SEQ ID NO: 233642 - RNA, 19 nt, Homo sapiens
  misc_RNA (1)...(19): siRNA sense strand
cggcgcaucuaugacauca

SEQ ID NO: 233643 - RNA, 19 nt, Homo sapiens
  misc_RNA (1)...(19): siRNA sense strand
uaaggagcagacagugauu

SEQ ID NO: 233644 - RNA, 19 nt, Homo sapiens
  misc_RNA (1)...(19): siRNA sense strand
gggcugcucaccaagaagu

SEQ ID NO: 233645 - RNA, 19 nt, Homo sapiens
  misc_RNA (1)...(19): siRNA sense strand
gaacaaggauggccgcuau

SEQ ID NO: 233646 - RNA, 19 nt, Homo sapiens
  misc_RNA (1)...(19): siRNA sense strand
ggacacaccuggaggagaa

SEQ ID NO: 233647 - RNA, 19 nt, Homo sapiens
  misc_RNA (1)...(19): siRNA sense strand
ggacgugguugucagcaaa

SEQ ID NO: 233648 - RNA, 19 nt, Homo sapiens
  misc_RNA (1)...(19): siRNA sense strand
ccacgcaucugaccuuguu

SEQ ID NO: 233649 - RNA, 19 nt, Homo sapiens
  misc_RNA (1)...(19): siRNA sense strand
ggcaagcgcuacaagacua

SEQ ID NO: 233650 - RNA, 19 nt, Homo sapiens
  misc_RNA (1)...(19): siRNA sense strand
gcgagaagccguucaagug

SEQ ID NO: 233651 - RNA, 19 nt, Homo sapiens
  misc_RNA (1)...(19): siRNA sense strand
gcaaggaccacgagugcaa

SEQ ID NO: 233652 - RNA, 19 nt, Homo sapiens
  misc_RNA (1)...(19): siRNA sense strand
ggaguucucguccguggua

SEQ ID NO: 233653 - RNA, 19 nt, Homo sapiens
  misc_RNA (1)...(19): siRNA sense strand
gcgggaagcucuacaagac

SEQ ID NO: 233654 - RNA, 19 nt, Homo sapiens
  misc_RNA (1)...(19): siRNA sense strand
cagaggagcccaucacugu

SEQ ID NO: 233655 - RNA, 19 nt, Homo sapiens
  misc_RNA (1)...(19): siRNA sense strand
ggacgcacgugcagguucu

SEQ ID NO: 233656 - RNA, 19 nt, Homo sapiens
  misc_RNA (1)...(19): siRNA sense strand
aaaauccgcuucaguguga

SEQ ID NO: 233657 - RNA, 19 nt, Homo sapiens
  misc_RNA (1)...(19): siRNA sense strand
ugaagcuacuggugaacaa

SEQ ID NO: 233658 - RNA, 19 nt, Homo sapiens
  misc_RNA (1)...(19): siRNA sense strand
ucaccgccuuggaggauuu

SEQ ID NO: 233659 - RNA, 19 nt, Homo sapiens
  misc_RNA (1)...(19): siRNA sense strand
acaagaccauugcccaugu

SEQ ID NO: 233660 - RNA, 19 nt, Homo sapiens
  misc_RNA (1)...(19): siRNA sense strand
cgaggaagaugaggacgau

SEQ ID NO: 233661 - RNA, 19 nt, Homo sapiens
  misc_RNA (1)...(19): siRNA sense strand
gcaagcgcuacaagacuaa

SEQ ID NO: 233662 - RNA, 19 nt, Homo sapiens
  misc_RNA (1)...(19): siRNA sense strand
uagcugacacccaggagua

SEQ ID NO: 233663 - RNA, 19 nt, Homo sapiens
  misc_RNA (1)...(19): siRNA sense strand
aggaguugcuggugucuga

SEQ ID NO: 233664 - RNA, 19 nt, Homo sapiens
  misc_RNA (1)...(19): siRNA sense strand
agaagccguucaagugcua

SEQ ID NO: 233665 - RNA, 19 nt, Homo sapiens
  misc_RNA (1)...(19): siRNA sense strand
ggacagccacaucaugaag

SEQ ID NO: 233666 - RNA, 19 nt, Homo sapiens
  misc_RNA (1)...(19): siRNA sense strand
gcugggagacggugagaug

SEQ ID NO: 233667 - RNA, 19 nt, Homo sapiens
  misc_RNA (1)...(19): siRNA sense strand
gaacuccggcaucguccuu

SEQ ID NO: 233668 - RNA, 19 nt, Homo sapiens
  misc_RNA (1)...(19): siRNA sense strand
caagaccauugcccaugug

SEQ ID NO: 233669 - RNA, 19 nt, Homo sapiens
  misc_RNA (1)...(19): siRNA sense strand
ugaggacgaugugcacaga

SEQ ID NO: 233670 - RNA, 19 nt, Homo sapiens
  misc_RNA (1)...(19): siRNA sense strand
gcaccgucauccacgaagu

SEQ ID NO: 233671 - RNA, 19 nt, Homo sapiens
  misc_RNA (1)...(19): siRNA sense strand
ugaagguggugcagcagau

SEQ ID NO: 233672 - RNA, 19 nt, Homo sapiens
  misc_RNA (1)...(19): siRNA sense strand
cuacaagugcuccaagugu

SEQ ID NO: 233673 - RNA, 19 nt, Homo sapiens
  misc_RNA (1)...(19): siRNA sense strand
cgaaguccacguccagaug

SEQ ID NO: 233674 - RNA, 19 nt, Homo sapiens
  misc_RNA (1)...(19): siRNA sense strand
ggaagaugaggacgaugug

SEQ ID NO: 233675 - RNA, 19 nt, Homo sapiens
  misc_RNA (1)...(19): siRNA sense strand
guggugggcacaucaaaga

SEQ ID NO: 233676 - RNA, 19 nt, Homo sapiens
  misc_RNA (1)...(19): siRNA sense strand
gcgagccuauagagacuuc

SEQ ID NO: 233677 - RNA, 19 nt, Homo sapiens
  misc_RNA (1)...(19): siRNA sense strand
gcacaucaaagaggucauc

SEQ ID NO: 233678 - RNA, 19 nt, Homo sapiens
  misc_RNA (1)...(19): siRNA sense strand
gcagcugccgguacuggaa

SEQ ID NO: 233679 - RNA, 19 nt, Homo sapiens
  misc_RNA (1)...(19): siRNA sense strand
ccagugaggccacggagau

SEQ ID NO: 233680 - RNA, 19 nt, Homo sapiens
  misc_RNA (1)...(19): siRNA sense strand
cggaagacccgcacacagu

SEQ ID NO: 233681 - RNA, 19 nt, Homo sapiens
  misc_RNA (1)...(19): siRNA sense strand
aaggauggccgcuaugugu

SEQ ID NO: 233682 - RNA, 19 nt, Homo sapiens
  misc_RNA (1)...(19): siRNA sense strand
gcugacacccaggaguaua

SEQ ID NO: 233683 - RNA, 19 nt, Homo sapiens
  misc_RNA (1)...(19): siRNA sense strand
guucagcacaagauucaga

SEQ ID NO: 233684 - RNA, 19 nt, Homo sapiens
  misc_RNA (1)...(19): siRNA sense strand
gagcugucccugggcauga

SEQ ID NO: 233685 - RNA, 19 nt, Homo sapiens
  misc_RNA (1)...(19): siRNA sense strand
gcacgugcgacaccacaca

SEQ ID NO: 233686 - RNA, 19 nt, Homo sapiens
  misc_RNA (1)...(19): siRNA sense strand
gaagggcagccgugagaac

SEQ ID NO: 233687 - RNA, 19 nt, Homo sapiens
  misc_RNA (1)...(19): siRNA sense strand
ggauggccgcuaugugugu

SEQ ID NO: 233688 - RNA, 19 nt, Homo sapiens
  misc_RNA (1)...(19): siRNA sense strand
gagcaaggacgugguuguc

SEQ ID NO: 233689 - RNA, 19 nt, Homo sapiens
  misc_RNA (1)...(19): siRNA sense strand
ccuaccugcucaagacaga

SEQ ID NO: 233690 - RNA, 19 nt, Homo sapiens
  misc_RNA (1)...(19): siRNA sense strand
gcaccaagggcucacucau

SEQ ID NO: 233691 - RNA, 19 nt, Homo sapiens
  misc_RNA (1)...(19): siRNA sense strand
ggaagggcagccgugagaa

SEQ ID NO: 233692 - RNA, 19 nt, Homo sapiens
  misc_RNA (1)...(19): siRNA sense strand
cagagcagguggccaugac

SEQ ID NO: 233693 - RNA, 19 nt, Homo sapiens
  misc_RNA (1)...(19): siRNA sense strand
ugcagaacgucaccaugga

SEQ ID NO: 233694 - RNA, 19 nt, Homo sapiens
  misc_RNA (1)...(19): siRNA sense strand
aggacgaugugcacagaug

SEQ ID NO: 233695 - RNA, 19 nt, Homo sapiens
  misc_RNA (1)...(19): siRNA sense strand
caaggauggccgcuaugug

SEQ ID NO: 233696 - RNA, 19 nt, Homo sapiens
  misc_RNA (1)...(19): siRNA sense strand
gaagcucuacaagaccauu

SEQ ID NO: 233697 - RNA, 19 nt, Homo sapiens
  misc_RNA (1)...(19): siRNA sense strand
caccaagggcucacucauc

SEQ ID NO: 233698 - RNA, 19 nt, Homo sapiens
  misc_RNA (1)...(19): siRNA sense strand
aggugaagcuacuggugaa

SEQ ID NO: 233699 - RNA, 19 nt, Homo sapiens
  misc_RNA (1)...(19): siRNA sense strand
ccaggcagauucauuuaua

SEQ ID NO: 233700 - RNA, 19 nt, Homo sapiens
  misc_RNA (1)...(19): siRNA sense strand
gauaacauguuuguccaua

SEQ ID NO: 233701 - RNA, 19 nt, Homo sapiens
  misc_RNA (1)...(19): siRNA sense strand
ggacggagcaggauuucua

SEQ ID NO: 233702 - RNA, 19 nt, Homo sapiens
  misc_RNA (1)...(19): siRNA sense strand
caauuucuuugauggguua

SEQ ID NO: 233703 - RNA, 19 nt, Homo sapiens
  misc_RNA (1)...(19): siRNA sense strand
ccacgagcaugaacggaua

SEQ ID NO: 233704 - RNA, 19 nt, Homo sapiens
  misc_RNA (1)...(19): siRNA sense strand
ggaaaucauucugaagaga

SEQ ID NO: 233705 - RNA, 19 nt, Homo sapiens
  misc_RNA (1)...(19): siRNA sense strand
gaagcagcaugaaggaaga

SEQ ID NO: 233706 - RNA, 19 nt, Homo sapiens
  misc_RNA (1)...(19): siRNA sense strand
gaacagccugcaagcgaua

SEQ ID NO: 233707 - RNA, 19 nt, Homo sapiens
  misc_RNA (1)...(19): siRNA sense strand
caacaaccaggaaaucauu

SEQ ID NO: 233708 - RNA, 19 nt, Homo sapiens
  misc_RNA (1)...(19): siRNA sense strand
cuacaaaucuaagcaguuc

SEQ ID NO: 233709 - RNA, 19 nt, Homo sapiens
  misc_RNA (1)...(19): siRNA sense strand
ggcagucucugauaacaug

SEQ ID NO: 233710 - RNA, 19 nt, Homo sapiens
  misc_RNA (1)...(19): siRNA sense strand
gaacaugcuacucccugua

SEQ ID NO: 233711 - RNA, 19 nt, Homo sapiens
  misc_RNA (1)...(19): siRNA sense strand
gacaagaacccagaaaugu

SEQ ID NO: 233712 - RNA, 19 nt, Homo sapiens
  misc_RNA (1)...(19): siRNA sense strand
gauuguuccuccuauguga

SEQ ID NO: 233713 - RNA, 19 nt, Homo sapiens
  misc_RNA (1)...(19): siRNA sense strand
gacagguucuucuugaaau

SEQ ID NO: 233714 - RNA, 19 nt, Homo sapiens
  misc_RNA (1)...(19): siRNA sense strand
ccagaaaugugccgagucu

SEQ ID NO: 233715 - RNA, 19 nt, Homo sapiens
  misc_RNA (1)...(19): siRNA sense strand
gaagguacgcccucuuauc

SEQ ID NO: 233716 - RNA, 19 nt, Homo sapiens
  misc_RNA (1)...(19): siRNA sense strand
caagcgauaucuggcauga

SEQ ID NO: 233717 - RNA, 19 nt, Homo sapiens
  misc_RNA (1)...(19): siRNA sense strand
gagucuugcucacacauga

SEQ ID NO: 233718 - RNA, 19 nt, Homo sapiens
  misc_RNA (1)...(19): siRNA sense strand
cagauccagugauaauuga

SEQ ID NO: 233719 - RNA, 19 nt, Homo sapiens
  misc_RNA (1)...(19): siRNA sense strand
cagcuucucuacagcaaug

SEQ ID NO: 233720 - RNA, 19 nt, Homo sapiens
  misc_RNA (1)...(19): siRNA sense strand
ucccucagauccagugaua

SEQ ID NO: 233721 - RNA, 19 nt, Homo sapiens
  misc_RNA (1)...(19): siRNA sense strand
aaagaccaauaacggaauu

SEQ ID NO: 233722 - RNA, 19 nt, Homo sapiens
  misc_RNA (1)...(19): siRNA sense strand
caggaaaucauucugaaga

SEQ ID NO: 233723 - RNA, 19 nt, Homo sapiens
  misc_RNA (1)...(19): siRNA sense strand
cggaagguacgcccucuua

SEQ ID NO: 233724 - RNA, 19 nt, Homo sapiens
  misc_RNA (1)...(19): siRNA sense strand
agcgauaucuggcaugauu

SEQ ID NO: 233725 - RNA, 19 nt, Homo sapiens
  misc_RNA (1)...(19): siRNA sense strand
gcggaaauccaacuucuuc

SEQ ID NO: 233726 - RNA, 19 nt, Homo sapiens
  misc_RNA (1)...(19): siRNA sense strand
gcuacucccuguaucaaag

SEQ ID NO: 233727 - RNA, 19 nt, Homo sapiens
  misc_RNA (1)...(19): siRNA sense strand
uaaggacggagcaggauuu

SEQ ID NO: 233728 - RNA, 19 nt, Homo sapiens
  misc_RNA (1)...(19): siRNA sense strand
caacgaacccaccaucgau

SEQ ID NO: 233729 - RNA, 19 nt, Homo sapiens
  misc_RNA (1)...(19): siRNA sense strand
ugacagguucuucuugaaa

SEQ ID NO: 233730 - RNA, 19 nt, Homo sapiens
  misc_RNA (1)...(19): siRNA sense strand
agacaagaacccagaaaug

SEQ ID NO: 233731 - RNA, 19 nt, Homo sapiens
  misc_RNA (1)...(19): siRNA sense strand
gcaugauuguuccuccuau

SEQ ID NO: 233732 - RNA, 19 nt, Homo sapiens
  misc_RNA (1)...(19): siRNA sense strand
guggacaacuggccgugaa

SEQ ID NO: 233733 - RNA, 19 nt, Homo sapiens
  misc_RNA (1)...(19): siRNA sense strand
acaccaggcagauucauuu

SEQ ID NO: 233734 - RNA, 19 nt, Homo sapiens
  misc_RNA (1)...(19): siRNA sense strand
acacuguccuacaaaucua

SEQ ID NO: 233735 - RNA, 19 nt, Homo sapiens
  misc_RNA (1)...(19): siRNA sense strand
ucagauccagugauaauug

SEQ ID NO: 233736 - RNA, 19 nt, Homo sapiens
  misc_RNA (1)...(19): siRNA sense strand
caaaauugccuaaagaaug

SEQ ID NO: 233737 - RNA, 19 nt, Homo sapiens
  misc_RNA (1)...(19): siRNA sense strand
ucucagccgugaaacagaa

SEQ ID NO: 233738 - RNA, 19 nt, Homo sapiens
  misc_RNA (1)...(19): siRNA sense strand
caacucaagcagcguauca

SEQ ID NO: 233739 - RNA, 19 nt, Homo sapiens
  misc_RNA (1)...(19): siRNA sense strand
caucacaagccaccaauca

SEQ ID NO: 233740 - RNA, 19 nt, Homo sapiens
  misc_RNA (1)...(19): siRNA sense strand
ccaauaacggaauucacua

SEQ ID NO: 233741 - RNA, 19 nt, Homo sapiens
  misc_RNA (1)...(19): siRNA sense strand
agaaaugugccgagucuug

SEQ ID NO: 233742 - RNA, 19 nt, Homo sapiens
  misc_RNA (1)...(19): siRNA sense strand
gggaaacccacgugacaug

SEQ ID NO: 233743 - RNA, 19 nt, Homo sapiens
  misc_RNA (1)...(19): siRNA sense strand
cccagcagaccaacuauaa

SEQ ID NO: 233744 - RNA, 19 nt, Homo sapiens
  misc_RNA (1)...(19): siRNA sense strand
ccacacaacaaccaggaaa

SEQ ID NO: 233745 - RNA, 19 nt, Homo sapiens
  misc_RNA (1)...(19): siRNA sense strand
caauguggauggccauguc

SEQ ID NO: 233746 - RNA, 19 nt, Homo sapiens
  misc_RNA (1)...(19): siRNA sense strand
gaagucacacuguccuaca

SEQ ID NO: 233747 - RNA, 19 nt, Homo sapiens
  misc_RNA (1)...(19): siRNA sense strand
ugaaacagaagagugcuuu

SEQ ID NO: 233748 - RNA, 19 nt, Homo sapiens
  misc_RNA (1)...(19): siRNA sense strand
ccgaggcccuguacagugu

SEQ ID NO: 233749 - RNA, 19 nt, Homo sapiens
  misc_RNA (1)...(19): siRNA sense strand
gaacccaccaucgauuaug

SEQ ID NO: 233750 - RNA, 19 nt, Homo sapiens
  misc_RNA (1)...(19): siRNA sense strand
caagacaagaacccagaaa

SEQ ID NO: 233751 - RNA, 19 nt, Homo sapiens
  misc_RNA (1)...(19): siRNA sense strand
cugccgcaauguccaauuu

SEQ ID NO: 233752 - RNA, 19 nt, Homo sapiens
  misc_RNA (1)...(19): siRNA sense strand
ggaagguacgcccucuuau

SEQ ID NO: 233753 - RNA, 19 nt, Homo sapiens
  misc_RNA (1)...(19): siRNA sense strand
ccucagauccagugauaau

SEQ ID NO: 233754 - RNA, 19 nt, Homo sapiens
  misc_RNA (1)...(19): siRNA sense strand
acagguucuucuugaaauu

SEQ ID NO: 233755 - RNA, 19 nt, Homo sapiens
  misc_RNA (1)...(19): siRNA sense strand
gaaugucuccgaggcauca

SEQ ID NO: 233756 - RNA, 19 nt, Homo sapiens
  misc_RNA (1)...(19): siRNA sense strand
uguaugggaugccacacaa

SEQ ID NO: 233757 - RNA, 19 nt, Homo sapiens
  misc_RNA (1)...(19): siRNA sense strand
caaaacaagccauagugua

SEQ ID NO: 233758 - RNA, 19 nt, Homo sapiens
  misc_RNA (1)...(19): siRNA sense strand
caacuggccgugaaugucu

SEQ ID NO: 233759 - RNA, 19 nt, Homo sapiens
  misc_RNA (1)...(19): siRNA sense strand
caccaggcagauucauuua

SEQ ID NO: 233760 - RNA, 19 nt, Homo sapiens
  misc_RNA (1)...(19): siRNA sense strand
guaugaaggccaagacaag

SEQ ID NO: 233761 - RNA, 19 nt, Homo sapiens
  misc_RNA (1)...(19): siRNA sense strand
ggacaacuggccgugaaug

SEQ ID NO: 233762 - RNA, 19 nt, Homo sapiens
  misc_RNA (1)...(19): siRNA sense strand
uaaccaaaauugccuaaag

SEQ ID NO: 233763 - RNA, 19 nt, Homo sapiens
  misc_RNA (1)...(19): siRNA sense strand
acaagaacccagaaaugug

SEQ ID NO: 233764 - RNA, 19 nt, Homo sapiens
  misc_RNA (1)...(19): siRNA sense strand
ugaugggcgugaauucguu

SEQ ID NO: 233765 - RNA, 19 nt, Homo sapiens
  misc_RNA (1)...(19): siRNA sense strand
gcagccgccuuccaaucug

SEQ ID NO: 233766 - RNA, 19 nt, Homo sapiens
  misc_RNA (1)...(19): siRNA sense strand
auugacagguucuucuuga

SEQ ID NO: 233767 - RNA, 19 nt, Homo sapiens
  misc_RNA (1)...(19): siRNA sense strand
caugauuguuccuccuaug

SEQ ID NO: 233768 - RNA, 19 nt, Homo sapiens
  misc_RNA (1)...(19): siRNA sense strand
ccacaagccuccccuccaa

SEQ ID NO: 233769 - RNA, 19 nt, Homo sapiens
  misc_RNA (1)...(19): siRNA sense strand
gcgggaaacccacgugaca

SEQ ID NO: 233770 - RNA, 19 nt, Homo sapiens
  misc_RNA (1)...(19): siRNA sense strand
cuacagcaaugggauaagg

SEQ ID NO: 233771 - RNA, 19 nt, Homo sapiens
  misc_RNA (1)...(19): siRNA sense strand
gggcaucuucuccuucuca

SEQ ID NO: 233772 - RNA, 19 nt, Homo sapiens
  misc_RNA (1)...(19): siRNA sense strand
ggaacaccaggcagauuca

SEQ ID NO: 233773 - RNA, 19 nt, Homo sapiens
  misc_RNA (1)...(19): siRNA sense strand
ggucuggagugaguugauc

SEQ ID NO: 233774 - RNA, 19 nt, Homo sapiens
  misc_RNA (1)...(19): siRNA sense strand
gauaauugacagguucuuc

SEQ ID NO: 233775 - RNA, 19 nt, Homo sapiens
  misc_RNA (1)...(19): siRNA sense strand
aaagaagccaacagcgaaa

SEQ ID NO: 233776 - RNA, 19 nt, Homo sapiens
  misc_RNA (1)...(19): siRNA sense strand
caaaagggcugcggaucug

SEQ ID NO: 233777 - RNA, 19 nt, Homo sapiens
  misc_RNA (1)...(19): siRNA sense strand
acgaacccaccaucgauua

SEQ ID NO: 233778 - RNA, 19 nt, Homo sapiens
  misc_RNA (1)...(19): siRNA sense strand
gaucgagaggacagcguuu

SEQ ID NO: 233779 - RNA, 19 nt, Homo sapiens
  misc_RNA (1)...(19): siRNA sense strand
ccucaaauguaaccaaaau

SEQ ID NO: 233780 - RNA, 19 nt, Homo sapiens
  misc_RNA (1)...(19): siRNA sense strand
cagcagaccaacuauaacu

SEQ ID NO: 233781 - RNA, 19 nt, Homo sapiens
  misc_RNA (1)...(19): siRNA sense strand
gacaacuggccgugaaugu

SEQ ID NO: 233782 - RNA, 19 nt, Homo sapiens
  misc_RNA (1)...(19): siRNA sense strand
cacgugacaugcggagauu

SEQ ID NO: 233783 - RNA, 19 nt, Homo sapiens
  misc_RNA (1)...(19): siRNA sense strand
gauaaggacggagcaggau

SEQ ID NO: 233784 - RNA, 19 nt, Homo sapiens
  misc_RNA (1)...(19): siRNA sense strand
ggaugaugggcgugaauuc

SEQ ID NO: 233785 - RNA, 19 nt, Homo sapiens
  misc_RNA (1)...(19): siRNA sense strand
ccauaauaauuccaagcau

SEQ ID NO: 233786 - RNA, 19 nt, Homo sapiens
  misc_RNA (1)...(19): siRNA sense strand
gccuaaagaaugcgggaaa

SEQ ID NO: 233787 - RNA, 19 nt, Homo sapiens
  misc_RNA (1)...(19): siRNA sense strand
cauggucucagccgugaaa

SEQ ID NO: 233788 - RNA, 19 nt, Homo sapiens
  misc_RNA (1)...(19): siRNA sense strand
ccucgggcaucuucuccuu

SEQ ID NO: 233789 - RNA, 19 nt, Homo sapiens
  misc_RNA (1)...(19): siRNA sense strand
gggaugaugggcgugaauu

SEQ ID NO: 233790 - RNA, 19 nt, Homo sapiens
  misc_RNA (1)...(19): siRNA sense strand
accaggaaaucauucugaa

SEQ ID NO: 233791 - RNA, 19 nt, Homo sapiens
  misc_RNA (1)...(19): siRNA sense strand
ucaacgaacccaccaucga

SEQ ID NO: 233792 - RNA, 19 nt, Homo sapiens
  misc_RNA (1)...(19): siRNA sense strand
uuauacagcgcucaacgaa

SEQ ID NO: 233793 - RNA, 19 nt, Homo sapiens
  misc_RNA (1)...(19): siRNA sense strand
gccaucagcccgagugaag

SEQ ID NO: 233794 - RNA, 19 nt, Homo sapiens
  misc_RNA (1)...(19): siRNA sense strand
ggcuucagcuucucuacag

SEQ ID NO: 233795 - RNA, 19 nt, Homo sapiens
  misc_RNA (1)...(19): siRNA sense strand
aaaacaagccauaguguau

SEQ ID NO: 233796 - RNA, 19 nt, Homo sapiens
  misc_RNA (1)...(19): siRNA sense strand
agucucugauaacauguuu

SEQ ID NO: 233797 - RNA, 19 nt, Homo sapiens
  misc_RNA (1)...(19): siRNA sense strand
cagguucuucuugaaauuu

SEQ ID NO: 233798 - RNA, 19 nt, Homo sapiens
  misc_RNA (1)...(19): siRNA sense strand
caacgggaacagccugcaa

SEQ ID NO: 233799 - RNA, 19 nt, Homo sapiens
  misc_RNA (1)...(19): siRNA sense strand
gaacguggcucuagugucu

SEQ ID NO: 233800 - RNA, 19 nt, Homo sapiens
  misc_RNA (1)...(19): siRNA sense strand
gaggagaaauuaaccuuca

SEQ ID NO: 233801 - RNA, 19 nt, Homo sapiens
  misc_RNA (1)...(19): siRNA sense strand
gaaccugaguccuggaaug

SEQ ID NO: 233802 - RNA, 19 nt, Homo sapiens
  misc_RNA (1)...(19): siRNA sense strand
aggauacccuugacaaaua

SEQ ID NO: 233803 - RNA, 19 nt, Homo sapiens
  misc_RNA (1)...(19): siRNA sense strand
aaccaaaucugccuuccua

SEQ ID NO: 233804 - RNA, 19 nt, Homo sapiens
  misc_RNA (1)...(19): siRNA sense strand
ccagagcacuuucaagaag

SEQ ID NO: 233805 - RNA, 19 nt, Homo sapiens
  misc_RNA (1)...(19): siRNA sense strand
cgggacaucuugaccauug

SEQ ID NO: 233806 - RNA, 19 nt, Homo sapiens
  misc_RNA (1)...(19): siRNA sense strand
gugcagaggaggagaaauu

SEQ ID NO: 233807 - RNA, 19 nt, Homo sapiens
  misc_RNA (1)...(19): siRNA sense strand
ucaccaagcauaaacauau

SEQ ID NO: 233808 - RNA, 19 nt, Homo sapiens
  misc_RNA (1)...(19): siRNA sense strand
gaacaggucaacugcuuca

SEQ ID NO: 233809 - RNA, 19 nt, Homo sapiens
  misc_RNA (1)...(19): siRNA sense strand
ggccagagcacuuucaaga

SEQ ID NO: 233810 - RNA, 19 nt, Homo sapiens
  misc_RNA (1)...(19): siRNA sense strand
gaagacccaccaccacuug

SEQ ID NO: 233811 - RNA, 19 nt, Homo sapiens
  misc_RNA (1)...(19): siRNA sense strand
ggaggauacccuugacaaa

SEQ ID NO: 233812 - RNA, 19 nt, Homo sapiens
  misc_RNA (1)...(19): siRNA sense strand
gcagaggaggagaaauuaa

SEQ ID NO: 233813 - RNA, 19 nt, Homo sapiens
  misc_RNA (1)...(19): siRNA sense strand
gggcugauccacaacauga

SEQ ID NO: 233814 - RNA, 19 nt, Homo sapiens
  misc_RNA (1)...(19): siRNA sense strand
gaggauacccuugacaaau

SEQ ID NO: 233815 - RNA, 19 nt, Homo sapiens
  misc_RNA (1)...(19): siRNA sense strand
caccaagcauaaacauauu

SEQ ID NO: 233816 - RNA, 19 nt, Homo sapiens
  misc_RNA (1)...(19): siRNA sense strand
cagcauggcccucccuuug

SEQ ID NO: 233817 - RNA, 19 nt, Homo sapiens
  misc_RNA (1)...(19): siRNA sense strand
aaagaguucucaccaagca

SEQ ID NO: 233818 - RNA, 19 nt, Homo sapiens
  misc_RNA (1)...(19): siRNA sense strand
ucaauuaucugaggaacgu

SEQ ID NO: 233819 - RNA, 19 nt, Homo sapiens
  misc_RNA (1)...(19): siRNA sense strand
ggauacccuugacaaauac

SEQ ID NO: 233820 - RNA, 19 nt, Homo sapiens
  misc_RNA (1)...(19): siRNA sense strand
caggucaacugcuucaaca

SEQ ID NO: 233821 - RNA, 19 nt, Homo sapiens
  misc_RNA (1)...(19): siRNA sense strand
gucaacugcuucaacauca

SEQ ID NO: 233822 - RNA, 19 nt, Homo sapiens
  misc_RNA (1)...(19): siRNA sense strand
gcauggcccucccuuugag

SEQ ID NO: 233823 - RNA, 19 nt, Homo sapiens
  misc_RNA (1)...(19): siRNA sense strand
gcuucaacaucaauuaucu

SEQ ID NO: 233824 - RNA, 19 nt, Homo sapiens
  misc_RNA (1)...(19): siRNA sense strand
ggaccagagccauccagaa

SEQ ID NO: 233825 - RNA, 19 nt, Homo sapiens
  misc_RNA (1)...(19): siRNA sense strand
gagaaauuaaccuucauca

SEQ ID NO: 233826 - RNA, 19 nt, Homo sapiens
  misc_RNA (1)...(19): siRNA sense strand
ccuagagugugccaaacuu

SEQ ID NO: 233827 - RNA, 19 nt, Homo sapiens
  misc_RNA (1)...(19): siRNA sense strand
gaccagagccauccagaac

SEQ ID NO: 233828 - RNA, 19 nt, Homo sapiens
  misc_RNA (1)...(19): siRNA sense strand
gggaugaacaggucaacug

SEQ ID NO: 233829 - RNA, 19 nt, Homo sapiens
  misc_RNA (1)...(19): siRNA sense strand
gggaggauacccuugacaa

SEQ ID NO: 233830 - RNA, 19 nt, Homo sapiens
  misc_RNA (1)...(19): siRNA sense strand
ggucaacugcuucaacauc

SEQ ID NO: 233831 - RNA, 19 nt, Homo sapiens
  misc_RNA (1)...(19): siRNA sense strand
ggaacgccagcuccauuug

SEQ ID NO: 233832 - RNA, 19 nt, Homo sapiens
  misc_RNA (1)...(19): siRNA sense strand
gcugugaccugccauuucc

SEQ ID NO: 233833 - RNA, 19 nt, Homo sapiens
  misc_RNA (1)...(19): siRNA sense strand
cagagcagccuuggucuug

SEQ ID NO: 233834 - RNA, 19 nt, Homo sapiens
  misc_RNA (1)...(19): siRNA sense strand
gaacgccagcuccauuugg

SEQ ID NO: 233835 - RNA, 19 nt, Homo sapiens
  misc_RNA (1)...(19): siRNA sense strand
gcugcuaccugcccaacuc

SEQ ID NO: 233836 - RNA, 19 nt, Homo sapiens
  misc_RNA (1)...(19): siRNA sense strand
ggagaaauuaaccuucauc

SEQ ID NO: 233837 - RNA, 19 nt, Homo sapiens
  misc_RNA (1)...(19): siRNA sense strand
agaguucucaccaagcaua

SEQ ID NO: 233838 - RNA, 19 nt, Homo sapiens
  misc_RNA (1)...(19): siRNA sense strand
gaccugccauuuccagaac

SEQ ID NO: 233839 - RNA, 19 nt, Homo sapiens
  misc_RNA (1)...(19): siRNA sense strand
ugaggaacguggcucuagu

SEQ ID NO: 233840 - RNA, 19 nt, Homo sapiens
  misc_RNA (1)...(19): siRNA sense strand
gccagagcacuuucaagaa

SEQ ID NO: 233841 - RNA, 19 nt, Homo sapiens
  misc_RNA (1)...(19): siRNA sense strand
cuauuuggcuguugcuucu

SEQ ID NO: 233842 - RNA, 19 nt, Homo sapiens
  misc_RNA (1)...(19): siRNA sense strand
gcccaacucccugcugaaa

SEQ ID NO: 233843 - RNA, 19 nt, Homo sapiens
  misc_RNA (1)...(19): siRNA sense strand
acccugcccucugcuguua

SEQ ID NO: 233844 - RNA, 19 nt, Homo sapiens
  misc_RNA (1)...(19): siRNA sense strand
gagcagccuuggucuugac

SEQ ID NO: 233845 - RNA, 19 nt, Homo sapiens
  misc_RNA (1)...(19): siRNA sense strand
gucagcaugugguauaugg

SEQ ID NO: 233846 - RNA, 19 nt, Homo sapiens
  misc_RNA (1)...(19): siRNA sense strand
ucaacugcuucaacaucaa

SEQ ID NO: 233847 - RNA, 19 nt, Homo sapiens
  misc_RNA (1)...(19): siRNA sense strand
ggaaaccaaagaguucuca

SEQ ID NO: 233848 - RNA, 19 nt, Homo sapiens
  misc_RNA (1)...(19): siRNA sense strand
gggacaucuugaccauuga

SEQ ID NO: 233849 - RNA, 19 nt, Homo sapiens
  misc_RNA (1)...(19): siRNA sense strand
gaccgggaguaugcuguga

SEQ ID NO: 233850 - RNA, 19 nt, Homo sapiens
  misc_RNA (1)...(19): siRNA sense strand
gcugaggccagagcacuuu

SEQ ID NO: 233851 - RNA, 19 nt, Homo sapiens
  misc_RNA (1)...(19): siRNA sense strand
ccacacaaaccgccuagag

SEQ ID NO: 233852 - RNA, 19 nt, Homo sapiens
  misc_RNA (1)...(19): siRNA sense strand
caacugcuucaacaucaau

SEQ ID NO: 233853 - RNA, 19 nt, Homo sapiens
  misc_RNA (1)...(19): siRNA sense strand
gaggaacguggcucuagug

SEQ ID NO: 233854 - RNA, 19 nt, Homo sapiens
  misc_RNA (1)...(19): siRNA sense strand
augaacaggucaacugcuu

SEQ ID NO: 233855 - RNA, 19 nt, Homo sapiens
  misc_RNA (1)...(19): siRNA sense strand
gaaggaacgccagcuccau

SEQ ID NO: 233856 - RNA, 19 nt, Homo sapiens
  misc_RNA (1)...(19): siRNA sense strand
ccucugcuguuaccugagu

SEQ ID NO: 233857 - RNA, 19 nt, Homo sapiens
  misc_RNA (1)...(19): siRNA sense strand
ccagagccauccagaaccu

SEQ ID NO: 233858 - RNA, 19 nt, Homo sapiens
  misc_RNA (1)...(19): siRNA sense strand
ccucaugggccaccucugu

SEQ ID NO: 233859 - RNA, 19 nt, Homo sapiens
  misc_RNA (1)...(19): siRNA sense strand
caucuugaccauugacauc

SEQ ID NO: 233860 - RNA, 19 nt, Homo sapiens
  misc_RNA (1)...(19): siRNA sense strand
gggaguaugcugugaagac

SEQ ID NO: 233861 - RNA, 19 nt, Homo sapiens
  misc_RNA (1)...(19): siRNA sense strand
ugaccugccauuuccagaa

SEQ ID NO: 233862 - RNA, 19 nt, Homo sapiens
  misc_RNA (1)...(19): siRNA sense strand
ugaagacccaccaccacuu

SEQ ID NO: 233863 - RNA, 19 nt, Homo sapiens
  misc_RNA (1)...(19): siRNA sense strand
cagaggaggagaaauuaac

SEQ ID NO: 233864 - RNA, 19 nt, Homo sapiens
  misc_RNA (1)...(19): siRNA sense strand
ugcagaggaggagaaauua

SEQ ID NO: 233865 - RNA, 19 nt, Homo sapiens
  misc_RNA (1)...(19): siRNA sense strand
aaggaacgccagcuccauu

SEQ ID NO: 233866 - RNA, 19 nt, Homo sapiens
  misc_RNA (1)...(19): siRNA sense strand
uuccugggcugauccacaa

SEQ ID NO: 233867 - RNA, 19 nt, Homo sapiens
  misc_RNA (1)...(19): siRNA sense strand
ccaaaucugccuuccuaac

SEQ ID NO: 233868 - RNA, 19 nt, Homo sapiens
  misc_RNA (1)...(19): siRNA sense strand
gacaaucugaaccaaaucu

SEQ ID NO: 233869 - RNA, 19 nt, Homo sapiens
  misc_RNA (1)...(19): siRNA sense strand
agagcagccuuggucuuga

SEQ ID NO: 233870 - RNA, 19 nt, Homo sapiens
  misc_RNA (1)...(19): siRNA sense strand
accaaagaguucucaccaa

SEQ ID NO: 233871 - RNA, 19 nt, Homo sapiens
  misc_RNA (1)...(19): siRNA sense strand
ccaacucccugcugaaaag

SEQ ID NO: 233872 - RNA, 19 nt, Homo sapiens
  misc_RNA (1)...(19): siRNA sense strand
gaacguggcucuagugucu

SEQ ID NO: 233873 - RNA, 19 nt, Homo sapiens
  misc_RNA (1)...(19): siRNA sense strand
gaggagaaauuaaccuuca

SEQ ID NO: 233874 - RNA, 19 nt, Homo sapiens
  misc_RNA (1)...(19): siRNA sense strand
gaaccugaguccuggaaug

SEQ ID NO: 233875 - RNA, 19 nt, Homo sapiens
  misc_RNA (1)...(19): siRNA sense strand
aggauacccuugacaaaua

SEQ ID NO: 233876 - RNA, 19 nt, Homo sapiens
  misc_RNA (1)...(19): siRNA sense strand
aaccaaaucugccuuccua

SEQ ID NO: 233877 - RNA, 19 nt, Homo sapiens
  misc_RNA (1)...(19): siRNA sense strand
ccagagcacuuucaagaag

SEQ ID NO: 233878 - RNA, 19 nt, Homo sapiens
  misc_RNA (1)...(19): siRNA sense strand
cgggacaucuugaccauug

SEQ ID NO: 233879 - RNA, 19 nt, Homo sapiens
  misc_RNA (1)...(19): siRNA sense strand
gugcagaggaggagaaauu

SEQ ID NO: 233880 - RNA, 19 nt, Homo sapiens
  misc_RNA (1)...(19): siRNA sense strand
ucaccaagcauaaacauau

SEQ ID NO: 233881 - RNA, 19 nt, Homo sapiens
  misc_RNA (1)...(19): siRNA sense strand
gaacaggucaacugcuuca

SEQ ID NO: 233882 - RNA, 19 nt, Homo sapiens
  misc_RNA (1)...(19): siRNA sense strand
ggccagagcacuuucaaga

SEQ ID NO: 233883 - RNA, 19 nt, Homo sapiens
  misc_RNA (1)...(19): siRNA sense strand
gaagacccaccaccacuug

SEQ ID NO: 233884 - RNA, 19 nt, Homo sapiens
  misc_RNA (1)...(19): siRNA sense strand
ggaggauacccuugacaaa

SEQ ID NO: 233885 - RNA, 19 nt, Homo sapiens
  misc_RNA (1)...(19): siRNA sense strand
gcagaggaggagaaauuaa

SEQ ID NO: 233886 - RNA, 19 nt, Homo sapiens
  misc_RNA (1)...(19): siRNA sense strand
gggcugauccacaacauga

SEQ ID NO: 233887 - RNA, 19 nt, Homo sapiens
  misc_RNA (1)...(19): siRNA sense strand
gaggauacccuugacaaau

SEQ ID NO: 233888 - RNA, 19 nt, Homo sapiens
  misc_RNA (1)...(19): siRNA sense strand
caccaagcauaaacauauu

SEQ ID NO: 233889 - RNA, 19 nt, Homo sapiens
  misc_RNA (1)...(19): siRNA sense strand
cagcauggcccucccuuug

SEQ ID NO: 233890 - RNA, 19 nt, Homo sapiens
  misc_RNA (1)...(19): siRNA sense strand
aaagaguucucaccaagca

SEQ ID NO: 233891 - RNA, 19 nt, Homo sapiens
  misc_RNA (1)...(19): siRNA sense strand
ucaauuaucugaggaacgu

SEQ ID NO: 233892 - RNA, 19 nt, Homo sapiens
  misc_RNA (1)...(19): siRNA sense strand
ggauacccuugacaaauac

SEQ ID NO: 233893 - RNA, 19 nt, Homo sapiens
  misc_RNA (1)...(19): siRNA sense strand
caggucaacugcuucaaca

SEQ ID NO: 233894 - RNA, 19 nt, Homo sapiens
  misc_RNA (1)...(19): siRNA sense strand
gucaacugcuucaacauca

SEQ ID NO: 233895 - RNA, 19 nt, Homo sapiens
  misc_RNA (1)...(19): siRNA sense strand
gcauggcccucccuuugag

SEQ ID NO: 233896 - RNA, 19 nt, Homo sapiens
  misc_RNA (1)...(19): siRNA sense strand
gcuucaacaucaauuaucu

SEQ ID NO: 233897 - RNA, 19 nt, Homo sapiens
  misc_RNA (1)...(19): siRNA sense strand
ggaccagagccauccagaa

SEQ ID NO: 233898 - RNA, 19 nt, Homo sapiens
  misc_RNA (1)...(19): siRNA sense strand
gagaaauuaaccuucauca

SEQ ID NO: 233899 - RNA, 19 nt, Homo sapiens
  misc_RNA (1)...(19): siRNA sense strand
ccuagagugugccaaacuu

SEQ ID NO: 233900 - RNA, 19 nt, Homo sapiens
  misc_RNA (1)...(19): siRNA sense strand
gaccagagccauccagaac

SEQ ID NO: 233901 - RNA, 19 nt, Homo sapiens
  misc_RNA (1)...(19): siRNA sense strand
gggaugaacaggucaacug

SEQ ID NO: 233902 - RNA, 19 nt, Homo sapiens
  misc_RNA (1)...(19): siRNA sense strand
gggaggauacccuugacaa

SEQ ID NO: 233903 - RNA, 19 nt, Homo sapiens
  misc_RNA (1)...(19): siRNA sense strand
ggucaacugcuucaacauc

SEQ ID NO: 233904 - RNA, 19 nt, Homo sapiens
  misc_RNA (1)...(19): siRNA sense strand
ggaacgccagcuccauuug

SEQ ID NO: 233905 - RNA, 19 nt, Homo sapiens
  misc_RNA (1)...(19): siRNA sense strand
gcugugaccugccauuucc

SEQ ID NO: 233906 - RNA, 19 nt, Homo sapiens
  misc_RNA (1)...(19): siRNA sense strand
cagagcagccuuggucuug

SEQ ID NO: 233907 - RNA, 19 nt, Homo sapiens
  misc_RNA (1)...(19): siRNA sense strand
gaacgccagcuccauuugg

SEQ ID NO: 233908 - RNA, 19 nt, Homo sapiens
  misc_RNA (1)...(19): siRNA sense strand
gcugcuaccugcccaacuc

SEQ ID NO: 233909 - RNA, 19 nt, Homo sapiens
  misc_RNA (1)...(19): siRNA sense strand
ggagaaauuaaccuucauc

SEQ ID NO: 233910 - RNA, 19 nt, Homo sapiens
  misc_RNA (1)...(19): siRNA sense strand
agaguucucaccaagcaua

SEQ ID NO: 233911 - RNA, 19 nt, Homo sapiens
  misc_RNA (1)...(19): siRNA sense strand
gaccugccauuuccagaac

SEQ ID NO: 233912 - RNA, 19 nt, Homo sapiens
  misc_RNA (1)...(19): siRNA sense strand
ugaggaacguggcucuagu

SEQ ID NO: 233913 - RNA, 19 nt, Homo sapiens
  misc_RNA (1)...(19): siRNA sense strand
gccagagcacuuucaagaa

SEQ ID NO: 233914 - RNA, 19 nt, Homo sapiens
  misc_RNA (1)...(19): siRNA sense strand
cuauuuggcuguugcuucu

SEQ ID NO: 233915 - RNA, 19 nt, Homo sapiens
  misc_RNA (1)...(19): siRNA sense strand
gcccaacucccugcugaaa

SEQ ID NO: 233916 - RNA, 19 nt, Homo sapiens
  misc_RNA (1)...(19): siRNA sense strand
acccugcccucugcuguua

SEQ ID NO: 233917 - RNA, 19 nt, Homo sapiens
  misc_RNA (1)...(19): siRNA sense strand
gagcagccuuggucuugac

SEQ ID NO: 233918 - RNA, 19 nt, Homo sapiens
  misc_RNA (1)...(19): siRNA sense strand
gucagcaugugguauaugg

SEQ ID NO: 233919 - RNA, 19 nt, Homo sapiens
  misc_RNA (1)...(19): siRNA sense strand
ucaacugcuucaacaucaa

SEQ ID NO: 233920 - RNA, 19 nt, Homo sapiens
  misc_RNA (1)...(19): siRNA sense strand
ggaaaccaaagaguucuca

SEQ ID NO: 233921 - RNA, 19 nt, Homo sapiens
  misc_RNA (1)...(19): siRNA sense strand
gggacaucuugaccauuga

SEQ ID NO: 233922 - RNA, 19 nt, Homo sapiens
  misc_RNA (1)...(19): siRNA sense strand
gaccgggaguaugcuguga

SEQ ID NO: 233923 - RNA, 19 nt, Homo sapiens
  misc_RNA (1)...(19): siRNA sense strand
gcugaggccagagcacuuu

SEQ ID NO: 233924 - RNA, 19 nt, Homo sapiens
  misc_RNA (1)...(19): siRNA sense strand
ccacacaaaccgccuagag

SEQ ID NO: 233925 - RNA, 19 nt, Homo sapiens
  misc_RNA (1)...(19): siRNA sense strand
caacugcuucaacaucaau

SEQ ID NO: 233926 - RNA, 19 nt, Homo sapiens
  misc_RNA (1)...(19): siRNA sense strand
gaggaacguggcucuagug

SEQ ID NO: 233927 - RNA, 19 nt, Homo sapiens
  misc_RNA (1)...(19): siRNA sense strand
augaacaggucaacugcuu

SEQ ID NO: 233928 - RNA, 19 nt, Homo sapiens
  misc_RNA (1)...(19): siRNA sense strand
gaaggaacgccagcuccau

SEQ ID NO: 233929 - RNA, 19 nt, Homo sapiens
  misc_RNA (1)...(19): siRNA sense strand
ccucugcuguuaccugagu

SEQ ID NO: 233930 - RNA, 19 nt, Homo sapiens
  misc_RNA (1)...(19): siRNA sense strand
ccagagccauccagaaccu

SEQ ID NO: 233931 - RNA, 19 nt, Homo sapiens
  misc_RNA (1)...(19): siRNA sense strand
ccucaugggccaccucugu

SEQ ID NO: 233932 - RNA, 19 nt, Homo sapiens
  misc_RNA (1)...(19): siRNA sense strand
caucuugaccauugacauc

SEQ ID NO: 233933 - RNA, 19 nt, Homo sapiens
  misc_RNA (1)...(19): siRNA sense strand
gggaguaugcugugaagac

SEQ ID NO: 233934 - RNA, 19 nt, Homo sapiens
  misc_RNA (1)...(19): siRNA sense strand
ugaccugccauuuccagaa

SEQ ID NO: 233935 - RNA, 19 nt, Homo sapiens
  misc_RNA (1)...(19): siRNA sense strand
ugaagacccaccaccacuu

SEQ ID NO: 233936 - RNA, 19 nt, Homo sapiens
  misc_RNA (1)...(19): siRNA sense strand
cagaggaggagaaauuaac

SEQ ID NO: 233937 - RNA, 19 nt, Homo sapiens
  misc_RNA (1)...(19): siRNA sense strand
ugcagaggaggagaaauua

SEQ ID NO: 233938 - RNA, 19 nt, Homo sapiens
  misc_RNA (1)...(19): siRNA sense strand
aaggaacgccagcuccauu

SEQ ID NO: 233939 - RNA, 19 nt, Homo sapiens
  misc_RNA (1)...(19): siRNA sense strand
uuccugggcugauccacaa

SEQ ID NO: 233940 - RNA, 19 nt, Homo sapiens
  misc_RNA (1)...(19): siRNA sense strand
ccaaaucugccuuccuaac

SEQ ID NO: 233941 - RNA, 19 nt, Homo sapiens
  misc_RNA (1)...(19): siRNA sense strand
gacaaucugaaccaaaucu

SEQ ID NO: 233942 - RNA, 19 nt, Homo sapiens
  misc_RNA (1)...(19): siRNA sense strand
agagcagccuuggucuuga

SEQ ID NO: 233943 - RNA, 19 nt, Homo sapiens
  misc_RNA (1)...(19): siRNA sense strand
accaaagaguucucaccaa

SEQ ID NO: 233944 - RNA, 19 nt, Homo sapiens
  misc_RNA (1)...(19): siRNA sense strand
ccaacucccugcugaaaag

SEQ ID NO: 233945 - RNA, 19 nt, Homo sapiens
  misc_RNA (1)...(19): siRNA sense strand
ccagauagcucaaauguca

SEQ ID NO: 233946 - RNA, 19 nt, Homo sapiens
  misc_RNA (1)...(19): siRNA sense strand
gcuaagagguacaauguga

SEQ ID NO: 233947 - RNA, 19 nt, Homo sapiens
  misc_RNA (1)...(19): siRNA sense strand
gcucaaaugucacuuuaug

SEQ ID NO: 233948 - RNA, 19 nt, Homo sapiens
  misc_RNA (1)...(19): siRNA sense strand
gagcagaacuccaauucca

SEQ ID NO: 233949 - RNA, 19 nt, Homo sapiens
  misc_RNA (1)...(19): siRNA sense strand
ggaauuacauggcaucaac

SEQ ID NO: 233950 - RNA, 19 nt, Homo sapiens
  misc_RNA (1)...(19): siRNA sense strand
uagcucaaaugucacuuua

SEQ ID NO: 233951 - RNA, 19 nt, Homo sapiens
  misc_RNA (1)...(19): siRNA sense strand
guucagauaauuccaguua

SEQ ID NO: 233952 - RNA, 19 nt, Homo sapiens
  misc_RNA (1)...(19): siRNA sense strand
ccacaucauugaaggcuuu

SEQ ID NO: 233953 - RNA, 19 nt, Homo sapiens
  misc_RNA (1)...(19): siRNA sense strand
gaacuuggcaguaaggaau

SEQ ID NO: 233954 - RNA, 19 nt, Homo sapiens
  misc_RNA (1)...(19): siRNA sense strand
gaacuccaauuccaccaau

SEQ ID NO: 233955 - RNA, 19 nt, Homo sapiens
  misc_RNA (1)...(19): siRNA sense strand
ggacagcacaugugguaaa

SEQ ID NO: 233956 - RNA, 19 nt, Homo sapiens
  misc_RNA (1)...(19): siRNA sense strand
gaagcacucucuccaacau

SEQ ID NO: 233957 - RNA, 19 nt, Homo sapiens
  misc_RNA (1)...(19): siRNA sense strand
ccaaugcagcucaguauuu

SEQ ID NO: 233958 - RNA, 19 nt, Homo sapiens
  misc_RNA (1)...(19): siRNA sense strand
caauacagcuccaccuaca

SEQ ID NO: 233959 - RNA, 19 nt, Homo sapiens
  misc_RNA (1)...(19): siRNA sense strand
uagaggagguguacgaguu

SEQ ID NO: 233960 - RNA, 19 nt, Homo sapiens
  misc_RNA (1)...(19): siRNA sense strand
gcaggcacauggugguuug

SEQ ID NO: 233961 - RNA, 19 nt, Homo sapiens
  misc_RNA (1)...(19): siRNA sense strand
caagaucaauguccucaag

SEQ ID NO: 233962 - RNA, 19 nt, Homo sapiens
  misc_RNA (1)...(19): siRNA sense strand
caaggcaucuccaguagca

SEQ ID NO: 233963 - RNA, 19 nt, Homo sapiens
  misc_RNA (1)...(19): siRNA sense strand
uaucaagccgccucaguua

SEQ ID NO: 233964 - RNA, 19 nt, Homo sapiens
  misc_RNA (1)...(19): siRNA sense strand
uggcuaaugugaaugcuaa

SEQ ID NO: 233965 - RNA, 19 nt, Homo sapiens
  misc_RNA (1)...(19): siRNA sense strand
caaugcagcucaguauuuc

SEQ ID NO: 233966 - RNA, 19 nt, Homo sapiens
  misc_RNA (1)...(19): siRNA sense strand
gaggagguguacgaguuua

SEQ ID NO: 233967 - RNA, 19 nt, Homo sapiens
  misc_RNA (1)...(19): siRNA sense strand
caacaucuccugggccuuu

SEQ ID NO: 233968 - RNA, 19 nt, Homo sapiens
  misc_RNA (1)...(19): siRNA sense strand
caacaggccucagcucaag

SEQ ID NO: 233969 - RNA, 19 nt, Homo sapiens
  misc_RNA (1)...(19): siRNA sense strand
cgacaggcuugacugagaa

SEQ ID NO: 233970 - RNA, 19 nt, Homo sapiens
  misc_RNA (1)...(19): siRNA sense strand
gcagaaagcccaaaaguca

SEQ ID NO: 233971 - RNA, 19 nt, Homo sapiens
  misc_RNA (1)...(19): siRNA sense strand
ucaaggaccucagaugcaa

SEQ ID NO: 233972 - RNA, 19 nt, Homo sapiens
  misc_RNA (1)...(19): siRNA sense strand
gcgcccagccagacacuua

SEQ ID NO: 233973 - RNA, 19 nt, Homo sapiens
  misc_RNA (1)...(19): siRNA sense strand
uccaagcagugaacuagua

SEQ ID NO: 233974 - RNA, 19 nt, Homo sapiens
  misc_RNA (1)...(19): siRNA sense strand
ccauaucccugugcaaguu

SEQ ID NO: 233975 - RNA, 19 nt, Homo sapiens
  misc_RNA (1)...(19): siRNA sense strand
gaaggcgaaucuccugaag

SEQ ID NO: 233976 - RNA, 19 nt, Homo sapiens
  misc_RNA (1)...(19): siRNA sense strand
ccaagagauugcagaggaa

SEQ ID NO: 233977 - RNA, 19 nt, Homo sapiens
  misc_RNA (1)...(19): siRNA sense strand
gcgcuaagagguacaaugu

SEQ ID NO: 233978 - RNA, 19 nt, Homo sapiens
  misc_RNA (1)...(19): siRNA sense strand
caagaaggcagaagcagau

SEQ ID NO: 233979 - RNA, 19 nt, Homo sapiens
  misc_RNA (1)...(19): siRNA sense strand
ggaguggccagcagaaugu

SEQ ID NO: 233980 - RNA, 19 nt, Homo sapiens
  misc_RNA (1)...(19): siRNA sense strand
aggcgaaucuccugaagug

SEQ ID NO: 233981 - RNA, 19 nt, Homo sapiens
  misc_RNA (1)...(19): siRNA sense strand
ccgacaggcuugacugaga

SEQ ID NO: 233982 - RNA, 19 nt, Homo sapiens
  misc_RNA (1)...(19): siRNA sense strand
acaaaugggugacucaaaa

SEQ ID NO: 233983 - RNA, 19 nt, Homo sapiens
  misc_RNA (1)...(19): siRNA sense strand
ccucuagccucccaacuca

SEQ ID NO: 233984 - RNA, 19 nt, Homo sapiens
  misc_RNA (1)...(19): siRNA sense strand
gccaaggcaucuccaguag

SEQ ID NO: 233985 - RNA, 19 nt, Homo sapiens
  misc_RNA (1)...(19): siRNA sense strand
gcuaccaccuugacccaau

SEQ ID NO: 233986 - RNA, 19 nt, Homo sapiens
  misc_RNA (1)...(19): siRNA sense strand
gcuaaugugaaugcuaaua

SEQ ID NO: 233987 - RNA, 19 nt, Homo sapiens
  misc_RNA (1)...(19): siRNA sense strand
ccacaaaccagucccucaa

SEQ ID NO: 233988 - RNA, 19 nt, Homo sapiens
  misc_RNA (1)...(19): siRNA sense strand
augcaaggcuccacucaga

SEQ ID NO: 233989 - RNA, 19 nt, Homo sapiens
  misc_RNA (1)...(19): siRNA sense strand
ccaaggcugccaagagauu

SEQ ID NO: 233990 - RNA, 19 nt, Homo sapiens
  misc_RNA (1)...(19): siRNA sense strand
cuccaaggcugccaagaga

SEQ ID NO: 233991 - RNA, 19 nt, Homo sapiens
  misc_RNA (1)...(19): siRNA sense strand
guuuauugcuucucuccaa

SEQ ID NO: 233992 - RNA, 19 nt, Homo sapiens
  misc_RNA (1)...(19): siRNA sense strand
aguaagagcugggcaugga

SEQ ID NO: 233993 - RNA, 19 nt, Homo sapiens
  misc_RNA (1)...(19): siRNA sense strand
aagagguucugcuccauga

SEQ ID NO: 233994 - RNA, 19 nt, Homo sapiens
  misc_RNA (1)...(19): siRNA sense strand
cugcugaguuagauaagaa

SEQ ID NO: 233995 - RNA, 19 nt, Homo sapiens
  misc_RNA (1)...(19): siRNA sense strand
gacaaaugggugacucaaa

SEQ ID NO: 233996 - RNA, 19 nt, Homo sapiens
  misc_RNA (1)...(19): siRNA sense strand
cagcagcagcucaguaaug

SEQ ID NO: 233997 - RNA, 19 nt, Homo sapiens
  misc_RNA (1)...(19): siRNA sense strand
ggagguguacgaguuuauu

SEQ ID NO: 233998 - RNA, 19 nt, Homo sapiens
  misc_RNA (1)...(19): siRNA sense strand
ccgcagcuccucugacauu

SEQ ID NO: 233999 - RNA, 19 nt, Homo sapiens
  misc_RNA (1)...(19): siRNA sense strand
ggucccugcugccuucuau

SEQ ID NO: 234000 - RNA, 19 nt, Homo sapiens
  misc_RNA (1)...(19): siRNA sense strand
agaaacagguggugaucca

SEQ ID NO: 234001 - RNA, 19 nt, Homo sapiens
  misc_RNA (1)...(19): siRNA sense strand
gacccaaucugugcuacug

SEQ ID NO: 234002 - RNA, 19 nt, Homo sapiens
  misc_RNA (1)...(19): siRNA sense strand
gcaaggcuccacucagaag

SEQ ID NO: 234003 - RNA, 19 nt, Homo sapiens
  misc_RNA (1)...(19): siRNA sense strand
ugagugccaugaacaucaa

SEQ ID NO: 234004 - RNA, 19 nt, Homo sapiens
  misc_RNA (1)...(19): siRNA sense strand
gcgagcagaacuccaauuc

SEQ ID NO: 234005 - RNA, 19 nt, Homo sapiens
  misc_RNA (1)...(19): siRNA sense strand
gaaagugcagcagccaaga

SEQ ID NO: 234006 - RNA, 19 nt, Homo sapiens
  misc_RNA (1)...(19): siRNA sense strand
gaugaagcacucucuccaa

SEQ ID NO: 234007 - RNA, 19 nt, Homo sapiens
  misc_RNA (1)...(19): siRNA sense strand
gggaguggccagcagaaug

SEQ ID NO: 234008 - RNA, 19 nt, Homo sapiens
  misc_RNA (1)...(19): siRNA sense strand
ccugggccuuuaucaguaa

SEQ ID NO: 234009 - RNA, 19 nt, Homo sapiens
  misc_RNA (1)...(19): siRNA sense strand
gaaucaguggcuaauguga

SEQ ID NO: 234010 - RNA, 19 nt, Homo sapiens
  misc_RNA (1)...(19): siRNA sense strand
caaaagucauggacgagaa

SEQ ID NO: 234011 - RNA, 19 nt, Homo sapiens
  misc_RNA (1)...(19): siRNA sense strand
agagauugcagaggaauuu

SEQ ID NO: 234012 - RNA, 19 nt, Homo sapiens
  misc_RNA (1)...(19): siRNA sense strand
gauucucacccacaucauu

SEQ ID NO: 234013 - RNA, 19 nt, Homo sapiens
  misc_RNA (1)...(19): siRNA sense strand
agacugagagcgagcagaa

SEQ ID NO: 234014 - RNA, 19 nt, Homo sapiens
  misc_RNA (1)...(19): siRNA sense strand
cucaagaucugugccaaga

SEQ ID NO: 234015 - RNA, 19 nt, Homo sapiens
  misc_RNA (1)...(19): siRNA sense strand
gacagcacaugugguaaag

SEQ ID NO: 234016 - RNA, 19 nt, Homo sapiens
  misc_RNA (1)...(19): siRNA sense strand
caauucccauccaauccaa

SEQ ID NO: 234017 - RNA, 19 nt, Homo sapiens
  misc_RNA (1)...(19): siRNA sense strand
cccaaacccuggucguuca

SEQ ID NO: 234018 - RNA, 19 nt, Homo sapiens
  misc_RNA (1)...(19): siRNA sense strand
cuacacagcagcagacuac

SEQ ID NO: 234019 - RNA, 19 nt, Homo sapiens
  misc_RNA (1)...(19): siRNA sense strand
uccaugaccugcgcuaaga

SEQ ID NO: 234020 - RNA, 19 nt, Homo sapiens
  misc_RNA (1)...(19): siRNA sense strand
cggugguuguucucaguua

SEQ ID NO: 234021 - RNA, 19 nt, Homo sapiens
  misc_RNA (1)...(19): siRNA sense strand
ccacagcugggaaaccuau

SEQ ID NO: 234022 - RNA, 19 nt, Homo sapiens
  misc_RNA (1)...(19): siRNA sense strand
gcccugcccucaagaucug

SEQ ID NO: 234023 - RNA, 19 nt, Homo sapiens
  misc_RNA (1)...(19): siRNA sense strand
gagguguacgaguuuauug

SEQ ID NO: 234024 - RNA, 19 nt, Homo sapiens
  misc_RNA (1)...(19): siRNA sense strand
gcaguuucguggcucuaag

SEQ ID NO: 234025 - RNA, 19 nt, Homo sapiens
  misc_RNA (1)...(19): siRNA sense strand
ccagacagaggcagaaagu

SEQ ID NO: 234026 - RNA, 19 nt, Homo sapiens
  misc_RNA (1)...(19): siRNA sense strand
gccugcagcccaaacagua

SEQ ID NO: 234027 - RNA, 19 nt, Homo sapiens
  misc_RNA (1)...(19): siRNA sense strand
gcccaaugcagcucaguau

SEQ ID NO: 234028 - RNA, 19 nt, Homo sapiens
  misc_RNA (1)...(19): siRNA sense strand
gcagaaacagguggugauc

SEQ ID NO: 234029 - RNA, 19 nt, Homo sapiens
  misc_RNA (1)...(19): siRNA sense strand
aaccagucccucaaccuua

SEQ ID NO: 234030 - RNA, 19 nt, Homo sapiens
  misc_RNA (1)...(19): siRNA sense strand
gcccaucugcugaguuaga

SEQ ID NO: 234031 - RNA, 19 nt, Homo sapiens
  misc_RNA (1)...(19): siRNA sense strand
ggugccaucugcucagucu

SEQ ID NO: 234032 - RNA, 19 nt, Homo sapiens
  misc_RNA (1)...(19): siRNA sense strand
guacgaguuuauugcuucu

SEQ ID NO: 234033 - RNA, 19 nt, Homo sapiens
  misc_RNA (1)...(19): siRNA sense strand
caucauugaaggcuuuguu

SEQ ID NO: 234034 - RNA, 19 nt, Homo sapiens
  misc_RNA (1)...(19): siRNA sense strand
cagauucucacccacauca

SEQ ID NO: 234035 - RNA, 19 nt, Homo sapiens
  misc_RNA (1)...(19): siRNA sense strand
gagcuguagccaucaguuc

SEQ ID NO: 234036 - RNA, 19 nt, Homo sapiens
  misc_RNA (1)...(19): siRNA sense strand
ucaagaagccaacuaugcu

SEQ ID NO: 234037 - RNA, 19 nt, Homo sapiens
  misc_RNA (1)...(19): siRNA sense strand
aaaccagucccucaaccuu

SEQ ID NO: 234038 - RNA, 19 nt, Homo sapiens
  misc_RNA (1)...(19): siRNA sense strand
cauugaaggcuuuguuauc

SEQ ID NO: 234039 - RNA, 19 nt, Homo sapiens
  misc_RNA (1)...(19): siRNA sense strand
cagcuacacaccuccaguu

SEQ ID NO: 234040 - RNA, 19 nt, Homo sapiens
  misc_RNA (1)...(19): siRNA sense strand
cuaucaagccgccucaguu

SEQ ID NO: 234041 - RNA, 19 nt, Homo sapiens
  misc_RNA (1)...(19): siRNA sense strand
caucuuaugagugccauga

SEQ ID NO: 234042 - RNA, 19 nt, Homo sapiens
  misc_RNA (1)...(19): siRNA sense strand
cagaggaauuucgcucaca

SEQ ID NO: 234043 - RNA, 19 nt, Homo sapiens
  misc_RNA (1)...(19): siRNA sense strand
uccugggccuuuaucagua

SEQ ID NO: 234044 - RNA, 19 nt, Homo sapiens
  misc_RNA (1)...(19): siRNA sense strand
caaaugucacuuuaugaac

SEQ ID NO: 234045 - RNA, 19 nt, Homo sapiens
  misc_RNA (1)...(19): siRNA sense strand
gcaacaagaccgugaccua

SEQ ID NO: 234046 - RNA, 19 nt, Homo sapiens
  misc_RNA (1)...(19): siRNA sense strand
ucagauggcuacagagaau

SEQ ID NO: 234047 - RNA, 19 nt, Homo sapiens
  misc_RNA (1)...(19): siRNA sense strand
acaaucagauggcuacaga

SEQ ID NO: 234048 - RNA, 19 nt, Homo sapiens
  misc_RNA (1)...(19): siRNA sense strand
caacaucauuagccucaug

SEQ ID NO: 234049 - RNA, 19 nt, Homo sapiens
  misc_RNA (1)...(19): siRNA sense strand
uaaaccaacugccugacaa

SEQ ID NO: 234050 - RNA, 19 nt, Homo sapiens
  misc_RNA (1)...(19): siRNA sense strand
acucagagcccgugucuuu

SEQ ID NO: 234051 - RNA, 19 nt, Homo sapiens
  misc_RNA (1)...(19): siRNA sense strand
gcggcgaccucuacucaga

SEQ ID NO: 234052 - RNA, 19 nt, Homo sapiens
  misc_RNA (1)...(19): siRNA sense strand
gcgaccaccucaccacuca

SEQ ID NO: 234053 - RNA, 19 nt, Homo sapiens
  misc_RNA (1)...(19): siRNA sense strand
caagacaccgcuccacgaa

SEQ ID NO: 234054 - RNA, 19 nt, Homo sapiens
  misc_RNA (1)...(19): siRNA sense strand
acaagaccgugaccuacuu

SEQ ID NO: 234055 - RNA, 19 nt, Homo sapiens
  misc_RNA (1)...(19): siRNA sense strand
acucacauccgcacucaua

SEQ ID NO: 234056 - RNA, 19 nt, Homo sapiens
  misc_RNA (1)...(19): siRNA sense strand
gaccaucaaggcauucaaa

SEQ ID NO: 234057 - RNA, 19 nt, Homo sapiens
  misc_RNA (1)...(19): siRNA sense strand
caaccggccuagcaagaca

SEQ ID NO: 234058 - RNA, 19 nt, Homo sapiens
  misc_RNA (1)...(19): siRNA sense strand
ucaaggcauucaaagacaa

SEQ ID NO: 234059 - RNA, 19 nt, Homo sapiens
  misc_RNA (1)...(19): siRNA sense strand
ccaacugccugacaaucug

SEQ ID NO: 234060 - RNA, 19 nt, Homo sapiens
  misc_RNA (1)...(19): siRNA sense strand
caagauccaccucaagcaa

SEQ ID NO: 234061 - RNA, 19 nt, Homo sapiens
  misc_RNA (1)...(19): siRNA sense strand
guaauggacaucggucuga

SEQ ID NO: 234062 - RNA, 19 nt, Homo sapiens
  misc_RNA (1)...(19): siRNA sense strand
ccagcgcgcucaaccucuu

SEQ ID NO: 234063 - RNA, 19 nt, Homo sapiens
  misc_RNA (1)...(19): siRNA sense strand
ccacucacauccgcacuca

SEQ ID NO: 234064 - RNA, 19 nt, Homo sapiens
  misc_RNA (1)...(19): siRNA sense strand
caacugcggcgaccucuac

SEQ ID NO: 234065 - RNA, 19 nt, Homo sapiens
  misc_RNA (1)...(19): siRNA sense strand
gcacucauacgggcgagaa

SEQ ID NO: 234066 - RNA, 19 nt, Homo sapiens
  misc_RNA (1)...(19): siRNA sense strand
gguaguccauuacaaucag

SEQ ID NO: 234067 - RNA, 19 nt, Homo sapiens
  misc_RNA (1)...(19): siRNA sense strand
caucaaggcauucaaagac

SEQ ID NO: 234068 - RNA, 19 nt, Homo sapiens
  misc_RNA (1)...(19): siRNA sense strand
ugacguggaggccauguau

SEQ ID NO: 234069 - RNA, 19 nt, Homo sapiens
  misc_RNA (1)...(19): siRNA sense strand
gcaagcgccacgccaagau

SEQ ID NO: 234070 - RNA, 19 nt, Homo sapiens
  misc_RNA (1)...(19): siRNA sense strand
uggagaccaucaaggcauu

SEQ ID NO: 234071 - RNA, 19 nt, Homo sapiens
  misc_RNA (1)...(19): siRNA sense strand
caugauuccugacuacaac

SEQ ID NO: 234072 - RNA, 19 nt, Homo sapiens
  misc_RNA (1)...(19): siRNA sense strand
guaguccauuacaaucaga

SEQ ID NO: 234073 - RNA, 19 nt, Homo sapiens
  misc_RNA (1)...(19): siRNA sense strand
ugccaggacaacaucauua

SEQ ID NO: 234074 - RNA, 19 nt, Homo sapiens
  misc_RNA (1)...(19): siRNA sense strand
aaucagauggcuacagaga

SEQ ID NO: 234075 - RNA, 19 nt, Homo sapiens
  misc_RNA (1)...(19): siRNA sense strand
ccaucaaggcauucaaaga

SEQ ID NO: 234076 - RNA, 19 nt, Homo sapiens
  misc_RNA (1)...(19): siRNA sense strand
ccaacccggaacucucuua

SEQ ID NO: 234077 - RNA, 19 nt, Homo sapiens
  misc_RNA (1)...(19): siRNA sense strand
ugggaaaguucgccuucga

SEQ ID NO: 234078 - RNA, 19 nt, Homo sapiens
  misc_RNA (1)...(19): siRNA sense strand
gcccuuugccugcgaguuc

SEQ ID NO: 234079 - RNA, 19 nt, Homo sapiens
  misc_RNA (1)...(19): siRNA sense strand
gccaggacaacaucauuag

SEQ ID NO: 234080 - RNA, 19 nt, Homo sapiens
  misc_RNA (1)...(19): siRNA sense strand
ccaugauuccugacuacaa

SEQ ID NO: 234081 - RNA, 19 nt, Homo sapiens
  misc_RNA (1)...(19): siRNA sense strand
ucaaagacaagcagaucca

SEQ ID NO: 234082 - RNA, 19 nt, Homo sapiens
  misc_RNA (1)...(19): siRNA sense strand
gaaaucacaucucuacuuu

SEQ ID NO: 234083 - RNA, 19 nt, Homo sapiens
  misc_RNA (1)...(19): siRNA sense strand
gaaggaagcucccauuaau

SEQ ID NO: 234084 - RNA, 19 nt, Homo sapiens
  misc_RNA (1)...(19): siRNA sense strand
gaaaggcgaugugaucuug

SEQ ID NO: 234085 - RNA, 19 nt, Homo sapiens
  misc_RNA (1)...(19): siRNA sense strand
ggacuggucuguaaacuca

SEQ ID NO: 234086 - RNA, 19 nt, Homo sapiens
  misc_RNA (1)...(19): siRNA sense strand
caugacaacugcaucuaua

SEQ ID NO: 234087 - RNA, 19 nt, Homo sapiens
  misc_RNA (1)...(19): siRNA sense strand
gaugugaagugcucuaaug

SEQ ID NO: 234088 - RNA, 19 nt, Homo sapiens
  misc_RNA (1)...(19): siRNA sense strand
ggaggugguuuguguuuga

SEQ ID NO: 234089 - RNA, 19 nt, Homo sapiens
  misc_RNA (1)...(19): siRNA sense strand
ucacacagauggaaacgaa

SEQ ID NO: 234090 - RNA, 19 nt, Homo sapiens
  misc_RNA (1)...(19): siRNA sense strand
uggcacaacucgaaacuuu

SEQ ID NO: 234091 - RNA, 19 nt, Homo sapiens
  misc_RNA (1)...(19): siRNA sense strand
ggacggaaccgacaucaau

SEQ ID NO: 234092 - RNA, 19 nt, Homo sapiens
  misc_RNA (1)...(19): siRNA sense strand
guacaaaucgaauaagcua

SEQ ID NO: 234093 - RNA, 19 nt, Homo sapiens
  misc_RNA (1)...(19): siRNA sense strand
aaacggagauuccagaaca

SEQ ID NO: 234094 - RNA, 19 nt, Homo sapiens
  misc_RNA (1)...(19): siRNA sense strand
cgaauaagcuaugcaguuc

SEQ ID NO: 234095 - RNA, 19 nt, Homo sapiens
  misc_RNA (1)...(19): siRNA sense strand
gaccagcucuucugaacga

SEQ ID NO: 234096 - RNA, 19 nt, Homo sapiens
  misc_RNA (1)...(19): siRNA sense strand
gcagaagaaggcuauguaa

SEQ ID NO: 234097 - RNA, 19 nt, Homo sapiens
  misc_RNA (1)...(19): siRNA sense strand
aaagaacagugaaagcaaa

SEQ ID NO: 234098 - RNA, 19 nt, Homo sapiens
  misc_RNA (1)...(19): siRNA sense strand
gcccaaagaucaaguggau

SEQ ID NO: 234099 - RNA, 19 nt, Homo sapiens
  misc_RNA (1)...(19): siRNA sense strand
guaagcaagucguaagugu

SEQ ID NO: 234100 - RNA, 19 nt, Homo sapiens
  misc_RNA (1)...(19): siRNA sense strand
ccacaacgaugacgugaag

SEQ ID NO: 234101 - RNA, 19 nt, Homo sapiens
  misc_RNA (1)...(19): siRNA sense strand
ggucauuccagcuucauua

SEQ ID NO: 234102 - RNA, 19 nt, Homo sapiens
  misc_RNA (1)...(19): siRNA sense strand
ggagauuccagaacaguuu

SEQ ID NO: 234103 - RNA, 19 nt, Homo sapiens
  misc_RNA (1)...(19): siRNA sense strand
cgacaucaaugccgucugu

SEQ ID NO: 234104 - RNA, 19 nt, Homo sapiens
  misc_RNA (1)...(19): siRNA sense strand
caccuggacuggucuguaa

SEQ ID NO: 234105 - RNA, 19 nt, Homo sapiens
  misc_RNA (1)...(19): siRNA sense strand
caaggagccuguauucagu

SEQ ID NO: 234106 - RNA, 19 nt, Homo sapiens
  misc_RNA (1)...(19): siRNA sense strand
gaagcucccauuaauaaga

SEQ ID NO: 234107 - RNA, 19 nt, Homo sapiens
  misc_RNA (1)...(19): siRNA sense strand
gcagucaccuguauugcau

SEQ ID NO: 234108 - RNA, 19 nt, Homo sapiens
  misc_RNA (1)...(19): siRNA sense strand
gaagaaggcuauguaaaau

SEQ ID NO: 234109 - RNA, 19 nt, Homo sapiens
  misc_RNA (1)...(19): siRNA sense strand
gaagugcucuaaugaagcu

SEQ ID NO: 234110 - RNA, 19 nt, Homo sapiens
  misc_RNA (1)...(19): siRNA sense strand
gggauucugugacauugaa

SEQ ID NO: 234111 - RNA, 19 nt, Homo sapiens
  misc_RNA (1)...(19): siRNA sense strand
ggucgagacugccguaaca

SEQ ID NO: 234112 - RNA, 19 nt, Homo sapiens
  misc_RNA (1)...(19): siRNA sense strand
caaugucgauuuccucugu

SEQ ID NO: 234113 - RNA, 19 nt, Homo sapiens
  misc_RNA (1)...(19): siRNA sense strand
gaaagacacaagcaucaug

SEQ ID NO: 234114 - RNA, 19 nt, Homo sapiens
  misc_RNA (1)...(19): siRNA sense strand
gaagacagccaccucaucu

SEQ ID NO: 234115 - RNA, 19 nt, Homo sapiens
  misc_RNA (1)...(19): siRNA sense strand
gacaccaacaucauaguua

SEQ ID NO: 234116 - RNA, 19 nt, Homo sapiens
  misc_RNA (1)...(19): siRNA sense strand
gauagcaacaggacaaguu

SEQ ID NO: 234117 - RNA, 19 nt, Homo sapiens
  misc_RNA (1)...(19): siRNA sense strand
gcagccaugucaccaaugu

SEQ ID NO: 234118 - RNA, 19 nt, Homo sapiens
  misc_RNA (1)...(19): siRNA sense strand
ugacaacugcaucuauaua

SEQ ID NO: 234119 - RNA, 19 nt, Homo sapiens
  misc_RNA (1)...(19): siRNA sense strand
cauaguuacuuguggagaa

SEQ ID NO: 234120 - RNA, 19 nt, Homo sapiens
  misc_RNA (1)...(19): siRNA sense strand
gccauaggcucacaugaca

SEQ ID NO: 234121 - RNA, 19 nt, Homo sapiens
  misc_RNA (1)...(19): siRNA sense strand
gugaagugcucuaaugaag

SEQ ID NO: 234122 - RNA, 19 nt, Homo sapiens
  misc_RNA (1)...(19): siRNA sense strand
aggaagcucccauuaauaa

SEQ ID NO: 234123 - RNA, 19 nt, Homo sapiens
  misc_RNA (1)...(19): siRNA sense strand
ccaaagaucaaguggauuc

SEQ ID NO: 234124 - RNA, 19 nt, Homo sapiens
  misc_RNA (1)...(19): siRNA sense strand
agaagaaacuccugucaac

SEQ ID NO: 234125 - RNA, 19 nt, Homo sapiens
  misc_RNA (1)...(19): siRNA sense strand
gagaagaaacuccugucaa

SEQ ID NO: 234126 - RNA, 19 nt, Homo sapiens
  misc_RNA (1)...(19): siRNA sense strand
gaaacuacaagagacauug

SEQ ID NO: 234127 - RNA, 19 nt, Homo sapiens
  misc_RNA (1)...(19): siRNA sense strand
agaaggaagcucccauuaa

SEQ ID NO: 234128 - RNA, 19 nt, Homo sapiens
  misc_RNA (1)...(19): siRNA sense strand
gcauuacgcuggccacaac

SEQ ID NO: 234129 - RNA, 19 nt, Homo sapiens
  misc_RNA (1)...(19): siRNA sense strand
cauccguggugguguuaua

SEQ ID NO: 234130 - RNA, 19 nt, Homo sapiens
  misc_RNA (1)...(19): siRNA sense strand
ccaaaguuguccucugugu

SEQ ID NO: 234131 - RNA, 19 nt, Homo sapiens
  misc_RNA (1)...(19): siRNA sense strand
ggacaccaacaucauaguu

SEQ ID NO: 234132 - RNA, 19 nt, Homo sapiens
  misc_RNA (1)...(19): siRNA sense strand
guaacaaccuguacuugcu

SEQ ID NO: 234133 - RNA, 19 nt, Homo sapiens
  misc_RNA (1)...(19): siRNA sense strand
gcacuguguuaccaaagau

SEQ ID NO: 234134 - RNA, 19 nt, Homo sapiens
  misc_RNA (1)...(19): siRNA sense strand
caucugggauucugugaca

SEQ ID NO: 234135 - RNA, 19 nt, Homo sapiens
  misc_RNA (1)...(19): siRNA sense strand
gacaacugcaucuauauau

SEQ ID NO: 234136 - RNA, 19 nt, Homo sapiens
  misc_RNA (1)...(19): siRNA sense strand
uagaaggaagcucccauua

SEQ ID NO: 234137 - RNA, 19 nt, Homo sapiens
  misc_RNA (1)...(19): siRNA sense strand
guacaugcccaaagaucaa

SEQ ID NO: 234138 - RNA, 19 nt, Homo sapiens
  misc_RNA (1)...(19): siRNA sense strand
aagugcaccucuucucaua

SEQ ID NO: 234139 - RNA, 19 nt, Homo sapiens
  misc_RNA (1)...(19): siRNA sense strand
gggaauuucuuagccauag

SEQ ID NO: 234140 - RNA, 19 nt, Homo sapiens
  misc_RNA (1)...(19): siRNA sense strand
aaaguuguccucuguguga

SEQ ID NO: 234141 - RNA, 19 nt, Homo sapiens
  misc_RNA (1)...(19): siRNA sense strand
ggcaagugcucgggucauu

SEQ ID NO: 234142 - RNA, 19 nt, Homo sapiens
  misc_RNA (1)...(19): siRNA sense strand
uguauucagugcagaagaa

SEQ ID NO: 234143 - RNA, 19 nt, Homo sapiens
  misc_RNA (1)...(19): siRNA sense strand
caaagugcaccucuucuca

SEQ ID NO: 234144 - RNA, 19 nt, Homo sapiens
  misc_RNA (1)...(19): siRNA sense strand
gcauuucuccacuuuguau

SEQ ID NO: 234145 - RNA, 19 nt, Homo sapiens
  misc_RNA (1)...(19): siRNA sense strand
caccauuacuggagauuca

SEQ ID NO: 234146 - RNA, 19 nt, Homo sapiens
  misc_RNA (1)...(19): siRNA sense strand
uaagaagcaaggauuauuc

SEQ ID NO: 234147 - RNA, 19 nt, Homo sapiens
  misc_RNA (1)...(19): siRNA sense strand
cagaagaaggcuauguaaa

SEQ ID NO: 234148 - RNA, 19 nt, Homo sapiens
  misc_RNA (1)...(19): siRNA sense strand
gggaaagacacaagcauca

SEQ ID NO: 234149 - RNA, 19 nt, Homo sapiens
  misc_RNA (1)...(19): siRNA sense strand
gggcacagcagccauguca

SEQ ID NO: 234150 - RNA, 19 nt, Homo sapiens
  misc_RNA (1)...(19): siRNA sense strand
cuauauauauggcguuagu

SEQ ID NO: 234151 - RNA, 19 nt, Homo sapiens
  misc_RNA (1)...(19): siRNA sense strand
ggaaaggcgaugugaucuu

SEQ ID NO: 234152 - RNA, 19 nt, Homo sapiens
  misc_RNA (1)...(19): siRNA sense strand
gaccaugugcucucuguau

SEQ ID NO: 234153 - RNA, 19 nt, Homo sapiens
  misc_RNA (1)...(19): siRNA sense strand
agaaaucacaucucuacuu

SEQ ID NO: 234154 - RNA, 19 nt, Homo sapiens
  misc_RNA (1)...(19): siRNA sense strand
gaagaaacuccugucaaca

SEQ ID NO: 234155 - RNA, 19 nt, Homo sapiens
  misc_RNA (1)...(19): siRNA sense strand
ggaaacuacaagagacauu

SEQ ID NO: 234156 - RNA, 19 nt, Homo sapiens
  misc_RNA (1)...(19): siRNA sense strand
cacaguuccucgugucaaa

SEQ ID NO: 234157 - RNA, 19 nt, Homo sapiens
  misc_RNA (1)...(19): siRNA sense strand
ggacuggcagaaagaagaa

SEQ ID NO: 234158 - RNA, 19 nt, Homo sapiens
  misc_RNA (1)...(19): siRNA sense strand
cagcagccaugucaccaau

SEQ ID NO: 234159 - RNA, 19 nt, Homo sapiens
  misc_RNA (1)...(19): siRNA sense strand
ccaaggagccuguauucag

SEQ ID NO: 234160 - RNA, 19 nt, Homo sapiens
  misc_RNA (1)...(19): siRNA sense strand
gucaacaggcgacgacuuu

SEQ ID NO: 234161 - RNA, 19 nt, Homo sapiens
  misc_RNA (1)...(19): siRNA sense strand
gcgaugugaucuugauugg

SEQ ID NO: 234162 - RNA, 19 nt, Homo sapiens
  misc_RNA (1)...(19): siRNA sense strand
ggcacuguguuaccaaaga

SEQ ID NO: 234163 - RNA, 19 nt, Homo sapiens
  misc_RNA (1)...(19): siRNA sense strand
guaugggacuggcagaaag

SEQ ID NO: 234164 - RNA, 19 nt, Homo sapiens
  misc_RNA (1)...(19): siRNA sense strand
ugaauacucuccacgucau

SEQ ID NO: 234165 - RNA, 19 nt, Homo sapiens
  misc_RNA (1)...(19): siRNA sense strand
ggaaagaccgaaagcucau

SEQ ID NO: 234166 - RNA, 19 nt, Homo sapiens
  misc_RNA (1)...(19): siRNA sense strand
aagcucccauuaauaagaa

SEQ ID NO: 234167 - RNA, 19 nt, Homo sapiens
  misc_RNA (1)...(19): siRNA sense strand
ggucaccguucacacagau

SEQ ID NO: 234168 - RNA, 19 nt, Homo sapiens
  misc_RNA (1)...(19): siRNA sense strand
gagcaacugcagaggcauu

SEQ ID NO: 234169 - RNA, 19 nt, Homo sapiens
  misc_RNA (1)...(19): siRNA sense strand
gauaccuacuggcucucua

SEQ ID NO: 234170 - RNA, 19 nt, Homo sapiens
  misc_RNA (1)...(19): siRNA sense strand
uggcauuucuccacuuugu

SEQ ID NO: 234171 - RNA, 19 nt, Homo sapiens
  misc_RNA (1)...(19): siRNA sense strand
aaucacaucucuacuuuug

SEQ ID NO: 234172 - RNA, 19 nt, Homo sapiens
  misc_RNA (1)...(19): siRNA sense strand
ccaacaucauaguuacuug

SEQ ID NO: 234173 - RNA, 19 nt, Homo sapiens
  misc_RNA (1)...(19): siRNA sense strand
ccacgucauuggaauaggu

SEQ ID NO: 234174 - RNA, 19 nt, Homo sapiens
  misc_RNA (1)...(19): siRNA sense strand
guagaacuuccaaccaaga

SEQ ID NO: 234175 - RNA, 19 nt, Homo sapiens
  misc_RNA (1)...(19): siRNA sense strand
gaucuugauuggcacaacu

SEQ ID NO: 234176 - RNA, 19 nt, Homo sapiens
  misc_RNA (1)...(19): siRNA sense strand
gaaagaccgaaagcucauu

SEQ ID NO: 234177 - RNA, 19 nt, Homo sapiens
  misc_RNA (1)...(19): siRNA sense strand
ucgaauaagcuaugcaguu

SEQ ID NO: 234178 - RNA, 19 nt, Homo sapiens
  misc_RNA (1)...(19): siRNA sense strand
cuucguggacgcccuguua

SEQ ID NO: 234179 - RNA, 19 nt, Homo sapiens
  misc_RNA (1)...(19): siRNA sense strand
gcaaagugcaccucuucuc

SEQ ID NO: 234180 - RNA, 19 nt, Homo sapiens
  misc_RNA (1)...(19): siRNA sense strand
agaagaaggcuauguaaaa

SEQ ID NO: 234181 - RNA, 19 nt, Homo sapiens
  misc_RNA (1)...(19): siRNA sense strand
acuuugggauuccauguuu

SEQ ID NO: 234182 - RNA, 19 nt, Homo sapiens
  misc_RNA (1)...(19): siRNA sense strand
ggaacaaccuggagaaaua

SEQ ID NO: 234183 - RNA, 19 nt, Homo sapiens
  misc_RNA (1)...(19): siRNA sense strand
gaugggaaauccuacguaa

SEQ ID NO: 234184 - RNA, 19 nt, Homo sapiens
  misc_RNA (1)...(19): siRNA sense strand
gacagaggcugaugggaaa

SEQ ID NO: 234185 - RNA, 19 nt, Homo sapiens
  misc_RNA (1)...(19): siRNA sense strand
ggaaauccuacguaaagua

SEQ ID NO: 234186 - RNA, 19 nt, Homo sapiens
  misc_RNA (1)...(19): siRNA sense strand
aaauauagccgcagcuuga

SEQ ID NO: 234187 - RNA, 19 nt, Homo sapiens
  misc_RNA (1)...(19): siRNA sense strand
aaauugagcuccgcaccua

SEQ ID NO: 234188 - RNA, 19 nt, Homo sapiens
  misc_RNA (1)...(19): siRNA sense strand
gaacaaccuggagaaauau

SEQ ID NO: 234189 - RNA, 19 nt, Homo sapiens
  misc_RNA (1)...(19): siRNA sense strand
gaaauccuacguaaaguac

SEQ ID NO: 234190 - RNA, 19 nt, Homo sapiens
  misc_RNA (1)...(19): siRNA sense strand
ccacacacuucuucaaggu

SEQ ID NO: 234191 - RNA, 19 nt, Homo sapiens
  misc_RNA (1)...(19): siRNA sense strand
ggcagcaggugggcaaauu

SEQ ID NO: 234192 - RNA, 19 nt, Homo sapiens
  misc_RNA (1)...(19): siRNA sense strand
ccaacgcaccuguggauga

SEQ ID NO: 234193 - RNA, 19 nt, Homo sapiens
  misc_RNA (1)...(19): siRNA sense strand
cgggcgaguuggccaagua

SEQ ID NO: 234194 - RNA, 19 nt, Homo sapiens
  misc_RNA (1)...(19): siRNA sense strand
caacgcaccuguggaugag

SEQ ID NO: 234195 - RNA, 19 nt, Homo sapiens
  misc_RNA (1)...(19): siRNA sense strand
ucaagagccgcgagucgua

SEQ ID NO: 234196 - RNA, 19 nt, Homo sapiens
  misc_RNA (1)...(19): siRNA sense strand
agucguacgugcugugcua

SEQ ID NO: 234197 - RNA, 19 nt, Homo sapiens
  misc_RNA (1)...(19): siRNA sense strand
gggaaauccuacguaaagu

SEQ ID NO: 234198 - RNA, 19 nt, Homo sapiens
  misc_RNA (1)...(19): siRNA sense strand
gcagcaggugggcaaauug

SEQ ID NO: 234199 - RNA, 19 nt, Homo sapiens
  misc_RNA (1)...(19): siRNA sense strand
ugggaaauccuacguaaag

SEQ ID NO: 234200 - RNA, 19 nt, Homo sapiens
  misc_RNA (1)...(19): siRNA sense strand
cagcaggugggcaaauuga

SEQ ID NO: 234201 - RNA, 19 nt, Homo sapiens
  misc_RNA (1)...(19): siRNA sense strand
gcacagggccacucuuccu

SEQ ID NO: 234202 - RNA, 19 nt, Homo sapiens
  misc_RNA (1)...(19): siRNA sense strand
gcuccgcaccuacgugaug

SEQ ID NO: 234203 - RNA, 19 nt, Homo sapiens
  misc_RNA (1)...(19): siRNA sense strand
gcccaacgcaccuguggau

SEQ ID NO: 234204 - RNA, 19 nt, Homo sapiens
  misc_RNA (1)...(19): siRNA sense strand
ccauggacgacacguucua

SEQ ID NO: 234205 - RNA, 19 nt, Homo sapiens
  misc_RNA (1)...(19): siRNA sense strand
aagccaagaugaagaauaa

SEQ ID NO: 234206 - RNA, 19 nt, Homo sapiens
  misc_RNA (1)...(19): siRNA sense strand
gaagguauucugccugaga

SEQ ID NO: 234207 - RNA, 19 nt, Homo sapiens
  misc_RNA (1)...(19): siRNA sense strand
ugaagagacuccagaaagg

SEQ ID NO: 234208 - RNA, 19 nt, Homo sapiens
  misc_RNA (1)...(19): siRNA sense strand
gaaacaagaagaagagaac

SEQ ID NO: 234209 - RNA, 19 nt, Homo sapiens
  misc_RNA (1)...(19): siRNA sense strand
ccaaagccaagaugaagaa

SEQ ID NO: 234210 - RNA, 19 nt, Homo sapiens
  misc_RNA (1)...(19): siRNA sense strand
caaagcuaaaggccaaaua

SEQ ID NO: 234211 - RNA, 19 nt, Homo sapiens
  misc_RNA (1)...(19): siRNA sense strand
gcuccgacuuccucaugaa

SEQ ID NO: 234212 - RNA, 19 nt, Homo sapiens
  misc_RNA (1)...(19): siRNA sense strand
caaauacccaagccuagga

SEQ ID NO: 234213 - RNA, 19 nt, Homo sapiens
  misc_RNA (1)...(19): siRNA sense strand
gcaggagaaagaagguauu

SEQ ID NO: 234214 - RNA, 19 nt, Homo sapiens
  misc_RNA (1)...(19): siRNA sense strand
gugcaggaccagacaagaa

SEQ ID NO: 234215 - RNA, 19 nt, Homo sapiens
  misc_RNA (1)...(19): siRNA sense strand
gcaggacacgcaggagaaa

SEQ ID NO: 234216 - RNA, 19 nt, Homo sapiens
  misc_RNA (1)...(19): siRNA sense strand
gcugaagaggcaaagcuaa

SEQ ID NO: 234217 - RNA, 19 nt, Homo sapiens
  misc_RNA (1)...(19): siRNA sense strand
ggacacgcaggagaaagaa

SEQ ID NO: 234218 - RNA, 19 nt, Homo sapiens
  misc_RNA (1)...(19): siRNA sense strand
gaagaggcaaagcuaaagg

SEQ ID NO: 234219 - RNA, 19 nt, Homo sapiens
  misc_RNA (1)...(19): siRNA sense strand
aaagccaagaugaagaaua

SEQ ID NO: 234220 - RNA, 19 nt, Homo sapiens
  misc_RNA (1)...(19): siRNA sense strand
ccagaaacaagaagaagag

SEQ ID NO: 234221 - RNA, 19 nt, Homo sapiens
  misc_RNA (1)...(19): siRNA sense strand
cugaagaggcaaagcuaaa

SEQ ID NO: 234222 - RNA, 19 nt, Homo sapiens
  misc_RNA (1)...(19): siRNA sense strand
caugaagagacuccagaaa

SEQ ID NO: 234223 - RNA, 19 nt, Homo sapiens
  misc_RNA (1)...(19): siRNA sense strand
gcaaagcuaaaggccaaau

SEQ ID NO: 234224 - RNA, 19 nt, Homo sapiens
  misc_RNA (1)...(19): siRNA sense strand
ggccaaagccaagaugaag

SEQ ID NO: 234225 - RNA, 19 nt, Homo sapiens
  misc_RNA (1)...(19): siRNA sense strand
gccaaagccaagaugaaga

SEQ ID NO: 234226 - RNA, 19 nt, Homo sapiens
  misc_RNA (1)...(19): siRNA sense strand
agaaacaagaagaagagaa

SEQ ID NO: 234227 - RNA, 19 nt, Homo sapiens
  misc_RNA (1)...(19): siRNA sense strand
ccaagaugaagaauaagca

SEQ ID NO: 234228 - RNA, 19 nt, Homo sapiens
  misc_RNA (1)...(19): siRNA sense strand
uacccaagccuaggacaaa

SEQ ID NO: 234229 - RNA, 19 nt, Homo sapiens
  misc_RNA (1)...(19): siRNA sense strand
aauaagcagcugccaagug

SEQ ID NO: 234230 - RNA, 19 nt, Homo sapiens
  misc_RNA (1)...(19): siRNA sense strand
gcucgucaccagcaagcuu

SEQ ID NO: 234231 - RNA, 19 nt, Homo sapiens
  misc_RNA (1)...(19): siRNA sense strand
gcgauaagcuccagcauua

SEQ ID NO: 234232 - RNA, 19 nt, Homo sapiens
  misc_RNA (1)...(19): siRNA sense strand
gaaacgggcuuauagcaaa

SEQ ID NO: 234233 - RNA, 19 nt, Homo sapiens
  misc_RNA (1)...(19): siRNA sense strand
ggaugaagaucuacauuga

SEQ ID NO: 234234 - RNA, 19 nt, Homo sapiens
  misc_RNA (1)...(19): siRNA sense strand
gaacagcauucauucuaug

SEQ ID NO: 234235 - RNA, 19 nt, Homo sapiens
  misc_RNA (1)...(19): siRNA sense strand
gagagacccuauugggaua

SEQ ID NO: 234236 - RNA, 19 nt, Homo sapiens
  misc_RNA (1)...(19): siRNA sense strand
gagcacaucucuggugauu

SEQ ID NO: 234237 - RNA, 19 nt, Homo sapiens
  misc_RNA (1)...(19): siRNA sense strand
gcacgucucugucaacauc

SEQ ID NO: 234238 - RNA, 19 nt, Homo sapiens
  misc_RNA (1)...(19): siRNA sense strand
ucacagaguucauggagaa

SEQ ID NO: 234239 - RNA, 19 nt, Homo sapiens
  misc_RNA (1)...(19): siRNA sense strand
cagaagaccuccugagaau

SEQ ID NO: 234240 - RNA, 19 nt, Homo sapiens
  misc_RNA (1)...(19): siRNA sense strand
gcacaucucuggugauugc

SEQ ID NO: 234241 - RNA, 19 nt, Homo sapiens
  misc_RNA (1)...(19): siRNA sense strand
gggaauggauggugccuau

SEQ ID NO: 234242 - RNA, 19 nt, Homo sapiens
  misc_RNA (1)...(19): siRNA sense strand
gaagaccuccugagaauag

SEQ ID NO: 234243 - RNA, 19 nt, Homo sapiens
  misc_RNA (1)...(19): siRNA sense strand
ccaaggagauugauguauc

SEQ ID NO: 234244 - RNA, 19 nt, Homo sapiens
  misc_RNA (1)...(19): siRNA sense strand
gggaugaugugaccuacaa

SEQ ID NO: 234245 - RNA, 19 nt, Homo sapiens
  misc_RNA (1)...(19): siRNA sense strand
gcagcagccucccuaaugu

SEQ ID NO: 234246 - RNA, 19 nt, Homo sapiens
  misc_RNA (1)...(19): siRNA sense strand
gaaggcugaugaagguaaa

SEQ ID NO: 234247 - RNA, 19 nt, Homo sapiens
  misc_RNA (1)...(19): siRNA sense strand
ugaaguaccuggcugagau

SEQ ID NO: 234248 - RNA, 19 nt, Homo sapiens
  misc_RNA (1)...(19): siRNA sense strand
uggcugagaugaauuaugu

SEQ ID NO: 234249 - RNA, 19 nt, Homo sapiens
  misc_RNA (1)...(19): siRNA sense strand
gaauggauggugccuauug

SEQ ID NO: 234250 - RNA, 19 nt, Homo sapiens
  misc_RNA (1)...(19): siRNA sense strand
gcaggaaacgggcuuauag

SEQ ID NO: 234251 - RNA, 19 nt, Homo sapiens
  misc_RNA (1)...(19): siRNA sense strand
caacuuguauuacuaugag

SEQ ID NO: 234252 - RNA, 19 nt, Homo sapiens
  misc_RNA (1)...(19): siRNA sense strand
caaguucaguggcaagaug

SEQ ID NO: 234253 - RNA, 19 nt, Homo sapiens
  misc_RNA (1)...(19): siRNA sense strand
gcaccugucggaccgguua

SEQ ID NO: 234254 - RNA, 19 nt, Homo sapiens
  misc_RNA (1)...(19): siRNA sense strand
gaagcagcgucgggacuuu

SEQ ID NO: 234255 - RNA, 19 nt, Homo sapiens
  misc_RNA (1)...(19): siRNA sense strand
ggaaacgggcuuauagcaa

SEQ ID NO: 234256 - RNA, 19 nt, Homo sapiens
  misc_RNA (1)...(19): siRNA sense strand
ggcccuggauuaucuacua

SEQ ID NO: 234257 - RNA, 19 nt, Homo sapiens
  misc_RNA (1)...(19): siRNA sense strand
guaccuggcugagaugaau

SEQ ID NO: 234258 - RNA, 19 nt, Homo sapiens
  misc_RNA (1)...(19): siRNA sense strand
ggaaggcugaugaagguaa

SEQ ID NO: 234259 - RNA, 19 nt, Homo sapiens
  misc_RNA (1)...(19): siRNA sense strand
gagauccgguacuaugaga

SEQ ID NO: 234260 - RNA, 19 nt, Homo sapiens
  misc_RNA (1)...(19): siRNA sense strand
caacaucaccacaaaccaa

SEQ ID NO: 234261 - RNA, 19 nt, Homo sapiens
  misc_RNA (1)...(19): siRNA sense strand
ugacgacaauguggaguuu

SEQ ID NO: 234262 - RNA, 19 nt, Homo sapiens
  misc_RNA (1)...(19): siRNA sense strand
gcagaggcgucucccaucu

SEQ ID NO: 234263 - RNA, 19 nt, Homo sapiens
  misc_RNA (1)...(19): siRNA sense strand
acaguaaccuggugugcaa

SEQ ID NO: 234264 - RNA, 19 nt, Homo sapiens
  misc_RNA (1)...(19): siRNA sense strand
gaagguaaacacagaaguc

SEQ ID NO: 234265 - RNA, 19 nt, Homo sapiens
  misc_RNA (1)...(19): siRNA sense strand
agaagaagauccugaacag

SEQ ID NO: 234266 - RNA, 19 nt, Homo sapiens
  misc_RNA (1)...(19): siRNA sense strand
ggaagaucccugugagaug

SEQ ID NO: 234267 - RNA, 19 nt, Homo sapiens
  misc_RNA (1)...(19): siRNA sense strand
gaaguggacgugcccauca

SEQ ID NO: 234268 - RNA, 19 nt, Homo sapiens
  misc_RNA (1)...(19): siRNA sense strand
ugaugaagguaaacacaga

SEQ ID NO: 234269 - RNA, 19 nt, Homo sapiens
  misc_RNA (1)...(19): siRNA sense strand
ggacuuugacccuccagaa

SEQ ID NO: 234270 - RNA, 19 nt, Homo sapiens
  misc_RNA (1)...(19): siRNA sense strand
ccaucaaacucuacugcaa

SEQ ID NO: 234271 - RNA, 19 nt, Homo sapiens
  misc_RNA (1)...(19): siRNA sense strand
ggccaucucuaucgucugu

SEQ ID NO: 234272 - RNA, 19 nt, Homo sapiens
  misc_RNA (1)...(19): siRNA sense strand
gauaagcuccagcauuaca

SEQ ID NO: 234273 - RNA, 19 nt, Homo sapiens
  misc_RNA (1)...(19): siRNA sense strand
gggaugaagaucuacauug

SEQ ID NO: 234274 - RNA, 19 nt, Homo sapiens
  misc_RNA (1)...(19): siRNA sense strand
gcuaugagccugagaacag

SEQ ID NO: 234275 - RNA, 19 nt, Homo sapiens
  misc_RNA (1)...(19): siRNA sense strand
cgaccauccuaacaucauu

SEQ ID NO: 234276 - RNA, 19 nt, Homo sapiens
  misc_RNA (1)...(19): siRNA sense strand
acuaugagauccgguacua

SEQ ID NO: 234277 - RNA, 19 nt, Homo sapiens
  misc_RNA (1)...(19): siRNA sense strand
ggaacauucuggucaacag

SEQ ID NO: 234278 - RNA, 19 nt, Homo sapiens
  misc_RNA (1)...(19): siRNA sense strand
ggccuggcaugguauaugu

SEQ ID NO: 234279 - RNA, 19 nt, Homo sapiens
  misc_RNA (1)...(19): siRNA sense strand
agaaggaacacaaugaguu

SEQ ID NO: 234280 - RNA, 19 nt, Homo sapiens
  misc_RNA (1)...(19): siRNA sense strand
ucaacacccuagauaagau

SEQ ID NO: 234281 - RNA, 19 nt, Homo sapiens
  misc_RNA (1)...(19): siRNA sense strand
ggauauguccaaccaagau

SEQ ID NO: 234282 - RNA, 19 nt, Homo sapiens
  misc_RNA (1)...(19): siRNA sense strand
ugugggaagucaugucauu

SEQ ID NO: 234283 - RNA, 19 nt, Homo sapiens
  misc_RNA (1)...(19): siRNA sense strand
gaccaacacagcaaggauu

SEQ ID NO: 234284 - RNA, 19 nt, Homo sapiens
  misc_RNA (1)...(19): siRNA sense strand
gaucaucacagaguucaug

SEQ ID NO: 234285 - RNA, 19 nt, Homo sapiens
  misc_RNA (1)...(19): siRNA sense strand
ugagaugaauuaugugcau

SEQ ID NO: 234286 - RNA, 19 nt, Homo sapiens
  misc_RNA (1)...(19): siRNA sense strand
acacagaagucaggagcuu

SEQ ID NO: 234287 - RNA, 19 nt, Homo sapiens
  misc_RNA (1)...(19): siRNA sense strand
gagcccaaccagaacaauu

SEQ ID NO: 234288 - RNA, 19 nt, Homo sapiens
  misc_RNA (1)...(19): siRNA sense strand
gggaagucaugucauuugg

SEQ ID NO: 234289 - RNA, 19 nt, Homo sapiens
  misc_RNA (1)...(19): siRNA sense strand
gcaauguuaucuccaucgu

SEQ ID NO: 234290 - RNA, 19 nt, Homo sapiens
  misc_RNA (1)...(19): siRNA sense strand
ugauccagcuuguggguau

SEQ ID NO: 234291 - RNA, 19 nt, Homo sapiens
  misc_RNA (1)...(19): siRNA sense strand
uaugagauccgguacuaug

SEQ ID NO: 234292 - RNA, 19 nt, Homo sapiens
  misc_RNA (1)...(19): siRNA sense strand
cuaggaacauucuggucaa

SEQ ID NO: 234293 - RNA, 19 nt, Homo sapiens
  misc_RNA (1)...(19): siRNA sense strand
ugacugacgaugauuacaa

SEQ ID NO: 234294 - RNA, 19 nt, Homo sapiens
  misc_RNA (1)...(19): siRNA sense strand
gaagauccugaacagcauu

SEQ ID NO: 234295 - RNA, 19 nt, Homo sapiens
  misc_RNA (1)...(19): siRNA sense strand
gucaguggcuacgaugaaa

SEQ ID NO: 234296 - RNA, 19 nt, Homo sapiens
  misc_RNA (1)...(19): siRNA sense strand
guucgaccauccuaacauc

SEQ ID NO: 234297 - RNA, 19 nt, Homo sapiens
  misc_RNA (1)...(19): siRNA sense strand
gacugacgaugauuacaag

SEQ ID NO: 234298 - RNA, 19 nt, Homo sapiens
  misc_RNA (1)...(19): siRNA sense strand
ccuacaacaucaucugcaa

SEQ ID NO: 234299 - RNA, 19 nt, Homo sapiens
  misc_RNA (1)...(19): siRNA sense strand
ggaguuugccaaggagauu

SEQ ID NO: 234300 - RNA, 19 nt, Homo sapiens
  misc_RNA (1)...(19): siRNA sense strand
ggacgugcccaucaaacuc

SEQ ID NO: 234301 - RNA, 19 nt, Homo sapiens
  misc_RNA (1)...(19): siRNA sense strand
caugucauuuggagagaga

SEQ ID NO: 234302 - RNA, 19 nt, Homo sapiens
  misc_RNA (1)...(19): siRNA sense strand
gugcaagguguccgacuuu

SEQ ID NO: 234303 - RNA, 19 nt, Homo sapiens
  misc_RNA (1)...(19): siRNA sense strand
gaagcuguccgggaguuug

SEQ ID NO: 234304 - RNA, 19 nt, Homo sapiens
  misc_RNA (1)...(19): siRNA sense strand
uaucgucuguagcaggaaa

SEQ ID NO: 234305 - RNA, 19 nt, Homo sapiens
  misc_RNA (1)...(19): siRNA sense strand
gagaaggaacacaaugagu

SEQ ID NO: 234306 - RNA, 19 nt, Homo sapiens
  misc_RNA (1)...(19): siRNA sense strand
agaagucaguggcuacgau

SEQ ID NO: 234307 - RNA, 19 nt, Homo sapiens
  misc_RNA (1)...(19): siRNA sense strand
caccauugcugcagaugag

SEQ ID NO: 234308 - RNA, 19 nt, Homo sapiens
  misc_RNA (1)...(19): siRNA sense strand
ucaagacuguggcaaccau

SEQ ID NO: 234309 - RNA, 19 nt, Homo sapiens
  misc_RNA (1)...(19): siRNA sense strand
ggaagucaugucauuugga

SEQ ID NO: 234310 - RNA, 19 nt, Homo sapiens
  misc_RNA (1)...(19): siRNA sense strand
ccagcgacguuuggagcua

SEQ ID NO: 234311 - RNA, 19 nt, Homo sapiens
  misc_RNA (1)...(19): siRNA sense strand
acauucuggucaacaguaa

SEQ ID NO: 234312 - RNA, 19 nt, Homo sapiens
  misc_RNA (1)...(19): siRNA sense strand
gaacauucuggucaacagu

SEQ ID NO: 234313 - RNA, 19 nt, Homo sapiens
  misc_RNA (1)...(19): siRNA sense strand
gaaguaccuggcugagaug

SEQ ID NO: 234314 - RNA, 19 nt, Homo sapiens
  misc_RNA (1)...(19): siRNA sense strand
agaccuucaacuuguauua

SEQ ID NO: 234315 - RNA, 19 nt, Homo sapiens
  misc_RNA (1)...(19): siRNA sense strand
caacacagcaaggauugau

SEQ ID NO: 234316 - RNA, 19 nt, Homo sapiens
  misc_RNA (1)...(19): siRNA sense strand
gauggaagaaacguuaaug

SEQ ID NO: 234317 - RNA, 19 nt, Homo sapiens
  misc_RNA (1)...(19): siRNA sense strand
ccucaaaguagacaccauu

SEQ ID NO: 234318 - RNA, 19 nt, Homo sapiens
  misc_RNA (1)...(19): siRNA sense strand
cagaagaagauccugaaca

SEQ ID NO: 234319 - RNA, 19 nt, Homo sapiens
  misc_RNA (1)...(19): siRNA sense strand
cagaguucauggagaaugg

SEQ ID NO: 234320 - RNA, 19 nt, Homo sapiens
  misc_RNA (1)...(19): siRNA sense strand
gagucggccugucaugauc

SEQ ID NO: 234321 - RNA, 19 nt, Homo sapiens
  misc_RNA (1)...(19): siRNA sense strand
caaaguagacaccauugcu

SEQ ID NO: 234322 - RNA, 19 nt, Homo sapiens
  misc_RNA (1)...(19): siRNA sense strand
gaugaagguaaacacagaa

SEQ ID NO: 234323 - RNA, 19 nt, Homo sapiens
  misc_RNA (1)...(19): siRNA sense strand
cccgcuaccuccaggauga

SEQ ID NO: 234324 - RNA, 19 nt, Homo sapiens
  misc_RNA (1)...(19): siRNA sense strand
uggaagaaacguuaaugga

SEQ ID NO: 234325 - RNA, 19 nt, Homo sapiens
  misc_RNA (1)...(19): siRNA sense strand
gucgggacuuucugaguga

SEQ ID NO: 234326 - RNA, 19 nt, Homo sapiens
  misc_RNA (1)...(19): siRNA sense strand
gcagcccaauggcaucauc

SEQ ID NO: 234327 - RNA, 19 nt, Homo sapiens
  misc_RNA (1)...(19): siRNA sense strand
cagcacgucucugucaaca

SEQ ID NO: 234328 - RNA, 19 nt, Homo sapiens
  misc_RNA (1)...(19): siRNA sense strand
uuaucuccaucgucaauga

SEQ ID NO: 234329 - RNA, 19 nt, Homo sapiens
  misc_RNA (1)...(19): siRNA sense strand
ccuucaacuuguauuacua

SEQ ID NO: 234330 - RNA, 19 nt, Homo sapiens
  misc_RNA (1)...(19): siRNA sense strand
aggagaccuucaacuugua

SEQ ID NO: 234331 - RNA, 19 nt, Homo sapiens
  misc_RNA (1)...(19): siRNA sense strand
ccaucaagcucuacuguaa

SEQ ID NO: 234332 - RNA, 19 nt, Homo sapiens
  misc_RNA (1)...(19): siRNA sense strand
acuaugagcugcaguacua

SEQ ID NO: 234333 - RNA, 19 nt, Homo sapiens
  misc_RNA (1)...(19): siRNA sense strand
guacaacgccacagccaua

SEQ ID NO: 234334 - RNA, 19 nt, Homo sapiens
  misc_RNA (1)...(19): siRNA sense strand
gagcgaagccuccaucaug

SEQ ID NO: 234335 - RNA, 19 nt, Homo sapiens
  misc_RNA (1)...(19): siRNA sense strand
caaccaggauguaaucaau

SEQ ID NO: 234336 - RNA, 19 nt, Homo sapiens
  misc_RNA (1)...(19): siRNA sense strand
gcaugaagaucuacaucga

SEQ ID NO: 234337 - RNA, 19 nt, Homo sapiens
  misc_RNA (1)...(19): siRNA sense strand
cggacaagcugcaacacua

SEQ ID NO: 234338 - RNA, 19 nt, Homo sapiens
  misc_RNA (1)...(19): siRNA sense strand
gaagguggauaccauugca

SEQ ID NO: 234339 - RNA, 19 nt, Homo sapiens
  misc_RNA (1)...(19): siRNA sense strand
ggccuggucuuccucauug

SEQ ID NO: 234340 - RNA, 19 nt, Homo sapiens
  misc_RNA (1)...(19): siRNA sense strand
ugaaguaccuggcagacau

SEQ ID NO: 234341 - RNA, 19 nt, Homo sapiens
  misc_RNA (1)...(19): siRNA sense strand
gagcugcaguacuaugaga

SEQ ID NO: 234342 - RNA, 19 nt, Homo sapiens
  misc_RNA (1)...(19): siRNA sense strand
caggagaaguugccacuca

SEQ ID NO: 234343 - RNA, 19 nt, Homo sapiens
  misc_RNA (1)...(19): siRNA sense strand
agacaagcauccaggagaa

SEQ ID NO: 234344 - RNA, 19 nt, Homo sapiens
  misc_RNA (1)...(19): siRNA sense strand
ucaccgaguucauggagaa

SEQ ID NO: 234345 - RNA, 19 nt, Homo sapiens
  misc_RNA (1)...(19): siRNA sense strand
caucgcagcuggcaugaag

SEQ ID NO: 234346 - RNA, 19 nt, Homo sapiens
  misc_RNA (1)...(19): siRNA sense strand
gaugggcaguucacaguca

SEQ ID NO: 234347 - RNA, 19 nt, Homo sapiens
  misc_RNA (1)...(19): siRNA sense strand
ccaaggaaauugacaucuc

SEQ ID NO: 234348 - RNA, 19 nt, Homo sapiens
  misc_RNA (1)...(19): siRNA sense strand
ucaacacgcuagacaagau

SEQ ID NO: 234349 - RNA, 19 nt, Homo sapiens
  misc_RNA (1)...(19): siRNA sense strand
ggacaugaccaaccaggau

SEQ ID NO: 234350 - RNA, 19 nt, Homo sapiens
  misc_RNA (1)...(19): siRNA sense strand
ccuucaaccucuauuacua

SEQ ID NO: 234351 - RNA, 19 nt, Homo sapiens
  misc_RNA (1)...(19): siRNA sense strand
gaucaucaccgaguucaug

SEQ ID NO: 234352 - RNA, 19 nt, Homo sapiens
  misc_RNA (1)...(19): siRNA sense strand
gaaguugccacucaucauc

SEQ ID NO: 234353 - RNA, 19 nt, Homo sapiens
  misc_RNA (1)...(19): siRNA sense strand
ugaccgagccacgcauuua

SEQ ID NO: 234354 - RNA, 19 nt, Homo sapiens
  misc_RNA (1)...(19): siRNA sense strand
gggcgcagaugaaccagau

SEQ ID NO: 234355 - RNA, 19 nt, Homo sapiens
  misc_RNA (1)...(19): siRNA sense strand
aaggagagcuucgccaaug

SEQ ID NO: 234356 - RNA, 19 nt, Homo sapiens
  misc_RNA (1)...(19): siRNA sense strand
aaauugacaucuccugugu

SEQ ID NO: 234357 - RNA, 19 nt, Homo sapiens
  misc_RNA (1)...(19): siRNA sense strand
gcugugauuuccaguguca

SEQ ID NO: 234358 - RNA, 19 nt, Homo sapiens
  misc_RNA (1)...(19): siRNA sense strand
ccagugauguguggagcua

SEQ ID NO: 234359 - RNA, 19 nt, Homo sapiens
  misc_RNA (1)...(19): siRNA sense strand
gcgugauccuggacuauga

SEQ ID NO: 234360 - RNA, 19 nt, Homo sapiens
  misc_RNA (1)...(19): siRNA sense strand
caaccucuauuacuaugag

SEQ ID NO: 234361 - RNA, 19 nt, Homo sapiens
  misc_RNA (1)...(19): siRNA sense strand
ugugggaggugauguccua

SEQ ID NO: 234362 - RNA, 19 nt, Homo sapiens
  misc_RNA (1)...(19): siRNA sense strand
ggaguuugccaaggaaauu

SEQ ID NO: 234363 - RNA, 19 nt, Homo sapiens
  misc_RNA (1)...(19): siRNA sense strand
gagccacgcauuuacauca

SEQ ID NO: 234364 - RNA, 19 nt, Homo sapiens
  misc_RNA (1)...(19): siRNA sense strand
ugaacacgauccgcacgua

SEQ ID NO: 234365 - RNA, 19 nt, Homo sapiens
  misc_RNA (1)...(19): siRNA sense strand
gacaugcccugcacaacca

SEQ ID NO: 234366 - RNA, 19 nt, Homo sapiens
  misc_RNA (1)...(19): siRNA sense strand
gggaggugauguccuaugg

SEQ ID NO: 234367 - RNA, 19 nt, Homo sapiens
  misc_RNA (1)...(19): siRNA sense strand
gcaaaacgaugggcaguuc

SEQ ID NO: 234368 - RNA, 19 nt, Homo sapiens
  misc_RNA (1)...(19): siRNA sense strand
gaccucgucuacaacauca

SEQ ID NO: 234369 - RNA, 19 nt, Homo sapiens
  misc_RNA (1)...(19): siRNA sense strand
gcaacauccucgucaacag

SEQ ID NO: 234370 - RNA, 19 nt, Homo sapiens
  misc_RNA (1)...(19): siRNA sense strand
guacgcaccacgccagcua

SEQ ID NO: 234371 - RNA, 19 nt, Homo sapiens
  misc_RNA (1)...(19): siRNA sense strand
gacgucgugucucagauga

SEQ ID NO: 234372 - RNA, 19 nt, Homo sapiens
  misc_RNA (1)...(19): siRNA sense strand
gagcuacggcauugucaug

SEQ ID NO: 234373 - RNA, 19 nt, Homo sapiens
  misc_RNA (1)...(19): siRNA sense strand
gagaaguugccacucauca

SEQ ID NO: 234374 - RNA, 19 nt, Homo sapiens
  misc_RNA (1)...(19): siRNA sense strand
ugucucagaugaugaugga

SEQ ID NO: 234375 - RNA, 19 nt, Homo sapiens
  misc_RNA (1)...(19): siRNA sense strand
acagcaaccuggucugcaa

SEQ ID NO: 234376 - RNA, 19 nt, Homo sapiens
  misc_RNA (1)...(19): siRNA sense strand
cuacaccaguggccacaug

SEQ ID NO: 234377 - RNA, 19 nt, Homo sapiens
  misc_RNA (1)...(19): siRNA sense strand
gugaguggcuacgaugaga

SEQ ID NO: 234378 - RNA, 19 nt, Homo sapiens
  misc_RNA (1)...(19): siRNA sense strand
acuaugaggcugacuuuga

SEQ ID NO: 234379 - RNA, 19 nt, Homo sapiens
  misc_RNA (1)...(19): siRNA sense strand
ucaucgccaucguguguaa

SEQ ID NO: 234380 - RNA, 19 nt, Homo sapiens
  misc_RNA (1)...(19): siRNA sense strand
gggugaagguggauaccau

SEQ ID NO: 234381 - RNA, 19 nt, Homo sapiens
  misc_RNA (1)...(19): siRNA sense strand
gacaagaugauccgcaauc

SEQ ID NO: 234382 - RNA, 19 nt, Homo sapiens
  misc_RNA (1)...(19): siRNA sense strand
gcuacggcauugucaugug

SEQ ID NO: 234383 - RNA, 19 nt, Homo sapiens
  misc_RNA (1)...(19): siRNA sense strand
gaacaguauccaggugaug

SEQ ID NO: 234384 - RNA, 19 nt, Homo sapiens
  misc_RNA (1)...(19): siRNA sense strand
ggaccucgucuacaacauc

SEQ ID NO: 234385 - RNA, 19 nt, Homo sapiens
  misc_RNA (1)...(19): siRNA sense strand
cgucgugucucagaugaug

SEQ ID NO: 234386 - RNA, 19 nt, Homo sapiens
  misc_RNA (1)...(19): siRNA sense strand
caaguucggccaaauuguc

SEQ ID NO: 234387 - RNA, 19 nt, Homo sapiens
  misc_RNA (1)...(19): siRNA sense strand
gcccaaguucggccaaauu

SEQ ID NO: 234388 - RNA, 19 nt, Homo sapiens
  misc_RNA (1)...(19): siRNA sense strand
gaaguaccuggcagacaug

SEQ ID NO: 234389 - RNA, 19 nt, Homo sapiens
  misc_RNA (1)...(19): siRNA sense strand
gagggugucgugaccaaga

SEQ ID NO: 234390 - RNA, 19 nt, Homo sapiens
  misc_RNA (1)...(19): siRNA sense strand
gaagccgaguaccagacaa

SEQ ID NO: 234391 - RNA, 19 nt, Homo sapiens
  misc_RNA (1)...(19): siRNA sense strand
ucuacaacaucaucugcaa

SEQ ID NO: 234392 - RNA, 19 nt, Homo sapiens
  misc_RNA (1)...(19): siRNA sense strand
gaccaaccaggauguaauc

SEQ ID NO: 234393 - RNA, 19 nt, Homo sapiens
  misc_RNA (1)...(19): siRNA sense strand
guguggagcuacggcauug

SEQ ID NO: 234394 - RNA, 19 nt, Homo sapiens
  misc_RNA (1)...(19): siRNA sense strand
gcgggaguuugccaaggaa

SEQ ID NO: 234395 - RNA, 19 nt, Homo sapiens
  misc_RNA (1)...(19): siRNA sense strand
ccaguacaccuucgagauc

SEQ ID NO: 234396 - RNA, 19 nt, Homo sapiens
  misc_RNA (1)...(19): siRNA sense strand
gcgcagaugaaccagauuc

SEQ ID NO: 234397 - RNA, 19 nt, Homo sapiens
  misc_RNA (1)...(19): siRNA sense strand
ggacaagcugcaacacuac

SEQ ID NO: 234398 - RNA, 19 nt, Homo sapiens
  misc_RNA (1)...(19): siRNA sense strand
ugacagaagccgaguacca

SEQ ID NO: 234399 - RNA, 19 nt, Homo sapiens
  misc_RNA (1)...(19): siRNA sense strand
ccaggugugcaacguguuu

SEQ ID NO: 234400 - RNA, 19 nt, Homo sapiens
  misc_RNA (1)...(19): siRNA sense strand
agaccuucaaccucuauua

SEQ ID NO: 234401 - RNA, 19 nt, Homo sapiens
  misc_RNA (1)...(19): siRNA sense strand
uggcuacggaccaaguuua

SEQ ID NO: 234402 - RNA, 19 nt, Homo sapiens
  misc_RNA (1)...(19): siRNA sense strand
gcggcaagauguacuucca

SEQ ID NO: 234403 - RNA, 19 nt, Homo sapiens
  misc_RNA (1)...(19): siRNA sense strand
gcuacgaugagaacaugaa

SEQ ID NO: 234404 - RNA, 19 nt, Homo sapiens
  misc_RNA (1)...(19): siRNA sense strand
uacaacaucaucugcaaga

SEQ ID NO: 234405 - RNA, 19 nt, Homo sapiens
  misc_RNA (1)...(19): siRNA sense strand
uggaagaaacgcuaaugga

SEQ ID NO: 234406 - RNA, 19 nt, Homo sapiens
  misc_RNA (1)...(19): siRNA sense strand
ccacguggagaugaaguuu

SEQ ID NO: 234407 - RNA, 19 nt, Homo sapiens
  misc_RNA (1)...(19): siRNA sense strand
uuacuaugaggcugacuuu

SEQ ID NO: 234408 - RNA, 19 nt, Homo sapiens
  misc_RNA (1)...(19): siRNA sense strand
caguguccaucaugcauca

SEQ ID NO: 234409 - RNA, 19 nt, Homo sapiens
  misc_RNA (1)...(19): siRNA sense strand
gcagcuccaucggcagugu

SEQ ID NO: 234410 - RNA, 19 nt, Homo sapiens
  misc_RNA (1)...(19): siRNA sense strand
ggugaagguggauaccauu

SEQ ID NO: 234411 - RNA, 19 nt, Homo sapiens
  misc_RNA (1)...(19): siRNA sense strand
ccuuugacgucgugucuca

SEQ ID NO: 234412 - RNA, 19 nt, Homo sapiens
  misc_RNA (1)...(19): siRNA sense strand
ggagaccuucaaccucuau

SEQ ID NO: 234413 - RNA, 19 nt, Homo sapiens
  misc_RNA (1)...(19): siRNA sense strand
ucgcagcuggcaugaagua

SEQ ID NO: 234414 - RNA, 19 nt, Homo sapiens
  misc_RNA (1)...(19): siRNA sense strand
gaucggagcaggggaguuu

SEQ ID NO: 234415 - RNA, 19 nt, Homo sapiens
  misc_RNA (1)...(19): siRNA sense strand
uggcuacgaugagaacaug

SEQ ID NO: 234416 - RNA, 19 nt, Homo sapiens
  misc_RNA (1)...(19): siRNA sense strand
gacuauggcggcugcaugu

SEQ ID NO: 234417 - RNA, 19 nt, Homo sapiens
  misc_RNA (1)...(19): siRNA sense strand
ugaacaguauccaggugau

SEQ ID NO: 234418 - RNA, 19 nt, Homo sapiens
  misc_RNA (1)...(19): siRNA sense strand
gacuacaccagcuuuaaca

SEQ ID NO: 234419 - RNA, 19 nt, Homo sapiens
  misc_RNA (1)...(19): siRNA sense strand
caacacgcuagacaagaug

SEQ ID NO: 234420 - RNA, 19 nt, Homo sapiens
  misc_RNA (1)...(19): siRNA sense strand
ccauugagcaggacuaucg

SEQ ID NO: 234421 - RNA, 19 nt, Homo sapiens
  misc_RNA (1)...(19): siRNA sense strand
ggagaaguugccacucauc

SEQ ID NO: 234422 - RNA, 19 nt, Homo sapiens
  misc_RNA (1)...(19): siRNA sense strand
caucggcaguguccaucau

SEQ ID NO: 234423 - RNA, 19 nt, Homo sapiens
  misc_RNA (1)...(19): siRNA sense strand
cugcugagcugggcuggau

SEQ ID NO: 234424 - RNA, 19 nt, Homo sapiens
  misc_RNA (1)...(19): siRNA sense strand
caaggagagcuucgccaau

SEQ ID NO: 234425 - RNA, 19 nt, Homo sapiens
  misc_RNA (1)...(19): siRNA sense strand
caacucaugcuggacuguu

SEQ ID NO: 234426 - RNA, 19 nt, Homo sapiens
  misc_RNA (1)...(19): siRNA sense strand
ugaccaaccaggauguaau

SEQ ID NO: 234427 - RNA, 19 nt, Homo sapiens
  misc_RNA (1)...(19): siRNA sense strand
gcaaggugucggacuuugg

SEQ ID NO: 234428 - RNA, 19 nt, Homo sapiens
  misc_RNA (1)...(19): siRNA sense strand
gaccuucaaccucuauuac

SEQ ID NO: 234429 - RNA, 19 nt, Homo sapiens
  misc_RNA (1)...(19): siRNA sense strand
caucuccugugucaaaauu

SEQ ID NO: 234430 - RNA, 19 nt, Homo sapiens
  misc_RNA (1)...(19): siRNA sense strand
acaucgauccuuucaccua

SEQ ID NO: 234431 - RNA, 19 nt, Homo sapiens
  misc_RNA (1)...(19): siRNA sense strand
ccaucaagcucuacuguaa

SEQ ID NO: 234432 - RNA, 19 nt, Homo sapiens
  misc_RNA (1)...(19): siRNA sense strand
acuaugagcugcaguacua

SEQ ID NO: 234433 - RNA, 19 nt, Homo sapiens
  misc_RNA (1)...(19): siRNA sense strand
guacaacgccacagccaua

SEQ ID NO: 234434 - RNA, 19 nt, Homo sapiens
  misc_RNA (1)...(19): siRNA sense strand
gagcgaagccuccaucaug

SEQ ID NO: 234435 - RNA, 19 nt, Homo sapiens
  misc_RNA (1)...(19): siRNA sense strand
caaccaggauguaaucaau

SEQ ID NO: 234436 - RNA, 19 nt, Homo sapiens
  misc_RNA (1)...(19): siRNA sense strand
uaaagaggauucucauaag

SEQ ID NO: 234437 - RNA, 19 nt, Homo sapiens
  misc_RNA (1)...(19): siRNA sense strand
ggaaagcaaugacuguucu

SEQ ID NO: 234438 - RNA, 19 nt, Homo sapiens
  misc_RNA (1)...(19): siRNA sense strand
gcaugaagaucuacaucga

SEQ ID NO: 234439 - RNA, 19 nt, Homo sapiens
  misc_RNA (1)...(19): siRNA sense strand
cggacaagcugcaacacua

SEQ ID NO: 234440 - RNA, 19 nt, Homo sapiens
  misc_RNA (1)...(19): siRNA sense strand
gaagguggauaccauugca

SEQ ID NO: 234441 - RNA, 19 nt, Homo sapiens
  misc_RNA (1)...(19): siRNA sense strand
ggccuggucuuccucauug

SEQ ID NO: 234442 - RNA, 19 nt, Homo sapiens
  misc_RNA (1)...(19): siRNA sense strand
ugaaguaccuggcagacau

SEQ ID NO: 234443 - RNA, 19 nt, Homo sapiens
  misc_RNA (1)...(19): siRNA sense strand
gagcugcaguacuaugaga

SEQ ID NO: 234444 - RNA, 19 nt, Homo sapiens
  misc_RNA (1)...(19): siRNA sense strand
caggagaaguugccacuca

SEQ ID NO: 234445 - RNA, 19 nt, Homo sapiens
  misc_RNA (1)...(19): siRNA sense strand
agacaagcauccaggagaa

SEQ ID NO: 234446 - RNA, 19 nt, Homo sapiens
  misc_RNA (1)...(19): siRNA sense strand
ucaccgaguucauggagaa

SEQ ID NO: 234447 - RNA, 19 nt, Homo sapiens
  misc_RNA (1)...(19): siRNA sense strand
cacgagacgucaccaagaa

SEQ ID NO: 234448 - RNA, 19 nt, Homo sapiens
  misc_RNA (1)...(19): siRNA sense strand
caucgcagcuggcaugaag

SEQ ID NO: 234449 - RNA, 19 nt, Homo sapiens
  misc_RNA (1)...(19): siRNA sense strand
gaugggcaguucacaguca

SEQ ID NO: 234450 - RNA, 19 nt, Homo sapiens
  misc_RNA (1)...(19): siRNA sense strand
ccaaggaaauugacaucuc

SEQ ID NO: 234451 - RNA, 19 nt, Homo sapiens
  misc_RNA (1)...(19): siRNA sense strand
ucaacacgcuagacaagau

SEQ ID NO: 234452 - RNA, 19 nt, Homo sapiens
  misc_RNA (1)...(19): siRNA sense strand
ggacaugaccaaccaggau

SEQ ID NO: 234453 - RNA, 19 nt, Homo sapiens
  misc_RNA (1)...(19): siRNA sense strand
ccuucaaccucuauuacua

SEQ ID NO: 234454 - RNA, 19 nt, Homo sapiens
  misc_RNA (1)...(19): siRNA sense strand
gaucaucaccgaguucaug

SEQ ID NO: 234455 - RNA, 19 nt, Homo sapiens
  misc_RNA (1)...(19): siRNA sense strand
gaaguugccacucaucauc

SEQ ID NO: 234456 - RNA, 19 nt, Homo sapiens
  misc_RNA (1)...(19): siRNA sense strand
ugaccgagccacgcauuua

SEQ ID NO: 234457 - RNA, 19 nt, Homo sapiens
  misc_RNA (1)...(19): siRNA sense strand
gggcgcagaugaaccagau

SEQ ID NO: 234458 - RNA, 19 nt, Homo sapiens
  misc_RNA (1)...(19): siRNA sense strand
aaggagagcuucgccaaug

SEQ ID NO: 234459 - RNA, 19 nt, Homo sapiens
  misc_RNA (1)...(19): siRNA sense strand
aaauugacaucuccugugu

SEQ ID NO: 234460 - RNA, 19 nt, Homo sapiens
  misc_RNA (1)...(19): siRNA sense strand
gcugugauuuccaguguca

SEQ ID NO: 234461 - RNA, 19 nt, Homo sapiens
  misc_RNA (1)...(19): siRNA sense strand
ccagugauguguggagcua

SEQ ID NO: 234462 - RNA, 19 nt, Homo sapiens
  misc_RNA (1)...(19): siRNA sense strand
gcgugauccuggacuauga

SEQ ID NO: 234463 - RNA, 19 nt, Homo sapiens
  misc_RNA (1)...(19): siRNA sense strand
caaccucuauuacuaugag

SEQ ID NO: 234464 - RNA, 19 nt, Homo sapiens
  misc_RNA (1)...(19): siRNA sense strand
ugugggaggugauguccua

SEQ ID NO: 234465 - RNA, 19 nt, Homo sapiens
  misc_RNA (1)...(19): siRNA sense strand
ggaguuugccaaggaaauu

SEQ ID NO: 234466 - RNA, 19 nt, Homo sapiens
  misc_RNA (1)...(19): siRNA sense strand
gagccacgcauuuacauca

SEQ ID NO: 234467 - RNA, 19 nt, Homo sapiens
  misc_RNA (1)...(19): siRNA sense strand
ugaacacgauccgcacgua

SEQ ID NO: 234468 - RNA, 19 nt, Homo sapiens
  misc_RNA (1)...(19): siRNA sense strand
gacaugcccugcacaacca

SEQ ID NO: 234469 - RNA, 19 nt, Homo sapiens
  misc_RNA (1)...(19): siRNA sense strand
agaggauucucauaaggaa

SEQ ID NO: 234470 - RNA, 19 nt, Homo sapiens
  misc_RNA (1)...(19): siRNA sense strand
gggaggugauguccuaugg

SEQ ID NO: 234471 - RNA, 19 nt, Homo sapiens
  misc_RNA (1)...(19): siRNA sense strand
gcaaaacgaugggcaguuc

SEQ ID NO: 234472 - RNA, 19 nt, Homo sapiens
  misc_RNA (1)...(19): siRNA sense strand
gaccucgucuacaacauca

SEQ ID NO: 234473 - RNA, 19 nt, Homo sapiens
  misc_RNA (1)...(19): siRNA sense strand
gcaacauccucgucaacag

SEQ ID NO: 234474 - RNA, 19 nt, Homo sapiens
  misc_RNA (1)...(19): siRNA sense strand
guacgcaccacgccagcua

SEQ ID NO: 234475 - RNA, 19 nt, Homo sapiens
  misc_RNA (1)...(19): siRNA sense strand
aaagaggauucucauaagg

SEQ ID NO: 234476 - RNA, 19 nt, Homo sapiens
  misc_RNA (1)...(19): siRNA sense strand
gcgggaaauacaaggaaua

SEQ ID NO: 234477 - RNA, 19 nt, Homo sapiens
  misc_RNA (1)...(19): siRNA sense strand
gacgucgugucucagauga

SEQ ID NO: 234478 - RNA, 19 nt, Homo sapiens
  misc_RNA (1)...(19): siRNA sense strand
gagcuacggcauugucaug

SEQ ID NO: 234479 - RNA, 19 nt, Homo sapiens
  misc_RNA (1)...(19): siRNA sense strand
gagaaguugccacucauca

SEQ ID NO: 234480 - RNA, 19 nt, Homo sapiens
  misc_RNA (1)...(19): siRNA sense strand
ugucucagaugaugaugga

SEQ ID NO: 234481 - RNA, 19 nt, Homo sapiens
  misc_RNA (1)...(19): siRNA sense strand
acagcaaccuggucugcaa

SEQ ID NO: 234482 - RNA, 19 nt, Homo sapiens
  misc_RNA (1)...(19): siRNA sense strand
cuacaccaguggccacaug

SEQ ID NO: 234483 - RNA, 19 nt, Homo sapiens
  misc_RNA (1)...(19): siRNA sense strand
gugaguggcuacgaugaga

SEQ ID NO: 234484 - RNA, 19 nt, Homo sapiens
  misc_RNA (1)...(19): siRNA sense strand
acuaugaggcugacuuuga

SEQ ID NO: 234485 - RNA, 19 nt, Homo sapiens
  misc_RNA (1)...(19): siRNA sense strand
ccacgagacgucaccaaga

SEQ ID NO: 234486 - RNA, 19 nt, Homo sapiens
  misc_RNA (1)...(19): siRNA sense strand
ucaucgccaucguguguaa

SEQ ID NO: 234487 - RNA, 19 nt, Homo sapiens
  misc_RNA (1)...(19): siRNA sense strand
gggugaagguggauaccau

SEQ ID NO: 234488 - RNA, 19 nt, Homo sapiens
  misc_RNA (1)...(19): siRNA sense strand
gcaacucaaacgacggaaa

SEQ ID NO: 234489 - RNA, 19 nt, Homo sapiens
  misc_RNA (1)...(19): siRNA sense strand
gacaagaugauccgcaauc

SEQ ID NO: 234490 - RNA, 19 nt, Homo sapiens
  misc_RNA (1)...(19): siRNA sense strand
gcuacggcauugucaugug

SEQ ID NO: 234491 - RNA, 19 nt, Homo sapiens
  misc_RNA (1)...(19): siRNA sense strand
uaaggaaagcaaugacugu

SEQ ID NO: 234492 - RNA, 19 nt, Homo sapiens
  misc_RNA (1)...(19): siRNA sense strand
gaacaguauccaggugaug

SEQ ID NO: 234493 - RNA, 19 nt, Homo sapiens
  misc_RNA (1)...(19): siRNA sense strand
ggaccucgucuacaacauc

SEQ ID NO: 234494 - RNA, 19 nt, Homo sapiens
  misc_RNA (1)...(19): siRNA sense strand
caagaaaacaugcaacuca

SEQ ID NO: 234495 - RNA, 19 nt, Homo sapiens
  misc_RNA (1)...(19): siRNA sense strand
cgucgugucucagaugaug

SEQ ID NO: 234496 - RNA, 19 nt, Homo sapiens
  misc_RNA (1)...(19): siRNA sense strand
caaguucggccaaauuguc

SEQ ID NO: 234497 - RNA, 19 nt, Homo sapiens
  misc_RNA (1)...(19): siRNA sense strand
gcccaaguucggccaaauu

SEQ ID NO: 234498 - RNA, 19 nt, Homo sapiens
  misc_RNA (1)...(19): siRNA sense strand
gaaguaccuggcagacaug

SEQ ID NO: 234499 - RNA, 19 nt, Homo sapiens
  misc_RNA (1)...(19): siRNA sense strand
gagggugucgugaccaaga

SEQ ID NO: 234500 - RNA, 19 nt, Homo sapiens
  misc_RNA (1)...(19): siRNA sense strand
gaagccgaguaccagacaa

SEQ ID NO: 234501 - RNA, 19 nt, Homo sapiens
  misc_RNA (1)...(19): siRNA sense strand
ucuacaacaucaucugcaa

SEQ ID NO: 234502 - RNA, 19 nt, Homo sapiens
  misc_RNA (1)...(19): siRNA sense strand
gaaagcaaugacuguucuu

SEQ ID NO: 234503 - RNA, 19 nt, Homo sapiens
  misc_RNA (1)...(19): siRNA sense strand
aaacaugcaacucaaacga

SEQ ID NO: 234504 - RNA, 19 nt, Homo sapiens
  misc_RNA (1)...(19): siRNA sense strand
gaccaaccaggauguaauc

SEQ ID NO: 234505 - RNA, 19 nt, Homo sapiens
  misc_RNA (1)...(19): siRNA sense strand
guguggagcuacggcauug

SEQ ID NO: 234506 - RNA, 19 nt, Homo sapiens
  misc_RNA (1)...(19): siRNA sense strand
gcgggaguuugccaaggaa

SEQ ID NO: 234507 - RNA, 19 nt, Homo sapiens
  misc_RNA (1)...(19): siRNA sense strand
ccaguacaccuucgagauc

SEQ ID NO: 234508 - RNA, 19 nt, Homo sapiens
  misc_RNA (1)...(19): siRNA sense strand
gcgcagaugaaccagauuc

SEQ ID NO: 234509 - RNA, 19 nt, Homo sapiens
  misc_RNA (1)...(19): siRNA sense strand
ggacaagcugcaacacuac

SEQ ID NO: 234510 - RNA, 19 nt, Homo sapiens
  misc_RNA (1)...(19): siRNA sense strand
ugacagaagccgaguacca

SEQ ID NO: 234511 - RNA, 19 nt, Homo sapiens
  misc_RNA (1)...(19): siRNA sense strand
ccaggugugcaacguguuu

SEQ ID NO: 234512 - RNA, 19 nt, Homo sapiens
  misc_RNA (1)...(19): siRNA sense strand
uggcuacggaccaaguuua

SEQ ID NO: 234513 - RNA, 19 nt, Homo sapiens
  misc_RNA (1)...(19): siRNA sense strand
agaccuucaaccucuauua

SEQ ID NO: 234514 - RNA, 19 nt, Homo sapiens
  misc_RNA (1)...(19): siRNA sense strand
gcggcaagauguacuucca

SEQ ID NO: 234515 - RNA, 19 nt, Homo sapiens
  misc_RNA (1)...(19): siRNA sense strand
gcuacgaugagaacaugaa

SEQ ID NO: 234516 - RNA, 19 nt, Homo sapiens
  misc_RNA (1)...(19): siRNA sense strand
uacaacaucaucugcaaga

SEQ ID NO: 234517 - RNA, 19 nt, Homo sapiens
  misc_RNA (1)...(19): siRNA sense strand
ccacguggagaugaaguuu

SEQ ID NO: 234518 - RNA, 19 nt, Homo sapiens
  misc_RNA (1)...(19): siRNA sense strand
uggaagaaacgcuaaugga

SEQ ID NO: 234519 - RNA, 19 nt, Homo sapiens
  misc_RNA (1)...(19): siRNA sense strand
uuacuaugaggcugacuuu

SEQ ID NO: 234520 - RNA, 19 nt, Homo sapiens
  misc_RNA (1)...(19): siRNA sense strand
caguguccaucaugcauca

SEQ ID NO: 234521 - RNA, 19 nt, Homo sapiens
  misc_RNA (1)...(19): siRNA sense strand
gcagcuccaucggcagugu

SEQ ID NO: 234522 - RNA, 19 nt, Homo sapiens
  misc_RNA (1)...(19): siRNA sense strand
ggugaagguggauaccauu

SEQ ID NO: 234523 - RNA, 19 nt, Homo sapiens
  misc_RNA (1)...(19): siRNA sense strand
ccuuugacgucgugucuca

SEQ ID NO: 234524 - RNA, 19 nt, Homo sapiens
  misc_RNA (1)...(19): siRNA sense strand
uggcuacgaugagaacaug

SEQ ID NO: 234525 - RNA, 19 nt, Homo sapiens
  misc_RNA (1)...(19): siRNA sense strand
ucgcagcuggcaugaagua

SEQ ID NO: 234526 - RNA, 19 nt, Homo sapiens
  misc_RNA (1)...(19): siRNA sense strand
gaucggagcaggggaguuu

SEQ ID NO: 234527 - RNA, 19 nt, Homo sapiens
  misc_RNA (1)...(19): siRNA sense strand
ggagaccuucaaccucuau

SEQ ID NO: 234528 - RNA, 19 nt, Homo sapiens
  misc_RNA (1)...(19): siRNA sense strand
ugaacaguauccaggugau

SEQ ID NO: 234529 - RNA, 19 nt, Homo sapiens
  misc_RNA (1)...(19): siRNA sense strand
ggcgggaaauacaaggaau

SEQ ID NO: 234530 - RNA, 19 nt, Homo sapiens
  misc_RNA (1)...(19): siRNA sense strand
caacucaaacgacggaaaa

SEQ ID NO: 234531 - RNA, 19 nt, Homo sapiens
  misc_RNA (1)...(19): siRNA sense strand
ggacaaacacggacaguau

SEQ ID NO: 234532 - RNA, 19 nt, Homo sapiens
  misc_RNA (1)...(19): siRNA sense strand
ucacagaguucauggagaa

SEQ ID NO: 234533 - RNA, 19 nt, Homo sapiens
  misc_RNA (1)...(19): siRNA sense strand
gaagagacccugcugaaca

SEQ ID NO: 234534 - RNA, 19 nt, Homo sapiens
  misc_RNA (1)...(19): siRNA sense strand
guacuaaggucuacaucga

SEQ ID NO: 234535 - RNA, 19 nt, Homo sapiens
  misc_RNA (1)...(19): siRNA sense strand
ggaaacugcugaucugaag

SEQ ID NO: 234536 - RNA, 19 nt, Homo sapiens
  misc_RNA (1)...(19): siRNA sense strand
ggagagaagcagaauauuc

SEQ ID NO: 234537 - RNA, 19 nt, Homo sapiens
  misc_RNA (1)...(19): siRNA sense strand
gcagagcaaugggagagaa

SEQ ID NO: 234538 - RNA, 19 nt, Homo sapiens
  misc_RNA (1)...(19): siRNA sense strand
ugacuucaccuauaccuuu

SEQ ID NO: 234539 - RNA, 19 nt, Homo sapiens
  misc_RNA (1)...(19): siRNA sense strand
gagcgaggccuccaucaug

SEQ ID NO: 234540 - RNA, 19 nt, Homo sapiens
  misc_RNA (1)...(19): siRNA sense strand
gccaauagccacucuaaca

SEQ ID NO: 234541 - RNA, 19 nt, Homo sapiens
  misc_RNA (1)...(19): siRNA sense strand
cguccugacuucaccuaua

SEQ ID NO: 234542 - RNA, 19 nt, Homo sapiens
  misc_RNA (1)...(19): siRNA sense strand
ggacuacgaggucaaauac

SEQ ID NO: 234543 - RNA, 19 nt, Homo sapiens
  misc_RNA (1)...(19): siRNA sense strand
gcgcccagcugacugugaa

SEQ ID NO: 234544 - RNA, 19 nt, Homo sapiens
  misc_RNA (1)...(19): siRNA sense strand
ugugggaggugaugucauu

SEQ ID NO: 234545 - RNA, 19 nt, Homo sapiens
  misc_RNA (1)...(19): siRNA sense strand
gcuaaacgacggacaguuc

SEQ ID NO: 234546 - RNA, 19 nt, Homo sapiens
  misc_RNA (1)...(19): siRNA sense strand
ggggagaccugacuuuuga

SEQ ID NO: 234547 - RNA, 19 nt, Homo sapiens
  misc_RNA (1)...(19): siRNA sense strand
gaggucaaauaccaugaga

SEQ ID NO: 234548 - RNA, 19 nt, Homo sapiens
  misc_RNA (1)...(19): siRNA sense strand
gagagaagcagaauauucg

SEQ ID NO: 234549 - RNA, 19 nt, Homo sapiens
  misc_RNA (1)...(19): siRNA sense strand
gggcugugcuggacuacga

SEQ ID NO: 234550 - RNA, 19 nt, Homo sapiens
  misc_RNA (1)...(19): siRNA sense strand
ggucaaauaccaugagaag

SEQ ID NO: 234551 - RNA, 19 nt, Homo sapiens
  misc_RNA (1)...(19): siRNA sense strand
ggagagcuguguggcaauc

SEQ ID NO: 234552 - RNA, 19 nt, Homo sapiens
  misc_RNA (1)...(19): siRNA sense strand
ggaagaaggagagcugugu

SEQ ID NO: 234553 - RNA, 19 nt, Homo sapiens
  misc_RNA (1)...(19): siRNA sense strand
gaucugaagugggugacau

SEQ ID NO: 234554 - RNA, 19 nt, Homo sapiens
  misc_RNA (1)...(19): siRNA sense strand
cagaauauucggacaaaca

SEQ ID NO: 234555 - RNA, 19 nt, Homo sapiens
  misc_RNA (1)...(19): siRNA sense strand
gagcagcuggcccugauug

SEQ ID NO: 234556 - RNA, 19 nt, Homo sapiens
  misc_RNA (1)...(19): siRNA sense strand
ccuuugaggucacugcauu

SEQ ID NO: 234557 - RNA, 19 nt, Homo sapiens
  misc_RNA (1)...(19): siRNA sense strand
gacggacaguucacaguca

SEQ ID NO: 234558 - RNA, 19 nt, Homo sapiens
  misc_RNA (1)...(19): siRNA sense strand
gcaccuacgaaguguguga

SEQ ID NO: 234559 - RNA, 19 nt, Homo sapiens
  misc_RNA (1)...(19): siRNA sense strand
agacccugcugaacacaaa

SEQ ID NO: 234560 - RNA, 19 nt, Homo sapiens
  misc_RNA (1)...(19): siRNA sense strand
gacuucaccuauaccuuug

SEQ ID NO: 234561 - RNA, 19 nt, Homo sapiens
  misc_RNA (1)...(19): siRNA sense strand
gggaggugaugucauuugg

SEQ ID NO: 234562 - RNA, 19 nt, Homo sapiens
  misc_RNA (1)...(19): siRNA sense strand
acagcaaccucgucugcaa

SEQ ID NO: 234563 - RNA, 19 nt, Homo sapiens
  misc_RNA (1)...(19): siRNA sense strand
gaacgggguauccuccuua

SEQ ID NO: 234564 - RNA, 19 nt, Homo sapiens
  misc_RNA (1)...(19): siRNA sense strand
gcggcagccucacuacuca

SEQ ID NO: 234565 - RNA, 19 nt, Homo sapiens
  misc_RNA (1)...(19): siRNA sense strand
ucaugauucucacagaguu

SEQ ID NO: 234566 - RNA, 19 nt, Homo sapiens
  misc_RNA (1)...(19): siRNA sense strand
gauuggugcaggugaguuu

SEQ ID NO: 234567 - RNA, 19 nt, Homo sapiens
  misc_RNA (1)...(19): siRNA sense strand
ucaccgucuucuacuauga

SEQ ID NO: 234568 - RNA, 19 nt, Homo sapiens
  misc_RNA (1)...(19): siRNA sense strand
gcuggacuguuggcagaaa

SEQ ID NO: 234569 - RNA, 19 nt, Homo sapiens
  misc_RNA (1)...(19): siRNA sense strand
ucacuuaugaagacccuaa

SEQ ID NO: 234570 - RNA, 19 nt, Homo sapiens
  misc_RNA (1)...(19): siRNA sense strand
ugaggucacugcauugaac

SEQ ID NO: 234571 - RNA, 19 nt, Homo sapiens
  misc_RNA (1)...(19): siRNA sense strand
ugggagagaagcagaauau

SEQ ID NO: 234572 - RNA, 19 nt, Homo sapiens
  misc_RNA (1)...(19): siRNA sense strand
guuacgggauugugaugug

SEQ ID NO: 234573 - RNA, 19 nt, Homo sapiens
  misc_RNA (1)...(19): siRNA sense strand
ccgggaaggugaaugucaa

SEQ ID NO: 234574 - RNA, 19 nt, Homo sapiens
  misc_RNA (1)...(19): siRNA sense strand
gcaacauccuagucaacag

SEQ ID NO: 234575 - RNA, 19 nt, Homo sapiens
  misc_RNA (1)...(19): siRNA sense strand
uagccacucuaacaccauu

SEQ ID NO: 234576 - RNA, 19 nt, Homo sapiens
  misc_RNA (1)...(19): siRNA sense strand
cagccaauagccacucuaa

SEQ ID NO: 234577 - RNA, 19 nt, Homo sapiens
  misc_RNA (1)...(19): siRNA sense strand
gcucgcaacauccuaguca

SEQ ID NO: 234578 - RNA, 19 nt, Homo sapiens
  misc_RNA (1)...(19): siRNA sense strand
cugaggaccugcuccgaau

SEQ ID NO: 234579 - RNA, 19 nt, Homo sapiens
  misc_RNA (1)...(19): siRNA sense strand
ucagcgcccuggacaagau

SEQ ID NO: 234580 - RNA, 19 nt, Homo sapiens
  misc_RNA (1)...(19): siRNA sense strand
caaccucgucugcaaagug

SEQ ID NO: 234581 - RNA, 19 nt, Homo sapiens
  misc_RNA (1)...(19): siRNA sense strand
aaacacggacaguaucuca

SEQ ID NO: 234582 - RNA, 19 nt, Homo sapiens
  misc_RNA (1)...(19): siRNA sense strand
caagauugaagaggugauu

SEQ ID NO: 234583 - RNA, 19 nt, Homo sapiens
  misc_RNA (1)...(19): siRNA sense strand
gaccuucaccgucuucuac

SEQ ID NO: 234584 - RNA, 19 nt, Homo sapiens
  misc_RNA (1)...(19): siRNA sense strand
uggaagagacccugcugaa

SEQ ID NO: 234585 - RNA, 19 nt, Homo sapiens
  misc_RNA (1)...(19): siRNA sense strand
ggccgcagcuuuggaagag

SEQ ID NO: 234586 - RNA, 19 nt, Homo sapiens
  misc_RNA (1)...(19): siRNA sense strand
cugugaaccugacucgauu

SEQ ID NO: 234587 - RNA, 19 nt, Homo sapiens
  misc_RNA (1)...(19): siRNA sense strand
guccugacuucaccuauac

SEQ ID NO: 234588 - RNA, 19 nt, Homo sapiens
  misc_RNA (1)...(19): siRNA sense strand
ggaguuacgggauugugau

SEQ ID NO: 234589 - RNA, 19 nt, Homo sapiens
  misc_RNA (1)...(19): siRNA sense strand
cuuaugaagacccuaauga

SEQ ID NO: 234590 - RNA, 19 nt, Homo sapiens
  misc_RNA (1)...(19): siRNA sense strand
gacaaacacggacaguauc

SEQ ID NO: 234591 - RNA, 19 nt, Homo sapiens
  misc_RNA (1)...(19): siRNA sense strand
uggacuacgaggucaaaua

SEQ ID NO: 234592 - RNA, 19 nt, Homo sapiens
  misc_RNA (1)...(19): siRNA sense strand
gcgguaccuugccgagaug

SEQ ID NO: 234593 - RNA, 19 nt, Homo sapiens
  misc_RNA (1)...(19): siRNA sense strand
gccaguguccagcacauga

SEQ ID NO: 234594 - RNA, 19 nt, Homo sapiens
  misc_RNA (1)...(19): siRNA sense strand
cagccucacuacucagcuu

SEQ ID NO: 234595 - RNA, 19 nt, Homo sapiens
  misc_RNA (1)...(19): siRNA sense strand
aaacugcugaucugaagug

SEQ ID NO: 234596 - RNA, 19 nt, Homo sapiens
  misc_RNA (1)...(19): siRNA sense strand
ggaagagacccugcugaac

SEQ ID NO: 234597 - RNA, 19 nt, Homo sapiens
  misc_RNA (1)...(19): siRNA sense strand
ugagggaauuugcaaaaga

SEQ ID NO: 234598 - RNA, 19 nt, Homo sapiens
  misc_RNA (1)...(19): siRNA sense strand
agcagaauauucggacaaa

SEQ ID NO: 234599 - RNA, 19 nt, Homo sapiens
  misc_RNA (1)...(19): siRNA sense strand
cagcaaccucgucugcaaa

SEQ ID NO: 234600 - RNA, 19 nt, Homo sapiens
  misc_RNA (1)...(19): siRNA sense strand
ggaaggugaaugucaagac

SEQ ID NO: 234601 - RNA, 19 nt, Homo sapiens
  misc_RNA (1)...(19): siRNA sense strand
gcgcaccuacgaagugugu

SEQ ID NO: 234602 - RNA, 19 nt, Homo sapiens
  misc_RNA (1)...(19): siRNA sense strand
ucaggaagcagagcaaugg

SEQ ID NO: 234603 - RNA, 19 nt, Homo sapiens
  misc_RNA (1)...(19): siRNA sense strand
ggaacugagcggccuggau

SEQ ID NO: 234604 - RNA, 19 nt, Homo sapiens
  misc_RNA (1)...(19): siRNA sense strand
cagccaugcccagccaaua

SEQ ID NO: 234605 - RNA, 19 nt, Homo sapiens
  misc_RNA (1)...(19): siRNA sense strand
gcagaauauucggacaaac

SEQ ID NO: 234606 - RNA, 19 nt, Homo sapiens
  misc_RNA (1)...(19): siRNA sense strand
acuacgaggucaaauacca

SEQ ID NO: 234607 - RNA, 19 nt, Homo sapiens
  misc_RNA (1)...(19): siRNA sense strand
gcugugagggaauuugcaa

SEQ ID NO: 234608 - RNA, 19 nt, Homo sapiens
  misc_RNA (1)...(19): siRNA sense strand
aaccucgucugcaaagugu

SEQ ID NO: 234609 - RNA, 19 nt, Homo sapiens
  misc_RNA (1)...(19): siRNA sense strand
gugcgcaccuacgaagugu

SEQ ID NO: 234610 - RNA, 19 nt, Homo sapiens
  misc_RNA (1)...(19): siRNA sense strand
caaaaugggaagauacgaa

SEQ ID NO: 234611 - RNA, 19 nt, Homo sapiens
  misc_RNA (1)...(19): siRNA sense strand
ccuucaccgucuucuacua

SEQ ID NO: 234612 - RNA, 19 nt, Homo sapiens
  misc_RNA (1)...(19): siRNA sense strand
ggagaaccccuacaucaag

SEQ ID NO: 234613 - RNA, 19 nt, Homo sapiens
  misc_RNA (1)...(19): siRNA sense strand
gggagagaagcagaauauu

SEQ ID NO: 234614 - RNA, 19 nt, Homo sapiens
  misc_RNA (1)...(19): siRNA sense strand
ggaagucgauccugcuuau

SEQ ID NO: 234615 - RNA, 19 nt, Homo sapiens
  misc_RNA (1)...(19): siRNA sense strand
ggaccaagguggacacaau

SEQ ID NO: 234616 - RNA, 19 nt, Homo sapiens
  misc_RNA (1)...(19): siRNA sense strand
acacguacccuacaucuua

SEQ ID NO: 234617 - RNA, 19 nt, Homo sapiens
  misc_RNA (1)...(19): siRNA sense strand
ggaacauccuggacuauca

SEQ ID NO: 234618 - RNA, 19 nt, Homo sapiens
  misc_RNA (1)...(19): siRNA sense strand
cgggagaccuucacccuuu

SEQ ID NO: 234619 - RNA, 19 nt, Homo sapiens
  misc_RNA (1)...(19): siRNA sense strand
ugugggaagugaugaguua

SEQ ID NO: 234620 - RNA, 19 nt, Homo sapiens
  misc_RNA (1)...(19): siRNA sense strand
gggagaccuucacccuuua

SEQ ID NO: 234621 - RNA, 19 nt, Homo sapiens
  misc_RNA (1)...(19): siRNA sense strand
gcaccgggcaggacaauug

SEQ ID NO: 234622 - RNA, 19 nt, Homo sapiens
  misc_RNA (1)...(19): siRNA sense strand
gccgaaagccugcagauga

SEQ ID NO: 234623 - RNA, 19 nt, Homo sapiens
  misc_RNA (1)...(19): siRNA sense strand
gggaugagguccacuucga

SEQ ID NO: 234624 - RNA, 19 nt, Homo sapiens
  misc_RNA (1)...(19): siRNA sense strand
gcacauggaaagcauacaa

SEQ ID NO: 234625 - RNA, 19 nt, Homo sapiens
  misc_RNA (1)...(19): siRNA sense strand
gggcuggacugcaacugaa

SEQ ID NO: 234626 - RNA, 19 nt, Homo sapiens
  misc_RNA (1)...(19): siRNA sense strand
ccauuggacuggagugcua

SEQ ID NO: 234627 - RNA, 19 nt, Homo sapiens
  misc_RNA (1)...(19): siRNA sense strand
ggagguacuaaaugcaaua

SEQ ID NO: 234628 - RNA, 19 nt, Homo sapiens
  misc_RNA (1)...(19): siRNA sense strand
uggauuacaucuacuuaug

SEQ ID NO: 234629 - RNA, 19 nt, Homo sapiens
  misc_RNA (1)...(19): siRNA sense strand
gguacuaaaugcaauagag

SEQ ID NO: 234630 - RNA, 19 nt, Homo sapiens
  misc_RNA (1)...(19): siRNA sense strand
cccaggagcuuugguuuga

SEQ ID NO: 234631 - RNA, 19 nt, Homo sapiens
  misc_RNA (1)...(19): siRNA sense strand
gagcaggagguacuaaaug

SEQ ID NO: 234632 - RNA, 19 nt, Homo sapiens
  misc_RNA (1)...(19): siRNA sense strand
gcaaggcucagcacucaug

SEQ ID NO: 234633 - RNA, 19 nt, Homo sapiens
  misc_RNA (1)...(19): siRNA sense strand
aggcuguccuccuggauua

SEQ ID NO: 234634 - RNA, 19 nt, Homo sapiens
  misc_RNA (1)...(19): siRNA sense strand
ggacaccaccggagagaca

SEQ ID NO: 234635 - RNA, 19 nt, Homo sapiens
  misc_RNA (1)...(19): siRNA sense strand
cagagaggccugacugaga

SEQ ID NO: 234636 - RNA, 19 nt, Homo sapiens
  misc_RNA (1)...(19): siRNA sense strand
gggaccugcucuucaaugu

SEQ ID NO: 234637 - RNA, 19 nt, Homo sapiens
  misc_RNA (1)...(19): siRNA sense strand
gggaagugaugaguuaugg

SEQ ID NO: 234638 - RNA, 19 nt, Homo sapiens
  misc_RNA (1)...(19): siRNA sense strand
acuaucagcuccgcuacua

SEQ ID NO: 234639 - RNA, 19 nt, Homo sapiens
  misc_RNA (1)...(19): siRNA sense strand
ccucagggcccaaguuguu

SEQ ID NO: 234640 - RNA, 19 nt, Homo sapiens
  misc_RNA (1)...(19): siRNA sense strand
cuacuuauguuggacacuu

SEQ ID NO: 234641 - RNA, 19 nt, Homo sapiens
  misc_RNA (1)...(19): siRNA sense strand
gauccugcuuauaucaaga

SEQ ID NO: 234642 - RNA, 19 nt, Homo sapiens
  misc_RNA (1)...(19): siRNA sense strand
gcuggugaauagccacuug

SEQ ID NO: 234643 - RNA, 19 nt, Homo sapiens
  misc_RNA (1)...(19): siRNA sense strand
acaauugguugcagacaca

SEQ ID NO: 234644 - RNA, 19 nt, Homo sapiens
  misc_RNA (1)...(19): siRNA sense strand
gaagucgauccugcuuaua

SEQ ID NO: 234645 - RNA, 19 nt, Homo sapiens
  misc_RNA (1)...(19): siRNA sense strand
gaccaagguggacacaauu

SEQ ID NO: 234646 - RNA, 19 nt, Homo sapiens
  misc_RNA (1)...(19): siRNA sense strand
cggaaagacucuccuuggu

SEQ ID NO: 234647 - RNA, 19 nt, Homo sapiens
  misc_RNA (1)...(19): siRNA sense strand
gcacauucgacuccacuuc

SEQ ID NO: 234648 - RNA, 19 nt, Homo sapiens
  misc_RNA (1)...(19): siRNA sense strand
agugaugucuggagcuuug

SEQ ID NO: 234649 - RNA, 19 nt, Homo sapiens
  misc_RNA (1)...(19): siRNA sense strand
ucauggugcugacggaguu

SEQ ID NO: 234650 - RNA, 19 nt, Homo sapiens
  misc_RNA (1)...(19): siRNA sense strand
gggaagucgauccugcuua

SEQ ID NO: 234651 - RNA, 19 nt, Homo sapiens
  misc_RNA (1)...(19): siRNA sense strand
gacugagagccgaguguua

SEQ ID NO: 234652 - RNA, 19 nt, Homo sapiens
  misc_RNA (1)...(19): siRNA sense strand
gcugguggcugcauuugac

SEQ ID NO: 234653 - RNA, 19 nt, Homo sapiens
  misc_RNA (1)...(19): siRNA sense strand
gcacacguacccuacaucu

SEQ ID NO: 234654 - RNA, 19 nt, Homo sapiens
  misc_RNA (1)...(19): siRNA sense strand
gggcacacguacccuacau

SEQ ID NO: 234655 - RNA, 19 nt, Homo sapiens
  misc_RNA (1)...(19): siRNA sense strand
gcccuggacuuuccuuguc

SEQ ID NO: 234656 - RNA, 19 nt, Homo sapiens
  misc_RNA (1)...(19): siRNA sense strand
gaccuucacccuuuacuac

SEQ ID NO: 234657 - RNA, 19 nt, Homo sapiens
  misc_RNA (1)...(19): siRNA sense strand
gggcccaaguuguuugcuu

SEQ ID NO: 234658 - RNA, 19 nt, Homo sapiens
  misc_RNA (1)...(19): siRNA sense strand
gacaggcucuuuuggagaa

SEQ ID NO: 234659 - RNA, 19 nt, Homo sapiens
  misc_RNA (1)...(19): siRNA sense strand
gcaacugaacgucaaagag

SEQ ID NO: 234660 - RNA, 19 nt, Homo sapiens
  misc_RNA (1)...(19): siRNA sense strand
agugaugaguuauggagaa

SEQ ID NO: 234661 - RNA, 19 nt, Homo sapiens
  misc_RNA (1)...(19): siRNA sense strand
ugcaguaccuguccagcuu

SEQ ID NO: 234662 - RNA, 19 nt, Homo sapiens
  misc_RNA (1)...(19): siRNA sense strand
gacucggggugaaguauua

SEQ ID NO: 234663 - RNA, 19 nt, Homo sapiens
  misc_RNA (1)...(19): siRNA sense strand
uaucagcuccgcuacuaug

SEQ ID NO: 234664 - RNA, 19 nt, Homo sapiens
  misc_RNA (1)...(19): siRNA sense strand
gcagggaugagguccacuu

SEQ ID NO: 234665 - RNA, 19 nt, Homo sapiens
  misc_RNA (1)...(19): siRNA sense strand
gacugcaacugaacgucaa

SEQ ID NO: 234666 - RNA, 19 nt, Homo sapiens
  misc_RNA (1)...(19): siRNA sense strand
ggucauugcacauggaaag

SEQ ID NO: 234667 - RNA, 19 nt, Homo sapiens
  misc_RNA (1)...(19): siRNA sense strand
gcaguaccuguccagcuuu

SEQ ID NO: 234668 - RNA, 19 nt, Homo sapiens
  misc_RNA (1)...(19): siRNA sense strand
ccgcagugcugggucaguu

SEQ ID NO: 234669 - RNA, 19 nt, Homo sapiens
  misc_RNA (1)...(19): siRNA sense strand
gaggggaccugcucuucaa

SEQ ID NO: 234670 - RNA, 19 nt, Homo sapiens
  misc_RNA (1)...(19): siRNA sense strand
uaagucuucugcugggaau

SEQ ID NO: 234671 - RNA, 19 nt, Homo sapiens
  misc_RNA (1)...(19): siRNA sense strand
gugcuccgauccuuugcuu

SEQ ID NO: 234672 - RNA, 19 nt, Homo sapiens
  misc_RNA (1)...(19): siRNA sense strand
gccagaggaggauggagua

SEQ ID NO: 234673 - RNA, 19 nt, Homo sapiens
  misc_RNA (1)...(19): siRNA sense strand
gcauacaacauccagugau

SEQ ID NO: 234674 - RNA, 19 nt, Homo sapiens
  misc_RNA (1)...(19): siRNA sense strand
cuucgacccucgccagaga

SEQ ID NO: 234675 - RNA, 19 nt, Homo sapiens
  misc_RNA (1)...(19): siRNA sense strand
ugaccaggcagaagacgaa

SEQ ID NO: 234676 - RNA, 19 nt, Homo sapiens
  misc_RNA (1)...(19): siRNA sense strand
auacucaugugggaaguga

SEQ ID NO: 234677 - RNA, 19 nt, Homo sapiens
  misc_RNA (1)...(19): siRNA sense strand
caagauugaggaggucauu

SEQ ID NO: 234678 - RNA, 19 nt, Homo sapiens
  misc_RNA (1)...(19): siRNA sense strand
gagcagcugcagcaauaca

SEQ ID NO: 234679 - RNA, 19 nt, Homo sapiens
  misc_RNA (1)...(19): siRNA sense strand
gcucagcucagccuagaag

SEQ ID NO: 234680 - RNA, 19 nt, Homo sapiens
  misc_RNA (1)...(19): siRNA sense strand
ggagggcaaguggauggua

SEQ ID NO: 234681 - RNA, 19 nt, Homo sapiens
  misc_RNA (1)...(19): siRNA sense strand
ccuccuggauuacaucuac

SEQ ID NO: 234682 - RNA, 19 nt, Homo sapiens
  misc_RNA (1)...(19): siRNA sense strand
gcuuugggauacucaugug

SEQ ID NO: 234683 - RNA, 19 nt, Homo sapiens
  misc_RNA (1)...(19): siRNA sense strand
ccgaaagccugcagaugac

SEQ ID NO: 234684 - RNA, 19 nt, Homo sapiens
  misc_RNA (1)...(19): siRNA sense strand
caacacugccaccgugaca

SEQ ID NO: 234685 - RNA, 19 nt, Homo sapiens
  misc_RNA (1)...(19): siRNA sense strand
gaacauccuggacuaucag

SEQ ID NO: 234686 - RNA, 19 nt, Homo sapiens
  misc_RNA (1)...(19): siRNA sense strand
ccagagggcgcacauucga

SEQ ID NO: 234687 - RNA, 19 nt, Homo sapiens
  misc_RNA (1)...(19): siRNA sense strand
ccgauccuuugcuuccuuu

SEQ ID NO: 234688 - RNA, 19 nt, Homo sapiens
  misc_RNA (1)...(19): siRNA sense strand
uagaggugcaggcuguuaa

SEQ ID NO: 234689 - RNA, 19 nt, Homo sapiens
  misc_RNA (1)...(19): siRNA sense strand
gucaggcucuucuccuaca

SEQ ID NO: 234690 - RNA, 19 nt, Homo sapiens
  misc_RNA (1)...(19): siRNA sense strand
ucaaugucgugugcaagga

SEQ ID NO: 234691 - RNA, 19 nt, Homo sapiens
  misc_RNA (1)...(19): siRNA sense strand
caggagguacuaaaugcaa

SEQ ID NO: 234692 - RNA, 19 nt, Homo sapiens
  misc_RNA (1)...(19): siRNA sense strand
ccuggugucuucaguucug

SEQ ID NO: 234693 - RNA, 19 nt, Homo sapiens
  misc_RNA (1)...(19): siRNA sense strand
gggacgaggugaguguucu

SEQ ID NO: 234694 - RNA, 19 nt, Homo sapiens
  misc_RNA (1)...(19): siRNA sense strand
gugagcaggagguacuaaa

SEQ ID NO: 234695 - RNA, 19 nt, Homo sapiens
  misc_RNA (1)...(19): siRNA sense strand
ugucuggagcuuugggaua

SEQ ID NO: 234696 - RNA, 19 nt, Homo sapiens
  misc_RNA (1)...(19): siRNA sense strand
ggaaagcauacaacaucca

SEQ ID NO: 234697 - RNA, 19 nt, Homo sapiens
  misc_RNA (1)...(19): siRNA sense strand
caguaccuguccagcuuug

SEQ ID NO: 234698 - RNA, 19 nt, Homo sapiens
  misc_RNA (1)...(19): siRNA sense strand
ccagaccaaugggaacauc

SEQ ID NO: 234699 - RNA, 19 nt, Homo sapiens
  misc_RNA (1)...(19): siRNA sense strand
ggaagugaugaguuaugga

SEQ ID NO: 234700 - RNA, 19 nt, Homo sapiens
  misc_RNA (1)...(19): siRNA sense strand
ccagaggucauugcacaug

SEQ ID NO: 234701 - RNA, 19 nt, Homo sapiens
  misc_RNA (1)...(19): siRNA sense strand
aagucgauccugcuuauau

SEQ ID NO: 234702 - RNA, 19 nt, Homo sapiens
  misc_RNA (1)...(19): siRNA sense strand
gggaacauccuggacuauc

SEQ ID NO: 234703 - RNA, 19 nt, Homo sapiens
  misc_RNA (1)...(19): siRNA sense strand
caagguggacacaauugca

SEQ ID NO: 234704 - RNA, 19 nt, Homo sapiens
  misc_RNA (1)...(19): siRNA sense strand
agaagcugcugcaccacau

SEQ ID NO: 234705 - RNA, 19 nt, Homo sapiens
  misc_RNA (1)...(19): siRNA sense strand
uggcugcauuugacaagau

SEQ ID NO: 234706 - RNA, 19 nt, Homo sapiens
  misc_RNA (1)...(19): siRNA sense strand
gagcuuugggauacucaug

SEQ ID NO: 234707 - RNA, 19 nt, Homo sapiens
  misc_RNA (1)...(19): siRNA sense strand
cugucaggcucuucuccua

SEQ ID NO: 234708 - RNA, 19 nt, Homo sapiens
  misc_RNA (1)...(19): siRNA sense strand
cucuguaccuucagugaug

SEQ ID NO: 234709 - RNA, 19 nt, Homo sapiens
  misc_RNA (1)...(19): siRNA sense strand
gcaggagguacuaaaugca

SEQ ID NO: 234710 - RNA, 19 nt, Homo sapiens
  misc_RNA (1)...(19): siRNA sense strand
agaggucauugcacaugga

SEQ ID NO: 234711 - RNA, 19 nt, Homo sapiens
  misc_RNA (1)...(19): siRNA sense strand
augggaacauccuggacua

SEQ ID NO: 234712 - RNA, 19 nt, Homo sapiens
  misc_RNA (1)...(19): siRNA sense strand
ccaccggagagacaucuga

SEQ ID NO: 234713 - RNA, 19 nt, Homo sapiens
  misc_RNA (1)...(19): siRNA sense strand
caacauggguuuaguauua

SEQ ID NO: 234714 - RNA, 19 nt, Homo sapiens
  misc_RNA (1)...(19): siRNA sense strand
guaaaucucuguaugauga

SEQ ID NO: 234715 - RNA, 19 nt, Homo sapiens
  misc_RNA (1)...(19): siRNA sense strand
gaagaaagcuccaguucau

SEQ ID NO: 234716 - RNA, 19 nt, Homo sapiens
  misc_RNA (1)...(19): siRNA sense strand
gaaaguaaaucucuguaug

SEQ ID NO: 234717 - RNA, 19 nt, Homo sapiens
  misc_RNA (1)...(19): siRNA sense strand
gcagauacuugacuuauau

SEQ ID NO: 234718 - RNA, 19 nt, Homo sapiens
  misc_RNA (1)...(19): siRNA sense strand
gaagagggaugacaguuga

SEQ ID NO: 234719 - RNA, 19 nt, Homo sapiens
  misc_RNA (1)...(19): siRNA sense strand
gaacauacuuaguuggaaa

SEQ ID NO: 234720 - RNA, 19 nt, Homo sapiens
  misc_RNA (1)...(19): siRNA sense strand
gcaagaacccugccaagua

SEQ ID NO: 234721 - RNA, 19 nt, Homo sapiens
  misc_RNA (1)...(19): siRNA sense strand
ggaggaacaucacaucauu

SEQ ID NO: 234722 - RNA, 19 nt, Homo sapiens
  misc_RNA (1)...(19): siRNA sense strand
agauauagcuguucaagaa

SEQ ID NO: 234723 - RNA, 19 nt, Homo sapiens
  misc_RNA (1)...(19): siRNA sense strand
ggaaacugaucaugagauu

SEQ ID NO: 234724 - RNA, 19 nt, Homo sapiens
  misc_RNA (1)...(19): siRNA sense strand
gaagagcugucaguuugua

SEQ ID NO: 234725 - RNA, 19 nt, Homo sapiens
  misc_RNA (1)...(19): siRNA sense strand
caaguauucuggaaaguaa

SEQ ID NO: 234726 - RNA, 19 nt, Homo sapiens
  misc_RNA (1)...(19): siRNA sense strand
ugacagagaugagcaguuu

SEQ ID NO: 234727 - RNA, 19 nt, Homo sapiens
  misc_RNA (1)...(19): siRNA sense strand
ucacaugguuugucaauga

SEQ ID NO: 234728 - RNA, 19 nt, Homo sapiens
  misc_RNA (1)...(19): siRNA sense strand
ggaggagacuauacaacua

SEQ ID NO: 234729 - RNA, 19 nt, Homo sapiens
  misc_RNA (1)...(19): siRNA sense strand
caccuucucugaauaauaa

SEQ ID NO: 234730 - RNA, 19 nt, Homo sapiens
  misc_RNA (1)...(19): siRNA sense strand
ugacuuauaugcucaggua

SEQ ID NO: 234731 - RNA, 19 nt, Homo sapiens
  misc_RNA (1)...(19): siRNA sense strand
gaaguugggccacgugaua

SEQ ID NO: 234732 - RNA, 19 nt, Homo sapiens
  misc_RNA (1)...(19): siRNA sense strand
cagagaagcuaauucaaga

SEQ ID NO: 234733 - RNA, 19 nt, Homo sapiens
  misc_RNA (1)...(19): siRNA sense strand
gcucagggcuccucacguu

SEQ ID NO: 234734 - RNA, 19 nt, Homo sapiens
  misc_RNA (1)...(19): siRNA sense strand
gaauaagccucagaaacaa

SEQ ID NO: 234735 - RNA, 19 nt, Homo sapiens
  misc_RNA (1)...(19): siRNA sense strand
guacaagucuuugauagga

SEQ ID NO: 234736 - RNA, 19 nt, Homo sapiens
  misc_RNA (1)...(19): siRNA sense strand
uauugaagcuuuaggcaua

SEQ ID NO: 234737 - RNA, 19 nt, Homo sapiens
  misc_RNA (1)...(19): siRNA sense strand
ggaagacuuucagaagaua

SEQ ID NO: 234738 - RNA, 19 nt, Homo sapiens
  misc_RNA (1)...(19): siRNA sense strand
ccaaugcacuuucugaaga

SEQ ID NO: 234739 - RNA, 19 nt, Homo sapiens
  misc_RNA (1)...(19): siRNA sense strand
gcaagauguugggaaauuu

SEQ ID NO: 234740 - RNA, 19 nt, Homo sapiens
  misc_RNA (1)...(19): siRNA sense strand
agacuaaacuucaagcuau

SEQ ID NO: 234741 - RNA, 19 nt, Homo sapiens
  misc_RNA (1)...(19): siRNA sense strand
ggacaaagauaagaagaag

SEQ ID NO: 234742 - RNA, 19 nt, Homo sapiens
  misc_RNA (1)...(19): siRNA sense strand
caagaaagcaccaaaggaa

SEQ ID NO: 234743 - RNA, 19 nt, Homo sapiens
  misc_RNA (1)...(19): siRNA sense strand
caaaggaaaugccaacauc

SEQ ID NO: 234744 - RNA, 19 nt, Homo sapiens
  misc_RNA (1)...(19): siRNA sense strand
ggaagauguugcaauguug

SEQ ID NO: 234745 - RNA, 19 nt, Homo sapiens
  misc_RNA (1)...(19): siRNA sense strand
gagcugaggacaaagauaa

SEQ ID NO: 234746 - RNA, 19 nt, Homo sapiens
  misc_RNA (1)...(19): siRNA sense strand
caagaacuccuucagcuaa

SEQ ID NO: 234747 - RNA, 19 nt, Homo sapiens
  misc_RNA (1)...(19): siRNA sense strand
gauacuagauucuggaaag

SEQ ID NO: 234748 - RNA, 19 nt, Homo sapiens
  misc_RNA (1)...(19): siRNA sense strand
gaauauagucggcuaaauc

SEQ ID NO: 234749 - RNA, 19 nt, Homo sapiens
  misc_RNA (1)...(19): siRNA sense strand
aagaagcgcugauugcaaa

SEQ ID NO: 234750 - RNA, 19 nt, Homo sapiens
  misc_RNA (1)...(19): siRNA sense strand
ggugagaugguuacauuua

SEQ ID NO: 234751 - RNA, 19 nt, Homo sapiens
  misc_RNA (1)...(19): siRNA sense strand
ugagaagaaucuacaaaug

SEQ ID NO: 234752 - RNA, 19 nt, Homo sapiens
  misc_RNA (1)...(19): siRNA sense strand
ggaggugguucguaagcua

SEQ ID NO: 234753 - RNA, 19 nt, Homo sapiens
  misc_RNA (1)...(19): siRNA sense strand
gagaagaaucuacaaaugu

SEQ ID NO: 234754 - RNA, 19 nt, Homo sapiens
  misc_RNA (1)...(19): siRNA sense strand
ggacaacauggguuuagua

SEQ ID NO: 234755 - RNA, 19 nt, Homo sapiens
  misc_RNA (1)...(19): siRNA sense strand
caacuacaauagaagcauu

SEQ ID NO: 234756 - RNA, 19 nt, Homo sapiens
  misc_RNA (1)...(19): siRNA sense strand
gaagaacuccuggcaauuc

SEQ ID NO: 234757 - RNA, 19 nt, Homo sapiens
  misc_RNA (1)...(19): siRNA sense strand
gaacaacagaauaccauga

SEQ ID NO: 234758 - RNA, 19 nt, Homo sapiens
  misc_RNA (1)...(19): siRNA sense strand
cuacaaaugugggaagaaa

SEQ ID NO: 234759 - RNA, 19 nt, Homo sapiens
  misc_RNA (1)...(19): siRNA sense strand
caagaacccugccaaguac

SEQ ID NO: 234760 - RNA, 19 nt, Homo sapiens
  misc_RNA (1)...(19): siRNA sense strand
ggcaauuccuguuguuaaa

SEQ ID NO: 234761 - RNA, 19 nt, Homo sapiens
  misc_RNA (1)...(19): siRNA sense strand
gcaaguauucuggaaagua

SEQ ID NO: 234762 - RNA, 19 nt, Homo sapiens
  misc_RNA (1)...(19): siRNA sense strand
gaacauggagugggacaaa

SEQ ID NO: 234763 - RNA, 19 nt, Homo sapiens
  misc_RNA (1)...(19): siRNA sense strand
ugagagauccaacccuuua

SEQ ID NO: 234764 - RNA, 19 nt, Homo sapiens
  misc_RNA (1)...(19): siRNA sense strand
agaugugguucgugaauua

SEQ ID NO: 234765 - RNA, 19 nt, Homo sapiens
  misc_RNA (1)...(19): siRNA sense strand
ugaaagaaguagccaaaca

SEQ ID NO: 234766 - RNA, 19 nt, Homo sapiens
  misc_RNA (1)...(19): siRNA sense strand
gcacuaccagguuaacuuu

SEQ ID NO: 234767 - RNA, 19 nt, Homo sapiens
  misc_RNA (1)...(19): siRNA sense strand
ucaaguagauauagcuguu

SEQ ID NO: 234768 - RNA, 19 nt, Homo sapiens
  misc_RNA (1)...(19): siRNA sense strand
aaacuggccaggaauauaa

SEQ ID NO: 234769 - RNA, 19 nt, Homo sapiens
  misc_RNA (1)...(19): siRNA sense strand
ggagaaaacuggccaggaa

SEQ ID NO: 234770 - RNA, 19 nt, Homo sapiens
  misc_RNA (1)...(19): siRNA sense strand
uagaguggcuguucaagga

SEQ ID NO: 234771 - RNA, 19 nt, Homo sapiens
  misc_RNA (1)...(19): siRNA sense strand
caacaccuucucugaauaa

SEQ ID NO: 234772 - RNA, 19 nt, Homo sapiens
  misc_RNA (1)...(19): siRNA sense strand
ucauaucucuugaugcaaa

SEQ ID NO: 234773 - RNA, 19 nt, Homo sapiens
  misc_RNA (1)...(19): siRNA sense strand
aaagcaagauguugggaaa

SEQ ID NO: 234774 - RNA, 19 nt, Homo sapiens
  misc_RNA (1)...(19): siRNA sense strand
ggaaagauuguucagauuc

SEQ ID NO: 234775 - RNA, 19 nt, Homo sapiens
  misc_RNA (1)...(19): siRNA sense strand
gaacaucacaucauuuagg

SEQ ID NO: 234776 - RNA, 19 nt, Homo sapiens
  misc_RNA (1)...(19): siRNA sense strand
aaaugaagcuguagaaugc

SEQ ID NO: 234777 - RNA, 19 nt, Homo sapiens
  misc_RNA (1)...(19): siRNA sense strand
gcugaaauaggacagaaua

SEQ ID NO: 234778 - RNA, 19 nt, Homo sapiens
  misc_RNA (1)...(19): siRNA sense strand
gaugaaagaaguagccaaa

SEQ ID NO: 234779 - RNA, 19 nt, Homo sapiens
  misc_RNA (1)...(19): siRNA sense strand
gaagugaucccagugaaug

SEQ ID NO: 234780 - RNA, 19 nt, Homo sapiens
  misc_RNA (1)...(19): siRNA sense strand
aaacugaucaugagauuug

SEQ ID NO: 234781 - RNA, 19 nt, Homo sapiens
  misc_RNA (1)...(19): siRNA sense strand
ugauaggaguagaguauaa

SEQ ID NO: 234782 - RNA, 19 nt, Homo sapiens
  misc_RNA (1)...(19): siRNA sense strand
cugaagaccuuaagacuca

SEQ ID NO: 234783 - RNA, 19 nt, Homo sapiens
  misc_RNA (1)...(19): siRNA sense strand
gagcugauuuacgagauaa

SEQ ID NO: 234784 - RNA, 19 nt, Homo sapiens
  misc_RNA (1)...(19): siRNA sense strand
agaauaagccucagaaaca

SEQ ID NO: 234785 - RNA, 19 nt, Homo sapiens
  misc_RNA (1)...(19): siRNA sense strand
gaaagguuaccgucagauu

SEQ ID NO: 234786 - RNA, 19 nt, Homo sapiens
  misc_RNA (1)...(19): siRNA sense strand
guucagugcuacaaaauua

SEQ ID NO: 234787 - RNA, 19 nt, Homo sapiens
  misc_RNA (1)...(19): siRNA sense strand
gauaauuauucuccagguu

SEQ ID NO: 234788 - RNA, 19 nt, Homo sapiens
  misc_RNA (1)...(19): siRNA sense strand
gaggugggcucucaucaag

SEQ ID NO: 234789 - RNA, 19 nt, Homo sapiens
  misc_RNA (1)...(19): siRNA sense strand
uaaaugaagcuguagaaug

SEQ ID NO: 234790 - RNA, 19 nt, Homo sapiens
  misc_RNA (1)...(19): siRNA sense strand
ccaacaccuucucugaaua

SEQ ID NO: 234791 - RNA, 19 nt, Homo sapiens
  misc_RNA (1)...(19): siRNA sense strand
gaguuuagcagauuuaugu

SEQ ID NO: 234792 - RNA, 19 nt, Homo sapiens
  misc_RNA (1)...(19): siRNA sense strand
agaagaaucuacaaaugug

SEQ ID NO: 234793 - RNA, 19 nt, Homo sapiens
  misc_RNA (1)...(19): siRNA sense strand
gauuauuccuuguggcauu

SEQ ID NO: 234794 - RNA, 19 nt, Homo sapiens
  misc_RNA (1)...(19): siRNA sense strand
aaacccuccugcugaaaua

SEQ ID NO: 234795 - RNA, 19 nt, Homo sapiens
  misc_RNA (1)...(19): siRNA sense strand
gacaaaaucugggcguuua

SEQ ID NO: 234796 - RNA, 19 nt, Homo sapiens
  misc_RNA (1)...(19): siRNA sense strand
gcagagaagcuaauucaag

SEQ ID NO: 234797 - RNA, 19 nt, Homo sapiens
  misc_RNA (1)...(19): siRNA sense strand
caaguacuacaccuuauuu

SEQ ID NO: 234798 - RNA, 19 nt, Homo sapiens
  misc_RNA (1)...(19): siRNA sense strand
augaagagcugucaguuug

SEQ ID NO: 234799 - RNA, 19 nt, Homo sapiens
  misc_RNA (1)...(19): siRNA sense strand
cguuagagcugauuuacga

SEQ ID NO: 234800 - RNA, 19 nt, Homo sapiens
  misc_RNA (1)...(19): siRNA sense strand
gcauuuauaucugcuagug

SEQ ID NO: 234801 - RNA, 19 nt, Homo sapiens
  misc_RNA (1)...(19): siRNA sense strand
caaagccagugcuaggaaa

SEQ ID NO: 234802 - RNA, 19 nt, Homo sapiens
  misc_RNA (1)...(19): siRNA sense strand
uggaagauguugcaauguu

SEQ ID NO: 234803 - RNA, 19 nt, Homo sapiens
  misc_RNA (1)...(19): siRNA sense strand
acagagaccugcccaucaa

SEQ ID NO: 234804 - RNA, 19 nt, Homo sapiens
  misc_RNA (1)...(19): siRNA sense strand
gaggauucuucauauguga

SEQ ID NO: 234805 - RNA, 19 nt, Homo sapiens
  misc_RNA (1)...(19): siRNA sense strand
ggaauauagucggcuaaau

SEQ ID NO: 234806 - RNA, 19 nt, Homo sapiens
  misc_RNA (1)...(19): siRNA sense strand
ggaguucccauuagacuug

SEQ ID NO: 234807 - RNA, 19 nt, Homo sapiens
  misc_RNA (1)...(19): siRNA sense strand
gaagaaagacggaaaagga

SEQ ID NO: 234808 - RNA, 19 nt, Homo sapiens
  misc_RNA (1)...(19): siRNA sense strand
ucaaagugcauuagagaaa

SEQ ID NO: 234809 - RNA, 19 nt, Homo sapiens
  misc_RNA (1)...(19): siRNA sense strand
gaaagcuccaguucaugua

SEQ ID NO: 234810 - RNA, 19 nt, Homo sapiens
  misc_RNA (1)...(19): siRNA sense strand
aaaggaagauguagaugca

SEQ ID NO: 234811 - RNA, 19 nt, Homo sapiens
  misc_RNA (1)...(19): siRNA sense strand
gagaugugguucgugaauu

SEQ ID NO: 234812 - RNA, 19 nt, Homo sapiens
  misc_RNA (1)...(19): siRNA sense strand
gagacuaaacuucaagcua

SEQ ID NO: 234813 - RNA, 19 nt, Homo sapiens
  misc_RNA (1)...(19): siRNA sense strand
caaaugcacuuaagucuuu

SEQ ID NO: 234814 - RNA, 19 nt, Homo sapiens
  misc_RNA (1)...(19): siRNA sense strand
gcacaucaguuacuacaaa

SEQ ID NO: 234815 - RNA, 19 nt, Homo sapiens
  misc_RNA (1)...(19): siRNA sense strand
gcacuuaagucuuuaucaa

SEQ ID NO: 234816 - RNA, 19 nt, Homo sapiens
  misc_RNA (1)...(19): siRNA sense strand
gagagaaccuguaggaguu

SEQ ID NO: 234817 - RNA, 19 nt, Homo sapiens
  misc_RNA (1)...(19): siRNA sense strand
gagcguauaugacaucgaa

SEQ ID NO: 234818 - RNA, 19 nt, Homo sapiens
  misc_RNA (1)...(19): siRNA sense strand
gcaccaucaucuacuauuu

SEQ ID NO: 234819 - RNA, 19 nt, Homo sapiens
  misc_RNA (1)...(19): siRNA sense strand
ggaagacucccaggauuua

SEQ ID NO: 234820 - RNA, 19 nt, Homo sapiens
  misc_RNA (1)...(19): siRNA sense strand
ccaccaagcacuggaauua

SEQ ID NO: 234821 - RNA, 19 nt, Homo sapiens
  misc_RNA (1)...(19): siRNA sense strand
uagaugauguuuccucuga

SEQ ID NO: 234822 - RNA, 19 nt, Homo sapiens
  misc_RNA (1)...(19): siRNA sense strand
gagaauauuuacagugcaa

SEQ ID NO: 234823 - RNA, 19 nt, Homo sapiens
  misc_RNA (1)...(19): siRNA sense strand
gccagacaccuuauucuua

SEQ ID NO: 234824 - RNA, 19 nt, Homo sapiens
  misc_RNA (1)...(19): siRNA sense strand
gcacuggaauuagaguauu

SEQ ID NO: 234825 - RNA, 19 nt, Homo sapiens
  misc_RNA (1)...(19): siRNA sense strand
cugcauaaaugucuuggua

SEQ ID NO: 234826 - RNA, 19 nt, Homo sapiens
  misc_RNA (1)...(19): siRNA sense strand
gaucagcacaucaguauuc

SEQ ID NO: 234827 - RNA, 19 nt, Homo sapiens
  misc_RNA (1)...(19): siRNA sense strand
gauguuuccucugaugaua

SEQ ID NO: 234828 - RNA, 19 nt, Homo sapiens
  misc_RNA (1)...(19): siRNA sense strand
gaauuucagugguucacaa

SEQ ID NO: 234829 - RNA, 19 nt, Homo sapiens
  misc_RNA (1)...(19): siRNA sense strand
cagaguggcugccucaguu

SEQ ID NO: 234830 - RNA, 19 nt, Homo sapiens
  misc_RNA (1)...(19): siRNA sense strand
aggaguaacugcauaaaug

SEQ ID NO: 234831 - RNA, 19 nt, Homo sapiens
  misc_RNA (1)...(19): siRNA sense strand
gcuaacaaaugcacuuaag

SEQ ID NO: 234832 - RNA, 19 nt, Homo sapiens
  misc_RNA (1)...(19): siRNA sense strand
caacugaucccagcacuug

SEQ ID NO: 234833 - RNA, 19 nt, Homo sapiens
  misc_RNA (1)...(19): siRNA sense strand
agaaucagauguuucacaa

SEQ ID NO: 234834 - RNA, 19 nt, Homo sapiens
  misc_RNA (1)...(19): siRNA sense strand
gaugauguuuccucugaug

SEQ ID NO: 234835 - RNA, 19 nt, Homo sapiens
  misc_RNA (1)...(19): siRNA sense strand
ggucuuaugcacagaagua

SEQ ID NO: 234836 - RNA, 19 nt, Homo sapiens
  misc_RNA (1)...(19): siRNA sense strand
aaucagauguuucacaauc

SEQ ID NO: 234837 - RNA, 19 nt, Homo sapiens
  misc_RNA (1)...(19): siRNA sense strand
gcauaaaugucuugguaac

SEQ ID NO: 234838 - RNA, 19 nt, Homo sapiens
  misc_RNA (1)...(19): siRNA sense strand
gaugagagaaccuguagga

SEQ ID NO: 234839 - RNA, 19 nt, Homo sapiens
  misc_RNA (1)...(19): siRNA sense strand
gcaaauaauucaguuucca

SEQ ID NO: 234840 - RNA, 19 nt, Homo sapiens
  misc_RNA (1)...(19): siRNA sense strand
ccagacaccuuauucuuac

SEQ ID NO: 234841 - RNA, 19 nt, Homo sapiens
  misc_RNA (1)...(19): siRNA sense strand
aaacagagcccuugaacag

SEQ ID NO: 234842 - RNA, 19 nt, Homo sapiens
  misc_RNA (1)...(19): siRNA sense strand
ggucaguaauuacaaguag

SEQ ID NO: 234843 - RNA, 19 nt, Homo sapiens
  misc_RNA (1)...(19): siRNA sense strand
gaggauauccagucacuca

SEQ ID NO: 234844 - RNA, 19 nt, Homo sapiens
  misc_RNA (1)...(19): siRNA sense strand
gagaguggacuuucccaaa

SEQ ID NO: 234845 - RNA, 19 nt, Homo sapiens
  misc_RNA (1)...(19): siRNA sense strand
gugaucaaguucauauaga

SEQ ID NO: 234846 - RNA, 19 nt, Homo sapiens
  misc_RNA (1)...(19): siRNA sense strand
cgaagguucuacucuauag

SEQ ID NO: 234847 - RNA, 19 nt, Homo sapiens
  misc_RNA (1)...(19): siRNA sense strand
aaaccaguaugcacaguau

SEQ ID NO: 234848 - RNA, 19 nt, Homo sapiens
  misc_RNA (1)...(19): siRNA sense strand
caaagaucuugaugagaga

SEQ ID NO: 234849 - RNA, 19 nt, Homo sapiens
  misc_RNA (1)...(19): siRNA sense strand
caacguauggagcguauau

SEQ ID NO: 234850 - RNA, 19 nt, Homo sapiens
  misc_RNA (1)...(19): siRNA sense strand
uauaacaccuacaagaaca

SEQ ID NO: 234851 - RNA, 19 nt, Homo sapiens
  misc_RNA (1)...(19): siRNA sense strand
caccaucaucuacuauuua

SEQ ID NO: 234852 - RNA, 19 nt, Homo sapiens
  misc_RNA (1)...(19): siRNA sense strand
guucuacucuauaguuuag

SEQ ID NO: 234853 - RNA, 19 nt, Homo sapiens
  misc_RNA (1)...(19): siRNA sense strand
uaacaaaugcacuuaaguc

SEQ ID NO: 234854 - RNA, 19 nt, Homo sapiens
  misc_RNA (1)...(19): siRNA sense strand
gcguauaugacaucgaaua

SEQ ID NO: 234855 - RNA, 19 nt, Homo sapiens
  misc_RNA (1)...(19): siRNA sense strand
auggagcgcuugacacuuu

SEQ ID NO: 234856 - RNA, 19 nt, Homo sapiens
  misc_RNA (1)...(19): siRNA sense strand
gaaguuggcuuuucguuac

SEQ ID NO: 234857 - RNA, 19 nt, Homo sapiens
  misc_RNA (1)...(19): siRNA sense strand
gcacagaaucagauguuuc

SEQ ID NO: 234858 - RNA, 19 nt, Homo sapiens
  misc_RNA (1)...(19): siRNA sense strand
caaacaaugucugccuaug

SEQ ID NO: 234859 - RNA, 19 nt, Homo sapiens
  misc_RNA (1)...(19): siRNA sense strand
gcgaagguucuacucuaua

SEQ ID NO: 234860 - RNA, 19 nt, Homo sapiens
  misc_RNA (1)...(19): siRNA sense strand
ggaguaacugcauaaaugu

SEQ ID NO: 234861 - RNA, 19 nt, Homo sapiens
  misc_RNA (1)...(19): siRNA sense strand
ccucuucaaccucuacuua

SEQ ID NO: 234862 - RNA, 19 nt, Homo sapiens
  misc_RNA (1)...(19): siRNA sense strand
ucaacgaauuucagugguu

SEQ ID NO: 234863 - RNA, 19 nt, Homo sapiens
  misc_RNA (1)...(19): siRNA sense strand
caaaugccagguucuaguu

SEQ ID NO: 234864 - RNA, 19 nt, Homo sapiens
  misc_RNA (1)...(19): siRNA sense strand
ggagugugaucaaguucau

SEQ ID NO: 234865 - RNA, 19 nt, Homo sapiens
  misc_RNA (1)...(19): siRNA sense strand
acagauuccuggcuaacaa

SEQ ID NO: 234866 - RNA, 19 nt, Homo sapiens
  misc_RNA (1)...(19): siRNA sense strand
cagaucagcacaucaguau

SEQ ID NO: 234867 - RNA, 19 nt, Homo sapiens
  misc_RNA (1)...(19): siRNA sense strand
agaggagugugaucaaguu

SEQ ID NO: 234868 - RNA, 19 nt, Homo sapiens
  misc_RNA (1)...(19): siRNA sense strand
ggacuccgcauggaagaaa

SEQ ID NO: 234869 - RNA, 19 nt, Homo sapiens
  misc_RNA (1)...(19): siRNA sense strand
guaacgacaacucaacuga

SEQ ID NO: 234870 - RNA, 19 nt, Homo sapiens
  misc_RNA (1)...(19): siRNA sense strand
caagcccuauccacacauu

SEQ ID NO: 234871 - RNA, 19 nt, Homo sapiens
  misc_RNA (1)...(19): siRNA sense strand
ccacacccaucaaagaucu

SEQ ID NO: 234872 - RNA, 19 nt, Homo sapiens
  misc_RNA (1)...(19): siRNA sense strand
gaagacucccaggauuuaa

SEQ ID NO: 234873 - RNA, 19 nt, Homo sapiens
  misc_RNA (1)...(19): siRNA sense strand
ggaugaggaaguuggcuuu

SEQ ID NO: 234874 - RNA, 19 nt, Homo sapiens
  misc_RNA (1)...(19): siRNA sense strand
caaccucuacuuaucaguu

SEQ ID NO: 234875 - RNA, 19 nt, Homo sapiens
  misc_RNA (1)...(19): siRNA sense strand
ggaaaugcaggaccuagca

SEQ ID NO: 234876 - RNA, 19 nt, Homo sapiens
  misc_RNA (1)...(19): siRNA sense strand
ccuacagcuugcccacuua

SEQ ID NO: 234877 - RNA, 19 nt, Homo sapiens
  misc_RNA (1)...(19): siRNA sense strand
ucucagaauuccaggucua

SEQ ID NO: 234878 - RNA, 19 nt, Homo sapiens
  misc_RNA (1)...(19): siRNA sense strand
auaaaugucuugguaacga

SEQ ID NO: 234879 - RNA, 19 nt, Homo sapiens
  misc_RNA (1)...(19): siRNA sense strand
ggaaguuggcuuuucguua

SEQ ID NO: 234880 - RNA, 19 nt, Homo sapiens
  misc_RNA (1)...(19): siRNA sense strand
gaucaaguucauauagaug

SEQ ID NO: 234881 - RNA, 19 nt, Homo sapiens
  misc_RNA (1)...(19): siRNA sense strand
uaaccaaccaggagaguuc

SEQ ID NO: 234882 - RNA, 19 nt, Homo sapiens
  misc_RNA (1)...(19): siRNA sense strand
guauggagcguauaugaca

SEQ ID NO: 234883 - RNA, 19 nt, Homo sapiens
  misc_RNA (1)...(19): siRNA sense strand
gauuauccauccuauacag

SEQ ID NO: 234884 - RNA, 19 nt, Homo sapiens
  misc_RNA (1)...(19): siRNA sense strand
gaccuagcaaguccucaua

SEQ ID NO: 234885 - RNA, 19 nt, Homo sapiens
  misc_RNA (1)...(19): siRNA sense strand
cgauuugggugugauguug

SEQ ID NO: 234886 - RNA, 19 nt, Homo sapiens
  misc_RNA (1)...(19): siRNA sense strand
ggagauggagcgcuugaca

SEQ ID NO: 234887 - RNA, 19 nt, Homo sapiens
  misc_RNA (1)...(19): siRNA sense strand
uugcgaagguucuacucua

SEQ ID NO: 234888 - RNA, 19 nt, Homo sapiens
  misc_RNA (1)...(19): siRNA sense strand
caggagaguucgauaccau

SEQ ID NO: 234889 - RNA, 19 nt, Homo sapiens
  misc_RNA (1)...(19): siRNA sense strand
ccagaucagcacaucagua

SEQ ID NO: 234890 - RNA, 19 nt, Homo sapiens
  misc_RNA (1)...(19): siRNA sense strand
gcagccagccgucuacaca

SEQ ID NO: 234891 - RNA, 19 nt, Homo sapiens
  misc_RNA (1)...(19): siRNA sense strand
cacuggaauuagaguauuu

SEQ ID NO: 234892 - RNA, 19 nt, Homo sapiens
  misc_RNA (1)...(19): siRNA sense strand
accaagcacuggaauuaga

SEQ ID NO: 234893 - RNA, 19 nt, Homo sapiens
  misc_RNA (1)...(19): siRNA sense strand
ggaugccuggcuacaguua

SEQ ID NO: 234894 - RNA, 19 nt, Homo sapiens
  misc_RNA (1)...(19): siRNA sense strand
caaccaggagaguucgaua

SEQ ID NO: 234895 - RNA, 19 nt, Homo sapiens
  misc_RNA (1)...(19): siRNA sense strand
gcacaguauuauucagcau

SEQ ID NO: 234896 - RNA, 19 nt, Homo sapiens
  misc_RNA (1)...(19): siRNA sense strand
acagaaguauggcaaggau

SEQ ID NO: 234897 - RNA, 19 nt, Homo sapiens
  misc_RNA (1)...(19): siRNA sense strand
gaaaugcaggaccuagcaa

SEQ ID NO: 234898 - RNA, 19 nt, Homo sapiens
  misc_RNA (1)...(19): siRNA sense strand
gcacuaggaguaacugcau

SEQ ID NO: 234899 - RNA, 19 nt, Homo sapiens
  misc_RNA (1)...(19): siRNA sense strand
auuauuagcacuaggagua

SEQ ID NO: 234900 - RNA, 19 nt, Homo sapiens
  misc_RNA (1)...(19): siRNA sense strand
ccgcauggaagaaaugauu

SEQ ID NO: 234901 - RNA, 19 nt, Homo sapiens
  misc_RNA (1)...(19): siRNA sense strand
accagcagcucaaacaaug

SEQ ID NO: 234902 - RNA, 19 nt, Homo sapiens
  misc_RNA (1)...(19): siRNA sense strand
ggauauccagucacucaga

SEQ ID NO: 234903 - RNA, 19 nt, Homo sapiens
  misc_RNA (1)...(19): siRNA sense strand
guaacugcauaaaugucuu

SEQ ID NO: 234904 - RNA, 19 nt, Homo sapiens
  misc_RNA (1)...(19): siRNA sense strand
cguauaugacaucgaauaa

SEQ ID NO: 234905 - RNA, 19 nt, Homo sapiens
  misc_RNA (1)...(19): siRNA sense strand
caggacagcccuacagcuu

SEQ ID NO: 234906 - RNA, 19 nt, Homo sapiens
  misc_RNA (1)...(19): siRNA sense strand
gaaucucucccaggacuga

SEQ ID NO: 234907 - RNA, 19 nt, Homo sapiens
  misc_RNA (1)...(19): siRNA sense strand
gugguucacaacaggauua

SEQ ID NO: 234908 - RNA, 19 nt, Homo sapiens
  misc_RNA (1)...(19): siRNA sense strand
caucaucuacuauuuaugc

SEQ ID NO: 234909 - RNA, 19 nt, Homo sapiens
  misc_RNA (1)...(19): siRNA sense strand
ggccagacaccuuauucuu

SEQ ID NO: 234910 - RNA, 19 nt, Homo sapiens
  misc_RNA (1)...(19): siRNA sense strand
ccaggucuauggaaaugca

SEQ ID NO: 234911 - RNA, 19 nt, Homo sapiens
  misc_RNA (1)...(19): siRNA sense strand
ccuccuggcucuccaccaa

SEQ ID NO: 234912 - RNA, 19 nt, Homo sapiens
  misc_RNA (1)...(19): siRNA sense strand
gguucuacucuauaguuua

SEQ ID NO: 234913 - RNA, 19 nt, Homo sapiens
  misc_RNA (1)...(19): siRNA sense strand
caaaugcacuuaagucuuu

SEQ ID NO: 234914 - RNA, 19 nt, Homo sapiens
  misc_RNA (1)...(19): siRNA sense strand
gcacuuaagucuuuaucaa

SEQ ID NO: 234915 - RNA, 19 nt, Homo sapiens
  misc_RNA (1)...(19): siRNA sense strand
gagagaaccuguaggaguu

SEQ ID NO: 234916 - RNA, 19 nt, Homo sapiens
  misc_RNA (1)...(19): siRNA sense strand
gagcguauaugacaucgaa

SEQ ID NO: 234917 - RNA, 19 nt, Homo sapiens
  misc_RNA (1)...(19): siRNA sense strand
gcaccaucaucuacuauuu

SEQ ID NO: 234918 - RNA, 19 nt, Homo sapiens
  misc_RNA (1)...(19): siRNA sense strand
ccaccaagcacuggaauua

SEQ ID NO: 234919 - RNA, 19 nt, Homo sapiens
  misc_RNA (1)...(19): siRNA sense strand
uagaugauguuuccucuga

SEQ ID NO: 234920 - RNA, 19 nt, Homo sapiens
  misc_RNA (1)...(19): siRNA sense strand
gagaauauuuacagugcaa

SEQ ID NO: 234921 - RNA, 19 nt, Homo sapiens
  misc_RNA (1)...(19): siRNA sense strand
gccagacaccuuauucuua

SEQ ID NO: 234922 - RNA, 19 nt, Homo sapiens
  misc_RNA (1)...(19): siRNA sense strand
gcacuggaauuagaguauu

SEQ ID NO: 234923 - RNA, 19 nt, Homo sapiens
  misc_RNA (1)...(19): siRNA sense strand
cugcauaaaugucuuggua

SEQ ID NO: 234924 - RNA, 19 nt, Homo sapiens
  misc_RNA (1)...(19): siRNA sense strand
gaucagcacaucaguauuc

SEQ ID NO: 234925 - RNA, 19 nt, Homo sapiens
  misc_RNA (1)...(19): siRNA sense strand
gauguuuccucugaugaua

SEQ ID NO: 234926 - RNA, 19 nt, Homo sapiens
  misc_RNA (1)...(19): siRNA sense strand
gaauuucagugguucacaa

SEQ ID NO: 234927 - RNA, 19 nt, Homo sapiens
  misc_RNA (1)...(19): siRNA sense strand
cagaguggcugccucaguu

SEQ ID NO: 234928 - RNA, 19 nt, Homo sapiens
  misc_RNA (1)...(19): siRNA sense strand
aggaguaacugcauaaaug

SEQ ID NO: 234929 - RNA, 19 nt, Homo sapiens
  misc_RNA (1)...(19): siRNA sense strand
gcuaacaaaugcacuuaag

SEQ ID NO: 234930 - RNA, 19 nt, Homo sapiens
  misc_RNA (1)...(19): siRNA sense strand
caacugaucccagcacuug

SEQ ID NO: 234931 - RNA, 19 nt, Homo sapiens
  misc_RNA (1)...(19): siRNA sense strand
gaugauguuuccucugaug

SEQ ID NO: 234932 - RNA, 19 nt, Homo sapiens
  misc_RNA (1)...(19): siRNA sense strand
ggucuuaugcacagaagua

SEQ ID NO: 234933 - RNA, 19 nt, Homo sapiens
  misc_RNA (1)...(19): siRNA sense strand
ccagacaccuuauucuuac

SEQ ID NO: 234934 - RNA, 19 nt, Homo sapiens
  misc_RNA (1)...(19): siRNA sense strand
gcauaaaugucuugguaac

SEQ ID NO: 234935 - RNA, 19 nt, Homo sapiens
  misc_RNA (1)...(19): siRNA sense strand
aaacagagcccuugaacag

SEQ ID NO: 234936 - RNA, 19 nt, Homo sapiens
  misc_RNA (1)...(19): siRNA sense strand
gaugagagaaccuguagga

SEQ ID NO: 234937 - RNA, 19 nt, Homo sapiens
  misc_RNA (1)...(19): siRNA sense strand
gcaaauaauucaguuucca

SEQ ID NO: 234938 - RNA, 19 nt, Homo sapiens
  misc_RNA (1)...(19): siRNA sense strand
ggucaguaauuacaaguag

SEQ ID NO: 234939 - RNA, 19 nt, Homo sapiens
  misc_RNA (1)...(19): siRNA sense strand
gaggauauccagucacuca

SEQ ID NO: 234940 - RNA, 19 nt, Homo sapiens
  misc_RNA (1)...(19): siRNA sense strand
gagaguggacuuucccaaa

SEQ ID NO: 234941 - RNA, 19 nt, Homo sapiens
  misc_RNA (1)...(19): siRNA sense strand
gugaucaaguucauauaga

SEQ ID NO: 234942 - RNA, 19 nt, Homo sapiens
  misc_RNA (1)...(19): siRNA sense strand
cgaagguucuacucuauag

SEQ ID NO: 234943 - RNA, 19 nt, Homo sapiens
  misc_RNA (1)...(19): siRNA sense strand
aaaccaguaugcacaguau

SEQ ID NO: 234944 - RNA, 19 nt, Homo sapiens
  misc_RNA (1)...(19): siRNA sense strand
caaagaucuugaugagaga

SEQ ID NO: 234945 - RNA, 19 nt, Homo sapiens
  misc_RNA (1)...(19): siRNA sense strand
caacguauggagcguauau

SEQ ID NO: 234946 - RNA, 19 nt, Homo sapiens
  misc_RNA (1)...(19): siRNA sense strand
uauaacaccuacaagaaca

SEQ ID NO: 234947 - RNA, 19 nt, Homo sapiens
  misc_RNA (1)...(19): siRNA sense strand
caccaucaucuacuauuua

SEQ ID NO: 234948 - RNA, 19 nt, Homo sapiens
  misc_RNA (1)...(19): siRNA sense strand
guucuacucuauaguuuag

SEQ ID NO: 234949 - RNA, 19 nt, Homo sapiens
  misc_RNA (1)...(19): siRNA sense strand
uaacaaaugcacuuaaguc

SEQ ID NO: 234950 - RNA, 19 nt, Homo sapiens
  misc_RNA (1)...(19): siRNA sense strand
gcguauaugacaucgaaua

SEQ ID NO: 234951 - RNA, 19 nt, Homo sapiens
  misc_RNA (1)...(19): siRNA sense strand
auggagcgcuugacacuuu

SEQ ID NO: 234952 - RNA, 19 nt, Homo sapiens
  misc_RNA (1)...(19): siRNA sense strand
gaaguuggcuuuucguuac

SEQ ID NO: 234953 - RNA, 19 nt, Homo sapiens
  misc_RNA (1)...(19): siRNA sense strand
caaacaaugucugccuaug

SEQ ID NO: 234954 - RNA, 19 nt, Homo sapiens
  misc_RNA (1)...(19): siRNA sense strand
gcgaagguucuacucuaua

SEQ ID NO: 234955 - RNA, 19 nt, Homo sapiens
  misc_RNA (1)...(19): siRNA sense strand
ggaguaacugcauaaaugu

SEQ ID NO: 234956 - RNA, 19 nt, Homo sapiens
  misc_RNA (1)...(19): siRNA sense strand
ccucuucaaccucuacuua

SEQ ID NO: 234957 - RNA, 19 nt, Homo sapiens
  misc_RNA (1)...(19): siRNA sense strand
ucaacgaauuucagugguu

SEQ ID NO: 234958 - RNA, 19 nt, Homo sapiens
  misc_RNA (1)...(19): siRNA sense strand
caaaugccagguucuaguu

SEQ ID NO: 234959 - RNA, 19 nt, Homo sapiens
  misc_RNA (1)...(19): siRNA sense strand
ggagugugaucaaguucau

SEQ ID NO: 234960 - RNA, 19 nt, Homo sapiens
  misc_RNA (1)...(19): siRNA sense strand
acagauuccuggcuaacaa

SEQ ID NO: 234961 - RNA, 19 nt, Homo sapiens
  misc_RNA (1)...(19): siRNA sense strand
cagaucagcacaucaguau

SEQ ID NO: 234962 - RNA, 19 nt, Homo sapiens
  misc_RNA (1)...(19): siRNA sense strand
agaggagugugaucaaguu

SEQ ID NO: 234963 - RNA, 19 nt, Homo sapiens
  misc_RNA (1)...(19): siRNA sense strand
ggacuccgcauggaagaaa

SEQ ID NO: 234964 - RNA, 19 nt, Homo sapiens
  misc_RNA (1)...(19): siRNA sense strand
guaacgacaacucaacuga

SEQ ID NO: 234965 - RNA, 19 nt, Homo sapiens
  misc_RNA (1)...(19): siRNA sense strand
caagcccuauccacacauu

SEQ ID NO: 234966 - RNA, 19 nt, Homo sapiens
  misc_RNA (1)...(19): siRNA sense strand
ccacacccaucaaagaucu

SEQ ID NO: 234967 - RNA, 19 nt, Homo sapiens
  misc_RNA (1)...(19): siRNA sense strand
caaccucuacuuaucaguu

SEQ ID NO: 234968 - RNA, 19 nt, Homo sapiens
  misc_RNA (1)...(19): siRNA sense strand
ggaugaggaaguuggcuuu

SEQ ID NO: 234969 - RNA, 19 nt, Homo sapiens
  misc_RNA (1)...(19): siRNA sense strand
ccuacagcuugcccacuua

SEQ ID NO: 234970 - RNA, 19 nt, Homo sapiens
  misc_RNA (1)...(19): siRNA sense strand
auaaaugucuugguaacga

SEQ ID NO: 234971 - RNA, 19 nt, Homo sapiens
  misc_RNA (1)...(19): siRNA sense strand
ggaaguuggcuuuucguua

SEQ ID NO: 234972 - RNA, 19 nt, Homo sapiens
  misc_RNA (1)...(19): siRNA sense strand
gaucaaguucauauagaug

SEQ ID NO: 234973 - RNA, 19 nt, Homo sapiens
  misc_RNA (1)...(19): siRNA sense strand
uaaccaaccaggagaguuc

SEQ ID NO: 234974 - RNA, 19 nt, Homo sapiens
  misc_RNA (1)...(19): siRNA sense strand
guauggagcguauaugaca

SEQ ID NO: 234975 - RNA, 19 nt, Homo sapiens
  misc_RNA (1)...(19): siRNA sense strand
gauuauccauccuauacag

SEQ ID NO: 234976 - RNA, 19 nt, Homo sapiens
  misc_RNA (1)...(19): siRNA sense strand
cgauuugggugugauguug

SEQ ID NO: 234977 - RNA, 19 nt, Homo sapiens
  misc_RNA (1)...(19): siRNA sense strand
caggagaguucgauaccau

SEQ ID NO: 234978 - RNA, 19 nt, Homo sapiens
  misc_RNA (1)...(19): siRNA sense strand
uugcgaagguucuacucua

SEQ ID NO: 234979 - RNA, 19 nt, Homo sapiens
  misc_RNA (1)...(19): siRNA sense strand
ggagauggagcgcuugaca

SEQ ID NO: 234980 - RNA, 19 nt, Homo sapiens
  misc_RNA (1)...(19): siRNA sense strand
ccagaucagcacaucagua

SEQ ID NO: 234981 - RNA, 19 nt, Homo sapiens
  misc_RNA (1)...(19): siRNA sense strand
gcagccagccgucuacaca

SEQ ID NO: 234982 - RNA, 19 nt, Homo sapiens
  misc_RNA (1)...(19): siRNA sense strand
cacuggaauuagaguauuu

SEQ ID NO: 234983 - RNA, 19 nt, Homo sapiens
  misc_RNA (1)...(19): siRNA sense strand
accaagcacuggaauuaga

SEQ ID NO: 234984 - RNA, 19 nt, Homo sapiens
  misc_RNA (1)...(19): siRNA sense strand
ggaugccuggcuacaguua

SEQ ID NO: 234985 - RNA, 19 nt, Homo sapiens
  misc_RNA (1)...(19): siRNA sense strand
caaccaggagaguucgaua

SEQ ID NO: 234986 - RNA, 19 nt, Homo sapiens
  misc_RNA (1)...(19): siRNA sense strand
gcacaguauuauucagcau

SEQ ID NO: 234987 - RNA, 19 nt, Homo sapiens
  misc_RNA (1)...(19): siRNA sense strand
acagaaguauggcaaggau

SEQ ID NO: 234988 - RNA, 19 nt, Homo sapiens
  misc_RNA (1)...(19): siRNA sense strand
gcacuaggaguaacugcau

SEQ ID NO: 234989 - RNA, 19 nt, Homo sapiens
  misc_RNA (1)...(19): siRNA sense strand
auuauuagcacuaggagua

SEQ ID NO: 234990 - RNA, 19 nt, Homo sapiens
  misc_RNA (1)...(19): siRNA sense strand
ccgcauggaagaaaugauu

SEQ ID NO: 234991 - RNA, 19 nt, Homo sapiens
  misc_RNA (1)...(19): siRNA sense strand
cguauaugacaucgaauaa

SEQ ID NO: 234992 - RNA, 19 nt, Homo sapiens
  misc_RNA (1)...(19): siRNA sense strand
ggauauccagucacucaga

SEQ ID NO: 234993 - RNA, 19 nt, Homo sapiens
  misc_RNA (1)...(19): siRNA sense strand
guaacugcauaaaugucuu

SEQ ID NO: 234994 - RNA, 19 nt, Homo sapiens
  misc_RNA (1)...(19): siRNA sense strand
accagcagcucaaacaaug

SEQ ID NO: 234995 - RNA, 19 nt, Homo sapiens
  misc_RNA (1)...(19): siRNA sense strand
caggacagcccuacagcuu

SEQ ID NO: 234996 - RNA, 19 nt, Homo sapiens
  misc_RNA (1)...(19): siRNA sense strand
gaaucucucccaggacuga

SEQ ID NO: 234997 - RNA, 19 nt, Homo sapiens
  misc_RNA (1)...(19): siRNA sense strand
gugguucacaacaggauua

SEQ ID NO: 234998 - RNA, 19 nt, Homo sapiens
  misc_RNA (1)...(19): siRNA sense strand
caucaucuacuauuuaugc

SEQ ID NO: 234999 - RNA, 19 nt, Homo sapiens
  misc_RNA (1)...(19): siRNA sense strand
ggccagacaccuuauucuu

SEQ ID NO: 235000 - RNA, 19 nt, Homo sapiens
  misc_RNA (1)...(19): siRNA sense strand
gggucaaaguccagaggaa

SEQ ID NO: 235001 - RNA, 19 nt, Homo sapiens
  misc_RNA (1)...(19): siRNA sense strand
ccuccuggcucuccaccaa

SEQ ID NO: 235002 - RNA, 19 nt, Homo sapiens
  misc_RNA (1)...(19): siRNA sense strand
gguucuacucuauaguuua

SEQ ID NO: 235003 - RNA, 19 nt, Homo sapiens
  misc_RNA (1)...(19): siRNA sense strand
accaguaugcacaguauua

SEQ ID NO: 235004 - RNA, 19 nt, Homo sapiens
  misc_RNA (1)...(19): siRNA sense strand
ucaauuauuagcacuagga

SEQ ID NO: 235005 - RNA, 19 nt, Homo sapiens
  misc_RNA (1)...(19): siRNA sense strand
gaguggacuuucccaaacu

SEQ ID NO: 235006 - RNA, 19 nt, Homo sapiens
  misc_RNA (1)...(19): siRNA sense strand
guuaagggcagagauugaa

SEQ ID NO: 235007 - RNA, 19 nt, Homo sapiens
  misc_RNA (1)...(19): siRNA sense strand
ugaccuggagcguguguuu

SEQ ID NO: 235008 - RNA, 19 nt, Homo sapiens
  misc_RNA (1)...(19): siRNA sense strand
acaguauuauucagcauca

SEQ ID NO: 235009 - RNA, 19 nt, Homo sapiens
  misc_RNA (1)...(19): siRNA sense strand
ggacuuucccaaacucagu

SEQ ID NO: 235010 - RNA, 19 nt, Homo sapiens
  misc_RNA (1)...(19): siRNA sense strand
aacaaugucugccuaugca

SEQ ID NO: 235011 - RNA, 19 nt, Homo sapiens
  misc_RNA (1)...(19): siRNA sense strand
aacgacaacucaacugauc

SEQ ID NO: 235012 - RNA, 19 nt, Homo sapiens
  misc_RNA (1)...(19): siRNA sense strand
cacuaggaguaacugcaua

SEQ ID NO: 235013 - RNA, 19 nt, Homo sapiens
  misc_RNA (1)...(19): siRNA sense strand
caaaugcacuuaagucuuu

SEQ ID NO: 235014 - RNA, 19 nt, Homo sapiens
  misc_RNA (1)...(19): siRNA sense strand
gcacaucaguuacuacaaa

SEQ ID NO: 235015 - RNA, 19 nt, Homo sapiens
  misc_RNA (1)...(19): siRNA sense strand
gcacuuaagucuuuaucaa

SEQ ID NO: 235016 - RNA, 19 nt, Homo sapiens
  misc_RNA (1)...(19): siRNA sense strand
gagagaaccuguaggaguu

SEQ ID NO: 235017 - RNA, 19 nt, Homo sapiens
  misc_RNA (1)...(19): siRNA sense strand
gagcguauaugacaucgaa

SEQ ID NO: 235018 - RNA, 19 nt, Homo sapiens
  misc_RNA (1)...(19): siRNA sense strand
gcaccaucaucuacuauuu

SEQ ID NO: 235019 - RNA, 19 nt, Homo sapiens
  misc_RNA (1)...(19): siRNA sense strand
ggaagacucccaggauuua

SEQ ID NO: 235020 - RNA, 19 nt, Homo sapiens
  misc_RNA (1)...(19): siRNA sense strand
ccaccaagcacuggaauua

SEQ ID NO: 235021 - RNA, 19 nt, Homo sapiens
  misc_RNA (1)...(19): siRNA sense strand
uagaugauguuuccucuga

SEQ ID NO: 235022 - RNA, 19 nt, Homo sapiens
  misc_RNA (1)...(19): siRNA sense strand
gagaauauuuacagugcaa

SEQ ID NO: 235023 - RNA, 19 nt, Homo sapiens
  misc_RNA (1)...(19): siRNA sense strand
gccagacaccuuauucuua

SEQ ID NO: 235024 - RNA, 19 nt, Homo sapiens
  misc_RNA (1)...(19): siRNA sense strand
gcacuggaauuagaguauu

SEQ ID NO: 235025 - RNA, 19 nt, Homo sapiens
  misc_RNA (1)...(19): siRNA sense strand
cugcauaaaugucuuggua

SEQ ID NO: 235026 - RNA, 19 nt, Homo sapiens
  misc_RNA (1)...(19): siRNA sense strand
gaucagcacaucaguauuc

SEQ ID NO: 235027 - RNA, 19 nt, Homo sapiens
  misc_RNA (1)...(19): siRNA sense strand
gauguuuccucugaugaua

SEQ ID NO: 235028 - RNA, 19 nt, Homo sapiens
  misc_RNA (1)...(19): siRNA sense strand
gaauuucagugguucacaa

SEQ ID NO: 235029 - RNA, 19 nt, Homo sapiens
  misc_RNA (1)...(19): siRNA sense strand
cagaguggcugccucaguu

SEQ ID NO: 235030 - RNA, 19 nt, Homo sapiens
  misc_RNA (1)...(19): siRNA sense strand
aggaguaacugcauaaaug

SEQ ID NO: 235031 - RNA, 19 nt, Homo sapiens
  misc_RNA (1)...(19): siRNA sense strand
gcuaacaaaugcacuuaag

SEQ ID NO: 235032 - RNA, 19 nt, Homo sapiens
  misc_RNA (1)...(19): siRNA sense strand
caacugaucccagcacuug

SEQ ID NO: 235033 - RNA, 19 nt, Homo sapiens
  misc_RNA (1)...(19): siRNA sense strand
agaaucagauguuucacaa

SEQ ID NO: 235034 - RNA, 19 nt, Homo sapiens
  misc_RNA (1)...(19): siRNA sense strand
gaugauguuuccucugaug

SEQ ID NO: 235035 - RNA, 19 nt, Homo sapiens
  misc_RNA (1)...(19): siRNA sense strand
ggucuuaugcacagaagua

SEQ ID NO: 235036 - RNA, 19 nt, Homo sapiens
  misc_RNA (1)...(19): siRNA sense strand
aaucagauguuucacaauc

SEQ ID NO: 235037 - RNA, 19 nt, Homo sapiens
  misc_RNA (1)...(19): siRNA sense strand
gcauaaaugucuugguaac

SEQ ID NO: 235038 - RNA, 19 nt, Homo sapiens
  misc_RNA (1)...(19): siRNA sense strand
gaugagagaaccuguagga

SEQ ID NO: 235039 - RNA, 19 nt, Homo sapiens
  misc_RNA (1)...(19): siRNA sense strand
gcaaauaauucaguuucca

SEQ ID NO: 235040 - RNA, 19 nt, Homo sapiens
  misc_RNA (1)...(19): siRNA sense strand
ccagacaccuuauucuuac

SEQ ID NO: 235041 - RNA, 19 nt, Homo sapiens
  misc_RNA (1)...(19): siRNA sense strand
aaacagagcccuugaacag

SEQ ID NO: 235042 - RNA, 19 nt, Homo sapiens
  misc_RNA (1)...(19): siRNA sense strand
ggucaguaauuacaaguag

SEQ ID NO: 235043 - RNA, 19 nt, Homo sapiens
  misc_RNA (1)...(19): siRNA sense strand
gaggauauccagucacuca

SEQ ID NO: 235044 - RNA, 19 nt, Homo sapiens
  misc_RNA (1)...(19): siRNA sense strand
gagaguggacuuucccaaa

SEQ ID NO: 235045 - RNA, 19 nt, Homo sapiens
  misc_RNA (1)...(19): siRNA sense strand
gugaucaaguucauauaga

SEQ ID NO: 235046 - RNA, 19 nt, Homo sapiens
  misc_RNA (1)...(19): siRNA sense strand
cgaagguucuacucuauag

SEQ ID NO: 235047 - RNA, 19 nt, Homo sapiens
  misc_RNA (1)...(19): siRNA sense strand
aaaccaguaugcacaguau

SEQ ID NO: 235048 - RNA, 19 nt, Homo sapiens
  misc_RNA (1)...(19): siRNA sense strand
caaagaucuugaugagaga

SEQ ID NO: 235049 - RNA, 19 nt, Homo sapiens
  misc_RNA (1)...(19): siRNA sense strand
caacguauggagcguauau

SEQ ID NO: 235050 - RNA, 19 nt, Homo sapiens
  misc_RNA (1)...(19): siRNA sense strand
uauaacaccuacaagaaca

SEQ ID NO: 235051 - RNA, 19 nt, Homo sapiens
  misc_RNA (1)...(19): siRNA sense strand
caccaucaucuacuauuua

SEQ ID NO: 235052 - RNA, 19 nt, Homo sapiens
  misc_RNA (1)...(19): siRNA sense strand
guucuacucuauaguuuag

SEQ ID NO: 235053 - RNA, 19 nt, Homo sapiens
  misc_RNA (1)...(19): siRNA sense strand
uaacaaaugcacuuaaguc

SEQ ID NO: 235054 - RNA, 19 nt, Homo sapiens
  misc_RNA (1)...(19): siRNA sense strand
gcguauaugacaucgaaua

SEQ ID NO: 235055 - RNA, 19 nt, Homo sapiens
  misc_RNA (1)...(19): siRNA sense strand
auggagcgcuugacacuuu

SEQ ID NO: 235056 - RNA, 19 nt, Homo sapiens
  misc_RNA (1)...(19): siRNA sense strand
gaaguuggcuuuucguuac

SEQ ID NO: 235057 - RNA, 19 nt, Homo sapiens
  misc_RNA (1)...(19): siRNA sense strand
gcacagaaucagauguuuc

SEQ ID NO: 235058 - RNA, 19 nt, Homo sapiens
  misc_RNA (1)...(19): siRNA sense strand
caaacaaugucugccuaug

SEQ ID NO: 235059 - RNA, 19 nt, Homo sapiens
  misc_RNA (1)...(19): siRNA sense strand
gcgaagguucuacucuaua

SEQ ID NO: 235060 - RNA, 19 nt, Homo sapiens
  misc_RNA (1)...(19): siRNA sense strand
ggaguaacugcauaaaugu

SEQ ID NO: 235061 - RNA, 19 nt, Homo sapiens
  misc_RNA (1)...(19): siRNA sense strand
ccucuucaaccucuacuua

SEQ ID NO: 235062 - RNA, 19 nt, Homo sapiens
  misc_RNA (1)...(19): siRNA sense strand
ucaacgaauuucagugguu

SEQ ID NO: 235063 - RNA, 19 nt, Homo sapiens
  misc_RNA (1)...(19): siRNA sense strand
caaaugccagguucuaguu

SEQ ID NO: 235064 - RNA, 19 nt, Homo sapiens
  misc_RNA (1)...(19): siRNA sense strand
ggagugugaucaaguucau

SEQ ID NO: 235065 - RNA, 19 nt, Homo sapiens
  misc_RNA (1)...(19): siRNA sense strand
acagauuccuggcuaacaa

SEQ ID NO: 235066 - RNA, 19 nt, Homo sapiens
  misc_RNA (1)...(19): siRNA sense strand
cagaucagcacaucaguau

SEQ ID NO: 235067 - RNA, 19 nt, Homo sapiens
  misc_RNA (1)...(19): siRNA sense strand
agaggagugugaucaaguu

SEQ ID NO: 235068 - RNA, 19 nt, Homo sapiens
  misc_RNA (1)...(19): siRNA sense strand
ggacuccgcauggaagaaa

SEQ ID NO: 235069 - RNA, 19 nt, Homo sapiens
  misc_RNA (1)...(19): siRNA sense strand
guaacgacaacucaacuga

SEQ ID NO: 235070 - RNA, 19 nt, Homo sapiens
  misc_RNA (1)...(19): siRNA sense strand
caagcccuauccacacauu

SEQ ID NO: 235071 - RNA, 19 nt, Homo sapiens
  misc_RNA (1)...(19): siRNA sense strand
ccacacccaucaaagaucu

SEQ ID NO: 235072 - RNA, 19 nt, Homo sapiens
  misc_RNA (1)...(19): siRNA sense strand
gaagacucccaggauuuaa

SEQ ID NO: 235073 - RNA, 19 nt, Homo sapiens
  misc_RNA (1)...(19): siRNA sense strand
ggaugaggaaguuggcuuu

SEQ ID NO: 235074 - RNA, 19 nt, Homo sapiens
  misc_RNA (1)...(19): siRNA sense strand
caaccucuacuuaucaguu

SEQ ID NO: 235075 - RNA, 19 nt, Homo sapiens
  misc_RNA (1)...(19): siRNA sense strand
ggaaaugcaggaccuagca

SEQ ID NO: 235076 - RNA, 19 nt, Homo sapiens
  misc_RNA (1)...(19): siRNA sense strand
ccuacagcuugcccacuua

SEQ ID NO: 235077 - RNA, 19 nt, Homo sapiens
  misc_RNA (1)...(19): siRNA sense strand
ucucagaauuccaggucua

SEQ ID NO: 235078 - RNA, 19 nt, Homo sapiens
  misc_RNA (1)...(19): siRNA sense strand
auaaaugucuugguaacga

SEQ ID NO: 235079 - RNA, 19 nt, Homo sapiens
  misc_RNA (1)...(19): siRNA sense strand
ggaaguuggcuuuucguua

SEQ ID NO: 235080 - RNA, 19 nt, Homo sapiens
  misc_RNA (1)...(19): siRNA sense strand
gaucaaguucauauagaug

SEQ ID NO: 235081 - RNA, 19 nt, Homo sapiens
  misc_RNA (1)...(19): siRNA sense strand
uaaccaaccaggagaguuc

SEQ ID NO: 235082 - RNA, 19 nt, Homo sapiens
  misc_RNA (1)...(19): siRNA sense strand
guauggagcguauaugaca

SEQ ID NO: 235083 - RNA, 19 nt, Homo sapiens
  misc_RNA (1)...(19): siRNA sense strand
gauuauccauccuauacag

SEQ ID NO: 235084 - RNA, 19 nt, Homo sapiens
  misc_RNA (1)...(19): siRNA sense strand
gaccuagcaaguccucaua

SEQ ID NO: 235085 - RNA, 19 nt, Homo sapiens
  misc_RNA (1)...(19): siRNA sense strand
cgauuugggugugauguug

SEQ ID NO: 235086 - RNA, 19 nt, Homo sapiens
  misc_RNA (1)...(19): siRNA sense strand
ggagauggagcgcuugaca

SEQ ID NO: 235087 - RNA, 19 nt, Homo sapiens
  misc_RNA (1)...(19): siRNA sense strand
uugcgaagguucuacucua

SEQ ID NO: 235088 - RNA, 19 nt, Homo sapiens
  misc_RNA (1)...(19): siRNA sense strand
caggagaguucgauaccau

SEQ ID NO: 235089 - RNA, 19 nt, Homo sapiens
  misc_RNA (1)...(19): siRNA sense strand
ccagaucagcacaucagua

SEQ ID NO: 235090 - RNA, 19 nt, Homo sapiens
  misc_RNA (1)...(19): siRNA sense strand
gcagccagccgucuacaca

SEQ ID NO: 235091 - RNA, 19 nt, Homo sapiens
  misc_RNA (1)...(19): siRNA sense strand
cacuggaauuagaguauuu

SEQ ID NO: 235092 - RNA, 19 nt, Homo sapiens
  misc_RNA (1)...(19): siRNA sense strand
accaagcacuggaauuaga

SEQ ID NO: 235093 - RNA, 19 nt, Homo sapiens
  misc_RNA (1)...(19): siRNA sense strand
ggaugccuggcuacaguua

SEQ ID NO: 235094 - RNA, 19 nt, Homo sapiens
  misc_RNA (1)...(19): siRNA sense strand
caaccaggagaguucgaua

SEQ ID NO: 235095 - RNA, 19 nt, Homo sapiens
  misc_RNA (1)...(19): siRNA sense strand
gcacaguauuauucagcau

SEQ ID NO: 235096 - RNA, 19 nt, Homo sapiens
  misc_RNA (1)...(19): siRNA sense strand
acagaaguauggcaaggau

SEQ ID NO: 235097 - RNA, 19 nt, Homo sapiens
  misc_RNA (1)...(19): siRNA sense strand
gaaaugcaggaccuagcaa

SEQ ID NO: 235098 - RNA, 19 nt, Homo sapiens
  misc_RNA (1)...(19): siRNA sense strand
gcacuaggaguaacugcau

SEQ ID NO: 235099 - RNA, 19 nt, Homo sapiens
  misc_RNA (1)...(19): siRNA sense strand
auuauuagcacuaggagua

SEQ ID NO: 235100 - RNA, 19 nt, Homo sapiens
  misc_RNA (1)...(19): siRNA sense strand
ccgcauggaagaaaugauu

SEQ ID NO: 235101 - RNA, 19 nt, Homo sapiens
  misc_RNA (1)...(19): siRNA sense strand
accagcagcucaaacaaug

SEQ ID NO: 235102 - RNA, 19 nt, Homo sapiens
  misc_RNA (1)...(19): siRNA sense strand
ggauauccagucacucaga

SEQ ID NO: 235103 - RNA, 19 nt, Homo sapiens
  misc_RNA (1)...(19): siRNA sense strand
guaacugcauaaaugucuu

SEQ ID NO: 235104 - RNA, 19 nt, Homo sapiens
  misc_RNA (1)...(19): siRNA sense strand
cguauaugacaucgaauaa

SEQ ID NO: 235105 - RNA, 19 nt, Homo sapiens
  misc_RNA (1)...(19): siRNA sense strand
caggacagcccuacagcuu

SEQ ID NO: 235106 - RNA, 19 nt, Homo sapiens
  misc_RNA (1)...(19): siRNA sense strand
gaaucucucccaggacuga

SEQ ID NO: 235107 - RNA, 19 nt, Homo sapiens
  misc_RNA (1)...(19): siRNA sense strand
gugguucacaacaggauua

SEQ ID NO: 235108 - RNA, 19 nt, Homo sapiens
  misc_RNA (1)...(19): siRNA sense strand
caucaucuacuauuuaugc

SEQ ID NO: 235109 - RNA, 19 nt, Homo sapiens
  misc_RNA (1)...(19): siRNA sense strand
ggccagacaccuuauucuu

SEQ ID NO: 235110 - RNA, 19 nt, Homo sapiens
  misc_RNA (1)...(19): siRNA sense strand
ccaggucuauggaaaugca

SEQ ID NO: 235111 - RNA, 19 nt, Homo sapiens
  misc_RNA (1)...(19): siRNA sense strand
ccuccuggcucuccaccaa

SEQ ID NO: 235112 - RNA, 19 nt, Homo sapiens
  misc_RNA (1)...(19): siRNA sense strand
gguucuacucuauaguuua

SEQ ID NO: 235113 - RNA, 19 nt, Homo sapiens
  misc_RNA (1)...(19): siRNA sense strand
caaaugcacuuaagucuuu

SEQ ID NO: 235114 - RNA, 19 nt, Homo sapiens
  misc_RNA (1)...(19): siRNA sense strand
gcacaucaguuacuacaaa

SEQ ID NO: 235115 - RNA, 19 nt, Homo sapiens
  misc_RNA (1)...(19): siRNA sense strand
gcacuuaagucuuuaucaa

SEQ ID NO: 235116 - RNA, 19 nt, Homo sapiens
  misc_RNA (1)...(19): siRNA sense strand
gagagaaccuguaggaguu

SEQ ID NO: 235117 - RNA, 19 nt, Homo sapiens
  misc_RNA (1)...(19): siRNA sense strand
gagcguauaugacaucgaa

SEQ ID NO: 235118 - RNA, 19 nt, Homo sapiens
  misc_RNA (1)...(19): siRNA sense strand
gcaccaucaucuacuauuu

SEQ ID NO: 235119 - RNA, 19 nt, Homo sapiens
  misc_RNA (1)...(19): siRNA sense strand
ggaagacucccaggauuua

SEQ ID NO: 235120 - RNA, 19 nt, Homo sapiens
  misc_RNA (1)...(19): siRNA sense strand
ccaccaagcacuggaauua

SEQ ID NO: 235121 - RNA, 19 nt, Homo sapiens
  misc_RNA (1)...(19): siRNA sense strand
uagaugauguuuccucuga

SEQ ID NO: 235122 - RNA, 19 nt, Homo sapiens
  misc_RNA (1)...(19): siRNA sense strand
gagaauauuuacagugcaa

SEQ ID NO: 235123 - RNA, 19 nt, Homo sapiens
  misc_RNA (1)...(19): siRNA sense strand
gccagacaccuuauucuua

SEQ ID NO: 235124 - RNA, 19 nt, Homo sapiens
  misc_RNA (1)...(19): siRNA sense strand
gcacuggaauuagaguauu

SEQ ID NO: 235125 - RNA, 19 nt, Homo sapiens
  misc_RNA (1)...(19): siRNA sense strand
cugcauaaaugucuuggua

SEQ ID NO: 235126 - RNA, 19 nt, Homo sapiens
  misc_RNA (1)...(19): siRNA sense strand
gaucagcacaucaguauuc

SEQ ID NO: 235127 - RNA, 19 nt, Homo sapiens
  misc_RNA (1)...(19): siRNA sense strand
gauguuuccucugaugaua

SEQ ID NO: 235128 - RNA, 19 nt, Homo sapiens
  misc_RNA (1)...(19): siRNA sense strand
gaauuucagugguucacaa

SEQ ID NO: 235129 - RNA, 19 nt, Homo sapiens
  misc_RNA (1)...(19): siRNA sense strand
cagaguggcugccucaguu

SEQ ID NO: 235130 - RNA, 19 nt, Homo sapiens
  misc_RNA (1)...(19): siRNA sense strand
aggaguaacugcauaaaug

SEQ ID NO: 235131 - RNA, 19 nt, Homo sapiens
  misc_RNA (1)...(19): siRNA sense strand
gcuaacaaaugcacuuaag

SEQ ID NO: 235132 - RNA, 19 nt, Homo sapiens
  misc_RNA (1)...(19): siRNA sense strand
caacugaucccagcacuug

SEQ ID NO: 235133 - RNA, 19 nt, Homo sapiens
  misc_RNA (1)...(19): siRNA sense strand
agaaucagauguuucacaa

SEQ ID NO: 235134 - RNA, 19 nt, Homo sapiens
  misc_RNA (1)...(19): siRNA sense strand
gaugauguuuccucugaug

SEQ ID NO: 235135 - RNA, 19 nt, Homo sapiens
  misc_RNA (1)...(19): siRNA sense strand
ggucuuaugcacagaagua

SEQ ID NO: 235136 - RNA, 19 nt, Homo sapiens
  misc_RNA (1)...(19): siRNA sense strand
aaucagauguuucacaauc

SEQ ID NO: 235137 - RNA, 19 nt, Homo sapiens
  misc_RNA (1)...(19): siRNA sense strand
gcauaaaugucuugguaac

SEQ ID NO: 235138 - RNA, 19 nt, Homo sapiens
  misc_RNA (1)...(19): siRNA sense strand
gaugagagaaccuguagga

SEQ ID NO: 235139 - RNA, 19 nt, Homo sapiens
  misc_RNA (1)...(19): siRNA sense strand
gcaaauaauucaguuucca

SEQ ID NO: 235140 - RNA, 19 nt, Homo sapiens
  misc_RNA (1)...(19): siRNA sense strand
ccagacaccuuauucuuac

SEQ ID NO: 235141 - RNA, 19 nt, Homo sapiens
  misc_RNA (1)...(19): siRNA sense strand
aaacagagcccuugaacag

SEQ ID NO: 235142 - RNA, 19 nt, Homo sapiens
  misc_RNA (1)...(19): siRNA sense strand
ggucaguaauuacaaguag

SEQ ID NO: 235143 - RNA, 19 nt, Homo sapiens
  misc_RNA (1)...(19): siRNA sense strand
gaggauauccagucacuca

SEQ ID NO: 235144 - RNA, 19 nt, Homo sapiens
  misc_RNA (1)...(19): siRNA sense strand
gagaguggacuuucccaaa

SEQ ID NO: 235145 - RNA, 19 nt, Homo sapiens
  misc_RNA (1)...(19): siRNA sense strand
gugaucaaguucauauaga

SEQ ID NO: 235146 - RNA, 19 nt, Homo sapiens
  misc_RNA (1)...(19): siRNA sense strand
cgaagguucuacucuauag

SEQ ID NO: 235147 - RNA, 19 nt, Homo sapiens
  misc_RNA (1)...(19): siRNA sense strand
aaaccaguaugcacaguau

SEQ ID NO: 235148 - RNA, 19 nt, Homo sapiens
  misc_RNA (1)...(19): siRNA sense strand
caaagaucuugaugagaga

SEQ ID NO: 235149 - RNA, 19 nt, Homo sapiens
  misc_RNA (1)...(19): siRNA sense strand
caacguauggagcguauau

SEQ ID NO: 235150 - RNA, 19 nt, Homo sapiens
  misc_RNA (1)...(19): siRNA sense strand
uauaacaccuacaagaaca

SEQ ID NO: 235151 - RNA, 19 nt, Homo sapiens
  misc_RNA (1)...(19): siRNA sense strand
caccaucaucuacuauuua

SEQ ID NO: 235152 - RNA, 19 nt, Homo sapiens
  misc_RNA (1)...(19): siRNA sense strand
guucuacucuauaguuuag

SEQ ID NO: 235153 - RNA, 19 nt, Homo sapiens
  misc_RNA (1)...(19): siRNA sense strand
uaacaaaugcacuuaaguc

SEQ ID NO: 235154 - RNA, 19 nt, Homo sapiens
  misc_RNA (1)...(19): siRNA sense strand
gcguauaugacaucgaaua

SEQ ID NO: 235155 - RNA, 19 nt, Homo sapiens
  misc_RNA (1)...(19): siRNA sense strand
auggagcgcuugacacuuu

SEQ ID NO: 235156 - RNA, 19 nt, Homo sapiens
  misc_RNA (1)...(19): siRNA sense strand
gaaguuggcuuuucguuac

SEQ ID NO: 235157 - RNA, 19 nt, Homo sapiens
  misc_RNA (1)...(19): siRNA sense strand
gcacagaaucagauguuuc

SEQ ID NO: 235158 - RNA, 19 nt, Homo sapiens
  misc_RNA (1)...(19): siRNA sense strand
caaacaaugucugccuaug

SEQ ID NO: 235159 - RNA, 19 nt, Homo sapiens
  misc_RNA (1)...(19): siRNA sense strand
gcgaagguucuacucuaua

SEQ ID NO: 235160 - RNA, 19 nt, Homo sapiens
  misc_RNA (1)...(19): siRNA sense strand
ggaguaacugcauaaaugu

SEQ ID NO: 235161 - RNA, 19 nt, Homo sapiens
  misc_RNA (1)...(19): siRNA sense strand
ccucuucaaccucuacuua

SEQ ID NO: 235162 - RNA, 19 nt, Homo sapiens
  misc_RNA (1)...(19): siRNA sense strand
ucaacgaauuucagugguu

SEQ ID NO: 235163 - RNA, 19 nt, Homo sapiens
  misc_RNA (1)...(19): siRNA sense strand
caaaugccagguucuaguu

SEQ ID NO: 235164 - RNA, 19 nt, Homo sapiens
  misc_RNA (1)...(19): siRNA sense strand
ggagugugaucaaguucau

SEQ ID NO: 235165 - RNA, 19 nt, Homo sapiens
  misc_RNA (1)...(19): siRNA sense strand
acagauuccuggcuaacaa

SEQ ID NO: 235166 - RNA, 19 nt, Homo sapiens
  misc_RNA (1)...(19): siRNA sense strand
cagaucagcacaucaguau

SEQ ID NO: 235167 - RNA, 19 nt, Homo sapiens
  misc_RNA (1)...(19): siRNA sense strand
agaggagugugaucaaguu

SEQ ID NO: 235168 - RNA, 19 nt, Homo sapiens
  misc_RNA (1)...(19): siRNA sense strand
ggacuccgcauggaagaaa

SEQ ID NO: 235169 - RNA, 19 nt, Homo sapiens
  misc_RNA (1)...(19): siRNA sense strand
guaacgacaacucaacuga

SEQ ID NO: 235170 - RNA, 19 nt, Homo sapiens
  misc_RNA (1)...(19): siRNA sense strand
caagcccuauccacacauu

SEQ ID NO: 235171 - RNA, 19 nt, Homo sapiens
  misc_RNA (1)...(19): siRNA sense strand
ccacacccaucaaagaucu

SEQ ID NO: 235172 - RNA, 19 nt, Homo sapiens
  misc_RNA (1)...(19): siRNA sense strand
gaagacucccaggauuuaa

SEQ ID NO: 235173 - RNA, 19 nt, Homo sapiens
  misc_RNA (1)...(19): siRNA sense strand
ggaugaggaaguuggcuuu

SEQ ID NO: 235174 - RNA, 19 nt, Homo sapiens
  misc_RNA (1)...(19): siRNA sense strand
caaccucuacuuaucaguu

SEQ ID NO: 235175 - RNA, 19 nt, Homo sapiens
  misc_RNA (1)...(19): siRNA sense strand
ggaaaugcaggaccuagca

SEQ ID NO: 235176 - RNA, 19 nt, Homo sapiens
  misc_RNA (1)...(19): siRNA sense strand
ccuacagcuugcccacuua

SEQ ID NO: 235177 - RNA, 19 nt, Homo sapiens
  misc_RNA (1)...(19): siRNA sense strand
ucucagaauuccaggucua

SEQ ID NO: 235178 - RNA, 19 nt, Homo sapiens
  misc_RNA (1)...(19): siRNA sense strand
auaaaugucuugguaacga

SEQ ID NO: 235179 - RNA, 19 nt, Homo sapiens
  misc_RNA (1)...(19): siRNA sense strand
ggaaguuggcuuuucguua

SEQ ID NO: 235180 - RNA, 19 nt, Homo sapiens
  misc_RNA (1)...(19): siRNA sense strand
gaucaaguucauauagaug

SEQ ID NO: 235181 - RNA, 19 nt, Homo sapiens
  misc_RNA (1)...(19): siRNA sense strand
uaaccaaccaggagaguuc

SEQ ID NO: 235182 - RNA, 19 nt, Homo sapiens
  misc_RNA (1)...(19): siRNA sense strand
guauggagcguauaugaca

SEQ ID NO: 235183 - RNA, 19 nt, Homo sapiens
  misc_RNA (1)...(19): siRNA sense strand
gauuauccauccuauacag

SEQ ID NO: 235184 - RNA, 19 nt, Homo sapiens
  misc_RNA (1)...(19): siRNA sense strand
gaccuagcaaguccucaua

SEQ ID NO: 235185 - RNA, 19 nt, Homo sapiens
  misc_RNA (1)...(19): siRNA sense strand
cgauuugggugugauguug

SEQ ID NO: 235186 - RNA, 19 nt, Homo sapiens
  misc_RNA (1)...(19): siRNA sense strand
ggagauggagcgcuugaca

SEQ ID NO: 235187 - RNA, 19 nt, Homo sapiens
  misc_RNA (1)...(19): siRNA sense strand
uugcgaagguucuacucua

SEQ ID NO: 235188 - RNA, 19 nt, Homo sapiens
  misc_RNA (1)...(19): siRNA sense strand
caggagaguucgauaccau

SEQ ID NO: 235189 - RNA, 19 nt, Homo sapiens
  misc_RNA (1)...(19): siRNA sense strand
ccagaucagcacaucagua

SEQ ID NO: 235190 - RNA, 19 nt, Homo sapiens
  misc_RNA (1)...(19): siRNA sense strand
gcagccagccgucuacaca

SEQ ID NO: 235191 - RNA, 19 nt, Homo sapiens
  misc_RNA (1)...(19): siRNA sense strand
cacuggaauuagaguauuu

SEQ ID NO: 235192 - RNA, 19 nt, Homo sapiens
  misc_RNA (1)...(19): siRNA sense strand
accaagcacuggaauuaga

SEQ ID NO: 235193 - RNA, 19 nt, Homo sapiens
  misc_RNA (1)...(19): siRNA sense strand
ggaugccuggcuacaguua

SEQ ID NO: 235194 - RNA, 19 nt, Homo sapiens
  misc_RNA (1)...(19): siRNA sense strand
caaccaggagaguucgaua

SEQ ID NO: 235195 - RNA, 19 nt, Homo sapiens
  misc_RNA (1)...(19): siRNA sense strand
gcacaguauuauucagcau

SEQ ID NO: 235196 - RNA, 19 nt, Homo sapiens
  misc_RNA (1)...(19): siRNA sense strand
acagaaguauggcaaggau

SEQ ID NO: 235197 - RNA, 19 nt, Homo sapiens
  misc_RNA (1)...(19): siRNA sense strand
gaaaugcaggaccuagcaa

SEQ ID NO: 235198 - RNA, 19 nt, Homo sapiens
  misc_RNA (1)...(19): siRNA sense strand
gcacuaggaguaacugcau

SEQ ID NO: 235199 - RNA, 19 nt, Homo sapiens
  misc_RNA (1)...(19): siRNA sense strand
auuauuagcacuaggagua

SEQ ID NO: 235200 - RNA, 19 nt, Homo sapiens
  misc_RNA (1)...(19): siRNA sense strand
ccgcauggaagaaaugauu

SEQ ID NO: 235201 - RNA, 19 nt, Homo sapiens
  misc_RNA (1)...(19): siRNA sense strand
accagcagcucaaacaaug

SEQ ID NO: 235202 - RNA, 19 nt, Homo sapiens
  misc_RNA (1)...(19): siRNA sense strand
ggauauccagucacucaga

SEQ ID NO: 235203 - RNA, 19 nt, Homo sapiens
  misc_RNA (1)...(19): siRNA sense strand
guaacugcauaaaugucuu

SEQ ID NO: 235204 - RNA, 19 nt, Homo sapiens
  misc_RNA (1)...(19): siRNA sense strand
cguauaugacaucgaauaa

SEQ ID NO: 235205 - RNA, 19 nt, Homo sapiens
  misc_RNA (1)...(19): siRNA sense strand
caggacagcccuacagcuu

SEQ ID NO: 235206 - RNA, 19 nt, Homo sapiens
  misc_RNA (1)...(19): siRNA sense strand
gaaucucucccaggacuga

SEQ ID NO: 235207 - RNA, 19 nt, Homo sapiens
  misc_RNA (1)...(19): siRNA sense strand
gugguucacaacaggauua

SEQ ID NO: 235208 - RNA, 19 nt, Homo sapiens
  misc_RNA (1)...(19): siRNA sense strand
caucaucuacuauuuaugc

SEQ ID NO: 235209 - RNA, 19 nt, Homo sapiens
  misc_RNA (1)...(19): siRNA sense strand
ggccagacaccuuauucuu

SEQ ID NO: 235210 - RNA, 19 nt, Homo sapiens
  misc_RNA (1)...(19): siRNA sense strand
ccaggucuauggaaaugca

SEQ ID NO: 235211 - RNA, 19 nt, Homo sapiens
  misc_RNA (1)...(19): siRNA sense strand
ccuccuggcucuccaccaa

SEQ ID NO: 235212 - RNA, 19 nt, Homo sapiens
  misc_RNA (1)...(19): siRNA sense strand
gguucuacucuauaguuua

SEQ ID NO: 235213 - RNA, 19 nt, Homo sapiens
  misc_RNA (1)...(19): siRNA sense strand
ggagaaagcugcccagaua

SEQ ID NO: 235214 - RNA, 19 nt, Homo sapiens
  misc_RNA (1)...(19): siRNA sense strand
gaagacagauuuggaauuu

SEQ ID NO: 235215 - RNA, 19 nt, Homo sapiens
  misc_RNA (1)...(19): siRNA sense strand
ggaaagagcuauauucugu

SEQ ID NO: 235216 - RNA, 19 nt, Homo sapiens
  misc_RNA (1)...(19): siRNA sense strand
ggaacaaggugauggauuu

SEQ ID NO: 235217 - RNA, 19 nt, Homo sapiens
  misc_RNA (1)...(19): siRNA sense strand
gaagguggcuuucagucua

SEQ ID NO: 235218 - RNA, 19 nt, Homo sapiens
  misc_RNA (1)...(19): siRNA sense strand
agaagcagauguuguaaua

SEQ ID NO: 235219 - RNA, 19 nt, Homo sapiens
  misc_RNA (1)...(19): siRNA sense strand
gaucuuuccucuaucauuu

SEQ ID NO: 235220 - RNA, 19 nt, Homo sapiens
  misc_RNA (1)...(19): siRNA sense strand
ggauuucgguuacagauaa

SEQ ID NO: 235221 - RNA, 19 nt, Homo sapiens
  misc_RNA (1)...(19): siRNA sense strand
ggaaagguuugcagaagaa

SEQ ID NO: 235222 - RNA, 19 nt, Homo sapiens
  misc_RNA (1)...(19): siRNA sense strand
gcucagaacuguguacauu

SEQ ID NO: 235223 - RNA, 19 nt, Homo sapiens
  misc_RNA (1)...(19): siRNA sense strand
gagaguagaucacacuguu

SEQ ID NO: 235224 - RNA, 19 nt, Homo sapiens
  misc_RNA (1)...(19): siRNA sense strand
ccaagcaacuauauaagaa

SEQ ID NO: 235225 - RNA, 19 nt, Homo sapiens
  misc_RNA (1)...(19): siRNA sense strand
gaucaaagguacucacaca

SEQ ID NO: 235226 - RNA, 19 nt, Homo sapiens
  misc_RNA (1)...(19): siRNA sense strand
gaaacaccauccuagcauu

SEQ ID NO: 235227 - RNA, 19 nt, Homo sapiens
  misc_RNA (1)...(19): siRNA sense strand
gauccaagucagaauauua

SEQ ID NO: 235228 - RNA, 19 nt, Homo sapiens
  misc_RNA (1)...(19): siRNA sense strand
ggaacuacaugcuaaaguc

SEQ ID NO: 235229 - RNA, 19 nt, Homo sapiens
  misc_RNA (1)...(19): siRNA sense strand
ccacuuaacacuccuguaa

SEQ ID NO: 235230 - RNA, 19 nt, Homo sapiens
  misc_RNA (1)...(19): siRNA sense strand
gauaaaugcucagaacugu

SEQ ID NO: 235231 - RNA, 19 nt, Homo sapiens
  misc_RNA (1)...(19): siRNA sense strand
caguauaccuguaaauaga

SEQ ID NO: 235232 - RNA, 19 nt, Homo sapiens
  misc_RNA (1)...(19): siRNA sense strand
ggauuggacugaaggaguu

SEQ ID NO: 235233 - RNA, 19 nt, Homo sapiens
  misc_RNA (1)...(19): siRNA sense strand
gcauaucagugcuuucaug

SEQ ID NO: 235234 - RNA, 19 nt, Homo sapiens
  misc_RNA (1)...(19): siRNA sense strand
gacaauaggacuccaugua

SEQ ID NO: 235235 - RNA, 19 nt, Homo sapiens
  misc_RNA (1)...(19): siRNA sense strand
agaagaagcagauguugua

SEQ ID NO: 235236 - RNA, 19 nt, Homo sapiens
  misc_RNA (1)...(19): siRNA sense strand
gaaaucugucgauauauga

SEQ ID NO: 235237 - RNA, 19 nt, Homo sapiens
  misc_RNA (1)...(19): siRNA sense strand
cuuaagggaugacaguaua

SEQ ID NO: 235238 - RNA, 19 nt, Homo sapiens
  misc_RNA (1)...(19): siRNA sense strand
agaaaucugucgauauaug

SEQ ID NO: 235239 - RNA, 19 nt, Homo sapiens
  misc_RNA (1)...(19): siRNA sense strand
ugcaggaguuuaugaauuu

SEQ ID NO: 235240 - RNA, 19 nt, Homo sapiens
  misc_RNA (1)...(19): siRNA sense strand
acagagaaauacagaauuc

SEQ ID NO: 235241 - RNA, 19 nt, Homo sapiens
  misc_RNA (1)...(19): siRNA sense strand
cguggacucugaaacauaa

SEQ ID NO: 235242 - RNA, 19 nt, Homo sapiens
  misc_RNA (1)...(19): siRNA sense strand
uaaaaggaauugccacuaa

SEQ ID NO: 235243 - RNA, 19 nt, Homo sapiens
  misc_RNA (1)...(19): siRNA sense strand
gugaaaaucuccaaucaaa

SEQ ID NO: 235244 - RNA, 19 nt, Homo sapiens
  misc_RNA (1)...(19): siRNA sense strand
gagugaacauggaaagguu

SEQ ID NO: 235245 - RNA, 19 nt, Homo sapiens
  misc_RNA (1)...(19): siRNA sense strand
gaacucauggguauggaaa

SEQ ID NO: 235246 - RNA, 19 nt, Homo sapiens
  misc_RNA (1)...(19): siRNA sense strand
cugaaggaguuauggguua

SEQ ID NO: 235247 - RNA, 19 nt, Homo sapiens
  misc_RNA (1)...(19): siRNA sense strand
ggacuggaacuacaugcua

SEQ ID NO: 235248 - RNA, 19 nt, Homo sapiens
  misc_RNA (1)...(19): siRNA sense strand
gacuggaacuacaugcuaa

SEQ ID NO: 235249 - RNA, 19 nt, Homo sapiens
  misc_RNA (1)...(19): siRNA sense strand
gaaaaucuccaaucaaaga

SEQ ID NO: 235250 - RNA, 19 nt, Homo sapiens
  misc_RNA (1)...(19): siRNA sense strand
cgaauuacuacccauuaua

SEQ ID NO: 235251 - RNA, 19 nt, Homo sapiens
  misc_RNA (1)...(19): siRNA sense strand
ccuaguagcucuuggucuu

SEQ ID NO: 235252 - RNA, 19 nt, Homo sapiens
  misc_RNA (1)...(19): siRNA sense strand
ucagugcuuucaugccuua

SEQ ID NO: 235253 - RNA, 19 nt, Homo sapiens
  misc_RNA (1)...(19): siRNA sense strand
acaauaggacuccauguaa

SEQ ID NO: 235254 - RNA, 19 nt, Homo sapiens
  misc_RNA (1)...(19): siRNA sense strand
agccagagcucucaaugaa

SEQ ID NO: 235255 - RNA, 19 nt, Homo sapiens
  misc_RNA (1)...(19): siRNA sense strand
gggaaggagugaacaugga

SEQ ID NO: 235256 - RNA, 19 nt, Homo sapiens
  misc_RNA (1)...(19): siRNA sense strand
uugaagaacucauggguau

SEQ ID NO: 235257 - RNA, 19 nt, Homo sapiens
  misc_RNA (1)...(19): siRNA sense strand
guauauggagggaugauuu

SEQ ID NO: 235258 - RNA, 19 nt, Homo sapiens
  misc_RNA (1)...(19): siRNA sense strand
ucagaacuguguacauugu

SEQ ID NO: 235259 - RNA, 19 nt, Homo sapiens
  misc_RNA (1)...(19): siRNA sense strand
gcagaagcccuugguguug

SEQ ID NO: 235260 - RNA, 19 nt, Homo sapiens
  misc_RNA (1)...(19): siRNA sense strand
gaggaggaccugcuuacaa

SEQ ID NO: 235261 - RNA, 19 nt, Homo sapiens
  misc_RNA (1)...(19): siRNA sense strand
gcacaccuauugaguaucc

SEQ ID NO: 235262 - RNA, 19 nt, Homo sapiens
  misc_RNA (1)...(19): siRNA sense strand
ggucuagacuaucagaauc

SEQ ID NO: 235263 - RNA, 19 nt, Homo sapiens
  misc_RNA (1)...(19): siRNA sense strand
uagccaagcaacuauauaa

SEQ ID NO: 235264 - RNA, 19 nt, Homo sapiens
  misc_RNA (1)...(19): siRNA sense strand
aagcagauguuguaauagu

SEQ ID NO: 235265 - RNA, 19 nt, Homo sapiens
  misc_RNA (1)...(19): siRNA sense strand
aaagauccaagucagaaua

SEQ ID NO: 235266 - RNA, 19 nt, Homo sapiens
  misc_RNA (1)...(19): siRNA sense strand
cacuaacgauguagggaua

SEQ ID NO: 235267 - RNA, 19 nt, Homo sapiens
  misc_RNA (1)...(19): siRNA sense strand
cagaagcccuugguguuga

SEQ ID NO: 235268 - RNA, 19 nt, Homo sapiens
  misc_RNA (1)...(19): siRNA sense strand
gaagaagcagauguuguaa

SEQ ID NO: 235269 - RNA, 19 nt, Homo sapiens
  misc_RNA (1)...(19): siRNA sense strand
gggaugauuuacacuggaa

SEQ ID NO: 235270 - RNA, 19 nt, Homo sapiens
  misc_RNA (1)...(19): siRNA sense strand
gaauaugaggacaauuuga

SEQ ID NO: 235271 - RNA, 19 nt, Homo sapiens
  misc_RNA (1)...(19): siRNA sense strand
ccauguaacugaauaugag

SEQ ID NO: 235272 - RNA, 19 nt, Homo sapiens
  misc_RNA (1)...(19): siRNA sense strand
gaacuacaugcuaaaguca

SEQ ID NO: 235273 - RNA, 19 nt, Homo sapiens
  misc_RNA (1)...(19): siRNA sense strand
gcagauguuguaauaguug

SEQ ID NO: 235274 - RNA, 19 nt, Homo sapiens
  misc_RNA (1)...(19): siRNA sense strand
cuaccucuaugugcuauaa

SEQ ID NO: 235275 - RNA, 19 nt, Homo sapiens
  misc_RNA (1)...(19): siRNA sense strand
cugcaggaguuuaugaauu

SEQ ID NO: 235276 - RNA, 19 nt, Homo sapiens
  misc_RNA (1)...(19): siRNA sense strand
gaauuacuacccauuauac

SEQ ID NO: 235277 - RNA, 19 nt, Homo sapiens
  misc_RNA (1)...(19): siRNA sense strand
ccucaaaccuacgggauug

SEQ ID NO: 235278 - RNA, 19 nt, Homo sapiens
  misc_RNA (1)...(19): siRNA sense strand
ccuggugguuuacuaauug

SEQ ID NO: 235279 - RNA, 19 nt, Homo sapiens
  misc_RNA (1)...(19): siRNA sense strand
ggaaggagugaacauggaa

SEQ ID NO: 235280 - RNA, 19 nt, Homo sapiens
  misc_RNA (1)...(19): siRNA sense strand
ggugauggauuucgguuac

SEQ ID NO: 235281 - RNA, 19 nt, Homo sapiens
  misc_RNA (1)...(19): siRNA sense strand
gaagaacucauggguaugg

SEQ ID NO: 235282 - RNA, 19 nt, Homo sapiens
  misc_RNA (1)...(19): siRNA sense strand
cugaauaugaggacaauuu

SEQ ID NO: 235283 - RNA, 19 nt, Homo sapiens
  misc_RNA (1)...(19): siRNA sense strand
ggaaacaccauccuagcau

SEQ ID NO: 235284 - RNA, 19 nt, Homo sapiens
  misc_RNA (1)...(19): siRNA sense strand
gccaagcaacuauauaaga

SEQ ID NO: 235285 - RNA, 19 nt, Homo sapiens
  misc_RNA (1)...(19): siRNA sense strand
caauaggacuccauguaac

SEQ ID NO: 235286 - RNA, 19 nt, Homo sapiens
  misc_RNA (1)...(19): siRNA sense strand
gggauaaggacaagagaug

SEQ ID NO: 235287 - RNA, 19 nt, Homo sapiens
  misc_RNA (1)...(19): siRNA sense strand
uauauggagggaugauuua

SEQ ID NO: 235288 - RNA, 19 nt, Homo sapiens
  misc_RNA (1)...(19): siRNA sense strand
agagcuauauucuguuaga

SEQ ID NO: 235289 - RNA, 19 nt, Homo sapiens
  misc_RNA (1)...(19): siRNA sense strand
gaaagagcuauauucuguu

SEQ ID NO: 235290 - RNA, 19 nt, Homo sapiens
  misc_RNA (1)...(19): siRNA sense strand
uggaaagguuugcagaaga

SEQ ID NO: 235291 - RNA, 19 nt, Homo sapiens
  misc_RNA (1)...(19): siRNA sense strand
ggaccugcuuacaauggaa

SEQ ID NO: 235292 - RNA, 19 nt, Homo sapiens
  misc_RNA (1)...(19): siRNA sense strand
uaaaugcucagaacugugu

SEQ ID NO: 235293 - RNA, 19 nt, Homo sapiens
  misc_RNA (1)...(19): siRNA sense strand
gccaaggauugcacaccua

SEQ ID NO: 235294 - RNA, 19 nt, Homo sapiens
  misc_RNA (1)...(19): siRNA sense strand
gcaaauugugaaccucaaa

SEQ ID NO: 235295 - RNA, 19 nt, Homo sapiens
  misc_RNA (1)...(19): siRNA sense strand
gaaagcugcccagauagga

SEQ ID NO: 235296 - RNA, 19 nt, Homo sapiens
  misc_RNA (1)...(19): siRNA sense strand
aggaggaccugcuuacaau

SEQ ID NO: 235297 - RNA, 19 nt, Homo sapiens
  misc_RNA (1)...(19): siRNA sense strand
acagauaaaugcucagaac

SEQ ID NO: 235298 - RNA, 19 nt, Homo sapiens
  misc_RNA (1)...(19): siRNA sense strand
gcaggaguuuaugaauuug

SEQ ID NO: 235299 - RNA, 19 nt, Homo sapiens
  misc_RNA (1)...(19): siRNA sense strand
uagacuaucagaauccaua

SEQ ID NO: 235300 - RNA, 19 nt, Homo sapiens
  misc_RNA (1)...(19): siRNA sense strand
cuggaaaccugggagagua

SEQ ID NO: 235301 - RNA, 19 nt, Homo sapiens
  misc_RNA (1)...(19): siRNA sense strand
gaauugccacuaacgaugu

SEQ ID NO: 235302 - RNA, 19 nt, Homo sapiens
  misc_RNA (1)...(19): siRNA sense strand
ugaaguauacccugguuau

SEQ ID NO: 235303 - RNA, 19 nt, Homo sapiens
  misc_RNA (1)...(19): siRNA sense strand
uguaacagaagacagauuu

SEQ ID NO: 235304 - RNA, 19 nt, Homo sapiens
  misc_RNA (1)...(19): siRNA sense strand
ggaguuauggguuauugau

SEQ ID NO: 235305 - RNA, 19 nt, Homo sapiens
  misc_RNA (1)...(19): siRNA sense strand
gaauauuaacuggguggua

SEQ ID NO: 235306 - RNA, 19 nt, Homo sapiens
  misc_RNA (1)...(19): siRNA sense strand
ugaccagccggcacacuua

SEQ ID NO: 235307 - RNA, 19 nt, Homo sapiens
  misc_RNA (1)...(19): siRNA sense strand
guuauggguuauugaugaa

SEQ ID NO: 235308 - RNA, 19 nt, Homo sapiens
  misc_RNA (1)...(19): siRNA sense strand
aguuauggguuauugauga

SEQ ID NO: 235309 - RNA, 19 nt, Homo sapiens
  misc_RNA (1)...(19): siRNA sense strand
gaauggagccguggacucu

SEQ ID NO: 235310 - RNA, 19 nt, Homo sapiens
  misc_RNA (1)...(19): siRNA sense strand
caugcuaaagucacaauuu

SEQ ID NO: 235311 - RNA, 19 nt, Homo sapiens
  misc_RNA (1)...(19): siRNA sense strand
caagucagaauauuaacug

SEQ ID NO: 235312 - RNA, 19 nt, Homo sapiens
  misc_RNA (1)...(19): siRNA sense strand
gaggacaauuugaagaacu

SEQ ID NO: 235313 - RNA, 19 nt, Homo sapiens
  misc_RNA (1)...(19): siRNA sense strand
gcaagaauuucgaugacua

SEQ ID NO: 235314 - RNA, 19 nt, Homo sapiens
  misc_RNA (1)...(19): siRNA sense strand
gaauuucgaugacuacaug

SEQ ID NO: 235315 - RNA, 19 nt, Homo sapiens
  misc_RNA (1)...(19): siRNA sense strand
acacagagaucagcuuuaa

SEQ ID NO: 235316 - RNA, 19 nt, Homo sapiens
  misc_RNA (1)...(19): siRNA sense strand
gaacacagagaucagcuuu

SEQ ID NO: 235317 - RNA, 19 nt, Homo sapiens
  misc_RNA (1)...(19): siRNA sense strand
gaccaagccuaccacaauc

SEQ ID NO: 235318 - RNA, 19 nt, Homo sapiens
  misc_RNA (1)...(19): siRNA sense strand
ggaguucgaugagacaaca

SEQ ID NO: 235319 - RNA, 19 nt, Homo sapiens
  misc_RNA (1)...(19): siRNA sense strand
gacacuggauggagggaaa

SEQ ID NO: 235320 - RNA, 19 nt, Homo sapiens
  misc_RNA (1)...(19): siRNA sense strand
ugaccaagccuaccacaau

SEQ ID NO: 235321 - RNA, 19 nt, Homo sapiens
  misc_RNA (1)...(19): siRNA sense strand
caacagcagaugacaggaa

SEQ ID NO: 235322 - RNA, 19 nt, Homo sapiens
  misc_RNA (1)...(19): siRNA sense strand
aaacucauccugacacuca

SEQ ID NO: 235323 - RNA, 19 nt, Homo sapiens
  misc_RNA (1)...(19): siRNA sense strand
acacacagcaccuucaaga

SEQ ID NO: 235324 - RNA, 19 nt, Homo sapiens
  misc_RNA (1)...(19): siRNA sense strand
ccacggcacugcaguuugc

SEQ ID NO: 235325 - RNA, 19 nt, Homo sapiens
  misc_RNA (1)...(19): siRNA sense strand
ggaagcuaguggacagcaa

SEQ ID NO: 235326 - RNA, 19 nt, Homo sapiens
  misc_RNA (1)...(19): siRNA sense strand
cacagcaccuucaagaaca

SEQ ID NO: 235327 - RNA, 19 nt, Homo sapiens
  misc_RNA (1)...(19): siRNA sense strand
gaaaugggacgggcaagag

SEQ ID NO: 235328 - RNA, 19 nt, Homo sapiens
  misc_RNA (1)...(19): siRNA sense strand
acagagaucagcuuuaagu

SEQ ID NO: 235329 - RNA, 19 nt, Homo sapiens
  misc_RNA (1)...(19): siRNA sense strand
agagaucagcuuuaaguug

SEQ ID NO: 235330 - RNA, 19 nt, Homo sapiens
  misc_RNA (1)...(19): siRNA sense strand
ggagcuaauugauggaaaa

SEQ ID NO: 235331 - RNA, 19 nt, Homo sapiens
  misc_RNA (1)...(19): siRNA sense strand
gaaggucaaguccauugug

SEQ ID NO: 235332 - RNA, 19 nt, Homo sapiens
  misc_RNA (1)...(19): siRNA sense strand
acaggaaggucaaguccau

SEQ ID NO: 235333 - RNA, 19 nt, Homo sapiens
  misc_RNA (1)...(19): siRNA sense strand
aaggucaaguccauuguga

SEQ ID NO: 235334 - RNA, 19 nt, Homo sapiens
  misc_RNA (1)...(19): siRNA sense strand
ccacaaucaucgaaaagaa

SEQ ID NO: 235335 - RNA, 19 nt, Homo sapiens
  misc_RNA (1)...(19): siRNA sense strand
gggagcuaauugauggaaa

SEQ ID NO: 235336 - RNA, 19 nt, Homo sapiens
  misc_RNA (1)...(19): siRNA sense strand
ggacagcaagaauuucgau

SEQ ID NO: 235337 - RNA, 19 nt, Homo sapiens
  misc_RNA (1)...(19): siRNA sense strand
ggauggagggaaacuuguu

SEQ ID NO: 235338 - RNA, 19 nt, Homo sapiens
  misc_RNA (1)...(19): siRNA sense strand
cagcaagaauuucgaugac

SEQ ID NO: 235339 - RNA, 19 nt, Homo sapiens
  misc_RNA (1)...(19): siRNA sense strand
gcaguuugcacucgcacuu

SEQ ID NO: 235340 - RNA, 19 nt, Homo sapiens
  misc_RNA (1)...(19): siRNA sense strand
ucaaguccauugugacacu

SEQ ID NO: 235341 - RNA, 19 nt, Homo sapiens
  misc_RNA (1)...(19): siRNA sense strand
acagcaagaauuucgauga

SEQ ID NO: 235342 - RNA, 19 nt, Homo sapiens
  misc_RNA (1)...(19): siRNA sense strand
gcuaguggacagcaagaau

SEQ ID NO: 235343 - RNA, 19 nt, Homo sapiens
  misc_RNA (1)...(19): siRNA sense strand
cuaguggacagcaagaauu

SEQ ID NO: 235344 - RNA, 19 nt, Homo sapiens
  misc_RNA (1)...(19): siRNA sense strand
uaguggacagcaagaauuu

SEQ ID NO: 235345 - RNA, 19 nt, Homo sapiens
  misc_RNA (1)...(19): siRNA sense strand
gaugagacaacagcagaug

SEQ ID NO: 235346 - RNA, 19 nt, Homo sapiens
  misc_RNA (1)...(19): siRNA sense strand
ggaaggucaaguccauugu

SEQ ID NO: 235347 - RNA, 19 nt, Homo sapiens
  misc_RNA (1)...(19): siRNA sense strand
acacagcaccuucaagaac

SEQ ID NO: 235348 - RNA, 19 nt, Homo sapiens
  misc_RNA (1)...(19): siRNA sense strand
gauggagggaaacuuguuc

SEQ ID NO: 235349 - RNA, 19 nt, Homo sapiens
  misc_RNA (1)...(19): siRNA sense strand
gcaccuucaagaacacaga

SEQ ID NO: 235350 - RNA, 19 nt, Homo sapiens
  misc_RNA (1)...(19): siRNA sense strand
uuguucaccugcagaaaug

SEQ ID NO: 235351 - RNA, 19 nt, Homo sapiens
  misc_RNA (1)...(19): siRNA sense strand
caagaauuucgaugacuac

SEQ ID NO: 235352 - RNA, 19 nt, Homo sapiens
  misc_RNA (1)...(19): siRNA sense strand
gcuaauugauggaaaacuc

SEQ ID NO: 235353 - RNA, 19 nt, Homo sapiens
  misc_RNA (1)...(19): siRNA sense strand
gugcgggagcuaauugaug

SEQ ID NO: 235354 - RNA, 19 nt, Homo sapiens
  misc_RNA (1)...(19): siRNA sense strand
gaagguggauacuuuaaua

SEQ ID NO: 235355 - RNA, 19 nt, Homo sapiens
  misc_RNA (1)...(19): siRNA sense strand
ggacaaagguggcucugua

SEQ ID NO: 235356 - RNA, 19 nt, Homo sapiens
  misc_RNA (1)...(19): siRNA sense strand
ggaggaagguggauacuuu

SEQ ID NO: 235357 - RNA, 19 nt, Homo sapiens
  misc_RNA (1)...(19): siRNA sense strand
gauggaugcuuaaagauua

SEQ ID NO: 235358 - RNA, 19 nt, Homo sapiens
  misc_RNA (1)...(19): siRNA sense strand
ggaaauggauuacagaugu

SEQ ID NO: 235359 - RNA, 19 nt, Homo sapiens
  misc_RNA (1)...(19): siRNA sense strand
caaacaaaguugaaggaua

SEQ ID NO: 235360 - RNA, 19 nt, Homo sapiens
  misc_RNA (1)...(19): siRNA sense strand
ugaacuagcucgaaagaaa

SEQ ID NO: 235361 - RNA, 19 nt, Homo sapiens
  misc_RNA (1)...(19): siRNA sense strand
gcaaagagcuuaaaacaca

SEQ ID NO: 235362 - RNA, 19 nt, Homo sapiens
  misc_RNA (1)...(19): siRNA sense strand
gucaugaucucacauagua

SEQ ID NO: 235363 - RNA, 19 nt, Homo sapiens
  misc_RNA (1)...(19): siRNA sense strand
auaauuggcuuuccuauga

SEQ ID NO: 235364 - RNA, 19 nt, Homo sapiens
  misc_RNA (1)...(19): siRNA sense strand
uaacugaacuagcucgaaa

SEQ ID NO: 235365 - RNA, 19 nt, Homo sapiens
  misc_RNA (1)...(19): siRNA sense strand
aaacagaggugaccaacau

SEQ ID NO: 235366 - RNA, 19 nt, Homo sapiens
  misc_RNA (1)...(19): siRNA sense strand
gcaaacaguuaucauucuu

SEQ ID NO: 235367 - RNA, 19 nt, Homo sapiens
  misc_RNA (1)...(19): siRNA sense strand
ugguuuggcuucaguauua

SEQ ID NO: 235368 - RNA, 19 nt, Homo sapiens
  misc_RNA (1)...(19): siRNA sense strand
aaaccaaccucauagcaaa

SEQ ID NO: 235369 - RNA, 19 nt, Homo sapiens
  misc_RNA (1)...(19): siRNA sense strand
gaaauggauuacagauguu

SEQ ID NO: 235370 - RNA, 19 nt, Homo sapiens
  misc_RNA (1)...(19): siRNA sense strand
ugaggaagaugaaguacaa

SEQ ID NO: 235371 - RNA, 19 nt, Homo sapiens
  misc_RNA (1)...(19): siRNA sense strand
ggaacuaacugaacuagcu

SEQ ID NO: 235372 - RNA, 19 nt, Homo sapiens
  misc_RNA (1)...(19): siRNA sense strand
gaucucacauaguaacauu

SEQ ID NO: 235373 - RNA, 19 nt, Homo sapiens
  misc_RNA (1)...(19): siRNA sense strand
gaauaaagucagugaaaug

SEQ ID NO: 235374 - RNA, 19 nt, Homo sapiens
  misc_RNA (1)...(19): siRNA sense strand
aagcaaagccuguaaauuc

SEQ ID NO: 235375 - RNA, 19 nt, Homo sapiens
  misc_RNA (1)...(19): siRNA sense strand
gaggugaccaacaucauua

SEQ ID NO: 235376 - RNA, 19 nt, Homo sapiens
  misc_RNA (1)...(19): siRNA sense strand
uaacaguugugaaauggaa

SEQ ID NO: 235377 - RNA, 19 nt, Homo sapiens
  misc_RNA (1)...(19): siRNA sense strand
caacguaaucuguuuauuc

SEQ ID NO: 235378 - RNA, 19 nt, Homo sapiens
  misc_RNA (1)...(19): siRNA sense strand
gauacgggcucacugaauc

SEQ ID NO: 235379 - RNA, 19 nt, Homo sapiens
  misc_RNA (1)...(19): siRNA sense strand
caaagccuguaaauucaaa

SEQ ID NO: 235380 - RNA, 19 nt, Homo sapiens
  misc_RNA (1)...(19): siRNA sense strand
guggauacuuuaauacuga

SEQ ID NO: 235381 - RNA, 19 nt, Homo sapiens
  misc_RNA (1)...(19): siRNA sense strand
caacaucgccaucuucugu

SEQ ID NO: 235382 - RNA, 19 nt, Homo sapiens
  misc_RNA (1)...(19): siRNA sense strand
gaaguacaaccaaauggaa

SEQ ID NO: 235383 - RNA, 19 nt, Homo sapiens
  misc_RNA (1)...(19): siRNA sense strand
ucagugaaaugaguaguuu

SEQ ID NO: 235384 - RNA, 19 nt, Homo sapiens
  misc_RNA (1)...(19): siRNA sense strand
agaaaggauuccagaacua

SEQ ID NO: 235385 - RNA, 19 nt, Homo sapiens
  misc_RNA (1)...(19): siRNA sense strand
caucaacccuauucuuuua

SEQ ID NO: 235386 - RNA, 19 nt, Homo sapiens
  misc_RNA (1)...(19): siRNA sense strand
gagcgaauguauggaagaa

SEQ ID NO: 235387 - RNA, 19 nt, Homo sapiens
  misc_RNA (1)...(19): siRNA sense strand
gugcugagcuugucugucu

SEQ ID NO: 235388 - RNA, 19 nt, Homo sapiens
  misc_RNA (1)...(19): siRNA sense strand
gggaacacgugaaguuuua

SEQ ID NO: 235389 - RNA, 19 nt, Homo sapiens
  misc_RNA (1)...(19): siRNA sense strand
gcaguaaucauguacacaa

SEQ ID NO: 235390 - RNA, 19 nt, Homo sapiens
  misc_RNA (1)...(19): siRNA sense strand
ugaacccgauggaugcuua

SEQ ID NO: 235391 - RNA, 19 nt, Homo sapiens
  misc_RNA (1)...(19): siRNA sense strand
uaaagucagugaaaugagu

SEQ ID NO: 235392 - RNA, 19 nt, Homo sapiens
  misc_RNA (1)...(19): siRNA sense strand
uaacugggauggcagaaag

SEQ ID NO: 235393 - RNA, 19 nt, Homo sapiens
  misc_RNA (1)...(19): siRNA sense strand
guaaucauguacacaagug

SEQ ID NO: 235394 - RNA, 19 nt, Homo sapiens
  misc_RNA (1)...(19): siRNA sense strand
guuaauaguuuggaugguu

SEQ ID NO: 235395 - RNA, 19 nt, Homo sapiens
  misc_RNA (1)...(19): siRNA sense strand
ggagucaugaucucacaua

SEQ ID NO: 235396 - RNA, 19 nt, Homo sapiens
  misc_RNA (1)...(19): siRNA sense strand
caaaccgaauuaaagcaaa

SEQ ID NO: 235397 - RNA, 19 nt, Homo sapiens
  misc_RNA (1)...(19): siRNA sense strand
gauaacauuugugcauaug

SEQ ID NO: 235398 - RNA, 19 nt, Homo sapiens
  misc_RNA (1)...(19): siRNA sense strand
gaggaagguggauacuuua

SEQ ID NO: 235399 - RNA, 19 nt, Homo sapiens
  misc_RNA (1)...(19): siRNA sense strand
ggcccauguucuagaauua

SEQ ID NO: 235400 - RNA, 19 nt, Homo sapiens
  misc_RNA (1)...(19): siRNA sense strand
gcccucagauauugcagua

SEQ ID NO: 235401 - RNA, 19 nt, Homo sapiens
  misc_RNA (1)...(19): siRNA sense strand
uagcagaucagucuucaaa

SEQ ID NO: 235402 - RNA, 19 nt, Homo sapiens
  misc_RNA (1)...(19): siRNA sense strand
gaagaugaaguacaaccaa

SEQ ID NO: 235403 - RNA, 19 nt, Homo sapiens
  misc_RNA (1)...(19): siRNA sense strand
caucuaccaugaagcuaaa

SEQ ID NO: 235404 - RNA, 19 nt, Homo sapiens
  misc_RNA (1)...(19): siRNA sense strand
agaauuaagugcugagcuu

SEQ ID NO: 235405 - RNA, 19 nt, Homo sapiens
  misc_RNA (1)...(19): siRNA sense strand
ugaccaacaucauuacuag

SEQ ID NO: 235406 - RNA, 19 nt, Homo sapiens
  misc_RNA (1)...(19): siRNA sense strand
gcacaggcguguuuuaugu

SEQ ID NO: 235407 - RNA, 19 nt, Homo sapiens
  misc_RNA (1)...(19): siRNA sense strand
ccucagauauugcaguaau

SEQ ID NO: 235408 - RNA, 19 nt, Homo sapiens
  misc_RNA (1)...(19): siRNA sense strand
gaagugugggacuacaaua

SEQ ID NO: 235409 - RNA, 19 nt, Homo sapiens
  misc_RNA (1)...(19): siRNA sense strand
gagcuugucugucuuucuc

SEQ ID NO: 235410 - RNA, 19 nt, Homo sapiens
  misc_RNA (1)...(19): siRNA sense strand
gaaauauucgucuccuguu

SEQ ID NO: 235411 - RNA, 19 nt, Homo sapiens
  misc_RNA (1)...(19): siRNA sense strand
cgaaagaaaggacuuaaag

SEQ ID NO: 235412 - RNA, 19 nt, Homo sapiens
  misc_RNA (1)...(19): siRNA sense strand
ggugacagaugccuucaag

SEQ ID NO: 235413 - RNA, 19 nt, Homo sapiens
  misc_RNA (1)...(19): siRNA sense strand
ccauugcccucagauauug

SEQ ID NO: 235414 - RNA, 19 nt, Homo sapiens
  misc_RNA (1)...(19): siRNA sense strand
gaaagaaaggacuuaaagg

SEQ ID NO: 235415 - RNA, 19 nt, Homo sapiens
  misc_RNA (1)...(19): siRNA sense strand
cagagugggagcaccauua

SEQ ID NO: 235416 - RNA, 19 nt, Homo sapiens
  misc_RNA (1)...(19): siRNA sense strand
ucuaggagguccagccauu

SEQ ID NO: 235417 - RNA, 19 nt, Homo sapiens
  misc_RNA (1)...(19): siRNA sense strand
gaaaggauuccagaacuag

SEQ ID NO: 235418 - RNA, 19 nt, Homo sapiens
  misc_RNA (1)...(19): siRNA sense strand
cagaaaggauuccagaacu

SEQ ID NO: 235419 - RNA, 19 nt, Homo sapiens
  misc_RNA (1)...(19): siRNA sense strand
uuacagauguugggucaga

SEQ ID NO: 235420 - RNA, 19 nt, Homo sapiens
  misc_RNA (1)...(19): siRNA sense strand
uacauuauaugccacucua

SEQ ID NO: 235421 - RNA, 19 nt, Homo sapiens
  misc_RNA (1)...(19): siRNA sense strand
guagauaacauuugugcau

SEQ ID NO: 235422 - RNA, 19 nt, Homo sapiens
  misc_RNA (1)...(19): siRNA sense strand
gcagaaaggauuccagaac

SEQ ID NO: 235423 - RNA, 19 nt, Homo sapiens
  misc_RNA (1)...(19): siRNA sense strand
gaugaaguacaaccaaaug

SEQ ID NO: 235424 - RNA, 19 nt, Homo sapiens
  misc_RNA (1)...(19): siRNA sense strand
gcgaauguauggaagaaaa

SEQ ID NO: 235425 - RNA, 19 nt, Homo sapiens
  misc_RNA (1)...(19): siRNA sense strand
cagcaagucuggaaaaguu

SEQ ID NO: 235426 - RNA, 19 nt, Homo sapiens
  misc_RNA (1)...(19): siRNA sense strand
guguaacaguugugaaaug

SEQ ID NO: 235427 - RNA, 19 nt, Homo sapiens
  misc_RNA (1)...(19): siRNA sense strand
gaacuagcucgaaagaaag

SEQ ID NO: 235428 - RNA, 19 nt, Homo sapiens
  misc_RNA (1)...(19): siRNA sense strand
cccgauggaugcuuaaaga

SEQ ID NO: 235429 - RNA, 19 nt, Homo sapiens
  misc_RNA (1)...(19): siRNA sense strand
ccacagacuuuagcagauc

SEQ ID NO: 235430 - RNA, 19 nt, Homo sapiens
  misc_RNA (1)...(19): siRNA sense strand
guaacauuauugcugguau

SEQ ID NO: 235431 - RNA, 19 nt, Homo sapiens
  misc_RNA (1)...(19): siRNA sense strand
aagaugaaguacaaccaaa

SEQ ID NO: 235432 - RNA, 19 nt, Homo sapiens
  misc_RNA (1)...(19): siRNA sense strand
gguggauacuuuaauacug

SEQ ID NO: 235433 - RNA, 19 nt, Homo sapiens
  misc_RNA (1)...(19): siRNA sense strand
caaagggagucaugaucuc

SEQ ID NO: 235434 - RNA, 19 nt, Homo sapiens
  misc_RNA (1)...(19): siRNA sense strand
ggaugugauacuuuagaua

SEQ ID NO: 235435 - RNA, 19 nt, Homo sapiens
  misc_RNA (1)...(19): siRNA sense strand
ccauuaguuugcugugaaa

SEQ ID NO: 235436 - RNA, 19 nt, Homo sapiens
  misc_RNA (1)...(19): siRNA sense strand
gcaaagccuguaaauucaa

SEQ ID NO: 235437 - RNA, 19 nt, Homo sapiens
  misc_RNA (1)...(19): siRNA sense strand
aaauauucgucuccuguug

SEQ ID NO: 235438 - RNA, 19 nt, Homo sapiens
  misc_RNA (1)...(19): siRNA sense strand
agccauuguucaugcauua

SEQ ID NO: 235439 - RNA, 19 nt, Homo sapiens
  misc_RNA (1)...(19): siRNA sense strand
uuccgaagcugcuauuuca

SEQ ID NO: 235440 - RNA, 19 nt, Homo sapiens
  misc_RNA (1)...(19): siRNA sense strand
ccacuaguagauaacauuu

SEQ ID NO: 235441 - RNA, 19 nt, Homo sapiens
  misc_RNA (1)...(19): siRNA sense strand
cgauggaugcuuaaagauu

SEQ ID NO: 235442 - RNA, 19 nt, Homo sapiens
  misc_RNA (1)...(19): siRNA sense strand
ggaagguggauacuuuaau

SEQ ID NO: 235443 - RNA, 19 nt, Homo sapiens
  misc_RNA (1)...(19): siRNA sense strand
uaaagcaaagccuguaaau

SEQ ID NO: 235444 - RNA, 19 nt, Homo sapiens
  misc_RNA (1)...(19): siRNA sense strand
ggacguaauacuccacugu

SEQ ID NO: 235445 - RNA, 19 nt, Homo sapiens
  misc_RNA (1)...(19): siRNA sense strand
ucaaaaccaucuaccauga

SEQ ID NO: 235446 - RNA, 19 nt, Homo sapiens
  misc_RNA (1)...(19): siRNA sense strand
cccuggaugugauacuuua

SEQ ID NO: 235447 - RNA, 19 nt, Homo sapiens
  misc_RNA (1)...(19): siRNA sense strand
agaggcagcuuugaagaau

SEQ ID NO: 235448 - RNA, 19 nt, Homo sapiens
  misc_RNA (1)...(19): siRNA sense strand
gauauugcaguaaucaugu

SEQ ID NO: 235449 - RNA, 19 nt, Homo sapiens
  misc_RNA (1)...(19): siRNA sense strand
aaaugaggaagaugaagua

SEQ ID NO: 235450 - RNA, 19 nt, Homo sapiens
  misc_RNA (1)...(19): siRNA sense strand
uaauuggcuuuccuaugaa

SEQ ID NO: 235451 - RNA, 19 nt, Homo sapiens
  misc_RNA (1)...(19): siRNA sense strand
gaaacgcaaagagcuuaaa

SEQ ID NO: 235452 - RNA, 19 nt, Homo sapiens
  misc_RNA (1)...(19): siRNA sense strand
gcucgaaagaaaggacuua

SEQ ID NO: 235453 - RNA, 19 nt, Homo sapiens
  misc_RNA (1)...(19): siRNA sense strand
agcaaagccuguaaauuca

SEQ ID NO: 235454 - RNA, 19 nt, Homo sapiens
  misc_RNA (1)...(19): siRNA sense strand
gcagagauaucuugcuuua

SEQ ID NO: 235455 - RNA, 19 nt, Homo sapiens
  misc_RNA (1)...(19): siRNA sense strand
gcacagaccugcuuuaagu

SEQ ID NO: 235456 - RNA, 19 nt, Homo sapiens
  misc_RNA (1)...(19): siRNA sense strand
gaaggcgguuauacaauua

SEQ ID NO: 235457 - RNA, 19 nt, Homo sapiens
  misc_RNA (1)...(19): siRNA sense strand
gaagaauuguccacuuauu

SEQ ID NO: 235458 - RNA, 19 nt, Homo sapiens
  misc_RNA (1)...(19): siRNA sense strand
gaaggaacuuggguugaua

SEQ ID NO: 235459 - RNA, 19 nt, Homo sapiens
  misc_RNA (1)...(19): siRNA sense strand
gauaggguaugauuacaaa

SEQ ID NO: 235460 - RNA, 19 nt, Homo sapiens
  misc_RNA (1)...(19): siRNA sense strand
gaacuuggguugauaucug

SEQ ID NO: 235461 - RNA, 19 nt, Homo sapiens
  misc_RNA (1)...(19): siRNA sense strand
agaaagaucuagugaaguu

SEQ ID NO: 235462 - RNA, 19 nt, Homo sapiens
  misc_RNA (1)...(19): siRNA sense strand
guacugaagcccacacuua

SEQ ID NO: 235463 - RNA, 19 nt, Homo sapiens
  misc_RNA (1)...(19): siRNA sense strand
uaagaaagaucuagugaag

SEQ ID NO: 235464 - RNA, 19 nt, Homo sapiens
  misc_RNA (1)...(19): siRNA sense strand
gauggauguuuacagauua

SEQ ID NO: 235465 - RNA, 19 nt, Homo sapiens
  misc_RNA (1)...(19): siRNA sense strand
caaaggagacuguacugua

SEQ ID NO: 235466 - RNA, 19 nt, Homo sapiens
  misc_RNA (1)...(19): siRNA sense strand
guugauaucugcaauaauc

SEQ ID NO: 235467 - RNA, 19 nt, Homo sapiens
  misc_RNA (1)...(19): siRNA sense strand
guauguaucucuugggaaa

SEQ ID NO: 235468 - RNA, 19 nt, Homo sapiens
  misc_RNA (1)...(19): siRNA sense strand
gcaauaauccugcuaugga

SEQ ID NO: 235469 - RNA, 19 nt, Homo sapiens
  misc_RNA (1)...(19): siRNA sense strand
gaacaccauugccaucuuc

SEQ ID NO: 235470 - RNA, 19 nt, Homo sapiens
  misc_RNA (1)...(19): siRNA sense strand
gacaauaaggcuaucaaua

SEQ ID NO: 235471 - RNA, 19 nt, Homo sapiens
  misc_RNA (1)...(19): siRNA sense strand
gaugaacuaucuugaagug

SEQ ID NO: 235472 - RNA, 19 nt, Homo sapiens
  misc_RNA (1)...(19): siRNA sense strand
gaaagaaauucgagaagcu

SEQ ID NO: 235473 - RNA, 19 nt, Homo sapiens
  misc_RNA (1)...(19): siRNA sense strand
ccagggaaauccuaaguga

SEQ ID NO: 235474 - RNA, 19 nt, Homo sapiens
  misc_RNA (1)...(19): siRNA sense strand
ggaaggagcugaggaacca

SEQ ID NO: 235475 - RNA, 19 nt, Homo sapiens
  misc_RNA (1)...(19): siRNA sense strand
cugaagaauuguccacuua

SEQ ID NO: 235476 - RNA, 19 nt, Homo sapiens
  misc_RNA (1)...(19): siRNA sense strand
gaaaugcagccaaauggaa

SEQ ID NO: 235477 - RNA, 19 nt, Homo sapiens
  misc_RNA (1)...(19): siRNA sense strand
caaaugccaugaaauugga

SEQ ID NO: 235478 - RNA, 19 nt, Homo sapiens
  misc_RNA (1)...(19): siRNA sense strand
agaaggcgguuauacaauu

SEQ ID NO: 235479 - RNA, 19 nt, Homo sapiens
  misc_RNA (1)...(19): siRNA sense strand
gcugugaaauuaagcuaaa

SEQ ID NO: 235480 - RNA, 19 nt, Homo sapiens
  misc_RNA (1)...(19): siRNA sense strand
ugaacuaucuugaagugaa

SEQ ID NO: 235481 - RNA, 19 nt, Homo sapiens
  misc_RNA (1)...(19): siRNA sense strand
gugaauaacuuugguagug

SEQ ID NO: 235482 - RNA, 19 nt, Homo sapiens
  misc_RNA (1)...(19): siRNA sense strand
gaacuaucuugaagugaau

SEQ ID NO: 235483 - RNA, 19 nt, Homo sapiens
  misc_RNA (1)...(19): siRNA sense strand
agaguacccugaaggauuu

SEQ ID NO: 235484 - RNA, 19 nt, Homo sapiens
  misc_RNA (1)...(19): siRNA sense strand
gcaagaaggcgguuauaca

SEQ ID NO: 235485 - RNA, 19 nt, Homo sapiens
  misc_RNA (1)...(19): siRNA sense strand
gaagugaaucgcagaguga

SEQ ID NO: 235486 - RNA, 19 nt, Homo sapiens
  misc_RNA (1)...(19): siRNA sense strand
gguaacugaugcuuucaaa

SEQ ID NO: 235487 - RNA, 19 nt, Homo sapiens
  misc_RNA (1)...(19): siRNA sense strand
gaacaucuccaugggauau

SEQ ID NO: 235488 - RNA, 19 nt, Homo sapiens
  misc_RNA (1)...(19): siRNA sense strand
gcaaucuguuacuguuuaa

SEQ ID NO: 235489 - RNA, 19 nt, Homo sapiens
  misc_RNA (1)...(19): siRNA sense strand
ggauauucuucuccgcuua

SEQ ID NO: 235490 - RNA, 19 nt, Homo sapiens
  misc_RNA (1)...(19): siRNA sense strand
gagcaaaguccaagagaug

SEQ ID NO: 235491 - RNA, 19 nt, Homo sapiens
  misc_RNA (1)...(19): siRNA sense strand
gcugaaauacugaaagaaa

SEQ ID NO: 235492 - RNA, 19 nt, Homo sapiens
  misc_RNA (1)...(19): siRNA sense strand
uauggaagcugaaauacug

SEQ ID NO: 235493 - RNA, 19 nt, Homo sapiens
  misc_RNA (1)...(19): siRNA sense strand
caauaauccugcuauggaa

SEQ ID NO: 235494 - RNA, 19 nt, Homo sapiens
  misc_RNA (1)...(19): siRNA sense strand
aagcugcacugaagaauug

SEQ ID NO: 235495 - RNA, 19 nt, Homo sapiens
  misc_RNA (1)...(19): siRNA sense strand
cgauggauguuuacagauu

SEQ ID NO: 235496 - RNA, 19 nt, Homo sapiens
  misc_RNA (1)...(19): siRNA sense strand
gaaaacagcagaagauuau

SEQ ID NO: 235497 - RNA, 19 nt, Homo sapiens
  misc_RNA (1)...(19): siRNA sense strand
caagaaggcgguuauacaa

SEQ ID NO: 235498 - RNA, 19 nt, Homo sapiens
  misc_RNA (1)...(19): siRNA sense strand
gaggcuuccuaucugauua

SEQ ID NO: 235499 - RNA, 19 nt, Homo sapiens
  misc_RNA (1)...(19): siRNA sense strand
acuuaagacugcauuguua

SEQ ID NO: 235500 - RNA, 19 nt, Homo sapiens
  misc_RNA (1)...(19): siRNA sense strand
ggaaaucauggauagaauu

SEQ ID NO: 235501 - RNA, 19 nt, Homo sapiens
  misc_RNA (1)...(19): siRNA sense strand
ggguugauaucugcaauaa

SEQ ID NO: 235502 - RNA, 19 nt, Homo sapiens
  misc_RNA (1)...(19): siRNA sense strand
gaggugaaaucguaauugg

SEQ ID NO: 235503 - RNA, 19 nt, Homo sapiens
  misc_RNA (1)...(19): siRNA sense strand
gcaaagaagcaguaguuca

SEQ ID NO: 235504 - RNA, 19 nt, Homo sapiens
  misc_RNA (1)...(19): siRNA sense strand
gcaaaugccaugaaauugg

SEQ ID NO: 235505 - RNA, 19 nt, Homo sapiens
  misc_RNA (1)...(19): siRNA sense strand
ugcaaucuguuacuguuua

SEQ ID NO: 235506 - RNA, 19 nt, Homo sapiens
  misc_RNA (1)...(19): siRNA sense strand
acacauauauuggcuacuu

SEQ ID NO: 235507 - RNA, 19 nt, Homo sapiens
  misc_RNA (1)...(19): siRNA sense strand
caaagaagcaguaguucau

SEQ ID NO: 235508 - RNA, 19 nt, Homo sapiens
  misc_RNA (1)...(19): siRNA sense strand
gaacugacagcagagauau

SEQ ID NO: 235509 - RNA, 19 nt, Homo sapiens
  misc_RNA (1)...(19): siRNA sense strand
gaccgaaggacacauauau

SEQ ID NO: 235510 - RNA, 19 nt, Homo sapiens
  misc_RNA (1)...(19): siRNA sense strand
gcaauuugauagcuggaau

SEQ ID NO: 235511 - RNA, 19 nt, Homo sapiens
  misc_RNA (1)...(19): siRNA sense strand
gcaaagagaauaaaagcua

SEQ ID NO: 235512 - RNA, 19 nt, Homo sapiens
  misc_RNA (1)...(19): siRNA sense strand
gcaaucaguagaagaguug

SEQ ID NO: 235513 - RNA, 19 nt, Homo sapiens
  misc_RNA (1)...(19): siRNA sense strand
ccucuuauuugcugugaaa

SEQ ID NO: 235514 - RNA, 19 nt, Homo sapiens
  misc_RNA (1)...(19): siRNA sense strand
gauuugagauucacagcau

SEQ ID NO: 235515 - RNA, 19 nt, Homo sapiens
  misc_RNA (1)...(19): siRNA sense strand
gaagcugcacugaagaauu

SEQ ID NO: 235516 - RNA, 19 nt, Homo sapiens
  misc_RNA (1)...(19): siRNA sense strand
caagauaggguaugauuac

SEQ ID NO: 235517 - RNA, 19 nt, Homo sapiens
  misc_RNA (1)...(19): siRNA sense strand
gggcauuccuccaaguaga

SEQ ID NO: 235518 - RNA, 19 nt, Homo sapiens
  misc_RNA (1)...(19): siRNA sense strand
ggaccgaaggacacauaua

SEQ ID NO: 235519 - RNA, 19 nt, Homo sapiens
  misc_RNA (1)...(19): siRNA sense strand
uaagcccacuucagacaaa

SEQ ID NO: 235520 - RNA, 19 nt, Homo sapiens
  misc_RNA (1)...(19): siRNA sense strand
guaacugacuauacuacug

SEQ ID NO: 235521 - RNA, 19 nt, Homo sapiens
  misc_RNA (1)...(19): siRNA sense strand
aagacugcauuguuagaua

SEQ ID NO: 235522 - RNA, 19 nt, Homo sapiens
  misc_RNA (1)...(19): siRNA sense strand
aagcugaaauacugaaaga

SEQ ID NO: 235523 - RNA, 19 nt, Homo sapiens
  misc_RNA (1)...(19): siRNA sense strand
gaaagaucuagugaaguua

SEQ ID NO: 235524 - RNA, 19 nt, Homo sapiens
  misc_RNA (1)...(19): siRNA sense strand
agacaucccuggagcagau

SEQ ID NO: 235525 - RNA, 19 nt, Homo sapiens
  misc_RNA (1)...(19): siRNA sense strand
gcgguuauacaauuaauga

SEQ ID NO: 235526 - RNA, 19 nt, Homo sapiens
  misc_RNA (1)...(19): siRNA sense strand
guuauggacugacagaauc

SEQ ID NO: 235527 - RNA, 19 nt, Homo sapiens
  misc_RNA (1)...(19): siRNA sense strand
gcaccucuuugcaaucugu

SEQ ID NO: 235528 - RNA, 19 nt, Homo sapiens
  misc_RNA (1)...(19): siRNA sense strand
ucagacauggccauuguua

SEQ ID NO: 235529 - RNA, 19 nt, Homo sapiens
  misc_RNA (1)...(19): siRNA sense strand
gugaaucgcagagugaaua

SEQ ID NO: 235530 - RNA, 19 nt, Homo sapiens
  misc_RNA (1)...(19): siRNA sense strand
uuugauagcuggaaugaca

SEQ ID NO: 235531 - RNA, 19 nt, Homo sapiens
  misc_RNA (1)...(19): siRNA sense strand
cagaguacccugaaggauu

SEQ ID NO: 235532 - RNA, 19 nt, Homo sapiens
  misc_RNA (1)...(19): siRNA sense strand
caacuuuccucuugugacu

SEQ ID NO: 235533 - RNA, 19 nt, Homo sapiens
  misc_RNA (1)...(19): siRNA sense strand
caaauuggaacagaucaaa

SEQ ID NO: 235534 - RNA, 19 nt, Homo sapiens
  misc_RNA (1)...(19): siRNA sense strand
gauuacaaauuggaacaga

SEQ ID NO: 235535 - RNA, 19 nt, Homo sapiens
  misc_RNA (1)...(19): siRNA sense strand
ucacugcacugggacuaaa

SEQ ID NO: 235536 - RNA, 19 nt, Homo sapiens
  misc_RNA (1)...(19): siRNA sense strand
gccuuuggcucaugugcua

SEQ ID NO: 235537 - RNA, 19 nt, Homo sapiens
  misc_RNA (1)...(19): siRNA sense strand
agacugcauuguuagauau

SEQ ID NO: 235538 - RNA, 19 nt, Homo sapiens
  misc_RNA (1)...(19): siRNA sense strand
gauuaccaguguugaacuu

SEQ ID NO: 235539 - RNA, 19 nt, Homo sapiens
  misc_RNA (1)...(19): siRNA sense strand
ccauugccaucuucuguga

SEQ ID NO: 235540 - RNA, 19 nt, Homo sapiens
  misc_RNA (1)...(19): siRNA sense strand
gauaucaguuguguuaaac

SEQ ID NO: 235541 - RNA, 19 nt, Homo sapiens
  misc_RNA (1)...(19): siRNA sense strand
aaagugaucaguccuaugu

SEQ ID NO: 235542 - RNA, 19 nt, Homo sapiens
  misc_RNA (1)...(19): siRNA sense strand
aguagaagcugcacugaag

SEQ ID NO: 235543 - RNA, 19 nt, Homo sapiens
  misc_RNA (1)...(19): siRNA sense strand
guaagaaagaucuagugaa

SEQ ID NO: 235544 - RNA, 19 nt, Homo sapiens
  misc_RNA (1)...(19): siRNA sense strand
ggaaauccuaagugaagaa

SEQ ID NO: 235545 - RNA, 19 nt, Homo sapiens
  misc_RNA (1)...(19): siRNA sense strand
cgacucacuagcuguaaua

SEQ ID NO: 235546 - RNA, 19 nt, Homo sapiens
  misc_RNA (1)...(19): siRNA sense strand
gauaugaugcaccucuuug

SEQ ID NO: 235547 - RNA, 19 nt, Homo sapiens
  misc_RNA (1)...(19): siRNA sense strand
aagcuaagcccacuucaga

SEQ ID NO: 235548 - RNA, 19 nt, Homo sapiens
  misc_RNA (1)...(19): siRNA sense strand
ccgaaggacacauauauug

SEQ ID NO: 235549 - RNA, 19 nt, Homo sapiens
  misc_RNA (1)...(19): siRNA sense strand
agacauggccauuguuaug

SEQ ID NO: 235550 - RNA, 19 nt, Homo sapiens
  misc_RNA (1)...(19): siRNA sense strand
uaacugaugcuuucaaacu

SEQ ID NO: 235551 - RNA, 19 nt, Homo sapiens
  misc_RNA (1)...(19): siRNA sense strand
cugcaaaugccaugaaauu

SEQ ID NO: 235552 - RNA, 19 nt, Homo sapiens
  misc_RNA (1)...(19): siRNA sense strand
aguccuaugugaucaguuu

SEQ ID NO: 235553 - RNA, 19 nt, Homo sapiens
  misc_RNA (1)...(19): siRNA sense strand
gaaauccuaagugaagaaa

SEQ ID NO: 235554 - RNA, 19 nt, Homo sapiens
  misc_RNA (1)...(19): siRNA sense strand
gcagagauaucuugcuuua

SEQ ID NO: 235555 - RNA, 19 nt, Homo sapiens
  misc_RNA (1)...(19): siRNA sense strand
gcacagaccugcuuuaagu

SEQ ID NO: 235556 - RNA, 19 nt, Homo sapiens
  misc_RNA (1)...(19): siRNA sense strand
gaaggcgguuauacaauua

SEQ ID NO: 235557 - RNA, 19 nt, Homo sapiens
  misc_RNA (1)...(19): siRNA sense strand
gaagaauuguccacuuauu

SEQ ID NO: 235558 - RNA, 19 nt, Homo sapiens
  misc_RNA (1)...(19): siRNA sense strand
gaaggaacuuggguugaua

SEQ ID NO: 235559 - RNA, 19 nt, Homo sapiens
  misc_RNA (1)...(19): siRNA sense strand
gauaggguaugauuacaaa

SEQ ID NO: 235560 - RNA, 19 nt, Homo sapiens
  misc_RNA (1)...(19): siRNA sense strand
gaacuuggguugauaucug

SEQ ID NO: 235561 - RNA, 19 nt, Homo sapiens
  misc_RNA (1)...(19): siRNA sense strand
agaaagaucuagugaaguu

SEQ ID NO: 235562 - RNA, 19 nt, Homo sapiens
  misc_RNA (1)...(19): siRNA sense strand
guacugaagcccacacuua

SEQ ID NO: 235563 - RNA, 19 nt, Homo sapiens
  misc_RNA (1)...(19): siRNA sense strand
uaagaaagaucuagugaag

SEQ ID NO: 235564 - RNA, 19 nt, Homo sapiens
  misc_RNA (1)...(19): siRNA sense strand
gauggauguuuacagauua

SEQ ID NO: 235565 - RNA, 19 nt, Homo sapiens
  misc_RNA (1)...(19): siRNA sense strand
caaaggagacuguacugua

SEQ ID NO: 235566 - RNA, 19 nt, Homo sapiens
  misc_RNA (1)...(19): siRNA sense strand
guugauaucugcaauaauc

SEQ ID NO: 235567 - RNA, 19 nt, Homo sapiens
  misc_RNA (1)...(19): siRNA sense strand
guauguaucucuugggaaa

SEQ ID NO: 235568 - RNA, 19 nt, Homo sapiens
  misc_RNA (1)...(19): siRNA sense strand
gcaauaauccugcuaugga

SEQ ID NO: 235569 - RNA, 19 nt, Homo sapiens
  misc_RNA (1)...(19): siRNA sense strand
gaacaccauugccaucuuc

SEQ ID NO: 235570 - RNA, 19 nt, Homo sapiens
  misc_RNA (1)...(19): siRNA sense strand
gacaauaaggcuaucaaua

SEQ ID NO: 235571 - RNA, 19 nt, Homo sapiens
  misc_RNA (1)...(19): siRNA sense strand
gaugaacuaucuugaagug

SEQ ID NO: 235572 - RNA, 19 nt, Homo sapiens
  misc_RNA (1)...(19): siRNA sense strand
gaaagaaauucgagaagcu

SEQ ID NO: 235573 - RNA, 19 nt, Homo sapiens
  misc_RNA (1)...(19): siRNA sense strand
ccagggaaauccuaaguga

SEQ ID NO: 235574 - RNA, 19 nt, Homo sapiens
  misc_RNA (1)...(19): siRNA sense strand
ggaaggagcugaggaacca

SEQ ID NO: 235575 - RNA, 19 nt, Homo sapiens
  misc_RNA (1)...(19): siRNA sense strand
cugaagaauuguccacuua

SEQ ID NO: 235576 - RNA, 19 nt, Homo sapiens
  misc_RNA (1)...(19): siRNA sense strand
gaaaugcagccaaauggaa

SEQ ID NO: 235577 - RNA, 19 nt, Homo sapiens
  misc_RNA (1)...(19): siRNA sense strand
caaaugccaugaaauugga

SEQ ID NO: 235578 - RNA, 19 nt, Homo sapiens
  misc_RNA (1)...(19): siRNA sense strand
agaaggcgguuauacaauu

SEQ ID NO: 235579 - RNA, 19 nt, Homo sapiens
  misc_RNA (1)...(19): siRNA sense strand
gcugugaaauuaagcuaaa

SEQ ID NO: 235580 - RNA, 19 nt, Homo sapiens
  misc_RNA (1)...(19): siRNA sense strand
ugaacuaucuugaagugaa

SEQ ID NO: 235581 - RNA, 19 nt, Homo sapiens
  misc_RNA (1)...(19): siRNA sense strand
gugaauaacuuugguagug

SEQ ID NO: 235582 - RNA, 19 nt, Homo sapiens
  misc_RNA (1)...(19): siRNA sense strand
gaacuaucuugaagugaau

SEQ ID NO: 235583 - RNA, 19 nt, Homo sapiens
  misc_RNA (1)...(19): siRNA sense strand
agaguacccugaaggauuu

SEQ ID NO: 235584 - RNA, 19 nt, Homo sapiens
  misc_RNA (1)...(19): siRNA sense strand
gcaagaaggcgguuauaca

SEQ ID NO: 235585 - RNA, 19 nt, Homo sapiens
  misc_RNA (1)...(19): siRNA sense strand
gaagugaaucgcagaguga

SEQ ID NO: 235586 - RNA, 19 nt, Homo sapiens
  misc_RNA (1)...(19): siRNA sense strand
gguaacugaugcuuucaaa

SEQ ID NO: 235587 - RNA, 19 nt, Homo sapiens
  misc_RNA (1)...(19): siRNA sense strand
gaacaucuccaugggauau

SEQ ID NO: 235588 - RNA, 19 nt, Homo sapiens
  misc_RNA (1)...(19): siRNA sense strand
gcaaucuguuacuguuuaa

SEQ ID NO: 235589 - RNA, 19 nt, Homo sapiens
  misc_RNA (1)...(19): siRNA sense strand
ggauauucuucuccgcuua

SEQ ID NO: 235590 - RNA, 19 nt, Homo sapiens
  misc_RNA (1)...(19): siRNA sense strand
gagcaaaguccaagagaug

SEQ ID NO: 235591 - RNA, 19 nt, Homo sapiens
  misc_RNA (1)...(19): siRNA sense strand
gcugaaauacugaaagaaa

SEQ ID NO: 235592 - RNA, 19 nt, Homo sapiens
  misc_RNA (1)...(19): siRNA sense strand
uauggaagcugaaauacug

SEQ ID NO: 235593 - RNA, 19 nt, Homo sapiens
  misc_RNA (1)...(19): siRNA sense strand
caauaauccugcuauggaa

SEQ ID NO: 235594 - RNA, 19 nt, Homo sapiens
  misc_RNA (1)...(19): siRNA sense strand
aagcugcacugaagaauug

SEQ ID NO: 235595 - RNA, 19 nt, Homo sapiens
  misc_RNA (1)...(19): siRNA sense strand
cgauggauguuuacagauu

SEQ ID NO: 235596 - RNA, 19 nt, Homo sapiens
  misc_RNA (1)...(19): siRNA sense strand
gaaaacagcagaagauuau

SEQ ID NO: 235597 - RNA, 19 nt, Homo sapiens
  misc_RNA (1)...(19): siRNA sense strand
caagaaggcgguuauacaa

SEQ ID NO: 235598 - RNA, 19 nt, Homo sapiens
  misc_RNA (1)...(19): siRNA sense strand
gaggcuuccuaucugauua

SEQ ID NO: 235599 - RNA, 19 nt, Homo sapiens
  misc_RNA (1)...(19): siRNA sense strand
acuuaagacugcauuguua

SEQ ID NO: 235600 - RNA, 19 nt, Homo sapiens
  misc_RNA (1)...(19): siRNA sense strand
ggaaaucauggauagaauu

SEQ ID NO: 235601 - RNA, 19 nt, Homo sapiens
  misc_RNA (1)...(19): siRNA sense strand
ggguugauaucugcaauaa

SEQ ID NO: 235602 - RNA, 19 nt, Homo sapiens
  misc_RNA (1)...(19): siRNA sense strand
gaggugaaaucguaauugg

SEQ ID NO: 235603 - RNA, 19 nt, Homo sapiens
  misc_RNA (1)...(19): siRNA sense strand
gcaaagaagcaguaguuca

SEQ ID NO: 235604 - RNA, 19 nt, Homo sapiens
  misc_RNA (1)...(19): siRNA sense strand
gcaaaugccaugaaauugg

SEQ ID NO: 235605 - RNA, 19 nt, Homo sapiens
  misc_RNA (1)...(19): siRNA sense strand
ugcaaucuguuacuguuua

SEQ ID NO: 235606 - RNA, 19 nt, Homo sapiens
  misc_RNA (1)...(19): siRNA sense strand
acacauauauuggcuacuu

SEQ ID NO: 235607 - RNA, 19 nt, Homo sapiens
  misc_RNA (1)...(19): siRNA sense strand
caaagaagcaguaguucau

SEQ ID NO: 235608 - RNA, 19 nt, Homo sapiens
  misc_RNA (1)...(19): siRNA sense strand
gaacugacagcagagauau

SEQ ID NO: 235609 - RNA, 19 nt, Homo sapiens
  misc_RNA (1)...(19): siRNA sense strand
gaccgaaggacacauauau

SEQ ID NO: 235610 - RNA, 19 nt, Homo sapiens
  misc_RNA (1)...(19): siRNA sense strand
gcaauuugauagcuggaau

SEQ ID NO: 235611 - RNA, 19 nt, Homo sapiens
  misc_RNA (1)...(19): siRNA sense strand
gcaaucaguagaagaguug

SEQ ID NO: 235612 - RNA, 19 nt, Homo sapiens
  misc_RNA (1)...(19): siRNA sense strand
gcaaagagaauaaaagcua

SEQ ID NO: 235613 - RNA, 19 nt, Homo sapiens
  misc_RNA (1)...(19): siRNA sense strand
ccucuuauuugcugugaaa

SEQ ID NO: 235614 - RNA, 19 nt, Homo sapiens
  misc_RNA (1)...(19): siRNA sense strand
gauuugagauucacagcau

SEQ ID NO: 235615 - RNA, 19 nt, Homo sapiens
  misc_RNA (1)...(19): siRNA sense strand
gaagcugcacugaagaauu

SEQ ID NO: 235616 - RNA, 19 nt, Homo sapiens
  misc_RNA (1)...(19): siRNA sense strand
caagauaggguaugauuac

SEQ ID NO: 235617 - RNA, 19 nt, Homo sapiens
  misc_RNA (1)...(19): siRNA sense strand
gggcauuccuccaaguaga

SEQ ID NO: 235618 - RNA, 19 nt, Homo sapiens
  misc_RNA (1)...(19): siRNA sense strand
ggaccgaaggacacauaua

SEQ ID NO: 235619 - RNA, 19 nt, Homo sapiens
  misc_RNA (1)...(19): siRNA sense strand
uaagcccacuucagacaaa

SEQ ID NO: 235620 - RNA, 19 nt, Homo sapiens
  misc_RNA (1)...(19): siRNA sense strand
guaacugacuauacuacug

SEQ ID NO: 235621 - RNA, 19 nt, Homo sapiens
  misc_RNA (1)...(19): siRNA sense strand
aagacugcauuguuagaua

SEQ ID NO: 235622 - RNA, 19 nt, Homo sapiens
  misc_RNA (1)...(19): siRNA sense strand
agacaucccuggagcagau

SEQ ID NO: 235623 - RNA, 19 nt, Homo sapiens
  misc_RNA (1)...(19): siRNA sense strand
aagcugaaauacugaaaga

SEQ ID NO: 235624 - RNA, 19 nt, Homo sapiens
  misc_RNA (1)...(19): siRNA sense strand
gaaagaucuagugaaguua

SEQ ID NO: 235625 - RNA, 19 nt, Homo sapiens
  misc_RNA (1)...(19): siRNA sense strand
gcgguuauacaauuaauga

SEQ ID NO: 235626 - RNA, 19 nt, Homo sapiens
  misc_RNA (1)...(19): siRNA sense strand
guuauggacugacagaauc

SEQ ID NO: 235627 - RNA, 19 nt, Homo sapiens
  misc_RNA (1)...(19): siRNA sense strand
gcaccucuuugcaaucugu

SEQ ID NO: 235628 - RNA, 19 nt, Homo sapiens
  misc_RNA (1)...(19): siRNA sense strand
ucagacauggccauuguua

SEQ ID NO: 235629 - RNA, 19 nt, Homo sapiens
  misc_RNA (1)...(19): siRNA sense strand
gugaaucgcagagugaaua

SEQ ID NO: 235630 - RNA, 19 nt, Homo sapiens
  misc_RNA (1)...(19): siRNA sense strand
uuugauagcuggaaugaca

SEQ ID NO: 235631 - RNA, 19 nt, Homo sapiens
  misc_RNA (1)...(19): siRNA sense strand
cagaguacccugaaggauu

SEQ ID NO: 235632 - RNA, 19 nt, Homo sapiens
  misc_RNA (1)...(19): siRNA sense strand
caacuuuccucuugugacu

SEQ ID NO: 235633 - RNA, 19 nt, Homo sapiens
  misc_RNA (1)...(19): siRNA sense strand
caaauuggaacagaucaaa

SEQ ID NO: 235634 - RNA, 19 nt, Homo sapiens
  misc_RNA (1)...(19): siRNA sense strand
gauuacaaauuggaacaga

SEQ ID NO: 235635 - RNA, 19 nt, Homo sapiens
  misc_RNA (1)...(19): siRNA sense strand
ucacugcacugggacuaaa

SEQ ID NO: 235636 - RNA, 19 nt, Homo sapiens
  misc_RNA (1)...(19): siRNA sense strand
gccuuuggcucaugugcua

SEQ ID NO: 235637 - RNA, 19 nt, Homo sapiens
  misc_RNA (1)...(19): siRNA sense strand
agacugcauuguuagauau

SEQ ID NO: 235638 - RNA, 19 nt, Homo sapiens
  misc_RNA (1)...(19): siRNA sense strand
gauuaccaguguugaacuu

SEQ ID NO: 235639 - RNA, 19 nt, Homo sapiens
  misc_RNA (1)...(19): siRNA sense strand
ccauugccaucuucuguga

SEQ ID NO: 235640 - RNA, 19 nt, Homo sapiens
  misc_RNA (1)...(19): siRNA sense strand
aagcuaagcccacuucaga

SEQ ID NO: 235641 - RNA, 19 nt, Homo sapiens
  misc_RNA (1)...(19): siRNA sense strand
aaagugaucaguccuaugu

SEQ ID NO: 235642 - RNA, 19 nt, Homo sapiens
  misc_RNA (1)...(19): siRNA sense strand
aguagaagcugcacugaag

SEQ ID NO: 235643 - RNA, 19 nt, Homo sapiens
  misc_RNA (1)...(19): siRNA sense strand
guaagaaagaucuagugaa

SEQ ID NO: 235644 - RNA, 19 nt, Homo sapiens
  misc_RNA (1)...(19): siRNA sense strand
cgacucacuagcuguaaua

SEQ ID NO: 235645 - RNA, 19 nt, Homo sapiens
  misc_RNA (1)...(19): siRNA sense strand
gauaugaugcaccucuuug

SEQ ID NO: 235646 - RNA, 19 nt, Homo sapiens
  misc_RNA (1)...(19): siRNA sense strand
ggaaauccuaagugaagaa

SEQ ID NO: 235647 - RNA, 19 nt, Homo sapiens
  misc_RNA (1)...(19): siRNA sense strand
ccgaaggacacauauauug

SEQ ID NO: 235648 - RNA, 19 nt, Homo sapiens
  misc_RNA (1)...(19): siRNA sense strand
gauaucaguuguguuaaac

SEQ ID NO: 235649 - RNA, 19 nt, Homo sapiens
  misc_RNA (1)...(19): siRNA sense strand
agacauggccauuguuaug

SEQ ID NO: 235650 - RNA, 19 nt, Homo sapiens
  misc_RNA (1)...(19): siRNA sense strand
uaacugaugcuuucaaacu

SEQ ID NO: 235651 - RNA, 19 nt, Homo sapiens
  misc_RNA (1)...(19): siRNA sense strand
cugcaaaugccaugaaauu

SEQ ID NO: 235652 - RNA, 19 nt, Homo sapiens
  misc_RNA (1)...(19): siRNA sense strand
aguccuaugugaucaguuu

SEQ ID NO: 235653 - RNA, 19 nt, Homo sapiens
  misc_RNA (1)...(19): siRNA sense strand
ucaagauaggguaugauua

SEQ ID NO: 235654 - RNA, 19 nt, Homo sapiens
  misc_RNA (1)...(19): siRNA sense strand
gaucaaaguucuacaguuu

SEQ ID NO: 235655 - RNA, 19 nt, Homo sapiens
  misc_RNA (1)...(19): siRNA sense strand
ggaaagacuucuacaaauu

SEQ ID NO: 235656 - RNA, 19 nt, Homo sapiens
  misc_RNA (1)...(19): siRNA sense strand
gcacauaaguucugucuga

SEQ ID NO: 235657 - RNA, 19 nt, Homo sapiens
  misc_RNA (1)...(19): siRNA sense strand
gaaggcaucuugcacauaa

SEQ ID NO: 235658 - RNA, 19 nt, Homo sapiens
  misc_RNA (1)...(19): siRNA sense strand
caacaucccuucauccuuu

SEQ ID NO: 235659 - RNA, 19 nt, Homo sapiens
  misc_RNA (1)...(19): siRNA sense strand
acacaaagcuuuacuguau

SEQ ID NO: 235660 - RNA, 19 nt, Homo sapiens
  misc_RNA (1)...(19): siRNA sense strand
gaacagagcccaaaugcaa

SEQ ID NO: 235661 - RNA, 19 nt, Homo sapiens
  misc_RNA (1)...(19): siRNA sense strand
ggacaaggaucugcaaauu

SEQ ID NO: 235662 - RNA, 19 nt, Homo sapiens
  misc_RNA (1)...(19): siRNA sense strand
gagaaugacucuaaagaug

SEQ ID NO: 235663 - RNA, 19 nt, Homo sapiens
  misc_RNA (1)...(19): siRNA sense strand
ggagagauguugguccuua

SEQ ID NO: 235664 - RNA, 19 nt, Homo sapiens
  misc_RNA (1)...(19): siRNA sense strand
gaagaggaaucuaaucuca

SEQ ID NO: 235665 - RNA, 19 nt, Homo sapiens
  misc_RNA (1)...(19): siRNA sense strand
gcuauaaggccauucauua

SEQ ID NO: 235666 - RNA, 19 nt, Homo sapiens
  misc_RNA (1)...(19): siRNA sense strand
gcagguacaucaagacaaa

SEQ ID NO: 235667 - RNA, 19 nt, Homo sapiens
  misc_RNA (1)...(19): siRNA sense strand
gaacuuucaucaaaccuuu

SEQ ID NO: 235668 - RNA, 19 nt, Homo sapiens
  misc_RNA (1)...(19): siRNA sense strand
gguuggagcuggauuagua

SEQ ID NO: 235669 - RNA, 19 nt, Homo sapiens
  misc_RNA (1)...(19): siRNA sense strand
ugaaggagcucuuagauuc

SEQ ID NO: 235670 - RNA, 19 nt, Homo sapiens
  misc_RNA (1)...(19): siRNA sense strand
gaaagugacaccauuguuu

SEQ ID NO: 235671 - RNA, 19 nt, Homo sapiens
  misc_RNA (1)...(19): siRNA sense strand
gaaccgaagacucauaaua

SEQ ID NO: 235672 - RNA, 19 nt, Homo sapiens
  misc_RNA (1)...(19): siRNA sense strand
guacagcucugccauccua

SEQ ID NO: 235673 - RNA, 19 nt, Homo sapiens
  misc_RNA (1)...(19): siRNA sense strand
gguagaagauauggaaaua

SEQ ID NO: 235674 - RNA, 19 nt, Homo sapiens
  misc_RNA (1)...(19): siRNA sense strand
cugaagaccugaccaauaa

SEQ ID NO: 235675 - RNA, 19 nt, Homo sapiens
  misc_RNA (1)...(19): siRNA sense strand
uaacagagaaggauuauga

SEQ ID NO: 235676 - RNA, 19 nt, Homo sapiens
  misc_RNA (1)...(19): siRNA sense strand
guaaccaggugaugaagua

SEQ ID NO: 235677 - RNA, 19 nt, Homo sapiens
  misc_RNA (1)...(19): siRNA sense strand
guucagcgauuccucuuua

SEQ ID NO: 235678 - RNA, 19 nt, Homo sapiens
  misc_RNA (1)...(19): siRNA sense strand
ccagaaagcaauucaguua

SEQ ID NO: 235679 - RNA, 19 nt, Homo sapiens
  misc_RNA (1)...(19): siRNA sense strand
ccacauacaucucuucaga

SEQ ID NO: 235680 - RNA, 19 nt, Homo sapiens
  misc_RNA (1)...(19): siRNA sense strand
gguccaacuugcagaauua

SEQ ID NO: 235681 - RNA, 19 nt, Homo sapiens
  misc_RNA (1)...(19): siRNA sense strand
acaaggaucugcaaauuga

SEQ ID NO: 235682 - RNA, 19 nt, Homo sapiens
  misc_RNA (1)...(19): siRNA sense strand
uaaagaaucugcuauaagg

SEQ ID NO: 235683 - RNA, 19 nt, Homo sapiens
  misc_RNA (1)...(19): siRNA sense strand
gaagaccagucccuugaaa

SEQ ID NO: 235684 - RNA, 19 nt, Homo sapiens
  misc_RNA (1)...(19): siRNA sense strand
guacaaagacgauauuaug

SEQ ID NO: 235685 - RNA, 19 nt, Homo sapiens
  misc_RNA (1)...(19): siRNA sense strand
gaaagaaacagcuccgaaa

SEQ ID NO: 235686 - RNA, 19 nt, Homo sapiens
  misc_RNA (1)...(19): siRNA sense strand
ggagagaccaguuaauaaa

SEQ ID NO: 235687 - RNA, 19 nt, Homo sapiens
  misc_RNA (1)...(19): siRNA sense strand
caagagugcuuuacauuca

SEQ ID NO: 235688 - RNA, 19 nt, Homo sapiens
  misc_RNA (1)...(19): siRNA sense strand
ggagaaauuucacgguuga

SEQ ID NO: 235689 - RNA, 19 nt, Homo sapiens
  misc_RNA (1)...(19): siRNA sense strand
gaagaaacaggaagaagaa

SEQ ID NO: 235690 - RNA, 19 nt, Homo sapiens
  misc_RNA (1)...(19): siRNA sense strand
caagagcaauggacuuuga

SEQ ID NO: 235691 - RNA, 19 nt, Homo sapiens
  misc_RNA (1)...(19): siRNA sense strand
gagccgagauccugaagaa

SEQ ID NO: 235692 - RNA, 19 nt, Homo sapiens
  misc_RNA (1)...(19): siRNA sense strand
gaagagaaucaaagaauga

SEQ ID NO: 235693 - RNA, 19 nt, Homo sapiens
  misc_RNA (1)...(19): siRNA sense strand
caaacuggcccuguuauua

SEQ ID NO: 235694 - RNA, 19 nt, Homo sapiens
  misc_RNA (1)...(19): siRNA sense strand
ggugaaugcuugaaagaaa

SEQ ID NO: 235695 - RNA, 19 nt, Homo sapiens
  misc_RNA (1)...(19): siRNA sense strand
gagaggaauugaugucuga

SEQ ID NO: 235696 - RNA, 19 nt, Homo sapiens
  misc_RNA (1)...(19): siRNA sense strand
gaggagagaccaguuaaua

SEQ ID NO: 235697 - RNA, 19 nt, Homo sapiens
  misc_RNA (1)...(19): siRNA sense strand
ggaggaaagugacaccauu

SEQ ID NO: 235698 - RNA, 19 nt, Homo sapiens
  misc_RNA (1)...(19): siRNA sense strand
gaaagugauuccucaguuc

SEQ ID NO: 235699 - RNA, 19 nt, Homo sapiens
  misc_RNA (1)...(19): siRNA sense strand
gcaauggacuuugaaggaa

SEQ ID NO: 235700 - RNA, 19 nt, Homo sapiens
  misc_RNA (1)...(19): siRNA sense strand
gcacacugguuacaucuau

SEQ ID NO: 235701 - RNA, 19 nt, Homo sapiens
  misc_RNA (1)...(19): siRNA sense strand
auagaaaccucagaaguua

SEQ ID NO: 235702 - RNA, 19 nt, Homo sapiens
  misc_RNA (1)...(19): siRNA sense strand
gcaaagagguacugguagu

SEQ ID NO: 235703 - RNA, 19 nt, Homo sapiens
  misc_RNA (1)...(19): siRNA sense strand
gagcaugacuccagcugaa

SEQ ID NO: 235704 - RNA, 19 nt, Homo sapiens
  misc_RNA (1)...(19): siRNA sense strand
caaacuagauggacuucuu

SEQ ID NO: 235705 - RNA, 19 nt, Homo sapiens
  misc_RNA (1)...(19): siRNA sense strand
ggaaguagacgaugacaug

SEQ ID NO: 235706 - RNA, 19 nt, Homo sapiens
  misc_RNA (1)...(19): siRNA sense strand
gaagugaucaugaaaggaa

SEQ ID NO: 235707 - RNA, 19 nt, Homo sapiens
  misc_RNA (1)...(19): siRNA sense strand
gacaugaaccuauuggaua

SEQ ID NO: 235708 - RNA, 19 nt, Homo sapiens
  misc_RNA (1)...(19): siRNA sense strand
gaaccuauuggauaugaua

SEQ ID NO: 235709 - RNA, 19 nt, Homo sapiens
  misc_RNA (1)...(19): siRNA sense strand
gaacaaaggcagaguaaac

SEQ ID NO: 235710 - RNA, 19 nt, Homo sapiens
  misc_RNA (1)...(19): siRNA sense strand
gaaaggagaauuaaacagu

SEQ ID NO: 235711 - RNA, 19 nt, Homo sapiens
  misc_RNA (1)...(19): siRNA sense strand
gaagaaaugcgugaagaaa

SEQ ID NO: 235712 - RNA, 19 nt, Homo sapiens
  misc_RNA (1)...(19): siRNA sense strand
gcagaggacuacccauaug

SEQ ID NO: 235713 - RNA, 19 nt, Homo sapiens
  misc_RNA (1)...(19): siRNA sense strand
guccaaaguucuuaccaua

SEQ ID NO: 235714 - RNA, 19 nt, Homo sapiens
  misc_RNA (1)...(19): siRNA sense strand
cacaagcaauucacaagua

SEQ ID NO: 235715 - RNA, 19 nt, Homo sapiens
  misc_RNA (1)...(19): siRNA sense strand
gaaaucacaacaacagaaa

SEQ ID NO: 235716 - RNA, 19 nt, Homo sapiens
  misc_RNA (1)...(19): siRNA sense strand
ggaaauagaaaccucagaa

SEQ ID NO: 235717 - RNA, 19 nt, Homo sapiens
  misc_RNA (1)...(19): siRNA sense strand
ugacaucaauugaaagaga

SEQ ID NO: 235718 - RNA, 19 nt, Homo sapiens
  misc_RNA (1)...(19): siRNA sense strand
aaauagagccugauucuga

SEQ ID NO: 235719 - RNA, 19 nt, Homo sapiens
  misc_RNA (1)...(19): siRNA sense strand
ggaagaaagaguacaaaga

SEQ ID NO: 235720 - RNA, 19 nt, Homo sapiens
  misc_RNA (1)...(19): siRNA sense strand
gcaagcagaaugccacuaa

SEQ ID NO: 235721 - RNA, 19 nt, Homo sapiens
  misc_RNA (1)...(19): siRNA sense strand
caagucagcagaagaaauu

SEQ ID NO: 235722 - RNA, 19 nt, Homo sapiens
  misc_RNA (1)...(19): siRNA sense strand
gaaagacuucuacaaauuc

SEQ ID NO: 235723 - RNA, 19 nt, Homo sapiens
  misc_RNA (1)...(19): siRNA sense strand
gcucuuagauucugacagu

SEQ ID NO: 235724 - RNA, 19 nt, Homo sapiens
  misc_RNA (1)...(19): siRNA sense strand
gagaagagaaucaaagaau

SEQ ID NO: 235725 - RNA, 19 nt, Homo sapiens
  misc_RNA (1)...(19): siRNA sense strand
uagcaaacccagagaauuu

SEQ ID NO: 235726 - RNA, 19 nt, Homo sapiens
  misc_RNA (1)...(19): siRNA sense strand
aggaagagcugaagagaga

SEQ ID NO: 235727 - RNA, 19 nt, Homo sapiens
  misc_RNA (1)...(19): siRNA sense strand
gaaagcaauucaguuaauc

SEQ ID NO: 235728 - RNA, 19 nt, Homo sapiens
  misc_RNA (1)...(19): siRNA sense strand
cagaugauauugguacuuu

SEQ ID NO: 235729 - RNA, 19 nt, Homo sapiens
  misc_RNA (1)...(19): siRNA sense strand
ugagacauguucagcagua

SEQ ID NO: 235730 - RNA, 19 nt, Homo sapiens
  misc_RNA (1)...(19): siRNA sense strand
cagcaaaccuuuacuucau

SEQ ID NO: 235731 - RNA, 19 nt, Homo sapiens
  misc_RNA (1)...(19): siRNA sense strand
ggaaaggccuucgaucaag

SEQ ID NO: 235732 - RNA, 19 nt, Homo sapiens
  misc_RNA (1)...(19): siRNA sense strand
caaagagucugacaguaca

SEQ ID NO: 235733 - RNA, 19 nt, Homo sapiens
  misc_RNA (1)...(19): siRNA sense strand
ggacugaagcaaaugguaa

SEQ ID NO: 235734 - RNA, 19 nt, Homo sapiens
  misc_RNA (1)...(19): siRNA sense strand
gaauuaaggguauaggaaa

SEQ ID NO: 235735 - RNA, 19 nt, Homo sapiens
  misc_RNA (1)...(19): siRNA sense strand
guagauguggucaauguua

SEQ ID NO: 235736 - RNA, 19 nt, Homo sapiens
  misc_RNA (1)...(19): siRNA sense strand
gaaacaggaagaagaagaa

SEQ ID NO: 235737 - RNA, 19 nt, Homo sapiens
  misc_RNA (1)...(19): siRNA sense strand
gcacaugaagcaaauaaau

SEQ ID NO: 235738 - RNA, 19 nt, Homo sapiens
  misc_RNA (1)...(19): siRNA sense strand
agaaugagacugagaauga

SEQ ID NO: 235739 - RNA, 19 nt, Homo sapiens
  misc_RNA (1)...(19): siRNA sense strand
gaagaaauccaccgacaca

SEQ ID NO: 235740 - RNA, 19 nt, Homo sapiens
  misc_RNA (1)...(19): siRNA sense strand
gaagaaggaccaagaugug

SEQ ID NO: 235741 - RNA, 19 nt, Homo sapiens
  misc_RNA (1)...(19): siRNA sense strand
caaaggaaacuaagaagga

SEQ ID NO: 235742 - RNA, 19 nt, Homo sapiens
  misc_RNA (1)...(19): siRNA sense strand
gaacaccugugaugguaca

SEQ ID NO: 235743 - RNA, 19 nt, Homo sapiens
  misc_RNA (1)...(19): siRNA sense strand
ggaggaaccacaagcaauu

SEQ ID NO: 235744 - RNA, 19 nt, Homo sapiens
  misc_RNA (1)...(19): siRNA sense strand
ggacagagaacaaguacau

SEQ ID NO: 235745 - RNA, 19 nt, Homo sapiens
  misc_RNA (1)...(19): siRNA sense strand
gggcaaagagguacuggua

SEQ ID NO: 235746 - RNA, 19 nt, Homo sapiens
  misc_RNA (1)...(19): siRNA sense strand
acaguaacauuccaacaaa

SEQ ID NO: 235747 - RNA, 19 nt, Homo sapiens
  misc_RNA (1)...(19): siRNA sense strand
cgacagugauugcaacuuc

SEQ ID NO: 235748 - RNA, 19 nt, Homo sapiens
  misc_RNA (1)...(19): siRNA sense strand
aagaagaacuggaauugug

SEQ ID NO: 235749 - RNA, 19 nt, Homo sapiens
  misc_RNA (1)...(19): siRNA sense strand
gaaaggugaaugcuugaaa

SEQ ID NO: 235750 - RNA, 19 nt, Homo sapiens
  misc_RNA (1)...(19): siRNA sense strand
gagaacaaguacauuucaa

SEQ ID NO: 235751 - RNA, 19 nt, Homo sapiens
  misc_RNA (1)...(19): siRNA sense strand
ggaauuaaggguauaggaa

SEQ ID NO: 235752 - RNA, 19 nt, Homo sapiens
  misc_RNA (1)...(19): siRNA sense strand
gaucaaggcaguucagaug

SEQ ID NO: 235753 - RNA, 19 nt, Homo sapiens
  misc_RNA (1)...(19): siRNA sense strand
ccaaaguucuuaccauauc

SEQ ID NO: 235754 - RNA, 19 nt, Homo sapiens
  misc_RNA (1)...(19): siRNA sense strand
gaucaaaguucuacaguuu

SEQ ID NO: 235755 - RNA, 19 nt, Homo sapiens
  misc_RNA (1)...(19): siRNA sense strand
ggaaagacuucuacaaauu

SEQ ID NO: 235756 - RNA, 19 nt, Homo sapiens
  misc_RNA (1)...(19): siRNA sense strand
gcacauaaguucugucuga

SEQ ID NO: 235757 - RNA, 19 nt, Homo sapiens
  misc_RNA (1)...(19): siRNA sense strand
gaaggcaucuugcacauaa

SEQ ID NO: 235758 - RNA, 19 nt, Homo sapiens
  misc_RNA (1)...(19): siRNA sense strand
caacaucccuucauccuuu

SEQ ID NO: 235759 - RNA, 19 nt, Homo sapiens
  misc_RNA (1)...(19): siRNA sense strand
acacaaagcuuuacuguau

SEQ ID NO: 235760 - RNA, 19 nt, Homo sapiens
  misc_RNA (1)...(19): siRNA sense strand
gaacagagcccaaaugcaa

SEQ ID NO: 235761 - RNA, 19 nt, Homo sapiens
  misc_RNA (1)...(19): siRNA sense strand
ggacaaggaucugcaaauu

SEQ ID NO: 235762 - RNA, 19 nt, Homo sapiens
  misc_RNA (1)...(19): siRNA sense strand
gagaaugacucuaaagaug

SEQ ID NO: 235763 - RNA, 19 nt, Homo sapiens
  misc_RNA (1)...(19): siRNA sense strand
ggagagauguugguccuua

SEQ ID NO: 235764 - RNA, 19 nt, Homo sapiens
  misc_RNA (1)...(19): siRNA sense strand
gaagaggaaucuaaucuca

SEQ ID NO: 235765 - RNA, 19 nt, Homo sapiens
  misc_RNA (1)...(19): siRNA sense strand
gcuauaaggccauucauua

SEQ ID NO: 235766 - RNA, 19 nt, Homo sapiens
  misc_RNA (1)...(19): siRNA sense strand
gcagguacaucaagacaaa

SEQ ID NO: 235767 - RNA, 19 nt, Homo sapiens
  misc_RNA (1)...(19): siRNA sense strand
gaacuuucaucaaaccuuu

SEQ ID NO: 235768 - RNA, 19 nt, Homo sapiens
  misc_RNA (1)...(19): siRNA sense strand
gguuggagcuggauuagua

SEQ ID NO: 235769 - RNA, 19 nt, Homo sapiens
  misc_RNA (1)...(19): siRNA sense strand
ugaaggagcucuuagauuc

SEQ ID NO: 235770 - RNA, 19 nt, Homo sapiens
  misc_RNA (1)...(19): siRNA sense strand
gaaagugacaccauuguuu

SEQ ID NO: 235771 - RNA, 19 nt, Homo sapiens
  misc_RNA (1)...(19): siRNA sense strand
gaaccgaagacucauaaua

SEQ ID NO: 235772 - RNA, 19 nt, Homo sapiens
  misc_RNA (1)...(19): siRNA sense strand
guacagcucugccauccua

SEQ ID NO: 235773 - RNA, 19 nt, Homo sapiens
  misc_RNA (1)...(19): siRNA sense strand
gguagaagauauggaaaua

SEQ ID NO: 235774 - RNA, 19 nt, Homo sapiens
  misc_RNA (1)...(19): siRNA sense strand
cugaagaccugaccaauaa

SEQ ID NO: 235775 - RNA, 19 nt, Homo sapiens
  misc_RNA (1)...(19): siRNA sense strand
uaacagagaaggauuauga

SEQ ID NO: 235776 - RNA, 19 nt, Homo sapiens
  misc_RNA (1)...(19): siRNA sense strand
guaaccaggugaugaagua

SEQ ID NO: 235777 - RNA, 19 nt, Homo sapiens
  misc_RNA (1)...(19): siRNA sense strand
guucagcgauuccucuuua

SEQ ID NO: 235778 - RNA, 19 nt, Homo sapiens
  misc_RNA (1)...(19): siRNA sense strand
ccagaaagcaauucaguua

SEQ ID NO: 235779 - RNA, 19 nt, Homo sapiens
  misc_RNA (1)...(19): siRNA sense strand
ccacauacaucucuucaga

SEQ ID NO: 235780 - RNA, 19 nt, Homo sapiens
  misc_RNA (1)...(19): siRNA sense strand
gguccaacuugcagaauua

SEQ ID NO: 235781 - RNA, 19 nt, Homo sapiens
  misc_RNA (1)...(19): siRNA sense strand
acaaggaucugcaaauuga

SEQ ID NO: 235782 - RNA, 19 nt, Homo sapiens
  misc_RNA (1)...(19): siRNA sense strand
uaaagaaucugcuauaagg

SEQ ID NO: 235783 - RNA, 19 nt, Homo sapiens
  misc_RNA (1)...(19): siRNA sense strand
gaagaccagucccuugaaa

SEQ ID NO: 235784 - RNA, 19 nt, Homo sapiens
  misc_RNA (1)...(19): siRNA sense strand
guacaaagacgauauuaug

SEQ ID NO: 235785 - RNA, 19 nt, Homo sapiens
  misc_RNA (1)...(19): siRNA sense strand
gaaagaaacagcuccgaaa

SEQ ID NO: 235786 - RNA, 19 nt, Homo sapiens
  misc_RNA (1)...(19): siRNA sense strand
ggagagaccaguuaauaaa

SEQ ID NO: 235787 - RNA, 19 nt, Homo sapiens
  misc_RNA (1)...(19): siRNA sense strand
caagagugcuuuacauuca

SEQ ID NO: 235788 - RNA, 19 nt, Homo sapiens
  misc_RNA (1)...(19): siRNA sense strand
ggagaaauuucacgguuga

SEQ ID NO: 235789 - RNA, 19 nt, Homo sapiens
  misc_RNA (1)...(19): siRNA sense strand
gaagaaacaggaagaagaa

SEQ ID NO: 235790 - RNA, 19 nt, Homo sapiens
  misc_RNA (1)...(19): siRNA sense strand
caagagcaauggacuuuga

SEQ ID NO: 235791 - RNA, 19 nt, Homo sapiens
  misc_RNA (1)...(19): siRNA sense strand
gagccgagauccugaagaa

SEQ ID NO: 235792 - RNA, 19 nt, Homo sapiens
  misc_RNA (1)...(19): siRNA sense strand
gaagagaaucaaagaauga

SEQ ID NO: 235793 - RNA, 19 nt, Homo sapiens
  misc_RNA (1)...(19): siRNA sense strand
caaacuggcccuguuauua

SEQ ID NO: 235794 - RNA, 19 nt, Homo sapiens
  misc_RNA (1)...(19): siRNA sense strand
ggugaaugcuugaaagaaa

SEQ ID NO: 235795 - RNA, 19 nt, Homo sapiens
  misc_RNA (1)...(19): siRNA sense strand
gagaggaauugaugucuga

SEQ ID NO: 235796 - RNA, 19 nt, Homo sapiens
  misc_RNA (1)...(19): siRNA sense strand
gaggagagaccaguuaaua

SEQ ID NO: 235797 - RNA, 19 nt, Homo sapiens
  misc_RNA (1)...(19): siRNA sense strand
ggaggaaagugacaccauu

SEQ ID NO: 235798 - RNA, 19 nt, Homo sapiens
  misc_RNA (1)...(19): siRNA sense strand
gaaagugauuccucaguuc

SEQ ID NO: 235799 - RNA, 19 nt, Homo sapiens
  misc_RNA (1)...(19): siRNA sense strand
gcaauggacuuugaaggaa

SEQ ID NO: 235800 - RNA, 19 nt, Homo sapiens
  misc_RNA (1)...(19): siRNA sense strand
gcacacugguuacaucuau

SEQ ID NO: 235801 - RNA, 19 nt, Homo sapiens
  misc_RNA (1)...(19): siRNA sense strand
auagaaaccucagaaguua

SEQ ID NO: 235802 - RNA, 19 nt, Homo sapiens
  misc_RNA (1)...(19): siRNA sense strand
gcaaagagguacugguagu

SEQ ID NO: 235803 - RNA, 19 nt, Homo sapiens
  misc_RNA (1)...(19): siRNA sense strand
gagcaugacuccagcugaa

SEQ ID NO: 235804 - RNA, 19 nt, Homo sapiens
  misc_RNA (1)...(19): siRNA sense strand
caaacuagauggacuucuu

SEQ ID NO: 235805 - RNA, 19 nt, Homo sapiens
  misc_RNA (1)...(19): siRNA sense strand
ggaaguagacgaugacaug

SEQ ID NO: 235806 - RNA, 19 nt, Homo sapiens
  misc_RNA (1)...(19): siRNA sense strand
gaagugaucaugaaaggaa

SEQ ID NO: 235807 - RNA, 19 nt, Homo sapiens
  misc_RNA (1)...(19): siRNA sense strand
gacaugaaccuauuggaua

SEQ ID NO: 235808 - RNA, 19 nt, Homo sapiens
  misc_RNA (1)...(19): siRNA sense strand
gaaccuauuggauaugaua

SEQ ID NO: 235809 - RNA, 19 nt, Homo sapiens
  misc_RNA (1)...(19): siRNA sense strand
gaacaaaggcagaguaaac

SEQ ID NO: 235810 - RNA, 19 nt, Homo sapiens
  misc_RNA (1)...(19): siRNA sense strand
gaaaggagaauuaaacagu

SEQ ID NO: 235811 - RNA, 19 nt, Homo sapiens
  misc_RNA (1)...(19): siRNA sense strand
gaagaaaugcgugaagaaa

SEQ ID NO: 235812 - RNA, 19 nt, Homo sapiens
  misc_RNA (1)...(19): siRNA sense strand
gcagaggacuacccauaug

SEQ ID NO: 235813 - RNA, 19 nt, Homo sapiens
  misc_RNA (1)...(19): siRNA sense strand
guccaaaguucuuaccaua

SEQ ID NO: 235814 - RNA, 19 nt, Homo sapiens
  misc_RNA (1)...(19): siRNA sense strand
cacaagcaauucacaagua

SEQ ID NO: 235815 - RNA, 19 nt, Homo sapiens
  misc_RNA (1)...(19): siRNA sense strand
gaaaucacaacaacagaaa

SEQ ID NO: 235816 - RNA, 19 nt, Homo sapiens
  misc_RNA (1)...(19): siRNA sense strand
ggaaauagaaaccucagaa

SEQ ID NO: 235817 - RNA, 19 nt, Homo sapiens
  misc_RNA (1)...(19): siRNA sense strand
ugacaucaauugaaagaga

SEQ ID NO: 235818 - RNA, 19 nt, Homo sapiens
  misc_RNA (1)...(19): siRNA sense strand
aaauagagccugauucuga

SEQ ID NO: 235819 - RNA, 19 nt, Homo sapiens
  misc_RNA (1)...(19): siRNA sense strand
ggaagaaagaguacaaaga

SEQ ID NO: 235820 - RNA, 19 nt, Homo sapiens
  misc_RNA (1)...(19): siRNA sense strand
gcaagcagaaugccacuaa

SEQ ID NO: 235821 - RNA, 19 nt, Homo sapiens
  misc_RNA (1)...(19): siRNA sense strand
caagucagcagaagaaauu

SEQ ID NO: 235822 - RNA, 19 nt, Homo sapiens
  misc_RNA (1)...(19): siRNA sense strand
gaaagacuucuacaaauuc

SEQ ID NO: 235823 - RNA, 19 nt, Homo sapiens
  misc_RNA (1)...(19): siRNA sense strand
gcucuuagauucugacagu

SEQ ID NO: 235824 - RNA, 19 nt, Homo sapiens
  misc_RNA (1)...(19): siRNA sense strand
gagaagagaaucaaagaau

SEQ ID NO: 235825 - RNA, 19 nt, Homo sapiens
  misc_RNA (1)...(19): siRNA sense strand
uagcaaacccagagaauuu

SEQ ID NO: 235826 - RNA, 19 nt, Homo sapiens
  misc_RNA (1)...(19): siRNA sense strand
aggaagagcugaagagaga

SEQ ID NO: 235827 - RNA, 19 nt, Homo sapiens
  misc_RNA (1)...(19): siRNA sense strand
gaaagcaauucaguuaauc

SEQ ID NO: 235828 - RNA, 19 nt, Homo sapiens
  misc_RNA (1)...(19): siRNA sense strand
cagaugauauugguacuuu

SEQ ID NO: 235829 - RNA, 19 nt, Homo sapiens
  misc_RNA (1)...(19): siRNA sense strand
ugagacauguucagcagua

SEQ ID NO: 235830 - RNA, 19 nt, Homo sapiens
  misc_RNA (1)...(19): siRNA sense strand
cagcaaaccuuuacuucau

SEQ ID NO: 235831 - RNA, 19 nt, Homo sapiens
  misc_RNA (1)...(19): siRNA sense strand
ggaaaggccuucgaucaag

SEQ ID NO: 235832 - RNA, 19 nt, Homo sapiens
  misc_RNA (1)...(19): siRNA sense strand
caaagagucugacaguaca

SEQ ID NO: 235833 - RNA, 19 nt, Homo sapiens
  misc_RNA (1)...(19): siRNA sense strand
ggacugaagcaaaugguaa

SEQ ID NO: 235834 - RNA, 19 nt, Homo sapiens
  misc_RNA (1)...(19): siRNA sense strand
gaauuaaggguauaggaaa

SEQ ID NO: 235835 - RNA, 19 nt, Homo sapiens
  misc_RNA (1)...(19): siRNA sense strand
guagauguggucaauguua

SEQ ID NO: 235836 - RNA, 19 nt, Homo sapiens
  misc_RNA (1)...(19): siRNA sense strand
gaaacaggaagaagaagaa

SEQ ID NO: 235837 - RNA, 19 nt, Homo sapiens
  misc_RNA (1)...(19): siRNA sense strand
gcacaugaagcaaauaaau

SEQ ID NO: 235838 - RNA, 19 nt, Homo sapiens
  misc_RNA (1)...(19): siRNA sense strand
agaaugagacugagaauga

SEQ ID NO: 235839 - RNA, 19 nt, Homo sapiens
  misc_RNA (1)...(19): siRNA sense strand
gaagaaauccaccgacaca

SEQ ID NO: 235840 - RNA, 19 nt, Homo sapiens
  misc_RNA (1)...(19): siRNA sense strand
gaagaaggaccaagaugug

SEQ ID NO: 235841 - RNA, 19 nt, Homo sapiens
  misc_RNA (1)...(19): siRNA sense strand
caaaggaaacuaagaagga

SEQ ID NO: 235842 - RNA, 19 nt, Homo sapiens
  misc_RNA (1)...(19): siRNA sense strand
gaacaccugugaugguaca

SEQ ID NO: 235843 - RNA, 19 nt, Homo sapiens
  misc_RNA (1)...(19): siRNA sense strand
ggaggaaccacaagcaauu

SEQ ID NO: 235844 - RNA, 19 nt, Homo sapiens
  misc_RNA (1)...(19): siRNA sense strand
ggacagagaacaaguacau

SEQ ID NO: 235845 - RNA, 19 nt, Homo sapiens
  misc_RNA (1)...(19): siRNA sense strand
gggcaaagagguacuggua

SEQ ID NO: 235846 - RNA, 19 nt, Homo sapiens
  misc_RNA (1)...(19): siRNA sense strand
acaguaacauuccaacaaa

SEQ ID NO: 235847 - RNA, 19 nt, Homo sapiens
  misc_RNA (1)...(19): siRNA sense strand
cgacagugauugcaacuuc

SEQ ID NO: 235848 - RNA, 19 nt, Homo sapiens
  misc_RNA (1)...(19): siRNA sense strand
aagaagaacuggaauugug

SEQ ID NO: 235849 - RNA, 19 nt, Homo sapiens
  misc_RNA (1)...(19): siRNA sense strand
gaaaggugaaugcuugaaa

SEQ ID NO: 235850 - RNA, 19 nt, Homo sapiens
  misc_RNA (1)...(19): siRNA sense strand
gagaacaaguacauuucaa

SEQ ID NO: 235851 - RNA, 19 nt, Homo sapiens
  misc_RNA (1)...(19): siRNA sense strand
ggaauuaaggguauaggaa

SEQ ID NO: 235852 - RNA, 19 nt, Homo sapiens
  misc_RNA (1)...(19): siRNA sense strand
gaucaaggcaguucagaug

SEQ ID NO: 235853 - RNA, 19 nt, Homo sapiens
  misc_RNA (1)...(19): siRNA sense strand
ccaaaguucuuaccauauc

SEQ ID NO: 235854 - RNA, 19 nt, Homo sapiens
  misc_RNA (1)...(19): siRNA sense strand
gaagaaacaucuacagaau

SEQ ID NO: 235855 - RNA, 19 nt, Homo sapiens
  misc_RNA (1)...(19): siRNA sense strand
aaagaaaggugccaauauu

SEQ ID NO: 235856 - RNA, 19 nt, Homo sapiens
  misc_RNA (1)...(19): siRNA sense strand
ggacaaucauauaccauuu

SEQ ID NO: 235857 - RNA, 19 nt, Homo sapiens
  misc_RNA (1)...(19): siRNA sense strand
gaaagaaaggugccaauau

SEQ ID NO: 235858 - RNA, 19 nt, Homo sapiens
  misc_RNA (1)...(19): siRNA sense strand
ugacaaggauggcuacaaa

SEQ ID NO: 235859 - RNA, 19 nt, Homo sapiens
  misc_RNA (1)...(19): siRNA sense strand
gcacugaucaagaaauuaa

SEQ ID NO: 235860 - RNA, 19 nt, Homo sapiens
  misc_RNA (1)...(19): siRNA sense strand
gaaacaggacaaucauaua

SEQ ID NO: 235861 - RNA, 19 nt, Homo sapiens
  misc_RNA (1)...(19): siRNA sense strand
gaagaaagcagaacuggau

SEQ ID NO: 235862 - RNA, 19 nt, Homo sapiens
  misc_RNA (1)...(19): siRNA sense strand
gaacuggucuuuucaaaug

SEQ ID NO: 235863 - RNA, 19 nt, Homo sapiens
  misc_RNA (1)...(19): siRNA sense strand
gcugguggauucuuuguuu

SEQ ID NO: 235864 - RNA, 19 nt, Homo sapiens
  misc_RNA (1)...(19): siRNA sense strand
ggaaagaaaggugccaaua

SEQ ID NO: 235865 - RNA, 19 nt, Homo sapiens
  misc_RNA (1)...(19): siRNA sense strand
gaacagcagaugauaaugu

SEQ ID NO: 235866 - RNA, 19 nt, Homo sapiens
  misc_RNA (1)...(19): siRNA sense strand
gaugaacaauauccuagaa

SEQ ID NO: 235867 - RNA, 19 nt, Homo sapiens
  misc_RNA (1)...(19): siRNA sense strand
ggaguaaauuagcauaugu

SEQ ID NO: 235868 - RNA, 19 nt, Homo sapiens
  misc_RNA (1)...(19): siRNA sense strand
caacaaaggaugauaaucu

SEQ ID NO: 235869 - RNA, 19 nt, Homo sapiens
  misc_RNA (1)...(19): siRNA sense strand
aaggauggcuacaaacaua

SEQ ID NO: 235870 - RNA, 19 nt, Homo sapiens
  misc_RNA (1)...(19): siRNA sense strand
ucacguggguuacugauga

SEQ ID NO: 235871 - RNA, 19 nt, Homo sapiens
  misc_RNA (1)...(19): siRNA sense strand
gaaguugaagaccagauua

SEQ ID NO: 235872 - RNA, 19 nt, Homo sapiens
  misc_RNA (1)...(19): siRNA sense strand
gcacucacacugaaggaua

SEQ ID NO: 235873 - RNA, 19 nt, Homo sapiens
  misc_RNA (1)...(19): siRNA sense strand
ggccauaaauauauucaga

SEQ ID NO: 235874 - RNA, 19 nt, Homo sapiens
  misc_RNA (1)...(19): siRNA sense strand
aaagaaguaucccuugcua

SEQ ID NO: 235875 - RNA, 19 nt, Homo sapiens
  misc_RNA (1)...(19): siRNA sense strand
gaagaggaaaugcuugcua

SEQ ID NO: 235876 - RNA, 19 nt, Homo sapiens
  misc_RNA (1)...(19): siRNA sense strand
agaauacccuggaagaaga

SEQ ID NO: 235877 - RNA, 19 nt, Homo sapiens
  misc_RNA (1)...(19): siRNA sense strand
gcuaugaugccauuucgua

SEQ ID NO: 235878 - RNA, 19 nt, Homo sapiens
  misc_RNA (1)...(19): siRNA sense strand
ccacuuacccugcguaugu

SEQ ID NO: 235879 - RNA, 19 nt, Homo sapiens
  misc_RNA (1)...(19): siRNA sense strand
gaagcuauccuccaagcaa

SEQ ID NO: 235880 - RNA, 19 nt, Homo sapiens
  misc_RNA (1)...(19): siRNA sense strand
ccacaugacccacuuccua

SEQ ID NO: 235881 - RNA, 19 nt, Homo sapiens
  misc_RNA (1)...(19): siRNA sense strand
cuaaagcucugguuaaugc

SEQ ID NO: 235882 - RNA, 19 nt, Homo sapiens
  misc_RNA (1)...(19): siRNA sense strand
gauucuuccuccucaauuu

SEQ ID NO: 235883 - RNA, 19 nt, Homo sapiens
  misc_RNA (1)...(19): siRNA sense strand
gaacaauauccuagaacaa

SEQ ID NO: 235884 - RNA, 19 nt, Homo sapiens
  misc_RNA (1)...(19): siRNA sense strand
gauaaugugcacuuucaaa

SEQ ID NO: 235885 - RNA, 19 nt, Homo sapiens
  misc_RNA (1)...(19): siRNA sense strand
caaaggaugauaaucuuga

SEQ ID NO: 235886 - RNA, 19 nt, Homo sapiens
  misc_RNA (1)...(19): siRNA sense strand
gaaagcuggguguuuauga

SEQ ID NO: 235887 - RNA, 19 nt, Homo sapiens
  misc_RNA (1)...(19): siRNA sense strand
gcaagugggaggccauaaa

SEQ ID NO: 235888 - RNA, 19 nt, Homo sapiens
  misc_RNA (1)...(19): siRNA sense strand
ggcaagagcagaauauuuc

SEQ ID NO: 235889 - RNA, 19 nt, Homo sapiens
  misc_RNA (1)...(19): siRNA sense strand
gaggauacguuucaucacu

SEQ ID NO: 235890 - RNA, 19 nt, Homo sapiens
  misc_RNA (1)...(19): siRNA sense strand
gaaguaucccuugcuaauu

SEQ ID NO: 235891 - RNA, 19 nt, Homo sapiens
  misc_RNA (1)...(19): siRNA sense strand
gaaaggugccaauauuaca

SEQ ID NO: 235892 - RNA, 19 nt, Homo sapiens
  misc_RNA (1)...(19): siRNA sense strand
gaagaauacccuggaagaa

SEQ ID NO: 235893 - RNA, 19 nt, Homo sapiens
  misc_RNA (1)...(19): siRNA sense strand
gggaguaaauuagcauaug

SEQ ID NO: 235894 - RNA, 19 nt, Homo sapiens
  misc_RNA (1)...(19): siRNA sense strand
gauuacagcugucagaaaa

SEQ ID NO: 235895 - RNA, 19 nt, Homo sapiens
  misc_RNA (1)...(19): siRNA sense strand
gggaggccauaaauauauu

SEQ ID NO: 235896 - RNA, 19 nt, Homo sapiens
  misc_RNA (1)...(19): siRNA sense strand
gcaaugauagccucaagug

SEQ ID NO: 235897 - RNA, 19 nt, Homo sapiens
  misc_RNA (1)...(19): siRNA sense strand
aggaaaugcuugcuacaaa

SEQ ID NO: 235898 - RNA, 19 nt, Homo sapiens
  misc_RNA (1)...(19): siRNA sense strand
gcagauaacaauauaguac

SEQ ID NO: 235899 - RNA, 19 nt, Homo sapiens
  misc_RNA (1)...(19): siRNA sense strand
aagaaaggugccaauauua

SEQ ID NO: 235900 - RNA, 19 nt, Homo sapiens
  misc_RNA (1)...(19): siRNA sense strand
ggaaaugcuugcuacaaaa

SEQ ID NO: 235901 - RNA, 19 nt, Homo sapiens
  misc_RNA (1)...(19): siRNA sense strand
caauggagaauuuguaaga

SEQ ID NO: 235902 - RNA, 19 nt, Homo sapiens
  misc_RNA (1)...(19): siRNA sense strand
ccuuagcaauggagaauuu

SEQ ID NO: 235903 - RNA, 19 nt, Homo sapiens
  misc_RNA (1)...(19): siRNA sense strand
gaaagugauuauucaaagc

SEQ ID NO: 235904 - RNA, 19 nt, Homo sapiens
  misc_RNA (1)...(19): siRNA sense strand
ucagaaauguagacuaucu

SEQ ID NO: 235905 - RNA, 19 nt, Homo sapiens
  misc_RNA (1)...(19): siRNA sense strand
guuauugccuauuccuauu

SEQ ID NO: 235906 - RNA, 19 nt, Homo sapiens
  misc_RNA (1)...(19): siRNA sense strand
gaguguaaggucuguauuu

SEQ ID NO: 235907 - RNA, 19 nt, Homo sapiens
  misc_RNA (1)...(19): siRNA sense strand
ggugaugugcauugucuua

SEQ ID NO: 235908 - RNA, 19 nt, Homo sapiens
  misc_RNA (1)...(19): siRNA sense strand
ugaaacaggacaaucauau

SEQ ID NO: 235909 - RNA, 19 nt, Homo sapiens
  misc_RNA (1)...(19): siRNA sense strand
caaagacccaggagcauau

SEQ ID NO: 235910 - RNA, 19 nt, Homo sapiens
  misc_RNA (1)...(19): siRNA sense strand
ccaaagacccaggagcaua

SEQ ID NO: 235911 - RNA, 19 nt, Homo sapiens
  misc_RNA (1)...(19): siRNA sense strand
ugaacaauauccuagaaca

SEQ ID NO: 235912 - RNA, 19 nt, Homo sapiens
  misc_RNA (1)...(19): siRNA sense strand
cagacuggguuuaugaaga

SEQ ID NO: 235913 - RNA, 19 nt, Homo sapiens
  misc_RNA (1)...(19): siRNA sense strand
gcuacaaacauauucacua

SEQ ID NO: 235914 - RNA, 19 nt, Homo sapiens
  misc_RNA (1)...(19): siRNA sense strand
uggcauaugcggaauuuaa

SEQ ID NO: 235915 - RNA, 19 nt, Homo sapiens
  misc_RNA (1)...(19): siRNA sense strand
ccaggagcauauagaagaa

SEQ ID NO: 235916 - RNA, 19 nt, Homo sapiens
  misc_RNA (1)...(19): siRNA sense strand
augauaaucuugagcacua

SEQ ID NO: 235917 - RNA, 19 nt, Homo sapiens
  misc_RNA (1)...(19): siRNA sense strand
aaagcuggguguuuaugaa

SEQ ID NO: 235918 - RNA, 19 nt, Homo sapiens
  misc_RNA (1)...(19): siRNA sense strand
gguggucccugcagucaga

SEQ ID NO: 235919 - RNA, 19 nt, Homo sapiens
  misc_RNA (1)...(19): siRNA sense strand
uuauggcgaugaacaauau

SEQ ID NO: 235920 - RNA, 19 nt, Homo sapiens
  misc_RNA (1)...(19): siRNA sense strand
gcuguuaauuggauaucuu

SEQ ID NO: 235921 - RNA, 19 nt, Homo sapiens
  misc_RNA (1)...(19): siRNA sense strand
agaagaaacaucuacagaa

SEQ ID NO: 235922 - RNA, 19 nt, Homo sapiens
  misc_RNA (1)...(19): siRNA sense strand
aaguaucccuugcuaauuc

SEQ ID NO: 235923 - RNA, 19 nt, Homo sapiens
  misc_RNA (1)...(19): siRNA sense strand
gaucggcaauuuguauauc

SEQ ID NO: 235924 - RNA, 19 nt, Homo sapiens
  misc_RNA (1)...(19): siRNA sense strand
cuaaagcaguguuucucuu

SEQ ID NO: 235925 - RNA, 19 nt, Homo sapiens
  misc_RNA (1)...(19): siRNA sense strand
ggucuguauuugcuguuaa

SEQ ID NO: 235926 - RNA, 19 nt, Homo sapiens
  misc_RNA (1)...(19): siRNA sense strand
ccaagcaagaaguguguua

SEQ ID NO: 235927 - RNA, 19 nt, Homo sapiens
  misc_RNA (1)...(19): siRNA sense strand
uggaugggcugguggauuc

SEQ ID NO: 235928 - RNA, 19 nt, Homo sapiens
  misc_RNA (1)...(19): siRNA sense strand
gaaacaaagaccaggagau

SEQ ID NO: 235929 - RNA, 19 nt, Homo sapiens
  misc_RNA (1)...(19): siRNA sense strand
uguguuacuugccaucuaa

SEQ ID NO: 235930 - RNA, 19 nt, Homo sapiens
  misc_RNA (1)...(19): siRNA sense strand
cuacagaauuagcauugga

SEQ ID NO: 235931 - RNA, 19 nt, Homo sapiens
  misc_RNA (1)...(19): siRNA sense strand
ugaagaauacccuggaaga

SEQ ID NO: 235932 - RNA, 19 nt, Homo sapiens
  misc_RNA (1)...(19): siRNA sense strand
gugggaggccauaaauaua

SEQ ID NO: 235933 - RNA, 19 nt, Homo sapiens
  misc_RNA (1)...(19): siRNA sense strand
uaucaaagacacuguggaa

SEQ ID NO: 235934 - RNA, 19 nt, Homo sapiens
  misc_RNA (1)...(19): siRNA sense strand
gauacggauauaccaguua

SEQ ID NO: 235935 - RNA, 19 nt, Homo sapiens
  misc_RNA (1)...(19): siRNA sense strand
gagaauuuguaagaggaaa

SEQ ID NO: 235936 - RNA, 19 nt, Homo sapiens
  misc_RNA (1)...(19): siRNA sense strand
cuugagcacuauaagaauu

SEQ ID NO: 235937 - RNA, 19 nt, Homo sapiens
  misc_RNA (1)...(19): siRNA sense strand
gugacaaacuccucuaugc

SEQ ID NO: 235938 - RNA, 19 nt, Homo sapiens
  misc_RNA (1)...(19): siRNA sense strand
acuaugcacuugucugcua

SEQ ID NO: 235939 - RNA, 19 nt, Homo sapiens
  misc_RNA (1)...(19): siRNA sense strand
ggaagaagaaacaucuaca

SEQ ID NO: 235940 - RNA, 19 nt, Homo sapiens
  misc_RNA (1)...(19): siRNA sense strand
aaacuggauuucaggacaa

SEQ ID NO: 235941 - RNA, 19 nt, Homo sapiens
  misc_RNA (1)...(19): siRNA sense strand
gauaaucuugagcacuaua

SEQ ID NO: 235942 - RNA, 19 nt, Homo sapiens
  misc_RNA (1)...(19): siRNA sense strand
gcuggguguuuaugaaguu

SEQ ID NO: 235943 - RNA, 19 nt, Homo sapiens
  misc_RNA (1)...(19): siRNA sense strand
gauuucaggacaagaauau

SEQ ID NO: 235944 - RNA, 19 nt, Homo sapiens
  misc_RNA (1)...(19): siRNA sense strand
gagcuaagaaucccguugu

SEQ ID NO: 235945 - RNA, 19 nt, Homo sapiens
  misc_RNA (1)...(19): siRNA sense strand
aaacaaagaccaggagauc

SEQ ID NO: 235946 - RNA, 19 nt, Homo sapiens
  misc_RNA (1)...(19): siRNA sense strand
gcgacuacgccaaguacua

SEQ ID NO: 235947 - RNA, 19 nt, Homo sapiens
  misc_RNA (1)...(19): siRNA sense strand
uagccucaagugauuauua

SEQ ID NO: 235948 - RNA, 19 nt, Homo sapiens
  misc_RNA (1)...(19): siRNA sense strand
gaggaaaugcuugcuacaa

SEQ ID NO: 235949 - RNA, 19 nt, Homo sapiens
  misc_RNA (1)...(19): siRNA sense strand
gauccaccuuuucaaauaa

SEQ ID NO: 235950 - RNA, 19 nt, Homo sapiens
  misc_RNA (1)...(19): siRNA sense strand
cugcugugcuugccuuauu

SEQ ID NO: 235951 - RNA, 19 nt, Homo sapiens
  misc_RNA (1)...(19): siRNA sense strand
aucgaaagcuggguguuua

SEQ ID NO: 235952 - RNA, 19 nt, Homo sapiens
  misc_RNA (1)...(19): siRNA sense strand
agaaguaucccuugcuaau

SEQ ID NO: 235953 - RNA, 19 nt, Homo sapiens
  misc_RNA (1)...(19): siRNA sense strand
gaggaaauuaagaaacuug

SEQ ID NO: 235954 - RNA, 19 nt, Homo sapiens
  misc_RNA (1)...(19): siRNA sense strand
gcccaacgaugaucaaaua

SEQ ID NO: 235955 - RNA, 19 nt, Homo sapiens
  misc_RNA (1)...(19): siRNA sense strand
gcauggagguguucagcua

SEQ ID NO: 235956 - RNA, 19 nt, Homo sapiens
  misc_RNA (1)...(19): siRNA sense strand
gcaaggccauguccaacaa

SEQ ID NO: 235957 - RNA, 19 nt, Homo sapiens
  misc_RNA (1)...(19): siRNA sense strand
gaucaaauauggcaucaac

SEQ ID NO: 235958 - RNA, 19 nt, Homo sapiens
  misc_RNA (1)...(19): siRNA sense strand
caacgaugaucaaauaugg

SEQ ID NO: 235959 - RNA, 19 nt, Homo sapiens
  misc_RNA (1)...(19): siRNA sense strand
gagcugagcccagagauga

SEQ ID NO: 235960 - RNA, 19 nt, Homo sapiens
  misc_RNA (1)...(19): siRNA sense strand
ucaccgagaugccgacuga

SEQ ID NO: 235961 - RNA, 19 nt, Homo sapiens
  misc_RNA (1)...(19): siRNA sense strand
ccacgcaccuggcugaguu

SEQ ID NO: 235962 - RNA, 19 nt, Homo sapiens
  misc_RNA (1)...(19): siRNA sense strand
acugauaacuucauugaga

SEQ ID NO: 235963 - RNA, 19 nt, Homo sapiens
  misc_RNA (1)...(19): siRNA sense strand
gaacuuugacgcccucuuc

SEQ ID NO: 235964 - RNA, 19 nt, Homo sapiens
  misc_RNA (1)...(19): siRNA sense strand
gcacgacaccuucuuccuu

SEQ ID NO: 235965 - RNA, 19 nt, Homo sapiens
  misc_RNA (1)...(19): siRNA sense strand
cgacugauaacuucauuga

SEQ ID NO: 235966 - RNA, 19 nt, Homo sapiens
  misc_RNA (1)...(19): siRNA sense strand
ggagcgagcugaggaagag

SEQ ID NO: 235967 - RNA, 19 nt, Homo sapiens
  misc_RNA (1)...(19): siRNA sense strand
gagaacgugucggucauug

SEQ ID NO: 235968 - RNA, 19 nt, Homo sapiens
  misc_RNA (1)...(19): siRNA sense strand
ucaaauauggcaucaacaa

SEQ ID NO: 235969 - RNA, 19 nt, Homo sapiens
  misc_RNA (1)...(19): siRNA sense strand
ucacuccggucaaguacuu

SEQ ID NO: 235970 - RNA, 19 nt, Homo sapiens
  misc_RNA (1)...(19): siRNA sense strand
ggucuuccguccagagaug

SEQ ID NO: 235971 - RNA, 19 nt, Homo sapiens
  misc_RNA (1)...(19): siRNA sense strand
ccaugaggcccguguguuu

SEQ ID NO: 235972 - RNA, 19 nt, Homo sapiens
  misc_RNA (1)...(19): siRNA sense strand
gaugccgacugauaacuuc

SEQ ID NO: 235973 - RNA, 19 nt, Homo sapiens
  misc_RNA (1)...(19): siRNA sense strand
gcuguuggcugaagugacu

SEQ ID NO: 235974 - RNA, 19 nt, Homo sapiens
  misc_RNA (1)...(19): siRNA sense strand
gcaaagugggcuucagcaa

SEQ ID NO: 235975 - RNA, 19 nt, Homo sapiens
  misc_RNA (1)...(19): siRNA sense strand
ucaaguacuucuccaucga

SEQ ID NO: 235976 - RNA, 19 nt, Homo sapiens
  misc_RNA (1)...(19): siRNA sense strand
guaccagcaucuccaagca

SEQ ID NO: 235977 - RNA, 19 nt, Homo sapiens
  misc_RNA (1)...(19): siRNA sense strand
ucacagggguacaaguaua

SEQ ID NO: 235978 - RNA, 19 nt, Homo sapiens
  misc_RNA (1)...(19): siRNA sense strand
ggucaucgaggcugaacuu

SEQ ID NO: 235979 - RNA, 19 nt, Homo sapiens
  misc_RNA (1)...(19): siRNA sense strand
ccgagaugccgacugauaa

SEQ ID NO: 235980 - RNA, 19 nt, Homo sapiens
  misc_RNA (1)...(19): siRNA sense strand
caaauauggcaucaacaau

SEQ ID NO: 235981 - RNA, 19 nt, Homo sapiens
  misc_RNA (1)...(19): siRNA sense strand
ggauucggguggacaagag

SEQ ID NO: 235982 - RNA, 19 nt, Homo sapiens
  misc_RNA (1)...(19): siRNA sense strand
acacagagcccagcaugga

SEQ ID NO: 235983 - RNA, 19 nt, Homo sapiens
  misc_RNA (1)...(19): siRNA sense strand
ucacgcaacuccgcuucaa

SEQ ID NO: 235984 - RNA, 19 nt, Homo sapiens
  misc_RNA (1)...(19): siRNA sense strand
ggaagcuguuggcugaagu

SEQ ID NO: 235985 - RNA, 19 nt, Homo sapiens
  misc_RNA (1)...(19): siRNA sense strand
uggcugaagugacucugaa

SEQ ID NO: 235986 - RNA, 19 nt, Homo sapiens
  misc_RNA (1)...(19): siRNA sense strand
gcagaugguguaugacagu

SEQ ID NO: 235987 - RNA, 19 nt, Homo sapiens
  misc_RNA (1)...(19): siRNA sense strand
aagugacucugaagaccua

SEQ ID NO: 235988 - RNA, 19 nt, Homo sapiens
  misc_RNA (1)...(19): siRNA sense strand
ccaacgaugaucaaauaug

SEQ ID NO: 235989 - RNA, 19 nt, Homo sapiens
  misc_RNA (1)...(19): siRNA sense strand
gguacaaguauaacuggaa

SEQ ID NO: 235990 - RNA, 19 nt, Homo sapiens
  misc_RNA (1)...(19): siRNA sense strand
caccaaggccugaagaagu

SEQ ID NO: 235991 - RNA, 19 nt, Homo sapiens
  misc_RNA (1)...(19): siRNA sense strand
accaaggccugaagaagug

SEQ ID NO: 235992 - RNA, 19 nt, Homo sapiens
  misc_RNA (1)...(19): siRNA sense strand
gcccguguguuucgaagca

SEQ ID NO: 235993 - RNA, 19 nt, Homo sapiens
  misc_RNA (1)...(19): siRNA sense strand
gccgacugauaacuucauu

SEQ ID NO: 235994 - RNA, 19 nt, Homo sapiens
  misc_RNA (1)...(19): siRNA sense strand
caagguccgcucccaguuc

SEQ ID NO: 235995 - RNA, 19 nt, Homo sapiens
  misc_RNA (1)...(19): siRNA sense strand
uggcugaguuccaccagau

SEQ ID NO: 235996 - RNA, 19 nt, Homo sapiens
  misc_RNA (1)...(19): siRNA sense strand
gagagcuccuucuggaacu

SEQ ID NO: 235997 - RNA, 19 nt, Homo sapiens
  misc_RNA (1)...(19): siRNA sense strand
cuucaagcccuacaacuuc

SEQ ID NO: 235998 - RNA, 19 nt, Homo sapiens
  misc_RNA (1)...(19): siRNA sense strand
cuggagcgcccaacgauga

SEQ ID NO: 235999 - RNA, 19 nt, Homo sapiens
  misc_RNA (1)...(19): siRNA sense strand
gcucacagggguacaagua

SEQ ID NO: 236000 - RNA, 19 nt, Homo sapiens
  misc_RNA (1)...(19): siRNA sense strand
ugaggaagaggaagcuguu

SEQ ID NO: 236001 - RNA, 19 nt, Homo sapiens
  misc_RNA (1)...(19): siRNA sense strand
uggacagcauggaggauga

SEQ ID NO: 236002 - RNA, 19 nt, Homo sapiens
  misc_RNA (1)...(19): siRNA sense strand
gcugaagugacucugaaga

SEQ ID NO: 236003 - RNA, 19 nt, Homo sapiens
  misc_RNA (1)...(19): siRNA sense strand
gcccagagcgagcuuaugc

SEQ ID NO: 236004 - RNA, 19 nt, Homo sapiens
  misc_RNA (1)...(19): siRNA sense strand
gaagcuguuggcugaagug

SEQ ID NO: 236005 - RNA, 19 nt, Homo sapiens
  misc_RNA (1)...(19): siRNA sense strand
ucaagcggacccacucuca

SEQ ID NO: 236006 - RNA, 19 nt, Homo sapiens
  misc_RNA (1)...(19): siRNA sense strand
gagcuccuucuggaacuuu

SEQ ID NO: 236007 - RNA, 19 nt, Homo sapiens
  misc_RNA (1)...(19): siRNA sense strand
ucagcaaggccauguccaa

SEQ ID NO: 236008 - RNA, 19 nt, Homo sapiens
  misc_RNA (1)...(19): siRNA sense strand
gcccuucacuccggucaag

SEQ ID NO: 236009 - RNA, 19 nt, Homo sapiens
  misc_RNA (1)...(19): siRNA sense strand
gaaccugcagaugguguau

SEQ ID NO: 236010 - RNA, 19 nt, Homo sapiens
  misc_RNA (1)...(19): siRNA sense strand
ccuacaacccauacacaga

SEQ ID NO: 236011 - RNA, 19 nt, Homo sapiens
  misc_RNA (1)...(19): siRNA sense strand
ucaccaagcuggguaucac

SEQ ID NO: 236012 - RNA, 19 nt, Homo sapiens
  misc_RNA (1)...(19): siRNA sense strand
ccuucaagcccuacaacuu

SEQ ID NO: 236013 - RNA, 19 nt, Homo sapiens
  misc_RNA (1)...(19): siRNA sense strand
accugcagaugguguauga

SEQ ID NO: 236014 - RNA, 19 nt, Homo sapiens
  misc_RNA (1)...(19): siRNA sense strand
accgagaugccgacugaua

SEQ ID NO: 236015 - RNA, 19 nt, Homo sapiens
  misc_RNA (1)...(19): siRNA sense strand
gcaaagauauugaugaaug

SEQ ID NO: 236016 - RNA, 19 nt, Homo sapiens
  misc_RNA (1)...(19): siRNA sense strand
gaugaaauguguuggaauu

SEQ ID NO: 236017 - RNA, 19 nt, Homo sapiens
  misc_RNA (1)...(19): siRNA sense strand
caagaucccuacauucuaa

SEQ ID NO: 236018 - RNA, 19 nt, Homo sapiens
  misc_RNA (1)...(19): siRNA sense strand
gauaugagcuaagcaguga

SEQ ID NO: 236019 - RNA, 19 nt, Homo sapiens
  misc_RNA (1)...(19): siRNA sense strand
agacagcaaugcaaagaua

SEQ ID NO: 236020 - RNA, 19 nt, Homo sapiens
  misc_RNA (1)...(19): siRNA sense strand
caagcuaccugugucaaua

SEQ ID NO: 236021 - RNA, 19 nt, Homo sapiens
  misc_RNA (1)...(19): siRNA sense strand
ccagagaaccgauguguuu

SEQ ID NO: 236022 - RNA, 19 nt, Homo sapiens
  misc_RNA (1)...(19): siRNA sense strand
gcucaacugugaagacauu

SEQ ID NO: 236023 - RNA, 19 nt, Homo sapiens
  misc_RNA (1)...(19): siRNA sense strand
caccaaagaugcgugaaua

SEQ ID NO: 236024 - RNA, 19 nt, Homo sapiens
  misc_RNA (1)...(19): siRNA sense strand
gggaaauucucauguaugu

SEQ ID NO: 236025 - RNA, 19 nt, Homo sapiens
  misc_RNA (1)...(19): siRNA sense strand
gaccaagugugcaucaauu

SEQ ID NO: 236026 - RNA, 19 nt, Homo sapiens
  misc_RNA (1)...(19): siRNA sense strand
gaaauguguuggaauuauc

SEQ ID NO: 236027 - RNA, 19 nt, Homo sapiens
  misc_RNA (1)...(19): siRNA sense strand
gaauacaccaggcucauuu

SEQ ID NO: 236028 - RNA, 19 nt, Homo sapiens
  misc_RNA (1)...(19): siRNA sense strand
ccaacaccaucaauacuuu

SEQ ID NO: 236029 - RNA, 19 nt, Homo sapiens
  misc_RNA (1)...(19): siRNA sense strand
cgacaaacaaguccuguaa

SEQ ID NO: 236030 - RNA, 19 nt, Homo sapiens
  misc_RNA (1)...(19): siRNA sense strand
caacgugugccaagacaua

SEQ ID NO: 236031 - RNA, 19 nt, Homo sapiens
  misc_RNA (1)...(19): siRNA sense strand
caaugaaccugggaaauuc

SEQ ID NO: 236032 - RNA, 19 nt, Homo sapiens
  misc_RNA (1)...(19): siRNA sense strand
aguagaacaugucaagaua

SEQ ID NO: 236033 - RNA, 19 nt, Homo sapiens
  misc_RNA (1)...(19): siRNA sense strand
caagcucuguguuaagauu

SEQ ID NO: 236034 - RNA, 19 nt, Homo sapiens
  misc_RNA (1)...(19): siRNA sense strand
caacauucuugguucauuc

SEQ ID NO: 236035 - RNA, 19 nt, Homo sapiens
  misc_RNA (1)...(19): siRNA sense strand
ccaagugugcaucaauuua

SEQ ID NO: 236036 - RNA, 19 nt, Homo sapiens
  misc_RNA (1)...(19): siRNA sense strand
gaaaacagcccagauuauu

SEQ ID NO: 236037 - RNA, 19 nt, Homo sapiens
  misc_RNA (1)...(19): siRNA sense strand
ucaaugaaccugggaaauu

SEQ ID NO: 236038 - RNA, 19 nt, Homo sapiens
  misc_RNA (1)...(19): siRNA sense strand
ccugggaaauucucaugua

SEQ ID NO: 236039 - RNA, 19 nt, Homo sapiens
  misc_RNA (1)...(19): siRNA sense strand
acaaacaaguccuguaagu

SEQ ID NO: 236040 - RNA, 19 nt, Homo sapiens
  misc_RNA (1)...(19): siRNA sense strand
ggugagaaguagaacaugu

SEQ ID NO: 236041 - RNA, 19 nt, Homo sapiens
  misc_RNA (1)...(19): siRNA sense strand
ggaaacacaaccagcagaa

SEQ ID NO: 236042 - RNA, 19 nt, Homo sapiens
  misc_RNA (1)...(19): siRNA sense strand
gcguagauauaaaugaaug

SEQ ID NO: 236043 - RNA, 19 nt, Homo sapiens
  misc_RNA (1)...(19): siRNA sense strand
ucagugcccuccuggauau

SEQ ID NO: 236044 - RNA, 19 nt, Homo sapiens
  misc_RNA (1)...(19): siRNA sense strand
ucagugcaaucaaggauau

SEQ ID NO: 236045 - RNA, 19 nt, Homo sapiens
  misc_RNA (1)...(19): siRNA sense strand
caauaucaaugugucaaug

SEQ ID NO: 236046 - RNA, 19 nt, Homo sapiens
  misc_RNA (1)...(19): siRNA sense strand
ggagcagugcguagacaua

SEQ ID NO: 236047 - RNA, 19 nt, Homo sapiens
  misc_RNA (1)...(19): siRNA sense strand
auacaggccacaacuauuu

SEQ ID NO: 236048 - RNA, 19 nt, Homo sapiens
  misc_RNA (1)...(19): siRNA sense strand
ugagugggauccugugaga

SEQ ID NO: 236049 - RNA, 19 nt, Homo sapiens
  misc_RNA (1)...(19): siRNA sense strand
gaacagccucagcaggaaa

SEQ ID NO: 236050 - RNA, 19 nt, Homo sapiens
  misc_RNA (1)...(19): siRNA sense strand
gcguagacauagaugaaug

SEQ ID NO: 236051 - RNA, 19 nt, Homo sapiens
  misc_RNA (1)...(19): siRNA sense strand
cugcguagauauaaaugaa

SEQ ID NO: 236052 - RNA, 19 nt, Homo sapiens
  misc_RNA (1)...(19): siRNA sense strand
caaccacuauggaggauac

SEQ ID NO: 236053 - RNA, 19 nt, Homo sapiens
  misc_RNA (1)...(19): siRNA sense strand
gauacaggccacaacuauu

SEQ ID NO: 236054 - RNA, 19 nt, Homo sapiens
  misc_RNA (1)...(19): siRNA sense strand
gcagcaggcuacgagcaaa

SEQ ID NO: 236055 - RNA, 19 nt, Homo sapiens
  misc_RNA (1)...(19): siRNA sense strand
aaacagcccagauuauugu

SEQ ID NO: 236056 - RNA, 19 nt, Homo sapiens
  misc_RNA (1)...(19): siRNA sense strand
guaccaucccuccauauug

SEQ ID NO: 236057 - RNA, 19 nt, Homo sapiens
  misc_RNA (1)...(19): siRNA sense strand
aaucaaggauaugagcuaa

SEQ ID NO: 236058 - RNA, 19 nt, Homo sapiens
  misc_RNA (1)...(19): siRNA sense strand
aacuauaccugcguagaua

SEQ ID NO: 236059 - RNA, 19 nt, Homo sapiens
  misc_RNA (1)...(19): siRNA sense strand
caacuauaccugcguagau

SEQ ID NO: 236060 - RNA, 19 nt, Homo sapiens
  misc_RNA (1)...(19): siRNA sense strand
gcagggacgcacaacugua

SEQ ID NO: 236061 - RNA, 19 nt, Homo sapiens
  misc_RNA (1)...(19): siRNA sense strand
cuacaacauucuugguuca

SEQ ID NO: 236062 - RNA, 19 nt, Homo sapiens
  misc_RNA (1)...(19): siRNA sense strand
cauggcggcuuccguuguu

SEQ ID NO: 236063 - RNA, 19 nt, Homo sapiens
  misc_RNA (1)...(19): siRNA sense strand
aauguaccaucccuccaua

SEQ ID NO: 236064 - RNA, 19 nt, Homo sapiens
  misc_RNA (1)...(19): siRNA sense strand
ugaaugugaugccagcaau

SEQ ID NO: 236065 - RNA, 19 nt, Homo sapiens
  misc_RNA (1)...(19): siRNA sense strand
caaguggugagaaguagaa

SEQ ID NO: 236066 - RNA, 19 nt, Homo sapiens
  misc_RNA (1)...(19): siRNA sense strand
ucaagaucccuacauucua

SEQ ID NO: 236067 - RNA, 19 nt, Homo sapiens
  misc_RNA (1)...(19): siRNA sense strand
gaauguaccaucccuccau

SEQ ID NO: 236068 - RNA, 19 nt, Homo sapiens
  misc_RNA (1)...(19): siRNA sense strand
caaucaaggauaugagcua

SEQ ID NO: 236069 - RNA, 19 nt, Homo sapiens
  misc_RNA (1)...(19): siRNA sense strand
guagaacaugucaagauau

SEQ ID NO: 236070 - RNA, 19 nt, Homo sapiens
  misc_RNA (1)...(19): siRNA sense strand
auagggaccuuccgcacaa

SEQ ID NO: 236071 - RNA, 19 nt, Homo sapiens
  misc_RNA (1)...(19): siRNA sense strand
gccaacaccaucaauacuu

SEQ ID NO: 236072 - RNA, 19 nt, Homo sapiens
  misc_RNA (1)...(19): siRNA sense strand
gucaauagucuacaaauac

SEQ ID NO: 236073 - RNA, 19 nt, Homo sapiens
  misc_RNA (1)...(19): siRNA sense strand
gugcguagacauagaugaa

SEQ ID NO: 236074 - RNA, 19 nt, Homo sapiens
  misc_RNA (1)...(19): siRNA sense strand
aaauggagaguucuaccua

SEQ ID NO: 236075 - RNA, 19 nt, Homo sapiens
  misc_RNA (1)...(19): siRNA sense strand
cccagacgcuuguaaaggu

SEQ ID NO: 236076 - RNA, 19 nt, Homo sapiens
  misc_RNA (1)...(19): siRNA sense strand
gauauaaaugagugugaga

SEQ ID NO: 236077 - RNA, 19 nt, Homo sapiens
  misc_RNA (1)...(19): siRNA sense strand
gaaguagaacaugucaaga

SEQ ID NO: 236078 - RNA, 19 nt, Homo sapiens
  misc_RNA (1)...(19): siRNA sense strand
cagcccagauuauugucaa

SEQ ID NO: 236079 - RNA, 19 nt, Homo sapiens
  misc_RNA (1)...(19): siRNA sense strand
ccaaagaugcgugaauaca

SEQ ID NO: 236080 - RNA, 19 nt, Homo sapiens
  misc_RNA (1)...(19): siRNA sense strand
ugaacagccucagcaggaa

SEQ ID NO: 236081 - RNA, 19 nt, Homo sapiens
  misc_RNA (1)...(19): siRNA sense strand
gcucgugaagucauuauca

SEQ ID NO: 236082 - RNA, 19 nt, Homo sapiens
  misc_RNA (1)...(19): siRNA sense strand
caaacaaguccuguaagug

SEQ ID NO: 236083 - RNA, 19 nt, Homo sapiens
  misc_RNA (1)...(19): siRNA sense strand
guaaagguggaaugaagug

SEQ ID NO: 236084 - RNA, 19 nt, Homo sapiens
  misc_RNA (1)...(19): siRNA sense strand
cuaccugugucaauaucaa

SEQ ID NO: 236085 - RNA, 19 nt, Homo sapiens
  misc_RNA (1)...(19): siRNA sense strand
acaccaggcucauuuuauu

SEQ ID NO: 236086 - RNA, 19 nt, Homo sapiens
  misc_RNA (1)...(19): siRNA sense strand
acaacauucuugguucauu

SEQ ID NO: 236087 - RNA, 19 nt, Homo sapiens
  misc_RNA (1)...(19): siRNA sense strand
ccgggaggaugaaaugugu

SEQ ID NO: 236088 - RNA, 19 nt, Homo sapiens
  misc_RNA (1)...(19): siRNA sense strand
gagcagaccaagugugcau

SEQ ID NO: 236089 - RNA, 19 nt, Homo sapiens
  misc_RNA (1)...(19): siRNA sense strand
caucaauacuuuucggauu

SEQ ID NO: 236090 - RNA, 19 nt, Homo sapiens
  misc_RNA (1)...(19): siRNA sense strand
gucaagaucccuacauucu

SEQ ID NO: 236091 - RNA, 19 nt, Homo sapiens
  misc_RNA (1)...(19): siRNA sense strand
gggaggaugaaauguguug

SEQ ID NO: 236092 - RNA, 19 nt, Homo sapiens
  misc_RNA (1)...(19): siRNA sense strand
gaaugaagugugucaacca

SEQ ID NO: 236093 - RNA, 19 nt, Homo sapiens
  misc_RNA (1)...(19): siRNA sense strand
gcaguccuggguuucaauu

SEQ ID NO: 236094 - RNA, 19 nt, Homo sapiens
  misc_RNA (1)...(19): siRNA sense strand
cauauugccaccaaagaug

SEQ ID NO: 236095 - RNA, 19 nt, Homo sapiens
  misc_RNA (1)...(19): siRNA sense strand
cgagcaaagugaacacaac

SEQ ID NO: 236096 - RNA, 19 nt, Homo sapiens
  misc_RNA (1)...(19): siRNA sense strand
ggaccaagagaacauaucg

SEQ ID NO: 236097 - RNA, 19 nt, Homo sapiens
  misc_RNA (1)...(19): siRNA sense strand
gaugaaugcagaaccucaa

SEQ ID NO: 236098 - RNA, 19 nt, Homo sapiens
  misc_RNA (1)...(19): siRNA sense strand
ucaaggauaugagcuaagc

SEQ ID NO: 236099 - RNA, 19 nt, Homo sapiens
  misc_RNA (1)...(19): siRNA sense strand
uaccaucccuccauauugc

SEQ ID NO: 236100 - RNA, 19 nt, Homo sapiens
  misc_RNA (1)...(19): siRNA sense strand
gcagugcguagacauagau

SEQ ID NO: 236101 - RNA, 19 nt, Homo sapiens
  misc_RNA (1)...(19): siRNA sense strand
caagugugcaucaauuuac

SEQ ID NO: 236102 - RNA, 19 nt, Homo sapiens
  misc_RNA (1)...(19): siRNA sense strand
gcagaccaagugugcauca

SEQ ID NO: 236103 - RNA, 19 nt, Homo sapiens
  misc_RNA (1)...(19): siRNA sense strand
gaggaugaaauguguugga

SEQ ID NO: 236104 - RNA, 19 nt, Homo sapiens
  misc_RNA (1)...(19): siRNA sense strand
agaaguagaacaugucaag

SEQ ID NO: 236105 - RNA, 19 nt, Homo sapiens
  misc_RNA (1)...(19): siRNA sense strand
gguuucaauuggcagcaaa

SEQ ID NO: 236106 - RNA, 19 nt, Homo sapiens
  misc_RNA (1)...(19): siRNA sense strand
gagcagugcguagacauag

SEQ ID NO: 236107 - RNA, 19 nt, Homo sapiens
  misc_RNA (1)...(19): siRNA sense strand
gcacugcagggacgcacaa

SEQ ID NO: 236108 - RNA, 19 nt, Homo sapiens
  misc_RNA (1)...(19): siRNA sense strand
gucauuaucaggaccaaga

SEQ ID NO: 236109 - RNA, 19 nt, Homo sapiens
  misc_RNA (1)...(19): siRNA sense strand
uacaggccacaacuauuua

SEQ ID NO: 236110 - RNA, 19 nt, Homo sapiens
  misc_RNA (1)...(19): siRNA sense strand
agauacaggccacaacuau

SEQ ID NO: 236111 - RNA, 19 nt, Homo sapiens
  misc_RNA (1)...(19): siRNA sense strand
cagauacaggccacaacua

SEQ ID NO: 236112 - RNA, 19 nt, Homo sapiens
  misc_RNA (1)...(19): siRNA sense strand
cugggaaauucucauguau

SEQ ID NO: 236113 - RNA, 19 nt, Homo sapiens
  misc_RNA (1)...(19): siRNA sense strand
gcagugcuacaacauucuu

SEQ ID NO: 236114 - RNA, 19 nt, Homo sapiens
  misc_RNA (1)...(19): siRNA sense strand
gucagugcccuccuggaua

SEQ ID NO: 236115 - RNA, 19 nt, Homo sapiens
  misc_RNA (1)...(19): siRNA sense strand
gcaaagauauugaugaaug

SEQ ID NO: 236116 - RNA, 19 nt, Homo sapiens
  misc_RNA (1)...(19): siRNA sense strand
gaugaaauguguuggaauu

SEQ ID NO: 236117 - RNA, 19 nt, Homo sapiens
  misc_RNA (1)...(19): siRNA sense strand
caagaucccuacauucuaa

SEQ ID NO: 236118 - RNA, 19 nt, Homo sapiens
  misc_RNA (1)...(19): siRNA sense strand
gauaugagcuaagcaguga

SEQ ID NO: 236119 - RNA, 19 nt, Homo sapiens
  misc_RNA (1)...(19): siRNA sense strand
agacagcaaugcaaagaua

SEQ ID NO: 236120 - RNA, 19 nt, Homo sapiens
  misc_RNA (1)...(19): siRNA sense strand
caagcuaccugugucaaua

SEQ ID NO: 236121 - RNA, 19 nt, Homo sapiens
  misc_RNA (1)...(19): siRNA sense strand
ccagagaaccgauguguuu

SEQ ID NO: 236122 - RNA, 19 nt, Homo sapiens
  misc_RNA (1)...(19): siRNA sense strand
gcucaacugugaagacauu

SEQ ID NO: 236123 - RNA, 19 nt, Homo sapiens
  misc_RNA (1)...(19): siRNA sense strand
caccaaagaugcgugaaua

SEQ ID NO: 236124 - RNA, 19 nt, Homo sapiens
  misc_RNA (1)...(19): siRNA sense strand
gggaaauucucauguaugu

SEQ ID NO: 236125 - RNA, 19 nt, Homo sapiens
  misc_RNA (1)...(19): siRNA sense strand
gaccaagugugcaucaauu

SEQ ID NO: 236126 - RNA, 19 nt, Homo sapiens
  misc_RNA (1)...(19): siRNA sense strand
gaaauguguuggaauuauc

SEQ ID NO: 236127 - RNA, 19 nt, Homo sapiens
  misc_RNA (1)...(19): siRNA sense strand
gaauacaccaggcucauuu

SEQ ID NO: 236128 - RNA, 19 nt, Homo sapiens
  misc_RNA (1)...(19): siRNA sense strand
ccaacaccaucaauacuuu

SEQ ID NO: 236129 - RNA, 19 nt, Homo sapiens
  misc_RNA (1)...(19): siRNA sense strand
cgacaaacaaguccuguaa

SEQ ID NO: 236130 - RNA, 19 nt, Homo sapiens
  misc_RNA (1)...(19): siRNA sense strand
caacgugugccaagacaua

SEQ ID NO: 236131 - RNA, 19 nt, Homo sapiens
  misc_RNA (1)...(19): siRNA sense strand
caaugaaccugggaaauuc

SEQ ID NO: 236132 - RNA, 19 nt, Homo sapiens
  misc_RNA (1)...(19): siRNA sense strand
aguagaacaugucaagaua

SEQ ID NO: 236133 - RNA, 19 nt, Homo sapiens
  misc_RNA (1)...(19): siRNA sense strand
caagcucuguguuaagauu

SEQ ID NO: 236134 - RNA, 19 nt, Homo sapiens
  misc_RNA (1)...(19): siRNA sense strand
caacauucuugguucauuc

SEQ ID NO: 236135 - RNA, 19 nt, Homo sapiens
  misc_RNA (1)...(19): siRNA sense strand
ccaagugugcaucaauuua

SEQ ID NO: 236136 - RNA, 19 nt, Homo sapiens
  misc_RNA (1)...(19): siRNA sense strand
gaaaacagcccagauuauu

SEQ ID NO: 236137 - RNA, 19 nt, Homo sapiens
  misc_RNA (1)...(19): siRNA sense strand
ucaaugaaccugggaaauu

SEQ ID NO: 236138 - RNA, 19 nt, Homo sapiens
  misc_RNA (1)...(19): siRNA sense strand
ccugggaaauucucaugua

SEQ ID NO: 236139 - RNA, 19 nt, Homo sapiens
  misc_RNA (1)...(19): siRNA sense strand
acaaacaaguccuguaagu

SEQ ID NO: 236140 - RNA, 19 nt, Homo sapiens
  misc_RNA (1)...(19): siRNA sense strand
ggugagaaguagaacaugu

SEQ ID NO: 236141 - RNA, 19 nt, Homo sapiens
  misc_RNA (1)...(19): siRNA sense strand
ggaaacacaaccagcagaa

SEQ ID NO: 236142 - RNA, 19 nt, Homo sapiens
  misc_RNA (1)...(19): siRNA sense strand
gcguagauauaaaugaaug

SEQ ID NO: 236143 - RNA, 19 nt, Homo sapiens
  misc_RNA (1)...(19): siRNA sense strand
ucagugcccuccuggauau

SEQ ID NO: 236144 - RNA, 19 nt, Homo sapiens
  misc_RNA (1)...(19): siRNA sense strand
ucagugcaaucaaggauau

SEQ ID NO: 236145 - RNA, 19 nt, Homo sapiens
  misc_RNA (1)...(19): siRNA sense strand
caauaucaaugugucaaug

SEQ ID NO: 236146 - RNA, 19 nt, Homo sapiens
  misc_RNA (1)...(19): siRNA sense strand
ggagcagugcguagacaua

SEQ ID NO: 236147 - RNA, 19 nt, Homo sapiens
  misc_RNA (1)...(19): siRNA sense strand
auacaggccacaacuauuu

SEQ ID NO: 236148 - RNA, 19 nt, Homo sapiens
  misc_RNA (1)...(19): siRNA sense strand
ugagugggauccugugaga

SEQ ID NO: 236149 - RNA, 19 nt, Homo sapiens
  misc_RNA (1)...(19): siRNA sense strand
gaacagccucagcaggaaa

SEQ ID NO: 236150 - RNA, 19 nt, Homo sapiens
  misc_RNA (1)...(19): siRNA sense strand
gcguagacauagaugaaug

SEQ ID NO: 236151 - RNA, 19 nt, Homo sapiens
  misc_RNA (1)...(19): siRNA sense strand
cugcguagauauaaaugaa

SEQ ID NO: 236152 - RNA, 19 nt, Homo sapiens
  misc_RNA (1)...(19): siRNA sense strand
caaccacuauggaggauac

SEQ ID NO: 236153 - RNA, 19 nt, Homo sapiens
  misc_RNA (1)...(19): siRNA sense strand
gauacaggccacaacuauu

SEQ ID NO: 236154 - RNA, 19 nt, Homo sapiens
  misc_RNA (1)...(19): siRNA sense strand
gcagcaggcuacgagcaaa

SEQ ID NO: 236155 - RNA, 19 nt, Homo sapiens
  misc_RNA (1)...(19): siRNA sense strand
aaacagcccagauuauugu

SEQ ID NO: 236156 - RNA, 19 nt, Homo sapiens
  misc_RNA (1)...(19): siRNA sense strand
guaccaucccuccauauug

SEQ ID NO: 236157 - RNA, 19 nt, Homo sapiens
  misc_RNA (1)...(19): siRNA sense strand
aaucaaggauaugagcuaa

SEQ ID NO: 236158 - RNA, 19 nt, Homo sapiens
  misc_RNA (1)...(19): siRNA sense strand
aacuauaccugcguagaua

SEQ ID NO: 236159 - RNA, 19 nt, Homo sapiens
  misc_RNA (1)...(19): siRNA sense strand
caacuauaccugcguagau

SEQ ID NO: 236160 - RNA, 19 nt, Homo sapiens
  misc_RNA (1)...(19): siRNA sense strand
gcagggacgcacaacugua

SEQ ID NO: 236161 - RNA, 19 nt, Homo sapiens
  misc_RNA (1)...(19): siRNA sense strand
cuacaacauucuugguuca

SEQ ID NO: 236162 - RNA, 19 nt, Homo sapiens
  misc_RNA (1)...(19): siRNA sense strand
cauggcggcuuccguuguu

SEQ ID NO: 236163 - RNA, 19 nt, Homo sapiens
  misc_RNA (1)...(19): siRNA sense strand
aauguaccaucccuccaua

SEQ ID NO: 236164 - RNA, 19 nt, Homo sapiens
  misc_RNA (1)...(19): siRNA sense strand
ugaaugugaugccagcaau

SEQ ID NO: 236165 - RNA, 19 nt, Homo sapiens
  misc_RNA (1)...(19): siRNA sense strand
caaguggugagaaguagaa

SEQ ID NO: 236166 - RNA, 19 nt, Homo sapiens
  misc_RNA (1)...(19): siRNA sense strand
ucaagaucccuacauucua

SEQ ID NO: 236167 - RNA, 19 nt, Homo sapiens
  misc_RNA (1)...(19): siRNA sense strand
gaauguaccaucccuccau

SEQ ID NO: 236168 - RNA, 19 nt, Homo sapiens
  misc_RNA (1)...(19): siRNA sense strand
caaucaaggauaugagcua

SEQ ID NO: 236169 - RNA, 19 nt, Homo sapiens
  misc_RNA (1)...(19): siRNA sense strand
guagaacaugucaagauau

SEQ ID NO: 236170 - RNA, 19 nt, Homo sapiens
  misc_RNA (1)...(19): siRNA sense strand
auagggaccuuccgcacaa

SEQ ID NO: 236171 - RNA, 19 nt, Homo sapiens
  misc_RNA (1)...(19): siRNA sense strand
gccaacaccaucaauacuu

SEQ ID NO: 236172 - RNA, 19 nt, Homo sapiens
  misc_RNA (1)...(19): siRNA sense strand
gucaauagucuacaaauac

SEQ ID NO: 236173 - RNA, 19 nt, Homo sapiens
  misc_RNA (1)...(19): siRNA sense strand
gugcguagacauagaugaa

SEQ ID NO: 236174 - RNA, 19 nt, Homo sapiens
  misc_RNA (1)...(19): siRNA sense strand
aaauggagaguucuaccua

SEQ ID NO: 236175 - RNA, 19 nt, Homo sapiens
  misc_RNA (1)...(19): siRNA sense strand
cccagacgcuuguaaaggu

SEQ ID NO: 236176 - RNA, 19 nt, Homo sapiens
  misc_RNA (1)...(19): siRNA sense strand
gauauaaaugagugugaga

SEQ ID NO: 236177 - RNA, 19 nt, Homo sapiens
  misc_RNA (1)...(19): siRNA sense strand
gaaguagaacaugucaaga

SEQ ID NO: 236178 - RNA, 19 nt, Homo sapiens
  misc_RNA (1)...(19): siRNA sense strand
cagcccagauuauugucaa

SEQ ID NO: 236179 - RNA, 19 nt, Homo sapiens
  misc_RNA (1)...(19): siRNA sense strand
ccaaagaugcgugaauaca

SEQ ID NO: 236180 - RNA, 19 nt, Homo sapiens
  misc_RNA (1)...(19): siRNA sense strand
ugaacagccucagcaggaa

SEQ ID NO: 236181 - RNA, 19 nt, Homo sapiens
  misc_RNA (1)...(19): siRNA sense strand
gcucgugaagucauuauca

SEQ ID NO: 236182 - RNA, 19 nt, Homo sapiens
  misc_RNA (1)...(19): siRNA sense strand
caaacaaguccuguaagug

SEQ ID NO: 236183 - RNA, 19 nt, Homo sapiens
  misc_RNA (1)...(19): siRNA sense strand
guaaagguggaaugaagug

SEQ ID NO: 236184 - RNA, 19 nt, Homo sapiens
  misc_RNA (1)...(19): siRNA sense strand
cuaccugugucaauaucaa

SEQ ID NO: 236185 - RNA, 19 nt, Homo sapiens
  misc_RNA (1)...(19): siRNA sense strand
acaccaggcucauuuuauu

SEQ ID NO: 236186 - RNA, 19 nt, Homo sapiens
  misc_RNA (1)...(19): siRNA sense strand
acaacauucuugguucauu

SEQ ID NO: 236187 - RNA, 19 nt, Homo sapiens
  misc_RNA (1)...(19): siRNA sense strand
ccgggaggaugaaaugugu

SEQ ID NO: 236188 - RNA, 19 nt, Homo sapiens
  misc_RNA (1)...(19): siRNA sense strand
gagcagaccaagugugcau

SEQ ID NO: 236189 - RNA, 19 nt, Homo sapiens
  misc_RNA (1)...(19): siRNA sense strand
caucaauacuuuucggauu

SEQ ID NO: 236190 - RNA, 19 nt, Homo sapiens
  misc_RNA (1)...(19): siRNA sense strand
gucaagaucccuacauucu

SEQ ID NO: 236191 - RNA, 19 nt, Homo sapiens
  misc_RNA (1)...(19): siRNA sense strand
gggaggaugaaauguguug

SEQ ID NO: 236192 - RNA, 19 nt, Homo sapiens
  misc_RNA (1)...(19): siRNA sense strand
gaaugaagugugucaacca

SEQ ID NO: 236193 - RNA, 19 nt, Homo sapiens
  misc_RNA (1)...(19): siRNA sense strand
gcaguccuggguuucaauu

SEQ ID NO: 236194 - RNA, 19 nt, Homo sapiens
  misc_RNA (1)...(19): siRNA sense strand
cauauugccaccaaagaug

SEQ ID NO: 236195 - RNA, 19 nt, Homo sapiens
  misc_RNA (1)...(19): siRNA sense strand
cgagcaaagugaacacaac

SEQ ID NO: 236196 - RNA, 19 nt, Homo sapiens
  misc_RNA (1)...(19): siRNA sense strand
ggaccaagagaacauaucg

SEQ ID NO: 236197 - RNA, 19 nt, Homo sapiens
  misc_RNA (1)...(19): siRNA sense strand
gaugaaugcagaaccucaa

SEQ ID NO: 236198 - RNA, 19 nt, Homo sapiens
  misc_RNA (1)...(19): siRNA sense strand
ucaaggauaugagcuaagc

SEQ ID NO: 236199 - RNA, 19 nt, Homo sapiens
  misc_RNA (1)...(19): siRNA sense strand
uaccaucccuccauauugc

SEQ ID NO: 236200 - RNA, 19 nt, Homo sapiens
  misc_RNA (1)...(19): siRNA sense strand
gcagugcguagacauagau

SEQ ID NO: 236201 - RNA, 19 nt, Homo sapiens
  misc_RNA (1)...(19): siRNA sense strand
caagugugcaucaauuuac

SEQ ID NO: 236202 - RNA, 19 nt, Homo sapiens
  misc_RNA (1)...(19): siRNA sense strand
gcagaccaagugugcauca

SEQ ID NO: 236203 - RNA, 19 nt, Homo sapiens
  misc_RNA (1)...(19): siRNA sense strand
gaggaugaaauguguugga

SEQ ID NO: 236204 - RNA, 19 nt, Homo sapiens
  misc_RNA (1)...(19): siRNA sense strand
agaaguagaacaugucaag

SEQ ID NO: 236205 - RNA, 19 nt, Homo sapiens
  misc_RNA (1)...(19): siRNA sense strand
gguuucaauuggcagcaaa

SEQ ID NO: 236206 - RNA, 19 nt, Homo sapiens
  misc_RNA (1)...(19): siRNA sense strand
gagcagugcguagacauag

SEQ ID NO: 236207 - RNA, 19 nt, Homo sapiens
  misc_RNA (1)...(19): siRNA sense strand
gcacugcagggacgcacaa

SEQ ID NO: 236208 - RNA, 19 nt, Homo sapiens
  misc_RNA (1)...(19): siRNA sense strand
gucauuaucaggaccaaga

SEQ ID NO: 236209 - RNA, 19 nt, Homo sapiens
  misc_RNA (1)...(19): siRNA sense strand
uacaggccacaacuauuua

SEQ ID NO: 236210 - RNA, 19 nt, Homo sapiens
  misc_RNA (1)...(19): siRNA sense strand
agauacaggccacaacuau

SEQ ID NO: 236211 - RNA, 19 nt, Homo sapiens
  misc_RNA (1)...(19): siRNA sense strand
cagauacaggccacaacua

SEQ ID NO: 236212 - RNA, 19 nt, Homo sapiens
  misc_RNA (1)...(19): siRNA sense strand
cugggaaauucucauguau

SEQ ID NO: 236213 - RNA, 19 nt, Homo sapiens
  misc_RNA (1)...(19): siRNA sense strand
gcagugcuacaacauucuu

SEQ ID NO: 236214 - RNA, 19 nt, Homo sapiens
  misc_RNA (1)...(19): siRNA sense strand
gucagugcccuccuggaua

SEQ ID NO: 236215 - RNA, 19 nt, Homo sapiens
  misc_RNA (1)...(19): siRNA sense strand
gaaaucagaugguguuuac

SEQ ID NO: 236216 - RNA, 19 nt, Homo sapiens
  misc_RNA (1)...(19): siRNA sense strand
ccaggaaccaggagacuua

SEQ ID NO: 236217 - RNA, 19 nt, Homo sapiens
  misc_RNA (1)...(19): siRNA sense strand
gcaguggucuugcucuuac

SEQ ID NO: 236218 - RNA, 19 nt, Homo sapiens
  misc_RNA (1)...(19): siRNA sense strand
gcuauaaccagcuaugaga

SEQ ID NO: 236219 - RNA, 19 nt, Homo sapiens
  misc_RNA (1)...(19): siRNA sense strand
acgagacucugaagcauga

SEQ ID NO: 236220 - RNA, 19 nt, Homo sapiens
  misc_RNA (1)...(19): siRNA sense strand
ugagaaaucagaugguguu

SEQ ID NO: 236221 - RNA, 19 nt, Homo sapiens
  misc_RNA (1)...(19): siRNA sense strand
ugagaaaccaccacaguag

SEQ ID NO: 236222 - RNA, 19 nt, Homo sapiens
  misc_RNA (1)...(19): siRNA sense strand
ccaggagacuuacgagacu

SEQ ID NO: 236223 - RNA, 19 nt, Homo sapiens
  misc_RNA (1)...(19): siRNA sense strand
ccucagcucugcuauaucc

SEQ ID NO: 236224 - RNA, 19 nt, Homo sapiens
  misc_RNA (1)...(19): siRNA sense strand
agaaaucagaugguguuua

SEQ ID NO: 236225 - RNA, 19 nt, Homo sapiens
  misc_RNA (1)...(19): siRNA sense strand
gucuugcucuuacuccuuu

SEQ ID NO: 236226 - RNA, 19 nt, Homo sapiens
  misc_RNA (1)...(19): siRNA sense strand
uauaaccagcuaugagaaa

SEQ ID NO: 236227 - RNA, 19 nt, Homo sapiens
  misc_RNA (1)...(19): siRNA sense strand
ggaaccaggagacuuacga

SEQ ID NO: 236228 - RNA, 19 nt, Homo sapiens
  misc_RNA (1)...(19): siRNA sense strand
gugcgaaaggcagcuauaa

SEQ ID NO: 236229 - RNA, 19 nt, Homo sapiens
  misc_RNA (1)...(19): siRNA sense strand
agccucagcucugcuauau

SEQ ID NO: 236230 - RNA, 19 nt, Homo sapiens
  misc_RNA (1)...(19): siRNA sense strand
aaccagcuaugagaaauca

SEQ ID NO: 236231 - RNA, 19 nt, Homo sapiens
  misc_RNA (1)...(19): siRNA sense strand
gaagauccaagugcgaaag

SEQ ID NO: 236232 - RNA, 19 nt, Homo sapiens
  misc_RNA (1)...(19): siRNA sense strand
caugagaaaccaccacagu

SEQ ID NO: 236233 - RNA, 19 nt, Homo sapiens
  misc_RNA (1)...(19): siRNA sense strand
gccauccuguuucuguaug

SEQ ID NO: 236234 - RNA, 19 nt, Homo sapiens
  misc_RNA (1)...(19): siRNA sense strand
ccucuacugucgacugaag

SEQ ID NO: 236235 - RNA, 19 nt, Homo sapiens
  misc_RNA (1)...(19): siRNA sense strand
gagaaaucagaugguguuu

SEQ ID NO: 236236 - RNA, 19 nt, Homo sapiens
  misc_RNA (1)...(19): siRNA sense strand
gcgaaaggcagcuauaacc

SEQ ID NO: 236237 - RNA, 19 nt, Homo sapiens
  misc_RNA (1)...(19): siRNA sense strand
ccagcuaugagaaaucaga

SEQ ID NO: 236238 - RNA, 19 nt, Homo sapiens
  misc_RNA (1)...(19): siRNA sense strand
auaaccagcuaugagaaau

SEQ ID NO: 236239 - RNA, 19 nt, Homo sapiens
  misc_RNA (1)...(19): siRNA sense strand
cgaaaggcagcuauaacca

SEQ ID NO: 236240 - RNA, 19 nt, Homo sapiens
  misc_RNA (1)...(19): siRNA sense strand
agacuuacgagacucugaa

SEQ ID NO: 236241 - RNA, 19 nt, Homo sapiens
  misc_RNA (1)...(19): siRNA sense strand
gagacuuacgagacucuga

SEQ ID NO: 236242 - RNA, 19 nt, Homo sapiens
  misc_RNA (1)...(19): siRNA sense strand
uuacgagacucugaagcau

SEQ ID NO: 236243 - RNA, 19 nt, Homo sapiens
  misc_RNA (1)...(19): siRNA sense strand
augagaaaccaccacagua

SEQ ID NO: 236244 - RNA, 19 nt, Homo sapiens
  misc_RNA (1)...(19): siRNA sense strand
ccacccugcugcucucuuu

SEQ ID NO: 236245 - RNA, 19 nt, Homo sapiens
  misc_RNA (1)...(19): siRNA sense strand
ggauggcucuguggacuuc

SEQ ID NO: 236246 - RNA, 19 nt, Homo sapiens
  misc_RNA (1)...(19): siRNA sense strand
guguagaccugguggacuu

SEQ ID NO: 236247 - RNA, 19 nt, Homo sapiens
  misc_RNA (1)...(19): siRNA sense strand
ccagcgagcuccguguaga

SEQ ID NO: 236248 - RNA, 19 nt, Homo sapiens
  misc_RNA (1)...(19): siRNA sense strand
acuaccaguuugcuaagua

SEQ ID NO: 236249 - RNA, 19 nt, Homo sapiens
  misc_RNA (1)...(19): siRNA sense strand
ccaguuugcuaaguacaga

SEQ ID NO: 236250 - RNA, 19 nt, Homo sapiens
  misc_RNA (1)...(19): siRNA sense strand
ccgacgaggcggagaagua

SEQ ID NO: 236251 - RNA, 19 nt, Homo sapiens
  misc_RNA (1)...(19): siRNA sense strand
gcuaaguacagaucauuca

SEQ ID NO: 236252 - RNA, 19 nt, Homo sapiens
  misc_RNA (1)...(19): siRNA sense strand
ggacuuugaggacaacuac

SEQ ID NO: 236253 - RNA, 19 nt, Homo sapiens
  misc_RNA (1)...(19): siRNA sense strand
ggacugggccacguacaag

SEQ ID NO: 236254 - RNA, 19 nt, Homo sapiens
  misc_RNA (1)...(19): siRNA sense strand
ugacugugcucugugacau

SEQ ID NO: 236255 - RNA, 19 nt, Homo sapiens
  misc_RNA (1)...(19): siRNA sense strand
gggacugggccacguacaa

SEQ ID NO: 236256 - RNA, 19 nt, Homo sapiens
  misc_RNA (1)...(19): siRNA sense strand
uagaccugguggacuuuga

SEQ ID NO: 236257 - RNA, 19 nt, Homo sapiens
  misc_RNA (1)...(19): siRNA sense strand
gcggcuggcacaccaucua

SEQ ID NO: 236258 - RNA, 19 nt, Homo sapiens
  misc_RNA (1)...(19): siRNA sense strand
cuaaguacagaucauucaa

SEQ ID NO: 236259 - RNA, 19 nt, Homo sapiens
  misc_RNA (1)...(19): siRNA sense strand
uaaguacagaucauucaag

SEQ ID NO: 236260 - RNA, 19 nt, Homo sapiens
  misc_RNA (1)...(19): siRNA sense strand
ccacccugcugcucucuuu

SEQ ID NO: 236261 - RNA, 19 nt, Homo sapiens
  misc_RNA (1)...(19): siRNA sense strand
ggauggcucuguggacuuc

SEQ ID NO: 236262 - RNA, 19 nt, Homo sapiens
  misc_RNA (1)...(19): siRNA sense strand
guguagaccugguggacuu

SEQ ID NO: 236263 - RNA, 19 nt, Homo sapiens
  misc_RNA (1)...(19): siRNA sense strand
ccagcgagcuccguguaga

SEQ ID NO: 236264 - RNA, 19 nt, Homo sapiens
  misc_RNA (1)...(19): siRNA sense strand
acuaccaguuugcuaagua

SEQ ID NO: 236265 - RNA, 19 nt, Homo sapiens
  misc_RNA (1)...(19): siRNA sense strand
ccaguuugcuaaguacaga

SEQ ID NO: 236266 - RNA, 19 nt, Homo sapiens
  misc_RNA (1)...(19): siRNA sense strand
ccgacgaggcggagaagua

SEQ ID NO: 236267 - RNA, 19 nt, Homo sapiens
  misc_RNA (1)...(19): siRNA sense strand
gcuaaguacagaucauuca

SEQ ID NO: 236268 - RNA, 19 nt, Homo sapiens
  misc_RNA (1)...(19): siRNA sense strand
ggacuuugaggacaacuac

SEQ ID NO: 236269 - RNA, 19 nt, Homo sapiens
  misc_RNA (1)...(19): siRNA sense strand
ggacugggccacguacaag

SEQ ID NO: 236270 - RNA, 19 nt, Homo sapiens
  misc_RNA (1)...(19): siRNA sense strand
ugacugugcucugugacau

SEQ ID NO: 236271 - RNA, 19 nt, Homo sapiens
  misc_RNA (1)...(19): siRNA sense strand
gggacugggccacguacaa

SEQ ID NO: 236272 - RNA, 19 nt, Homo sapiens
  misc_RNA (1)...(19): siRNA sense strand
uagaccugguggacuuuga

SEQ ID NO: 236273 - RNA, 19 nt, Homo sapiens
  misc_RNA (1)...(19): siRNA sense strand
gcggcuggcacaccaucua

SEQ ID NO: 236274 - RNA, 19 nt, Homo sapiens
  misc_RNA (1)...(19): siRNA sense strand
cuaaguacagaucauucaa

SEQ ID NO: 236275 - RNA, 19 nt, Homo sapiens
  misc_RNA (1)...(19): siRNA sense strand
uaaguacagaucauucaag

SEQ ID NO: 236276 - RNA, 19 nt, Homo sapiens
  misc_RNA (1)...(19): siRNA sense strand
ccacccugcugcucucuuu

SEQ ID NO: 236277 - RNA, 19 nt, Homo sapiens
  misc_RNA (1)...(19): siRNA sense strand
ugacugugcucugugacau

SEQ ID NO: 236278 - RNA, 19 nt, Homo sapiens
  misc_RNA (1)...(19): siRNA sense strand
gcggcuggcacaccaucua

SEQ ID NO: 236279 - RNA, 19 nt, Homo sapiens
  misc_RNA (1)...(19): siRNA sense strand
ccacccugcugcucucuuu

SEQ ID NO: 236280 - RNA, 19 nt, Homo sapiens
  misc_RNA (1)...(19): siRNA sense strand
gaaaggaggugaaacaucu

SEQ ID NO: 236281 - RNA, 19 nt, Homo sapiens
  misc_RNA (1)...(19): siRNA sense strand
gaaauaguguugaugaguu

SEQ ID NO: 236282 - RNA, 19 nt, Homo sapiens
  misc_RNA (1)...(19): siRNA sense strand
caaagaaugugaggaaauu

SEQ ID NO: 236283 - RNA, 19 nt, Homo sapiens
  misc_RNA (1)...(19): siRNA sense strand
gaaaggccaaucagaaaua

SEQ ID NO: 236284 - RNA, 19 nt, Homo sapiens
  misc_RNA (1)...(19): siRNA sense strand
gaaaggagacaaaguaaag

SEQ ID NO: 236285 - RNA, 19 nt, Homo sapiens
  misc_RNA (1)...(19): siRNA sense strand
guacauguauuugcugaaa

SEQ ID NO: 236286 - RNA, 19 nt, Homo sapiens
  misc_RNA (1)...(19): siRNA sense strand
acacagaugggaagaauua

SEQ ID NO: 236287 - RNA, 19 nt, Homo sapiens
  misc_RNA (1)...(19): siRNA sense strand
caaagcagcugccacucaa

SEQ ID NO: 236288 - RNA, 19 nt, Homo sapiens
  misc_RNA (1)...(19): siRNA sense strand
gguggauggugguauaaua

SEQ ID NO: 236289 - RNA, 19 nt, Homo sapiens
  misc_RNA (1)...(19): siRNA sense strand
guuagaaucugaugucuca

SEQ ID NO: 236290 - RNA, 19 nt, Homo sapiens
  misc_RNA (1)...(19): siRNA sense strand
caacacagaugggaagaau

SEQ ID NO: 236291 - RNA, 19 nt, Homo sapiens
  misc_RNA (1)...(19): siRNA sense strand
agaaugaagccaacaaaua

SEQ ID NO: 236292 - RNA, 19 nt, Homo sapiens
  misc_RNA (1)...(19): siRNA sense strand
cagcucaaauggaauauug

SEQ ID NO: 236293 - RNA, 19 nt, Homo sapiens
  misc_RNA (1)...(19): siRNA sense strand
gaaugaagccaacaaauac

SEQ ID NO: 236294 - RNA, 19 nt, Homo sapiens
  misc_RNA (1)...(19): siRNA sense strand
aauauuggcuuggaaauga

SEQ ID NO: 236295 - RNA, 19 nt, Homo sapiens
  misc_RNA (1)...(19): siRNA sense strand
ccacagaacuuuugauaga

SEQ ID NO: 236296 - RNA, 19 nt, Homo sapiens
  misc_RNA (1)...(19): siRNA sense strand
ggugguggauggugguaua

SEQ ID NO: 236297 - RNA, 19 nt, Homo sapiens
  misc_RNA (1)...(19): siRNA sense strand
gaccuccucuucuuccuuu

SEQ ID NO: 236298 - RNA, 19 nt, Homo sapiens
  misc_RNA (1)...(19): siRNA sense strand
gugaggaaauuaucaggaa

SEQ ID NO: 236299 - RNA, 19 nt, Homo sapiens
  misc_RNA (1)...(19): siRNA sense strand
gauggacagugauucagaa

SEQ ID NO: 236300 - RNA, 19 nt, Homo sapiens
  misc_RNA (1)...(19): siRNA sense strand
gguguaguauggaugaauu

SEQ ID NO: 236301 - RNA, 19 nt, Homo sapiens
  misc_RNA (1)...(19): siRNA sense strand
ggaaaggagacaaaguaaa

SEQ ID NO: 236302 - RNA, 19 nt, Homo sapiens
  misc_RNA (1)...(19): siRNA sense strand
caaaguaaaggcucacuau

SEQ ID NO: 236303 - RNA, 19 nt, Homo sapiens
  misc_RNA (1)...(19): siRNA sense strand
ugucucagcucaaauggaa

SEQ ID NO: 236304 - RNA, 19 nt, Homo sapiens
  misc_RNA (1)...(19): siRNA sense strand
gcaaagaaugugaggaaau

SEQ ID NO: 236305 - RNA, 19 nt, Homo sapiens
  misc_RNA (1)...(19): siRNA sense strand
gaagaugaguaugaagauc

SEQ ID NO: 236306 - RNA, 19 nt, Homo sapiens
  misc_RNA (1)...(19): siRNA sense strand
cacagaugaugguguagua

SEQ ID NO: 236307 - RNA, 19 nt, Homo sapiens
  misc_RNA (1)...(19): siRNA sense strand
uggcacagaugauggugua

SEQ ID NO: 236308 - RNA, 19 nt, Homo sapiens
  misc_RNA (1)...(19): siRNA sense strand
ggaaaggccaaucagaaau

SEQ ID NO: 236309 - RNA, 19 nt, Homo sapiens
  misc_RNA (1)...(19): siRNA sense strand
ugucaaaccguauagagua

SEQ ID NO: 236310 - RNA, 19 nt, Homo sapiens
  misc_RNA (1)...(19): siRNA sense strand
uaacaucagaucccagaaa

SEQ ID NO: 236311 - RNA, 19 nt, Homo sapiens
  misc_RNA (1)...(19): siRNA sense strand
gacaaugacggcugguuaa

SEQ ID NO: 236312 - RNA, 19 nt, Homo sapiens
  misc_RNA (1)...(19): siRNA sense strand
aguaaaggcucacuaugga

SEQ ID NO: 236313 - RNA, 19 nt, Homo sapiens
  misc_RNA (1)...(19): siRNA sense strand
ggacuggaaaggagacaaa

SEQ ID NO: 236314 - RNA, 19 nt, Homo sapiens
  misc_RNA (1)...(19): siRNA sense strand
caacaggaaaggccaauca

SEQ ID NO: 236315 - RNA, 19 nt, Homo sapiens
  misc_RNA (1)...(19): siRNA sense strand
ucagaaauaguguugauga

SEQ ID NO: 236316 - RNA, 19 nt, Homo sapiens
  misc_RNA (1)...(19): siRNA sense strand
ggaaaagcaccaauuauau

SEQ ID NO: 236317 - RNA, 19 nt, Homo sapiens
  misc_RNA (1)...(19): siRNA sense strand
uaguauggaugaauuggaa

SEQ ID NO: 236318 - RNA, 19 nt, Homo sapiens
  misc_RNA (1)...(19): siRNA sense strand
uagaugagacugugaauag

SEQ ID NO: 236319 - RNA, 19 nt, Homo sapiens
  misc_RNA (1)...(19): siRNA sense strand
caggaaaggccaaucagaa

SEQ ID NO: 236320 - RNA, 19 nt, Homo sapiens
  misc_RNA (1)...(19): siRNA sense strand
agacaaugacggcugguua

SEQ ID NO: 236321 - RNA, 19 nt, Homo sapiens
  misc_RNA (1)...(19): siRNA sense strand
agacgguaguguugacuuu

SEQ ID NO: 236322 - RNA, 19 nt, Homo sapiens
  misc_RNA (1)...(19): siRNA sense strand
gaauuacuguggccuacca

SEQ ID NO: 236323 - RNA, 19 nt, Homo sapiens
  misc_RNA (1)...(19): siRNA sense strand
ggaaaggaggugaaacauc

SEQ ID NO: 236324 - RNA, 19 nt, Homo sapiens
  misc_RNA (1)...(19): siRNA sense strand
caaagcauggcacagauga

SEQ ID NO: 236325 - RNA, 19 nt, Homo sapiens
  misc_RNA (1)...(19): siRNA sense strand
gaauauuggcuuggaaaug

SEQ ID NO: 236326 - RNA, 19 nt, Homo sapiens
  misc_RNA (1)...(19): siRNA sense strand
ggaggugaaacaucugaaa

SEQ ID NO: 236327 - RNA, 19 nt, Homo sapiens
  misc_RNA (1)...(19): siRNA sense strand
gagcuuccacaaacuuaaa

SEQ ID NO: 236328 - RNA, 19 nt, Homo sapiens
  misc_RNA (1)...(19): siRNA sense strand
ugaaagaccuguggcaaaa

SEQ ID NO: 236329 - RNA, 19 nt, Homo sapiens
  misc_RNA (1)...(19): siRNA sense strand
acauguauuugcugaaaga

SEQ ID NO: 236330 - RNA, 19 nt, Homo sapiens
  misc_RNA (1)...(19): siRNA sense strand
ggauggugguauaauagau

SEQ ID NO: 236331 - RNA, 19 nt, Homo sapiens
  misc_RNA (1)...(19): siRNA sense strand
ggagaaaacaggaccauga

SEQ ID NO: 236332 - RNA, 19 nt, Homo sapiens
  misc_RNA (1)...(19): siRNA sense strand
uugcuacuauuguguguuu

SEQ ID NO: 236333 - RNA, 19 nt, Homo sapiens
  misc_RNA (1)...(19): siRNA sense strand
aauggaggauggacaguga

SEQ ID NO: 236334 - RNA, 19 nt, Homo sapiens
  misc_RNA (1)...(19): siRNA sense strand
ugaggaaauuaucaggaaa

SEQ ID NO: 236335 - RNA, 19 nt, Homo sapiens
  misc_RNA (1)...(19): siRNA sense strand
uguggugucuggcaaagaa

SEQ ID NO: 236336 - RNA, 19 nt, Homo sapiens
  misc_RNA (1)...(19): siRNA sense strand
caucugaaauguaucucau

SEQ ID NO: 236337 - RNA, 19 nt, Homo sapiens
  misc_RNA (1)...(19): siRNA sense strand
ggcaaagaaugugaggaaa

SEQ ID NO: 236338 - RNA, 19 nt, Homo sapiens
  misc_RNA (1)...(19): siRNA sense strand
ccaaucagaaauaguguug

SEQ ID NO: 236339 - RNA, 19 nt, Homo sapiens
  misc_RNA (1)...(19): siRNA sense strand
ugaggaggguuucuucagu

SEQ ID NO: 236340 - RNA, 19 nt, Homo sapiens
  misc_RNA (1)...(19): siRNA sense strand
gcaaagcauggcacagaug

SEQ ID NO: 236341 - RNA, 19 nt, Homo sapiens
  misc_RNA (1)...(19): siRNA sense strand
ucccagaccuccucuucuu

SEQ ID NO: 236342 - RNA, 19 nt, Homo sapiens
  misc_RNA (1)...(19): siRNA sense strand
gauaaaauuagccagcuua

SEQ ID NO: 236343 - RNA, 19 nt, Homo sapiens
  misc_RNA (1)...(19): siRNA sense strand
gaggauggacagugauuca

SEQ ID NO: 236344 - RNA, 19 nt, Homo sapiens
  misc_RNA (1)...(19): siRNA sense strand
gucaaaccguauagaguau

SEQ ID NO: 236345 - RNA, 19 nt, Homo sapiens
  misc_RNA (1)...(19): siRNA sense strand
gaaugugaggaaauuauca

SEQ ID NO: 236346 - RNA, 19 nt, Homo sapiens
  misc_RNA (1)...(19): siRNA sense strand
ccaaagcagcugccacuca

SEQ ID NO: 236347 - RNA, 19 nt, Homo sapiens
  misc_RNA (1)...(19): siRNA sense strand
ggcaaagcauggcacagau

SEQ ID NO: 236348 - RNA, 19 nt, Homo sapiens
  misc_RNA (1)...(19): siRNA sense strand
cuggaaaggagacaaagua

SEQ ID NO: 236349 - RNA, 19 nt, Homo sapiens
  misc_RNA (1)...(19): siRNA sense strand
caagaggcuuugcuacaac

SEQ ID NO: 236350 - RNA, 19 nt, Homo sapiens
  misc_RNA (1)...(19): siRNA sense strand
ggauggacagugauucaga

SEQ ID NO: 236351 - RNA, 19 nt, Homo sapiens
  misc_RNA (1)...(19): siRNA sense strand
gaugguguaguauggauga

SEQ ID NO: 236352 - RNA, 19 nt, Homo sapiens
  misc_RNA (1)...(19): siRNA sense strand
agaaauggaggacuggaaa

SEQ ID NO: 236353 - RNA, 19 nt, Homo sapiens
  misc_RNA (1)...(19): siRNA sense strand
uggaaaagcaccaauuaua

SEQ ID NO: 236354 - RNA, 19 nt, Homo sapiens
  misc_RNA (1)...(19): siRNA sense strand
ggugaauauuggcuuggaa

SEQ ID NO: 236355 - RNA, 19 nt, Homo sapiens
  misc_RNA (1)...(19): siRNA sense strand
uagaguauacugugacaug

SEQ ID NO: 236356 - RNA, 19 nt, Homo sapiens
  misc_RNA (1)...(19): siRNA sense strand
gaggugaaacaucugaaau

SEQ ID NO: 236357 - RNA, 19 nt, Homo sapiens
  misc_RNA (1)...(19): siRNA sense strand
gagacugugaauagcaaua

SEQ ID NO: 236358 - RNA, 19 nt, Homo sapiens
  misc_RNA (1)...(19): siRNA sense strand
ucucagcucaaauggaaua

SEQ ID NO: 236359 - RNA, 19 nt, Homo sapiens
  misc_RNA (1)...(19): siRNA sense strand
aaugacggcugguuaacau

SEQ ID NO: 236360 - RNA, 19 nt, Homo sapiens
  misc_RNA (1)...(19): siRNA sense strand
caggaaaggaggugaaaca

SEQ ID NO: 236361 - RNA, 19 nt, Homo sapiens
  misc_RNA (1)...(19): siRNA sense strand
guacuccucagaacuggaa

SEQ ID NO: 236362 - RNA, 19 nt, Homo sapiens
  misc_RNA (1)...(19): siRNA sense strand
gaggauucacuguacagaa

SEQ ID NO: 236363 - RNA, 19 nt, Homo sapiens
  misc_RNA (1)...(19): siRNA sense strand
agaguauacugugacauga

SEQ ID NO: 236364 - RNA, 19 nt, Homo sapiens
  misc_RNA (1)...(19): siRNA sense strand
aggaaaggccaaucagaaa

SEQ ID NO: 236365 - RNA, 19 nt, Homo sapiens
  misc_RNA (1)...(19): siRNA sense strand
ggagcuuccacaaacuuaa

SEQ ID NO: 236366 - RNA, 19 nt, Homo sapiens
  misc_RNA (1)...(19): siRNA sense strand
uggcaaagaaugugaggaa

SEQ ID NO: 236367 - RNA, 19 nt, Homo sapiens
  misc_RNA (1)...(19): siRNA sense strand
uauggaggauucacuguac

SEQ ID NO: 236368 - RNA, 19 nt, Homo sapiens
  misc_RNA (1)...(19): siRNA sense strand
gcacguaugacagagacaa

SEQ ID NO: 236369 - RNA, 19 nt, Homo sapiens
  misc_RNA (1)...(19): siRNA sense strand
ggaccaugaccauucacaa

SEQ ID NO: 236370 - RNA, 19 nt, Homo sapiens
  misc_RNA (1)...(19): siRNA sense strand
acaggaccaugaccauuca

SEQ ID NO: 236371 - RNA, 19 nt, Homo sapiens
  misc_RNA (1)...(19): siRNA sense strand
gaaaaccugagaagcaaaa

SEQ ID NO: 236372 - RNA, 19 nt, Homo sapiens
  misc_RNA (1)...(19): siRNA sense strand
gccaacaaauaccagaucu

SEQ ID NO: 236373 - RNA, 19 nt, Homo sapiens
  misc_RNA (1)...(19): siRNA sense strand
gaaauggaggacuggaaag

SEQ ID NO: 236374 - RNA, 19 nt, Homo sapiens
  misc_RNA (1)...(19): siRNA sense strand
gaaagaaaagccccugaug

SEQ ID NO: 236375 - RNA, 19 nt, Homo sapiens
  misc_RNA (1)...(19): siRNA sense strand
gaguauacugugacaugaa

SEQ ID NO: 236376 - RNA, 19 nt, Homo sapiens
  misc_RNA (1)...(19): siRNA sense strand
gauggugguauaauagaug

SEQ ID NO: 236377 - RNA, 19 nt, Homo sapiens
  misc_RNA (1)...(19): siRNA sense strand
cagaaauaguguugaugag

SEQ ID NO: 236378 - RNA, 19 nt, Homo sapiens
  misc_RNA (1)...(19): siRNA sense strand
uggaaaggagacaaaguaa

SEQ ID NO: 236379 - RNA, 19 nt, Homo sapiens
  misc_RNA (1)...(19): siRNA sense strand
gugaauauuggcuuggaaa

SEQ ID NO: 236380 - RNA, 19 nt, Homo sapiens
  misc_RNA (1)...(19): siRNA sense strand
ggagauaacaucaguagaa

SEQ ID NO: 236381 - RNA, 19 nt, Homo sapiens
  misc_RNA (1)...(19): siRNA sense strand
aaacaccucugcucacuuu

SEQ ID NO: 236382 - RNA, 19 nt, Homo sapiens
  misc_RNA (1)...(19): siRNA sense strand
gagauaacaucaguagaaa

SEQ ID NO: 236383 - RNA, 19 nt, Homo sapiens
  misc_RNA (1)...(19): siRNA sense strand
ggaaauggauacugacaca

SEQ ID NO: 236384 - RNA, 19 nt, Homo sapiens
  misc_RNA (1)...(19): siRNA sense strand
ucauuuaacuggcagcaua

SEQ ID NO: 236385 - RNA, 19 nt, Homo sapiens
  misc_RNA (1)...(19): siRNA sense strand
caauaccuaugcaucauuu

SEQ ID NO: 236386 - RNA, 19 nt, Homo sapiens
  misc_RNA (1)...(19): siRNA sense strand
caaguacuuucucaagauu

SEQ ID NO: 236387 - RNA, 19 nt, Homo sapiens
  misc_RNA (1)...(19): siRNA sense strand
gauaacaucaguagaaauc

SEQ ID NO: 236388 - RNA, 19 nt, Homo sapiens
  misc_RNA (1)...(19): siRNA sense strand
ccauuaacagcaacuauua

SEQ ID NO: 236389 - RNA, 19 nt, Homo sapiens
  misc_RNA (1)...(19): siRNA sense strand
ccaaguacuuucucaagau

SEQ ID NO: 236390 - RNA, 19 nt, Homo sapiens
  misc_RNA (1)...(19): siRNA sense strand
ggagauguccgcuggagaa

SEQ ID NO: 236391 - RNA, 19 nt, Homo sapiens
  misc_RNA (1)...(19): siRNA sense strand
gagcuacaaucaccuucaa

SEQ ID NO: 236392 - RNA, 19 nt, Homo sapiens
  misc_RNA (1)...(19): siRNA sense strand
ucaaagccauuaacagcaa

SEQ ID NO: 236393 - RNA, 19 nt, Homo sapiens
  misc_RNA (1)...(19): siRNA sense strand
gaaggcaugugcggagcua

SEQ ID NO: 236394 - RNA, 19 nt, Homo sapiens
  misc_RNA (1)...(19): siRNA sense strand
caauggugguacacucaua

SEQ ID NO: 236395 - RNA, 19 nt, Homo sapiens
  misc_RNA (1)...(19): siRNA sense strand
gaaacucuauggcucaaaa

SEQ ID NO: 236396 - RNA, 19 nt, Homo sapiens
  misc_RNA (1)...(19): siRNA sense strand
guagaaaucggaguuguug

SEQ ID NO: 236397 - RNA, 19 nt, Homo sapiens
  misc_RNA (1)...(19): siRNA sense strand
guacagcauccuggagaua

SEQ ID NO: 236398 - RNA, 19 nt, Homo sapiens
  misc_RNA (1)...(19): siRNA sense strand
ggaccaagaaggagaacug

SEQ ID NO: 236399 - RNA, 19 nt, Homo sapiens
  misc_RNA (1)...(19): siRNA sense strand
gccauuaacagcaacuauu

SEQ ID NO: 236400 - RNA, 19 nt, Homo sapiens
  misc_RNA (1)...(19): siRNA sense strand
cauaaugggaggcaaaugu

SEQ ID NO: 236401 - RNA, 19 nt, Homo sapiens
  misc_RNA (1)...(19): siRNA sense strand
gauguccgcuggagaaagc

SEQ ID NO: 236402 - RNA, 19 nt, Homo sapiens
  misc_RNA (1)...(19): siRNA sense strand
gaaaauggauacaauaccu

SEQ ID NO: 236403 - RNA, 19 nt, Homo sapiens
  misc_RNA (1)...(19): siRNA sense strand
aaggagaacugcccguaca

SEQ ID NO: 236404 - RNA, 19 nt, Homo sapiens
  misc_RNA (1)...(19): siRNA sense strand
gggaaacucuauggcucaa

SEQ ID NO: 236405 - RNA, 19 nt, Homo sapiens
  misc_RNA (1)...(19): siRNA sense strand
gaaggagaggauagaggaa

SEQ ID NO: 236406 - RNA, 19 nt, Homo sapiens
  misc_RNA (1)...(19): siRNA sense strand
ggacagaaaacacgaagga

SEQ ID NO: 236407 - RNA, 19 nt, Homo sapiens
  misc_RNA (1)...(19): siRNA sense strand
gaggaaaauggauacaaua

SEQ ID NO: 236408 - RNA, 19 nt, Homo sapiens
  misc_RNA (1)...(19): siRNA sense strand
cggaguuguugccgucaaa

SEQ ID NO: 236409 - RNA, 19 nt, Homo sapiens
  misc_RNA (1)...(19): siRNA sense strand
auaaugggaggcaaaugua

SEQ ID NO: 236410 - RNA, 19 nt, Homo sapiens
  misc_RNA (1)...(19): siRNA sense strand
accaaguacuuucucaaga

SEQ ID NO: 236411 - RNA, 19 nt, Homo sapiens
  misc_RNA (1)...(19): siRNA sense strand
ggaaaaggagcuccaagga

SEQ ID NO: 236412 - RNA, 19 nt, Homo sapiens
  misc_RNA (1)...(19): siRNA sense strand
cagcauaaugggaggcaaa

SEQ ID NO: 236413 - RNA, 19 nt, Homo sapiens
  misc_RNA (1)...(19): siRNA sense strand
ggauagaggaaaauggaua

SEQ ID NO: 236414 - RNA, 19 nt, Homo sapiens
  misc_RNA (1)...(19): siRNA sense strand
uauucucuuucaccaagua

SEQ ID NO: 236415 - RNA, 19 nt, Homo sapiens
  misc_RNA (1)...(19): siRNA sense strand
cagaaaacacgaaggaaaa

SEQ ID NO: 236416 - RNA, 19 nt, Homo sapiens
  misc_RNA (1)...(19): siRNA sense strand
auacaauaccuaugcauca

SEQ ID NO: 236417 - RNA, 19 nt, Homo sapiens
  misc_RNA (1)...(19): siRNA sense strand
acuuagccaugaacaagaa

SEQ ID NO: 236418 - RNA, 19 nt, Homo sapiens
  misc_RNA (1)...(19): siRNA sense strand
ggagcuacaaucaccuuca

SEQ ID NO: 236419 - RNA, 19 nt, Homo sapiens
  misc_RNA (1)...(19): siRNA sense strand
caccucugcucacuuucuu

SEQ ID NO: 236420 - RNA, 19 nt, Homo sapiens
  misc_RNA (1)...(19): siRNA sense strand
caguagaaaucggaguugu

SEQ ID NO: 236421 - RNA, 19 nt, Homo sapiens
  misc_RNA (1)...(19): siRNA sense strand
ccaaggagaggacagaaaa

SEQ ID NO: 236422 - RNA, 19 nt, Homo sapiens
  misc_RNA (1)...(19): siRNA sense strand
uacaauaccuaugcaucau

SEQ ID NO: 236423 - RNA, 19 nt, Homo sapiens
  misc_RNA (1)...(19): siRNA sense strand
acuauuacuuagccaugaa

SEQ ID NO: 236424 - RNA, 19 nt, Homo sapiens
  misc_RNA (1)...(19): siRNA sense strand
uacagcauccuggagauaa

SEQ ID NO: 236425 - RNA, 19 nt, Homo sapiens
  misc_RNA (1)...(19): siRNA sense strand
aacagcaacuauuacuuag

SEQ ID NO: 236426 - RNA, 19 nt, Homo sapiens
  misc_RNA (1)...(19): siRNA sense strand
gagauguccgcuggagaaa

SEQ ID NO: 236427 - RNA, 19 nt, Homo sapiens
  misc_RNA (1)...(19): siRNA sense strand
cauuuaacuggcagcauaa

SEQ ID NO: 236428 - RNA, 19 nt, Homo sapiens
  misc_RNA (1)...(19): siRNA sense strand
caccagaggccaccaacuc

SEQ ID NO: 236429 - RNA, 19 nt, Homo sapiens
  misc_RNA (1)...(19): siRNA sense strand
ucugcucacuuucuuccaa

SEQ ID NO: 236430 - RNA, 19 nt, Homo sapiens
  misc_RNA (1)...(19): siRNA sense strand
uaaugggaggcaaauguau

SEQ ID NO: 236431 - RNA, 19 nt, Homo sapiens
  misc_RNA (1)...(19): siRNA sense strand
acauugugccucagccuuu

SEQ ID NO: 236432 - RNA, 19 nt, Homo sapiens
  misc_RNA (1)...(19): siRNA sense strand
acaauaccuaugcaucauu

SEQ ID NO: 236433 - RNA, 19 nt, Homo sapiens
  misc_RNA (1)...(19): siRNA sense strand
uuacuuagccaugaacaag

SEQ ID NO: 236434 - RNA, 19 nt, Homo sapiens
  misc_RNA (1)...(19): siRNA sense strand
gaggauagaggaaaaugga

SEQ ID NO: 236435 - RNA, 19 nt, Homo sapiens
  misc_RNA (1)...(19): siRNA sense strand
uuaacuggcagcauaaugg

SEQ ID NO: 236436 - RNA, 19 nt, Homo sapiens
  misc_RNA (1)...(19): siRNA sense strand
agaggaaaauggauacaau

SEQ ID NO: 236437 - RNA, 19 nt, Homo sapiens
  misc_RNA (1)...(19): siRNA sense strand
ggaaaccgaguuaagaaga

SEQ ID NO: 236438 - RNA, 19 nt, Homo sapiens
  misc_RNA (1)...(19): siRNA sense strand
gcgccaagcugggucacua

SEQ ID NO: 236439 - RNA, 19 nt, Homo sapiens
  misc_RNA (1)...(19): siRNA sense strand
caagcugggucacuacaug

SEQ ID NO: 236440 - RNA, 19 nt, Homo sapiens
  misc_RNA (1)...(19): siRNA sense strand
gagugugucuuugagaauu

SEQ ID NO: 236441 - RNA, 19 nt, Homo sapiens
  misc_RNA (1)...(19): siRNA sense strand
ccaagucccuuugccagaa

SEQ ID NO: 236442 - RNA, 19 nt, Homo sapiens
  misc_RNA (1)...(19): siRNA sense strand
gaagggaaaccgaguuaag

SEQ ID NO: 236443 - RNA, 19 nt, Homo sapiens
  misc_RNA (1)...(19): siRNA sense strand
ucaaaggcaucgucaccaa

SEQ ID NO: 236444 - RNA, 19 nt, Homo sapiens
  misc_RNA (1)...(19): siRNA sense strand
guacgccucugcucucuac

SEQ ID NO: 236445 - RNA, 19 nt, Homo sapiens
  misc_RNA (1)...(19): siRNA sense strand
gaaaccgaguuaagaagac

SEQ ID NO: 236446 - RNA, 19 nt, Homo sapiens
  misc_RNA (1)...(19): siRNA sense strand
acagcugagugucgcuuua

SEQ ID NO: 236447 - RNA, 19 nt, Homo sapiens
  misc_RNA (1)...(19): siRNA sense strand
caaaggcaucgucaccaaa

SEQ ID NO: 236448 - RNA, 19 nt, Homo sapiens
  misc_RNA (1)...(19): siRNA sense strand
uaaggagugugucuuugag

SEQ ID NO: 236449 - RNA, 19 nt, Homo sapiens
  misc_RNA (1)...(19): siRNA sense strand
gaauuacuacguccuguac

SEQ ID NO: 236450 - RNA, 19 nt, Homo sapiens
  misc_RNA (1)...(19): siRNA sense strand
agugugucuuugagaauua

SEQ ID NO: 236451 - RNA, 19 nt, Homo sapiens
  misc_RNA (1)...(19): siRNA sense strand
uuaaggagugugucuuuga

SEQ ID NO: 236452 - RNA, 19 nt, Homo sapiens
  misc_RNA (1)...(19): siRNA sense strand
gcauuucacagcugagugu

SEQ ID NO: 236453 - RNA, 19 nt, Homo sapiens
  misc_RNA (1)...(19): siRNA sense strand
ggagugugucuuugagaau

SEQ ID NO: 236454 - RNA, 19 nt, Homo sapiens
  misc_RNA (1)...(19): siRNA sense strand
aggagugugucuuugagaa

SEQ ID NO: 236455 - RNA, 19 nt, Homo sapiens
  misc_RNA (1)...(19): siRNA sense strand
gccaggucaugaagggaaa

SEQ ID NO: 236456 - RNA, 19 nt, Homo sapiens
  misc_RNA (1)...(19): siRNA sense strand
caucgucaccaaacuguuc

SEQ ID NO: 236457 - RNA, 19 nt, Homo sapiens
  misc_RNA (1)...(19): siRNA sense strand
cagcugagugucgcuuuaa

SEQ ID NO: 236458 - RNA, 19 nt, Homo sapiens
  misc_RNA (1)...(19): siRNA sense strand
agaagcagcuccucauccu

SEQ ID NO: 236459 - RNA, 19 nt, Homo sapiens
  misc_RNA (1)...(19): siRNA sense strand
agaauuacuacguccugua

SEQ ID NO: 236460 - RNA, 19 nt, Homo sapiens
  misc_RNA (1)...(19): siRNA sense strand
uccuggagguggccaugua

SEQ ID NO: 236461 - RNA, 19 nt, Homo sapiens
  misc_RNA (1)...(19): siRNA sense strand
caagucccuuugccagaag

SEQ ID NO: 236462 - RNA, 19 nt, Homo sapiens
  misc_RNA (1)...(19): siRNA sense strand
caaggagggccaggucaug

SEQ ID NO: 236463 - RNA, 19 nt, Homo sapiens
  misc_RNA (1)...(19): siRNA sense strand
gggaaaccgaguuaagaag

SEQ ID NO: 236464 - RNA, 19 nt, Homo sapiens
  misc_RNA (1)...(19): siRNA sense strand
aagggaaaccgaguuaaga

SEQ ID NO: 236465 - RNA, 19 nt, Homo sapiens
  misc_RNA (1)...(19): siRNA sense strand
gcugagggacugcucuaca

SEQ ID NO: 236466 - RNA, 19 nt, Homo sapiens
  misc_RNA (1)...(19): siRNA sense strand
uuuaaggagugugucuuug

SEQ ID NO: 236467 - RNA, 19 nt, Homo sapiens
  misc_RNA (1)...(19): siRNA sense strand
agccuucucuccacagugu

SEQ ID NO: 236468 - RNA, 19 nt, Homo sapiens
  misc_RNA (1)...(19): siRNA sense strand
augaagggaaaccgaguua

SEQ ID NO: 236469 - RNA, 19 nt, Homo sapiens
  misc_RNA (1)...(19): siRNA sense strand
gcacuuacacucuguuuaa

SEQ ID NO: 236470 - RNA, 19 nt, Homo sapiens
  misc_RNA (1)...(19): siRNA sense strand
gaacaaagaaggagagauc

SEQ ID NO: 236471 - RNA, 19 nt, Homo sapiens
  misc_RNA (1)...(19): siRNA sense strand
gcaaccaugugaagaagaa

SEQ ID NO: 236472 - RNA, 19 nt, Homo sapiens
  misc_RNA (1)...(19): siRNA sense strand
gaacaagccugcagcucau

SEQ ID NO: 236473 - RNA, 19 nt, Homo sapiens
  misc_RNA (1)...(19): siRNA sense strand
gaacagugagggauacuug

SEQ ID NO: 236474 - RNA, 19 nt, Homo sapiens
  misc_RNA (1)...(19): siRNA sense strand
cagcuuaaggguauaguua

SEQ ID NO: 236475 - RNA, 19 nt, Homo sapiens
  misc_RNA (1)...(19): siRNA sense strand
gcaaauccaugagccacaa

SEQ ID NO: 236476 - RNA, 19 nt, Homo sapiens
  misc_RNA (1)...(19): siRNA sense strand
gaaaggcaaccaugugaag

SEQ ID NO: 236477 - RNA, 19 nt, Homo sapiens
  misc_RNA (1)...(19): siRNA sense strand
gaaaguggccauguacaag

SEQ ID NO: 236478 - RNA, 19 nt, Homo sapiens
  misc_RNA (1)...(19): siRNA sense strand
aaggagagaucaugaaagg

SEQ ID NO: 236479 - RNA, 19 nt, Homo sapiens
  misc_RNA (1)...(19): siRNA sense strand
caaagaaggagagaucaug

SEQ ID NO: 236480 - RNA, 19 nt, Homo sapiens
  misc_RNA (1)...(19): siRNA sense strand
caaugaacagugagggaua

SEQ ID NO: 236481 - RNA, 19 nt, Homo sapiens
  misc_RNA (1)...(19): siRNA sense strand
ggugguaucugggucugaa

SEQ ID NO: 236482 - RNA, 19 nt, Homo sapiens
  misc_RNA (1)...(19): siRNA sense strand
ugugacauauucaucaaug

SEQ ID NO: 236483 - RNA, 19 nt, Homo sapiens
  misc_RNA (1)...(19): siRNA sense strand
agaaggagagaucaugaaa

SEQ ID NO: 236484 - RNA, 19 nt, Homo sapiens
  misc_RNA (1)...(19): siRNA sense strand
ugaaaguggccauguacaa

SEQ ID NO: 236485 - RNA, 19 nt, Homo sapiens
  misc_RNA (1)...(19): siRNA sense strand
aagaugaggacagcacuua

SEQ ID NO: 236486 - RNA, 19 nt, Homo sapiens
  misc_RNA (1)...(19): siRNA sense strand
aaagaaggagagaucauga

SEQ ID NO: 236487 - RNA, 19 nt, Homo sapiens
  misc_RNA (1)...(19): siRNA sense strand
guaucugggucugaacaaa

SEQ ID NO: 236488 - RNA, 19 nt, Homo sapiens
  misc_RNA (1)...(19): siRNA sense strand
gaaggagagaucaugaaag

SEQ ID NO: 236489 - RNA, 19 nt, Homo sapiens
  misc_RNA (1)...(19): siRNA sense strand
gaugaggacagcacuuaca

SEQ ID NO: 236490 - RNA, 19 nt, Homo sapiens
  misc_RNA (1)...(19): siRNA sense strand
aagcuguacuuggcaauga

SEQ ID NO: 236491 - RNA, 19 nt, Homo sapiens
  misc_RNA (1)...(19): siRNA sense strand
acaccugagugcaaauuca

SEQ ID NO: 236492 - RNA, 19 nt, Homo sapiens
  misc_RNA (1)...(19): siRNA sense strand
agccucagcuuaaggguau

SEQ ID NO: 236493 - RNA, 19 nt, Homo sapiens
  misc_RNA (1)...(19): siRNA sense strand
gaguucaaaccaagcugua

SEQ ID NO: 236494 - RNA, 19 nt, Homo sapiens
  misc_RNA (1)...(19): siRNA sense strand
acagugagggauacuugua

SEQ ID NO: 236495 - RNA, 19 nt, Homo sapiens
  misc_RNA (1)...(19): siRNA sense strand
uuucacaccugagugcaaa

SEQ ID NO: 236496 - RNA, 19 nt, Homo sapiens
  misc_RNA (1)...(19): siRNA sense strand
caaccaagagcagaagugu

SEQ ID NO: 236497 - RNA, 19 nt, Homo sapiens
  misc_RNA (1)...(19): siRNA sense strand
ugcacgaucucacggaguu

SEQ ID NO: 236498 - RNA, 19 nt, Homo sapiens
  misc_RNA (1)...(19): siRNA sense strand
ugagugcaaauucaaagaa

SEQ ID NO: 236499 - RNA, 19 nt, Homo sapiens
  misc_RNA (1)...(19): siRNA sense strand
gaucaugaaaggcaaccau

SEQ ID NO: 236500 - RNA, 19 nt, Homo sapiens
  misc_RNA (1)...(19): siRNA sense strand
uccaaggaguucaaaccaa

SEQ ID NO: 236501 - RNA, 19 nt, Homo sapiens
  misc_RNA (1)...(19): siRNA sense strand
ugaaaggcaaccaugugaa

SEQ ID NO: 236502 - RNA, 19 nt, Homo sapiens
  misc_RNA (1)...(19): siRNA sense strand
agugguggcuauccaagga

SEQ ID NO: 236503 - RNA, 19 nt, Homo sapiens
  misc_RNA (1)...(19): siRNA sense strand
caugagccacaaugaauca

SEQ ID NO: 236504 - RNA, 19 nt, Homo sapiens
  misc_RNA (1)...(19): siRNA sense strand
uuguacaccucggaacuuu

SEQ ID NO: 236505 - RNA, 19 nt, Homo sapiens
  misc_RNA (1)...(19): siRNA sense strand
guacuuggcaaugaacagu

SEQ ID NO: 236506 - RNA, 19 nt, Homo sapiens
  misc_RNA (1)...(19): siRNA sense strand
uccaugagccacaaugaau

SEQ ID NO: 236507 - RNA, 19 nt, Homo sapiens
  misc_RNA (1)...(19): siRNA sense strand
caagcuauacagccgacaa

SEQ ID NO: 236508 - RNA, 19 nt, Homo sapiens
  misc_RNA (1)...(19): siRNA sense strand
ucacaccugagugcaaauu

SEQ ID NO: 236509 - RNA, 19 nt, Homo sapiens
  misc_RNA (1)...(19): siRNA sense strand
gcacuuacacucuguuuaa

SEQ ID NO: 236510 - RNA, 19 nt, Homo sapiens
  misc_RNA (1)...(19): siRNA sense strand
gaacaaagaaggagagauc

SEQ ID NO: 236511 - RNA, 19 nt, Homo sapiens
  misc_RNA (1)...(19): siRNA sense strand
gcaaccaugugaagaagaa

SEQ ID NO: 236512 - RNA, 19 nt, Homo sapiens
  misc_RNA (1)...(19): siRNA sense strand
gaacaagccugcagcucau

SEQ ID NO: 236513 - RNA, 19 nt, Homo sapiens
  misc_RNA (1)...(19): siRNA sense strand
gaacagugagggauacuug

SEQ ID NO: 236514 - RNA, 19 nt, Homo sapiens
  misc_RNA (1)...(19): siRNA sense strand
cagcuuaaggguauaguua

SEQ ID NO: 236515 - RNA, 19 nt, Homo sapiens
  misc_RNA (1)...(19): siRNA sense strand
gcaaauccaugagccacaa

SEQ ID NO: 236516 - RNA, 19 nt, Homo sapiens
  misc_RNA (1)...(19): siRNA sense strand
gaaaggcaaccaugugaag

SEQ ID NO: 236517 - RNA, 19 nt, Homo sapiens
  misc_RNA (1)...(19): siRNA sense strand
gaaaguggccauguacaag

SEQ ID NO: 236518 - RNA, 19 nt, Homo sapiens
  misc_RNA (1)...(19): siRNA sense strand
aaggagagaucaugaaagg

SEQ ID NO: 236519 - RNA, 19 nt, Homo sapiens
  misc_RNA (1)...(19): siRNA sense strand
caaagaaggagagaucaug

SEQ ID NO: 236520 - RNA, 19 nt, Homo sapiens
  misc_RNA (1)...(19): siRNA sense strand
caaugaacagugagggaua

SEQ ID NO: 236521 - RNA, 19 nt, Homo sapiens
  misc_RNA (1)...(19): siRNA sense strand
ggugguaucugggucugaa

SEQ ID NO: 236522 - RNA, 19 nt, Homo sapiens
  misc_RNA (1)...(19): siRNA sense strand
ugugacauauucaucaaug

SEQ ID NO: 236523 - RNA, 19 nt, Homo sapiens
  misc_RNA (1)...(19): siRNA sense strand
agaaggagagaucaugaaa

SEQ ID NO: 236524 - RNA, 19 nt, Homo sapiens
  misc_RNA (1)...(19): siRNA sense strand
ugaaaguggccauguacaa

SEQ ID NO: 236525 - RNA, 19 nt, Homo sapiens
  misc_RNA (1)...(19): siRNA sense strand
aagaugaggacagcacuua

SEQ ID NO: 236526 - RNA, 19 nt, Homo sapiens
  misc_RNA (1)...(19): siRNA sense strand
aaagaaggagagaucauga

SEQ ID NO: 236527 - RNA, 19 nt, Homo sapiens
  misc_RNA (1)...(19): siRNA sense strand
guaucugggucugaacaaa

SEQ ID NO: 236528 - RNA, 19 nt, Homo sapiens
  misc_RNA (1)...(19): siRNA sense strand
gaaggagagaucaugaaag

SEQ ID NO: 236529 - RNA, 19 nt, Homo sapiens
  misc_RNA (1)...(19): siRNA sense strand
gaugaggacagcacuuaca

SEQ ID NO: 236530 - RNA, 19 nt, Homo sapiens
  misc_RNA (1)...(19): siRNA sense strand
aagcuguacuuggcaauga

SEQ ID NO: 236531 - RNA, 19 nt, Homo sapiens
  misc_RNA (1)...(19): siRNA sense strand
acaccugagugcaaauuca

SEQ ID NO: 236532 - RNA, 19 nt, Homo sapiens
  misc_RNA (1)...(19): siRNA sense strand
agccucagcuuaaggguau

SEQ ID NO: 236533 - RNA, 19 nt, Homo sapiens
  misc_RNA (1)...(19): siRNA sense strand
gaguucaaaccaagcugua

SEQ ID NO: 236534 - RNA, 19 nt, Homo sapiens
  misc_RNA (1)...(19): siRNA sense strand
acagugagggauacuugua

SEQ ID NO: 236535 - RNA, 19 nt, Homo sapiens
  misc_RNA (1)...(19): siRNA sense strand
uuucacaccugagugcaaa

SEQ ID NO: 236536 - RNA, 19 nt, Homo sapiens
  misc_RNA (1)...(19): siRNA sense strand
caaccaagagcagaagugu

SEQ ID NO: 236537 - RNA, 19 nt, Homo sapiens
  misc_RNA (1)...(19): siRNA sense strand
ugcacgaucucacggaguu

SEQ ID NO: 236538 - RNA, 19 nt, Homo sapiens
  misc_RNA (1)...(19): siRNA sense strand
ugagugcaaauucaaagaa

SEQ ID NO: 236539 - RNA, 19 nt, Homo sapiens
  misc_RNA (1)...(19): siRNA sense strand
gaucaugaaaggcaaccau

SEQ ID NO: 236540 - RNA, 19 nt, Homo sapiens
  misc_RNA (1)...(19): siRNA sense strand
uccaaggaguucaaaccaa

SEQ ID NO: 236541 - RNA, 19 nt, Homo sapiens
  misc_RNA (1)...(19): siRNA sense strand
ugaaaggcaaccaugugaa

SEQ ID NO: 236542 - RNA, 19 nt, Homo sapiens
  misc_RNA (1)...(19): siRNA sense strand
agugguggcuauccaagga

SEQ ID NO: 236543 - RNA, 19 nt, Homo sapiens
  misc_RNA (1)...(19): siRNA sense strand
caugagccacaaugaauca

SEQ ID NO: 236544 - RNA, 19 nt, Homo sapiens
  misc_RNA (1)...(19): siRNA sense strand
uuguacaccucggaacuuu

SEQ ID NO: 236545 - RNA, 19 nt, Homo sapiens
  misc_RNA (1)...(19): siRNA sense strand
guacuuggcaaugaacagu

SEQ ID NO: 236546 - RNA, 19 nt, Homo sapiens
  misc_RNA (1)...(19): siRNA sense strand
uccaugagccacaaugaau

SEQ ID NO: 236547 - RNA, 19 nt, Homo sapiens
  misc_RNA (1)...(19): siRNA sense strand
caagcuauacagccgacaa

SEQ ID NO: 236548 - RNA, 19 nt, Homo sapiens
  misc_RNA (1)...(19): siRNA sense strand
ucacaccugagugcaaauu

SEQ ID NO: 236549 - RNA, 19 nt, Homo sapiens
  misc_RNA (1)...(19): siRNA sense strand
gaugacagcacuaauucua

SEQ ID NO: 236550 - RNA, 19 nt, Homo sapiens
  misc_RNA (1)...(19): siRNA sense strand
gcaaaccagucaacaagag

SEQ ID NO: 236551 - RNA, 19 nt, Homo sapiens
  misc_RNA (1)...(19): siRNA sense strand
cgauggagcucucgaugga

SEQ ID NO: 236552 - RNA, 19 nt, Homo sapiens
  misc_RNA (1)...(19): siRNA sense strand
guaaucuacucauccaugu

SEQ ID NO: 236553 - RNA, 19 nt, Homo sapiens
  misc_RNA (1)...(19): siRNA sense strand
acaagugcgucugcaauaa

SEQ ID NO: 236554 - RNA, 19 nt, Homo sapiens
  misc_RNA (1)...(19): siRNA sense strand
cauuggaaguugccaugua

SEQ ID NO: 236555 - RNA, 19 nt, Homo sapiens
  misc_RNA (1)...(19): siRNA sense strand
aauaaugaauggaggcaaa

SEQ ID NO: 236556 - RNA, 19 nt, Homo sapiens
  misc_RNA (1)...(19): siRNA sense strand
gaaaacaggguuguauaua

SEQ ID NO: 236557 - RNA, 19 nt, Homo sapiens
  misc_RNA (1)...(19): siRNA sense strand
ggaagggcaagcuaugaaa

SEQ ID NO: 236558 - RNA, 19 nt, Homo sapiens
  misc_RNA (1)...(19): siRNA sense strand
ugacagcacuaauucuaca

SEQ ID NO: 236559 - RNA, 19 nt, Homo sapiens
  misc_RNA (1)...(19): siRNA sense strand
gaaagggaacagaguaaag

SEQ ID NO: 236560 - RNA, 19 nt, Homo sapiens
  misc_RNA (1)...(19): siRNA sense strand
caacaggaaucugguagag

SEQ ID NO: 236561 - RNA, 19 nt, Homo sapiens
  misc_RNA (1)...(19): siRNA sense strand
caacaagaguaagacaaca

SEQ ID NO: 236562 - RNA, 19 nt, Homo sapiens
  misc_RNA (1)...(19): siRNA sense strand
gcacuaauucuacacucuu

SEQ ID NO: 236563 - RNA, 19 nt, Homo sapiens
  misc_RNA (1)...(19): siRNA sense strand
gagaaccaucuuugcauga

SEQ ID NO: 236564 - RNA, 19 nt, Homo sapiens
  misc_RNA (1)...(19): siRNA sense strand
cacaagugcgucugcaaua

SEQ ID NO: 236565 - RNA, 19 nt, Homo sapiens
  misc_RNA (1)...(19): siRNA sense strand
aaacaggguuguauauagc

SEQ ID NO: 236566 - RNA, 19 nt, Homo sapiens
  misc_RNA (1)...(19): siRNA sense strand
acaagaguaagacaacaua

SEQ ID NO: 236567 - RNA, 19 nt, Homo sapiens
  misc_RNA (1)...(19): siRNA sense strand
guaccgagaaccaucuuug

SEQ ID NO: 236568 - RNA, 19 nt, Homo sapiens
  misc_RNA (1)...(19): siRNA sense strand
gguuguauauagccaugaa

SEQ ID NO: 236569 - RNA, 19 nt, Homo sapiens
  misc_RNA (1)...(19): siRNA sense strand
ccagugggacuacguguug

SEQ ID NO: 236570 - RNA, 19 nt, Homo sapiens
  misc_RNA (1)...(19): siRNA sense strand
ccaaggaugacagcacuaa

SEQ ID NO: 236571 - RNA, 19 nt, Homo sapiens
  misc_RNA (1)...(19): siRNA sense strand
ccaaaccagcagcucauuu

SEQ ID NO: 236572 - RNA, 19 nt, Homo sapiens
  misc_RNA (1)...(19): siRNA sense strand
uaugaaagggaacagagua

SEQ ID NO: 236573 - RNA, 19 nt, Homo sapiens
  misc_RNA (1)...(19): siRNA sense strand
aaagggaacagaguaaaga

SEQ ID NO: 236574 - RNA, 19 nt, Homo sapiens
  misc_RNA (1)...(19): siRNA sense strand
gaggcaaaccagucaacaa

SEQ ID NO: 236575 - RNA, 19 nt, Homo sapiens
  misc_RNA (1)...(19): siRNA sense strand
caagugcgucugcaauaau

SEQ ID NO: 236576 - RNA, 19 nt, Homo sapiens
  misc_RNA (1)...(19): siRNA sense strand
aaggaugacagcacuaauu

SEQ ID NO: 236577 - RNA, 19 nt, Homo sapiens
  misc_RNA (1)...(19): siRNA sense strand
gaagggcaagcuaugaaag

SEQ ID NO: 236578 - RNA, 19 nt, Homo sapiens
  misc_RNA (1)...(19): siRNA sense strand
ggguauagugaccagguua

SEQ ID NO: 236579 - RNA, 19 nt, Homo sapiens
  misc_RNA (1)...(19): siRNA sense strand
uaaggaagggcaagcuaug

SEQ ID NO: 236580 - RNA, 19 nt, Homo sapiens
  misc_RNA (1)...(19): siRNA sense strand
guacagacaacaggaaucu

SEQ ID NO: 236581 - RNA, 19 nt, Homo sapiens
  misc_RNA (1)...(19): siRNA sense strand
aaaacaggguuguauauag

SEQ ID NO: 236582 - RNA, 19 nt, Homo sapiens
  misc_RNA (1)...(19): siRNA sense strand
gcaggcaaggcuacuacuu

SEQ ID NO: 236583 - RNA, 19 nt, Homo sapiens
  misc_RNA (1)...(19): siRNA sense strand
auagugaccagguuauauu

SEQ ID NO: 236584 - RNA, 19 nt, Homo sapiens
  misc_RNA (1)...(19): siRNA sense strand
ccagucaacaagaguaaga

SEQ ID NO: 236585 - RNA, 19 nt, Homo sapiens
  misc_RNA (1)...(19): siRNA sense strand
aaaccagucaacaagagua

SEQ ID NO: 236586 - RNA, 19 nt, Homo sapiens
  misc_RNA (1)...(19): siRNA sense strand
caaaccagcagcucauuuu

SEQ ID NO: 236587 - RNA, 19 nt, Homo sapiens
  misc_RNA (1)...(19): siRNA sense strand
ugaaagggaacagaguaaa

SEQ ID NO: 236588 - RNA, 19 nt, Homo sapiens
  misc_RNA (1)...(19): siRNA sense strand
uauguaaucuacucaucca

SEQ ID NO: 236589 - RNA, 19 nt, Homo sapiens
  misc_RNA (1)...(19): siRNA sense strand
gugaccagguuauauugca

SEQ ID NO: 236590 - RNA, 19 nt, Homo sapiens
  misc_RNA (1)...(19): siRNA sense strand
aaucuacucauccauguug

SEQ ID NO: 236591 - RNA, 19 nt, Homo sapiens
  misc_RNA (1)...(19): siRNA sense strand
agacaacaggaaucuggua

SEQ ID NO: 236592 - RNA, 19 nt, Homo sapiens
  misc_RNA (1)...(19): siRNA sense strand
cgucugcaauaaugaaugg

SEQ ID NO: 236593 - RNA, 19 nt, Homo sapiens
  misc_RNA (1)...(19): siRNA sense strand
gcaaguuuaaagaaucugu

SEQ ID NO: 236594 - RNA, 19 nt, Homo sapiens
  misc_RNA (1)...(19): siRNA sense strand
cagcucaaggguauaguga

SEQ ID NO: 236595 - RNA, 19 nt, Homo sapiens
  misc_RNA (1)...(19): siRNA sense strand
ccucauaccagugggacua

SEQ ID NO: 236596 - RNA, 19 nt, Homo sapiens
  misc_RNA (1)...(19): siRNA sense strand
gggaacagaguaaagaaaa

SEQ ID NO: 236597 - RNA, 19 nt, Homo sapiens
  misc_RNA (1)...(19): siRNA sense strand
agaaccaucuuugcaugau

SEQ ID NO: 236598 - RNA, 19 nt, Homo sapiens
  misc_RNA (1)...(19): siRNA sense strand
ggcaaaccagucaacaaga

SEQ ID NO: 236599 - RNA, 19 nt, Homo sapiens
  misc_RNA (1)...(19): siRNA sense strand
aagugcgucugcaauaaug

SEQ ID NO: 236600 - RNA, 19 nt, Homo sapiens
  misc_RNA (1)...(19): siRNA sense strand
gguauagugaccagguuau

SEQ ID NO: 236601 - RNA, 19 nt, Homo sapiens
  misc_RNA (1)...(19): siRNA sense strand
cugaaugcaaguuuaaaga

SEQ ID NO: 236602 - RNA, 19 nt, Homo sapiens
  misc_RNA (1)...(19): siRNA sense strand
aauaaggaagggcaagcua

SEQ ID NO: 236603 - RNA, 19 nt, Homo sapiens
  misc_RNA (1)...(19): siRNA sense strand
cacuaauucuacacucuuc

SEQ ID NO: 236604 - RNA, 19 nt, Homo sapiens
  misc_RNA (1)...(19): siRNA sense strand
ccucuacccaucagaacuu

SEQ ID NO: 236605 - RNA, 19 nt, Homo sapiens
  misc_RNA (1)...(19): siRNA sense strand
ucaacaagaguaagacaac

SEQ ID NO: 236606 - RNA, 19 nt, Homo sapiens
  misc_RNA (1)...(19): siRNA sense strand
ucgauggaaccaaggauga

SEQ ID NO: 236607 - RNA, 19 nt, Homo sapiens
  misc_RNA (1)...(19): siRNA sense strand
gaugacagcacuaauucua

SEQ ID NO: 236608 - RNA, 19 nt, Homo sapiens
  misc_RNA (1)...(19): siRNA sense strand
gcaaaccagucaacaagag

SEQ ID NO: 236609 - RNA, 19 nt, Homo sapiens
  misc_RNA (1)...(19): siRNA sense strand
cgauggagcucucgaugga

SEQ ID NO: 236610 - RNA, 19 nt, Homo sapiens
  misc_RNA (1)...(19): siRNA sense strand
guaaucuacucauccaugu

SEQ ID NO: 236611 - RNA, 19 nt, Homo sapiens
  misc_RNA (1)...(19): siRNA sense strand
acaagugcgucugcaauaa

SEQ ID NO: 236612 - RNA, 19 nt, Homo sapiens
  misc_RNA (1)...(19): siRNA sense strand
cauuggaaguugccaugua

SEQ ID NO: 236613 - RNA, 19 nt, Homo sapiens
  misc_RNA (1)...(19): siRNA sense strand
aauaaugaauggaggcaaa

SEQ ID NO: 236614 - RNA, 19 nt, Homo sapiens
  misc_RNA (1)...(19): siRNA sense strand
gaaaacaggguuguauaua

SEQ ID NO: 236615 - RNA, 19 nt, Homo sapiens
  misc_RNA (1)...(19): siRNA sense strand
ggaagggcaagcuaugaaa

SEQ ID NO: 236616 - RNA, 19 nt, Homo sapiens
  misc_RNA (1)...(19): siRNA sense strand
ugacagcacuaauucuaca

SEQ ID NO: 236617 - RNA, 19 nt, Homo sapiens
  misc_RNA (1)...(19): siRNA sense strand
gaaagggaacagaguaaag

SEQ ID NO: 236618 - RNA, 19 nt, Homo sapiens
  misc_RNA (1)...(19): siRNA sense strand
caacaggaaucugguagag

SEQ ID NO: 236619 - RNA, 19 nt, Homo sapiens
  misc_RNA (1)...(19): siRNA sense strand
caacaagaguaagacaaca

SEQ ID NO: 236620 - RNA, 19 nt, Homo sapiens
  misc_RNA (1)...(19): siRNA sense strand
gcacuaauucuacacucuu

SEQ ID NO: 236621 - RNA, 19 nt, Homo sapiens
  misc_RNA (1)...(19): siRNA sense strand
gagaaccaucuuugcauga

SEQ ID NO: 236622 - RNA, 19 nt, Homo sapiens
  misc_RNA (1)...(19): siRNA sense strand
cacaagugcgucugcaaua

SEQ ID NO: 236623 - RNA, 19 nt, Homo sapiens
  misc_RNA (1)...(19): siRNA sense strand
aaacaggguuguauauagc

SEQ ID NO: 236624 - RNA, 19 nt, Homo sapiens
  misc_RNA (1)...(19): siRNA sense strand
acaagaguaagacaacaua

SEQ ID NO: 236625 - RNA, 19 nt, Homo sapiens
  misc_RNA (1)...(19): siRNA sense strand
guaccgagaaccaucuuug

SEQ ID NO: 236626 - RNA, 19 nt, Homo sapiens
  misc_RNA (1)...(19): siRNA sense strand
gguuguauauagccaugaa

SEQ ID NO: 236627 - RNA, 19 nt, Homo sapiens
  misc_RNA (1)...(19): siRNA sense strand
ccagugggacuacguguug

SEQ ID NO: 236628 - RNA, 19 nt, Homo sapiens
  misc_RNA (1)...(19): siRNA sense strand
ccaaggaugacagcacuaa

SEQ ID NO: 236629 - RNA, 19 nt, Homo sapiens
  misc_RNA (1)...(19): siRNA sense strand
ccaaaccagcagcucauuu

SEQ ID NO: 236630 - RNA, 19 nt, Homo sapiens
  misc_RNA (1)...(19): siRNA sense strand
uaugaaagggaacagagua

SEQ ID NO: 236631 - RNA, 19 nt, Homo sapiens
  misc_RNA (1)...(19): siRNA sense strand
aaagggaacagaguaaaga

SEQ ID NO: 236632 - RNA, 19 nt, Homo sapiens
  misc_RNA (1)...(19): siRNA sense strand
gaggcaaaccagucaacaa

SEQ ID NO: 236633 - RNA, 19 nt, Homo sapiens
  misc_RNA (1)...(19): siRNA sense strand
caagugcgucugcaauaau

SEQ ID NO: 236634 - RNA, 19 nt, Homo sapiens
  misc_RNA (1)...(19): siRNA sense strand
aaggaugacagcacuaauu

SEQ ID NO: 236635 - RNA, 19 nt, Homo sapiens
  misc_RNA (1)...(19): siRNA sense strand
gaagggcaagcuaugaaag

SEQ ID NO: 236636 - RNA, 19 nt, Homo sapiens
  misc_RNA (1)...(19): siRNA sense strand
ggguauagugaccagguua

SEQ ID NO: 236637 - RNA, 19 nt, Homo sapiens
  misc_RNA (1)...(19): siRNA sense strand
uaaggaagggcaagcuaug

SEQ ID NO: 236638 - RNA, 19 nt, Homo sapiens
  misc_RNA (1)...(19): siRNA sense strand
guacagacaacaggaaucu

SEQ ID NO: 236639 - RNA, 19 nt, Homo sapiens
  misc_RNA (1)...(19): siRNA sense strand
aaaacaggguuguauauag

SEQ ID NO: 236640 - RNA, 19 nt, Homo sapiens
  misc_RNA (1)...(19): siRNA sense strand
gcaggcaaggcuacuacuu

SEQ ID NO: 236641 - RNA, 19 nt, Homo sapiens
  misc_RNA (1)...(19): siRNA sense strand
auagugaccagguuauauu

SEQ ID NO: 236642 - RNA, 19 nt, Homo sapiens
  misc_RNA (1)...(19): siRNA sense strand
ccagucaacaagaguaaga

SEQ ID NO: 236643 - RNA, 19 nt, Homo sapiens
  misc_RNA (1)...(19): siRNA sense strand
aaaccagucaacaagagua

SEQ ID NO: 236644 - RNA, 19 nt, Homo sapiens
  misc_RNA (1)...(19): siRNA sense strand
caaaccagcagcucauuuu

SEQ ID NO: 236645 - RNA, 19 nt, Homo sapiens
  misc_RNA (1)...(19): siRNA sense strand
ugaaagggaacagaguaaa

SEQ ID NO: 236646 - RNA, 19 nt, Homo sapiens
  misc_RNA (1)...(19): siRNA sense strand
uauguaaucuacucaucca

SEQ ID NO: 236647 - RNA, 19 nt, Homo sapiens
  misc_RNA (1)...(19): siRNA sense strand
gugaccagguuauauugca

SEQ ID NO: 236648 - RNA, 19 nt, Homo sapiens
  misc_RNA (1)...(19): siRNA sense strand
aaucuacucauccauguug

SEQ ID NO: 236649 - RNA, 19 nt, Homo sapiens
  misc_RNA (1)...(19): siRNA sense strand
agacaacaggaaucuggua

SEQ ID NO: 236650 - RNA, 19 nt, Homo sapiens
  misc_RNA (1)...(19): siRNA sense strand
cgucugcaauaaugaaugg

SEQ ID NO: 236651 - RNA, 19 nt, Homo sapiens
  misc_RNA (1)...(19): siRNA sense strand
gcaaguuuaaagaaucugu

SEQ ID NO: 236652 - RNA, 19 nt, Homo sapiens
  misc_RNA (1)...(19): siRNA sense strand
cagcucaaggguauaguga

SEQ ID NO: 236653 - RNA, 19 nt, Homo sapiens
  misc_RNA (1)...(19): siRNA sense strand
ccucauaccagugggacua

SEQ ID NO: 236654 - RNA, 19 nt, Homo sapiens
  misc_RNA (1)...(19): siRNA sense strand
gggaacagaguaaagaaaa

SEQ ID NO: 236655 - RNA, 19 nt, Homo sapiens
  misc_RNA (1)...(19): siRNA sense strand
agaaccaucuuugcaugau

SEQ ID NO: 236656 - RNA, 19 nt, Homo sapiens
  misc_RNA (1)...(19): siRNA sense strand
ggcaaaccagucaacaaga

SEQ ID NO: 236657 - RNA, 19 nt, Homo sapiens
  misc_RNA (1)...(19): siRNA sense strand
aagugcgucugcaauaaug

SEQ ID NO: 236658 - RNA, 19 nt, Homo sapiens
  misc_RNA (1)...(19): siRNA sense strand
gguauagugaccagguuau

SEQ ID NO: 236659 - RNA, 19 nt, Homo sapiens
  misc_RNA (1)...(19): siRNA sense strand
cugaaugcaaguuuaaaga

SEQ ID NO: 236660 - RNA, 19 nt, Homo sapiens
  misc_RNA (1)...(19): siRNA sense strand
aauaaggaagggcaagcua

SEQ ID NO: 236661 - RNA, 19 nt, Homo sapiens
  misc_RNA (1)...(19): siRNA sense strand
cacuaauucuacacucuuc

SEQ ID NO: 236662 - RNA, 19 nt, Homo sapiens
  misc_RNA (1)...(19): siRNA sense strand
ccucuacccaucagaacuu

SEQ ID NO: 236663 - RNA, 19 nt, Homo sapiens
  misc_RNA (1)...(19): siRNA sense strand
ucaacaagaguaagacaac

SEQ ID NO: 236664 - RNA, 19 nt, Homo sapiens
  misc_RNA (1)...(19): siRNA sense strand
ucgauggaaccaaggauga

SEQ ID NO: 236665 - RNA, 19 nt, Homo sapiens
  misc_RNA (1)...(19): siRNA sense strand
gaacuucagugauguaaag

SEQ ID NO: 236666 - RNA, 19 nt, Homo sapiens
  misc_RNA (1)...(19): siRNA sense strand
gaggagagauaucagauug

SEQ ID NO: 236667 - RNA, 19 nt, Homo sapiens
  misc_RNA (1)...(19): siRNA sense strand
gaauggagaagauauagua

SEQ ID NO: 236668 - RNA, 19 nt, Homo sapiens
  misc_RNA (1)...(19): siRNA sense strand
gaauugauccugugauaaa

SEQ ID NO: 236669 - RNA, 19 nt, Homo sapiens
  misc_RNA (1)...(19): siRNA sense strand
gcagagcccuccugaagau

SEQ ID NO: 236670 - RNA, 19 nt, Homo sapiens
  misc_RNA (1)...(19): siRNA sense strand
gaagaacucucggaugcaa

SEQ ID NO: 236671 - RNA, 19 nt, Homo sapiens
  misc_RNA (1)...(19): siRNA sense strand
ggacugugaugaugaagau

SEQ ID NO: 236672 - RNA, 19 nt, Homo sapiens
  misc_RNA (1)...(19): siRNA sense strand
gcaaagagaagcauggaau

SEQ ID NO: 236673 - RNA, 19 nt, Homo sapiens
  misc_RNA (1)...(19): siRNA sense strand
guaagaacacccacacaaa

SEQ ID NO: 236674 - RNA, 19 nt, Homo sapiens
  misc_RNA (1)...(19): siRNA sense strand
gaagcauguuguucaguug

SEQ ID NO: 236675 - RNA, 19 nt, Homo sapiens
  misc_RNA (1)...(19): siRNA sense strand
gaugugaguccauuuggua

SEQ ID NO: 236676 - RNA, 19 nt, Homo sapiens
  misc_RNA (1)...(19): siRNA sense strand
gguuggaaauggaaucaaa

SEQ ID NO: 236677 - RNA, 19 nt, Homo sapiens
  misc_RNA (1)...(19): siRNA sense strand
ggaagauggaggagagaua

SEQ ID NO: 236678 - RNA, 19 nt, Homo sapiens
  misc_RNA (1)...(19): siRNA sense strand
gcauguuguucaguuguua

SEQ ID NO: 236679 - RNA, 19 nt, Homo sapiens
  misc_RNA (1)...(19): siRNA sense strand
gugaguccauuugguaaua

SEQ ID NO: 236680 - RNA, 19 nt, Homo sapiens
  misc_RNA (1)...(19): siRNA sense strand
guaaagcaaauccaucaaa

SEQ ID NO: 236681 - RNA, 19 nt, Homo sapiens
  misc_RNA (1)...(19): siRNA sense strand
gcauggaacauacgacauu

SEQ ID NO: 236682 - RNA, 19 nt, Homo sapiens
  misc_RNA (1)...(19): siRNA sense strand
ucuaugacauucacucuga

SEQ ID NO: 236683 - RNA, 19 nt, Homo sapiens
  misc_RNA (1)...(19): siRNA sense strand
gaucagcuuugugcuaaug

SEQ ID NO: 236684 - RNA, 19 nt, Homo sapiens
  misc_RNA (1)...(19): siRNA sense strand
gauguuacuucccgggauu

SEQ ID NO: 236685 - RNA, 19 nt, Homo sapiens
  misc_RNA (1)...(19): siRNA sense strand
gaagauggaggagagauau

SEQ ID NO: 236686 - RNA, 19 nt, Homo sapiens
  misc_RNA (1)...(19): siRNA sense strand
uguuaaugaugcuguguua

SEQ ID NO: 236687 - RNA, 19 nt, Homo sapiens
  misc_RNA (1)...(19): siRNA sense strand
gaagucaagaggacacuga

SEQ ID NO: 236688 - RNA, 19 nt, Homo sapiens
  misc_RNA (1)...(19): siRNA sense strand
gaagucaaagucaaaggaa

SEQ ID NO: 236689 - RNA, 19 nt, Homo sapiens
  misc_RNA (1)...(19): siRNA sense strand
uggaaauccugaagucaaa

SEQ ID NO: 236690 - RNA, 19 nt, Homo sapiens
  misc_RNA (1)...(19): siRNA sense strand
gaaugaagaccaccacaag

SEQ ID NO: 236691 - RNA, 19 nt, Homo sapiens
  misc_RNA (1)...(19): siRNA sense strand
gccaggauaugcagcaguu

SEQ ID NO: 236692 - RNA, 19 nt, Homo sapiens
  misc_RNA (1)...(19): siRNA sense strand
gacauucacucugauaagu

SEQ ID NO: 236693 - RNA, 19 nt, Homo sapiens
  misc_RNA (1)...(19): siRNA sense strand
cgacugaaucuaugacauu

SEQ ID NO: 236694 - RNA, 19 nt, Homo sapiens
  misc_RNA (1)...(19): siRNA sense strand
gcacauggcggagcuuaau

SEQ ID NO: 236695 - RNA, 19 nt, Homo sapiens
  misc_RNA (1)...(19): siRNA sense strand
gcagaaaauuacaccagua

SEQ ID NO: 236696 - RNA, 19 nt, Homo sapiens
  misc_RNA (1)...(19): siRNA sense strand
uaaagcaaauccaucaaac

SEQ ID NO: 236697 - RNA, 19 nt, Homo sapiens
  misc_RNA (1)...(19): siRNA sense strand
ggaauugauccugugauaa

SEQ ID NO: 236698 - RNA, 19 nt, Homo sapiens
  misc_RNA (1)...(19): siRNA sense strand
aacuuucacuugcuuguua

SEQ ID NO: 236699 - RNA, 19 nt, Homo sapiens
  misc_RNA (1)...(19): siRNA sense strand
gaaacucucaucaaacaag

SEQ ID NO: 236700 - RNA, 19 nt, Homo sapiens
  misc_RNA (1)...(19): siRNA sense strand
guacaggucauucuaugga

SEQ ID NO: 236701 - RNA, 19 nt, Homo sapiens
  misc_RNA (1)...(19): siRNA sense strand
guuacaggcucaccucaau

SEQ ID NO: 236702 - RNA, 19 nt, Homo sapiens
  misc_RNA (1)...(19): siRNA sense strand
ggaaugaagaccaccacaa

SEQ ID NO: 236703 - RNA, 19 nt, Homo sapiens
  misc_RNA (1)...(19): siRNA sense strand
uugauaaacugaagcaugu

SEQ ID NO: 236704 - RNA, 19 nt, Homo sapiens
  misc_RNA (1)...(19): siRNA sense strand
aagaaacccuugaaacucu

SEQ ID NO: 236705 - RNA, 19 nt, Homo sapiens
  misc_RNA (1)...(19): siRNA sense strand
gauaaguguggugauguua

SEQ ID NO: 236706 - RNA, 19 nt, Homo sapiens
  misc_RNA (1)...(19): siRNA sense strand
ucagugauguaaagcaaau

SEQ ID NO: 236707 - RNA, 19 nt, Homo sapiens
  misc_RNA (1)...(19): siRNA sense strand
cagcagagcccuccugaag

SEQ ID NO: 236708 - RNA, 19 nt, Homo sapiens
  misc_RNA (1)...(19): siRNA sense strand
caggaguucuucacugaug

SEQ ID NO: 236709 - RNA, 19 nt, Homo sapiens
  misc_RNA (1)...(19): siRNA sense strand
gaagagacgcuugccaaca

SEQ ID NO: 236710 - RNA, 19 nt, Homo sapiens
  misc_RNA (1)...(19): siRNA sense strand
gacacgugcugcugaacuu

SEQ ID NO: 236711 - RNA, 19 nt, Homo sapiens
  misc_RNA (1)...(19): siRNA sense strand
ggaggagagauaucagauu

SEQ ID NO: 236712 - RNA, 19 nt, Homo sapiens
  misc_RNA (1)...(19): siRNA sense strand
ugauaaguguggugauguu

SEQ ID NO: 236713 - RNA, 19 nt, Homo sapiens
  misc_RNA (1)...(19): siRNA sense strand
gauaaacugaagcauguug

SEQ ID NO: 236714 - RNA, 19 nt, Homo sapiens
  misc_RNA (1)...(19): siRNA sense strand
cugaucagcuuugugcuaa

SEQ ID NO: 236715 - RNA, 19 nt, Homo sapiens
  misc_RNA (1)...(19): siRNA sense strand
uaucugcacuucuccaaag

SEQ ID NO: 236716 - RNA, 19 nt, Homo sapiens
  misc_RNA (1)...(19): siRNA sense strand
gaucuucagguuugcauau

SEQ ID NO: 236717 - RNA, 19 nt, Homo sapiens
  misc_RNA (1)...(19): siRNA sense strand
cuucaaacguccagcucua

SEQ ID NO: 236718 - RNA, 19 nt, Homo sapiens
  misc_RNA (1)...(19): siRNA sense strand
uaagaacacccacacaaag

SEQ ID NO: 236719 - RNA, 19 nt, Homo sapiens
  misc_RNA (1)...(19): siRNA sense strand
caucaacaccacagacuau

SEQ ID NO: 236720 - RNA, 19 nt, Homo sapiens
  misc_RNA (1)...(19): siRNA sense strand
gauacugccucaaugucau

SEQ ID NO: 236721 - RNA, 19 nt, Homo sapiens
  misc_RNA (1)...(19): siRNA sense strand
ggucuacaaccaccucauu

SEQ ID NO: 236722 - RNA, 19 nt, Homo sapiens
  misc_RNA (1)...(19): siRNA sense strand
guccagcucuacauuaaag

SEQ ID NO: 236723 - RNA, 19 nt, Homo sapiens
  misc_RNA (1)...(19): siRNA sense strand
caaagagaagcauggaaug

SEQ ID NO: 236724 - RNA, 19 nt, Homo sapiens
  misc_RNA (1)...(19): siRNA sense strand
ggauacugccucaauguca

SEQ ID NO: 236725 - RNA, 19 nt, Homo sapiens
  misc_RNA (1)...(19): siRNA sense strand
ggacacugaagaucacaga

SEQ ID NO: 236726 - RNA, 19 nt, Homo sapiens
  misc_RNA (1)...(19): siRNA sense strand
gaacuuucacuugcuuguu

SEQ ID NO: 236727 - RNA, 19 nt, Homo sapiens
  misc_RNA (1)...(19): siRNA sense strand
gaguccauuugguaauauu

SEQ ID NO: 236728 - RNA, 19 nt, Homo sapiens
  misc_RNA (1)...(19): siRNA sense strand
gaugccagaugauaugaac

SEQ ID NO: 236729 - RNA, 19 nt, Homo sapiens
  misc_RNA (1)...(19): siRNA sense strand
aaagagaagcauggaauga

SEQ ID NO: 236730 - RNA, 19 nt, Homo sapiens
  misc_RNA (1)...(19): siRNA sense strand
ucacuugcuuguuaaugau

SEQ ID NO: 236731 - RNA, 19 nt, Homo sapiens
  misc_RNA (1)...(19): siRNA sense strand
acacuggcaugcauauauc

SEQ ID NO: 236732 - RNA, 19 nt, Homo sapiens
  misc_RNA (1)...(19): siRNA sense strand
gagaagcauggaaugaaga

SEQ ID NO: 236733 - RNA, 19 nt, Homo sapiens
  misc_RNA (1)...(19): siRNA sense strand
acaggaacauggccuugga

SEQ ID NO: 236734 - RNA, 19 nt, Homo sapiens
  misc_RNA (1)...(19): siRNA sense strand
agagaagcauggaaugaag

SEQ ID NO: 236735 - RNA, 19 nt, Homo sapiens
  misc_RNA (1)...(19): siRNA sense strand
ggaugugaguccauuuggu

SEQ ID NO: 236736 - RNA, 19 nt, Homo sapiens
  misc_RNA (1)...(19): siRNA sense strand
augcagcaguuucuucaaa

SEQ ID NO: 236737 - RNA, 19 nt, Homo sapiens
  misc_RNA (1)...(19): siRNA sense strand
gauaugcagcaguuucuuc

SEQ ID NO: 236738 - RNA, 19 nt, Homo sapiens
  misc_RNA (1)...(19): siRNA sense strand
gauugcggcucgccaggau

SEQ ID NO: 236739 - RNA, 19 nt, Homo sapiens
  misc_RNA (1)...(19): siRNA sense strand
uggaacagguaaauaggau

SEQ ID NO: 236740 - RNA, 19 nt, Homo sapiens
  misc_RNA (1)...(19): siRNA sense strand
cauggaacauacgacauug

SEQ ID NO: 236741 - RNA, 19 nt, Homo sapiens
  misc_RNA (1)...(19): siRNA sense strand
cugcuucgguucaggaguu

SEQ ID NO: 236742 - RNA, 19 nt, Homo sapiens
  misc_RNA (1)...(19): siRNA sense strand
aaacguccagcucuacauu

SEQ ID NO: 236743 - RNA, 19 nt, Homo sapiens
  misc_RNA (1)...(19): siRNA sense strand
uggcaguacuuuagacaca

SEQ ID NO: 236744 - RNA, 19 nt, Homo sapiens
  misc_RNA (1)...(19): siRNA sense strand
gaaauccugaagucaaagu

SEQ ID NO: 236745 - RNA, 19 nt, Homo sapiens
  misc_RNA (1)...(19): siRNA sense strand
acguccagcucuacauuaa

SEQ ID NO: 236746 - RNA, 19 nt, Homo sapiens
  misc_RNA (1)...(19): siRNA sense strand
aagagacgcuugccaacag

SEQ ID NO: 236747 - RNA, 19 nt, Homo sapiens
  misc_RNA (1)...(19): siRNA sense strand
gaaaauuacaccaguauac

SEQ ID NO: 236748 - RNA, 19 nt, Homo sapiens
  misc_RNA (1)...(19): siRNA sense strand
ucuacaaccaccucauuaa

SEQ ID NO: 236749 - RNA, 19 nt, Homo sapiens
  misc_RNA (1)...(19): siRNA sense strand
ccacaaggaacagugaaga

SEQ ID NO: 236750 - RNA, 19 nt, Homo sapiens
  misc_RNA (1)...(19): siRNA sense strand
uaaguguggugauguuacu

SEQ ID NO: 236751 - RNA, 19 nt, Homo sapiens
  misc_RNA (1)...(19): siRNA sense strand
cuucagugauguaaagcaa

SEQ ID NO: 236752 - RNA, 19 nt, Homo sapiens
  misc_RNA (1)...(19): siRNA sense strand
gucaagaggacacugaaga

SEQ ID NO: 236753 - RNA, 19 nt, Homo sapiens
  misc_RNA (1)...(19): siRNA sense strand
gucauucuauggaggucua

SEQ ID NO: 236754 - RNA, 19 nt, Homo sapiens
  misc_RNA (1)...(19): siRNA sense strand
ccugaagaauuuguaaaca

SEQ ID NO: 236755 - RNA, 19 nt, Homo sapiens
  misc_RNA (1)...(19): siRNA sense strand
guggaggcaugguugaaca

SEQ ID NO: 236756 - RNA, 19 nt, Homo sapiens
  misc_RNA (1)...(19): siRNA sense strand
ugaagaccaccacaaggaa

SEQ ID NO: 236757 - RNA, 19 nt, Homo sapiens
  misc_RNA (1)...(19): siRNA sense strand
gagcaaagagaagcaugga

SEQ ID NO: 236758 - RNA, 19 nt, Homo sapiens
  misc_RNA (1)...(19): siRNA sense strand
uucacuugcuuguuaauga

SEQ ID NO: 236759 - RNA, 19 nt, Homo sapiens
  misc_RNA (1)...(19): siRNA sense strand
gucuacaaccaccucauua

SEQ ID NO: 236760 - RNA, 19 nt, Homo sapiens
  misc_RNA (1)...(19): siRNA sense strand
cacacuggcaugcauauau

SEQ ID NO: 236761 - RNA, 19 nt, Homo sapiens
  misc_RNA (1)...(19): siRNA sense strand
ucugauaaguguggugaug

SEQ ID NO: 236762 - RNA, 19 nt, Homo sapiens
  misc_RNA (1)...(19): siRNA sense strand
gcaguacuuuagacacaac

SEQ ID NO: 236763 - RNA, 19 nt, Homo sapiens
  misc_RNA (1)...(19): siRNA sense strand
ggaaguggagaagucaaga

SEQ ID NO: 236764 - RNA, 19 nt, Homo sapiens
  misc_RNA (1)...(19): siRNA sense strand
gaggcaugguugaacaagu

SEQ ID NO: 236765 - RNA, 19 nt, Homo sapiens
  misc_RNA (1)...(19): siRNA sense strand
caagaagacuacacuuuaa

SEQ ID NO: 236766 - RNA, 19 nt, Homo sapiens
  misc_RNA (1)...(19): siRNA sense strand
gaaaauggcuuuggaaauu

SEQ ID NO: 236767 - RNA, 19 nt, Homo sapiens
  misc_RNA (1)...(19): siRNA sense strand
ggaggaggauggacuguaa

SEQ ID NO: 236768 - RNA, 19 nt, Homo sapiens
  misc_RNA (1)...(19): siRNA sense strand
gaaguccaguuccuugaua

SEQ ID NO: 236769 - RNA, 19 nt, Homo sapiens
  misc_RNA (1)...(19): siRNA sense strand
ggacagagaucaugacaac

SEQ ID NO: 236770 - RNA, 19 nt, Homo sapiens
  misc_RNA (1)...(19): siRNA sense strand
gcaaagguguucaguuuca

SEQ ID NO: 236771 - RNA, 19 nt, Homo sapiens
  misc_RNA (1)...(19): siRNA sense strand
ucaagaagacuacacuuua

SEQ ID NO: 236772 - RNA, 19 nt, Homo sapiens
  misc_RNA (1)...(19): siRNA sense strand
gguauaagcucaguggauu

SEQ ID NO: 236773 - RNA, 19 nt, Homo sapiens
  misc_RNA (1)...(19): siRNA sense strand
gaacugcgcagaagaagau

SEQ ID NO: 236774 - RNA, 19 nt, Homo sapiens
  misc_RNA (1)...(19): siRNA sense strand
gguauucucugaaaucugu

SEQ ID NO: 236775 - RNA, 19 nt, Homo sapiens
  misc_RNA (1)...(19): siRNA sense strand
ugaaaucugugguuaugaa

SEQ ID NO: 236776 - RNA, 19 nt, Homo sapiens
  misc_RNA (1)...(19): siRNA sense strand
gcagauuguucagagauuu

SEQ ID NO: 236777 - RNA, 19 nt, Homo sapiens
  misc_RNA (1)...(19): siRNA sense strand
guucagagauuuucaauga

SEQ ID NO: 236778 - RNA, 19 nt, Homo sapiens
  misc_RNA (1)...(19): siRNA sense strand
gaagggaacugcgcagaag

SEQ ID NO: 236779 - RNA, 19 nt, Homo sapiens
  misc_RNA (1)...(19): siRNA sense strand
ccagagcccagcagaauuu

SEQ ID NO: 236780 - RNA, 19 nt, Homo sapiens
  misc_RNA (1)...(19): siRNA sense strand
gauaaaggagaugagaaua

SEQ ID NO: 236781 - RNA, 19 nt, Homo sapiens
  misc_RNA (1)...(19): siRNA sense strand
gaggauggacuguaauuca

SEQ ID NO: 236782 - RNA, 19 nt, Homo sapiens
  misc_RNA (1)...(19): siRNA sense strand
cagucuggcuggugguuua

SEQ ID NO: 236783 - RNA, 19 nt, Homo sapiens
  misc_RNA (1)...(19): siRNA sense strand
acagagaucaugacaacua

SEQ ID NO: 236784 - RNA, 19 nt, Homo sapiens
  misc_RNA (1)...(19): siRNA sense strand
gcuagucaccaaagaauga

SEQ ID NO: 236785 - RNA, 19 nt, Homo sapiens
  misc_RNA (1)...(19): siRNA sense strand
uaaaggagaugagaauacu

SEQ ID NO: 236786 - RNA, 19 nt, Homo sapiens
  misc_RNA (1)...(19): siRNA sense strand
ucucugaaaucugugguua

SEQ ID NO: 236787 - RNA, 19 nt, Homo sapiens
  misc_RNA (1)...(19): siRNA sense strand
gaggauggaaagacuauga

SEQ ID NO: 236788 - RNA, 19 nt, Homo sapiens
  misc_RNA (1)...(19): siRNA sense strand
gaaaucugugguuaugaaa

SEQ ID NO: 236789 - RNA, 19 nt, Homo sapiens
  misc_RNA (1)...(19): siRNA sense strand
uggcauggguggugguauu

SEQ ID NO: 236790 - RNA, 19 nt, Homo sapiens
  misc_RNA (1)...(19): siRNA sense strand
guggugguauucucugaaa

SEQ ID NO: 236791 - RNA, 19 nt, Homo sapiens
  misc_RNA (1)...(19): siRNA sense strand
ugagaauacugucguugau

SEQ ID NO: 236792 - RNA, 19 nt, Homo sapiens
  misc_RNA (1)...(19): siRNA sense strand
ucugaaaucugugguuaug

SEQ ID NO: 236793 - RNA, 19 nt, Homo sapiens
  misc_RNA (1)...(19): siRNA sense strand
aaaccugaaugguguauac

SEQ ID NO: 236794 - RNA, 19 nt, Homo sapiens
  misc_RNA (1)...(19): siRNA sense strand
cagagaucaugacaacuau

SEQ ID NO: 236795 - RNA, 19 nt, Homo sapiens
  misc_RNA (1)...(19): siRNA sense strand
gguguucaguuucauccuu

SEQ ID NO: 236796 - RNA, 19 nt, Homo sapiens
  misc_RNA (1)...(19): siRNA sense strand
aaauagccguuaugcacaa

SEQ ID NO: 236797 - RNA, 19 nt, Homo sapiens
  misc_RNA (1)...(19): siRNA sense strand
ggagaaugaaguccaguuc

SEQ ID NO: 236798 - RNA, 19 nt, Homo sapiens
  misc_RNA (1)...(19): siRNA sense strand
gaagcaagaggcaguaugc

SEQ ID NO: 236799 - RNA, 19 nt, Homo sapiens
  misc_RNA (1)...(19): siRNA sense strand
gaggcaguaugcagauugu

SEQ ID NO: 236800 - RNA, 19 nt, Homo sapiens
  misc_RNA (1)...(19): siRNA sense strand
ggauggaaagacuaugaaa

SEQ ID NO: 236801 - RNA, 19 nt, Homo sapiens
  misc_RNA (1)...(19): siRNA sense strand
gcaguaugcagauuguuca

SEQ ID NO: 236802 - RNA, 19 nt, Homo sapiens
  misc_RNA (1)...(19): siRNA sense strand
agaauacugucguugaucu

SEQ ID NO: 236803 - RNA, 19 nt, Homo sapiens
  misc_RNA (1)...(19): siRNA sense strand
ugauaaaggagaugagaau

SEQ ID NO: 236804 - RNA, 19 nt, Homo sapiens
  misc_RNA (1)...(19): siRNA sense strand
gaaugaaguccaguuccuu

SEQ ID NO: 236805 - RNA, 19 nt, Homo sapiens
  misc_RNA (1)...(19): siRNA sense strand
ggaagcaagaggcaguaug

SEQ ID NO: 236806 - RNA, 19 nt, Homo sapiens
  misc_RNA (1)...(19): siRNA sense strand
gaauuucuacgaguugaau

SEQ ID NO: 236807 - RNA, 19 nt, Homo sapiens
  misc_RNA (1)...(19): siRNA sense strand
uagccguuaugcacaauau

SEQ ID NO: 236808 - RNA, 19 nt, Homo sapiens
  misc_RNA (1)...(19): siRNA sense strand
gggcuagucaccaaagaau

SEQ ID NO: 236809 - RNA, 19 nt, Homo sapiens
  misc_RNA (1)...(19): siRNA sense strand
gaauuucaaaguuggagau

SEQ ID NO: 236810 - RNA, 19 nt, Homo sapiens
  misc_RNA (1)...(19): siRNA sense strand
guauaagcucaguggauuu

SEQ ID NO: 236811 - RNA, 19 nt, Homo sapiens
  misc_RNA (1)...(19): siRNA sense strand
gcacgugggacagagauca

SEQ ID NO: 236812 - RNA, 19 nt, Homo sapiens
  misc_RNA (1)...(19): siRNA sense strand
ggauggacuguaauucaga

SEQ ID NO: 236813 - RNA, 19 nt, Homo sapiens
  misc_RNA (1)...(19): siRNA sense strand
ggaacugcgcagaagaaga

SEQ ID NO: 236814 - RNA, 19 nt, Homo sapiens
  misc_RNA (1)...(19): siRNA sense strand
ucagagauuuucaaugaug

SEQ ID NO: 236815 - RNA, 19 nt, Homo sapiens
  misc_RNA (1)...(19): siRNA sense strand
ggugguauucucugaaauc

SEQ ID NO: 236816 - RNA, 19 nt, Homo sapiens
  misc_RNA (1)...(19): siRNA sense strand
ucaaacagcaacaggucaa

SEQ ID NO: 236817 - RNA, 19 nt, Homo sapiens
  misc_RNA (1)...(19): siRNA sense strand
uaacagaggauggaaagac

SEQ ID NO: 236818 - RNA, 19 nt, Homo sapiens
  misc_RNA (1)...(19): siRNA sense strand
agcaacaggucaagaucaa

SEQ ID NO: 236819 - RNA, 19 nt, Homo sapiens
  misc_RNA (1)...(19): siRNA sense strand
ccugaaugguguauacuac

SEQ ID NO: 236820 - RNA, 19 nt, Homo sapiens
  misc_RNA (1)...(19): siRNA sense strand
ugaagggaacugcgcagaa

SEQ ID NO: 236821 - RNA, 19 nt, Homo sapiens
  misc_RNA (1)...(19): siRNA sense strand
caagaggcaguaugcagau

SEQ ID NO: 236822 - RNA, 19 nt, Homo sapiens
  misc_RNA (1)...(19): siRNA sense strand
ggguggugguauucucuga

SEQ ID NO: 236823 - RNA, 19 nt, Homo sapiens
  misc_RNA (1)...(19): siRNA sense strand
ucuacgaguugaauauugg

SEQ ID NO: 236824 - RNA, 19 nt, Homo sapiens
  misc_RNA (1)...(19): siRNA sense strand
caaagguguucaguuucau

SEQ ID NO: 236825 - RNA, 19 nt, Homo sapiens
  misc_RNA (1)...(19): siRNA sense strand
cagcaacaggucaagauca

SEQ ID NO: 236826 - RNA, 19 nt, Homo sapiens
  misc_RNA (1)...(19): siRNA sense strand
gaauacugucguugaucuu

SEQ ID NO: 236827 - RNA, 19 nt, Homo sapiens
  misc_RNA (1)...(19): siRNA sense strand
cucaagaagacuacacuuu

SEQ ID NO: 236828 - RNA, 19 nt, Homo sapiens
  misc_RNA (1)...(19): siRNA sense strand
cagaggauggaaagacuau

SEQ ID NO: 236829 - RNA, 19 nt, Homo sapiens
  misc_RNA (1)...(19): siRNA sense strand
gagaauacugucguugauc

SEQ ID NO: 236830 - RNA, 19 nt, Homo sapiens
  misc_RNA (1)...(19): siRNA sense strand
aaguccaguuccuugauaa

SEQ ID NO: 236831 - RNA, 19 nt, Homo sapiens
  misc_RNA (1)...(19): siRNA sense strand
ggaaagacuaugaaaaugg

SEQ ID NO: 236832 - RNA, 19 nt, Homo sapiens
  misc_RNA (1)...(19): siRNA sense strand
ggcaguaugcagauuguuc

SEQ ID NO: 236833 - RNA, 19 nt, Homo sapiens
  misc_RNA (1)...(19): siRNA sense strand
uaaaacagacaaugggauu

SEQ ID NO: 236834 - RNA, 19 nt, Homo sapiens
  misc_RNA (1)...(19): siRNA sense strand
ggaggauggacuguaauuc

SEQ ID NO: 236835 - RNA, 19 nt, Homo sapiens
  misc_RNA (1)...(19): siRNA sense strand
ggguauaagcucaguggau

SEQ ID NO: 236836 - RNA, 19 nt, Homo sapiens
  misc_RNA (1)...(19): siRNA sense strand
agaaugaaguccaguuccu

SEQ ID NO: 236837 - RNA, 19 nt, Homo sapiens
  misc_RNA (1)...(19): siRNA sense strand
gcaaaccugaaugguguau

SEQ ID NO: 236838 - RNA, 19 nt, Homo sapiens
  misc_RNA (1)...(19): siRNA sense strand
ugcagauuguucagagauu

SEQ ID NO: 236839 - RNA, 19 nt, Homo sapiens
  misc_RNA (1)...(19): siRNA sense strand
agaugagaauacugucguu

SEQ ID NO: 236840 - RNA, 19 nt, Homo sapiens
  misc_RNA (1)...(19): siRNA sense strand
gauggaaagacuaugaaaa

SEQ ID NO: 236841 - RNA, 19 nt, Homo sapiens
  misc_RNA (1)...(19): siRNA sense strand
aaacagcaacaggucaaga

SEQ ID NO: 236842 - RNA, 19 nt, Homo sapiens
  misc_RNA (1)...(19): siRNA sense strand
ugauggcagugaaaacuuu

SEQ ID NO: 236843 - RNA, 19 nt, Homo sapiens
  misc_RNA (1)...(19): siRNA sense strand
caagaagacuacacuuuaa

SEQ ID NO: 236844 - RNA, 19 nt, Homo sapiens
  misc_RNA (1)...(19): siRNA sense strand
gaaaauggcuuuggaaauu

SEQ ID NO: 236845 - RNA, 19 nt, Homo sapiens
  misc_RNA (1)...(19): siRNA sense strand
ggaggaggauggacuguaa

SEQ ID NO: 236846 - RNA, 19 nt, Homo sapiens
  misc_RNA (1)...(19): siRNA sense strand
gaaguccaguuccuugaua

SEQ ID NO: 236847 - RNA, 19 nt, Homo sapiens
  misc_RNA (1)...(19): siRNA sense strand
ggacagagaucaugacaac

SEQ ID NO: 236848 - RNA, 19 nt, Homo sapiens
  misc_RNA (1)...(19): siRNA sense strand
gcaaagguguucaguuuca

SEQ ID NO: 236849 - RNA, 19 nt, Homo sapiens
  misc_RNA (1)...(19): siRNA sense strand
ucaagaagacuacacuuua

SEQ ID NO: 236850 - RNA, 19 nt, Homo sapiens
  misc_RNA (1)...(19): siRNA sense strand
gguauaagcucaguggauu

SEQ ID NO: 236851 - RNA, 19 nt, Homo sapiens
  misc_RNA (1)...(19): siRNA sense strand
gaacugcgcagaagaagau

SEQ ID NO: 236852 - RNA, 19 nt, Homo sapiens
  misc_RNA (1)...(19): siRNA sense strand
gguauucucugaaaucugu

SEQ ID NO: 236853 - RNA, 19 nt, Homo sapiens
  misc_RNA (1)...(19): siRNA sense strand
ugaaaucugugguuaugaa

SEQ ID NO: 236854 - RNA, 19 nt, Homo sapiens
  misc_RNA (1)...(19): siRNA sense strand
gcagauuguucagagauuu

SEQ ID NO: 236855 - RNA, 19 nt, Homo sapiens
  misc_RNA (1)...(19): siRNA sense strand
guucagagauuuucaauga

SEQ ID NO: 236856 - RNA, 19 nt, Homo sapiens
  misc_RNA (1)...(19): siRNA sense strand
gaagggaacugcgcagaag

SEQ ID NO: 236857 - RNA, 19 nt, Homo sapiens
  misc_RNA (1)...(19): siRNA sense strand
ccagagcccagcagaauuu

SEQ ID NO: 236858 - RNA, 19 nt, Homo sapiens
  misc_RNA (1)...(19): siRNA sense strand
gauaaaggagaugagaaua

SEQ ID NO: 236859 - RNA, 19 nt, Homo sapiens
  misc_RNA (1)...(19): siRNA sense strand
gaggauggacuguaauuca

SEQ ID NO: 236860 - RNA, 19 nt, Homo sapiens
  misc_RNA (1)...(19): siRNA sense strand
cagucuggcuggugguuua

SEQ ID NO: 236861 - RNA, 19 nt, Homo sapiens
  misc_RNA (1)...(19): siRNA sense strand
acagagaucaugacaacua

SEQ ID NO: 236862 - RNA, 19 nt, Homo sapiens
  misc_RNA (1)...(19): siRNA sense strand
gcuagucaccaaagaauga

SEQ ID NO: 236863 - RNA, 19 nt, Homo sapiens
  misc_RNA (1)...(19): siRNA sense strand
uaaaggagaugagaauacu

SEQ ID NO: 236864 - RNA, 19 nt, Homo sapiens
  misc_RNA (1)...(19): siRNA sense strand
ucucugaaaucugugguua

SEQ ID NO: 236865 - RNA, 19 nt, Homo sapiens
  misc_RNA (1)...(19): siRNA sense strand
gaggauggaaagacuauga

SEQ ID NO: 236866 - RNA, 19 nt, Homo sapiens
  misc_RNA (1)...(19): siRNA sense strand
gaaaucugugguuaugaaa

SEQ ID NO: 236867 - RNA, 19 nt, Homo sapiens
  misc_RNA (1)...(19): siRNA sense strand
uggcauggguggugguauu

SEQ ID NO: 236868 - RNA, 19 nt, Homo sapiens
  misc_RNA (1)...(19): siRNA sense strand
guggugguauucucugaaa

SEQ ID NO: 236869 - RNA, 19 nt, Homo sapiens
  misc_RNA (1)...(19): siRNA sense strand
ugagaauacugucguugau

SEQ ID NO: 236870 - RNA, 19 nt, Homo sapiens
  misc_RNA (1)...(19): siRNA sense strand
ucugaaaucugugguuaug

SEQ ID NO: 236871 - RNA, 19 nt, Homo sapiens
  misc_RNA (1)...(19): siRNA sense strand
aaaccugaaugguguauac

SEQ ID NO: 236872 - RNA, 19 nt, Homo sapiens
  misc_RNA (1)...(19): siRNA sense strand
cagagaucaugacaacuau

SEQ ID NO: 236873 - RNA, 19 nt, Homo sapiens
  misc_RNA (1)...(19): siRNA sense strand
gguguucaguuucauccuu

SEQ ID NO: 236874 - RNA, 19 nt, Homo sapiens
  misc_RNA (1)...(19): siRNA sense strand
aaauagccguuaugcacaa

SEQ ID NO: 236875 - RNA, 19 nt, Homo sapiens
  misc_RNA (1)...(19): siRNA sense strand
ggagaaugaaguccaguuc

SEQ ID NO: 236876 - RNA, 19 nt, Homo sapiens
  misc_RNA (1)...(19): siRNA sense strand
gaagcaagaggcaguaugc

SEQ ID NO: 236877 - RNA, 19 nt, Homo sapiens
  misc_RNA (1)...(19): siRNA sense strand
gaggcaguaugcagauugu

SEQ ID NO: 236878 - RNA, 19 nt, Homo sapiens
  misc_RNA (1)...(19): siRNA sense strand
ggauggaaagacuaugaaa

SEQ ID NO: 236879 - RNA, 19 nt, Homo sapiens
  misc_RNA (1)...(19): siRNA sense strand
gcaguaugcagauuguuca

SEQ ID NO: 236880 - RNA, 19 nt, Homo sapiens
  misc_RNA (1)...(19): siRNA sense strand
agaauacugucguugaucu

SEQ ID NO: 236881 - RNA, 19 nt, Homo sapiens
  misc_RNA (1)...(19): siRNA sense strand
ugauaaaggagaugagaau

SEQ ID NO: 236882 - RNA, 19 nt, Homo sapiens
  misc_RNA (1)...(19): siRNA sense strand
gaaugaaguccaguuccuu

SEQ ID NO: 236883 - RNA, 19 nt, Homo sapiens
  misc_RNA (1)...(19): siRNA sense strand
ggaagcaagaggcaguaug

SEQ ID NO: 236884 - RNA, 19 nt, Homo sapiens
  misc_RNA (1)...(19): siRNA sense strand
gaauuucuacgaguugaau

SEQ ID NO: 236885 - RNA, 19 nt, Homo sapiens
  misc_RNA (1)...(19): siRNA sense strand
uagccguuaugcacaauau

SEQ ID NO: 236886 - RNA, 19 nt, Homo sapiens
  misc_RNA (1)...(19): siRNA sense strand
gggcuagucaccaaagaau

SEQ ID NO: 236887 - RNA, 19 nt, Homo sapiens
  misc_RNA (1)...(19): siRNA sense strand
gaauuucaaaguuggagau

SEQ ID NO: 236888 - RNA, 19 nt, Homo sapiens
  misc_RNA (1)...(19): siRNA sense strand
guauaagcucaguggauuu

SEQ ID NO: 236889 - RNA, 19 nt, Homo sapiens
  misc_RNA (1)...(19): siRNA sense strand
gcacgugggacagagauca

SEQ ID NO: 236890 - RNA, 19 nt, Homo sapiens
  misc_RNA (1)...(19): siRNA sense strand
ggauggacuguaauucaga

SEQ ID NO: 236891 - RNA, 19 nt, Homo sapiens
  misc_RNA (1)...(19): siRNA sense strand
ggaacugcgcagaagaaga

SEQ ID NO: 236892 - RNA, 19 nt, Homo sapiens
  misc_RNA (1)...(19): siRNA sense strand
ucagagauuuucaaugaug

SEQ ID NO: 236893 - RNA, 19 nt, Homo sapiens
  misc_RNA (1)...(19): siRNA sense strand
ggugguauucucugaaauc

SEQ ID NO: 236894 - RNA, 19 nt, Homo sapiens
  misc_RNA (1)...(19): siRNA sense strand
ucaaacagcaacaggucaa

SEQ ID NO: 236895 - RNA, 19 nt, Homo sapiens
  misc_RNA (1)...(19): siRNA sense strand
uaacagaggauggaaagac

SEQ ID NO: 236896 - RNA, 19 nt, Homo sapiens
  misc_RNA (1)...(19): siRNA sense strand
agcaacaggucaagaucaa

SEQ ID NO: 236897 - RNA, 19 nt, Homo sapiens
  misc_RNA (1)...(19): siRNA sense strand
ccugaaugguguauacuac

SEQ ID NO: 236898 - RNA, 19 nt, Homo sapiens
  misc_RNA (1)...(19): siRNA sense strand
ugaagggaacugcgcagaa

SEQ ID NO: 236899 - RNA, 19 nt, Homo sapiens
  misc_RNA (1)...(19): siRNA sense strand
caagaggcaguaugcagau

SEQ ID NO: 236900 - RNA, 19 nt, Homo sapiens
  misc_RNA (1)...(19): siRNA sense strand
ggguggugguauucucuga

SEQ ID NO: 236901 - RNA, 19 nt, Homo sapiens
  misc_RNA (1)...(19): siRNA sense strand
ucuacgaguugaauauugg

SEQ ID NO: 236902 - RNA, 19 nt, Homo sapiens
  misc_RNA (1)...(19): siRNA sense strand
caaagguguucaguuucau

SEQ ID NO: 236903 - RNA, 19 nt, Homo sapiens
  misc_RNA (1)...(19): siRNA sense strand
cagcaacaggucaagauca

SEQ ID NO: 236904 - RNA, 19 nt, Homo sapiens
  misc_RNA (1)...(19): siRNA sense strand
gaauacugucguugaucuu

SEQ ID NO: 236905 - RNA, 19 nt, Homo sapiens
  misc_RNA (1)...(19): siRNA sense strand
cucaagaagacuacacuuu

SEQ ID NO: 236906 - RNA, 19 nt, Homo sapiens
  misc_RNA (1)...(19): siRNA sense strand
cagaggauggaaagacuau

SEQ ID NO: 236907 - RNA, 19 nt, Homo sapiens
  misc_RNA (1)...(19): siRNA sense strand
gagaauacugucguugauc

SEQ ID NO: 236908 - RNA, 19 nt, Homo sapiens
  misc_RNA (1)...(19): siRNA sense strand
aaguccaguuccuugauaa

SEQ ID NO: 236909 - RNA, 19 nt, Homo sapiens
  misc_RNA (1)...(19): siRNA sense strand
ggaaagacuaugaaaaugg

SEQ ID NO: 236910 - RNA, 19 nt, Homo sapiens
  misc_RNA (1)...(19): siRNA sense strand
ggcaguaugcagauuguuc

SEQ ID NO: 236911 - RNA, 19 nt, Homo sapiens
  misc_RNA (1)...(19): siRNA sense strand
uaaaacagacaaugggauu

SEQ ID NO: 236912 - RNA, 19 nt, Homo sapiens
  misc_RNA (1)...(19): siRNA sense strand
ggaggauggacuguaauuc

SEQ ID NO: 236913 - RNA, 19 nt, Homo sapiens
  misc_RNA (1)...(19): siRNA sense strand
ggguauaagcucaguggau

SEQ ID NO: 236914 - RNA, 19 nt, Homo sapiens
  misc_RNA (1)...(19): siRNA sense strand
agaaugaaguccaguuccu

SEQ ID NO: 236915 - RNA, 19 nt, Homo sapiens
  misc_RNA (1)...(19): siRNA sense strand
gcaaaccugaaugguguau

SEQ ID NO: 236916 - RNA, 19 nt, Homo sapiens
  misc_RNA (1)...(19): siRNA sense strand
ugcagauuguucagagauu

SEQ ID NO: 236917 - RNA, 19 nt, Homo sapiens
  misc_RNA (1)...(19): siRNA sense strand
agaugagaauacugucguu

SEQ ID NO: 236918 - RNA, 19 nt, Homo sapiens
  misc_RNA (1)...(19): siRNA sense strand
gauggaaagacuaugaaaa

SEQ ID NO: 236919 - RNA, 19 nt, Homo sapiens
  misc_RNA (1)...(19): siRNA sense strand
aaacagcaacaggucaaga

SEQ ID NO: 236920 - RNA, 19 nt, Homo sapiens
  misc_RNA (1)...(19): siRNA sense strand
ugauggcagugaaaacuuu

SEQ ID NO: 236921 - RNA, 19 nt, Homo sapiens
  misc_RNA (1)...(19): siRNA sense strand
aaacaaaccuuucaaguuc

SEQ ID NO: 236922 - RNA, 19 nt, Homo sapiens
  misc_RNA (1)...(19): siRNA sense strand
ggaagaaguuugauucauc

SEQ ID NO: 236923 - RNA, 19 nt, Homo sapiens
  misc_RNA (1)...(19): siRNA sense strand
aaacguguguggugcacua

SEQ ID NO: 236924 - RNA, 19 nt, Homo sapiens
  misc_RNA (1)...(19): siRNA sense strand
caaacaggaagucaucaaa

SEQ ID NO: 236925 - RNA, 19 nt, Homo sapiens
  misc_RNA (1)...(19): siRNA sense strand
gcaaacaggaagucaucaa

SEQ ID NO: 236926 - RNA, 19 nt, Homo sapiens
  misc_RNA (1)...(19): siRNA sense strand
gggaagaaguuugauucau

SEQ ID NO: 236927 - RNA, 19 nt, Homo sapiens
  misc_RNA (1)...(19): siRNA sense strand
caaugccacccucaucuuu

SEQ ID NO: 236928 - RNA, 19 nt, Homo sapiens
  misc_RNA (1)...(19): siRNA sense strand
ccuuucaaguucagaauug

SEQ ID NO: 236929 - RNA, 19 nt, Homo sapiens
  misc_RNA (1)...(19): siRNA sense strand
gaaggacauuccccaagaa

SEQ ID NO: 236930 - RNA, 19 nt, Homo sapiens
  misc_RNA (1)...(19): siRNA sense strand
guucagaauuggcaaacag

SEQ ID NO: 236931 - RNA, 19 nt, Homo sapiens
  misc_RNA (1)...(19): siRNA sense strand
gagacagaaacaaaccuuu

SEQ ID NO: 236932 - RNA, 19 nt, Homo sapiens
  misc_RNA (1)...(19): siRNA sense strand
aggaagucaucaaagguuu

SEQ ID NO: 236933 - RNA, 19 nt, Homo sapiens
  misc_RNA (1)...(19): siRNA sense strand
guggugcacuacacaggaa

SEQ ID NO: 236934 - RNA, 19 nt, Homo sapiens
  misc_RNA (1)...(19): siRNA sense strand
caggaagucaucaaagguu

SEQ ID NO: 236935 - RNA, 19 nt, Homo sapiens
  misc_RNA (1)...(19): siRNA sense strand
acacaggaaugcuccaaaa

SEQ ID NO: 236936 - RNA, 19 nt, Homo sapiens
  misc_RNA (1)...(19): siRNA sense strand
ggugucaucccucccaaug

SEQ ID NO: 236937 - RNA, 19 nt, Homo sapiens
  misc_RNA (1)...(19): siRNA sense strand
gcguggagaucgagaccau

SEQ ID NO: 236938 - RNA, 19 nt, Homo sapiens
  misc_RNA (1)...(19): siRNA sense strand
aaacaggaagucaucaaag

SEQ ID NO: 236939 - RNA, 19 nt, Homo sapiens
  misc_RNA (1)...(19): siRNA sense strand
cagaauuggcaaacaggaa

SEQ ID NO: 236940 - RNA, 19 nt, Homo sapiens
  misc_RNA (1)...(19): siRNA sense strand
ccaaugccacccucaucuu

SEQ ID NO: 236941 - RNA, 19 nt, Homo sapiens
  misc_RNA (1)...(19): siRNA sense strand
aacaggaagucaucaaagg

SEQ ID NO: 236942 - RNA, 19 nt, Homo sapiens
  misc_RNA (1)...(19): siRNA sense strand
caaguucagaauuggcaaa

SEQ ID NO: 236943 - RNA, 19 nt, Homo sapiens
  misc_RNA (1)...(19): siRNA sense strand
gcugcucaacuuagaguga

SEQ ID NO: 236944 - RNA, 19 nt, Homo sapiens
  misc_RNA (1)...(19): siRNA sense strand
aacaaaccuuucaaguuca

SEQ ID NO: 236945 - RNA, 19 nt, Homo sapiens
  misc_RNA (1)...(19): siRNA sense strand
augccacccucaucuuuga

SEQ ID NO: 236946 - RNA, 19 nt, Homo sapiens
  misc_RNA (1)...(19): siRNA sense strand
caggaaugcuccaaaaugg

SEQ ID NO: 236947 - RNA, 19 nt, Homo sapiens
  misc_RNA (1)...(19): siRNA sense strand
aaacaaaccuuucaaguuc

SEQ ID NO: 236948 - RNA, 19 nt, Homo sapiens
  misc_RNA (1)...(19): siRNA sense strand
ggaagaaguuugauucauc

SEQ ID NO: 236949 - RNA, 19 nt, Homo sapiens
  misc_RNA (1)...(19): siRNA sense strand
aaacguguguggugcacua

SEQ ID NO: 236950 - RNA, 19 nt, Homo sapiens
  misc_RNA (1)...(19): siRNA sense strand
caaacaggaagucaucaaa

SEQ ID NO: 236951 - RNA, 19 nt, Homo sapiens
  misc_RNA (1)...(19): siRNA sense strand
gcaaacaggaagucaucaa

SEQ ID NO: 236952 - RNA, 19 nt, Homo sapiens
  misc_RNA (1)...(19): siRNA sense strand
gggaagaaguuugauucau

SEQ ID NO: 236953 - RNA, 19 nt, Homo sapiens
  misc_RNA (1)...(19): siRNA sense strand
ccuuucaaguucagaauug

SEQ ID NO: 236954 - RNA, 19 nt, Homo sapiens
  misc_RNA (1)...(19): siRNA sense strand
gaaggacauuccccaagaa

SEQ ID NO: 236955 - RNA, 19 nt, Homo sapiens
  misc_RNA (1)...(19): siRNA sense strand
guucagaauuggcaaacag

SEQ ID NO: 236956 - RNA, 19 nt, Homo sapiens
  misc_RNA (1)...(19): siRNA sense strand
gagacagaaacaaaccuuu

SEQ ID NO: 236957 - RNA, 19 nt, Homo sapiens
  misc_RNA (1)...(19): siRNA sense strand
aggaagucaucaaagguuu

SEQ ID NO: 236958 - RNA, 19 nt, Homo sapiens
  misc_RNA (1)...(19): siRNA sense strand
guggugcacuacacaggaa

SEQ ID NO: 236959 - RNA, 19 nt, Homo sapiens
  misc_RNA (1)...(19): siRNA sense strand
caggaagucaucaaagguu

SEQ ID NO: 236960 - RNA, 19 nt, Homo sapiens
  misc_RNA (1)...(19): siRNA sense strand
acacaggaaugcuccaaaa

SEQ ID NO: 236961 - RNA, 19 nt, Homo sapiens
  misc_RNA (1)...(19): siRNA sense strand
gcguggagaucgagaccau

SEQ ID NO: 236962 - RNA, 19 nt, Homo sapiens
  misc_RNA (1)...(19): siRNA sense strand
aaacaggaagucaucaaag

SEQ ID NO: 236963 - RNA, 19 nt, Homo sapiens
  misc_RNA (1)...(19): siRNA sense strand
cagaauuggcaaacaggaa

SEQ ID NO: 236964 - RNA, 19 nt, Homo sapiens
  misc_RNA (1)...(19): siRNA sense strand
aacaggaagucaucaaagg

SEQ ID NO: 236965 - RNA, 19 nt, Homo sapiens
  misc_RNA (1)...(19): siRNA sense strand
caaguucagaauuggcaaa

SEQ ID NO: 236966 - RNA, 19 nt, Homo sapiens
  misc_RNA (1)...(19): siRNA sense strand
aacaaaccuuucaaguuca

SEQ ID NO: 236967 - RNA, 19 nt, Homo sapiens
  misc_RNA (1)...(19): siRNA sense strand
caggaaugcuccaaaaugg

SEQ ID NO: 236968 - RNA, 19 nt, Homo sapiens
  misc_RNA (1)...(19): siRNA sense strand
gagaaaggcuuguauagga

SEQ ID NO: 236969 - RNA, 19 nt, Homo sapiens
  misc_RNA (1)...(19): siRNA sense strand
gaaagcuucugaaucauuu

SEQ ID NO: 236970 - RNA, 19 nt, Homo sapiens
  misc_RNA (1)...(19): siRNA sense strand
caaaggagaggauuuauuu

SEQ ID NO: 236971 - RNA, 19 nt, Homo sapiens
  misc_RNA (1)...(19): siRNA sense strand
ugacaaagcucuggagaaa

SEQ ID NO: 236972 - RNA, 19 nt, Homo sapiens
  misc_RNA (1)...(19): siRNA sense strand
gaagauaguguccugguua

SEQ ID NO: 236973 - RNA, 19 nt, Homo sapiens
  misc_RNA (1)...(19): siRNA sense strand
ggagauggauaccaaagaa

SEQ ID NO: 236974 - RNA, 19 nt, Homo sapiens
  misc_RNA (1)...(19): siRNA sense strand
ggaauaugguuuaucagaa

SEQ ID NO: 236975 - RNA, 19 nt, Homo sapiens
  misc_RNA (1)...(19): siRNA sense strand
gauggaauaugguuuauca

SEQ ID NO: 236976 - RNA, 19 nt, Homo sapiens
  misc_RNA (1)...(19): siRNA sense strand
agauugagcuccuugauuu

SEQ ID NO: 236977 - RNA, 19 nt, Homo sapiens
  misc_RNA (1)...(19): siRNA sense strand
ggagagauaugccauuuac

SEQ ID NO: 236978 - RNA, 19 nt, Homo sapiens
  misc_RNA (1)...(19): siRNA sense strand
gaaaggagagggauauuca

SEQ ID NO: 236979 - RNA, 19 nt, Homo sapiens
  misc_RNA (1)...(19): siRNA sense strand
ggagagggauauucaaauc

SEQ ID NO: 236980 - RNA, 19 nt, Homo sapiens
  misc_RNA (1)...(19): siRNA sense strand
augcugagcuuauauauga

SEQ ID NO: 236981 - RNA, 19 nt, Homo sapiens
  misc_RNA (1)...(19): siRNA sense strand
ggacagugccaaugagaaa

SEQ ID NO: 236982 - RNA, 19 nt, Homo sapiens
  misc_RNA (1)...(19): siRNA sense strand
agaaagugcuggaaguaaa

SEQ ID NO: 236983 - RNA, 19 nt, Homo sapiens
  misc_RNA (1)...(19): siRNA sense strand
caccaaagcuguugaaugc

SEQ ID NO: 236984 - RNA, 19 nt, Homo sapiens
  misc_RNA (1)...(19): siRNA sense strand
gaacagacagucaagcaau

SEQ ID NO: 236985 - RNA, 19 nt, Homo sapiens
  misc_RNA (1)...(19): siRNA sense strand
ccauuugucuuuagucuug

SEQ ID NO: 236986 - RNA, 19 nt, Homo sapiens
  misc_RNA (1)...(19): siRNA sense strand
gguuagagauggaauaugg

SEQ ID NO: 236987 - RNA, 19 nt, Homo sapiens
  misc_RNA (1)...(19): siRNA sense strand
gagaggauuuauuugaaga

SEQ ID NO: 236988 - RNA, 19 nt, Homo sapiens
  misc_RNA (1)...(19): siRNA sense strand
gcagggaagccuaaauuug

SEQ ID NO: 236989 - RNA, 19 nt, Homo sapiens
  misc_RNA (1)...(19): siRNA sense strand
gaaggccgcugugguggaa

SEQ ID NO: 236990 - RNA, 19 nt, Homo sapiens
  misc_RNA (1)...(19): siRNA sense strand
ggaagauaguguccugguu

SEQ ID NO: 236991 - RNA, 19 nt, Homo sapiens
  misc_RNA (1)...(19): siRNA sense strand
ggagaggauuuauuugaag

SEQ ID NO: 236992 - RNA, 19 nt, Homo sapiens
  misc_RNA (1)...(19): siRNA sense strand
ccaaggaagaggccaauaa

SEQ ID NO: 236993 - RNA, 19 nt, Homo sapiens
  misc_RNA (1)...(19): siRNA sense strand
gagcagggagaggauauua

SEQ ID NO: 236994 - RNA, 19 nt, Homo sapiens
  misc_RNA (1)...(19): siRNA sense strand
caaggaagaggccaauaaa

SEQ ID NO: 236995 - RNA, 19 nt, Homo sapiens
  misc_RNA (1)...(19): siRNA sense strand
ggauuuauuugaagaugga

SEQ ID NO: 236996 - RNA, 19 nt, Homo sapiens
  misc_RNA (1)...(19): siRNA sense strand
gaggaaacgccgaugauug

SEQ ID NO: 236997 - RNA, 19 nt, Homo sapiens
  misc_RNA (1)...(19): siRNA sense strand
gaaaaggaaucgaaagcuu

SEQ ID NO: 236998 - RNA, 19 nt, Homo sapiens
  misc_RNA (1)...(19): siRNA sense strand
aaacgaaggagcaacagua

SEQ ID NO: 236999 - RNA, 19 nt, Homo sapiens
  misc_RNA (1)...(19): siRNA sense strand
cgaaggagcaacaguagaa

SEQ ID NO: 237000 - RNA, 19 nt, Homo sapiens
  misc_RNA (1)...(19): siRNA sense strand
gauauacgccaacauguuc

SEQ ID NO: 237001 - RNA, 19 nt, Homo sapiens
  misc_RNA (1)...(19): siRNA sense strand
ggauauacgccaacauguu

SEQ ID NO: 237002 - RNA, 19 nt, Homo sapiens
  misc_RNA (1)...(19): siRNA sense strand
ggaagaggccaauaaagca

SEQ ID NO: 237003 - RNA, 19 nt, Homo sapiens
  misc_RNA (1)...(19): siRNA sense strand
caagaacaaugaagaaagc

SEQ ID NO: 237004 - RNA, 19 nt, Homo sapiens
  misc_RNA (1)...(19): siRNA sense strand
gagaaagugcuggaaguaa

SEQ ID NO: 237005 - RNA, 19 nt, Homo sapiens
  misc_RNA (1)...(19): siRNA sense strand
caaagaauccugggagaug

SEQ ID NO: 237006 - RNA, 19 nt, Homo sapiens
  misc_RNA (1)...(19): siRNA sense strand
gagauugagcuccuugauu

SEQ ID NO: 237007 - RNA, 19 nt, Homo sapiens
  misc_RNA (1)...(19): siRNA sense strand
caaaguuuauguccauuac

SEQ ID NO: 237008 - RNA, 19 nt, Homo sapiens
  misc_RNA (1)...(19): siRNA sense strand
agagauggaauaugguuua

SEQ ID NO: 237009 - RNA, 19 nt, Homo sapiens
  misc_RNA (1)...(19): siRNA sense strand
gaaccuaaugcugagcuua

SEQ ID NO: 237010 - RNA, 19 nt, Homo sapiens
  misc_RNA (1)...(19): siRNA sense strand
gaaguuugauuccagucau

SEQ ID NO: 237011 - RNA, 19 nt, Homo sapiens
  misc_RNA (1)...(19): siRNA sense strand
gaagaaaggagagauaugc

SEQ ID NO: 237012 - RNA, 19 nt, Homo sapiens
  misc_RNA (1)...(19): siRNA sense strand
gaagaggccaauaaagcaa

SEQ ID NO: 237013 - RNA, 19 nt, Homo sapiens
  misc_RNA (1)...(19): siRNA sense strand
gcaaaccagaauaugcaua

SEQ ID NO: 237014 - RNA, 19 nt, Homo sapiens
  misc_RNA (1)...(19): siRNA sense strand
cgaaagcuucugaaucauu

SEQ ID NO: 237015 - RNA, 19 nt, Homo sapiens
  misc_RNA (1)...(19): siRNA sense strand
gagauggaauaugguuuau

SEQ ID NO: 237016 - RNA, 19 nt, Homo sapiens
  misc_RNA (1)...(19): siRNA sense strand
ggaaaauugucaaauggaa

SEQ ID NO: 237017 - RNA, 19 nt, Homo sapiens
  misc_RNA (1)...(19): siRNA sense strand
cagaaggggucacuaauga

SEQ ID NO: 237018 - RNA, 19 nt, Homo sapiens
  misc_RNA (1)...(19): siRNA sense strand
gcagagauguggcauucac

SEQ ID NO: 237019 - RNA, 19 nt, Homo sapiens
  misc_RNA (1)...(19): siRNA sense strand
aaggagagauaugccauuu

SEQ ID NO: 237020 - RNA, 19 nt, Homo sapiens
  misc_RNA (1)...(19): siRNA sense strand
caagggaggcaaauacaug

SEQ ID NO: 237021 - RNA, 19 nt, Homo sapiens
  misc_RNA (1)...(19): siRNA sense strand
gcaaugggcaagaagacuu

SEQ ID NO: 237022 - RNA, 19 nt, Homo sapiens
  misc_RNA (1)...(19): siRNA sense strand
ccaacauguucaagaaguu

SEQ ID NO: 237023 - RNA, 19 nt, Homo sapiens
  misc_RNA (1)...(19): siRNA sense strand
gcaaaggccaagucaucaa

SEQ ID NO: 237024 - RNA, 19 nt, Homo sapiens
  misc_RNA (1)...(19): siRNA sense strand
aucgaaagcuucugaauca

SEQ ID NO: 237025 - RNA, 19 nt, Homo sapiens
  misc_RNA (1)...(19): siRNA sense strand
gaccacgacauuccaauug

SEQ ID NO: 237026 - RNA, 19 nt, Homo sapiens
  misc_RNA (1)...(19): siRNA sense strand
gaggauuuauuugaagaug

SEQ ID NO: 237027 - RNA, 19 nt, Homo sapiens
  misc_RNA (1)...(19): siRNA sense strand
gucaagcaauggaagaaga

SEQ ID NO: 237028 - RNA, 19 nt, Homo sapiens
  misc_RNA (1)...(19): siRNA sense strand
gccaacauguucaagaagu

SEQ ID NO: 237029 - RNA, 19 nt, Homo sapiens
  misc_RNA (1)...(19): siRNA sense strand
caagggugacuuugagaaa

SEQ ID NO: 237030 - RNA, 19 nt, Homo sapiens
  misc_RNA (1)...(19): siRNA sense strand
gauuggagacaaaguuuau

SEQ ID NO: 237031 - RNA, 19 nt, Homo sapiens
  misc_RNA (1)...(19): siRNA sense strand
gaaggugccaagaacaaug

SEQ ID NO: 237032 - RNA, 19 nt, Homo sapiens
  misc_RNA (1)...(19): siRNA sense strand
gagauaugccauuuacugu

SEQ ID NO: 237033 - RNA, 19 nt, Homo sapiens
  misc_RNA (1)...(19): siRNA sense strand
ggaaaggagagggauauuc

SEQ ID NO: 237034 - RNA, 19 nt, Homo sapiens
  misc_RNA (1)...(19): siRNA sense strand
aggagaggauuuauuugaa

SEQ ID NO: 237035 - RNA, 19 nt, Homo sapiens
  misc_RNA (1)...(19): siRNA sense strand
ucaaaggagaggauuuauu

SEQ ID NO: 237036 - RNA, 19 nt, Homo sapiens
  misc_RNA (1)...(19): siRNA sense strand
gaagauggaggcauuaucc

SEQ ID NO: 237037 - RNA, 19 nt, Homo sapiens
  misc_RNA (1)...(19): siRNA sense strand
gaugauuggagacaaaguu

SEQ ID NO: 237038 - RNA, 19 nt, Homo sapiens
  misc_RNA (1)...(19): siRNA sense strand
caacauguucaagaaguuu

SEQ ID NO: 237039 - RNA, 19 nt, Homo sapiens
  misc_RNA (1)...(19): siRNA sense strand
gauucaguaugggaagaua

SEQ ID NO: 237040 - RNA, 19 nt, Homo sapiens
  misc_RNA (1)...(19): siRNA sense strand
cuaaugcugagcuuauaua

SEQ ID NO: 237041 - RNA, 19 nt, Homo sapiens
  misc_RNA (1)...(19): siRNA sense strand
caugaagaaaggagagaua

SEQ ID NO: 237042 - RNA, 19 nt, Homo sapiens
  misc_RNA (1)...(19): siRNA sense strand
gcuuagagaauacaccaaa

SEQ ID NO: 237043 - RNA, 19 nt, Homo sapiens
  misc_RNA (1)...(19): siRNA sense strand
gccgaugauuggagacaaa

SEQ ID NO: 237044 - RNA, 19 nt, Homo sapiens
  misc_RNA (1)...(19): siRNA sense strand
aaggagaggauuuauuuga

SEQ ID NO: 237045 - RNA, 19 nt, Homo sapiens
  misc_RNA (1)...(19): siRNA sense strand
aagcccagcugcucaugaa

SEQ ID NO: 237046 - RNA, 19 nt, Homo sapiens
  misc_RNA (1)...(19): siRNA sense strand
ccugggagauggauaccaa

SEQ ID NO: 237047 - RNA, 19 nt, Homo sapiens
  misc_RNA (1)...(19): siRNA sense strand
gccuaaauuuggcauugaa

SEQ ID NO: 237048 - RNA, 19 nt, Homo sapiens
  misc_RNA (1)...(19): siRNA sense strand
acaaagcucuggagaaaau

SEQ ID NO: 237049 - RNA, 19 nt, Homo sapiens
  misc_RNA (1)...(19): siRNA sense strand
gagcaacaguagaaaucca

SEQ ID NO: 237050 - RNA, 19 nt, Homo sapiens
  misc_RNA (1)...(19): siRNA sense strand
gaaggagcaacaguagaaa

SEQ ID NO: 237051 - RNA, 19 nt, Homo sapiens
  misc_RNA (1)...(19): siRNA sense strand
auaaagcaaugggcaagaa

SEQ ID NO: 237052 - RNA, 19 nt, Homo sapiens
  misc_RNA (1)...(19): siRNA sense strand
cagggaagccuaaauuugg

SEQ ID NO: 237053 - RNA, 19 nt, Homo sapiens
  misc_RNA (1)...(19): siRNA sense strand
caucaaggcaugggacauu

SEQ ID NO: 237054 - RNA, 19 nt, Homo sapiens
  misc_RNA (1)...(19): siRNA sense strand
ggaacagacagucaagcaa

SEQ ID NO: 237055 - RNA, 19 nt, Homo sapiens
  misc_RNA (1)...(19): siRNA sense strand
ugagaaagugcuggaagua

SEQ ID NO: 237056 - RNA, 19 nt, Homo sapiens
  misc_RNA (1)...(19): siRNA sense strand
gaauacaccaaagcuguug

SEQ ID NO: 237057 - RNA, 19 nt, Homo sapiens
  misc_RNA (1)...(19): siRNA sense strand
ugcaggcggugauucagua

SEQ ID NO: 237058 - RNA, 19 nt, Homo sapiens
  misc_RNA (1)...(19): siRNA sense strand
gcgggaagaacaauguauu

SEQ ID NO: 237059 - RNA, 19 nt, Homo sapiens
  misc_RNA (1)...(19): siRNA sense strand
uuucaaaggagaggauuua

SEQ ID NO: 237060 - RNA, 19 nt, Homo sapiens
  misc_RNA (1)...(19): siRNA sense strand
caggauauacgccaacaug

SEQ ID NO: 237061 - RNA, 19 nt, Homo sapiens
  misc_RNA (1)...(19): siRNA sense strand
gcuguugaaugcugugaca

SEQ ID NO: 237062 - RNA, 19 nt, Homo sapiens
  misc_RNA (1)...(19): siRNA sense strand
gagauggauaccaaagaaa

SEQ ID NO: 237063 - RNA, 19 nt, Homo sapiens
  misc_RNA (1)...(19): siRNA sense strand
gaagaccacgacauuccaa

SEQ ID NO: 237064 - RNA, 19 nt, Homo sapiens
  misc_RNA (1)...(19): siRNA sense strand
cugcagagauguggcauuc

SEQ ID NO: 237065 - RNA, 19 nt, Homo sapiens
  misc_RNA (1)...(19): siRNA sense strand
gaaucgaaagcuucugaau

SEQ ID NO: 237066 - RNA, 19 nt, Homo sapiens
  misc_RNA (1)...(19): siRNA sense strand
ccaaugagaaaggcuugua

SEQ ID NO: 237067 - RNA, 19 nt, Homo sapiens
  misc_RNA (1)...(19): siRNA sense strand
accugaagcuuagagaaua

SEQ ID NO: 237068 - RNA, 19 nt, Homo sapiens
  misc_RNA (1)...(19): siRNA sense strand
gaacuuuacugcuaggauu

SEQ ID NO: 237069 - RNA, 19 nt, Homo sapiens
  misc_RNA (1)...(19): siRNA sense strand
ggacgaagaagacgaggaa

SEQ ID NO: 237070 - RNA, 19 nt, Homo sapiens
  misc_RNA (1)...(19): siRNA sense strand
gucgagaacuuuacugcua

SEQ ID NO: 237071 - RNA, 19 nt, Homo sapiens
  misc_RNA (1)...(19): siRNA sense strand
gcuaggauuuccaauuguu

SEQ ID NO: 237072 - RNA, 19 nt, Homo sapiens
  misc_RNA (1)...(19): siRNA sense strand
cugcuaggauuuccaauug

SEQ ID NO: 237073 - RNA, 19 nt, Homo sapiens
  misc_RNA (1)...(19): siRNA sense strand
ccaagaacccgcuggugaa

SEQ ID NO: 237074 - RNA, 19 nt, Homo sapiens
  misc_RNA (1)...(19): siRNA sense strand
ggaguccgccgacauguuc

SEQ ID NO: 237075 - RNA, 19 nt, Homo sapiens
  misc_RNA (1)...(19): siRNA sense strand
ggagggcgaggacgaagaa

SEQ ID NO: 237076 - RNA, 19 nt, Homo sapiens
  misc_RNA (1)...(19): siRNA sense strand
ugagcgagaucugugaguu

SEQ ID NO: 237077 - RNA, 19 nt, Homo sapiens
  misc_RNA (1)...(19): siRNA sense strand
gaacagcauccgccacaac

SEQ ID NO: 237078 - RNA, 19 nt, Homo sapiens
  misc_RNA (1)...(19): siRNA sense strand
cgagaucugugaguucauc

SEQ ID NO: 237079 - RNA, 19 nt, Homo sapiens
  misc_RNA (1)...(19): siRNA sense strand
gccacaaccucucgcucaa

SEQ ID NO: 237080 - RNA, 19 nt, Homo sapiens
  misc_RNA (1)...(19): siRNA sense strand
auaucgcgcucaucacuau

SEQ ID NO: 237081 - RNA, 19 nt, Homo sapiens
  misc_RNA (1)...(19): siRNA sense strand
cuaggauuuccaauuguua

SEQ ID NO: 237082 - RNA, 19 nt, Homo sapiens
  misc_RNA (1)...(19): siRNA sense strand
gagcgagaucugugaguuc

SEQ ID NO: 237083 - RNA, 19 nt, Homo sapiens
  misc_RNA (1)...(19): siRNA sense strand
cgaagaagacgaggaagag

SEQ ID NO: 237084 - RNA, 19 nt, Homo sapiens
  misc_RNA (1)...(19): siRNA sense strand
aggacgagcuggaggaucu

SEQ ID NO: 237085 - RNA, 19 nt, Homo sapiens
  misc_RNA (1)...(19): siRNA sense strand
ggaggaggaggacgacgau

SEQ ID NO: 237086 - RNA, 19 nt, Homo sapiens
  misc_RNA (1)...(19): siRNA sense strand
ccgccgacauguucgacaa

SEQ ID NO: 237087 - RNA, 19 nt, Homo sapiens
  misc_RNA (1)...(19): siRNA sense strand
ccuacuaccgggagaaguu

SEQ ID NO: 237088 - RNA, 19 nt, Homo sapiens
  misc_RNA (1)...(19): siRNA sense strand
guauaucgcgcucaucacu

SEQ ID NO: 237089 - RNA, 19 nt, Homo sapiens
  misc_RNA (1)...(19): siRNA sense strand
ggaggaggacgacgaugac

SEQ ID NO: 237090 - RNA, 19 nt, Homo sapiens
  misc_RNA (1)...(19): siRNA sense strand
uguccagugucgagaacuu

SEQ ID NO: 237091 - RNA, 19 nt, Homo sapiens
  misc_RNA (1)...(19): siRNA sense strand
gcucggaccucuccaccua

SEQ ID NO: 237092 - RNA, 19 nt, Homo sapiens
  misc_RNA (1)...(19): siRNA sense strand
gccacaaccucacacucaa

SEQ ID NO: 237093 - RNA, 19 nt, Homo sapiens
  misc_RNA (1)...(19): siRNA sense strand
gaacagcauccgccacaac

SEQ ID NO: 237094 - RNA, 19 nt, Homo sapiens
  misc_RNA (1)...(19): siRNA sense strand
guucguguccgccauguga

SEQ ID NO: 237095 - RNA, 19 nt, Homo sapiens
  misc_RNA (1)...(19): siRNA sense strand
caacgacugcuuccucaag

SEQ ID NO: 237096 - RNA, 19 nt, Homo sapiens
  misc_RNA (1)...(19): siRNA sense strand
ccaccuacccggcuuacau

SEQ ID NO: 237097 - RNA, 19 nt, Homo sapiens
  misc_RNA (1)...(19): siRNA sense strand
caacgcggaggacauguuc

SEQ ID NO: 237098 - RNA, 19 nt, Homo sapiens
  misc_RNA (1)...(19): siRNA sense strand
gcugggagccugcuacaac

SEQ ID NO: 237099 - RNA, 19 nt, Homo sapiens
  misc_RNA (1)...(19): siRNA sense strand
uggcuaccgugaaggaaga

SEQ ID NO: 237100 - RNA, 19 nt, Homo sapiens
  misc_RNA (1)...(19): siRNA sense strand
ggugcuggcuaccgugaag

SEQ ID NO: 237101 - RNA, 19 nt, Homo sapiens
  misc_RNA (1)...(19): siRNA sense strand
ggcggcaucuacaaguuca

SEQ ID NO: 237102 - RNA, 19 nt, Homo sapiens
  misc_RNA (1)...(19): siRNA sense strand
aacgacugcuuccucaaga

SEQ ID NO: 237103 - RNA, 19 nt, Homo sapiens
  misc_RNA (1)...(19): siRNA sense strand
cgccacaaccucacacuca

SEQ ID NO: 237104 - RNA, 19 nt, Homo sapiens
  misc_RNA (1)...(19): siRNA sense strand
ccaacgcggaggacauguu

SEQ ID NO: 237105 - RNA, 19 nt, Homo sapiens
  misc_RNA (1)...(19): siRNA sense strand
ggaagccgaggcagacuua

SEQ ID NO: 237106 - RNA, 19 nt, Homo sapiens
  misc_RNA (1)...(19): siRNA sense strand
ccaagaagcggcugacguu

SEQ ID NO: 237107 - RNA, 19 nt, Homo sapiens
  misc_RNA (1)...(19): siRNA sense strand
gccacaaccucucucucaa

SEQ ID NO: 237108 - RNA, 19 nt, Homo sapiens
  misc_RNA (1)...(19): siRNA sense strand
cgaggccgacgcagacaua

SEQ ID NO: 237109 - RNA, 19 nt, Homo sapiens
  misc_RNA (1)...(19): siRNA sense strand
gaacagcauccgccacaac

SEQ ID NO: 237110 - RNA, 19 nt, Homo sapiens
  misc_RNA (1)...(19): siRNA sense strand
ggccuuccuucucuauaga

SEQ ID NO: 237111 - RNA, 19 nt, Homo sapiens
  misc_RNA (1)...(19): siRNA sense strand
ugagcgagaucugcgaguu

SEQ ID NO: 237112 - RNA, 19 nt, Homo sapiens
  misc_RNA (1)...(19): siRNA sense strand
gggcagaggccuuccuucu

SEQ ID NO: 237113 - RNA, 19 nt, Homo sapiens
  misc_RNA (1)...(19): siRNA sense strand
agaagcggcugacguugag

SEQ ID NO: 237114 - RNA, 19 nt, Homo sapiens
  misc_RNA (1)...(19): siRNA sense strand
aagaagcggcugacguuga

SEQ ID NO: 237115 - RNA, 19 nt, Homo sapiens
  misc_RNA (1)...(19): siRNA sense strand
ucccguugcuggccacauu

SEQ ID NO: 237116 - RNA, 19 nt, Homo sapiens
  misc_RNA (1)...(19): siRNA sense strand
gagcgagaucugcgaguuc

SEQ ID NO: 237117 - RNA, 19 nt, Homo sapiens
  misc_RNA (1)...(19): siRNA sense strand
cggccgacauguucgacaa

SEQ ID NO: 237118 - RNA, 19 nt, Homo sapiens
  misc_RNA (1)...(19): siRNA sense strand
ccuacuaccgggagaaguu

SEQ ID NO: 237119 - RNA, 19 nt, Homo sapiens
  misc_RNA (1)...(19): siRNA sense strand
gaggccuuccuucucuaua

SEQ ID NO: 237120 - RNA, 19 nt, Homo sapiens
  misc_RNA (1)...(19): siRNA sense strand
gagaucugcgaguucauca

SEQ ID NO: 237121 - RNA, 19 nt, Homo sapiens
  misc_RNA (1)...(19): siRNA sense strand
cgccacaaccucucucuca

SEQ ID NO: 237122 - RNA, 19 nt, Homo sapiens
  misc_RNA (1)...(19): siRNA sense strand
ggaauguucuucuuugagu

SEQ ID NO: 237123 - RNA, 19 nt, Homo sapiens
  misc_RNA (1)...(19): siRNA sense strand
ccaggaauguucuucuuug

SEQ ID NO: 237124 - RNA, 19 nt, Homo sapiens
  misc_RNA (1)...(19): siRNA sense strand
gaauguucuucuuugagua

SEQ ID NO: 237125 - RNA, 19 nt, Homo sapiens
  misc_RNA (1)...(19): siRNA sense strand
caggaauguucuucuuuga

SEQ ID NO: 237126 - RNA, 19 nt, Homo sapiens
  misc_RNA (1)...(19): siRNA sense strand
ugacugccacgacauguuu

SEQ ID NO: 237127 - RNA, 19 nt, Homo sapiens
  misc_RNA (1)...(19): siRNA sense strand
caaccaagccucccuacag

SEQ ID NO: 237128 - RNA, 19 nt, Homo sapiens
  misc_RNA (1)...(19): siRNA sense strand
gccaguaugugcccagcaa

SEQ ID NO: 237129 - RNA, 19 nt, Homo sapiens
  misc_RNA (1)...(19): siRNA sense strand
gccacaaccugucacucaa

SEQ ID NO: 237130 - RNA, 19 nt, Homo sapiens
  misc_RNA (1)...(19): siRNA sense strand
gaacagcauccgccacaac

SEQ ID NO: 237131 - RNA, 19 nt, Homo sapiens
  misc_RNA (1)...(19): siRNA sense strand
ccauggagcccaaagagau

SEQ ID NO: 237132 - RNA, 19 nt, Homo sapiens
  misc_RNA (1)...(19): siRNA sense strand
ccaagccucccuacagcua

SEQ ID NO: 237133 - RNA, 19 nt, Homo sapiens
  misc_RNA (1)...(19): siRNA sense strand
caacgagugcuuugucaag

SEQ ID NO: 237134 - RNA, 19 nt, Homo sapiens
  misc_RNA (1)...(19): siRNA sense strand
gccaggaauguucuucuuu

SEQ ID NO: 237135 - RNA, 19 nt, Homo sapiens
  misc_RNA (1)...(19): siRNA sense strand
acagcuacaucgcccuuau

SEQ ID NO: 237136 - RNA, 19 nt, Homo sapiens
  misc_RNA (1)...(19): siRNA sense strand
cccaagggccuaagcuuug

SEQ ID NO: 237137 - RNA, 19 nt, Homo sapiens
  misc_RNA (1)...(19): siRNA sense strand
gcugagaguuuuaauaagg

SEQ ID NO: 237138 - RNA, 19 nt, Homo sapiens
  misc_RNA (1)...(19): siRNA sense strand
cuacaucgcccuuauugcu

SEQ ID NO: 237139 - RNA, 19 nt, Homo sapiens
  misc_RNA (1)...(19): siRNA sense strand
cgccaggaauguucuucuu

SEQ ID NO: 237140 - RNA, 19 nt, Homo sapiens
  misc_RNA (1)...(19): siRNA sense strand
caucuaccgcuacaucaug

SEQ ID NO: 237141 - RNA, 19 nt, Homo sapiens
  misc_RNA (1)...(19): siRNA sense strand
ccacaacugagccaaccaa

SEQ ID NO: 237142 - RNA, 19 nt, Homo sapiens
  misc_RNA (1)...(19): siRNA sense strand
cauggagcccaaagagauu

SEQ ID NO: 237143 - RNA, 19 nt, Homo sapiens
  misc_RNA (1)...(19): siRNA sense strand
acaucgcccuuauugcuau

SEQ ID NO: 237144 - RNA, 19 nt, Homo sapiens
  misc_RNA (1)...(19): siRNA sense strand
cagcuacaucgcccuuauu

SEQ ID NO: 237145 - RNA, 19 nt, Homo sapiens
  misc_RNA (1)...(19): siRNA sense strand
ucccaagggccuaagcuuu

SEQ ID NO: 237146 - RNA, 19 nt, Homo sapiens
  misc_RNA (1)...(19): siRNA sense strand
cgccacaaccugucacuca

SEQ ID NO: 237147 - RNA, 19 nt, Homo sapiens
  misc_RNA (1)...(19): siRNA sense strand
ggcugcaggcacugaauuu

SEQ ID NO: 237148 - RNA, 19 nt, Homo sapiens
  misc_RNA (1)...(19): siRNA sense strand
gcagagagaugcugacauu

SEQ ID NO: 237149 - RNA, 19 nt, Homo sapiens
  misc_RNA (1)...(19): siRNA sense strand
ggacguguaugacaaagug

SEQ ID NO: 237150 - RNA, 19 nt, Homo sapiens
  misc_RNA (1)...(19): siRNA sense strand
gcagaagccuaccagaaau

SEQ ID NO: 237151 - RNA, 19 nt, Homo sapiens
  misc_RNA (1)...(19): siRNA sense strand
aggaagagauugagauuga

SEQ ID NO: 237152 - RNA, 19 nt, Homo sapiens
  misc_RNA (1)...(19): siRNA sense strand
agaaggagaugcuggaugu

SEQ ID NO: 237153 - RNA, 19 nt, Homo sapiens
  misc_RNA (1)...(19): siRNA sense strand
caagauugcugacucuaag

SEQ ID NO: 237154 - RNA, 19 nt, Homo sapiens
  misc_RNA (1)...(19): siRNA sense strand
acaguaaggucacaucaga

SEQ ID NO: 237155 - RNA, 19 nt, Homo sapiens
  misc_RNA (1)...(19): siRNA sense strand
ggcagaagccuaccagaaa

SEQ ID NO: 237156 - RNA, 19 nt, Homo sapiens
  misc_RNA (1)...(19): siRNA sense strand
gugaggagguuaacaucaa

SEQ ID NO: 237157 - RNA, 19 nt, Homo sapiens
  misc_RNA (1)...(19): siRNA sense strand
ucaaggacguguaugacaa

SEQ ID NO: 237158 - RNA, 19 nt, Homo sapiens
  misc_RNA (1)...(19): siRNA sense strand
gcaggaagagauugagauu

SEQ ID NO: 237159 - RNA, 19 nt, Homo sapiens
  misc_RNA (1)...(19): siRNA sense strand
ugacaguggagcagauuua

SEQ ID NO: 237160 - RNA, 19 nt, Homo sapiens
  misc_RNA (1)...(19): siRNA sense strand
caaaaucgcugccccacuu

SEQ ID NO: 237161 - RNA, 19 nt, Homo sapiens
  misc_RNA (1)...(19): siRNA sense strand
gugagcaguuucuggguaa

SEQ ID NO: 237162 - RNA, 19 nt, Homo sapiens
  misc_RNA (1)...(19): siRNA sense strand
gcguggaccugucuaagau

SEQ ID NO: 237163 - RNA, 19 nt, Homo sapiens
  misc_RNA (1)...(19): siRNA sense strand
caaggucgaugagauugug

SEQ ID NO: 237164 - RNA, 19 nt, Homo sapiens
  misc_RNA (1)...(19): siRNA sense strand
cagaagccuaccagaaaua

SEQ ID NO: 237165 - RNA, 19 nt, Homo sapiens
  misc_RNA (1)...(19): siRNA sense strand
ccaagauugcugacucuaa

SEQ ID NO: 237166 - RNA, 19 nt, Homo sapiens
  misc_RNA (1)...(19): siRNA sense strand
ugaagaucaugacggagaa

SEQ ID NO: 237167 - RNA, 19 nt, Homo sapiens
  misc_RNA (1)...(19): siRNA sense strand
gaucaugacggagaaggaa

SEQ ID NO: 237168 - RNA, 19 nt, Homo sapiens
  misc_RNA (1)...(19): siRNA sense strand
uuaccaaggucgaugagau

SEQ ID NO: 237169 - RNA, 19 nt, Homo sapiens
  misc_RNA (1)...(19): siRNA sense strand
agauugagauugagguugu

SEQ ID NO: 237170 - RNA, 19 nt, Homo sapiens
  misc_RNA (1)...(19): siRNA sense strand
caaggacguguaugacaaa

SEQ ID NO: 237171 - RNA, 19 nt, Homo sapiens
  misc_RNA (1)...(19): siRNA sense strand
caguggagcagauuuauca

SEQ ID NO: 237172 - RNA, 19 nt, Homo sapiens
  misc_RNA (1)...(19): siRNA sense strand
gaugcuggaugugaaguuc

SEQ ID NO: 237173 - RNA, 19 nt, Homo sapiens
  misc_RNA (1)...(19): siRNA sense strand
ggcagaggcugagaagauc

SEQ ID NO: 237174 - RNA, 19 nt, Homo sapiens
  misc_RNA (1)...(19): siRNA sense strand
caacaguaaggucacauca

SEQ ID NO: 237175 - RNA, 19 nt, Homo sapiens
  misc_RNA (1)...(19): siRNA sense strand
uaaggucacaucagaagug

SEQ ID NO: 237176 - RNA, 19 nt, Homo sapiens
  misc_RNA (1)...(19): siRNA sense strand
ggaagagauugagauugag

SEQ ID NO: 237177 - RNA, 19 nt, Homo sapiens
  misc_RNA (1)...(19): siRNA sense strand
gcagauugccgagggugaa

SEQ ID NO: 237178 - RNA, 19 nt, Homo sapiens
  misc_RNA (1)...(19): siRNA sense strand
ccaucaaggacguguauga

SEQ ID NO: 237179 - RNA, 19 nt, Homo sapiens
  misc_RNA (1)...(19): siRNA sense strand
gacaaaguggacuaucuga

SEQ ID NO: 237180 - RNA, 19 nt, Homo sapiens
  misc_RNA (1)...(19): siRNA sense strand
gugcagcgcaagaaacaga

SEQ ID NO: 237181 - RNA, 19 nt, Homo sapiens
  misc_RNA (1)...(19): siRNA sense strand
ucaguggagacaacaguaa

SEQ ID NO: 237182 - RNA, 19 nt, Homo sapiens
  misc_RNA (1)...(19): siRNA sense strand
ugacaaaguggacuaucug

SEQ ID NO: 237183 - RNA, 19 nt, Homo sapiens
  misc_RNA (1)...(19): siRNA sense strand
gagaagauccgcaaaaucg

SEQ ID NO: 237184 - RNA, 19 nt, Homo sapiens
  misc_RNA (1)...(19): siRNA sense strand
ggcguggaccugucuaaga

SEQ ID NO: 237185 - RNA, 19 nt, Homo sapiens
  misc_RNA (1)...(19): siRNA sense strand
aggagaugcuggaugugaa

SEQ ID NO: 237186 - RNA, 19 nt, Homo sapiens
  misc_RNA (1)...(19): siRNA sense strand
uaccaaggucgaugagauu

SEQ ID NO: 237187 - RNA, 19 nt, Homo sapiens
  misc_RNA (1)...(19): siRNA sense strand
ggugaagcagguccucuug

SEQ ID NO: 237188 - RNA, 19 nt, Homo sapiens
  misc_RNA (1)...(19): siRNA sense strand
gauccggcaggaagagauu

SEQ ID NO: 237189 - RNA, 19 nt, Homo sapiens
  misc_RNA (1)...(19): siRNA sense strand
aggcagaggcugagaagau

SEQ ID NO: 237190 - RNA, 19 nt, Homo sapiens
  misc_RNA (1)...(19): siRNA sense strand
agagagaugcugacauugg

SEQ ID NO: 237191 - RNA, 19 nt, Homo sapiens
  misc_RNA (1)...(19): siRNA sense strand
gcagaggcugagcggauga

SEQ ID NO: 237192 - RNA, 19 nt, Homo sapiens
  misc_RNA (1)...(19): siRNA sense strand
gacaguggagcagauuuau

SEQ ID NO: 237193 - RNA, 19 nt, Homo sapiens
  misc_RNA (1)...(19): siRNA sense strand
gcagaagauccggcaggaa

SEQ ID NO: 237194 - RNA, 19 nt, Homo sapiens
  misc_RNA (1)...(19): siRNA sense strand
ugaggagguuaacaucaag

SEQ ID NO: 237195 - RNA, 19 nt, Homo sapiens
  misc_RNA (1)...(19): siRNA sense strand
ucagugaggagguuaacau

SEQ ID NO: 237196 - RNA, 19 nt, Homo sapiens
  misc_RNA (1)...(19): siRNA sense strand
cauggcagacaccaagauu

SEQ ID NO: 237197 - RNA, 19 nt, Homo sapiens
  misc_RNA (1)...(19): siRNA sense strand
auccucagcuucaccauca

SEQ ID NO: 237198 - RNA, 19 nt, Homo sapiens
  misc_RNA (1)...(19): siRNA sense strand
caccaagauugcugacucu

SEQ ID NO: 237199 - RNA, 19 nt, Homo sapiens
  misc_RNA (1)...(19): siRNA sense strand
gggaagcugagugcaagaa

SEQ ID NO: 237200 - RNA, 19 nt, Homo sapiens
  misc_RNA (1)...(19): siRNA sense strand
ggagaugcuggaugugaag

SEQ ID NO: 237201 - RNA, 19 nt, Homo sapiens
  misc_RNA (1)...(19): siRNA sense strand
guggaccugucuaagauac

SEQ ID NO: 237202 - RNA, 19 nt, Homo sapiens
  misc_RNA (1)...(19): siRNA sense strand
agacaacaguaaggucaca

SEQ ID NO: 237203 - RNA, 19 nt, Homo sapiens
  misc_RNA (1)...(19): siRNA sense strand
gagcaguuucuggguaaga

SEQ ID NO: 237204 - RNA, 19 nt, Homo sapiens
  misc_RNA (1)...(19): siRNA sense strand
gcagcgcaagaaacagauu

SEQ ID NO: 237205 - RNA, 19 nt, Homo sapiens
  misc_RNA (1)...(19): siRNA sense strand
gaagauccggcaggaagag

SEQ ID NO: 237206 - RNA, 19 nt, Homo sapiens
  misc_RNA (1)...(19): siRNA sense strand
gcaaaagucagccuucagu

SEQ ID NO: 237207 - RNA, 19 nt, Homo sapiens
  misc_RNA (1)...(19): siRNA sense strand
ucaggaccgggaccaguuu

SEQ ID NO: 237208 - RNA, 19 nt, Homo sapiens
  misc_RNA (1)...(19): siRNA sense strand
gcacaggcagaggcugaga

SEQ ID NO: 237209 - RNA, 19 nt, Homo sapiens
  misc_RNA (1)...(19): siRNA sense strand
gguccucaguggagacaac

SEQ ID NO: 237210 - RNA, 19 nt, Homo sapiens
  misc_RNA (1)...(19): siRNA sense strand
caccaucaaggacguguau

SEQ ID NO: 237211 - RNA, 19 nt, Homo sapiens
  misc_RNA (1)...(19): siRNA sense strand
gaagaaacccagcuugaua

SEQ ID NO: 237212 - RNA, 19 nt, Homo sapiens
  misc_RNA (1)...(19): siRNA sense strand
gaaccaagacgaagaguaa

SEQ ID NO: 237213 - RNA, 19 nt, Homo sapiens
  misc_RNA (1)...(19): siRNA sense strand
cgacagauacugcaaguga

SEQ ID NO: 237214 - RNA, 19 nt, Homo sapiens
  misc_RNA (1)...(19): siRNA sense strand
gaaccagucuuucaaaaug

SEQ ID NO: 237215 - RNA, 19 nt, Homo sapiens
  misc_RNA (1)...(19): siRNA sense strand
ccugggagcuccacacaaa

SEQ ID NO: 237216 - RNA, 19 nt, Homo sapiens
  misc_RNA (1)...(19): siRNA sense strand
ggacaggagagccaaauug

SEQ ID NO: 237217 - RNA, 19 nt, Homo sapiens
  misc_RNA (1)...(19): siRNA sense strand
gaagaagaaaugaucaaga

SEQ ID NO: 237218 - RNA, 19 nt, Homo sapiens
  misc_RNA (1)...(19): siRNA sense strand
gcugucaaauuaucugauu

SEQ ID NO: 237219 - RNA, 19 nt, Homo sapiens
  misc_RNA (1)...(19): siRNA sense strand
caggagagccaaauugaaa

SEQ ID NO: 237220 - RNA, 19 nt, Homo sapiens
  misc_RNA (1)...(19): siRNA sense strand
gagcaaagauaagaaaaga

SEQ ID NO: 237221 - RNA, 19 nt, Homo sapiens
  misc_RNA (1)...(19): siRNA sense strand
gacaggagagccaaauuga

SEQ ID NO: 237222 - RNA, 19 nt, Homo sapiens
  misc_RNA (1)...(19): siRNA sense strand
gaagaagacaaaggaaaug

SEQ ID NO: 237223 - RNA, 19 nt, Homo sapiens
  misc_RNA (1)...(19): siRNA sense strand
aagaugacauuccagaaga

SEQ ID NO: 237224 - RNA, 19 nt, Homo sapiens
  misc_RNA (1)...(19): siRNA sense strand
gauuagauccugugcugaa

SEQ ID NO: 237225 - RNA, 19 nt, Homo sapiens
  misc_RNA (1)...(19): siRNA sense strand
cuaccaagcucgugcucaa

SEQ ID NO: 237226 - RNA, 19 nt, Homo sapiens
  misc_RNA (1)...(19): siRNA sense strand
agacgaagaguaagaagaa

SEQ ID NO: 237227 - RNA, 19 nt, Homo sapiens
  misc_RNA (1)...(19): siRNA sense strand
gccgaguacuccuauguga

SEQ ID NO: 237228 - RNA, 19 nt, Homo sapiens
  misc_RNA (1)...(19): siRNA sense strand
ggaaccaagacgaagagua

SEQ ID NO: 237229 - RNA, 19 nt, Homo sapiens
  misc_RNA (1)...(19): siRNA sense strand
ggaaccauagccauugaaa

SEQ ID NO: 237230 - RNA, 19 nt, Homo sapiens
  misc_RNA (1)...(19): siRNA sense strand
gaaauuucaggaaccauag

SEQ ID NO: 237231 - RNA, 19 nt, Homo sapiens
  misc_RNA (1)...(19): siRNA sense strand
cagaagaagacaaaggaaa

SEQ ID NO: 237232 - RNA, 19 nt, Homo sapiens
  misc_RNA (1)...(19): siRNA sense strand
gagaagaagaaaugaucaa

SEQ ID NO: 237233 - RNA, 19 nt, Homo sapiens
  misc_RNA (1)...(19): siRNA sense strand
caggaaccauagccauuga

SEQ ID NO: 237234 - RNA, 19 nt, Homo sapiens
  misc_RNA (1)...(19): siRNA sense strand
agaagaagaugaagaaacc

SEQ ID NO: 237235 - RNA, 19 nt, Homo sapiens
  misc_RNA (1)...(19): siRNA sense strand
aagagaagaagaugaagaa

SEQ ID NO: 237236 - RNA, 19 nt, Homo sapiens
  misc_RNA (1)...(19): siRNA sense strand
caaauugaaagccgacaga

SEQ ID NO: 237237 - RNA, 19 nt, Homo sapiens
  misc_RNA (1)...(19): siRNA sense strand
gagcuuccaagaccacaaa

SEQ ID NO: 237238 - RNA, 19 nt, Homo sapiens
  misc_RNA (1)...(19): siRNA sense strand
uaaaacagcaggagaagaa

SEQ ID NO: 237239 - RNA, 19 nt, Homo sapiens
  misc_RNA (1)...(19): siRNA sense strand
ggccucaaauagcugcuuu

SEQ ID NO: 237240 - RNA, 19 nt, Homo sapiens
  misc_RNA (1)...(19): siRNA sense strand
acaaugggaaccagucuuu

SEQ ID NO: 237241 - RNA, 19 nt, Homo sapiens
  misc_RNA (1)...(19): siRNA sense strand
gaaccauagccauugaaau

SEQ ID NO: 237242 - RNA, 19 nt, Homo sapiens
  misc_RNA (1)...(19): siRNA sense strand
gagaagaagaugaagaaac

SEQ ID NO: 237243 - RNA, 19 nt, Homo sapiens
  misc_RNA (1)...(19): siRNA sense strand
gacgaagaguaagaagaaa

SEQ ID NO: 237244 - RNA, 19 nt, Homo sapiens
  misc_RNA (1)...(19): siRNA sense strand
ggagaagaagaaaugauca

SEQ ID NO: 237245 - RNA, 19 nt, Homo sapiens
  misc_RNA (1)...(19): siRNA sense strand
ccaagaccacaaacuuaaa

SEQ ID NO: 237246 - RNA, 19 nt, Homo sapiens
  misc_RNA (1)...(19): siRNA sense strand
gcguucagaugcaauugga

SEQ ID NO: 237247 - RNA, 19 nt, Homo sapiens
  misc_RNA (1)...(19): siRNA sense strand
agaagaagacaaaggaaau

SEQ ID NO: 237248 - RNA, 19 nt, Homo sapiens
  misc_RNA (1)...(19): siRNA sense strand
gaacaaugggaaccagucu

SEQ ID NO: 237249 - RNA, 19 nt, Homo sapiens
  misc_RNA (1)...(19): siRNA sense strand
uccaagaccacaaacuuaa

SEQ ID NO: 237250 - RNA, 19 nt, Homo sapiens
  misc_RNA (1)...(19): siRNA sense strand
ccaagacgaagaguaagaa

SEQ ID NO: 237251 - RNA, 19 nt, Homo sapiens
  misc_RNA (1)...(19): siRNA sense strand
aaagagaagaagaugaaga

SEQ ID NO: 237252 - RNA, 19 nt, Homo sapiens
  misc_RNA (1)...(19): siRNA sense strand
ucaagggaaccaagacgaa

SEQ ID NO: 237253 - RNA, 19 nt, Homo sapiens
  misc_RNA (1)...(19): siRNA sense strand
gggaaccagucuuucaaaa

SEQ ID NO: 237254 - RNA, 19 nt, Homo sapiens
  misc_RNA (1)...(19): siRNA sense strand
acacaaagaaguugaugag

SEQ ID NO: 237255 - RNA, 19 nt, Homo sapiens
  misc_RNA (1)...(19): siRNA sense strand
cgaguacuccuaugugaag

SEQ ID NO: 237256 - RNA, 19 nt, Homo sapiens
  misc_RNA (1)...(19): siRNA sense strand
uuccaagaccacaaacuua

SEQ ID NO: 237257 - RNA, 19 nt, Homo sapiens
  misc_RNA (1)...(19): siRNA sense strand
gaaauuucagagcuuccaa

SEQ ID NO: 237258 - RNA, 19 nt, Homo sapiens
  misc_RNA (1)...(19): siRNA sense strand
aaagaugacauuccagaag

SEQ ID NO: 237259 - RNA, 19 nt, Homo sapiens
  misc_RNA (1)...(19): siRNA sense strand
gggaaccuauauacaugca

SEQ ID NO: 237260 - RNA, 19 nt, Homo sapiens
  misc_RNA (1)...(19): siRNA sense strand
gccgacagauacugcaagu

SEQ ID NO: 237261 - RNA, 19 nt, Homo sapiens
  misc_RNA (1)...(19): siRNA sense strand
aauugaaagccgacagaua

SEQ ID NO: 237262 - RNA, 19 nt, Homo sapiens
  misc_RNA (1)...(19): siRNA sense strand
agaugacauuccagaagaa

SEQ ID NO: 237263 - RNA, 19 nt, Homo sapiens
  misc_RNA (1)...(19): siRNA sense strand
gcaggagaagaagaaauga

SEQ ID NO: 237264 - RNA, 19 nt, Homo sapiens
  misc_RNA (1)...(19): siRNA sense strand
ugaagaaacccagcuugau

SEQ ID NO: 237265 - RNA, 19 nt, Homo sapiens
  misc_RNA (1)...(19): siRNA sense strand
guacuccuaugugaagucu

SEQ ID NO: 237266 - RNA, 19 nt, Homo sapiens
  misc_RNA (1)...(19): siRNA sense strand
ucaggaaccauagccauug

SEQ ID NO: 237267 - RNA, 19 nt, Homo sapiens
  misc_RNA (1)...(19): siRNA sense strand
aaacagcaggagaagaaga

SEQ ID NO: 237268 - RNA, 19 nt, Homo sapiens
  misc_RNA (1)...(19): siRNA sense strand
gagcuccacacaaagaagu

SEQ ID NO: 237269 - RNA, 19 nt, Homo sapiens
  misc_RNA (1)...(19): siRNA sense strand
ccucaaauagcugcuuuau

SEQ ID NO: 237270 - RNA, 19 nt, Homo sapiens
  misc_RNA (1)...(19): siRNA sense strand
ccagaagaagacaaaggaa

SEQ ID NO: 237271 - RNA, 19 nt, Homo sapiens
  misc_RNA (1)...(19): siRNA sense strand
guuguugggcguucagaug

SEQ ID NO: 237272 - RNA, 19 nt, Homo sapiens
  misc_RNA (1)...(19): siRNA sense strand
caaugaagcaggggacaua

SEQ ID NO: 237273 - RNA, 19 nt, Homo sapiens
  misc_RNA (1)...(19): siRNA sense strand
ggaaccagucuuucaaaau

SEQ ID NO: 237274 - RNA, 19 nt, Homo sapiens
  misc_RNA (1)...(19): siRNA sense strand
gcaccgggcucucuuauaa

SEQ ID NO: 237275 - RNA, 19 nt, Homo sapiens
  misc_RNA (1)...(19): siRNA sense strand
ccaggaagcuuauguugga

SEQ ID NO: 237276 - RNA, 19 nt, Homo sapiens
  misc_RNA (1)...(19): siRNA sense strand
ggaagaaacucagcugcaa

SEQ ID NO: 237277 - RNA, 19 nt, Homo sapiens
  misc_RNA (1)...(19): siRNA sense strand
gauuggagcuuaggaagaa

SEQ ID NO: 237278 - RNA, 19 nt, Homo sapiens
  misc_RNA (1)...(19): siRNA sense strand
gcaagccuuucaaauggua

SEQ ID NO: 237279 - RNA, 19 nt, Homo sapiens
  misc_RNA (1)...(19): siRNA sense strand
aaaugucuauccagaguua

SEQ ID NO: 237280 - RNA, 19 nt, Homo sapiens
  misc_RNA (1)...(19): siRNA sense strand
gaaauugaccccauuaaaa

SEQ ID NO: 237281 - RNA, 19 nt, Homo sapiens
  misc_RNA (1)...(19): siRNA sense strand
ggacaggacucggguugug

SEQ ID NO: 237282 - RNA, 19 nt, Homo sapiens
  misc_RNA (1)...(19): siRNA sense strand
ggaaggaggacuggaauga

SEQ ID NO: 237283 - RNA, 19 nt, Homo sapiens
  misc_RNA (1)...(19): siRNA sense strand
cuaacugccucgacacuuu

SEQ ID NO: 237284 - RNA, 19 nt, Homo sapiens
  misc_RNA (1)...(19): siRNA sense strand
cagagcagauuggagcuua

SEQ ID NO: 237285 - RNA, 19 nt, Homo sapiens
  misc_RNA (1)...(19): siRNA sense strand
gaagagaaagcacaaagca

SEQ ID NO: 237286 - RNA, 19 nt, Homo sapiens
  misc_RNA (1)...(19): siRNA sense strand
gggcaucgccuacuacaug

SEQ ID NO: 237287 - RNA, 19 nt, Homo sapiens
  misc_RNA (1)...(19): siRNA sense strand
gugauaagcuucgaaugga

SEQ ID NO: 237288 - RNA, 19 nt, Homo sapiens
  misc_RNA (1)...(19): siRNA sense strand
cuagaaacguuccuuaugg

SEQ ID NO: 237289 - RNA, 19 nt, Homo sapiens
  misc_RNA (1)...(19): siRNA sense strand
aaggaggacuggaaugaaa

SEQ ID NO: 237290 - RNA, 19 nt, Homo sapiens
  misc_RNA (1)...(19): siRNA sense strand
gguuggaguuuaugaaugu

SEQ ID NO: 237291 - RNA, 19 nt, Homo sapiens
  misc_RNA (1)...(19): siRNA sense strand
gaaaaugucuauccagagu

SEQ ID NO: 237292 - RNA, 19 nt, Homo sapiens
  misc_RNA (1)...(19): siRNA sense strand
gauuggaacuugguauuca

SEQ ID NO: 237293 - RNA, 19 nt, Homo sapiens
  misc_RNA (1)...(19): siRNA sense strand
gaaagugcgaguucuuaga

SEQ ID NO: 237294 - RNA, 19 nt, Homo sapiens
  misc_RNA (1)...(19): siRNA sense strand
ucaaccagguggagaguga

SEQ ID NO: 237295 - RNA, 19 nt, Homo sapiens
  misc_RNA (1)...(19): siRNA sense strand
ggacaacuuucaguaugug

SEQ ID NO: 237296 - RNA, 19 nt, Homo sapiens
  misc_RNA (1)...(19): siRNA sense strand
gcugcaagccuuucaaaug

SEQ ID NO: 237297 - RNA, 19 nt, Homo sapiens
  misc_RNA (1)...(19): siRNA sense strand
uagaaaugaucgacgagaa

SEQ ID NO: 237298 - RNA, 19 nt, Homo sapiens
  misc_RNA (1)...(19): siRNA sense strand
agacagaaaugggaacaga

SEQ ID NO: 237299 - RNA, 19 nt, Homo sapiens
  misc_RNA (1)...(19): siRNA sense strand
gaaauauucagagcagauu

SEQ ID NO: 237300 - RNA, 19 nt, Homo sapiens
  misc_RNA (1)...(19): siRNA sense strand
ggacuggaaugaaauugac

SEQ ID NO: 237301 - RNA, 19 nt, Homo sapiens
  misc_RNA (1)...(19): siRNA sense strand
cuggauggaugaauacaaa

SEQ ID NO: 237302 - RNA, 19 nt, Homo sapiens
  misc_RNA (1)...(19): siRNA sense strand
gcaggaaggaggacuggaa

SEQ ID NO: 237303 - RNA, 19 nt, Homo sapiens
  misc_RNA (1)...(19): siRNA sense strand
gcuagaaacguuccuuaug

SEQ ID NO: 237304 - RNA, 19 nt, Homo sapiens
  misc_RNA (1)...(19): siRNA sense strand
gcacugucuuugcccgaaa

SEQ ID NO: 237305 - RNA, 19 nt, Homo sapiens
  misc_RNA (1)...(19): siRNA sense strand
ucacagcaauggagaagag

SEQ ID NO: 237306 - RNA, 19 nt, Homo sapiens
  misc_RNA (1)...(19): siRNA sense strand
ggaaauauucagagcagau

SEQ ID NO: 237307 - RNA, 19 nt, Homo sapiens
  misc_RNA (1)...(19): siRNA sense strand
uagaaacguuccuuaugga

SEQ ID NO: 237308 - RNA, 19 nt, Homo sapiens
  misc_RNA (1)...(19): siRNA sense strand
ggagagaaccuagagaucu

SEQ ID NO: 237309 - RNA, 19 nt, Homo sapiens
  misc_RNA (1)...(19): siRNA sense strand
gaaggaggacuggaaugaa

SEQ ID NO: 237310 - RNA, 19 nt, Homo sapiens
  misc_RNA (1)...(19): siRNA sense strand
ggaaguacgacaugaugau

SEQ ID NO: 237311 - RNA, 19 nt, Homo sapiens
  misc_RNA (1)...(19): siRNA sense strand
gagcuuaggaagaaacuca

SEQ ID NO: 237312 - RNA, 19 nt, Homo sapiens
  misc_RNA (1)...(19): siRNA sense strand
gaaaaugacagcagacaga

SEQ ID NO: 237313 - RNA, 19 nt, Homo sapiens
  misc_RNA (1)...(19): siRNA sense strand
gagaagagaaagcacaaag

SEQ ID NO: 237314 - RNA, 19 nt, Homo sapiens
  misc_RNA (1)...(19): siRNA sense strand
cugcaagccuuucaaaugg

SEQ ID NO: 237315 - RNA, 19 nt, Homo sapiens
  misc_RNA (1)...(19): siRNA sense strand
guggaugacuacagcaaug

SEQ ID NO: 237316 - RNA, 19 nt, Homo sapiens
  misc_RNA (1)...(19): siRNA sense strand
gaggagagaaccuagagau

SEQ ID NO: 237317 - RNA, 19 nt, Homo sapiens
  misc_RNA (1)...(19): siRNA sense strand
ggaggacuggaaugaaauu

SEQ ID NO: 237318 - RNA, 19 nt, Homo sapiens
  misc_RNA (1)...(19): siRNA sense strand
guuuaugaaugucacaaug

SEQ ID NO: 237319 - RNA, 19 nt, Homo sapiens
  misc_RNA (1)...(19): siRNA sense strand
gcagauuggagcuuaggaa

SEQ ID NO: 237320 - RNA, 19 nt, Homo sapiens
  misc_RNA (1)...(19): siRNA sense strand
ggucagcgugcuuaagaaa

SEQ ID NO: 237321 - RNA, 19 nt, Homo sapiens
  misc_RNA (1)...(19): siRNA sense strand
ugaucacguuucacaauga

SEQ ID NO: 237322 - RNA, 19 nt, Homo sapiens
  misc_RNA (1)...(19): siRNA sense strand
gaaguacgacaugaugaug

SEQ ID NO: 237323 - RNA, 19 nt, Homo sapiens
  misc_RNA (1)...(19): siRNA sense strand
gggcaucugcugacuugaa

SEQ ID NO: 237324 - RNA, 19 nt, Homo sapiens
  misc_RNA (1)...(19): siRNA sense strand
guacgguggccagacuuua

SEQ ID NO: 237325 - RNA, 19 nt, Homo sapiens
  misc_RNA (1)...(19): siRNA sense strand
cgaaggagaagucggugaa

SEQ ID NO: 237326 - RNA, 19 nt, Homo sapiens
  misc_RNA (1)...(19): siRNA sense strand
gguggagagugauaagcuu

SEQ ID NO: 237327 - RNA, 19 nt, Homo sapiens
  misc_RNA (1)...(19): siRNA sense strand
gaagggcgguuuugauugg

SEQ ID NO: 237328 - RNA, 19 nt, Homo sapiens
  misc_RNA (1)...(19): siRNA sense strand
gcuggugggcuguuuguga

SEQ ID NO: 237329 - RNA, 19 nt, Homo sapiens
  misc_RNA (1)...(19): siRNA sense strand
agaagucggugaagcacau

SEQ ID NO: 237330 - RNA, 19 nt, Homo sapiens
  misc_RNA (1)...(19): siRNA sense strand
gaacagaucgagggcaacu

SEQ ID NO: 237331 - RNA, 19 nt, Homo sapiens
  misc_RNA (1)...(19): siRNA sense strand
cggugaagcacauggauuu

SEQ ID NO: 237332 - RNA, 19 nt, Homo sapiens
  misc_RNA (1)...(19): siRNA sense strand
uaaccaggaagcuuauguu

SEQ ID NO: 237333 - RNA, 19 nt, Homo sapiens
  misc_RNA (1)...(19): siRNA sense strand
guuaaggguuccagaccau

SEQ ID NO: 237334 - RNA, 19 nt, Homo sapiens
  misc_RNA (1)...(19): siRNA sense strand
cagcaauggagaagagaaa

SEQ ID NO: 237335 - RNA, 19 nt, Homo sapiens
  misc_RNA (1)...(19): siRNA sense strand
ggagagugauaagcuucga

SEQ ID NO: 237336 - RNA, 19 nt, Homo sapiens
  misc_RNA (1)...(19): siRNA sense strand
aagaaagaccuucaucaca

SEQ ID NO: 237337 - RNA, 19 nt, Homo sapiens
  misc_RNA (1)...(19): siRNA sense strand
gggaaguacgacaugauga

SEQ ID NO: 237338 - RNA, 19 nt, Homo sapiens
  misc_RNA (1)...(19): siRNA sense strand
uggacaacuuucaguaugu

SEQ ID NO: 237339 - RNA, 19 nt, Homo sapiens
  misc_RNA (1)...(19): siRNA sense strand
guggucagcgugcuuaaga

SEQ ID NO: 237340 - RNA, 19 nt, Homo sapiens
  misc_RNA (1)...(19): siRNA sense strand
aaaguacgguggccagacu

SEQ ID NO: 237341 - RNA, 19 nt, Homo sapiens
  misc_RNA (1)...(19): siRNA sense strand
ggcuguuugugauggauaa

SEQ ID NO: 237342 - RNA, 19 nt, Homo sapiens
  misc_RNA (1)...(19): siRNA sense strand
ggagaagagaaagcacaaa

SEQ ID NO: 237343 - RNA, 19 nt, Homo sapiens
  misc_RNA (1)...(19): siRNA sense strand
uaacugccucgacacuuug

SEQ ID NO: 237344 - RNA, 19 nt, Homo sapiens
  misc_RNA (1)...(19): siRNA sense strand
ggcaucugcugacuugaag

SEQ ID NO: 237345 - RNA, 19 nt, Homo sapiens
  misc_RNA (1)...(19): siRNA sense strand
ucgcagcaguggaaguuca

SEQ ID NO: 237346 - RNA, 19 nt, Homo sapiens
  misc_RNA (1)...(19): siRNA sense strand
ggcaucgccuacuacaugu

SEQ ID NO: 237347 - RNA, 19 nt, Homo sapiens
  misc_RNA (1)...(19): siRNA sense strand
aaugguaccuugaaaaugu

SEQ ID NO: 237348 - RNA, 19 nt, Homo sapiens
  misc_RNA (1)...(19): siRNA sense strand
ugugauggauaaguucuau

SEQ ID NO: 237349 - RNA, 19 nt, Homo sapiens
  misc_RNA (1)...(19): siRNA sense strand
caugacgccugagcagaga

SEQ ID NO: 237350 - RNA, 19 nt, Homo sapiens
  misc_RNA (1)...(19): siRNA sense strand
aaugacagcagacagaaau

SEQ ID NO: 237351 - RNA, 19 nt, Homo sapiens
  misc_RNA (1)...(19): siRNA sense strand
gauugcuggugggcuguuu

SEQ ID NO: 237352 - RNA, 19 nt, Homo sapiens
  misc_RNA (1)...(19): siRNA sense strand
uccagaccaucaggauaua

SEQ ID NO: 237353 - RNA, 19 nt, Homo sapiens
  misc_RNA (1)...(19): siRNA sense strand
caaaugguaccuugaaaau

SEQ ID NO: 237354 - RNA, 19 nt, Homo sapiens
  misc_RNA (1)...(19): siRNA sense strand
cagcugcaagccuuucaaa

SEQ ID NO: 237355 - RNA, 19 nt, Homo sapiens
  misc_RNA (1)...(19): siRNA sense strand
aaagaaagaccuucaucac

SEQ ID NO: 237356 - RNA, 19 nt, Homo sapiens
  misc_RNA (1)...(19): siRNA sense strand
aggucuggauggaugaaua

SEQ ID NO: 237357 - RNA, 19 nt, Homo sapiens
  misc_RNA (1)...(19): siRNA sense strand
guauucaagugggauuaca

SEQ ID NO: 237358 - RNA, 19 nt, Homo sapiens
  misc_RNA (1)...(19): siRNA sense strand
uacgguggccagacuuuaa

SEQ ID NO: 237359 - RNA, 19 nt, Homo sapiens
  misc_RNA (1)...(19): siRNA sense strand
gauggugugguuggaguuu

SEQ ID NO: 237360 - RNA, 19 nt, Homo sapiens
  misc_RNA (1)...(19): siRNA sense strand
guuccagaccaucaggaua

SEQ ID NO: 237361 - RNA, 19 nt, Homo sapiens
  misc_RNA (1)...(19): siRNA sense strand
uugaagaacuggggaagua

SEQ ID NO: 237362 - RNA, 19 nt, Homo sapiens
  misc_RNA (1)...(19): siRNA sense strand
gccagacuuuaaccaggaa

SEQ ID NO: 237363 - RNA, 19 nt, Homo sapiens
  misc_RNA (1)...(19): siRNA sense strand
uguuugugauggauaaguu

SEQ ID NO: 237364 - RNA, 19 nt, Homo sapiens
  misc_RNA (1)...(19): siRNA sense strand
uauggacaacuuucaguau

SEQ ID NO: 237365 - RNA, 19 nt, Homo sapiens
  misc_RNA (1)...(19): siRNA sense strand
acuuuaaccaggaagcuua

SEQ ID NO: 237366 - RNA, 19 nt, Homo sapiens
  misc_RNA (1)...(19): siRNA sense strand
gaacccagucgccccuaua

SEQ ID NO: 237367 - RNA, 19 nt, Homo sapiens
  misc_RNA (1)...(19): siRNA sense strand
auggacaacuuucaguaug

SEQ ID NO: 237368 - RNA, 19 nt, Homo sapiens
  misc_RNA (1)...(19): siRNA sense strand
ggaggagagaaccuagaga

SEQ ID NO: 237369 - RNA, 19 nt, Homo sapiens
  misc_RNA (1)...(19): siRNA sense strand
ggcaccgggcucucuuaua

SEQ ID NO: 237370 - RNA, 19 nt, Homo sapiens
  misc_RNA (1)...(19): siRNA sense strand
ucgaugucauuaauaugga

SEQ ID NO: 237371 - RNA, 19 nt, Homo sapiens
  misc_RNA (1)...(19): siRNA sense strand
acagaaaugggaacagauc

SEQ ID NO: 237372 - RNA, 19 nt, Homo sapiens
  misc_RNA (1)...(19): siRNA sense strand
gguggcagccuggagauca

SEQ ID NO: 237373 - RNA, 19 nt, Homo sapiens
  misc_RNA (1)...(19): siRNA sense strand
aguacgacaugaugaugga

SEQ ID NO: 237374 - RNA, 19 nt, Homo sapiens
  misc_RNA (1)...(19): siRNA sense strand
gaugaaaccuacccaauua

SEQ ID NO: 237375 - RNA, 19 nt, Homo sapiens
  misc_RNA (1)...(19): siRNA sense strand
caacaaaccuucuccuuau

SEQ ID NO: 237376 - RNA, 19 nt, Homo sapiens
  misc_RNA (1)...(19): siRNA sense strand
gaugaguacuuacaugaua

SEQ ID NO: 237377 - RNA, 19 nt, Homo sapiens
  misc_RNA (1)...(19): siRNA sense strand
gcuagaagcuguaaacaau

SEQ ID NO: 237378 - RNA, 19 nt, Homo sapiens
  misc_RNA (1)...(19): siRNA sense strand
ggaggcaaaccauuaauua

SEQ ID NO: 237379 - RNA, 19 nt, Homo sapiens
  misc_RNA (1)...(19): siRNA sense strand
gauguuggauuuaaugcua

SEQ ID NO: 237380 - RNA, 19 nt, Homo sapiens
  misc_RNA (1)...(19): siRNA sense strand
gaagcuuggugcaguaauu

SEQ ID NO: 237381 - RNA, 19 nt, Homo sapiens
  misc_RNA (1)...(19): siRNA sense strand
gaacuacacggcugucgua

SEQ ID NO: 237382 - RNA, 19 nt, Homo sapiens
  misc_RNA (1)...(19): siRNA sense strand
ccauagaucugaacacguu

SEQ ID NO: 237383 - RNA, 19 nt, Homo sapiens
  misc_RNA (1)...(19): siRNA sense strand
gcaaagagaaguaaguguu

SEQ ID NO: 237384 - RNA, 19 nt, Homo sapiens
  misc_RNA (1)...(19): siRNA sense strand
ugagagaccuuguuugcaa

SEQ ID NO: 237385 - RNA, 19 nt, Homo sapiens
  misc_RNA (1)...(19): siRNA sense strand
cuacaaaggucacaagaca

SEQ ID NO: 237386 - RNA, 19 nt, Homo sapiens
  misc_RNA (1)...(19): siRNA sense strand
gaaaccaguacuuugaaua

SEQ ID NO: 237387 - RNA, 19 nt, Homo sapiens
  misc_RNA (1)...(19): siRNA sense strand
gggagucgcuuccugauca

SEQ ID NO: 237388 - RNA, 19 nt, Homo sapiens
  misc_RNA (1)...(19): siRNA sense strand
ucaaggaggcaaaccauua

SEQ ID NO: 237389 - RNA, 19 nt, Homo sapiens
  misc_RNA (1)...(19): siRNA sense strand
ucaacaaaccuucuccuua

SEQ ID NO: 237390 - RNA, 19 nt, Homo sapiens
  misc_RNA (1)...(19): siRNA sense strand
cagaauagcugagaacuac

SEQ ID NO: 237391 - RNA, 19 nt, Homo sapiens
  misc_RNA (1)...(19): siRNA sense strand
ggcaaaccauuaauuaugu

SEQ ID NO: 237392 - RNA, 19 nt, Homo sapiens
  misc_RNA (1)...(19): siRNA sense strand
gaaggaaagaugaaaccua

SEQ ID NO: 237393 - RNA, 19 nt, Homo sapiens
  misc_RNA (1)...(19): siRNA sense strand
gguaaagcauucaagacaa

SEQ ID NO: 237394 - RNA, 19 nt, Homo sapiens
  misc_RNA (1)...(19): siRNA sense strand
ggaauuaugucuucaugcu

SEQ ID NO: 237395 - RNA, 19 nt, Homo sapiens
  misc_RNA (1)...(19): siRNA sense strand
ggaaaccaguacuuugaau

SEQ ID NO: 237396 - RNA, 19 nt, Homo sapiens
  misc_RNA (1)...(19): siRNA sense strand
caccaccagugucauaaua

SEQ ID NO: 237397 - RNA, 19 nt, Homo sapiens
  misc_RNA (1)...(19): siRNA sense strand
gauauugcauccauagauc

SEQ ID NO: 237398 - RNA, 19 nt, Homo sapiens
  misc_RNA (1)...(19): siRNA sense strand
aaacacugcuuuaaugcuu

SEQ ID NO: 237399 - RNA, 19 nt, Homo sapiens
  misc_RNA (1)...(19): siRNA sense strand
uaguguagaugaguacuua

SEQ ID NO: 237400 - RNA, 19 nt, Homo sapiens
  misc_RNA (1)...(19): siRNA sense strand
caagugacaggauuucuuu

SEQ ID NO: 237401 - RNA, 19 nt, Homo sapiens
  misc_RNA (1)...(19): siRNA sense strand
gaaauacagaugcagcaaa

SEQ ID NO: 237402 - RNA, 19 nt, Homo sapiens
  misc_RNA (1)...(19): siRNA sense strand
gauuaugccuugcucuguu

SEQ ID NO: 237403 - RNA, 19 nt, Homo sapiens
  misc_RNA (1)...(19): siRNA sense strand
gcaaagaaggaaagaugaa

SEQ ID NO: 237404 - RNA, 19 nt, Homo sapiens
  misc_RNA (1)...(19): siRNA sense strand
aaucaaggauggaaaggaa

SEQ ID NO: 237405 - RNA, 19 nt, Homo sapiens
  misc_RNA (1)...(19): siRNA sense strand
caacauccagaaggaauua

SEQ ID NO: 237406 - RNA, 19 nt, Homo sapiens
  misc_RNA (1)...(19): siRNA sense strand
gagaaguaaguguucaaua

SEQ ID NO: 237407 - RNA, 19 nt, Homo sapiens
  misc_RNA (1)...(19): siRNA sense strand
gaucugaacacguuugaau

SEQ ID NO: 237408 - RNA, 19 nt, Homo sapiens
  misc_RNA (1)...(19): siRNA sense strand
cuacacggcugucguaagu

SEQ ID NO: 237409 - RNA, 19 nt, Homo sapiens
  misc_RNA (1)...(19): siRNA sense strand
guagaugaguacuuacaug

SEQ ID NO: 237410 - RNA, 19 nt, Homo sapiens
  misc_RNA (1)...(19): siRNA sense strand
gcaauacugcugaaggaaa

SEQ ID NO: 237411 - RNA, 19 nt, Homo sapiens
  misc_RNA (1)...(19): siRNA sense strand
caauuuaaguguugaagag

SEQ ID NO: 237412 - RNA, 19 nt, Homo sapiens
  misc_RNA (1)...(19): siRNA sense strand
ugaauacucugcucaacau

SEQ ID NO: 237413 - RNA, 19 nt, Homo sapiens
  misc_RNA (1)...(19): siRNA sense strand
gcaauguggugggcaguug

SEQ ID NO: 237414 - RNA, 19 nt, Homo sapiens
  misc_RNA (1)...(19): siRNA sense strand
caauacugcugaaggaaau

SEQ ID NO: 237415 - RNA, 19 nt, Homo sapiens
  misc_RNA (1)...(19): siRNA sense strand
caaggaggcaaaccauuaa

SEQ ID NO: 237416 - RNA, 19 nt, Homo sapiens
  misc_RNA (1)...(19): siRNA sense strand
caugguaucugaacaacau

SEQ ID NO: 237417 - RNA, 19 nt, Homo sapiens
  misc_RNA (1)...(19): siRNA sense strand
gaucacugcucgguugcua

SEQ ID NO: 237418 - RNA, 19 nt, Homo sapiens
  misc_RNA (1)...(19): siRNA sense strand
ugucguaaguccagauauu

SEQ ID NO: 237419 - RNA, 19 nt, Homo sapiens
  misc_RNA (1)...(19): siRNA sense strand
ggaugaauacaaggaaaua

SEQ ID NO: 237420 - RNA, 19 nt, Homo sapiens
  misc_RNA (1)...(19): siRNA sense strand
ggugggcaguuggagauua

SEQ ID NO: 237421 - RNA, 19 nt, Homo sapiens
  misc_RNA (1)...(19): siRNA sense strand
uggaagcuaugaugaagaa

SEQ ID NO: 237422 - RNA, 19 nt, Homo sapiens
  misc_RNA (1)...(19): siRNA sense strand
caagacaaccaauuuaagu

SEQ ID NO: 237423 - RNA, 19 nt, Homo sapiens
  misc_RNA (1)...(19): siRNA sense strand
aaaugugccuuucagcaaa

SEQ ID NO: 237424 - RNA, 19 nt, Homo sapiens
  misc_RNA (1)...(19): siRNA sense strand
uaugggagauccagaagga

SEQ ID NO: 237425 - RNA, 19 nt, Homo sapiens
  misc_RNA (1)...(19): siRNA sense strand
gacaaccaauuuaaguguu

SEQ ID NO: 237426 - RNA, 19 nt, Homo sapiens
  misc_RNA (1)...(19): siRNA sense strand
ggaugaugcuaguguagau

SEQ ID NO: 237427 - RNA, 19 nt, Homo sapiens
  misc_RNA (1)...(19): siRNA sense strand
gcaagugacaggauuucuu

SEQ ID NO: 237428 - RNA, 19 nt, Homo sapiens
  misc_RNA (1)...(19): siRNA sense strand
ggaucaacuucuauacaau

SEQ ID NO: 237429 - RNA, 19 nt, Homo sapiens
  misc_RNA (1)...(19): siRNA sense strand
guaaagcauucaagacaac

SEQ ID NO: 237430 - RNA, 19 nt, Homo sapiens
  misc_RNA (1)...(19): siRNA sense strand
ggugauugcuagaaaccaa

SEQ ID NO: 237431 - RNA, 19 nt, Homo sapiens
  misc_RNA (1)...(19): siRNA sense strand
gaagcuaugaugaagaaau

SEQ ID NO: 237432 - RNA, 19 nt, Homo sapiens
  misc_RNA (1)...(19): siRNA sense strand
ccacguugcuuagaacugu

SEQ ID NO: 237433 - RNA, 19 nt, Homo sapiens
  misc_RNA (1)...(19): siRNA sense strand
caaagaaggaaagaugaaa

SEQ ID NO: 237434 - RNA, 19 nt, Homo sapiens
  misc_RNA (1)...(19): siRNA sense strand
acagugugcucuauucuuc

SEQ ID NO: 237435 - RNA, 19 nt, Homo sapiens
  misc_RNA (1)...(19): siRNA sense strand
caacuucuauacaauccau

SEQ ID NO: 237436 - RNA, 19 nt, Homo sapiens
  misc_RNA (1)...(19): siRNA sense strand
gaggcaaaccauuaauuau

SEQ ID NO: 237437 - RNA, 19 nt, Homo sapiens
  misc_RNA (1)...(19): siRNA sense strand
agaccuuaauccuguuaua

SEQ ID NO: 237438 - RNA, 19 nt, Homo sapiens
  misc_RNA (1)...(19): siRNA sense strand
gguggaugaugcuagugua

SEQ ID NO: 237439 - RNA, 19 nt, Homo sapiens
  misc_RNA (1)...(19): siRNA sense strand
caaauaggagcaccuguca

SEQ ID NO: 237440 - RNA, 19 nt, Homo sapiens
  misc_RNA (1)...(19): siRNA sense strand
gcauccaaguuuaguguca

SEQ ID NO: 237441 - RNA, 19 nt, Homo sapiens
  misc_RNA (1)...(19): siRNA sense strand
aggaucaacuucuauacaa

SEQ ID NO: 237442 - RNA, 19 nt, Homo sapiens
  misc_RNA (1)...(19): siRNA sense strand
aagcuaugaugaagaaaug

SEQ ID NO: 237443 - RNA, 19 nt, Homo sapiens
  misc_RNA (1)...(19): siRNA sense strand
gaucaugagaagcaaagaa

SEQ ID NO: 237444 - RNA, 19 nt, Homo sapiens
  misc_RNA (1)...(19): siRNA sense strand
caaguuuagugucaugcaa

SEQ ID NO: 237445 - RNA, 19 nt, Homo sapiens
  misc_RNA (1)...(19): siRNA sense strand
caccuaaagcgacuaguaa

SEQ ID NO: 237446 - RNA, 19 nt, Homo sapiens
  misc_RNA (1)...(19): siRNA sense strand
gguaucugaacaacauuua

SEQ ID NO: 237447 - RNA, 19 nt, Homo sapiens
  misc_RNA (1)...(19): siRNA sense strand
caagauguuggauuuaaug

SEQ ID NO: 237448 - RNA, 19 nt, Homo sapiens
  misc_RNA (1)...(19): siRNA sense strand
gaucaacuucuauacaauc

SEQ ID NO: 237449 - RNA, 19 nt, Homo sapiens
  misc_RNA (1)...(19): siRNA sense strand
ugaaaccuacccaauuaaa

SEQ ID NO: 237450 - RNA, 19 nt, Homo sapiens
  misc_RNA (1)...(19): siRNA sense strand
cagcugaaacgcucacauu

SEQ ID NO: 237451 - RNA, 19 nt, Homo sapiens
  misc_RNA (1)...(19): siRNA sense strand
uuaaugcuuucgcaaguga

SEQ ID NO: 237452 - RNA, 19 nt, Homo sapiens
  misc_RNA (1)...(19): siRNA sense strand
caaagagaaguaaguguuc

SEQ ID NO: 237453 - RNA, 19 nt, Homo sapiens
  misc_RNA (1)...(19): siRNA sense strand
ucaccuaaagcgacuagua

SEQ ID NO: 237454 - RNA, 19 nt, Homo sapiens
  misc_RNA (1)...(19): siRNA sense strand
ggcacaacauccagaagga

SEQ ID NO: 237455 - RNA, 19 nt, Homo sapiens
  misc_RNA (1)...(19): siRNA sense strand
gagcauccaaguuuagugu

SEQ ID NO: 237456 - RNA, 19 nt, Homo sapiens
  misc_RNA (1)...(19): siRNA sense strand
caaaccuucuccuuaugga

SEQ ID NO: 237457 - RNA, 19 nt, Homo sapiens
  misc_RNA (1)...(19): siRNA sense strand
uuauacagcagcagaauug

SEQ ID NO: 237458 - RNA, 19 nt, Homo sapiens
  misc_RNA (1)...(19): siRNA sense strand
ggagagcauccaaguuuag

SEQ ID NO: 237459 - RNA, 19 nt, Homo sapiens
  misc_RNA (1)...(19): siRNA sense strand
ggauggaaaggaacaugaa

SEQ ID NO: 237460 - RNA, 19 nt, Homo sapiens
  misc_RNA (1)...(19): siRNA sense strand
gauggaaaggaacaugaaa

SEQ ID NO: 237461 - RNA, 19 nt, Homo sapiens
  misc_RNA (1)...(19): siRNA sense strand
agaugaaaccuacccaauu

SEQ ID NO: 237462 - RNA, 19 nt, Homo sapiens
  misc_RNA (1)...(19): siRNA sense strand
ccaaagaggaaucaaggau

SEQ ID NO: 237463 - RNA, 19 nt, Homo sapiens
  misc_RNA (1)...(19): siRNA sense strand
gcacaacauccagaaggaa

SEQ ID NO: 237464 - RNA, 19 nt, Homo sapiens
  misc_RNA (1)...(19): siRNA sense strand
aaagagaaguaaguguuca

SEQ ID NO: 237465 - RNA, 19 nt, Homo sapiens
  misc_RNA (1)...(19): siRNA sense strand
aagcaaagaaggaaagaug

SEQ ID NO: 237466 - RNA, 19 nt, Homo sapiens
  misc_RNA (1)...(19): siRNA sense strand
ccagaauagcugagaacua

SEQ ID NO: 237467 - RNA, 19 nt, Homo sapiens
  misc_RNA (1)...(19): siRNA sense strand
uagaugaguacuuacauga

SEQ ID NO: 237468 - RNA, 19 nt, Homo sapiens
  misc_RNA (1)...(19): siRNA sense strand
ccaccagugucauaauagu

SEQ ID NO: 237469 - RNA, 19 nt, Homo sapiens
  misc_RNA (1)...(19): siRNA sense strand
gaaagaaaaggucugauca

SEQ ID NO: 237470 - RNA, 19 nt, Homo sapiens
  misc_RNA (1)...(19): siRNA sense strand
gggaaaccaguacuuugaa

SEQ ID NO: 237471 - RNA, 19 nt, Homo sapiens
  misc_RNA (1)...(19): siRNA sense strand
gaccuuaauccuguuauau

SEQ ID NO: 237472 - RNA, 19 nt, Homo sapiens
  misc_RNA (1)...(19): siRNA sense strand
aagucuggauggaugaaua

SEQ ID NO: 237473 - RNA, 19 nt, Homo sapiens
  misc_RNA (1)...(19): siRNA sense strand
aaccauaaccguggaaauu

SEQ ID NO: 237474 - RNA, 19 nt, Homo sapiens
  misc_RNA (1)...(19): siRNA sense strand
ggauauauuuggcccuuua

SEQ ID NO: 237475 - RNA, 19 nt, Homo sapiens
  misc_RNA (1)...(19): siRNA sense strand
gcaaacuccucaccuggua

SEQ ID NO: 237476 - RNA, 19 nt, Homo sapiens
  misc_RNA (1)...(19): siRNA sense strand
gaacucagccgcaguggaa

SEQ ID NO: 237477 - RNA, 19 nt, Homo sapiens
  misc_RNA (1)...(19): siRNA sense strand
ugcaggagcugaagaauaa

SEQ ID NO: 237478 - RNA, 19 nt, Homo sapiens
  misc_RNA (1)...(19): siRNA sense strand
agaacaaguugcagaauuu

SEQ ID NO: 237479 - RNA, 19 nt, Homo sapiens
  misc_RNA (1)...(19): siRNA sense strand
gaacccugauuucauagaa

SEQ ID NO: 237480 - RNA, 19 nt, Homo sapiens
  misc_RNA (1)...(19): siRNA sense strand
gagaaugacuccuggaucu

SEQ ID NO: 237481 - RNA, 19 nt, Homo sapiens
  misc_RNA (1)...(19): siRNA sense strand
cgacucagcugacuuugug

SEQ ID NO: 237482 - RNA, 19 nt, Homo sapiens
  misc_RNA (1)...(19): siRNA sense strand
ggacagggcccaguuaaug

SEQ ID NO: 237483 - RNA, 19 nt, Homo sapiens
  misc_RNA (1)...(19): siRNA sense strand
gaacagaaagagaagaguu

SEQ ID NO: 237484 - RNA, 19 nt, Homo sapiens
  misc_RNA (1)...(19): siRNA sense strand
gaaguaccuugcucaccua

SEQ ID NO: 237485 - RNA, 19 nt, Homo sapiens
  misc_RNA (1)...(19): siRNA sense strand
gaacaugugaaacaauuga

SEQ ID NO: 237486 - RNA, 19 nt, Homo sapiens
  misc_RNA (1)...(19): siRNA sense strand
gaacaggaacgccuucuca

SEQ ID NO: 237487 - RNA, 19 nt, Homo sapiens
  misc_RNA (1)...(19): siRNA sense strand
ggauguggcugaugcacuu

SEQ ID NO: 237488 - RNA, 19 nt, Homo sapiens
  misc_RNA (1)...(19): siRNA sense strand
uagaacaaguugcagaauu

SEQ ID NO: 237489 - RNA, 19 nt, Homo sapiens
  misc_RNA (1)...(19): siRNA sense strand
ggagguuaccgucucuuua

SEQ ID NO: 237490 - RNA, 19 nt, Homo sapiens
  misc_RNA (1)...(19): siRNA sense strand
gacccucgcucuuaaacuu

SEQ ID NO: 237491 - RNA, 19 nt, Homo sapiens
  misc_RNA (1)...(19): siRNA sense strand
ucaaggauguggaccaaau

SEQ ID NO: 237492 - RNA, 19 nt, Homo sapiens
  misc_RNA (1)...(19): siRNA sense strand
ugaaacaauugacugagaa

SEQ ID NO: 237493 - RNA, 19 nt, Homo sapiens
  misc_RNA (1)...(19): siRNA sense strand
gugaaacaauugacugaga

SEQ ID NO: 237494 - RNA, 19 nt, Homo sapiens
  misc_RNA (1)...(19): siRNA sense strand
caagcuggcugggaagaaa

SEQ ID NO: 237495 - RNA, 19 nt, Homo sapiens
  misc_RNA (1)...(19): siRNA sense strand
ucucuaggcuccacaguga

SEQ ID NO: 237496 - RNA, 19 nt, Homo sapiens
  misc_RNA (1)...(19): siRNA sense strand
gaaugacuccuggaucuuu

SEQ ID NO: 237497 - RNA, 19 nt, Homo sapiens
  misc_RNA (1)...(19): siRNA sense strand
ggaccaacuucacuaugug

SEQ ID NO: 237498 - RNA, 19 nt, Homo sapiens
  misc_RNA (1)...(19): siRNA sense strand
gaaaagguacugauaagaa

SEQ ID NO: 237499 - RNA, 19 nt, Homo sapiens
  misc_RNA (1)...(19): siRNA sense strand
gcacagggacagugagaga

SEQ ID NO: 237500 - RNA, 19 nt, Homo sapiens
  misc_RNA (1)...(19): siRNA sense strand
gcaccuucguguacaauag

SEQ ID NO: 237501 - RNA, 19 nt, Homo sapiens
  misc_RNA (1)...(19): siRNA sense strand
gcauuuguguggacucuca

SEQ ID NO: 237502 - RNA, 19 nt, Homo sapiens
  misc_RNA (1)...(19): siRNA sense strand
gcugacagaucgaaucaag

SEQ ID NO: 237503 - RNA, 19 nt, Homo sapiens
  misc_RNA (1)...(19): siRNA sense strand
aauccuaccugaugaacaa

SEQ ID NO: 237504 - RNA, 19 nt, Homo sapiens
  misc_RNA (1)...(19): siRNA sense strand
agagaagaguuaucaggaa

SEQ ID NO: 237505 - RNA, 19 nt, Homo sapiens
  misc_RNA (1)...(19): siRNA sense strand
caaagcaucaucagauugu

SEQ ID NO: 237506 - RNA, 19 nt, Homo sapiens
  misc_RNA (1)...(19): siRNA sense strand
gauccuaucugcaauuacg

SEQ ID NO: 237507 - RNA, 19 nt, Homo sapiens
  misc_RNA (1)...(19): siRNA sense strand
uagagaagggugacaauga

SEQ ID NO: 237508 - RNA, 19 nt, Homo sapiens
  misc_RNA (1)...(19): siRNA sense strand
aggaacaugugaaacaauu

SEQ ID NO: 237509 - RNA, 19 nt, Homo sapiens
  misc_RNA (1)...(19): siRNA sense strand
gaagaguuaucaggaacau

SEQ ID NO: 237510 - RNA, 19 nt, Homo sapiens
  misc_RNA (1)...(19): siRNA sense strand
cgauugaaguggaacguau

SEQ ID NO: 237511 - RNA, 19 nt, Homo sapiens
  misc_RNA (1)...(19): siRNA sense strand
gaucagucacucucagaaa

SEQ ID NO: 237512 - RNA, 19 nt, Homo sapiens
  misc_RNA (1)...(19): siRNA sense strand
ggcaaauccuaccugauga

SEQ ID NO: 237513 - RNA, 19 nt, Homo sapiens
  misc_RNA (1)...(19): siRNA sense strand
gaagagcugaacccugauu

SEQ ID NO: 237514 - RNA, 19 nt, Homo sapiens
  misc_RNA (1)...(19): siRNA sense strand
gagaggccauugaagucuu

SEQ ID NO: 237515 - RNA, 19 nt, Homo sapiens
  misc_RNA (1)...(19): siRNA sense strand
gaugacuacuuggagcuuu

SEQ ID NO: 237516 - RNA, 19 nt, Homo sapiens
  misc_RNA (1)...(19): siRNA sense strand
acaauugacugagaagaug

SEQ ID NO: 237517 - RNA, 19 nt, Homo sapiens
  misc_RNA (1)...(19): siRNA sense strand
gagcagcaccuucguguac

SEQ ID NO: 237518 - RNA, 19 nt, Homo sapiens
  misc_RNA (1)...(19): siRNA sense strand
gcaaauccuaccugaugaa

SEQ ID NO: 237519 - RNA, 19 nt, Homo sapiens
  misc_RNA (1)...(19): siRNA sense strand
ggagaugauggaacagaaa

SEQ ID NO: 237520 - RNA, 19 nt, Homo sapiens
  misc_RNA (1)...(19): siRNA sense strand
gaaguggaacguauaaagg

SEQ ID NO: 237521 - RNA, 19 nt, Homo sapiens
  misc_RNA (1)...(19): siRNA sense strand
guaccuugcucaccuagag

SEQ ID NO: 237522 - RNA, 19 nt, Homo sapiens
  misc_RNA (1)...(19): siRNA sense strand
uaccgucucuuuacucaga

SEQ ID NO: 237523 - RNA, 19 nt, Homo sapiens
  misc_RNA (1)...(19): siRNA sense strand
gaaucuggauguggugugu

SEQ ID NO: 237524 - RNA, 19 nt, Homo sapiens
  misc_RNA (1)...(19): siRNA sense strand
gagagcaagagacuucaaa

SEQ ID NO: 237525 - RNA, 19 nt, Homo sapiens
  misc_RNA (1)...(19): siRNA sense strand
ucaggaacaugugaaacaa

SEQ ID NO: 237526 - RNA, 19 nt, Homo sapiens
  misc_RNA (1)...(19): siRNA sense strand
aaagaagaaugaggagaug

SEQ ID NO: 237527 - RNA, 19 nt, Homo sapiens
  misc_RNA (1)...(19): siRNA sense strand
gcagaauuccaaagcauca

SEQ ID NO: 237528 - RNA, 19 nt, Homo sapiens
  misc_RNA (1)...(19): siRNA sense strand
ggauguggaccaaauguuc

SEQ ID NO: 237529 - RNA, 19 nt, Homo sapiens
  misc_RNA (1)...(19): siRNA sense strand
ccucauugauaacacuaaa

SEQ ID NO: 237530 - RNA, 19 nt, Homo sapiens
  misc_RNA (1)...(19): siRNA sense strand
agaaagagaagaguuauca

SEQ ID NO: 237531 - RNA, 19 nt, Homo sapiens
  misc_RNA (1)...(19): siRNA sense strand
gauugaaguggaacguaua

SEQ ID NO: 237532 - RNA, 19 nt, Homo sapiens
  misc_RNA (1)...(19): siRNA sense strand
gagagaggccauugaaguc

SEQ ID NO: 237533 - RNA, 19 nt, Homo sapiens
  misc_RNA (1)...(19): siRNA sense strand
gcagcaccuucguguacaa

SEQ ID NO: 237534 - RNA, 19 nt, Homo sapiens
  misc_RNA (1)...(19): siRNA sense strand
gagggacagggcccaguua

SEQ ID NO: 237535 - RNA, 19 nt, Homo sapiens
  misc_RNA (1)...(19): siRNA sense strand
uccaaagcaucaucagauu

SEQ ID NO: 237536 - RNA, 19 nt, Homo sapiens
  misc_RNA (1)...(19): siRNA sense strand
ugagagagaggccauugaa

SEQ ID NO: 237537 - RNA, 19 nt, Homo sapiens
  misc_RNA (1)...(19): siRNA sense strand
caaugggccucgucuagag

SEQ ID NO: 237538 - RNA, 19 nt, Homo sapiens
  misc_RNA (1)...(19): siRNA sense strand
cagaucgaaucaaggcaaa

SEQ ID NO: 237539 - RNA, 19 nt, Homo sapiens
  misc_RNA (1)...(19): siRNA sense strand
acuuggagcuuucgcuaaa

SEQ ID NO: 237540 - RNA, 19 nt, Homo sapiens
  misc_RNA (1)...(19): siRNA sense strand
gagcugacagaucgaauca

SEQ ID NO: 237541 - RNA, 19 nt, Homo sapiens
  misc_RNA (1)...(19): siRNA sense strand
gcuccacagugaagucuca

SEQ ID NO: 237542 - RNA, 19 nt, Homo sapiens
  misc_RNA (1)...(19): siRNA sense strand
gaaaauguuggaggaaaua

SEQ ID NO: 237543 - RNA, 19 nt, Homo sapiens
  misc_RNA (1)...(19): siRNA sense strand
gaacguauaaaggcugaau

SEQ ID NO: 237544 - RNA, 19 nt, Homo sapiens
  misc_RNA (1)...(19): siRNA sense strand
uggcuuuacuucaggauau

SEQ ID NO: 237545 - RNA, 19 nt, Homo sapiens
  misc_RNA (1)...(19): siRNA sense strand
agacgacucagcugacuuu

SEQ ID NO: 237546 - RNA, 19 nt, Homo sapiens
  misc_RNA (1)...(19): siRNA sense strand
gaagggugacaaugagaau

SEQ ID NO: 237547 - RNA, 19 nt, Homo sapiens
  misc_RNA (1)...(19): siRNA sense strand
aacagaaagagaagaguua

SEQ ID NO: 237548 - RNA, 19 nt, Homo sapiens
  misc_RNA (1)...(19): siRNA sense strand
gaagaaugaggagaugaug

SEQ ID NO: 237549 - RNA, 19 nt, Homo sapiens
  misc_RNA (1)...(19): siRNA sense strand
uggaccaacuucacuaugu

SEQ ID NO: 237550 - RNA, 19 nt, Homo sapiens
  misc_RNA (1)...(19): siRNA sense strand
uaagcagaauuccaaagca

SEQ ID NO: 237551 - RNA, 19 nt, Homo sapiens
  misc_RNA (1)...(19): siRNA sense strand
ggaacuggaaguagaugga

SEQ ID NO: 237552 - RNA, 19 nt, Homo sapiens
  misc_RNA (1)...(19): siRNA sense strand
gagguuaccgucucuuuac

SEQ ID NO: 237553 - RNA, 19 nt, Homo sapiens
  misc_RNA (1)...(19): siRNA sense strand
ccaaagcaucaucagauug

SEQ ID NO: 237554 - RNA, 19 nt, Homo sapiens
  misc_RNA (1)...(19): siRNA sense strand
agagaagggugacaaugag

SEQ ID NO: 237555 - RNA, 19 nt, Homo sapiens
  misc_RNA (1)...(19): siRNA sense strand
gcacuucuacagacugauc

SEQ ID NO: 237556 - RNA, 19 nt, Homo sapiens
  misc_RNA (1)...(19): siRNA sense strand
gcugaugcacuucuacaga

SEQ ID NO: 237557 - RNA, 19 nt, Homo sapiens
  misc_RNA (1)...(19): siRNA sense strand
guuaccgucucuuuacuca

SEQ ID NO: 237558 - RNA, 19 nt, Homo sapiens
  misc_RNA (1)...(19): siRNA sense strand
aggcaaauccuaccugaug

SEQ ID NO: 237559 - RNA, 19 nt, Homo sapiens
  misc_RNA (1)...(19): siRNA sense strand
cauagaacaaguugcagaa

SEQ ID NO: 237560 - RNA, 19 nt, Homo sapiens
  misc_RNA (1)...(19): siRNA sense strand
uaaaggaggaagagcugaa

SEQ ID NO: 237561 - RNA, 19 nt, Homo sapiens
  misc_RNA (1)...(19): siRNA sense strand
ggcuuuacuucaggauaua

SEQ ID NO: 237562 - RNA, 19 nt, Homo sapiens
  misc_RNA (1)...(19): siRNA sense strand
agagagaggccauugaagu

SEQ ID NO: 237563 - RNA, 19 nt, Homo sapiens
  misc_RNA (1)...(19): siRNA sense strand
aagggcagcugguggugaa

SEQ ID NO: 237564 - RNA, 19 nt, Homo sapiens
  misc_RNA (1)...(19): siRNA sense strand
ggccaaagaggugcugaaa

SEQ ID NO: 237565 - RNA, 19 nt, Homo sapiens
  misc_RNA (1)...(19): siRNA sense strand
gagaagggugacaaugaga

SEQ ID NO: 237566 - RNA, 19 nt, Homo sapiens
  misc_RNA (1)...(19): siRNA sense strand
cugcaggagcugaagaaua

SEQ ID NO: 237567 - RNA, 19 nt, Homo sapiens
  misc_RNA (1)...(19): siRNA sense strand
uauauuuggcccuuuagaa

SEQ ID NO: 237568 - RNA, 19 nt, Homo sapiens
  misc_RNA (1)...(19): siRNA sense strand
ccaagggaaucuggaugug

SEQ ID NO: 237569 - RNA, 19 nt, Homo sapiens
  misc_RNA (1)...(19): siRNA sense strand
ucaaggagggauucgagaa

SEQ ID NO: 237570 - RNA, 19 nt, Homo sapiens
  misc_RNA (1)...(19): siRNA sense strand
ugaaguggaacguauaaag

SEQ ID NO: 237571 - RNA, 19 nt, Homo sapiens
  misc_RNA (1)...(19): siRNA sense strand
gcagggaacauuuucuaaa

SEQ ID NO: 237572 - RNA, 19 nt, Homo sapiens
  misc_RNA (1)...(19): siRNA sense strand
agaguuaucaggaacaugu

SEQ ID NO: 237573 - RNA, 19 nt, Homo sapiens
  misc_RNA (1)...(19): siRNA sense strand
ggaacaugugaaacaauug

SEQ ID NO: 237574 - RNA, 19 nt, Homo sapiens
  misc_RNA (1)...(19): siRNA sense strand
ggacaggcaucauccucaa

SEQ ID NO: 237575 - RNA, 19 nt, Homo sapiens
  misc_RNA (1)...(19): siRNA sense strand
ggucgaagcuagugauugg

SEQ ID NO: 237576 - RNA, 19 nt, Homo sapiens
  misc_RNA (1)...(19): siRNA sense strand
gcuaagaggguucaacuuc

SEQ ID NO: 237577 - RNA, 19 nt, Homo sapiens
  misc_RNA (1)...(19): siRNA sense strand
acaacgagcuccuggacuu

SEQ ID NO: 237578 - RNA, 19 nt, Homo sapiens
  misc_RNA (1)...(19): siRNA sense strand
ggaggacauugccaaggaa

SEQ ID NO: 237579 - RNA, 19 nt, Homo sapiens
  misc_RNA (1)...(19): siRNA sense strand
guagagacgcucaaguuug

SEQ ID NO: 237580 - RNA, 19 nt, Homo sapiens
  misc_RNA (1)...(19): siRNA sense strand
gaacguguaccaccaccuu

SEQ ID NO: 237581 - RNA, 19 nt, Homo sapiens
  misc_RNA (1)...(19): siRNA sense strand
ggaggccgcaggcuacuaa

SEQ ID NO: 237582 - RNA, 19 nt, Homo sapiens
  misc_RNA (1)...(19): siRNA sense strand
gaagguggaggucaucaau

SEQ ID NO: 237583 - RNA, 19 nt, Homo sapiens
  misc_RNA (1)...(19): siRNA sense strand
uccaaggucugcucggaua

SEQ ID NO: 237584 - RNA, 19 nt, Homo sapiens
  misc_RNA (1)...(19): siRNA sense strand
gcacgucccaugugucugu

SEQ ID NO: 237585 - RNA, 19 nt, Homo sapiens
  misc_RNA (1)...(19): siRNA sense strand
caacgagcuccuggacuua

SEQ ID NO: 237586 - RNA, 19 nt, Homo sapiens
  misc_RNA (1)...(19): siRNA sense strand
uagagacgcucaaguuugc

SEQ ID NO: 237587 - RNA, 19 nt, Homo sapiens
  misc_RNA (1)...(19): siRNA sense strand
gcaagggcuguguggagua

SEQ ID NO: 237588 - RNA, 19 nt, Homo sapiens
  misc_RNA (1)...(19): siRNA sense strand
uggaggacauugccaagga

SEQ ID NO: 237589 - RNA, 19 nt, Homo sapiens
  misc_RNA (1)...(19): siRNA sense strand
ggaguacgagcccaacuuc

SEQ ID NO: 237590 - RNA, 19 nt, Homo sapiens
  misc_RNA (1)...(19): siRNA sense strand
uaagaggguucaacuucuc

SEQ ID NO: 237591 - RNA, 19 nt, Homo sapiens
  misc_RNA (1)...(19): siRNA sense strand
cuaagaggguucaacuucu

SEQ ID NO: 237592 - RNA, 19 nt, Homo sapiens
  misc_RNA (1)...(19): siRNA sense strand
ggacuauacccuguacuca

SEQ ID NO: 237593 - RNA, 19 nt, Homo sapiens
  misc_RNA (1)...(19): siRNA sense strand
gcaucauccucaacaacga

SEQ ID NO: 237594 - RNA, 19 nt, Homo sapiens
  misc_RNA (1)...(19): siRNA sense strand
aagggagggugaacgugua

SEQ ID NO: 237595 - RNA, 19 nt, Homo sapiens
  misc_RNA (1)...(19): siRNA sense strand
uuggagcgaugguguauuc

SEQ ID NO: 237596 - RNA, 19 nt, Homo sapiens
  misc_RNA (1)...(19): siRNA sense strand
cagcucauccgccaacaga

SEQ ID NO: 237597 - RNA, 19 nt, Homo sapiens
  misc_RNA (1)...(19): siRNA sense strand
uguagagacgcucaaguuu

SEQ ID NO: 237598 - RNA, 19 nt, Homo sapiens
  misc_RNA (1)...(19): siRNA sense strand
caucaacacacccuuugga

SEQ ID NO: 237599 - RNA, 19 nt, Homo sapiens
  misc_RNA (1)...(19): siRNA sense strand
caucuucaccaucuacaau

SEQ ID NO: 237600 - RNA, 19 nt, Homo sapiens
  misc_RNA (1)...(19): siRNA sense strand
ccaagaccguggccagaac

SEQ ID NO: 237601 - RNA, 19 nt, Homo sapiens
  misc_RNA (1)...(19): siRNA sense strand
gguucaacuucucaacaga

SEQ ID NO: 237602 - RNA, 19 nt, Homo sapiens
  misc_RNA (1)...(19): siRNA sense strand
ggaagguggaggucaucaa

SEQ ID NO: 237603 - RNA, 19 nt, Homo sapiens
  misc_RNA (1)...(19): siRNA sense strand
caucuacaaugugacaaca

SEQ ID NO: 237604 - RNA, 19 nt, Homo sapiens
  misc_RNA (1)...(19): siRNA sense strand
ggcgcuggcugucauugug

SEQ ID NO: 237605 - RNA, 19 nt, Homo sapiens
  misc_RNA (1)...(19): siRNA sense strand
gcucauccgccaacagauc

SEQ ID NO: 237606 - RNA, 19 nt, Homo sapiens
  misc_RNA (1)...(19): siRNA sense strand
acccgaagcuccagaaugc

SEQ ID NO: 237607 - RNA, 19 nt, Homo sapiens
  misc_RNA (1)...(19): siRNA sense strand
ggguucaacuucucaacag

SEQ ID NO: 237608 - RNA, 19 nt, Homo sapiens
  misc_RNA (1)...(19): siRNA sense strand
caacuucucaacagagucu

SEQ ID NO: 237609 - RNA, 19 nt, Homo sapiens
  misc_RNA (1)...(19): siRNA sense strand
ggucugcucggauauugga

SEQ ID NO: 237610 - RNA, 19 nt, Homo sapiens
  misc_RNA (1)...(19): siRNA sense strand
caaggucugcucggauauu

SEQ ID NO: 237611 - RNA, 19 nt, Homo sapiens
  misc_RNA (1)...(19): siRNA sense strand
cagggaagguggaggucau

SEQ ID NO: 237612 - RNA, 19 nt, Homo sapiens
  misc_RNA (1)...(19): siRNA sense strand
gaccugagagcggccauug

SEQ ID NO: 237613 - RNA, 19 nt, Homo sapiens
  misc_RNA (1)...(19): siRNA sense strand
acaggcacgucccaugugu

SEQ ID NO: 237614 - RNA, 19 nt, Homo sapiens
  misc_RNA (1)...(19): siRNA sense strand
caagggcuguguggaguac

SEQ ID NO: 237615 - RNA, 19 nt, Homo sapiens
  misc_RNA (1)...(19): siRNA sense strand
gcguggaggucuucuacac

SEQ ID NO: 237616 - RNA, 19 nt, Homo sapiens
  misc_RNA (1)...(19): siRNA sense strand
gcuuggcuuugaccugaga

SEQ ID NO: 237617 - RNA, 19 nt, Homo sapiens
  misc_RNA (1)...(19): siRNA sense strand
ggugccauucucagcuuua

SEQ ID NO: 237618 - RNA, 19 nt, Homo sapiens
  misc_RNA (1)...(19): siRNA sense strand
uggagaccguggccacaga

SEQ ID NO: 237619 - RNA, 19 nt, Homo sapiens
  misc_RNA (1)...(19): siRNA sense strand
cagagggcguggaggucuu

SEQ ID NO: 237620 - RNA, 19 nt, Homo sapiens
  misc_RNA (1)...(19): siRNA sense strand
gugccauucucagcuuuau

SEQ ID NO: 237621 - RNA, 19 nt, Homo sapiens
  misc_RNA (1)...(19): siRNA sense strand
ucucggaccugaggaagag

SEQ ID NO: 237622 - RNA, 19 nt, Homo sapiens
  misc_RNA (1)...(19): siRNA sense strand
aaggucugcucggauauug

SEQ ID NO: 237623 - RNA, 19 nt, Homo sapiens
  misc_RNA (1)...(19): siRNA sense strand
caccaucaacacacccuuu

SEQ ID NO: 237624 - RNA, 19 nt, Homo sapiens
  misc_RNA (1)...(19): siRNA sense strand
gggugccauucucagcuuu

SEQ ID NO: 237625 - RNA, 19 nt, Homo sapiens
  misc_RNA (1)...(19): siRNA sense strand
gagcucaaguucuuaauua

SEQ ID NO: 237626 - RNA, 19 nt, Homo sapiens
  misc_RNA (1)...(19): siRNA sense strand
gaagggaacuaauucagaa

SEQ ID NO: 237627 - RNA, 19 nt, Homo sapiens
  misc_RNA (1)...(19): siRNA sense strand
caagaggccuuugaaauug

SEQ ID NO: 237628 - RNA, 19 nt, Homo sapiens
  misc_RNA (1)...(19): siRNA sense strand
ccaagaggccuuugaaauu

SEQ ID NO: 237629 - RNA, 19 nt, Homo sapiens
  misc_RNA (1)...(19): siRNA sense strand
gaucagauuugcaaguaug

SEQ ID NO: 237630 - RNA, 19 nt, Homo sapiens
  misc_RNA (1)...(19): siRNA sense strand
caagaaagauggaagaaaa

SEQ ID NO: 237631 - RNA, 19 nt, Homo sapiens
  misc_RNA (1)...(19): siRNA sense strand
guauggagcucaaguucuu

SEQ ID NO: 237632 - RNA, 19 nt, Homo sapiens
  misc_RNA (1)...(19): siRNA sense strand
ccaaugccauguucaagaa

SEQ ID NO: 237633 - RNA, 19 nt, Homo sapiens
  misc_RNA (1)...(19): siRNA sense strand
gacgugaccugaaaguauu

SEQ ID NO: 237634 - RNA, 19 nt, Homo sapiens
  misc_RNA (1)...(19): siRNA sense strand
caacaacgccaauauagau

SEQ ID NO: 237635 - RNA, 19 nt, Homo sapiens
  misc_RNA (1)...(19): siRNA sense strand
gcaaguaugucucccuaag

SEQ ID NO: 237636 - RNA, 19 nt, Homo sapiens
  misc_RNA (1)...(19): siRNA sense strand
ccaguggucagucaaauua

SEQ ID NO: 237637 - RNA, 19 nt, Homo sapiens
  misc_RNA (1)...(19): siRNA sense strand
uugcagaacuggccuauga

SEQ ID NO: 237638 - RNA, 19 nt, Homo sapiens
  misc_RNA (1)...(19): siRNA sense strand
gccaagaacuacaccaaug

SEQ ID NO: 237639 - RNA, 19 nt, Homo sapiens
  misc_RNA (1)...(19): siRNA sense strand
ccaacaugcugcucaagaa

SEQ ID NO: 237640 - RNA, 19 nt, Homo sapiens
  misc_RNA (1)...(19): siRNA sense strand
gcaagucacuaggaucuuc

SEQ ID NO: 237641 - RNA, 19 nt, Homo sapiens
  misc_RNA (1)...(19): siRNA sense strand
gagauaagcaccuuucaca

SEQ ID NO: 237642 - RNA, 19 nt, Homo sapiens
  misc_RNA (1)...(19): siRNA sense strand
caacuaacagcacgauuga

SEQ ID NO: 237643 - RNA, 19 nt, Homo sapiens
  misc_RNA (1)...(19): siRNA sense strand
gacaaguacuggagagaau

SEQ ID NO: 237644 - RNA, 19 nt, Homo sapiens
  misc_RNA (1)...(19): siRNA sense strand
guacagaaucuaugacaug

SEQ ID NO: 237645 - RNA, 19 nt, Homo sapiens
  misc_RNA (1)...(19): siRNA sense strand
gaggaaggguuugaaagug

SEQ ID NO: 237646 - RNA, 19 nt, Homo sapiens
  misc_RNA (1)...(19): siRNA sense strand
caaguuaugugcccauucu

SEQ ID NO: 237647 - RNA, 19 nt, Homo sapiens
  misc_RNA (1)...(19): siRNA sense strand
gaacaugaagaaaccuuau

SEQ ID NO: 237648 - RNA, 19 nt, Homo sapiens
  misc_RNA (1)...(19): siRNA sense strand
gaagaagggaacuaauuca

SEQ ID NO: 237649 - RNA, 19 nt, Homo sapiens
  misc_RNA (1)...(19): siRNA sense strand
ugguggagauugacaagua

SEQ ID NO: 237650 - RNA, 19 nt, Homo sapiens
  misc_RNA (1)...(19): siRNA sense strand
agacugcggugaugaugaa

SEQ ID NO: 237651 - RNA, 19 nt, Homo sapiens
  misc_RNA (1)...(19): siRNA sense strand
aaagguagaguucuggaua

SEQ ID NO: 237652 - RNA, 19 nt, Homo sapiens
  misc_RNA (1)...(19): siRNA sense strand
guggagagauacagccaaa

SEQ ID NO: 237653 - RNA, 19 nt, Homo sapiens
  misc_RNA (1)...(19): siRNA sense strand
ggaaagcugaccaccacua

SEQ ID NO: 237654 - RNA, 19 nt, Homo sapiens
  misc_RNA (1)...(19): siRNA sense strand
uugaagaacuugugaaugg

SEQ ID NO: 237655 - RNA, 19 nt, Homo sapiens
  misc_RNA (1)...(19): siRNA sense strand
ugaauggcauguacagaau

SEQ ID NO: 237656 - RNA, 19 nt, Homo sapiens
  misc_RNA (1)...(19): siRNA sense strand
gacaaacugaagcacauua

SEQ ID NO: 237657 - RNA, 19 nt, Homo sapiens
  misc_RNA (1)...(19): siRNA sense strand
gaagugaucaacacaacug

SEQ ID NO: 237658 - RNA, 19 nt, Homo sapiens
  misc_RNA (1)...(19): siRNA sense strand
gaaagcugaccaccacuau

SEQ ID NO: 237659 - RNA, 19 nt, Homo sapiens
  misc_RNA (1)...(19): siRNA sense strand
caucuuggguucugacauc

SEQ ID NO: 237660 - RNA, 19 nt, Homo sapiens
  misc_RNA (1)...(19): siRNA sense strand
gccaauauagaucugcuua

SEQ ID NO: 237661 - RNA, 19 nt, Homo sapiens
  misc_RNA (1)...(19): siRNA sense strand
gaacauggaacagcugcuu

SEQ ID NO: 237662 - RNA, 19 nt, Homo sapiens
  misc_RNA (1)...(19): siRNA sense strand
gauaagcaccuuucacaac

SEQ ID NO: 237663 - RNA, 19 nt, Homo sapiens
  misc_RNA (1)...(19): siRNA sense strand
cgaagaagggaacuaauuc

SEQ ID NO: 237664 - RNA, 19 nt, Homo sapiens
  misc_RNA (1)...(19): siRNA sense strand
caacaugcugcucaagaaa

SEQ ID NO: 237665 - RNA, 19 nt, Homo sapiens
  misc_RNA (1)...(19): siRNA sense strand
ccagaagaaugcaggaaag

SEQ ID NO: 237666 - RNA, 19 nt, Homo sapiens
  misc_RNA (1)...(19): siRNA sense strand
gcauguacagaaucuauga

SEQ ID NO: 237667 - RNA, 19 nt, Homo sapiens
  misc_RNA (1)...(19): siRNA sense strand
gugaauggcauguacagaa

SEQ ID NO: 237668 - RNA, 19 nt, Homo sapiens
  misc_RNA (1)...(19): siRNA sense strand
gaaugugguacugcucuua

SEQ ID NO: 237669 - RNA, 19 nt, Homo sapiens
  misc_RNA (1)...(19): siRNA sense strand
uaaggacuguggccgaaug

SEQ ID NO: 237670 - RNA, 19 nt, Homo sapiens
  misc_RNA (1)...(19): siRNA sense strand
ccaacuaacagcacgauug

SEQ ID NO: 237671 - RNA, 19 nt, Homo sapiens
  misc_RNA (1)...(19): siRNA sense strand
aaaaguugcucauguagaa

SEQ ID NO: 237672 - RNA, 19 nt, Homo sapiens
  misc_RNA (1)...(19): siRNA sense strand
aagguagaguucuggauaa

SEQ ID NO: 237673 - RNA, 19 nt, Homo sapiens
  misc_RNA (1)...(19): siRNA sense strand
ggagcucaaguucuuaauu

SEQ ID NO: 237674 - RNA, 19 nt, Homo sapiens
  misc_RNA (1)...(19): siRNA sense strand
gaugaggaaggguuugaaa

SEQ ID NO: 237675 - RNA, 19 nt, Homo sapiens
  misc_RNA (1)...(19): siRNA sense strand
ccgaagaagggaacuaauu

SEQ ID NO: 237676 - RNA, 19 nt, Homo sapiens
  misc_RNA (1)...(19): siRNA sense strand
guacuggagagaauacauu

SEQ ID NO: 237677 - RNA, 19 nt, Homo sapiens
  misc_RNA (1)...(19): siRNA sense strand
gccgaaugcucaccagaau

SEQ ID NO: 237678 - RNA, 19 nt, Homo sapiens
  misc_RNA (1)...(19): siRNA sense strand
gagcaagacgugaccugaa

SEQ ID NO: 237679 - RNA, 19 nt, Homo sapiens
  misc_RNA (1)...(19): siRNA sense strand
cuacaccaaugccauguuc

SEQ ID NO: 237680 - RNA, 19 nt, Homo sapiens
  misc_RNA (1)...(19): siRNA sense strand
gcccaaagguagaguucug

SEQ ID NO: 237681 - RNA, 19 nt, Homo sapiens
  misc_RNA (1)...(19): siRNA sense strand
ggaucagauuugcaaguau

SEQ ID NO: 237682 - RNA, 19 nt, Homo sapiens
  misc_RNA (1)...(19): siRNA sense strand
aggaucagauuugcaagua

SEQ ID NO: 237683 - RNA, 19 nt, Homo sapiens
  misc_RNA (1)...(19): siRNA sense strand
cgaaugcucaccagaaugu

SEQ ID NO: 237684 - RNA, 19 nt, Homo sapiens
  misc_RNA (1)...(19): siRNA sense strand
ugaugaagaugagugcauu

SEQ ID NO: 237685 - RNA, 19 nt, Homo sapiens
  misc_RNA (1)...(19): siRNA sense strand
ucucaacaacgccaauaua

SEQ ID NO: 237686 - RNA, 19 nt, Homo sapiens
  misc_RNA (1)...(19): siRNA sense strand
agacgugaccugaaaguau

SEQ ID NO: 237687 - RNA, 19 nt, Homo sapiens
  misc_RNA (1)...(19): siRNA sense strand
uccaguauguccagaagaa

SEQ ID NO: 237688 - RNA, 19 nt, Homo sapiens
  misc_RNA (1)...(19): siRNA sense strand
agcaagacgugaccugaaa

SEQ ID NO: 237689 - RNA, 19 nt, Homo sapiens
  misc_RNA (1)...(19): siRNA sense strand
caccacuauuggcaaguua

SEQ ID NO: 237690 - RNA, 19 nt, Homo sapiens
  misc_RNA (1)...(19): siRNA sense strand
gaaucuaugacauggagaa

SEQ ID NO: 237691 - RNA, 19 nt, Homo sapiens
  misc_RNA (1)...(19): siRNA sense strand
caggugugguggagauuga

SEQ ID NO: 237692 - RNA, 19 nt, Homo sapiens
  misc_RNA (1)...(19): siRNA sense strand
aagaacucguggagagaua

SEQ ID NO: 237693 - RNA, 19 nt, Homo sapiens
  misc_RNA (1)...(19): siRNA sense strand
cagcuucuauagugcuuug

SEQ ID NO: 237694 - RNA, 19 nt, Homo sapiens
  misc_RNA (1)...(19): siRNA sense strand
aagcugaccaccacuauug

SEQ ID NO: 237695 - RNA, 19 nt, Homo sapiens
  misc_RNA (1)...(19): siRNA sense strand
ugacccagguuuccaaguc

SEQ ID NO: 237696 - RNA, 19 nt, Homo sapiens
  misc_RNA (1)...(19): siRNA sense strand
ggacgccaccugucaccaa

SEQ ID NO: 237697 - RNA, 19 nt, Homo sapiens
  misc_RNA (1)...(19): siRNA sense strand
ccaccacuauuggcaaguu

SEQ ID NO: 237698 - RNA, 19 nt, Homo sapiens
  misc_RNA (1)...(19): siRNA sense strand
ucaagugggugccagaaac

SEQ ID NO: 237699 - RNA, 19 nt, Homo sapiens
  misc_RNA (1)...(19): siRNA sense strand
gacccagguuuccaaguca

SEQ ID NO: 237700 - RNA, 19 nt, Homo sapiens
  misc_RNA (1)...(19): siRNA sense strand
gcucaagaaagauggaaga

SEQ ID NO: 237701 - RNA, 19 nt, Homo sapiens
  misc_RNA (1)...(19): siRNA sense strand
gaaacucccgugccaggau

SEQ ID NO: 237702 - RNA, 19 nt, Homo sapiens
  misc_RNA (1)...(19): siRNA sense strand
gcucugaaucuuggaauug

SEQ ID NO: 237703 - RNA, 19 nt, Homo sapiens
  misc_RNA (1)...(19): siRNA sense strand
cugaaaguauuugggaauu

SEQ ID NO: 237704 - RNA, 19 nt, Homo sapiens
  misc_RNA (1)...(19): siRNA sense strand
agcaaggaauggaaugaaa

SEQ ID NO: 237705 - RNA, 19 nt, Homo sapiens
  misc_RNA (1)...(19): siRNA sense strand
uucaucagcuucuauagug

SEQ ID NO: 237706 - RNA, 19 nt, Homo sapiens
  misc_RNA (1)...(19): siRNA sense strand
ucaacaacgccaauauaga

SEQ ID NO: 237707 - RNA, 19 nt, Homo sapiens
  misc_RNA (1)...(19): siRNA sense strand
ccaugauucuauccaguau

SEQ ID NO: 237708 - RNA, 19 nt, Homo sapiens
  misc_RNA (1)...(19): siRNA sense strand
gcggugaugaugaagauga

SEQ ID NO: 237709 - RNA, 19 nt, Homo sapiens
  misc_RNA (1)...(19): siRNA sense strand
uaacagcacgauugaacau

SEQ ID NO: 237710 - RNA, 19 nt, Homo sapiens
  misc_RNA (1)...(19): siRNA sense strand
gcagaacuggccuaugauc

SEQ ID NO: 237711 - RNA, 19 nt, Homo sapiens
  misc_RNA (1)...(19): siRNA sense strand
gcagcaaggaauggaauga

SEQ ID NO: 237712 - RNA, 19 nt, Homo sapiens
  misc_RNA (1)...(19): siRNA sense strand
gcaaguauggagcucaagu

SEQ ID NO: 237713 - RNA, 19 nt, Homo sapiens
  misc_RNA (1)...(19): siRNA sense strand
caaguauggagcucaaguu

SEQ ID NO: 237714 - RNA, 19 nt, Homo sapiens
  misc_RNA (1)...(19): siRNA sense strand
ucaagaaagauggaagaaa

SEQ ID NO: 237715 - RNA, 19 nt, Homo sapiens
  misc_RNA (1)...(19): siRNA sense strand
acaugcugcucaagaaaga

SEQ ID NO: 237716 - RNA, 19 nt, Homo sapiens
  misc_RNA (1)...(19): siRNA sense strand
caacgccaauauagaucug

SEQ ID NO: 237717 - RNA, 19 nt, Homo sapiens
  misc_RNA (1)...(19): siRNA sense strand
cguacugcuuggucucuuu

SEQ ID NO: 237718 - RNA, 19 nt, Homo sapiens
  misc_RNA (1)...(19): siRNA sense strand
ugaggaaggguuugaaagu

SEQ ID NO: 237719 - RNA, 19 nt, Homo sapiens
  misc_RNA (1)...(19): siRNA sense strand
acaaacugaagcacauuaa

SEQ ID NO: 237720 - RNA, 19 nt, Homo sapiens
  misc_RNA (1)...(19): siRNA sense strand
caaucuccaugagcugaaa

SEQ ID NO: 237721 - RNA, 19 nt, Homo sapiens
  misc_RNA (1)...(19): siRNA sense strand
cgacacccuuugcuggaau

SEQ ID NO: 237722 - RNA, 19 nt, Homo sapiens
  misc_RNA (1)...(19): siRNA sense strand
ccaguucaaucuccaugag

SEQ ID NO: 237723 - RNA, 19 nt, Homo sapiens
  misc_RNA (1)...(19): siRNA sense strand
uuaaccagcuccugagaac

SEQ ID NO: 237724 - RNA, 19 nt, Homo sapiens
  misc_RNA (1)...(19): siRNA sense strand
aguggucagucaaauuauu

SEQ ID NO: 237725 - RNA, 19 nt, Homo sapiens
  misc_RNA (1)...(19): siRNA sense strand
cuacauggcuuaucuuaug

SEQ ID NO: 237726 - RNA, 19 nt, Homo sapiens
  misc_RNA (1)...(19): siRNA sense strand
gaaucugacuuacgccauu

SEQ ID NO: 237727 - RNA, 19 nt, Homo sapiens
  misc_RNA (1)...(19): siRNA sense strand
gcaccaaagucucaagcuu

SEQ ID NO: 237728 - RNA, 19 nt, Homo sapiens
  misc_RNA (1)...(19): siRNA sense strand
gagccgacccagcaguuua

SEQ ID NO: 237729 - RNA, 19 nt, Homo sapiens
  misc_RNA (1)...(19): siRNA sense strand
gcaacaaggcccaggugaa

SEQ ID NO: 237730 - RNA, 19 nt, Homo sapiens
  misc_RNA (1)...(19): siRNA sense strand
gaagaugacagugcaggaa

SEQ ID NO: 237731 - RNA, 19 nt, Homo sapiens
  misc_RNA (1)...(19): siRNA sense strand
ccuauaauccuaagaacuu

SEQ ID NO: 237732 - RNA, 19 nt, Homo sapiens
  misc_RNA (1)...(19): siRNA sense strand
ccacgagccugcaccaaag

SEQ ID NO: 237733 - RNA, 19 nt, Homo sapiens
  misc_RNA (1)...(19): siRNA sense strand
uggcuuaucuuaugaucug

SEQ ID NO: 237734 - RNA, 19 nt, Homo sapiens
  misc_RNA (1)...(19): siRNA sense strand
cauccagccuauaauccua

SEQ ID NO: 237735 - RNA, 19 nt, Homo sapiens
  misc_RNA (1)...(19): siRNA sense strand
caacaaggcccaggugaag

SEQ ID NO: 237736 - RNA, 19 nt, Homo sapiens
  misc_RNA (1)...(19): siRNA sense strand
gaucgaaagugcgaaucug

SEQ ID NO: 237737 - RNA, 19 nt, Homo sapiens
  misc_RNA (1)...(19): siRNA sense strand
gaagaucgaaagugcgaau

SEQ ID NO: 237738 - RNA, 19 nt, Homo sapiens
  misc_RNA (1)...(19): siRNA sense strand
cgacaguaccauugaguug

SEQ ID NO: 237739 - RNA, 19 nt, Homo sapiens
  misc_RNA (1)...(19): siRNA sense strand
aaucugacuuacgccauua

SEQ ID NO: 237740 - RNA, 19 nt, Homo sapiens
  misc_RNA (1)...(19): siRNA sense strand
uuuguacacuggauaaaga

SEQ ID NO: 237741 - RNA, 19 nt, Homo sapiens
  misc_RNA (1)...(19): siRNA sense strand
uacugcagcuggagagaaa

SEQ ID NO: 237742 - RNA, 19 nt, Homo sapiens
  misc_RNA (1)...(19): siRNA sense strand
cuacaagaggugaagauga

SEQ ID NO: 237743 - RNA, 19 nt, Homo sapiens
  misc_RNA (1)...(19): siRNA sense strand
uacaagaggugaagaugac

SEQ ID NO: 237744 - RNA, 19 nt, Homo sapiens
  misc_RNA (1)...(19): siRNA sense strand
ugacuuacgccauuauuac

SEQ ID NO: 237745 - RNA, 19 nt, Homo sapiens
  misc_RNA (1)...(19): siRNA sense strand
ggaagcuccauaaauguca

SEQ ID NO: 237746 - RNA, 19 nt, Homo sapiens
  misc_RNA (1)...(19): siRNA sense strand
ggcccacaauaucaaagaa

SEQ ID NO: 237747 - RNA, 19 nt, Homo sapiens
  misc_RNA (1)...(19): siRNA sense strand
ccagggcauugucuccuau

SEQ ID NO: 237748 - RNA, 19 nt, Homo sapiens
  misc_RNA (1)...(19): siRNA sense strand
uacauggcuuaucuuauga

SEQ ID NO: 237749 - RNA, 19 nt, Homo sapiens
  misc_RNA (1)...(19): siRNA sense strand
gcaguuuaucccugugaaa

SEQ ID NO: 237750 - RNA, 19 nt, Homo sapiens
  misc_RNA (1)...(19): siRNA sense strand
cagccuauaauccuaagaa

SEQ ID NO: 237751 - RNA, 19 nt, Homo sapiens
  misc_RNA (1)...(19): siRNA sense strand
acaguaccauugaguugug

SEQ ID NO: 237752 - RNA, 19 nt, Homo sapiens
  misc_RNA (1)...(19): siRNA sense strand
gugcgguggcuuccugaua

SEQ ID NO: 237753 - RNA, 19 nt, Homo sapiens
  misc_RNA (1)...(19): siRNA sense strand
gggaagcuccauaaauguc

SEQ ID NO: 237754 - RNA, 19 nt, Homo sapiens
  misc_RNA (1)...(19): siRNA sense strand
uggggaagcuccauaaaug

SEQ ID NO: 237755 - RNA, 19 nt, Homo sapiens
  misc_RNA (1)...(19): siRNA sense strand
cccacaauaucaaagaaca

SEQ ID NO: 237756 - RNA, 19 nt, Homo sapiens
  misc_RNA (1)...(19): siRNA sense strand
cccagggcauugucuccua

SEQ ID NO: 237757 - RNA, 19 nt, Homo sapiens
  misc_RNA (1)...(19): siRNA sense strand
agaugacagugcaggaaga

SEQ ID NO: 237758 - RNA, 19 nt, Homo sapiens
  misc_RNA (1)...(19): siRNA sense strand
ggagccgacccagcaguuu

SEQ ID NO: 237759 - RNA, 19 nt, Homo sapiens
  misc_RNA (1)...(19): siRNA sense strand
cugacuuacgccauuauua

SEQ ID NO: 237760 - RNA, 19 nt, Homo sapiens
  misc_RNA (1)...(19): siRNA sense strand
gacaguaccauugaguugu

SEQ ID NO: 237761 - RNA, 19 nt, Homo sapiens
  misc_RNA (1)...(19): siRNA sense strand
aaccaugaaacgcuacuaa

SEQ ID NO: 237762 - RNA, 19 nt, Homo sapiens
  misc_RNA (1)...(19): siRNA sense strand
gggcccacaauaucaaaga

SEQ ID NO: 237763 - RNA, 19 nt, Homo sapiens
  misc_RNA (1)...(19): siRNA sense strand
gggcauugucuccuaugga

SEQ ID NO: 237764 - RNA, 19 nt, Homo sapiens
  misc_RNA (1)...(19): siRNA sense strand
ggauaaagaaaaccaugaa

SEQ ID NO: 237765 - RNA, 19 nt, Homo sapiens
  misc_RNA (1)...(19): siRNA sense strand
gaucaaagccaccaucaaa

SEQ ID NO: 237766 - RNA, 19 nt, Homo sapiens
  misc_RNA (1)...(19): siRNA sense strand
gagaaucuauggaggcuuu

SEQ ID NO: 237767 - RNA, 19 nt, Homo sapiens
  misc_RNA (1)...(19): siRNA sense strand
gaaauucugugaaauaggu

SEQ ID NO: 237768 - RNA, 19 nt, Homo sapiens
  misc_RNA (1)...(19): siRNA sense strand
ccaaauacgugaagacugu

SEQ ID NO: 237769 - RNA, 19 nt, Homo sapiens
  misc_RNA (1)...(19): siRNA sense strand
ggaauacugugaugucuca

SEQ ID NO: 237770 - RNA, 19 nt, Homo sapiens
  misc_RNA (1)...(19): siRNA sense strand
gagaagauauucaaguaca

SEQ ID NO: 237771 - RNA, 19 nt, Homo sapiens
  misc_RNA (1)...(19): siRNA sense strand
gcaggagaauuacaacaug

SEQ ID NO: 237772 - RNA, 19 nt, Homo sapiens
  misc_RNA (1)...(19): siRNA sense strand
uggagaagauauucaagua

SEQ ID NO: 237773 - RNA, 19 nt, Homo sapiens
  misc_RNA (1)...(19): siRNA sense strand
gaagagaacaccaguagca

SEQ ID NO: 237774 - RNA, 19 nt, Homo sapiens
  misc_RNA (1)...(19): siRNA sense strand
gggaauaagugucagaaag

SEQ ID NO: 237775 - RNA, 19 nt, Homo sapiens
  misc_RNA (1)...(19): siRNA sense strand
gcagcugccuggcuccuuu

SEQ ID NO: 237776 - RNA, 19 nt, Homo sapiens
  misc_RNA (1)...(19): siRNA sense strand
gaauaagugucagaaagug

SEQ ID NO: 237777 - RNA, 19 nt, Homo sapiens
  misc_RNA (1)...(19): siRNA sense strand
gaacaccaguagcacacuu

SEQ ID NO: 237778 - RNA, 19 nt, Homo sapiens
  misc_RNA (1)...(19): siRNA sense strand
ugaaauagguucugaugac

SEQ ID NO: 237779 - RNA, 19 nt, Homo sapiens
  misc_RNA (1)...(19): siRNA sense strand
gauauugcauugcucaagu

SEQ ID NO: 237780 - RNA, 19 nt, Homo sapiens
  misc_RNA (1)...(19): siRNA sense strand
ccugaugucuuuauuggaa

SEQ ID NO: 237781 - RNA, 19 nt, Homo sapiens
  misc_RNA (1)...(19): siRNA sense strand
agaggaagaucaagagaau

SEQ ID NO: 237782 - RNA, 19 nt, Homo sapiens
  misc_RNA (1)...(19): siRNA sense strand
ggaauaagugucagaaagu

SEQ ID NO: 237783 - RNA, 19 nt, Homo sapiens
  misc_RNA (1)...(19): siRNA sense strand
gggaaauucugugaaauag

SEQ ID NO: 237784 - RNA, 19 nt, Homo sapiens
  misc_RNA (1)...(19): siRNA sense strand
gcagagaggaagaucaaga

SEQ ID NO: 237785 - RNA, 19 nt, Homo sapiens
  misc_RNA (1)...(19): siRNA sense strand
gaaauagguucugaugacu

SEQ ID NO: 237786 - RNA, 19 nt, Homo sapiens
  misc_RNA (1)...(19): siRNA sense strand
ccacuacaaugaaagagau

SEQ ID NO: 237787 - RNA, 19 nt, Homo sapiens
  misc_RNA (1)...(19): siRNA sense strand
guacagccacuacaaugaa

SEQ ID NO: 237788 - RNA, 19 nt, Homo sapiens
  misc_RNA (1)...(19): siRNA sense strand
ggagaauuacaacauguuu

SEQ ID NO: 237789 - RNA, 19 nt, Homo sapiens
  misc_RNA (1)...(19): siRNA sense strand
ucugaugacugcuauguug

SEQ ID NO: 237790 - RNA, 19 nt, Homo sapiens
  misc_RNA (1)...(19): siRNA sense strand
guacuacacugaggaccaa

SEQ ID NO: 237791 - RNA, 19 nt, Homo sapiens
  misc_RNA (1)...(19): siRNA sense strand
acacccaaguuaccaaauu

SEQ ID NO: 237792 - RNA, 19 nt, Homo sapiens
  misc_RNA (1)...(19): siRNA sense strand
uugcauugcucaaguuaaa

SEQ ID NO: 237793 - RNA, 19 nt, Homo sapiens
  misc_RNA (1)...(19): siRNA sense strand
gaacucccaccuccucuug

SEQ ID NO: 237794 - RNA, 19 nt, Homo sapiens
  misc_RNA (1)...(19): siRNA sense strand
uaauggcucuggugggaaa

SEQ ID NO: 237795 - RNA, 19 nt, Homo sapiens
  misc_RNA (1)...(19): siRNA sense strand
gauuacagcuacgaggauu

SEQ ID NO: 237796 - RNA, 19 nt, Homo sapiens
  misc_RNA (1)...(19): siRNA sense strand
gguucucccugaugucuuu

SEQ ID NO: 237797 - RNA, 19 nt, Homo sapiens
  misc_RNA (1)...(19): siRNA sense strand
gaaaugggaauacugugau

SEQ ID NO: 237798 - RNA, 19 nt, Homo sapiens
  misc_RNA (1)...(19): siRNA sense strand
ccacugagccaucaaccaa

SEQ ID NO: 237799 - RNA, 19 nt, Homo sapiens
  misc_RNA (1)...(19): siRNA sense strand
ccacaugauugaugacagu

SEQ ID NO: 237800 - RNA, 19 nt, Homo sapiens
  misc_RNA (1)...(19): siRNA sense strand
ccaaugacaaggugaaaug

SEQ ID NO: 237801 - RNA, 19 nt, Homo sapiens
  misc_RNA (1)...(19): siRNA sense strand
gagaggaagaucaagagaa

SEQ ID NO: 237802 - RNA, 19 nt, Homo sapiens
  misc_RNA (1)...(19): siRNA sense strand
ccaacucuaugaccacaug

SEQ ID NO: 237803 - RNA, 19 nt, Homo sapiens
  misc_RNA (1)...(19): siRNA sense strand
gcuccuuucucugggaaua

SEQ ID NO: 237804 - RNA, 19 nt, Homo sapiens
  misc_RNA (1)...(19): siRNA sense strand
aagugaaaguggcuucuaa

SEQ ID NO: 237805 - RNA, 19 nt, Homo sapiens
  misc_RNA (1)...(19): siRNA sense strand
aagcggagauccaaguuca

SEQ ID NO: 237806 - RNA, 19 nt, Homo sapiens
  misc_RNA (1)...(19): siRNA sense strand
caggaaaucuucagaaacc

SEQ ID NO: 237807 - RNA, 19 nt, Homo sapiens
  misc_RNA (1)...(19): siRNA sense strand
ugcaggaaaucuucagaaa

SEQ ID NO: 237808 - RNA, 19 nt, Homo sapiens
  misc_RNA (1)...(19): siRNA sense strand
gauggucacugugcucuag

SEQ ID NO: 237809 - RNA, 19 nt, Homo sapiens
  misc_RNA (1)...(19): siRNA sense strand
gagaugagauuccccacaa

SEQ ID NO: 237810 - RNA, 19 nt, Homo sapiens
  misc_RNA (1)...(19): siRNA sense strand
ggguuugacuccuguggaa

SEQ ID NO: 237811 - RNA, 19 nt, Homo sapiens
  misc_RNA (1)...(19): siRNA sense strand
gggagcaccuucacaugca

SEQ ID NO: 237812 - RNA, 19 nt, Homo sapiens
  misc_RNA (1)...(19): siRNA sense strand
caaugaaagagaugagauu

SEQ ID NO: 237813 - RNA, 19 nt, Homo sapiens
  misc_RNA (1)...(19): siRNA sense strand
gcuaccugcucccggcaua

SEQ ID NO: 237814 - RNA, 19 nt, Homo sapiens
  misc_RNA (1)...(19): siRNA sense strand
ccaagugguuccuguaugc

SEQ ID NO: 237815 - RNA, 19 nt, Homo sapiens
  misc_RNA (1)...(19): siRNA sense strand
ugaaaugggaauacuguga

SEQ ID NO: 237816 - RNA, 19 nt, Homo sapiens
  misc_RNA (1)...(19): siRNA sense strand
caugauugaugacaguaug

SEQ ID NO: 237817 - RNA, 19 nt, Homo sapiens
  misc_RNA (1)...(19): siRNA sense strand
gaugucugaucuccauguu

SEQ ID NO: 237818 - RNA, 19 nt, Homo sapiens
  misc_RNA (1)...(19): siRNA sense strand
uaugaucugugcaggaaau

SEQ ID NO: 237819 - RNA, 19 nt, Homo sapiens
  misc_RNA (1)...(19): siRNA sense strand
cugagaauccugacuggua

SEQ ID NO: 237820 - RNA, 19 nt, Homo sapiens
  misc_RNA (1)...(19): siRNA sense strand
cuacuacgucuaugggaua

SEQ ID NO: 237821 - RNA, 19 nt, Homo sapiens
  misc_RNA (1)...(19): siRNA sense strand
caggaugucugaucuccau

SEQ ID NO: 237822 - RNA, 19 nt, Homo sapiens
  misc_RNA (1)...(19): siRNA sense strand
gcuuuaggguggagaagau

SEQ ID NO: 237823 - RNA, 19 nt, Homo sapiens
  misc_RNA (1)...(19): siRNA sense strand
caggagaauuacaacaugu

SEQ ID NO: 237824 - RNA, 19 nt, Homo sapiens
  misc_RNA (1)...(19): siRNA sense strand
ccagaguccucccuacuac

SEQ ID NO: 237825 - RNA, 19 nt, Homo sapiens
  misc_RNA (1)...(19): siRNA sense strand
gcuccuggaugccaaaguc

SEQ ID NO: 237826 - RNA, 19 nt, Homo sapiens
  misc_RNA (1)...(19): siRNA sense strand
ccugaagaaagaagaauuu

SEQ ID NO: 237827 - RNA, 19 nt, Homo sapiens
  misc_RNA (1)...(19): siRNA sense strand
ucacugugcucuagaaucc

SEQ ID NO: 237828 - RNA, 19 nt, Homo sapiens
  misc_RNA (1)...(19): siRNA sense strand
ucuaugaccacaugauuga

SEQ ID NO: 237829 - RNA, 19 nt, Homo sapiens
  misc_RNA (1)...(19): siRNA sense strand
ugucugaucuccauguucu

SEQ ID NO: 237830 - RNA, 19 nt, Homo sapiens
  misc_RNA (1)...(19): siRNA sense strand
ucagaaaccugggcaagac

SEQ ID NO: 237831 - RNA, 19 nt, Homo sapiens
  misc_RNA (1)...(19): siRNA sense strand
gaucugugcaggaaaucuu

SEQ ID NO: 237832 - RNA, 19 nt, Homo sapiens
  misc_RNA (1)...(19): siRNA sense strand
aguaugaucugugcaggaa

SEQ ID NO: 237833 - RNA, 19 nt, Homo sapiens
  misc_RNA (1)...(19): siRNA sense strand
gcaacucccgccaacucua

SEQ ID NO: 237834 - RNA, 19 nt, Homo sapiens
  misc_RNA (1)...(19): siRNA sense strand
caaguacagccacuacaau

SEQ ID NO: 237835 - RNA, 19 nt, Homo sapiens
  misc_RNA (1)...(19): siRNA sense strand
ggugaaaugggaauacugu

SEQ ID NO: 237836 - RNA, 19 nt, Homo sapiens
  misc_RNA (1)...(19): siRNA sense strand
cuaccgcugugucuguaaa

SEQ ID NO: 237837 - RNA, 19 nt, Homo sapiens
  misc_RNA (1)...(19): siRNA sense strand
cacccaaguuaccaaauuc

SEQ ID NO: 237838 - RNA, 19 nt, Homo sapiens
  misc_RNA (1)...(19): siRNA sense strand
gaaggacggcaccuacuac

SEQ ID NO: 237839 - RNA, 19 nt, Homo sapiens
  misc_RNA (1)...(19): siRNA sense strand
caacucccgccaacucuau

SEQ ID NO: 237840 - RNA, 19 nt, Homo sapiens
  misc_RNA (1)...(19): siRNA sense strand
gggagugagugccacaucu

SEQ ID NO: 237841 - RNA, 19 nt, Homo sapiens
  misc_RNA (1)...(19): siRNA sense strand
ucaaguacagccacuacaa

SEQ ID NO: 237842 - RNA, 19 nt, Homo sapiens
  misc_RNA (1)...(19): siRNA sense strand
uagcagagaggaagaucaa

SEQ ID NO: 237843 - RNA, 19 nt, Homo sapiens
  misc_RNA (1)...(19): siRNA sense strand
gcugaaacccaugggauug

SEQ ID NO: 237844 - RNA, 19 nt, Homo sapiens
  misc_RNA (1)...(19): siRNA sense strand
caacauguuuauggaggau

SEQ ID NO: 237845 - RNA, 19 nt, Homo sapiens
  misc_RNA (1)...(19): siRNA sense strand
ggggaaauucugugaaaua

SEQ ID NO: 237846 - RNA, 19 nt, Homo sapiens
  misc_RNA (1)...(19): siRNA sense strand
gaauccaaauacgugaaga

SEQ ID NO: 237847 - RNA, 19 nt, Homo sapiens
  misc_RNA (1)...(19): siRNA sense strand
ggaccugaagaaagaagaa

SEQ ID NO: 237848 - RNA, 19 nt, Homo sapiens
  misc_RNA (1)...(19): siRNA sense strand
aaacccagaugcggacgaa

SEQ ID NO: 237849 - RNA, 19 nt, Homo sapiens
  misc_RNA (1)...(19): siRNA sense strand
acagcuacgaggauuauaa

SEQ ID NO: 237850 - RNA, 19 nt, Homo sapiens
  misc_RNA (1)...(19): siRNA sense strand
agaaggacggcaccuacua

SEQ ID NO: 237851 - RNA, 19 nt, Homo sapiens
  misc_RNA (1)...(19): siRNA sense strand
gagauuccccacaaugaua

SEQ ID NO: 237852 - RNA, 19 nt, Homo sapiens
  misc_RNA (1)...(19): siRNA sense strand
uacagccacuacaaugaaa

SEQ ID NO: 237853 - RNA, 19 nt, Homo sapiens
  misc_RNA (1)...(19): siRNA sense strand
cagcugcucccaagugguu

SEQ ID NO: 237854 - RNA, 19 nt, Homo sapiens
  misc_RNA (1)...(19): siRNA sense strand
gcugauugccaacacuuug

SEQ ID NO: 237855 - RNA, 19 nt, Homo sapiens
  misc_RNA (1)...(19): siRNA sense strand
caaguuaaagccaguggau

SEQ ID NO: 237856 - RNA, 19 nt, Homo sapiens
  misc_RNA (1)...(19): siRNA sense strand
cagcaugcgugccuuuacu

SEQ ID NO: 237857 - RNA, 19 nt, Homo sapiens
  misc_RNA (1)...(19): siRNA sense strand
gcaggaaaucuucagaaac

SEQ ID NO: 237858 - RNA, 19 nt, Homo sapiens
  misc_RNA (1)...(19): siRNA sense strand
gccaaagucaagcugauug

SEQ ID NO: 237859 - RNA, 19 nt, Homo sapiens
  misc_RNA (1)...(19): siRNA sense strand
ccacugcaccgacauaaaa

SEQ ID NO: 237860 - RNA, 19 nt, Homo sapiens
  misc_RNA (1)...(19): siRNA sense strand
gaucaagagaaucuaugga

SEQ ID NO: 237861 - RNA, 19 nt, Homo sapiens
  misc_RNA (1)...(19): siRNA sense strand
uggaaagacugagauagca

SEQ ID NO: 237862 - RNA, 19 nt, Homo sapiens
  misc_RNA (1)...(19): siRNA sense strand
ggagaagauauucaaguac

SEQ ID NO: 237863 - RNA, 19 nt, Homo sapiens
  misc_RNA (1)...(19): siRNA sense strand
gcucuagaauccaaauacg

SEQ ID NO: 237864 - RNA, 19 nt, Homo sapiens
  misc_RNA (1)...(19): siRNA sense strand
gaaucuauggaggcuuuaa

SEQ ID NO: 237865 - RNA, 19 nt, Homo sapiens
  misc_RNA (1)...(19): siRNA sense strand
uaaaaugugcggagaagga

SEQ ID NO: 237866 - RNA, 19 nt, Homo sapiens
  misc_RNA (1)...(19): siRNA sense strand
uuucaaaccccucgagaua

SEQ ID NO: 237867 - RNA, 19 nt, Homo sapiens
  misc_RNA (1)...(19): siRNA sense strand
uaaaaugugcggagaagga

SEQ ID NO: 237868 - RNA, 19 nt, Homo sapiens
  misc_RNA (1)...(19): siRNA sense strand
uuucaaaccccucgagaua

SEQ ID NO: 237869 - RNA, 19 nt, Homo sapiens
  misc_RNA (1)...(19): siRNA sense strand
uaaaaugugcggagaagga

SEQ ID NO: 237870 - RNA, 19 nt, Homo sapiens
  misc_RNA (1)...(19): siRNA sense strand
uuucaaaccccucgagaua

SEQ ID NO: 237871 - RNA, 19 nt, Homo sapiens
  misc_RNA (1)...(19): siRNA sense strand
uaaaaugugcggagaagga

SEQ ID NO: 237872 - RNA, 19 nt, Homo sapiens
  misc_RNA (1)...(19): siRNA sense strand
uuucaaaccccucgagaua

SEQ ID NO: 237873 - RNA, 19 nt, Homo sapiens
  misc_RNA (1)...(19): siRNA sense strand
uaaaaugugcggagaagga

SEQ ID NO: 237874 - RNA, 19 nt, Homo sapiens
  misc_RNA (1)...(19): siRNA sense strand
uuucaaaccccucgagaua

SEQ ID NO: 237875 - RNA, 19 nt, Homo sapiens
  misc_RNA (1)...(19): siRNA sense strand
uaaaaugugcggagaagga

SEQ ID NO: 237876 - RNA, 19 nt, Homo sapiens
  misc_RNA (1)...(19): siRNA sense strand
uuucaaaccccucgagaua

SEQ ID NO: 237877 - RNA, 19 nt, Homo sapiens
  misc_RNA (1)...(19): siRNA sense strand
uaaaaugugcggagaagga

SEQ ID NO: 237878 - RNA, 19 nt, Homo sapiens
  misc_RNA (1)...(19): siRNA sense strand
uuucaaaccccucgagaua

SEQ ID NO: 237879 - RNA, 19 nt, Homo sapiens
  misc_RNA (1)...(19): siRNA sense strand
uaaaaugugcggagaagga

SEQ ID NO: 237880 - RNA, 19 nt, Homo sapiens
  misc_RNA (1)...(19): siRNA sense strand
uuucaaaccccucgagaua

SEQ ID NO: 237881 - RNA, 19 nt, Homo sapiens
  misc_RNA (1)...(19): siRNA sense strand
uaaaaugugcggagaagga

SEQ ID NO: 237882 - RNA, 19 nt, Homo sapiens
  misc_RNA (1)...(19): siRNA sense strand
uuucaaaccccucgagaua

SEQ ID NO: 237883 - RNA, 19 nt, Homo sapiens
  misc_RNA (1)...(19): siRNA sense strand
caacgggacuauuaugaua

SEQ ID NO: 237884 - RNA, 19 nt, Homo sapiens
  misc_RNA (1)...(19): siRNA sense strand
gaagaaagaugagacuaau

SEQ ID NO: 237885 - RNA, 19 nt, Homo sapiens
  misc_RNA (1)...(19): siRNA sense strand
gaacucccguguauucauu

SEQ ID NO: 237886 - RNA, 19 nt, Homo sapiens
  misc_RNA (1)...(19): siRNA sense strand
caguagagaugaagaauga

SEQ ID NO: 237887 - RNA, 19 nt, Homo sapiens
  misc_RNA (1)...(19): siRNA sense strand
gaugaagaaugauaaguca

SEQ ID NO: 237888 - RNA, 19 nt, Homo sapiens
  misc_RNA (1)...(19): siRNA sense strand
gaagaaugauaagucagaa

SEQ ID NO: 237889 - RNA, 19 nt, Homo sapiens
  misc_RNA (1)...(19): siRNA sense strand
ggaaggagaggaugacaga

SEQ ID NO: 237890 - RNA, 19 nt, Homo sapiens
  misc_RNA (1)...(19): siRNA sense strand
gaggauggcagaaugauug

SEQ ID NO: 237891 - RNA, 19 nt, Homo sapiens
  misc_RNA (1)...(19): siRNA sense strand
agaaggagcugacccagau

SEQ ID NO: 237892 - RNA, 19 nt, Homo sapiens
  misc_RNA (1)...(19): siRNA sense strand
caaacaagcaguagagaug

SEQ ID NO: 237893 - RNA, 19 nt, Homo sapiens
  misc_RNA (1)...(19): siRNA sense strand
ggaugaugaugauaaugaa

SEQ ID NO: 237894 - RNA, 19 nt, Homo sapiens
  misc_RNA (1)...(19): siRNA sense strand
ugacuuggacuaugacuuu

SEQ ID NO: 237895 - RNA, 19 nt, Homo sapiens
  misc_RNA (1)...(19): siRNA sense strand
guagagaugaagaaugaua

SEQ ID NO: 237896 - RNA, 19 nt, Homo sapiens
  misc_RNA (1)...(19): siRNA sense strand
aaaguggcuucaauucuaa

SEQ ID NO: 237897 - RNA, 19 nt, Homo sapiens
  misc_RNA (1)...(19): siRNA sense strand
gcagcuccgugaagaaaga

SEQ ID NO: 237898 - RNA, 19 nt, Homo sapiens
  misc_RNA (1)...(19): siRNA sense strand
augauaggauguacaguua

SEQ ID NO: 237899 - RNA, 19 nt, Homo sapiens
  misc_RNA (1)...(19): siRNA sense strand
ugaagaaagaugagacuaa

SEQ ID NO: 237900 - RNA, 19 nt, Homo sapiens
  misc_RNA (1)...(19): siRNA sense strand
aaaaguggcuucaauucua

SEQ ID NO: 237901 - RNA, 19 nt, Homo sapiens
  misc_RNA (1)...(19): siRNA sense strand
agacuaaugugaagaugga

SEQ ID NO: 237902 - RNA, 19 nt, Homo sapiens
  misc_RNA (1)...(19): siRNA sense strand
gggcugcucuguucauaag

SEQ ID NO: 237903 - RNA, 19 nt, Homo sapiens
  misc_RNA (1)...(19): siRNA sense strand
gauccucgcuccaugaacu

SEQ ID NO: 237904 - RNA, 19 nt, Homo sapiens
  misc_RNA (1)...(19): siRNA sense strand
ccagcaacguuaccaacaa

SEQ ID NO: 237905 - RNA, 19 nt, Homo sapiens
  misc_RNA (1)...(19): siRNA sense strand
ggagaggauggcagaauga

SEQ ID NO: 237906 - RNA, 19 nt, Homo sapiens
  misc_RNA (1)...(19): siRNA sense strand
agaaagaugagacuaaugu

SEQ ID NO: 237907 - RNA, 19 nt, Homo sapiens
  misc_RNA (1)...(19): siRNA sense strand
uccaugaacucccguguau

SEQ ID NO: 237908 - RNA, 19 nt, Homo sapiens
  misc_RNA (1)...(19): siRNA sense strand
caugaacucccguguauuc

SEQ ID NO: 237909 - RNA, 19 nt, Homo sapiens
  misc_RNA (1)...(19): siRNA sense strand
gcaaacaagcaguagagau

SEQ ID NO: 237910 - RNA, 19 nt, Homo sapiens
  misc_RNA (1)...(19): siRNA sense strand
aaugauugcuggccagguu

SEQ ID NO: 237911 - RNA, 19 nt, Homo sapiens
  misc_RNA (1)...(19): siRNA sense strand
ugaagaaugauaagucaga

SEQ ID NO: 237912 - RNA, 19 nt, Homo sapiens
  misc_RNA (1)...(19): siRNA sense strand
gagcaaacaagcaguagag

SEQ ID NO: 237913 - RNA, 19 nt, Homo sapiens
  misc_RNA (1)...(19): siRNA sense strand
gggaaucucaacacucuug

SEQ ID NO: 237914 - RNA, 19 nt, Homo sapiens
  misc_RNA (1)...(19): siRNA sense strand
aaagaugagacuaauguga

SEQ ID NO: 237915 - RNA, 19 nt, Homo sapiens
  misc_RNA (1)...(19): siRNA sense strand
gggaugaccagcuggaguu

SEQ ID NO: 237916 - RNA, 19 nt, Homo sapiens
  misc_RNA (1)...(19): siRNA sense strand
ucaacacucuuguggucaa

SEQ ID NO: 237917 - RNA, 19 nt, Homo sapiens
  misc_RNA (1)...(19): siRNA sense strand
uaugauaggauguacaguu

SEQ ID NO: 237918 - RNA, 19 nt, Homo sapiens
  misc_RNA (1)...(19): siRNA sense strand
uggaguugaucaaggauga

SEQ ID NO: 237919 - RNA, 19 nt, Homo sapiens
  misc_RNA (1)...(19): siRNA sense strand
gaaggagcugacccagaua

SEQ ID NO: 237920 - RNA, 19 nt, Homo sapiens
  misc_RNA (1)...(19): siRNA sense strand
ucaggaaacacuucacgaa

SEQ ID NO: 237921 - RNA, 19 nt, Homo sapiens
  misc_RNA (1)...(19): siRNA sense strand
cagcgccaauggaggauga

SEQ ID NO: 237922 - RNA, 19 nt, Homo sapiens
  misc_RNA (1)...(19): siRNA sense strand
gaaagaugagacuaaugug

SEQ ID NO: 237923 - RNA, 19 nt, Homo sapiens
  misc_RNA (1)...(19): siRNA sense strand
gcaguagagaugaagaaug

SEQ ID NO: 237924 - RNA, 19 nt, Homo sapiens
  misc_RNA (1)...(19): siRNA sense strand
gaaaguugaaaggagauga

SEQ ID NO: 237925 - RNA, 19 nt, Homo sapiens
  misc_RNA (1)...(19): siRNA sense strand
gggcaaaaguggcuucaau

SEQ ID NO: 237926 - RNA, 19 nt, Homo sapiens
  misc_RNA (1)...(19): siRNA sense strand
gggaccuacuggaugauga

SEQ ID NO: 237927 - RNA, 19 nt, Homo sapiens
  misc_RNA (1)...(19): siRNA sense strand
cagcagcuccgugaagaaa

SEQ ID NO: 237928 - RNA, 19 nt, Homo sapiens
  misc_RNA (1)...(19): siRNA sense strand
aaucugauguggaggcaau

SEQ ID NO: 237929 - RNA, 19 nt, Homo sapiens
  misc_RNA (1)...(19): siRNA sense strand
uggaugaugaugauaauga

SEQ ID NO: 237930 - RNA, 19 nt, Homo sapiens
  misc_RNA (1)...(19): siRNA sense strand
aagaugagacuaaugugaa

SEQ ID NO: 237931 - RNA, 19 nt, Homo sapiens
  misc_RNA (1)...(19): siRNA sense strand
gaaacgucagcguguauca

SEQ ID NO: 237932 - RNA, 19 nt, Homo sapiens
  misc_RNA (1)...(19): siRNA sense strand
agaaugauaagucagaaga

SEQ ID NO: 237933 - RNA, 19 nt, Homo sapiens
  misc_RNA (1)...(19): siRNA sense strand
ggccagguuuuagauauua

SEQ ID NO: 237934 - RNA, 19 nt, Homo sapiens
  misc_RNA (1)...(19): siRNA sense strand
ugacagagacagcgccaau

SEQ ID NO: 237935 - RNA, 19 nt, Homo sapiens
  misc_RNA (1)...(19): siRNA sense strand
cagcaacguuaccaacaag

SEQ ID NO: 237936 - RNA, 19 nt, Homo sapiens
  misc_RNA (1)...(19): siRNA sense strand
gugggcugcucuguucaua

SEQ ID NO: 237937 - RNA, 19 nt, Homo sapiens
  misc_RNA (1)...(19): siRNA sense strand
aaacaagcaguagagauga

SEQ ID NO: 237938 - RNA, 19 nt, Homo sapiens
  misc_RNA (1)...(19): siRNA sense strand
aggagaggauggcagaaug

SEQ ID NO: 237939 - RNA, 19 nt, Homo sapiens
  misc_RNA (1)...(19): siRNA sense strand
gaccuucaggccauuaaga

SEQ ID NO: 237940 - RNA, 19 nt, Homo sapiens
  misc_RNA (1)...(19): siRNA sense strand
gcaaaaguggcuucaauuc

SEQ ID NO: 237941 - RNA, 19 nt, Homo sapiens
  misc_RNA (1)...(19): siRNA sense strand
gauaggauguacaguuacc

SEQ ID NO: 237942 - RNA, 19 nt, Homo sapiens
  misc_RNA (1)...(19): siRNA sense strand
cagcguguaucaggaaaca

SEQ ID NO: 237943 - RNA, 19 nt, Homo sapiens
  misc_RNA (1)...(19): siRNA sense strand
ucaguauguuaaugagaga

SEQ ID NO: 237944 - RNA, 19 nt, Homo sapiens
  misc_RNA (1)...(19): siRNA sense strand
ccuacuggaugaugaugau

SEQ ID NO: 237945 - RNA, 19 nt, Homo sapiens
  misc_RNA (1)...(19): siRNA sense strand
caacguuaccaacaagaca

SEQ ID NO: 237946 - RNA, 19 nt, Homo sapiens
  misc_RNA (1)...(19): siRNA sense strand
acagagcaaacaagcagua

SEQ ID NO: 237947 - RNA, 19 nt, Homo sapiens
  misc_RNA (1)...(19): siRNA sense strand
ugauguggaggcaaucuuu

SEQ ID NO: 237948 - RNA, 19 nt, Homo sapiens
  misc_RNA (1)...(19): siRNA sense strand
ggucaagaaaucugaugug

SEQ ID NO: 237949 - RNA, 19 nt, Homo sapiens
  misc_RNA (1)...(19): siRNA sense strand
aaaagaggcugaggaagga

SEQ ID NO: 237950 - RNA, 19 nt, Homo sapiens
  misc_RNA (1)...(19): siRNA sense strand
acuuucaacgggacuauua

SEQ ID NO: 237951 - RNA, 19 nt, Homo sapiens
  misc_RNA (1)...(19): siRNA sense strand
gaggcaaucuuuucgaagu

SEQ ID NO: 237952 - RNA, 19 nt, Homo sapiens
  misc_RNA (1)...(19): siRNA sense strand
aacaagcaguagagaugaa

SEQ ID NO: 237953 - RNA, 19 nt, Homo sapiens
  misc_RNA (1)...(19): siRNA sense strand
uggcuucaauucuaagagu

SEQ ID NO: 237954 - RNA, 19 nt, Homo sapiens
  misc_RNA (1)...(19): siRNA sense strand
gcagcagcuccgugaagaa

SEQ ID NO: 237955 - RNA, 19 nt, Homo sapiens
  misc_RNA (1)...(19): siRNA sense strand
augugaagauggagucuga

SEQ ID NO: 237956 - RNA, 19 nt, Homo sapiens
  misc_RNA (1)...(19): siRNA sense strand
aaggagaggaugacagaga

SEQ ID NO: 237957 - RNA, 19 nt, Homo sapiens
  misc_RNA (1)...(19): siRNA sense strand
ucaacgggacuauuaugau

SEQ ID NO: 237958 - RNA, 19 nt, Homo sapiens
  misc_RNA (1)...(19): siRNA sense strand
ggaccuacuggaugaugau

SEQ ID NO: 237959 - RNA, 19 nt, Homo sapiens
  misc_RNA (1)...(19): siRNA sense strand
gagaugaagaaugauaagu

SEQ ID NO: 237960 - RNA, 19 nt, Homo sapiens
  misc_RNA (1)...(19): siRNA sense strand
uugggaaucucaacacucu

SEQ ID NO: 237961 - RNA, 19 nt, Homo sapiens
  misc_RNA (1)...(19): siRNA sense strand
ggaacagagcaaacaagca

SEQ ID NO: 237962 - RNA, 19 nt, Homo sapiens
  misc_RNA (1)...(19): siRNA sense strand
ugacccagauaaaacaaaa

SEQ ID NO: 237963 - RNA, 19 nt, Homo sapiens
  misc_RNA (1)...(19): siRNA sense strand
gaugaccuucaggccauua

SEQ ID NO: 237964 - RNA, 19 nt, Homo sapiens
  misc_RNA (1)...(19): siRNA sense strand
auugugggcugcucuguuc

SEQ ID NO: 237965 - RNA, 19 nt, Homo sapiens
  misc_RNA (1)...(19): siRNA sense strand
ccaagucuggaaaguugaa

SEQ ID NO: 237966 - RNA, 19 nt, Homo sapiens
  misc_RNA (1)...(19): siRNA sense strand
agaugagacuaaugugaag

SEQ ID NO: 237967 - RNA, 19 nt, Homo sapiens
  misc_RNA (1)...(19): siRNA sense strand
aaaggaacagagcaaacaa

SEQ ID NO: 237968 - RNA, 19 nt, Homo sapiens
  misc_RNA (1)...(19): siRNA sense strand
uggauucucuccuggaaaa

SEQ ID NO: 237969 - RNA, 19 nt, Homo sapiens
  misc_RNA (1)...(19): siRNA sense strand
guaccuccuccuccuccua

SEQ ID NO: 237970 - RNA, 19 nt, Homo sapiens
  misc_RNA (1)...(19): siRNA sense strand
gcuccgugaagaaagauga

SEQ ID NO: 237971 - RNA, 19 nt, Homo sapiens
  misc_RNA (1)...(19): siRNA sense strand
acagauccucgcuccauga

SEQ ID NO: 237972 - RNA, 19 nt, Homo sapiens
  misc_RNA (1)...(19): siRNA sense strand
caacgggacuauuaugaua

SEQ ID NO: 237973 - RNA, 19 nt, Homo sapiens
  misc_RNA (1)...(19): siRNA sense strand
gaagaaagaugagacuaau

SEQ ID NO: 237974 - RNA, 19 nt, Homo sapiens
  misc_RNA (1)...(19): siRNA sense strand
gaacucccguguauucauu

SEQ ID NO: 237975 - RNA, 19 nt, Homo sapiens
  misc_RNA (1)...(19): siRNA sense strand
caguagagaugaagaauga

SEQ ID NO: 237976 - RNA, 19 nt, Homo sapiens
  misc_RNA (1)...(19): siRNA sense strand
gaugaagaaugauaaguca

SEQ ID NO: 237977 - RNA, 19 nt, Homo sapiens
  misc_RNA (1)...(19): siRNA sense strand
gaagaaugauaagucagaa

SEQ ID NO: 237978 - RNA, 19 nt, Homo sapiens
  misc_RNA (1)...(19): siRNA sense strand
ggaaggagaggaugacaga

SEQ ID NO: 237979 - RNA, 19 nt, Homo sapiens
  misc_RNA (1)...(19): siRNA sense strand
gaggauggcagaaugauug

SEQ ID NO: 237980 - RNA, 19 nt, Homo sapiens
  misc_RNA (1)...(19): siRNA sense strand
agaaggagcugacccagau

SEQ ID NO: 237981 - RNA, 19 nt, Homo sapiens
  misc_RNA (1)...(19): siRNA sense strand
caaacaagcaguagagaug

SEQ ID NO: 237982 - RNA, 19 nt, Homo sapiens
  misc_RNA (1)...(19): siRNA sense strand
ggaugaugaugauaaugaa

SEQ ID NO: 237983 - RNA, 19 nt, Homo sapiens
  misc_RNA (1)...(19): siRNA sense strand
ugacuuggacuaugacuuu

SEQ ID NO: 237984 - RNA, 19 nt, Homo sapiens
  misc_RNA (1)...(19): siRNA sense strand
guagagaugaagaaugaua

SEQ ID NO: 237985 - RNA, 19 nt, Homo sapiens
  misc_RNA (1)...(19): siRNA sense strand
aaaguggcuucaauucuaa

SEQ ID NO: 237986 - RNA, 19 nt, Homo sapiens
  misc_RNA (1)...(19): siRNA sense strand
gcagcuccgugaagaaaga

SEQ ID NO: 237987 - RNA, 19 nt, Homo sapiens
  misc_RNA (1)...(19): siRNA sense strand
augauaggauguacaguua

SEQ ID NO: 237988 - RNA, 19 nt, Homo sapiens
  misc_RNA (1)...(19): siRNA sense strand
ugaagaaagaugagacuaa

SEQ ID NO: 237989 - RNA, 19 nt, Homo sapiens
  misc_RNA (1)...(19): siRNA sense strand
aaaaguggcuucaauucua

SEQ ID NO: 237990 - RNA, 19 nt, Homo sapiens
  misc_RNA (1)...(19): siRNA sense strand
agacuaaugugaagaugga

SEQ ID NO: 237991 - RNA, 19 nt, Homo sapiens
  misc_RNA (1)...(19): siRNA sense strand
gggcugcucuguucauaag

SEQ ID NO: 237992 - RNA, 19 nt, Homo sapiens
  misc_RNA (1)...(19): siRNA sense strand
gauccucgcuccaugaacu

SEQ ID NO: 237993 - RNA, 19 nt, Homo sapiens
  misc_RNA (1)...(19): siRNA sense strand
ccagcaacguuaccaacaa

SEQ ID NO: 237994 - RNA, 19 nt, Homo sapiens
  misc_RNA (1)...(19): siRNA sense strand
ggagaggauggcagaauga

SEQ ID NO: 237995 - RNA, 19 nt, Homo sapiens
  misc_RNA (1)...(19): siRNA sense strand
agaaagaugagacuaaugu

SEQ ID NO: 237996 - RNA, 19 nt, Homo sapiens
  misc_RNA (1)...(19): siRNA sense strand
uccaugaacucccguguau

SEQ ID NO: 237997 - RNA, 19 nt, Homo sapiens
  misc_RNA (1)...(19): siRNA sense strand
caugaacucccguguauuc

SEQ ID NO: 237998 - RNA, 19 nt, Homo sapiens
  misc_RNA (1)...(19): siRNA sense strand
gcaaacaagcaguagagau

SEQ ID NO: 237999 - RNA, 19 nt, Homo sapiens
  misc_RNA (1)...(19): siRNA sense strand
aaugauugcuggccagguu

SEQ ID NO: 238000 - RNA, 19 nt, Homo sapiens
  misc_RNA (1)...(19): siRNA sense strand
ugaagaaugauaagucaga

SEQ ID NO: 238001 - RNA, 19 nt, Homo sapiens
  misc_RNA (1)...(19): siRNA sense strand
gagcaaacaagcaguagag

SEQ ID NO: 238002 - RNA, 19 nt, Homo sapiens
  misc_RNA (1)...(19): siRNA sense strand
gggaaucucaacacucuug

SEQ ID NO: 238003 - RNA, 19 nt, Homo sapiens
  misc_RNA (1)...(19): siRNA sense strand
aaagaugagacuaauguga

SEQ ID NO: 238004 - RNA, 19 nt, Homo sapiens
  misc_RNA (1)...(19): siRNA sense strand
gggaugaccagcuggaguu

SEQ ID NO: 238005 - RNA, 19 nt, Homo sapiens
  misc_RNA (1)...(19): siRNA sense strand
ucaacacucuuguggucaa

SEQ ID NO: 238006 - RNA, 19 nt, Homo sapiens
  misc_RNA (1)...(19): siRNA sense strand
uaugauaggauguacaguu

SEQ ID NO: 238007 - RNA, 19 nt, Homo sapiens
  misc_RNA (1)...(19): siRNA sense strand
uggaguugaucaaggauga

SEQ ID NO: 238008 - RNA, 19 nt, Homo sapiens
  misc_RNA (1)...(19): siRNA sense strand
gaaggagcugacccagaua

SEQ ID NO: 238009 - RNA, 19 nt, Homo sapiens
  misc_RNA (1)...(19): siRNA sense strand
ucaggaaacacuucacgaa

SEQ ID NO: 238010 - RNA, 19 nt, Homo sapiens
  misc_RNA (1)...(19): siRNA sense strand
cagcgccaauggaggauga

SEQ ID NO: 238011 - RNA, 19 nt, Homo sapiens
  misc_RNA (1)...(19): siRNA sense strand
gaaagaugagacuaaugug

SEQ ID NO: 238012 - RNA, 19 nt, Homo sapiens
  misc_RNA (1)...(19): siRNA sense strand
gcaguagagaugaagaaug

SEQ ID NO: 238013 - RNA, 19 nt, Homo sapiens
  misc_RNA (1)...(19): siRNA sense strand
gaaaguugaaaggagauga

SEQ ID NO: 238014 - RNA, 19 nt, Homo sapiens
  misc_RNA (1)...(19): siRNA sense strand
gggcaaaaguggcuucaau

SEQ ID NO: 238015 - RNA, 19 nt, Homo sapiens
  misc_RNA (1)...(19): siRNA sense strand
gggaccuacuggaugauga

SEQ ID NO: 238016 - RNA, 19 nt, Homo sapiens
  misc_RNA (1)...(19): siRNA sense strand
cagcagcuccgugaagaaa

SEQ ID NO: 238017 - RNA, 19 nt, Homo sapiens
  misc_RNA (1)...(19): siRNA sense strand
aaucugauguggaggcaau

SEQ ID NO: 238018 - RNA, 19 nt, Homo sapiens
  misc_RNA (1)...(19): siRNA sense strand
uggaugaugaugauaauga

SEQ ID NO: 238019 - RNA, 19 nt, Homo sapiens
  misc_RNA (1)...(19): siRNA sense strand
aagaugagacuaaugugaa

SEQ ID NO: 238020 - RNA, 19 nt, Homo sapiens
  misc_RNA (1)...(19): siRNA sense strand
gaaacgucagcguguauca

SEQ ID NO: 238021 - RNA, 19 nt, Homo sapiens
  misc_RNA (1)...(19): siRNA sense strand
agaaugauaagucagaaga

SEQ ID NO: 238022 - RNA, 19 nt, Homo sapiens
  misc_RNA (1)...(19): siRNA sense strand
ggccagguuuuagauauua

SEQ ID NO: 238023 - RNA, 19 nt, Homo sapiens
  misc_RNA (1)...(19): siRNA sense strand
ugacagagacagcgccaau

SEQ ID NO: 238024 - RNA, 19 nt, Homo sapiens
  misc_RNA (1)...(19): siRNA sense strand
cagcaacguuaccaacaag

SEQ ID NO: 238025 - RNA, 19 nt, Homo sapiens
  misc_RNA (1)...(19): siRNA sense strand
gugggcugcucuguucaua

SEQ ID NO: 238026 - RNA, 19 nt, Homo sapiens
  misc_RNA (1)...(19): siRNA sense strand
aaacaagcaguagagauga

SEQ ID NO: 238027 - RNA, 19 nt, Homo sapiens
  misc_RNA (1)...(19): siRNA sense strand
aggagaggauggcagaaug

SEQ ID NO: 238028 - RNA, 19 nt, Homo sapiens
  misc_RNA (1)...(19): siRNA sense strand
gaccuucaggccauuaaga

SEQ ID NO: 238029 - RNA, 19 nt, Homo sapiens
  misc_RNA (1)...(19): siRNA sense strand
gcaaaaguggcuucaauuc

SEQ ID NO: 238030 - RNA, 19 nt, Homo sapiens
  misc_RNA (1)...(19): siRNA sense strand
gauaggauguacaguuacc

SEQ ID NO: 238031 - RNA, 19 nt, Homo sapiens
  misc_RNA (1)...(19): siRNA sense strand
cagcguguaucaggaaaca

SEQ ID NO: 238032 - RNA, 19 nt, Homo sapiens
  misc_RNA (1)...(19): siRNA sense strand
ucaguauguuaaugagaga

SEQ ID NO: 238033 - RNA, 19 nt, Homo sapiens
  misc_RNA (1)...(19): siRNA sense strand
ccuacuggaugaugaugau

SEQ ID NO: 238034 - RNA, 19 nt, Homo sapiens
  misc_RNA (1)...(19): siRNA sense strand
caacguuaccaacaagaca

SEQ ID NO: 238035 - RNA, 19 nt, Homo sapiens
  misc_RNA (1)...(19): siRNA sense strand
acagagcaaacaagcagua

SEQ ID NO: 238036 - RNA, 19 nt, Homo sapiens
  misc_RNA (1)...(19): siRNA sense strand
ugauguggaggcaaucuuu

SEQ ID NO: 238037 - RNA, 19 nt, Homo sapiens
  misc_RNA (1)...(19): siRNA sense strand
ggucaagaaaucugaugug

SEQ ID NO: 238038 - RNA, 19 nt, Homo sapiens
  misc_RNA (1)...(19): siRNA sense strand
aaaagaggcugaggaagga

SEQ ID NO: 238039 - RNA, 19 nt, Homo sapiens
  misc_RNA (1)...(19): siRNA sense strand
acuuucaacgggacuauua

SEQ ID NO: 238040 - RNA, 19 nt, Homo sapiens
  misc_RNA (1)...(19): siRNA sense strand
gaggcaaucuuuucgaagu

SEQ ID NO: 238041 - RNA, 19 nt, Homo sapiens
  misc_RNA (1)...(19): siRNA sense strand
aacaagcaguagagaugaa

SEQ ID NO: 238042 - RNA, 19 nt, Homo sapiens
  misc_RNA (1)...(19): siRNA sense strand
uggcuucaauucuaagagu

SEQ ID NO: 238043 - RNA, 19 nt, Homo sapiens
  misc_RNA (1)...(19): siRNA sense strand
gcagcagcuccgugaagaa

SEQ ID NO: 238044 - RNA, 19 nt, Homo sapiens
  misc_RNA (1)...(19): siRNA sense strand
augugaagauggagucuga

SEQ ID NO: 238045 - RNA, 19 nt, Homo sapiens
  misc_RNA (1)...(19): siRNA sense strand
aaggagaggaugacagaga

SEQ ID NO: 238046 - RNA, 19 nt, Homo sapiens
  misc_RNA (1)...(19): siRNA sense strand
ucaacgggacuauuaugau

SEQ ID NO: 238047 - RNA, 19 nt, Homo sapiens
  misc_RNA (1)...(19): siRNA sense strand
ggaccuacuggaugaugau

SEQ ID NO: 238048 - RNA, 19 nt, Homo sapiens
  misc_RNA (1)...(19): siRNA sense strand
gagaugaagaaugauaagu

SEQ ID NO: 238049 - RNA, 19 nt, Homo sapiens
  misc_RNA (1)...(19): siRNA sense strand
uugggaaucucaacacucu

SEQ ID NO: 238050 - RNA, 19 nt, Homo sapiens
  misc_RNA (1)...(19): siRNA sense strand
ggaacagagcaaacaagca

SEQ ID NO: 238051 - RNA, 19 nt, Homo sapiens
  misc_RNA (1)...(19): siRNA sense strand
ugacccagauaaaacaaaa

SEQ ID NO: 238052 - RNA, 19 nt, Homo sapiens
  misc_RNA (1)...(19): siRNA sense strand
gaugaccuucaggccauua

SEQ ID NO: 238053 - RNA, 19 nt, Homo sapiens
  misc_RNA (1)...(19): siRNA sense strand
auugugggcugcucuguuc

SEQ ID NO: 238054 - RNA, 19 nt, Homo sapiens
  misc_RNA (1)...(19): siRNA sense strand
ccaagucuggaaaguugaa

SEQ ID NO: 238055 - RNA, 19 nt, Homo sapiens
  misc_RNA (1)...(19): siRNA sense strand
agaugagacuaaugugaag

SEQ ID NO: 238056 - RNA, 19 nt, Homo sapiens
  misc_RNA (1)...(19): siRNA sense strand
aaaggaacagagcaaacaa

SEQ ID NO: 238057 - RNA, 19 nt, Homo sapiens
  misc_RNA (1)...(19): siRNA sense strand
uggauucucuccuggaaaa

SEQ ID NO: 238058 - RNA, 19 nt, Homo sapiens
  misc_RNA (1)...(19): siRNA sense strand
guaccuccuccuccuccua

SEQ ID NO: 238059 - RNA, 19 nt, Homo sapiens
  misc_RNA (1)...(19): siRNA sense strand
gcuccgugaagaaagauga

SEQ ID NO: 238060 - RNA, 19 nt, Homo sapiens
  misc_RNA (1)...(19): siRNA sense strand
acagauccucgcuccauga

SEQ ID NO: 238061 - RNA, 19 nt, Homo sapiens
  misc_RNA (1)...(19): siRNA sense strand
aaagacagaucaagauuug

SEQ ID NO: 238062 - RNA, 19 nt, Homo sapiens
  misc_RNA (1)...(19): siRNA sense strand
gaaagacagaucaagauuu

SEQ ID NO: 238063 - RNA, 19 nt, Homo sapiens
  misc_RNA (1)...(19): siRNA sense strand
gagaguaacuuccggaucu

SEQ ID NO: 238064 - RNA, 19 nt, Homo sapiens
  misc_RNA (1)...(19): siRNA sense strand
ggaaagacagaucaagauu

SEQ ID NO: 238065 - RNA, 19 nt, Homo sapiens
  misc_RNA (1)...(19): siRNA sense strand
ggaggaagaggaagaguga

SEQ ID NO: 238066 - RNA, 19 nt, Homo sapiens
  misc_RNA (1)...(19): siRNA sense strand
gagccgaguuccuucaaca

SEQ ID NO: 238067 - RNA, 19 nt, Homo sapiens
  misc_RNA (1)...(19): siRNA sense strand
ggagcuggagaaagaauuu

SEQ ID NO: 238068 - RNA, 19 nt, Homo sapiens
  misc_RNA (1)...(19): siRNA sense strand
cccuggagcuggagaaaga

SEQ ID NO: 238069 - RNA, 19 nt, Homo sapiens
  misc_RNA (1)...(19): siRNA sense strand
guauuaugcgaaugcuuua

SEQ ID NO: 238070 - RNA, 19 nt, Homo sapiens
  misc_RNA (1)...(19): siRNA sense strand
uguauuaugcgaaugcuuu

SEQ ID NO: 238071 - RNA, 19 nt, Homo sapiens
  misc_RNA (1)...(19): siRNA sense strand
cuaaauauccagccucaag

SEQ ID NO: 238072 - RNA, 19 nt, Homo sapiens
  misc_RNA (1)...(19): siRNA sense strand
uaccggagccuucccagaa

SEQ ID NO: 238073 - RNA, 19 nt, Homo sapiens
  misc_RNA (1)...(19): siRNA sense strand
gcgaaugcuuuauuuucua

SEQ ID NO: 238074 - RNA, 19 nt, Homo sapiens
  misc_RNA (1)...(19): siRNA sense strand
agaguaacuuccggaucua

SEQ ID NO: 238075 - RNA, 19 nt, Homo sapiens
  misc_RNA (1)...(19): siRNA sense strand
gaucaagauuugguuucag

SEQ ID NO: 238076 - RNA, 19 nt, Homo sapiens
  misc_RNA (1)...(19): siRNA sense strand
cggaaagacagaucaagau

SEQ ID NO: 238077 - RNA, 19 nt, Homo sapiens
  misc_RNA (1)...(19): siRNA sense strand
agaucaagauuugguuuca

SEQ ID NO: 238078 - RNA, 19 nt, Homo sapiens
  misc_RNA (1)...(19): siRNA sense strand
aaauauccagccucaaguu

SEQ ID NO: 238079 - RNA, 19 nt, Homo sapiens
  misc_RNA (1)...(19): siRNA sense strand
cagaggaggaagaggaaga

SEQ ID NO: 238080 - RNA, 19 nt, Homo sapiens
  misc_RNA (1)...(19): siRNA sense strand
cgaguuccuucaacaugca

SEQ ID NO: 238081 - RNA, 19 nt, Homo sapiens
  misc_RNA (1)...(19): siRNA sense strand
uaaauauccagccucaagu

SEQ ID NO: 238082 - RNA, 19 nt, Homo sapiens
  misc_RNA (1)...(19): siRNA sense strand
agacagaucaagauuuggu

SEQ ID NO: 238083 - RNA, 19 nt, Homo sapiens
  misc_RNA (1)...(19): siRNA sense strand
aucaagauuugguuucaga

SEQ ID NO: 238084 - RNA, 19 nt, Homo sapiens
  misc_RNA (1)...(19): siRNA sense strand
acagaucaagauuugguuu

SEQ ID NO: 238085 - RNA, 19 nt, Homo sapiens
  misc_RNA (1)...(19): siRNA sense strand
gccgaguuccuucaacaug

SEQ ID NO: 238086 - RNA, 19 nt, Homo sapiens
  misc_RNA (1)...(19): siRNA sense strand
augcgaagcucaggaacug

SEQ ID NO: 238087 - RNA, 19 nt, Homo sapiens
  misc_RNA (1)...(19): siRNA sense strand
agaaagacaugcucucaaa

SEQ ID NO: 238088 - RNA, 19 nt, Homo sapiens
  misc_RNA (1)...(19): siRNA sense strand
gaaagccaguauccagauu

SEQ ID NO: 238089 - RNA, 19 nt, Homo sapiens
  misc_RNA (1)...(19): siRNA sense strand
caaaacaccuuaggacaua

SEQ ID NO: 238090 - RNA, 19 nt, Homo sapiens
  misc_RNA (1)...(19): siRNA sense strand
gagaaugucguguucaguu

SEQ ID NO: 238091 - RNA, 19 nt, Homo sapiens
  misc_RNA (1)...(19): siRNA sense strand
ucacuucaaucgcuaccua

SEQ ID NO: 238092 - RNA, 19 nt, Homo sapiens
  misc_RNA (1)...(19): siRNA sense strand
cuauggaucuaauuccuuu

SEQ ID NO: 238093 - RNA, 19 nt, Homo sapiens
  misc_RNA (1)...(19): siRNA sense strand
aagccaguauccagauuua

SEQ ID NO: 238094 - RNA, 19 nt, Homo sapiens
  misc_RNA (1)...(19): siRNA sense strand
cagaagaggagaagcagaa

SEQ ID NO: 238095 - RNA, 19 nt, Homo sapiens
  misc_RNA (1)...(19): siRNA sense strand
ucaauuccaccgccuauga

SEQ ID NO: 238096 - RNA, 19 nt, Homo sapiens
  misc_RNA (1)...(19): siRNA sense strand
gaucuacucgacucccuuu

SEQ ID NO: 238097 - RNA, 19 nt, Homo sapiens
  misc_RNA (1)...(19): siRNA sense strand
ggagaagcagaaagaguga

SEQ ID NO: 238098 - RNA, 19 nt, Homo sapiens
  misc_RNA (1)...(19): siRNA sense strand
ggaacuggagaaggaauuu

SEQ ID NO: 238099 - RNA, 19 nt, Homo sapiens
  misc_RNA (1)...(19): siRNA sense strand
guaugacuauggaucuaau

SEQ ID NO: 238100 - RNA, 19 nt, Homo sapiens
  misc_RNA (1)...(19): siRNA sense strand
ugaggcauuucucgaccua

SEQ ID NO: 238101 - RNA, 19 nt, Homo sapiens
  misc_RNA (1)...(19): siRNA sense strand
acaggagaaugucguguuc

SEQ ID NO: 238102 - RNA, 19 nt, Homo sapiens
  misc_RNA (1)...(19): siRNA sense strand
agaaugucguguucaguuc

SEQ ID NO: 238103 - RNA, 19 nt, Homo sapiens
  misc_RNA (1)...(19): siRNA sense strand
aagaggagaagcagaaaga

SEQ ID NO: 238104 - RNA, 19 nt, Homo sapiens
  misc_RNA (1)...(19): siRNA sense strand
caacgucgcccucaauucc

SEQ ID NO: 238105 - RNA, 19 nt, Homo sapiens
  misc_RNA (1)...(19): siRNA sense strand
gaggagaagcagaaagagu

SEQ ID NO: 238106 - RNA, 19 nt, Homo sapiens
  misc_RNA (1)...(19): siRNA sense strand
gaagaggagaagcagaaag

SEQ ID NO: 238107 - RNA, 19 nt, Homo sapiens
  misc_RNA (1)...(19): siRNA sense strand
gaaagacaugcucucaaac

SEQ ID NO: 238108 - RNA, 19 nt, Homo sapiens
  misc_RNA (1)...(19): siRNA sense strand
gaacuggagaaggaauuuc

SEQ ID NO: 238109 - RNA, 19 nt, Homo sapiens
  misc_RNA (1)...(19): siRNA sense strand
gcucucaaacugcagacaa

SEQ ID NO: 238110 - RNA, 19 nt, Homo sapiens
  misc_RNA (1)...(19): siRNA sense strand
aagacaugcucucaaacug

SEQ ID NO: 238111 - RNA, 19 nt, Homo sapiens
  misc_RNA (1)...(19): siRNA sense strand
cccuggaacuggagaagga

SEQ ID NO: 238112 - RNA, 19 nt, Homo sapiens
  misc_RNA (1)...(19): siRNA sense strand
aaagacaugcucucaaacu

SEQ ID NO: 238113 - RNA, 19 nt, Homo sapiens
  misc_RNA (1)...(19): siRNA sense strand
agacagaagaggagaagca

SEQ ID NO: 238114 - RNA, 19 nt, Homo sapiens
  misc_RNA (1)...(19): siRNA sense strand
aggcauuucucgaccuaug

SEQ ID NO: 238115 - RNA, 19 nt, Homo sapiens
  misc_RNA (1)...(19): siRNA sense strand
uaacacacagaccucaauc

SEQ ID NO: 238116 - RNA, 19 nt, Homo sapiens
  misc_RNA (1)...(19): siRNA sense strand
aaucucacauccacucucu

SEQ ID NO: 238117 - RNA, 19 nt, Homo sapiens
  misc_RNA (1)...(19): siRNA sense strand
aaagccaguauccagauuu

SEQ ID NO: 238118 - RNA, 19 nt, Homo sapiens
  misc_RNA (1)...(19): siRNA sense strand
gacuauggaucuaauuccu

SEQ ID NO: 238119 - RNA, 19 nt, Homo sapiens
  misc_RNA (1)...(19): siRNA sense strand
caccuuaggacauaacaca

SEQ ID NO: 238120 - RNA, 19 nt, Homo sapiens
  misc_RNA (1)...(19): siRNA sense strand
ugaccgagcgacagaucaa

SEQ ID NO: 238121 - RNA, 19 nt, Homo sapiens
  misc_RNA (1)...(19): siRNA sense strand
ccguaugacuauggaucua

SEQ ID NO: 238122 - RNA, 19 nt, Homo sapiens
  misc_RNA (1)...(19): siRNA sense strand
gcccagaaccggaucuacu

SEQ ID NO: 238123 - RNA, 19 nt, Homo sapiens
  misc_RNA (1)...(19): siRNA sense strand
uggaugcagcgaaugaauu

SEQ ID NO: 238124 - RNA, 19 nt, Homo sapiens
  misc_RNA (1)...(19): siRNA sense strand
gcauuucucgaccuaugga

SEQ ID NO: 238125 - RNA, 19 nt, Homo sapiens
  misc_RNA (1)...(19): siRNA sense strand
cuacucgacucccuuuuau

SEQ ID NO: 238126 - RNA, 19 nt, Homo sapiens
  misc_RNA (1)...(19): siRNA sense strand
cacaggagaaugucguguu

SEQ ID NO: 238127 - RNA, 19 nt, Homo sapiens
  misc_RNA (1)...(19): siRNA sense strand
gaccagaaagccaguaucc

SEQ ID NO: 238128 - RNA, 19 nt, Homo sapiens
  misc_RNA (1)...(19): siRNA sense strand
cucucaaacugcagacaaa

SEQ ID NO: 238129 - RNA, 19 nt, Homo sapiens
  misc_RNA (1)...(19): siRNA sense strand
gaaagccaguauccagauu

SEQ ID NO: 238130 - RNA, 19 nt, Homo sapiens
  misc_RNA (1)...(19): siRNA sense strand
caaaacaccuuaggacaua

SEQ ID NO: 238131 - RNA, 19 nt, Homo sapiens
  misc_RNA (1)...(19): siRNA sense strand
ucacuucaaucgcuaccua

SEQ ID NO: 238132 - RNA, 19 nt, Homo sapiens
  misc_RNA (1)...(19): siRNA sense strand
aagccaguauccagauuua

SEQ ID NO: 238133 - RNA, 19 nt, Homo sapiens
  misc_RNA (1)...(19): siRNA sense strand
cagaagaggagaagcagaa

SEQ ID NO: 238134 - RNA, 19 nt, Homo sapiens
  misc_RNA (1)...(19): siRNA sense strand
ggagaagcagaaagaguga

SEQ ID NO: 238135 - RNA, 19 nt, Homo sapiens
  misc_RNA (1)...(19): siRNA sense strand
ggaacuggagaaggaauuu

SEQ ID NO: 238136 - RNA, 19 nt, Homo sapiens
  misc_RNA (1)...(19): siRNA sense strand
aagaggagaagcagaaaga

SEQ ID NO: 238137 - RNA, 19 nt, Homo sapiens
  misc_RNA (1)...(19): siRNA sense strand
gaggagaagcagaaagagu

SEQ ID NO: 238138 - RNA, 19 nt, Homo sapiens
  misc_RNA (1)...(19): siRNA sense strand
gaagaggagaagcagaaag

SEQ ID NO: 238139 - RNA, 19 nt, Homo sapiens
  misc_RNA (1)...(19): siRNA sense strand
gaacuggagaaggaauuuc

SEQ ID NO: 238140 - RNA, 19 nt, Homo sapiens
  misc_RNA (1)...(19): siRNA sense strand
gcucucaaacugcagacaa

SEQ ID NO: 238141 - RNA, 19 nt, Homo sapiens
  misc_RNA (1)...(19): siRNA sense strand
cccuggaacuggagaagga

SEQ ID NO: 238142 - RNA, 19 nt, Homo sapiens
  misc_RNA (1)...(19): siRNA sense strand
agacagaagaggagaagca

SEQ ID NO: 238143 - RNA, 19 nt, Homo sapiens
  misc_RNA (1)...(19): siRNA sense strand
uaacacacagaccucaauc

SEQ ID NO: 238144 - RNA, 19 nt, Homo sapiens
  misc_RNA (1)...(19): siRNA sense strand
aaucucacauccacucucu

SEQ ID NO: 238145 - RNA, 19 nt, Homo sapiens
  misc_RNA (1)...(19): siRNA sense strand
aaagccaguauccagauuu

SEQ ID NO: 238146 - RNA, 19 nt, Homo sapiens
  misc_RNA (1)...(19): siRNA sense strand
caccuuaggacauaacaca

SEQ ID NO: 238147 - RNA, 19 nt, Homo sapiens
  misc_RNA (1)...(19): siRNA sense strand
ugaccgagcgacagaucaa

SEQ ID NO: 238148 - RNA, 19 nt, Homo sapiens
  misc_RNA (1)...(19): siRNA sense strand
uggaugcagcgaaugaauu

SEQ ID NO: 238149 - RNA, 19 nt, Homo sapiens
  misc_RNA (1)...(19): siRNA sense strand
gaccagaaagccaguaucc

SEQ ID NO: 238150 - RNA, 19 nt, Homo sapiens
  misc_RNA (1)...(19): siRNA sense strand
cucucaaacugcagacaaa

SEQ ID NO: 238151 - RNA, 19 nt, Homo sapiens
  misc_RNA (1)...(19): siRNA sense strand
gaaggaaucaacacagaaa

SEQ ID NO: 238152 - RNA, 19 nt, Homo sapiens
  misc_RNA (1)...(19): siRNA sense strand
ggacugggcuguguuccaa

SEQ ID NO: 238153 - RNA, 19 nt, Homo sapiens
  misc_RNA (1)...(19): siRNA sense strand
gcacugcccuuuccuucug

SEQ ID NO: 238154 - RNA, 19 nt, Homo sapiens
  misc_RNA (1)...(19): siRNA sense strand
ggaccaagagcaucaaaga

SEQ ID NO: 238155 - RNA, 19 nt, Homo sapiens
  misc_RNA (1)...(19): siRNA sense strand
ccagagggauggagagaug

SEQ ID NO: 238156 - RNA, 19 nt, Homo sapiens
  misc_RNA (1)...(19): siRNA sense strand
cagaaggaaucaacacaga

SEQ ID NO: 238157 - RNA, 19 nt, Homo sapiens
  misc_RNA (1)...(19): siRNA sense strand
ccacaaccuuccugcaaug

SEQ ID NO: 238158 - RNA, 19 nt, Homo sapiens
  misc_RNA (1)...(19): siRNA sense strand
ggccugagcuucgcccaaa

SEQ ID NO: 238159 - RNA, 19 nt, Homo sapiens
  misc_RNA (1)...(19): siRNA sense strand
ggaaggaggccaugcuuac

SEQ ID NO: 238160 - RNA, 19 nt, Homo sapiens
  misc_RNA (1)...(19): siRNA sense strand
cuacaaggauccgagcauu

SEQ ID NO: 238161 - RNA, 19 nt, Homo sapiens
  misc_RNA (1)...(19): siRNA sense strand
acaccaagcugaagaagac

SEQ ID NO: 238162 - RNA, 19 nt, Homo sapiens
  misc_RNA (1)...(19): siRNA sense strand
ggaccaagaaccucugugu

SEQ ID NO: 238163 - RNA, 19 nt, Homo sapiens
  misc_RNA (1)...(19): siRNA sense strand
guacugcgcccuccaugga

SEQ ID NO: 238164 - RNA, 19 nt, Homo sapiens
  misc_RNA (1)...(19): siRNA sense strand
gcgaacugcuggcuucuac

SEQ ID NO: 238165 - RNA, 19 nt, Homo sapiens
  misc_RNA (1)...(19): siRNA sense strand
cauuacaggaggccaaaua

SEQ ID NO: 238166 - RNA, 19 nt, Homo sapiens
  misc_RNA (1)...(19): siRNA sense strand
guggccaucucaagaguga

SEQ ID NO: 238167 - RNA, 19 nt, Homo sapiens
  misc_RNA (1)...(19): siRNA sense strand
gaagaagacauggcucaca

SEQ ID NO: 238168 - RNA, 19 nt, Homo sapiens
  misc_RNA (1)...(19): siRNA sense strand
gaacccagcgaggaaguga

SEQ ID NO: 238169 - RNA, 19 nt, Homo sapiens
  misc_RNA (1)...(19): siRNA sense strand
cauccuacccacccacuaa

SEQ ID NO: 238170 - RNA, 19 nt, Homo sapiens
  misc_RNA (1)...(19): siRNA sense strand
gaggacagcccaggcauuc

SEQ ID NO: 238171 - RNA, 19 nt, Homo sapiens
  misc_RNA (1)...(19): siRNA sense strand
acacaucgauagggaacaa

SEQ ID NO: 238172 - RNA, 19 nt, Homo sapiens
  misc_RNA (1)...(19): siRNA sense strand
ggacaugcucccacuugug

SEQ ID NO: 238173 - RNA, 19 nt, Homo sapiens
  misc_RNA (1)...(19): siRNA sense strand
cagcgucacucagcacuuc

SEQ ID NO: 238174 - RNA, 19 nt, Homo sapiens
  misc_RNA (1)...(19): siRNA sense strand
caacauccuggacagcauu

SEQ ID NO: 238175 - RNA, 19 nt, Homo sapiens
  misc_RNA (1)...(19): siRNA sense strand
gcagccaggucagcacugu

SEQ ID NO: 238176 - RNA, 19 nt, Homo sapiens
  misc_RNA (1)...(19): siRNA sense strand
gcaagggcuuuuacuacaa

SEQ ID NO: 238177 - RNA, 19 nt, Homo sapiens
  misc_RNA (1)...(19): siRNA sense strand
aacggaagauccaggagaa

SEQ ID NO: 238178 - RNA, 19 nt, Homo sapiens
  misc_RNA (1)...(19): siRNA sense strand
gcccucugccuucagcuua

SEQ ID NO: 238179 - RNA, 19 nt, Homo sapiens
  misc_RNA (1)...(19): siRNA sense strand
cagauggacugggcugugu

SEQ ID NO: 238180 - RNA, 19 nt, Homo sapiens
  misc_RNA (1)...(19): siRNA sense strand
gcucaaugccaaaguugug

SEQ ID NO: 238181 - RNA, 19 nt, Homo sapiens
  misc_RNA (1)...(19): siRNA sense strand
gcacagucagcgucacuca

SEQ ID NO: 238182 - RNA, 19 nt, Homo sapiens
  misc_RNA (1)...(19): siRNA sense strand
gagcugagcacugcaaugc

SEQ ID NO: 238183 - RNA, 19 nt, Homo sapiens
  misc_RNA (1)...(19): siRNA sense strand
caacuccagcucugaggaa

SEQ ID NO: 238184 - RNA, 19 nt, Homo sapiens
  misc_RNA (1)...(19): siRNA sense strand
gcauagugguggccaucuc

SEQ ID NO: 238185 - RNA, 19 nt, Homo sapiens
  misc_RNA (1)...(19): siRNA sense strand
ggacagcccaggcauucca

SEQ ID NO: 238186 - RNA, 19 nt, Homo sapiens
  misc_RNA (1)...(19): siRNA sense strand
cagcgaacccagcgaggaa

SEQ ID NO: 238187 - RNA, 19 nt, Homo sapiens
  misc_RNA (1)...(19): siRNA sense strand
gaagacacagccaccaacu

SEQ ID NO: 238188 - RNA, 19 nt, Homo sapiens
  misc_RNA (1)...(19): siRNA sense strand
aaagugcccucugccuuca

SEQ ID NO: 238189 - RNA, 19 nt, Homo sapiens
  misc_RNA (1)...(19): siRNA sense strand
gccuggcucucccugcaaa

SEQ ID NO: 238190 - RNA, 19 nt, Homo sapiens
  misc_RNA (1)...(19): siRNA sense strand
uggaaggaggccaugcuua

SEQ ID NO: 238191 - RNA, 19 nt, Homo sapiens
  misc_RNA (1)...(19): siRNA sense strand
acucggagcaguuugaaug

SEQ ID NO: 238192 - RNA, 19 nt, Homo sapiens
  misc_RNA (1)...(19): siRNA sense strand
gcacucggagcaguuugaa

SEQ ID NO: 238193 - RNA, 19 nt, Homo sapiens
  misc_RNA (1)...(19): siRNA sense strand
caccauggacucuucaaca

SEQ ID NO: 238194 - RNA, 19 nt, Homo sapiens
  misc_RNA (1)...(19): siRNA sense strand
cugcaaaacuggcucaaug

SEQ ID NO: 238195 - RNA, 19 nt, Homo sapiens
  misc_RNA (1)...(19): siRNA sense strand
gcagcaagggcuuuuacua

SEQ ID NO: 238196 - RNA, 19 nt, Homo sapiens
  misc_RNA (1)...(19): siRNA sense strand
ccaacauccuggacagcau

SEQ ID NO: 238197 - RNA, 19 nt, Homo sapiens
  misc_RNA (1)...(19): siRNA sense strand
gcagaaaggaccccaagau

SEQ ID NO: 238198 - RNA, 19 nt, Homo sapiens
  misc_RNA (1)...(19): siRNA sense strand
aagagggacugcgcuggaa

SEQ ID NO: 238199 - RNA, 19 nt, Homo sapiens
  misc_RNA (1)...(19): siRNA sense strand
cgauagggaacaaggaugu

SEQ ID NO: 238200 - RNA, 19 nt, Homo sapiens
  misc_RNA (1)...(19): siRNA sense strand
gacagcaugaugagcagaa

SEQ ID NO: 238201 - RNA, 19 nt, Homo sapiens
  misc_RNA (1)...(19): siRNA sense strand
gccaggcgaugggaaccuu

SEQ ID NO: 238202 - RNA, 19 nt, Homo sapiens
  misc_RNA (1)...(19): siRNA sense strand
ggaagauccaggagaaagc

SEQ ID NO: 238203 - RNA, 19 nt, Homo sapiens
  misc_RNA (1)...(19): siRNA sense strand
uccacaaccuuccugcaau

SEQ ID NO: 238204 - RNA, 19 nt, Homo sapiens
  misc_RNA (1)...(19): siRNA sense strand
agaaggaaucaacacagaa

SEQ ID NO: 238205 - RNA, 19 nt, Homo sapiens
  misc_RNA (1)...(19): siRNA sense strand
agaacggcaucgugagaca

SEQ ID NO: 238206 - RNA, 19 nt, Homo sapiens
  misc_RNA (1)...(19): siRNA sense strand
agagaacggcaucgugaga

SEQ ID NO: 238207 - RNA, 19 nt, Homo sapiens
  misc_RNA (1)...(19): siRNA sense strand
gacauuacaggaggccaaa

SEQ ID NO: 238208 - RNA, 19 nt, Homo sapiens
  misc_RNA (1)...(19): siRNA sense strand
ggccaugagcgaauacaca

SEQ ID NO: 238209 - RNA, 19 nt, Homo sapiens
  misc_RNA (1)...(19): siRNA sense strand
gcagcaggaggaagacaca

SEQ ID NO: 238210 - RNA, 19 nt, Homo sapiens
  misc_RNA (1)...(19): siRNA sense strand
gggagaggaaggucaacug

SEQ ID NO: 238211 - RNA, 19 nt, Homo sapiens
  misc_RNA (1)...(19): siRNA sense strand
ggugcgggacacaucgaua

SEQ ID NO: 238212 - RNA, 19 nt, Homo sapiens
  misc_RNA (1)...(19): siRNA sense strand
gauggacugggcuguguuc

SEQ ID NO: 238213 - RNA, 19 nt, Homo sapiens
  misc_RNA (1)...(19): siRNA sense strand
aacucaaccuggcuuccua

SEQ ID NO: 238214 - RNA, 19 nt, Homo sapiens
  misc_RNA (1)...(19): siRNA sense strand
gucugccacuuccggagua

SEQ ID NO: 238215 - RNA, 19 nt, Homo sapiens
  misc_RNA (1)...(19): siRNA sense strand
gaccaagagcaucaaagag

SEQ ID NO: 238216 - RNA, 19 nt, Homo sapiens
  misc_RNA (1)...(19): siRNA sense strand
caacacccacuggcgaugu

SEQ ID NO: 238217 - RNA, 19 nt, Homo sapiens
  misc_RNA (1)...(19): siRNA sense strand
gaaggaaucaacacagaaa

SEQ ID NO: 238218 - RNA, 19 nt, Homo sapiens
  misc_RNA (1)...(19): siRNA sense strand
ggacugggcuguguuccaa

SEQ ID NO: 238219 - RNA, 19 nt, Homo sapiens
  misc_RNA (1)...(19): siRNA sense strand
gcacugcccuuuccuucug

SEQ ID NO: 238220 - RNA, 19 nt, Homo sapiens
  misc_RNA (1)...(19): siRNA sense strand
ggaccaagagcaucaaaga

SEQ ID NO: 238221 - RNA, 19 nt, Homo sapiens
  misc_RNA (1)...(19): siRNA sense strand
ccagagggauggagagaug

SEQ ID NO: 238222 - RNA, 19 nt, Homo sapiens
  misc_RNA (1)...(19): siRNA sense strand
cagaaggaaucaacacaga

SEQ ID NO: 238223 - RNA, 19 nt, Homo sapiens
  misc_RNA (1)...(19): siRNA sense strand
ccacaaccuuccugcaaug

SEQ ID NO: 238224 - RNA, 19 nt, Homo sapiens
  misc_RNA (1)...(19): siRNA sense strand
ggccugagcuucgcccaaa

SEQ ID NO: 238225 - RNA, 19 nt, Homo sapiens
  misc_RNA (1)...(19): siRNA sense strand
ggaaggaggccaugcuuac

SEQ ID NO: 238226 - RNA, 19 nt, Homo sapiens
  misc_RNA (1)...(19): siRNA sense strand
cuacaaggauccgagcauu

SEQ ID NO: 238227 - RNA, 19 nt, Homo sapiens
  misc_RNA (1)...(19): siRNA sense strand
acaccaagcugaagaagac

SEQ ID NO: 238228 - RNA, 19 nt, Homo sapiens
  misc_RNA (1)...(19): siRNA sense strand
ggaccaagaaccucugugu

SEQ ID NO: 238229 - RNA, 19 nt, Homo sapiens
  misc_RNA (1)...(19): siRNA sense strand
guacugcgcccuccaugga

SEQ ID NO: 238230 - RNA, 19 nt, Homo sapiens
  misc_RNA (1)...(19): siRNA sense strand
gcgaacugcuggcuucuac

SEQ ID NO: 238231 - RNA, 19 nt, Homo sapiens
  misc_RNA (1)...(19): siRNA sense strand
cauuacaggaggccaaaua

SEQ ID NO: 238232 - RNA, 19 nt, Homo sapiens
  misc_RNA (1)...(19): siRNA sense strand
guggccaucucaagaguga

SEQ ID NO: 238233 - RNA, 19 nt, Homo sapiens
  misc_RNA (1)...(19): siRNA sense strand
gaagaagacauggcucaca

SEQ ID NO: 238234 - RNA, 19 nt, Homo sapiens
  misc_RNA (1)...(19): siRNA sense strand
gaacccagcgaggaaguga

SEQ ID NO: 238235 - RNA, 19 nt, Homo sapiens
  misc_RNA (1)...(19): siRNA sense strand
cauccuacccacccacuaa

SEQ ID NO: 238236 - RNA, 19 nt, Homo sapiens
  misc_RNA (1)...(19): siRNA sense strand
gaggacagcccaggcauuc

SEQ ID NO: 238237 - RNA, 19 nt, Homo sapiens
  misc_RNA (1)...(19): siRNA sense strand
acacaucgauagggaacaa

SEQ ID NO: 238238 - RNA, 19 nt, Homo sapiens
  misc_RNA (1)...(19): siRNA sense strand
ggacaugcucccacuugug

SEQ ID NO: 238239 - RNA, 19 nt, Homo sapiens
  misc_RNA (1)...(19): siRNA sense strand
cagcgucacucagcacuuc

SEQ ID NO: 238240 - RNA, 19 nt, Homo sapiens
  misc_RNA (1)...(19): siRNA sense strand
caacauccuggacagcauu

SEQ ID NO: 238241 - RNA, 19 nt, Homo sapiens
  misc_RNA (1)...(19): siRNA sense strand
gcagccaggucagcacugu

SEQ ID NO: 238242 - RNA, 19 nt, Homo sapiens
  misc_RNA (1)...(19): siRNA sense strand
gcaagggcuuuuacuacaa

SEQ ID NO: 238243 - RNA, 19 nt, Homo sapiens
  misc_RNA (1)...(19): siRNA sense strand
aacggaagauccaggagaa

SEQ ID NO: 238244 - RNA, 19 nt, Homo sapiens
  misc_RNA (1)...(19): siRNA sense strand
gcccucugccuucagcuua

SEQ ID NO: 238245 - RNA, 19 nt, Homo sapiens
  misc_RNA (1)...(19): siRNA sense strand
cagauggacugggcugugu

SEQ ID NO: 238246 - RNA, 19 nt, Homo sapiens
  misc_RNA (1)...(19): siRNA sense strand
gcucaaugccaaaguugug

SEQ ID NO: 238247 - RNA, 19 nt, Homo sapiens
  misc_RNA (1)...(19): siRNA sense strand
gcacagucagcgucacuca

SEQ ID NO: 238248 - RNA, 19 nt, Homo sapiens
  misc_RNA (1)...(19): siRNA sense strand
gagcugagcacugcaaugc

SEQ ID NO: 238249 - RNA, 19 nt, Homo sapiens
  misc_RNA (1)...(19): siRNA sense strand
caacuccagcucugaggaa

SEQ ID NO: 238250 - RNA, 19 nt, Homo sapiens
  misc_RNA (1)...(19): siRNA sense strand
gcauagugguggccaucuc

SEQ ID NO: 238251 - RNA, 19 nt, Homo sapiens
  misc_RNA (1)...(19): siRNA sense strand
ggacagcccaggcauucca

SEQ ID NO: 238252 - RNA, 19 nt, Homo sapiens
  misc_RNA (1)...(19): siRNA sense strand
cagcgaacccagcgaggaa

SEQ ID NO: 238253 - RNA, 19 nt, Homo sapiens
  misc_RNA (1)...(19): siRNA sense strand
gaagacacagccaccaacu

SEQ ID NO: 238254 - RNA, 19 nt, Homo sapiens
  misc_RNA (1)...(19): siRNA sense strand
aaagugcccucugccuuca

SEQ ID NO: 238255 - RNA, 19 nt, Homo sapiens
  misc_RNA (1)...(19): siRNA sense strand
gccuggcucucccugcaaa

SEQ ID NO: 238256 - RNA, 19 nt, Homo sapiens
  misc_RNA (1)...(19): siRNA sense strand
uggaaggaggccaugcuua

SEQ ID NO: 238257 - RNA, 19 nt, Homo sapiens
  misc_RNA (1)...(19): siRNA sense strand
acucggagcaguuugaaug

SEQ ID NO: 238258 - RNA, 19 nt, Homo sapiens
  misc_RNA (1)...(19): siRNA sense strand
gcacucggagcaguuugaa

SEQ ID NO: 238259 - RNA, 19 nt, Homo sapiens
  misc_RNA (1)...(19): siRNA sense strand
caccauggacucuucaaca

SEQ ID NO: 238260 - RNA, 19 nt, Homo sapiens
  misc_RNA (1)...(19): siRNA sense strand
cugcaaaacuggcucaaug

SEQ ID NO: 238261 - RNA, 19 nt, Homo sapiens
  misc_RNA (1)...(19): siRNA sense strand
gcagcaagggcuuuuacua

SEQ ID NO: 238262 - RNA, 19 nt, Homo sapiens
  misc_RNA (1)...(19): siRNA sense strand
ccaacauccuggacagcau

SEQ ID NO: 238263 - RNA, 19 nt, Homo sapiens
  misc_RNA (1)...(19): siRNA sense strand
gcagaaaggaccccaagau

SEQ ID NO: 238264 - RNA, 19 nt, Homo sapiens
  misc_RNA (1)...(19): siRNA sense strand
aagagggacugcgcuggaa

SEQ ID NO: 238265 - RNA, 19 nt, Homo sapiens
  misc_RNA (1)...(19): siRNA sense strand
cgauagggaacaaggaugu

SEQ ID NO: 238266 - RNA, 19 nt, Homo sapiens
  misc_RNA (1)...(19): siRNA sense strand
gacagcaugaugagcagaa

SEQ ID NO: 238267 - RNA, 19 nt, Homo sapiens
  misc_RNA (1)...(19): siRNA sense strand
gccaggcgaugggaaccuu

SEQ ID NO: 238268 - RNA, 19 nt, Homo sapiens
  misc_RNA (1)...(19): siRNA sense strand
ggaagauccaggagaaagc

SEQ ID NO: 238269 - RNA, 19 nt, Homo sapiens
  misc_RNA (1)...(19): siRNA sense strand
uccacaaccuuccugcaau

SEQ ID NO: 238270 - RNA, 19 nt, Homo sapiens
  misc_RNA (1)...(19): siRNA sense strand
agaaggaaucaacacagaa

SEQ ID NO: 238271 - RNA, 19 nt, Homo sapiens
  misc_RNA (1)...(19): siRNA sense strand
agaacggcaucgugagaca

SEQ ID NO: 238272 - RNA, 19 nt, Homo sapiens
  misc_RNA (1)...(19): siRNA sense strand
agagaacggcaucgugaga

SEQ ID NO: 238273 - RNA, 19 nt, Homo sapiens
  misc_RNA (1)...(19): siRNA sense strand
gacauuacaggaggccaaa

SEQ ID NO: 238274 - RNA, 19 nt, Homo sapiens
  misc_RNA (1)...(19): siRNA sense strand
ggccaugagcgaauacaca

SEQ ID NO: 238275 - RNA, 19 nt, Homo sapiens
  misc_RNA (1)...(19): siRNA sense strand
gcagcaggaggaagacaca

SEQ ID NO: 238276 - RNA, 19 nt, Homo sapiens
  misc_RNA (1)...(19): siRNA sense strand
gggagaggaaggucaacug

SEQ ID NO: 238277 - RNA, 19 nt, Homo sapiens
  misc_RNA (1)...(19): siRNA sense strand
ggugcgggacacaucgaua

SEQ ID NO: 238278 - RNA, 19 nt, Homo sapiens
  misc_RNA (1)...(19): siRNA sense strand
gauggacugggcuguguuc

SEQ ID NO: 238279 - RNA, 19 nt, Homo sapiens
  misc_RNA (1)...(19): siRNA sense strand
aacucaaccuggcuuccua

SEQ ID NO: 238280 - RNA, 19 nt, Homo sapiens
  misc_RNA (1)...(19): siRNA sense strand
gucugccacuuccggagua

SEQ ID NO: 238281 - RNA, 19 nt, Homo sapiens
  misc_RNA (1)...(19): siRNA sense strand
gaccaagagcaucaaagag

SEQ ID NO: 238282 - RNA, 19 nt, Homo sapiens
  misc_RNA (1)...(19): siRNA sense strand
caacacccacuggcgaugu

SEQ ID NO: 238283 - RNA, 19 nt, Homo sapiens
  misc_RNA (1)...(19): siRNA sense strand
gaacaaagcugguuuacag

SEQ ID NO: 238284 - RNA, 19 nt, Homo sapiens
  misc_RNA (1)...(19): siRNA sense strand
gaaaugaagucuguaaaca

SEQ ID NO: 238285 - RNA, 19 nt, Homo sapiens
  misc_RNA (1)...(19): siRNA sense strand
caaccaauccuuucuuaua

SEQ ID NO: 238286 - RNA, 19 nt, Homo sapiens
  misc_RNA (1)...(19): siRNA sense strand
gaugauagaucuucagcaa

SEQ ID NO: 238287 - RNA, 19 nt, Homo sapiens
  misc_RNA (1)...(19): siRNA sense strand
ugauagaucuucagcaauu

SEQ ID NO: 238288 - RNA, 19 nt, Homo sapiens
  misc_RNA (1)...(19): siRNA sense strand
caacacugcacuuaaauaa

SEQ ID NO: 238289 - RNA, 19 nt, Homo sapiens
  misc_RNA (1)...(19): siRNA sense strand
gagcuacgccuuccacaaa

SEQ ID NO: 238290 - RNA, 19 nt, Homo sapiens
  misc_RNA (1)...(19): siRNA sense strand
caacagcuacagccaauuu

SEQ ID NO: 238291 - RNA, 19 nt, Homo sapiens
  misc_RNA (1)...(19): siRNA sense strand
caccaacacugcacuuaaa

SEQ ID NO: 238292 - RNA, 19 nt, Homo sapiens
  misc_RNA (1)...(19): siRNA sense strand
gcagccaccuccaguaaug

SEQ ID NO: 238293 - RNA, 19 nt, Homo sapiens
  misc_RNA (1)...(19): siRNA sense strand
gaagcaauuugaccuuuua

SEQ ID NO: 238294 - RNA, 19 nt, Homo sapiens
  misc_RNA (1)...(19): siRNA sense strand
agacaaauaugcagcacuu

SEQ ID NO: 238295 - RNA, 19 nt, Homo sapiens
  misc_RNA (1)...(19): siRNA sense strand
gcaccaacacugcacuuaa

SEQ ID NO: 238296 - RNA, 19 nt, Homo sapiens
  misc_RNA (1)...(19): siRNA sense strand
uggaagugcugcaucagua

SEQ ID NO: 238297 - RNA, 19 nt, Homo sapiens
  misc_RNA (1)...(19): siRNA sense strand
uaagugaucucggcucaga

SEQ ID NO: 238298 - RNA, 19 nt, Homo sapiens
  misc_RNA (1)...(19): siRNA sense strand
aaacagauuuggcuaggau

SEQ ID NO: 238299 - RNA, 19 nt, Homo sapiens
  misc_RNA (1)...(19): siRNA sense strand
ucacacaacaggaaauuga

SEQ ID NO: 238300 - RNA, 19 nt, Homo sapiens
  misc_RNA (1)...(19): siRNA sense strand
ucaaaccacugaaaucucu

SEQ ID NO: 238301 - RNA, 19 nt, Homo sapiens
  misc_RNA (1)...(19): siRNA sense strand
gcucaucaaccaauccuuu

SEQ ID NO: 238302 - RNA, 19 nt, Homo sapiens
  misc_RNA (1)...(19): siRNA sense strand
aaacuuugaugcauuugga

SEQ ID NO: 238303 - RNA, 19 nt, Homo sapiens
  misc_RNA (1)...(19): siRNA sense strand
caaacaaagccaguaguaa

SEQ ID NO: 238304 - RNA, 19 nt, Homo sapiens
  misc_RNA (1)...(19): siRNA sense strand
gcaagucacucuccuuuuc

SEQ ID NO: 238305 - RNA, 19 nt, Homo sapiens
  misc_RNA (1)...(19): siRNA sense strand
gaagaagcaauuugaccuu

SEQ ID NO: 238306 - RNA, 19 nt, Homo sapiens
  misc_RNA (1)...(19): siRNA sense strand
acaggaagcucaucaacca

SEQ ID NO: 238307 - RNA, 19 nt, Homo sapiens
  misc_RNA (1)...(19): siRNA sense strand
ccacacagggugaaaucua

SEQ ID NO: 238308 - RNA, 19 nt, Homo sapiens
  misc_RNA (1)...(19): siRNA sense strand
ggaagugcugcaucaguaa

SEQ ID NO: 238309 - RNA, 19 nt, Homo sapiens
  misc_RNA (1)...(19): siRNA sense strand
ucuagugguucgaguaauu

SEQ ID NO: 238310 - RNA, 19 nt, Homo sapiens
  misc_RNA (1)...(19): siRNA sense strand
gacacagccugcuucauca

SEQ ID NO: 238311 - RNA, 19 nt, Homo sapiens
  misc_RNA (1)...(19): siRNA sense strand
ggacaaacaaagccaguag

SEQ ID NO: 238312 - RNA, 19 nt, Homo sapiens
  misc_RNA (1)...(19): siRNA sense strand
aaaucuaucuccaugacaa

SEQ ID NO: 238313 - RNA, 19 nt, Homo sapiens
  misc_RNA (1)...(19): siRNA sense strand
gcuggaguaucuaguaauc

SEQ ID NO: 238314 - RNA, 19 nt, Homo sapiens
  misc_RNA (1)...(19): siRNA sense strand
acaaacaaagccaguagua

SEQ ID NO: 238315 - RNA, 19 nt, Homo sapiens
  misc_RNA (1)...(19): siRNA sense strand
gcacagacacagccugcuu

SEQ ID NO: 238316 - RNA, 19 nt, Homo sapiens
  misc_RNA (1)...(19): siRNA sense strand
ggaaaugaagucuguaaac

SEQ ID NO: 238317 - RNA, 19 nt, Homo sapiens
  misc_RNA (1)...(19): siRNA sense strand
ugacaacauucacacaaca

SEQ ID NO: 238318 - RNA, 19 nt, Homo sapiens
  misc_RNA (1)...(19): siRNA sense strand
caacgaacaaagcugguuu

SEQ ID NO: 238319 - RNA, 19 nt, Homo sapiens
  misc_RNA (1)...(19): siRNA sense strand
ccaacacugcacuuaaaua

SEQ ID NO: 238320 - RNA, 19 nt, Homo sapiens
  misc_RNA (1)...(19): siRNA sense strand
uggcuaggauuauuugaug

SEQ ID NO: 238321 - RNA, 19 nt, Homo sapiens
  misc_RNA (1)...(19): siRNA sense strand
gaagugcugcaucaguaaa

SEQ ID NO: 238322 - RNA, 19 nt, Homo sapiens
  misc_RNA (1)...(19): siRNA sense strand
gagcaugcccacaggauuc

SEQ ID NO: 238323 - RNA, 19 nt, Homo sapiens
  misc_RNA (1)...(19): siRNA sense strand
gcuccucagucaacagcua

SEQ ID NO: 238324 - RNA, 19 nt, Homo sapiens
  misc_RNA (1)...(19): siRNA sense strand
ucaagugcaucuucagaca

SEQ ID NO: 238325 - RNA, 19 nt, Homo sapiens
  misc_RNA (1)...(19): siRNA sense strand
cagcaagucacucuccuuu

SEQ ID NO: 238326 - RNA, 19 nt, Homo sapiens
  misc_RNA (1)...(19): siRNA sense strand
aagaagcaauuugaccuuu

SEQ ID NO: 238327 - RNA, 19 nt, Homo sapiens
  misc_RNA (1)...(19): siRNA sense strand
gcaccaacaggacaauuuc

SEQ ID NO: 238328 - RNA, 19 nt, Homo sapiens
  misc_RNA (1)...(19): siRNA sense strand
gcacauuucaacagucaug

SEQ ID NO: 238329 - RNA, 19 nt, Homo sapiens
  misc_RNA (1)...(19): siRNA sense strand
uugcuaacuuugcacauuu

SEQ ID NO: 238330 - RNA, 19 nt, Homo sapiens
  misc_RNA (1)...(19): siRNA sense strand
gaucucggcucagacaucu

SEQ ID NO: 238331 - RNA, 19 nt, Homo sapiens
  misc_RNA (1)...(19): siRNA sense strand
aaccaauccuuucuuauag

SEQ ID NO: 238332 - RNA, 19 nt, Homo sapiens
  misc_RNA (1)...(19): siRNA sense strand
ggaagcucaucaaccaauc

SEQ ID NO: 238333 - RNA, 19 nt, Homo sapiens
  misc_RNA (1)...(19): siRNA sense strand
aaacaaagccaguaguaac

SEQ ID NO: 238334 - RNA, 19 nt, Homo sapiens
  misc_RNA (1)...(19): siRNA sense strand
caagugugccugcuccauu

SEQ ID NO: 238335 - RNA, 19 nt, Homo sapiens
  misc_RNA (1)...(19): siRNA sense strand
agacacagccugcuucauc

SEQ ID NO: 238336 - RNA, 19 nt, Homo sapiens
  misc_RNA (1)...(19): siRNA sense strand
caucagcuguuaguaaagu

SEQ ID NO: 238337 - RNA, 19 nt, Homo sapiens
  misc_RNA (1)...(19): siRNA sense strand
gaaaagaaaagaugguaug

SEQ ID NO: 238338 - RNA, 19 nt, Homo sapiens
  misc_RNA (1)...(19): siRNA sense strand
cacacagggugaaaucuau

SEQ ID NO: 238339 - RNA, 19 nt, Homo sapiens
  misc_RNA (1)...(19): siRNA sense strand
gcagaacuagacagcguuu

SEQ ID NO: 238340 - RNA, 19 nt, Homo sapiens
  misc_RNA (1)...(19): siRNA sense strand
agcaucagcuguuaguaaa

SEQ ID NO: 238341 - RNA, 19 nt, Homo sapiens
  misc_RNA (1)...(19): siRNA sense strand
uuuggaaccuucaauacuu

SEQ ID NO: 238342 - RNA, 19 nt, Homo sapiens
  misc_RNA (1)...(19): siRNA sense strand
gaggagaagcaccugaaga

SEQ ID NO: 238343 - RNA, 19 nt, Homo sapiens
  misc_RNA (1)...(19): siRNA sense strand
gaguaucuaguaauccuuu

SEQ ID NO: 238344 - RNA, 19 nt, Homo sapiens
  misc_RNA (1)...(19): siRNA sense strand
gucaacagcuacagccaau

SEQ ID NO: 238345 - RNA, 19 nt, Homo sapiens
  misc_RNA (1)...(19): siRNA sense strand
ugaaaucuaucuccaugac

SEQ ID NO: 238346 - RNA, 19 nt, Homo sapiens
  misc_RNA (1)...(19): siRNA sense strand
aagugugccugcuccauuu

SEQ ID NO: 238347 - RNA, 19 nt, Homo sapiens
  misc_RNA (1)...(19): siRNA sense strand
uuaaauaagggcacaccua

SEQ ID NO: 238348 - RNA, 19 nt, Homo sapiens
  misc_RNA (1)...(19): siRNA sense strand
ccaaagucguggcaucagu

SEQ ID NO: 238349 - RNA, 19 nt, Homo sapiens
  misc_RNA (1)...(19): siRNA sense strand
gauagaucuucagcaauuc

SEQ ID NO: 238350 - RNA, 19 nt, Homo sapiens
  misc_RNA (1)...(19): siRNA sense strand
ggaagcaggaggagaagca

SEQ ID NO: 238351 - RNA, 19 nt, Homo sapiens
  misc_RNA (1)...(19): siRNA sense strand
acauggaaaugaagucugu

SEQ ID NO: 238352 - RNA, 19 nt, Homo sapiens
  misc_RNA (1)...(19): siRNA sense strand
ccacugaaaucucuuuuag

SEQ ID NO: 238353 - RNA, 19 nt, Homo sapiens
  misc_RNA (1)...(19): siRNA sense strand
caaagucguggcaucaguu

SEQ ID NO: 238354 - RNA, 19 nt, Homo sapiens
  misc_RNA (1)...(19): siRNA sense strand
gagcaacagcggcaaccuu

SEQ ID NO: 238355 - RNA, 19 nt, Homo sapiens
  misc_RNA (1)...(19): siRNA sense strand
ggucaaaccacugaaaucu

SEQ ID NO: 238356 - RNA, 19 nt, Homo sapiens
  misc_RNA (1)...(19): siRNA sense strand
ggcagcagcaggagaagaa

SEQ ID NO: 238357 - RNA, 19 nt, Homo sapiens
  misc_RNA (1)...(19): siRNA sense strand
caacagcggcaaccuuugg

SEQ ID NO: 238358 - RNA, 19 nt, Homo sapiens
  misc_RNA (1)...(19): siRNA sense strand
ucagucaagugcaucuuca

SEQ ID NO: 238359 - RNA, 19 nt, Homo sapiens
  misc_RNA (1)...(19): siRNA sense strand
ggagaagcaccugaagaug

SEQ ID NO: 238360 - RNA, 19 nt, Homo sapiens
  misc_RNA (1)...(19): siRNA sense strand
aucaaccaauccuuucuua

SEQ ID NO: 238361 - RNA, 19 nt, Homo sapiens
  misc_RNA (1)...(19): siRNA sense strand
agauuuggcuaggauuauu

SEQ ID NO: 238362 - RNA, 19 nt, Homo sapiens
  misc_RNA (1)...(19): siRNA sense strand
caaagcugguuuacagacu

SEQ ID NO: 238363 - RNA, 19 nt, Homo sapiens
  misc_RNA (1)...(19): siRNA sense strand
caucaguucaugcaucuau

SEQ ID NO: 238364 - RNA, 19 nt, Homo sapiens
  misc_RNA (1)...(19): siRNA sense strand
cugcuggaguaucuaguaa

SEQ ID NO: 238365 - RNA, 19 nt, Homo sapiens
  misc_RNA (1)...(19): siRNA sense strand
gcugcuggaguaucuagua

SEQ ID NO: 238366 - RNA, 19 nt, Homo sapiens
  misc_RNA (1)...(19): siRNA sense strand
gauuuggcuaggauuauuu

SEQ ID NO: 238367 - RNA, 19 nt, Homo sapiens
  misc_RNA (1)...(19): siRNA sense strand
uuuacagacugcagacaaa

SEQ ID NO: 238368 - RNA, 19 nt, Homo sapiens
  misc_RNA (1)...(19): siRNA sense strand
gcaggagaagaagcaauuu

SEQ ID NO: 238369 - RNA, 19 nt, Homo sapiens
  misc_RNA (1)...(19): siRNA sense strand
acagauuuggcuaggauua

SEQ ID NO: 238370 - RNA, 19 nt, Homo sapiens
  misc_RNA (1)...(19): siRNA sense strand
ucaguucaugcaucuauuu

SEQ ID NO: 238371 - RNA, 19 nt, Homo sapiens
  misc_RNA (1)...(19): siRNA sense strand
gaucagggaaguggcuuug

SEQ ID NO: 238372 - RNA, 19 nt, Homo sapiens
  misc_RNA (1)...(19): siRNA sense strand
gcauuuggacagucuagug

SEQ ID NO: 238373 - RNA, 19 nt, Homo sapiens
  misc_RNA (1)...(19): siRNA sense strand
ggucggcuccuucgugugu

SEQ ID NO: 238374 - RNA, 19 nt, Homo sapiens
  misc_RNA (1)...(19): siRNA sense strand
gaggucaaaccacugaaau

SEQ ID NO: 238375 - RNA, 19 nt, Homo sapiens
  misc_RNA (1)...(19): siRNA sense strand
guucaugcaucuauuucag

SEQ ID NO: 238376 - RNA, 19 nt, Homo sapiens
  misc_RNA (1)...(19): siRNA sense strand
caaacccauuucagaccaa

SEQ ID NO: 238377 - RNA, 19 nt, Homo sapiens
  misc_RNA (1)...(19): siRNA sense strand
ggagcuacgccuuccacaa

SEQ ID NO: 238378 - RNA, 19 nt, Homo sapiens
  misc_RNA (1)...(19): siRNA sense strand
gugcaucuucagacaagua

SEQ ID NO: 238379 - RNA, 19 nt, Homo sapiens
  misc_RNA (1)...(19): siRNA sense strand
ccaccuacguuaacaugac

SEQ ID NO: 238380 - RNA, 19 nt, Homo sapiens
  misc_RNA (1)...(19): siRNA sense strand
uaaacagauuuggcuagga

SEQ ID NO: 238381 - RNA, 19 nt, Homo sapiens
  misc_RNA (1)...(19): siRNA sense strand
gcagcuuucccucaacaga

SEQ ID NO: 238382 - RNA, 19 nt, Homo sapiens
  misc_RNA (1)...(19): siRNA sense strand
cuucagcaauuccagacuu

SEQ ID NO: 238383 - RNA, 19 nt, Homo sapiens
  misc_RNA (1)...(19): siRNA sense strand
ggaaggaggugucagaauu

SEQ ID NO: 238384 - RNA, 19 nt, Homo sapiens
  misc_RNA (1)...(19): siRNA sense strand
gaaagauuguccaguuuau

SEQ ID NO: 238385 - RNA, 19 nt, Homo sapiens
  misc_RNA (1)...(19): siRNA sense strand
agaaagagaugguccugua

SEQ ID NO: 238386 - RNA, 19 nt, Homo sapiens
  misc_RNA (1)...(19): siRNA sense strand
gcacaacagcaacaaguua

SEQ ID NO: 238387 - RNA, 19 nt, Homo sapiens
  misc_RNA (1)...(19): siRNA sense strand
gaaggaggugucagaauua

SEQ ID NO: 238388 - RNA, 19 nt, Homo sapiens
  misc_RNA (1)...(19): siRNA sense strand
ggaagacaauuuagcauag

SEQ ID NO: 238389 - RNA, 19 nt, Homo sapiens
  misc_RNA (1)...(19): siRNA sense strand
ucaaagaaccaacugauaa

SEQ ID NO: 238390 - RNA, 19 nt, Homo sapiens
  misc_RNA (1)...(19): siRNA sense strand
gggagaggauuucagauga

SEQ ID NO: 238391 - RNA, 19 nt, Homo sapiens
  misc_RNA (1)...(19): siRNA sense strand
ccaaauauuucaagcacaa

SEQ ID NO: 238392 - RNA, 19 nt, Homo sapiens
  misc_RNA (1)...(19): siRNA sense strand
ugaggcaacugaauaugua

SEQ ID NO: 238393 - RNA, 19 nt, Homo sapiens
  misc_RNA (1)...(19): siRNA sense strand
uaucgacucuggaauugua

SEQ ID NO: 238394 - RNA, 19 nt, Homo sapiens
  misc_RNA (1)...(19): siRNA sense strand
ccacagauuacaucaauaa

SEQ ID NO: 238395 - RNA, 19 nt, Homo sapiens
  misc_RNA (1)...(19): siRNA sense strand
gaaccuguuucagcacaua

SEQ ID NO: 238396 - RNA, 19 nt, Homo sapiens
  misc_RNA (1)...(19): siRNA sense strand
gaagacaauuuagcauaga

SEQ ID NO: 238397 - RNA, 19 nt, Homo sapiens
  misc_RNA (1)...(19): siRNA sense strand
guccaggcuuucugaauua

SEQ ID NO: 238398 - RNA, 19 nt, Homo sapiens
  misc_RNA (1)...(19): siRNA sense strand
uggauuaucuugacaguau

SEQ ID NO: 238399 - RNA, 19 nt, Homo sapiens
  misc_RNA (1)...(19): siRNA sense strand
agguugagcuguuggauua

SEQ ID NO: 238400 - RNA, 19 nt, Homo sapiens
  misc_RNA (1)...(19): siRNA sense strand
gagaaugagucccuuugga

SEQ ID NO: 238401 - RNA, 19 nt, Homo sapiens
  misc_RNA (1)...(19): siRNA sense strand
gagcaaagcaugcacaaca

SEQ ID NO: 238402 - RNA, 19 nt, Homo sapiens
  misc_RNA (1)...(19): siRNA sense strand
gagaugguccuguagaauu

SEQ ID NO: 238403 - RNA, 19 nt, Homo sapiens
  misc_RNA (1)...(19): siRNA sense strand
gcucagaagguucagauaa

SEQ ID NO: 238404 - RNA, 19 nt, Homo sapiens
  misc_RNA (1)...(19): siRNA sense strand
gcagaugaaucccacagau

SEQ ID NO: 238405 - RNA, 19 nt, Homo sapiens
  misc_RNA (1)...(19): siRNA sense strand
cgaaagauuguccaguuua

SEQ ID NO: 238406 - RNA, 19 nt, Homo sapiens
  misc_RNA (1)...(19): siRNA sense strand
gaagauccagugaccauga

SEQ ID NO: 238407 - RNA, 19 nt, Homo sapiens
  misc_RNA (1)...(19): siRNA sense strand
gaacccugcuucuucuguu

SEQ ID NO: 238408 - RNA, 19 nt, Homo sapiens
  misc_RNA (1)...(19): siRNA sense strand
gauuagaaacuaccaagaa

SEQ ID NO: 238409 - RNA, 19 nt, Homo sapiens
  misc_RNA (1)...(19): siRNA sense strand
gaaacuaccaagaacaaug

SEQ ID NO: 238410 - RNA, 19 nt, Homo sapiens
  misc_RNA (1)...(19): siRNA sense strand
gcaacaaguuauucgaaag

SEQ ID NO: 238411 - RNA, 19 nt, Homo sapiens
  misc_RNA (1)...(19): siRNA sense strand
guacauaucgacucuggaa

SEQ ID NO: 238412 - RNA, 19 nt, Homo sapiens
  misc_RNA (1)...(19): siRNA sense strand
acaauaauauggcaagcuu

SEQ ID NO: 238413 - RNA, 19 nt, Homo sapiens
  misc_RNA (1)...(19): siRNA sense strand
cauagaaguugaugagcuu

SEQ ID NO: 238414 - RNA, 19 nt, Homo sapiens
  misc_RNA (1)...(19): siRNA sense strand
gaaugaaccagccagagaa

SEQ ID NO: 238415 - RNA, 19 nt, Homo sapiens
  misc_RNA (1)...(19): siRNA sense strand
gaagaaaauaucccaguua

SEQ ID NO: 238416 - RNA, 19 nt, Homo sapiens
  misc_RNA (1)...(19): siRNA sense strand
uaaaaggccucuacuucua

SEQ ID NO: 238417 - RNA, 19 nt, Homo sapiens
  misc_RNA (1)...(19): siRNA sense strand
caaguuauucgaaagauug

SEQ ID NO: 238418 - RNA, 19 nt, Homo sapiens
  misc_RNA (1)...(19): siRNA sense strand
guucgaacgugccggcuuu

SEQ ID NO: 238419 - RNA, 19 nt, Homo sapiens
  misc_RNA (1)...(19): siRNA sense strand
gaaacuaaugaggauguua

SEQ ID NO: 238420 - RNA, 19 nt, Homo sapiens
  misc_RNA (1)...(19): siRNA sense strand
caacaaguuauucgaaaga

SEQ ID NO: 238421 - RNA, 19 nt, Homo sapiens
  misc_RNA (1)...(19): siRNA sense strand
gauaaacccauagaaguug

SEQ ID NO: 238422 - RNA, 19 nt, Homo sapiens
  misc_RNA (1)...(19): siRNA sense strand
gggaaagguugagcuguug

SEQ ID NO: 238423 - RNA, 19 nt, Homo sapiens
  misc_RNA (1)...(19): siRNA sense strand
caaagaaccaacugauaau

SEQ ID NO: 238424 - RNA, 19 nt, Homo sapiens
  misc_RNA (1)...(19): siRNA sense strand
caaaauaaccaacuuguga

SEQ ID NO: 238425 - RNA, 19 nt, Homo sapiens
  misc_RNA (1)...(19): siRNA sense strand
uugaugagcuucuggauag

SEQ ID NO: 238426 - RNA, 19 nt, Homo sapiens
  misc_RNA (1)...(19): siRNA sense strand
cauaucgacucuggaauug

SEQ ID NO: 238427 - RNA, 19 nt, Homo sapiens
  misc_RNA (1)...(19): siRNA sense strand
gcuaucaggaagacaauuu

SEQ ID NO: 238428 - RNA, 19 nt, Homo sapiens
  misc_RNA (1)...(19): siRNA sense strand
gccagagaaucccuaaguu

SEQ ID NO: 238429 - RNA, 19 nt, Homo sapiens
  misc_RNA (1)...(19): siRNA sense strand
caagggagaggauuucaga

SEQ ID NO: 238430 - RNA, 19 nt, Homo sapiens
  misc_RNA (1)...(19): siRNA sense strand
ucgaaagauuguccaguuu

SEQ ID NO: 238431 - RNA, 19 nt, Homo sapiens
  misc_RNA (1)...(19): siRNA sense strand
agaugguccuguagaauuu

SEQ ID NO: 238432 - RNA, 19 nt, Homo sapiens
  misc_RNA (1)...(19): siRNA sense strand
ggaauuguaaagcaagaaa

SEQ ID NO: 238433 - RNA, 19 nt, Homo sapiens
  misc_RNA (1)...(19): siRNA sense strand
cucagaagguucagauaaa

SEQ ID NO: 238434 - RNA, 19 nt, Homo sapiens
  misc_RNA (1)...(19): siRNA sense strand
gccauugacugaagcugaa

SEQ ID NO: 238435 - RNA, 19 nt, Homo sapiens
  misc_RNA (1)...(19): siRNA sense strand
gcacauagucaaagaacca

SEQ ID NO: 238436 - RNA, 19 nt, Homo sapiens
  misc_RNA (1)...(19): siRNA sense strand
cagcagcccucucaugucu

SEQ ID NO: 238437 - RNA, 19 nt, Homo sapiens
  misc_RNA (1)...(19): siRNA sense strand
guagauaaacccauagaag

SEQ ID NO: 238438 - RNA, 19 nt, Homo sapiens
  misc_RNA (1)...(19): siRNA sense strand
caacugaauauguaugguu

SEQ ID NO: 238439 - RNA, 19 nt, Homo sapiens
  misc_RNA (1)...(19): siRNA sense strand
ucugaucccuccaacugua

SEQ ID NO: 238440 - RNA, 19 nt, Homo sapiens
  misc_RNA (1)...(19): siRNA sense strand
uagaauuucagcauccuua

SEQ ID NO: 238441 - RNA, 19 nt, Homo sapiens
  misc_RNA (1)...(19): siRNA sense strand
ccagaaccaacccaaagua

SEQ ID NO: 238442 - RNA, 19 nt, Homo sapiens
  misc_RNA (1)...(19): siRNA sense strand
caauguaguucagccaguu

SEQ ID NO: 238443 - RNA, 19 nt, Homo sapiens
  misc_RNA (1)...(19): siRNA sense strand
gcagcccucucaugucuag

SEQ ID NO: 238444 - RNA, 19 nt, Homo sapiens
  misc_RNA (1)...(19): siRNA sense strand
cguugaagaugacaaugaa

SEQ ID NO: 238445 - RNA, 19 nt, Homo sapiens
  misc_RNA (1)...(19): siRNA sense strand
ccaguacccugauauuguc

SEQ ID NO: 238446 - RNA, 19 nt, Homo sapiens
  misc_RNA (1)...(19): siRNA sense strand
ucauaaaguuccacacagu

SEQ ID NO: 238447 - RNA, 19 nt, Homo sapiens
  misc_RNA (1)...(19): siRNA sense strand
aguccaggcuuucugaauu

SEQ ID NO: 238448 - RNA, 19 nt, Homo sapiens
  misc_RNA (1)...(19): siRNA sense strand
gaaccaacccaaaguaagc

SEQ ID NO: 238449 - RNA, 19 nt, Homo sapiens
  misc_RNA (1)...(19): siRNA sense strand
gaagaugacaaugaagaug

SEQ ID NO: 238450 - RNA, 19 nt, Homo sapiens
  misc_RNA (1)...(19): siRNA sense strand
gucaaagaaccaacugaua

SEQ ID NO: 238451 - RNA, 19 nt, Homo sapiens
  misc_RNA (1)...(19): siRNA sense strand
ucagcauccuuacuucaaa

SEQ ID NO: 238452 - RNA, 19 nt, Homo sapiens
  misc_RNA (1)...(19): siRNA sense strand
guacaacagcaucaucaga

SEQ ID NO: 238453 - RNA, 19 nt, Homo sapiens
  misc_RNA (1)...(19): siRNA sense strand
ugggaaagguugagcuguu

SEQ ID NO: 238454 - RNA, 19 nt, Homo sapiens
  misc_RNA (1)...(19): siRNA sense strand
cagagaaucccuaaguuca

SEQ ID NO: 238455 - RNA, 19 nt, Homo sapiens
  misc_RNA (1)...(19): siRNA sense strand
gagaggauuucagaugaca

SEQ ID NO: 238456 - RNA, 19 nt, Homo sapiens
  misc_RNA (1)...(19): siRNA sense strand
cauaaaguuccacacagua

SEQ ID NO: 238457 - RNA, 19 nt, Homo sapiens
  misc_RNA (1)...(19): siRNA sense strand
ccaguuuauuguuacauug

SEQ ID NO: 238458 - RNA, 19 nt, Homo sapiens
  misc_RNA (1)...(19): siRNA sense strand
guaaaguaguacauaucga

SEQ ID NO: 238459 - RNA, 19 nt, Homo sapiens
  misc_RNA (1)...(19): siRNA sense strand
cagaaccaacccaaaguaa

SEQ ID NO: 238460 - RNA, 19 nt, Homo sapiens
  misc_RNA (1)...(19): siRNA sense strand
ggacuuccaggccaugcua

SEQ ID NO: 238461 - RNA, 19 nt, Homo sapiens
  misc_RNA (1)...(19): siRNA sense strand
caaugaagaugaguaugca

SEQ ID NO: 238462 - RNA, 19 nt, Homo sapiens
  misc_RNA (1)...(19): siRNA sense strand
caacagcaacaaguuauuc

SEQ ID NO: 238463 - RNA, 19 nt, Homo sapiens
  misc_RNA (1)...(19): siRNA sense strand
gcaccucuggauagugaua

SEQ ID NO: 238464 - RNA, 19 nt, Homo sapiens
  misc_RNA (1)...(19): siRNA sense strand
gccaguacccugauauugu

SEQ ID NO: 238465 - RNA, 19 nt, Homo sapiens
  misc_RNA (1)...(19): siRNA sense strand
augaggauguuauaucuga

SEQ ID NO: 238466 - RNA, 19 nt, Homo sapiens
  misc_RNA (1)...(19): siRNA sense strand
gaaagagaugguccuguag

SEQ ID NO: 238467 - RNA, 19 nt, Homo sapiens
  misc_RNA (1)...(19): siRNA sense strand
agauaaacccauagaaguu

SEQ ID NO: 238468 - RNA, 19 nt, Homo sapiens
  misc_RNA (1)...(19): siRNA sense strand
uagauaaacccauagaagu

SEQ ID NO: 238469 - RNA, 19 nt, Homo sapiens
  misc_RNA (1)...(19): siRNA sense strand
ucccacagauuacaucaau

SEQ ID NO: 238470 - RNA, 19 nt, Homo sapiens
  misc_RNA (1)...(19): siRNA sense strand
ggauuaucuugacaguauu

SEQ ID NO: 238471 - RNA, 19 nt, Homo sapiens
  misc_RNA (1)...(19): siRNA sense strand
aaaggccucuacuucuaaa

SEQ ID NO: 238472 - RNA, 19 nt, Homo sapiens
  misc_RNA (1)...(19): siRNA sense strand
ggaggugucagaauuacga

SEQ ID NO: 238473 - RNA, 19 nt, Homo sapiens
  misc_RNA (1)...(19): siRNA sense strand
aagagaugguccuguagaa

SEQ ID NO: 238474 - RNA, 19 nt, Homo sapiens
  misc_RNA (1)...(19): siRNA sense strand
ggucuuggaugagcaacga

SEQ ID NO: 238475 - RNA, 19 nt, Homo sapiens
  misc_RNA (1)...(19): siRNA sense strand
gaacaggcgaguacaacag

SEQ ID NO: 238476 - RNA, 19 nt, Homo sapiens
  misc_RNA (1)...(19): siRNA sense strand
gaagagggaagaaaaucua

SEQ ID NO: 238477 - RNA, 19 nt, Homo sapiens
  misc_RNA (1)...(19): siRNA sense strand
ccagagaaucccuaaguuc

SEQ ID NO: 238478 - RNA, 19 nt, Homo sapiens
  misc_RNA (1)...(19): siRNA sense strand
gauaugccacuuuuagaua

SEQ ID NO: 238479 - RNA, 19 nt, Homo sapiens
  misc_RNA (1)...(19): siRNA sense strand
cuaaauccaaaccagauaa

SEQ ID NO: 238480 - RNA, 19 nt, Homo sapiens
  misc_RNA (1)...(19): siRNA sense strand
ggaagaaaaucuaaaucca

SEQ ID NO: 238481 - RNA, 19 nt, Homo sapiens
  misc_RNA (1)...(19): siRNA sense strand
ggaggaaacccacacuaac

SEQ ID NO: 238482 - RNA, 19 nt, Homo sapiens
  misc_RNA (1)...(19): siRNA sense strand
aguauugacugcaguuuag

SEQ ID NO: 238483 - RNA, 19 nt, Homo sapiens
  misc_RNA (1)...(19): siRNA sense strand
acaaaggccuuaugcaaua

SEQ ID NO: 238484 - RNA, 19 nt, Homo sapiens
  misc_RNA (1)...(19): siRNA sense strand
aaaccuagauggagaauug

SEQ ID NO: 238485 - RNA, 19 nt, Homo sapiens
  misc_RNA (1)...(19): siRNA sense strand
gaagugcacauagauauua

SEQ ID NO: 238486 - RNA, 19 nt, Homo sapiens
  misc_RNA (1)...(19): siRNA sense strand
aagcuuaacuucauccuuu

SEQ ID NO: 238487 - RNA, 19 nt, Homo sapiens
  misc_RNA (1)...(19): siRNA sense strand
gaacuucuucaacgaauuu

SEQ ID NO: 238488 - RNA, 19 nt, Homo sapiens
  misc_RNA (1)...(19): siRNA sense strand
auaacaagauggugcauuu

SEQ ID NO: 238489 - RNA, 19 nt, Homo sapiens
  misc_RNA (1)...(19): siRNA sense strand
gaaauuguggaaggacuua

SEQ ID NO: 238490 - RNA, 19 nt, Homo sapiens
  misc_RNA (1)...(19): siRNA sense strand
ccacaaaggccuuaugcaa

SEQ ID NO: 238491 - RNA, 19 nt, Homo sapiens
  misc_RNA (1)...(19): siRNA sense strand
gaaacugaauuaguaugug

SEQ ID NO: 238492 - RNA, 19 nt, Homo sapiens
  misc_RNA (1)...(19): siRNA sense strand
gugacaagcuggcuaaugg

SEQ ID NO: 238493 - RNA, 19 nt, Homo sapiens
  misc_RNA (1)...(19): siRNA sense strand
caucagcaaucaccuuguu

SEQ ID NO: 238494 - RNA, 19 nt, Homo sapiens
  misc_RNA (1)...(19): siRNA sense strand
gagggugucucugcagaaa

SEQ ID NO: 238495 - RNA, 19 nt, Homo sapiens
  misc_RNA (1)...(19): siRNA sense strand
ccguggagcuguuaucuau

SEQ ID NO: 238496 - RNA, 19 nt, Homo sapiens
  misc_RNA (1)...(19): siRNA sense strand
ugaagacuaugaagagugu

SEQ ID NO: 238497 - RNA, 19 nt, Homo sapiens
  misc_RNA (1)...(19): siRNA sense strand
acacgaaucaguaacauga

SEQ ID NO: 238498 - RNA, 19 nt, Homo sapiens
  misc_RNA (1)...(19): siRNA sense strand
acaaguaaaucccacaaag

SEQ ID NO: 238499 - RNA, 19 nt, Homo sapiens
  misc_RNA (1)...(19): siRNA sense strand
cugauaagcuuaacuucau

SEQ ID NO: 238500 - RNA, 19 nt, Homo sapiens
  misc_RNA (1)...(19): siRNA sense strand
ggucccagauccugauguu

SEQ ID NO: 238501 - RNA, 19 nt, Homo sapiens
  misc_RNA (1)...(19): siRNA sense strand
guggagcuguuaucuaugu

SEQ ID NO: 238502 - RNA, 19 nt, Homo sapiens
  misc_RNA (1)...(19): siRNA sense strand
uaugaagaguguuguggaa

SEQ ID NO: 238503 - RNA, 19 nt, Homo sapiens
  misc_RNA (1)...(19): siRNA sense strand
caaaggccuuaugcaauau

SEQ ID NO: 238504 - RNA, 19 nt, Homo sapiens
  misc_RNA (1)...(19): siRNA sense strand
gcuaacaucggaaaacuua

SEQ ID NO: 238505 - RNA, 19 nt, Homo sapiens
  misc_RNA (1)...(19): siRNA sense strand
gcugaagugcacauagaua

SEQ ID NO: 238506 - RNA, 19 nt, Homo sapiens
  misc_RNA (1)...(19): siRNA sense strand
gauccugauguuaguauuu

SEQ ID NO: 238507 - RNA, 19 nt, Homo sapiens
  misc_RNA (1)...(19): siRNA sense strand
uuaaagaucuuggaaaucc

SEQ ID NO: 238508 - RNA, 19 nt, Homo sapiens
  misc_RNA (1)...(19): siRNA sense strand
gagcuguuaucuaugucaa

SEQ ID NO: 238509 - RNA, 19 nt, Homo sapiens
  misc_RNA (1)...(19): siRNA sense strand
guggaaggacuuacaagaa

SEQ ID NO: 238510 - RNA, 19 nt, Homo sapiens
  misc_RNA (1)...(19): siRNA sense strand
uggcugaagugcacauaga

SEQ ID NO: 238511 - RNA, 19 nt, Homo sapiens
  misc_RNA (1)...(19): siRNA sense strand
gggccugucugaaccacuu

SEQ ID NO: 238512 - RNA, 19 nt, Homo sapiens
  misc_RNA (1)...(19): siRNA sense strand
caaacugacuaauaaacac

SEQ ID NO: 238513 - RNA, 19 nt, Homo sapiens
  misc_RNA (1)...(19): siRNA sense strand
acgugucccuucaguauuu

SEQ ID NO: 238514 - RNA, 19 nt, Homo sapiens
  misc_RNA (1)...(19): siRNA sense strand
uuaucuaugucaagcagua

SEQ ID NO: 238515 - RNA, 19 nt, Homo sapiens
  misc_RNA (1)...(19): siRNA sense strand
acagaaacguggaacacau

SEQ ID NO: 238516 - RNA, 19 nt, Homo sapiens
  misc_RNA (1)...(19): siRNA sense strand
cacaaaggccuuaugcaau

SEQ ID NO: 238517 - RNA, 19 nt, Homo sapiens
  misc_RNA (1)...(19): siRNA sense strand
agacgugucccuucaguau

SEQ ID NO: 238518 - RNA, 19 nt, Homo sapiens
  misc_RNA (1)...(19): siRNA sense strand
uaguauguguuacaacuca

SEQ ID NO: 238519 - RNA, 19 nt, Homo sapiens
  misc_RNA (1)...(19): siRNA sense strand
ggaagcuccuacaguuucu

SEQ ID NO: 238520 - RNA, 19 nt, Homo sapiens
  misc_RNA (1)...(19): siRNA sense strand
gcacccaugaggacagaaa

SEQ ID NO: 238521 - RNA, 19 nt, Homo sapiens
  misc_RNA (1)...(19): siRNA sense strand
ggaaauuguggaaggacuu

SEQ ID NO: 238522 - RNA, 19 nt, Homo sapiens
  misc_RNA (1)...(19): siRNA sense strand
uggaaggacuuacaagaac

SEQ ID NO: 238523 - RNA, 19 nt, Homo sapiens
  misc_RNA (1)...(19): siRNA sense strand
gagugagcaugugguguga

SEQ ID NO: 238524 - RNA, 19 nt, Homo sapiens
  misc_RNA (1)...(19): siRNA sense strand
caacaaguaaaucccacaa

SEQ ID NO: 238525 - RNA, 19 nt, Homo sapiens
  misc_RNA (1)...(19): siRNA sense strand
ugaagugcacauagauauu

SEQ ID NO: 238526 - RNA, 19 nt, Homo sapiens
  misc_RNA (1)...(19): siRNA sense strand
cagcaaucaccuuguuauu

SEQ ID NO: 238527 - RNA, 19 nt, Homo sapiens
  misc_RNA (1)...(19): siRNA sense strand
cuugaagacugcccagaau

SEQ ID NO: 238528 - RNA, 19 nt, Homo sapiens
  misc_RNA (1)...(19): siRNA sense strand
uuaacuucauccuuuguga

SEQ ID NO: 238529 - RNA, 19 nt, Homo sapiens
  misc_RNA (1)...(19): siRNA sense strand
gcagaaaacaaugagauuu

SEQ ID NO: 238530 - RNA, 19 nt, Homo sapiens
  misc_RNA (1)...(19): siRNA sense strand
ugaagaguguuguggaaaa

SEQ ID NO: 238531 - RNA, 19 nt, Homo sapiens
  misc_RNA (1)...(19): siRNA sense strand
gaaugccagggcuuugaaa

SEQ ID NO: 238532 - RNA, 19 nt, Homo sapiens
  misc_RNA (1)...(19): siRNA sense strand
caaguaaaucccacaaagg

SEQ ID NO: 238533 - RNA, 19 nt, Homo sapiens
  misc_RNA (1)...(19): siRNA sense strand
agcaguagccgcauuguga

SEQ ID NO: 238534 - RNA, 19 nt, Homo sapiens
  misc_RNA (1)...(19): siRNA sense strand
aaacaucagcaaucaccuu

SEQ ID NO: 238535 - RNA, 19 nt, Homo sapiens
  misc_RNA (1)...(19): siRNA sense strand
ccacuucacacgaaucagu

SEQ ID NO: 238536 - RNA, 19 nt, Homo sapiens
  misc_RNA (1)...(19): siRNA sense strand
uggaacacauggcugaagu

SEQ ID NO: 238537 - RNA, 19 nt, Homo sapiens
  misc_RNA (1)...(19): siRNA sense strand
ggacagaaacguggaacac

SEQ ID NO: 238538 - RNA, 19 nt, Homo sapiens
  misc_RNA (1)...(19): siRNA sense strand
cuaggaaauuguggaagga

SEQ ID NO: 238539 - RNA, 19 nt, Homo sapiens
  misc_RNA (1)...(19): siRNA sense strand
ucacacgaaucaguaacau

SEQ ID NO: 238540 - RNA, 19 nt, Homo sapiens
  misc_RNA (1)...(19): siRNA sense strand
cagaaugccagggcuuuga

SEQ ID NO: 238541 - RNA, 19 nt, Homo sapiens
  misc_RNA (1)...(19): siRNA sense strand
cagaaacguggaacacaug

SEQ ID NO: 238542 - RNA, 19 nt, Homo sapiens
  misc_RNA (1)...(19): siRNA sense strand
ucaaauggagggugucucu

SEQ ID NO: 238543 - RNA, 19 nt, Homo sapiens
  misc_RNA (1)...(19): siRNA sense strand
ggagggugucucugcagaa

SEQ ID NO: 238544 - RNA, 19 nt, Homo sapiens
  misc_RNA (1)...(19): siRNA sense strand
ccauuagccucugaaagca

SEQ ID NO: 238545 - RNA, 19 nt, Homo sapiens
  misc_RNA (1)...(19): siRNA sense strand
gcccugauaagcuuaacuu

SEQ ID NO: 238546 - RNA, 19 nt, Homo sapiens
  misc_RNA (1)...(19): siRNA sense strand
ugaagcaaaccuagaugga

SEQ ID NO: 238547 - RNA, 19 nt, Homo sapiens
  misc_RNA (1)...(19): siRNA sense strand
ccugauaagcuuaacuuca

SEQ ID NO: 238548 - RNA, 19 nt, Homo sapiens
  misc_RNA (1)...(19): siRNA sense strand
gucaagcaguagccgcauu

SEQ ID NO: 238549 - RNA, 19 nt, Homo sapiens
  misc_RNA (1)...(19): siRNA sense strand
uaacaugauagccaagcuu

SEQ ID NO: 238550 - RNA, 19 nt, Homo sapiens
  misc_RNA (1)...(19): siRNA sense strand
gaaccgguggucccagauc

SEQ ID NO: 238551 - RNA, 19 nt, Homo sapiens
  misc_RNA (1)...(19): siRNA sense strand
ccucugaaagcacccauga

SEQ ID NO: 238552 - RNA, 19 nt, Homo sapiens
  misc_RNA (1)...(19): siRNA sense strand
ucagcaaucaccuuguuau

SEQ ID NO: 238553 - RNA, 19 nt, Homo sapiens
  misc_RNA (1)...(19): siRNA sense strand
ucaagcaguagccgcauug

SEQ ID NO: 238554 - RNA, 19 nt, Homo sapiens
  misc_RNA (1)...(19): siRNA sense strand
gauagccaagcuugccaaa

SEQ ID NO: 238555 - RNA, 19 nt, Homo sapiens
  misc_RNA (1)...(19): siRNA sense strand
guuucuugcuggacaacaa

SEQ ID NO: 238556 - RNA, 19 nt, Homo sapiens
  misc_RNA (1)...(19): siRNA sense strand
gaaccacuucacacgaauc

SEQ ID NO: 238557 - RNA, 19 nt, Homo sapiens
  misc_RNA (1)...(19): siRNA sense strand
cugaagugcacauagauau

SEQ ID NO: 238558 - RNA, 19 nt, Homo sapiens
  misc_RNA (1)...(19): siRNA sense strand
gacagaaacguggaacaca

SEQ ID NO: 238559 - RNA, 19 nt, Homo sapiens
  misc_RNA (1)...(19): siRNA sense strand
acaagauggugcauuuuga

SEQ ID NO: 238560 - RNA, 19 nt, Homo sapiens
  misc_RNA (1)...(19): siRNA sense strand
cauguggugugagcuggaa

SEQ ID NO: 238561 - RNA, 19 nt, Homo sapiens
  misc_RNA (1)...(19): siRNA sense strand
gacgugucccuucaguauu

SEQ ID NO: 238562 - RNA, 19 nt, Homo sapiens
  misc_RNA (1)...(19): siRNA sense strand
ugauaagcuuaacuucauc

SEQ ID NO: 238563 - RNA, 19 nt, Homo sapiens
  misc_RNA (1)...(19): siRNA sense strand
ggaacacauggcugaagug

SEQ ID NO: 238564 - RNA, 19 nt, Homo sapiens
  misc_RNA (1)...(19): siRNA sense strand
ucccagauccugauguuag

SEQ ID NO: 238565 - RNA, 19 nt, Homo sapiens
  misc_RNA (1)...(19): siRNA sense strand
guaacaugauagccaagcu

SEQ ID NO: 238566 - RNA, 19 nt, Homo sapiens
  misc_RNA (1)...(19): siRNA sense strand
guauguguuacaacucauu

SEQ ID NO: 238567 - RNA, 19 nt, Homo sapiens
  misc_RNA (1)...(19): siRNA sense strand
ggccuuaugcaauauugug

SEQ ID NO: 238568 - RNA, 19 nt, Homo sapiens
  misc_RNA (1)...(19): siRNA sense strand
gugcacauagauauuagga

SEQ ID NO: 238569 - RNA, 19 nt, Homo sapiens
  misc_RNA (1)...(19): siRNA sense strand
gcaagaguaucgccaauaa

SEQ ID NO: 238570 - RNA, 19 nt, Homo sapiens
  misc_RNA (1)...(19): siRNA sense strand
gcacaaaucucgaaacaac

SEQ ID NO: 238571 - RNA, 19 nt, Homo sapiens
  misc_RNA (1)...(19): siRNA sense strand
ggacauagacauccucauu

SEQ ID NO: 238572 - RNA, 19 nt, Homo sapiens
  misc_RNA (1)...(19): siRNA sense strand
gcacaaggccaacaucaug

SEQ ID NO: 238573 - RNA, 19 nt, Homo sapiens
  misc_RNA (1)...(19): siRNA sense strand
gaacaucuuuucagaacaa

SEQ ID NO: 238574 - RNA, 19 nt, Homo sapiens
  misc_RNA (1)...(19): siRNA sense strand
gaacacagagggcgaguac

SEQ ID NO: 238575 - RNA, 19 nt, Homo sapiens
  misc_RNA (1)...(19): siRNA sense strand
uggcauccauggacaauga

SEQ ID NO: 238576 - RNA, 19 nt, Homo sapiens
  misc_RNA (1)...(19): siRNA sense strand
agaacaugauuguggauaa

SEQ ID NO: 238577 - RNA, 19 nt, Homo sapiens
  misc_RNA (1)...(19): siRNA sense strand
gcacaaggacauagacauc

SEQ ID NO: 238578 - RNA, 19 nt, Homo sapiens
  misc_RNA (1)...(19): siRNA sense strand
gaacaugauuguggauaac

SEQ ID NO: 238579 - RNA, 19 nt, Homo sapiens
  misc_RNA (1)...(19): siRNA sense strand
guggagagccugaagauca

SEQ ID NO: 238580 - RNA, 19 nt, Homo sapiens
  misc_RNA (1)...(19): siRNA sense strand
ccaacgucauccacuguaa

SEQ ID NO: 238581 - RNA, 19 nt, Homo sapiens
  misc_RNA (1)...(19): siRNA sense strand
acauagacauccucauugu

SEQ ID NO: 238582 - RNA, 19 nt, Homo sapiens
  misc_RNA (1)...(19): siRNA sense strand
gacauagacauccucauug

SEQ ID NO: 238583 - RNA, 19 nt, Homo sapiens
  misc_RNA (1)...(19): siRNA sense strand
gagaacaugauuguggaua

SEQ ID NO: 238584 - RNA, 19 nt, Homo sapiens
  misc_RNA (1)...(19): siRNA sense strand
gcacgugaguuccaaugcu

SEQ ID NO: 238585 - RNA, 19 nt, Homo sapiens
  misc_RNA (1)...(19): siRNA sense strand
ucgcacaaaucucgaaaca

SEQ ID NO: 238586 - RNA, 19 nt, Homo sapiens
  misc_RNA (1)...(19): siRNA sense strand
aagaguaucgccaauaaga

SEQ ID NO: 238587 - RNA, 19 nt, Homo sapiens
  misc_RNA (1)...(19): siRNA sense strand
acagcagccuggagcauga

SEQ ID NO: 238588 - RNA, 19 nt, Homo sapiens
  misc_RNA (1)...(19): siRNA sense strand
ggugaugcccaaucucuau

SEQ ID NO: 238589 - RNA, 19 nt, Homo sapiens
  misc_RNA (1)...(19): siRNA sense strand
gccugaagaucaucaccaa

SEQ ID NO: 238590 - RNA, 19 nt, Homo sapiens
  misc_RNA (1)...(19): siRNA sense strand
gaggaacaccggcaagagu

SEQ ID NO: 238591 - RNA, 19 nt, Homo sapiens
  misc_RNA (1)...(19): siRNA sense strand
gaguuccaaugcugaugaa

SEQ ID NO: 238592 - RNA, 19 nt, Homo sapiens
  misc_RNA (1)...(19): siRNA sense strand
ggcaagaguaucgccaaua

SEQ ID NO: 238593 - RNA, 19 nt, Homo sapiens
  misc_RNA (1)...(19): siRNA sense strand
cagaucaccuucgagaaca

SEQ ID NO: 238594 - RNA, 19 nt, Homo sapiens
  misc_RNA (1)...(19): siRNA sense strand
ggcaacaucgucaacaaug

SEQ ID NO: 238595 - RNA, 19 nt, Homo sapiens
  misc_RNA (1)...(19): siRNA sense strand
ggaacaccggcaagaguau

SEQ ID NO: 238596 - RNA, 19 nt, Homo sapiens
  misc_RNA (1)...(19): siRNA sense strand
gaagaggugcacgugaguu

SEQ ID NO: 238597 - RNA, 19 nt, Homo sapiens
  misc_RNA (1)...(19): siRNA sense strand
ccaacuauggccaugugua

SEQ ID NO: 238598 - RNA, 19 nt, Homo sapiens
  misc_RNA (1)...(19): siRNA sense strand
caauuccuccguccgcuaa

SEQ ID NO: 238599 - RNA, 19 nt, Homo sapiens
  misc_RNA (1)...(19): siRNA sense strand
cgaggaacaucuuuucaga

SEQ ID NO: 238600 - RNA, 19 nt, Homo sapiens
  misc_RNA (1)...(19): siRNA sense strand
caacuauggccauguguac

SEQ ID NO: 238601 - RNA, 19 nt, Homo sapiens
  misc_RNA (1)...(19): siRNA sense strand
caaucucuauggcaacauc

SEQ ID NO: 238602 - RNA, 19 nt, Homo sapiens
  misc_RNA (1)...(19): siRNA sense strand
guguaccaguggacuuuga

SEQ ID NO: 238603 - RNA, 19 nt, Homo sapiens
  misc_RNA (1)...(19): siRNA sense strand
ccagcaguuugaugucaug

SEQ ID NO: 238604 - RNA, 19 nt, Homo sapiens
  misc_RNA (1)...(19): siRNA sense strand
gccaagucccugcgcauug

SEQ ID NO: 238605 - RNA, 19 nt, Homo sapiens
  misc_RNA (1)...(19): siRNA sense strand
caacaucgaaaccaaccau

SEQ ID NO: 238606 - RNA, 19 nt, Homo sapiens
  misc_RNA (1)...(19): siRNA sense strand
gaguaucgccaauaagaac

SEQ ID NO: 238607 - RNA, 19 nt, Homo sapiens
  misc_RNA (1)...(19): siRNA sense strand
guuccaaugcugaugaaga

SEQ ID NO: 238608 - RNA, 19 nt, Homo sapiens
  misc_RNA (1)...(19): siRNA sense strand
ggacgucauccgccacauc

SEQ ID NO: 238609 - RNA, 19 nt, Homo sapiens
  misc_RNA (1)...(19): siRNA sense strand
caaggccaacaucaugaaa

SEQ ID NO: 238610 - RNA, 19 nt, Homo sapiens
  misc_RNA (1)...(19): siRNA sense strand
ccaagucccugcgcauugc

SEQ ID NO: 238611 - RNA, 19 nt, Homo sapiens
  misc_RNA (1)...(19): siRNA sense strand
acaucgaaaccaaccauaa

SEQ ID NO: 238612 - RNA, 19 nt, Homo sapiens
  misc_RNA (1)...(19): siRNA sense strand
gaacaccggcaagaguauc

SEQ ID NO: 238613 - RNA, 19 nt, Homo sapiens
  misc_RNA (1)...(19): siRNA sense strand
gccaacgucauccacugua

SEQ ID NO: 238614 - RNA, 19 nt, Homo sapiens
  misc_RNA (1)...(19): siRNA sense strand
ggcacacggugaccaugau

SEQ ID NO: 238615 - RNA, 19 nt, Homo sapiens
  misc_RNA (1)...(19): siRNA sense strand
aggaacaccggcaagagua

SEQ ID NO: 238616 - RNA, 19 nt, Homo sapiens
  misc_RNA (1)...(19): siRNA sense strand
cacaaggccaacaucauga

SEQ ID NO: 238617 - RNA, 19 nt, Homo sapiens
  misc_RNA (1)...(19): siRNA sense strand
ugaguuccaaugcugauga

SEQ ID NO: 238618 - RNA, 19 nt, Homo sapiens
  misc_RNA (1)...(19): siRNA sense strand
gaaacagcuacgaggaaca

SEQ ID NO: 238619 - RNA, 19 nt, Homo sapiens
  misc_RNA (1)...(19): siRNA sense strand
ucagaucaccuucgagaac

SEQ ID NO: 238620 - RNA, 19 nt, Homo sapiens
  misc_RNA (1)...(19): siRNA sense strand
aaacugggcgaugggcuuu

SEQ ID NO: 238621 - RNA, 19 nt, Homo sapiens
  misc_RNA (1)...(19): siRNA sense strand
uggagagccugaagaucau

SEQ ID NO: 238622 - RNA, 19 nt, Homo sapiens
  misc_RNA (1)...(19): siRNA sense strand
caucgaaaccaaccauaac

SEQ ID NO: 238623 - RNA, 19 nt, Homo sapiens
  misc_RNA (1)...(19): siRNA sense strand
cggcaagaguaucgccaau

SEQ ID NO: 238624 - RNA, 19 nt, Homo sapiens
  misc_RNA (1)...(19): siRNA sense strand
gcaugucaaguccgucuuc

SEQ ID NO: 238625 - RNA, 19 nt, Homo sapiens
  misc_RNA (1)...(19): siRNA sense strand
acaaaucucgaaacaacau

SEQ ID NO: 238626 - RNA, 19 nt, Homo sapiens
  misc_RNA (1)...(19): siRNA sense strand
ugaagaggacauucgcaau

SEQ ID NO: 238627 - RNA, 19 nt, Homo sapiens
  misc_RNA (1)...(19): siRNA sense strand
ccacauccgcgucaucaac

SEQ ID NO: 238628 - RNA, 19 nt, Homo sapiens
  misc_RNA (1)...(19): siRNA sense strand
ucauggugaugcccaaucu

SEQ ID NO: 238629 - RNA, 19 nt, Homo sapiens
  misc_RNA (1)...(19): siRNA sense strand
acacagagggcgaguacag

SEQ ID NO: 238630 - RNA, 19 nt, Homo sapiens
  misc_RNA (1)...(19): siRNA sense strand
ggccagggcacaacaucug

SEQ ID NO: 238631 - RNA, 19 nt, Homo sapiens
  misc_RNA (1)...(19): siRNA sense strand
ggccaagucccugcgcauu

SEQ ID NO: 238632 - RNA, 19 nt, Homo sapiens
  misc_RNA (1)...(19): siRNA sense strand
gcaagaguaucgccaauaa

SEQ ID NO: 238633 - RNA, 19 nt, Homo sapiens
  misc_RNA (1)...(19): siRNA sense strand
gcacaaaucucgaaacaac

SEQ ID NO: 238634 - RNA, 19 nt, Homo sapiens
  misc_RNA (1)...(19): siRNA sense strand
ggacauagacauccucauu

SEQ ID NO: 238635 - RNA, 19 nt, Homo sapiens
  misc_RNA (1)...(19): siRNA sense strand
gcacaaggccaacaucaug

SEQ ID NO: 238636 - RNA, 19 nt, Homo sapiens
  misc_RNA (1)...(19): siRNA sense strand
gaacaucuuuucagaacaa

SEQ ID NO: 238637 - RNA, 19 nt, Homo sapiens
  misc_RNA (1)...(19): siRNA sense strand
gaacacagagggcgaguac

SEQ ID NO: 238638 - RNA, 19 nt, Homo sapiens
  misc_RNA (1)...(19): siRNA sense strand
uggcauccauggacaauga

SEQ ID NO: 238639 - RNA, 19 nt, Homo sapiens
  misc_RNA (1)...(19): siRNA sense strand
agaacaugauuguggauaa

SEQ ID NO: 238640 - RNA, 19 nt, Homo sapiens
  misc_RNA (1)...(19): siRNA sense strand
gcacaaggacauagacauc

SEQ ID NO: 238641 - RNA, 19 nt, Homo sapiens
  misc_RNA (1)...(19): siRNA sense strand
gaacaugauuguggauaac

SEQ ID NO: 238642 - RNA, 19 nt, Homo sapiens
  misc_RNA (1)...(19): siRNA sense strand
guggagagccugaagauca

SEQ ID NO: 238643 - RNA, 19 nt, Homo sapiens
  misc_RNA (1)...(19): siRNA sense strand
ccaacgucauccacuguaa

SEQ ID NO: 238644 - RNA, 19 nt, Homo sapiens
  misc_RNA (1)...(19): siRNA sense strand
acauagacauccucauugu

SEQ ID NO: 238645 - RNA, 19 nt, Homo sapiens
  misc_RNA (1)...(19): siRNA sense strand
gacauagacauccucauug

SEQ ID NO: 238646 - RNA, 19 nt, Homo sapiens
  misc_RNA (1)...(19): siRNA sense strand
gagaacaugauuguggaua

SEQ ID NO: 238647 - RNA, 19 nt, Homo sapiens
  misc_RNA (1)...(19): siRNA sense strand
gcacgugaguuccaaugcu

SEQ ID NO: 238648 - RNA, 19 nt, Homo sapiens
  misc_RNA (1)...(19): siRNA sense strand
ucgcacaaaucucgaaaca

SEQ ID NO: 238649 - RNA, 19 nt, Homo sapiens
  misc_RNA (1)...(19): siRNA sense strand
aagaguaucgccaauaaga

SEQ ID NO: 238650 - RNA, 19 nt, Homo sapiens
  misc_RNA (1)...(19): siRNA sense strand
acagcagccuggagcauga

SEQ ID NO: 238651 - RNA, 19 nt, Homo sapiens
  misc_RNA (1)...(19): siRNA sense strand
ggugaugcccaaucucuau

SEQ ID NO: 238652 - RNA, 19 nt, Homo sapiens
  misc_RNA (1)...(19): siRNA sense strand
gccugaagaucaucaccaa

SEQ ID NO: 238653 - RNA, 19 nt, Homo sapiens
  misc_RNA (1)...(19): siRNA sense strand
gaggaacaccggcaagagu

SEQ ID NO: 238654 - RNA, 19 nt, Homo sapiens
  misc_RNA (1)...(19): siRNA sense strand
gaguuccaaugcugaugaa

SEQ ID NO: 238655 - RNA, 19 nt, Homo sapiens
  misc_RNA (1)...(19): siRNA sense strand
ggcaagaguaucgccaaua

SEQ ID NO: 238656 - RNA, 19 nt, Homo sapiens
  misc_RNA (1)...(19): siRNA sense strand
cagaucaccuucgagaaca

SEQ ID NO: 238657 - RNA, 19 nt, Homo sapiens
  misc_RNA (1)...(19): siRNA sense strand
ggcaacaucgucaacaaug

SEQ ID NO: 238658 - RNA, 19 nt, Homo sapiens
  misc_RNA (1)...(19): siRNA sense strand
ggaacaccggcaagaguau

SEQ ID NO: 238659 - RNA, 19 nt, Homo sapiens
  misc_RNA (1)...(19): siRNA sense strand
gaagaggugcacgugaguu

SEQ ID NO: 238660 - RNA, 19 nt, Homo sapiens
  misc_RNA (1)...(19): siRNA sense strand
ccaacuauggccaugugua

SEQ ID NO: 238661 - RNA, 19 nt, Homo sapiens
  misc_RNA (1)...(19): siRNA sense strand
caauuccuccguccgcuaa

SEQ ID NO: 238662 - RNA, 19 nt, Homo sapiens
  misc_RNA (1)...(19): siRNA sense strand
cgaggaacaucuuuucaga

SEQ ID NO: 238663 - RNA, 19 nt, Homo sapiens
  misc_RNA (1)...(19): siRNA sense strand
caacuauggccauguguac

SEQ ID NO: 238664 - RNA, 19 nt, Homo sapiens
  misc_RNA (1)...(19): siRNA sense strand
caaucucuauggcaacauc

SEQ ID NO: 238665 - RNA, 19 nt, Homo sapiens
  misc_RNA (1)...(19): siRNA sense strand
guguaccaguggacuuuga

SEQ ID NO: 238666 - RNA, 19 nt, Homo sapiens
  misc_RNA (1)...(19): siRNA sense strand
ccagcaguuugaugucaug

SEQ ID NO: 238667 - RNA, 19 nt, Homo sapiens
  misc_RNA (1)...(19): siRNA sense strand
gccaagucccugcgcauug

SEQ ID NO: 238668 - RNA, 19 nt, Homo sapiens
  misc_RNA (1)...(19): siRNA sense strand
caacaucgaaaccaaccau

SEQ ID NO: 238669 - RNA, 19 nt, Homo sapiens
  misc_RNA (1)...(19): siRNA sense strand
gaguaucgccaauaagaac

SEQ ID NO: 238670 - RNA, 19 nt, Homo sapiens
  misc_RNA (1)...(19): siRNA sense strand
guuccaaugcugaugaaga

SEQ ID NO: 238671 - RNA, 19 nt, Homo sapiens
  misc_RNA (1)...(19): siRNA sense strand
caaggccaacaucaugaaa

SEQ ID NO: 238672 - RNA, 19 nt, Homo sapiens
  misc_RNA (1)...(19): siRNA sense strand
ccaagucccugcgcauugc

SEQ ID NO: 238673 - RNA, 19 nt, Homo sapiens
  misc_RNA (1)...(19): siRNA sense strand
acaucgaaaccaaccauaa

SEQ ID NO: 238674 - RNA, 19 nt, Homo sapiens
  misc_RNA (1)...(19): siRNA sense strand
gaacaccggcaagaguauc

SEQ ID NO: 238675 - RNA, 19 nt, Homo sapiens
  misc_RNA (1)...(19): siRNA sense strand
gccaacgucauccacugua

SEQ ID NO: 238676 - RNA, 19 nt, Homo sapiens
  misc_RNA (1)...(19): siRNA sense strand
ggcacacggugaccaugau

SEQ ID NO: 238677 - RNA, 19 nt, Homo sapiens
  misc_RNA (1)...(19): siRNA sense strand
aggaacaccggcaagagua

SEQ ID NO: 238678 - RNA, 19 nt, Homo sapiens
  misc_RNA (1)...(19): siRNA sense strand
cacaaggccaacaucauga

SEQ ID NO: 238679 - RNA, 19 nt, Homo sapiens
  misc_RNA (1)...(19): siRNA sense strand
ugaguuccaaugcugauga

SEQ ID NO: 238680 - RNA, 19 nt, Homo sapiens
  misc_RNA (1)...(19): siRNA sense strand
gaaacagcuacgaggaaca

SEQ ID NO: 238681 - RNA, 19 nt, Homo sapiens
  misc_RNA (1)...(19): siRNA sense strand
ucagaucaccuucgagaac

SEQ ID NO: 238682 - RNA, 19 nt, Homo sapiens
  misc_RNA (1)...(19): siRNA sense strand
aaacugggcgaugggcuuu

SEQ ID NO: 238683 - RNA, 19 nt, Homo sapiens
  misc_RNA (1)...(19): siRNA sense strand
uggagagccugaagaucau

SEQ ID NO: 238684 - RNA, 19 nt, Homo sapiens
  misc_RNA (1)...(19): siRNA sense strand
caucgaaaccaaccauaac

SEQ ID NO: 238685 - RNA, 19 nt, Homo sapiens
  misc_RNA (1)...(19): siRNA sense strand
cggcaagaguaucgccaau

SEQ ID NO: 238686 - RNA, 19 nt, Homo sapiens
  misc_RNA (1)...(19): siRNA sense strand
gcaugucaaguccgucuuc

SEQ ID NO: 238687 - RNA, 19 nt, Homo sapiens
  misc_RNA (1)...(19): siRNA sense strand
acaaaucucgaaacaacau

SEQ ID NO: 238688 - RNA, 19 nt, Homo sapiens
  misc_RNA (1)...(19): siRNA sense strand
ugaagaggacauucgcaau

SEQ ID NO: 238689 - RNA, 19 nt, Homo sapiens
  misc_RNA (1)...(19): siRNA sense strand
ucauggugaugcccaaucu

SEQ ID NO: 238690 - RNA, 19 nt, Homo sapiens
  misc_RNA (1)...(19): siRNA sense strand
acacagagggcgaguacag

SEQ ID NO: 238691 - RNA, 19 nt, Homo sapiens
  misc_RNA (1)...(19): siRNA sense strand
ggccaagucccugcgcauu

SEQ ID NO: 238692 - RNA, 19 nt, Homo sapiens
  misc_RNA (1)...(19): siRNA sense strand
gcagagauguguauccuua

SEQ ID NO: 238693 - RNA, 19 nt, Homo sapiens
  misc_RNA (1)...(19): siRNA sense strand
gaacauugagaaaggauua

SEQ ID NO: 238694 - RNA, 19 nt, Homo sapiens
  misc_RNA (1)...(19): siRNA sense strand
ggaagaauguaacuuugaa

SEQ ID NO: 238695 - RNA, 19 nt, Homo sapiens
  misc_RNA (1)...(19): siRNA sense strand
gagcugagaccaagaagaa

SEQ ID NO: 238696 - RNA, 19 nt, Homo sapiens
  misc_RNA (1)...(19): siRNA sense strand
gaggaagaauguaacuuug

SEQ ID NO: 238697 - RNA, 19 nt, Homo sapiens
  misc_RNA (1)...(19): siRNA sense strand
guaaugaugccugaaauaa

SEQ ID NO: 238698 - RNA, 19 nt, Homo sapiens
  misc_RNA (1)...(19): siRNA sense strand
uagaacagaucagacauuu

SEQ ID NO: 238699 - RNA, 19 nt, Homo sapiens
  misc_RNA (1)...(19): siRNA sense strand
uaagauaacgccaugguuu

SEQ ID NO: 238700 - RNA, 19 nt, Homo sapiens
  misc_RNA (1)...(19): siRNA sense strand
uaacacgaauucacuacaa

SEQ ID NO: 238701 - RNA, 19 nt, Homo sapiens
  misc_RNA (1)...(19): siRNA sense strand
gcugaucaguguucuagaa

SEQ ID NO: 238702 - RNA, 19 nt, Homo sapiens
  misc_RNA (1)...(19): siRNA sense strand
uaaauggugggauaacuua

SEQ ID NO: 238703 - RNA, 19 nt, Homo sapiens
  misc_RNA (1)...(19): siRNA sense strand
gcacagagacggcugaaag

SEQ ID NO: 238704 - RNA, 19 nt, Homo sapiens
  misc_RNA (1)...(19): siRNA sense strand
gaacgagaacauugagaaa

SEQ ID NO: 238705 - RNA, 19 nt, Homo sapiens
  misc_RNA (1)...(19): siRNA sense strand
gaacagaucagacauuuug

SEQ ID NO: 238706 - RNA, 19 nt, Homo sapiens
  misc_RNA (1)...(19): siRNA sense strand
gcaaagaucagaugcuaag

SEQ ID NO: 238707 - RNA, 19 nt, Homo sapiens
  misc_RNA (1)...(19): siRNA sense strand
ccaaugagauuaaaagcua

SEQ ID NO: 238708 - RNA, 19 nt, Homo sapiens
  misc_RNA (1)...(19): siRNA sense strand
aagaucagaugcuaagauu

SEQ ID NO: 238709 - RNA, 19 nt, Homo sapiens
  misc_RNA (1)...(19): siRNA sense strand
gaucagaugcuaagauuac

SEQ ID NO: 238710 - RNA, 19 nt, Homo sapiens
  misc_RNA (1)...(19): siRNA sense strand
gaauguaacuuugaaucca

SEQ ID NO: 238711 - RNA, 19 nt, Homo sapiens
  misc_RNA (1)...(19): siRNA sense strand
ugaggaagaauguaacuuu

SEQ ID NO: 238712 - RNA, 19 nt, Homo sapiens
  misc_RNA (1)...(19): siRNA sense strand
gaagaauugucaccugaac

SEQ ID NO: 238713 - RNA, 19 nt, Homo sapiens
  misc_RNA (1)...(19): siRNA sense strand
cagccgagcuugaggaaag

SEQ ID NO: 238714 - RNA, 19 nt, Homo sapiens
  misc_RNA (1)...(19): siRNA sense strand
agagauguguauccuuauu

SEQ ID NO: 238715 - RNA, 19 nt, Homo sapiens
  misc_RNA (1)...(19): siRNA sense strand
aagauaacgccaugguuua

SEQ ID NO: 238716 - RNA, 19 nt, Homo sapiens
  misc_RNA (1)...(19): siRNA sense strand
gcugagaccaagaagaauu

SEQ ID NO: 238717 - RNA, 19 nt, Homo sapiens
  misc_RNA (1)...(19): siRNA sense strand
ggaaagugacgcccuugga

SEQ ID NO: 238718 - RNA, 19 nt, Homo sapiens
  misc_RNA (1)...(19): siRNA sense strand
aaaauaagcuucugcuaca

SEQ ID NO: 238719 - RNA, 19 nt, Homo sapiens
  misc_RNA (1)...(19): siRNA sense strand
ugccugaaauaaacacuaa

SEQ ID NO: 238720 - RNA, 19 nt, Homo sapiens
  misc_RNA (1)...(19): siRNA sense strand
gcagcgacuuuucucuuua

SEQ ID NO: 238721 - RNA, 19 nt, Homo sapiens
  misc_RNA (1)...(19): siRNA sense strand
gccggaggcugaucagugu

SEQ ID NO: 238722 - RNA, 19 nt, Homo sapiens
  misc_RNA (1)...(19): siRNA sense strand
gaauccagaucccaaugag

SEQ ID NO: 238723 - RNA, 19 nt, Homo sapiens
  misc_RNA (1)...(19): siRNA sense strand
guguuguagucauccauua

SEQ ID NO: 238724 - RNA, 19 nt, Homo sapiens
  misc_RNA (1)...(19): siRNA sense strand
gcagccaguggugaaauua

SEQ ID NO: 238725 - RNA, 19 nt, Homo sapiens
  misc_RNA (1)...(19): siRNA sense strand
ccagaucccaaugagauua

SEQ ID NO: 238726 - RNA, 19 nt, Homo sapiens
  misc_RNA (1)...(19): siRNA sense strand
aaugaugccugaaauaaac

SEQ ID NO: 238727 - RNA, 19 nt, Homo sapiens
  misc_RNA (1)...(19): siRNA sense strand
agauguguauccuuauuga

SEQ ID NO: 238728 - RNA, 19 nt, Homo sapiens
  misc_RNA (1)...(19): siRNA sense strand
gaauacguguuguagucau

SEQ ID NO: 238729 - RNA, 19 nt, Homo sapiens
  misc_RNA (1)...(19): siRNA sense strand
gagauguguauccuuauug

SEQ ID NO: 238730 - RNA, 19 nt, Homo sapiens
  misc_RNA (1)...(19): siRNA sense strand
cgacuuuucucuuuaaaug

SEQ ID NO: 238731 - RNA, 19 nt, Homo sapiens
  misc_RNA (1)...(19): siRNA sense strand
gauaacgccaugguuuaaa

SEQ ID NO: 238732 - RNA, 19 nt, Homo sapiens
  misc_RNA (1)...(19): siRNA sense strand
gggugaacaugaaauugau

SEQ ID NO: 238733 - RNA, 19 nt, Homo sapiens
  misc_RNA (1)...(19): siRNA sense strand
uguguauccuuauugauga

SEQ ID NO: 238734 - RNA, 19 nt, Homo sapiens
  misc_RNA (1)...(19): siRNA sense strand
acgaauacguguuguaguc

SEQ ID NO: 238735 - RNA, 19 nt, Homo sapiens
  misc_RNA (1)...(19): siRNA sense strand
ggugggauaacuuaaauca

SEQ ID NO: 238736 - RNA, 19 nt, Homo sapiens
  misc_RNA (1)...(19): siRNA sense strand
ugaacgagaacauugagaa

SEQ ID NO: 238737 - RNA, 19 nt, Homo sapiens
  misc_RNA (1)...(19): siRNA sense strand
gaggcgagcagcacagaga

SEQ ID NO: 238738 - RNA, 19 nt, Homo sapiens
  misc_RNA (1)...(19): siRNA sense strand
gcaauccagccgagcuuga

SEQ ID NO: 238739 - RNA, 19 nt, Homo sapiens
  misc_RNA (1)...(19): siRNA sense strand
cgagaacauugagaaagga

SEQ ID NO: 238740 - RNA, 19 nt, Homo sapiens
  misc_RNA (1)...(19): siRNA sense strand
cuaaccaccucgacaagca

SEQ ID NO: 238741 - RNA, 19 nt, Homo sapiens
  misc_RNA (1)...(19): siRNA sense strand
uguaaugaugccugaaaua

SEQ ID NO: 238742 - RNA, 19 nt, Homo sapiens
  misc_RNA (1)...(19): siRNA sense strand
guggugaaauuaagauaac

SEQ ID NO: 238743 - RNA, 19 nt, Homo sapiens
  misc_RNA (1)...(19): siRNA sense strand
guagucauccauuaagcaa

SEQ ID NO: 238744 - RNA, 19 nt, Homo sapiens
  misc_RNA (1)...(19): siRNA sense strand
ugagaaaggauuauugcau

SEQ ID NO: 238745 - RNA, 19 nt, Homo sapiens
  misc_RNA (1)...(19): siRNA sense strand
gcuauuguuaugugucaaa

SEQ ID NO: 238746 - RNA, 19 nt, Homo sapiens
  misc_RNA (1)...(19): siRNA sense strand
agucauccauuaagcaauc

SEQ ID NO: 238747 - RNA, 19 nt, Homo sapiens
  misc_RNA (1)...(19): siRNA sense strand
gaaaggauuauugcaucga

SEQ ID NO: 238748 - RNA, 19 nt, Homo sapiens
  misc_RNA (1)...(19): siRNA sense strand
gaaucaguuuguugaccau

SEQ ID NO: 238749 - RNA, 19 nt, Homo sapiens
  misc_RNA (1)...(19): siRNA sense strand
gauuauugcaucgagcuuu

SEQ ID NO: 238750 - RNA, 19 nt, Homo sapiens
  misc_RNA (1)...(19): siRNA sense strand
acacuaaccaccucgacaa

SEQ ID NO: 238751 - RNA, 19 nt, Homo sapiens
  misc_RNA (1)...(19): siRNA sense strand
aacacgaauucacuacaaa

SEQ ID NO: 238752 - RNA, 19 nt, Homo sapiens
  misc_RNA (1)...(19): siRNA sense strand
agaccaagaagaauuguca

SEQ ID NO: 238753 - RNA, 19 nt, Homo sapiens
  misc_RNA (1)...(19): siRNA sense strand
agauaacgccaugguuuaa

SEQ ID NO: 238754 - RNA, 19 nt, Homo sapiens
  misc_RNA (1)...(19): siRNA sense strand
ugucaaaggaagaacuaaa

SEQ ID NO: 238755 - RNA, 19 nt, Homo sapiens
  misc_RNA (1)...(19): siRNA sense strand
aagcuauuguuauguguca

SEQ ID NO: 238756 - RNA, 19 nt, Homo sapiens
  misc_RNA (1)...(19): siRNA sense strand
cuagaacagaucagacauu

SEQ ID NO: 238757 - RNA, 19 nt, Homo sapiens
  misc_RNA (1)...(19): siRNA sense strand
ccagguuguuuuacgaaua

SEQ ID NO: 238758 - RNA, 19 nt, Homo sapiens
  misc_RNA (1)...(19): siRNA sense strand
acgagaacauugagaaagg

SEQ ID NO: 238759 - RNA, 19 nt, Homo sapiens
  misc_RNA (1)...(19): siRNA sense strand
ugaauccagaucccaauga

SEQ ID NO: 238760 - RNA, 19 nt, Homo sapiens
  misc_RNA (1)...(19): siRNA sense strand
aaagaucagaugcuaagau

SEQ ID NO: 238761 - RNA, 19 nt, Homo sapiens
  misc_RNA (1)...(19): siRNA sense strand
cuacagcaaagaucagaug

SEQ ID NO: 238762 - RNA, 19 nt, Homo sapiens
  misc_RNA (1)...(19): siRNA sense strand
caccugaacgagaacauug

SEQ ID NO: 238763 - RNA, 19 nt, Homo sapiens
  misc_RNA (1)...(19): siRNA sense strand
uuaaauggugggauaacuu

SEQ ID NO: 238764 - RNA, 19 nt, Homo sapiens
  misc_RNA (1)...(19): siRNA sense strand
cagaucccaaugagauuaa

SEQ ID NO: 238765 - RNA, 19 nt, Homo sapiens
  misc_RNA (1)...(19): siRNA sense strand
guucaacuccuggcagaga

SEQ ID NO: 238766 - RNA, 19 nt, Homo sapiens
  misc_RNA (1)...(19): siRNA sense strand
cucuuuaaauggugggaua

SEQ ID NO: 238767 - RNA, 19 nt, Homo sapiens
  misc_RNA (1)...(19): siRNA sense strand
cagcgacuuuucucuuuaa

SEQ ID NO: 238768 - RNA, 19 nt, Homo sapiens
  misc_RNA (1)...(19): siRNA sense strand
auuguuaugugucaaagga

SEQ ID NO: 238769 - RNA, 19 nt, Homo sapiens
  misc_RNA (1)...(19): siRNA sense strand
cagccaguggugaaauuaa

SEQ ID NO: 238770 - RNA, 19 nt, Homo sapiens
  misc_RNA (1)...(19): siRNA sense strand
gaugcuaagauuaccuuuc

SEQ ID NO: 238771 - RNA, 19 nt, Homo sapiens
  misc_RNA (1)...(19): siRNA sense strand
agaauugucaccugaacga

SEQ ID NO: 238772 - RNA, 19 nt, Homo sapiens
  misc_RNA (1)...(19): siRNA sense strand
ggagcugagaccaagaaga

SEQ ID NO: 238773 - RNA, 19 nt, Homo sapiens
  misc_RNA (1)...(19): siRNA sense strand
gccgcagacugugcucaaa

SEQ ID NO: 238774 - RNA, 19 nt, Homo sapiens
  misc_RNA (1)...(19): siRNA sense strand
aggaagaauguaacuuuga

SEQ ID NO: 238775 - RNA, 19 nt, Homo sapiens
  misc_RNA (1)...(19): siRNA sense strand
cauugagaaaggauuauug

SEQ ID NO: 238776 - RNA, 19 nt, Homo sapiens
  misc_RNA (1)...(19): siRNA sense strand
guguauccuuauugaugaa

SEQ ID NO: 238777 - RNA, 19 nt, Homo sapiens
  misc_RNA (1)...(19): siRNA sense strand
caaaggaagaacuaaaaga

SEQ ID NO: 238778 - RNA, 19 nt, Homo sapiens
  misc_RNA (1)...(19): siRNA sense strand
ggugaacaugaaauugauu

SEQ ID NO: 238779 - RNA, 19 nt, Homo sapiens
  misc_RNA (1)...(19): siRNA sense strand
uaucuggggugaacaugaa

SEQ ID NO: 238780 - RNA, 19 nt, Homo sapiens
  misc_RNA (1)...(19): siRNA sense strand
aauggugggauaacuuaaa

SEQ ID NO: 238781 - RNA, 19 nt, Homo sapiens
  misc_RNA (1)...(19): siRNA sense strand
acgccaugguuuaaaauua

SEQ ID NO: 238782 - RNA, 19 nt, Homo sapiens
  misc_RNA (1)...(19): siRNA sense strand
auugucaccugaacgagaa

SEQ ID NO: 238783 - RNA, 19 nt, Homo sapiens
  misc_RNA (1)...(19): siRNA sense strand
gaaggaagcucccuccaua

SEQ ID NO: 238784 - RNA, 19 nt, Homo sapiens
  misc_RNA (1)...(19): siRNA sense strand
ggaaagaggucccagaaga

SEQ ID NO: 238785 - RNA, 19 nt, Homo sapiens
  misc_RNA (1)...(19): siRNA sense strand
gaauauacguugugaagga

SEQ ID NO: 238786 - RNA, 19 nt, Homo sapiens
  misc_RNA (1)...(19): siRNA sense strand
aaagaugacucaacuugua

SEQ ID NO: 238787 - RNA, 19 nt, Homo sapiens
  misc_RNA (1)...(19): siRNA sense strand
ggagaaagauaucuguuca

SEQ ID NO: 238788 - RNA, 19 nt, Homo sapiens
  misc_RNA (1)...(19): siRNA sense strand
gcgaugagauccugaguga

SEQ ID NO: 238789 - RNA, 19 nt, Homo sapiens
  misc_RNA (1)...(19): siRNA sense strand
gaaauuugaucccuguauc

SEQ ID NO: 238790 - RNA, 19 nt, Homo sapiens
  misc_RNA (1)...(19): siRNA sense strand
caaauuaaccugcgugaau

SEQ ID NO: 238791 - RNA, 19 nt, Homo sapiens
  misc_RNA (1)...(19): siRNA sense strand
uaaggugacucaaaggaaa

SEQ ID NO: 238792 - RNA, 19 nt, Homo sapiens
  misc_RNA (1)...(19): siRNA sense strand
aaauuaaccugcgugaaua

SEQ ID NO: 238793 - RNA, 19 nt, Homo sapiens
  misc_RNA (1)...(19): siRNA sense strand
aaacacggauccucaguga

SEQ ID NO: 238794 - RNA, 19 nt, Homo sapiens
  misc_RNA (1)...(19): siRNA sense strand
gaauguacauggaaucucu

SEQ ID NO: 238795 - RNA, 19 nt, Homo sapiens
  misc_RNA (1)...(19): siRNA sense strand
aaagauaucuguucaagcu

SEQ ID NO: 238796 - RNA, 19 nt, Homo sapiens
  misc_RNA (1)...(19): siRNA sense strand
gaacucagaggucaugaug

SEQ ID NO: 238797 - RNA, 19 nt, Homo sapiens
  misc_RNA (1)...(19): siRNA sense strand
ggauggaacuugguuaaca

SEQ ID NO: 238798 - RNA, 19 nt, Homo sapiens
  misc_RNA (1)...(19): siRNA sense strand
ggaagccuguagaaauuug

SEQ ID NO: 238799 - RNA, 19 nt, Homo sapiens
  misc_RNA (1)...(19): siRNA sense strand
aaagaaagaugacucaacu

SEQ ID NO: 238800 - RNA, 19 nt, Homo sapiens
  misc_RNA (1)...(19): siRNA sense strand
gaacuggaaacggaauaua

SEQ ID NO: 238801 - RNA, 19 nt, Homo sapiens
  misc_RNA (1)...(19): siRNA sense strand
cuagacaacuccaucauca

SEQ ID NO: 238802 - RNA, 19 nt, Homo sapiens
  misc_RNA (1)...(19): siRNA sense strand
ggaacauccucccagcaaa

SEQ ID NO: 238803 - RNA, 19 nt, Homo sapiens
  misc_RNA (1)...(19): siRNA sense strand
gaacuaaaugugcccgaaa

SEQ ID NO: 238804 - RNA, 19 nt, Homo sapiens
  misc_RNA (1)...(19): siRNA sense strand
ggaaugaggauggaacuug

SEQ ID NO: 238805 - RNA, 19 nt, Homo sapiens
  misc_RNA (1)...(19): siRNA sense strand
agaagacccucaagagaug

SEQ ID NO: 238806 - RNA, 19 nt, Homo sapiens
  misc_RNA (1)...(19): siRNA sense strand
gaacugaaugugcccgaaa

SEQ ID NO: 238807 - RNA, 19 nt, Homo sapiens
  misc_RNA (1)...(19): siRNA sense strand
acaacuccaucaucacuaa

SEQ ID NO: 238808 - RNA, 19 nt, Homo sapiens
  misc_RNA (1)...(19): siRNA sense strand
caagccauuucccuucuuu

SEQ ID NO: 238809 - RNA, 19 nt, Homo sapiens
  misc_RNA (1)...(19): siRNA sense strand
gaaagaugacucaacuugu

SEQ ID NO: 238810 - RNA, 19 nt, Homo sapiens
  misc_RNA (1)...(19): siRNA sense strand
gaugagauccugagugagu

SEQ ID NO: 238811 - RNA, 19 nt, Homo sapiens
  misc_RNA (1)...(19): siRNA sense strand
cuggaagccuguagaaauu

SEQ ID NO: 238812 - RNA, 19 nt, Homo sapiens
  misc_RNA (1)...(19): siRNA sense strand
guacauggaaucucuggaa

SEQ ID NO: 238813 - RNA, 19 nt, Homo sapiens
  misc_RNA (1)...(19): siRNA sense strand
cagcacaccuucagacaag

SEQ ID NO: 238814 - RNA, 19 nt, Homo sapiens
  misc_RNA (1)...(19): siRNA sense strand
gaggauggaacuugguuaa

SEQ ID NO: 238815 - RNA, 19 nt, Homo sapiens
  misc_RNA (1)...(19): siRNA sense strand
ugauggcacuucagaaaug

SEQ ID NO: 238816 - RNA, 19 nt, Homo sapiens
  misc_RNA (1)...(19): siRNA sense strand
uaaagaagacccucaagag

SEQ ID NO: 238817 - RNA, 19 nt, Homo sapiens
  misc_RNA (1)...(19): siRNA sense strand
agaaaugaaugaaggaaag

SEQ ID NO: 238818 - RNA, 19 nt, Homo sapiens
  misc_RNA (1)...(19): siRNA sense strand
gagcagagacacaccaauc

SEQ ID NO: 238819 - RNA, 19 nt, Homo sapiens
  misc_RNA (1)...(19): siRNA sense strand
gggcauggcauccaagaga

SEQ ID NO: 238820 - RNA, 19 nt, Homo sapiens
  misc_RNA (1)...(19): siRNA sense strand
caucaucacuaagagaaug

SEQ ID NO: 238821 - RNA, 19 nt, Homo sapiens
  misc_RNA (1)...(19): siRNA sense strand
gauggcacuucagaaauga

SEQ ID NO: 238822 - RNA, 19 nt, Homo sapiens
  misc_RNA (1)...(19): siRNA sense strand
aaagaagacccucaagaga

SEQ ID NO: 238823 - RNA, 19 nt, Homo sapiens
  misc_RNA (1)...(19): siRNA sense strand
gaacauccucccagcaaag

SEQ ID NO: 238824 - RNA, 19 nt, Homo sapiens
  misc_RNA (1)...(19): siRNA sense strand
gaacgcaaagaacuggaaa

SEQ ID NO: 238825 - RNA, 19 nt, Homo sapiens
  misc_RNA (1)...(19): siRNA sense strand
ggaaggaacgcaaagaacu

SEQ ID NO: 238826 - RNA, 19 nt, Homo sapiens
  misc_RNA (1)...(19): siRNA sense strand
agaaagauaucuguucaag

SEQ ID NO: 238827 - RNA, 19 nt, Homo sapiens
  misc_RNA (1)...(19): siRNA sense strand
agaaagaugacucaacuug

SEQ ID NO: 238828 - RNA, 19 nt, Homo sapiens
  misc_RNA (1)...(19): siRNA sense strand
acacaccaauccuacuuga

SEQ ID NO: 238829 - RNA, 19 nt, Homo sapiens
  misc_RNA (1)...(19): siRNA sense strand
gaaggaacgcaaagaacug

SEQ ID NO: 238830 - RNA, 19 nt, Homo sapiens
  misc_RNA (1)...(19): siRNA sense strand
cuaagagaauguacaugga

SEQ ID NO: 238831 - RNA, 19 nt, Homo sapiens
  misc_RNA (1)...(19): siRNA sense strand
gauaaggugacucaaagga

SEQ ID NO: 238832 - RNA, 19 nt, Homo sapiens
  misc_RNA (1)...(19): siRNA sense strand
gaaaugaaugaaggaaaga

SEQ ID NO: 238833 - RNA, 19 nt, Homo sapiens
  misc_RNA (1)...(19): siRNA sense strand
ccagagauaagagauaauu

SEQ ID NO: 238834 - RNA, 19 nt, Homo sapiens
  misc_RNA (1)...(19): siRNA sense strand
agugaccaaugacaaguua

SEQ ID NO: 238835 - RNA, 19 nt, Homo sapiens
  misc_RNA (1)...(19): siRNA sense strand
ugccagagauaagagauaa

SEQ ID NO: 238836 - RNA, 19 nt, Homo sapiens
  misc_RNA (1)...(19): siRNA sense strand
gaggaaaacccaaaaguga

SEQ ID NO: 238837 - RNA, 19 nt, Homo sapiens
  misc_RNA (1)...(19): siRNA sense strand
uggauaaggugacucaaag

SEQ ID NO: 238838 - RNA, 19 nt, Homo sapiens
  misc_RNA (1)...(19): siRNA sense strand
ggcauggcauccaagagaa

SEQ ID NO: 238839 - RNA, 19 nt, Homo sapiens
  misc_RNA (1)...(19): siRNA sense strand
uaagagaauguacauggaa

SEQ ID NO: 238840 - RNA, 19 nt, Homo sapiens
  misc_RNA (1)...(19): siRNA sense strand
gaaagaggucccagaagac

SEQ ID NO: 238841 - RNA, 19 nt, Homo sapiens
  misc_RNA (1)...(19): siRNA sense strand
gguuaacaccaaaugaauu

SEQ ID NO: 238842 - RNA, 19 nt, Homo sapiens
  misc_RNA (1)...(19): siRNA sense strand
ccagaguggugcacaacau

SEQ ID NO: 238843 - RNA, 19 nt, Homo sapiens
  misc_RNA (1)...(19): siRNA sense strand
gcaaguggccagugacaac

SEQ ID NO: 238844 - RNA, 19 nt, Homo sapiens
  misc_RNA (1)...(19): siRNA sense strand
ugacaagagccauggaaga

SEQ ID NO: 238845 - RNA, 19 nt, Homo sapiens
  misc_RNA (1)...(19): siRNA sense strand
gcacaccuucagacaagaa

SEQ ID NO: 238846 - RNA, 19 nt, Homo sapiens
  misc_RNA (1)...(19): siRNA sense strand
gcacucauccaggaaggaa

SEQ ID NO: 238847 - RNA, 19 nt, Homo sapiens
  misc_RNA (1)...(19): siRNA sense strand
gcgaaagggauuuuauaua

SEQ ID NO: 238848 - RNA, 19 nt, Homo sapiens
  misc_RNA (1)...(19): siRNA sense strand
agaaccaaaugacccagaa

SEQ ID NO: 238849 - RNA, 19 nt, Homo sapiens
  misc_RNA (1)...(19): siRNA sense strand
ccaaugacaaguuaacauc

SEQ ID NO: 238850 - RNA, 19 nt, Homo sapiens
  misc_RNA (1)...(19): siRNA sense strand
aagaagacccucaagagau

SEQ ID NO: 238851 - RNA, 19 nt, Homo sapiens
  misc_RNA (1)...(19): siRNA sense strand
guggauaaggugacucaaa

SEQ ID NO: 238852 - RNA, 19 nt, Homo sapiens
  misc_RNA (1)...(19): siRNA sense strand
aauuugaagucgaaggaaa

SEQ ID NO: 238853 - RNA, 19 nt, Homo sapiens
  misc_RNA (1)...(19): siRNA sense strand
gacauuguucagucaaauu

SEQ ID NO: 238854 - RNA, 19 nt, Homo sapiens
  misc_RNA (1)...(19): siRNA sense strand
ggaacgcaaagaacuggaa

SEQ ID NO: 238855 - RNA, 19 nt, Homo sapiens
  misc_RNA (1)...(19): siRNA sense strand
gaaaaggaaggaacgcaaa

SEQ ID NO: 238856 - RNA, 19 nt, Homo sapiens
  misc_RNA (1)...(19): siRNA sense strand
gauccucagugaagugcau

SEQ ID NO: 238857 - RNA, 19 nt, Homo sapiens
  misc_RNA (1)...(19): siRNA sense strand
gagaaagauaucuguucaa

SEQ ID NO: 238858 - RNA, 19 nt, Homo sapiens
  misc_RNA (1)...(19): siRNA sense strand
gcccgaaaguccagaucga

SEQ ID NO: 238859 - RNA, 19 nt, Homo sapiens
  misc_RNA (1)...(19): siRNA sense strand
caaguuaacauccaaaaug

SEQ ID NO: 238860 - RNA, 19 nt, Homo sapiens
  misc_RNA (1)...(19): siRNA sense strand
cagagacacaccaauccua

SEQ ID NO: 238861 - RNA, 19 nt, Homo sapiens
  misc_RNA (1)...(19): siRNA sense strand
gauggaacuugguuaacac

SEQ ID NO: 238862 - RNA, 19 nt, Homo sapiens
  misc_RNA (1)...(19): siRNA sense strand
ucuggaagccuguagaaau

SEQ ID NO: 238863 - RNA, 19 nt, Homo sapiens
  misc_RNA (1)...(19): siRNA sense strand
gacaagagccauggaagag

SEQ ID NO: 238864 - RNA, 19 nt, Homo sapiens
  misc_RNA (1)...(19): siRNA sense strand
cagaaaugaaugaaggaaa

SEQ ID NO: 238865 - RNA, 19 nt, Homo sapiens
  misc_RNA (1)...(19): siRNA sense strand
uugaaggccuccuagacaa

SEQ ID NO: 238866 - RNA, 19 nt, Homo sapiens
  misc_RNA (1)...(19): siRNA sense strand
ccacgaagggucacacaag

SEQ ID NO: 238867 - RNA, 19 nt, Homo sapiens
  misc_RNA (1)...(19): siRNA sense strand
acacggauccucagugaag

SEQ ID NO: 238868 - RNA, 19 nt, Homo sapiens
  misc_RNA (1)...(19): siRNA sense strand
aauauucaccgaagaggaa

SEQ ID NO: 238869 - RNA, 19 nt, Homo sapiens
  misc_RNA (1)...(19): siRNA sense strand
gauaucuguucaagcucaa

SEQ ID NO: 238870 - RNA, 19 nt, Homo sapiens
  misc_RNA (1)...(19): siRNA sense strand
caacuggagaggacuuuua

SEQ ID NO: 238871 - RNA, 19 nt, Homo sapiens
  misc_RNA (1)...(19): siRNA sense strand
aagagaauguacauggaau

SEQ ID NO: 238872 - RNA, 19 nt, Homo sapiens
  misc_RNA (1)...(19): siRNA sense strand
gcgugaauaucccaaucug

SEQ ID NO: 238873 - RNA, 19 nt, Homo sapiens
  misc_RNA (1)...(19): siRNA sense strand
ucaaaggaaagacgacuca

SEQ ID NO: 238874 - RNA, 19 nt, Homo sapiens
  misc_RNA (1)...(19): siRNA sense strand
gggacagccucaucuagac

SEQ ID NO: 238875 - RNA, 19 nt, Homo sapiens
  misc_RNA (1)...(19): siRNA sense strand
ggacagccucaucuagaca

SEQ ID NO: 238876 - RNA, 19 nt, Homo sapiens
  misc_RNA (1)...(19): siRNA sense strand
cggaauauacguugugaag

SEQ ID NO: 238877 - RNA, 19 nt, Homo sapiens
  misc_RNA (1)...(19): siRNA sense strand
cgacucaaccuggaacuca

SEQ ID NO: 238878 - RNA, 19 nt, Homo sapiens
  misc_RNA (1)...(19): siRNA sense strand
auaaagaagacccucaaga

SEQ ID NO: 238879 - RNA, 19 nt, Homo sapiens
  misc_RNA (1)...(19): siRNA sense strand
aauauacguugugaaggaa

SEQ ID NO: 238880 - RNA, 19 nt, Homo sapiens
  misc_RNA (1)...(19): siRNA sense strand
gaccuguggugaggcgaaa

SEQ ID NO: 238881 - RNA, 19 nt, Homo sapiens
  misc_RNA (1)...(19): siRNA sense strand
ccgaaaguccagaucgaaa

SEQ ID NO: 238882 - RNA, 19 nt, Homo sapiens
  misc_RNA (1)...(19): siRNA sense strand
ucacuaagagaauguacau

SEQ ID NO: 238883 - RNA, 19 nt, Homo sapiens
  misc_RNA (1)...(19): siRNA sense strand
gaaggaagcucccuccaua

SEQ ID NO: 238884 - RNA, 19 nt, Homo sapiens
  misc_RNA (1)...(19): siRNA sense strand
ggaaagaggucccagaaga

SEQ ID NO: 238885 - RNA, 19 nt, Homo sapiens
  misc_RNA (1)...(19): siRNA sense strand
gaauauacguugugaagga

SEQ ID NO: 238886 - RNA, 19 nt, Homo sapiens
  misc_RNA (1)...(19): siRNA sense strand
aaagaugacucaacuugua

SEQ ID NO: 238887 - RNA, 19 nt, Homo sapiens
  misc_RNA (1)...(19): siRNA sense strand
ggagaaagauaucuguuca

SEQ ID NO: 238888 - RNA, 19 nt, Homo sapiens
  misc_RNA (1)...(19): siRNA sense strand
gcgaugagauccugaguga

SEQ ID NO: 238889 - RNA, 19 nt, Homo sapiens
  misc_RNA (1)...(19): siRNA sense strand
gaaauuugaucccuguauc

SEQ ID NO: 238890 - RNA, 19 nt, Homo sapiens
  misc_RNA (1)...(19): siRNA sense strand
caaauuaaccugcgugaau

SEQ ID NO: 238891 - RNA, 19 nt, Homo sapiens
  misc_RNA (1)...(19): siRNA sense strand
uaaggugacucaaaggaaa

SEQ ID NO: 238892 - RNA, 19 nt, Homo sapiens
  misc_RNA (1)...(19): siRNA sense strand
aaauuaaccugcgugaaua

SEQ ID NO: 238893 - RNA, 19 nt, Homo sapiens
  misc_RNA (1)...(19): siRNA sense strand
aaacacggauccucaguga

SEQ ID NO: 238894 - RNA, 19 nt, Homo sapiens
  misc_RNA (1)...(19): siRNA sense strand
gaauguacauggaaucucu

SEQ ID NO: 238895 - RNA, 19 nt, Homo sapiens
  misc_RNA (1)...(19): siRNA sense strand
aaagauaucuguucaagcu

SEQ ID NO: 238896 - RNA, 19 nt, Homo sapiens
  misc_RNA (1)...(19): siRNA sense strand
gaacucagaggucaugaug

SEQ ID NO: 238897 - RNA, 19 nt, Homo sapiens
  misc_RNA (1)...(19): siRNA sense strand
ggauggaacuugguuaaca

SEQ ID NO: 238898 - RNA, 19 nt, Homo sapiens
  misc_RNA (1)...(19): siRNA sense strand
ggaagccuguagaaauuug

SEQ ID NO: 238899 - RNA, 19 nt, Homo sapiens
  misc_RNA (1)...(19): siRNA sense strand
aaagaaagaugacucaacu

SEQ ID NO: 238900 - RNA, 19 nt, Homo sapiens
  misc_RNA (1)...(19): siRNA sense strand
gaacuggaaacggaauaua

SEQ ID NO: 238901 - RNA, 19 nt, Homo sapiens
  misc_RNA (1)...(19): siRNA sense strand
cuagacaacuccaucauca

SEQ ID NO: 238902 - RNA, 19 nt, Homo sapiens
  misc_RNA (1)...(19): siRNA sense strand
ggaacauccucccagcaaa

SEQ ID NO: 238903 - RNA, 19 nt, Homo sapiens
  misc_RNA (1)...(19): siRNA sense strand
gaacuaaaugugcccgaaa

SEQ ID NO: 238904 - RNA, 19 nt, Homo sapiens
  misc_RNA (1)...(19): siRNA sense strand
ggaaugaggauggaacuug

SEQ ID NO: 238905 - RNA, 19 nt, Homo sapiens
  misc_RNA (1)...(19): siRNA sense strand
agaagacccucaagagaug

SEQ ID NO: 238906 - RNA, 19 nt, Homo sapiens
  misc_RNA (1)...(19): siRNA sense strand
gaacugaaugugcccgaaa

SEQ ID NO: 238907 - RNA, 19 nt, Homo sapiens
  misc_RNA (1)...(19): siRNA sense strand
acaacuccaucaucacuaa

SEQ ID NO: 238908 - RNA, 19 nt, Homo sapiens
  misc_RNA (1)...(19): siRNA sense strand
caagccauuucccuucuuu

SEQ ID NO: 238909 - RNA, 19 nt, Homo sapiens
  misc_RNA (1)...(19): siRNA sense strand
gaaagaugacucaacuugu

SEQ ID NO: 238910 - RNA, 19 nt, Homo sapiens
  misc_RNA (1)...(19): siRNA sense strand
gaugagauccugagugagu

SEQ ID NO: 238911 - RNA, 19 nt, Homo sapiens
  misc_RNA (1)...(19): siRNA sense strand
cuggaagccuguagaaauu

SEQ ID NO: 238912 - RNA, 19 nt, Homo sapiens
  misc_RNA (1)...(19): siRNA sense strand
guacauggaaucucuggaa

SEQ ID NO: 238913 - RNA, 19 nt, Homo sapiens
  misc_RNA (1)...(19): siRNA sense strand
cagcacaccuucagacaag

SEQ ID NO: 238914 - RNA, 19 nt, Homo sapiens
  misc_RNA (1)...(19): siRNA sense strand
gaggauggaacuugguuaa

SEQ ID NO: 238915 - RNA, 19 nt, Homo sapiens
  misc_RNA (1)...(19): siRNA sense strand
ugauggcacuucagaaaug

SEQ ID NO: 238916 - RNA, 19 nt, Homo sapiens
  misc_RNA (1)...(19): siRNA sense strand
uaaagaagacccucaagag

SEQ ID NO: 238917 - RNA, 19 nt, Homo sapiens
  misc_RNA (1)...(19): siRNA sense strand
agaaaugaaugaaggaaag

SEQ ID NO: 238918 - RNA, 19 nt, Homo sapiens
  misc_RNA (1)...(19): siRNA sense strand
gagcagagacacaccaauc

SEQ ID NO: 238919 - RNA, 19 nt, Homo sapiens
  misc_RNA (1)...(19): siRNA sense strand
gggcauggcauccaagaga

SEQ ID NO: 238920 - RNA, 19 nt, Homo sapiens
  misc_RNA (1)...(19): siRNA sense strand
caucaucacuaagagaaug

SEQ ID NO: 238921 - RNA, 19 nt, Homo sapiens
  misc_RNA (1)...(19): siRNA sense strand
gauggcacuucagaaauga

SEQ ID NO: 238922 - RNA, 19 nt, Homo sapiens
  misc_RNA (1)...(19): siRNA sense strand
aaagaagacccucaagaga

SEQ ID NO: 238923 - RNA, 19 nt, Homo sapiens
  misc_RNA (1)...(19): siRNA sense strand
gaacauccucccagcaaag

SEQ ID NO: 238924 - RNA, 19 nt, Homo sapiens
  misc_RNA (1)...(19): siRNA sense strand
gaacgcaaagaacuggaaa

SEQ ID NO: 238925 - RNA, 19 nt, Homo sapiens
  misc_RNA (1)...(19): siRNA sense strand
ggaaggaacgcaaagaacu

SEQ ID NO: 238926 - RNA, 19 nt, Homo sapiens
  misc_RNA (1)...(19): siRNA sense strand
agaaagauaucuguucaag

SEQ ID NO: 238927 - RNA, 19 nt, Homo sapiens
  misc_RNA (1)...(19): siRNA sense strand
agaaagaugacucaacuug

SEQ ID NO: 238928 - RNA, 19 nt, Homo sapiens
  misc_RNA (1)...(19): siRNA sense strand
acacaccaauccuacuuga

SEQ ID NO: 238929 - RNA, 19 nt, Homo sapiens
  misc_RNA (1)...(19): siRNA sense strand
gaaggaacgcaaagaacug

SEQ ID NO: 238930 - RNA, 19 nt, Homo sapiens
  misc_RNA (1)...(19): siRNA sense strand
cuaagagaauguacaugga

SEQ ID NO: 238931 - RNA, 19 nt, Homo sapiens
  misc_RNA (1)...(19): siRNA sense strand
gauaaggugacucaaagga

SEQ ID NO: 238932 - RNA, 19 nt, Homo sapiens
  misc_RNA (1)...(19): siRNA sense strand
gaaaugaaugaaggaaaga

SEQ ID NO: 238933 - RNA, 19 nt, Homo sapiens
  misc_RNA (1)...(19): siRNA sense strand
ccagagauaagagauaauu

SEQ ID NO: 238934 - RNA, 19 nt, Homo sapiens
  misc_RNA (1)...(19): siRNA sense strand
agugaccaaugacaaguua

SEQ ID NO: 238935 - RNA, 19 nt, Homo sapiens
  misc_RNA (1)...(19): siRNA sense strand
ugccagagauaagagauaa

SEQ ID NO: 238936 - RNA, 19 nt, Homo sapiens
  misc_RNA (1)...(19): siRNA sense strand
gaggaaaacccaaaaguga

SEQ ID NO: 238937 - RNA, 19 nt, Homo sapiens
  misc_RNA (1)...(19): siRNA sense strand
uggauaaggugacucaaag

SEQ ID NO: 238938 - RNA, 19 nt, Homo sapiens
  misc_RNA (1)...(19): siRNA sense strand
ggcauggcauccaagagaa

SEQ ID NO: 238939 - RNA, 19 nt, Homo sapiens
  misc_RNA (1)...(19): siRNA sense strand
uaagagaauguacauggaa

SEQ ID NO: 238940 - RNA, 19 nt, Homo sapiens
  misc_RNA (1)...(19): siRNA sense strand
gaaagaggucccagaagac

SEQ ID NO: 238941 - RNA, 19 nt, Homo sapiens
  misc_RNA (1)...(19): siRNA sense strand
gguuaacaccaaaugaauu

SEQ ID NO: 238942 - RNA, 19 nt, Homo sapiens
  misc_RNA (1)...(19): siRNA sense strand
ccagaguggugcacaacau

SEQ ID NO: 238943 - RNA, 19 nt, Homo sapiens
  misc_RNA (1)...(19): siRNA sense strand
gcaaguggccagugacaac

SEQ ID NO: 238944 - RNA, 19 nt, Homo sapiens
  misc_RNA (1)...(19): siRNA sense strand
ugacaagagccauggaaga

SEQ ID NO: 238945 - RNA, 19 nt, Homo sapiens
  misc_RNA (1)...(19): siRNA sense strand
gcacaccuucagacaagaa

SEQ ID NO: 238946 - RNA, 19 nt, Homo sapiens
  misc_RNA (1)...(19): siRNA sense strand
gcacucauccaggaaggaa

SEQ ID NO: 238947 - RNA, 19 nt, Homo sapiens
  misc_RNA (1)...(19): siRNA sense strand
gcgaaagggauuuuauaua

SEQ ID NO: 238948 - RNA, 19 nt, Homo sapiens
  misc_RNA (1)...(19): siRNA sense strand
agaaccaaaugacccagaa

SEQ ID NO: 238949 - RNA, 19 nt, Homo sapiens
  misc_RNA (1)...(19): siRNA sense strand
ccaaugacaaguuaacauc

SEQ ID NO: 238950 - RNA, 19 nt, Homo sapiens
  misc_RNA (1)...(19): siRNA sense strand
aagaagacccucaagagau

SEQ ID NO: 238951 - RNA, 19 nt, Homo sapiens
  misc_RNA (1)...(19): siRNA sense strand
guggauaaggugacucaaa

SEQ ID NO: 238952 - RNA, 19 nt, Homo sapiens
  misc_RNA (1)...(19): siRNA sense strand
aauuugaagucgaaggaaa

SEQ ID NO: 238953 - RNA, 19 nt, Homo sapiens
  misc_RNA (1)...(19): siRNA sense strand
gacauuguucagucaaauu

SEQ ID NO: 238954 - RNA, 19 nt, Homo sapiens
  misc_RNA (1)...(19): siRNA sense strand
ggaacgcaaagaacuggaa

SEQ ID NO: 238955 - RNA, 19 nt, Homo sapiens
  misc_RNA (1)...(19): siRNA sense strand
gaaaaggaaggaacgcaaa

SEQ ID NO: 238956 - RNA, 19 nt, Homo sapiens
  misc_RNA (1)...(19): siRNA sense strand
gauccucagugaagugcau

SEQ ID NO: 238957 - RNA, 19 nt, Homo sapiens
  misc_RNA (1)...(19): siRNA sense strand
gagaaagauaucuguucaa

SEQ ID NO: 238958 - RNA, 19 nt, Homo sapiens
  misc_RNA (1)...(19): siRNA sense strand
gcccgaaaguccagaucga

SEQ ID NO: 238959 - RNA, 19 nt, Homo sapiens
  misc_RNA (1)...(19): siRNA sense strand
caaguuaacauccaaaaug

SEQ ID NO: 238960 - RNA, 19 nt, Homo sapiens
  misc_RNA (1)...(19): siRNA sense strand
cagagacacaccaauccua

SEQ ID NO: 238961 - RNA, 19 nt, Homo sapiens
  misc_RNA (1)...(19): siRNA sense strand
gauggaacuugguuaacac

SEQ ID NO: 238962 - RNA, 19 nt, Homo sapiens
  misc_RNA (1)...(19): siRNA sense strand
ucuggaagccuguagaaau

SEQ ID NO: 238963 - RNA, 19 nt, Homo sapiens
  misc_RNA (1)...(19): siRNA sense strand
gacaagagccauggaagag

SEQ ID NO: 238964 - RNA, 19 nt, Homo sapiens
  misc_RNA (1)...(19): siRNA sense strand
cagaaaugaaugaaggaaa

SEQ ID NO: 238965 - RNA, 19 nt, Homo sapiens
  misc_RNA (1)...(19): siRNA sense strand
uugaaggccuccuagacaa

SEQ ID NO: 238966 - RNA, 19 nt, Homo sapiens
  misc_RNA (1)...(19): siRNA sense strand
ccacgaagggucacacaag

SEQ ID NO: 238967 - RNA, 19 nt, Homo sapiens
  misc_RNA (1)...(19): siRNA sense strand
acacggauccucagugaag

SEQ ID NO: 238968 - RNA, 19 nt, Homo sapiens
  misc_RNA (1)...(19): siRNA sense strand
aauauucaccgaagaggaa

SEQ ID NO: 238969 - RNA, 19 nt, Homo sapiens
  misc_RNA (1)...(19): siRNA sense strand
gauaucuguucaagcucaa

SEQ ID NO: 238970 - RNA, 19 nt, Homo sapiens
  misc_RNA (1)...(19): siRNA sense strand
caacuggagaggacuuuua

SEQ ID NO: 238971 - RNA, 19 nt, Homo sapiens
  misc_RNA (1)...(19): siRNA sense strand
aagagaauguacauggaau

SEQ ID NO: 238972 - RNA, 19 nt, Homo sapiens
  misc_RNA (1)...(19): siRNA sense strand
gcgugaauaucccaaucug

SEQ ID NO: 238973 - RNA, 19 nt, Homo sapiens
  misc_RNA (1)...(19): siRNA sense strand
ucaaaggaaagacgacuca

SEQ ID NO: 238974 - RNA, 19 nt, Homo sapiens
  misc_RNA (1)...(19): siRNA sense strand
gggacagccucaucuagac

SEQ ID NO: 238975 - RNA, 19 nt, Homo sapiens
  misc_RNA (1)...(19): siRNA sense strand
ggacagccucaucuagaca

SEQ ID NO: 238976 - RNA, 19 nt, Homo sapiens
  misc_RNA (1)...(19): siRNA sense strand
cggaauauacguugugaag

SEQ ID NO: 238977 - RNA, 19 nt, Homo sapiens
  misc_RNA (1)...(19): siRNA sense strand
cgacucaaccuggaacuca

SEQ ID NO: 238978 - RNA, 19 nt, Homo sapiens
  misc_RNA (1)...(19): siRNA sense strand
auaaagaagacccucaaga

SEQ ID NO: 238979 - RNA, 19 nt, Homo sapiens
  misc_RNA (1)...(19): siRNA sense strand
aauauacguugugaaggaa

SEQ ID NO: 238980 - RNA, 19 nt, Homo sapiens
  misc_RNA (1)...(19): siRNA sense strand
gaccuguggugaggcgaaa

SEQ ID NO: 238981 - RNA, 19 nt, Homo sapiens
  misc_RNA (1)...(19): siRNA sense strand
ccgaaaguccagaucgaaa

SEQ ID NO: 238982 - RNA, 19 nt, Homo sapiens
  misc_RNA (1)...(19): siRNA sense strand
ucacuaagagaauguacau

SEQ ID NO: 238983 - RNA, 19 nt, Homo sapiens
  misc_RNA (1)...(19): siRNA sense strand
gaaggaagcucccuccaua

SEQ ID NO: 238984 - RNA, 19 nt, Homo sapiens
  misc_RNA (1)...(19): siRNA sense strand
ggaaagaggucccagaaga

SEQ ID NO: 238985 - RNA, 19 nt, Homo sapiens
  misc_RNA (1)...(19): siRNA sense strand
gaauauacguugugaagga

SEQ ID NO: 238986 - RNA, 19 nt, Homo sapiens
  misc_RNA (1)...(19): siRNA sense strand
aaagaugacucaacuugua

SEQ ID NO: 238987 - RNA, 19 nt, Homo sapiens
  misc_RNA (1)...(19): siRNA sense strand
ggagaaagauaucuguuca

SEQ ID NO: 238988 - RNA, 19 nt, Homo sapiens
  misc_RNA (1)...(19): siRNA sense strand
gcgaugagauccugaguga

SEQ ID NO: 238989 - RNA, 19 nt, Homo sapiens
  misc_RNA (1)...(19): siRNA sense strand
gaaauuugaucccuguauc

SEQ ID NO: 238990 - RNA, 19 nt, Homo sapiens
  misc_RNA (1)...(19): siRNA sense strand
caaauuaaccugcgugaau

SEQ ID NO: 238991 - RNA, 19 nt, Homo sapiens
  misc_RNA (1)...(19): siRNA sense strand
uaaggugacucaaaggaaa

SEQ ID NO: 238992 - RNA, 19 nt, Homo sapiens
  misc_RNA (1)...(19): siRNA sense strand
aaauuaaccugcgugaaua

SEQ ID NO: 238993 - RNA, 19 nt, Homo sapiens
  misc_RNA (1)...(19): siRNA sense strand
aaacacggauccucaguga

SEQ ID NO: 238994 - RNA, 19 nt, Homo sapiens
  misc_RNA (1)...(19): siRNA sense strand
gaauguacauggaaucucu

SEQ ID NO: 238995 - RNA, 19 nt, Homo sapiens
  misc_RNA (1)...(19): siRNA sense strand
aaagauaucuguucaagcu

SEQ ID NO: 238996 - RNA, 19 nt, Homo sapiens
  misc_RNA (1)...(19): siRNA sense strand
gaacucagaggucaugaug

SEQ ID NO: 238997 - RNA, 19 nt, Homo sapiens
  misc_RNA (1)...(19): siRNA sense strand
ggauggaacuugguuaaca

SEQ ID NO: 238998 - RNA, 19 nt, Homo sapiens
  misc_RNA (1)...(19): siRNA sense strand
ggaagccuguagaaauuug

SEQ ID NO: 238999 - RNA, 19 nt, Homo sapiens
  misc_RNA (1)...(19): siRNA sense strand
aaagaaagaugacucaacu

SEQ ID NO: 239000 - RNA, 19 nt, Homo sapiens
  misc_RNA (1)...(19): siRNA sense strand
gaacuggaaacggaauaua

SEQ ID NO: 239001 - RNA, 19 nt, Homo sapiens
  misc_RNA (1)...(19): siRNA sense strand
cuagacaacuccaucauca

SEQ ID NO: 239002 - RNA, 19 nt, Homo sapiens
  misc_RNA (1)...(19): siRNA sense strand
ggaacauccucccagcaaa

SEQ ID NO: 239003 - RNA, 19 nt, Homo sapiens
  misc_RNA (1)...(19): siRNA sense strand
gaacuaaaugugcccgaaa

SEQ ID NO: 239004 - RNA, 19 nt, Homo sapiens
  misc_RNA (1)...(19): siRNA sense strand
ggaaugaggauggaacuug

SEQ ID NO: 239005 - RNA, 19 nt, Homo sapiens
  misc_RNA (1)...(19): siRNA sense strand
agaagacccucaagagaug

SEQ ID NO: 239006 - RNA, 19 nt, Homo sapiens
  misc_RNA (1)...(19): siRNA sense strand
gaacugaaugugcccgaaa

SEQ ID NO: 239007 - RNA, 19 nt, Homo sapiens
  misc_RNA (1)...(19): siRNA sense strand
acaacuccaucaucacuaa

SEQ ID NO: 239008 - RNA, 19 nt, Homo sapiens
  misc_RNA (1)...(19): siRNA sense strand
caagccauuucccuucuuu

SEQ ID NO: 239009 - RNA, 19 nt, Homo sapiens
  misc_RNA (1)...(19): siRNA sense strand
gaaagaugacucaacuugu

SEQ ID NO: 239010 - RNA, 19 nt, Homo sapiens
  misc_RNA (1)...(19): siRNA sense strand
gaugagauccugagugagu

SEQ ID NO: 239011 - RNA, 19 nt, Homo sapiens
  misc_RNA (1)...(19): siRNA sense strand
cuggaagccuguagaaauu

SEQ ID NO: 239012 - RNA, 19 nt, Homo sapiens
  misc_RNA (1)...(19): siRNA sense strand
guacauggaaucucuggaa

SEQ ID NO: 239013 - RNA, 19 nt, Homo sapiens
  misc_RNA (1)...(19): siRNA sense strand
cagcacaccuucagacaag

SEQ ID NO: 239014 - RNA, 19 nt, Homo sapiens
  misc_RNA (1)...(19): siRNA sense strand
gaggauggaacuugguuaa

SEQ ID NO: 239015 - RNA, 19 nt, Homo sapiens
  misc_RNA (1)...(19): siRNA sense strand
ugauggcacuucagaaaug

SEQ ID NO: 239016 - RNA, 19 nt, Homo sapiens
  misc_RNA (1)...(19): siRNA sense strand
uaaagaagacccucaagag

SEQ ID NO: 239017 - RNA, 19 nt, Homo sapiens
  misc_RNA (1)...(19): siRNA sense strand
agaaaugaaugaaggaaag

SEQ ID NO: 239018 - RNA, 19 nt, Homo sapiens
  misc_RNA (1)...(19): siRNA sense strand
gagcagagacacaccaauc

SEQ ID NO: 239019 - RNA, 19 nt, Homo sapiens
  misc_RNA (1)...(19): siRNA sense strand
gggcauggcauccaagaga

SEQ ID NO: 239020 - RNA, 19 nt, Homo sapiens
  misc_RNA (1)...(19): siRNA sense strand
caucaucacuaagagaaug

SEQ ID NO: 239021 - RNA, 19 nt, Homo sapiens
  misc_RNA (1)...(19): siRNA sense strand
gauggcacuucagaaauga

SEQ ID NO: 239022 - RNA, 19 nt, Homo sapiens
  misc_RNA (1)...(19): siRNA sense strand
aaagaagacccucaagaga

SEQ ID NO: 239023 - RNA, 19 nt, Homo sapiens
  misc_RNA (1)...(19): siRNA sense strand
gaacauccucccagcaaag

SEQ ID NO: 239024 - RNA, 19 nt, Homo sapiens
  misc_RNA (1)...(19): siRNA sense strand
gaacgcaaagaacuggaaa

SEQ ID NO: 239025 - RNA, 19 nt, Homo sapiens
  misc_RNA (1)...(19): siRNA sense strand
ggaaggaacgcaaagaacu

SEQ ID NO: 239026 - RNA, 19 nt, Homo sapiens
  misc_RNA (1)...(19): siRNA sense strand
agaaagauaucuguucaag

SEQ ID NO: 239027 - RNA, 19 nt, Homo sapiens
  misc_RNA (1)...(19): siRNA sense strand
agaaagaugacucaacuug

SEQ ID NO: 239028 - RNA, 19 nt, Homo sapiens
  misc_RNA (1)...(19): siRNA sense strand
acacaccaauccuacuuga

SEQ ID NO: 239029 - RNA, 19 nt, Homo sapiens
  misc_RNA (1)...(19): siRNA sense strand
gaaggaacgcaaagaacug

SEQ ID NO: 239030 - RNA, 19 nt, Homo sapiens
  misc_RNA (1)...(19): siRNA sense strand
cuaagagaauguacaugga

SEQ ID NO: 239031 - RNA, 19 nt, Homo sapiens
  misc_RNA (1)...(19): siRNA sense strand
gauaaggugacucaaagga

SEQ ID NO: 239032 - RNA, 19 nt, Homo sapiens
  misc_RNA (1)...(19): siRNA sense strand
gaaaugaaugaaggaaaga

SEQ ID NO: 239033 - RNA, 19 nt, Homo sapiens
  misc_RNA (1)...(19): siRNA sense strand
ccagagauaagagauaauu

SEQ ID NO: 239034 - RNA, 19 nt, Homo sapiens
  misc_RNA (1)...(19): siRNA sense strand
agugaccaaugacaaguua

SEQ ID NO: 239035 - RNA, 19 nt, Homo sapiens
  misc_RNA (1)...(19): siRNA sense strand
ugccagagauaagagauaa

SEQ ID NO: 239036 - RNA, 19 nt, Homo sapiens
  misc_RNA (1)...(19): siRNA sense strand
gaggaaaacccaaaaguga

SEQ ID NO: 239037 - RNA, 19 nt, Homo sapiens
  misc_RNA (1)...(19): siRNA sense strand
uggauaaggugacucaaag

SEQ ID NO: 239038 - RNA, 19 nt, Homo sapiens
  misc_RNA (1)...(19): siRNA sense strand
ggcauggcauccaagagaa

SEQ ID NO: 239039 - RNA, 19 nt, Homo sapiens
  misc_RNA (1)...(19): siRNA sense strand
uaagagaauguacauggaa

SEQ ID NO: 239040 - RNA, 19 nt, Homo sapiens
  misc_RNA (1)...(19): siRNA sense strand
gaaagaggucccagaagac

SEQ ID NO: 239041 - RNA, 19 nt, Homo sapiens
  misc_RNA (1)...(19): siRNA sense strand
gguuaacaccaaaugaauu

SEQ ID NO: 239042 - RNA, 19 nt, Homo sapiens
  misc_RNA (1)...(19): siRNA sense strand
ccagaguggugcacaacau

SEQ ID NO: 239043 - RNA, 19 nt, Homo sapiens
  misc_RNA (1)...(19): siRNA sense strand
gcaaguggccagugacaac

SEQ ID NO: 239044 - RNA, 19 nt, Homo sapiens
  misc_RNA (1)...(19): siRNA sense strand
ugacaagagccauggaaga

SEQ ID NO: 239045 - RNA, 19 nt, Homo sapiens
  misc_RNA (1)...(19): siRNA sense strand
gcacaccuucagacaagaa

SEQ ID NO: 239046 - RNA, 19 nt, Homo sapiens
  misc_RNA (1)...(19): siRNA sense strand
gcacucauccaggaaggaa

SEQ ID NO: 239047 - RNA, 19 nt, Homo sapiens
  misc_RNA (1)...(19): siRNA sense strand
gcgaaagggauuuuauaua

SEQ ID NO: 239048 - RNA, 19 nt, Homo sapiens
  misc_RNA (1)...(19): siRNA sense strand
agaaccaaaugacccagaa

SEQ ID NO: 239049 - RNA, 19 nt, Homo sapiens
  misc_RNA (1)...(19): siRNA sense strand
ccaaugacaaguuaacauc

SEQ ID NO: 239050 - RNA, 19 nt, Homo sapiens
  misc_RNA (1)...(19): siRNA sense strand
aagaagacccucaagagau

SEQ ID NO: 239051 - RNA, 19 nt, Homo sapiens
  misc_RNA (1)...(19): siRNA sense strand
guggauaaggugacucaaa

SEQ ID NO: 239052 - RNA, 19 nt, Homo sapiens
  misc_RNA (1)...(19): siRNA sense strand
aauuugaagucgaaggaaa

SEQ ID NO: 239053 - RNA, 19 nt, Homo sapiens
  misc_RNA (1)...(19): siRNA sense strand
gacauuguucagucaaauu

SEQ ID NO: 239054 - RNA, 19 nt, Homo sapiens
  misc_RNA (1)...(19): siRNA sense strand
ggaacgcaaagaacuggaa

SEQ ID NO: 239055 - RNA, 19 nt, Homo sapiens
  misc_RNA (1)...(19): siRNA sense strand
gaaaaggaaggaacgcaaa

SEQ ID NO: 239056 - RNA, 19 nt, Homo sapiens
  misc_RNA (1)...(19): siRNA sense strand
gauccucagugaagugcau

SEQ ID NO: 239057 - RNA, 19 nt, Homo sapiens
  misc_RNA (1)...(19): siRNA sense strand
gagaaagauaucuguucaa

SEQ ID NO: 239058 - RNA, 19 nt, Homo sapiens
  misc_RNA (1)...(19): siRNA sense strand
gcccgaaaguccagaucga

SEQ ID NO: 239059 - RNA, 19 nt, Homo sapiens
  misc_RNA (1)...(19): siRNA sense strand
caaguuaacauccaaaaug

SEQ ID NO: 239060 - RNA, 19 nt, Homo sapiens
  misc_RNA (1)...(19): siRNA sense strand
cagagacacaccaauccua

SEQ ID NO: 239061 - RNA, 19 nt, Homo sapiens
  misc_RNA (1)...(19): siRNA sense strand
gauggaacuugguuaacac

SEQ ID NO: 239062 - RNA, 19 nt, Homo sapiens
  misc_RNA (1)...(19): siRNA sense strand
ucuggaagccuguagaaau

SEQ ID NO: 239063 - RNA, 19 nt, Homo sapiens
  misc_RNA (1)...(19): siRNA sense strand
gacaagagccauggaagag

SEQ ID NO: 239064 - RNA, 19 nt, Homo sapiens
  misc_RNA (1)...(19): siRNA sense strand
cagaaaugaaugaaggaaa

SEQ ID NO: 239065 - RNA, 19 nt, Homo sapiens
  misc_RNA (1)...(19): siRNA sense strand
uugaaggccuccuagacaa

SEQ ID NO: 239066 - RNA, 19 nt, Homo sapiens
  misc_RNA (1)...(19): siRNA sense strand
ccacgaagggucacacaag

SEQ ID NO: 239067 - RNA, 19 nt, Homo sapiens
  misc_RNA (1)...(19): siRNA sense strand
acacggauccucagugaag

SEQ ID NO: 239068 - RNA, 19 nt, Homo sapiens
  misc_RNA (1)...(19): siRNA sense strand
aauauucaccgaagaggaa

SEQ ID NO: 239069 - RNA, 19 nt, Homo sapiens
  misc_RNA (1)...(19): siRNA sense strand
gauaucuguucaagcucaa

SEQ ID NO: 239070 - RNA, 19 nt, Homo sapiens
  misc_RNA (1)...(19): siRNA sense strand
caacuggagaggacuuuua

SEQ ID NO: 239071 - RNA, 19 nt, Homo sapiens
  misc_RNA (1)...(19): siRNA sense strand
aagagaauguacauggaau

SEQ ID NO: 239072 - RNA, 19 nt, Homo sapiens
  misc_RNA (1)...(19): siRNA sense strand
gcgugaauaucccaaucug

SEQ ID NO: 239073 - RNA, 19 nt, Homo sapiens
  misc_RNA (1)...(19): siRNA sense strand
ucaaaggaaagacgacuca

SEQ ID NO: 239074 - RNA, 19 nt, Homo sapiens
  misc_RNA (1)...(19): siRNA sense strand
gggacagccucaucuagac

SEQ ID NO: 239075 - RNA, 19 nt, Homo sapiens
  misc_RNA (1)...(19): siRNA sense strand
ggacagccucaucuagaca

SEQ ID NO: 239076 - RNA, 19 nt, Homo sapiens
  misc_RNA (1)...(19): siRNA sense strand
cggaauauacguugugaag

SEQ ID NO: 239077 - RNA, 19 nt, Homo sapiens
  misc_RNA (1)...(19): siRNA sense strand
cgacucaaccuggaacuca

SEQ ID NO: 239078 - RNA, 19 nt, Homo sapiens
  misc_RNA (1)...(19): siRNA sense strand
auaaagaagacccucaaga

SEQ ID NO: 239079 - RNA, 19 nt, Homo sapiens
  misc_RNA (1)...(19): siRNA sense strand
aauauacguugugaaggaa

SEQ ID NO: 239080 - RNA, 19 nt, Homo sapiens
  misc_RNA (1)...(19): siRNA sense strand
gaccuguggugaggcgaaa

SEQ ID NO: 239081 - RNA, 19 nt, Homo sapiens
  misc_RNA (1)...(19): siRNA sense strand
ccgaaaguccagaucgaaa

SEQ ID NO: 239082 - RNA, 19 nt, Homo sapiens
  misc_RNA (1)...(19): siRNA sense strand
ucacuaagagaauguacau

SEQ ID NO: 239083 - RNA, 19 nt, Homo sapiens
  misc_RNA (1)...(19): siRNA sense strand
ccaaacagagcaacaacaa

SEQ ID NO: 239084 - RNA, 19 nt, Homo sapiens
  misc_RNA (1)...(19): siRNA sense strand
aaacagagcaacaacaagu

SEQ ID NO: 239085 - RNA, 19 nt, Homo sapiens
  misc_RNA (1)...(19): siRNA sense strand
caguggaggucccgcagaa

SEQ ID NO: 239086 - RNA, 19 nt, Homo sapiens
  misc_RNA (1)...(19): siRNA sense strand
ugaccacgcccuccaaaca

SEQ ID NO: 239087 - RNA, 19 nt, Homo sapiens
  misc_RNA (1)...(19): siRNA sense strand
gaugaccacgcccuccaaa

SEQ ID NO: 239088 - RNA, 19 nt, Homo sapiens
  misc_RNA (1)...(19): siRNA sense strand
ggaggucccgcagaagcua

SEQ ID NO: 239089 - RNA, 19 nt, Homo sapiens
  misc_RNA (1)...(19): siRNA sense strand
ggagcaccguggagaagac

SEQ ID NO: 239090 - RNA, 19 nt, Homo sapiens
  misc_RNA (1)...(19): siRNA sense strand
ucuugacggugaccuggaa

SEQ ID NO: 239091 - RNA, 19 nt, Homo sapiens
  misc_RNA (1)...(19): siRNA sense strand
gcacaaacaucaagauaac

SEQ ID NO: 239092 - RNA, 19 nt, Homo sapiens
  misc_RNA (1)...(19): siRNA sense strand
caucugaccucaauuuaau

SEQ ID NO: 239093 - RNA, 19 nt, Homo sapiens
  misc_RNA (1)...(19): siRNA sense strand
ucgaguaucugaugaagaa

SEQ ID NO: 239094 - RNA, 19 nt, Homo sapiens
  misc_RNA (1)...(19): siRNA sense strand
acaaacagcucacccugaa

SEQ ID NO: 239095 - RNA, 19 nt, Homo sapiens
  misc_RNA (1)...(19): siRNA sense strand
gagcacaaacaucaagaua

SEQ ID NO: 239096 - RNA, 19 nt, Homo sapiens
  misc_RNA (1)...(19): siRNA sense strand
caaagccgccuuacuccua

SEQ ID NO: 239097 - RNA, 19 nt, Homo sapiens
  misc_RNA (1)...(19): siRNA sense strand
uuuaauggcugacaacuca

SEQ ID NO: 239098 - RNA, 19 nt, Homo sapiens
  misc_RNA (1)...(19): siRNA sense strand
uacgauggcucccgacaaa

SEQ ID NO: 239099 - RNA, 19 nt, Homo sapiens
  misc_RNA (1)...(19): siRNA sense strand
gagcugaagcggaucaaga

SEQ ID NO: 239100 - RNA, 19 nt, Homo sapiens
  misc_RNA (1)...(19): siRNA sense strand
ugaagcggaucaagacaga

SEQ ID NO: 239101 - RNA, 19 nt, Homo sapiens
  misc_RNA (1)...(19): siRNA sense strand
ugaacgggauuuauacaca

SEQ ID NO: 239102 - RNA, 19 nt, Homo sapiens
  misc_RNA (1)...(19): siRNA sense strand
gagacagcccgaaggauga

SEQ ID NO: 239103 - RNA, 19 nt, Homo sapiens
  misc_RNA (1)...(19): siRNA sense strand
gcccgaaggaugauucaaa

SEQ ID NO: 239104 - RNA, 19 nt, Homo sapiens
  misc_RNA (1)...(19): siRNA sense strand
ucaauuuaauggcugacaa

SEQ ID NO: 239105 - RNA, 19 nt, Homo sapiens
  misc_RNA (1)...(19): siRNA sense strand
ccaucugaccucaauuuaa

SEQ ID NO: 239106 - RNA, 19 nt, Homo sapiens
  misc_RNA (1)...(19): siRNA sense strand
gcgaguccuuugcacaugu

SEQ ID NO: 239107 - RNA, 19 nt, Homo sapiens
  misc_RNA (1)...(19): siRNA sense strand
ggaaaaggguguccagaac

SEQ ID NO: 239108 - RNA, 19 nt, Homo sapiens
  misc_RNA (1)...(19): siRNA sense strand
caaggugggccgagugaug

SEQ ID NO: 239109 - RNA, 19 nt, Homo sapiens
  misc_RNA (1)...(19): siRNA sense strand
gccaucugaccucaauuua

SEQ ID NO: 239110 - RNA, 19 nt, Homo sapiens
  misc_RNA (1)...(19): siRNA sense strand
gcaggaggcgucugagucu

SEQ ID NO: 239111 - RNA, 19 nt, Homo sapiens
  misc_RNA (1)...(19): siRNA sense strand
gaguucgaguaucugauga

SEQ ID NO: 239112 - RNA, 19 nt, Homo sapiens
  misc_RNA (1)...(19): siRNA sense strand
aaaaggguguccagaacua

SEQ ID NO: 239113 - RNA, 19 nt, Homo sapiens
  misc_RNA (1)...(19): siRNA sense strand
cuacaggacugcggacaag

SEQ ID NO: 239114 - RNA, 19 nt, Homo sapiens
  misc_RNA (1)...(19): siRNA sense strand
acgcgcagcugauaguuca

SEQ ID NO: 239115 - RNA, 19 nt, Homo sapiens
  misc_RNA (1)...(19): siRNA sense strand
cgaguucgaguaucugaug

SEQ ID NO: 239116 - RNA, 19 nt, Homo sapiens
  misc_RNA (1)...(19): siRNA sense strand
caccauggcccaccucauc

SEQ ID NO: 239117 - RNA, 19 nt, Homo sapiens
  misc_RNA (1)...(19): siRNA sense strand
gaaccaucagcgcugcaaa

SEQ ID NO: 239118 - RNA, 19 nt, Homo sapiens
  misc_RNA (1)...(19): siRNA sense strand
cgaguccuuugcacauguu

SEQ ID NO: 239119 - RNA, 19 nt, Homo sapiens
  misc_RNA (1)...(19): siRNA sense strand
acccugaacgggauuuaua

SEQ ID NO: 239120 - RNA, 19 nt, Homo sapiens
  misc_RNA (1)...(19): siRNA sense strand
gcgucugagucuccaguga

SEQ ID NO: 239121 - RNA, 19 nt, Homo sapiens
  misc_RNA (1)...(19): siRNA sense strand
gcgagggcaucgucauugc

SEQ ID NO: 239122 - RNA, 19 nt, Homo sapiens
  misc_RNA (1)...(19): siRNA sense strand
cccgaaggaugauucaaag

SEQ ID NO: 239123 - RNA, 19 nt, Homo sapiens
  misc_RNA (1)...(19): siRNA sense strand
agaagcaggaggcgucuga

SEQ ID NO: 239124 - RNA, 19 nt, Homo sapiens
  misc_RNA (1)...(19): siRNA sense strand
gcgagaagagagagaagca

SEQ ID NO: 239125 - RNA, 19 nt, Homo sapiens
  misc_RNA (1)...(19): siRNA sense strand
gccgcgaguucgaguaucu

SEQ ID NO: 239126 - RNA, 19 nt, Homo sapiens
  misc_RNA (1)...(19): siRNA sense strand
ugccaucugaccucaauuu

SEQ ID NO: 239127 - RNA, 19 nt, Homo sapiens
  misc_RNA (1)...(19): siRNA sense strand
caaacaucaagauaacguu

SEQ ID NO: 239128 - RNA, 19 nt, Homo sapiens
  misc_RNA (1)...(19): siRNA sense strand
cgauggcucccgacaaaca

SEQ ID NO: 239129 - RNA, 19 nt, Homo sapiens
  misc_RNA (1)...(19): siRNA sense strand
ggcgaguccuuugcacaug

SEQ ID NO: 239130 - RNA, 19 nt, Homo sapiens
  misc_RNA (1)...(19): siRNA sense strand
agcacaaacaucaagauaa

SEQ ID NO: 239131 - RNA, 19 nt, Homo sapiens
  misc_RNA (1)...(19): siRNA sense strand
gggaaaaggguguccagaa

SEQ ID NO: 239132 - RNA, 19 nt, Homo sapiens
  misc_RNA (1)...(19): siRNA sense strand
acucacagccugaaaauga

SEQ ID NO: 239133 - RNA, 19 nt, Homo sapiens
  misc_RNA (1)...(19): siRNA sense strand
guucgaguaucugaugaag

SEQ ID NO: 239134 - RNA, 19 nt, Homo sapiens
  misc_RNA (1)...(19): siRNA sense strand
cgucugagucuccagugaa

SEQ ID NO: 239135 - RNA, 19 nt, Homo sapiens
  misc_RNA (1)...(19): siRNA sense strand
gcaugggccacucgagcuu

SEQ ID NO: 239136 - RNA, 19 nt, Homo sapiens
  misc_RNA (1)...(19): siRNA sense strand
ugacaacucacagccugaa

SEQ ID NO: 239137 - RNA, 19 nt, Homo sapiens
  misc_RNA (1)...(19): siRNA sense strand
gcacaaacaucaagauaac

SEQ ID NO: 239138 - RNA, 19 nt, Homo sapiens
  misc_RNA (1)...(19): siRNA sense strand
caucugaccucaauuuaau

SEQ ID NO: 239139 - RNA, 19 nt, Homo sapiens
  misc_RNA (1)...(19): siRNA sense strand
ucgaguaucugaugaagaa

SEQ ID NO: 239140 - RNA, 19 nt, Homo sapiens
  misc_RNA (1)...(19): siRNA sense strand
acaaacagcucacccugaa

SEQ ID NO: 239141 - RNA, 19 nt, Homo sapiens
  misc_RNA (1)...(19): siRNA sense strand
gagcacaaacaucaagaua

SEQ ID NO: 239142 - RNA, 19 nt, Homo sapiens
  misc_RNA (1)...(19): siRNA sense strand
caaagccgccuuacuccua

SEQ ID NO: 239143 - RNA, 19 nt, Homo sapiens
  misc_RNA (1)...(19): siRNA sense strand
uuuaauggcugacaacuca

SEQ ID NO: 239144 - RNA, 19 nt, Homo sapiens
  misc_RNA (1)...(19): siRNA sense strand
uacgauggcucccgacaaa

SEQ ID NO: 239145 - RNA, 19 nt, Homo sapiens
  misc_RNA (1)...(19): siRNA sense strand
ugaacgggauuuauacaca

SEQ ID NO: 239146 - RNA, 19 nt, Homo sapiens
  misc_RNA (1)...(19): siRNA sense strand
gagacagcccgaaggauga

SEQ ID NO: 239147 - RNA, 19 nt, Homo sapiens
  misc_RNA (1)...(19): siRNA sense strand
gcccgaaggaugauucaaa

SEQ ID NO: 239148 - RNA, 19 nt, Homo sapiens
  misc_RNA (1)...(19): siRNA sense strand
ucaauuuaauggcugacaa

SEQ ID NO: 239149 - RNA, 19 nt, Homo sapiens
  misc_RNA (1)...(19): siRNA sense strand
ccaucugaccucaauuuaa

SEQ ID NO: 239150 - RNA, 19 nt, Homo sapiens
  misc_RNA (1)...(19): siRNA sense strand
caaggugggccgagugaug

SEQ ID NO: 239151 - RNA, 19 nt, Homo sapiens
  misc_RNA (1)...(19): siRNA sense strand
gccaucugaccucaauuua

SEQ ID NO: 239152 - RNA, 19 nt, Homo sapiens
  misc_RNA (1)...(19): siRNA sense strand
gcaggaggcgucugagucu

SEQ ID NO: 239153 - RNA, 19 nt, Homo sapiens
  misc_RNA (1)...(19): siRNA sense strand
gaguucgaguaucugauga

SEQ ID NO: 239154 - RNA, 19 nt, Homo sapiens
  misc_RNA (1)...(19): siRNA sense strand
cuacaggacugcggacaag

SEQ ID NO: 239155 - RNA, 19 nt, Homo sapiens
  misc_RNA (1)...(19): siRNA sense strand
acgcgcagcugauaguuca

SEQ ID NO: 239156 - RNA, 19 nt, Homo sapiens
  misc_RNA (1)...(19): siRNA sense strand
cgaguucgaguaucugaug

SEQ ID NO: 239157 - RNA, 19 nt, Homo sapiens
  misc_RNA (1)...(19): siRNA sense strand
caccauggcccaccucauc

SEQ ID NO: 239158 - RNA, 19 nt, Homo sapiens
  misc_RNA (1)...(19): siRNA sense strand
gaaccaucagcgcugcaaa

SEQ ID NO: 239159 - RNA, 19 nt, Homo sapiens
  misc_RNA (1)...(19): siRNA sense strand
acccugaacgggauuuaua

SEQ ID NO: 239160 - RNA, 19 nt, Homo sapiens
  misc_RNA (1)...(19): siRNA sense strand
gcgucugagucuccaguga

SEQ ID NO: 239161 - RNA, 19 nt, Homo sapiens
  misc_RNA (1)...(19): siRNA sense strand
cccgaaggaugauucaaag

SEQ ID NO: 239162 - RNA, 19 nt, Homo sapiens
  misc_RNA (1)...(19): siRNA sense strand
agaagcaggaggcgucuga

SEQ ID NO: 239163 - RNA, 19 nt, Homo sapiens
  misc_RNA (1)...(19): siRNA sense strand
gcgagaagagagagaagca

SEQ ID NO: 239164 - RNA, 19 nt, Homo sapiens
  misc_RNA (1)...(19): siRNA sense strand
gccgcgaguucgaguaucu

SEQ ID NO: 239165 - RNA, 19 nt, Homo sapiens
  misc_RNA (1)...(19): siRNA sense strand
ugccaucugaccucaauuu

SEQ ID NO: 239166 - RNA, 19 nt, Homo sapiens
  misc_RNA (1)...(19): siRNA sense strand
caaacaucaagauaacguu

SEQ ID NO: 239167 - RNA, 19 nt, Homo sapiens
  misc_RNA (1)...(19): siRNA sense strand
cgauggcucccgacaaaca

SEQ ID NO: 239168 - RNA, 19 nt, Homo sapiens
  misc_RNA (1)...(19): siRNA sense strand
agcacaaacaucaagauaa

SEQ ID NO: 239169 - RNA, 19 nt, Homo sapiens
  misc_RNA (1)...(19): siRNA sense strand
acucacagccugaaaauga

SEQ ID NO: 239170 - RNA, 19 nt, Homo sapiens
  misc_RNA (1)...(19): siRNA sense strand
guucgaguaucugaugaag

SEQ ID NO: 239171 - RNA, 19 nt, Homo sapiens
  misc_RNA (1)...(19): siRNA sense strand
cgucugagucuccagugaa

SEQ ID NO: 239172 - RNA, 19 nt, Homo sapiens
  misc_RNA (1)...(19): siRNA sense strand
ugacaacucacagccugaa

SEQ ID NO: 239173 - RNA, 19 nt, Homo sapiens
  misc_RNA (1)...(19): siRNA sense strand
gcaugggccacucgagcuu

SEQ ID NO: 239174 - RNA, 19 nt, Homo sapiens
  misc_RNA (1)...(19): siRNA sense strand
gcacaaacaucaagauaac

SEQ ID NO: 239175 - RNA, 19 nt, Homo sapiens
  misc_RNA (1)...(19): siRNA sense strand
caucugaccucaauuuaau

SEQ ID NO: 239176 - RNA, 19 nt, Homo sapiens
  misc_RNA (1)...(19): siRNA sense strand
ucgaguaucugaugaagaa

SEQ ID NO: 239177 - RNA, 19 nt, Homo sapiens
  misc_RNA (1)...(19): siRNA sense strand
acaaacagcucacccugaa

SEQ ID NO: 239178 - RNA, 19 nt, Homo sapiens
  misc_RNA (1)...(19): siRNA sense strand
gagcacaaacaucaagaua

SEQ ID NO: 239179 - RNA, 19 nt, Homo sapiens
  misc_RNA (1)...(19): siRNA sense strand
caaagccgccuuacuccua

SEQ ID NO: 239180 - RNA, 19 nt, Homo sapiens
  misc_RNA (1)...(19): siRNA sense strand
uuuaauggcugacaacuca

SEQ ID NO: 239181 - RNA, 19 nt, Homo sapiens
  misc_RNA (1)...(19): siRNA sense strand
uacgauggcucccgacaaa

SEQ ID NO: 239182 - RNA, 19 nt, Homo sapiens
  misc_RNA (1)...(19): siRNA sense strand
ugaacgggauuuauacaca

SEQ ID NO: 239183 - RNA, 19 nt, Homo sapiens
  misc_RNA (1)...(19): siRNA sense strand
gagacagcccgaaggauga

SEQ ID NO: 239184 - RNA, 19 nt, Homo sapiens
  misc_RNA (1)...(19): siRNA sense strand
gcccgaaggaugauucaaa

SEQ ID NO: 239185 - RNA, 19 nt, Homo sapiens
  misc_RNA (1)...(19): siRNA sense strand
ucaauuuaauggcugacaa

SEQ ID NO: 239186 - RNA, 19 nt, Homo sapiens
  misc_RNA (1)...(19): siRNA sense strand
ccaucugaccucaauuuaa

SEQ ID NO: 239187 - RNA, 19 nt, Homo sapiens
  misc_RNA (1)...(19): siRNA sense strand
gcgaguccuuugcacaugu

SEQ ID NO: 239188 - RNA, 19 nt, Homo sapiens
  misc_RNA (1)...(19): siRNA sense strand
caaggugggccgagugaug

SEQ ID NO: 239189 - RNA, 19 nt, Homo sapiens
  misc_RNA (1)...(19): siRNA sense strand
gccaucugaccucaauuua

SEQ ID NO: 239190 - RNA, 19 nt, Homo sapiens
  misc_RNA (1)...(19): siRNA sense strand
gcaggaggcgucugagucu

SEQ ID NO: 239191 - RNA, 19 nt, Homo sapiens
  misc_RNA (1)...(19): siRNA sense strand
gaguucgaguaucugauga

SEQ ID NO: 239192 - RNA, 19 nt, Homo sapiens
  misc_RNA (1)...(19): siRNA sense strand
cuacaggacugcggacaag

SEQ ID NO: 239193 - RNA, 19 nt, Homo sapiens
  misc_RNA (1)...(19): siRNA sense strand
acgcgcagcugauaguuca

SEQ ID NO: 239194 - RNA, 19 nt, Homo sapiens
  misc_RNA (1)...(19): siRNA sense strand
cgaguucgaguaucugaug

SEQ ID NO: 239195 - RNA, 19 nt, Homo sapiens
  misc_RNA (1)...(19): siRNA sense strand
caccauggcccaccucauc

SEQ ID NO: 239196 - RNA, 19 nt, Homo sapiens
  misc_RNA (1)...(19): siRNA sense strand
gaaccaucagcgcugcaaa

SEQ ID NO: 239197 - RNA, 19 nt, Homo sapiens
  misc_RNA (1)...(19): siRNA sense strand
cgaguccuuugcacauguu

SEQ ID NO: 239198 - RNA, 19 nt, Homo sapiens
  misc_RNA (1)...(19): siRNA sense strand
acccugaacgggauuuaua

SEQ ID NO: 239199 - RNA, 19 nt, Homo sapiens
  misc_RNA (1)...(19): siRNA sense strand
gcgucugagucuccaguga

SEQ ID NO: 239200 - RNA, 19 nt, Homo sapiens
  misc_RNA (1)...(19): siRNA sense strand
cccgaaggaugauucaaag

SEQ ID NO: 239201 - RNA, 19 nt, Homo sapiens
  misc_RNA (1)...(19): siRNA sense strand
agaagcaggaggcgucuga

SEQ ID NO: 239202 - RNA, 19 nt, Homo sapiens
  misc_RNA (1)...(19): siRNA sense strand
gcgagaagagagagaagca

SEQ ID NO: 239203 - RNA, 19 nt, Homo sapiens
  misc_RNA (1)...(19): siRNA sense strand
gccgcgaguucgaguaucu

SEQ ID NO: 239204 - RNA, 19 nt, Homo sapiens
  misc_RNA (1)...(19): siRNA sense strand
ugccaucugaccucaauuu

SEQ ID NO: 239205 - RNA, 19 nt, Homo sapiens
  misc_RNA (1)...(19): siRNA sense strand
caaacaucaagauaacguu

SEQ ID NO: 239206 - RNA, 19 nt, Homo sapiens
  misc_RNA (1)...(19): siRNA sense strand
cgauggcucccgacaaaca

SEQ ID NO: 239207 - RNA, 19 nt, Homo sapiens
  misc_RNA (1)...(19): siRNA sense strand
ggcgaguccuuugcacaug

SEQ ID NO: 239208 - RNA, 19 nt, Homo sapiens
  misc_RNA (1)...(19): siRNA sense strand
agcacaaacaucaagauaa

SEQ ID NO: 239209 - RNA, 19 nt, Homo sapiens
  misc_RNA (1)...(19): siRNA sense strand
acucacagccugaaaauga

SEQ ID NO: 239210 - RNA, 19 nt, Homo sapiens
  misc_RNA (1)...(19): siRNA sense strand
guucgaguaucugaugaag

SEQ ID NO: 239211 - RNA, 19 nt, Homo sapiens
  misc_RNA (1)...(19): siRNA sense strand
cgucugagucuccagugaa

SEQ ID NO: 239212 - RNA, 19 nt, Homo sapiens
  misc_RNA (1)...(19): siRNA sense strand
ugacaacucacagccugaa

SEQ ID NO: 239213 - RNA, 19 nt, Homo sapiens
  misc_RNA (1)...(19): siRNA sense strand
gcaugggccacucgagcuu

SEQ ID NO: 239214 - RNA, 19 nt, Homo sapiens
  misc_RNA (1)...(19): siRNA sense strand
ggacaugacugcccgaauu

SEQ ID NO: 239215 - RNA, 19 nt, Homo sapiens
  misc_RNA (1)...(19): siRNA sense strand
gaagaagccugaagacaca

SEQ ID NO: 239216 - RNA, 19 nt, Homo sapiens
  misc_RNA (1)...(19): siRNA sense strand
gaacaaacacucuggcauu

SEQ ID NO: 239217 - RNA, 19 nt, Homo sapiens
  misc_RNA (1)...(19): siRNA sense strand
ugacgaagcucaacgagaa

SEQ ID NO: 239218 - RNA, 19 nt, Homo sapiens
  misc_RNA (1)...(19): siRNA sense strand
caaguucucuuuccaaugu

SEQ ID NO: 239219 - RNA, 19 nt, Homo sapiens
  misc_RNA (1)...(19): siRNA sense strand
uaacaaguauggagagaug

SEQ ID NO: 239220 - RNA, 19 nt, Homo sapiens
  misc_RNA (1)...(19): siRNA sense strand
gaaguuugcuuuggacaug

SEQ ID NO: 239221 - RNA, 19 nt, Homo sapiens
  misc_RNA (1)...(19): siRNA sense strand
uacagaagcuauugcagua

SEQ ID NO: 239222 - RNA, 19 nt, Homo sapiens
  misc_RNA (1)...(19): siRNA sense strand
gaaauggaacccugaacaa

SEQ ID NO: 239223 - RNA, 19 nt, Homo sapiens
  misc_RNA (1)...(19): siRNA sense strand
cagcagacauguggaguuu

SEQ ID NO: 239224 - RNA, 19 nt, Homo sapiens
  misc_RNA (1)...(19): siRNA sense strand
cagaggaccugguggcaaa

SEQ ID NO: 239225 - RNA, 19 nt, Homo sapiens
  misc_RNA (1)...(19): siRNA sense strand
gccagaaucucaaccguau

SEQ ID NO: 239226 - RNA, 19 nt, Homo sapiens
  misc_RNA (1)...(19): siRNA sense strand
ccgaagcucugcagaagaa

SEQ ID NO: 239227 - RNA, 19 nt, Homo sapiens
  misc_RNA (1)...(19): siRNA sense strand
gaauuagcauggcugaugu

SEQ ID NO: 239228 - RNA, 19 nt, Homo sapiens
  misc_RNA (1)...(19): siRNA sense strand
guacaaggcagacaucaau

SEQ ID NO: 239229 - RNA, 19 nt, Homo sapiens
  misc_RNA (1)...(19): siRNA sense strand
gcacggaucaauguaauga

SEQ ID NO: 239230 - RNA, 19 nt, Homo sapiens
  misc_RNA (1)...(19): siRNA sense strand
uagcauggcugaugucaag

SEQ ID NO: 239231 - RNA, 19 nt, Homo sapiens
  misc_RNA (1)...(19): siRNA sense strand
guaguguaaugauugauga

SEQ ID NO: 239232 - RNA, 19 nt, Homo sapiens
  misc_RNA (1)...(19): siRNA sense strand
gacaugacugcccgaauua

SEQ ID NO: 239233 - RNA, 19 nt, Homo sapiens
  misc_RNA (1)...(19): siRNA sense strand
uguguaagcucaugaagau

SEQ ID NO: 239234 - RNA, 19 nt, Homo sapiens
  misc_RNA (1)...(19): siRNA sense strand
agacaucaaugcagugaau

SEQ ID NO: 239235 - RNA, 19 nt, Homo sapiens
  misc_RNA (1)...(19): siRNA sense strand
uugcugaccucuccaauau

SEQ ID NO: 239236 - RNA, 19 nt, Homo sapiens
  misc_RNA (1)...(19): siRNA sense strand
caauagccguaguguaaug

SEQ ID NO: 239237 - RNA, 19 nt, Homo sapiens
  misc_RNA (1)...(19): siRNA sense strand
cucaauagccguaguguaa

SEQ ID NO: 239238 - RNA, 19 nt, Homo sapiens
  misc_RNA (1)...(19): siRNA sense strand
guucgagacuggaguacaa

SEQ ID NO: 239239 - RNA, 19 nt, Homo sapiens
  misc_RNA (1)...(19): siRNA sense strand
cagcaucuguaacaaguau

SEQ ID NO: 239240 - RNA, 19 nt, Homo sapiens
  misc_RNA (1)...(19): siRNA sense strand
gaaugaagacccugcaaag

SEQ ID NO: 239241 - RNA, 19 nt, Homo sapiens
  misc_RNA (1)...(19): siRNA sense strand
ucaaacagcuuaacuuccu

SEQ ID NO: 239242 - RNA, 19 nt, Homo sapiens
  misc_RNA (1)...(19): siRNA sense strand
cagagaagaugggccagaa

SEQ ID NO: 239243 - RNA, 19 nt, Homo sapiens
  misc_RNA (1)...(19): siRNA sense strand
gaagaugcaggacaaguag

SEQ ID NO: 239244 - RNA, 19 nt, Homo sapiens
  misc_RNA (1)...(19): siRNA sense strand
gggcacggaucaauguaau

SEQ ID NO: 239245 - RNA, 19 nt, Homo sapiens
  misc_RNA (1)...(19): siRNA sense strand
augaagaucugcaugaaug

SEQ ID NO: 239246 - RNA, 19 nt, Homo sapiens
  misc_RNA (1)...(19): siRNA sense strand
gcugaccucuccaauaugg

SEQ ID NO: 239247 - RNA, 19 nt, Homo sapiens
  misc_RNA (1)...(19): siRNA sense strand
ucaaugcagugaaugaaca

SEQ ID NO: 239248 - RNA, 19 nt, Homo sapiens
  misc_RNA (1)...(19): siRNA sense strand
gcagacauguggaguuuug

SEQ ID NO: 239249 - RNA, 19 nt, Homo sapiens
  misc_RNA (1)...(19): siRNA sense strand
agagaugccuguggacaaa

SEQ ID NO: 239250 - RNA, 19 nt, Homo sapiens
  misc_RNA (1)...(19): siRNA sense strand
cgaauuagcauggcugaug

SEQ ID NO: 239251 - RNA, 19 nt, Homo sapiens
  misc_RNA (1)...(19): siRNA sense strand
guauggaucccucuacaau

SEQ ID NO: 239252 - RNA, 19 nt, Homo sapiens
  misc_RNA (1)...(19): siRNA sense strand
agaagaugcaggacaagua

SEQ ID NO: 239253 - RNA, 19 nt, Homo sapiens
  misc_RNA (1)...(19): siRNA sense strand
cgacccaaauuugacauga

SEQ ID NO: 239254 - RNA, 19 nt, Homo sapiens
  misc_RNA (1)...(19): siRNA sense strand
cagaagcuauugcaguaca

SEQ ID NO: 239255 - RNA, 19 nt, Homo sapiens
  misc_RNA (1)...(19): siRNA sense strand
gaagaucugcaugaaugaa

SEQ ID NO: 239256 - RNA, 19 nt, Homo sapiens
  misc_RNA (1)...(19): siRNA sense strand
gagaagaugggccagaauc

SEQ ID NO: 239257 - RNA, 19 nt, Homo sapiens
  misc_RNA (1)...(19): siRNA sense strand
gagagaugccuguggacaa

SEQ ID NO: 239258 - RNA, 19 nt, Homo sapiens
  misc_RNA (1)...(19): siRNA sense strand
caaacacucuggcauugac

SEQ ID NO: 239259 - RNA, 19 nt, Homo sapiens
  misc_RNA (1)...(19): siRNA sense strand
ggcauggccuuccuacaca

SEQ ID NO: 239260 - RNA, 19 nt, Homo sapiens
  misc_RNA (1)...(19): siRNA sense strand
cugcaaagcgacccaaauu

SEQ ID NO: 239261 - RNA, 19 nt, Homo sapiens
  misc_RNA (1)...(19): siRNA sense strand
gcucugcugugguugagau

SEQ ID NO: 239262 - RNA, 19 nt, Homo sapiens
  misc_RNA (1)...(19): siRNA sense strand
acccaaauuugacaugauu

SEQ ID NO: 239263 - RNA, 19 nt, Homo sapiens
  misc_RNA (1)...(19): siRNA sense strand
gauauuguacagaagcuau

SEQ ID NO: 239264 - RNA, 19 nt, Homo sapiens
  misc_RNA (1)...(19): siRNA sense strand
aacaaacacucuggcauug

SEQ ID NO: 239265 - RNA, 19 nt, Homo sapiens
  misc_RNA (1)...(19): siRNA sense strand
gcagacaucaaugcaguga

SEQ ID NO: 239266 - RNA, 19 nt, Homo sapiens
  misc_RNA (1)...(19): siRNA sense strand
cgaaauggaacccugaaca

SEQ ID NO: 239267 - RNA, 19 nt, Homo sapiens
  misc_RNA (1)...(19): siRNA sense strand
gacccaaauuugacaugau

SEQ ID NO: 239268 - RNA, 19 nt, Homo sapiens
  misc_RNA (1)...(19): siRNA sense strand
ccacgacaugcacucaaua

SEQ ID NO: 239269 - RNA, 19 nt, Homo sapiens
  misc_RNA (1)...(19): siRNA sense strand
uacaugaaggcaccaauuu

SEQ ID NO: 239270 - RNA, 19 nt, Homo sapiens
  misc_RNA (1)...(19): siRNA sense strand
gucagcaucuguaacaagu

SEQ ID NO: 239271 - RNA, 19 nt, Homo sapiens
  misc_RNA (1)...(19): siRNA sense strand
uugagaagaugcaggacaa

SEQ ID NO: 239272 - RNA, 19 nt, Homo sapiens
  misc_RNA (1)...(19): siRNA sense strand
cuacaugaaggcaccaauu

SEQ ID NO: 239273 - RNA, 19 nt, Homo sapiens
  misc_RNA (1)...(19): siRNA sense strand
ugaaugaagacccugcaaa

SEQ ID NO: 239274 - RNA, 19 nt, Homo sapiens
  misc_RNA (1)...(19): siRNA sense strand
gucaaguucucuuuccaau

SEQ ID NO: 239275 - RNA, 19 nt, Homo sapiens
  misc_RNA (1)...(19): siRNA sense strand
gccguaguguaaugauuga

SEQ ID NO: 239276 - RNA, 19 nt, Homo sapiens
  misc_RNA (1)...(19): siRNA sense strand
ugaaugaacacgggaaugu

SEQ ID NO: 239277 - RNA, 19 nt, Homo sapiens
  misc_RNA (1)...(19): siRNA sense strand
gagacuggaguacaaggaa

SEQ ID NO: 239278 - RNA, 19 nt, Homo sapiens
  misc_RNA (1)...(19): siRNA sense strand
aaauggaacccugaacaaa

SEQ ID NO: 239279 - RNA, 19 nt, Homo sapiens
  misc_RNA (1)...(19): siRNA sense strand
uggacaccgugauauugua

SEQ ID NO: 239280 - RNA, 19 nt, Homo sapiens
  misc_RNA (1)...(19): siRNA sense strand
gaaugaacacgggaaugug

SEQ ID NO: 239281 - RNA, 19 nt, Homo sapiens
  misc_RNA (1)...(19): siRNA sense strand
gcauggcugaugucaaguu

SEQ ID NO: 239282 - RNA, 19 nt, Homo sapiens
  misc_RNA (1)...(19): siRNA sense strand
gcugugaaguuugcuuugg

SEQ ID NO: 239283 - RNA, 19 nt, Homo sapiens
  misc_RNA (1)...(19): siRNA sense strand
auggaucccucuacaaugu

SEQ ID NO: 239284 - RNA, 19 nt, Homo sapiens
  misc_RNA (1)...(19): siRNA sense strand
ucauggacaccgugauauu

SEQ ID NO: 239285 - RNA, 19 nt, Homo sapiens
  misc_RNA (1)...(19): siRNA sense strand
agucauggacaccgugaua

SEQ ID NO: 239286 - RNA, 19 nt, Homo sapiens
  misc_RNA (1)...(19): siRNA sense strand
gaugucaaguucucuuucc

SEQ ID NO: 239287 - RNA, 19 nt, Homo sapiens
  misc_RNA (1)...(19): siRNA sense strand
gggcauggccuuccuacac

SEQ ID NO: 239288 - RNA, 19 nt, Homo sapiens
  misc_RNA (1)...(19): siRNA sense strand
ccaaauuugacaugauugu

SEQ ID NO: 239289 - RNA, 19 nt, Homo sapiens
  misc_RNA (1)...(19): siRNA sense strand
cauggacaccgugauauug

SEQ ID NO: 239290 - RNA, 19 nt, Homo sapiens
  misc_RNA (1)...(19): siRNA sense strand
uagccguaguguaaugauu

SEQ ID NO: 239291 - RNA, 19 nt, Homo sapiens
  misc_RNA (1)...(19): siRNA sense strand
acaaggacacauucuggaa

SEQ ID NO: 239292 - RNA, 19 nt, Homo sapiens
  misc_RNA (1)...(19): siRNA sense strand
auauggagauuggaaugaa

SEQ ID NO: 239293 - RNA, 19 nt, Homo sapiens
  misc_RNA (1)...(19): siRNA sense strand
gcccuugucagcaucugua

SEQ ID NO: 239294 - RNA, 19 nt, Homo sapiens
  misc_RNA (1)...(19): siRNA sense strand
gauugugccuauccuugag

SEQ ID NO: 239295 - RNA, 19 nt, Homo sapiens
  misc_RNA (1)...(19): siRNA sense strand
guaagcucaugaagaucug

SEQ ID NO: 239296 - RNA, 19 nt, Homo sapiens
  misc_RNA (1)...(19): siRNA sense strand
auggaacccugaacaaaca

SEQ ID NO: 239297 - RNA, 19 nt, Homo sapiens
  misc_RNA (1)...(19): siRNA sense strand
gagaagaugcaggacaagu

SEQ ID NO: 239298 - RNA, 19 nt, Homo sapiens
  misc_RNA (1)...(19): siRNA sense strand
caucaaugcagugaaugaa

SEQ ID NO: 239299 - RNA, 19 nt, Homo sapiens
  misc_RNA (1)...(19): siRNA sense strand
cacacuggaugccguaugg

SEQ ID NO: 239300 - RNA, 19 nt, Homo sapiens
  misc_RNA (1)...(19): siRNA sense strand
gcaguacaaggcagacauc

SEQ ID NO: 239301 - RNA, 19 nt, Homo sapiens
  misc_RNA (1)...(19): siRNA sense strand
cauggcugaugucaaguuc

SEQ ID NO: 239302 - RNA, 19 nt, Homo sapiens
  misc_RNA (1)...(19): siRNA sense strand
cuucaaacagcuuaacuuc

SEQ ID NO: 239303 - RNA, 19 nt, Homo sapiens
  misc_RNA (1)...(19): siRNA sense strand
ugauugugccuauccuuga

SEQ ID NO: 239304 - RNA, 19 nt, Homo sapiens
  misc_RNA (1)...(19): siRNA sense strand
gacacgggagguacccuuu

SEQ ID NO: 239305 - RNA, 19 nt, Homo sapiens
  misc_RNA (1)...(19): siRNA sense strand
gcagaagaagccugaagac

SEQ ID NO: 239306 - RNA, 19 nt, Homo sapiens
  misc_RNA (1)...(19): siRNA sense strand
accgugauauuguacagaa

SEQ ID NO: 239307 - RNA, 19 nt, Homo sapiens
  misc_RNA (1)...(19): siRNA sense strand
caaggaagagcagggacuu

SEQ ID NO: 239308 - RNA, 19 nt, Homo sapiens
  misc_RNA (1)...(19): siRNA sense strand
cugcugugguugagauguu

SEQ ID NO: 239309 - RNA, 19 nt, Homo sapiens
  misc_RNA (1)...(19): siRNA sense strand
ugacaugauugugccuauc

SEQ ID NO: 239310 - RNA, 19 nt, Homo sapiens
  misc_RNA (1)...(19): siRNA sense strand
ugcaaagcgacccaaauuu

SEQ ID NO: 239311 - RNA, 19 nt, Homo sapiens
  misc_RNA (1)...(19): siRNA sense strand
cagaagaagccugaagaca

SEQ ID NO: 239312 - RNA, 19 nt, Homo sapiens
  misc_RNA (1)...(19): siRNA sense strand
aaugauugaugaggacaug

SEQ ID NO: 239313 - RNA, 19 nt, Homo sapiens
  misc_RNA (1)...(19): siRNA sense strand
agaucugcaugaaugaaga

SEQ ID NO: 239314 - RNA, 19 nt, Homo sapiens
  misc_RNA (1)...(19): siRNA sense strand
gaacgaaaccagcguccua

SEQ ID NO: 239315 - RNA, 19 nt, Homo sapiens
  misc_RNA (1)...(19): siRNA sense strand
gcaagaaggugccccagua

SEQ ID NO: 239316 - RNA, 19 nt, Homo sapiens
  misc_RNA (1)...(19): siRNA sense strand
ggucagagccaaauuccaa

SEQ ID NO: 239317 - RNA, 19 nt, Homo sapiens
  misc_RNA (1)...(19): siRNA sense strand
caggcagcguggacaauua

SEQ ID NO: 239318 - RNA, 19 nt, Homo sapiens
  misc_RNA (1)...(19): siRNA sense strand
gaaggucagagccaaauuc

SEQ ID NO: 239319 - RNA, 19 nt, Homo sapiens
  misc_RNA (1)...(19): siRNA sense strand
ggagagacacgagcccuuu

SEQ ID NO: 239320 - RNA, 19 nt, Homo sapiens
  misc_RNA (1)...(19): siRNA sense strand
gcaggugggcugugcugua

SEQ ID NO: 239321 - RNA, 19 nt, Homo sapiens
  misc_RNA (1)...(19): siRNA sense strand
ccaagugccaccugauuga

SEQ ID NO: 239322 - RNA, 19 nt, Homo sapiens
  misc_RNA (1)...(19): siRNA sense strand
ggagaaggucagagccaaa

SEQ ID NO: 239323 - RNA, 19 nt, Homo sapiens
  misc_RNA (1)...(19): siRNA sense strand
cgaaaccagcguccuauuc

SEQ ID NO: 239324 - RNA, 19 nt, Homo sapiens
  misc_RNA (1)...(19): siRNA sense strand
ccgguggccuccucauuau

SEQ ID NO: 239325 - RNA, 19 nt, Homo sapiens
  misc_RNA (1)...(19): siRNA sense strand
gagaaggucagagccaaau

SEQ ID NO: 239326 - RNA, 19 nt, Homo sapiens
  misc_RNA (1)...(19): siRNA sense strand
gaaaccagcguccuauucc

SEQ ID NO: 239327 - RNA, 19 nt, Homo sapiens
  misc_RNA (1)...(19): siRNA sense strand
cgucaucaccuacuacauc

SEQ ID NO: 239328 - RNA, 19 nt, Homo sapiens
  misc_RNA (1)...(19): siRNA sense strand
gguggugugugccgucauc

SEQ ID NO: 239329 - RNA, 19 nt, Homo sapiens
  misc_RNA (1)...(19): siRNA sense strand
gagagacacgagcccuuug

SEQ ID NO: 239330 - RNA, 19 nt, Homo sapiens
  misc_RNA (1)...(19): siRNA sense strand
gugccgucaucaccuacua

SEQ ID NO: 239331 - RNA, 19 nt, Homo sapiens
  misc_RNA (1)...(19): siRNA sense strand
ccaggcagcguggacaauu

SEQ ID NO: 239332 - RNA, 19 nt, Homo sapiens
  misc_RNA (1)...(19): siRNA sense strand
ggacccaggaauccaagug

SEQ ID NO: 239333 - RNA, 19 nt, Homo sapiens
  misc_RNA (1)...(19): siRNA sense strand
accgguggccuccucauua

SEQ ID NO: 239334 - RNA, 19 nt, Homo sapiens
  misc_RNA (1)...(19): siRNA sense strand
gaccgguggccuccucauu

SEQ ID NO: 239335 - RNA, 19 nt, Homo sapiens
  misc_RNA (1)...(19): siRNA sense strand
gcccuuugccuggguguaa

SEQ ID NO: 239336 - RNA, 19 nt, Homo sapiens
  misc_RNA (1)...(19): siRNA sense strand
caggugggcugugcuguac

SEQ ID NO: 239337 - RNA, 19 nt, Homo sapiens
  misc_RNA (1)...(19): siRNA sense strand
ugugugccgucaucaccua

SEQ ID NO: 239338 - RNA, 19 nt, Homo sapiens
  misc_RNA (1)...(19): siRNA sense strand
cgacugugcugccccucua

SEQ ID NO: 239339 - RNA, 19 nt, Homo sapiens
  misc_RNA (1)...(19): siRNA sense strand
ggugggcugugcuguacca

SEQ ID NO: 239340 - RNA, 19 nt, Homo sapiens
  misc_RNA (1)...(19): siRNA sense strand
cagaagcacuuugagaaga

SEQ ID NO: 239341 - RNA, 19 nt, Homo sapiens
  misc_RNA (1)...(19): siRNA sense strand
guacaucggcuuccuuugu

SEQ ID NO: 239342 - RNA, 19 nt, Homo sapiens
  misc_RNA (1)...(19): siRNA sense strand
cggaaaccguucuguguga

SEQ ID NO: 239343 - RNA, 19 nt, Homo sapiens
  misc_RNA (1)...(19): siRNA sense strand
gcucaaguuugcccggaaa

SEQ ID NO: 239344 - RNA, 19 nt, Homo sapiens
  misc_RNA (1)...(19): siRNA sense strand
accgcaagcugcagaauuu

SEQ ID NO: 239345 - RNA, 19 nt, Homo sapiens
  misc_RNA (1)...(19): siRNA sense strand
ggcagaagcacuuugagaa

SEQ ID NO: 239346 - RNA, 19 nt, Homo sapiens
  misc_RNA (1)...(19): siRNA sense strand
caacgucuuugccacaucu

SEQ ID NO: 239347 - RNA, 19 nt, Homo sapiens
  misc_RNA (1)...(19): siRNA sense strand
ggaagcugcugggcucugu

SEQ ID NO: 239348 - RNA, 19 nt, Homo sapiens
  misc_RNA (1)...(19): siRNA sense strand
gcagaagcacuuugagaag

SEQ ID NO: 239349 - RNA, 19 nt, Homo sapiens
  misc_RNA (1)...(19): siRNA sense strand
ggucuggguuugcccugaa

SEQ ID NO: 239350 - RNA, 19 nt, Homo sapiens
  misc_RNA (1)...(19): siRNA sense strand
gaaaccguucugugugauu

SEQ ID NO: 239351 - RNA, 19 nt, Homo sapiens
  misc_RNA (1)...(19): siRNA sense strand
gcugggcucuguggucuau

SEQ ID NO: 239352 - RNA, 19 nt, Homo sapiens
  misc_RNA (1)...(19): siRNA sense strand
gggagaacgaccacuuuga

SEQ ID NO: 239353 - RNA, 19 nt, Homo sapiens
  misc_RNA (1)...(19): siRNA sense strand
ggaaaccguucugugugau

SEQ ID NO: 239354 - RNA, 19 nt, Homo sapiens
  misc_RNA (1)...(19): siRNA sense strand
gcacaggcagaagcacuuu

SEQ ID NO: 239355 - RNA, 19 nt, Homo sapiens
  misc_RNA (1)...(19): siRNA sense strand
aaaccguucugugugauug

SEQ ID NO: 239356 - RNA, 19 nt, Homo sapiens
  misc_RNA (1)...(19): siRNA sense strand
ccacguggcaguacuacga

SEQ ID NO: 239357 - RNA, 19 nt, Homo sapiens
  misc_RNA (1)...(19): siRNA sense strand
ggagaacgaccacuuugac

SEQ ID NO: 239358 - RNA, 19 nt, Homo sapiens
  misc_RNA (1)...(19): siRNA sense strand
ccucguuccugguguacuu

SEQ ID NO: 239359 - RNA, 19 nt, Homo sapiens
  misc_RNA (1)...(19): siRNA sense strand
gagaacgaccacuuugaca

SEQ ID NO: 239360 - RNA, 19 nt, Homo sapiens
  misc_RNA (1)...(19): siRNA sense strand
agaauuuccucuacaacgu

SEQ ID NO: 239361 - RNA, 19 nt, Homo sapiens
  misc_RNA (1)...(19): siRNA sense strand
gggagaagaagcugaaggu

SEQ ID NO: 239362 - RNA, 19 nt, Homo sapiens
  misc_RNA (1)...(19): siRNA sense strand
caucaaggaguaugagaag

SEQ ID NO: 239363 - RNA, 19 nt, Homo sapiens
  misc_RNA (1)...(19): siRNA sense strand
ugcagaauuuccucuacaa

SEQ ID NO: 239364 - RNA, 19 nt, Homo sapiens
  misc_RNA (1)...(19): siRNA sense strand
ugacuaucgugguguuugg

SEQ ID NO: 239365 - RNA, 19 nt, Homo sapiens
  misc_RNA (1)...(19): siRNA sense strand
agaagcacuuugagaagag

SEQ ID NO: 239366 - RNA, 19 nt, Homo sapiens
  misc_RNA (1)...(19): siRNA sense strand
gugcucaucgccuccauug

SEQ ID NO: 239367 - RNA, 19 nt, Homo sapiens
  misc_RNA (1)...(19): siRNA sense strand
gcugcagaauuuccucuac

SEQ ID NO: 239368 - RNA, 19 nt, Homo sapiens
  misc_RNA (1)...(19): siRNA sense strand
uacaucggcuuccuuuguc

SEQ ID NO: 239369 - RNA, 19 nt, Homo sapiens
  misc_RNA (1)...(19): siRNA sense strand
uuuccaccaucaaggagua

SEQ ID NO: 239370 - RNA, 19 nt, Homo sapiens
  misc_RNA (1)...(19): siRNA sense strand
gcugggcguucaucuacca

SEQ ID NO: 239371 - RNA, 19 nt, Homo sapiens
  misc_RNA (1)...(19): siRNA sense strand
ucaaggaguaugagaagag

SEQ ID NO: 239372 - RNA, 19 nt, Homo sapiens
  misc_RNA (1)...(19): siRNA sense strand
cugcagaauuuccucuaca

SEQ ID NO: 239373 - RNA, 19 nt, Homo sapiens
  misc_RNA (1)...(19): siRNA sense strand
ccaucaaggaguaugagaa

SEQ ID NO: 239374 - RNA, 19 nt, Homo sapiens
  misc_RNA (1)...(19): siRNA sense strand
acaggcagaagcacuuuga

SEQ ID NO: 239375 - RNA, 19 nt, Homo sapiens
  misc_RNA (1)...(19): siRNA sense strand
ugaucacgcugaccaccau

SEQ ID NO: 239376 - RNA, 19 nt, Homo sapiens
  misc_RNA (1)...(19): siRNA sense strand
ccaccaucaaggaguauga

SEQ ID NO: 239377 - RNA, 19 nt, Homo sapiens
  misc_RNA (1)...(19): siRNA sense strand
gcggcagcauccucagcaa

SEQ ID NO: 239378 - RNA, 19 nt, Homo sapiens
  misc_RNA (1)...(19): siRNA sense strand
cagaagcacuuugagaaga

SEQ ID NO: 239379 - RNA, 19 nt, Homo sapiens
  misc_RNA (1)...(19): siRNA sense strand
guacaucggcuuccuuugu

SEQ ID NO: 239380 - RNA, 19 nt, Homo sapiens
  misc_RNA (1)...(19): siRNA sense strand
cggaaaccguucuguguga

SEQ ID NO: 239381 - RNA, 19 nt, Homo sapiens
  misc_RNA (1)...(19): siRNA sense strand
gcucaaguuugcccggaaa

SEQ ID NO: 239382 - RNA, 19 nt, Homo sapiens
  misc_RNA (1)...(19): siRNA sense strand
accgcaagcugcagaauuu

SEQ ID NO: 239383 - RNA, 19 nt, Homo sapiens
  misc_RNA (1)...(19): siRNA sense strand
ggcagaagcacuuugagaa

SEQ ID NO: 239384 - RNA, 19 nt, Homo sapiens
  misc_RNA (1)...(19): siRNA sense strand
caacgucuuugccacaucu

SEQ ID NO: 239385 - RNA, 19 nt, Homo sapiens
  misc_RNA (1)...(19): siRNA sense strand
ggaagcugcugggcucugu

SEQ ID NO: 239386 - RNA, 19 nt, Homo sapiens
  misc_RNA (1)...(19): siRNA sense strand
gcagaagcacuuugagaag

SEQ ID NO: 239387 - RNA, 19 nt, Homo sapiens
  misc_RNA (1)...(19): siRNA sense strand
ggucuggguuugcccugaa

SEQ ID NO: 239388 - RNA, 19 nt, Homo sapiens
  misc_RNA (1)...(19): siRNA sense strand
gaaaccguucugugugauu

SEQ ID NO: 239389 - RNA, 19 nt, Homo sapiens
  misc_RNA (1)...(19): siRNA sense strand
gcugggcucuguggucuau

SEQ ID NO: 239390 - RNA, 19 nt, Homo sapiens
  misc_RNA (1)...(19): siRNA sense strand
gggagaacgaccacuuuga

SEQ ID NO: 239391 - RNA, 19 nt, Homo sapiens
  misc_RNA (1)...(19): siRNA sense strand
ggaaaccguucugugugau

SEQ ID NO: 239392 - RNA, 19 nt, Homo sapiens
  misc_RNA (1)...(19): siRNA sense strand
gcacaggcagaagcacuuu

SEQ ID NO: 239393 - RNA, 19 nt, Homo sapiens
  misc_RNA (1)...(19): siRNA sense strand
aaaccguucugugugauug

SEQ ID NO: 239394 - RNA, 19 nt, Homo sapiens
  misc_RNA (1)...(19): siRNA sense strand
ccacguggcaguacuacga

SEQ ID NO: 239395 - RNA, 19 nt, Homo sapiens
  misc_RNA (1)...(19): siRNA sense strand
ggagaacgaccacuuugac

SEQ ID NO: 239396 - RNA, 19 nt, Homo sapiens
  misc_RNA (1)...(19): siRNA sense strand
ccucguuccugguguacuu

SEQ ID NO: 239397 - RNA, 19 nt, Homo sapiens
  misc_RNA (1)...(19): siRNA sense strand
gagaacgaccacuuugaca

SEQ ID NO: 239398 - RNA, 19 nt, Homo sapiens
  misc_RNA (1)...(19): siRNA sense strand
agaauuuccucuacaacgu

SEQ ID NO: 239399 - RNA, 19 nt, Homo sapiens
  misc_RNA (1)...(19): siRNA sense strand
gggagaagaagcugaaggu

SEQ ID NO: 239400 - RNA, 19 nt, Homo sapiens
  misc_RNA (1)...(19): siRNA sense strand
caucaaggaguaugagaag

SEQ ID NO: 239401 - RNA, 19 nt, Homo sapiens
  misc_RNA (1)...(19): siRNA sense strand
ugcagaauuuccucuacaa

SEQ ID NO: 239402 - RNA, 19 nt, Homo sapiens
  misc_RNA (1)...(19): siRNA sense strand
ugacuaucgugguguuugg

SEQ ID NO: 239403 - RNA, 19 nt, Homo sapiens
  misc_RNA (1)...(19): siRNA sense strand
agaagcacuuugagaagag

SEQ ID NO: 239404 - RNA, 19 nt, Homo sapiens
  misc_RNA (1)...(19): siRNA sense strand
gugcucaucgccuccauug

SEQ ID NO: 239405 - RNA, 19 nt, Homo sapiens
  misc_RNA (1)...(19): siRNA sense strand
gcugcagaauuuccucuac

SEQ ID NO: 239406 - RNA, 19 nt, Homo sapiens
  misc_RNA (1)...(19): siRNA sense strand
uacaucggcuuccuuuguc

SEQ ID NO: 239407 - RNA, 19 nt, Homo sapiens
  misc_RNA (1)...(19): siRNA sense strand
uuuccaccaucaaggagua

SEQ ID NO: 239408 - RNA, 19 nt, Homo sapiens
  misc_RNA (1)...(19): siRNA sense strand
gcugggcguucaucuacca

SEQ ID NO: 239409 - RNA, 19 nt, Homo sapiens
  misc_RNA (1)...(19): siRNA sense strand
ucaaggaguaugagaagag

SEQ ID NO: 239410 - RNA, 19 nt, Homo sapiens
  misc_RNA (1)...(19): siRNA sense strand
cugcagaauuuccucuaca

SEQ ID NO: 239411 - RNA, 19 nt, Homo sapiens
  misc_RNA (1)...(19): siRNA sense strand
ccaucaaggaguaugagaa

SEQ ID NO: 239412 - RNA, 19 nt, Homo sapiens
  misc_RNA (1)...(19): siRNA sense strand
acaggcagaagcacuuuga

SEQ ID NO: 239413 - RNA, 19 nt, Homo sapiens
  misc_RNA (1)...(19): siRNA sense strand
ugaucacgcugaccaccau

SEQ ID NO: 239414 - RNA, 19 nt, Homo sapiens
  misc_RNA (1)...(19): siRNA sense strand
ccaccaucaaggaguauga

SEQ ID NO: 239415 - RNA, 19 nt, Homo sapiens
  misc_RNA (1)...(19): siRNA sense strand
gcggcagcauccucagcaa

SEQ ID NO: 239416 - RNA, 19 nt, Homo sapiens
  misc_RNA (1)...(19): siRNA sense strand
cagaagcacuuugagaaga

SEQ ID NO: 239417 - RNA, 19 nt, Homo sapiens
  misc_RNA (1)...(19): siRNA sense strand
guacaucggcuuccuuugu

SEQ ID NO: 239418 - RNA, 19 nt, Homo sapiens
  misc_RNA (1)...(19): siRNA sense strand
cggaaaccguucuguguga

SEQ ID NO: 239419 - RNA, 19 nt, Homo sapiens
  misc_RNA (1)...(19): siRNA sense strand
gcucaaguuugcccggaaa

SEQ ID NO: 239420 - RNA, 19 nt, Homo sapiens
  misc_RNA (1)...(19): siRNA sense strand
accgcaagcugcagaauuu

SEQ ID NO: 239421 - RNA, 19 nt, Homo sapiens
  misc_RNA (1)...(19): siRNA sense strand
ggcagaagcacuuugagaa

SEQ ID NO: 239422 - RNA, 19 nt, Homo sapiens
  misc_RNA (1)...(19): siRNA sense strand
caacgucuuugccacaucu

SEQ ID NO: 239423 - RNA, 19 nt, Homo sapiens
  misc_RNA (1)...(19): siRNA sense strand
ggaagcugcugggcucugu

SEQ ID NO: 239424 - RNA, 19 nt, Homo sapiens
  misc_RNA (1)...(19): siRNA sense strand
gcagaagcacuuugagaag

SEQ ID NO: 239425 - RNA, 19 nt, Homo sapiens
  misc_RNA (1)...(19): siRNA sense strand
ggucuggguuugcccugaa

SEQ ID NO: 239426 - RNA, 19 nt, Homo sapiens
  misc_RNA (1)...(19): siRNA sense strand
gaaaccguucugugugauu

SEQ ID NO: 239427 - RNA, 19 nt, Homo sapiens
  misc_RNA (1)...(19): siRNA sense strand
gcugggcucuguggucuau

SEQ ID NO: 239428 - RNA, 19 nt, Homo sapiens
  misc_RNA (1)...(19): siRNA sense strand
gggagaacgaccacuuuga

SEQ ID NO: 239429 - RNA, 19 nt, Homo sapiens
  misc_RNA (1)...(19): siRNA sense strand
ggaaaccguucugugugau

SEQ ID NO: 239430 - RNA, 19 nt, Homo sapiens
  misc_RNA (1)...(19): siRNA sense strand
gcacaggcagaagcacuuu

SEQ ID NO: 239431 - RNA, 19 nt, Homo sapiens
  misc_RNA (1)...(19): siRNA sense strand
aaaccguucugugugauug

SEQ ID NO: 239432 - RNA, 19 nt, Homo sapiens
  misc_RNA (1)...(19): siRNA sense strand
ccacguggcaguacuacga

SEQ ID NO: 239433 - RNA, 19 nt, Homo sapiens
  misc_RNA (1)...(19): siRNA sense strand
ggagaacgaccacuuugac

SEQ ID NO: 239434 - RNA, 19 nt, Homo sapiens
  misc_RNA (1)...(19): siRNA sense strand
ccucguuccugguguacuu

SEQ ID NO: 239435 - RNA, 19 nt, Homo sapiens
  misc_RNA (1)...(19): siRNA sense strand
gagaacgaccacuuugaca

SEQ ID NO: 239436 - RNA, 19 nt, Homo sapiens
  misc_RNA (1)...(19): siRNA sense strand
agaauuuccucuacaacgu

SEQ ID NO: 239437 - RNA, 19 nt, Homo sapiens
  misc_RNA (1)...(19): siRNA sense strand
gggagaagaagcugaaggu

SEQ ID NO: 239438 - RNA, 19 nt, Homo sapiens
  misc_RNA (1)...(19): siRNA sense strand
caucaaggaguaugagaag

SEQ ID NO: 239439 - RNA, 19 nt, Homo sapiens
  misc_RNA (1)...(19): siRNA sense strand
ugcagaauuuccucuacaa

SEQ ID NO: 239440 - RNA, 19 nt, Homo sapiens
  misc_RNA (1)...(19): siRNA sense strand
ugacuaucgugguguuugg

SEQ ID NO: 239441 - RNA, 19 nt, Homo sapiens
  misc_RNA (1)...(19): siRNA sense strand
agaagcacuuugagaagag

SEQ ID NO: 239442 - RNA, 19 nt, Homo sapiens
  misc_RNA (1)...(19): siRNA sense strand
gugcucaucgccuccauug

SEQ ID NO: 239443 - RNA, 19 nt, Homo sapiens
  misc_RNA (1)...(19): siRNA sense strand
gcugcagaauuuccucuac

SEQ ID NO: 239444 - RNA, 19 nt, Homo sapiens
  misc_RNA (1)...(19): siRNA sense strand
uacaucggcuuccuuuguc

SEQ ID NO: 239445 - RNA, 19 nt, Homo sapiens
  misc_RNA (1)...(19): siRNA sense strand
uuuccaccaucaaggagua

SEQ ID NO: 239446 - RNA, 19 nt, Homo sapiens
  misc_RNA (1)...(19): siRNA sense strand
gcugggcguucaucuacca

SEQ ID NO: 239447 - RNA, 19 nt, Homo sapiens
  misc_RNA (1)...(19): siRNA sense strand
ucaaggaguaugagaagag

SEQ ID NO: 239448 - RNA, 19 nt, Homo sapiens
  misc_RNA (1)...(19): siRNA sense strand
cugcagaauuuccucuaca

SEQ ID NO: 239449 - RNA, 19 nt, Homo sapiens
  misc_RNA (1)...(19): siRNA sense strand
ccaucaaggaguaugagaa

SEQ ID NO: 239450 - RNA, 19 nt, Homo sapiens
  misc_RNA (1)...(19): siRNA sense strand
acaggcagaagcacuuuga

SEQ ID NO: 239451 - RNA, 19 nt, Homo sapiens
  misc_RNA (1)...(19): siRNA sense strand
ugaucacgcugaccaccau

SEQ ID NO: 239452 - RNA, 19 nt, Homo sapiens
  misc_RNA (1)...(19): siRNA sense strand
ccaccaucaaggaguauga

SEQ ID NO: 239453 - RNA, 19 nt, Homo sapiens
  misc_RNA (1)...(19): siRNA sense strand
gcggcagcauccucagcaa

SEQ ID NO: 239454 - RNA, 19 nt, Homo sapiens
  misc_RNA (1)...(19): siRNA sense strand
cagaagcacuuugagaaga

SEQ ID NO: 239455 - RNA, 19 nt, Homo sapiens
  misc_RNA (1)...(19): siRNA sense strand
guacaucggcuuccuuugu

SEQ ID NO: 239456 - RNA, 19 nt, Homo sapiens
  misc_RNA (1)...(19): siRNA sense strand
cggaaaccguucuguguga

SEQ ID NO: 239457 - RNA, 19 nt, Homo sapiens
  misc_RNA (1)...(19): siRNA sense strand
gcucaaguuugcccggaaa

SEQ ID NO: 239458 - RNA, 19 nt, Homo sapiens
  misc_RNA (1)...(19): siRNA sense strand
accgcaagcugcagaauuu

SEQ ID NO: 239459 - RNA, 19 nt, Homo sapiens
  misc_RNA (1)...(19): siRNA sense strand
ggcagaagcacuuugagaa

SEQ ID NO: 239460 - RNA, 19 nt, Homo sapiens
  misc_RNA (1)...(19): siRNA sense strand
caacgucuuugccacaucu

SEQ ID NO: 239461 - RNA, 19 nt, Homo sapiens
  misc_RNA (1)...(19): siRNA sense strand
ggaagcugcugggcucugu

SEQ ID NO: 239462 - RNA, 19 nt, Homo sapiens
  misc_RNA (1)...(19): siRNA sense strand
gcagaagcacuuugagaag

SEQ ID NO: 239463 - RNA, 19 nt, Homo sapiens
  misc_RNA (1)...(19): siRNA sense strand
ggucuggguuugcccugaa

SEQ ID NO: 239464 - RNA, 19 nt, Homo sapiens
  misc_RNA (1)...(19): siRNA sense strand
gaaaccguucugugugauu

SEQ ID NO: 239465 - RNA, 19 nt, Homo sapiens
  misc_RNA (1)...(19): siRNA sense strand
gcugggcucuguggucuau

SEQ ID NO: 239466 - RNA, 19 nt, Homo sapiens
  misc_RNA (1)...(19): siRNA sense strand
gggagaacgaccacuuuga

SEQ ID NO: 239467 - RNA, 19 nt, Homo sapiens
  misc_RNA (1)...(19): siRNA sense strand
ggaaaccguucugugugau

SEQ ID NO: 239468 - RNA, 19 nt, Homo sapiens
  misc_RNA (1)...(19): siRNA sense strand
gcacaggcagaagcacuuu

SEQ ID NO: 239469 - RNA, 19 nt, Homo sapiens
  misc_RNA (1)...(19): siRNA sense strand
aaaccguucugugugauug

SEQ ID NO: 239470 - RNA, 19 nt, Homo sapiens
  misc_RNA (1)...(19): siRNA sense strand
ccacguggcaguacuacga

SEQ ID NO: 239471 - RNA, 19 nt, Homo sapiens
  misc_RNA (1)...(19): siRNA sense strand
ggagaacgaccacuuugac

SEQ ID NO: 239472 - RNA, 19 nt, Homo sapiens
  misc_RNA (1)...(19): siRNA sense strand
ccucguuccugguguacuu

SEQ ID NO: 239473 - RNA, 19 nt, Homo sapiens
  misc_RNA (1)...(19): siRNA sense strand
gagaacgaccacuuugaca

SEQ ID NO: 239474 - RNA, 19 nt, Homo sapiens
  misc_RNA (1)...(19): siRNA sense strand
agaauuuccucuacaacgu

SEQ ID NO: 239475 - RNA, 19 nt, Homo sapiens
  misc_RNA (1)...(19): siRNA sense strand
gggagaagaagcugaaggu

SEQ ID NO: 239476 - RNA, 19 nt, Homo sapiens
  misc_RNA (1)...(19): siRNA sense strand
caucaaggaguaugagaag

SEQ ID NO: 239477 - RNA, 19 nt, Homo sapiens
  misc_RNA (1)...(19): siRNA sense strand
ugcagaauuuccucuacaa

SEQ ID NO: 239478 - RNA, 19 nt, Homo sapiens
  misc_RNA (1)...(19): siRNA sense strand
ugacuaucgugguguuugg

SEQ ID NO: 239479 - RNA, 19 nt, Homo sapiens
  misc_RNA (1)...(19): siRNA sense strand
agaagcacuuugagaagag

SEQ ID NO: 239480 - RNA, 19 nt, Homo sapiens
  misc_RNA (1)...(19): siRNA sense strand
gugcucaucgccuccauug

SEQ ID NO: 239481 - RNA, 19 nt, Homo sapiens
  misc_RNA (1)...(19): siRNA sense strand
gcugcagaauuuccucuac

SEQ ID NO: 239482 - RNA, 19 nt, Homo sapiens
  misc_RNA (1)...(19): siRNA sense strand
uacaucggcuuccuuuguc

SEQ ID NO: 239483 - RNA, 19 nt, Homo sapiens
  misc_RNA (1)...(19): siRNA sense strand
uuuccaccaucaaggagua

SEQ ID NO: 239484 - RNA, 19 nt, Homo sapiens
  misc_RNA (1)...(19): siRNA sense strand
gcugggcguucaucuacca

SEQ ID NO: 239485 - RNA, 19 nt, Homo sapiens
  misc_RNA (1)...(19): siRNA sense strand
ucaaggaguaugagaagag

SEQ ID NO: 239486 - RNA, 19 nt, Homo sapiens
  misc_RNA (1)...(19): siRNA sense strand
cugcagaauuuccucuaca

SEQ ID NO: 239487 - RNA, 19 nt, Homo sapiens
  misc_RNA (1)...(19): siRNA sense strand
ccaucaaggaguaugagaa

SEQ ID NO: 239488 - RNA, 19 nt, Homo sapiens
  misc_RNA (1)...(19): siRNA sense strand
acaggcagaagcacuuuga

SEQ ID NO: 239489 - RNA, 19 nt, Homo sapiens
  misc_RNA (1)...(19): siRNA sense strand
ugaucacgcugaccaccau

SEQ ID NO: 239490 - RNA, 19 nt, Homo sapiens
  misc_RNA (1)...(19): siRNA sense strand
ccaccaucaaggaguauga

SEQ ID NO: 239491 - RNA, 19 nt, Homo sapiens
  misc_RNA (1)...(19): siRNA sense strand
gcggcagcauccucagcaa

SEQ ID NO: 239492 - RNA, 19 nt, Homo sapiens
  misc_RNA (1)...(19): siRNA sense strand
cagaagcacuuugagaaga

SEQ ID NO: 239493 - RNA, 19 nt, Homo sapiens
  misc_RNA (1)...(19): siRNA sense strand
guacaucggcuuccuuugu

SEQ ID NO: 239494 - RNA, 19 nt, Homo sapiens
  misc_RNA (1)...(19): siRNA sense strand
cggaaaccguucuguguga

SEQ ID NO: 239495 - RNA, 19 nt, Homo sapiens
  misc_RNA (1)...(19): siRNA sense strand
gcucaaguuugcccggaaa

SEQ ID NO: 239496 - RNA, 19 nt, Homo sapiens
  misc_RNA (1)...(19): siRNA sense strand
accgcaagcugcagaauuu

SEQ ID NO: 239497 - RNA, 19 nt, Homo sapiens
  misc_RNA (1)...(19): siRNA sense strand
ggcagaagcacuuugagaa

SEQ ID NO: 239498 - RNA, 19 nt, Homo sapiens
  misc_RNA (1)...(19): siRNA sense strand
caacgucuuugccacaucu

SEQ ID NO: 239499 - RNA, 19 nt, Homo sapiens
  misc_RNA (1)...(19): siRNA sense strand
ggaagcugcugggcucugu

SEQ ID NO: 239500 - RNA, 19 nt, Homo sapiens
  misc_RNA (1)...(19): siRNA sense strand
gcagaagcacuuugagaag

SEQ ID NO: 239501 - RNA, 19 nt, Homo sapiens
  misc_RNA (1)...(19): siRNA sense strand
ggucuggguuugcccugaa

SEQ ID NO: 239502 - RNA, 19 nt, Homo sapiens
  misc_RNA (1)...(19): siRNA sense strand
gaaaccguucugugugauu

SEQ ID NO: 239503 - RNA, 19 nt, Homo sapiens
  misc_RNA (1)...(19): siRNA sense strand
gcugggcucuguggucuau

SEQ ID NO: 239504 - RNA, 19 nt, Homo sapiens
  misc_RNA (1)...(19): siRNA sense strand
gggagaacgaccacuuuga

SEQ ID NO: 239505 - RNA, 19 nt, Homo sapiens
  misc_RNA (1)...(19): siRNA sense strand
ggaaaccguucugugugau

SEQ ID NO: 239506 - RNA, 19 nt, Homo sapiens
  misc_RNA (1)...(19): siRNA sense strand
gcacaggcagaagcacuuu

SEQ ID NO: 239507 - RNA, 19 nt, Homo sapiens
  misc_RNA (1)...(19): siRNA sense strand
aaaccguucugugugauug

SEQ ID NO: 239508 - RNA, 19 nt, Homo sapiens
  misc_RNA (1)...(19): siRNA sense strand
ccacguggcaguacuacga

SEQ ID NO: 239509 - RNA, 19 nt, Homo sapiens
  misc_RNA (1)...(19): siRNA sense strand
ggagaacgaccacuuugac

SEQ ID NO: 239510 - RNA, 19 nt, Homo sapiens
  misc_RNA (1)...(19): siRNA sense strand
ccucguuccugguguacuu

SEQ ID NO: 239511 - RNA, 19 nt, Homo sapiens
  misc_RNA (1)...(19): siRNA sense strand
gagaacgaccacuuugaca

SEQ ID NO: 239512 - RNA, 19 nt, Homo sapiens
  misc_RNA (1)...(19): siRNA sense strand
agaauuuccucuacaacgu

SEQ ID NO: 239513 - RNA, 19 nt, Homo sapiens
  misc_RNA (1)...(19): siRNA sense strand
gggagaagaagcugaaggu

SEQ ID NO: 239514 - RNA, 19 nt, Homo sapiens
  misc_RNA (1)...(19): siRNA sense strand
caucaaggaguaugagaag

SEQ ID NO: 239515 - RNA, 19 nt, Homo sapiens
  misc_RNA (1)...(19): siRNA sense strand
ugcagaauuuccucuacaa

SEQ ID NO: 239516 - RNA, 19 nt, Homo sapiens
  misc_RNA (1)...(19): siRNA sense strand
ugacuaucgugguguuugg

SEQ ID NO: 239517 - RNA, 19 nt, Homo sapiens
  misc_RNA (1)...(19): siRNA sense strand
agaagcacuuugagaagag

SEQ ID NO: 239518 - RNA, 19 nt, Homo sapiens
  misc_RNA (1)...(19): siRNA sense strand
gugcucaucgccuccauug

SEQ ID NO: 239519 - RNA, 19 nt, Homo sapiens
  misc_RNA (1)...(19): siRNA sense strand
gcugcagaauuuccucuac

SEQ ID NO: 239520 - RNA, 19 nt, Homo sapiens
  misc_RNA (1)...(19): siRNA sense strand
uacaucggcuuccuuuguc

SEQ ID NO: 239521 - RNA, 19 nt, Homo sapiens
  misc_RNA (1)...(19): siRNA sense strand
uuuccaccaucaaggagua

SEQ ID NO: 239522 - RNA, 19 nt, Homo sapiens
  misc_RNA (1)...(19): siRNA sense strand
gcugggcguucaucuacca

SEQ ID NO: 239523 - RNA, 19 nt, Homo sapiens
  misc_RNA (1)...(19): siRNA sense strand
ucaaggaguaugagaagag

SEQ ID NO: 239524 - RNA, 19 nt, Homo sapiens
  misc_RNA (1)...(19): siRNA sense strand
cugcagaauuuccucuaca

SEQ ID NO: 239525 - RNA, 19 nt, Homo sapiens
  misc_RNA (1)...(19): siRNA sense strand
ccaucaaggaguaugagaa

SEQ ID NO: 239526 - RNA, 19 nt, Homo sapiens
  misc_RNA (1)...(19): siRNA sense strand
acaggcagaagcacuuuga

SEQ ID NO: 239527 - RNA, 19 nt, Homo sapiens
  misc_RNA (1)...(19): siRNA sense strand
ugaucacgcugaccaccau

SEQ ID NO: 239528 - RNA, 19 nt, Homo sapiens
  misc_RNA (1)...(19): siRNA sense strand
ccaccaucaaggaguauga

SEQ ID NO: 239529 - RNA, 19 nt, Homo sapiens
  misc_RNA (1)...(19): siRNA sense strand
gcggcagcauccucagcaa

SEQ ID NO: 239530 - RNA, 19 nt, Homo sapiens
  misc_RNA (1)...(19): siRNA sense strand
ggacagagaugauuaugug

SEQ ID NO: 239531 - RNA, 19 nt, Homo sapiens
  misc_RNA (1)...(19): siRNA sense strand
gaauguagaugccauagaa

SEQ ID NO: 239532 - RNA, 19 nt, Homo sapiens
  misc_RNA (1)...(19): siRNA sense strand
caacagguauuccgauuug

SEQ ID NO: 239533 - RNA, 19 nt, Homo sapiens
  misc_RNA (1)...(19): siRNA sense strand
gaucugggcugcuggaugu

SEQ ID NO: 239534 - RNA, 19 nt, Homo sapiens
  misc_RNA (1)...(19): siRNA sense strand
guacaucgguuuccugaca

SEQ ID NO: 239535 - RNA, 19 nt, Homo sapiens
  misc_RNA (1)...(19): siRNA sense strand
cgacaugcuuuccaggaua

SEQ ID NO: 239536 - RNA, 19 nt, Homo sapiens
  misc_RNA (1)...(19): siRNA sense strand
ggacaucuuugugcugauu

SEQ ID NO: 239537 - RNA, 19 nt, Homo sapiens
  misc_RNA (1)...(19): siRNA sense strand
gggaugggauuucugauuc

SEQ ID NO: 239538 - RNA, 19 nt, Homo sapiens
  misc_RNA (1)...(19): siRNA sense strand
gacaacagguauuccgauu

SEQ ID NO: 239539 - RNA, 19 nt, Homo sapiens
  misc_RNA (1)...(19): siRNA sense strand
ccaaguggcuucagcaucu

SEQ ID NO: 239540 - RNA, 19 nt, Homo sapiens
  misc_RNA (1)...(19): siRNA sense strand
gacaugcuuuccaggauaa

SEQ ID NO: 239541 - RNA, 19 nt, Homo sapiens
  misc_RNA (1)...(19): siRNA sense strand
acaauuccgucucuauaaa

SEQ ID NO: 239542 - RNA, 19 nt, Homo sapiens
  misc_RNA (1)...(19): siRNA sense strand
gagacuggcuucuguuacu

SEQ ID NO: 239543 - RNA, 19 nt, Homo sapiens
  misc_RNA (1)...(19): siRNA sense strand
aagaggaguuugagaccua

SEQ ID NO: 239544 - RNA, 19 nt, Homo sapiens
  misc_RNA (1)...(19): siRNA sense strand
cauccgagccgucagaauu

SEQ ID NO: 239545 - RNA, 19 nt, Homo sapiens
  misc_RNA (1)...(19): siRNA sense strand
ggauguugcugccgauaca

SEQ ID NO: 239546 - RNA, 19 nt, Homo sapiens
  misc_RNA (1)...(19): siRNA sense strand
cagagaugauuauguguuc

SEQ ID NO: 239547 - RNA, 19 nt, Homo sapiens
  misc_RNA (1)...(19): siRNA sense strand
cuacaauuccgucucuaua

SEQ ID NO: 239548 - RNA, 19 nt, Homo sapiens
  misc_RNA (1)...(19): siRNA sense strand
cuggagacauuugcuauuu

SEQ ID NO: 239549 - RNA, 19 nt, Homo sapiens
  misc_RNA (1)...(19): siRNA sense strand
gaaggaggacaacagguau

SEQ ID NO: 239550 - RNA, 19 nt, Homo sapiens
  misc_RNA (1)...(19): siRNA sense strand
gggagacuggcuucuguua

SEQ ID NO: 239551 - RNA, 19 nt, Homo sapiens
  misc_RNA (1)...(19): siRNA sense strand
cagaaagggucagcauuca

SEQ ID NO: 239552 - RNA, 19 nt, Homo sapiens
  misc_RNA (1)...(19): siRNA sense strand
cacaagaagucucagaaag

SEQ ID NO: 239553 - RNA, 19 nt, Homo sapiens
  misc_RNA (1)...(19): siRNA sense strand
acucauccuuucuucauuu

SEQ ID NO: 239554 - RNA, 19 nt, Homo sapiens
  misc_RNA (1)...(19): siRNA sense strand
aaagacagguucaggacau

SEQ ID NO: 239555 - RNA, 19 nt, Homo sapiens
  misc_RNA (1)...(19): siRNA sense strand
ccagcaaucucccaggaau

SEQ ID NO: 239556 - RNA, 19 nt, Homo sapiens
  misc_RNA (1)...(19): siRNA sense strand
ggagaugaaagaggaguuu

SEQ ID NO: 239557 - RNA, 19 nt, Homo sapiens
  misc_RNA (1)...(19): siRNA sense strand
ggaugggauuucugauuca

SEQ ID NO: 239558 - RNA, 19 nt, Homo sapiens
  misc_RNA (1)...(19): siRNA sense strand
agaaggaggacaacaggua

SEQ ID NO: 239559 - RNA, 19 nt, Homo sapiens
  misc_RNA (1)...(19): siRNA sense strand
agagaaacaacgccaagua

SEQ ID NO: 239560 - RNA, 19 nt, Homo sapiens
  misc_RNA (1)...(19): siRNA sense strand
ugaccacauucaaggagua

SEQ ID NO: 239561 - RNA, 19 nt, Homo sapiens
  misc_RNA (1)...(19): siRNA sense strand
gacugaaguuugccaggaa

SEQ ID NO: 239562 - RNA, 19 nt, Homo sapiens
  misc_RNA (1)...(19): siRNA sense strand
ucagaagcacuuugagaaa

SEQ ID NO: 239563 - RNA, 19 nt, Homo sapiens
  misc_RNA (1)...(19): siRNA sense strand
guagcaauacuaaaggaaa

SEQ ID NO: 239564 - RNA, 19 nt, Homo sapiens
  misc_RNA (1)...(19): siRNA sense strand
ggaaaccaaggcaauguuc

SEQ ID NO: 239565 - RNA, 19 nt, Homo sapiens
  misc_RNA (1)...(19): siRNA sense strand
guagaugccauagaagaaa

SEQ ID NO: 239566 - RNA, 19 nt, Homo sapiens
  misc_RNA (1)...(19): siRNA sense strand
gcacaaggagaggagauga

SEQ ID NO: 239567 - RNA, 19 nt, Homo sapiens
  misc_RNA (1)...(19): siRNA sense strand
agagguggaugcacaagga

SEQ ID NO: 239568 - RNA, 19 nt, Homo sapiens
  misc_RNA (1)...(19): siRNA sense strand
gagccgaguuugcuuugag

SEQ ID NO: 239569 - RNA, 19 nt, Homo sapiens
  misc_RNA (1)...(19): siRNA sense strand
ccacgguccugccuaucuu

SEQ ID NO: 239570 - RNA, 19 nt, Homo sapiens
  misc_RNA (1)...(19): siRNA sense strand
ucagaaagggucagcauuc

SEQ ID NO: 239571 - RNA, 19 nt, Homo sapiens
  misc_RNA (1)...(19): siRNA sense strand
gcugggcgcugcuuuacca

SEQ ID NO: 239572 - RNA, 19 nt, Homo sapiens
  misc_RNA (1)...(19): siRNA sense strand
augaaucagucgucucuuu

SEQ ID NO: 239573 - RNA, 19 nt, Homo sapiens
  misc_RNA (1)...(19): siRNA sense strand
ccacauucaaggaguauga

SEQ ID NO: 239574 - RNA, 19 nt, Homo sapiens
  misc_RNA (1)...(19): siRNA sense strand
gagaaacaacgccaaguac

SEQ ID NO: 239575 - RNA, 19 nt, Homo sapiens
  misc_RNA (1)...(19): siRNA sense strand
cuucagacgagaauagaua

SEQ ID NO: 239576 - RNA, 19 nt, Homo sapiens
  misc_RNA (1)...(19): siRNA sense strand
gcacggccuuccgcaugaa

SEQ ID NO: 239577 - RNA, 19 nt, Homo sapiens
  misc_RNA (1)...(19): siRNA sense strand
cggcagagacguagcauca

SEQ ID NO: 239578 - RNA, 19 nt, Homo sapiens
  misc_RNA (1)...(19): siRNA sense strand
gacgagaauagauaugauu

SEQ ID NO: 239579 - RNA, 19 nt, Homo sapiens
  misc_RNA (1)...(19): siRNA sense strand
gcguugguguuccugauug

SEQ ID NO: 239580 - RNA, 19 nt, Homo sapiens
  misc_RNA (1)...(19): siRNA sense strand
ugacacucauccuuucuuc

SEQ ID NO: 239581 - RNA, 19 nt, Homo sapiens
  misc_RNA (1)...(19): siRNA sense strand
cugccuaucuugacucuuc

SEQ ID NO: 239582 - RNA, 19 nt, Homo sapiens
  misc_RNA (1)...(19): siRNA sense strand
uacaauuccgucucuauaa

SEQ ID NO: 239583 - RNA, 19 nt, Homo sapiens
  misc_RNA (1)...(19): siRNA sense strand
gaggcagcauccagccaaa

SEQ ID NO: 239584 - RNA, 19 nt, Homo sapiens
  misc_RNA (1)...(19): siRNA sense strand
gccuggagguauuaugcua

SEQ ID NO: 239585 - RNA, 19 nt, Homo sapiens
  misc_RNA (1)...(19): siRNA sense strand
gucagaagcacuuugagaa

SEQ ID NO: 239586 - RNA, 19 nt, Homo sapiens
  misc_RNA (1)...(19): siRNA sense strand
ggagacauuugcuauuuuc

SEQ ID NO: 239587 - RNA, 19 nt, Homo sapiens
  misc_RNA (1)...(19): siRNA sense strand
ccaggugaccauugacaaa

SEQ ID NO: 239588 - RNA, 19 nt, Homo sapiens
  misc_RNA (1)...(19): siRNA sense strand
acacaagaagucucagaaa

SEQ ID NO: 239589 - RNA, 19 nt, Homo sapiens
  misc_RNA (1)...(19): siRNA sense strand
cauccuuucuucauuucuu

SEQ ID NO: 239590 - RNA, 19 nt, Homo sapiens
  misc_RNA (1)...(19): siRNA sense strand
ggaugugauugagcaguau

SEQ ID NO: 239591 - RNA, 19 nt, Homo sapiens
  misc_RNA (1)...(19): siRNA sense strand
aggaugugauugagcagua

SEQ ID NO: 239592 - RNA, 19 nt, Homo sapiens
  misc_RNA (1)...(19): siRNA sense strand
uagcaauacuaaaggaaag

SEQ ID NO: 239593 - RNA, 19 nt, Homo sapiens
  misc_RNA (1)...(19): siRNA sense strand
ucccaggaaugaaccauau

SEQ ID NO: 239594 - RNA, 19 nt, Homo sapiens
  misc_RNA (1)...(19): siRNA sense strand
aaggagaggagaugaaaga

SEQ ID NO: 239595 - RNA, 19 nt, Homo sapiens
  misc_RNA (1)...(19): siRNA sense strand
cagcugaagcagagaagaa

SEQ ID NO: 239596 - RNA, 19 nt, Homo sapiens
  misc_RNA (1)...(19): siRNA sense strand
cagaagcacuuugagaaaa

SEQ ID NO: 239597 - RNA, 19 nt, Homo sapiens
  misc_RNA (1)...(19): siRNA sense strand
gugggaaggccgucugauu

SEQ ID NO: 239598 - RNA, 19 nt, Homo sapiens
  misc_RNA (1)...(19): siRNA sense strand
ggagccgaguuugcuuuga

SEQ ID NO: 239599 - RNA, 19 nt, Homo sapiens
  misc_RNA (1)...(19): siRNA sense strand
uggcuguccugaccacauu

SEQ ID NO: 239600 - RNA, 19 nt, Homo sapiens
  misc_RNA (1)...(19): siRNA sense strand
cagacgagaauagauauga

SEQ ID NO: 239601 - RNA, 19 nt, Homo sapiens
  misc_RNA (1)...(19): siRNA sense strand
gaucggguucgccuuucua

SEQ ID NO: 239602 - RNA, 19 nt, Homo sapiens
  misc_RNA (1)...(19): siRNA sense strand
ugggaaggccgucugauug

SEQ ID NO: 239603 - RNA, 19 nt, Homo sapiens
  misc_RNA (1)...(19): siRNA sense strand
gggaaaccaaggcaauguu

SEQ ID NO: 239604 - RNA, 19 nt, Homo sapiens
  misc_RNA (1)...(19): siRNA sense strand
acacaccucugucccugau

SEQ ID NO: 239605 - RNA, 19 nt, Homo sapiens
  misc_RNA (1)...(19): siRNA sense strand
aggauaaaguaccuucaga

SEQ ID NO: 239606 - RNA, 19 nt, Homo sapiens
  misc_RNA (1)...(19): siRNA sense strand
aaagcugggucucuuggau

SEQ ID NO: 239607 - RNA, 19 nt, Homo sapiens
  misc_RNA (1)...(19): siRNA sense strand
acaaggagaggagaugaaa

SEQ ID NO: 239608 - RNA, 19 nt, Homo sapiens
  misc_RNA (1)...(19): siRNA sense strand
accaucaucugcaacuauu

SEQ ID NO: 239609 - RNA, 19 nt, Homo sapiens
  misc_RNA (1)...(19): siRNA sense strand
aaaccaucaucugcaacua

SEQ ID NO: 239610 - RNA, 19 nt, Homo sapiens
  misc_RNA (1)...(19): siRNA sense strand
cagguauuccgauuugaaa

SEQ ID NO: 239611 - RNA, 19 nt, Homo sapiens
  misc_RNA (1)...(19): siRNA sense strand
cagagaagaaggaggacaa

SEQ ID NO: 239612 - RNA, 19 nt, Homo sapiens
  misc_RNA (1)...(19): siRNA sense strand
caggaaugaaccauaugua

SEQ ID NO: 239613 - RNA, 19 nt, Homo sapiens
  misc_RNA (1)...(19): siRNA sense strand
ucaaggaguaugagacugu

SEQ ID NO: 239614 - RNA, 19 nt, Homo sapiens
  misc_RNA (1)...(19): siRNA sense strand
agacgagaauagauaugau

SEQ ID NO: 239615 - RNA, 19 nt, Homo sapiens
  misc_RNA (1)...(19): siRNA sense strand
gaucacacuggccaccauu

SEQ ID NO: 239616 - RNA, 19 nt, Homo sapiens
  misc_RNA (1)...(19): siRNA sense strand
cugcaacuauucugagaca

SEQ ID NO: 239617 - RNA, 19 nt, Homo sapiens
  misc_RNA (1)...(19): siRNA sense strand
ccacaucagaaaucgaaga

SEQ ID NO: 239618 - RNA, 19 nt, Homo sapiens
  misc_RNA (1)...(19): siRNA sense strand
ccacagcaaagaacucauc

SEQ ID NO: 239619 - RNA, 19 nt, Homo sapiens
  misc_RNA (1)...(19): siRNA sense strand
ggaaguuuguaaaaguuga

SEQ ID NO: 239620 - RNA, 19 nt, Homo sapiens
  misc_RNA (1)...(19): siRNA sense strand
gaccauccacaucagaaau

SEQ ID NO: 239621 - RNA, 19 nt, Homo sapiens
  misc_RNA (1)...(19): siRNA sense strand
ggagcaacaccgucagaag

SEQ ID NO: 239622 - RNA, 19 nt, Homo sapiens
  misc_RNA (1)...(19): siRNA sense strand
cuuccaauaagcccauuua

SEQ ID NO: 239623 - RNA, 19 nt, Homo sapiens
  misc_RNA (1)...(19): siRNA sense strand
cgagcuggaugagggagaa

SEQ ID NO: 239624 - RNA, 19 nt, Homo sapiens
  misc_RNA (1)...(19): siRNA sense strand
aaacacaagaagucucaga

SEQ ID NO: 239625 - RNA, 19 nt, Homo sapiens
  misc_RNA (1)...(19): siRNA sense strand
caucuuuggagccgaguuu

SEQ ID NO: 239626 - RNA, 19 nt, Homo sapiens
  misc_RNA (1)...(19): siRNA sense strand
cgucagaagcacuuugaga

SEQ ID NO: 239627 - RNA, 19 nt, Homo sapiens
  misc_RNA (1)...(19): siRNA sense strand
acaccucugucccugaugu

SEQ ID NO: 239628 - RNA, 19 nt, Homo sapiens
  misc_RNA (1)...(19): siRNA sense strand
acagagaugauuauguguu

SEQ ID NO: 239629 - RNA, 19 nt, Homo sapiens
  misc_RNA (1)...(19): siRNA sense strand
cagcaucucccaggacaga

SEQ ID NO: 239630 - RNA, 19 nt, Homo sapiens
  misc_RNA (1)...(19): siRNA sense strand
gcagaaaucuaaggauaua

SEQ ID NO: 239631 - RNA, 19 nt, Homo sapiens
  misc_RNA (1)...(19): siRNA sense strand
caacaaggaugaagucuau

SEQ ID NO: 239632 - RNA, 19 nt, Homo sapiens
  misc_RNA (1)...(19): siRNA sense strand
gaauaagccugaagugaau

SEQ ID NO: 239633 - RNA, 19 nt, Homo sapiens
  misc_RNA (1)...(19): siRNA sense strand
cagcagaaaucuaaggaua

SEQ ID NO: 239634 - RNA, 19 nt, Homo sapiens
  misc_RNA (1)...(19): siRNA sense strand
gagaagagcuuguuaaaau

SEQ ID NO: 239635 - RNA, 19 nt, Homo sapiens
  misc_RNA (1)...(19): siRNA sense strand
cuagauggcuuucucagua

SEQ ID NO: 239636 - RNA, 19 nt, Homo sapiens
  misc_RNA (1)...(19): siRNA sense strand
uaaggcagcucaugagaaa

SEQ ID NO: 239637 - RNA, 19 nt, Homo sapiens
  misc_RNA (1)...(19): siRNA sense strand
gagcccagaucaaccuuua

SEQ ID NO: 239638 - RNA, 19 nt, Homo sapiens
  misc_RNA (1)...(19): siRNA sense strand
gaaagaaacuacgauugau

SEQ ID NO: 239639 - RNA, 19 nt, Homo sapiens
  misc_RNA (1)...(19): siRNA sense strand
gaaaucagauggacguaag

SEQ ID NO: 239640 - RNA, 19 nt, Homo sapiens
  misc_RNA (1)...(19): siRNA sense strand
gauggcagcucaaagcaaa

SEQ ID NO: 239641 - RNA, 19 nt, Homo sapiens
  misc_RNA (1)...(19): siRNA sense strand
ggaaaguacugaggagaaa

SEQ ID NO: 239642 - RNA, 19 nt, Homo sapiens
  misc_RNA (1)...(19): siRNA sense strand
ggagaggucuaaaguggaa

SEQ ID NO: 239643 - RNA, 19 nt, Homo sapiens
  misc_RNA (1)...(19): siRNA sense strand
ucgggaagcuggaaauaua

SEQ ID NO: 239644 - RNA, 19 nt, Homo sapiens
  misc_RNA (1)...(19): siRNA sense strand
gaaacacucugauaaacuc

SEQ ID NO: 239645 - RNA, 19 nt, Homo sapiens
  misc_RNA (1)...(19): siRNA sense strand
ggucauuacugcccuugua

SEQ ID NO: 239646 - RNA, 19 nt, Homo sapiens
  misc_RNA (1)...(19): siRNA sense strand
agacugaucuucuaaguuc

SEQ ID NO: 239647 - RNA, 19 nt, Homo sapiens
  misc_RNA (1)...(19): siRNA sense strand
gacaagagcucaaggaaaa

SEQ ID NO: 239648 - RNA, 19 nt, Homo sapiens
  misc_RNA (1)...(19): siRNA sense strand
gacaguggccgauaagaua

SEQ ID NO: 239649 - RNA, 19 nt, Homo sapiens
  misc_RNA (1)...(19): siRNA sense strand
gaacuugaccaguguaaau

SEQ ID NO: 239650 - RNA, 19 nt, Homo sapiens
  misc_RNA (1)...(19): siRNA sense strand
gaauaggguuacagaguug

SEQ ID NO: 239651 - RNA, 19 nt, Homo sapiens
  misc_RNA (1)...(19): siRNA sense strand
gagcaaagaacauauugaa

SEQ ID NO: 239652 - RNA, 19 nt, Homo sapiens
  misc_RNA (1)...(19): siRNA sense strand
cuacaggaauugauuaaug

SEQ ID NO: 239653 - RNA, 19 nt, Homo sapiens
  misc_RNA (1)...(19): siRNA sense strand
cacaggaacucagaaauuu

SEQ ID NO: 239654 - RNA, 19 nt, Homo sapiens
  misc_RNA (1)...(19): siRNA sense strand
gcaaguuaaugaaucuuug

SEQ ID NO: 239655 - RNA, 19 nt, Homo sapiens
  misc_RNA (1)...(19): siRNA sense strand
gaacuugguugaucuugca

SEQ ID NO: 239656 - RNA, 19 nt, Homo sapiens
  misc_RNA (1)...(19): siRNA sense strand
acaggaacuucacaacuua

SEQ ID NO: 239657 - RNA, 19 nt, Homo sapiens
  misc_RNA (1)...(19): siRNA sense strand
ccacguacccuucaucaaa

SEQ ID NO: 239658 - RNA, 19 nt, Homo sapiens
  misc_RNA (1)...(19): siRNA sense strand
ggaugaagucuaucaaauu

SEQ ID NO: 239659 - RNA, 19 nt, Homo sapiens
  misc_RNA (1)...(19): siRNA sense strand
agagaggagugauaauuaa

SEQ ID NO: 239660 - RNA, 19 nt, Homo sapiens
  misc_RNA (1)...(19): siRNA sense strand
gacuacagauguuugauga

SEQ ID NO: 239661 - RNA, 19 nt, Homo sapiens
  misc_RNA (1)...(19): siRNA sense strand
caacaaagaagagacaauu

SEQ ID NO: 239662 - RNA, 19 nt, Homo sapiens
  misc_RNA (1)...(19): siRNA sense strand
ucaagagacugaacagaga

SEQ ID NO: 239663 - RNA, 19 nt, Homo sapiens
  misc_RNA (1)...(19): siRNA sense strand
gaauauaucacaucagcuu

SEQ ID NO: 239664 - RNA, 19 nt, Homo sapiens
  misc_RNA (1)...(19): siRNA sense strand
ugaauaggguuacagaguu

SEQ ID NO: 239665 - RNA, 19 nt, Homo sapiens
  misc_RNA (1)...(19): siRNA sense strand
ugaaagaaacuacgauuga

SEQ ID NO: 239666 - RNA, 19 nt, Homo sapiens
  misc_RNA (1)...(19): siRNA sense strand
gaggaucccuuggcuggua

SEQ ID NO: 239667 - RNA, 19 nt, Homo sapiens
  misc_RNA (1)...(19): siRNA sense strand
ugaagaaccucuaagucaa

SEQ ID NO: 239668 - RNA, 19 nt, Homo sapiens
  misc_RNA (1)...(19): siRNA sense strand
gugaacaucuccuugauca

SEQ ID NO: 239669 - RNA, 19 nt, Homo sapiens
  misc_RNA (1)...(19): siRNA sense strand
gaaacuggauaucccaaca

SEQ ID NO: 239670 - RNA, 19 nt, Homo sapiens
  misc_RNA (1)...(19): siRNA sense strand
guggguaucuuccuuaaau

SEQ ID NO: 239671 - RNA, 19 nt, Homo sapiens
  misc_RNA (1)...(19): siRNA sense strand
gaaaaugugucuacucaug

SEQ ID NO: 239672 - RNA, 19 nt, Homo sapiens
  misc_RNA (1)...(19): siRNA sense strand
gcacuuggaucucucacau

SEQ ID NO: 239673 - RNA, 19 nt, Homo sapiens
  misc_RNA (1)...(19): siRNA sense strand
gaguguauauuucugaaga

SEQ ID NO: 239674 - RNA, 19 nt, Homo sapiens
  misc_RNA (1)...(19): siRNA sense strand
gaaauuacaguacacaaca

SEQ ID NO: 239675 - RNA, 19 nt, Homo sapiens
  misc_RNA (1)...(19): siRNA sense strand
gagaaacagcauaacauuu

SEQ ID NO: 239676 - RNA, 19 nt, Homo sapiens
  misc_RNA (1)...(19): siRNA sense strand
gaaacuuacugauaauggu

SEQ ID NO: 239677 - RNA, 19 nt, Homo sapiens
  misc_RNA (1)...(19): siRNA sense strand
gaacacaagaacaguuuau

SEQ ID NO: 239678 - RNA, 19 nt, Homo sapiens
  misc_RNA (1)...(19): siRNA sense strand
ugaauaagccugaagugaa

SEQ ID NO: 239679 - RNA, 19 nt, Homo sapiens
  misc_RNA (1)...(19): siRNA sense strand
uaacaagagaggagugaua

SEQ ID NO: 239680 - RNA, 19 nt, Homo sapiens
  misc_RNA (1)...(19): siRNA sense strand
caagagaggagugauaauu

SEQ ID NO: 239681 - RNA, 19 nt, Homo sapiens
  misc_RNA (1)...(19): siRNA sense strand
ucagaugacuauugaugaa

SEQ ID NO: 239682 - RNA, 19 nt, Homo sapiens
  misc_RNA (1)...(19): siRNA sense strand
agacaucacugagaaauca

SEQ ID NO: 239683 - RNA, 19 nt, Homo sapiens
  misc_RNA (1)...(19): siRNA sense strand
gaggaaaagugugaaaaua

SEQ ID NO: 239684 - RNA, 19 nt, Homo sapiens
  misc_RNA (1)...(19): siRNA sense strand
caauaaagcagacccauuc

SEQ ID NO: 239685 - RNA, 19 nt, Homo sapiens
  misc_RNA (1)...(19): siRNA sense strand
ggaacuagauggcuuucuc

SEQ ID NO: 239686 - RNA, 19 nt, Homo sapiens
  misc_RNA (1)...(19): siRNA sense strand
uuacagaguuguuuaugga

SEQ ID NO: 239687 - RNA, 19 nt, Homo sapiens
  misc_RNA (1)...(19): siRNA sense strand
uaaguucacuggaaaugau

SEQ ID NO: 239688 - RNA, 19 nt, Homo sapiens
  misc_RNA (1)...(19): siRNA sense strand
ggagaucuauaaugaagag

SEQ ID NO: 239689 - RNA, 19 nt, Homo sapiens
  misc_RNA (1)...(19): siRNA sense strand
auacagaaaccacuuagua

SEQ ID NO: 239690 - RNA, 19 nt, Homo sapiens
  misc_RNA (1)...(19): siRNA sense strand
gaagaccugaagacaauaa

SEQ ID NO: 239691 - RNA, 19 nt, Homo sapiens
  misc_RNA (1)...(19): siRNA sense strand
guggaaaccuaacugaaga

SEQ ID NO: 239692 - RNA, 19 nt, Homo sapiens
  misc_RNA (1)...(19): siRNA sense strand
aagagcagauuguagaauu

SEQ ID NO: 239693 - RNA, 19 nt, Homo sapiens
  misc_RNA (1)...(19): siRNA sense strand
ucccuuggcugguauaauu

SEQ ID NO: 239694 - RNA, 19 nt, Homo sapiens
  misc_RNA (1)...(19): siRNA sense strand
ucacaggaacucagaaauu

SEQ ID NO: 239695 - RNA, 19 nt, Homo sapiens
  misc_RNA (1)...(19): siRNA sense strand
uaaugaaucuuuggacaga

SEQ ID NO: 239696 - RNA, 19 nt, Homo sapiens
  misc_RNA (1)...(19): siRNA sense strand
guacuacaggaauugauua

SEQ ID NO: 239697 - RNA, 19 nt, Homo sapiens
  misc_RNA (1)...(19): siRNA sense strand
caaacuggaucguaagaag

SEQ ID NO: 239698 - RNA, 19 nt, Homo sapiens
  misc_RNA (1)...(19): siRNA sense strand
uguuggagaucuauaauga

SEQ ID NO: 239699 - RNA, 19 nt, Homo sapiens
  misc_RNA (1)...(19): siRNA sense strand
cugaagaccugaagacaau

SEQ ID NO: 239700 - RNA, 19 nt, Homo sapiens
  misc_RNA (1)...(19): siRNA sense strand
caaucuacaugaacuacaa

SEQ ID NO: 239701 - RNA, 19 nt, Homo sapiens
  misc_RNA (1)...(19): siRNA sense strand
gaggagaaacuucaugaug

SEQ ID NO: 239702 - RNA, 19 nt, Homo sapiens
  misc_RNA (1)...(19): siRNA sense strand
aagagaggagugauaauua

SEQ ID NO: 239703 - RNA, 19 nt, Homo sapiens
  misc_RNA (1)...(19): siRNA sense strand
gugaaucucugaacacaag

SEQ ID NO: 239704 - RNA, 19 nt, Homo sapiens
  misc_RNA (1)...(19): siRNA sense strand
ccaagaagguacaaaauug

SEQ ID NO: 239705 - RNA, 19 nt, Homo sapiens
  misc_RNA (1)...(19): siRNA sense strand
cuaaggauauagucaacaa

SEQ ID NO: 239706 - RNA, 19 nt, Homo sapiens
  misc_RNA (1)...(19): siRNA sense strand
uuaauguacucaagacuga

SEQ ID NO: 239707 - RNA, 19 nt, Homo sapiens
  misc_RNA (1)...(19): siRNA sense strand
ggagauagaacguuuaaaa

SEQ ID NO: 239708 - RNA, 19 nt, Homo sapiens
  misc_RNA (1)...(19): siRNA sense strand
cggaggagauagaacguuu

SEQ ID NO: 239709 - RNA, 19 nt, Homo sapiens
  misc_RNA (1)...(19): siRNA sense strand
guagaaagaacaccucaug

SEQ ID NO: 239710 - RNA, 19 nt, Homo sapiens
  misc_RNA (1)...(19): siRNA sense strand
ggagugauaauuaaagguu

SEQ ID NO: 239711 - RNA, 19 nt, Homo sapiens
  misc_RNA (1)...(19): siRNA sense strand
gaggagauagaacguuuaa

SEQ ID NO: 239712 - RNA, 19 nt, Homo sapiens
  misc_RNA (1)...(19): siRNA sense strand
gaugcagaccauuuaauuu

SEQ ID NO: 239713 - RNA, 19 nt, Homo sapiens
  misc_RNA (1)...(19): siRNA sense strand
aaagcaauguggaaaccua

SEQ ID NO: 239714 - RNA, 19 nt, Homo sapiens
  misc_RNA (1)...(19): siRNA sense strand
aaucugaccugcaaaauaa

SEQ ID NO: 239715 - RNA, 19 nt, Homo sapiens
  misc_RNA (1)...(19): siRNA sense strand
ccgauaagauagaagauca

SEQ ID NO: 239716 - RNA, 19 nt, Homo sapiens
  misc_RNA (1)...(19): siRNA sense strand
ggauguggauguagaagag

SEQ ID NO: 239717 - RNA, 19 nt, Homo sapiens
  misc_RNA (1)...(19): siRNA sense strand
gaacaggaacuucacaacu

SEQ ID NO: 239718 - RNA, 19 nt, Homo sapiens
  misc_RNA (1)...(19): siRNA sense strand
gaucuauaaugaagagcuu

SEQ ID NO: 239719 - RNA, 19 nt, Homo sapiens
  misc_RNA (1)...(19): siRNA sense strand
augcuaaacuguucagaaa

SEQ ID NO: 239720 - RNA, 19 nt, Homo sapiens
  misc_RNA (1)...(19): siRNA sense strand
caucaacacugguaagaac

SEQ ID NO: 239721 - RNA, 19 nt, Homo sapiens
  misc_RNA (1)...(19): siRNA sense strand
guaacaaucuacaugaacu

SEQ ID NO: 239722 - RNA, 19 nt, Homo sapiens
  misc_RNA (1)...(19): siRNA sense strand
acagaguuguuuauggaua

SEQ ID NO: 239723 - RNA, 19 nt, Homo sapiens
  misc_RNA (1)...(19): siRNA sense strand
guguaaaucugaccugcaa

SEQ ID NO: 239724 - RNA, 19 nt, Homo sapiens
  misc_RNA (1)...(19): siRNA sense strand
gcacaaaaucuagaacuua

SEQ ID NO: 239725 - RNA, 19 nt, Homo sapiens
  misc_RNA (1)...(19): siRNA sense strand
cuacaugaacuacaagaaa

SEQ ID NO: 239726 - RNA, 19 nt, Homo sapiens
  misc_RNA (1)...(19): siRNA sense strand
aacaggaacuucacaacuu

SEQ ID NO: 239727 - RNA, 19 nt, Homo sapiens
  misc_RNA (1)...(19): siRNA sense strand
ggucuaaaguggaagaaac

SEQ ID NO: 239728 - RNA, 19 nt, Homo sapiens
  misc_RNA (1)...(19): siRNA sense strand
gaacugaaccacgugaaca

SEQ ID NO: 239729 - RNA, 19 nt, Homo sapiens
  misc_RNA (1)...(19): siRNA sense strand
ggaacaggaucugaaacug

SEQ ID NO: 239730 - RNA, 19 nt, Homo sapiens
  misc_RNA (1)...(19): siRNA sense strand
caacagagauugacaguuu

SEQ ID NO: 239731 - RNA, 19 nt, Homo sapiens
  misc_RNA (1)...(19): siRNA sense strand
cgacauugauuauagcuua

SEQ ID NO: 239732 - RNA, 19 nt, Homo sapiens
  misc_RNA (1)...(19): siRNA sense strand
caaguucaaugauaaguug

SEQ ID NO: 239733 - RNA, 19 nt, Homo sapiens
  misc_RNA (1)...(19): siRNA sense strand
cuacagggcuccuuugaug

SEQ ID NO: 239734 - RNA, 19 nt, Homo sapiens
  misc_RNA (1)...(19): siRNA sense strand
uggaagcgcuccucaacua

SEQ ID NO: 239735 - RNA, 19 nt, Homo sapiens
  misc_RNA (1)...(19): siRNA sense strand
uaucugaacuucuccauca

SEQ ID NO: 239736 - RNA, 19 nt, Homo sapiens
  misc_RNA (1)...(19): siRNA sense strand
ggacaugucgggagacuug

SEQ ID NO: 239737 - RNA, 19 nt, Homo sapiens
  misc_RNA (1)...(19): siRNA sense strand
guuuaagggugaaaucuuu

SEQ ID NO: 239738 - RNA, 19 nt, Homo sapiens
  misc_RNA (1)...(19): siRNA sense strand
gcgaaaugauccagaaauc

SEQ ID NO: 239739 - RNA, 19 nt, Homo sapiens
  misc_RNA (1)...(19): siRNA sense strand
ggaaggugcgcaagucauu

SEQ ID NO: 239740 - RNA, 19 nt, Homo sapiens
  misc_RNA (1)...(19): siRNA sense strand
aagcgcuccucaacuauua

SEQ ID NO: 239741 - RNA, 19 nt, Homo sapiens
  misc_RNA (1)...(19): siRNA sense strand
gcaagucauucuucaaacu

SEQ ID NO: 239742 - RNA, 19 nt, Homo sapiens
  misc_RNA (1)...(19): siRNA sense strand
gcgcaagucauucuucaaa

SEQ ID NO: 239743 - RNA, 19 nt, Homo sapiens
  misc_RNA (1)...(19): siRNA sense strand
gaacuucuccaucacagau

SEQ ID NO: 239744 - RNA, 19 nt, Homo sapiens
  misc_RNA (1)...(19): siRNA sense strand
ccuccgaucuacagccuua

SEQ ID NO: 239745 - RNA, 19 nt, Homo sapiens
  misc_RNA (1)...(19): siRNA sense strand
gaagcgcuccucaacuauu

SEQ ID NO: 239746 - RNA, 19 nt, Homo sapiens
  misc_RNA (1)...(19): siRNA sense strand
ggaucacgcugccugacuu

SEQ ID NO: 239747 - RNA, 19 nt, Homo sapiens
  misc_RNA (1)...(19): siRNA sense strand
gaacugaaagaauccaaag

SEQ ID NO: 239748 - RNA, 19 nt, Homo sapiens
  misc_RNA (1)...(19): siRNA sense strand
cugaaagaauccaaaguug

SEQ ID NO: 239749 - RNA, 19 nt, Homo sapiens
  misc_RNA (1)...(19): siRNA sense strand
caagucauucuucaaacua

SEQ ID NO: 239750 - RNA, 19 nt, Homo sapiens
  misc_RNA (1)...(19): siRNA sense strand
gcagauccauaaggacuuc

SEQ ID NO: 239751 - RNA, 19 nt, Homo sapiens
  misc_RNA (1)...(19): siRNA sense strand
gaacuucagcccugggaau

SEQ ID NO: 239752 - RNA, 19 nt, Homo sapiens
  misc_RNA (1)...(19): siRNA sense strand
uaaccaccguucuccaguu

SEQ ID NO: 239753 - RNA, 19 nt, Homo sapiens
  misc_RNA (1)...(19): siRNA sense strand
gucaagggcaucagcauuu

SEQ ID NO: 239754 - RNA, 19 nt, Homo sapiens
  misc_RNA (1)...(19): siRNA sense strand
ccucaacuauuacauccuu

SEQ ID NO: 239755 - RNA, 19 nt, Homo sapiens
  misc_RNA (1)...(19): siRNA sense strand
aaccaccguucuccaguua

SEQ ID NO: 239756 - RNA, 19 nt, Homo sapiens
  misc_RNA (1)...(19): siRNA sense strand
guacuggagagcaggauuu

SEQ ID NO: 239757 - RNA, 19 nt, Homo sapiens
  misc_RNA (1)...(19): siRNA sense strand
caaacuacagggcuccuuu

SEQ ID NO: 239758 - RNA, 19 nt, Homo sapiens
  misc_RNA (1)...(19): siRNA sense strand
ugauaccgccugacucuaa

SEQ ID NO: 239759 - RNA, 19 nt, Homo sapiens
  misc_RNA (1)...(19): siRNA sense strand
gaggaaggauaucugaacu

SEQ ID NO: 239760 - RNA, 19 nt, Homo sapiens
  misc_RNA (1)...(19): siRNA sense strand
gagagcaggauuugcgaaa

SEQ ID NO: 239761 - RNA, 19 nt, Homo sapiens
  misc_RNA (1)...(19): siRNA sense strand
aaaguuggacuauucaaug

SEQ ID NO: 239762 - RNA, 19 nt, Homo sapiens
  misc_RNA (1)...(19): siRNA sense strand
cugcuggcauugcugcuua

SEQ ID NO: 239763 - RNA, 19 nt, Homo sapiens
  misc_RNA (1)...(19): siRNA sense strand
gauaccgccugacucuaau

SEQ ID NO: 239764 - RNA, 19 nt, Homo sapiens
  misc_RNA (1)...(19): siRNA sense strand
acaagggacugcaguaugc

SEQ ID NO: 239765 - RNA, 19 nt, Homo sapiens
  misc_RNA (1)...(19): siRNA sense strand
ggaacugaaagaauccaaa

SEQ ID NO: 239766 - RNA, 19 nt, Homo sapiens
  misc_RNA (1)...(19): siRNA sense strand
acaaccagauugaguccaa

SEQ ID NO: 239767 - RNA, 19 nt, Homo sapiens
  misc_RNA (1)...(19): siRNA sense strand
gacaagggacugcaguaug

SEQ ID NO: 239768 - RNA, 19 nt, Homo sapiens
  misc_RNA (1)...(19): siRNA sense strand
aaggauaucugaacuucuc

SEQ ID NO: 239769 - RNA, 19 nt, Homo sapiens
  misc_RNA (1)...(19): siRNA sense strand
cuacagccuuaucuccaaa

SEQ ID NO: 239770 - RNA, 19 nt, Homo sapiens
  misc_RNA (1)...(19): siRNA sense strand
caaaguuggacuauucaau

SEQ ID NO: 239771 - RNA, 19 nt, Homo sapiens
  misc_RNA (1)...(19): siRNA sense strand
caacaaaauggucuacuuu

SEQ ID NO: 239772 - RNA, 19 nt, Homo sapiens
  misc_RNA (1)...(19): siRNA sense strand
ugcuggaggugauguuuaa

SEQ ID NO: 239773 - RNA, 19 nt, Homo sapiens
  misc_RNA (1)...(19): siRNA sense strand
ucgccgacauugauuauag

SEQ ID NO: 239774 - RNA, 19 nt, Homo sapiens
  misc_RNA (1)...(19): siRNA sense strand
aaguggaacugaaagaauc

SEQ ID NO: 239775 - RNA, 19 nt, Homo sapiens
  misc_RNA (1)...(19): siRNA sense strand
gugcgcaagucauucuuca

SEQ ID NO: 239776 - RNA, 19 nt, Homo sapiens
  misc_RNA (1)...(19): siRNA sense strand
gguggaaggugcgcaaguc

SEQ ID NO: 239777 - RNA, 19 nt, Homo sapiens
  misc_RNA (1)...(19): siRNA sense strand
ucaagggcaucagcauuuc

SEQ ID NO: 239778 - RNA, 19 nt, Homo sapiens
  misc_RNA (1)...(19): siRNA sense strand
ggaagcgcuccucaacuau

SEQ ID NO: 239779 - RNA, 19 nt, Homo sapiens
  misc_RNA (1)...(19): siRNA sense strand
ggcugcagauccauaagga

SEQ ID NO: 239780 - RNA, 19 nt, Homo sapiens
  misc_RNA (1)...(19): siRNA sense strand
uguugaaccucuuccacaa

SEQ ID NO: 239781 - RNA, 19 nt, Homo sapiens
  misc_RNA (1)...(19): siRNA sense strand
uccaauacaugagaguuug

SEQ ID NO: 239782 - RNA, 19 nt, Homo sapiens
  misc_RNA (1)...(19): siRNA sense strand
ccaaguucaaugauaaguu

SEQ ID NO: 239783 - RNA, 19 nt, Homo sapiens
  misc_RNA (1)...(19): siRNA sense strand
acugaaagaauccaaaguu

SEQ ID NO: 239784 - RNA, 19 nt, Homo sapiens
  misc_RNA (1)...(19): siRNA sense strand
cgacaagggacugcaguau

SEQ ID NO: 239785 - RNA, 19 nt, Homo sapiens
  misc_RNA (1)...(19): siRNA sense strand
gacauugauuauagcuuag

SEQ ID NO: 239786 - RNA, 19 nt, Homo sapiens
  misc_RNA (1)...(19): siRNA sense strand
gcaucagcauuucggucaa

SEQ ID NO: 239787 - RNA, 19 nt, Homo sapiens
  misc_RNA (1)...(19): siRNA sense strand
guccaauacaugagaguuu

SEQ ID NO: 239788 - RNA, 19 nt, Homo sapiens
  misc_RNA (1)...(19): siRNA sense strand
cagcaaggagccugucuuc

SEQ ID NO: 239789 - RNA, 19 nt, Homo sapiens
  misc_RNA (1)...(19): siRNA sense strand
cugcuccgcuccugaacuu

SEQ ID NO: 239790 - RNA, 19 nt, Homo sapiens
  misc_RNA (1)...(19): siRNA sense strand
caugaggaaggauaucuga

SEQ ID NO: 239791 - RNA, 19 nt, Homo sapiens
  misc_RNA (1)...(19): siRNA sense strand
ccuccuugcugcagucaug

SEQ ID NO: 239792 - RNA, 19 nt, Homo sapiens
  misc_RNA (1)...(19): siRNA sense strand
ucuacagccuuaucuccaa

SEQ ID NO: 239793 - RNA, 19 nt, Homo sapiens
  misc_RNA (1)...(19): siRNA sense strand
aaaguggaacugaaagaau

SEQ ID NO: 239794 - RNA, 19 nt, Homo sapiens
  misc_RNA (1)...(19): siRNA sense strand
uccgggaggcccacaguua

SEQ ID NO: 239795 - RNA, 19 nt, Homo sapiens
  misc_RNA (1)...(19): siRNA sense strand
agccuuaucuccaaacucu

SEQ ID NO: 239796 - RNA, 19 nt, Homo sapiens
  misc_RNA (1)...(19): siRNA sense strand
gguaaaaguggaacugaaa

SEQ ID NO: 239797 - RNA, 19 nt, Homo sapiens
  misc_RNA (1)...(19): siRNA sense strand
ccagauugaguccaaguuc

SEQ ID NO: 239798 - RNA, 19 nt, Homo sapiens
  misc_RNA (1)...(19): siRNA sense strand
ccaguuacaacagagauug

SEQ ID NO: 239799 - RNA, 19 nt, Homo sapiens
  misc_RNA (1)...(19): siRNA sense strand
gaaggugcgcaagucauuc

SEQ ID NO: 239800 - RNA, 19 nt, Homo sapiens
  misc_RNA (1)...(19): siRNA sense strand
caacaugaaccuggaacuc

SEQ ID NO: 239801 - RNA, 19 nt, Homo sapiens
  misc_RNA (1)...(19): siRNA sense strand
caugauaccgccugacucu

SEQ ID NO: 239802 - RNA, 19 nt, Homo sapiens
  misc_RNA (1)...(19): siRNA sense strand
aguccaaguuccagaaagu

SEQ ID NO: 239803 - RNA, 19 nt, Homo sapiens
  misc_RNA (1)...(19): siRNA sense strand
cguccauacugcuggcauu

SEQ ID NO: 239804 - RNA, 19 nt, Homo sapiens
  misc_RNA (1)...(19): siRNA sense strand
aaacuacagggcuccuuug

SEQ ID NO: 239805 - RNA, 19 nt, Homo sapiens
  misc_RNA (1)...(19): siRNA sense strand
gaugcuggaggugauguuu

SEQ ID NO: 239806 - RNA, 19 nt, Homo sapiens
  misc_RNA (1)...(19): siRNA sense strand
gaguccaaguuccagaaag

SEQ ID NO: 239807 - RNA, 19 nt, Homo sapiens
  misc_RNA (1)...(19): siRNA sense strand
ccaauacaugagaguuuga

SEQ ID NO: 239808 - RNA, 19 nt, Homo sapiens
  misc_RNA (1)...(19): siRNA sense strand
ugacaguuucgccgacauu

SEQ ID NO: 239809 - RNA, 19 nt, Homo sapiens
  misc_RNA (1)...(19): siRNA sense strand
ccugguuuaucaugaggaa

SEQ ID NO: 239810 - RNA, 19 nt, Homo sapiens
  misc_RNA (1)...(19): siRNA sense strand
gaagcguguucagcucuac

SEQ ID NO: 239811 - RNA, 19 nt, Homo sapiens
  misc_RNA (1)...(19): siRNA sense strand
gggcuccuuugaugucagu

SEQ ID NO: 239812 - RNA, 19 nt, Homo sapiens
  misc_RNA (1)...(19): siRNA sense strand
acaacaaaauggucuacuu

SEQ ID NO: 239813 - RNA, 19 nt, Homo sapiens
  misc_RNA (1)...(19): siRNA sense strand
gacaugauaccgccugacu

SEQ ID NO: 239814 - RNA, 19 nt, Homo sapiens
  misc_RNA (1)...(19): siRNA sense strand
acuauuacauccuuaacac

SEQ ID NO: 239815 - RNA, 19 nt, Homo sapiens
  misc_RNA (1)...(19): siRNA sense strand
gcuccucaacuauuacauc

SEQ ID NO: 239816 - RNA, 19 nt, Homo sapiens
  misc_RNA (1)...(19): siRNA sense strand
gagcacagcuggccucuuc

SEQ ID NO: 239817 - RNA, 19 nt, Homo sapiens
  misc_RNA (1)...(19): siRNA sense strand
ccacaaagauucucauugg

SEQ ID NO: 239818 - RNA, 19 nt, Homo sapiens
  misc_RNA (1)...(19): siRNA sense strand
gcaagaagcgggcugcuaa

SEQ ID NO: 239819 - RNA, 19 nt, Homo sapiens
  misc_RNA (1)...(19): siRNA sense strand
gcaaggccauuaacaagau

SEQ ID NO: 239820 - RNA, 19 nt, Homo sapiens
  misc_RNA (1)...(19): siRNA sense strand
uggaagaugugaaggauuu

SEQ ID NO: 239821 - RNA, 19 nt, Homo sapiens
  misc_RNA (1)...(19): siRNA sense strand
gcaaggaggugcagcugau

SEQ ID NO: 239822 - RNA, 19 nt, Homo sapiens
  misc_RNA (1)...(19): siRNA sense strand
ggaagaagcacucaguuuc

SEQ ID NO: 239823 - RNA, 19 nt, Homo sapiens
  misc_RNA (1)...(19): siRNA sense strand
gaacgcuucucccuaagug

SEQ ID NO: 239824 - RNA, 19 nt, Homo sapiens
  misc_RNA (1)...(19): siRNA sense strand
ucacacagaugcacuucuu

SEQ ID NO: 239825 - RNA, 19 nt, Homo sapiens
  misc_RNA (1)...(19): siRNA sense strand
ugaggaaccuggcagaaga

SEQ ID NO: 239826 - RNA, 19 nt, Homo sapiens
  misc_RNA (1)...(19): siRNA sense strand
ccacagagccuugauggaa

SEQ ID NO: 239827 - RNA, 19 nt, Homo sapiens
  misc_RNA (1)...(19): siRNA sense strand
ugaagucucucaagaaguc

SEQ ID NO: 239828 - RNA, 19 nt, Homo sapiens
  misc_RNA (1)...(19): siRNA sense strand
gggagauuguccaccauaa

SEQ ID NO: 239829 - RNA, 19 nt, Homo sapiens
  misc_RNA (1)...(19): siRNA sense strand
gggcagcagugucuucuuc

SEQ ID NO: 239830 - RNA, 19 nt, Homo sapiens
  misc_RNA (1)...(19): siRNA sense strand
acacagcgauggcagcuau

SEQ ID NO: 239831 - RNA, 19 nt, Homo sapiens
  misc_RNA (1)...(19): siRNA sense strand
ggugaagucucucaagaag

SEQ ID NO: 239832 - RNA, 19 nt, Homo sapiens
  misc_RNA (1)...(19): siRNA sense strand
gcucugcucucuggacauu

SEQ ID NO: 239833 - RNA, 19 nt, Homo sapiens
  misc_RNA (1)...(19): siRNA sense strand
caacaagacuguggagcau

SEQ ID NO: 239834 - RNA, 19 nt, Homo sapiens
  misc_RNA (1)...(19): siRNA sense strand
gagauuguccaccauaaug

SEQ ID NO: 239835 - RNA, 19 nt, Homo sapiens
  misc_RNA (1)...(19): siRNA sense strand
caacucaggcucuguguuc

SEQ ID NO: 239836 - RNA, 19 nt, Homo sapiens
  misc_RNA (1)...(19): siRNA sense strand
uuugaacgcuucucccuaa

SEQ ID NO: 239837 - RNA, 19 nt, Homo sapiens
  misc_RNA (1)...(19): siRNA sense strand
gcacuccucugcaaucacu

SEQ ID NO: 239838 - RNA, 19 nt, Homo sapiens
  misc_RNA (1)...(19): siRNA sense strand
ccacgccuguugcaucuga

SEQ ID NO: 239839 - RNA, 19 nt, Homo sapiens
  misc_RNA (1)...(19): siRNA sense strand
gagcauggcuuccccaauc

SEQ ID NO: 239840 - RNA, 19 nt, Homo sapiens
  misc_RNA (1)...(19): siRNA sense strand
gccuugagcuggcccauca

SEQ ID NO: 239841 - RNA, 19 nt, Homo sapiens
  misc_RNA (1)...(19): siRNA sense strand
gaaccaggccucgcagugu

SEQ ID NO: 239842 - RNA, 19 nt, Homo sapiens
  misc_RNA (1)...(19): siRNA sense strand
gcgcgaagaccaaguucaa

SEQ ID NO: 239843 - RNA, 19 nt, Homo sapiens
  misc_RNA (1)...(19): siRNA sense strand
ggugaccgccacuguguaa

SEQ ID NO: 239844 - RNA, 19 nt, Homo sapiens
  misc_RNA (1)...(19): siRNA sense strand
gcaaguauacagcccagau

SEQ ID NO: 239845 - RNA, 19 nt, Homo sapiens
  misc_RNA (1)...(19): siRNA sense strand
gcccgaggaugaauuugau

SEQ ID NO: 239846 - RNA, 19 nt, Homo sapiens
  misc_RNA (1)...(19): siRNA sense strand
guacuggagcuuagugaug

SEQ ID NO: 239847 - RNA, 19 nt, Homo sapiens
  misc_RNA (1)...(19): siRNA sense strand
ucugcucucuggacauuaa

SEQ ID NO: 239848 - RNA, 19 nt, Homo sapiens
  misc_RNA (1)...(19): siRNA sense strand
caaggccauuaacaagauu

SEQ ID NO: 239849 - RNA, 19 nt, Homo sapiens
  misc_RNA (1)...(19): siRNA sense strand
gcgagggcuucacauggaa

SEQ ID NO: 239850 - RNA, 19 nt, Homo sapiens
  misc_RNA (1)...(19): siRNA sense strand
caucaucgacuucuucaca

SEQ ID NO: 239851 - RNA, 19 nt, Homo sapiens
  misc_RNA (1)...(19): siRNA sense strand
ggagauuguccaccauaau

SEQ ID NO: 239852 - RNA, 19 nt, Homo sapiens
  misc_RNA (1)...(19): siRNA sense strand
cagagaagaaccugaggaa

SEQ ID NO: 239853 - RNA, 19 nt, Homo sapiens
  misc_RNA (1)...(19): siRNA sense strand
cgggugaagucucucaaga

SEQ ID NO: 239854 - RNA, 19 nt, Homo sapiens
  misc_RNA (1)...(19): siRNA sense strand
gcugcacucucacccaugu

SEQ ID NO: 239855 - RNA, 19 nt, Homo sapiens
  misc_RNA (1)...(19): siRNA sense strand
acacagaugcacuucuuga

SEQ ID NO: 239856 - RNA, 19 nt, Homo sapiens
  misc_RNA (1)...(19): siRNA sense strand
uggaagaagcacucaguuu

SEQ ID NO: 239857 - RNA, 19 nt, Homo sapiens
  misc_RNA (1)...(19): siRNA sense strand
gaagaagcacucaguuucc

SEQ ID NO: 239858 - RNA, 19 nt, Homo sapiens
  misc_RNA (1)...(19): siRNA sense strand
uggcugugcugcuggaaga

SEQ ID NO: 239859 - RNA, 19 nt, Homo sapiens
  misc_RNA (1)...(19): siRNA sense strand
gcuaugcugucuggucugu

SEQ ID NO: 239860 - RNA, 19 nt, Homo sapiens
  misc_RNA (1)...(19): siRNA sense strand
ggacgucacaguggaagau

SEQ ID NO: 239861 - RNA, 19 nt, Homo sapiens
  misc_RNA (1)...(19): siRNA sense strand
cuaagugcccggaacauca

SEQ ID NO: 239862 - RNA, 19 nt, Homo sapiens
  misc_RNA (1)...(19): siRNA sense strand
gggugaagucucucaagaa

SEQ ID NO: 239863 - RNA, 19 nt, Homo sapiens
  misc_RNA (1)...(19): siRNA sense strand
uggcaccagucauggcuuu

SEQ ID NO: 239864 - RNA, 19 nt, Homo sapiens
  misc_RNA (1)...(19): siRNA sense strand
cgcgagggcuucacaugga

SEQ ID NO: 239865 - RNA, 19 nt, Homo sapiens
  misc_RNA (1)...(19): siRNA sense strand
gcuucgaucccuacaguga

SEQ ID NO: 239866 - RNA, 19 nt, Homo sapiens
  misc_RNA (1)...(19): siRNA sense strand
gcuaaugccagcagcaagu

SEQ ID NO: 239867 - RNA, 19 nt, Homo sapiens
  misc_RNA (1)...(19): siRNA sense strand
gcccacgccuguugcaucu

SEQ ID NO: 239868 - RNA, 19 nt, Homo sapiens
  misc_RNA (1)...(19): siRNA sense strand
gugcguugccuauacuuug

SEQ ID NO: 239869 - RNA, 19 nt, Homo sapiens
  misc_RNA (1)...(19): siRNA sense strand
ggaugcagccacugucaca

SEQ ID NO: 239870 - RNA, 19 nt, Homo sapiens
  misc_RNA (1)...(19): siRNA sense strand
caucugaggagcaguucaa

SEQ ID NO: 239871 - RNA, 19 nt, Homo sapiens
  misc_RNA (1)...(19): siRNA sense strand
caaggugggcugcuucgau

SEQ ID NO: 239872 - RNA, 19 nt, Homo sapiens
  misc_RNA (1)...(19): siRNA sense strand
gccauuaacaagauucugu

SEQ ID NO: 239873 - RNA, 19 nt, Homo sapiens
  misc_RNA (1)...(19): siRNA sense strand
gauauccccaucagaauuu

SEQ ID NO: 239874 - RNA, 19 nt, Homo sapiens
  misc_RNA (1)...(19): siRNA sense strand
ggcccgaggaugaauuuga

SEQ ID NO: 239875 - RNA, 19 nt, Homo sapiens
  misc_RNA (1)...(19): siRNA sense strand
gcagcgugccagacgacua

SEQ ID NO: 239876 - RNA, 19 nt, Homo sapiens
  misc_RNA (1)...(19): siRNA sense strand
uacuggagcuuagugaugu

SEQ ID NO: 239877 - RNA, 19 nt, Homo sapiens
  misc_RNA (1)...(19): siRNA sense strand
caaguauacagcccagaug

SEQ ID NO: 239878 - RNA, 19 nt, Homo sapiens
  misc_RNA (1)...(19): siRNA sense strand
ucauggcuuuggccucuug

SEQ ID NO: 239879 - RNA, 19 nt, Homo sapiens
  misc_RNA (1)...(19): siRNA sense strand
cgacacauuccuucgagau

SEQ ID NO: 239880 - RNA, 19 nt, Homo sapiens
  misc_RNA (1)...(19): siRNA sense strand
gcucuguguucgccuaugc

SEQ ID NO: 239881 - RNA, 19 nt, Homo sapiens
  misc_RNA (1)...(19): siRNA sense strand
acccgaggcugcacucuca

SEQ ID NO: 239882 - RNA, 19 nt, Homo sapiens
  misc_RNA (1)...(19): siRNA sense strand
gggccacuuuaucaucuuc

SEQ ID NO: 239883 - RNA, 19 nt, Homo sapiens
  misc_RNA (1)...(19): siRNA sense strand
agaagaaccugaggaaccu

SEQ ID NO: 239884 - RNA, 19 nt, Homo sapiens
  misc_RNA (1)...(19): siRNA sense strand
gguggccauugccguguug

SEQ ID NO: 239885 - RNA, 19 nt, Homo sapiens
  misc_RNA (1)...(19): siRNA sense strand
auacuuugccgacacauuc

SEQ ID NO: 239886 - RNA, 19 nt, Homo sapiens
  misc_RNA (1)...(19): siRNA sense strand
ugucgugcguugccuauac

SEQ ID NO: 239887 - RNA, 19 nt, Homo sapiens
  misc_RNA (1)...(19): siRNA sense strand
gugcugguacuggagcuua

SEQ ID NO: 239888 - RNA, 19 nt, Homo sapiens
  misc_RNA (1)...(19): siRNA sense strand
gcuucgagccgagacauug

SEQ ID NO: 239889 - RNA, 19 nt, Homo sapiens
  misc_RNA (1)...(19): siRNA sense strand
caagaagcgggcugcuaau

SEQ ID NO: 239890 - RNA, 19 nt, Homo sapiens
  misc_RNA (1)...(19): siRNA sense strand
ggcaagaagcgggcugcua

SEQ ID NO: 239891 - RNA, 19 nt, Homo sapiens
  misc_RNA (1)...(19): siRNA sense strand
gcaccuggcguggaguuca

SEQ ID NO: 239892 - RNA, 19 nt, Homo sapiens
  misc_RNA (1)...(19): siRNA sense strand
cugcuucgaucccuacagu

SEQ ID NO: 239893 - RNA, 19 nt, Homo sapiens
  misc_RNA (1)...(19): siRNA sense strand
cgguagccaccacaccuua

SEQ ID NO: 239894 - RNA, 19 nt, Homo sapiens
  misc_RNA (1)...(19): siRNA sense strand
gacacauuccuucgagaug

SEQ ID NO: 239895 - RNA, 19 nt, Homo sapiens
  misc_RNA (1)...(19): siRNA sense strand
ccuauacuuugccgacaca

SEQ ID NO: 239896 - RNA, 19 nt, Homo sapiens
  misc_RNA (1)...(19): siRNA sense strand
gcacagcuggccucuucca

SEQ ID NO: 239897 - RNA, 19 nt, Homo sapiens
  misc_RNA (1)...(19): siRNA sense strand
ccgaggaugaauuugauga

SEQ ID NO: 239898 - RNA, 19 nt, Homo sapiens
  misc_RNA (1)...(19): siRNA sense strand
uggcggaacugugaaucug

SEQ ID NO: 239899 - RNA, 19 nt, Homo sapiens
  misc_RNA (1)...(19): siRNA sense strand
ccugcaaggccauuaacaa

SEQ ID NO: 239900 - RNA, 19 nt, Homo sapiens
  misc_RNA (1)...(19): siRNA sense strand
agucgugucucuggcaaga

SEQ ID NO: 239901 - RNA, 19 nt, Homo sapiens
  misc_RNA (1)...(19): siRNA sense strand
gcugugcccaccuggaaga

SEQ ID NO: 239902 - RNA, 19 nt, Homo sapiens
  misc_RNA (1)...(19): siRNA sense strand
gacuucacuucccgcauca

SEQ ID NO: 239903 - RNA, 19 nt, Homo sapiens
  misc_RNA (1)...(19): siRNA sense strand
ccaaugagacagagaagaa

SEQ ID NO: 239904 - RNA, 19 nt, Homo sapiens
  misc_RNA (1)...(19): siRNA sense strand
gcacugccaaugagacaga

SEQ ID NO: 239905 - RNA, 19 nt, Homo sapiens
  misc_RNA (1)...(19): siRNA sense strand
agacagagaagaaaucauc

SEQ ID NO: 239906 - RNA, 19 nt, Homo sapiens
  misc_RNA (1)...(19): siRNA sense strand
aggagcacaucuucacuga

SEQ ID NO: 239907 - RNA, 19 nt, Homo sapiens
  misc_RNA (1)...(19): siRNA sense strand
gaaguggaagcgugugaag

SEQ ID NO: 239908 - RNA, 19 nt, Homo sapiens
  misc_RNA (1)...(19): siRNA sense strand
ccacagccucuccaaguuc

SEQ ID NO: 239909 - RNA, 19 nt, Homo sapiens
  misc_RNA (1)...(19): siRNA sense strand
caaugagacagagaagaaa

SEQ ID NO: 239910 - RNA, 19 nt, Homo sapiens
  misc_RNA (1)...(19): siRNA sense strand
uuccagaaccgaaggauga

SEQ ID NO: 239911 - RNA, 19 nt, Homo sapiens
  misc_RNA (1)...(19): siRNA sense strand
gagcacugccaaugagaca

SEQ ID NO: 239912 - RNA, 19 nt, Homo sapiens
  misc_RNA (1)...(19): siRNA sense strand
cacagccucuccaaguuca

SEQ ID NO: 239913 - RNA, 19 nt, Homo sapiens
  misc_RNA (1)...(19): siRNA sense strand
accgaaggaugaaguggaa

SEQ ID NO: 239914 - RNA, 19 nt, Homo sapiens
  misc_RNA (1)...(19): siRNA sense strand
uccacagccucuccaaguu

SEQ ID NO: 239915 - RNA, 19 nt, Homo sapiens
  misc_RNA (1)...(19): siRNA sense strand
ccaggaggagcacaucuuc

SEQ ID NO: 239916 - RNA, 19 nt, Homo sapiens
  misc_RNA (1)...(19): siRNA sense strand
ucaaagugugguuccagaa

SEQ ID NO: 239917 - RNA, 19 nt, Homo sapiens
  misc_RNA (1)...(19): siRNA sense strand
cagcguacccugacuucuc

SEQ ID NO: 239918 - RNA, 19 nt, Homo sapiens
  misc_RNA (1)...(19): siRNA sense strand
ccucagggcuaccccacua

SEQ ID NO: 239919 - RNA, 19 nt, Homo sapiens
  misc_RNA (1)...(19): siRNA sense strand
ccaaugagacagagaagaa

SEQ ID NO: 239920 - RNA, 19 nt, Homo sapiens
  misc_RNA (1)...(19): siRNA sense strand
gcacugccaaugagacaga

SEQ ID NO: 239921 - RNA, 19 nt, Homo sapiens
  misc_RNA (1)...(19): siRNA sense strand
agacagagaagaaaucauc

SEQ ID NO: 239922 - RNA, 19 nt, Homo sapiens
  misc_RNA (1)...(19): siRNA sense strand
aggagcacaucuucacuga

SEQ ID NO: 239923 - RNA, 19 nt, Homo sapiens
  misc_RNA (1)...(19): siRNA sense strand
gaaguggaagcgugugaag

SEQ ID NO: 239924 - RNA, 19 nt, Homo sapiens
  misc_RNA (1)...(19): siRNA sense strand
caaugagacagagaagaaa

SEQ ID NO: 239925 - RNA, 19 nt, Homo sapiens
  misc_RNA (1)...(19): siRNA sense strand
uuccagaaccgaaggauga

SEQ ID NO: 239926 - RNA, 19 nt, Homo sapiens
  misc_RNA (1)...(19): siRNA sense strand
gagcacugccaaugagaca

SEQ ID NO: 239927 - RNA, 19 nt, Homo sapiens
  misc_RNA (1)...(19): siRNA sense strand
accgaaggaugaaguggaa

SEQ ID NO: 239928 - RNA, 19 nt, Homo sapiens
  misc_RNA (1)...(19): siRNA sense strand
ccaggaggagcacaucuuc

SEQ ID NO: 239929 - RNA, 19 nt, Homo sapiens
  misc_RNA (1)...(19): siRNA sense strand
ucaaagugugguuccagaa

SEQ ID NO: 239930 - RNA, 19 nt, Homo sapiens
  misc_RNA (1)...(19): siRNA sense strand
cagcguacccugacuucuc

SEQ ID NO: 239931 - RNA, 19 nt, Homo sapiens
  misc_RNA (1)...(19): siRNA sense strand
ccucagggcuaccccacua

SEQ ID NO: 239932 - RNA, 19 nt, Homo sapiens
  misc_RNA (1)...(19): siRNA sense strand
ggagucaggccucacauuu

SEQ ID NO: 239933 - RNA, 19 nt, Homo sapiens
  misc_RNA (1)...(19): siRNA sense strand
gaggagaccuggacuuuug

SEQ ID NO: 239934 - RNA, 19 nt, Homo sapiens
  misc_RNA (1)...(19): siRNA sense strand
acacucacuuugacgauga

SEQ ID NO: 239935 - RNA, 19 nt, Homo sapiens
  misc_RNA (1)...(19): siRNA sense strand
caugagcuaugcccugaug

SEQ ID NO: 239936 - RNA, 19 nt, Homo sapiens
  misc_RNA (1)...(19): siRNA sense strand
agucaggccucacauuuca

SEQ ID NO: 239937 - RNA, 19 nt, Homo sapiens
  misc_RNA (1)...(19): siRNA sense strand
cgacauccucaucgacuuu

SEQ ID NO: 239938 - RNA, 19 nt, Homo sapiens
  misc_RNA (1)...(19): siRNA sense strand
gaagaagcgaacccugaca

SEQ ID NO: 239939 - RNA, 19 nt, Homo sapiens
  misc_RNA (1)...(19): siRNA sense strand
gagucaggccucacauuuc

SEQ ID NO: 239940 - RNA, 19 nt, Homo sapiens
  misc_RNA (1)...(19): siRNA sense strand
ggacacucacuuugacgau

SEQ ID NO: 239941 - RNA, 19 nt, Homo sapiens
  misc_RNA (1)...(19): siRNA sense strand
aagcgaacccugacaugga

SEQ ID NO: 239942 - RNA, 19 nt, Homo sapiens
  misc_RNA (1)...(19): siRNA sense strand
gcggcucaccgguugauga

SEQ ID NO: 239943 - RNA, 19 nt, Homo sapiens
  misc_RNA (1)...(19): siRNA sense strand
gaugaggagaccuggacuu

SEQ ID NO: 239944 - RNA, 19 nt, Homo sapiens
  misc_RNA (1)...(19): siRNA sense strand
ccuagcccaugccuucuuc

SEQ ID NO: 239945 - RNA, 19 nt, Homo sapiens
  misc_RNA (1)...(19): siRNA sense strand
gaaccgaaaugucaagauu

SEQ ID NO: 239946 - RNA, 19 nt, Homo sapiens
  misc_RNA (1)...(19): siRNA sense strand
cagcauaacuugaagauug

SEQ ID NO: 239947 - RNA, 19 nt, Homo sapiens
  misc_RNA (1)...(19): siRNA sense strand
ccaaguacgugaagaugua

SEQ ID NO: 239948 - RNA, 19 nt, Homo sapiens
  misc_RNA (1)...(19): siRNA sense strand
ucaagcagccugaagauua

SEQ ID NO: 239949 - RNA, 19 nt, Homo sapiens
  misc_RNA (1)...(19): siRNA sense strand
gggaggaccugaagcauga

SEQ ID NO: 239950 - RNA, 19 nt, Homo sapiens
  misc_RNA (1)...(19): siRNA sense strand
gcucucaggucgacucuaa

SEQ ID NO: 239951 - RNA, 19 nt, Homo sapiens
  misc_RNA (1)...(19): siRNA sense strand
gagcugucgucgagaaaua

SEQ ID NO: 239952 - RNA, 19 nt, Homo sapiens
  misc_RNA (1)...(19): siRNA sense strand
gcaaagcucagaagaagaa

SEQ ID NO: 239953 - RNA, 19 nt, Homo sapiens
  misc_RNA (1)...(19): siRNA sense strand
ggaagagcgccaagaauuu

SEQ ID NO: 239954 - RNA, 19 nt, Homo sapiens
  misc_RNA (1)...(19): siRNA sense strand
caacgucacuuauaagaag

SEQ ID NO: 239955 - RNA, 19 nt, Homo sapiens
  misc_RNA (1)...(19): siRNA sense strand
ucaaguaccuggacgaguu

SEQ ID NO: 239956 - RNA, 19 nt, Homo sapiens
  misc_RNA (1)...(19): siRNA sense strand
gagaggaacuaccaugugu

SEQ ID NO: 239957 - RNA, 19 nt, Homo sapiens
  misc_RNA (1)...(19): siRNA sense strand
acaaggaucugauggagaa

SEQ ID NO: 239958 - RNA, 19 nt, Homo sapiens
  misc_RNA (1)...(19): siRNA sense strand
caagucagcuaccuagaga

SEQ ID NO: 239959 - RNA, 19 nt, Homo sapiens
  misc_RNA (1)...(19): siRNA sense strand
gaacggauccaguccauca

SEQ ID NO: 239960 - RNA, 19 nt, Homo sapiens
  misc_RNA (1)...(19): siRNA sense strand
augagcagcugcaguauua

SEQ ID NO: 239961 - RNA, 19 nt, Homo sapiens
  misc_RNA (1)...(19): siRNA sense strand
ccaaugagcagcugcagua

SEQ ID NO: 239962 - RNA, 19 nt, Homo sapiens
  misc_RNA (1)...(19): siRNA sense strand
ggacuuugaugaccugugu

SEQ ID NO: 239963 - RNA, 19 nt, Homo sapiens
  misc_RNA (1)...(19): siRNA sense strand
gagcagugccucuccuaua

SEQ ID NO: 239964 - RNA, 19 nt, Homo sapiens
  misc_RNA (1)...(19): siRNA sense strand
cagggaaggugaaauauca

SEQ ID NO: 239965 - RNA, 19 nt, Homo sapiens
  misc_RNA (1)...(19): siRNA sense strand
ggagccagcuuucaucauc

SEQ ID NO: 239966 - RNA, 19 nt, Homo sapiens
  misc_RNA (1)...(19): siRNA sense strand
caagcagccugaagauuau

SEQ ID NO: 239967 - RNA, 19 nt, Homo sapiens
  misc_RNA (1)...(19): siRNA sense strand
ugaaauaucagaucaagga

SEQ ID NO: 239968 - RNA, 19 nt, Homo sapiens
  misc_RNA (1)...(19): siRNA sense strand
ccaaugagcucaaguaccu

SEQ ID NO: 239969 - RNA, 19 nt, Homo sapiens
  misc_RNA (1)...(19): siRNA sense strand
cagaggagcuggagaaugc

SEQ ID NO: 239970 - RNA, 19 nt, Homo sapiens
  misc_RNA (1)...(19): siRNA sense strand
caacaacuccagccgguuu

SEQ ID NO: 239971 - RNA, 19 nt, Homo sapiens
  misc_RNA (1)...(19): siRNA sense strand
gaggaacuaccauguguuu

SEQ ID NO: 239972 - RNA, 19 nt, Homo sapiens
  misc_RNA (1)...(19): siRNA sense strand
cgagaaauaucugcuugaa

SEQ ID NO: 239973 - RNA, 19 nt, Homo sapiens
  misc_RNA (1)...(19): siRNA sense strand
caaggucucugaagaaacu

SEQ ID NO: 239974 - RNA, 19 nt, Homo sapiens
  misc_RNA (1)...(19): siRNA sense strand
gaggagcugucgucgagaa

SEQ ID NO: 239975 - RNA, 19 nt, Homo sapiens
  misc_RNA (1)...(19): siRNA sense strand
ggaaauacaaagugaagau

SEQ ID NO: 239976 - RNA, 19 nt, Homo sapiens
  misc_RNA (1)...(19): siRNA sense strand
gaagagcgccaagaauuuc

SEQ ID NO: 239977 - RNA, 19 nt, Homo sapiens
  misc_RNA (1)...(19): siRNA sense strand
aagaugaccugccacaaga

SEQ ID NO: 239978 - RNA, 19 nt, Homo sapiens
  misc_RNA (1)...(19): siRNA sense strand
ggcaaggucucugaagaaa

SEQ ID NO: 239979 - RNA, 19 nt, Homo sapiens
  misc_RNA (1)...(19): siRNA sense strand
ggagagugcccucagagaa

SEQ ID NO: 239980 - RNA, 19 nt, Homo sapiens
  misc_RNA (1)...(19): siRNA sense strand
ucaagagcaucaaaggauu

SEQ ID NO: 239981 - RNA, 19 nt, Homo sapiens
  misc_RNA (1)...(19): siRNA sense strand
ggaagaagaaccgaaaugu

SEQ ID NO: 239982 - RNA, 19 nt, Homo sapiens
  misc_RNA (1)...(19): siRNA sense strand
ggaacuaccauguguuuua

SEQ ID NO: 239983 - RNA, 19 nt, Homo sapiens
  misc_RNA (1)...(19): siRNA sense strand
ggaacagcuuugagcaguu

SEQ ID NO: 239984 - RNA, 19 nt, Homo sapiens
  misc_RNA (1)...(19): siRNA sense strand
ucaaggagcagaugaggaa

SEQ ID NO: 239985 - RNA, 19 nt, Homo sapiens
  misc_RNA (1)...(19): siRNA sense strand
gcacaacgggcacguguuc

SEQ ID NO: 239986 - RNA, 19 nt, Homo sapiens
  misc_RNA (1)...(19): siRNA sense strand
ugaaacccuucuagucgua

SEQ ID NO: 239987 - RNA, 19 nt, Homo sapiens
  misc_RNA (1)...(19): siRNA sense strand
gcagaaggcagaagagaag

SEQ ID NO: 239988 - RNA, 19 nt, Homo sapiens
  misc_RNA (1)...(19): siRNA sense strand
ggacggcaccaaauguuau

SEQ ID NO: 239989 - RNA, 19 nt, Homo sapiens
  misc_RNA (1)...(19): siRNA sense strand
gaagaagaaccgaaauguc

SEQ ID NO: 239990 - RNA, 19 nt, Homo sapiens
  misc_RNA (1)...(19): siRNA sense strand
gcccugugcuggaggcuuu

SEQ ID NO: 239991 - RNA, 19 nt, Homo sapiens
  misc_RNA (1)...(19): siRNA sense strand
gcauccaucucaucagcaa

SEQ ID NO: 239992 - RNA, 19 nt, Homo sapiens
  misc_RNA (1)...(19): siRNA sense strand
aagaagaaccgaaauguca

SEQ ID NO: 239993 - RNA, 19 nt, Homo sapiens
  misc_RNA (1)...(19): siRNA sense strand
gcagaucauuccaaagaac

SEQ ID NO: 239994 - RNA, 19 nt, Homo sapiens
  misc_RNA (1)...(19): siRNA sense strand
agaagaacauggacuacau

SEQ ID NO: 239995 - RNA, 19 nt, Homo sapiens
  misc_RNA (1)...(19): siRNA sense strand
gggagaagaacauggacua

SEQ ID NO: 239996 - RNA, 19 nt, Homo sapiens
  misc_RNA (1)...(19): siRNA sense strand
ggaccugaagcaugacuuu

SEQ ID NO: 239997 - RNA, 19 nt, Homo sapiens
  misc_RNA (1)...(19): siRNA sense strand
gcagaugaggaaauacaaa

SEQ ID NO: 239998 - RNA, 19 nt, Homo sapiens
  misc_RNA (1)...(19): siRNA sense strand
cagucaagcuggagaacuu

SEQ ID NO: 239999 - RNA, 19 nt, Homo sapiens
  misc_RNA (1)...(19): siRNA sense strand
caaggaaccaggaggcaaa

SEQ ID NO: 240000 - RNA, 19 nt, Homo sapiens
  misc_RNA (1)...(19): siRNA sense strand
ggacaagagcaaaccaugu

SEQ ID NO: 240001 - RNA, 19 nt, Homo sapiens
  misc_RNA (1)...(19): siRNA sense strand
aagcagaucauuccaaaga

SEQ ID NO: 240002 - RNA, 19 nt, Homo sapiens
  misc_RNA (1)...(19): siRNA sense strand
gaacuaccauguguuuuau

SEQ ID NO: 240003 - RNA, 19 nt, Homo sapiens
  misc_RNA (1)...(19): siRNA sense strand
gaaauacaaagugaagaug

SEQ ID NO: 240004 - RNA, 19 nt, Homo sapiens
  misc_RNA (1)...(19): siRNA sense strand
aggagcagaugaggaaaua

SEQ ID NO: 240005 - RNA, 19 nt, Homo sapiens
  misc_RNA (1)...(19): siRNA sense strand
ucagagaaguggcgggaau

SEQ ID NO: 240006 - RNA, 19 nt, Homo sapiens
  misc_RNA (1)...(19): siRNA sense strand
agacaucccuuaacaagcu

SEQ ID NO: 240007 - RNA, 19 nt, Homo sapiens
  misc_RNA (1)...(19): siRNA sense strand
caacaagaaggacguggaa

SEQ ID NO: 240008 - RNA, 19 nt, Homo sapiens
  misc_RNA (1)...(19): siRNA sense strand
ugggcaacgucacuuauaa

SEQ ID NO: 240009 - RNA, 19 nt, Homo sapiens
  misc_RNA (1)...(19): siRNA sense strand
caagacagcccacaacaac

SEQ ID NO: 240010 - RNA, 19 nt, Homo sapiens
  misc_RNA (1)...(19): siRNA sense strand
gagcagaugaggaaauaca

SEQ ID NO: 240011 - RNA, 19 nt, Homo sapiens
  misc_RNA (1)...(19): siRNA sense strand
ggugaaauaucagaucaag

SEQ ID NO: 240012 - RNA, 19 nt, Homo sapiens
  misc_RNA (1)...(19): siRNA sense strand
gagaaauaucugcuugaaa

SEQ ID NO: 240013 - RNA, 19 nt, Homo sapiens
  misc_RNA (1)...(19): siRNA sense strand
aauaucagaucaaggacuu

SEQ ID NO: 240014 - RNA, 19 nt, Homo sapiens
  misc_RNA (1)...(19): siRNA sense strand
gcguggagaugcugaucaa

SEQ ID NO: 240015 - RNA, 19 nt, Homo sapiens
  misc_RNA (1)...(19): siRNA sense strand
gcgcagaggagcuggagaa

SEQ ID NO: 240016 - RNA, 19 nt, Homo sapiens
  misc_RNA (1)...(19): siRNA sense strand
gacaagagcaaaccaugug

SEQ ID NO: 240017 - RNA, 19 nt, Homo sapiens
  misc_RNA (1)...(19): siRNA sense strand
gaucaagagcaucaaagga

SEQ ID NO: 240018 - RNA, 19 nt, Homo sapiens
  misc_RNA (1)...(19): siRNA sense strand
cgaaaaggcugcagguaug

SEQ ID NO: 240019 - RNA, 19 nt, Homo sapiens
  misc_RNA (1)...(19): siRNA sense strand
uuaaguuccugcccaucua

SEQ ID NO: 240020 - RNA, 19 nt, Homo sapiens
  misc_RNA (1)...(19): siRNA sense strand
caagaugaccugccacaag

SEQ ID NO: 240021 - RNA, 19 nt, Homo sapiens
  misc_RNA (1)...(19): siRNA sense strand
cagaagacgcccauugaga

SEQ ID NO: 240022 - RNA, 19 nt, Homo sapiens
  misc_RNA (1)...(19): siRNA sense strand
ggagagcagagaagaugaa

SEQ ID NO: 240023 - RNA, 19 nt, Homo sapiens
  misc_RNA (1)...(19): siRNA sense strand
ccaagucccugaaacucau

SEQ ID NO: 240024 - RNA, 19 nt, Homo sapiens
  misc_RNA (1)...(19): siRNA sense strand
ucgcagggaaggugaaaua

SEQ ID NO: 240025 - RNA, 19 nt, Homo sapiens
  misc_RNA (1)...(19): siRNA sense strand
gaaggugaagcgagaaauc

SEQ ID NO: 240026 - RNA, 19 nt, Homo sapiens
  misc_RNA (1)...(19): siRNA sense strand
gcaacgucacuuauaagaa

SEQ ID NO: 240027 - RNA, 19 nt, Homo sapiens
  misc_RNA (1)...(19): siRNA sense strand
ccucggacgucaucaagga

SEQ ID NO: 240028 - RNA, 19 nt, Homo sapiens
  misc_RNA (1)...(19): siRNA sense strand
aggaagagcgccaagaauu

SEQ ID NO: 240029 - RNA, 19 nt, Homo sapiens
  misc_RNA (1)...(19): siRNA sense strand
gaagccaccaccaugaaga

SEQ ID NO: 240030 - RNA, 19 nt, Homo sapiens
  misc_RNA (1)...(19): siRNA sense strand
ggcugaaagucacgagaaa

SEQ ID NO: 240031 - RNA, 19 nt, Homo sapiens
  misc_RNA (1)...(19): siRNA sense strand
gaaggugaaauaucagauc

SEQ ID NO: 240032 - RNA, 19 nt, Homo sapiens
  misc_RNA (1)...(19): siRNA sense strand
gccaagaauuucagcucaa

SEQ ID NO: 240033 - RNA, 19 nt, Homo sapiens
  misc_RNA (1)...(19): siRNA sense strand
cgaggaagagcgccaagaa

SEQ ID NO: 240034 - RNA, 19 nt, Homo sapiens
  misc_RNA (1)...(19): siRNA sense strand
gggugagucuccuggaaga

SEQ ID NO: 240035 - RNA, 19 nt, Homo sapiens
  misc_RNA (1)...(19): siRNA sense strand
aaaugaagauagacaagag

SEQ ID NO: 240036 - RNA, 19 nt, Homo sapiens
  misc_RNA (1)...(19): siRNA sense strand
gccugaagauuauuucuac

SEQ ID NO: 240037 - RNA, 19 nt, Homo sapiens
  misc_RNA (1)...(19): siRNA sense strand
uggagaugcugaucaagga

SEQ ID NO: 240038 - RNA, 19 nt, Homo sapiens
  misc_RNA (1)...(19): siRNA sense strand
gugagaagcgcaccaagga

SEQ ID NO: 240039 - RNA, 19 nt, Homo sapiens
  misc_RNA (1)...(19): siRNA sense strand
aaagccagcuguccagaag

SEQ ID NO: 240040 - RNA, 19 nt, Homo sapiens
  misc_RNA (1)...(19): siRNA sense strand
aaaagcagaucauuccaaa

SEQ ID NO: 240041 - RNA, 19 nt, Homo sapiens
  misc_RNA (1)...(19): siRNA sense strand
aacaugaggacaauaagua

SEQ ID NO: 240042 - RNA, 19 nt, Homo sapiens
  misc_RNA (1)...(19): siRNA sense strand
gcacaacaucggcuacaca

SEQ ID NO: 240043 - RNA, 19 nt, Homo sapiens
  misc_RNA (1)...(19): siRNA sense strand
aacaaaagaucuacacgua

SEQ ID NO: 240044 - RNA, 19 nt, Homo sapiens
  misc_RNA (1)...(19): siRNA sense strand
gaugaggaaauacaaagug

SEQ ID NO: 240045 - RNA, 19 nt, Homo sapiens
  misc_RNA (1)...(19): siRNA sense strand
ggaagucccugaagaauga

SEQ ID NO: 240046 - RNA, 19 nt, Homo sapiens
  misc_RNA (1)...(19): siRNA sense strand
ccaaggagcuggagaaguu

SEQ ID NO: 240047 - RNA, 19 nt, Homo sapiens
  misc_RNA (1)...(19): siRNA sense strand
caacuucucuccugaacuu

SEQ ID NO: 240048 - RNA, 19 nt, Homo sapiens
  misc_RNA (1)...(19): siRNA sense strand
ggagauccuuccaagagua

SEQ ID NO: 240049 - RNA, 19 nt, Homo sapiens
  misc_RNA (1)...(19): siRNA sense strand
gagaagaaccugaagaaca

SEQ ID NO: 240050 - RNA, 19 nt, Homo sapiens
  misc_RNA (1)...(19): siRNA sense strand
gaauuucgaugccuaugug

SEQ ID NO: 240051 - RNA, 19 nt, Homo sapiens
  misc_RNA (1)...(19): siRNA sense strand
gaacuugggucaaauugcu

SEQ ID NO: 240052 - RNA, 19 nt, Homo sapiens
  misc_RNA (1)...(19): siRNA sense strand
ggaggaaccugaggaguca

SEQ ID NO: 240053 - RNA, 19 nt, Homo sapiens
  misc_RNA (1)...(19): siRNA sense strand
caguaaagauccuucaaga

SEQ ID NO: 240054 - RNA, 19 nt, Homo sapiens
  misc_RNA (1)...(19): siRNA sense strand
gcacaaacaccgcaaacga

SEQ ID NO: 240055 - RNA, 19 nt, Homo sapiens
  misc_RNA (1)...(19): siRNA sense strand
ccaaggacauaaagaagga

SEQ ID NO: 240056 - RNA, 19 nt, Homo sapiens
  misc_RNA (1)...(19): siRNA sense strand
ggaggaggaugaagaagag

SEQ ID NO: 240057 - RNA, 19 nt, Homo sapiens
  misc_RNA (1)...(19): siRNA sense strand
agaagaaccugaagaacau

SEQ ID NO: 240058 - RNA, 19 nt, Homo sapiens
  misc_RNA (1)...(19): siRNA sense strand
ugaagcagaugaccaggaa

SEQ ID NO: 240059 - RNA, 19 nt, Homo sapiens
  misc_RNA (1)...(19): siRNA sense strand
gcugggagaugccugagaa

SEQ ID NO: 240060 - RNA, 19 nt, Homo sapiens
  misc_RNA (1)...(19): siRNA sense strand
gcaagucuguggauaucga

SEQ ID NO: 240061 - RNA, 19 nt, Homo sapiens
  misc_RNA (1)...(19): siRNA sense strand
ggaggaagaggaagaggaa

SEQ ID NO: 240062 - RNA, 19 nt, Homo sapiens
  misc_RNA (1)...(19): siRNA sense strand
gcagaaugaagcccuguuu

SEQ ID NO: 240063 - RNA, 19 nt, Homo sapiens
  misc_RNA (1)...(19): siRNA sense strand
gcaacacgcacagaaguuu

SEQ ID NO: 240064 - RNA, 19 nt, Homo sapiens
  misc_RNA (1)...(19): siRNA sense strand
uccaaagucucgccaauau

SEQ ID NO: 240065 - RNA, 19 nt, Homo sapiens
  misc_RNA (1)...(19): siRNA sense strand
ugaaguuucucuccaagga

SEQ ID NO: 240066 - RNA, 19 nt, Homo sapiens
  misc_RNA (1)...(19): siRNA sense strand
ugaguacucuguuauugug

SEQ ID NO: 240067 - RNA, 19 nt, Homo sapiens
  misc_RNA (1)...(19): siRNA sense strand
gaggagaacaagcucauug

SEQ ID NO: 240068 - RNA, 19 nt, Homo sapiens
  misc_RNA (1)...(19): siRNA sense strand
ggaagugucggaagagaau

SEQ ID NO: 240069 - RNA, 19 nt, Homo sapiens
  misc_RNA (1)...(19): siRNA sense strand
agaaaggcauccugaguca

SEQ ID NO: 240070 - RNA, 19 nt, Homo sapiens
  misc_RNA (1)...(19): siRNA sense strand
guccaaaguucaagacuag

SEQ ID NO: 240071 - RNA, 19 nt, Homo sapiens
  misc_RNA (1)...(19): siRNA sense strand
gaacaggugcgcacagucu

SEQ ID NO: 240072 - RNA, 19 nt, Homo sapiens
  misc_RNA (1)...(19): siRNA sense strand
ggaggaggaggaugaagaa

SEQ ID NO: 240073 - RNA, 19 nt, Homo sapiens
  misc_RNA (1)...(19): siRNA sense strand
gcagaaaggcauccugagu

SEQ ID NO: 240074 - RNA, 19 nt, Homo sapiens
  misc_RNA (1)...(19): siRNA sense strand
gagccaauaugcgaacaga

SEQ ID NO: 240075 - RNA, 19 nt, Homo sapiens
  misc_RNA (1)...(19): siRNA sense strand
gcacauggagccaauaugc

SEQ ID NO: 240076 - RNA, 19 nt, Homo sapiens
  misc_RNA (1)...(19): siRNA sense strand
cagcgaaaccucaccuaaa

SEQ ID NO: 240077 - RNA, 19 nt, Homo sapiens
  misc_RNA (1)...(19): siRNA sense strand
acacugugcggaagaguua

SEQ ID NO: 240078 - RNA, 19 nt, Homo sapiens
  misc_RNA (1)...(19): siRNA sense strand
gaaggacgccucuguuucg

SEQ ID NO: 240079 - RNA, 19 nt, Homo sapiens
  misc_RNA (1)...(19): siRNA sense strand
ggagaaugaugaggagauc

SEQ ID NO: 240080 - RNA, 19 nt, Homo sapiens
  misc_RNA (1)...(19): siRNA sense strand
ugaagaagaggaagaggaa

SEQ ID NO: 240081 - RNA, 19 nt, Homo sapiens
  misc_RNA (1)...(19): siRNA sense strand
ccucauggcugcccacucu

SEQ ID NO: 240082 - RNA, 19 nt, Homo sapiens
  misc_RNA (1)...(19): siRNA sense strand
gugaaggacgccucuguuu

SEQ ID NO: 240083 - RNA, 19 nt, Homo sapiens
  misc_RNA (1)...(19): siRNA sense strand
caauaugcgaacagaauuu

SEQ ID NO: 240084 - RNA, 19 nt, Homo sapiens
  misc_RNA (1)...(19): siRNA sense strand
gaaugaagcccuguuucug

SEQ ID NO: 240085 - RNA, 19 nt, Homo sapiens
  misc_RNA (1)...(19): siRNA sense strand
ugacggcucuggccacauc

SEQ ID NO: 240086 - RNA, 19 nt, Homo sapiens
  misc_RNA (1)...(19): siRNA sense strand
ggauaucgagguagacgaa

SEQ ID NO: 240087 - RNA, 19 nt, Homo sapiens
  misc_RNA (1)...(19): siRNA sense strand
ggacaggacgagauucauc

SEQ ID NO: 240088 - RNA, 19 nt, Homo sapiens
  misc_RNA (1)...(19): siRNA sense strand
ucaccgacauguacuccaa

SEQ ID NO: 240089 - RNA, 19 nt, Homo sapiens
  misc_RNA (1)...(19): siRNA sense strand
cagcaagucuguggauauc

SEQ ID NO: 240090 - RNA, 19 nt, Homo sapiens
  misc_RNA (1)...(19): siRNA sense strand
gcggaagaguuacuacagu

SEQ ID NO: 240091 - RNA, 19 nt, Homo sapiens
  misc_RNA (1)...(19): siRNA sense strand
aagagacccugguggaaga

SEQ ID NO: 240092 - RNA, 19 nt, Homo sapiens
  misc_RNA (1)...(19): siRNA sense strand
gcgacguguuggagaauga

SEQ ID NO: 240093 - RNA, 19 nt, Homo sapiens
  misc_RNA (1)...(19): siRNA sense strand
gcucgucauucuccuggaa

SEQ ID NO: 240094 - RNA, 19 nt, Homo sapiens
  misc_RNA (1)...(19): siRNA sense strand
ggagaugcaggacaugaug

SEQ ID NO: 240095 - RNA, 19 nt, Homo sapiens
  misc_RNA (1)...(19): siRNA sense strand
gccaauaugcgaacagaau

SEQ ID NO: 240096 - RNA, 19 nt, Homo sapiens
  misc_RNA (1)...(19): siRNA sense strand
gacaagagccucagaaacc

SEQ ID NO: 240097 - RNA, 19 nt, Homo sapiens
  misc_RNA (1)...(19): siRNA sense strand
aaacaccgcaaacgagaaa

SEQ ID NO: 240098 - RNA, 19 nt, Homo sapiens
  misc_RNA (1)...(19): siRNA sense strand
ggaggaggaggaagaggaa

SEQ ID NO: 240099 - RNA, 19 nt, Homo sapiens
  misc_RNA (1)...(19): siRNA sense strand
gguccucaguccaaaguuc

SEQ ID NO: 240100 - RNA, 19 nt, Homo sapiens
  misc_RNA (1)...(19): siRNA sense strand
ugaccaacuuuaagcugaa

SEQ ID NO: 240101 - RNA, 19 nt, Homo sapiens
  misc_RNA (1)...(19): siRNA sense strand
ccaaaucccaugagaagca

SEQ ID NO: 240102 - RNA, 19 nt, Homo sapiens
  misc_RNA (1)...(19): siRNA sense strand
ccaauaugcgaacagaauu

SEQ ID NO: 240103 - RNA, 19 nt, Homo sapiens
  misc_RNA (1)...(19): siRNA sense strand
ccgaggaggucgucgaagu

SEQ ID NO: 240104 - RNA, 19 nt, Homo sapiens
  misc_RNA (1)...(19): siRNA sense strand
ccacucugcugaccucaag

SEQ ID NO: 240105 - RNA, 19 nt, Homo sapiens
  misc_RNA (1)...(19): siRNA sense strand
gagccaggcccucauccaa

SEQ ID NO: 240106 - RNA, 19 nt, Homo sapiens
  misc_RNA (1)...(19): siRNA sense strand
cauccaaagucucgccaau

SEQ ID NO: 240107 - RNA, 19 nt, Homo sapiens
  misc_RNA (1)...(19): siRNA sense strand
ccaagaguagcuccaauuc

SEQ ID NO: 240108 - RNA, 19 nt, Homo sapiens
  misc_RNA (1)...(19): siRNA sense strand
gccaggcccucauccaaag

SEQ ID NO: 240109 - RNA, 19 nt, Homo sapiens
  misc_RNA (1)...(19): siRNA sense strand
gaacaucgaggaggagaac

SEQ ID NO: 240110 - RNA, 19 nt, Homo sapiens
  misc_RNA (1)...(19): siRNA sense strand
cuagcgacguguuggagaa

SEQ ID NO: 240111 - RNA, 19 nt, Homo sapiens
  misc_RNA (1)...(19): siRNA sense strand
ggacuugagcaugcacaaa

SEQ ID NO: 240112 - RNA, 19 nt, Homo sapiens
  misc_RNA (1)...(19): siRNA sense strand
ggaaucaucgcaacuucuc

SEQ ID NO: 240113 - RNA, 19 nt, Homo sapiens
  misc_RNA (1)...(19): siRNA sense strand
cugaugaagugcccaguuc

SEQ ID NO: 240114 - RNA, 19 nt, Homo sapiens
  misc_RNA (1)...(19): siRNA sense strand
ccagcgaaaccucaccuaa

SEQ ID NO: 240115 - RNA, 19 nt, Homo sapiens
  misc_RNA (1)...(19): siRNA sense strand
ggaagaggaggaggaggaa

SEQ ID NO: 240116 - RNA, 19 nt, Homo sapiens
  misc_RNA (1)...(19): siRNA sense strand
ggaggaugaagaagaggaa

SEQ ID NO: 240117 - RNA, 19 nt, Homo sapiens
  misc_RNA (1)...(19): siRNA sense strand
gcagaugaccaggaagugu

SEQ ID NO: 240118 - RNA, 19 nt, Homo sapiens
  misc_RNA (1)...(19): siRNA sense strand
caacacgcacagaaguuug

SEQ ID NO: 240119 - RNA, 19 nt, Homo sapiens
  misc_RNA (1)...(19): siRNA sense strand
gcucggaugaugacaagga

SEQ ID NO: 240120 - RNA, 19 nt, Homo sapiens
  misc_RNA (1)...(19): siRNA sense strand
gagaugcaggacaugauga

SEQ ID NO: 240121 - RNA, 19 nt, Homo sapiens
  misc_RNA (1)...(19): siRNA sense strand
uggagaagaaccugaagaa

SEQ ID NO: 240122 - RNA, 19 nt, Homo sapiens
  misc_RNA (1)...(19): siRNA sense strand
ggaaagaagggaaaacugu

SEQ ID NO: 240123 - RNA, 19 nt, Homo sapiens
  misc_RNA (1)...(19): siRNA sense strand
ccaccaaggacgacaagga

SEQ ID NO: 240124 - RNA, 19 nt, Homo sapiens
  misc_RNA (1)...(19): siRNA sense strand
ccagcaagucuguggauau

SEQ ID NO: 240125 - RNA, 19 nt, Homo sapiens
  misc_RNA (1)...(19): siRNA sense strand
agcgaaaccucaccuaaag

SEQ ID NO: 240126 - RNA, 19 nt, Homo sapiens
  misc_RNA (1)...(19): siRNA sense strand
cuccugaacuugggucaaa

SEQ ID NO: 240127 - RNA, 19 nt, Homo sapiens
  misc_RNA (1)...(19): siRNA sense strand
gaucuuagccaugcaugag

SEQ ID NO: 240128 - RNA, 19 nt, Homo sapiens
  misc_RNA (1)...(19): siRNA sense strand
ugaaggacgccucuguuuc

SEQ ID NO: 240129 - RNA, 19 nt, Homo sapiens
  misc_RNA (1)...(19): siRNA sense strand
ggugaaggacgccucuguu

SEQ ID NO: 240130 - RNA, 19 nt, Homo sapiens
  misc_RNA (1)...(19): siRNA sense strand
caggaagugucggaagaga

SEQ ID NO: 240131 - RNA, 19 nt, Homo sapiens
  misc_RNA (1)...(19): siRNA sense strand
caugagaacgugcugaagu

SEQ ID NO: 240132 - RNA, 19 nt, Homo sapiens
  misc_RNA (1)...(19): siRNA sense strand
caaagucucgccaauaucc

SEQ ID NO: 240133 - RNA, 19 nt, Homo sapiens
  misc_RNA (1)...(19): siRNA sense strand
cuccugaugugaucuuuca

SEQ ID NO: 240134 - RNA, 19 nt, Homo sapiens
  misc_RNA (1)...(19): siRNA sense strand
cagcugcagucccagaucu

SEQ ID NO: 240135 - RNA, 19 nt, Homo sapiens
  misc_RNA (1)...(19): siRNA sense strand
caccgcagccucucugguu

SEQ ID NO: 240136 - RNA, 19 nt, Homo sapiens
  misc_RNA (1)...(19): siRNA sense strand
aaauggaacccuggacuug

SEQ ID NO: 240137 - RNA, 19 nt, Homo sapiens
  misc_RNA (1)...(19): siRNA sense strand
ggaugaaucggaaggaacu

SEQ ID NO: 240138 - RNA, 19 nt, Homo sapiens
  misc_RNA (1)...(19): siRNA sense strand
ccagugaggaguccagcaa

SEQ ID NO: 240139 - RNA, 19 nt, Homo sapiens
  misc_RNA (1)...(19): siRNA sense strand
caagacuagcgacguguug

SEQ ID NO: 240140 - RNA, 19 nt, Homo sapiens
  misc_RNA (1)...(19): siRNA sense strand
aaagaaaaguggagucaag

SEQ ID NO: 240141 - RNA, 19 nt, Homo sapiens
  misc_RNA (1)...(19): siRNA sense strand
ugggucaaauugcugaaga

SEQ ID NO: 240142 - RNA, 19 nt, Homo sapiens
  misc_RNA (1)...(19): siRNA sense strand
aaguuucgaugcucagguu

SEQ ID NO: 240143 - RNA, 19 nt, Homo sapiens
  misc_RNA (1)...(19): siRNA sense strand
ucccggaagucaacaguca

SEQ ID NO: 240144 - RNA, 19 nt, Homo sapiens
  misc_RNA (1)...(19): siRNA sense strand
ggaggagaacaagcucauu

SEQ ID NO: 240145 - RNA, 19 nt, Homo sapiens
  misc_RNA (1)...(19): siRNA sense strand
guaaagagcuauauggaua

SEQ ID NO: 240146 - RNA, 19 nt, Homo sapiens
  misc_RNA (1)...(19): siRNA sense strand
ggaaggugaugacccauua

SEQ ID NO: 240147 - RNA, 19 nt, Homo sapiens
  misc_RNA (1)...(19): siRNA sense strand
gaaauuacccaguauauuc

SEQ ID NO: 240148 - RNA, 19 nt, Homo sapiens
  misc_RNA (1)...(19): siRNA sense strand
guaagaaacucacagaaau

SEQ ID NO: 240149 - RNA, 19 nt, Homo sapiens
  misc_RNA (1)...(19): siRNA sense strand
ggacuaugcuucugccuuu

SEQ ID NO: 240150 - RNA, 19 nt, Homo sapiens
  misc_RNA (1)...(19): siRNA sense strand
caaaucaacucacccauga

SEQ ID NO: 240151 - RNA, 19 nt, Homo sapiens
  misc_RNA (1)...(19): siRNA sense strand
ccagaaagcuugucauugu

SEQ ID NO: 240152 - RNA, 19 nt, Homo sapiens
  misc_RNA (1)...(19): siRNA sense strand
gaccaaaucuuuccuaauc

SEQ ID NO: 240153 - RNA, 19 nt, Homo sapiens
  misc_RNA (1)...(19): siRNA sense strand
caaaggaacuagaagaaga

SEQ ID NO: 240154 - RNA, 19 nt, Homo sapiens
  misc_RNA (1)...(19): siRNA sense strand
gcaggaacaucaagauuug

SEQ ID NO: 240155 - RNA, 19 nt, Homo sapiens
  misc_RNA (1)...(19): siRNA sense strand
caagggauuuguugacaua

SEQ ID NO: 240156 - RNA, 19 nt, Homo sapiens
  misc_RNA (1)...(19): siRNA sense strand
ccacaacagucaagucuuu

SEQ ID NO: 240157 - RNA, 19 nt, Homo sapiens
  misc_RNA (1)...(19): siRNA sense strand
gaaagacgguccuccugaa

SEQ ID NO: 240158 - RNA, 19 nt, Homo sapiens
  misc_RNA (1)...(19): siRNA sense strand
gaucugugcucauugguuu

SEQ ID NO: 240159 - RNA, 19 nt, Homo sapiens
  misc_RNA (1)...(19): siRNA sense strand
gaaggaacaugccaaaugg

SEQ ID NO: 240160 - RNA, 19 nt, Homo sapiens
  misc_RNA (1)...(19): siRNA sense strand
gaggaaggauacagaaauu

SEQ ID NO: 240161 - RNA, 19 nt, Homo sapiens
  misc_RNA (1)...(19): siRNA sense strand
gcaucgaacuccauuuaaa

SEQ ID NO: 240162 - RNA, 19 nt, Homo sapiens
  misc_RNA (1)...(19): siRNA sense strand
ggaaucagcugugggaguu

SEQ ID NO: 240163 - RNA, 19 nt, Homo sapiens
  misc_RNA (1)...(19): siRNA sense strand
gaacaaagcgacagcugaa

SEQ ID NO: 240164 - RNA, 19 nt, Homo sapiens
  misc_RNA (1)...(19): siRNA sense strand
ggaagugacuccagaccuu

SEQ ID NO: 240165 - RNA, 19 nt, Homo sapiens
  misc_RNA (1)...(19): siRNA sense strand
gagaaagaaggaucuguua

SEQ ID NO: 240166 - RNA, 19 nt, Homo sapiens
  misc_RNA (1)...(19): siRNA sense strand
ggaaggaacaugccaaaug

SEQ ID NO: 240167 - RNA, 19 nt, Homo sapiens
  misc_RNA (1)...(19): siRNA sense strand
cagaggaaauuacccagua

SEQ ID NO: 240168 - RNA, 19 nt, Homo sapiens
  misc_RNA (1)...(19): siRNA sense strand
cagcaaaccugugcaagaa

SEQ ID NO: 240169 - RNA, 19 nt, Homo sapiens
  misc_RNA (1)...(19): siRNA sense strand
aaucaggucuuauuccuuu

SEQ ID NO: 240170 - RNA, 19 nt, Homo sapiens
  misc_RNA (1)...(19): siRNA sense strand
gaacaggaacugcuucuca

SEQ ID NO: 240171 - RNA, 19 nt, Homo sapiens
  misc_RNA (1)...(19): siRNA sense strand
gaggcuggcuuugucuuua

SEQ ID NO: 240172 - RNA, 19 nt, Homo sapiens
  misc_RNA (1)...(19): siRNA sense strand
aaagacauccucaaucuaa

SEQ ID NO: 240173 - RNA, 19 nt, Homo sapiens
  misc_RNA (1)...(19): siRNA sense strand
gguggaaauugccaaagua

SEQ ID NO: 240174 - RNA, 19 nt, Homo sapiens
  misc_RNA (1)...(19): siRNA sense strand
uuaguaaccuggaagaauu

SEQ ID NO: 240175 - RNA, 19 nt, Homo sapiens
  misc_RNA (1)...(19): siRNA sense strand
gcgcaucgaacuccauuua

SEQ ID NO: 240176 - RNA, 19 nt, Homo sapiens
  misc_RNA (1)...(19): siRNA sense strand
agaaggaucuguuacugaa

SEQ ID NO: 240177 - RNA, 19 nt, Homo sapiens
  misc_RNA (1)...(19): siRNA sense strand
cagcagaggcuuuauagaa

SEQ ID NO: 240178 - RNA, 19 nt, Homo sapiens
  misc_RNA (1)...(19): siRNA sense strand
gaaagcuugucauuguuga

SEQ ID NO: 240179 - RNA, 19 nt, Homo sapiens
  misc_RNA (1)...(19): siRNA sense strand
gaacauuauccagcaguua

SEQ ID NO: 240180 - RNA, 19 nt, Homo sapiens
  misc_RNA (1)...(19): siRNA sense strand
gcuuugaguuuaaugauga

SEQ ID NO: 240181 - RNA, 19 nt, Homo sapiens
  misc_RNA (1)...(19): siRNA sense strand
gaugauauugcauugcuua

SEQ ID NO: 240182 - RNA, 19 nt, Homo sapiens
  misc_RNA (1)...(19): siRNA sense strand
gagcgaaauuuagcugaaa

SEQ ID NO: 240183 - RNA, 19 nt, Homo sapiens
  misc_RNA (1)...(19): siRNA sense strand
agaaagacauccucaaucu

SEQ ID NO: 240184 - RNA, 19 nt, Homo sapiens
  misc_RNA (1)...(19): siRNA sense strand
guaagcgccuacaacaauu

SEQ ID NO: 240185 - RNA, 19 nt, Homo sapiens
  misc_RNA (1)...(19): siRNA sense strand
gaaagacauccucaaucua

SEQ ID NO: 240186 - RNA, 19 nt, Homo sapiens
  misc_RNA (1)...(19): siRNA sense strand
ggagcgaaauuuagcugaa

SEQ ID NO: 240187 - RNA, 19 nt, Homo sapiens
  misc_RNA (1)...(19): siRNA sense strand
ugaaugggagcgaaauuua

SEQ ID NO: 240188 - RNA, 19 nt, Homo sapiens
  misc_RNA (1)...(19): siRNA sense strand
gcagaaaggcuacaacucu

SEQ ID NO: 240189 - RNA, 19 nt, Homo sapiens
  misc_RNA (1)...(19): siRNA sense strand
gaauugauccuuccuacug

SEQ ID NO: 240190 - RNA, 19 nt, Homo sapiens
  misc_RNA (1)...(19): siRNA sense strand
guacaagauucccugucua

SEQ ID NO: 240191 - RNA, 19 nt, Homo sapiens
  misc_RNA (1)...(19): siRNA sense strand
ggaaauuacccaguauauu

SEQ ID NO: 240192 - RNA, 19 nt, Homo sapiens
  misc_RNA (1)...(19): siRNA sense strand
ggacauccgccgauaccua

SEQ ID NO: 240193 - RNA, 19 nt, Homo sapiens
  misc_RNA (1)...(19): siRNA sense strand
ggagggcaauauaaauguu

SEQ ID NO: 240194 - RNA, 19 nt, Homo sapiens
  misc_RNA (1)...(19): siRNA sense strand
gaucuaaccaugugcuuga

SEQ ID NO: 240195 - RNA, 19 nt, Homo sapiens
  misc_RNA (1)...(19): siRNA sense strand
guggugagcuggccuugaa

SEQ ID NO: 240196 - RNA, 19 nt, Homo sapiens
  misc_RNA (1)...(19): siRNA sense strand
ugcgaaaguuuaugguuua

SEQ ID NO: 240197 - RNA, 19 nt, Homo sapiens
  misc_RNA (1)...(19): siRNA sense strand
ggaaggauacagaaauuuc

SEQ ID NO: 240198 - RNA, 19 nt, Homo sapiens
  misc_RNA (1)...(19): siRNA sense strand
guaugauccuuccaaacua

SEQ ID NO: 240199 - RNA, 19 nt, Homo sapiens
  misc_RNA (1)...(19): siRNA sense strand
gaucuggagggcaauauaa

SEQ ID NO: 240200 - RNA, 19 nt, Homo sapiens
  misc_RNA (1)...(19): siRNA sense strand
ccaaagcaguacaagauuc

SEQ ID NO: 240201 - RNA, 19 nt, Homo sapiens
  misc_RNA (1)...(19): siRNA sense strand
ccaguuugaucacaauuug

SEQ ID NO: 240202 - RNA, 19 nt, Homo sapiens
  misc_RNA (1)...(19): siRNA sense strand
gaagaggaggcuagacuug

SEQ ID NO: 240203 - RNA, 19 nt, Homo sapiens
  misc_RNA (1)...(19): siRNA sense strand
gacugaacauguuaaguug

SEQ ID NO: 240204 - RNA, 19 nt, Homo sapiens
  misc_RNA (1)...(19): siRNA sense strand
aaucacaggugccaacuau

SEQ ID NO: 240205 - RNA, 19 nt, Homo sapiens
  misc_RNA (1)...(19): siRNA sense strand
gggacuguaucauuugaaa

SEQ ID NO: 240206 - RNA, 19 nt, Homo sapiens
  misc_RNA (1)...(19): siRNA sense strand
gaaagaaggaucuguuacu

SEQ ID NO: 240207 - RNA, 19 nt, Homo sapiens
  misc_RNA (1)...(19): siRNA sense strand
ggcaucagcuuauugcaau

SEQ ID NO: 240208 - RNA, 19 nt, Homo sapiens
  misc_RNA (1)...(19): siRNA sense strand
gugaauuucuucggaguaa

SEQ ID NO: 240209 - RNA, 19 nt, Homo sapiens
  misc_RNA (1)...(19): siRNA sense strand
gagauucuaaugacaguuu

SEQ ID NO: 240210 - RNA, 19 nt, Homo sapiens
  misc_RNA (1)...(19): siRNA sense strand
ugauugaacuccuggauuc

SEQ ID NO: 240211 - RNA, 19 nt, Homo sapiens
  misc_RNA (1)...(19): siRNA sense strand
ggaugaggcugauugaacu

SEQ ID NO: 240212 - RNA, 19 nt, Homo sapiens
  misc_RNA (1)...(19): siRNA sense strand
gaaagaaagacauccucaa

SEQ ID NO: 240213 - RNA, 19 nt, Homo sapiens
  misc_RNA (1)...(19): siRNA sense strand
caagauucccugucuagaa

SEQ ID NO: 240214 - RNA, 19 nt, Homo sapiens
  misc_RNA (1)...(19): siRNA sense strand
guggugaacuuugugaauu

SEQ ID NO: 240215 - RNA, 19 nt, Homo sapiens
  misc_RNA (1)...(19): siRNA sense strand
ggaaauugccaaaguagca

SEQ ID NO: 240216 - RNA, 19 nt, Homo sapiens
  misc_RNA (1)...(19): siRNA sense strand
ccacaugucuuugcuugau

SEQ ID NO: 240217 - RNA, 19 nt, Homo sapiens
  misc_RNA (1)...(19): siRNA sense strand
uggugaacuuugugaauua

SEQ ID NO: 240218 - RNA, 19 nt, Homo sapiens
  misc_RNA (1)...(19): siRNA sense strand
gaaguccucugcggaagug

SEQ ID NO: 240219 - RNA, 19 nt, Homo sapiens
  misc_RNA (1)...(19): siRNA sense strand
gccguucucuccaaucauu

SEQ ID NO: 240220 - RNA, 19 nt, Homo sapiens
  misc_RNA (1)...(19): siRNA sense strand
cgacuaccaaggcucauua

SEQ ID NO: 240221 - RNA, 19 nt, Homo sapiens
  misc_RNA (1)...(19): siRNA sense strand
ccacagcagaggcuuuaua

SEQ ID NO: 240222 - RNA, 19 nt, Homo sapiens
  misc_RNA (1)...(19): siRNA sense strand
ggcaggaacaucaagauuu

SEQ ID NO: 240223 - RNA, 19 nt, Homo sapiens
  misc_RNA (1)...(19): siRNA sense strand
gaacuccuggauucagaua

SEQ ID NO: 240224 - RNA, 19 nt, Homo sapiens
  misc_RNA (1)...(19): siRNA sense strand
caaagcgacagcugaaauu

SEQ ID NO: 240225 - RNA, 19 nt, Homo sapiens
  misc_RNA (1)...(19): siRNA sense strand
uucaaucccucaagucaua

SEQ ID NO: 240226 - RNA, 19 nt, Homo sapiens
  misc_RNA (1)...(19): siRNA sense strand
ggaacauuauccagcaguu

SEQ ID NO: 240227 - RNA, 19 nt, Homo sapiens
  misc_RNA (1)...(19): siRNA sense strand
ucauguugcuuugaguuua

SEQ ID NO: 240228 - RNA, 19 nt, Homo sapiens
  misc_RNA (1)...(19): siRNA sense strand
gcucuuggaugcagaugau

SEQ ID NO: 240229 - RNA, 19 nt, Homo sapiens
  misc_RNA (1)...(19): siRNA sense strand
agacugaacauguuaaguu

SEQ ID NO: 240230 - RNA, 19 nt, Homo sapiens
  misc_RNA (1)...(19): siRNA sense strand
gaaccuaaagcuuucaauc

SEQ ID NO: 240231 - RNA, 19 nt, Homo sapiens
  misc_RNA (1)...(19): siRNA sense strand
ggacaauccagucacaaga

SEQ ID NO: 240232 - RNA, 19 nt, Homo sapiens
  misc_RNA (1)...(19): siRNA sense strand
aaagagucauuggagaaua

SEQ ID NO: 240233 - RNA, 19 nt, Homo sapiens
  misc_RNA (1)...(19): siRNA sense strand
cauguugcuuugaguuuaa

SEQ ID NO: 240234 - RNA, 19 nt, Homo sapiens
  misc_RNA (1)...(19): siRNA sense strand
ggcuuugucuuuacaggua

SEQ ID NO: 240235 - RNA, 19 nt, Homo sapiens
  misc_RNA (1)...(19): siRNA sense strand
ucauuagacugaacauguu

SEQ ID NO: 240236 - RNA, 19 nt, Homo sapiens
  misc_RNA (1)...(19): siRNA sense strand
ccagaaacuugagaaccua

SEQ ID NO: 240237 - RNA, 19 nt, Homo sapiens
  misc_RNA (1)...(19): siRNA sense strand
gaaacucacagaaauuaag

SEQ ID NO: 240238 - RNA, 19 nt, Homo sapiens
  misc_RNA (1)...(19): siRNA sense strand
cagaaagcuugucauuguu

SEQ ID NO: 240239 - RNA, 19 nt, Homo sapiens
  misc_RNA (1)...(19): siRNA sense strand
cugcgaaaguuuaugguuu

SEQ ID NO: 240240 - RNA, 19 nt, Homo sapiens
  misc_RNA (1)...(19): siRNA sense strand
gugaccagcuccuagagaa

SEQ ID NO: 240241 - RNA, 19 nt, Homo sapiens
  misc_RNA (1)...(19): siRNA sense strand
gaggaaauuacccaguaua

SEQ ID NO: 240242 - RNA, 19 nt, Homo sapiens
  misc_RNA (1)...(19): siRNA sense strand
gcugugaucugucuauugc

SEQ ID NO: 240243 - RNA, 19 nt, Homo sapiens
  misc_RNA (1)...(19): siRNA sense strand
uuuccaaacuuccaccaua

SEQ ID NO: 240244 - RNA, 19 nt, Homo sapiens
  misc_RNA (1)...(19): siRNA sense strand
ggccagcaauuuccugaug

SEQ ID NO: 240245 - RNA, 19 nt, Homo sapiens
  misc_RNA (1)...(19): siRNA sense strand
gaaaugaggugcuggugaa

SEQ ID NO: 240246 - RNA, 19 nt, Homo sapiens
  misc_RNA (1)...(19): siRNA sense strand
gaacaaauuucguggauag

SEQ ID NO: 240247 - RNA, 19 nt, Homo sapiens
  misc_RNA (1)...(19): siRNA sense strand
gauaggcgguuucaaauca

SEQ ID NO: 240248 - RNA, 19 nt, Homo sapiens
  misc_RNA (1)...(19): siRNA sense strand
uaaagaaauuccugaggua

SEQ ID NO: 240249 - RNA, 19 nt, Homo sapiens
  misc_RNA (1)...(19): siRNA sense strand
gaugaggacuuugaaauug

SEQ ID NO: 240250 - RNA, 19 nt, Homo sapiens
  misc_RNA (1)...(19): siRNA sense strand
gaugggaaauugaagauug

SEQ ID NO: 240251 - RNA, 19 nt, Homo sapiens
  misc_RNA (1)...(19): siRNA sense strand
guagauacccuguucuuaa

SEQ ID NO: 240252 - RNA, 19 nt, Homo sapiens
  misc_RNA (1)...(19): siRNA sense strand
ggugaaagcugaagagaag

SEQ ID NO: 240253 - RNA, 19 nt, Homo sapiens
  misc_RNA (1)...(19): siRNA sense strand
ucacaaugaucccuucuuu

SEQ ID NO: 240254 - RNA, 19 nt, Homo sapiens
  misc_RNA (1)...(19): siRNA sense strand
ggcaagggcugcaguaaga

SEQ ID NO: 240255 - RNA, 19 nt, Homo sapiens
  misc_RNA (1)...(19): siRNA sense strand
aaaggcagaugauaaagaa

SEQ ID NO: 240256 - RNA, 19 nt, Homo sapiens
  misc_RNA (1)...(19): siRNA sense strand
ucaacaagccucuguauga

SEQ ID NO: 240257 - RNA, 19 nt, Homo sapiens
  misc_RNA (1)...(19): siRNA sense strand
gaagaaaacccuaaagaaa

SEQ ID NO: 240258 - RNA, 19 nt, Homo sapiens
  misc_RNA (1)...(19): siRNA sense strand
ggaacaaauuucguggaua

SEQ ID NO: 240259 - RNA, 19 nt, Homo sapiens
  misc_RNA (1)...(19): siRNA sense strand
gcaguaagagagacucaua

SEQ ID NO: 240260 - RNA, 19 nt, Homo sapiens
  misc_RNA (1)...(19): siRNA sense strand
gguaaaggcagaugauaaa

SEQ ID NO: 240261 - RNA, 19 nt, Homo sapiens
  misc_RNA (1)...(19): siRNA sense strand
gaagaagaaugugaaugga

SEQ ID NO: 240262 - RNA, 19 nt, Homo sapiens
  misc_RNA (1)...(19): siRNA sense strand
uagauacccuguucuuaaa

SEQ ID NO: 240263 - RNA, 19 nt, Homo sapiens
  misc_RNA (1)...(19): siRNA sense strand
caacaagccucuguaugau

SEQ ID NO: 240264 - RNA, 19 nt, Homo sapiens
  misc_RNA (1)...(19): siRNA sense strand
ggaugaggacuuugaaauu

SEQ ID NO: 240265 - RNA, 19 nt, Homo sapiens
  misc_RNA (1)...(19): siRNA sense strand
cuaaaggcauuccugacua

SEQ ID NO: 240266 - RNA, 19 nt, Homo sapiens
  misc_RNA (1)...(19): siRNA sense strand
ggccuaugauucagaagua

SEQ ID NO: 240267 - RNA, 19 nt, Homo sapiens
  misc_RNA (1)...(19): siRNA sense strand
ugaaaugccucccuuagag

SEQ ID NO: 240268 - RNA, 19 nt, Homo sapiens
  misc_RNA (1)...(19): siRNA sense strand
ggaaauugaagauugcaaa

SEQ ID NO: 240269 - RNA, 19 nt, Homo sapiens
  misc_RNA (1)...(19): siRNA sense strand
uaaaggcauuccugacuau

SEQ ID NO: 240270 - RNA, 19 nt, Homo sapiens
  misc_RNA (1)...(19): siRNA sense strand
gauaaugucauccugaaau

SEQ ID NO: 240271 - RNA, 19 nt, Homo sapiens
  misc_RNA (1)...(19): siRNA sense strand
gaaguaugaugagcccauu

SEQ ID NO: 240272 - RNA, 19 nt, Homo sapiens
  misc_RNA (1)...(19): siRNA sense strand
uaaagaauguugacaagcu

SEQ ID NO: 240273 - RNA, 19 nt, Homo sapiens
  misc_RNA (1)...(19): siRNA sense strand
gggcagauuuuacaugaua

SEQ ID NO: 240274 - RNA, 19 nt, Homo sapiens
  misc_RNA (1)...(19): siRNA sense strand
gggaacaaauuucguggau

SEQ ID NO: 240275 - RNA, 19 nt, Homo sapiens
  misc_RNA (1)...(19): siRNA sense strand
agaugaaugugacaaggua

SEQ ID NO: 240276 - RNA, 19 nt, Homo sapiens
  misc_RNA (1)...(19): siRNA sense strand
agaagaaugugaauggaau

SEQ ID NO: 240277 - RNA, 19 nt, Homo sapiens
  misc_RNA (1)...(19): siRNA sense strand
uaugauaggcgguuucaaa

SEQ ID NO: 240278 - RNA, 19 nt, Homo sapiens
  misc_RNA (1)...(19): siRNA sense strand
gcaagcgcuuagaaacauu

SEQ ID NO: 240279 - RNA, 19 nt, Homo sapiens
  misc_RNA (1)...(19): siRNA sense strand
ggaaacaagaaauacagaa

SEQ ID NO: 240280 - RNA, 19 nt, Homo sapiens
  misc_RNA (1)...(19): siRNA sense strand
caagagugguuccuaaugc

SEQ ID NO: 240281 - RNA, 19 nt, Homo sapiens
  misc_RNA (1)...(19): siRNA sense strand
gacaagcucgggccuauga

SEQ ID NO: 240282 - RNA, 19 nt, Homo sapiens
  misc_RNA (1)...(19): siRNA sense strand
ggacaguguagaucuuaaa

SEQ ID NO: 240283 - RNA, 19 nt, Homo sapiens
  misc_RNA (1)...(19): siRNA sense strand
gaacucaacaagccucugu

SEQ ID NO: 240284 - RNA, 19 nt, Homo sapiens
  misc_RNA (1)...(19): siRNA sense strand
gauguuagccugaaguucu

SEQ ID NO: 240285 - RNA, 19 nt, Homo sapiens
  misc_RNA (1)...(19): siRNA sense strand
augaggaggugcaggauaa

SEQ ID NO: 240286 - RNA, 19 nt, Homo sapiens
  misc_RNA (1)...(19): siRNA sense strand
agaagacccuaaaggcauu

SEQ ID NO: 240287 - RNA, 19 nt, Homo sapiens
  misc_RNA (1)...(19): siRNA sense strand
aaucaucaaugcagaauac

SEQ ID NO: 240288 - RNA, 19 nt, Homo sapiens
  misc_RNA (1)...(19): siRNA sense strand
gaagaaugugaauggaauu

SEQ ID NO: 240289 - RNA, 19 nt, Homo sapiens
  misc_RNA (1)...(19): siRNA sense strand
uaaaggcagaugauaaaga

SEQ ID NO: 240290 - RNA, 19 nt, Homo sapiens
  misc_RNA (1)...(19): siRNA sense strand
gaaaauaugcugaacucaa

SEQ ID NO: 240291 - RNA, 19 nt, Homo sapiens
  misc_RNA (1)...(19): siRNA sense strand
acaagccucuguaugauag

SEQ ID NO: 240292 - RNA, 19 nt, Homo sapiens
  misc_RNA (1)...(19): siRNA sense strand
gaaugugacaagguagaua

SEQ ID NO: 240293 - RNA, 19 nt, Homo sapiens
  misc_RNA (1)...(19): siRNA sense strand
gauguuacugugacaacua

SEQ ID NO: 240294 - RNA, 19 nt, Homo sapiens
  misc_RNA (1)...(19): siRNA sense strand
gcaaaggcugcaagauaga

SEQ ID NO: 240295 - RNA, 19 nt, Homo sapiens
  misc_RNA (1)...(19): siRNA sense strand
aaaccuggccagccuguaa

SEQ ID NO: 240296 - RNA, 19 nt, Homo sapiens
  misc_RNA (1)...(19): siRNA sense strand
ggaaaggcuucaggacagu

SEQ ID NO: 240297 - RNA, 19 nt, Homo sapiens
  misc_RNA (1)...(19): siRNA sense strand
auacgagccuacagaagaa

SEQ ID NO: 240298 - RNA, 19 nt, Homo sapiens
  misc_RNA (1)...(19): siRNA sense strand
cgcagccgcuuguauagaa

SEQ ID NO: 240299 - RNA, 19 nt, Homo sapiens
  misc_RNA (1)...(19): siRNA sense strand
gauaaagaacagccuaaag

SEQ ID NO: 240300 - RNA, 19 nt, Homo sapiens
  misc_RNA (1)...(19): siRNA sense strand
aagaagauccuaaagaagu

SEQ ID NO: 240301 - RNA, 19 nt, Homo sapiens
  misc_RNA (1)...(19): siRNA sense strand
gaugaggaggugcaggaua

SEQ ID NO: 240302 - RNA, 19 nt, Homo sapiens
  misc_RNA (1)...(19): siRNA sense strand
gcagccgcuuguauagaaa

SEQ ID NO: 240303 - RNA, 19 nt, Homo sapiens
  misc_RNA (1)...(19): siRNA sense strand
caaacauuauggaaacaag

SEQ ID NO: 240304 - RNA, 19 nt, Homo sapiens
  misc_RNA (1)...(19): siRNA sense strand
aaugguaccuacuaucaau

SEQ ID NO: 240305 - RNA, 19 nt, Homo sapiens
  misc_RNA (1)...(19): siRNA sense strand
ucaaugguaccuacuauca

SEQ ID NO: 240306 - RNA, 19 nt, Homo sapiens
  misc_RNA (1)...(19): siRNA sense strand
gaaauugaagauugcaaag

SEQ ID NO: 240307 - RNA, 19 nt, Homo sapiens
  misc_RNA (1)...(19): siRNA sense strand
gauaacaccccuagugaaa

SEQ ID NO: 240308 - RNA, 19 nt, Homo sapiens
  misc_RNA (1)...(19): siRNA sense strand
gaagcuggaaccacgagaa

SEQ ID NO: 240309 - RNA, 19 nt, Homo sapiens
  misc_RNA (1)...(19): siRNA sense strand
cuacagaagaagaauguga

SEQ ID NO: 240310 - RNA, 19 nt, Homo sapiens
  misc_RNA (1)...(19): siRNA sense strand
cagagucgcacaacugcua

SEQ ID NO: 240311 - RNA, 19 nt, Homo sapiens
  misc_RNA (1)...(19): siRNA sense strand
gugaaaugccucccuuaga

SEQ ID NO: 240312 - RNA, 19 nt, Homo sapiens
  misc_RNA (1)...(19): siRNA sense strand
aauacgagccuacagaaga

SEQ ID NO: 240313 - RNA, 19 nt, Homo sapiens
  misc_RNA (1)...(19): siRNA sense strand
uggcaaacauuauggaaac

SEQ ID NO: 240314 - RNA, 19 nt, Homo sapiens
  misc_RNA (1)...(19): siRNA sense strand
gacuauuggcugauuguuu

SEQ ID NO: 240315 - RNA, 19 nt, Homo sapiens
  misc_RNA (1)...(19): siRNA sense strand
uaaagaacagccuaaagca

SEQ ID NO: 240316 - RNA, 19 nt, Homo sapiens
  misc_RNA (1)...(19): siRNA sense strand
agaaauuccugagguaaag

SEQ ID NO: 240317 - RNA, 19 nt, Homo sapiens
  misc_RNA (1)...(19): siRNA sense strand
cagaauacgagccuacaga

SEQ ID NO: 240318 - RNA, 19 nt, Homo sapiens
  misc_RNA (1)...(19): siRNA sense strand
gcaaacauuauggaaacaa

SEQ ID NO: 240319 - RNA, 19 nt, Homo sapiens
  misc_RNA (1)...(19): siRNA sense strand
caacccauacuucagaaau

SEQ ID NO: 240320 - RNA, 19 nt, Homo sapiens
  misc_RNA (1)...(19): siRNA sense strand
agaagaagaaugugaaugg

SEQ ID NO: 240321 - RNA, 19 nt, Homo sapiens
  misc_RNA (1)...(19): siRNA sense strand
aaagaaauuccugagguaa

SEQ ID NO: 240322 - RNA, 19 nt, Homo sapiens
  misc_RNA (1)...(19): siRNA sense strand
uuacuauacuggagaaguc

SEQ ID NO: 240323 - RNA, 19 nt, Homo sapiens
  misc_RNA (1)...(19): siRNA sense strand
gggaaagccuaaaagagaa

SEQ ID NO: 240324 - RNA, 19 nt, Homo sapiens
  misc_RNA (1)...(19): siRNA sense strand
ucaggacaguguagaucuu

SEQ ID NO: 240325 - RNA, 19 nt, Homo sapiens
  misc_RNA (1)...(19): siRNA sense strand
ggaggcaaccccugaagua

SEQ ID NO: 240326 - RNA, 19 nt, Homo sapiens
  misc_RNA (1)...(19): siRNA sense strand
uaacaccccuagugaaaug

SEQ ID NO: 240327 - RNA, 19 nt, Homo sapiens
  misc_RNA (1)...(19): siRNA sense strand
ccaagagugguuccuaaug

SEQ ID NO: 240328 - RNA, 19 nt, Homo sapiens
  misc_RNA (1)...(19): siRNA sense strand
uaaaagagaagacccuaaa

SEQ ID NO: 240329 - RNA, 19 nt, Homo sapiens
  misc_RNA (1)...(19): siRNA sense strand
gaagaaucugacagcagua

SEQ ID NO: 240330 - RNA, 19 nt, Homo sapiens
  misc_RNA (1)...(19): siRNA sense strand
cuaaagcaacagaggcuaa

SEQ ID NO: 240331 - RNA, 19 nt, Homo sapiens
  misc_RNA (1)...(19): siRNA sense strand
ggcaaccccugaaguaaaa

SEQ ID NO: 240332 - RNA, 19 nt, Homo sapiens
  misc_RNA (1)...(19): siRNA sense strand
gaagggaaagccuaaaaga

SEQ ID NO: 240333 - RNA, 19 nt, Homo sapiens
  misc_RNA (1)...(19): siRNA sense strand
gguaccuacuaucaauuug

SEQ ID NO: 240334 - RNA, 19 nt, Homo sapiens
  misc_RNA (1)...(19): siRNA sense strand
caucauucuucaacuucuu

SEQ ID NO: 240335 - RNA, 19 nt, Homo sapiens
  misc_RNA (1)...(19): siRNA sense strand
gaugagcccauucugaagu

SEQ ID NO: 240336 - RNA, 19 nt, Homo sapiens
  misc_RNA (1)...(19): siRNA sense strand
cacaacugcuacuggagaa

SEQ ID NO: 240337 - RNA, 19 nt, Homo sapiens
  misc_RNA (1)...(19): siRNA sense strand
aaagaacagccuaaagcaa

SEQ ID NO: 240338 - RNA, 19 nt, Homo sapiens
  misc_RNA (1)...(19): siRNA sense strand
caggacaguguagaucuua

SEQ ID NO: 240339 - RNA, 19 nt, Homo sapiens
  misc_RNA (1)...(19): siRNA sense strand
uaagagagacucauaaaag

SEQ ID NO: 240340 - RNA, 19 nt, Homo sapiens
  misc_RNA (1)...(19): siRNA sense strand
uaugaugagcccauucuga

SEQ ID NO: 240341 - RNA, 19 nt, Homo sapiens
  misc_RNA (1)...(19): siRNA sense strand
gaaccacgagaagaugcua

SEQ ID NO: 240342 - RNA, 19 nt, Homo sapiens
  misc_RNA (1)...(19): siRNA sense strand
gcuggaaccacgagaagau

SEQ ID NO: 240343 - RNA, 19 nt, Homo sapiens
  misc_RNA (1)...(19): siRNA sense strand
agccaagagugguuccuaa

SEQ ID NO: 240344 - RNA, 19 nt, Homo sapiens
  misc_RNA (1)...(19): siRNA sense strand
cuggccagccuguaaguua

SEQ ID NO: 240345 - RNA, 19 nt, Homo sapiens
  misc_RNA (1)...(19): siRNA sense strand
gcaaagaagauuaccauua

SEQ ID NO: 240346 - RNA, 19 nt, Homo sapiens
  misc_RNA (1)...(19): siRNA sense strand
gaaggcaccuggcugagua

SEQ ID NO: 240347 - RNA, 19 nt, Homo sapiens
  misc_RNA (1)...(19): siRNA sense strand
gaagauaguuuacgaagag

SEQ ID NO: 240348 - RNA, 19 nt, Homo sapiens
  misc_RNA (1)...(19): siRNA sense strand
aaugagagguggaauguua

SEQ ID NO: 240349 - RNA, 19 nt, Homo sapiens
  misc_RNA (1)...(19): siRNA sense strand
gguggaauguuauuucuaa

SEQ ID NO: 240350 - RNA, 19 nt, Homo sapiens
  misc_RNA (1)...(19): siRNA sense strand
gaagaagcaaagaagauua

SEQ ID NO: 240351 - RNA, 19 nt, Homo sapiens
  misc_RNA (1)...(19): siRNA sense strand
gggaacaaaugaagaguga

SEQ ID NO: 240352 - RNA, 19 nt, Homo sapiens
  misc_RNA (1)...(19): siRNA sense strand
gaagauuggugcguuagaa

SEQ ID NO: 240353 - RNA, 19 nt, Homo sapiens
  misc_RNA (1)...(19): siRNA sense strand
ucaaacggaugaacuauuc

SEQ ID NO: 240354 - RNA, 19 nt, Homo sapiens
  misc_RNA (1)...(19): siRNA sense strand
ugacagacaccauuaauga

SEQ ID NO: 240355 - RNA, 19 nt, Homo sapiens
  misc_RNA (1)...(19): siRNA sense strand
gaacaaaugaagagugaau

SEQ ID NO: 240356 - RNA, 19 nt, Homo sapiens
  misc_RNA (1)...(19): siRNA sense strand
aagaaauacuggcagguua

SEQ ID NO: 240357 - RNA, 19 nt, Homo sapiens
  misc_RNA (1)...(19): siRNA sense strand
gaucaaguccuucuacaug

SEQ ID NO: 240358 - RNA, 19 nt, Homo sapiens
  misc_RNA (1)...(19): siRNA sense strand
ggacuugguuugugaugug

SEQ ID NO: 240359 - RNA, 19 nt, Homo sapiens
  misc_RNA (1)...(19): siRNA sense strand
gccaugagcugaguuguga

SEQ ID NO: 240360 - RNA, 19 nt, Homo sapiens
  misc_RNA (1)...(19): siRNA sense strand
gaaccaaggagaaaccauu

SEQ ID NO: 240361 - RNA, 19 nt, Homo sapiens
  misc_RNA (1)...(19): siRNA sense strand
gaaagaggcagaagauagu

SEQ ID NO: 240362 - RNA, 19 nt, Homo sapiens
  misc_RNA (1)...(19): siRNA sense strand
ggaagaagcaaagaagauu

SEQ ID NO: 240363 - RNA, 19 nt, Homo sapiens
  misc_RNA (1)...(19): siRNA sense strand
ugugguagaucgaauauug

SEQ ID NO: 240364 - RNA, 19 nt, Homo sapiens
  misc_RNA (1)...(19): siRNA sense strand
gagcaguguugcaguguau

SEQ ID NO: 240365 - RNA, 19 nt, Homo sapiens
  misc_RNA (1)...(19): siRNA sense strand
gaaauacuggcagguuaua

SEQ ID NO: 240366 - RNA, 19 nt, Homo sapiens
  misc_RNA (1)...(19): siRNA sense strand
gagaaaacauguccaaaau

SEQ ID NO: 240367 - RNA, 19 nt, Homo sapiens
  misc_RNA (1)...(19): siRNA sense strand
gcaaggaaagaauuuaaug

SEQ ID NO: 240368 - RNA, 19 nt, Homo sapiens
  misc_RNA (1)...(19): siRNA sense strand
gaagaaauacuggcagguu

SEQ ID NO: 240369 - RNA, 19 nt, Homo sapiens
  misc_RNA (1)...(19): siRNA sense strand
gauggaacuuucuaugaau

SEQ ID NO: 240370 - RNA, 19 nt, Homo sapiens
  misc_RNA (1)...(19): siRNA sense strand
gaagauggaacuuucuaug

SEQ ID NO: 240371 - RNA, 19 nt, Homo sapiens
  misc_RNA (1)...(19): siRNA sense strand
cagguuaucuucagugugu

SEQ ID NO: 240372 - RNA, 19 nt, Homo sapiens
  misc_RNA (1)...(19): siRNA sense strand
cuuuagagaucacuucuuu

SEQ ID NO: 240373 - RNA, 19 nt, Homo sapiens
  misc_RNA (1)...(19): siRNA sense strand
gggcuuggaacgauucuua

SEQ ID NO: 240374 - RNA, 19 nt, Homo sapiens
  misc_RNA (1)...(19): siRNA sense strand
caacauuagugcaaacaca

SEQ ID NO: 240375 - RNA, 19 nt, Homo sapiens
  misc_RNA (1)...(19): siRNA sense strand
ccaaggagaaaccauuuaa

SEQ ID NO: 240376 - RNA, 19 nt, Homo sapiens
  misc_RNA (1)...(19): siRNA sense strand
cugacaaccugaucaauga

SEQ ID NO: 240377 - RNA, 19 nt, Homo sapiens
  misc_RNA (1)...(19): siRNA sense strand
agauggaacuuucuaugaa

SEQ ID NO: 240378 - RNA, 19 nt, Homo sapiens
  misc_RNA (1)...(19): siRNA sense strand
cccagaagcuccugagaga

SEQ ID NO: 240379 - RNA, 19 nt, Homo sapiens
  misc_RNA (1)...(19): siRNA sense strand
cuaaaucacaguugaagaa

SEQ ID NO: 240380 - RNA, 19 nt, Homo sapiens
  misc_RNA (1)...(19): siRNA sense strand
ggaacuuucuaugaauuug

SEQ ID NO: 240381 - RNA, 19 nt, Homo sapiens
  misc_RNA (1)...(19): siRNA sense strand
uauagaggccaaagaguaa

SEQ ID NO: 240382 - RNA, 19 nt, Homo sapiens
  misc_RNA (1)...(19): siRNA sense strand
ccugaggauucccgucuua

SEQ ID NO: 240383 - RNA, 19 nt, Homo sapiens
  misc_RNA (1)...(19): siRNA sense strand
ggcagaagauaguuuacga

SEQ ID NO: 240384 - RNA, 19 nt, Homo sapiens
  misc_RNA (1)...(19): siRNA sense strand
gugcuuauacccucgauuu

SEQ ID NO: 240385 - RNA, 19 nt, Homo sapiens
  misc_RNA (1)...(19): siRNA sense strand
gagaucaaguccuucuaca

SEQ ID NO: 240386 - RNA, 19 nt, Homo sapiens
  misc_RNA (1)...(19): siRNA sense strand
gcaggcaaggaaagaauuu

SEQ ID NO: 240387 - RNA, 19 nt, Homo sapiens
  misc_RNA (1)...(19): siRNA sense strand
gaaccauuuccuaccauuu

SEQ ID NO: 240388 - RNA, 19 nt, Homo sapiens
  misc_RNA (1)...(19): siRNA sense strand
gaugcuaucguuuggcuaa

SEQ ID NO: 240389 - RNA, 19 nt, Homo sapiens
  misc_RNA (1)...(19): siRNA sense strand
caacaacagacacaugaug

SEQ ID NO: 240390 - RNA, 19 nt, Homo sapiens
  misc_RNA (1)...(19): siRNA sense strand
uuagagaucacuucuuuga

SEQ ID NO: 240391 - RNA, 19 nt, Homo sapiens
  misc_RNA (1)...(19): siRNA sense strand
ggagaaaacauguccaaaa

SEQ ID NO: 240392 - RNA, 19 nt, Homo sapiens
  misc_RNA (1)...(19): siRNA sense strand
gagguggaauguuauuucu

SEQ ID NO: 240393 - RNA, 19 nt, Homo sapiens
  misc_RNA (1)...(19): siRNA sense strand
gauaguuuacgaagagaaa

SEQ ID NO: 240394 - RNA, 19 nt, Homo sapiens
  misc_RNA (1)...(19): siRNA sense strand
aaagaaagaggcagaagau

SEQ ID NO: 240395 - RNA, 19 nt, Homo sapiens
  misc_RNA (1)...(19): siRNA sense strand
gaaguuacuccuccaacau

SEQ ID NO: 240396 - RNA, 19 nt, Homo sapiens
  misc_RNA (1)...(19): siRNA sense strand
gcugacaaccugaucaaug

SEQ ID NO: 240397 - RNA, 19 nt, Homo sapiens
  misc_RNA (1)...(19): siRNA sense strand
gaaaacauguccaaaaucc

SEQ ID NO: 240398 - RNA, 19 nt, Homo sapiens
  misc_RNA (1)...(19): siRNA sense strand
gguauacggaucagagaaa

SEQ ID NO: 240399 - RNA, 19 nt, Homo sapiens
  misc_RNA (1)...(19): siRNA sense strand
uggagaagauaucccagaa

SEQ ID NO: 240400 - RNA, 19 nt, Homo sapiens
  misc_RNA (1)...(19): siRNA sense strand
gcaaacacaaguagaaggu

SEQ ID NO: 240401 - RNA, 19 nt, Homo sapiens
  misc_RNA (1)...(19): siRNA sense strand
ugugaagauuggugcguua

SEQ ID NO: 240402 - RNA, 19 nt, Homo sapiens
  misc_RNA (1)...(19): siRNA sense strand
caaggagaaaccauuuaaa

SEQ ID NO: 240403 - RNA, 19 nt, Homo sapiens
  misc_RNA (1)...(19): siRNA sense strand
aaccauuuccuaccauuua

SEQ ID NO: 240404 - RNA, 19 nt, Homo sapiens
  misc_RNA (1)...(19): siRNA sense strand
gagauggaaccaaggagaa

SEQ ID NO: 240405 - RNA, 19 nt, Homo sapiens
  misc_RNA (1)...(19): siRNA sense strand
gagcucaacccgaacuuuc

SEQ ID NO: 240406 - RNA, 19 nt, Homo sapiens
  misc_RNA (1)...(19): siRNA sense strand
ugaaguuacuccuccaaca

SEQ ID NO: 240407 - RNA, 19 nt, Homo sapiens
  misc_RNA (1)...(19): siRNA sense strand
ggauauagaggccaaagag

SEQ ID NO: 240408 - RNA, 19 nt, Homo sapiens
  misc_RNA (1)...(19): siRNA sense strand
gcaccuggcugaguacacu

SEQ ID NO: 240409 - RNA, 19 nt, Homo sapiens
  misc_RNA (1)...(19): siRNA sense strand
gaugacagacaccauuaau

SEQ ID NO: 240410 - RNA, 19 nt, Homo sapiens
  misc_RNA (1)...(19): siRNA sense strand
aaagaaccauuuccuacca

SEQ ID NO: 240411 - RNA, 19 nt, Homo sapiens
  misc_RNA (1)...(19): siRNA sense strand
cuauucagaugcuaucguu

SEQ ID NO: 240412 - RNA, 19 nt, Homo sapiens
  misc_RNA (1)...(19): siRNA sense strand
gaacuauucagaugcuauc

SEQ ID NO: 240413 - RNA, 19 nt, Homo sapiens
  misc_RNA (1)...(19): siRNA sense strand
agaaagaggcagaagauag

SEQ ID NO: 240414 - RNA, 19 nt, Homo sapiens
  misc_RNA (1)...(19): siRNA sense strand
gcagagcaguccagaacac

SEQ ID NO: 240415 - RNA, 19 nt, Homo sapiens
  misc_RNA (1)...(19): siRNA sense strand
ugaggagucugacguugau

SEQ ID NO: 240416 - RNA, 19 nt, Homo sapiens
  misc_RNA (1)...(19): siRNA sense strand
ggagaaaccauuuaaaaca

SEQ ID NO: 240417 - RNA, 19 nt, Homo sapiens
  misc_RNA (1)...(19): siRNA sense strand
ccaaagaguaaagguguuu

SEQ ID NO: 240418 - RNA, 19 nt, Homo sapiens
  misc_RNA (1)...(19): siRNA sense strand
agaagauaguuuacgaaga

SEQ ID NO: 240419 - RNA, 19 nt, Homo sapiens
  misc_RNA (1)...(19): siRNA sense strand
gcagaagauaguuuacgaa

SEQ ID NO: 240420 - RNA, 19 nt, Homo sapiens
  misc_RNA (1)...(19): siRNA sense strand
gaaccuggaagaagcaaag

SEQ ID NO: 240421 - RNA, 19 nt, Homo sapiens
  misc_RNA (1)...(19): siRNA sense strand
guagaucgaauauugaagu

SEQ ID NO: 240422 - RNA, 19 nt, Homo sapiens
  misc_RNA (1)...(19): siRNA sense strand
uggaggacuugguuuguga

SEQ ID NO: 240423 - RNA, 19 nt, Homo sapiens
  misc_RNA (1)...(19): siRNA sense strand
ucacaguugaagaacauua

SEQ ID NO: 240424 - RNA, 19 nt, Homo sapiens
  misc_RNA (1)...(19): siRNA sense strand
ugacuucugggaacuaauu

SEQ ID NO: 240425 - RNA, 19 nt, Homo sapiens
  misc_RNA (1)...(19): siRNA sense strand
gcggaugaguugugucagu

SEQ ID NO: 240426 - RNA, 19 nt, Homo sapiens
  misc_RNA (1)...(19): siRNA sense strand
agaggcagaagauaguuua

SEQ ID NO: 240427 - RNA, 19 nt, Homo sapiens
  misc_RNA (1)...(19): siRNA sense strand
gacagacaccauuaaugaa

SEQ ID NO: 240428 - RNA, 19 nt, Homo sapiens
  misc_RNA (1)...(19): siRNA sense strand
cugagagacugaugacaga

SEQ ID NO: 240429 - RNA, 19 nt, Homo sapiens
  misc_RNA (1)...(19): siRNA sense strand
aaucacaguugaagaacau

SEQ ID NO: 240430 - RNA, 19 nt, Homo sapiens
  misc_RNA (1)...(19): siRNA sense strand
gaugguacagguuaucuuc

SEQ ID NO: 240431 - RNA, 19 nt, Homo sapiens
  misc_RNA (1)...(19): siRNA sense strand
auauagaggccaaagagua

SEQ ID NO: 240432 - RNA, 19 nt, Homo sapiens
  misc_RNA (1)...(19): siRNA sense strand
gaaaagaaccuggaagaag

SEQ ID NO: 240433 - RNA, 19 nt, Homo sapiens
  misc_RNA (1)...(19): siRNA sense strand
uggcauagggaacaaauga

SEQ ID NO: 240434 - RNA, 19 nt, Homo sapiens
  misc_RNA (1)...(19): siRNA sense strand
gagcaguccagaacacgaa

SEQ ID NO: 240435 - RNA, 19 nt, Homo sapiens
  misc_RNA (1)...(19): siRNA sense strand
gagcugaguugugacuucu

SEQ ID NO: 240436 - RNA, 19 nt, Homo sapiens
  misc_RNA (1)...(19): siRNA sense strand
caaaaugugugaagauugg

SEQ ID NO: 240437 - RNA, 19 nt, Homo sapiens
  misc_RNA (1)...(19): siRNA sense strand
gccaaagaguaaagguguu

SEQ ID NO: 240438 - RNA, 19 nt, Homo sapiens
  misc_RNA (1)...(19): siRNA sense strand
cauccgagacgugugcuua

SEQ ID NO: 240439 - RNA, 19 nt, Homo sapiens
  misc_RNA (1)...(19): siRNA sense strand
ggauucccgucuuacugaa

SEQ ID NO: 240440 - RNA, 19 nt, Homo sapiens
  misc_RNA (1)...(19): siRNA sense strand
aagauggaacuuucuauga

SEQ ID NO: 240441 - RNA, 19 nt, Homo sapiens
  misc_RNA (1)...(19): siRNA sense strand
guaaagaaagaagauggaa

SEQ ID NO: 240442 - RNA, 19 nt, Homo sapiens
  misc_RNA (1)...(19): siRNA sense strand
gggcagagcaguccagaac

SEQ ID NO: 240443 - RNA, 19 nt, Homo sapiens
  misc_RNA (1)...(19): siRNA sense strand
gagcugacaaccugaucaa

SEQ ID NO: 240444 - RNA, 19 nt, Homo sapiens
  misc_RNA (1)...(19): siRNA sense strand
ccauuuacguagauucaca

SEQ ID NO: 240445 - RNA, 19 nt, Homo sapiens
  misc_RNA (1)...(19): siRNA sense strand
ggguaucacuggagucuga

SEQ ID NO: 240446 - RNA, 19 nt, Homo sapiens
  misc_RNA (1)...(19): siRNA sense strand
gcgcaucucuggaguugau

SEQ ID NO: 240447 - RNA, 19 nt, Homo sapiens
  misc_RNA (1)...(19): siRNA sense strand
ucucuggaguugaucguua

SEQ ID NO: 240448 - RNA, 19 nt, Homo sapiens
  misc_RNA (1)...(19): siRNA sense strand
ggagucugauggaaagaga

SEQ ID NO: 240449 - RNA, 19 nt, Homo sapiens
  misc_RNA (1)...(19): siRNA sense strand
gaguugaucguuacuaugu

SEQ ID NO: 240450 - RNA, 19 nt, Homo sapiens
  misc_RNA (1)...(19): siRNA sense strand
ggcgugugcuuguugauuc

SEQ ID NO: 240451 - RNA, 19 nt, Homo sapiens
  misc_RNA (1)...(19): siRNA sense strand
uggaguugaucguuacuau

SEQ ID NO: 240452 - RNA, 19 nt, Homo sapiens
  misc_RNA (1)...(19): siRNA sense strand
ucacuggagucugauggaa

SEQ ID NO: 240453 - RNA, 19 nt, Homo sapiens
  misc_RNA (1)...(19): siRNA sense strand
guugaucguuacuaugugu

SEQ ID NO: 240454 - RNA, 19 nt, Homo sapiens
  misc_RNA (1)...(19): siRNA sense strand
cugcguacauccacagguu

SEQ ID NO: 240455 - RNA, 19 nt, Homo sapiens
  misc_RNA (1)...(19): siRNA sense strand
ggaguugaucguuacuaug

SEQ ID NO: 240456 - RNA, 19 nt, Homo sapiens
  misc_RNA (1)...(19): siRNA sense strand
gaucguuacuaugugucaa

SEQ ID NO: 240457 - RNA, 19 nt, Homo sapiens
  misc_RNA (1)...(19): siRNA sense strand
aggcgcaucucuggaguug

SEQ ID NO: 240458 - RNA, 19 nt, Homo sapiens
  misc_RNA (1)...(19): siRNA sense strand
gggcgugugcuuguugauu

SEQ ID NO: 240459 - RNA, 19 nt, Homo sapiens
  misc_RNA (1)...(19): siRNA sense strand
agucugauggaaagagaua

SEQ ID NO: 240460 - RNA, 19 nt, Homo sapiens
  misc_RNA (1)...(19): siRNA sense strand
caagagagcuggagaauua

SEQ ID NO: 240461 - RNA, 19 nt, Homo sapiens
  misc_RNA (1)...(19): siRNA sense strand
caagagagcugcugaaaua

SEQ ID NO: 240462 - RNA, 19 nt, Homo sapiens
  misc_RNA (1)...(19): siRNA sense strand
gaagagagcuggagaaauc

SEQ ID NO: 240463 - RNA, 19 nt, Homo sapiens
  misc_RNA (1)...(19): siRNA sense strand
gcaagaaacuguacacuga

SEQ ID NO: 240464 - RNA, 19 nt, Homo sapiens
  misc_RNA (1)...(19): siRNA sense strand
gaacgaacaucucuacaaa

SEQ ID NO: 240465 - RNA, 19 nt, Homo sapiens
  misc_RNA (1)...(19): siRNA sense strand
gcaagucagugauaucuua

SEQ ID NO: 240466 - RNA, 19 nt, Homo sapiens
  misc_RNA (1)...(19): siRNA sense strand
ggaagaagcuuugaagaaa

SEQ ID NO: 240467 - RNA, 19 nt, Homo sapiens
  misc_RNA (1)...(19): siRNA sense strand
gaacaaugcucucaauaug

SEQ ID NO: 240468 - RNA, 19 nt, Homo sapiens
  misc_RNA (1)...(19): siRNA sense strand
gaccauaacucaagaauau

SEQ ID NO: 240469 - RNA, 19 nt, Homo sapiens
  misc_RNA (1)...(19): siRNA sense strand
gaacaaugcucucaacaug

SEQ ID NO: 240470 - RNA, 19 nt, Homo sapiens
  misc_RNA (1)...(19): siRNA sense strand
ccagacagauucaaauuua

SEQ ID NO: 240471 - RNA, 19 nt, Homo sapiens
  misc_RNA (1)...(19): siRNA sense strand
gcaauuaccugcaugaaug

SEQ ID NO: 240472 - RNA, 19 nt, Homo sapiens
  misc_RNA (1)...(19): siRNA sense strand
gaaagcaggcgaugcauua

SEQ ID NO: 240473 - RNA, 19 nt, Homo sapiens
  misc_RNA (1)...(19): siRNA sense strand
guauaaagcucacauguug

SEQ ID NO: 240474 - RNA, 19 nt, Homo sapiens
  misc_RNA (1)...(19): siRNA sense strand
cgaauaaacuacagugaua

SEQ ID NO: 240475 - RNA, 19 nt, Homo sapiens
  misc_RNA (1)...(19): siRNA sense strand
gcacagggcucauacacaa

SEQ ID NO: 240476 - RNA, 19 nt, Homo sapiens
  misc_RNA (1)...(19): siRNA sense strand
gaucacagcugcaaagaug

SEQ ID NO: 240477 - RNA, 19 nt, Homo sapiens
  misc_RNA (1)...(19): siRNA sense strand
gcaaugacguucagaguga

SEQ ID NO: 240478 - RNA, 19 nt, Homo sapiens
  misc_RNA (1)...(19): siRNA sense strand
gaaagaaggcuaugacuug

SEQ ID NO: 240479 - RNA, 19 nt, Homo sapiens
  misc_RNA (1)...(19): siRNA sense strand
ccaagaaguuugacauuaa

SEQ ID NO: 240480 - RNA, 19 nt, Homo sapiens
  misc_RNA (1)...(19): siRNA sense strand
caagagauauugcuaguga

SEQ ID NO: 240481 - RNA, 19 nt, Homo sapiens
  misc_RNA (1)...(19): siRNA sense strand
caggagaucuugagugaua

SEQ ID NO: 240482 - RNA, 19 nt, Homo sapiens
  misc_RNA (1)...(19): siRNA sense strand
gaucauaccuacaaaguuc

SEQ ID NO: 240483 - RNA, 19 nt, Homo sapiens
  misc_RNA (1)...(19): siRNA sense strand
ccagucagauuaaguauaa

SEQ ID NO: 240484 - RNA, 19 nt, Homo sapiens
  misc_RNA (1)...(19): siRNA sense strand
ggacaugucugccugauca

SEQ ID NO: 240485 - RNA, 19 nt, Homo sapiens
  misc_RNA (1)...(19): siRNA sense strand
caagagacauugcuaguga

SEQ ID NO: 240486 - RNA, 19 nt, Homo sapiens
  misc_RNA (1)...(19): siRNA sense strand
gcaguaaccuguacaagga

SEQ ID NO: 240487 - RNA, 19 nt, Homo sapiens
  misc_RNA (1)...(19): siRNA sense strand
ggaagaacccaauguuaua

SEQ ID NO: 240488 - RNA, 19 nt, Homo sapiens
  misc_RNA (1)...(19): siRNA sense strand
gaacuucaguagugauaaa

SEQ ID NO: 240489 - RNA, 19 nt, Homo sapiens
  misc_RNA (1)...(19): siRNA sense strand
caagugagguuaaauacaa

SEQ ID NO: 240490 - RNA, 19 nt, Homo sapiens
  misc_RNA (1)...(19): siRNA sense strand
gaucuacgcuacaaagaaa

SEQ ID NO: 240491 - RNA, 19 nt, Homo sapiens
  misc_RNA (1)...(19): siRNA sense strand
gaacaucucuacaaacaag

SEQ ID NO: 240492 - RNA, 19 nt, Homo sapiens
  misc_RNA (1)...(19): siRNA sense strand
gaaacuagaucaguguaaa

SEQ ID NO: 240493 - RNA, 19 nt, Homo sapiens
  misc_RNA (1)...(19): siRNA sense strand
ggaaagaucuagaggaaag

SEQ ID NO: 240494 - RNA, 19 nt, Homo sapiens
  misc_RNA (1)...(19): siRNA sense strand
cuaauaaucuugcaaguga

SEQ ID NO: 240495 - RNA, 19 nt, Homo sapiens
  misc_RNA (1)...(19): siRNA sense strand
gaggaaagguuaugacaug

SEQ ID NO: 240496 - RNA, 19 nt, Homo sapiens
  misc_RNA (1)...(19): siRNA sense strand
gaaaggcuaugaucucaga

SEQ ID NO: 240497 - RNA, 19 nt, Homo sapiens
  misc_RNA (1)...(19): siRNA sense strand
guacaaagcagacuugaaa

SEQ ID NO: 240498 - RNA, 19 nt, Homo sapiens
  misc_RNA (1)...(19): siRNA sense strand
gaagggauaugaccugaga

SEQ ID NO: 240499 - RNA, 19 nt, Homo sapiens
  misc_RNA (1)...(19): siRNA sense strand
ccaaagagaaccugcauua

SEQ ID NO: 240500 - RNA, 19 nt, Homo sapiens
  misc_RNA (1)...(19): siRNA sense strand
ggauuggcaugacuuaaua

SEQ ID NO: 240501 - RNA, 19 nt, Homo sapiens
  misc_RNA (1)...(19): siRNA sense strand
gaaaguggauccuucaaag

SEQ ID NO: 240502 - RNA, 19 nt, Homo sapiens
  misc_RNA (1)...(19): siRNA sense strand
gaagaugaucccaagauua

SEQ ID NO: 240503 - RNA, 19 nt, Homo sapiens
  misc_RNA (1)...(19): siRNA sense strand
caagaaagccuaugaacaa

SEQ ID NO: 240504 - RNA, 19 nt, Homo sapiens
  misc_RNA (1)...(19): siRNA sense strand
caaggaauauugcuaguga

SEQ ID NO: 240505 - RNA, 19 nt, Homo sapiens
  misc_RNA (1)...(19): siRNA sense strand
ccacagagcucccacaaca

SEQ ID NO: 240506 - RNA, 19 nt, Homo sapiens
  misc_RNA (1)...(19): siRNA sense strand
acaccaaucuggacuauaa

SEQ ID NO: 240507 - RNA, 19 nt, Homo sapiens
  misc_RNA (1)...(19): siRNA sense strand
aauauaagcuugaccauga

SEQ ID NO: 240508 - RNA, 19 nt, Homo sapiens
  misc_RNA (1)...(19): siRNA sense strand
uaagaaaucucaggcaauu

SEQ ID NO: 240509 - RNA, 19 nt, Homo sapiens
  misc_RNA (1)...(19): siRNA sense strand
agaaguccaugucguauua

SEQ ID NO: 240510 - RNA, 19 nt, Homo sapiens
  misc_RNA (1)...(19): siRNA sense strand
gagagaaacugaagcacaa

SEQ ID NO: 240511 - RNA, 19 nt, Homo sapiens
  misc_RNA (1)...(19): siRNA sense strand
caaagcagcuaagugauuu

SEQ ID NO: 240512 - RNA, 19 nt, Homo sapiens
  misc_RNA (1)...(19): siRNA sense strand
caaggaagcuuaugagaag

SEQ ID NO: 240513 - RNA, 19 nt, Homo sapiens
  misc_RNA (1)...(19): siRNA sense strand
gauaugaccugagaacuga

SEQ ID NO: 240514 - RNA, 19 nt, Homo sapiens
  misc_RNA (1)...(19): siRNA sense strand
gaaggaaggcuaugacuug

SEQ ID NO: 240515 - RNA, 19 nt, Homo sapiens
  misc_RNA (1)...(19): siRNA sense strand
caacucaauugaugaauga

SEQ ID NO: 240516 - RNA, 19 nt, Homo sapiens
  misc_RNA (1)...(19): siRNA sense strand
gaaaguaaccaaucaagug

SEQ ID NO: 240517 - RNA, 19 nt, Homo sapiens
  misc_RNA (1)...(19): siRNA sense strand
gaaagaugcccuagacauu

SEQ ID NO: 240518 - RNA, 19 nt, Homo sapiens
  misc_RNA (1)...(19): siRNA sense strand
aagcagaagucaaucuuua

SEQ ID NO: 240519 - RNA, 19 nt, Homo sapiens
  misc_RNA (1)...(19): siRNA sense strand
ucaaauaucgggaagaaua

SEQ ID NO: 240520 - RNA, 19 nt, Homo sapiens
  misc_RNA (1)...(19): siRNA sense strand
caaggaagccuaugagaaa

SEQ ID NO: 240521 - RNA, 19 nt, Homo sapiens
  misc_RNA (1)...(19): siRNA sense strand
ccagagauauugcaaguga

SEQ ID NO: 240522 - RNA, 19 nt, Homo sapiens
  misc_RNA (1)...(19): siRNA sense strand
ccagagauauugcaaguga

SEQ ID NO: 240523 - RNA, 19 nt, Homo sapiens
  misc_RNA (1)...(19): siRNA sense strand
gccaagaaguuugacauua

SEQ ID NO: 240524 - RNA, 19 nt, Homo sapiens
  misc_RNA (1)...(19): siRNA sense strand
gccuauaacuugagugaua

SEQ ID NO: 240525 - RNA, 19 nt, Homo sapiens
  misc_RNA (1)...(19): siRNA sense strand
gcagagcgauguugaauac

SEQ ID NO: 240526 - RNA, 19 nt, Homo sapiens
  misc_RNA (1)...(19): siRNA sense strand
ccagaaacgcugaaauuua

SEQ ID NO: 240527 - RNA, 19 nt, Homo sapiens
  misc_RNA (1)...(19): siRNA sense strand
caggagagauucuuaguga

SEQ ID NO: 240528 - RNA, 19 nt, Homo sapiens
  misc_RNA (1)...(19): siRNA sense strand
ggagugauaucgcuuacaa

SEQ ID NO: 240529 - RNA, 19 nt, Homo sapiens
  misc_RNA (1)...(19): siRNA sense strand
auacaaagcugacuacaau

SEQ ID NO: 240530 - RNA, 19 nt, Homo sapiens
  misc_RNA (1)...(19): siRNA sense strand
ggaagggccucacugaaau

SEQ ID NO: 240531 - RNA, 19 nt, Homo sapiens
  misc_RNA (1)...(19): siRNA sense strand
caagaaguguugacgauga

SEQ ID NO: 240532 - RNA, 19 nt, Homo sapiens
  misc_RNA (1)...(19): siRNA sense strand
gauccucgaugauauuaaa

SEQ ID NO: 240533 - RNA, 19 nt, Homo sapiens
  misc_RNA (1)...(19): siRNA sense strand
gaaggacuaugaucugaga

SEQ ID NO: 240534 - RNA, 19 nt, Homo sapiens
  misc_RNA (1)...(19): siRNA sense strand
gcaguugggucaccacauu

SEQ ID NO: 240535 - RNA, 19 nt, Homo sapiens
  misc_RNA (1)...(19): siRNA sense strand
gcuaugaucucccaguuga

SEQ ID NO: 240536 - RNA, 19 nt, Homo sapiens
  misc_RNA (1)...(19): siRNA sense strand
aaaccagagugauagauua

SEQ ID NO: 240537 - RNA, 19 nt, Homo sapiens
  misc_RNA (1)...(19): siRNA sense strand
gaugaaggcuggauguaug

SEQ ID NO: 240538 - RNA, 19 nt, Homo sapiens
  misc_RNA (1)...(19): siRNA sense strand
gauauugccagucagauua

SEQ ID NO: 240539 - RNA, 19 nt, Homo sapiens
  misc_RNA (1)...(19): siRNA sense strand
caagagggcuuacuggaau

SEQ ID NO: 240540 - RNA, 19 nt, Homo sapiens
  misc_RNA (1)...(19): siRNA sense strand
ccagaaaccugaagaaucu

SEQ ID NO: 240541 - RNA, 19 nt, Homo sapiens
  misc_RNA (1)...(19): siRNA sense strand
guauaaagaugaccugaau

SEQ ID NO: 240542 - RNA, 19 nt, Homo sapiens
  misc_RNA (1)...(19): siRNA sense strand
acagugagcuuaaauacaa

SEQ ID NO: 240543 - RNA, 19 nt, Homo sapiens
  misc_RNA (1)...(19): siRNA sense strand
caacaugaauaagcguuua

SEQ ID NO: 240544 - RNA, 19 nt, Homo sapiens
  misc_RNA (1)...(19): siRNA sense strand
uuaagaagcugacugauuc

SEQ ID NO: 240545 - RNA, 19 nt, Homo sapiens
  misc_RNA (1)...(19): siRNA sense strand
caagaaagcaacugaauau

SEQ ID NO: 240546 - RNA, 19 nt, Homo sapiens
  misc_RNA (1)...(19): siRNA sense strand
uggcaaagcugcagucuga

SEQ ID NO: 240547 - RNA, 19 nt, Homo sapiens
  misc_RNA (1)...(19): siRNA sense strand
cgagaaacauugccaguga

SEQ ID NO: 240548 - RNA, 19 nt, Homo sapiens
  misc_RNA (1)...(19): siRNA sense strand
uaagugacgucuguuauaa

SEQ ID NO: 240549 - RNA, 19 nt, Homo sapiens
  misc_RNA (1)...(19): siRNA sense strand
gugcaaugcuuacaguaua

SEQ ID NO: 240550 - RNA, 19 nt, Homo sapiens
  misc_RNA (1)...(19): siRNA sense strand
ccagacacccucaaauuua

SEQ ID NO: 240551 - RNA, 19 nt, Homo sapiens
  misc_RNA (1)...(19): siRNA sense strand
gagaggaaauuauucacaa

SEQ ID NO: 240552 - RNA, 19 nt, Homo sapiens
  misc_RNA (1)...(19): siRNA sense strand
gccaaggccuccagagaua

SEQ ID NO: 240553 - RNA, 19 nt, Homo sapiens
  misc_RNA (1)...(19): siRNA sense strand
ccacucaaauccucaauga

SEQ ID NO: 240554 - RNA, 19 nt, Homo sapiens
  misc_RNA (1)...(19): siRNA sense strand
cuaauuaccuauacacuga

SEQ ID NO: 240555 - RNA, 19 nt, Homo sapiens
  misc_RNA (1)...(19): siRNA sense strand
gcaguuauuucaaguacaa

SEQ ID NO: 240556 - RNA, 19 nt, Homo sapiens
  misc_RNA (1)...(19): siRNA sense strand
ccaggaggcugcuaggaua

SEQ ID NO: 240557 - RNA, 19 nt, Homo sapiens
  misc_RNA (1)...(19): siRNA sense strand
aaucaaagaugaaggacua

SEQ ID NO: 240558 - RNA, 19 nt, Homo sapiens
  misc_RNA (1)...(19): siRNA sense strand
uauacaaacuugccaauga

SEQ ID NO: 240559 - RNA, 19 nt, Homo sapiens
  misc_RNA (1)...(19): siRNA sense strand
gcaagaagcagaagucaau

SEQ ID NO: 240560 - RNA, 19 nt, Homo sapiens
  misc_RNA (1)...(19): siRNA sense strand
caacuugucuuccuauuaa

SEQ ID NO: 240561 - RNA, 19 nt, Homo sapiens
  misc_RNA (1)...(19): siRNA sense strand
gaagaugaccuacagauaa

SEQ ID NO: 240562 - RNA, 19 nt, Homo sapiens
  misc_RNA (1)...(19): siRNA sense strand
gaagauacguggcucaaug

SEQ ID NO: 240563 - RNA, 19 nt, Homo sapiens
  misc_RNA (1)...(19): siRNA sense strand
ggacagagaaguuugauuu

SEQ ID NO: 240564 - RNA, 19 nt, Homo sapiens
  misc_RNA (1)...(19): siRNA sense strand
ggacaucucuuagcccaua

SEQ ID NO: 240565 - RNA, 19 nt, Homo sapiens
  misc_RNA (1)...(19): siRNA sense strand
ugaaggaacuugugagauu

SEQ ID NO: 240566 - RNA, 19 nt, Homo sapiens
  misc_RNA (1)...(19): siRNA sense strand
ggaaaggccuucuagagau

SEQ ID NO: 240567 - RNA, 19 nt, Homo sapiens
  misc_RNA (1)...(19): siRNA sense strand
gagaagagauugauuuguc

SEQ ID NO: 240568 - RNA, 19 nt, Homo sapiens
  misc_RNA (1)...(19): siRNA sense strand
ggacagcacucaacucaag

SEQ ID NO: 240569 - RNA, 19 nt, Homo sapiens
  misc_RNA (1)...(19): siRNA sense strand
gccaauaaaucuacaaaug

SEQ ID NO: 240570 - RNA, 19 nt, Homo sapiens
  misc_RNA (1)...(19): siRNA sense strand
gcacucaacucaagcacaa

SEQ ID NO: 240571 - RNA, 19 nt, Homo sapiens
  misc_RNA (1)...(19): siRNA sense strand
gagaugagaguguuaguaa

SEQ ID NO: 240572 - RNA, 19 nt, Homo sapiens
  misc_RNA (1)...(19): siRNA sense strand
agaauuagaugcacaugaa

SEQ ID NO: 240573 - RNA, 19 nt, Homo sapiens
  misc_RNA (1)...(19): siRNA sense strand
gaaucgcuuucacauauuu

SEQ ID NO: 240574 - RNA, 19 nt, Homo sapiens
  misc_RNA (1)...(19): siRNA sense strand
aaauagaagugcaaccuaa

SEQ ID NO: 240575 - RNA, 19 nt, Homo sapiens
  misc_RNA (1)...(19): siRNA sense strand
gaagaaacuuggcaucaac

SEQ ID NO: 240576 - RNA, 19 nt, Homo sapiens
  misc_RNA (1)...(19): siRNA sense strand
ggaccaacuugucuuccua

SEQ ID NO: 240577 - RNA, 19 nt, Homo sapiens
  misc_RNA (1)...(19): siRNA sense strand
gaaguuccuccauaucaua

SEQ ID NO: 240578 - RNA, 19 nt, Homo sapiens
  misc_RNA (1)...(19): siRNA sense strand
gacagcagaugaucgauau

SEQ ID NO: 240579 - RNA, 19 nt, Homo sapiens
  misc_RNA (1)...(19): siRNA sense strand
gauaauaauugccaguaca

SEQ ID NO: 240580 - RNA, 19 nt, Homo sapiens
  misc_RNA (1)...(19): siRNA sense strand
cauuaaaccugaaccagaa

SEQ ID NO: 240581 - RNA, 19 nt, Homo sapiens
  misc_RNA (1)...(19): siRNA sense strand
gcaccuucauccuuaauau

SEQ ID NO: 240582 - RNA, 19 nt, Homo sapiens
  misc_RNA (1)...(19): siRNA sense strand
aaauggaggucaugaaaug

SEQ ID NO: 240583 - RNA, 19 nt, Homo sapiens
  misc_RNA (1)...(19): siRNA sense strand
ucaagaacuuccucauauu

SEQ ID NO: 240584 - RNA, 19 nt, Homo sapiens
  misc_RNA (1)...(19): siRNA sense strand
uuacaucuaucucuccuaa

SEQ ID NO: 240585 - RNA, 19 nt, Homo sapiens
  misc_RNA (1)...(19): siRNA sense strand
guaaauggaggucaugaaa

SEQ ID NO: 240586 - RNA, 19 nt, Homo sapiens
  misc_RNA (1)...(19): siRNA sense strand
aaacugauauuggcagaaa

SEQ ID NO: 240587 - RNA, 19 nt, Homo sapiens
  misc_RNA (1)...(19): siRNA sense strand
gaaaggccuucuagagauc

SEQ ID NO: 240588 - RNA, 19 nt, Homo sapiens
  misc_RNA (1)...(19): siRNA sense strand
ccaccuccaucuacuuuaa

SEQ ID NO: 240589 - RNA, 19 nt, Homo sapiens
  misc_RNA (1)...(19): siRNA sense strand
gcucaagaacuuccucaua

SEQ ID NO: 240590 - RNA, 19 nt, Homo sapiens
  misc_RNA (1)...(19): siRNA sense strand
ggacagcagaugaucgaua

SEQ ID NO: 240591 - RNA, 19 nt, Homo sapiens
  misc_RNA (1)...(19): siRNA sense strand
gaaggaacuugugagauuc

SEQ ID NO: 240592 - RNA, 19 nt, Homo sapiens
  misc_RNA (1)...(19): siRNA sense strand
aaacuuggcaucaacagua

SEQ ID NO: 240593 - RNA, 19 nt, Homo sapiens
  misc_RNA (1)...(19): siRNA sense strand
gggcaacugugagcauuaa

SEQ ID NO: 240594 - RNA, 19 nt, Homo sapiens
  misc_RNA (1)...(19): siRNA sense strand
aagaugaccuacagauaaa

SEQ ID NO: 240595 - RNA, 19 nt, Homo sapiens
  misc_RNA (1)...(19): siRNA sense strand
guaaagaacagcauaugau

SEQ ID NO: 240596 - RNA, 19 nt, Homo sapiens
  misc_RNA (1)...(19): siRNA sense strand
agaucaagcugccauacua

SEQ ID NO: 240597 - RNA, 19 nt, Homo sapiens
  misc_RNA (1)...(19): siRNA sense strand
gcagaaagaauacuagagu

SEQ ID NO: 240598 - RNA, 19 nt, Homo sapiens
  misc_RNA (1)...(19): siRNA sense strand
ccacuuugcuuaccacauc

SEQ ID NO: 240599 - RNA, 19 nt, Homo sapiens
  misc_RNA (1)...(19): siRNA sense strand
ggagguagaagggaagaua

SEQ ID NO: 240600 - RNA, 19 nt, Homo sapiens
  misc_RNA (1)...(19): siRNA sense strand
gaaguacaguaucaacagu

SEQ ID NO: 240601 - RNA, 19 nt, Homo sapiens
  misc_RNA (1)...(19): siRNA sense strand
aauaauaugucagccagua

SEQ ID NO: 240602 - RNA, 19 nt, Homo sapiens
  misc_RNA (1)...(19): siRNA sense strand
ggacuuggacacucauuau

SEQ ID NO: 240603 - RNA, 19 nt, Homo sapiens
  misc_RNA (1)...(19): siRNA sense strand
gaagcaagaacacagagaa

SEQ ID NO: 240604 - RNA, 19 nt, Homo sapiens
  misc_RNA (1)...(19): siRNA sense strand
cucaagaacuuccucauau

SEQ ID NO: 240605 - RNA, 19 nt, Homo sapiens
  misc_RNA (1)...(19): siRNA sense strand
gaacacagagaagagauug

SEQ ID NO: 240606 - RNA, 19 nt, Homo sapiens
  misc_RNA (1)...(19): siRNA sense strand
caagaacuuccucauauug

SEQ ID NO: 240607 - RNA, 19 nt, Homo sapiens
  misc_RNA (1)...(19): siRNA sense strand
gaagcugcagcccgauuua

SEQ ID NO: 240608 - RNA, 19 nt, Homo sapiens
  misc_RNA (1)...(19): siRNA sense strand
cuuaauaugucacaguuug

SEQ ID NO: 240609 - RNA, 19 nt, Homo sapiens
  misc_RNA (1)...(19): siRNA sense strand
uaccgggagucuucucuua

SEQ ID NO: 240610 - RNA, 19 nt, Homo sapiens
  misc_RNA (1)...(19): siRNA sense strand
gcaaacuaauguuguguac

SEQ ID NO: 240611 - RNA, 19 nt, Homo sapiens
  misc_RNA (1)...(19): siRNA sense strand
uaugauuccuucuccaauu

SEQ ID NO: 240612 - RNA, 19 nt, Homo sapiens
  misc_RNA (1)...(19): siRNA sense strand
guacaaaaguucuggaaau

SEQ ID NO: 240613 - RNA, 19 nt, Homo sapiens
  misc_RNA (1)...(19): siRNA sense strand
ccacuagacuggccuuuac

SEQ ID NO: 240614 - RNA, 19 nt, Homo sapiens
  misc_RNA (1)...(19): siRNA sense strand
ucacucaccuguuccuuca

SEQ ID NO: 240615 - RNA, 19 nt, Homo sapiens
  misc_RNA (1)...(19): siRNA sense strand
ucaguuccuucacccuuua

SEQ ID NO: 240616 - RNA, 19 nt, Homo sapiens
  misc_RNA (1)...(19): siRNA sense strand
gcucaaugcuucuguccau

SEQ ID NO: 240617 - RNA, 19 nt, Homo sapiens
  misc_RNA (1)...(19): siRNA sense strand
gggcucacauuguccuuga

SEQ ID NO: 240618 - RNA, 19 nt, Homo sapiens
  misc_RNA (1)...(19): siRNA sense strand
ccaacuugucuuccuauua

SEQ ID NO: 240619 - RNA, 19 nt, Homo sapiens
  misc_RNA (1)...(19): siRNA sense strand
ugaagaugaccuacagaua

SEQ ID NO: 240620 - RNA, 19 nt, Homo sapiens
  misc_RNA (1)...(19): siRNA sense strand
ugucuucaguuccaucuuu

SEQ ID NO: 240621 - RNA, 19 nt, Homo sapiens
  misc_RNA (1)...(19): siRNA sense strand
gcauccauuuacaucuuua

SEQ ID NO: 240622 - RNA, 19 nt, Homo sapiens
  misc_RNA (1)...(19): siRNA sense strand
ccagcggucugcucaagaa

SEQ ID NO: 240623 - RNA, 19 nt, Homo sapiens
  misc_RNA (1)...(19): siRNA sense strand
gcaagccaagagauaauaa

SEQ ID NO: 240624 - RNA, 19 nt, Homo sapiens
  misc_RNA (1)...(19): siRNA sense strand
uuuacgaccucaugcauuu

SEQ ID NO: 240625 - RNA, 19 nt, Homo sapiens
  misc_RNA (1)...(19): siRNA sense strand
agaagaaacuuggcaucaa

SEQ ID NO: 240626 - RNA, 19 nt, Homo sapiens
  misc_RNA (1)...(19): siRNA sense strand
gaacagcauaugauuccuu

SEQ ID NO: 240627 - RNA, 19 nt, Homo sapiens
  misc_RNA (1)...(19): siRNA sense strand
gagauaauaauugccagua

SEQ ID NO: 240628 - RNA, 19 nt, Homo sapiens
  misc_RNA (1)...(19): siRNA sense strand
gccaagagauaauaauugc

SEQ ID NO: 240629 - RNA, 19 nt, Homo sapiens
  misc_RNA (1)...(19): siRNA sense strand
ggaagugugacagaagaua

SEQ ID NO: 240630 - RNA, 19 nt, Homo sapiens
  misc_RNA (1)...(19): siRNA sense strand
gagaagaaacuuggcauca

SEQ ID NO: 240631 - RNA, 19 nt, Homo sapiens
  misc_RNA (1)...(19): siRNA sense strand
gugcauccauuuacaucuu

SEQ ID NO: 240632 - RNA, 19 nt, Homo sapiens
  misc_RNA (1)...(19): siRNA sense strand
cagcagaugaucgauauuu

SEQ ID NO: 240633 - RNA, 19 nt, Homo sapiens
  misc_RNA (1)...(19): siRNA sense strand
cuuaccacaucauggauua

SEQ ID NO: 240634 - RNA, 19 nt, Homo sapiens
  misc_RNA (1)...(19): siRNA sense strand
acagagaagagauugauuu

SEQ ID NO: 240635 - RNA, 19 nt, Homo sapiens
  misc_RNA (1)...(19): siRNA sense strand
gggaagauaaucagggaaa

SEQ ID NO: 240636 - RNA, 19 nt, Homo sapiens
  misc_RNA (1)...(19): siRNA sense strand
gcccaaguauucaaauuac

SEQ ID NO: 240637 - RNA, 19 nt, Homo sapiens
  misc_RNA (1)...(19): siRNA sense strand
cagaagaucgagagccuaa

SEQ ID NO: 240638 - RNA, 19 nt, Homo sapiens
  misc_RNA (1)...(19): siRNA sense strand
gggauaucauuguucaaau

SEQ ID NO: 240639 - RNA, 19 nt, Homo sapiens
  misc_RNA (1)...(19): siRNA sense strand
augcaacucuuucugguuu

SEQ ID NO: 240640 - RNA, 19 nt, Homo sapiens
  misc_RNA (1)...(19): siRNA sense strand
gaugagaguguuaguaaag

SEQ ID NO: 240641 - RNA, 19 nt, Homo sapiens
  misc_RNA (1)...(19): siRNA sense strand
cgacuuguguuucguguac

SEQ ID NO: 240642 - RNA, 19 nt, Homo sapiens
  misc_RNA (1)...(19): siRNA sense strand
aaacuccgcaauucagaua

SEQ ID NO: 240643 - RNA, 19 nt, Homo sapiens
  misc_RNA (1)...(19): siRNA sense strand
aauuagagcuguguucaga

SEQ ID NO: 240644 - RNA, 19 nt, Homo sapiens
  misc_RNA (1)...(19): siRNA sense strand
ucaaauacaggacaaagau

SEQ ID NO: 240645 - RNA, 19 nt, Homo sapiens
  misc_RNA (1)...(19): siRNA sense strand
uggacaaugugaacugaaa

SEQ ID NO: 240646 - RNA, 19 nt, Homo sapiens
  misc_RNA (1)...(19): siRNA sense strand
cgacuucaaacucgucuuu

SEQ ID NO: 240647 - RNA, 19 nt, Homo sapiens
  misc_RNA (1)...(19): siRNA sense strand
uccaguggcugaccagauu

SEQ ID NO: 240648 - RNA, 19 nt, Homo sapiens
  misc_RNA (1)...(19): siRNA sense strand
caaccacugucauccauac

SEQ ID NO: 240649 - RNA, 19 nt, Homo sapiens
  misc_RNA (1)...(19): siRNA sense strand
caucccaucugccacaguu

SEQ ID NO: 240650 - RNA, 19 nt, Homo sapiens
  misc_RNA (1)...(19): siRNA sense strand
agcagaugaucgauauuua

SEQ ID NO: 240651 - RNA, 19 nt, Homo sapiens
  misc_RNA (1)...(19): siRNA sense strand
ugaagcuccugggcuauaa

SEQ ID NO: 240652 - RNA, 19 nt, Homo sapiens
  misc_RNA (1)...(19): siRNA sense strand
gagguagaagggaagauaa

SEQ ID NO: 240653 - RNA, 19 nt, Homo sapiens
  misc_RNA (1)...(19): siRNA sense strand
gagccuaacuuugcaacca

SEQ ID NO: 240654 - RNA, 19 nt, Homo sapiens
  misc_RNA (1)...(19): siRNA sense strand
ugagaguguuaguaaagaa

SEQ ID NO: 240655 - RNA, 19 nt, Homo sapiens
  misc_RNA (1)...(19): siRNA sense strand
gaaguuugauuugcuccau

SEQ ID NO: 240656 - RNA, 19 nt, Homo sapiens
  misc_RNA (1)...(19): siRNA sense strand
gcaagaacacagagaagag

SEQ ID NO: 240657 - RNA, 19 nt, Homo sapiens
  misc_RNA (1)...(19): siRNA sense strand
gaucgagagccuaacuuug

SEQ ID NO: 240658 - RNA, 19 nt, Homo sapiens
  misc_RNA (1)...(19): siRNA sense strand
ucucaucccuuggcuaguu

SEQ ID NO: 240659 - RNA, 19 nt, Homo sapiens
  misc_RNA (1)...(19): siRNA sense strand
gauucaggguguucacaug

SEQ ID NO: 240660 - RNA, 19 nt, Homo sapiens
  misc_RNA (1)...(19): siRNA sense strand
caacuugucuuccuauuaa

SEQ ID NO: 240661 - RNA, 19 nt, Homo sapiens
  misc_RNA (1)...(19): siRNA sense strand
gaagaugaccuacagauaa

SEQ ID NO: 240662 - RNA, 19 nt, Homo sapiens
  misc_RNA (1)...(19): siRNA sense strand
gaagauacguggcucaaug

SEQ ID NO: 240663 - RNA, 19 nt, Homo sapiens
  misc_RNA (1)...(19): siRNA sense strand
ggacagagaaguuugauuu

SEQ ID NO: 240664 - RNA, 19 nt, Homo sapiens
  misc_RNA (1)...(19): siRNA sense strand
ggacaucucuuagcccaua

SEQ ID NO: 240665 - RNA, 19 nt, Homo sapiens
  misc_RNA (1)...(19): siRNA sense strand
ugaaggaacuugugagauu

SEQ ID NO: 240666 - RNA, 19 nt, Homo sapiens
  misc_RNA (1)...(19): siRNA sense strand
ggaaaggccuucuagagau

SEQ ID NO: 240667 - RNA, 19 nt, Homo sapiens
  misc_RNA (1)...(19): siRNA sense strand
gagaagagauugauuuguc

SEQ ID NO: 240668 - RNA, 19 nt, Homo sapiens
  misc_RNA (1)...(19): siRNA sense strand
ggacagcacucaacucaag

SEQ ID NO: 240669 - RNA, 19 nt, Homo sapiens
  misc_RNA (1)...(19): siRNA sense strand
gccaauaaaucuacaaaug

SEQ ID NO: 240670 - RNA, 19 nt, Homo sapiens
  misc_RNA (1)...(19): siRNA sense strand
gcacucaacucaagcacaa

SEQ ID NO: 240671 - RNA, 19 nt, Homo sapiens
  misc_RNA (1)...(19): siRNA sense strand
gagaugagaguguuaguaa

SEQ ID NO: 240672 - RNA, 19 nt, Homo sapiens
  misc_RNA (1)...(19): siRNA sense strand
agaauuagaugcacaugaa

SEQ ID NO: 240673 - RNA, 19 nt, Homo sapiens
  misc_RNA (1)...(19): siRNA sense strand
gaaucgcuuucacauauuu

SEQ ID NO: 240674 - RNA, 19 nt, Homo sapiens
  misc_RNA (1)...(19): siRNA sense strand
aaauagaagugcaaccuaa

SEQ ID NO: 240675 - RNA, 19 nt, Homo sapiens
  misc_RNA (1)...(19): siRNA sense strand
gaagaaacuuggcaucaac

SEQ ID NO: 240676 - RNA, 19 nt, Homo sapiens
  misc_RNA (1)...(19): siRNA sense strand
ggaccaacuugucuuccua

SEQ ID NO: 240677 - RNA, 19 nt, Homo sapiens
  misc_RNA (1)...(19): siRNA sense strand
gaaguuccuccauaucaua

SEQ ID NO: 240678 - RNA, 19 nt, Homo sapiens
  misc_RNA (1)...(19): siRNA sense strand
gacagcagaugaucgauau

SEQ ID NO: 240679 - RNA, 19 nt, Homo sapiens
  misc_RNA (1)...(19): siRNA sense strand
gauaauaauugccaguaca

SEQ ID NO: 240680 - RNA, 19 nt, Homo sapiens
  misc_RNA (1)...(19): siRNA sense strand
cauuaaaccugaaccagaa

SEQ ID NO: 240681 - RNA, 19 nt, Homo sapiens
  misc_RNA (1)...(19): siRNA sense strand
gcaccuucauccuuaauau

SEQ ID NO: 240682 - RNA, 19 nt, Homo sapiens
  misc_RNA (1)...(19): siRNA sense strand
aaauggaggucaugaaaug

SEQ ID NO: 240683 - RNA, 19 nt, Homo sapiens
  misc_RNA (1)...(19): siRNA sense strand
ucaagaacuuccucauauu

SEQ ID NO: 240684 - RNA, 19 nt, Homo sapiens
  misc_RNA (1)...(19): siRNA sense strand
uuacaucuaucucuccuaa

SEQ ID NO: 240685 - RNA, 19 nt, Homo sapiens
  misc_RNA (1)...(19): siRNA sense strand
guaaauggaggucaugaaa

SEQ ID NO: 240686 - RNA, 19 nt, Homo sapiens
  misc_RNA (1)...(19): siRNA sense strand
aaacugauauuggcagaaa

SEQ ID NO: 240687 - RNA, 19 nt, Homo sapiens
  misc_RNA (1)...(19): siRNA sense strand
gaaaggccuucuagagauc

SEQ ID NO: 240688 - RNA, 19 nt, Homo sapiens
  misc_RNA (1)...(19): siRNA sense strand
ccaccuccaucuacuuuaa

SEQ ID NO: 240689 - RNA, 19 nt, Homo sapiens
  misc_RNA (1)...(19): siRNA sense strand
gcucaagaacuuccucaua

SEQ ID NO: 240690 - RNA, 19 nt, Homo sapiens
  misc_RNA (1)...(19): siRNA sense strand
ggacagcagaugaucgaua

SEQ ID NO: 240691 - RNA, 19 nt, Homo sapiens
  misc_RNA (1)...(19): siRNA sense strand
gaaggaacuugugagauuc

SEQ ID NO: 240692 - RNA, 19 nt, Homo sapiens
  misc_RNA (1)...(19): siRNA sense strand
aaacuuggcaucaacagua

SEQ ID NO: 240693 - RNA, 19 nt, Homo sapiens
  misc_RNA (1)...(19): siRNA sense strand
gggcaacugugagcauuaa

SEQ ID NO: 240694 - RNA, 19 nt, Homo sapiens
  misc_RNA (1)...(19): siRNA sense strand
aagaugaccuacagauaaa

SEQ ID NO: 240695 - RNA, 19 nt, Homo sapiens
  misc_RNA (1)...(19): siRNA sense strand
guaaagaacagcauaugau

SEQ ID NO: 240696 - RNA, 19 nt, Homo sapiens
  misc_RNA (1)...(19): siRNA sense strand
agaucaagcugccauacua

SEQ ID NO: 240697 - RNA, 19 nt, Homo sapiens
  misc_RNA (1)...(19): siRNA sense strand
gcagaaagaauacuagagu

SEQ ID NO: 240698 - RNA, 19 nt, Homo sapiens
  misc_RNA (1)...(19): siRNA sense strand
ccacuuugcuuaccacauc

SEQ ID NO: 240699 - RNA, 19 nt, Homo sapiens
  misc_RNA (1)...(19): siRNA sense strand
ggagguagaagggaagaua

SEQ ID NO: 240700 - RNA, 19 nt, Homo sapiens
  misc_RNA (1)...(19): siRNA sense strand
gaaguacaguaucaacagu

SEQ ID NO: 240701 - RNA, 19 nt, Homo sapiens
  misc_RNA (1)...(19): siRNA sense strand
aauaauaugucagccagua

SEQ ID NO: 240702 - RNA, 19 nt, Homo sapiens
  misc_RNA (1)...(19): siRNA sense strand
ggacuuggacacucauuau

SEQ ID NO: 240703 - RNA, 19 nt, Homo sapiens
  misc_RNA (1)...(19): siRNA sense strand
gaagcaagaacacagagaa

SEQ ID NO: 240704 - RNA, 19 nt, Homo sapiens
  misc_RNA (1)...(19): siRNA sense strand
cucaagaacuuccucauau

SEQ ID NO: 240705 - RNA, 19 nt, Homo sapiens
  misc_RNA (1)...(19): siRNA sense strand
gaacacagagaagagauug

SEQ ID NO: 240706 - RNA, 19 nt, Homo sapiens
  misc_RNA (1)...(19): siRNA sense strand
caagaacuuccucauauug

SEQ ID NO: 240707 - RNA, 19 nt, Homo sapiens
  misc_RNA (1)...(19): siRNA sense strand
gaagcugcagcccgauuua

SEQ ID NO: 240708 - RNA, 19 nt, Homo sapiens
  misc_RNA (1)...(19): siRNA sense strand
cuuaauaugucacaguuug

SEQ ID NO: 240709 - RNA, 19 nt, Homo sapiens
  misc_RNA (1)...(19): siRNA sense strand
uaccgggagucuucucuua

SEQ ID NO: 240710 - RNA, 19 nt, Homo sapiens
  misc_RNA (1)...(19): siRNA sense strand
gcaaacuaauguuguguac

SEQ ID NO: 240711 - RNA, 19 nt, Homo sapiens
  misc_RNA (1)...(19): siRNA sense strand
uaugauuccuucuccaauu

SEQ ID NO: 240712 - RNA, 19 nt, Homo sapiens
  misc_RNA (1)...(19): siRNA sense strand
guacaaaaguucuggaaau

SEQ ID NO: 240713 - RNA, 19 nt, Homo sapiens
  misc_RNA (1)...(19): siRNA sense strand
ccacuagacuggccuuuac

SEQ ID NO: 240714 - RNA, 19 nt, Homo sapiens
  misc_RNA (1)...(19): siRNA sense strand
ucacucaccuguuccuuca

SEQ ID NO: 240715 - RNA, 19 nt, Homo sapiens
  misc_RNA (1)...(19): siRNA sense strand
ucaguuccuucacccuuua

SEQ ID NO: 240716 - RNA, 19 nt, Homo sapiens
  misc_RNA (1)...(19): siRNA sense strand
gcucaaugcuucuguccau

SEQ ID NO: 240717 - RNA, 19 nt, Homo sapiens
  misc_RNA (1)...(19): siRNA sense strand
gggcucacauuguccuuga

SEQ ID NO: 240718 - RNA, 19 nt, Homo sapiens
  misc_RNA (1)...(19): siRNA sense strand
ccaacuugucuuccuauua

SEQ ID NO: 240719 - RNA, 19 nt, Homo sapiens
  misc_RNA (1)...(19): siRNA sense strand
ugaagaugaccuacagaua

SEQ ID NO: 240720 - RNA, 19 nt, Homo sapiens
  misc_RNA (1)...(19): siRNA sense strand
ugucuucaguuccaucuuu

SEQ ID NO: 240721 - RNA, 19 nt, Homo sapiens
  misc_RNA (1)...(19): siRNA sense strand
gcauccauuuacaucuuua

SEQ ID NO: 240722 - RNA, 19 nt, Homo sapiens
  misc_RNA (1)...(19): siRNA sense strand
ccagcggucugcucaagaa

SEQ ID NO: 240723 - RNA, 19 nt, Homo sapiens
  misc_RNA (1)...(19): siRNA sense strand
gcaagccaagagauaauaa

SEQ ID NO: 240724 - RNA, 19 nt, Homo sapiens
  misc_RNA (1)...(19): siRNA sense strand
uuuacgaccucaugcauuu

SEQ ID NO: 240725 - RNA, 19 nt, Homo sapiens
  misc_RNA (1)...(19): siRNA sense strand
agaagaaacuuggcaucaa

SEQ ID NO: 240726 - RNA, 19 nt, Homo sapiens
  misc_RNA (1)...(19): siRNA sense strand
gaacagcauaugauuccuu

SEQ ID NO: 240727 - RNA, 19 nt, Homo sapiens
  misc_RNA (1)...(19): siRNA sense strand
gagauaauaauugccagua

SEQ ID NO: 240728 - RNA, 19 nt, Homo sapiens
  misc_RNA (1)...(19): siRNA sense strand
gccaagagauaauaauugc

SEQ ID NO: 240729 - RNA, 19 nt, Homo sapiens
  misc_RNA (1)...(19): siRNA sense strand
ggaagugugacagaagaua

SEQ ID NO: 240730 - RNA, 19 nt, Homo sapiens
  misc_RNA (1)...(19): siRNA sense strand
gagaagaaacuuggcauca

SEQ ID NO: 240731 - RNA, 19 nt, Homo sapiens
  misc_RNA (1)...(19): siRNA sense strand
gugcauccauuuacaucuu

SEQ ID NO: 240732 - RNA, 19 nt, Homo sapiens
  misc_RNA (1)...(19): siRNA sense strand
cagcagaugaucgauauuu

SEQ ID NO: 240733 - RNA, 19 nt, Homo sapiens
  misc_RNA (1)...(19): siRNA sense strand
cuuaccacaucauggauua

SEQ ID NO: 240734 - RNA, 19 nt, Homo sapiens
  misc_RNA (1)...(19): siRNA sense strand
acagagaagagauugauuu

SEQ ID NO: 240735 - RNA, 19 nt, Homo sapiens
  misc_RNA (1)...(19): siRNA sense strand
gggaagauaaucagggaaa

SEQ ID NO: 240736 - RNA, 19 nt, Homo sapiens
  misc_RNA (1)...(19): siRNA sense strand
gcccaaguauucaaauuac

SEQ ID NO: 240737 - RNA, 19 nt, Homo sapiens
  misc_RNA (1)...(19): siRNA sense strand
cagaagaucgagagccuaa

SEQ ID NO: 240738 - RNA, 19 nt, Homo sapiens
  misc_RNA (1)...(19): siRNA sense strand
gggauaucauuguucaaau

SEQ ID NO: 240739 - RNA, 19 nt, Homo sapiens
  misc_RNA (1)...(19): siRNA sense strand
augcaacucuuucugguuu

SEQ ID NO: 240740 - RNA, 19 nt, Homo sapiens
  misc_RNA (1)...(19): siRNA sense strand
gaugagaguguuaguaaag

SEQ ID NO: 240741 - RNA, 19 nt, Homo sapiens
  misc_RNA (1)...(19): siRNA sense strand
cgacuuguguuucguguac

SEQ ID NO: 240742 - RNA, 19 nt, Homo sapiens
  misc_RNA (1)...(19): siRNA sense strand
aaacuccgcaauucagaua

SEQ ID NO: 240743 - RNA, 19 nt, Homo sapiens
  misc_RNA (1)...(19): siRNA sense strand
aauuagagcuguguucaga

SEQ ID NO: 240744 - RNA, 19 nt, Homo sapiens
  misc_RNA (1)...(19): siRNA sense strand
ucaaauacaggacaaagau

SEQ ID NO: 240745 - RNA, 19 nt, Homo sapiens
  misc_RNA (1)...(19): siRNA sense strand
uggacaaugugaacugaaa

SEQ ID NO: 240746 - RNA, 19 nt, Homo sapiens
  misc_RNA (1)...(19): siRNA sense strand
cgacuucaaacucgucuuu

SEQ ID NO: 240747 - RNA, 19 nt, Homo sapiens
  misc_RNA (1)...(19): siRNA sense strand
uccaguggcugaccagauu

SEQ ID NO: 240748 - RNA, 19 nt, Homo sapiens
  misc_RNA (1)...(19): siRNA sense strand
caaccacugucauccauac

SEQ ID NO: 240749 - RNA, 19 nt, Homo sapiens
  misc_RNA (1)...(19): siRNA sense strand
caucccaucugccacaguu

SEQ ID NO: 240750 - RNA, 19 nt, Homo sapiens
  misc_RNA (1)...(19): siRNA sense strand
agcagaugaucgauauuua

SEQ ID NO: 240751 - RNA, 19 nt, Homo sapiens
  misc_RNA (1)...(19): siRNA sense strand
ugaagcuccugggcuauaa

SEQ ID NO: 240752 - RNA, 19 nt, Homo sapiens
  misc_RNA (1)...(19): siRNA sense strand
gagguagaagggaagauaa

SEQ ID NO: 240753 - RNA, 19 nt, Homo sapiens
  misc_RNA (1)...(19): siRNA sense strand
gagccuaacuuugcaacca

SEQ ID NO: 240754 - RNA, 19 nt, Homo sapiens
  misc_RNA (1)...(19): siRNA sense strand
ugagaguguuaguaaagaa

SEQ ID NO: 240755 - RNA, 19 nt, Homo sapiens
  misc_RNA (1)...(19): siRNA sense strand
gaaguuugauuugcuccau

SEQ ID NO: 240756 - RNA, 19 nt, Homo sapiens
  misc_RNA (1)...(19): siRNA sense strand
gcaagaacacagagaagag

SEQ ID NO: 240757 - RNA, 19 nt, Homo sapiens
  misc_RNA (1)...(19): siRNA sense strand
gaucgagagccuaacuuug

SEQ ID NO: 240758 - RNA, 19 nt, Homo sapiens
  misc_RNA (1)...(19): siRNA sense strand
ucucaucccuuggcuaguu

SEQ ID NO: 240759 - RNA, 19 nt, Homo sapiens
  misc_RNA (1)...(19): siRNA sense strand
gauucaggguguucacaug

SEQ ID NO: 240760 - RNA, 19 nt, Homo sapiens
  misc_RNA (1)...(19): siRNA sense strand
caacuugucuuccuauuaa

SEQ ID NO: 240761 - RNA, 19 nt, Homo sapiens
  misc_RNA (1)...(19): siRNA sense strand
gaagaugaccuacagauaa

SEQ ID NO: 240762 - RNA, 19 nt, Homo sapiens
  misc_RNA (1)...(19): siRNA sense strand
gaagauacguggcucaaug

SEQ ID NO: 240763 - RNA, 19 nt, Homo sapiens
  misc_RNA (1)...(19): siRNA sense strand
ggacagagaaguuugauuu

SEQ ID NO: 240764 - RNA, 19 nt, Homo sapiens
  misc_RNA (1)...(19): siRNA sense strand
ggacaucucuuagcccaua

SEQ ID NO: 240765 - RNA, 19 nt, Homo sapiens
  misc_RNA (1)...(19): siRNA sense strand
ugaaggaacuugugagauu

SEQ ID NO: 240766 - RNA, 19 nt, Homo sapiens
  misc_RNA (1)...(19): siRNA sense strand
ggaaaggccuucuagagau

SEQ ID NO: 240767 - RNA, 19 nt, Homo sapiens
  misc_RNA (1)...(19): siRNA sense strand
gagaagagauugauuuguc

SEQ ID NO: 240768 - RNA, 19 nt, Homo sapiens
  misc_RNA (1)...(19): siRNA sense strand
ggacagcacucaacucaag

SEQ ID NO: 240769 - RNA, 19 nt, Homo sapiens
  misc_RNA (1)...(19): siRNA sense strand
gccaauaaaucuacaaaug

SEQ ID NO: 240770 - RNA, 19 nt, Homo sapiens
  misc_RNA (1)...(19): siRNA sense strand
gcacucaacucaagcacaa

SEQ ID NO: 240771 - RNA, 19 nt, Homo sapiens
  misc_RNA (1)...(19): siRNA sense strand
gagaugagaguguuaguaa

SEQ ID NO: 240772 - RNA, 19 nt, Homo sapiens
  misc_RNA (1)...(19): siRNA sense strand
agaauuagaugcacaugaa

SEQ ID NO: 240773 - RNA, 19 nt, Homo sapiens
  misc_RNA (1)...(19): siRNA sense strand
gaaucgcuuucacauauuu

SEQ ID NO: 240774 - RNA, 19 nt, Homo sapiens
  misc_RNA (1)...(19): siRNA sense strand
aaauagaagugcaaccuaa

SEQ ID NO: 240775 - RNA, 19 nt, Homo sapiens
  misc_RNA (1)...(19): siRNA sense strand
gaagaaacuuggcaucaac

SEQ ID NO: 240776 - RNA, 19 nt, Homo sapiens
  misc_RNA (1)...(19): siRNA sense strand
ggaccaacuugucuuccua

SEQ ID NO: 240777 - RNA, 19 nt, Homo sapiens
  misc_RNA (1)...(19): siRNA sense strand
gaaguuccuccauaucaua

SEQ ID NO: 240778 - RNA, 19 nt, Homo sapiens
  misc_RNA (1)...(19): siRNA sense strand
gacagcagaugaucgauau

SEQ ID NO: 240779 - RNA, 19 nt, Homo sapiens
  misc_RNA (1)...(19): siRNA sense strand
gauaauaauugccaguaca

SEQ ID NO: 240780 - RNA, 19 nt, Homo sapiens
  misc_RNA (1)...(19): siRNA sense strand
cauuaaaccugaaccagaa

SEQ ID NO: 240781 - RNA, 19 nt, Homo sapiens
  misc_RNA (1)...(19): siRNA sense strand
gcaccuucauccuuaauau

SEQ ID NO: 240782 - RNA, 19 nt, Homo sapiens
  misc_RNA (1)...(19): siRNA sense strand
aaauggaggucaugaaaug

SEQ ID NO: 240783 - RNA, 19 nt, Homo sapiens
  misc_RNA (1)...(19): siRNA sense strand
ucaagaacuuccucauauu

SEQ ID NO: 240784 - RNA, 19 nt, Homo sapiens
  misc_RNA (1)...(19): siRNA sense strand
uuacaucuaucucuccuaa

SEQ ID NO: 240785 - RNA, 19 nt, Homo sapiens
  misc_RNA (1)...(19): siRNA sense strand
guaaauggaggucaugaaa

SEQ ID NO: 240786 - RNA, 19 nt, Homo sapiens
  misc_RNA (1)...(19): siRNA sense strand
aaacugauauuggcagaaa

SEQ ID NO: 240787 - RNA, 19 nt, Homo sapiens
  misc_RNA (1)...(19): siRNA sense strand
gaaaggccuucuagagauc

SEQ ID NO: 240788 - RNA, 19 nt, Homo sapiens
  misc_RNA (1)...(19): siRNA sense strand
ccaccuccaucuacuuuaa

SEQ ID NO: 240789 - RNA, 19 nt, Homo sapiens
  misc_RNA (1)...(19): siRNA sense strand
gcucaagaacuuccucaua

SEQ ID NO: 240790 - RNA, 19 nt, Homo sapiens
  misc_RNA (1)...(19): siRNA sense strand
ggacagcagaugaucgaua

SEQ ID NO: 240791 - RNA, 19 nt, Homo sapiens
  misc_RNA (1)...(19): siRNA sense strand
gaaggaacuugugagauuc

SEQ ID NO: 240792 - RNA, 19 nt, Homo sapiens
  misc_RNA (1)...(19): siRNA sense strand
aaacuuggcaucaacagua

SEQ ID NO: 240793 - RNA, 19 nt, Homo sapiens
  misc_RNA (1)...(19): siRNA sense strand
gggcaacugugagcauuaa

SEQ ID NO: 240794 - RNA, 19 nt, Homo sapiens
  misc_RNA (1)...(19): siRNA sense strand
aagaugaccuacagauaaa

SEQ ID NO: 240795 - RNA, 19 nt, Homo sapiens
  misc_RNA (1)...(19): siRNA sense strand
guaaagaacagcauaugau

SEQ ID NO: 240796 - RNA, 19 nt, Homo sapiens
  misc_RNA (1)...(19): siRNA sense strand
agaucaagcugccauacua

SEQ ID NO: 240797 - RNA, 19 nt, Homo sapiens
  misc_RNA (1)...(19): siRNA sense strand
gcagaaagaauacuagagu

SEQ ID NO: 240798 - RNA, 19 nt, Homo sapiens
  misc_RNA (1)...(19): siRNA sense strand
ccacuuugcuuaccacauc

SEQ ID NO: 240799 - RNA, 19 nt, Homo sapiens
  misc_RNA (1)...(19): siRNA sense strand
ggagguagaagggaagaua

SEQ ID NO: 240800 - RNA, 19 nt, Homo sapiens
  misc_RNA (1)...(19): siRNA sense strand
gaaguacaguaucaacagu

SEQ ID NO: 240801 - RNA, 19 nt, Homo sapiens
  misc_RNA (1)...(19): siRNA sense strand
aauaauaugucagccagua

SEQ ID NO: 240802 - RNA, 19 nt, Homo sapiens
  misc_RNA (1)...(19): siRNA sense strand
ggacuuggacacucauuau

SEQ ID NO: 240803 - RNA, 19 nt, Homo sapiens
  misc_RNA (1)...(19): siRNA sense strand
gaagcaagaacacagagaa

SEQ ID NO: 240804 - RNA, 19 nt, Homo sapiens
  misc_RNA (1)...(19): siRNA sense strand
cucaagaacuuccucauau

SEQ ID NO: 240805 - RNA, 19 nt, Homo sapiens
  misc_RNA (1)...(19): siRNA sense strand
gaacacagagaagagauug

SEQ ID NO: 240806 - RNA, 19 nt, Homo sapiens
  misc_RNA (1)...(19): siRNA sense strand
caagaacuuccucauauug

SEQ ID NO: 240807 - RNA, 19 nt, Homo sapiens
  misc_RNA (1)...(19): siRNA sense strand
gaagcugcagcccgauuua

SEQ ID NO: 240808 - RNA, 19 nt, Homo sapiens
  misc_RNA (1)...(19): siRNA sense strand
cuuaauaugucacaguuug

SEQ ID NO: 240809 - RNA, 19 nt, Homo sapiens
  misc_RNA (1)...(19): siRNA sense strand
uaccgggagucuucucuua

SEQ ID NO: 240810 - RNA, 19 nt, Homo sapiens
  misc_RNA (1)...(19): siRNA sense strand
gcaaacuaauguuguguac

SEQ ID NO: 240811 - RNA, 19 nt, Homo sapiens
  misc_RNA (1)...(19): siRNA sense strand
uaugauuccuucuccaauu

SEQ ID NO: 240812 - RNA, 19 nt, Homo sapiens
  misc_RNA (1)...(19): siRNA sense strand
guacaaaaguucuggaaau

SEQ ID NO: 240813 - RNA, 19 nt, Homo sapiens
  misc_RNA (1)...(19): siRNA sense strand
ccacuagacuggccuuuac

SEQ ID NO: 240814 - RNA, 19 nt, Homo sapiens
  misc_RNA (1)...(19): siRNA sense strand
ucacucaccuguuccuuca

SEQ ID NO: 240815 - RNA, 19 nt, Homo sapiens
  misc_RNA (1)...(19): siRNA sense strand
ucaguuccuucacccuuua

SEQ ID NO: 240816 - RNA, 19 nt, Homo sapiens
  misc_RNA (1)...(19): siRNA sense strand
gcucaaugcuucuguccau

SEQ ID NO: 240817 - RNA, 19 nt, Homo sapiens
  misc_RNA (1)...(19): siRNA sense strand
gggcucacauuguccuuga

SEQ ID NO: 240818 - RNA, 19 nt, Homo sapiens
  misc_RNA (1)...(19): siRNA sense strand
ccaacuugucuuccuauua

SEQ ID NO: 240819 - RNA, 19 nt, Homo sapiens
  misc_RNA (1)...(19): siRNA sense strand
ugaagaugaccuacagaua

SEQ ID NO: 240820 - RNA, 19 nt, Homo sapiens
  misc_RNA (1)...(19): siRNA sense strand
ugucuucaguuccaucuuu

SEQ ID NO: 240821 - RNA, 19 nt, Homo sapiens
  misc_RNA (1)...(19): siRNA sense strand
gcauccauuuacaucuuua

SEQ ID NO: 240822 - RNA, 19 nt, Homo sapiens
  misc_RNA (1)...(19): siRNA sense strand
ccagcggucugcucaagaa

SEQ ID NO: 240823 - RNA, 19 nt, Homo sapiens
  misc_RNA (1)...(19): siRNA sense strand
gcaagccaagagauaauaa

SEQ ID NO: 240824 - RNA, 19 nt, Homo sapiens
  misc_RNA (1)...(19): siRNA sense strand
uuuacgaccucaugcauuu

SEQ ID NO: 240825 - RNA, 19 nt, Homo sapiens
  misc_RNA (1)...(19): siRNA sense strand
agaagaaacuuggcaucaa

SEQ ID NO: 240826 - RNA, 19 nt, Homo sapiens
  misc_RNA (1)...(19): siRNA sense strand
gaacagcauaugauuccuu

SEQ ID NO: 240827 - RNA, 19 nt, Homo sapiens
  misc_RNA (1)...(19): siRNA sense strand
gagauaauaauugccagua

SEQ ID NO: 240828 - RNA, 19 nt, Homo sapiens
  misc_RNA (1)...(19): siRNA sense strand
gccaagagauaauaauugc

SEQ ID NO: 240829 - RNA, 19 nt, Homo sapiens
  misc_RNA (1)...(19): siRNA sense strand
ggaagugugacagaagaua

SEQ ID NO: 240830 - RNA, 19 nt, Homo sapiens
  misc_RNA (1)...(19): siRNA sense strand
gagaagaaacuuggcauca

SEQ ID NO: 240831 - RNA, 19 nt, Homo sapiens
  misc_RNA (1)...(19): siRNA sense strand
gugcauccauuuacaucuu

SEQ ID NO: 240832 - RNA, 19 nt, Homo sapiens
  misc_RNA (1)...(19): siRNA sense strand
cagcagaugaucgauauuu

SEQ ID NO: 240833 - RNA, 19 nt, Homo sapiens
  misc_RNA (1)...(19): siRNA sense strand
cuuaccacaucauggauua

SEQ ID NO: 240834 - RNA, 19 nt, Homo sapiens
  misc_RNA (1)...(19): siRNA sense strand
acagagaagagauugauuu

SEQ ID NO: 240835 - RNA, 19 nt, Homo sapiens
  misc_RNA (1)...(19): siRNA sense strand
gggaagauaaucagggaaa

SEQ ID NO: 240836 - RNA, 19 nt, Homo sapiens
  misc_RNA (1)...(19): siRNA sense strand
gcccaaguauucaaauuac

SEQ ID NO: 240837 - RNA, 19 nt, Homo sapiens
  misc_RNA (1)...(19): siRNA sense strand
cagaagaucgagagccuaa

SEQ ID NO: 240838 - RNA, 19 nt, Homo sapiens
  misc_RNA (1)...(19): siRNA sense strand
gggauaucauuguucaaau

SEQ ID NO: 240839 - RNA, 19 nt, Homo sapiens
  misc_RNA (1)...(19): siRNA sense strand
augcaacucuuucugguuu

SEQ ID NO: 240840 - RNA, 19 nt, Homo sapiens
  misc_RNA (1)...(19): siRNA sense strand
gaugagaguguuaguaaag

SEQ ID NO: 240841 - RNA, 19 nt, Homo sapiens
  misc_RNA (1)...(19): siRNA sense strand
cgacuuguguuucguguac

SEQ ID NO: 240842 - RNA, 19 nt, Homo sapiens
  misc_RNA (1)...(19): siRNA sense strand
aaacuccgcaauucagaua

SEQ ID NO: 240843 - RNA, 19 nt, Homo sapiens
  misc_RNA (1)...(19): siRNA sense strand
aauuagagcuguguucaga

SEQ ID NO: 240844 - RNA, 19 nt, Homo sapiens
  misc_RNA (1)...(19): siRNA sense strand
ucaaauacaggacaaagau

SEQ ID NO: 240845 - RNA, 19 nt, Homo sapiens
  misc_RNA (1)...(19): siRNA sense strand
uggacaaugugaacugaaa

SEQ ID NO: 240846 - RNA, 19 nt, Homo sapiens
  misc_RNA (1)...(19): siRNA sense strand
cgacuucaaacucgucuuu

SEQ ID NO: 240847 - RNA, 19 nt, Homo sapiens
  misc_RNA (1)...(19): siRNA sense strand
uccaguggcugaccagauu

SEQ ID NO: 240848 - RNA, 19 nt, Homo sapiens
  misc_RNA (1)...(19): siRNA sense strand
caaccacugucauccauac

SEQ ID NO: 240849 - RNA, 19 nt, Homo sapiens
  misc_RNA (1)...(19): siRNA sense strand
caucccaucugccacaguu

SEQ ID NO: 240850 - RNA, 19 nt, Homo sapiens
  misc_RNA (1)...(19): siRNA sense strand
agcagaugaucgauauuua

SEQ ID NO: 240851 - RNA, 19 nt, Homo sapiens
  misc_RNA (1)...(19): siRNA sense strand
ugaagcuccugggcuauaa

SEQ ID NO: 240852 - RNA, 19 nt, Homo sapiens
  misc_RNA (1)...(19): siRNA sense strand
gagguagaagggaagauaa

SEQ ID NO: 240853 - RNA, 19 nt, Homo sapiens
  misc_RNA (1)...(19): siRNA sense strand
gagccuaacuuugcaacca

SEQ ID NO: 240854 - RNA, 19 nt, Homo sapiens
  misc_RNA (1)...(19): siRNA sense strand
ugagaguguuaguaaagaa

SEQ ID NO: 240855 - RNA, 19 nt, Homo sapiens
  misc_RNA (1)...(19): siRNA sense strand
gaaguuugauuugcuccau

SEQ ID NO: 240856 - RNA, 19 nt, Homo sapiens
  misc_RNA (1)...(19): siRNA sense strand
gcaagaacacagagaagag

SEQ ID NO: 240857 - RNA, 19 nt, Homo sapiens
  misc_RNA (1)...(19): siRNA sense strand
gaucgagagccuaacuuug

SEQ ID NO: 240858 - RNA, 19 nt, Homo sapiens
  misc_RNA (1)...(19): siRNA sense strand
ucucaucccuuggcuaguu

SEQ ID NO: 240859 - RNA, 19 nt, Homo sapiens
  misc_RNA (1)...(19): siRNA sense strand
gauucaggguguucacaug

SEQ ID NO: 240860 - RNA, 19 nt, Homo sapiens
  misc_RNA (1)...(19): siRNA sense strand
caacuugucuuccuauuaa

SEQ ID NO: 240861 - RNA, 19 nt, Homo sapiens
  misc_RNA (1)...(19): siRNA sense strand
gaagaugaccuacagauaa

SEQ ID NO: 240862 - RNA, 19 nt, Homo sapiens
  misc_RNA (1)...(19): siRNA sense strand
gaagauacguggcucaaug

SEQ ID NO: 240863 - RNA, 19 nt, Homo sapiens
  misc_RNA (1)...(19): siRNA sense strand
ggacagagaaguuugauuu

SEQ ID NO: 240864 - RNA, 19 nt, Homo sapiens
  misc_RNA (1)...(19): siRNA sense strand
ggacaucucuuagcccaua

SEQ ID NO: 240865 - RNA, 19 nt, Homo sapiens
  misc_RNA (1)...(19): siRNA sense strand
ugaaggaacuugugagauu

SEQ ID NO: 240866 - RNA, 19 nt, Homo sapiens
  misc_RNA (1)...(19): siRNA sense strand
ggaaaggccuucuagagau

SEQ ID NO: 240867 - RNA, 19 nt, Homo sapiens
  misc_RNA (1)...(19): siRNA sense strand
gagaagagauugauuuguc

SEQ ID NO: 240868 - RNA, 19 nt, Homo sapiens
  misc_RNA (1)...(19): siRNA sense strand
ggacagcacucaacucaag

SEQ ID NO: 240869 - RNA, 19 nt, Homo sapiens
  misc_RNA (1)...(19): siRNA sense strand
gccaauaaaucuacaaaug

SEQ ID NO: 240870 - RNA, 19 nt, Homo sapiens
  misc_RNA (1)...(19): siRNA sense strand
gcacucaacucaagcacaa

SEQ ID NO: 240871 - RNA, 19 nt, Homo sapiens
  misc_RNA (1)...(19): siRNA sense strand
gagaugagaguguuaguaa

SEQ ID NO: 240872 - RNA, 19 nt, Homo sapiens
  misc_RNA (1)...(19): siRNA sense strand
agaauuagaugcacaugaa

SEQ ID NO: 240873 - RNA, 19 nt, Homo sapiens
  misc_RNA (1)...(19): siRNA sense strand
gaaucgcuuucacauauuu

SEQ ID NO: 240874 - RNA, 19 nt, Homo sapiens
  misc_RNA (1)...(19): siRNA sense strand
aaauagaagugcaaccuaa

SEQ ID NO: 240875 - RNA, 19 nt, Homo sapiens
  misc_RNA (1)...(19): siRNA sense strand
gaagaaacuuggcaucaac

SEQ ID NO: 240876 - RNA, 19 nt, Homo sapiens
  misc_RNA (1)...(19): siRNA sense strand
ggaccaacuugucuuccua

SEQ ID NO: 240877 - RNA, 19 nt, Homo sapiens
  misc_RNA (1)...(19): siRNA sense strand
gaaguuccuccauaucaua

SEQ ID NO: 240878 - RNA, 19 nt, Homo sapiens
  misc_RNA (1)...(19): siRNA sense strand
gacagcagaugaucgauau

SEQ ID NO: 240879 - RNA, 19 nt, Homo sapiens
  misc_RNA (1)...(19): siRNA sense strand
gauaauaauugccaguaca

SEQ ID NO: 240880 - RNA, 19 nt, Homo sapiens
  misc_RNA (1)...(19): siRNA sense strand
cauuaaaccugaaccagaa

SEQ ID NO: 240881 - RNA, 19 nt, Homo sapiens
  misc_RNA (1)...(19): siRNA sense strand
gcaccuucauccuuaauau

SEQ ID NO: 240882 - RNA, 19 nt, Homo sapiens
  misc_RNA (1)...(19): siRNA sense strand
aaauggaggucaugaaaug

SEQ ID NO: 240883 - RNA, 19 nt, Homo sapiens
  misc_RNA (1)...(19): siRNA sense strand
ucaagaacuuccucauauu

SEQ ID NO: 240884 - RNA, 19 nt, Homo sapiens
  misc_RNA (1)...(19): siRNA sense strand
uuacaucuaucucuccuaa

SEQ ID NO: 240885 - RNA, 19 nt, Homo sapiens
  misc_RNA (1)...(19): siRNA sense strand
guaaauggaggucaugaaa

SEQ ID NO: 240886 - RNA, 19 nt, Homo sapiens
  misc_RNA (1)...(19): siRNA sense strand
aaacugauauuggcagaaa

SEQ ID NO: 240887 - RNA, 19 nt, Homo sapiens
  misc_RNA (1)...(19): siRNA sense strand
gaaaggccuucuagagauc

SEQ ID NO: 240888 - RNA, 19 nt, Homo sapiens
  misc_RNA (1)...(19): siRNA sense strand
ccaccuccaucuacuuuaa

SEQ ID NO: 240889 - RNA, 19 nt, Homo sapiens
  misc_RNA (1)...(19): siRNA sense strand
gcucaagaacuuccucaua

SEQ ID NO: 240890 - RNA, 19 nt, Homo sapiens
  misc_RNA (1)...(19): siRNA sense strand
ggacagcagaugaucgaua

SEQ ID NO: 240891 - RNA, 19 nt, Homo sapiens
  misc_RNA (1)...(19): siRNA sense strand
gaaggaacuugugagauuc

SEQ ID NO: 240892 - RNA, 19 nt, Homo sapiens
  misc_RNA (1)...(19): siRNA sense strand
aaacuuggcaucaacagua

SEQ ID NO: 240893 - RNA, 19 nt, Homo sapiens
  misc_RNA (1)...(19): siRNA sense strand
gggcaacugugagcauuaa

SEQ ID NO: 240894 - RNA, 19 nt, Homo sapiens
  misc_RNA (1)...(19): siRNA sense strand
aagaugaccuacagauaaa

SEQ ID NO: 240895 - RNA, 19 nt, Homo sapiens
  misc_RNA (1)...(19): siRNA sense strand
guaaagaacagcauaugau

SEQ ID NO: 240896 - RNA, 19 nt, Homo sapiens
  misc_RNA (1)...(19): siRNA sense strand
agaucaagcugccauacua

SEQ ID NO: 240897 - RNA, 19 nt, Homo sapiens
  misc_RNA (1)...(19): siRNA sense strand
gcagaaagaauacuagagu

SEQ ID NO: 240898 - RNA, 19 nt, Homo sapiens
  misc_RNA (1)...(19): siRNA sense strand
ccacuuugcuuaccacauc

SEQ ID NO: 240899 - RNA, 19 nt, Homo sapiens
  misc_RNA (1)...(19): siRNA sense strand
ggagguagaagggaagaua

SEQ ID NO: 240900 - RNA, 19 nt, Homo sapiens
  misc_RNA (1)...(19): siRNA sense strand
gaaguacaguaucaacagu

SEQ ID NO: 240901 - RNA, 19 nt, Homo sapiens
  misc_RNA (1)...(19): siRNA sense strand
aauaauaugucagccagua

SEQ ID NO: 240902 - RNA, 19 nt, Homo sapiens
  misc_RNA (1)...(19): siRNA sense strand
ggacuuggacacucauuau

SEQ ID NO: 240903 - RNA, 19 nt, Homo sapiens
  misc_RNA (1)...(19): siRNA sense strand
gaagcaagaacacagagaa

SEQ ID NO: 240904 - RNA, 19 nt, Homo sapiens
  misc_RNA (1)...(19): siRNA sense strand
cucaagaacuuccucauau

SEQ ID NO: 240905 - RNA, 19 nt, Homo sapiens
  misc_RNA (1)...(19): siRNA sense strand
gaacacagagaagagauug

SEQ ID NO: 240906 - RNA, 19 nt, Homo sapiens
  misc_RNA (1)...(19): siRNA sense strand
caagaacuuccucauauug

SEQ ID NO: 240907 - RNA, 19 nt, Homo sapiens
  misc_RNA (1)...(19): siRNA sense strand
gaagcugcagcccgauuua

SEQ ID NO: 240908 - RNA, 19 nt, Homo sapiens
  misc_RNA (1)...(19): siRNA sense strand
cuuaauaugucacaguuug

SEQ ID NO: 240909 - RNA, 19 nt, Homo sapiens
  misc_RNA (1)...(19): siRNA sense strand
uaccgggagucuucucuua

SEQ ID NO: 240910 - RNA, 19 nt, Homo sapiens
  misc_RNA (1)...(19): siRNA sense strand
gcaaacuaauguuguguac

SEQ ID NO: 240911 - RNA, 19 nt, Homo sapiens
  misc_RNA (1)...(19): siRNA sense strand
uaugauuccuucuccaauu

SEQ ID NO: 240912 - RNA, 19 nt, Homo sapiens
  misc_RNA (1)...(19): siRNA sense strand
guacaaaaguucuggaaau

SEQ ID NO: 240913 - RNA, 19 nt, Homo sapiens
  misc_RNA (1)...(19): siRNA sense strand
ccacuagacuggccuuuac

SEQ ID NO: 240914 - RNA, 19 nt, Homo sapiens
  misc_RNA (1)...(19): siRNA sense strand
ucacucaccuguuccuuca

SEQ ID NO: 240915 - RNA, 19 nt, Homo sapiens
  misc_RNA (1)...(19): siRNA sense strand
ucaguuccuucacccuuua

SEQ ID NO: 240916 - RNA, 19 nt, Homo sapiens
  misc_RNA (1)...(19): siRNA sense strand
gcucaaugcuucuguccau

SEQ ID NO: 240917 - RNA, 19 nt, Homo sapiens
  misc_RNA (1)...(19): siRNA sense strand
gggcucacauuguccuuga

SEQ ID NO: 240918 - RNA, 19 nt, Homo sapiens
  misc_RNA (1)...(19): siRNA sense strand
ccaacuugucuuccuauua

SEQ ID NO: 240919 - RNA, 19 nt, Homo sapiens
  misc_RNA (1)...(19): siRNA sense strand
ugaagaugaccuacagaua

SEQ ID NO: 240920 - RNA, 19 nt, Homo sapiens
  misc_RNA (1)...(19): siRNA sense strand
ugucuucaguuccaucuuu

SEQ ID NO: 240921 - RNA, 19 nt, Homo sapiens
  misc_RNA (1)...(19): siRNA sense strand
gcauccauuuacaucuuua

SEQ ID NO: 240922 - RNA, 19 nt, Homo sapiens
  misc_RNA (1)...(19): siRNA sense strand
ccagcggucugcucaagaa

SEQ ID NO: 240923 - RNA, 19 nt, Homo sapiens
  misc_RNA (1)...(19): siRNA sense strand
gcaagccaagagauaauaa

SEQ ID NO: 240924 - RNA, 19 nt, Homo sapiens
  misc_RNA (1)...(19): siRNA sense strand
uuuacgaccucaugcauuu

SEQ ID NO: 240925 - RNA, 19 nt, Homo sapiens
  misc_RNA (1)...(19): siRNA sense strand
agaagaaacuuggcaucaa

SEQ ID NO: 240926 - RNA, 19 nt, Homo sapiens
  misc_RNA (1)...(19): siRNA sense strand
gaacagcauaugauuccuu

SEQ ID NO: 240927 - RNA, 19 nt, Homo sapiens
  misc_RNA (1)...(19): siRNA sense strand
gagauaauaauugccagua

SEQ ID NO: 240928 - RNA, 19 nt, Homo sapiens
  misc_RNA (1)...(19): siRNA sense strand
gccaagagauaauaauugc

SEQ ID NO: 240929 - RNA, 19 nt, Homo sapiens
  misc_RNA (1)...(19): siRNA sense strand
ggaagugugacagaagaua

SEQ ID NO: 240930 - RNA, 19 nt, Homo sapiens
  misc_RNA (1)...(19): siRNA sense strand
gagaagaaacuuggcauca

SEQ ID NO: 240931 - RNA, 19 nt, Homo sapiens
  misc_RNA (1)...(19): siRNA sense strand
gugcauccauuuacaucuu

SEQ ID NO: 240932 - RNA, 19 nt, Homo sapiens
  misc_RNA (1)...(19): siRNA sense strand
cagcagaugaucgauauuu

SEQ ID NO: 240933 - RNA, 19 nt, Homo sapiens
  misc_RNA (1)...(19): siRNA sense strand
cuuaccacaucauggauua

SEQ ID NO: 240934 - RNA, 19 nt, Homo sapiens
  misc_RNA (1)...(19): siRNA sense strand
acagagaagagauugauuu

SEQ ID NO: 240935 - RNA, 19 nt, Homo sapiens
  misc_RNA (1)...(19): siRNA sense strand
gggaagauaaucagggaaa

SEQ ID NO: 240936 - RNA, 19 nt, Homo sapiens
  misc_RNA (1)...(19): siRNA sense strand
gcccaaguauucaaauuac

SEQ ID NO: 240937 - RNA, 19 nt, Homo sapiens
  misc_RNA (1)...(19): siRNA sense strand
cagaagaucgagagccuaa

SEQ ID NO: 240938 - RNA, 19 nt, Homo sapiens
  misc_RNA (1)...(19): siRNA sense strand
gggauaucauuguucaaau

SEQ ID NO: 240939 - RNA, 19 nt, Homo sapiens
  misc_RNA (1)...(19): siRNA sense strand
augcaacucuuucugguuu

SEQ ID NO: 240940 - RNA, 19 nt, Homo sapiens
  misc_RNA (1)...(19): siRNA sense strand
gaugagaguguuaguaaag

SEQ ID NO: 240941 - RNA, 19 nt, Homo sapiens
  misc_RNA (1)...(19): siRNA sense strand
cgacuuguguuucguguac

SEQ ID NO: 240942 - RNA, 19 nt, Homo sapiens
  misc_RNA (1)...(19): siRNA sense strand
aaacuccgcaauucagaua

SEQ ID NO: 240943 - RNA, 19 nt, Homo sapiens
  misc_RNA (1)...(19): siRNA sense strand
aauuagagcuguguucaga

SEQ ID NO: 240944 - RNA, 19 nt, Homo sapiens
  misc_RNA (1)...(19): siRNA sense strand
ucaaauacaggacaaagau

SEQ ID NO: 240945 - RNA, 19 nt, Homo sapiens
  misc_RNA (1)...(19): siRNA sense strand
uggacaaugugaacugaaa

SEQ ID NO: 240946 - RNA, 19 nt, Homo sapiens
  misc_RNA (1)...(19): siRNA sense strand
cgacuucaaacucgucuuu

SEQ ID NO: 240947 - RNA, 19 nt, Homo sapiens
  misc_RNA (1)...(19): siRNA sense strand
uccaguggcugaccagauu

SEQ ID NO: 240948 - RNA, 19 nt, Homo sapiens
  misc_RNA (1)...(19): siRNA sense strand
caaccacugucauccauac

SEQ ID NO: 240949 - RNA, 19 nt, Homo sapiens
  misc_RNA (1)...(19): siRNA sense strand
caucccaucugccacaguu

SEQ ID NO: 240950 - RNA, 19 nt, Homo sapiens
  misc_RNA (1)...(19): siRNA sense strand
agcagaugaucgauauuua

SEQ ID NO: 240951 - RNA, 19 nt, Homo sapiens
  misc_RNA (1)...(19): siRNA sense strand
ugaagcuccugggcuauaa

SEQ ID NO: 240952 - RNA, 19 nt, Homo sapiens
  misc_RNA (1)...(19): siRNA sense strand
gagguagaagggaagauaa

SEQ ID NO: 240953 - RNA, 19 nt, Homo sapiens
  misc_RNA (1)...(19): siRNA sense strand
gagccuaacuuugcaacca

SEQ ID NO: 240954 - RNA, 19 nt, Homo sapiens
  misc_RNA (1)...(19): siRNA sense strand
ugagaguguuaguaaagaa

SEQ ID NO: 240955 - RNA, 19 nt, Homo sapiens
  misc_RNA (1)...(19): siRNA sense strand
gaaguuugauuugcuccau

SEQ ID NO: 240956 - RNA, 19 nt, Homo sapiens
  misc_RNA (1)...(19): siRNA sense strand
gcaagaacacagagaagag

SEQ ID NO: 240957 - RNA, 19 nt, Homo sapiens
  misc_RNA (1)...(19): siRNA sense strand
gaucgagagccuaacuuug

SEQ ID NO: 240958 - RNA, 19 nt, Homo sapiens
  misc_RNA (1)...(19): siRNA sense strand
ucucaucccuuggcuaguu

SEQ ID NO: 240959 - RNA, 19 nt, Homo sapiens
  misc_RNA (1)...(19): siRNA sense strand
gauucaggguguucacaug

SEQ ID NO: 240960 - RNA, 19 nt, Homo sapiens
  misc_RNA (1)...(19): siRNA sense strand
ggacagaacugcucaaagg

SEQ ID NO: 240961 - RNA, 19 nt, Homo sapiens
  misc_RNA (1)...(19): siRNA sense strand
gaacucugcugguagcuuu

SEQ ID NO: 240962 - RNA, 19 nt, Homo sapiens
  misc_RNA (1)...(19): siRNA sense strand
gaaccuggaugacuguauu

SEQ ID NO: 240963 - RNA, 19 nt, Homo sapiens
  misc_RNA (1)...(19): siRNA sense strand
ggaaggagcgguggaagua

SEQ ID NO: 240964 - RNA, 19 nt, Homo sapiens
  misc_RNA (1)...(19): siRNA sense strand
ggacuuaugugcccagaag

SEQ ID NO: 240965 - RNA, 19 nt, Homo sapiens
  misc_RNA (1)...(19): siRNA sense strand
gcacggacggugucaguaa

SEQ ID NO: 240966 - RNA, 19 nt, Homo sapiens
  misc_RNA (1)...(19): siRNA sense strand
ggugugagguggagauaga

SEQ ID NO: 240967 - RNA, 19 nt, Homo sapiens
  misc_RNA (1)...(19): siRNA sense strand
uggaagaccugguugaaga

SEQ ID NO: 240968 - RNA, 19 nt, Homo sapiens
  misc_RNA (1)...(19): siRNA sense strand
ucaaggcacugaagccaaa

SEQ ID NO: 240969 - RNA, 19 nt, Homo sapiens
  misc_RNA (1)...(19): siRNA sense strand
guacugccaugaucacuuc

SEQ ID NO: 240970 - RNA, 19 nt, Homo sapiens
  misc_RNA (1)...(19): siRNA sense strand
ggucauggguguggauuug

SEQ ID NO: 240971 - RNA, 19 nt, Homo sapiens
  misc_RNA (1)...(19): siRNA sense strand
ggagccagcugccuugauc

SEQ ID NO: 240972 - RNA, 19 nt, Homo sapiens
  misc_RNA (1)...(19): siRNA sense strand
ggacagcauuggucucaag

SEQ ID NO: 240973 - RNA, 19 nt, Homo sapiens
  misc_RNA (1)...(19): siRNA sense strand
gggccaggcugaagaaaca

SEQ ID NO: 240974 - RNA, 19 nt, Homo sapiens
  misc_RNA (1)...(19): siRNA sense strand
gcaggaggguccacguugu

SEQ ID NO: 240975 - RNA, 19 nt, Homo sapiens
  misc_RNA (1)...(19): siRNA sense strand
gaagggccacgcugucaaa

SEQ ID NO: 240976 - RNA, 19 nt, Homo sapiens
  misc_RNA (1)...(19): siRNA sense strand
gaagagugucuguuugaug

SEQ ID NO: 240977 - RNA, 19 nt, Homo sapiens
  misc_RNA (1)...(19): siRNA sense strand
uccaagaaaugcccauaaa

SEQ ID NO: 240978 - RNA, 19 nt, Homo sapiens
  misc_RNA (1)...(19): siRNA sense strand
ggugagacgugccaguuuc

SEQ ID NO: 240979 - RNA, 19 nt, Homo sapiens
  misc_RNA (1)...(19): siRNA sense strand
guaaggaccagaaagacaa

SEQ ID NO: 240980 - RNA, 19 nt, Homo sapiens
  misc_RNA (1)...(19): siRNA sense strand
ccaagucccugugaacaug

SEQ ID NO: 240981 - RNA, 19 nt, Homo sapiens
  misc_RNA (1)...(19): siRNA sense strand
ggacugcuccgaagaugug

SEQ ID NO: 240982 - RNA, 19 nt, Homo sapiens
  misc_RNA (1)...(19): siRNA sense strand
gcacugagccaaggcauag

SEQ ID NO: 240983 - RNA, 19 nt, Homo sapiens
  misc_RNA (1)...(19): siRNA sense strand
caacgggcacugugagaaa

SEQ ID NO: 240984 - RNA, 19 nt, Homo sapiens
  misc_RNA (1)...(19): siRNA sense strand
gcaucugccugccuggauu

SEQ ID NO: 240985 - RNA, 19 nt, Homo sapiens
  misc_RNA (1)...(19): siRNA sense strand
gcccaacccugcgauaaug

SEQ ID NO: 240986 - RNA, 19 nt, Homo sapiens
  misc_RNA (1)...(19): siRNA sense strand
gaccaguacugccaugauc

SEQ ID NO: 240987 - RNA, 19 nt, Homo sapiens
  misc_RNA (1)...(19): siRNA sense strand
ucagccaacccauguguua

SEQ ID NO: 240988 - RNA, 19 nt, Homo sapiens
  misc_RNA (1)...(19): siRNA sense strand
ccagaacccugugccaaug

SEQ ID NO: 240989 - RNA, 19 nt, Homo sapiens
  misc_RNA (1)...(19): siRNA sense strand
guaggacucuggguaagga

SEQ ID NO: 240990 - RNA, 19 nt, Homo sapiens
  misc_RNA (1)...(19): siRNA sense strand
ccaagcagauauguaagga

SEQ ID NO: 240991 - RNA, 19 nt, Homo sapiens
  misc_RNA (1)...(19): siRNA sense strand
uagaagggcagcucuguga

SEQ ID NO: 240992 - RNA, 19 nt, Homo sapiens
  misc_RNA (1)...(19): siRNA sense strand
ggccggagccgauaaagau

SEQ ID NO: 240993 - RNA, 19 nt, Homo sapiens
  misc_RNA (1)...(19): siRNA sense strand
aggaugggcuggacaccua

SEQ ID NO: 240994 - RNA, 19 nt, Homo sapiens
  misc_RNA (1)...(19): siRNA sense strand
ggacacccguggaccugau

SEQ ID NO: 240995 - RNA, 19 nt, Homo sapiens
  misc_RNA (1)...(19): siRNA sense strand
ggcagaaguugaugaggau

SEQ ID NO: 240996 - RNA, 19 nt, Homo sapiens
  misc_RNA (1)...(19): siRNA sense strand
aauggcagcugcucagaga

SEQ ID NO: 240997 - RNA, 19 nt, Homo sapiens
  misc_RNA (1)...(19): siRNA sense strand
auagacgucucuucccuuu

SEQ ID NO: 240998 - RNA, 19 nt, Homo sapiens
  misc_RNA (1)...(19): siRNA sense strand
cagagauccucaugugugu

SEQ ID NO: 240999 - RNA, 19 nt, Homo sapiens
  misc_RNA (1)...(19): siRNA sense strand
ggaagaccugguugaagaa

SEQ ID NO: 241000 - RNA, 19 nt, Homo sapiens
  misc_RNA (1)...(19): siRNA sense strand
gugaggaggauaucgauga

SEQ ID NO: 241001 - RNA, 19 nt, Homo sapiens
  misc_RNA (1)...(19): siRNA sense strand
gcaccugucuggaccuacu

SEQ ID NO: 241002 - RNA, 19 nt, Homo sapiens
  misc_RNA (1)...(19): siRNA sense strand
gaagccaaaggcagaaguu

SEQ ID NO: 241003 - RNA, 19 nt, Homo sapiens
  misc_RNA (1)...(19): siRNA sense strand
aaccagcacugacuacugu

SEQ ID NO: 241004 - RNA, 19 nt, Homo sapiens
  misc_RNA (1)...(19): siRNA sense strand
gugaggagaaccuggauga

SEQ ID NO: 241005 - RNA, 19 nt, Homo sapiens
  misc_RNA (1)...(19): siRNA sense strand
ucagggccaugucucaaug

SEQ ID NO: 241006 - RNA, 19 nt, Homo sapiens
  misc_RNA (1)...(19): siRNA sense strand
ugccagagauccucaugug

SEQ ID NO: 241007 - RNA, 19 nt, Homo sapiens
  misc_RNA (1)...(19): siRNA sense strand
ccacagccaacccugcuuu

SEQ ID NO: 241008 - RNA, 19 nt, Homo sapiens
  misc_RNA (1)...(19): siRNA sense strand
caaaggcagaaguugauga

SEQ ID NO: 241009 - RNA, 19 nt, Homo sapiens
  misc_RNA (1)...(19): siRNA sense strand
gauauguaaggaccagaaa

SEQ ID NO: 241010 - RNA, 19 nt, Homo sapiens
  misc_RNA (1)...(19): siRNA sense strand
gaggacagcauuggucuca

SEQ ID NO: 241011 - RNA, 19 nt, Homo sapiens
  misc_RNA (1)...(19): siRNA sense strand
caacugcaccugcccuaca

SEQ ID NO: 241012 - RNA, 19 nt, Homo sapiens
  misc_RNA (1)...(19): siRNA sense strand
uauguaaggaccagaaaga

SEQ ID NO: 241013 - RNA, 19 nt, Homo sapiens
  misc_RNA (1)...(19): siRNA sense strand
ccacuuggaagacaugugu

SEQ ID NO: 241014 - RNA, 19 nt, Homo sapiens
  misc_RNA (1)...(19): siRNA sense strand
gauaaugcgaggaagauac

SEQ ID NO: 241015 - RNA, 19 nt, Homo sapiens
  misc_RNA (1)...(19): siRNA sense strand
ucugaagagugucuguuug

SEQ ID NO: 241016 - RNA, 19 nt, Homo sapiens
  misc_RNA (1)...(19): siRNA sense strand
agacgucucuucccuuugc

SEQ ID NO: 241017 - RNA, 19 nt, Homo sapiens
  misc_RNA (1)...(19): siRNA sense strand
gccaacccauguguuaaug

SEQ ID NO: 241018 - RNA, 19 nt, Homo sapiens
  misc_RNA (1)...(19): siRNA sense strand
agaaaugcccauaaaccaa

SEQ ID NO: 241019 - RNA, 19 nt, Homo sapiens
  misc_RNA (1)...(19): siRNA sense strand
gguucugccuccaacauuc

SEQ ID NO: 241020 - RNA, 19 nt, Homo sapiens
  misc_RNA (1)...(19): siRNA sense strand
gggagcagacgccgcuauu

SEQ ID NO: 241021 - RNA, 19 nt, Homo sapiens
  misc_RNA (1)...(19): siRNA sense strand
ugaugaggauggaguugug

SEQ ID NO: 241022 - RNA, 19 nt, Homo sapiens
  misc_RNA (1)...(19): siRNA sense strand
guaaggaaggaucgugaug

SEQ ID NO: 241023 - RNA, 19 nt, Homo sapiens
  misc_RNA (1)...(19): siRNA sense strand
ucugugagguggagaccaa

SEQ ID NO: 241024 - RNA, 19 nt, Homo sapiens
  misc_RNA (1)...(19): siRNA sense strand
agacucugauggacuuaug

SEQ ID NO: 241025 - RNA, 19 nt, Homo sapiens
  misc_RNA (1)...(19): siRNA sense strand
caagaaaugcccauaaacc

SEQ ID NO: 241026 - RNA, 19 nt, Homo sapiens
  misc_RNA (1)...(19): siRNA sense strand
ccugggagcuugcgguucu

SEQ ID NO: 241027 - RNA, 19 nt, Homo sapiens
  misc_RNA (1)...(19): siRNA sense strand
gaugacuggcccugugauu

SEQ ID NO: 241028 - RNA, 19 nt, Homo sapiens
  misc_RNA (1)...(19): siRNA sense strand
gcccagcucugccaaaaug

SEQ ID NO: 241029 - RNA, 19 nt, Homo sapiens
  misc_RNA (1)...(19): siRNA sense strand
gccaaaggcagaaguugau

SEQ ID NO: 241030 - RNA, 19 nt, Homo sapiens
  misc_RNA (1)...(19): siRNA sense strand
gcagugccacccacagugu

SEQ ID NO: 241031 - RNA, 19 nt, Homo sapiens
  misc_RNA (1)...(19): siRNA sense strand
gaugugaggaggauaucga

SEQ ID NO: 241032 - RNA, 19 nt, Homo sapiens
  misc_RNA (1)...(19): siRNA sense strand
agccaacccugcuuucaug

SEQ ID NO: 241033 - RNA, 19 nt, Homo sapiens
  misc_RNA (1)...(19): siRNA sense strand
gagauccucaugugugugu

SEQ ID NO: 241034 - RNA, 19 nt, Homo sapiens
  misc_RNA (1)...(19): siRNA sense strand
gcuccgaagauguggauga

SEQ ID NO: 241035 - RNA, 19 nt, Homo sapiens
  misc_RNA (1)...(19): siRNA sense strand
ccaaggaggagaggguaaa

SEQ ID NO: 241036 - RNA, 19 nt, Homo sapiens
  misc_RNA (1)...(19): siRNA sense strand
gggcugcugugugggaguu

SEQ ID NO: 241037 - RNA, 19 nt, Homo sapiens
  misc_RNA (1)...(19): siRNA sense strand
gaagaaaagcuaggaggaa

SEQ ID NO: 241038 - RNA, 19 nt, Homo sapiens
  misc_RNA (1)...(19): siRNA sense strand
ugagaaaggcugcaacacu

SEQ ID NO: 241039 - RNA, 19 nt, Homo sapiens
  misc_RNA (1)...(19): siRNA sense strand
gccaugaucacuuccacaa

SEQ ID NO: 241040 - RNA, 19 nt, Homo sapiens
  misc_RNA (1)...(19): siRNA sense strand
ugaagagugucuguuugau

SEQ ID NO: 241041 - RNA, 19 nt, Homo sapiens
  misc_RNA (1)...(19): siRNA sense strand
ggagaaccuggaugacugu

SEQ ID NO: 241042 - RNA, 19 nt, Homo sapiens
  misc_RNA (1)...(19): siRNA sense strand
gacuugguccguagacuug

SEQ ID NO: 241043 - RNA, 19 nt, Homo sapiens
  misc_RNA (1)...(19): siRNA sense strand
ccagaggcccgucacaaag

SEQ ID NO: 241044 - RNA, 19 nt, Homo sapiens
  misc_RNA (1)...(19): siRNA sense strand
gaugccaggccaagcuuga

SEQ ID NO: 241045 - RNA, 19 nt, Homo sapiens
  misc_RNA (1)...(19): siRNA sense strand
auaaagaugcccaggacaa

SEQ ID NO: 241046 - RNA, 19 nt, Homo sapiens
  misc_RNA (1)...(19): siRNA sense strand
gguggaagaccugguugaa

SEQ ID NO: 241047 - RNA, 19 nt, Homo sapiens
  misc_RNA (1)...(19): siRNA sense strand
gacgggaccacacccuuga

SEQ ID NO: 241048 - RNA, 19 nt, Homo sapiens
  misc_RNA (1)...(19): siRNA sense strand
cugaagagugucuguuuga

SEQ ID NO: 241049 - RNA, 19 nt, Homo sapiens
  misc_RNA (1)...(19): siRNA sense strand
acagaacugcucaaaggaa

SEQ ID NO: 241050 - RNA, 19 nt, Homo sapiens
  misc_RNA (1)...(19): siRNA sense strand
gaggagaaccuggaugacu

SEQ ID NO: 241051 - RNA, 19 nt, Homo sapiens
  misc_RNA (1)...(19): siRNA sense strand
gagccucucgggaguagga

SEQ ID NO: 241052 - RNA, 19 nt, Homo sapiens
  misc_RNA (1)...(19): siRNA sense strand
ugacccaugucccguugga

SEQ ID NO: 241053 - RNA, 19 nt, Homo sapiens
  misc_RNA (1)...(19): siRNA sense strand
cuacacaggcucccguugu

SEQ ID NO: 241054 - RNA, 19 nt, Homo sapiens
  misc_RNA (1)...(19): siRNA sense strand
gaccuggacgagugucuga

SEQ ID NO: 241055 - RNA, 19 nt, Homo sapiens
  misc_RNA (1)...(19): siRNA sense strand
gacagaacugcucaaagga

SEQ ID NO: 241056 - RNA, 19 nt, Homo sapiens
  misc_RNA (1)...(19): siRNA sense strand
gcgauaaugcgaggaagau

SEQ ID NO: 241057 - RNA, 19 nt, Homo sapiens
  misc_RNA (1)...(19): siRNA sense strand
agaccugguugaagaacug

SEQ ID NO: 241058 - RNA, 19 nt, Homo sapiens
  misc_RNA (1)...(19): siRNA sense strand
gaggauggaguugugaugu

SEQ ID NO: 241059 - RNA, 19 nt, Homo sapiens
  misc_RNA (1)...(19): siRNA sense strand
gggugagacgugccaguuu

SEQ ID NO: 241060 - RNA, 19 nt, Homo sapiens
  misc_RNA (1)...(19): siRNA sense strand
gcuccgugcuguccaucug

SEQ ID NO: 241061 - RNA, 19 nt, Homo sapiens
  misc_RNA (1)...(19): siRNA sense strand
ggaacucgcugcugccuau

SEQ ID NO: 241062 - RNA, 19 nt, Homo sapiens
  misc_RNA (1)...(19): siRNA sense strand
gcaggugccuccucagaug

SEQ ID NO: 241063 - RNA, 19 nt, Homo sapiens
  misc_RNA (1)...(19): siRNA sense strand
gcaaugugcuaguguacga

SEQ ID NO: 241064 - RNA, 19 nt, Homo sapiens
  misc_RNA (1)...(19): siRNA sense strand
gaagacagaauaugguuca

SEQ ID NO: 241065 - RNA, 19 nt, Homo sapiens
  misc_RNA (1)...(19): siRNA sense strand
cagcccaaaucauaacuuu

SEQ ID NO: 241066 - RNA, 19 nt, Homo sapiens
  misc_RNA (1)...(19): siRNA sense strand
caaacaggccaaacucaaa

SEQ ID NO: 241067 - RNA, 19 nt, Homo sapiens
  misc_RNA (1)...(19): siRNA sense strand
uuccaacucugaaagguua

SEQ ID NO: 241068 - RNA, 19 nt, Homo sapiens
  misc_RNA (1)...(19): siRNA sense strand
acgcacagcccaaaucaua

SEQ ID NO: 241069 - RNA, 19 nt, Homo sapiens
  misc_RNA (1)...(19): siRNA sense strand
gacagacacuggcuacuac

SEQ ID NO: 241070 - RNA, 19 nt, Homo sapiens
  misc_RNA (1)...(19): siRNA sense strand
cgacagacacuggcuacua

SEQ ID NO: 241071 - RNA, 19 nt, Homo sapiens
  misc_RNA (1)...(19): siRNA sense strand
gggaggaguuccggcauga

SEQ ID NO: 241072 - RNA, 19 nt, Homo sapiens
  misc_RNA (1)...(19): siRNA sense strand
gcccaaaucauaacuuuca

SEQ ID NO: 241073 - RNA, 19 nt, Homo sapiens
  misc_RNA (1)...(19): siRNA sense strand
ggucaucgcuugccuuuuc

SEQ ID NO: 241074 - RNA, 19 nt, Homo sapiens
  misc_RNA (1)...(19): siRNA sense strand
ccacuggcguccuguuugu

SEQ ID NO: 241075 - RNA, 19 nt, Homo sapiens
  misc_RNA (1)...(19): siRNA sense strand
gcacaaacaggccaaacuc

SEQ ID NO: 241076 - RNA, 19 nt, Homo sapiens
  misc_RNA (1)...(19): siRNA sense strand
gcaaccggaccauuuaugu

SEQ ID NO: 241077 - RNA, 19 nt, Homo sapiens
  misc_RNA (1)...(19): siRNA sense strand
ucaaaacgcugaaggacaa

SEQ ID NO: 241078 - RNA, 19 nt, Homo sapiens
  misc_RNA (1)...(19): siRNA sense strand
uauguggacucgcuucaga

SEQ ID NO: 241079 - RNA, 19 nt, Homo sapiens
  misc_RNA (1)...(19): siRNA sense strand
ugugggaggucuucagcua

SEQ ID NO: 241080 - RNA, 19 nt, Homo sapiens
  misc_RNA (1)...(19): siRNA sense strand
gcucaggcauggauuacag

SEQ ID NO: 241081 - RNA, 19 nt, Homo sapiens
  misc_RNA (1)...(19): siRNA sense strand
agagggcgcugaugacaca

SEQ ID NO: 241082 - RNA, 19 nt, Homo sapiens
  misc_RNA (1)...(19): siRNA sense strand
guuugcaugugccggaaua

SEQ ID NO: 241083 - RNA, 19 nt, Homo sapiens
  misc_RNA (1)...(19): siRNA sense strand
gacguacccucguguaguc

SEQ ID NO: 241084 - RNA, 19 nt, Homo sapiens
  misc_RNA (1)...(19): siRNA sense strand
gaacggcaagcaccaccaa

SEQ ID NO: 241085 - RNA, 19 nt, Homo sapiens
  misc_RNA (1)...(19): siRNA sense strand
caacgcacagcccaaauca

SEQ ID NO: 241086 - RNA, 19 nt, Homo sapiens
  misc_RNA (1)...(19): siRNA sense strand
gggcaaccuuuccaacuac

SEQ ID NO: 241087 - RNA, 19 nt, Homo sapiens
  misc_RNA (1)...(19): siRNA sense strand
acgacaagcugaacgugaa

SEQ ID NO: 241088 - RNA, 19 nt, Homo sapiens
  misc_RNA (1)...(19): siRNA sense strand
acagcggccuucaccauga

SEQ ID NO: 241089 - RNA, 19 nt, Homo sapiens
  misc_RNA (1)...(19): siRNA sense strand
ugcgguggcuaaagaauga

SEQ ID NO: 241090 - RNA, 19 nt, Homo sapiens
  misc_RNA (1)...(19): siRNA sense strand
caaguucuccaucgacuca

SEQ ID NO: 241091 - RNA, 19 nt, Homo sapiens
  misc_RNA (1)...(19): siRNA sense strand
ggaccagugcucacaguuc

SEQ ID NO: 241092 - RNA, 19 nt, Homo sapiens
  misc_RNA (1)...(19): siRNA sense strand
ggcuucagcugcccaagug

SEQ ID NO: 241093 - RNA, 19 nt, Homo sapiens
  misc_RNA (1)...(19): siRNA sense strand
ccaacgggaugaagaccau

SEQ ID NO: 241094 - RNA, 19 nt, Homo sapiens
  misc_RNA (1)...(19): siRNA sense strand
caucauguacggcaaguuc

SEQ ID NO: 241095 - RNA, 19 nt, Homo sapiens
  misc_RNA (1)...(19): siRNA sense strand
ugagcaugaucuucagcua

SEQ ID NO: 241096 - RNA, 19 nt, Homo sapiens
  misc_RNA (1)...(19): siRNA sense strand
gcugggagaggaccgguuu

SEQ ID NO: 241097 - RNA, 19 nt, Homo sapiens
  misc_RNA (1)...(19): siRNA sense strand
gcuaccaucagugcuauaa

SEQ ID NO: 241098 - RNA, 19 nt, Homo sapiens
  misc_RNA (1)...(19): siRNA sense strand
gcacagcccaaaucauaac

SEQ ID NO: 241099 - RNA, 19 nt, Homo sapiens
  misc_RNA (1)...(19): siRNA sense strand
ggggcaaccuuuccaacua

SEQ ID NO: 241100 - RNA, 19 nt, Homo sapiens
  misc_RNA (1)...(19): siRNA sense strand
gcgcugaugacacacagaa

SEQ ID NO: 241101 - RNA, 19 nt, Homo sapiens
  misc_RNA (1)...(19): siRNA sense strand
agacuucccugagcuugga

SEQ ID NO: 241102 - RNA, 19 nt, Homo sapiens
  misc_RNA (1)...(19): siRNA sense strand
acaaacaggccaaacucaa

SEQ ID NO: 241103 - RNA, 19 nt, Homo sapiens
  misc_RNA (1)...(19): siRNA sense strand
gaggaccgguuugggaaag

SEQ ID NO: 241104 - RNA, 19 nt, Homo sapiens
  misc_RNA (1)...(19): siRNA sense strand
caaccggaccauuuaugug

SEQ ID NO: 241105 - RNA, 19 nt, Homo sapiens
  misc_RNA (1)...(19): siRNA sense strand
uguaugcccucaugaucga

SEQ ID NO: 241106 - RNA, 19 nt, Homo sapiens
  misc_RNA (1)...(19): siRNA sense strand
aggccaaacucaaagagau

SEQ ID NO: 241107 - RNA, 19 nt, Homo sapiens
  misc_RNA (1)...(19): siRNA sense strand
gauccgaacgacccuuuag

SEQ ID NO: 241108 - RNA, 19 nt, Homo sapiens
  misc_RNA (1)...(19): siRNA sense strand
aacgugcgguggcuaaaga

SEQ ID NO: 241109 - RNA, 19 nt, Homo sapiens
  misc_RNA (1)...(19): siRNA sense strand
gcaccagcccagugagcaa

SEQ ID NO: 241110 - RNA, 19 nt, Homo sapiens
  misc_RNA (1)...(19): siRNA sense strand
acggcgaccuccacgaauu

SEQ ID NO: 241111 - RNA, 19 nt, Homo sapiens
  misc_RNA (1)...(19): siRNA sense strand
ucauuaaccagcacaaaca

SEQ ID NO: 241112 - RNA, 19 nt, Homo sapiens
  misc_RNA (1)...(19): siRNA sense strand
ggauccgaacgacccuuua

SEQ ID NO: 241113 - RNA, 19 nt, Homo sapiens
  misc_RNA (1)...(19): siRNA sense strand
uaacggcucaggcauggau

SEQ ID NO: 241114 - RNA, 19 nt, Homo sapiens
  misc_RNA (1)...(19): siRNA sense strand
cagcaggugccuccucaga

SEQ ID NO: 241115 - RNA, 19 nt, Homo sapiens
  misc_RNA (1)...(19): siRNA sense strand
gcagaucccaaugcagaug

SEQ ID NO: 241116 - RNA, 19 nt, Homo sapiens
  misc_RNA (1)...(19): siRNA sense strand
ggugcuuuacgcagaauaa

SEQ ID NO: 241117 - RNA, 19 nt, Homo sapiens
  misc_RNA (1)...(19): siRNA sense strand
ccaacccgcucauccucau

SEQ ID NO: 241118 - RNA, 19 nt, Homo sapiens
  misc_RNA (1)...(19): siRNA sense strand
uggagccaguaaacaauau

SEQ ID NO: 241119 - RNA, 19 nt, Homo sapiens
  misc_RNA (1)...(19): siRNA sense strand
caggugaaguggagguucu

SEQ ID NO: 241120 - RNA, 19 nt, Homo sapiens
  misc_RNA (1)...(19): siRNA sense strand
gcaugugccggaauaagca

SEQ ID NO: 241121 - RNA, 19 nt, Homo sapiens
  misc_RNA (1)...(19): siRNA sense strand
ggcaagcaccaccaaguca

SEQ ID NO: 241122 - RNA, 19 nt, Homo sapiens
  misc_RNA (1)...(19): siRNA sense strand
ggcauggauuacagaggaa

SEQ ID NO: 241123 - RNA, 19 nt, Homo sapiens
  misc_RNA (1)...(19): siRNA sense strand
gcgcuucugcucucagugu

SEQ ID NO: 241124 - RNA, 19 nt, Homo sapiens
  misc_RNA (1)...(19): siRNA sense strand
ggaccgguuugggaaaguc

SEQ ID NO: 241125 - RNA, 19 nt, Homo sapiens
  misc_RNA (1)...(19): siRNA sense strand
aaacaggccaaacucaaag

SEQ ID NO: 241126 - RNA, 19 nt, Homo sapiens
  misc_RNA (1)...(19): siRNA sense strand
ucacagcggccuucaccau

SEQ ID NO: 241127 - RNA, 19 nt, Homo sapiens
  misc_RNA (1)...(19): siRNA sense strand
gguguaugcccucaugauc

SEQ ID NO: 241128 - RNA, 19 nt, Homo sapiens
  misc_RNA (1)...(19): siRNA sense strand
gagccaguaaacaauauca

SEQ ID NO: 241129 - RNA, 19 nt, Homo sapiens
  misc_RNA (1)...(19): siRNA sense strand
gauuccaacucugaaaggu

SEQ ID NO: 241130 - RNA, 19 nt, Homo sapiens
  misc_RNA (1)...(19): siRNA sense strand
cauggaacugugugacgua

SEQ ID NO: 241131 - RNA, 19 nt, Homo sapiens
  misc_RNA (1)...(19): siRNA sense strand
uggacucgcuucagaugca

SEQ ID NO: 241132 - RNA, 19 nt, Homo sapiens
  misc_RNA (1)...(19): siRNA sense strand
ccaacgcacagcccaaauc

SEQ ID NO: 241133 - RNA, 19 nt, Homo sapiens
  misc_RNA (1)...(19): siRNA sense strand
acgugaagaucucagacuu

SEQ ID NO: 241134 - RNA, 19 nt, Homo sapiens
  misc_RNA (1)...(19): siRNA sense strand
cggaagacagaauaugguu

SEQ ID NO: 241135 - RNA, 19 nt, Homo sapiens
  misc_RNA (1)...(19): siRNA sense strand
gccaacugcaugcgcauug

SEQ ID NO: 241136 - RNA, 19 nt, Homo sapiens
  misc_RNA (1)...(19): siRNA sense strand
cuucugccacuucguguuu

SEQ ID NO: 241137 - RNA, 19 nt, Homo sapiens
  misc_RNA (1)...(19): siRNA sense strand
cccgcaaugugcuagugua

SEQ ID NO: 241138 - RNA, 19 nt, Homo sapiens
  misc_RNA (1)...(19): siRNA sense strand
ccacgaauuccuggucaug

SEQ ID NO: 241139 - RNA, 19 nt, Homo sapiens
  misc_RNA (1)...(19): siRNA sense strand
ugaaguggagguucuggau

SEQ ID NO: 241140 - RNA, 19 nt, Homo sapiens
  misc_RNA (1)...(19): siRNA sense strand
uaccaucagugcuauaacg

SEQ ID NO: 241141 - RNA, 19 nt, Homo sapiens
  misc_RNA (1)...(19): siRNA sense strand
cagcggccuucaccaugau

SEQ ID NO: 241142 - RNA, 19 nt, Homo sapiens
  misc_RNA (1)...(19): siRNA sense strand
caugaagggccagaucaga

SEQ ID NO: 241143 - RNA, 19 nt, Homo sapiens
  misc_RNA (1)...(19): siRNA sense strand
gggcagcaccgaugaugac

SEQ ID NO: 241144 - RNA, 19 nt, Homo sapiens
  misc_RNA (1)...(19): siRNA sense strand
gaccagccccugagcauga

SEQ ID NO: 241145 - RNA, 19 nt, Homo sapiens
  misc_RNA (1)...(19): siRNA sense strand
gaccuggacacgacagaca

SEQ ID NO: 241146 - RNA, 19 nt, Homo sapiens
  misc_RNA (1)...(19): siRNA sense strand
gaacaggaauuccaagaca

SEQ ID NO: 241147 - RNA, 19 nt, Homo sapiens
  misc_RNA (1)...(19): siRNA sense strand
uaagaaacgugcucgagua

SEQ ID NO: 241148 - RNA, 19 nt, Homo sapiens
  misc_RNA (1)...(19): siRNA sense strand
gagaucaccucaccuucua

SEQ ID NO: 241149 - RNA, 19 nt, Homo sapiens
  misc_RNA (1)...(19): siRNA sense strand
ucacgaaggugccaaagaa

SEQ ID NO: 241150 - RNA, 19 nt, Homo sapiens
  misc_RNA (1)...(19): siRNA sense strand
gcagagagcccuucuugga

SEQ ID NO: 241151 - RNA, 19 nt, Homo sapiens
  misc_RNA (1)...(19): siRNA sense strand
cuaaauugcuugaguuguu

SEQ ID NO: 241152 - RNA, 19 nt, Homo sapiens
  misc_RNA (1)...(19): siRNA sense strand
uccaagacaucuacaauuu

SEQ ID NO: 241153 - RNA, 19 nt, Homo sapiens
  misc_RNA (1)...(19): siRNA sense strand
cagcuucgguuucuaggua

SEQ ID NO: 241154 - RNA, 19 nt, Homo sapiens
  misc_RNA (1)...(19): siRNA sense strand
cgacugaggcugcauguuu

SEQ ID NO: 241155 - RNA, 19 nt, Homo sapiens
  misc_RNA (1)...(19): siRNA sense strand
uaccaaaccuauagagaaa

SEQ ID NO: 241156 - RNA, 19 nt, Homo sapiens
  misc_RNA (1)...(19): siRNA sense strand
caacagauauauagucaac

SEQ ID NO: 241157 - RNA, 19 nt, Homo sapiens
  misc_RNA (1)...(19): siRNA sense strand
gaagccacguuucaacaga

SEQ ID NO: 241158 - RNA, 19 nt, Homo sapiens
  misc_RNA (1)...(19): siRNA sense strand
ugaagucccugccuguaaa

SEQ ID NO: 241159 - RNA, 19 nt, Homo sapiens
  misc_RNA (1)...(19): siRNA sense strand
gcaaacuccuugaccauac

SEQ ID NO: 241160 - RNA, 19 nt, Homo sapiens
  misc_RNA (1)...(19): siRNA sense strand
gaagguagcagcacugucu

SEQ ID NO: 241161 - RNA, 19 nt, Homo sapiens
  misc_RNA (1)...(19): siRNA sense strand
gaaacgugcucgaguacag

SEQ ID NO: 241162 - RNA, 19 nt, Homo sapiens
  misc_RNA (1)...(19): siRNA sense strand
gcuggagcuuggcaacuua

SEQ ID NO: 241163 - RNA, 19 nt, Homo sapiens
  misc_RNA (1)...(19): siRNA sense strand
aaacuauccuggaaugaga

SEQ ID NO: 241164 - RNA, 19 nt, Homo sapiens
  misc_RNA (1)...(19): siRNA sense strand
ccaaaccuauagagaaaug

SEQ ID NO: 241165 - RNA, 19 nt, Homo sapiens
  misc_RNA (1)...(19): siRNA sense strand
caggaaauauucugguaug

SEQ ID NO: 241166 - RNA, 19 nt, Homo sapiens
  misc_RNA (1)...(19): siRNA sense strand
caucguauccgcagaaaga

SEQ ID NO: 241167 - RNA, 19 nt, Homo sapiens
  misc_RNA (1)...(19): siRNA sense strand
gagauucacauccagauug

SEQ ID NO: 241168 - RNA, 19 nt, Homo sapiens
  misc_RNA (1)...(19): siRNA sense strand
ucacaaacaagacauaaug

SEQ ID NO: 241169 - RNA, 19 nt, Homo sapiens
  misc_RNA (1)...(19): siRNA sense strand
gagcuuggcaacuuaggua

SEQ ID NO: 241170 - RNA, 19 nt, Homo sapiens
  misc_RNA (1)...(19): siRNA sense strand
cacaggaaauauucuggua

SEQ ID NO: 241171 - RNA, 19 nt, Homo sapiens
  misc_RNA (1)...(19): siRNA sense strand
agacuggacucucuuauac

SEQ ID NO: 241172 - RNA, 19 nt, Homo sapiens
  misc_RNA (1)...(19): siRNA sense strand
gugaaacuauccuggaaug

SEQ ID NO: 241173 - RNA, 19 nt, Homo sapiens
  misc_RNA (1)...(19): siRNA sense strand
gacaguuuguguugauuga

SEQ ID NO: 241174 - RNA, 19 nt, Homo sapiens
  misc_RNA (1)...(19): siRNA sense strand
caccauagcccacucaaug

SEQ ID NO: 241175 - RNA, 19 nt, Homo sapiens
  misc_RNA (1)...(19): siRNA sense strand
gauauauagucaacaugug

SEQ ID NO: 241176 - RNA, 19 nt, Homo sapiens
  misc_RNA (1)...(19): siRNA sense strand
gcacuccgccuccaaaucu

SEQ ID NO: 241177 - RNA, 19 nt, Homo sapiens
  misc_RNA (1)...(19): siRNA sense strand
caagacaucuacaauuuug

SEQ ID NO: 241178 - RNA, 19 nt, Homo sapiens
  misc_RNA (1)...(19): siRNA sense strand
ccaagaagagaaagagauu

SEQ ID NO: 241179 - RNA, 19 nt, Homo sapiens
  misc_RNA (1)...(19): siRNA sense strand
cugauaaacuucaaaccuu

SEQ ID NO: 241180 - RNA, 19 nt, Homo sapiens
  misc_RNA (1)...(19): siRNA sense strand
gaccaucauuggccuuguu

SEQ ID NO: 241181 - RNA, 19 nt, Homo sapiens
  misc_RNA (1)...(19): siRNA sense strand
caccucaccuucuaagaga

SEQ ID NO: 241182 - RNA, 19 nt, Homo sapiens
  misc_RNA (1)...(19): siRNA sense strand
ggaaaccaccguccugcuu

SEQ ID NO: 241183 - RNA, 19 nt, Homo sapiens
  misc_RNA (1)...(19): siRNA sense strand
guucgaagaugacucugau

SEQ ID NO: 241184 - RNA, 19 nt, Homo sapiens
  misc_RNA (1)...(19): siRNA sense strand
ccacuuuccucagaacuau

SEQ ID NO: 241185 - RNA, 19 nt, Homo sapiens
  misc_RNA (1)...(19): siRNA sense strand
ccucagauccguagucgaa

SEQ ID NO: 241186 - RNA, 19 nt, Homo sapiens
  misc_RNA (1)...(19): siRNA sense strand
ggaaauauucugguaugau

SEQ ID NO: 241187 - RNA, 19 nt, Homo sapiens
  misc_RNA (1)...(19): siRNA sense strand
caauggaagcuguggauga

SEQ ID NO: 241188 - RNA, 19 nt, Homo sapiens
  misc_RNA (1)...(19): siRNA sense strand
gcaggcagcccaagccaau

SEQ ID NO: 241189 - RNA, 19 nt, Homo sapiens
  misc_RNA (1)...(19): siRNA sense strand
cuaccaaaccuauagagaa

SEQ ID NO: 241190 - RNA, 19 nt, Homo sapiens
  misc_RNA (1)...(19): siRNA sense strand
gagccauccucgcagaguu

SEQ ID NO: 241191 - RNA, 19 nt, Homo sapiens
  misc_RNA (1)...(19): siRNA sense strand
ccaagucuaugugcaaauc

SEQ ID NO: 241192 - RNA, 19 nt, Homo sapiens
  misc_RNA (1)...(19): siRNA sense strand
caaugauguuccucccuuu

SEQ ID NO: 241193 - RNA, 19 nt, Homo sapiens
  misc_RNA (1)...(19): siRNA sense strand
agaguucugucuugacuau

SEQ ID NO: 241194 - RNA, 19 nt, Homo sapiens
  misc_RNA (1)...(19): siRNA sense strand
gaugaaaacccguauguug

SEQ ID NO: 241195 - RNA, 19 nt, Homo sapiens
  misc_RNA (1)...(19): siRNA sense strand
gcuuccagcccuauacaua

SEQ ID NO: 241196 - RNA, 19 nt, Homo sapiens
  misc_RNA (1)...(19): siRNA sense strand
gacugaggcugcauguuuc

SEQ ID NO: 241197 - RNA, 19 nt, Homo sapiens
  misc_RNA (1)...(19): siRNA sense strand
ccaaggagagcacccagaa

SEQ ID NO: 241198 - RNA, 19 nt, Homo sapiens
  misc_RNA (1)...(19): siRNA sense strand
aaagagggaugcaaaagaa

SEQ ID NO: 241199 - RNA, 19 nt, Homo sapiens
  misc_RNA (1)...(19): siRNA sense strand
gugcagagagcccuucuug

SEQ ID NO: 241200 - RNA, 19 nt, Homo sapiens
  misc_RNA (1)...(19): siRNA sense strand
gaaacuauccuggaaugag

SEQ ID NO: 241201 - RNA, 19 nt, Homo sapiens
  misc_RNA (1)...(19): siRNA sense strand
uaaauugcuugaguuguuc

SEQ ID NO: 241202 - RNA, 19 nt, Homo sapiens
  misc_RNA (1)...(19): siRNA sense strand
acccguauguugcuaaauu

SEQ ID NO: 241203 - RNA, 19 nt, Homo sapiens
  misc_RNA (1)...(19): siRNA sense strand
guauguugcuaaauugcuu

SEQ ID NO: 241204 - RNA, 19 nt, Homo sapiens
  misc_RNA (1)...(19): siRNA sense strand
uugaagucauccuuacaua

SEQ ID NO: 241205 - RNA, 19 nt, Homo sapiens
  misc_RNA (1)...(19): siRNA sense strand
agagaggagagaacacuua

SEQ ID NO: 241206 - RNA, 19 nt, Homo sapiens
  misc_RNA (1)...(19): siRNA sense strand
ucaugugccuccuuggauu

SEQ ID NO: 241207 - RNA, 19 nt, Homo sapiens
  misc_RNA (1)...(19): siRNA sense strand
ggacaguuuguguugauug

SEQ ID NO: 241208 - RNA, 19 nt, Homo sapiens
  misc_RNA (1)...(19): siRNA sense strand
ggaagacugccacuguuca

SEQ ID NO: 241209 - RNA, 19 nt, Homo sapiens
  misc_RNA (1)...(19): siRNA sense strand
ggagaucaccucaccuucu

SEQ ID NO: 241210 - RNA, 19 nt, Homo sapiens
  misc_RNA (1)...(19): siRNA sense strand
gugaagucccugccuguaa

SEQ ID NO: 241211 - RNA, 19 nt, Homo sapiens
  misc_RNA (1)...(19): siRNA sense strand
ccaccgagauucacaucca

SEQ ID NO: 241212 - RNA, 19 nt, Homo sapiens
  misc_RNA (1)...(19): siRNA sense strand
ggaggaagccacguuucaa

SEQ ID NO: 241213 - RNA, 19 nt, Homo sapiens
  misc_RNA (1)...(19): siRNA sense strand
ggagagcacccagaacugu

SEQ ID NO: 241214 - RNA, 19 nt, Homo sapiens
  misc_RNA (1)...(19): siRNA sense strand
ucaggccacuuuccucaga

SEQ ID NO: 241215 - RNA, 19 nt, Homo sapiens
  misc_RNA (1)...(19): siRNA sense strand
uggaugagcucgaccuucu

SEQ ID NO: 241216 - RNA, 19 nt, Homo sapiens
  misc_RNA (1)...(19): siRNA sense strand
ccacguuucaacagauaua

SEQ ID NO: 241217 - RNA, 19 nt, Homo sapiens
  misc_RNA (1)...(19): siRNA sense strand
aaacccguauguugcuaaa

SEQ ID NO: 241218 - RNA, 19 nt, Homo sapiens
  misc_RNA (1)...(19): siRNA sense strand
gcacuaccaaaccuauaga

SEQ ID NO: 241219 - RNA, 19 nt, Homo sapiens
  misc_RNA (1)...(19): siRNA sense strand
ggaauuccaagacaucuac

SEQ ID NO: 241220 - RNA, 19 nt, Homo sapiens
  misc_RNA (1)...(19): siRNA sense strand
auacugaggaugacaagaa

SEQ ID NO: 241221 - RNA, 19 nt, Homo sapiens
  misc_RNA (1)...(19): siRNA sense strand
ucucuuauacugaggauga

SEQ ID NO: 241222 - RNA, 19 nt, Homo sapiens
  misc_RNA (1)...(19): siRNA sense strand
gauuggacaguuuguguug

SEQ ID NO: 241223 - RNA, 19 nt, Homo sapiens
  misc_RNA (1)...(19): siRNA sense strand
acucugauccuccuccuaa

SEQ ID NO: 241224 - RNA, 19 nt, Homo sapiens
  misc_RNA (1)...(19): siRNA sense strand
caccaagucuaugugcaaa

SEQ ID NO: 241225 - RNA, 19 nt, Homo sapiens
  misc_RNA (1)...(19): siRNA sense strand
gacacucuuugugaaacua

SEQ ID NO: 241226 - RNA, 19 nt, Homo sapiens
  misc_RNA (1)...(19): siRNA sense strand
ccaggaugaugugcuguau

SEQ ID NO: 241227 - RNA, 19 nt, Homo sapiens
  misc_RNA (1)...(19): siRNA sense strand
auacaucacggccaucaaa

SEQ ID NO: 241228 - RNA, 19 nt, Homo sapiens
  misc_RNA (1)...(19): siRNA sense strand
gacugccacuguucaugaa

SEQ ID NO: 241229 - RNA, 19 nt, Homo sapiens
  misc_RNA (1)...(19): siRNA sense strand
ggcuggagcuuggcaacuu

SEQ ID NO: 241230 - RNA, 19 nt, Homo sapiens
  misc_RNA (1)...(19): siRNA sense strand
gaagaaauucaggccacuu

SEQ ID NO: 241231 - RNA, 19 nt, Homo sapiens
  misc_RNA (1)...(19): siRNA sense strand
gcagcacugucuggagaug

SEQ ID NO: 241232 - RNA, 19 nt, Homo sapiens
  misc_RNA (1)...(19): siRNA sense strand
gaagucauccuuacauacc

SEQ ID NO: 241233 - RNA, 19 nt, Homo sapiens
  misc_RNA (1)...(19): siRNA sense strand
aaccugcgaucuuccuuga

SEQ ID NO: 241234 - RNA, 19 nt, Homo sapiens
  misc_RNA (1)...(19): siRNA sense strand
aaagugaccaagaagagaa

SEQ ID NO: 241235 - RNA, 19 nt, Homo sapiens
  misc_RNA (1)...(19): siRNA sense strand
cuccaaaucucgccaaacu

SEQ ID NO: 241236 - RNA, 19 nt, Homo sapiens
  misc_RNA (1)...(19): siRNA sense strand
uacagugguuuguccgauu

SEQ ID NO: 241237 - RNA, 19 nt, Homo sapiens
  misc_RNA (1)...(19): siRNA sense strand
ggucccggcucaagcaucu

SEQ ID NO: 241238 - RNA, 19 nt, Homo sapiens
  misc_RNA (1)...(19): siRNA sense strand
agacugccacuguucauga

SEQ ID NO: 241239 - RNA, 19 nt, Homo sapiens
  misc_RNA (1)...(19): siRNA sense strand
uuagguaacccucagaugu

SEQ ID NO: 241240 - RNA, 19 nt, Homo sapiens
  misc_RNA (1)...(19): siRNA sense strand
gaacauguggccaaaagga

SEQ ID NO: 241241 - RNA, 19 nt, Homo sapiens
  misc_RNA (1)...(19): siRNA sense strand
gacggugccuggacaucug

SEQ ID NO: 241242 - RNA, 19 nt, Homo sapiens
  misc_RNA (1)...(19): siRNA sense strand
ugaaggggaugaugaugaa

SEQ ID NO: 241243 - RNA, 19 nt, Homo sapiens
  misc_RNA (1)...(19): siRNA sense strand
ccaccaagucuaugugcaa

SEQ ID NO: 241244 - RNA, 19 nt, Homo sapiens
  misc_RNA (1)...(19): siRNA sense strand
ugaggucaauggcaugaag

SEQ ID NO: 241245 - RNA, 19 nt, Homo sapiens
  misc_RNA (1)...(19): siRNA sense strand
acuccuacccauccucuua

SEQ ID NO: 241246 - RNA, 19 nt, Homo sapiens
  misc_RNA (1)...(19): siRNA sense strand
gcgcguuccuggugaagaa

SEQ ID NO: 241247 - RNA, 19 nt, Homo sapiens
  misc_RNA (1)...(19): siRNA sense strand
gaagguggccguggcacua

SEQ ID NO: 241248 - RNA, 19 nt, Homo sapiens
  misc_RNA (1)...(19): siRNA sense strand
gaagacaugggccacuuga

SEQ ID NO: 241249 - RNA, 19 nt, Homo sapiens
  misc_RNA (1)...(19): siRNA sense strand
gcugcucucuggagucuca

SEQ ID NO: 241250 - RNA, 19 nt, Homo sapiens
  misc_RNA (1)...(19): siRNA sense strand
gcgcaagaccuccaagaag

SEQ ID NO: 241251 - RNA, 19 nt, Homo sapiens
  misc_RNA (1)...(19): siRNA sense strand
agucucaccucaagaagau

SEQ ID NO: 241252 - RNA, 19 nt, Homo sapiens
  misc_RNA (1)...(19): siRNA sense strand
ccgcuggcuuugaacauga

SEQ ID NO: 241253 - RNA, 19 nt, Homo sapiens
  misc_RNA (1)...(19): siRNA sense strand
caagagacacguccgaacu

SEQ ID NO: 241254 - RNA, 19 nt, Homo sapiens
  misc_RNA (1)...(19): siRNA sense strand
gcugcccucugaagacaug

SEQ ID NO: 241255 - RNA, 19 nt, Homo sapiens
  misc_RNA (1)...(19): siRNA sense strand
agacaugggccacuugaca

SEQ ID NO: 241256 - RNA, 19 nt, Homo sapiens
  misc_RNA (1)...(19): siRNA sense strand
cagcugcccucugaagaca

SEQ ID NO: 241257 - RNA, 19 nt, Homo sapiens
  misc_RNA (1)...(19): siRNA sense strand
gcgcugcucucuggagucu

SEQ ID NO: 241258 - RNA, 19 nt, Homo sapiens
  misc_RNA (1)...(19): siRNA sense strand
gagucucaccucaagaaga

SEQ ID NO: 241259 - RNA, 19 nt, Homo sapiens
  misc_RNA (1)...(19): siRNA sense strand
agagacacguccgaacuca

SEQ ID NO: 241260 - RNA, 19 nt, Homo sapiens
  misc_RNA (1)...(19): siRNA sense strand
caccuucgaccucaagaga

SEQ ID NO: 241261 - RNA, 19 nt, Homo sapiens
  misc_RNA (1)...(19): siRNA sense strand
cuucgagacucuagcuaca

SEQ ID NO: 241262 - RNA, 19 nt, Homo sapiens
  misc_RNA (1)...(19): siRNA sense strand
caugagccuucgagacucu

SEQ ID NO: 241263 - RNA, 19 nt, Homo sapiens
  misc_RNA (1)...(19): siRNA sense strand
agacacguccgaacucaca

SEQ ID NO: 241264 - RNA, 19 nt, Homo sapiens
  misc_RNA (1)...(19): siRNA sense strand
cugaagacaugggccacuu

SEQ ID NO: 241265 - RNA, 19 nt, Homo sapiens
  misc_RNA (1)...(19): siRNA sense strand
ccugcccgcuggcuuugaa

SEQ ID NO: 241266 - RNA, 19 nt, Homo sapiens
  misc_RNA (1)...(19): siRNA sense strand
uggagucucaccucaagaa

SEQ ID NO: 241267 - RNA, 19 nt, Homo sapiens
  misc_RNA (1)...(19): siRNA sense strand
ucuggagucucaccucaag

SEQ ID NO: 241268 - RNA, 19 nt, Homo sapiens
  misc_RNA (1)...(19): siRNA sense strand
acaagugcagccuguguga

SEQ ID NO: 241269 - RNA, 19 nt, Homo sapiens
  misc_RNA (1)...(19): siRNA sense strand
augcugaaccgccacauga

SEQ ID NO: 241270 - RNA, 19 nt, Homo sapiens
  misc_RNA (1)...(19): siRNA sense strand
gaaccgccacaugaagugu

SEQ ID NO: 241271 - RNA, 19 nt, Homo sapiens
  misc_RNA (1)...(19): siRNA sense strand
ccuucgaccucaagagaca

SEQ ID NO: 241272 - RNA, 19 nt, Homo sapiens
  misc_RNA (1)...(19): siRNA sense strand
ccacaugaagugucacaac

SEQ ID NO: 241273 - RNA, 19 nt, Homo sapiens
  misc_RNA (1)...(19): siRNA sense strand
ggaaggagcugaggaauga

SEQ ID NO: 241274 - RNA, 19 nt, Homo sapiens
  misc_RNA (1)...(19): siRNA sense strand
gaagcagccuccaaagaaa

SEQ ID NO: 241275 - RNA, 19 nt, Homo sapiens
  misc_RNA (1)...(19): siRNA sense strand
ucaaggaggugguugcuaa

SEQ ID NO: 241276 - RNA, 19 nt, Homo sapiens
  misc_RNA (1)...(19): siRNA sense strand
ggaagcagccuccaaagaa

SEQ ID NO: 241277 - RNA, 19 nt, Homo sapiens
  misc_RNA (1)...(19): siRNA sense strand
gaacaucacuugcauuacg

SEQ ID NO: 241278 - RNA, 19 nt, Homo sapiens
  misc_RNA (1)...(19): siRNA sense strand
uuaaagagcuccaucacuu

SEQ ID NO: 241279 - RNA, 19 nt, Homo sapiens
  misc_RNA (1)...(19): siRNA sense strand
caaagaaaccaucaagaaa

SEQ ID NO: 241280 - RNA, 19 nt, Homo sapiens
  misc_RNA (1)...(19): siRNA sense strand
guaaagaagcguaccauga

SEQ ID NO: 241281 - RNA, 19 nt, Homo sapiens
  misc_RNA (1)...(19): siRNA sense strand
ccaaagaaaccaucaagaa

SEQ ID NO: 241282 - RNA, 19 nt, Homo sapiens
  misc_RNA (1)...(19): siRNA sense strand
uaaagaagcguaccaugaa

SEQ ID NO: 241283 - RNA, 19 nt, Homo sapiens
  misc_RNA (1)...(19): siRNA sense strand
ggaaacaccaguagcuuug

SEQ ID NO: 241284 - RNA, 19 nt, Homo sapiens
  misc_RNA (1)...(19): siRNA sense strand
ugucccaacuccuugauua

SEQ ID NO: 241285 - RNA, 19 nt, Homo sapiens
  misc_RNA (1)...(19): siRNA sense strand
cuuagacuguuuccacuua

SEQ ID NO: 241286 - RNA, 19 nt, Homo sapiens
  misc_RNA (1)...(19): siRNA sense strand
caccugaucgcaacaaaua

SEQ ID NO: 241287 - RNA, 19 nt, Homo sapiens
  misc_RNA (1)...(19): siRNA sense strand
cggaacaucacuugcauua

SEQ ID NO: 241288 - RNA, 19 nt, Homo sapiens
  misc_RNA (1)...(19): siRNA sense strand
caguggaggucgauucuga

SEQ ID NO: 241289 - RNA, 19 nt, Homo sapiens
  misc_RNA (1)...(19): siRNA sense strand
ccaacuccuugauuaaaga

SEQ ID NO: 241290 - RNA, 19 nt, Homo sapiens
  misc_RNA (1)...(19): siRNA sense strand
acaaauagucggaacauca

SEQ ID NO: 241291 - RNA, 19 nt, Homo sapiens
  misc_RNA (1)...(19): siRNA sense strand
gcugaccaguugcguguga

SEQ ID NO: 241292 - RNA, 19 nt, Homo sapiens
  misc_RNA (1)...(19): siRNA sense strand
gcuacucccugccuugugu

SEQ ID NO: 241293 - RNA, 19 nt, Homo sapiens
  misc_RNA (1)...(19): siRNA sense strand
uagacuguuuccacuuaua

SEQ ID NO: 241294 - RNA, 19 nt, Homo sapiens
  misc_RNA (1)...(19): siRNA sense strand
gggaagcagccuccaaaga

SEQ ID NO: 241295 - RNA, 19 nt, Homo sapiens
  misc_RNA (1)...(19): siRNA sense strand
ugacaaggaaacaccagua

SEQ ID NO: 241296 - RNA, 19 nt, Homo sapiens
  misc_RNA (1)...(19): siRNA sense strand
ucaaugaucggcaguuugu

SEQ ID NO: 241297 - RNA, 19 nt, Homo sapiens
  misc_RNA (1)...(19): siRNA sense strand
ccacuuauacugugugaca

SEQ ID NO: 241298 - RNA, 19 nt, Homo sapiens
  misc_RNA (1)...(19): siRNA sense strand
gggaaggagcugaggaaug

SEQ ID NO: 241299 - RNA, 19 nt, Homo sapiens
  misc_RNA (1)...(19): siRNA sense strand
cuccaucacuucaggauuc

SEQ ID NO: 241300 - RNA, 19 nt, Homo sapiens
  misc_RNA (1)...(19): siRNA sense strand
guucacgacccucaacuug

SEQ ID NO: 241301 - RNA, 19 nt, Homo sapiens
  misc_RNA (1)...(19): siRNA sense strand
caacaaauagucggaacau

SEQ ID NO: 241302 - RNA, 19 nt, Homo sapiens
  misc_RNA (1)...(19): siRNA sense strand
caacucccgccacgugauu

SEQ ID NO: 241303 - RNA, 19 nt, Homo sapiens
  misc_RNA (1)...(19): siRNA sense strand
gugauuugcuuagacuguu

SEQ ID NO: 241304 - RNA, 19 nt, Homo sapiens
  misc_RNA (1)...(19): siRNA sense strand
ugauuugcuuagacuguuu

SEQ ID NO: 241305 - RNA, 19 nt, Homo sapiens
  misc_RNA (1)...(19): siRNA sense strand
aaagaagcguaccaugaag

SEQ ID NO: 241306 - RNA, 19 nt, Homo sapiens
  misc_RNA (1)...(19): siRNA sense strand
gguuccggcugaccaguug

SEQ ID NO: 241307 - RNA, 19 nt, Homo sapiens
  misc_RNA (1)...(19): siRNA sense strand
acucaaugaucggcaguuu

SEQ ID NO: 241308 - RNA, 19 nt, Homo sapiens
  misc_RNA (1)...(19): siRNA sense strand
uaaagagcuccaucacuuc

SEQ ID NO: 241309 - RNA, 19 nt, Homo sapiens
  misc_RNA (1)...(19): siRNA sense strand
gagcacaccccaccucuga

SEQ ID NO: 241310 - RNA, 19 nt, Homo sapiens
  misc_RNA (1)...(19): siRNA sense strand
ccacgugauuugcuuagac

SEQ ID NO: 241311 - RNA, 19 nt, Homo sapiens
  misc_RNA (1)...(19): siRNA sense strand
caaggaaacaccaguagcu

SEQ ID NO: 241312 - RNA, 19 nt, Homo sapiens
  misc_RNA (1)...(19): siRNA sense strand
gcaccugaucgcaacaaau

SEQ ID NO: 241313 - RNA, 19 nt, Homo sapiens
  misc_RNA (1)...(19): siRNA sense strand
gcaacaaauagucggaaca

SEQ ID NO: 241314 - RNA, 19 nt, Homo sapiens
  misc_RNA (1)...(19): siRNA sense strand
gacaaggaaacaccaguag

SEQ ID NO: 241315 - RNA, 19 nt, Homo sapiens
  misc_RNA (1)...(19): siRNA sense strand
aaagagcuccaucacuuca

SEQ ID NO: 241316 - RNA, 19 nt, Homo sapiens
  misc_RNA (1)...(19): siRNA sense strand
gugacaagacucaaugauc

SEQ ID NO: 241317 - RNA, 19 nt, Homo sapiens
  misc_RNA (1)...(19): siRNA sense strand
aaacaccaguagcuuugca

SEQ ID NO: 241318 - RNA, 19 nt, Homo sapiens
  misc_RNA (1)...(19): siRNA sense strand
caacuacucaggccuacag

SEQ ID NO: 241319 - RNA, 19 nt, Homo sapiens
  misc_RNA (1)...(19): siRNA sense strand
gaccaguugcgugugauuu

SEQ ID NO: 241320 - RNA, 19 nt, Homo sapiens
  misc_RNA (1)...(19): siRNA sense strand
aggaaacaccaguagcuuu

SEQ ID NO: 241321 - RNA, 19 nt, Homo sapiens
  misc_RNA (1)...(19): siRNA sense strand
caacuccagccaugguuuc

SEQ ID NO: 241322 - RNA, 19 nt, Homo sapiens
  misc_RNA (1)...(19): siRNA sense strand
gcuguggguuugccuucug

SEQ ID NO: 241323 - RNA, 19 nt, Homo sapiens
  misc_RNA (1)...(19): siRNA sense strand
cccaacuccuugauuaaag

SEQ ID NO: 241324 - RNA, 19 nt, Homo sapiens
  misc_RNA (1)...(19): siRNA sense strand
cagggaaggagcugaggaa

SEQ ID NO: 241325 - RNA, 19 nt, Homo sapiens
  misc_RNA (1)...(19): siRNA sense strand
gaagccucaggaacaacua

SEQ ID NO: 241326 - RNA, 19 nt, Homo sapiens
  misc_RNA (1)...(19): siRNA sense strand
uuagacuguuuccacuuau

SEQ ID NO: 241327 - RNA, 19 nt, Homo sapiens
  misc_RNA (1)...(19): siRNA sense strand
caaccgguaccagcaguau

SEQ ID NO: 241328 - RNA, 19 nt, Homo sapiens
  misc_RNA (1)...(19): siRNA sense strand
caaauagucggaacaucac

SEQ ID NO: 241329 - RNA, 19 nt, Homo sapiens
  misc_RNA (1)...(19): siRNA sense strand
uuugaagccucaggaacaa

SEQ ID NO: 241330 - RNA, 19 nt, Homo sapiens
  misc_RNA (1)...(19): siRNA sense strand
gucccaacuccuugauuaa

SEQ ID NO: 241331 - RNA, 19 nt, Homo sapiens
  misc_RNA (1)...(19): siRNA sense strand
cuuauacugugugacaaga

SEQ ID NO: 241332 - RNA, 19 nt, Homo sapiens
  misc_RNA (1)...(19): siRNA sense strand
ggaaggagcugaggaauga

SEQ ID NO: 241333 - RNA, 19 nt, Homo sapiens
  misc_RNA (1)...(19): siRNA sense strand
gaagcagccuccaaagaaa

SEQ ID NO: 241334 - RNA, 19 nt, Homo sapiens
  misc_RNA (1)...(19): siRNA sense strand
ucaaggaggugguugcuaa

SEQ ID NO: 241335 - RNA, 19 nt, Homo sapiens
  misc_RNA (1)...(19): siRNA sense strand
ggaagcagccuccaaagaa

SEQ ID NO: 241336 - RNA, 19 nt, Homo sapiens
  misc_RNA (1)...(19): siRNA sense strand
gaacaucacuugcauuacg

SEQ ID NO: 241337 - RNA, 19 nt, Homo sapiens
  misc_RNA (1)...(19): siRNA sense strand
uuaaagagcuccaucacuu

SEQ ID NO: 241338 - RNA, 19 nt, Homo sapiens
  misc_RNA (1)...(19): siRNA sense strand
caaagaaaccaucaagaaa

SEQ ID NO: 241339 - RNA, 19 nt, Homo sapiens
  misc_RNA (1)...(19): siRNA sense strand
guaaagaagcguaccauga

SEQ ID NO: 241340 - RNA, 19 nt, Homo sapiens
  misc_RNA (1)...(19): siRNA sense strand
ccaaagaaaccaucaagaa

SEQ ID NO: 241341 - RNA, 19 nt, Homo sapiens
  misc_RNA (1)...(19): siRNA sense strand
uaaagaagcguaccaugaa

SEQ ID NO: 241342 - RNA, 19 nt, Homo sapiens
  misc_RNA (1)...(19): siRNA sense strand
ggaaacaccaguagcuuug

SEQ ID NO: 241343 - RNA, 19 nt, Homo sapiens
  misc_RNA (1)...(19): siRNA sense strand
ugucccaacuccuugauua

SEQ ID NO: 241344 - RNA, 19 nt, Homo sapiens
  misc_RNA (1)...(19): siRNA sense strand
cuuagacuguuuccacuua

SEQ ID NO: 241345 - RNA, 19 nt, Homo sapiens
  misc_RNA (1)...(19): siRNA sense strand
caccugaucgcaacaaaua

SEQ ID NO: 241346 - RNA, 19 nt, Homo sapiens
  misc_RNA (1)...(19): siRNA sense strand
cggaacaucacuugcauua

SEQ ID NO: 241347 - RNA, 19 nt, Homo sapiens
  misc_RNA (1)...(19): siRNA sense strand
caguggaggucgauucuga

SEQ ID NO: 241348 - RNA, 19 nt, Homo sapiens
  misc_RNA (1)...(19): siRNA sense strand
ccaacuccuugauuaaaga

SEQ ID NO: 241349 - RNA, 19 nt, Homo sapiens
  misc_RNA (1)...(19): siRNA sense strand
acaaauagucggaacauca

SEQ ID NO: 241350 - RNA, 19 nt, Homo sapiens
  misc_RNA (1)...(19): siRNA sense strand
gcugaccaguugcguguga

SEQ ID NO: 241351 - RNA, 19 nt, Homo sapiens
  misc_RNA (1)...(19): siRNA sense strand
gcuacucccugccuugugu

SEQ ID NO: 241352 - RNA, 19 nt, Homo sapiens
  misc_RNA (1)...(19): siRNA sense strand
uagacuguuuccacuuaua

SEQ ID NO: 241353 - RNA, 19 nt, Homo sapiens
  misc_RNA (1)...(19): siRNA sense strand
gggaagcagccuccaaaga

SEQ ID NO: 241354 - RNA, 19 nt, Homo sapiens
  misc_RNA (1)...(19): siRNA sense strand
ugacaaggaaacaccagua

SEQ ID NO: 241355 - RNA, 19 nt, Homo sapiens
  misc_RNA (1)...(19): siRNA sense strand
ucaaugaucggcaguuugu

SEQ ID NO: 241356 - RNA, 19 nt, Homo sapiens
  misc_RNA (1)...(19): siRNA sense strand
ccacuuauacugugugaca

SEQ ID NO: 241357 - RNA, 19 nt, Homo sapiens
  misc_RNA (1)...(19): siRNA sense strand
gggaaggagcugaggaaug

SEQ ID NO: 241358 - RNA, 19 nt, Homo sapiens
  misc_RNA (1)...(19): siRNA sense strand
cuccaucacuucaggauuc

SEQ ID NO: 241359 - RNA, 19 nt, Homo sapiens
  misc_RNA (1)...(19): siRNA sense strand
guucacgacccucaacuug

SEQ ID NO: 241360 - RNA, 19 nt, Homo sapiens
  misc_RNA (1)...(19): siRNA sense strand
caacaaauagucggaacau

SEQ ID NO: 241361 - RNA, 19 nt, Homo sapiens
  misc_RNA (1)...(19): siRNA sense strand
caacucccgccacgugauu

SEQ ID NO: 241362 - RNA, 19 nt, Homo sapiens
  misc_RNA (1)...(19): siRNA sense strand
gugauuugcuuagacuguu

SEQ ID NO: 241363 - RNA, 19 nt, Homo sapiens
  misc_RNA (1)...(19): siRNA sense strand
ugauuugcuuagacuguuu

SEQ ID NO: 241364 - RNA, 19 nt, Homo sapiens
  misc_RNA (1)...(19): siRNA sense strand
aaagaagcguaccaugaag

SEQ ID NO: 241365 - RNA, 19 nt, Homo sapiens
  misc_RNA (1)...(19): siRNA sense strand
gguuccggcugaccaguug

SEQ ID NO: 241366 - RNA, 19 nt, Homo sapiens
  misc_RNA (1)...(19): siRNA sense strand
acucaaugaucggcaguuu

SEQ ID NO: 241367 - RNA, 19 nt, Homo sapiens
  misc_RNA (1)...(19): siRNA sense strand
uaaagagcuccaucacuuc

SEQ ID NO: 241368 - RNA, 19 nt, Homo sapiens
  misc_RNA (1)...(19): siRNA sense strand
gagcacaccccaccucuga

SEQ ID NO: 241369 - RNA, 19 nt, Homo sapiens
  misc_RNA (1)...(19): siRNA sense strand
ccacgugauuugcuuagac

SEQ ID NO: 241370 - RNA, 19 nt, Homo sapiens
  misc_RNA (1)...(19): siRNA sense strand
caaggaaacaccaguagcu

SEQ ID NO: 241371 - RNA, 19 nt, Homo sapiens
  misc_RNA (1)...(19): siRNA sense strand
gcaccugaucgcaacaaau

SEQ ID NO: 241372 - RNA, 19 nt, Homo sapiens
  misc_RNA (1)...(19): siRNA sense strand
gcaacaaauagucggaaca

SEQ ID NO: 241373 - RNA, 19 nt, Homo sapiens
  misc_RNA (1)...(19): siRNA sense strand
gacaaggaaacaccaguag

SEQ ID NO: 241374 - RNA, 19 nt, Homo sapiens
  misc_RNA (1)...(19): siRNA sense strand
aaagagcuccaucacuuca

SEQ ID NO: 241375 - RNA, 19 nt, Homo sapiens
  misc_RNA (1)...(19): siRNA sense strand
gugacaagacucaaugauc

SEQ ID NO: 241376 - RNA, 19 nt, Homo sapiens
  misc_RNA (1)...(19): siRNA sense strand
aaacaccaguagcuuugca

SEQ ID NO: 241377 - RNA, 19 nt, Homo sapiens
  misc_RNA (1)...(19): siRNA sense strand
caacuacucaggccuacag

SEQ ID NO: 241378 - RNA, 19 nt, Homo sapiens
  misc_RNA (1)...(19): siRNA sense strand
gaccaguugcgugugauuu

SEQ ID NO: 241379 - RNA, 19 nt, Homo sapiens
  misc_RNA (1)...(19): siRNA sense strand
aggaaacaccaguagcuuu

SEQ ID NO: 241380 - RNA, 19 nt, Homo sapiens
  misc_RNA (1)...(19): siRNA sense strand
caacuccagccaugguuuc

SEQ ID NO: 241381 - RNA, 19 nt, Homo sapiens
  misc_RNA (1)...(19): siRNA sense strand
gcuguggguuugccuucug

SEQ ID NO: 241382 - RNA, 19 nt, Homo sapiens
  misc_RNA (1)...(19): siRNA sense strand
cccaacuccuugauuaaag

SEQ ID NO: 241383 - RNA, 19 nt, Homo sapiens
  misc_RNA (1)...(19): siRNA sense strand
cagggaaggagcugaggaa

SEQ ID NO: 241384 - RNA, 19 nt, Homo sapiens
  misc_RNA (1)...(19): siRNA sense strand
gaagccucaggaacaacua

SEQ ID NO: 241385 - RNA, 19 nt, Homo sapiens
  misc_RNA (1)...(19): siRNA sense strand
uuagacuguuuccacuuau

SEQ ID NO: 241386 - RNA, 19 nt, Homo sapiens
  misc_RNA (1)...(19): siRNA sense strand
caaccgguaccagcaguau

SEQ ID NO: 241387 - RNA, 19 nt, Homo sapiens
  misc_RNA (1)...(19): siRNA sense strand
caaauagucggaacaucac

SEQ ID NO: 241388 - RNA, 19 nt, Homo sapiens
  misc_RNA (1)...(19): siRNA sense strand
uuugaagccucaggaacaa

SEQ ID NO: 241389 - RNA, 19 nt, Homo sapiens
  misc_RNA (1)...(19): siRNA sense strand
gucccaacuccuugauuaa

SEQ ID NO: 241390 - RNA, 19 nt, Homo sapiens
  misc_RNA (1)...(19): siRNA sense strand
cuuauacugugugacaaga

SEQ ID NO: 241391 - RNA, 19 nt, Homo sapiens
  misc_RNA (1)...(19): siRNA sense strand
ggaaggagcugaggaauga

SEQ ID NO: 241392 - RNA, 19 nt, Homo sapiens
  misc_RNA (1)...(19): siRNA sense strand
gaagcagccuccaaagaaa

SEQ ID NO: 241393 - RNA, 19 nt, Homo sapiens
  misc_RNA (1)...(19): siRNA sense strand
ucaaggaggugguugcuaa

SEQ ID NO: 241394 - RNA, 19 nt, Homo sapiens
  misc_RNA (1)...(19): siRNA sense strand
ggaagcagccuccaaagaa

SEQ ID NO: 241395 - RNA, 19 nt, Homo sapiens
  misc_RNA (1)...(19): siRNA sense strand
gaacaucacuugcauuacg

SEQ ID NO: 241396 - RNA, 19 nt, Homo sapiens
  misc_RNA (1)...(19): siRNA sense strand
uuaaagagcuccaucacuu

SEQ ID NO: 241397 - RNA, 19 nt, Homo sapiens
  misc_RNA (1)...(19): siRNA sense strand
caaagaaaccaucaagaaa

SEQ ID NO: 241398 - RNA, 19 nt, Homo sapiens
  misc_RNA (1)...(19): siRNA sense strand
guaaagaagcguaccauga

SEQ ID NO: 241399 - RNA, 19 nt, Homo sapiens
  misc_RNA (1)...(19): siRNA sense strand
ccaaagaaaccaucaagaa

SEQ ID NO: 241400 - RNA, 19 nt, Homo sapiens
  misc_RNA (1)...(19): siRNA sense strand
uaaagaagcguaccaugaa

SEQ ID NO: 241401 - RNA, 19 nt, Homo sapiens
  misc_RNA (1)...(19): siRNA sense strand
ggaaacaccaguagcuuug

SEQ ID NO: 241402 - RNA, 19 nt, Homo sapiens
  misc_RNA (1)...(19): siRNA sense strand
ugucccaacuccuugauua

SEQ ID NO: 241403 - RNA, 19 nt, Homo sapiens
  misc_RNA (1)...(19): siRNA sense strand
cuuagacuguuuccacuua

SEQ ID NO: 241404 - RNA, 19 nt, Homo sapiens
  misc_RNA (1)...(19): siRNA sense strand
caccugaucgcaacaaaua

SEQ ID NO: 241405 - RNA, 19 nt, Homo sapiens
  misc_RNA (1)...(19): siRNA sense strand
cggaacaucacuugcauua

SEQ ID NO: 241406 - RNA, 19 nt, Homo sapiens
  misc_RNA (1)...(19): siRNA sense strand
caguggaggucgauucuga

SEQ ID NO: 241407 - RNA, 19 nt, Homo sapiens
  misc_RNA (1)...(19): siRNA sense strand
ccaacuccuugauuaaaga

SEQ ID NO: 241408 - RNA, 19 nt, Homo sapiens
  misc_RNA (1)...(19): siRNA sense strand
acaaauagucggaacauca

SEQ ID NO: 241409 - RNA, 19 nt, Homo sapiens
  misc_RNA (1)...(19): siRNA sense strand
gcugaccaguugcguguga

SEQ ID NO: 241410 - RNA, 19 nt, Homo sapiens
  misc_RNA (1)...(19): siRNA sense strand
gcuacucccugccuugugu

SEQ ID NO: 241411 - RNA, 19 nt, Homo sapiens
  misc_RNA (1)...(19): siRNA sense strand
uagacuguuuccacuuaua

SEQ ID NO: 241412 - RNA, 19 nt, Homo sapiens
  misc_RNA (1)...(19): siRNA sense strand
gggaagcagccuccaaaga

SEQ ID NO: 241413 - RNA, 19 nt, Homo sapiens
  misc_RNA (1)...(19): siRNA sense strand
ugacaaggaaacaccagua

SEQ ID NO: 241414 - RNA, 19 nt, Homo sapiens
  misc_RNA (1)...(19): siRNA sense strand
ucaaugaucggcaguuugu

SEQ ID NO: 241415 - RNA, 19 nt, Homo sapiens
  misc_RNA (1)...(19): siRNA sense strand
ccacuuauacugugugaca

SEQ ID NO: 241416 - RNA, 19 nt, Homo sapiens
  misc_RNA (1)...(19): siRNA sense strand
gggaaggagcugaggaaug

SEQ ID NO: 241417 - RNA, 19 nt, Homo sapiens
  misc_RNA (1)...(19): siRNA sense strand
cuccaucacuucaggauuc

SEQ ID NO: 241418 - RNA, 19 nt, Homo sapiens
  misc_RNA (1)...(19): siRNA sense strand
guucacgacccucaacuug

SEQ ID NO: 241419 - RNA, 19 nt, Homo sapiens
  misc_RNA (1)...(19): siRNA sense strand
caacaaauagucggaacau

SEQ ID NO: 241420 - RNA, 19 nt, Homo sapiens
  misc_RNA (1)...(19): siRNA sense strand
caacucccgccacgugauu

SEQ ID NO: 241421 - RNA, 19 nt, Homo sapiens
  misc_RNA (1)...(19): siRNA sense strand
gugauuugcuuagacuguu

SEQ ID NO: 241422 - RNA, 19 nt, Homo sapiens
  misc_RNA (1)...(19): siRNA sense strand
ugauuugcuuagacuguuu

SEQ ID NO: 241423 - RNA, 19 nt, Homo sapiens
  misc_RNA (1)...(19): siRNA sense strand
aaagaagcguaccaugaag

SEQ ID NO: 241424 - RNA, 19 nt, Homo sapiens
  misc_RNA (1)...(19): siRNA sense strand
gguuccggcugaccaguug

SEQ ID NO: 241425 - RNA, 19 nt, Homo sapiens
  misc_RNA (1)...(19): siRNA sense strand
acucaaugaucggcaguuu

SEQ ID NO: 241426 - RNA, 19 nt, Homo sapiens
  misc_RNA (1)...(19): siRNA sense strand
uaaagagcuccaucacuuc

SEQ ID NO: 241427 - RNA, 19 nt, Homo sapiens
  misc_RNA (1)...(19): siRNA sense strand
gagcacaccccaccucuga

SEQ ID NO: 241428 - RNA, 19 nt, Homo sapiens
  misc_RNA (1)...(19): siRNA sense strand
ccacgugauuugcuuagac

SEQ ID NO: 241429 - RNA, 19 nt, Homo sapiens
  misc_RNA (1)...(19): siRNA sense strand
caaggaaacaccaguagcu

SEQ ID NO: 241430 - RNA, 19 nt, Homo sapiens
  misc_RNA (1)...(19): siRNA sense strand
gcaccugaucgcaacaaau

SEQ ID NO: 241431 - RNA, 19 nt, Homo sapiens
  misc_RNA (1)...(19): siRNA sense strand
gcaacaaauagucggaaca

SEQ ID NO: 241432 - RNA, 19 nt, Homo sapiens
  misc_RNA (1)...(19): siRNA sense strand
gacaaggaaacaccaguag

SEQ ID NO: 241433 - RNA, 19 nt, Homo sapiens
  misc_RNA (1)...(19): siRNA sense strand
aaagagcuccaucacuuca

SEQ ID NO: 241434 - RNA, 19 nt, Homo sapiens
  misc_RNA (1)...(19): siRNA sense strand
gugacaagacucaaugauc

SEQ ID NO: 241435 - RNA, 19 nt, Homo sapiens
  misc_RNA (1)...(19): siRNA sense strand
aaacaccaguagcuuugca

SEQ ID NO: 241436 - RNA, 19 nt, Homo sapiens
  misc_RNA (1)...(19): siRNA sense strand
caacuacucaggccuacag

SEQ ID NO: 241437 - RNA, 19 nt, Homo sapiens
  misc_RNA (1)...(19): siRNA sense strand
gaccaguugcgugugauuu

SEQ ID NO: 241438 - RNA, 19 nt, Homo sapiens
  misc_RNA (1)...(19): siRNA sense strand
aggaaacaccaguagcuuu

SEQ ID NO: 241439 - RNA, 19 nt, Homo sapiens
  misc_RNA (1)...(19): siRNA sense strand
caacuccagccaugguuuc

SEQ ID NO: 241440 - RNA, 19 nt, Homo sapiens
  misc_RNA (1)...(19): siRNA sense strand
gcuguggguuugccuucug

SEQ ID NO: 241441 - RNA, 19 nt, Homo sapiens
  misc_RNA (1)...(19): siRNA sense strand
cccaacuccuugauuaaag

SEQ ID NO: 241442 - RNA, 19 nt, Homo sapiens
  misc_RNA (1)...(19): siRNA sense strand
cagggaaggagcugaggaa

SEQ ID NO: 241443 - RNA, 19 nt, Homo sapiens
  misc_RNA (1)...(19): siRNA sense strand
gaagccucaggaacaacua

SEQ ID NO: 241444 - RNA, 19 nt, Homo sapiens
  misc_RNA (1)...(19): siRNA sense strand
uuagacuguuuccacuuau

SEQ ID NO: 241445 - RNA, 19 nt, Homo sapiens
  misc_RNA (1)...(19): siRNA sense strand
caaccgguaccagcaguau

SEQ ID NO: 241446 - RNA, 19 nt, Homo sapiens
  misc_RNA (1)...(19): siRNA sense strand
caaauagucggaacaucac

SEQ ID NO: 241447 - RNA, 19 nt, Homo sapiens
  misc_RNA (1)...(19): siRNA sense strand
uuugaagccucaggaacaa

SEQ ID NO: 241448 - RNA, 19 nt, Homo sapiens
  misc_RNA (1)...(19): siRNA sense strand
gucccaacuccuugauuaa

SEQ ID NO: 241449 - RNA, 19 nt, Homo sapiens
  misc_RNA (1)...(19): siRNA sense strand
cuuauacugugugacaaga

SEQ ID NO: 241450 - RNA, 19 nt, Homo sapiens
  misc_RNA (1)...(19): siRNA sense strand
agaaagcacuaccuucaua

SEQ ID NO: 241451 - RNA, 19 nt, Homo sapiens
  misc_RNA (1)...(19): siRNA sense strand
gagcggagcuuuucggaua

SEQ ID NO: 241452 - RNA, 19 nt, Homo sapiens
  misc_RNA (1)...(19): siRNA sense strand
gcacuaccuucauagaaau

SEQ ID NO: 241453 - RNA, 19 nt, Homo sapiens
  misc_RNA (1)...(19): siRNA sense strand
ucaaggauauugucaucaa

SEQ ID NO: 241454 - RNA, 19 nt, Homo sapiens
  misc_RNA (1)...(19): siRNA sense strand
gcaaagaaagcacuaccuu

SEQ ID NO: 241455 - RNA, 19 nt, Homo sapiens
  misc_RNA (1)...(19): siRNA sense strand
ggucaaggauauugucauc

SEQ ID NO: 241456 - RNA, 19 nt, Homo sapiens
  misc_RNA (1)...(19): siRNA sense strand
ugcagaaggugauuuacua

SEQ ID NO: 241457 - RNA, 19 nt, Homo sapiens
  misc_RNA (1)...(19): siRNA sense strand
ucuuaggucugcuugguua

SEQ ID NO: 241458 - RNA, 19 nt, Homo sapiens
  misc_RNA (1)...(19): siRNA sense strand
gaucaggagacucuguuaa

SEQ ID NO: 241459 - RNA, 19 nt, Homo sapiens
  misc_RNA (1)...(19): siRNA sense strand
aaagaaagcacuaccuuca

SEQ ID NO: 241460 - RNA, 19 nt, Homo sapiens
  misc_RNA (1)...(19): siRNA sense strand
cggcuggacugcuugauug

SEQ ID NO: 241461 - RNA, 19 nt, Homo sapiens
  misc_RNA (1)...(19): siRNA sense strand
ccagaaagccacaucaaca

SEQ ID NO: 241462 - RNA, 19 nt, Homo sapiens
  misc_RNA (1)...(19): siRNA sense strand
gaagauugaucaggagacu

SEQ ID NO: 241463 - RNA, 19 nt, Homo sapiens
  misc_RNA (1)...(19): siRNA sense strand
ggacugcuugauugaagua

SEQ ID NO: 241464 - RNA, 19 nt, Homo sapiens
  misc_RNA (1)...(19): siRNA sense strand
gacuucaucuuaugcuuca

SEQ ID NO: 241465 - RNA, 19 nt, Homo sapiens
  misc_RNA (1)...(19): siRNA sense strand
gaaagcacuaccuucauag

SEQ ID NO: 241466 - RNA, 19 nt, Homo sapiens
  misc_RNA (1)...(19): siRNA sense strand
ccauuuacaugcagaaggu

SEQ ID NO: 241467 - RNA, 19 nt, Homo sapiens
  misc_RNA (1)...(19): siRNA sense strand
uuacuaccucugcaucuua

SEQ ID NO: 241468 - RNA, 19 nt, Homo sapiens
  misc_RNA (1)...(19): siRNA sense strand
cagaaagccacaucaacaa

SEQ ID NO: 241469 - RNA, 19 nt, Homo sapiens
  misc_RNA (1)...(19): siRNA sense strand
agcacuaccuucauagaaa

SEQ ID NO: 241470 - RNA, 19 nt, Homo sapiens
  misc_RNA (1)...(19): siRNA sense strand
caucuucaucacccucuua

SEQ ID NO: 241471 - RNA, 19 nt, Homo sapiens
  misc_RNA (1)...(19): siRNA sense strand
ccaaguaguacccgucuuc

SEQ ID NO: 241472 - RNA, 19 nt, Homo sapiens
  misc_RNA (1)...(19): siRNA sense strand
acaugcagaaggugauuua

SEQ ID NO: 241473 - RNA, 19 nt, Homo sapiens
  misc_RNA (1)...(19): siRNA sense strand
ugggcaaggucaaggauau

SEQ ID NO: 241474 - RNA, 19 nt, Homo sapiens
  misc_RNA (1)...(19): siRNA sense strand
ccucucugcugccaucuuc

SEQ ID NO: 241475 - RNA, 19 nt, Homo sapiens
  misc_RNA (1)...(19): siRNA sense strand
gcaaggucaaggauauugu

SEQ ID NO: 241476 - RNA, 19 nt, Homo sapiens
  misc_RNA (1)...(19): siRNA sense strand
gaacagcaugauccucucu

SEQ ID NO: 241477 - RNA, 19 nt, Homo sapiens
  misc_RNA (1)...(19): siRNA sense strand
ucauagaaaugggcaaggu

SEQ ID NO: 241478 - RNA, 19 nt, Homo sapiens
  misc_RNA (1)...(19): siRNA sense strand
gcagaaggugauuuacuac

SEQ ID NO: 241479 - RNA, 19 nt, Homo sapiens
  misc_RNA (1)...(19): siRNA sense strand
ggaaccacaugggauaucc

SEQ ID NO: 241480 - RNA, 19 nt, Homo sapiens
  misc_RNA (1)...(19): siRNA sense strand
aagcacuaccuucauagaa

SEQ ID NO: 241481 - RNA, 19 nt, Homo sapiens
  misc_RNA (1)...(19): siRNA sense strand
ccucuuaggucugcuuggu

SEQ ID NO: 241482 - RNA, 19 nt, Homo sapiens
  misc_RNA (1)...(19): siRNA sense strand
acugcuugauugaaguaua

SEQ ID NO: 241483 - RNA, 19 nt, Homo sapiens
  misc_RNA (1)...(19): siRNA sense strand
ccucugcaucuuauugaaa

SEQ ID NO: 241484 - RNA, 19 nt, Homo sapiens
  misc_RNA (1)...(19): siRNA sense strand
ggcaaggucaaggauauug

SEQ ID NO: 241485 - RNA, 19 nt, Homo sapiens
  misc_RNA (1)...(19): siRNA sense strand
gggcaaggucaaggauauu

SEQ ID NO: 241486 - RNA, 19 nt, Homo sapiens
  misc_RNA (1)...(19): siRNA sense strand
uacuaccucugcaucuuau

SEQ ID NO: 241487 - RNA, 19 nt, Homo sapiens
  misc_RNA (1)...(19): siRNA sense strand
cuaccucugcaucuuauug

SEQ ID NO: 241488 - RNA, 19 nt, Homo sapiens
  misc_RNA (1)...(19): siRNA sense strand
ucccuuggcauucagauga

SEQ ID NO: 241489 - RNA, 19 nt, Homo sapiens
  misc_RNA (1)...(19): siRNA sense strand
cugcuugguuaucuccauu

SEQ ID NO: 241490 - RNA, 19 nt, Homo sapiens
  misc_RNA (1)...(19): siRNA sense strand
caccagaaagccacaucaa

SEQ ID NO: 241491 - RNA, 19 nt, Homo sapiens
  misc_RNA (1)...(19): siRNA sense strand
cugcuugauugaaguauac

SEQ ID NO: 241492 - RNA, 19 nt, Homo sapiens
  misc_RNA (1)...(19): siRNA sense strand
aaagcacuaccuucauaga

SEQ ID NO: 241493 - RNA, 19 nt, Homo sapiens
  misc_RNA (1)...(19): siRNA sense strand
ggaggaugagcggagcuuu

SEQ ID NO: 241494 - RNA, 19 nt, Homo sapiens
  misc_RNA (1)...(19): siRNA sense strand
ugaucaggagacucuguua

SEQ ID NO: 241495 - RNA, 19 nt, Homo sapiens
  misc_RNA (1)...(19): siRNA sense strand
ggacaugucuuaaugcuua

SEQ ID NO: 241496 - RNA, 19 nt, Homo sapiens
  misc_RNA (1)...(19): siRNA sense strand
ggaccgagcuccuuucauu

SEQ ID NO: 241497 - RNA, 19 nt, Homo sapiens
  misc_RNA (1)...(19): siRNA sense strand
gaaaguacauggcagaaga

SEQ ID NO: 241498 - RNA, 19 nt, Homo sapiens
  misc_RNA (1)...(19): siRNA sense strand
gcacaaaugucagccauaa

SEQ ID NO: 241499 - RNA, 19 nt, Homo sapiens
  misc_RNA (1)...(19): siRNA sense strand
gaaagaaauuggcagacua

SEQ ID NO: 241500 - RNA, 19 nt, Homo sapiens
  misc_RNA (1)...(19): siRNA sense strand
gaaacaagccugacagaaa

SEQ ID NO: 241501 - RNA, 19 nt, Homo sapiens
  misc_RNA (1)...(19): siRNA sense strand
gggaagaucuggagcacua

SEQ ID NO: 241502 - RNA, 19 nt, Homo sapiens
  misc_RNA (1)...(19): siRNA sense strand
caacacaaccucuucauuu

SEQ ID NO: 241503 - RNA, 19 nt, Homo sapiens
  misc_RNA (1)...(19): siRNA sense strand
gaaaguauccagacaaugu

SEQ ID NO: 241504 - RNA, 19 nt, Homo sapiens
  misc_RNA (1)...(19): siRNA sense strand
gaacuuugcugucgugcuu

SEQ ID NO: 241505 - RNA, 19 nt, Homo sapiens
  misc_RNA (1)...(19): siRNA sense strand
gaacuaagucuaauucuuc

SEQ ID NO: 241506 - RNA, 19 nt, Homo sapiens
  misc_RNA (1)...(19): siRNA sense strand
gaaaguagcauuccuccaa

SEQ ID NO: 241507 - RNA, 19 nt, Homo sapiens
  misc_RNA (1)...(19): siRNA sense strand
guaaauacuugucaucuuc

SEQ ID NO: 241508 - RNA, 19 nt, Homo sapiens
  misc_RNA (1)...(19): siRNA sense strand
caacagggcauucauuaaa

SEQ ID NO: 241509 - RNA, 19 nt, Homo sapiens
  misc_RNA (1)...(19): siRNA sense strand
gagaauagaaguaaucuug

SEQ ID NO: 241510 - RNA, 19 nt, Homo sapiens
  misc_RNA (1)...(19): siRNA sense strand
guacauggcagaagaauau

SEQ ID NO: 241511 - RNA, 19 nt, Homo sapiens
  misc_RNA (1)...(19): siRNA sense strand
ccaaggacaugucuuaaug

SEQ ID NO: 241512 - RNA, 19 nt, Homo sapiens
  misc_RNA (1)...(19): siRNA sense strand
gguaaagccuugaaugaug

SEQ ID NO: 241513 - RNA, 19 nt, Homo sapiens
  misc_RNA (1)...(19): siRNA sense strand
ggacuugucuuccacuguu

SEQ ID NO: 241514 - RNA, 19 nt, Homo sapiens
  misc_RNA (1)...(19): siRNA sense strand
gagaagaaguuuccagaca

SEQ ID NO: 241515 - RNA, 19 nt, Homo sapiens
  misc_RNA (1)...(19): siRNA sense strand
gcaaaaggcuugauagaga

SEQ ID NO: 241516 - RNA, 19 nt, Homo sapiens
  misc_RNA (1)...(19): siRNA sense strand
guaaagccuugaaugauga

SEQ ID NO: 241517 - RNA, 19 nt, Homo sapiens
  misc_RNA (1)...(19): siRNA sense strand
gcacacaacauuccagaaa

SEQ ID NO: 241518 - RNA, 19 nt, Homo sapiens
  misc_RNA (1)...(19): siRNA sense strand
caacugaacuauccacauc

SEQ ID NO: 241519 - RNA, 19 nt, Homo sapiens
  misc_RNA (1)...(19): siRNA sense strand
gaaauccaguaaucuguau

SEQ ID NO: 241520 - RNA, 19 nt, Homo sapiens
  misc_RNA (1)...(19): siRNA sense strand
gauuccagauucaguauuu

SEQ ID NO: 241521 - RNA, 19 nt, Homo sapiens
  misc_RNA (1)...(19): siRNA sense strand
uagacaaccucuugaauga

SEQ ID NO: 241522 - RNA, 19 nt, Homo sapiens
  misc_RNA (1)...(19): siRNA sense strand
gaagguaacaacugaacua

SEQ ID NO: 241523 - RNA, 19 nt, Homo sapiens
  misc_RNA (1)...(19): siRNA sense strand
caggaaagcuaucucgaaa

SEQ ID NO: 241524 - RNA, 19 nt, Homo sapiens
  misc_RNA (1)...(19): siRNA sense strand
aaaugaagcacaccaaaua

SEQ ID NO: 241525 - RNA, 19 nt, Homo sapiens
  misc_RNA (1)...(19): siRNA sense strand
ggccacauguuucauauug

SEQ ID NO: 241526 - RNA, 19 nt, Homo sapiens
  misc_RNA (1)...(19): siRNA sense strand
gacaggagguacugaagaa

SEQ ID NO: 241527 - RNA, 19 nt, Homo sapiens
  misc_RNA (1)...(19): siRNA sense strand
gcagaagaauauagaguca

SEQ ID NO: 241528 - RNA, 19 nt, Homo sapiens
  misc_RNA (1)...(19): siRNA sense strand
gucaauagguuguuccauu

SEQ ID NO: 241529 - RNA, 19 nt, Homo sapiens
  misc_RNA (1)...(19): siRNA sense strand
acaacuaggucgauugaaa

SEQ ID NO: 241530 - RNA, 19 nt, Homo sapiens
  misc_RNA (1)...(19): siRNA sense strand
gcuuugccauugaagauua

SEQ ID NO: 241531 - RNA, 19 nt, Homo sapiens
  misc_RNA (1)...(19): siRNA sense strand
gagcacuacuacagcauuu

SEQ ID NO: 241532 - RNA, 19 nt, Homo sapiens
  misc_RNA (1)...(19): siRNA sense strand
aaacagugauuguguacuu

SEQ ID NO: 241533 - RNA, 19 nt, Homo sapiens
  misc_RNA (1)...(19): siRNA sense strand
gaaauuggcagacuagaag

SEQ ID NO: 241534 - RNA, 19 nt, Homo sapiens
  misc_RNA (1)...(19): siRNA sense strand
caaccaacaaugcaaauuu

SEQ ID NO: 241535 - RNA, 19 nt, Homo sapiens
  misc_RNA (1)...(19): siRNA sense strand
gcuaaucaaugucuacugu

SEQ ID NO: 241536 - RNA, 19 nt, Homo sapiens
  misc_RNA (1)...(19): siRNA sense strand
guggaaaccaaacaaauua

SEQ ID NO: 241537 - RNA, 19 nt, Homo sapiens
  misc_RNA (1)...(19): siRNA sense strand
uaugaaaccugauucugaa

SEQ ID NO: 241538 - RNA, 19 nt, Homo sapiens
  misc_RNA (1)...(19): siRNA sense strand
gaagaaguuuccagacaag

SEQ ID NO: 241539 - RNA, 19 nt, Homo sapiens
  misc_RNA (1)...(19): siRNA sense strand
gacaaccucuugaaugaug

SEQ ID NO: 241540 - RNA, 19 nt, Homo sapiens
  misc_RNA (1)...(19): siRNA sense strand
aaacugcucccuuccuuua

SEQ ID NO: 241541 - RNA, 19 nt, Homo sapiens
  misc_RNA (1)...(19): siRNA sense strand
gauaguagaugagaucagu

SEQ ID NO: 241542 - RNA, 19 nt, Homo sapiens
  misc_RNA (1)...(19): siRNA sense strand
uagagaagguaacaacuga

SEQ ID NO: 241543 - RNA, 19 nt, Homo sapiens
  misc_RNA (1)...(19): siRNA sense strand
caaugucucuuaacacuca

SEQ ID NO: 241544 - RNA, 19 nt, Homo sapiens
  misc_RNA (1)...(19): siRNA sense strand
ggaaagcuaucucgaaagc

SEQ ID NO: 241545 - RNA, 19 nt, Homo sapiens
  misc_RNA (1)...(19): siRNA sense strand
ccaaauauccuugaaugaa

SEQ ID NO: 241546 - RNA, 19 nt, Homo sapiens
  misc_RNA (1)...(19): siRNA sense strand
ccacacacuugcacaaaug

SEQ ID NO: 241547 - RNA, 19 nt, Homo sapiens
  misc_RNA (1)...(19): siRNA sense strand
ggacugauaggaccauuga

SEQ ID NO: 241548 - RNA, 19 nt, Homo sapiens
  misc_RNA (1)...(19): siRNA sense strand
guaugaacaccaagaauuu

SEQ ID NO: 241549 - RNA, 19 nt, Homo sapiens
  misc_RNA (1)...(19): siRNA sense strand
caccaaauauccuugaaug

SEQ ID NO: 241550 - RNA, 19 nt, Homo sapiens
  misc_RNA (1)...(19): siRNA sense strand
aggaaagucuggaguguuu

SEQ ID NO: 241551 - RNA, 19 nt, Homo sapiens
  misc_RNA (1)...(19): siRNA sense strand
gaaacagacuccccuacua

SEQ ID NO: 241552 - RNA, 19 nt, Homo sapiens
  misc_RNA (1)...(19): siRNA sense strand
gaagagaauagaaguaauc

SEQ ID NO: 241553 - RNA, 19 nt, Homo sapiens
  misc_RNA (1)...(19): siRNA sense strand
gaauauagagucaauaggu

SEQ ID NO: 241554 - RNA, 19 nt, Homo sapiens
  misc_RNA (1)...(19): siRNA sense strand
ucaagaaauucguaaagug

SEQ ID NO: 241555 - RNA, 19 nt, Homo sapiens
  misc_RNA (1)...(19): siRNA sense strand
acaaacaguugaaucauca

SEQ ID NO: 241556 - RNA, 19 nt, Homo sapiens
  misc_RNA (1)...(19): siRNA sense strand
cauaagcccugccaaaucu

SEQ ID NO: 241557 - RNA, 19 nt, Homo sapiens
  misc_RNA (1)...(19): siRNA sense strand
cuucagagauggaauacuu

SEQ ID NO: 241558 - RNA, 19 nt, Homo sapiens
  misc_RNA (1)...(19): siRNA sense strand
ccaauucugugcagguaaa

SEQ ID NO: 241559 - RNA, 19 nt, Homo sapiens
  misc_RNA (1)...(19): siRNA sense strand
uagcaaagcaccagcaauu

SEQ ID NO: 241560 - RNA, 19 nt, Homo sapiens
  misc_RNA (1)...(19): siRNA sense strand
gcuccaaggacaugucuua

SEQ ID NO: 241561 - RNA, 19 nt, Homo sapiens
  misc_RNA (1)...(19): siRNA sense strand
gaaguuacaaacagugauu

SEQ ID NO: 241562 - RNA, 19 nt, Homo sapiens
  misc_RNA (1)...(19): siRNA sense strand
ccaguaaucuguaucugau

SEQ ID NO: 241563 - RNA, 19 nt, Homo sapiens
  misc_RNA (1)...(19): siRNA sense strand
gaacccugcccuauguaua

SEQ ID NO: 241564 - RNA, 19 nt, Homo sapiens
  misc_RNA (1)...(19): siRNA sense strand
cagcugauguuaauuucaa

SEQ ID NO: 241565 - RNA, 19 nt, Homo sapiens
  misc_RNA (1)...(19): siRNA sense strand
ccaaggagcagaaacuuau

SEQ ID NO: 241566 - RNA, 19 nt, Homo sapiens
  misc_RNA (1)...(19): siRNA sense strand
caaaaucuguuccaaaaug

SEQ ID NO: 241567 - RNA, 19 nt, Homo sapiens
  misc_RNA (1)...(19): siRNA sense strand
caagugauggacaauauuu

SEQ ID NO: 241568 - RNA, 19 nt, Homo sapiens
  misc_RNA (1)...(19): siRNA sense strand
auacgagucuggccucuuu

SEQ ID NO: 241569 - RNA, 19 nt, Homo sapiens
  misc_RNA (1)...(19): siRNA sense strand
gaccugaaauauguguaua

SEQ ID NO: 241570 - RNA, 19 nt, Homo sapiens
  misc_RNA (1)...(19): siRNA sense strand
gguaacaacugaacuaucc

SEQ ID NO: 241571 - RNA, 19 nt, Homo sapiens
  misc_RNA (1)...(19): siRNA sense strand
gaacucuccuggcaucaag

SEQ ID NO: 241572 - RNA, 19 nt, Homo sapiens
  misc_RNA (1)...(19): siRNA sense strand
gcaauuaacauccgacucu

SEQ ID NO: 241573 - RNA, 19 nt, Homo sapiens
  misc_RNA (1)...(19): siRNA sense strand
uaaaguggcaguucaacaa

SEQ ID NO: 241574 - RNA, 19 nt, Homo sapiens
  misc_RNA (1)...(19): siRNA sense strand
cuacuacucucugaagaaa

SEQ ID NO: 241575 - RNA, 19 nt, Homo sapiens
  misc_RNA (1)...(19): siRNA sense strand
aaacauauugccagacuuu

SEQ ID NO: 241576 - RNA, 19 nt, Homo sapiens
  misc_RNA (1)...(19): siRNA sense strand
gagugagccucccguagaa

SEQ ID NO: 241577 - RNA, 19 nt, Homo sapiens
  misc_RNA (1)...(19): siRNA sense strand
gggaauccaugcucacugu

SEQ ID NO: 241578 - RNA, 19 nt, Homo sapiens
  misc_RNA (1)...(19): siRNA sense strand
ucaauagguuguuccauuc

SEQ ID NO: 241579 - RNA, 19 nt, Homo sapiens
  misc_RNA (1)...(19): siRNA sense strand
guucagagacuucagcaaa

SEQ ID NO: 241580 - RNA, 19 nt, Homo sapiens
  misc_RNA (1)...(19): siRNA sense strand
gcaccuaccuuuuacaaau

SEQ ID NO: 241581 - RNA, 19 nt, Homo sapiens
  misc_RNA (1)...(19): siRNA sense strand
guguuucccuguuaaauug

SEQ ID NO: 241582 - RNA, 19 nt, Homo sapiens
  misc_RNA (1)...(19): siRNA sense strand
gcaaagauucaucgccauu

SEQ ID NO: 241583 - RNA, 19 nt, Homo sapiens
  misc_RNA (1)...(19): siRNA sense strand
ccucuugaaugaugaacua

SEQ ID NO: 241584 - RNA, 19 nt, Homo sapiens
  misc_RNA (1)...(19): siRNA sense strand
ccuaaugaaucacacgaaa

SEQ ID NO: 241585 - RNA, 19 nt, Homo sapiens
  misc_RNA (1)...(19): siRNA sense strand
caguauaauuucaccauug

SEQ ID NO: 241586 - RNA, 19 nt, Homo sapiens
  misc_RNA (1)...(19): siRNA sense strand
cagugcacauguugaauuu

SEQ ID NO: 241587 - RNA, 19 nt, Homo sapiens
  misc_RNA (1)...(19): siRNA sense strand
agaagaaguuuccagacaa

SEQ ID NO: 241588 - RNA, 19 nt, Homo sapiens
  misc_RNA (1)...(19): siRNA sense strand
aaacaagccugacagaaaa

SEQ ID NO: 241589 - RNA, 19 nt, Homo sapiens
  misc_RNA (1)...(19): siRNA sense strand
gauaggaccauugaaagaa

SEQ ID NO: 241590 - RNA, 19 nt, Homo sapiens
  misc_RNA (1)...(19): siRNA sense strand
aguggcaguucaacaauua

SEQ ID NO: 241591 - RNA, 19 nt, Homo sapiens
  misc_RNA (1)...(19): siRNA sense strand
cuacagcauuuccguauca

SEQ ID NO: 241592 - RNA, 19 nt, Homo sapiens
  misc_RNA (1)...(19): siRNA sense strand
gugcacauguugaauuuua

SEQ ID NO: 241593 - RNA, 19 nt, Homo sapiens
  misc_RNA (1)...(19): siRNA sense strand
aaauucagaucacagaaga

SEQ ID NO: 241594 - RNA, 19 nt, Homo sapiens
  misc_RNA (1)...(19): siRNA sense strand
ugucaaagaucuaauugca

SEQ ID NO: 241595 - RNA, 19 nt, Homo sapiens
  misc_RNA (1)...(19): siRNA sense strand
gaaagaacauccaagacaa

SEQ ID NO: 241596 - RNA, 19 nt, Homo sapiens
  misc_RNA (1)...(19): siRNA sense strand
gggaggagauugagcauuu

SEQ ID NO: 241597 - RNA, 19 nt, Homo sapiens
  misc_RNA (1)...(19): siRNA sense strand
ggacagauccagaaacuga

SEQ ID NO: 241598 - RNA, 19 nt, Homo sapiens
  misc_RNA (1)...(19): siRNA sense strand
gcaaguucgugaaggauuu

SEQ ID NO: 241599 - RNA, 19 nt, Homo sapiens
  misc_RNA (1)...(19): siRNA sense strand
ggaagccuguggcagaaua

SEQ ID NO: 241600 - RNA, 19 nt, Homo sapiens
  misc_RNA (1)...(19): siRNA sense strand
gaagagaggaucaugcaaa

SEQ ID NO: 241601 - RNA, 19 nt, Homo sapiens
  misc_RNA (1)...(19): siRNA sense strand
ggaccaagcccuaaaggaa

SEQ ID NO: 241602 - RNA, 19 nt, Homo sapiens
  misc_RNA (1)...(19): siRNA sense strand
gaaaguccgugaagaaagg

SEQ ID NO: 241603 - RNA, 19 nt, Homo sapiens
  misc_RNA (1)...(19): siRNA sense strand
gccauuggauguugaauuc

SEQ ID NO: 241604 - RNA, 19 nt, Homo sapiens
  misc_RNA (1)...(19): siRNA sense strand
ggaugaggacuucaaauug

SEQ ID NO: 241605 - RNA, 19 nt, Homo sapiens
  misc_RNA (1)...(19): siRNA sense strand
gaugaggacuucaaauugc

SEQ ID NO: 241606 - RNA, 19 nt, Homo sapiens
  misc_RNA (1)...(19): siRNA sense strand
ggagacacauuaugagaac

SEQ ID NO: 241607 - RNA, 19 nt, Homo sapiens
  misc_RNA (1)...(19): siRNA sense strand
cagcaacacuguaguagag

SEQ ID NO: 241608 - RNA, 19 nt, Homo sapiens
  misc_RNA (1)...(19): siRNA sense strand
gaugaaggagaacuauuaa

SEQ ID NO: 241609 - RNA, 19 nt, Homo sapiens
  misc_RNA (1)...(19): siRNA sense strand
agaugaaggagaacuauua

SEQ ID NO: 241610 - RNA, 19 nt, Homo sapiens
  misc_RNA (1)...(19): siRNA sense strand
cgaaagaacauccaagaca

SEQ ID NO: 241611 - RNA, 19 nt, Homo sapiens
  misc_RNA (1)...(19): siRNA sense strand
gaccaagcccuaaaggaaa

SEQ ID NO: 241612 - RNA, 19 nt, Homo sapiens
  misc_RNA (1)...(19): siRNA sense strand
caaggaguaugugggcuuu

SEQ ID NO: 241613 - RNA, 19 nt, Homo sapiens
  misc_RNA (1)...(19): siRNA sense strand
ggaaucaagaucuaucaau

SEQ ID NO: 241614 - RNA, 19 nt, Homo sapiens
  misc_RNA (1)...(19): siRNA sense strand
gcacugcgacuuugugaag

SEQ ID NO: 241615 - RNA, 19 nt, Homo sapiens
  misc_RNA (1)...(19): siRNA sense strand
gagaggaucaugcaaacug

SEQ ID NO: 241616 - RNA, 19 nt, Homo sapiens
  misc_RNA (1)...(19): siRNA sense strand
caaacugacucgggaaagu

SEQ ID NO: 241617 - RNA, 19 nt, Homo sapiens
  misc_RNA (1)...(19): siRNA sense strand
gggcaagcuugaucccuau

SEQ ID NO: 241618 - RNA, 19 nt, Homo sapiens
  misc_RNA (1)...(19): siRNA sense strand
uaaaggaaagcaucccauu

SEQ ID NO: 241619 - RNA, 19 nt, Homo sapiens
  misc_RNA (1)...(19): siRNA sense strand
gaaacuucuuggugcugaa

SEQ ID NO: 241620 - RNA, 19 nt, Homo sapiens
  misc_RNA (1)...(19): siRNA sense strand
gugaaggauuucucaggaa

SEQ ID NO: 241621 - RNA, 19 nt, Homo sapiens
  misc_RNA (1)...(19): siRNA sense strand
caucccauuugcaguaauu

SEQ ID NO: 241622 - RNA, 19 nt, Homo sapiens
  misc_RNA (1)...(19): siRNA sense strand
auacauugaucagcaguuu

SEQ ID NO: 241623 - RNA, 19 nt, Homo sapiens
  misc_RNA (1)...(19): siRNA sense strand
ccaaccaaguccaccgaaa

SEQ ID NO: 241624 - RNA, 19 nt, Homo sapiens
  misc_RNA (1)...(19): siRNA sense strand
aaggaaagcaucccauuug

SEQ ID NO: 241625 - RNA, 19 nt, Homo sapiens
  misc_RNA (1)...(19): siRNA sense strand
agaguggccugaaccgaaa

SEQ ID NO: 241626 - RNA, 19 nt, Homo sapiens
  misc_RNA (1)...(19): siRNA sense strand
aauccacacuugucaauag

SEQ ID NO: 241627 - RNA, 19 nt, Homo sapiens
  misc_RNA (1)...(19): siRNA sense strand
aaaggaaagcaucccauuu

SEQ ID NO: 241628 - RNA, 19 nt, Homo sapiens
  misc_RNA (1)...(19): siRNA sense strand
ggagaucacuaagcaugca

SEQ ID NO: 241629 - RNA, 19 nt, Homo sapiens
  misc_RNA (1)...(19): siRNA sense strand
ugagcaaguucgugaagga

SEQ ID NO: 241630 - RNA, 19 nt, Homo sapiens
  misc_RNA (1)...(19): siRNA sense strand
ggacaccacggaugaugga

SEQ ID NO: 241631 - RNA, 19 nt, Homo sapiens
  misc_RNA (1)...(19): siRNA sense strand
ccagaaacugagaagcuua

SEQ ID NO: 241632 - RNA, 19 nt, Homo sapiens
  misc_RNA (1)...(19): siRNA sense strand
caccacggaugauggagaa

SEQ ID NO: 241633 - RNA, 19 nt, Homo sapiens
  misc_RNA (1)...(19): siRNA sense strand
gcaaauccacacuugucaa

SEQ ID NO: 241634 - RNA, 19 nt, Homo sapiens
  misc_RNA (1)...(19): siRNA sense strand
gggagacacauuaugagaa

SEQ ID NO: 241635 - RNA, 19 nt, Homo sapiens
  misc_RNA (1)...(19): siRNA sense strand
gcuaagaccugggcaucca

SEQ ID NO: 241636 - RNA, 19 nt, Homo sapiens
  misc_RNA (1)...(19): siRNA sense strand
aaacuguggagaucacuaa

SEQ ID NO: 241637 - RNA, 19 nt, Homo sapiens
  misc_RNA (1)...(19): siRNA sense strand
caaauccacacuugucaau

SEQ ID NO: 241638 - RNA, 19 nt, Homo sapiens
  misc_RNA (1)...(19): siRNA sense strand
gaaccgaaagaacauccaa

SEQ ID NO: 241639 - RNA, 19 nt, Homo sapiens
  misc_RNA (1)...(19): siRNA sense strand
aagcaucccauuugcagua

SEQ ID NO: 241640 - RNA, 19 nt, Homo sapiens
  misc_RNA (1)...(19): siRNA sense strand
gcagcaacacuguaguaga

SEQ ID NO: 241641 - RNA, 19 nt, Homo sapiens
  misc_RNA (1)...(19): siRNA sense strand
ggaccucuaugaugaugac

SEQ ID NO: 241642 - RNA, 19 nt, Homo sapiens
  misc_RNA (1)...(19): siRNA sense strand
gggcaaauccacacuuguc

SEQ ID NO: 241643 - RNA, 19 nt, Homo sapiens
  misc_RNA (1)...(19): siRNA sense strand
ccagggcacugcgacuuug

SEQ ID NO: 241644 - RNA, 19 nt, Homo sapiens
  misc_RNA (1)...(19): siRNA sense strand
ggaaagcaucccauuugca

SEQ ID NO: 241645 - RNA, 19 nt, Homo sapiens
  misc_RNA (1)...(19): siRNA sense strand
gcaagcuugaucccuauga

SEQ ID NO: 241646 - RNA, 19 nt, Homo sapiens
  misc_RNA (1)...(19): siRNA sense strand
caagcuugaucccuaugau

SEQ ID NO: 241647 - RNA, 19 nt, Homo sapiens
  misc_RNA (1)...(19): siRNA sense strand
ggccugaaccgaaagaaca

SEQ ID NO: 241648 - RNA, 19 nt, Homo sapiens
  misc_RNA (1)...(19): siRNA sense strand
gcaggagaugcuacacaaa

SEQ ID NO: 241649 - RNA, 19 nt, Homo sapiens
  misc_RNA (1)...(19): siRNA sense strand
ugcaggagaugcuacacaa

SEQ ID NO: 241650 - RNA, 19 nt, Homo sapiens
  misc_RNA (1)...(19): siRNA sense strand
aggaugaggacuucaaauu

SEQ ID NO: 241651 - RNA, 19 nt, Homo sapiens
  misc_RNA (1)...(19): siRNA sense strand
gcaugcaguggacauagaa

SEQ ID NO: 241652 - RNA, 19 nt, Homo sapiens
  misc_RNA (1)...(19): siRNA sense strand
ggagaugcuacacaaaaua

SEQ ID NO: 241653 - RNA, 19 nt, Homo sapiens
  misc_RNA (1)...(19): siRNA sense strand
gagaagcuuauccgagaga

SEQ ID NO: 241654 - RNA, 19 nt, Homo sapiens
  misc_RNA (1)...(19): siRNA sense strand
agacacauuaugagaacua

SEQ ID NO: 241655 - RNA, 19 nt, Homo sapiens
  misc_RNA (1)...(19): siRNA sense strand
gcaguggacauagaagaga

SEQ ID NO: 241656 - RNA, 19 nt, Homo sapiens
  misc_RNA (1)...(19): siRNA sense strand
caaccaaguccaccgaaag

SEQ ID NO: 241657 - RNA, 19 nt, Homo sapiens
  misc_RNA (1)...(19): siRNA sense strand
gcacugcugccuguacuuc

SEQ ID NO: 241658 - RNA, 19 nt, Homo sapiens
  misc_RNA (1)...(19): siRNA sense strand
caguggacauagaagagaa

SEQ ID NO: 241659 - RNA, 19 nt, Homo sapiens
  misc_RNA (1)...(19): siRNA sense strand
ccgaaaguccgugaagaaa

SEQ ID NO: 241660 - RNA, 19 nt, Homo sapiens
  misc_RNA (1)...(19): siRNA sense strand
gaagcuuauccgagagaaa

SEQ ID NO: 241661 - RNA, 19 nt, Homo sapiens
  misc_RNA (1)...(19): siRNA sense strand
acauugaucagcaguuuga

SEQ ID NO: 241662 - RNA, 19 nt, Homo sapiens
  misc_RNA (1)...(19): siRNA sense strand
gaugaugaccuggaguuca

SEQ ID NO: 241663 - RNA, 19 nt, Homo sapiens
  misc_RNA (1)...(19): siRNA sense strand
caccgaaaguccgugaaga

SEQ ID NO: 241664 - RNA, 19 nt, Homo sapiens
  misc_RNA (1)...(19): siRNA sense strand
acugacaccucccgaagug

SEQ ID NO: 241665 - RNA, 19 nt, Homo sapiens
  misc_RNA (1)...(19): siRNA sense strand
ggccauuggauguugaauu

SEQ ID NO: 241666 - RNA, 19 nt, Homo sapiens
  misc_RNA (1)...(19): siRNA sense strand
gggcaucguggaaguggaa

SEQ ID NO: 241667 - RNA, 19 nt, Homo sapiens
  misc_RNA (1)...(19): siRNA sense strand
gcaguaauuggcagcaaca

SEQ ID NO: 241668 - RNA, 19 nt, Homo sapiens
  misc_RNA (1)...(19): siRNA sense strand
gcuaaggcagacacacuga

SEQ ID NO: 241669 - RNA, 19 nt, Homo sapiens
  misc_RNA (1)...(19): siRNA sense strand
gggucaacaucgugccuau

SEQ ID NO: 241670 - RNA, 19 nt, Homo sapiens
  misc_RNA (1)...(19): siRNA sense strand
cauuggauguugaauucau

SEQ ID NO: 241671 - RNA, 19 nt, Homo sapiens
  misc_RNA (1)...(19): siRNA sense strand
aagagaggaucaugcaaac

SEQ ID NO: 241672 - RNA, 19 nt, Homo sapiens
  misc_RNA (1)...(19): siRNA sense strand
cagaaacugagaagcuuau

SEQ ID NO: 241673 - RNA, 19 nt, Homo sapiens
  misc_RNA (1)...(19): siRNA sense strand
ccucugacaaccagcagua

SEQ ID NO: 241674 - RNA, 19 nt, Homo sapiens
  misc_RNA (1)...(19): siRNA sense strand
caugcaaacuguggagauc

SEQ ID NO: 241675 - RNA, 19 nt, Homo sapiens
  misc_RNA (1)...(19): siRNA sense strand
ucaugaaggcccugcauca

SEQ ID NO: 241676 - RNA, 19 nt, Homo sapiens
  misc_RNA (1)...(19): siRNA sense strand
uggcagcaacacuguagua

SEQ ID NO: 241677 - RNA, 19 nt, Homo sapiens
  misc_RNA (1)...(19): siRNA sense strand
cgaaaguccgugaagaaag

SEQ ID NO: 241678 - RNA, 19 nt, Homo sapiens
  misc_RNA (1)...(19): siRNA sense strand
ugaugaggaugaggacuuc

SEQ ID NO: 241679 - RNA, 19 nt, Homo sapiens
  misc_RNA (1)...(19): siRNA sense strand
gcagucaacaacacagagu

SEQ ID NO: 241680 - RNA, 19 nt, Homo sapiens
  misc_RNA (1)...(19): siRNA sense strand
gggaugcagucaacaacac

SEQ ID NO: 241681 - RNA, 19 nt, Homo sapiens
  misc_RNA (1)...(19): siRNA sense strand
uaagcaugcaguggacaua

SEQ ID NO: 241682 - RNA, 19 nt, Homo sapiens
  misc_RNA (1)...(19): siRNA sense strand
ccagggacagauccagaaa

SEQ ID NO: 241683 - RNA, 19 nt, Homo sapiens
  misc_RNA (1)...(19): siRNA sense strand
ugacccgccugguggugaa

SEQ ID NO: 241684 - RNA, 19 nt, Homo sapiens
  misc_RNA (1)...(19): siRNA sense strand
gcaggaccaagcccuaaag

SEQ ID NO: 241685 - RNA, 19 nt, Homo sapiens
  misc_RNA (1)...(19): siRNA sense strand
ggaggagauugagcauuuu

SEQ ID NO: 241686 - RNA, 19 nt, Homo sapiens
  misc_RNA (1)...(19): siRNA sense strand
ggaccacaagaaacgcaaa

SEQ ID NO: 241687 - RNA, 19 nt, Homo sapiens
  misc_RNA (1)...(19): siRNA sense strand
caaacuguggagaucacua

SEQ ID NO: 241688 - RNA, 19 nt, Homo sapiens
  misc_RNA (1)...(19): siRNA sense strand
cagaugaaggagaacuauu

SEQ ID NO: 241689 - RNA, 19 nt, Homo sapiens
  misc_RNA (1)...(19): siRNA sense strand
uccagaaacugagaagcuu

SEQ ID NO: 241690 - RNA, 19 nt, Homo sapiens
  misc_RNA (1)...(19): siRNA sense strand
gaggacaccacggaugaug

SEQ ID NO: 241691 - RNA, 19 nt, Homo sapiens
  misc_RNA (1)...(19): siRNA sense strand
gggcacugcgacuuuguga

SEQ ID NO: 241692 - RNA, 19 nt, Homo sapiens
  misc_RNA (1)...(19): siRNA sense strand
caaccagcaguacuucugu

SEQ ID NO: 241693 - RNA, 19 nt, Homo sapiens
  misc_RNA (1)...(19): siRNA sense strand
gauggagaacugagcaagu

SEQ ID NO: 241694 - RNA, 19 nt, Homo sapiens
  misc_RNA (1)...(19): siRNA sense strand
uggaggacaccacggauga

SEQ ID NO: 241695 - RNA, 19 nt, Homo sapiens
  misc_RNA (1)...(19): siRNA sense strand
gaaagaacauccaagacaa

SEQ ID NO: 241696 - RNA, 19 nt, Homo sapiens
  misc_RNA (1)...(19): siRNA sense strand
gcaaguucgugaaggauuu

SEQ ID NO: 241697 - RNA, 19 nt, Homo sapiens
  misc_RNA (1)...(19): siRNA sense strand
ggaagccuguggcagaaua

SEQ ID NO: 241698 - RNA, 19 nt, Homo sapiens
  misc_RNA (1)...(19): siRNA sense strand
gaagagaggaucaugcaaa

SEQ ID NO: 241699 - RNA, 19 nt, Homo sapiens
  misc_RNA (1)...(19): siRNA sense strand
gaaaguccgugaagaaagg

SEQ ID NO: 241700 - RNA, 19 nt, Homo sapiens
  misc_RNA (1)...(19): siRNA sense strand
cgaaagaacauccaagaca

SEQ ID NO: 241701 - RNA, 19 nt, Homo sapiens
  misc_RNA (1)...(19): siRNA sense strand
caaggaguaugugggcuuu

SEQ ID NO: 241702 - RNA, 19 nt, Homo sapiens
  misc_RNA (1)...(19): siRNA sense strand
gagaggaucaugcaaacug

SEQ ID NO: 241703 - RNA, 19 nt, Homo sapiens
  misc_RNA (1)...(19): siRNA sense strand
gggcaagcuugaucccuau

SEQ ID NO: 241704 - RNA, 19 nt, Homo sapiens
  misc_RNA (1)...(19): siRNA sense strand
gugaaggauuucucaggaa

SEQ ID NO: 241705 - RNA, 19 nt, Homo sapiens
  misc_RNA (1)...(19): siRNA sense strand
auacauugaucagcaguuu

SEQ ID NO: 241706 - RNA, 19 nt, Homo sapiens
  misc_RNA (1)...(19): siRNA sense strand
gaaacuucuuggugcugaa

SEQ ID NO: 241707 - RNA, 19 nt, Homo sapiens
  misc_RNA (1)...(19): siRNA sense strand
ccaaccaaguccaccgaaa

SEQ ID NO: 241708 - RNA, 19 nt, Homo sapiens
  misc_RNA (1)...(19): siRNA sense strand
agaguggccugaaccgaaa

SEQ ID NO: 241709 - RNA, 19 nt, Homo sapiens
  misc_RNA (1)...(19): siRNA sense strand
aauccacacuugucaauag

SEQ ID NO: 241710 - RNA, 19 nt, Homo sapiens
  misc_RNA (1)...(19): siRNA sense strand
ggagaucacuaagcaugca

SEQ ID NO: 241711 - RNA, 19 nt, Homo sapiens
  misc_RNA (1)...(19): siRNA sense strand
ugagcaaguucgugaagga

SEQ ID NO: 241712 - RNA, 19 nt, Homo sapiens
  misc_RNA (1)...(19): siRNA sense strand
caccacggaugauggagaa

SEQ ID NO: 241713 - RNA, 19 nt, Homo sapiens
  misc_RNA (1)...(19): siRNA sense strand
ggacaccacggaugaugga

SEQ ID NO: 241714 - RNA, 19 nt, Homo sapiens
  misc_RNA (1)...(19): siRNA sense strand
gcuaagaccugggcaucca

SEQ ID NO: 241715 - RNA, 19 nt, Homo sapiens
  misc_RNA (1)...(19): siRNA sense strand
aaacuguggagaucacuaa

SEQ ID NO: 241716 - RNA, 19 nt, Homo sapiens
  misc_RNA (1)...(19): siRNA sense strand
gcaaauccacacuugucaa

SEQ ID NO: 241717 - RNA, 19 nt, Homo sapiens
  misc_RNA (1)...(19): siRNA sense strand
caaauccacacuugucaau

SEQ ID NO: 241718 - RNA, 19 nt, Homo sapiens
  misc_RNA (1)...(19): siRNA sense strand
gaaccgaaagaacauccaa

SEQ ID NO: 241719 - RNA, 19 nt, Homo sapiens
  misc_RNA (1)...(19): siRNA sense strand
ggaccucuaugaugaugac

SEQ ID NO: 241720 - RNA, 19 nt, Homo sapiens
  misc_RNA (1)...(19): siRNA sense strand
gggcaaauccacacuuguc

SEQ ID NO: 241721 - RNA, 19 nt, Homo sapiens
  misc_RNA (1)...(19): siRNA sense strand
gcaagcuugaucccuauga

SEQ ID NO: 241722 - RNA, 19 nt, Homo sapiens
  misc_RNA (1)...(19): siRNA sense strand
caagcuugaucccuaugau

SEQ ID NO: 241723 - RNA, 19 nt, Homo sapiens
  misc_RNA (1)...(19): siRNA sense strand
ggccugaaccgaaagaaca

SEQ ID NO: 241724 - RNA, 19 nt, Homo sapiens
  misc_RNA (1)...(19): siRNA sense strand
gcaugcaguggacauagaa

SEQ ID NO: 241725 - RNA, 19 nt, Homo sapiens
  misc_RNA (1)...(19): siRNA sense strand
gcaguggacauagaagaga

SEQ ID NO: 241726 - RNA, 19 nt, Homo sapiens
  misc_RNA (1)...(19): siRNA sense strand
caaccaaguccaccgaaag

SEQ ID NO: 241727 - RNA, 19 nt, Homo sapiens
  misc_RNA (1)...(19): siRNA sense strand
gcacugcugccuguacuuc

SEQ ID NO: 241728 - RNA, 19 nt, Homo sapiens
  misc_RNA (1)...(19): siRNA sense strand
caguggacauagaagagaa

SEQ ID NO: 241729 - RNA, 19 nt, Homo sapiens
  misc_RNA (1)...(19): siRNA sense strand
gaugaugaccuggaguuca

SEQ ID NO: 241730 - RNA, 19 nt, Homo sapiens
  misc_RNA (1)...(19): siRNA sense strand
acauugaucagcaguuuga

SEQ ID NO: 241731 - RNA, 19 nt, Homo sapiens
  misc_RNA (1)...(19): siRNA sense strand
ccgaaaguccgugaagaaa

SEQ ID NO: 241732 - RNA, 19 nt, Homo sapiens
  misc_RNA (1)...(19): siRNA sense strand
caccgaaaguccgugaaga

SEQ ID NO: 241733 - RNA, 19 nt, Homo sapiens
  misc_RNA (1)...(19): siRNA sense strand
ccucugacaaccagcagua

SEQ ID NO: 241734 - RNA, 19 nt, Homo sapiens
  misc_RNA (1)...(19): siRNA sense strand
caugcaaacuguggagauc

SEQ ID NO: 241735 - RNA, 19 nt, Homo sapiens
  misc_RNA (1)...(19): siRNA sense strand
aagagaggaucaugcaaac

SEQ ID NO: 241736 - RNA, 19 nt, Homo sapiens
  misc_RNA (1)...(19): siRNA sense strand
cgaaaguccgugaagaaag

SEQ ID NO: 241737 - RNA, 19 nt, Homo sapiens
  misc_RNA (1)...(19): siRNA sense strand
gcagucaacaacacagagu

SEQ ID NO: 241738 - RNA, 19 nt, Homo sapiens
  misc_RNA (1)...(19): siRNA sense strand
gggaugcagucaacaacac

SEQ ID NO: 241739 - RNA, 19 nt, Homo sapiens
  misc_RNA (1)...(19): siRNA sense strand
uaagcaugcaguggacaua

SEQ ID NO: 241740 - RNA, 19 nt, Homo sapiens
  misc_RNA (1)...(19): siRNA sense strand
gaggacaccacggaugaug

SEQ ID NO: 241741 - RNA, 19 nt, Homo sapiens
  misc_RNA (1)...(19): siRNA sense strand
uggaggacaccacggauga

SEQ ID NO: 241742 - RNA, 19 nt, Homo sapiens
  misc_RNA (1)...(19): siRNA sense strand
caaacuguggagaucacua

SEQ ID NO: 241743 - RNA, 19 nt, Homo sapiens
  misc_RNA (1)...(19): siRNA sense strand
caaccagcaguacuucugu

SEQ ID NO: 241744 - RNA, 19 nt, Homo sapiens
  misc_RNA (1)...(19): siRNA sense strand
gauggagaacugagcaagu

SEQ ID NO: 241745 - RNA, 19 nt, Homo sapiens
  misc_RNA (1)...(19): siRNA sense strand
cugggcaaauccacacuug

SEQ ID NO: 241746 - RNA, 19 nt, Homo sapiens
  misc_RNA (1)...(19): siRNA sense strand
gccuguggcagaauacauu

SEQ ID NO: 241747 - RNA, 19 nt, Homo sapiens
  misc_RNA (1)...(19): siRNA sense strand
agaggaucaugcaaacugu

SEQ ID NO: 241748 - RNA, 19 nt, Homo sapiens
  misc_RNA (1)...(19): siRNA sense strand
ggcugcggcucaccauugu

SEQ ID NO: 241749 - RNA, 19 nt, Homo sapiens
  misc_RNA (1)...(19): siRNA sense strand
ggcaaauccacacuuguca

SEQ ID NO: 241750 - RNA, 19 nt, Homo sapiens
  misc_RNA (1)...(19): siRNA sense strand
gcaguuugagcaguauuuc

SEQ ID NO: 241751 - RNA, 19 nt, Homo sapiens
  misc_RNA (1)...(19): siRNA sense strand
ccccggaccucuaugauga

SEQ ID NO: 241752 - RNA, 19 nt, Homo sapiens
  misc_RNA (1)...(19): siRNA sense strand
cuguggagaucacuaagca

SEQ ID NO: 241753 - RNA, 19 nt, Homo sapiens
  misc_RNA (1)...(19): siRNA sense strand
agacgagaguggccugaac

SEQ ID NO: 241754 - RNA, 19 nt, Homo sapiens
  misc_RNA (1)...(19): siRNA sense strand
gaaagaacauccaagacaa

SEQ ID NO: 241755 - RNA, 19 nt, Homo sapiens
  misc_RNA (1)...(19): siRNA sense strand
gggaggagauugagcauuu

SEQ ID NO: 241756 - RNA, 19 nt, Homo sapiens
  misc_RNA (1)...(19): siRNA sense strand
ggacagauccagaaacuga

SEQ ID NO: 241757 - RNA, 19 nt, Homo sapiens
  misc_RNA (1)...(19): siRNA sense strand
gcaaguucgugaaggauuu

SEQ ID NO: 241758 - RNA, 19 nt, Homo sapiens
  misc_RNA (1)...(19): siRNA sense strand
ggaagccuguggcagaaua

SEQ ID NO: 241759 - RNA, 19 nt, Homo sapiens
  misc_RNA (1)...(19): siRNA sense strand
gaagagaggaucaugcaaa

SEQ ID NO: 241760 - RNA, 19 nt, Homo sapiens
  misc_RNA (1)...(19): siRNA sense strand
ggaccaagcccuaaaggaa

SEQ ID NO: 241761 - RNA, 19 nt, Homo sapiens
  misc_RNA (1)...(19): siRNA sense strand
gaaaguccgugaagaaagg

SEQ ID NO: 241762 - RNA, 19 nt, Homo sapiens
  misc_RNA (1)...(19): siRNA sense strand
gccauuggauguugaauuc

SEQ ID NO: 241763 - RNA, 19 nt, Homo sapiens
  misc_RNA (1)...(19): siRNA sense strand
ggaugaggacuucaaauug

SEQ ID NO: 241764 - RNA, 19 nt, Homo sapiens
  misc_RNA (1)...(19): siRNA sense strand
gaugaggacuucaaauugc

SEQ ID NO: 241765 - RNA, 19 nt, Homo sapiens
  misc_RNA (1)...(19): siRNA sense strand
ggagacacauuaugagaac

SEQ ID NO: 241766 - RNA, 19 nt, Homo sapiens
  misc_RNA (1)...(19): siRNA sense strand
cagcaacacuguaguagag

SEQ ID NO: 241767 - RNA, 19 nt, Homo sapiens
  misc_RNA (1)...(19): siRNA sense strand
gaugaaggagaacuauuaa

SEQ ID NO: 241768 - RNA, 19 nt, Homo sapiens
  misc_RNA (1)...(19): siRNA sense strand
agaugaaggagaacuauua

SEQ ID NO: 241769 - RNA, 19 nt, Homo sapiens
  misc_RNA (1)...(19): siRNA sense strand
cgaaagaacauccaagaca

SEQ ID NO: 241770 - RNA, 19 nt, Homo sapiens
  misc_RNA (1)...(19): siRNA sense strand
gaccaagcccuaaaggaaa

SEQ ID NO: 241771 - RNA, 19 nt, Homo sapiens
  misc_RNA (1)...(19): siRNA sense strand
caaggaguaugugggcuuu

SEQ ID NO: 241772 - RNA, 19 nt, Homo sapiens
  misc_RNA (1)...(19): siRNA sense strand
ggaaucaagaucuaucaau

SEQ ID NO: 241773 - RNA, 19 nt, Homo sapiens
  misc_RNA (1)...(19): siRNA sense strand
gcacugcgacuuugugaag

SEQ ID NO: 241774 - RNA, 19 nt, Homo sapiens
  misc_RNA (1)...(19): siRNA sense strand
gagaggaucaugcaaacug

SEQ ID NO: 241775 - RNA, 19 nt, Homo sapiens
  misc_RNA (1)...(19): siRNA sense strand
caaacugacucgggaaagu

SEQ ID NO: 241776 - RNA, 19 nt, Homo sapiens
  misc_RNA (1)...(19): siRNA sense strand
gggcaagcuugaucccuau

SEQ ID NO: 241777 - RNA, 19 nt, Homo sapiens
  misc_RNA (1)...(19): siRNA sense strand
uaaaggaaagcaucccauu

SEQ ID NO: 241778 - RNA, 19 nt, Homo sapiens
  misc_RNA (1)...(19): siRNA sense strand
gaaacuucuuggugcugaa

SEQ ID NO: 241779 - RNA, 19 nt, Homo sapiens
  misc_RNA (1)...(19): siRNA sense strand
gugaaggauuucucaggaa

SEQ ID NO: 241780 - RNA, 19 nt, Homo sapiens
  misc_RNA (1)...(19): siRNA sense strand
caucccauuugcaguaauu

SEQ ID NO: 241781 - RNA, 19 nt, Homo sapiens
  misc_RNA (1)...(19): siRNA sense strand
auacauugaucagcaguuu

SEQ ID NO: 241782 - RNA, 19 nt, Homo sapiens
  misc_RNA (1)...(19): siRNA sense strand
ccaaccaaguccaccgaaa

SEQ ID NO: 241783 - RNA, 19 nt, Homo sapiens
  misc_RNA (1)...(19): siRNA sense strand
aaggaaagcaucccauuug

SEQ ID NO: 241784 - RNA, 19 nt, Homo sapiens
  misc_RNA (1)...(19): siRNA sense strand
agaguggccugaaccgaaa

SEQ ID NO: 241785 - RNA, 19 nt, Homo sapiens
  misc_RNA (1)...(19): siRNA sense strand
aauccacacuugucaauag

SEQ ID NO: 241786 - RNA, 19 nt, Homo sapiens
  misc_RNA (1)...(19): siRNA sense strand
aaaggaaagcaucccauuu

SEQ ID NO: 241787 - RNA, 19 nt, Homo sapiens
  misc_RNA (1)...(19): siRNA sense strand
ggagaucacuaagcaugca

SEQ ID NO: 241788 - RNA, 19 nt, Homo sapiens
  misc_RNA (1)...(19): siRNA sense strand
ugagcaaguucgugaagga

SEQ ID NO: 241789 - RNA, 19 nt, Homo sapiens
  misc_RNA (1)...(19): siRNA sense strand
ggacaccacggaugaugga

SEQ ID NO: 241790 - RNA, 19 nt, Homo sapiens
  misc_RNA (1)...(19): siRNA sense strand
ccagaaacugagaagcuua

SEQ ID NO: 241791 - RNA, 19 nt, Homo sapiens
  misc_RNA (1)...(19): siRNA sense strand
caccacggaugauggagaa

SEQ ID NO: 241792 - RNA, 19 nt, Homo sapiens
  misc_RNA (1)...(19): siRNA sense strand
gcaaauccacacuugucaa

SEQ ID NO: 241793 - RNA, 19 nt, Homo sapiens
  misc_RNA (1)...(19): siRNA sense strand
gggagacacauuaugagaa

SEQ ID NO: 241794 - RNA, 19 nt, Homo sapiens
  misc_RNA (1)...(19): siRNA sense strand
gcuaagaccugggcaucca

SEQ ID NO: 241795 - RNA, 19 nt, Homo sapiens
  misc_RNA (1)...(19): siRNA sense strand
aaacuguggagaucacuaa

SEQ ID NO: 241796 - RNA, 19 nt, Homo sapiens
  misc_RNA (1)...(19): siRNA sense strand
caaauccacacuugucaau

SEQ ID NO: 241797 - RNA, 19 nt, Homo sapiens
  misc_RNA (1)...(19): siRNA sense strand
gaaccgaaagaacauccaa

SEQ ID NO: 241798 - RNA, 19 nt, Homo sapiens
  misc_RNA (1)...(19): siRNA sense strand
aagcaucccauuugcagua

SEQ ID NO: 241799 - RNA, 19 nt, Homo sapiens
  misc_RNA (1)...(19): siRNA sense strand
gcagcaacacuguaguaga

SEQ ID NO: 241800 - RNA, 19 nt, Homo sapiens
  misc_RNA (1)...(19): siRNA sense strand
ggaccucuaugaugaugac

SEQ ID NO: 241801 - RNA, 19 nt, Homo sapiens
  misc_RNA (1)...(19): siRNA sense strand
gggcaaauccacacuuguc

SEQ ID NO: 241802 - RNA, 19 nt, Homo sapiens
  misc_RNA (1)...(19): siRNA sense strand
ccagggcacugcgacuuug

SEQ ID NO: 241803 - RNA, 19 nt, Homo sapiens
  misc_RNA (1)...(19): siRNA sense strand
ggaaagcaucccauuugca

SEQ ID NO: 241804 - RNA, 19 nt, Homo sapiens
  misc_RNA (1)...(19): siRNA sense strand
gcaagcuugaucccuauga

SEQ ID NO: 241805 - RNA, 19 nt, Homo sapiens
  misc_RNA (1)...(19): siRNA sense strand
caagcuugaucccuaugau

SEQ ID NO: 241806 - RNA, 19 nt, Homo sapiens
  misc_RNA (1)...(19): siRNA sense strand
ggccugaaccgaaagaaca

SEQ ID NO: 241807 - RNA, 19 nt, Homo sapiens
  misc_RNA (1)...(19): siRNA sense strand
gcaggagaugcuacacaaa

SEQ ID NO: 241808 - RNA, 19 nt, Homo sapiens
  misc_RNA (1)...(19): siRNA sense strand
ugcaggagaugcuacacaa

SEQ ID NO: 241809 - RNA, 19 nt, Homo sapiens
  misc_RNA (1)...(19): siRNA sense strand
aggaugaggacuucaaauu

SEQ ID NO: 241810 - RNA, 19 nt, Homo sapiens
  misc_RNA (1)...(19): siRNA sense strand
gcaugcaguggacauagaa

SEQ ID NO: 241811 - RNA, 19 nt, Homo sapiens
  misc_RNA (1)...(19): siRNA sense strand
ggagaugcuacacaaaaua

SEQ ID NO: 241812 - RNA, 19 nt, Homo sapiens
  misc_RNA (1)...(19): siRNA sense strand
gagaagcuuauccgagaga

SEQ ID NO: 241813 - RNA, 19 nt, Homo sapiens
  misc_RNA (1)...(19): siRNA sense strand
agacacauuaugagaacua

SEQ ID NO: 241814 - RNA, 19 nt, Homo sapiens
  misc_RNA (1)...(19): siRNA sense strand
gcaguggacauagaagaga

SEQ ID NO: 241815 - RNA, 19 nt, Homo sapiens
  misc_RNA (1)...(19): siRNA sense strand
caaccaaguccaccgaaag

SEQ ID NO: 241816 - RNA, 19 nt, Homo sapiens
  misc_RNA (1)...(19): siRNA sense strand
gcacugcugccuguacuuc

SEQ ID NO: 241817 - RNA, 19 nt, Homo sapiens
  misc_RNA (1)...(19): siRNA sense strand
caguggacauagaagagaa

SEQ ID NO: 241818 - RNA, 19 nt, Homo sapiens
  misc_RNA (1)...(19): siRNA sense strand
ccgaaaguccgugaagaaa

SEQ ID NO: 241819 - RNA, 19 nt, Homo sapiens
  misc_RNA (1)...(19): siRNA sense strand
gaagcuuauccgagagaaa

SEQ ID NO: 241820 - RNA, 19 nt, Homo sapiens
  misc_RNA (1)...(19): siRNA sense strand
acauugaucagcaguuuga

SEQ ID NO: 241821 - RNA, 19 nt, Homo sapiens
  misc_RNA (1)...(19): siRNA sense strand
gaugaugaccuggaguuca

SEQ ID NO: 241822 - RNA, 19 nt, Homo sapiens
  misc_RNA (1)...(19): siRNA sense strand
caccgaaaguccgugaaga

SEQ ID NO: 241823 - RNA, 19 nt, Homo sapiens
  misc_RNA (1)...(19): siRNA sense strand
acugacaccucccgaagug

SEQ ID NO: 241824 - RNA, 19 nt, Homo sapiens
  misc_RNA (1)...(19): siRNA sense strand
ggccauuggauguugaauu

SEQ ID NO: 241825 - RNA, 19 nt, Homo sapiens
  misc_RNA (1)...(19): siRNA sense strand
gggcaucguggaaguggaa

SEQ ID NO: 241826 - RNA, 19 nt, Homo sapiens
  misc_RNA (1)...(19): siRNA sense strand
gcaguaauuggcagcaaca

SEQ ID NO: 241827 - RNA, 19 nt, Homo sapiens
  misc_RNA (1)...(19): siRNA sense strand
gcuaaggcagacacacuga

SEQ ID NO: 241828 - RNA, 19 nt, Homo sapiens
  misc_RNA (1)...(19): siRNA sense strand
gggucaacaucgugccuau

SEQ ID NO: 241829 - RNA, 19 nt, Homo sapiens
  misc_RNA (1)...(19): siRNA sense strand
cauuggauguugaauucau

SEQ ID NO: 241830 - RNA, 19 nt, Homo sapiens
  misc_RNA (1)...(19): siRNA sense strand
aagagaggaucaugcaaac

SEQ ID NO: 241831 - RNA, 19 nt, Homo sapiens
  misc_RNA (1)...(19): siRNA sense strand
cagaaacugagaagcuuau

SEQ ID NO: 241832 - RNA, 19 nt, Homo sapiens
  misc_RNA (1)...(19): siRNA sense strand
ccucugacaaccagcagua

SEQ ID NO: 241833 - RNA, 19 nt, Homo sapiens
  misc_RNA (1)...(19): siRNA sense strand
caugcaaacuguggagauc

SEQ ID NO: 241834 - RNA, 19 nt, Homo sapiens
  misc_RNA (1)...(19): siRNA sense strand
ucaugaaggcccugcauca

SEQ ID NO: 241835 - RNA, 19 nt, Homo sapiens
  misc_RNA (1)...(19): siRNA sense strand
uggcagcaacacuguagua

SEQ ID NO: 241836 - RNA, 19 nt, Homo sapiens
  misc_RNA (1)...(19): siRNA sense strand
cgaaaguccgugaagaaag

SEQ ID NO: 241837 - RNA, 19 nt, Homo sapiens
  misc_RNA (1)...(19): siRNA sense strand
ugaugaggaugaggacuuc

SEQ ID NO: 241838 - RNA, 19 nt, Homo sapiens
  misc_RNA (1)...(19): siRNA sense strand
gcagucaacaacacagagu

SEQ ID NO: 241839 - RNA, 19 nt, Homo sapiens
  misc_RNA (1)...(19): siRNA sense strand
gggaugcagucaacaacac

SEQ ID NO: 241840 - RNA, 19 nt, Homo sapiens
  misc_RNA (1)...(19): siRNA sense strand
uaagcaugcaguggacaua

SEQ ID NO: 241841 - RNA, 19 nt, Homo sapiens
  misc_RNA (1)...(19): siRNA sense strand
ccagggacagauccagaaa

SEQ ID NO: 241842 - RNA, 19 nt, Homo sapiens
  misc_RNA (1)...(19): siRNA sense strand
ugacccgccugguggugaa

SEQ ID NO: 241843 - RNA, 19 nt, Homo sapiens
  misc_RNA (1)...(19): siRNA sense strand
gcaggaccaagcccuaaag

SEQ ID NO: 241844 - RNA, 19 nt, Homo sapiens
  misc_RNA (1)...(19): siRNA sense strand
ggaggagauugagcauuuu

SEQ ID NO: 241845 - RNA, 19 nt, Homo sapiens
  misc_RNA (1)...(19): siRNA sense strand
ggaccacaagaaacgcaaa

SEQ ID NO: 241846 - RNA, 19 nt, Homo sapiens
  misc_RNA (1)...(19): siRNA sense strand
caaacuguggagaucacua

SEQ ID NO: 241847 - RNA, 19 nt, Homo sapiens
  misc_RNA (1)...(19): siRNA sense strand
cagaugaaggagaacuauu

SEQ ID NO: 241848 - RNA, 19 nt, Homo sapiens
  misc_RNA (1)...(19): siRNA sense strand
uccagaaacugagaagcuu

SEQ ID NO: 241849 - RNA, 19 nt, Homo sapiens
  misc_RNA (1)...(19): siRNA sense strand
gaggacaccacggaugaug

SEQ ID NO: 241850 - RNA, 19 nt, Homo sapiens
  misc_RNA (1)...(19): siRNA sense strand
gggcacugcgacuuuguga

SEQ ID NO: 241851 - RNA, 19 nt, Homo sapiens
  misc_RNA (1)...(19): siRNA sense strand
caaccagcaguacuucugu

SEQ ID NO: 241852 - RNA, 19 nt, Homo sapiens
  misc_RNA (1)...(19): siRNA sense strand
gauggagaacugagcaagu

SEQ ID NO: 241853 - RNA, 19 nt, Homo sapiens
  misc_RNA (1)...(19): siRNA sense strand
uggaggacaccacggauga

SEQ ID NO: 241854 - RNA, 19 nt, Homo sapiens
  misc_RNA (1)...(19): siRNA sense strand
gcaaguucgugaaggauuu

SEQ ID NO: 241855 - RNA, 19 nt, Homo sapiens
  misc_RNA (1)...(19): siRNA sense strand
gggcaagcuugaucccuau

SEQ ID NO: 241856 - RNA, 19 nt, Homo sapiens
  misc_RNA (1)...(19): siRNA sense strand
gugaaggauuucucaggaa

SEQ ID NO: 241857 - RNA, 19 nt, Homo sapiens
  misc_RNA (1)...(19): siRNA sense strand
ugagcaaguucgugaagga

SEQ ID NO: 241858 - RNA, 19 nt, Homo sapiens
  misc_RNA (1)...(19): siRNA sense strand
caccacggaugauggagaa

SEQ ID NO: 241859 - RNA, 19 nt, Homo sapiens
  misc_RNA (1)...(19): siRNA sense strand
ggacaccacggaugaugga

SEQ ID NO: 241860 - RNA, 19 nt, Homo sapiens
  misc_RNA (1)...(19): siRNA sense strand
gcuaagaccugggcaucca

SEQ ID NO: 241861 - RNA, 19 nt, Homo sapiens
  misc_RNA (1)...(19): siRNA sense strand
ggaccucuaugaugaugac

SEQ ID NO: 241862 - RNA, 19 nt, Homo sapiens
  misc_RNA (1)...(19): siRNA sense strand
gcaagcuugaucccuauga

SEQ ID NO: 241863 - RNA, 19 nt, Homo sapiens
  misc_RNA (1)...(19): siRNA sense strand
caagcuugaucccuaugau

SEQ ID NO: 241864 - RNA, 19 nt, Homo sapiens
  misc_RNA (1)...(19): siRNA sense strand
gaugaugaccuggaguuca

SEQ ID NO: 241865 - RNA, 19 nt, Homo sapiens
  misc_RNA (1)...(19): siRNA sense strand
ccucugacaaccagcagua

SEQ ID NO: 241866 - RNA, 19 nt, Homo sapiens
  misc_RNA (1)...(19): siRNA sense strand
uggaggacaccacggauga

SEQ ID NO: 241867 - RNA, 19 nt, Homo sapiens
  misc_RNA (1)...(19): siRNA sense strand
caaccagcaguacuucugu

SEQ ID NO: 241868 - RNA, 19 nt, Homo sapiens
  misc_RNA (1)...(19): siRNA sense strand
gauggagaacugagcaagu

SEQ ID NO: 241869 - RNA, 19 nt, Homo sapiens
  misc_RNA (1)...(19): siRNA sense strand
gaggacaccacggaugaug

SEQ ID NO: 241870 - RNA, 19 nt, Homo sapiens
  misc_RNA (1)...(19): siRNA sense strand
ccccggaccucuaugauga

SEQ ID NO: 241871 - RNA, 19 nt, Homo sapiens
  misc_RNA (1)...(19): siRNA sense strand
cgacguggccuuccucgau

SEQ ID NO: 241872 - RNA, 19 nt, Homo sapiens
  misc_RNA (1)...(19): siRNA sense strand
cgucugaacagguggcaaa

SEQ ID NO: 241873 - RNA, 19 nt, Homo sapiens
  misc_RNA (1)...(19): siRNA sense strand
cagaggagaaggucaucuu

SEQ ID NO: 241874 - RNA, 19 nt, Homo sapiens
  misc_RNA (1)...(19): siRNA sense strand
cguggccgauggagaguuc

SEQ ID NO: 241875 - RNA, 19 nt, Homo sapiens
  misc_RNA (1)...(19): siRNA sense strand
ccaauaggcugaaauucua

SEQ ID NO: 241876 - RNA, 19 nt, Homo sapiens
  misc_RNA (1)...(19): siRNA sense strand
ccuaauaucugguggcuuu

SEQ ID NO: 241877 - RNA, 19 nt, Homo sapiens
  misc_RNA (1)...(19): siRNA sense strand
ugggagaacuggaagaaua

SEQ ID NO: 241878 - RNA, 19 nt, Homo sapiens
  misc_RNA (1)...(19): siRNA sense strand
ggcaacaagucaaggauaa

SEQ ID NO: 241879 - RNA, 19 nt, Homo sapiens
  misc_RNA (1)...(19): siRNA sense strand
ggagcgaaauguucagguu

SEQ ID NO: 241880 - RNA, 19 nt, Homo sapiens
  misc_RNA (1)...(19): siRNA sense strand
aggcugaaauucuacuuua

SEQ ID NO: 241881 - RNA, 19 nt, Homo sapiens
  misc_RNA (1)...(19): siRNA sense strand
ggagauggugccacagaua

SEQ ID NO: 241882 - RNA, 19 nt, Homo sapiens
  misc_RNA (1)...(19): siRNA sense strand
gaaaugugaucaggcaaca

SEQ ID NO: 241883 - RNA, 19 nt, Homo sapiens
  misc_RNA (1)...(19): siRNA sense strand
ucugguggcuuuaggagua

SEQ ID NO: 241884 - RNA, 19 nt, Homo sapiens
  misc_RNA (1)...(19): siRNA sense strand
gagaagaaggaaucgauga

SEQ ID NO: 241885 - RNA, 19 nt, Homo sapiens
  misc_RNA (1)...(19): siRNA sense strand
uuucaaagcugcucucaca

SEQ ID NO: 241886 - RNA, 19 nt, Homo sapiens
  misc_RNA (1)...(19): siRNA sense strand
ggauaacgccaaaugguau

SEQ ID NO: 241887 - RNA, 19 nt, Homo sapiens
  misc_RNA (1)...(19): siRNA sense strand
ccaaaugguauaucacuga

SEQ ID NO: 241888 - RNA, 19 nt, Homo sapiens
  misc_RNA (1)...(19): siRNA sense strand
gggagaacuggaagaauaa

SEQ ID NO: 241889 - RNA, 19 nt, Homo sapiens
  misc_RNA (1)...(19): siRNA sense strand
ggcugaaauucuacuuuaa

SEQ ID NO: 241890 - RNA, 19 nt, Homo sapiens
  misc_RNA (1)...(19): siRNA sense strand
gauaacgccaaaugguaua

SEQ ID NO: 241891 - RNA, 19 nt, Homo sapiens
  misc_RNA (1)...(19): siRNA sense strand
gagcgaaauguucagguuu

SEQ ID NO: 241892 - RNA, 19 nt, Homo sapiens
  misc_RNA (1)...(19): siRNA sense strand
gagauggugccacagauau

SEQ ID NO: 241893 - RNA, 19 nt, Homo sapiens
  misc_RNA (1)...(19): siRNA sense strand
gcacggucaucagagaaga

SEQ ID NO: 241894 - RNA, 19 nt, Homo sapiens
  misc_RNA (1)...(19): siRNA sense strand
caucagagaagaaggaauc

SEQ ID NO: 241895 - RNA, 19 nt, Homo sapiens
  misc_RNA (1)...(19): siRNA sense strand
gccaauaggcugaaauucu

SEQ ID NO: 241896 - RNA, 19 nt, Homo sapiens
  misc_RNA (1)...(19): siRNA sense strand
ggaguauuguagagcaugu

SEQ ID NO: 241897 - RNA, 19 nt, Homo sapiens
  misc_RNA (1)...(19): siRNA sense strand
gcaggugcagagacucaua

SEQ ID NO: 241898 - RNA, 19 nt, Homo sapiens
  misc_RNA (1)...(19): siRNA sense strand
ucaaggauaacgccaaaug

SEQ ID NO: 241899 - RNA, 19 nt, Homo sapiens
  misc_RNA (1)...(19): siRNA sense strand
ucaaagcugcucucacaga

SEQ ID NO: 241900 - RNA, 19 nt, Homo sapiens
  misc_RNA (1)...(19): siRNA sense strand
ggaaaaggaaaagugauua

SEQ ID NO: 241901 - RNA, 19 nt, Homo sapiens
  misc_RNA (1)...(19): siRNA sense strand
gcugaugcuuucauuggau

SEQ ID NO: 241902 - RNA, 19 nt, Homo sapiens
  misc_RNA (1)...(19): siRNA sense strand
agucaaggauaacgccaaa

SEQ ID NO: 241903 - RNA, 19 nt, Homo sapiens
  misc_RNA (1)...(19): siRNA sense strand
ggacgcggugucagaaaug

SEQ ID NO: 241904 - RNA, 19 nt, Homo sapiens
  misc_RNA (1)...(19): siRNA sense strand
ggucaucagagaagaagga

SEQ ID NO: 241905 - RNA, 19 nt, Homo sapiens
  misc_RNA (1)...(19): siRNA sense strand
cuacaggagcgaaauguuc

SEQ ID NO: 241906 - RNA, 19 nt, Homo sapiens
  misc_RNA (1)...(19): siRNA sense strand
gggagcaggugcagagacu

SEQ ID NO: 241907 - RNA, 19 nt, Homo sapiens
  misc_RNA (1)...(19): siRNA sense strand
gagcaggugcagagacuca

SEQ ID NO: 241908 - RNA, 19 nt, Homo sapiens
  misc_RNA (1)...(19): siRNA sense strand
agaaggaaucgaugagcua

SEQ ID NO: 241909 - RNA, 19 nt, Homo sapiens
  misc_RNA (1)...(19): siRNA sense strand
acagcacggucaucagaga

SEQ ID NO: 241910 - RNA, 19 nt, Homo sapiens
  misc_RNA (1)...(19): siRNA sense strand
cuacuuuaacggugaauau

SEQ ID NO: 241911 - RNA, 19 nt, Homo sapiens
  misc_RNA (1)...(19): siRNA sense strand
cccagcaaccaauguauuu

SEQ ID NO: 241912 - RNA, 19 nt, Homo sapiens
  misc_RNA (1)...(19): siRNA sense strand
gcugguaagucgccuacag

SEQ ID NO: 241913 - RNA, 19 nt, Homo sapiens
  misc_RNA (1)...(19): siRNA sense strand
gaucaggcaacaagucaag

SEQ ID NO: 241914 - RNA, 19 nt, Homo sapiens
  misc_RNA (1)...(19): siRNA sense strand
gacgcggugucagaaauga

SEQ ID NO: 241915 - RNA, 19 nt, Homo sapiens
  misc_RNA (1)...(19): siRNA sense strand
ugaggaagcuuuucuacuc

SEQ ID NO: 241916 - RNA, 19 nt, Homo sapiens
  misc_RNA (1)...(19): siRNA sense strand
aggauaacgccaaauggua

SEQ ID NO: 241917 - RNA, 19 nt, Homo sapiens
  misc_RNA (1)...(19): siRNA sense strand
cagagaagaaggaaucgau

SEQ ID NO: 241918 - RNA, 19 nt, Homo sapiens
  misc_RNA (1)...(19): siRNA sense strand
caauaucccagcaaccaau

SEQ ID NO: 241919 - RNA, 19 nt, Homo sapiens
  misc_RNA (1)...(19): siRNA sense strand
ggcauaagggagcugguaa

SEQ ID NO: 241920 - RNA, 19 nt, Homo sapiens
  misc_RNA (1)...(19): siRNA sense strand
guucagguuuuccuaauau

SEQ ID NO: 241921 - RNA, 19 nt, Homo sapiens
  misc_RNA (1)...(19): siRNA sense strand
gcugaaauucuacuuuaac

SEQ ID NO: 241922 - RNA, 19 nt, Homo sapiens
  misc_RNA (1)...(19): siRNA sense strand
gcugggagaacuggaagaa

SEQ ID NO: 241923 - RNA, 19 nt, Homo sapiens
  misc_RNA (1)...(19): siRNA sense strand
ucgaugagcuagccaaaau

SEQ ID NO: 241924 - RNA, 19 nt, Homo sapiens
  misc_RNA (1)...(19): siRNA sense strand
gaggacgcggugucagaaa

SEQ ID NO: 241925 - RNA, 19 nt, Homo sapiens
  misc_RNA (1)...(19): siRNA sense strand
caaaaucuguggcguugag

SEQ ID NO: 241926 - RNA, 19 nt, Homo sapiens
  misc_RNA (1)...(19): siRNA sense strand
uaucccagcaaccaaugua

SEQ ID NO: 241927 - RNA, 19 nt, Homo sapiens
  misc_RNA (1)...(19): siRNA sense strand
gaggaagcuuuucuacuca

SEQ ID NO: 241928 - RNA, 19 nt, Homo sapiens
  misc_RNA (1)...(19): siRNA sense strand
cugaugcuuucauuggauu

SEQ ID NO: 241929 - RNA, 19 nt, Homo sapiens
  misc_RNA (1)...(19): siRNA sense strand
gcauaagggagcugguaag

SEQ ID NO: 241930 - RNA, 19 nt, Homo sapiens
  misc_RNA (1)...(19): siRNA sense strand
caaggauaacgccaaaugg

SEQ ID NO: 241931 - RNA, 19 nt, Homo sapiens
  misc_RNA (1)...(19): siRNA sense strand
gugaucaggcaacaaguca

SEQ ID NO: 241932 - RNA, 19 nt, Homo sapiens
  misc_RNA (1)...(19): siRNA sense strand
cggcauaagggagcuggua

SEQ ID NO: 241933 - RNA, 19 nt, Homo sapiens
  misc_RNA (1)...(19): siRNA sense strand
aggcaacaagucaaggaua

SEQ ID NO: 241934 - RNA, 19 nt, Homo sapiens
  misc_RNA (1)...(19): siRNA sense strand
ggagaccuaugacauguuu

SEQ ID NO: 241935 - RNA, 19 nt, Homo sapiens
  misc_RNA (1)...(19): siRNA sense strand
gcgcaaagguggcuacaau

SEQ ID NO: 241936 - RNA, 19 nt, Homo sapiens
  misc_RNA (1)...(19): siRNA sense strand
gcagcuaccucaggaauga

SEQ ID NO: 241937 - RNA, 19 nt, Homo sapiens
  misc_RNA (1)...(19): siRNA sense strand
gaaggcaucuacacacuca

SEQ ID NO: 241938 - RNA, 19 nt, Homo sapiens
  misc_RNA (1)...(19): siRNA sense strand
caccugagcugaccuuuga

SEQ ID NO: 241939 - RNA, 19 nt, Homo sapiens
  misc_RNA (1)...(19): siRNA sense strand
caagauuccugacaccaaa

SEQ ID NO: 241940 - RNA, 19 nt, Homo sapiens
  misc_RNA (1)...(19): siRNA sense strand
gcaaagguggcuacaauga

SEQ ID NO: 241941 - RNA, 19 nt, Homo sapiens
  misc_RNA (1)...(19): siRNA sense strand
gaaacugacccacugaaug

SEQ ID NO: 241942 - RNA, 19 nt, Homo sapiens
  misc_RNA (1)...(19): siRNA sense strand
aaacugacccacugaauga

SEQ ID NO: 241943 - RNA, 19 nt, Homo sapiens
  misc_RNA (1)...(19): siRNA sense strand
ggacagggacacaauccua

SEQ ID NO: 241944 - RNA, 19 nt, Homo sapiens
  misc_RNA (1)...(19): siRNA sense strand
gguaugagccgcugcagaa

SEQ ID NO: 241945 - RNA, 19 nt, Homo sapiens
  misc_RNA (1)...(19): siRNA sense strand
ccagggagaugucaaacug

SEQ ID NO: 241946 - RNA, 19 nt, Homo sapiens
  misc_RNA (1)...(19): siRNA sense strand
uggagaagcugauuucaca

SEQ ID NO: 241947 - RNA, 19 nt, Homo sapiens
  misc_RNA (1)...(19): siRNA sense strand
ggagaucacagaugaaaca

SEQ ID NO: 241948 - RNA, 19 nt, Homo sapiens
  misc_RNA (1)...(19): siRNA sense strand
ggaaugaccgcuuguggau

SEQ ID NO: 241949 - RNA, 19 nt, Homo sapiens
  misc_RNA (1)...(19): siRNA sense strand
cccaggagaucacagauga

SEQ ID NO: 241950 - RNA, 19 nt, Homo sapiens
  misc_RNA (1)...(19): siRNA sense strand
ggacacuacugggaaagga

SEQ ID NO: 241951 - RNA, 19 nt, Homo sapiens
  misc_RNA (1)...(19): siRNA sense strand
ccucggagauccaguuuca

SEQ ID NO: 241952 - RNA, 19 nt, Homo sapiens
  misc_RNA (1)...(19): siRNA sense strand
gaccaagaauccuaagaag

SEQ ID NO: 241953 - RNA, 19 nt, Homo sapiens
  misc_RNA (1)...(19): siRNA sense strand
ccaagaauccuaagaagag

SEQ ID NO: 241954 - RNA, 19 nt, Homo sapiens
  misc_RNA (1)...(19): siRNA sense strand
gcacagcaaccucuacauc

SEQ ID NO: 241955 - RNA, 19 nt, Homo sapiens
  misc_RNA (1)...(19): siRNA sense strand
acugugagcuggagaccua

SEQ ID NO: 241956 - RNA, 19 nt, Homo sapiens
  misc_RNA (1)...(19): siRNA sense strand
gaagauccacagagacauc

SEQ ID NO: 241957 - RNA, 19 nt, Homo sapiens
  misc_RNA (1)...(19): siRNA sense strand
ggaaauccacgcacaucug

SEQ ID NO: 241958 - RNA, 19 nt, Homo sapiens
  misc_RNA (1)...(19): siRNA sense strand
ggaaacugacccacugaau

SEQ ID NO: 241959 - RNA, 19 nt, Homo sapiens
  misc_RNA (1)...(19): siRNA sense strand
ugaccaagaauccuaagaa

SEQ ID NO: 241960 - RNA, 19 nt, Homo sapiens
  misc_RNA (1)...(19): siRNA sense strand
gggaagauccacagagaca

SEQ ID NO: 241961 - RNA, 19 nt, Homo sapiens
  misc_RNA (1)...(19): siRNA sense strand
gccgaagccuggauaccaa

SEQ ID NO: 241962 - RNA, 19 nt, Homo sapiens
  misc_RNA (1)...(19): siRNA sense strand
gagcugaccuuugauuucc

SEQ ID NO: 241963 - RNA, 19 nt, Homo sapiens
  misc_RNA (1)...(19): siRNA sense strand
gaacaacgugcugcuguca

SEQ ID NO: 241964 - RNA, 19 nt, Homo sapiens
  misc_RNA (1)...(19): siRNA sense strand
aaacuggcccugaccaaga

SEQ ID NO: 241965 - RNA, 19 nt, Homo sapiens
  misc_RNA (1)...(19): siRNA sense strand
cgcccaaacugagagauaa

SEQ ID NO: 241966 - RNA, 19 nt, Homo sapiens
  misc_RNA (1)...(19): siRNA sense strand
ugaagauagucaagcuaga

SEQ ID NO: 241967 - RNA, 19 nt, Homo sapiens
  misc_RNA (1)...(19): siRNA sense strand
gcuuugcucuguccaccaa

SEQ ID NO: 241968 - RNA, 19 nt, Homo sapiens
  misc_RNA (1)...(19): siRNA sense strand
gagaagcugauuucacauc

SEQ ID NO: 241969 - RNA, 19 nt, Homo sapiens
  misc_RNA (1)...(19): siRNA sense strand
ucuccaaggucuucaaugg

SEQ ID NO: 241970 - RNA, 19 nt, Homo sapiens
  misc_RNA (1)...(19): siRNA sense strand
uaugacauguuuccagaca

SEQ ID NO: 241971 - RNA, 19 nt, Homo sapiens
  misc_RNA (1)...(19): siRNA sense strand
gcuacaaugagcuauguga

SEQ ID NO: 241972 - RNA, 19 nt, Homo sapiens
  misc_RNA (1)...(19): siRNA sense strand
uggagagcauucccacuga

SEQ ID NO: 241973 - RNA, 19 nt, Homo sapiens
  misc_RNA (1)...(19): siRNA sense strand
gcaccugagcugaccuuug

SEQ ID NO: 241974 - RNA, 19 nt, Homo sapiens
  misc_RNA (1)...(19): siRNA sense strand
acacaauccuagucagcuu

SEQ ID NO: 241975 - RNA, 19 nt, Homo sapiens
  misc_RNA (1)...(19): siRNA sense strand
ggaccuauggcgacgucua

SEQ ID NO: 241976 - RNA, 19 nt, Homo sapiens
  misc_RNA (1)...(19): siRNA sense strand
caggagaucacagaugaaa

SEQ ID NO: 241977 - RNA, 19 nt, Homo sapiens
  misc_RNA (1)...(19): siRNA sense strand
gcuggagaccuaugacaug

SEQ ID NO: 241978 - RNA, 19 nt, Homo sapiens
  misc_RNA (1)...(19): siRNA sense strand
gaagccuggauaccaauga

SEQ ID NO: 241979 - RNA, 19 nt, Homo sapiens
  misc_RNA (1)...(19): siRNA sense strand
gaacgcugugugaggauug

SEQ ID NO: 241980 - RNA, 19 nt, Homo sapiens
  misc_RNA (1)...(19): siRNA sense strand
ccagaauuuccaccacuuu

SEQ ID NO: 241981 - RNA, 19 nt, Homo sapiens
  misc_RNA (1)...(19): siRNA sense strand
gaagauagucaagcuagac

SEQ ID NO: 241982 - RNA, 19 nt, Homo sapiens
  misc_RNA (1)...(19): siRNA sense strand
aaugaccgcuuguggaucu

SEQ ID NO: 241983 - RNA, 19 nt, Homo sapiens
  misc_RNA (1)...(19): siRNA sense strand
ccaccacuuucucaaacug

SEQ ID NO: 241984 - RNA, 19 nt, Homo sapiens
  misc_RNA (1)...(19): siRNA sense strand
ccaagauuccugacaccaa

SEQ ID NO: 241985 - RNA, 19 nt, Homo sapiens
  misc_RNA (1)...(19): siRNA sense strand
caacucccaaggugcauau

SEQ ID NO: 241986 - RNA, 19 nt, Homo sapiens
  misc_RNA (1)...(19): siRNA sense strand
ugaccucccaggccuguuu

SEQ ID NO: 241987 - RNA, 19 nt, Homo sapiens
  misc_RNA (1)...(19): siRNA sense strand
ccaccagagcaccuacuaa

SEQ ID NO: 241988 - RNA, 19 nt, Homo sapiens
  misc_RNA (1)...(19): siRNA sense strand
cagcgucuguggccaagag

SEQ ID NO: 241989 - RNA, 19 nt, Homo sapiens
  misc_RNA (1)...(19): siRNA sense strand
augagccgcugcagaaguu

SEQ ID NO: 241990 - RNA, 19 nt, Homo sapiens
  misc_RNA (1)...(19): siRNA sense strand
cgaggaaggcaucuacaca

SEQ ID NO: 241991 - RNA, 19 nt, Homo sapiens
  misc_RNA (1)...(19): siRNA sense strand
ucggucagccucagaauuc

SEQ ID NO: 241992 - RNA, 19 nt, Homo sapiens
  misc_RNA (1)...(19): siRNA sense strand
caaagccagugacccucau

SEQ ID NO: 241993 - RNA, 19 nt, Homo sapiens
  misc_RNA (1)...(19): siRNA sense strand
gcccugaccaagaauccua

SEQ ID NO: 241994 - RNA, 19 nt, Homo sapiens
  misc_RNA (1)...(19): siRNA sense strand
gaaugagccgugggaggaa

SEQ ID NO: 241995 - RNA, 19 nt, Homo sapiens
  misc_RNA (1)...(19): siRNA sense strand
ggaucugcauggaguucug

SEQ ID NO: 241996 - RNA, 19 nt, Homo sapiens
  misc_RNA (1)...(19): siRNA sense strand
caaagguggcuacaaugag

SEQ ID NO: 241997 - RNA, 19 nt, Homo sapiens
  misc_RNA (1)...(19): siRNA sense strand
ucacagaugaaacaaggau

SEQ ID NO: 241998 - RNA, 19 nt, Homo sapiens
  misc_RNA (1)...(19): siRNA sense strand
ugagcugaccuuugauuuc

SEQ ID NO: 241999 - RNA, 19 nt, Homo sapiens
  misc_RNA (1)...(19): siRNA sense strand
ugugaggauugucaacaug

SEQ ID NO: 242000 - RNA, 19 nt, Homo sapiens
  misc_RNA (1)...(19): siRNA sense strand
gugugaggauugucaacau

SEQ ID NO: 242001 - RNA, 19 nt, Homo sapiens
  misc_RNA (1)...(19): siRNA sense strand
ugaacgcugugugaggauu

SEQ ID NO: 242002 - RNA, 19 nt, Homo sapiens
  misc_RNA (1)...(19): siRNA sense strand
gaauuuccaccacuuucuc

SEQ ID NO: 242003 - RNA, 19 nt, Homo sapiens
  misc_RNA (1)...(19): siRNA sense strand
gaggugacccaggagauca

SEQ ID NO: 242004 - RNA, 19 nt, Homo sapiens
  misc_RNA (1)...(19): siRNA sense strand
uggcuacaaugagcuaugu

SEQ ID NO: 242005 - RNA, 19 nt, Homo sapiens
  misc_RNA (1)...(19): siRNA sense strand
acagugugcuggccuucug

SEQ ID NO: 242006 - RNA, 19 nt, Homo sapiens
  misc_RNA (1)...(19): siRNA sense strand
gaggcuacagcaacagguu

SEQ ID NO: 242007 - RNA, 19 nt, Homo sapiens
  misc_RNA (1)...(19): siRNA sense strand
aggauacgcuggagaagcu

SEQ ID NO: 242008 - RNA, 19 nt, Homo sapiens
  misc_RNA (1)...(19): siRNA sense strand
ccgcccaaacugagagaua

SEQ ID NO: 242009 - RNA, 19 nt, Homo sapiens
  misc_RNA (1)...(19): siRNA sense strand
cccagaauuuccaccacuu

SEQ ID NO: 242010 - RNA, 19 nt, Homo sapiens
  misc_RNA (1)...(19): siRNA sense strand
gcgcacagcaaccucuaca

SEQ ID NO: 242011 - RNA, 19 nt, Homo sapiens
  misc_RNA (1)...(19): siRNA sense strand
gagagcauucccacugaca

SEQ ID NO: 242012 - RNA, 19 nt, Homo sapiens
  misc_RNA (1)...(19): siRNA sense strand
cccaggcgcuuugcucugu

SEQ ID NO: 242013 - RNA, 19 nt, Homo sapiens
  misc_RNA (1)...(19): siRNA sense strand
gagcuggagaccuaugaca

SEQ ID NO: 242014 - RNA, 19 nt, Homo sapiens
  misc_RNA (1)...(19): siRNA sense strand
gcuuguggaucugcaugga

SEQ ID NO: 242015 - RNA, 19 nt, Homo sapiens
  misc_RNA (1)...(19): siRNA sense strand
gcucuguccaccaagauuc

SEQ ID NO: 242016 - RNA, 19 nt, Homo sapiens
  misc_RNA (1)...(19): siRNA sense strand
cuggagaccuaugacaugu

SEQ ID NO: 242017 - RNA, 19 nt, Homo sapiens
  misc_RNA (1)...(19): siRNA sense strand
cagaauuuccaccacuuuc

SEQ ID NO: 242018 - RNA, 19 nt, Homo sapiens
  misc_RNA (1)...(19): siRNA sense strand
ccaaccuucuccucacucu

SEQ ID NO: 242019 - RNA, 19 nt, Homo sapiens
  misc_RNA (1)...(19): siRNA sense strand
aacuggcccugaccaagaa

SEQ ID NO: 242020 - RNA, 19 nt, Homo sapiens
  misc_RNA (1)...(19): siRNA sense strand
ucagcaaacuugaaucuua

SEQ ID NO: 242021 - RNA, 19 nt, Homo sapiens
  misc_RNA (1)...(19): siRNA sense strand
gacauugacucuuacauga

SEQ ID NO: 242022 - RNA, 19 nt, Homo sapiens
  misc_RNA (1)...(19): siRNA sense strand
ccaaagccauggugacuga

SEQ ID NO: 242023 - RNA, 19 nt, Homo sapiens
  misc_RNA (1)...(19): siRNA sense strand
gcuguaagauccugaugaa

SEQ ID NO: 242024 - RNA, 19 nt, Homo sapiens
  misc_RNA (1)...(19): siRNA sense strand
gaugaagucuuuccugucu

SEQ ID NO: 242025 - RNA, 19 nt, Homo sapiens
  misc_RNA (1)...(19): siRNA sense strand
ggaaaccacuauaggcaau

SEQ ID NO: 242026 - RNA, 19 nt, Homo sapiens
  misc_RNA (1)...(19): siRNA sense strand
guaagauccugaugaaguc

SEQ ID NO: 242027 - RNA, 19 nt, Homo sapiens
  misc_RNA (1)...(19): siRNA sense strand
cagcaaacuugaaucuuag

SEQ ID NO: 242028 - RNA, 19 nt, Homo sapiens
  misc_RNA (1)...(19): siRNA sense strand
gaagugacgcugggcauug

SEQ ID NO: 242029 - RNA, 19 nt, Homo sapiens
  misc_RNA (1)...(19): siRNA sense strand
gaaguuccgcucacuguuc

SEQ ID NO: 242030 - RNA, 19 nt, Homo sapiens
  misc_RNA (1)...(19): siRNA sense strand
cgacauugacucuuacaug

SEQ ID NO: 242031 - RNA, 19 nt, Homo sapiens
  misc_RNA (1)...(19): siRNA sense strand
augacgacauugacucuua

SEQ ID NO: 242032 - RNA, 19 nt, Homo sapiens
  misc_RNA (1)...(19): siRNA sense strand
ugaagucuuuccugucugu

SEQ ID NO: 242033 - RNA, 19 nt, Homo sapiens
  misc_RNA (1)...(19): siRNA sense strand
cggacgacuuugccaauga

SEQ ID NO: 242034 - RNA, 19 nt, Homo sapiens
  misc_RNA (1)...(19): siRNA sense strand
ggacgagcucuaccuggaa

SEQ ID NO: 242035 - RNA, 19 nt, Homo sapiens
  misc_RNA (1)...(19): siRNA sense strand
cauugacucuuacaugauc

SEQ ID NO: 242036 - RNA, 19 nt, Homo sapiens
  misc_RNA (1)...(19): siRNA sense strand
uguaagauccugaugaagu

SEQ ID NO: 242037 - RNA, 19 nt, Homo sapiens
  misc_RNA (1)...(19): siRNA sense strand
aaaccacuauaggcaauga

SEQ ID NO: 242038 - RNA, 19 nt, Homo sapiens
  misc_RNA (1)...(19): siRNA sense strand
ggacgacuuugccaaugac

SEQ ID NO: 242039 - RNA, 19 nt, Homo sapiens
  misc_RNA (1)...(19): siRNA sense strand
gaccugcugcgcuguaaga

SEQ ID NO: 242040 - RNA, 19 nt, Homo sapiens
  misc_RNA (1)...(19): siRNA sense strand
gcagagucagcaaacuuga

SEQ ID NO: 242041 - RNA, 19 nt, Homo sapiens
  misc_RNA (1)...(19): siRNA sense strand
ccaagaaguuccgcucacu

SEQ ID NO: 242042 - RNA, 19 nt, Homo sapiens
  misc_RNA (1)...(19): siRNA sense strand
gccuaugccugcuuucucu

SEQ ID NO: 242043 - RNA, 19 nt, Homo sapiens
  misc_RNA (1)...(19): siRNA sense strand
ugacgacauugacucuuac

SEQ ID NO: 242044 - RNA, 19 nt, Homo sapiens
  misc_RNA (1)...(19): siRNA sense strand
ccugagcuuugcagaguca

SEQ ID NO: 242045 - RNA, 19 nt, Homo sapiens
  misc_RNA (1)...(19): siRNA sense strand
uaugccugcuuucucuuug

SEQ ID NO: 242046 - RNA, 19 nt, Homo sapiens
  misc_RNA (1)...(19): siRNA sense strand
cacuggcgaugcuggagaa

SEQ ID NO: 242047 - RNA, 19 nt, Homo sapiens
  misc_RNA (1)...(19): siRNA sense strand
agauccugaugaagucuuu

SEQ ID NO: 242048 - RNA, 19 nt, Homo sapiens
  misc_RNA (1)...(19): siRNA sense strand
gaaaccacuauaggcaaug

SEQ ID NO: 242049 - RNA, 19 nt, Homo sapiens
  misc_RNA (1)...(19): siRNA sense strand
cuccugagcuuugcagagu

SEQ ID NO: 242050 - RNA, 19 nt, Homo sapiens
  misc_RNA (1)...(19): siRNA sense strand
cagagucagcaaacuugaa

SEQ ID NO: 242051 - RNA, 19 nt, Homo sapiens
  misc_RNA (1)...(19): siRNA sense strand
gcacugggcccuguauaua

SEQ ID NO: 242052 - RNA, 19 nt, Homo sapiens
  misc_RNA (1)...(19): siRNA sense strand
gaagaugaaguacaguauu

SEQ ID NO: 242053 - RNA, 19 nt, Homo sapiens
  misc_RNA (1)...(19): siRNA sense strand
ggagaugguuggucagaag

SEQ ID NO: 242054 - RNA, 19 nt, Homo sapiens
  misc_RNA (1)...(19): siRNA sense strand
aagaugaaguacaguauug

SEQ ID NO: 242055 - RNA, 19 nt, Homo sapiens
  misc_RNA (1)...(19): siRNA sense strand
gcgauuaggagauaccaaa

SEQ ID NO: 242056 - RNA, 19 nt, Homo sapiens
  misc_RNA (1)...(19): siRNA sense strand
caacagugcagaggugaaa

SEQ ID NO: 242057 - RNA, 19 nt, Homo sapiens
  misc_RNA (1)...(19): siRNA sense strand
caggaacugugagcacuuu

SEQ ID NO: 242058 - RNA, 19 nt, Homo sapiens
  misc_RNA (1)...(19): siRNA sense strand
cagaagaugaaguacagua

SEQ ID NO: 242059 - RNA, 19 nt, Homo sapiens
  misc_RNA (1)...(19): siRNA sense strand
cuggagaccugauugagau

SEQ ID NO: 242060 - RNA, 19 nt, Homo sapiens
  misc_RNA (1)...(19): siRNA sense strand
gucagaagaugaaguacag

SEQ ID NO: 242061 - RNA, 19 nt, Homo sapiens
  misc_RNA (1)...(19): siRNA sense strand
gaugguuggucagaagaug

SEQ ID NO: 242062 - RNA, 19 nt, Homo sapiens
  misc_RNA (1)...(19): siRNA sense strand
gcaagucccgcuguaaaca

SEQ ID NO: 242063 - RNA, 19 nt, Homo sapiens
  misc_RNA (1)...(19): siRNA sense strand
ggagaccugauugagauuu

SEQ ID NO: 242064 - RNA, 19 nt, Homo sapiens
  misc_RNA (1)...(19): siRNA sense strand
gaacugugagcacuuuguc

SEQ ID NO: 242065 - RNA, 19 nt, Homo sapiens
  misc_RNA (1)...(19): siRNA sense strand
gagcacugggcccuguaua

SEQ ID NO: 242066 - RNA, 19 nt, Homo sapiens
  misc_RNA (1)...(19): siRNA sense strand
ccaucuggcuccuccaagu

SEQ ID NO: 242067 - RNA, 19 nt, Homo sapiens
  misc_RNA (1)...(19): siRNA sense strand
uauggcaagucccgcugua

SEQ ID NO: 242068 - RNA, 19 nt, Homo sapiens
  misc_RNA (1)...(19): siRNA sense strand
acaacagcuuggaccauga

SEQ ID NO: 242069 - RNA, 19 nt, Homo sapiens
  misc_RNA (1)...(19): siRNA sense strand
ggucagaagaugaaguaca

SEQ ID NO: 242070 - RNA, 19 nt, Homo sapiens
  misc_RNA (1)...(19): siRNA sense strand
cagcugagauauggcaagu

SEQ ID NO: 242071 - RNA, 19 nt, Homo sapiens
  misc_RNA (1)...(19): siRNA sense strand
gaugaaguacaguauugug

SEQ ID NO: 242072 - RNA, 19 nt, Homo sapiens
  misc_RNA (1)...(19): siRNA sense strand
ggaacugugagcacuuugu

SEQ ID NO: 242073 - RNA, 19 nt, Homo sapiens
  misc_RNA (1)...(19): siRNA sense strand
uggcaagucccgcuguaaa

SEQ ID NO: 242074 - RNA, 19 nt, Homo sapiens
  misc_RNA (1)...(19): siRNA sense strand
gcaggaacugugagcacuu

SEQ ID NO: 242075 - RNA, 19 nt, Homo sapiens
  misc_RNA (1)...(19): siRNA sense strand
gagaugguuggucagaaga

SEQ ID NO: 242076 - RNA, 19 nt, Homo sapiens
  misc_RNA (1)...(19): siRNA sense strand
ggaaaaggccaagguugaa

SEQ ID NO: 242077 - RNA, 19 nt, Homo sapiens
  misc_RNA (1)...(19): siRNA sense strand
gagaccugauugagauuuu

SEQ ID NO: 242078 - RNA, 19 nt, Homo sapiens
  misc_RNA (1)...(19): siRNA sense strand
agaagaugaaguacaguau

SEQ ID NO: 242079 - RNA, 19 nt, Homo sapiens
  misc_RNA (1)...(19): siRNA sense strand
gcaacagugcagaggugaa

SEQ ID NO: 242080 - RNA, 19 nt, Homo sapiens
  misc_RNA (1)...(19): siRNA sense strand
cagcuuggaccaugaguac

SEQ ID NO: 242081 - RNA, 19 nt, Homo sapiens
  misc_RNA (1)...(19): siRNA sense strand
caacaacagcuuggaccau

SEQ ID NO: 242082 - RNA, 19 nt, Homo sapiens
  misc_RNA (1)...(19): siRNA sense strand
aaaccuggagaccugauug

SEQ ID NO: 242083 - RNA, 19 nt, Homo sapiens
  misc_RNA (1)...(19): siRNA sense strand
ccacggcgcuuggaauccu

SEQ ID NO: 242084 - RNA, 19 nt, Homo sapiens
  misc_RNA (1)...(19): siRNA sense strand
ccuggagaccugauugaga

SEQ ID NO: 242085 - RNA, 19 nt, Homo sapiens
  misc_RNA (1)...(19): siRNA sense strand
ggauuucacuguuggagua

SEQ ID NO: 242086 - RNA, 19 nt, Homo sapiens
  misc_RNA (1)...(19): siRNA sense strand
gaguagaguuugacgagua

SEQ ID NO: 242087 - RNA, 19 nt, Homo sapiens
  misc_RNA (1)...(19): siRNA sense strand
ggugauaacuucaagacaa

SEQ ID NO: 242088 - RNA, 19 nt, Homo sapiens
  misc_RNA (1)...(19): siRNA sense strand
ugaaggcccuggauauuga

SEQ ID NO: 242089 - RNA, 19 nt, Homo sapiens
  misc_RNA (1)...(19): siRNA sense strand
agacgaagguuauugauca

SEQ ID NO: 242090 - RNA, 19 nt, Homo sapiens
  misc_RNA (1)...(19): siRNA sense strand
gcacauuccgcaacuauga

SEQ ID NO: 242091 - RNA, 19 nt, Homo sapiens
  misc_RNA (1)...(19): siRNA sense strand
gcaacuaugauguggauuu

SEQ ID NO: 242092 - RNA, 19 nt, Homo sapiens
  misc_RNA (1)...(19): siRNA sense strand
ccugggagauggagaguaa

SEQ ID NO: 242093 - RNA, 19 nt, Homo sapiens
  misc_RNA (1)...(19): siRNA sense strand
gugauaacuucaagacaaa

SEQ ID NO: 242094 - RNA, 19 nt, Homo sapiens
  misc_RNA (1)...(19): siRNA sense strand
gaagguuauugaucaagau

SEQ ID NO: 242095 - RNA, 19 nt, Homo sapiens
  misc_RNA (1)...(19): siRNA sense strand
gauguggauuucacuguug

SEQ ID NO: 242096 - RNA, 19 nt, Homo sapiens
  misc_RNA (1)...(19): siRNA sense strand
ucaagauggugauaacuuc

SEQ ID NO: 242097 - RNA, 19 nt, Homo sapiens
  misc_RNA (1)...(19): siRNA sense strand
caacuaugauguggauuuc

SEQ ID NO: 242098 - RNA, 19 nt, Homo sapiens
  misc_RNA (1)...(19): siRNA sense strand
ggagaguaaugaaaacuuu

SEQ ID NO: 242099 - RNA, 19 nt, Homo sapiens
  misc_RNA (1)...(19): siRNA sense strand
cgaagguuauugaucaaga

SEQ ID NO: 242100 - RNA, 19 nt, Homo sapiens
  misc_RNA (1)...(19): siRNA sense strand
gaauggaaccugggagaug

SEQ ID NO: 242101 - RNA, 19 nt, Homo sapiens
  misc_RNA (1)...(19): siRNA sense strand
ggagauggagaguaaugaa

SEQ ID NO: 242102 - RNA, 19 nt, Homo sapiens
  misc_RNA (1)...(19): siRNA sense strand
gagauggagaguaaugaaa

SEQ ID NO: 242103 - RNA, 19 nt, Homo sapiens
  misc_RNA (1)...(19): siRNA sense strand
gacgaagguuauugaucaa

SEQ ID NO: 242104 - RNA, 19 nt, Homo sapiens
  misc_RNA (1)...(19): siRNA sense strand
gaccaggugugccgucaag

SEQ ID NO: 242105 - RNA, 19 nt, Homo sapiens
  misc_RNA (1)...(19): siRNA sense strand
cuggacaaccggcauguua

SEQ ID NO: 242106 - RNA, 19 nt, Homo sapiens
  misc_RNA (1)...(19): siRNA sense strand
ugauguggauuucacuguu

SEQ ID NO: 242107 - RNA, 19 nt, Homo sapiens
  misc_RNA (1)...(19): siRNA sense strand
ggugugccgucaaguguuc

SEQ ID NO: 242108 - RNA, 19 nt, Homo sapiens
  misc_RNA (1)...(19): siRNA sense strand
caugaaggcccuggauauu

SEQ ID NO: 242109 - RNA, 19 nt, Homo sapiens
  misc_RNA (1)...(19): siRNA sense strand
gugauguccuugugugugu

SEQ ID NO: 242110 - RNA, 19 nt, Homo sapiens
  misc_RNA (1)...(19): siRNA sense strand
ggacaaccggcauguuaag

SEQ ID NO: 242111 - RNA, 19 nt, Homo sapiens
  misc_RNA (1)...(19): siRNA sense strand
acacaaagagccuggacaa

SEQ ID NO: 242112 - RNA, 19 nt, Homo sapiens
  misc_RNA (1)...(19): siRNA sense strand
gcuggaagcaguggauuga

SEQ ID NO: 242113 - RNA, 19 nt, Homo sapiens
  misc_RNA (1)...(19): siRNA sense strand
ccgcaacuaugauguggau

SEQ ID NO: 242114 - RNA, 19 nt, Homo sapiens
  misc_RNA (1)...(19): siRNA sense strand
uuacucagacgaagguuau

SEQ ID NO: 242115 - RNA, 19 nt, Homo sapiens
  misc_RNA (1)...(19): siRNA sense strand
gguuauugaucaagauggu

SEQ ID NO: 242116 - RNA, 19 nt, Homo sapiens
  misc_RNA (1)...(19): siRNA sense strand
acaugaaggcccuggauau

SEQ ID NO: 242117 - RNA, 19 nt, Homo sapiens
  misc_RNA (1)...(19): siRNA sense strand
caagauggugauaacuuca

SEQ ID NO: 242118 - RNA, 19 nt, Homo sapiens
  misc_RNA (1)...(19): siRNA sense strand
uagcacauuccgcaacuau

SEQ ID NO: 242119 - RNA, 19 nt, Homo sapiens
  misc_RNA (1)...(19): siRNA sense strand
aaacuuugagggcuacaug

SEQ ID NO: 242120 - RNA, 19 nt, Homo sapiens
  misc_RNA (1)...(19): siRNA sense strand
uacaugaaggcccuggaua

SEQ ID NO: 242121 - RNA, 19 nt, Homo sapiens
  misc_RNA (1)...(19): siRNA sense strand
gggagauggagaguaauga

SEQ ID NO: 242122 - RNA, 19 nt, Homo sapiens
  misc_RNA (1)...(19): siRNA sense strand
uggacaaccggcauguuaa

SEQ ID NO: 242123 - RNA, 19 nt, Homo sapiens
  misc_RNA (1)...(19): siRNA sense strand
ccaggugugccgucaagug

SEQ ID NO: 242124 - RNA, 19 nt, Homo sapiens
  misc_RNA (1)...(19): siRNA sense strand
gaacgugugaucaccauua

SEQ ID NO: 242125 - RNA, 19 nt, Homo sapiens
  misc_RNA (1)...(19): siRNA sense strand
ccaauggucuggacaacaa

SEQ ID NO: 242126 - RNA, 19 nt, Homo sapiens
  misc_RNA (1)...(19): siRNA sense strand
gaacagacagaaggaugua

SEQ ID NO: 242127 - RNA, 19 nt, Homo sapiens
  misc_RNA (1)...(19): siRNA sense strand
gaaaaguuccagcauauuu

SEQ ID NO: 242128 - RNA, 19 nt, Homo sapiens
  misc_RNA (1)...(19): siRNA sense strand
acaacaagcuccgugaaga

SEQ ID NO: 242129 - RNA, 19 nt, Homo sapiens
  misc_RNA (1)...(19): siRNA sense strand
ccgaagauaugcucaugug

SEQ ID NO: 242130 - RNA, 19 nt, Homo sapiens
  misc_RNA (1)...(19): siRNA sense strand
acagaaggauguaaaggau

SEQ ID NO: 242131 - RNA, 19 nt, Homo sapiens
  misc_RNA (1)...(19): siRNA sense strand
gacagaaggauguaaagga

SEQ ID NO: 242132 - RNA, 19 nt, Homo sapiens
  misc_RNA (1)...(19): siRNA sense strand
gacauugaccucaccaaga

SEQ ID NO: 242133 - RNA, 19 nt, Homo sapiens
  misc_RNA (1)...(19): siRNA sense strand
ggacaacaagcuccgugaa

SEQ ID NO: 242134 - RNA, 19 nt, Homo sapiens
  misc_RNA (1)...(19): siRNA sense strand
gauaugcucaugugguguu

SEQ ID NO: 242135 - RNA, 19 nt, Homo sapiens
  misc_RNA (1)...(19): siRNA sense strand
ggugugggccgaagauaug

SEQ ID NO: 242136 - RNA, 19 nt, Homo sapiens
  misc_RNA (1)...(19): siRNA sense strand
gaggaaagcagacauugac

SEQ ID NO: 242137 - RNA, 19 nt, Homo sapiens
  misc_RNA (1)...(19): siRNA sense strand
acauugaccucaccaagag

SEQ ID NO: 242138 - RNA, 19 nt, Homo sapiens
  misc_RNA (1)...(19): siRNA sense strand
ggccgaagauaugcucaug

SEQ ID NO: 242139 - RNA, 19 nt, Homo sapiens
  misc_RNA (1)...(19): siRNA sense strand
gaagaccuggagcgacuga

SEQ ID NO: 242140 - RNA, 19 nt, Homo sapiens
  misc_RNA (1)...(19): siRNA sense strand
ugaggaaagcagacauuga

SEQ ID NO: 242141 - RNA, 19 nt, Homo sapiens
  misc_RNA (1)...(19): siRNA sense strand
guggguguguccaagaaga

SEQ ID NO: 242142 - RNA, 19 nt, Homo sapiens
  misc_RNA (1)...(19): siRNA sense strand
ccugaaaaguuccagcaua

SEQ ID NO: 242143 - RNA, 19 nt, Homo sapiens
  misc_RNA (1)...(19): siRNA sense strand
acagacagaaggauguaaa

SEQ ID NO: 242144 - RNA, 19 nt, Homo sapiens
  misc_RNA (1)...(19): siRNA sense strand
ugccaucacugccauuaag

SEQ ID NO: 242145 - RNA, 19 nt, Homo sapiens
  misc_RNA (1)...(19): siRNA sense strand
gaugagguggaacguguga

SEQ ID NO: 242146 - RNA, 19 nt, Homo sapiens
  misc_RNA (1)...(19): siRNA sense strand
caugugguguugaggaaag

SEQ ID NO: 242147 - RNA, 19 nt, Homo sapiens
  misc_RNA (1)...(19): siRNA sense strand
auagagggcugcgucacuu

SEQ ID NO: 242148 - RNA, 19 nt, Homo sapiens
  misc_RNA (1)...(19): siRNA sense strand
uggagcgacugaagaagau

SEQ ID NO: 242149 - RNA, 19 nt, Homo sapiens
  misc_RNA (1)...(19): siRNA sense strand
gaucaccauuaugcagaau

SEQ ID NO: 242150 - RNA, 19 nt, Homo sapiens
  misc_RNA (1)...(19): siRNA sense strand
ugaucaccauuaugcagaa

SEQ ID NO: 242151 - RNA, 19 nt, Homo sapiens
  misc_RNA (1)...(19): siRNA sense strand
gacaacaagcuccgugaag

SEQ ID NO: 242152 - RNA, 19 nt, Homo sapiens
  misc_RNA (1)...(19): siRNA sense strand
gaccuggagcgacugaaga

SEQ ID NO: 242153 - RNA, 19 nt, Homo sapiens
  misc_RNA (1)...(19): siRNA sense strand
gcagaauccacgccaguac

SEQ ID NO: 242154 - RNA, 19 nt, Homo sapiens
  misc_RNA (1)...(19): siRNA sense strand
guguguccaagaagaaaua

SEQ ID NO: 242155 - RNA, 19 nt, Homo sapiens
  misc_RNA (1)...(19): siRNA sense strand
cugaaaaguuccagcauau

SEQ ID NO: 242156 - RNA, 19 nt, Homo sapiens
  misc_RNA (1)...(19): siRNA sense strand
caacaagcuccgugaagac

SEQ ID NO: 242157 - RNA, 19 nt, Homo sapiens
  misc_RNA (1)...(19): siRNA sense strand
aaaauagccuuugccauca

SEQ ID NO: 242158 - RNA, 19 nt, Homo sapiens
  misc_RNA (1)...(19): siRNA sense strand
gagcgacugaagaagauuc

SEQ ID NO: 242159 - RNA, 19 nt, Homo sapiens
  misc_RNA (1)...(19): siRNA sense strand
uguaaaggauggaaaauac

SEQ ID NO: 242160 - RNA, 19 nt, Homo sapiens
  misc_RNA (1)...(19): siRNA sense strand
guugaggaaagcagacauu

SEQ ID NO: 242161 - RNA, 19 nt, Homo sapiens
  misc_RNA (1)...(19): siRNA sense strand
gggugugggccgaagauau

SEQ ID NO: 242162 - RNA, 19 nt, Homo sapiens
  misc_RNA (1)...(19): siRNA sense strand
ugaacagacagaaggaugu

SEQ ID NO: 242163 - RNA, 19 nt, Homo sapiens
  misc_RNA (1)...(19): siRNA sense strand
ccguggguguguccaagaa

SEQ ID NO: 242164 - RNA, 19 nt, Homo sapiens
  misc_RNA (1)...(19): siRNA sense strand
aacgugugaucaccauuau

SEQ ID NO: 242165 - RNA, 19 nt, Homo sapiens
  misc_RNA (1)...(19): siRNA sense strand
gccagguccuagccaaugg

SEQ ID NO: 242166 - RNA, 19 nt, Homo sapiens
  misc_RNA (1)...(19): siRNA sense strand
gcaaagagcugguggagaa

SEQ ID NO: 242167 - RNA, 19 nt, Homo sapiens
  misc_RNA (1)...(19): siRNA sense strand
gaagauaccugaucaugau

SEQ ID NO: 242168 - RNA, 19 nt, Homo sapiens
  misc_RNA (1)...(19): siRNA sense strand
gagaagaaguuaacaagug

SEQ ID NO: 242169 - RNA, 19 nt, Homo sapiens
  misc_RNA (1)...(19): siRNA sense strand
gaagaagucugguucaaag

SEQ ID NO: 242170 - RNA, 19 nt, Homo sapiens
  misc_RNA (1)...(19): siRNA sense strand
ugagaaggcuggcaucauu

SEQ ID NO: 242171 - RNA, 19 nt, Homo sapiens
  misc_RNA (1)...(19): siRNA sense strand
gaaggaaacgucauaugaa

SEQ ID NO: 242172 - RNA, 19 nt, Homo sapiens
  misc_RNA (1)...(19): siRNA sense strand
ugaagaagcugcaggaaca

SEQ ID NO: 242173 - RNA, 19 nt, Homo sapiens
  misc_RNA (1)...(19): siRNA sense strand
gaagucugguucaaagaaa

SEQ ID NO: 242174 - RNA, 19 nt, Homo sapiens
  misc_RNA (1)...(19): siRNA sense strand
gagagaauccguuccauug

SEQ ID NO: 242175 - RNA, 19 nt, Homo sapiens
  misc_RNA (1)...(19): siRNA sense strand
ggaaacgucauaugaagaa

SEQ ID NO: 242176 - RNA, 19 nt, Homo sapiens
  misc_RNA (1)...(19): siRNA sense strand
ucgaagagauuguagagaa

SEQ ID NO: 242177 - RNA, 19 nt, Homo sapiens
  misc_RNA (1)...(19): siRNA sense strand
gaaaggaaagaccaagaaa

SEQ ID NO: 242178 - RNA, 19 nt, Homo sapiens
  misc_RNA (1)...(19): siRNA sense strand
cguagaggauggugacaua

SEQ ID NO: 242179 - RNA, 19 nt, Homo sapiens
  misc_RNA (1)...(19): siRNA sense strand
ggaagauaccugaucauga

SEQ ID NO: 242180 - RNA, 19 nt, Homo sapiens
  misc_RNA (1)...(19): siRNA sense strand
ugaaggaaacgucauauga

SEQ ID NO: 242181 - RNA, 19 nt, Homo sapiens
  misc_RNA (1)...(19): siRNA sense strand
agaagaaguuaacaaguga

SEQ ID NO: 242182 - RNA, 19 nt, Homo sapiens
  misc_RNA (1)...(19): siRNA sense strand
ggaccuggccuccaaguug

SEQ ID NO: 242183 - RNA, 19 nt, Homo sapiens
  misc_RNA (1)...(19): siRNA sense strand
gaccuggccuccaaguuga

SEQ ID NO: 242184 - RNA, 19 nt, Homo sapiens
  misc_RNA (1)...(19): siRNA sense strand
ucagagaccugcagaagag

SEQ ID NO: 242185 - RNA, 19 nt, Homo sapiens
  misc_RNA (1)...(19): siRNA sense strand
gaaaccuaaugggaagaua

SEQ ID NO: 242186 - RNA, 19 nt, Homo sapiens
  misc_RNA (1)...(19): siRNA sense strand
gcaguugagugaaaugaag

SEQ ID NO: 242187 - RNA, 19 nt, Homo sapiens
  misc_RNA (1)...(19): siRNA sense strand
gggcagaaauacagaugug

SEQ ID NO: 242188 - RNA, 19 nt, Homo sapiens
  misc_RNA (1)...(19): siRNA sense strand
gcacaaggccacucagaag

SEQ ID NO: 242189 - RNA, 19 nt, Homo sapiens
  misc_RNA (1)...(19): siRNA sense strand
gagaauccguuccauugag

SEQ ID NO: 242190 - RNA, 19 nt, Homo sapiens
  misc_RNA (1)...(19): siRNA sense strand
caaugugacuguccuccuu

SEQ ID NO: 242191 - RNA, 19 nt, Homo sapiens
  misc_RNA (1)...(19): siRNA sense strand
ccuagagucuucagaaaca

SEQ ID NO: 242192 - RNA, 19 nt, Homo sapiens
  misc_RNA (1)...(19): siRNA sense strand
ugucagcucuguagugaau

SEQ ID NO: 242193 - RNA, 19 nt, Homo sapiens
  misc_RNA (1)...(19): siRNA sense strand
caagagcgaagcccagaaa

SEQ ID NO: 242194 - RNA, 19 nt, Homo sapiens
  misc_RNA (1)...(19): siRNA sense strand
ucaucgagauccugucuga

SEQ ID NO: 242195 - RNA, 19 nt, Homo sapiens
  misc_RNA (1)...(19): siRNA sense strand
gaagagccacguagaggau

SEQ ID NO: 242196 - RNA, 19 nt, Homo sapiens
  misc_RNA (1)...(19): siRNA sense strand
gcaaggagauggcgaaaac

SEQ ID NO: 242197 - RNA, 19 nt, Homo sapiens
  misc_RNA (1)...(19): siRNA sense strand
gcagcagacucgccucaag

SEQ ID NO: 242198 - RNA, 19 nt, Homo sapiens
  misc_RNA (1)...(19): siRNA sense strand
gaggauucaugguuguuuc

SEQ ID NO: 242199 - RNA, 19 nt, Homo sapiens
  misc_RNA (1)...(19): siRNA sense strand
ccagaaagucgagaagaaa

SEQ ID NO: 242200 - RNA, 19 nt, Homo sapiens
  misc_RNA (1)...(19): siRNA sense strand
gaaacagagcgaugagcuu

SEQ ID NO: 242201 - RNA, 19 nt, Homo sapiens
  misc_RNA (1)...(19): siRNA sense strand
agaaagugaagaacaauga

SEQ ID NO: 242202 - RNA, 19 nt, Homo sapiens
  misc_RNA (1)...(19): siRNA sense strand
ucagcaaggucagcaaaga

SEQ ID NO: 242203 - RNA, 19 nt, Homo sapiens
  misc_RNA (1)...(19): siRNA sense strand
ggagcaugguguucaacga

SEQ ID NO: 242204 - RNA, 19 nt, Homo sapiens
  misc_RNA (1)...(19): siRNA sense strand
agaaggacacggugaagaa

SEQ ID NO: 242205 - RNA, 19 nt, Homo sapiens
  misc_RNA (1)...(19): siRNA sense strand
ggcaggagcucagcaaggu

SEQ ID NO: 242206 - RNA, 19 nt, Homo sapiens
  misc_RNA (1)...(19): siRNA sense strand
aggcagcaguugagugaaa

SEQ ID NO: 242207 - RNA, 19 nt, Homo sapiens
  misc_RNA (1)...(19): siRNA sense strand
cgaagagauuguagagaag

SEQ ID NO: 242208 - RNA, 19 nt, Homo sapiens
  misc_RNA (1)...(19): siRNA sense strand
gauauuuacgacacucaaa

SEQ ID NO: 242209 - RNA, 19 nt, Homo sapiens
  misc_RNA (1)...(19): siRNA sense strand
aaggaaacgucauaugaag

SEQ ID NO: 242210 - RNA, 19 nt, Homo sapiens
  misc_RNA (1)...(19): siRNA sense strand
gggaagauaccugaucaug

SEQ ID NO: 242211 - RNA, 19 nt, Homo sapiens
  misc_RNA (1)...(19): siRNA sense strand
gagauuguagagaagcuaa

SEQ ID NO: 242212 - RNA, 19 nt, Homo sapiens
  misc_RNA (1)...(19): siRNA sense strand
gaaggcugccaucuuggaa

SEQ ID NO: 242213 - RNA, 19 nt, Homo sapiens
  misc_RNA (1)...(19): siRNA sense strand
ugucgggucuggagaagga

SEQ ID NO: 242214 - RNA, 19 nt, Homo sapiens
  misc_RNA (1)...(19): siRNA sense strand
ccgaguggcugcaggaucu

SEQ ID NO: 242215 - RNA, 19 nt, Homo sapiens
  misc_RNA (1)...(19): siRNA sense strand
agaaaggaaagaccaagaa

SEQ ID NO: 242216 - RNA, 19 nt, Homo sapiens
  misc_RNA (1)...(19): siRNA sense strand
gagaaggacacggugaaga

SEQ ID NO: 242217 - RNA, 19 nt, Homo sapiens
  misc_RNA (1)...(19): siRNA sense strand
ggaggauucaugguuguuu

SEQ ID NO: 242218 - RNA, 19 nt, Homo sapiens
  misc_RNA (1)...(19): siRNA sense strand
aggagcagcuggagaaugg

SEQ ID NO: 242219 - RNA, 19 nt, Homo sapiens
  misc_RNA (1)...(19): siRNA sense strand
aagaagaagucugguucaa

SEQ ID NO: 242220 - RNA, 19 nt, Homo sapiens
  misc_RNA (1)...(19): siRNA sense strand
accagaaagucgagaagaa

SEQ ID NO: 242221 - RNA, 19 nt, Homo sapiens
  misc_RNA (1)...(19): siRNA sense strand
gagcgaagcccagaaacag

SEQ ID NO: 242222 - RNA, 19 nt, Homo sapiens
  misc_RNA (1)...(19): siRNA sense strand
ccaaggaggaaucggagaa

SEQ ID NO: 242223 - RNA, 19 nt, Homo sapiens
  misc_RNA (1)...(19): siRNA sense strand
agaaaacaguggagaagaa

SEQ ID NO: 242224 - RNA, 19 nt, Homo sapiens
  misc_RNA (1)...(19): siRNA sense strand
ugaaaugaagagccacgua

SEQ ID NO: 242225 - RNA, 19 nt, Homo sapiens
  misc_RNA (1)...(19): siRNA sense strand
gugaggaggcccugcagaa

SEQ ID NO: 242226 - RNA, 19 nt, Homo sapiens
  misc_RNA (1)...(19): siRNA sense strand
uucgaaggcugccaucuug

SEQ ID NO: 242227 - RNA, 19 nt, Homo sapiens
  misc_RNA (1)...(19): siRNA sense strand
ccauccagguucucacuuc

SEQ ID NO: 242228 - RNA, 19 nt, Homo sapiens
  misc_RNA (1)...(19): siRNA sense strand
ugaauuccauccagguucu

SEQ ID NO: 242229 - RNA, 19 nt, Homo sapiens
  misc_RNA (1)...(19): siRNA sense strand
agaagaagucugguucaaa

SEQ ID NO: 242230 - RNA, 19 nt, Homo sapiens
  misc_RNA (1)...(19): siRNA sense strand
aaacucaccaccagaaagu

SEQ ID NO: 242231 - RNA, 19 nt, Homo sapiens
  misc_RNA (1)...(19): siRNA sense strand
caagaagaagucugguuca

SEQ ID NO: 242232 - RNA, 19 nt, Homo sapiens
  misc_RNA (1)...(19): siRNA sense strand
gggagaaggacacggugaa

SEQ ID NO: 242233 - RNA, 19 nt, Homo sapiens
  misc_RNA (1)...(19): siRNA sense strand
gcugaaggagagacuagaa

SEQ ID NO: 242234 - RNA, 19 nt, Homo sapiens
  misc_RNA (1)...(19): siRNA sense strand
gcagaaagugaagaacaau

SEQ ID NO: 242235 - RNA, 19 nt, Homo sapiens
  misc_RNA (1)...(19): siRNA sense strand
cagcagaaagugaagaaca

SEQ ID NO: 242236 - RNA, 19 nt, Homo sapiens
  misc_RNA (1)...(19): siRNA sense strand
gcucagcaaggucagcaaa

SEQ ID NO: 242237 - RNA, 19 nt, Homo sapiens
  misc_RNA (1)...(19): siRNA sense strand
cgagccagguggagagcaa

SEQ ID NO: 242238 - RNA, 19 nt, Homo sapiens
  misc_RNA (1)...(19): siRNA sense strand
ucgagauccugucugagaa

SEQ ID NO: 242239 - RNA, 19 nt, Homo sapiens
  misc_RNA (1)...(19): siRNA sense strand
cagugaagcaucucgaaga

SEQ ID NO: 242240 - RNA, 19 nt, Homo sapiens
  misc_RNA (1)...(19): siRNA sense strand
gcucagagaccugcagaag

SEQ ID NO: 242241 - RNA, 19 nt, Homo sapiens
  misc_RNA (1)...(19): siRNA sense strand
gcugcaggaucucaaagag

SEQ ID NO: 242242 - RNA, 19 nt, Homo sapiens
  misc_RNA (1)...(19): siRNA sense strand
agcagaaagugaagaacaa

SEQ ID NO: 242243 - RNA, 19 nt, Homo sapiens
  misc_RNA (1)...(19): siRNA sense strand
ucagcucuguagugaauuc

SEQ ID NO: 242244 - RNA, 19 nt, Homo sapiens
  misc_RNA (1)...(19): siRNA sense strand
cagcuggaguggacagaag

SEQ ID NO: 242245 - RNA, 19 nt, Homo sapiens
  misc_RNA (1)...(19): siRNA sense strand
cggagggcaugcucagaga

SEQ ID NO: 242246 - RNA, 19 nt, Homo sapiens
  misc_RNA (1)...(19): siRNA sense strand
gagaaggcuggcaucauuc

SEQ ID NO: 242247 - RNA, 19 nt, Homo sapiens
  misc_RNA (1)...(19): siRNA sense strand
cccaaggagggcagaaaua

SEQ ID NO: 242248 - RNA, 19 nt, Homo sapiens
  misc_RNA (1)...(19): siRNA sense strand
gaaaacaguggagaagaaa

SEQ ID NO: 242249 - RNA, 19 nt, Homo sapiens
  misc_RNA (1)...(19): siRNA sense strand
aagaagaauuggagaagcu

SEQ ID NO: 242250 - RNA, 19 nt, Homo sapiens
  misc_RNA (1)...(19): siRNA sense strand
gaaacgucauaugaagaag

SEQ ID NO: 242251 - RNA, 19 nt, Homo sapiens
  misc_RNA (1)...(19): siRNA sense strand
agaagucugguucaaagaa

SEQ ID NO: 242252 - RNA, 19 nt, Homo sapiens
  misc_RNA (1)...(19): siRNA sense strand
aagaggcuccugccaagaa

SEQ ID NO: 242253 - RNA, 19 nt, Homo sapiens
  misc_RNA (1)...(19): siRNA sense strand
ggcacaaggccacucagaa

SEQ ID NO: 242254 - RNA, 19 nt, Homo sapiens
  misc_RNA (1)...(19): siRNA sense strand
gaaggacacggugaagaag

SEQ ID NO: 242255 - RNA, 19 nt, Homo sapiens
  misc_RNA (1)...(19): siRNA sense strand
gcuaaaaggagaacuugaa

SEQ ID NO: 242256 - RNA, 19 nt, Homo sapiens
  misc_RNA (1)...(19): siRNA sense strand
agagagaauccguuccauu

SEQ ID NO: 242257 - RNA, 19 nt, Homo sapiens
  misc_RNA (1)...(19): siRNA sense strand
cgagaaggcccaggagcaa

SEQ ID NO: 242258 - RNA, 19 nt, Homo sapiens
  misc_RNA (1)...(19): siRNA sense strand
ugaaacgccagcuggaaga

SEQ ID NO: 242259 - RNA, 19 nt, Homo sapiens
  misc_RNA (1)...(19): siRNA sense strand
gcucuguagugaauuccau

SEQ ID NO: 242260 - RNA, 19 nt, Homo sapiens
  misc_RNA (1)...(19): siRNA sense strand
gcgccgagugccagaacua

SEQ ID NO: 242261 - RNA, 19 nt, Homo sapiens
  misc_RNA (1)...(19): siRNA sense strand
caaggagggcagaaauaca

SEQ ID NO: 242262 - RNA, 19 nt, Homo sapiens
  misc_RNA (1)...(19): siRNA sense strand
ccaaggagggcagaaauac

SEQ ID NO: 242263 - RNA, 19 nt, Homo sapiens
  misc_RNA (1)...(19): siRNA sense strand
ggagauggcagcagaaaag

SEQ ID NO: 242264 - RNA, 19 nt, Homo sapiens
  misc_RNA (1)...(19): siRNA sense strand
gaaaacucaccaccagaaa

SEQ ID NO: 242265 - RNA, 19 nt, Homo sapiens
  misc_RNA (1)...(19): siRNA sense strand
gcagggcugaggcaacuuc

SEQ ID NO: 242266 - RNA, 19 nt, Homo sapiens
  misc_RNA (1)...(19): siRNA sense strand
agaaauagcugcuucaauu

SEQ ID NO: 242267 - RNA, 19 nt, Homo sapiens
  misc_RNA (1)...(19): siRNA sense strand
ggacgaagaugaagacuac

SEQ ID NO: 242268 - RNA, 19 nt, Homo sapiens
  misc_RNA (1)...(19): siRNA sense strand
gagaagaggucgaucaagu

SEQ ID NO: 242269 - RNA, 19 nt, Homo sapiens
  misc_RNA (1)...(19): siRNA sense strand
cauaguggaucacacaaua

SEQ ID NO: 242270 - RNA, 19 nt, Homo sapiens
  misc_RNA (1)...(19): siRNA sense strand
ggucagugguuauugauuu

SEQ ID NO: 242271 - RNA, 19 nt, Homo sapiens
  misc_RNA (1)...(19): siRNA sense strand
aagaagccaucgcaaauua

SEQ ID NO: 242272 - RNA, 19 nt, Homo sapiens
  misc_RNA (1)...(19): siRNA sense strand
gaaugaagcacgucaagaa

SEQ ID NO: 242273 - RNA, 19 nt, Homo sapiens
  misc_RNA (1)...(19): siRNA sense strand
gauggugaguuucuagauu

SEQ ID NO: 242274 - RNA, 19 nt, Homo sapiens
  misc_RNA (1)...(19): siRNA sense strand
caagaggaagggagaaaua

SEQ ID NO: 242275 - RNA, 19 nt, Homo sapiens
  misc_RNA (1)...(19): siRNA sense strand
caucgcaaauuaugugaaa

SEQ ID NO: 242276 - RNA, 19 nt, Homo sapiens
  misc_RNA (1)...(19): siRNA sense strand
gaaauagcugcuucaauug

SEQ ID NO: 242277 - RNA, 19 nt, Homo sapiens
  misc_RNA (1)...(19): siRNA sense strand
ugaagcacgucaagaaaga

SEQ ID NO: 242278 - RNA, 19 nt, Homo sapiens
  misc_RNA (1)...(19): siRNA sense strand
cuacuugggucagugguua

SEQ ID NO: 242279 - RNA, 19 nt, Homo sapiens
  misc_RNA (1)...(19): siRNA sense strand
ccacacacaugaggccaua

SEQ ID NO: 242280 - RNA, 19 nt, Homo sapiens
  misc_RNA (1)...(19): siRNA sense strand
gucagugguuauugauuua

SEQ ID NO: 242281 - RNA, 19 nt, Homo sapiens
  misc_RNA (1)...(19): siRNA sense strand
guggaucacacaauaauaa

SEQ ID NO: 242282 - RNA, 19 nt, Homo sapiens
  misc_RNA (1)...(19): siRNA sense strand
ucaagucguggaugaaaua

SEQ ID NO: 242283 - RNA, 19 nt, Homo sapiens
  misc_RNA (1)...(19): siRNA sense strand
gagcuuuacuggcuggaau

SEQ ID NO: 242284 - RNA, 19 nt, Homo sapiens
  misc_RNA (1)...(19): siRNA sense strand
cagagaaguuagagaagga

SEQ ID NO: 242285 - RNA, 19 nt, Homo sapiens
  misc_RNA (1)...(19): siRNA sense strand
auggugaguuucuagauua

SEQ ID NO: 242286 - RNA, 19 nt, Homo sapiens
  misc_RNA (1)...(19): siRNA sense strand
cgaagaugaagacuacaua

SEQ ID NO: 242287 - RNA, 19 nt, Homo sapiens
  misc_RNA (1)...(19): siRNA sense strand
gaagccaucgcaaauuaug

SEQ ID NO: 242288 - RNA, 19 nt, Homo sapiens
  misc_RNA (1)...(19): siRNA sense strand
gagagaagaggucgaucaa

SEQ ID NO: 242289 - RNA, 19 nt, Homo sapiens
  misc_RNA (1)...(19): siRNA sense strand
gaagaugaagacuacauag

SEQ ID NO: 242290 - RNA, 19 nt, Homo sapiens
  misc_RNA (1)...(19): siRNA sense strand
ccagaucuaacuccacuuu

SEQ ID NO: 242291 - RNA, 19 nt, Homo sapiens
  misc_RNA (1)...(19): siRNA sense strand
guacuugauuggaccagau

SEQ ID NO: 242292 - RNA, 19 nt, Homo sapiens
  misc_RNA (1)...(19): siRNA sense strand
ucaauugccacacacauga

SEQ ID NO: 242293 - RNA, 19 nt, Homo sapiens
  misc_RNA (1)...(19): siRNA sense strand
ugauucaagucguggauga

SEQ ID NO: 242294 - RNA, 19 nt, Homo sapiens
  misc_RNA (1)...(19): siRNA sense strand
cuaguacccggacgaguua

SEQ ID NO: 242295 - RNA, 19 nt, Homo sapiens
  misc_RNA (1)...(19): siRNA sense strand
cagaagaacuagaaaagau

SEQ ID NO: 242296 - RNA, 19 nt, Homo sapiens
  misc_RNA (1)...(19): siRNA sense strand
gagaaauagcugcuucaau

SEQ ID NO: 242297 - RNA, 19 nt, Homo sapiens
  misc_RNA (1)...(19): siRNA sense strand
ggaaugaagcacgucaaga

SEQ ID NO: 242298 - RNA, 19 nt, Homo sapiens
  misc_RNA (1)...(19): siRNA sense strand
ucauugcccugaugucugu

SEQ ID NO: 242299 - RNA, 19 nt, Homo sapiens
  misc_RNA (1)...(19): siRNA sense strand
aaacugacaaggacuacuu

SEQ ID NO: 242300 - RNA, 19 nt, Homo sapiens
  misc_RNA (1)...(19): siRNA sense strand
aaagaagccaucgcaaauu

SEQ ID NO: 242301 - RNA, 19 nt, Homo sapiens
  misc_RNA (1)...(19): siRNA sense strand
caaaagaagccaucgcaaa

SEQ ID NO: 242302 - RNA, 19 nt, Homo sapiens
  misc_RNA (1)...(19): siRNA sense strand
cacaugaggccauacagaa

SEQ ID NO: 242303 - RNA, 19 nt, Homo sapiens
  misc_RNA (1)...(19): siRNA sense strand
gaacaagaggaagggagaa

SEQ ID NO: 242304 - RNA, 19 nt, Homo sapiens
  misc_RNA (1)...(19): siRNA sense strand
agucguggaugaaauagau

SEQ ID NO: 242305 - RNA, 19 nt, Homo sapiens
  misc_RNA (1)...(19): siRNA sense strand
ggagaaauagcugcuucaa

SEQ ID NO: 242306 - RNA, 19 nt, Homo sapiens
  misc_RNA (1)...(19): siRNA sense strand
uagauagcauuacaacucu

SEQ ID NO: 242307 - RNA, 19 nt, Homo sapiens
  misc_RNA (1)...(19): siRNA sense strand
ggaugaaauagauagcauu

SEQ ID NO: 242308 - RNA, 19 nt, Homo sapiens
  misc_RNA (1)...(19): siRNA sense strand
caaacugguuggcuugacu

SEQ ID NO: 242309 - RNA, 19 nt, Homo sapiens
  misc_RNA (1)...(19): siRNA sense strand
aaucacauuugcuauugga

SEQ ID NO: 242310 - RNA, 19 nt, Homo sapiens
  misc_RNA (1)...(19): siRNA sense strand
cuggaagucuuuagcaauc

SEQ ID NO: 242311 - RNA, 19 nt, Homo sapiens
  misc_RNA (1)...(19): siRNA sense strand
ccuaguacccggacgaguu

SEQ ID NO: 242312 - RNA, 19 nt, Homo sapiens
  misc_RNA (1)...(19): siRNA sense strand
cgagagaagaggucgauca

SEQ ID NO: 242313 - RNA, 19 nt, Homo sapiens
  misc_RNA (1)...(19): siRNA sense strand
acacaucggcaagccuuua

SEQ ID NO: 242314 - RNA, 19 nt, Homo sapiens
  misc_RNA (1)...(19): siRNA sense strand
cuacauaguggaucacaca

SEQ ID NO: 242315 - RNA, 19 nt, Homo sapiens
  misc_RNA (1)...(19): siRNA sense strand
ggaucacacaauaauaaug

SEQ ID NO: 242316 - RNA, 19 nt, Homo sapiens
  misc_RNA (1)...(19): siRNA sense strand
agaaaaggcagagaaguua

SEQ ID NO: 242317 - RNA, 19 nt, Homo sapiens
  misc_RNA (1)...(19): siRNA sense strand
ccaaggacgaagaugaaga

SEQ ID NO: 242318 - RNA, 19 nt, Homo sapiens
  misc_RNA (1)...(19): siRNA sense strand
auagauagcauuacaacuc

SEQ ID NO: 242319 - RNA, 19 nt, Homo sapiens
  misc_RNA (1)...(19): siRNA sense strand
gaagaacuagaaaagauga

SEQ ID NO: 242320 - RNA, 19 nt, Homo sapiens
  misc_RNA (1)...(19): siRNA sense strand
aggcagagaaguuagagaa

SEQ ID NO: 242321 - RNA, 19 nt, Homo sapiens
  misc_RNA (1)...(19): siRNA sense strand
gucuuuagcaaucacauuu

SEQ ID NO: 242322 - RNA, 19 nt, Homo sapiens
  misc_RNA (1)...(19): siRNA sense strand
ucgcaaauuaugugaaaga

SEQ ID NO: 242323 - RNA, 19 nt, Homo sapiens
  misc_RNA (1)...(19): siRNA sense strand
gaagcacgucaagaaagaa

SEQ ID NO: 242324 - RNA, 19 nt, Homo sapiens
  misc_RNA (1)...(19): siRNA sense strand
aaugaagcacgucaagaaa

SEQ ID NO: 242325 - RNA, 19 nt, Homo sapiens
  misc_RNA (1)...(19): siRNA sense strand
gccagagcauacagagugu

SEQ ID NO: 242326 - RNA, 19 nt, Homo sapiens
  misc_RNA (1)...(19): siRNA sense strand
ucaaguggccagagcauac

SEQ ID NO: 242327 - RNA, 19 nt, Homo sapiens
  misc_RNA (1)...(19): siRNA sense strand
uauuuuggcuucacucauu

SEQ ID NO: 242328 - RNA, 19 nt, Homo sapiens
  misc_RNA (1)...(19): siRNA sense strand
acaugaggccauacagaaa

SEQ ID NO: 242329 - RNA, 19 nt, Homo sapiens
  misc_RNA (1)...(19): siRNA sense strand
cgcaaauuaugugaaagaa

SEQ ID NO: 242330 - RNA, 19 nt, Homo sapiens
  misc_RNA (1)...(19): siRNA sense strand
gaaagaaaaggcagagaag

SEQ ID NO: 242331 - RNA, 19 nt, Homo sapiens
  misc_RNA (1)...(19): siRNA sense strand
acacaugaggccauacaga

SEQ ID NO: 242332 - RNA, 19 nt, Homo sapiens
  misc_RNA (1)...(19): siRNA sense strand
aaaagaagccaucgcaaau

SEQ ID NO: 242333 - RNA, 19 nt, Homo sapiens
  misc_RNA (1)...(19): siRNA sense strand
ggaagucuuuagcaaucac

SEQ ID NO: 242334 - RNA, 19 nt, Homo sapiens
  misc_RNA (1)...(19): siRNA sense strand
agaagaggucgaucaagug

SEQ ID NO: 242335 - RNA, 19 nt, Homo sapiens
  misc_RNA (1)...(19): siRNA sense strand
gagucuugcugaggcaguu

SEQ ID NO: 242336 - RNA, 19 nt, Homo sapiens
  misc_RNA (1)...(19): siRNA sense strand
uggaugaaauagauagcau

SEQ ID NO: 242337 - RNA, 19 nt, Homo sapiens
  misc_RNA (1)...(19): siRNA sense strand
gaggaagggagaaauagcu

SEQ ID NO: 242338 - RNA, 19 nt, Homo sapiens
  misc_RNA (1)...(19): siRNA sense strand
uuuacuggcuggaaugaag

SEQ ID NO: 242339 - RNA, 19 nt, Homo sapiens
  misc_RNA (1)...(19): siRNA sense strand
uugggucagugguuauuga

SEQ ID NO: 242340 - RNA, 19 nt, Homo sapiens
  misc_RNA (1)...(19): siRNA sense strand
gaucaaguggccagagcau

SEQ ID NO: 242341 - RNA, 19 nt, Homo sapiens
  misc_RNA (1)...(19): siRNA sense strand
guaaaacugacaaggacua

SEQ ID NO: 242342 - RNA, 19 nt, Homo sapiens
  misc_RNA (1)...(19): siRNA sense strand
caaggacgaagaugaagac

SEQ ID NO: 242343 - RNA, 19 nt, Homo sapiens
  misc_RNA (1)...(19): siRNA sense strand
gaacuagaaaagaugauuc

SEQ ID NO: 242344 - RNA, 19 nt, Homo sapiens
  misc_RNA (1)...(19): siRNA sense strand
ucaaggacaugaaggagaa

SEQ ID NO: 242345 - RNA, 19 nt, Homo sapiens
  misc_RNA (1)...(19): siRNA sense strand
gucagcggauuauggauua

SEQ ID NO: 242346 - RNA, 19 nt, Homo sapiens
  misc_RNA (1)...(19): siRNA sense strand
gauuauggauuacuaugag

SEQ ID NO: 242347 - RNA, 19 nt, Homo sapiens
  misc_RNA (1)...(19): siRNA sense strand
ggacaugaaggagaacuga

SEQ ID NO: 242348 - RNA, 19 nt, Homo sapiens
  misc_RNA (1)...(19): siRNA sense strand
ggauuauggauuacuauga

SEQ ID NO: 242349 - RNA, 19 nt, Homo sapiens
  misc_RNA (1)...(19): siRNA sense strand
gaauugucuucaucaccaa

SEQ ID NO: 242350 - RNA, 19 nt, Homo sapiens
  misc_RNA (1)...(19): siRNA sense strand
gcccggaauugucuucauc

SEQ ID NO: 242351 - RNA, 19 nt, Homo sapiens
  misc_RNA (1)...(19): siRNA sense strand
ucaccuacacuaccuacaa

SEQ ID NO: 242352 - RNA, 19 nt, Homo sapiens
  misc_RNA (1)...(19): siRNA sense strand
gcuccaagcccggaauugu

SEQ ID NO: 242353 - RNA, 19 nt, Homo sapiens
  misc_RNA (1)...(19): siRNA sense strand
caccuacacuaccuacaag

SEQ ID NO: 242354 - RNA, 19 nt, Homo sapiens
  misc_RNA (1)...(19): siRNA sense strand
cgucagcggauuauggauu

SEQ ID NO: 242355 - RNA, 19 nt, Homo sapiens
  misc_RNA (1)...(19): siRNA sense strand
gacuauaucaaggacauga

SEQ ID NO: 242356 - RNA, 19 nt, Homo sapiens
  misc_RNA (1)...(19): siRNA sense strand
gagugcugcuucaccuaca

SEQ ID NO: 242357 - RNA, 19 nt, Homo sapiens
  misc_RNA (1)...(19): siRNA sense strand
gccauuccgucuguaccaa

SEQ ID NO: 242358 - RNA, 19 nt, Homo sapiens
  misc_RNA (1)...(19): siRNA sense strand
ucaaggacaugaaggagaa

SEQ ID NO: 242359 - RNA, 19 nt, Homo sapiens
  misc_RNA (1)...(19): siRNA sense strand
gucagcggauuauggauua

SEQ ID NO: 242360 - RNA, 19 nt, Homo sapiens
  misc_RNA (1)...(19): siRNA sense strand
gauuauggauuacuaugag

SEQ ID NO: 242361 - RNA, 19 nt, Homo sapiens
  misc_RNA (1)...(19): siRNA sense strand
ggacaugaaggagaacuga

SEQ ID NO: 242362 - RNA, 19 nt, Homo sapiens
  misc_RNA (1)...(19): siRNA sense strand
ggauuauggauuacuauga

SEQ ID NO: 242363 - RNA, 19 nt, Homo sapiens
  misc_RNA (1)...(19): siRNA sense strand
gaauugucuucaucaccaa

SEQ ID NO: 242364 - RNA, 19 nt, Homo sapiens
  misc_RNA (1)...(19): siRNA sense strand
gcccggaauugucuucauc

SEQ ID NO: 242365 - RNA, 19 nt, Homo sapiens
  misc_RNA (1)...(19): siRNA sense strand
ucaccuacacuaccuacaa

SEQ ID NO: 242366 - RNA, 19 nt, Homo sapiens
  misc_RNA (1)...(19): siRNA sense strand
gcuccaagcccggaauugu

SEQ ID NO: 242367 - RNA, 19 nt, Homo sapiens
  misc_RNA (1)...(19): siRNA sense strand
caccuacacuaccuacaag

SEQ ID NO: 242368 - RNA, 19 nt, Homo sapiens
  misc_RNA (1)...(19): siRNA sense strand
cgucagcggauuauggauu

SEQ ID NO: 242369 - RNA, 19 nt, Homo sapiens
  misc_RNA (1)...(19): siRNA sense strand
gacuauaucaaggacauga

SEQ ID NO: 242370 - RNA, 19 nt, Homo sapiens
  misc_RNA (1)...(19): siRNA sense strand
gagugcugcuucaccuaca

SEQ ID NO: 242371 - RNA, 19 nt, Homo sapiens
  misc_RNA (1)...(19): siRNA sense strand
gccauuccgucuguaccaa

SEQ ID NO: 242372 - RNA, 19 nt, Homo sapiens
  misc_RNA (1)...(19): siRNA sense strand
ucaaggacaugaaggagaa

SEQ ID NO: 242373 - RNA, 19 nt, Homo sapiens
  misc_RNA (1)...(19): siRNA sense strand
gucagcggauuauggauua

SEQ ID NO: 242374 - RNA, 19 nt, Homo sapiens
  misc_RNA (1)...(19): siRNA sense strand
gauuauggauuacuaugag

SEQ ID NO: 242375 - RNA, 19 nt, Homo sapiens
  misc_RNA (1)...(19): siRNA sense strand
ggacaugaaggagaacuga

SEQ ID NO: 242376 - RNA, 19 nt, Homo sapiens
  misc_RNA (1)...(19): siRNA sense strand
ggauuauggauuacuauga

SEQ ID NO: 242377 - RNA, 19 nt, Homo sapiens
  misc_RNA (1)...(19): siRNA sense strand
gaauugucuucaucaccaa

SEQ ID NO: 242378 - RNA, 19 nt, Homo sapiens
  misc_RNA (1)...(19): siRNA sense strand
gcccggaauugucuucauc

SEQ ID NO: 242379 - RNA, 19 nt, Homo sapiens
  misc_RNA (1)...(19): siRNA sense strand
ucaccuacacuaccuacaa

SEQ ID NO: 242380 - RNA, 19 nt, Homo sapiens
  misc_RNA (1)...(19): siRNA sense strand
gcuccaagcccggaauugu

SEQ ID NO: 242381 - RNA, 19 nt, Homo sapiens
  misc_RNA (1)...(19): siRNA sense strand
caccuacacuaccuacaag

SEQ ID NO: 242382 - RNA, 19 nt, Homo sapiens
  misc_RNA (1)...(19): siRNA sense strand
cgucagcggauuauggauu

SEQ ID NO: 242383 - RNA, 19 nt, Homo sapiens
  misc_RNA (1)...(19): siRNA sense strand
gacuauaucaaggacauga

SEQ ID NO: 242384 - RNA, 19 nt, Homo sapiens
  misc_RNA (1)...(19): siRNA sense strand
gagugcugcuucaccuaca

SEQ ID NO: 242385 - RNA, 19 nt, Homo sapiens
  misc_RNA (1)...(19): siRNA sense strand
gccauuccgucuguaccaa

SEQ ID NO: 242386 - RNA, 19 nt, Homo sapiens
  misc_RNA (1)...(19): siRNA sense strand
gcugaagcccuacucaaua

SEQ ID NO: 242387 - RNA, 19 nt, Homo sapiens
  misc_RNA (1)...(19): siRNA sense strand
gcagagacagaguuaauga

SEQ ID NO: 242388 - RNA, 19 nt, Homo sapiens
  misc_RNA (1)...(19): siRNA sense strand
caagccaggugucauauuc

SEQ ID NO: 242389 - RNA, 19 nt, Homo sapiens
  misc_RNA (1)...(19): siRNA sense strand
gaagcccuacucaauauaa

SEQ ID NO: 242390 - RNA, 19 nt, Homo sapiens
  misc_RNA (1)...(19): siRNA sense strand
gaacagcuuucacuuugcu

SEQ ID NO: 242391 - RNA, 19 nt, Homo sapiens
  misc_RNA (1)...(19): siRNA sense strand
gagacagaguuaaugaugu

SEQ ID NO: 242392 - RNA, 19 nt, Homo sapiens
  misc_RNA (1)...(19): siRNA sense strand
ucacaaagcaucccguguu

SEQ ID NO: 242393 - RNA, 19 nt, Homo sapiens
  misc_RNA (1)...(19): siRNA sense strand
ucauauuccucaccaagaa

SEQ ID NO: 242394 - RNA, 19 nt, Homo sapiens
  misc_RNA (1)...(19): siRNA sense strand
cagaguuaaugaugucaaa

SEQ ID NO: 242395 - RNA, 19 nt, Homo sapiens
  misc_RNA (1)...(19): siRNA sense strand
cugaagcccuacucaauau

SEQ ID NO: 242396 - RNA, 19 nt, Homo sapiens
  misc_RNA (1)...(19): siRNA sense strand
cacaaagcaucccguguuc

SEQ ID NO: 242397 - RNA, 19 nt, Homo sapiens
  misc_RNA (1)...(19): siRNA sense strand
ggaguucaggauugcauga

SEQ ID NO: 242398 - RNA, 19 nt, Homo sapiens
  misc_RNA (1)...(19): siRNA sense strand
gcuuguugcuguccuugga

SEQ ID NO: 242399 - RNA, 19 nt, Homo sapiens
  misc_RNA (1)...(19): siRNA sense strand
guccgggaguucaggauug

SEQ ID NO: 242400 - RNA, 19 nt, Homo sapiens
  misc_RNA (1)...(19): siRNA sense strand
agagacagaguuaaugaug

SEQ ID NO: 242401 - RNA, 19 nt, Homo sapiens
  misc_RNA (1)...(19): siRNA sense strand
ugaugcagagacagaguua

SEQ ID NO: 242402 - RNA, 19 nt, Homo sapiens
  misc_RNA (1)...(19): siRNA sense strand
gaaaauccaguaguucuga

SEQ ID NO: 242403 - RNA, 19 nt, Homo sapiens
  misc_RNA (1)...(19): siRNA sense strand
ccuccuacaucucacaaag

SEQ ID NO: 242404 - RNA, 19 nt, Homo sapiens
  misc_RNA (1)...(19): siRNA sense strand
ccaagccaggugucauauu

SEQ ID NO: 242405 - RNA, 19 nt, Homo sapiens
  misc_RNA (1)...(19): siRNA sense strand
ugaagcccuacucaauaua

SEQ ID NO: 242406 - RNA, 19 nt, Homo sapiens
  misc_RNA (1)...(19): siRNA sense strand
caucccguguucacucaug

SEQ ID NO: 242407 - RNA, 19 nt, Homo sapiens
  misc_RNA (1)...(19): siRNA sense strand
caaagcaucccguguucac

SEQ ID NO: 242408 - RNA, 19 nt, Homo sapiens
  misc_RNA (1)...(19): siRNA sense strand
cuccaagccaggugucaua

SEQ ID NO: 242409 - RNA, 19 nt, Homo sapiens
  misc_RNA (1)...(19): siRNA sense strand
gcugaagcccuacucaaua

SEQ ID NO: 242410 - RNA, 19 nt, Homo sapiens
  misc_RNA (1)...(19): siRNA sense strand
gcagagacagaguuaauga

SEQ ID NO: 242411 - RNA, 19 nt, Homo sapiens
  misc_RNA (1)...(19): siRNA sense strand
caagccaggugucauauuc

SEQ ID NO: 242412 - RNA, 19 nt, Homo sapiens
  misc_RNA (1)...(19): siRNA sense strand
gaagcccuacucaauauaa

SEQ ID NO: 242413 - RNA, 19 nt, Homo sapiens
  misc_RNA (1)...(19): siRNA sense strand
gaacagcuuucacuuugcu

SEQ ID NO: 242414 - RNA, 19 nt, Homo sapiens
  misc_RNA (1)...(19): siRNA sense strand
gagacagaguuaaugaugu

SEQ ID NO: 242415 - RNA, 19 nt, Homo sapiens
  misc_RNA (1)...(19): siRNA sense strand
ucacaaagcaucccguguu

SEQ ID NO: 242416 - RNA, 19 nt, Homo sapiens
  misc_RNA (1)...(19): siRNA sense strand
ucauauuccucaccaagaa

SEQ ID NO: 242417 - RNA, 19 nt, Homo sapiens
  misc_RNA (1)...(19): siRNA sense strand
cagaguuaaugaugucaaa

SEQ ID NO: 242418 - RNA, 19 nt, Homo sapiens
  misc_RNA (1)...(19): siRNA sense strand
cugaagcccuacucaauau

SEQ ID NO: 242419 - RNA, 19 nt, Homo sapiens
  misc_RNA (1)...(19): siRNA sense strand
cacaaagcaucccguguuc

SEQ ID NO: 242420 - RNA, 19 nt, Homo sapiens
  misc_RNA (1)...(19): siRNA sense strand
ggaguucaggauugcauga

SEQ ID NO: 242421 - RNA, 19 nt, Homo sapiens
  misc_RNA (1)...(19): siRNA sense strand
gcuuguugcuguccuugga

SEQ ID NO: 242422 - RNA, 19 nt, Homo sapiens
  misc_RNA (1)...(19): siRNA sense strand
guccgggaguucaggauug

SEQ ID NO: 242423 - RNA, 19 nt, Homo sapiens
  misc_RNA (1)...(19): siRNA sense strand
agagacagaguuaaugaug

SEQ ID NO: 242424 - RNA, 19 nt, Homo sapiens
  misc_RNA (1)...(19): siRNA sense strand
ugaugcagagacagaguua

SEQ ID NO: 242425 - RNA, 19 nt, Homo sapiens
  misc_RNA (1)...(19): siRNA sense strand
gaaaauccaguaguucuga

SEQ ID NO: 242426 - RNA, 19 nt, Homo sapiens
  misc_RNA (1)...(19): siRNA sense strand
ccuccuacaucucacaaag

SEQ ID NO: 242427 - RNA, 19 nt, Homo sapiens
  misc_RNA (1)...(19): siRNA sense strand
ccaagccaggugucauauu

SEQ ID NO: 242428 - RNA, 19 nt, Homo sapiens
  misc_RNA (1)...(19): siRNA sense strand
ugaagcccuacucaauaua

SEQ ID NO: 242429 - RNA, 19 nt, Homo sapiens
  misc_RNA (1)...(19): siRNA sense strand
caucccguguucacucaug

SEQ ID NO: 242430 - RNA, 19 nt, Homo sapiens
  misc_RNA (1)...(19): siRNA sense strand
caaagcaucccguguucac

SEQ ID NO: 242431 - RNA, 19 nt, Homo sapiens
  misc_RNA (1)...(19): siRNA sense strand
cuccaagccaggugucaua

SEQ ID NO: 242432 - RNA, 19 nt, Homo sapiens
  misc_RNA (1)...(19): siRNA sense strand
gcugaagcccuacucaaua

SEQ ID NO: 242433 - RNA, 19 nt, Homo sapiens
  misc_RNA (1)...(19): siRNA sense strand
gcagagacagaguuaauga

SEQ ID NO: 242434 - RNA, 19 nt, Homo sapiens
  misc_RNA (1)...(19): siRNA sense strand
caagccaggugucauauuc

SEQ ID NO: 242435 - RNA, 19 nt, Homo sapiens
  misc_RNA (1)...(19): siRNA sense strand
gaagcccuacucaauauaa

SEQ ID NO: 242436 - RNA, 19 nt, Homo sapiens
  misc_RNA (1)...(19): siRNA sense strand
gaacagcuuucacuuugcu

SEQ ID NO: 242437 - RNA, 19 nt, Homo sapiens
  misc_RNA (1)...(19): siRNA sense strand
gagacagaguuaaugaugu

SEQ ID NO: 242438 - RNA, 19 nt, Homo sapiens
  misc_RNA (1)...(19): siRNA sense strand
ucacaaagcaucccguguu

SEQ ID NO: 242439 - RNA, 19 nt, Homo sapiens
  misc_RNA (1)...(19): siRNA sense strand
ucauauuccucaccaagaa

SEQ ID NO: 242440 - RNA, 19 nt, Homo sapiens
  misc_RNA (1)...(19): siRNA sense strand
cagaguuaaugaugucaaa

SEQ ID NO: 242441 - RNA, 19 nt, Homo sapiens
  misc_RNA (1)...(19): siRNA sense strand
cugaagcccuacucaauau

SEQ ID NO: 242442 - RNA, 19 nt, Homo sapiens
  misc_RNA (1)...(19): siRNA sense strand
cacaaagcaucccguguuc

SEQ ID NO: 242443 - RNA, 19 nt, Homo sapiens
  misc_RNA (1)...(19): siRNA sense strand
ggaguucaggauugcauga

SEQ ID NO: 242444 - RNA, 19 nt, Homo sapiens
  misc_RNA (1)...(19): siRNA sense strand
gcuuguugcuguccuugga

SEQ ID NO: 242445 - RNA, 19 nt, Homo sapiens
  misc_RNA (1)...(19): siRNA sense strand
guccgggaguucaggauug

SEQ ID NO: 242446 - RNA, 19 nt, Homo sapiens
  misc_RNA (1)...(19): siRNA sense strand
agagacagaguuaaugaug

SEQ ID NO: 242447 - RNA, 19 nt, Homo sapiens
  misc_RNA (1)...(19): siRNA sense strand
ugaugcagagacagaguua

SEQ ID NO: 242448 - RNA, 19 nt, Homo sapiens
  misc_RNA (1)...(19): siRNA sense strand
gaaaauccaguaguucuga

SEQ ID NO: 242449 - RNA, 19 nt, Homo sapiens
  misc_RNA (1)...(19): siRNA sense strand
ccuccuacaucucacaaag

SEQ ID NO: 242450 - RNA, 19 nt, Homo sapiens
  misc_RNA (1)...(19): siRNA sense strand
ccaagccaggugucauauu

SEQ ID NO: 242451 - RNA, 19 nt, Homo sapiens
  misc_RNA (1)...(19): siRNA sense strand
ugaagcccuacucaauaua

SEQ ID NO: 242452 - RNA, 19 nt, Homo sapiens
  misc_RNA (1)...(19): siRNA sense strand
caucccguguucacucaug

SEQ ID NO: 242453 - RNA, 19 nt, Homo sapiens
  misc_RNA (1)...(19): siRNA sense strand
caaagcaucccguguucac

SEQ ID NO: 242454 - RNA, 19 nt, Homo sapiens
  misc_RNA (1)...(19): siRNA sense strand
cuccaagccaggugucaua

SEQ ID NO: 242455 - RNA, 19 nt, Homo sapiens
  misc_RNA (1)...(19): siRNA sense strand
gauaaagucccuccaauua

SEQ ID NO: 242456 - RNA, 19 nt, Homo sapiens
  misc_RNA (1)...(19): siRNA sense strand
ggaagaaucugucaugaau

SEQ ID NO: 242457 - RNA, 19 nt, Homo sapiens
  misc_RNA (1)...(19): siRNA sense strand
gcaagaagguugugggaaa

SEQ ID NO: 242458 - RNA, 19 nt, Homo sapiens
  misc_RNA (1)...(19): siRNA sense strand
ggacagagccucaaguuug

SEQ ID NO: 242459 - RNA, 19 nt, Homo sapiens
  misc_RNA (1)...(19): siRNA sense strand
uaaagucccuccaauuaaa

SEQ ID NO: 242460 - RNA, 19 nt, Homo sapiens
  misc_RNA (1)...(19): siRNA sense strand
gagggcaucugcuaaaguu

SEQ ID NO: 242461 - RNA, 19 nt, Homo sapiens
  misc_RNA (1)...(19): siRNA sense strand
gagggaggcauucucauua

SEQ ID NO: 242462 - RNA, 19 nt, Homo sapiens
  misc_RNA (1)...(19): siRNA sense strand
gauaugauaccagcuauuu

SEQ ID NO: 242463 - RNA, 19 nt, Homo sapiens
  misc_RNA (1)...(19): siRNA sense strand
cgaaggaccuggcgucuag

SEQ ID NO: 242464 - RNA, 19 nt, Homo sapiens
  misc_RNA (1)...(19): siRNA sense strand
gagauaaagucccuccaau

SEQ ID NO: 242465 - RNA, 19 nt, Homo sapiens
  misc_RNA (1)...(19): siRNA sense strand
aguaguggaucaugaauuu

SEQ ID NO: 242466 - RNA, 19 nt, Homo sapiens
  misc_RNA (1)...(19): siRNA sense strand
ugagaaagaucacgucuac

SEQ ID NO: 242467 - RNA, 19 nt, Homo sapiens
  misc_RNA (1)...(19): siRNA sense strand
ggugcugguugucucauua

SEQ ID NO: 242468 - RNA, 19 nt, Homo sapiens
  misc_RNA (1)...(19): siRNA sense strand
gcacgugaauggccaggau

SEQ ID NO: 242469 - RNA, 19 nt, Homo sapiens
  misc_RNA (1)...(19): siRNA sense strand
gacggucucugcgauauga

SEQ ID NO: 242470 - RNA, 19 nt, Homo sapiens
  misc_RNA (1)...(19): siRNA sense strand
gauggaagcauaagaacau

SEQ ID NO: 242471 - RNA, 19 nt, Homo sapiens
  misc_RNA (1)...(19): siRNA sense strand
gacagagccucaaguuugg

SEQ ID NO: 242472 - RNA, 19 nt, Homo sapiens
  misc_RNA (1)...(19): siRNA sense strand
gaagaugggaagauuuauc

SEQ ID NO: 242473 - RNA, 19 nt, Homo sapiens
  misc_RNA (1)...(19): siRNA sense strand
ggaagcguguugcaagaag

SEQ ID NO: 242474 - RNA, 19 nt, Homo sapiens
  misc_RNA (1)...(19): siRNA sense strand
aaagguuuauggagcgaua

SEQ ID NO: 242475 - RNA, 19 nt, Homo sapiens
  misc_RNA (1)...(19): siRNA sense strand
cugaagaugggaagauuua

SEQ ID NO: 242476 - RNA, 19 nt, Homo sapiens
  misc_RNA (1)...(19): siRNA sense strand
caugaaucuugacaaauug

SEQ ID NO: 242477 - RNA, 19 nt, Homo sapiens
  misc_RNA (1)...(19): siRNA sense strand
gaaucugucaugaaucuug

SEQ ID NO: 242478 - RNA, 19 nt, Homo sapiens
  misc_RNA (1)...(19): siRNA sense strand
guccauccaucgcauaaga

SEQ ID NO: 242479 - RNA, 19 nt, Homo sapiens
  misc_RNA (1)...(19): siRNA sense strand
ggagugccguggugucauc

SEQ ID NO: 242480 - RNA, 19 nt, Homo sapiens
  misc_RNA (1)...(19): siRNA sense strand
ggacuggccacucgcuauu

SEQ ID NO: 242481 - RNA, 19 nt, Homo sapiens
  misc_RNA (1)...(19): siRNA sense strand
ggagguggcauuucuacga

SEQ ID NO: 242482 - RNA, 19 nt, Homo sapiens
  misc_RNA (1)...(19): siRNA sense strand
gggaagaaucugucaugaa

SEQ ID NO: 242483 - RNA, 19 nt, Homo sapiens
  misc_RNA (1)...(19): siRNA sense strand
gaacugaagaugggaagau

SEQ ID NO: 242484 - RNA, 19 nt, Homo sapiens
  misc_RNA (1)...(19): siRNA sense strand
gaccuggcgucuagagaug

SEQ ID NO: 242485 - RNA, 19 nt, Homo sapiens
  misc_RNA (1)...(19): siRNA sense strand
aagaaucugucaugaaucu

SEQ ID NO: 242486 - RNA, 19 nt, Homo sapiens
  misc_RNA (1)...(19): siRNA sense strand
caacagaagaagcccuuug

SEQ ID NO: 242487 - RNA, 19 nt, Homo sapiens
  misc_RNA (1)...(19): siRNA sense strand
gcugauggaagcauaagaa

SEQ ID NO: 242488 - RNA, 19 nt, Homo sapiens
  misc_RNA (1)...(19): siRNA sense strand
cugcuaaaguuucagauuc

SEQ ID NO: 242489 - RNA, 19 nt, Homo sapiens
  misc_RNA (1)...(19): siRNA sense strand
auaaagucccuccaauuaa

SEQ ID NO: 242490 - RNA, 19 nt, Homo sapiens
  misc_RNA (1)...(19): siRNA sense strand
ggcaugccguuuagcagaa

SEQ ID NO: 242491 - RNA, 19 nt, Homo sapiens
  misc_RNA (1)...(19): siRNA sense strand
ggaccugguugucuuuggu

SEQ ID NO: 242492 - RNA, 19 nt, Homo sapiens
  misc_RNA (1)...(19): siRNA sense strand
ggagauccgagaaggaaga

SEQ ID NO: 242493 - RNA, 19 nt, Homo sapiens
  misc_RNA (1)...(19): siRNA sense strand
agggaggcauucucauuaa

SEQ ID NO: 242494 - RNA, 19 nt, Homo sapiens
  misc_RNA (1)...(19): siRNA sense strand
gcgauaugauaccagcuau

SEQ ID NO: 242495 - RNA, 19 nt, Homo sapiens
  misc_RNA (1)...(19): siRNA sense strand
gaauggccaggaucagauu

SEQ ID NO: 242496 - RNA, 19 nt, Homo sapiens
  misc_RNA (1)...(19): siRNA sense strand
gcuauugcacaccuuauau

SEQ ID NO: 242497 - RNA, 19 nt, Homo sapiens
  misc_RNA (1)...(19): siRNA sense strand
augcaggccuggagauaaa

SEQ ID NO: 242498 - RNA, 19 nt, Homo sapiens
  misc_RNA (1)...(19): siRNA sense strand
caccgugcauuauaacaug

SEQ ID NO: 242499 - RNA, 19 nt, Homo sapiens
  misc_RNA (1)...(19): siRNA sense strand
gcuauuuuguggaguauuu

SEQ ID NO: 242500 - RNA, 19 nt, Homo sapiens
  misc_RNA (1)...(19): siRNA sense strand
aauuauggcaugccguuua

SEQ ID NO: 242501 - RNA, 19 nt, Homo sapiens
  misc_RNA (1)...(19): siRNA sense strand
gcuguggcccugagaaaga

SEQ ID NO: 242502 - RNA, 19 nt, Homo sapiens
  misc_RNA (1)...(19): siRNA sense strand
ggaccuggcgucuagagau

SEQ ID NO: 242503 - RNA, 19 nt, Homo sapiens
  misc_RNA (1)...(19): siRNA sense strand
ggaggcauucucauuaaca

SEQ ID NO: 242504 - RNA, 19 nt, Homo sapiens
  misc_RNA (1)...(19): siRNA sense strand
agauaaagucccuccaauu

SEQ ID NO: 242505 - RNA, 19 nt, Homo sapiens
  misc_RNA (1)...(19): siRNA sense strand
agucaaggcgaaagguuua

SEQ ID NO: 242506 - RNA, 19 nt, Homo sapiens
  misc_RNA (1)...(19): siRNA sense strand
gcauucucauuaacaguca

SEQ ID NO: 242507 - RNA, 19 nt, Homo sapiens
  misc_RNA (1)...(19): siRNA sense strand
gaacauggaggaggacaac

SEQ ID NO: 242508 - RNA, 19 nt, Homo sapiens
  misc_RNA (1)...(19): siRNA sense strand
cgacucagcaugcagaagu

SEQ ID NO: 242509 - RNA, 19 nt, Homo sapiens
  misc_RNA (1)...(19): siRNA sense strand
cagcauguguuaccaagcu

SEQ ID NO: 242510 - RNA, 19 nt, Homo sapiens
  misc_RNA (1)...(19): siRNA sense strand
gggcaucugcuaaaguuuc

SEQ ID NO: 242511 - RNA, 19 nt, Homo sapiens
  misc_RNA (1)...(19): siRNA sense strand
ccuuggaucuccugaugga

SEQ ID NO: 242512 - RNA, 19 nt, Homo sapiens
  misc_RNA (1)...(19): siRNA sense strand
ggcaucugcuaaaguuuca

SEQ ID NO: 242513 - RNA, 19 nt, Homo sapiens
  misc_RNA (1)...(19): siRNA sense strand
agagggaggcauucucauu

SEQ ID NO: 242514 - RNA, 19 nt, Homo sapiens
  misc_RNA (1)...(19): siRNA sense strand
aaaucaugcugccguguuc

SEQ ID NO: 242515 - RNA, 19 nt, Homo sapiens
  misc_RNA (1)...(19): siRNA sense strand
aaucugucaugaaucuuga

SEQ ID NO: 242516 - RNA, 19 nt, Homo sapiens
  misc_RNA (1)...(19): siRNA sense strand
gggcaaacucgcucuugga

SEQ ID NO: 242517 - RNA, 19 nt, Homo sapiens
  misc_RNA (1)...(19): siRNA sense strand
uaguggaucaugaauuuga

SEQ ID NO: 242518 - RNA, 19 nt, Homo sapiens
  misc_RNA (1)...(19): siRNA sense strand
caagaagguugugggaaaa

SEQ ID NO: 242519 - RNA, 19 nt, Homo sapiens
  misc_RNA (1)...(19): siRNA sense strand
gaagaaucugucaugaauc

SEQ ID NO: 242520 - RNA, 19 nt, Homo sapiens
  misc_RNA (1)...(19): siRNA sense strand
uggucgagcuagaaaauua

SEQ ID NO: 242521 - RNA, 19 nt, Homo sapiens
  misc_RNA (1)...(19): siRNA sense strand
ugggaagcguguugcaaga

SEQ ID NO: 242522 - RNA, 19 nt, Homo sapiens
  misc_RNA (1)...(19): siRNA sense strand
cauaagaacaucggaacug

SEQ ID NO: 242523 - RNA, 19 nt, Homo sapiens
  misc_RNA (1)...(19): siRNA sense strand
gaaucuugacaaauugaga

SEQ ID NO: 242524 - RNA, 19 nt, Homo sapiens
  misc_RNA (1)...(19): siRNA sense strand
aagaugggaagauuuauca

SEQ ID NO: 242525 - RNA, 19 nt, Homo sapiens
  misc_RNA (1)...(19): siRNA sense strand
cgagcugcauuuggccuuu

SEQ ID NO: 242526 - RNA, 19 nt, Homo sapiens
  misc_RNA (1)...(19): siRNA sense strand
gagcugcauuuggccuuuc

SEQ ID NO: 242527 - RNA, 19 nt, Homo sapiens
  misc_RNA (1)...(19): siRNA sense strand
gaggcauucucauuaacag

SEQ ID NO: 242528 - RNA, 19 nt, Homo sapiens
  misc_RNA (1)...(19): siRNA sense strand
guggacagagccucaaguu

SEQ ID NO: 242529 - RNA, 19 nt, Homo sapiens
  misc_RNA (1)...(19): siRNA sense strand
agaagucaaugcaaaauca

SEQ ID NO: 242530 - RNA, 19 nt, Homo sapiens
  misc_RNA (1)...(19): siRNA sense strand
gcgaaggaccuggcgucua

SEQ ID NO: 242531 - RNA, 19 nt, Homo sapiens
  misc_RNA (1)...(19): siRNA sense strand
ugccuuggaucuccugaug

SEQ ID NO: 242532 - RNA, 19 nt, Homo sapiens
  misc_RNA (1)...(19): siRNA sense strand
uuccauuucugcucaguau

SEQ ID NO: 242533 - RNA, 19 nt, Homo sapiens
  misc_RNA (1)...(19): siRNA sense strand
caugcaggccuggagauaa

SEQ ID NO: 242534 - RNA, 19 nt, Homo sapiens
  misc_RNA (1)...(19): siRNA sense strand
gggaggcauucucauuaac

SEQ ID NO: 242535 - RNA, 19 nt, Homo sapiens
  misc_RNA (1)...(19): siRNA sense strand
cagucaaggcgaaagguuu

SEQ ID NO: 242536 - RNA, 19 nt, Homo sapiens
  misc_RNA (1)...(19): siRNA sense strand
gugaauggccaggaucaga

SEQ ID NO: 242537 - RNA, 19 nt, Homo sapiens
  misc_RNA (1)...(19): siRNA sense strand
ggacggucucugcgauaug

SEQ ID NO: 242538 - RNA, 19 nt, Homo sapiens
  misc_RNA (1)...(19): siRNA sense strand
aacagaagaagcccuuuga

SEQ ID NO: 242539 - RNA, 19 nt, Homo sapiens
  misc_RNA (1)...(19): siRNA sense strand
gggaagcguguugcaagaa

SEQ ID NO: 242540 - RNA, 19 nt, Homo sapiens
  misc_RNA (1)...(19): siRNA sense strand
gcauucccaccaacuacaa

SEQ ID NO: 242541 - RNA, 19 nt, Homo sapiens
  misc_RNA (1)...(19): siRNA sense strand
gauuuaucagcgugcauuu

SEQ ID NO: 242542 - RNA, 19 nt, Homo sapiens
  misc_RNA (1)...(19): siRNA sense strand
gaaaaucagcaagcucuau

SEQ ID NO: 242543 - RNA, 19 nt, Homo sapiens
  misc_RNA (1)...(19): siRNA sense strand
ccagcuauuuuguggagua

SEQ ID NO: 242544 - RNA, 19 nt, Homo sapiens
  misc_RNA (1)...(19): siRNA sense strand
aacugaagaugggaagauu

SEQ ID NO: 242545 - RNA, 19 nt, Homo sapiens
  misc_RNA (1)...(19): siRNA sense strand
gcuaaaguuucagauucca

SEQ ID NO: 242546 - RNA, 19 nt, Homo sapiens
  misc_RNA (1)...(19): siRNA sense strand
ugaauggccaggaucagau

SEQ ID NO: 242547 - RNA, 19 nt, Homo sapiens
  misc_RNA (1)...(19): siRNA sense strand
ggaacauggaggaggacaa

SEQ ID NO: 242548 - RNA, 19 nt, Homo sapiens
  misc_RNA (1)...(19): siRNA sense strand
ucaugcaggccuggagaua

SEQ ID NO: 242549 - RNA, 19 nt, Homo sapiens
  misc_RNA (1)...(19): siRNA sense strand
agaaagaucacgucuaccu

SEQ ID NO: 242550 - RNA, 19 nt, Homo sapiens
  misc_RNA (1)...(19): siRNA sense strand
guuaccaagcuguuuccua

SEQ ID NO: 242551 - RNA, 19 nt, Homo sapiens
  misc_RNA (1)...(19): siRNA sense strand
ucuuggaccugguugucuu

SEQ ID NO: 242552 - RNA, 19 nt, Homo sapiens
  misc_RNA (1)...(19): siRNA sense strand
agagacagccaugaucuuc

SEQ ID NO: 242553 - RNA, 19 nt, Homo sapiens
  misc_RNA (1)...(19): siRNA sense strand
ucagagacagccaugaucu

SEQ ID NO: 242554 - RNA, 19 nt, Homo sapiens
  misc_RNA (1)...(19): siRNA sense strand
gaaucgacgugacuacuua

SEQ ID NO: 242555 - RNA, 19 nt, Homo sapiens
  misc_RNA (1)...(19): siRNA sense strand
gagaagaagccucaacuua

SEQ ID NO: 242556 - RNA, 19 nt, Homo sapiens
  misc_RNA (1)...(19): siRNA sense strand
ccaauaagcuuugcaauca

SEQ ID NO: 242557 - RNA, 19 nt, Homo sapiens
  misc_RNA (1)...(19): siRNA sense strand
gaaguuaaaccacccgaua

SEQ ID NO: 242558 - RNA, 19 nt, Homo sapiens
  misc_RNA (1)...(19): siRNA sense strand
gaauagaggcccuguguga

SEQ ID NO: 242559 - RNA, 19 nt, Homo sapiens
  misc_RNA (1)...(19): siRNA sense strand
gcaaagauccaccgagaga

SEQ ID NO: 242560 - RNA, 19 nt, Homo sapiens
  misc_RNA (1)...(19): siRNA sense strand
caaugaagaugaugaugau

SEQ ID NO: 242561 - RNA, 19 nt, Homo sapiens
  misc_RNA (1)...(19): siRNA sense strand
gcccagaucucuucagcaa

SEQ ID NO: 242562 - RNA, 19 nt, Homo sapiens
  misc_RNA (1)...(19): siRNA sense strand
caaagaaggccaagaaagu

SEQ ID NO: 242563 - RNA, 19 nt, Homo sapiens
  misc_RNA (1)...(19): siRNA sense strand
ugacagugaugaugaugaa

SEQ ID NO: 242564 - RNA, 19 nt, Homo sapiens
  misc_RNA (1)...(19): siRNA sense strand
ccagaucucuucagcaauc

SEQ ID NO: 242565 - RNA, 19 nt, Homo sapiens
  misc_RNA (1)...(19): siRNA sense strand
ucgcagcacuuguucguaa

SEQ ID NO: 242566 - RNA, 19 nt, Homo sapiens
  misc_RNA (1)...(19): siRNA sense strand
guguuaagcuagaugauga

SEQ ID NO: 242567 - RNA, 19 nt, Homo sapiens
  misc_RNA (1)...(19): siRNA sense strand
gaagaagccucaacuuacc

SEQ ID NO: 242568 - RNA, 19 nt, Homo sapiens
  misc_RNA (1)...(19): siRNA sense strand
ugcaugaccuuucugagua

SEQ ID NO: 242569 - RNA, 19 nt, Homo sapiens
  misc_RNA (1)...(19): siRNA sense strand
gcaaagcaagcaaagcaaa

SEQ ID NO: 242570 - RNA, 19 nt, Homo sapiens
  misc_RNA (1)...(19): siRNA sense strand
ugaguacgaugcugaguau

SEQ ID NO: 242571 - RNA, 19 nt, Homo sapiens
  misc_RNA (1)...(19): siRNA sense strand
aaacaaaagugacgagaaa

SEQ ID NO: 242572 - RNA, 19 nt, Homo sapiens
  misc_RNA (1)...(19): siRNA sense strand
ugaagaugaugaugaugaa

SEQ ID NO: 242573 - RNA, 19 nt, Homo sapiens
  misc_RNA (1)...(19): siRNA sense strand
gagcacaguuugagaucau

SEQ ID NO: 242574 - RNA, 19 nt, Homo sapiens
  misc_RNA (1)...(19): siRNA sense strand
uaagcuagaugaugacagu

SEQ ID NO: 242575 - RNA, 19 nt, Homo sapiens
  misc_RNA (1)...(19): siRNA sense strand
gcaaucaaggccaaagaaa

SEQ ID NO: 242576 - RNA, 19 nt, Homo sapiens
  misc_RNA (1)...(19): siRNA sense strand
ccaagaaugaucaaagauu

SEQ ID NO: 242577 - RNA, 19 nt, Homo sapiens
  misc_RNA (1)...(19): siRNA sense strand
gcaaagaaggccaagaaag

SEQ ID NO: 242578 - RNA, 19 nt, Homo sapiens
  misc_RNA (1)...(19): siRNA sense strand
ggaggagccuuccaaacag

SEQ ID NO: 242579 - RNA, 19 nt, Homo sapiens
  misc_RNA (1)...(19): siRNA sense strand
gagagaagaagagaaagaa

SEQ ID NO: 242580 - RNA, 19 nt, Homo sapiens
  misc_RNA (1)...(19): siRNA sense strand
gaggagccuuccaaacaga

SEQ ID NO: 242581 - RNA, 19 nt, Homo sapiens
  misc_RNA (1)...(19): siRNA sense strand
ggaagcagaagcugggaaa

SEQ ID NO: 242582 - RNA, 19 nt, Homo sapiens
  misc_RNA (1)...(19): siRNA sense strand
gaagaggaggcgcgaauag

SEQ ID NO: 242583 - RNA, 19 nt, Homo sapiens
  misc_RNA (1)...(19): siRNA sense strand
gaguggagcucuugguuuu

SEQ ID NO: 242584 - RNA, 19 nt, Homo sapiens
  misc_RNA (1)...(19): siRNA sense strand
cagaagaggcucccacaga

SEQ ID NO: 242585 - RNA, 19 nt, Homo sapiens
  misc_RNA (1)...(19): siRNA sense strand
ugaagaagaugggaauuac

SEQ ID NO: 242586 - RNA, 19 nt, Homo sapiens
  misc_RNA (1)...(19): siRNA sense strand
uugacaagcuggccgagua

SEQ ID NO: 242587 - RNA, 19 nt, Homo sapiens
  misc_RNA (1)...(19): siRNA sense strand
gaucacguucucccaagua

SEQ ID NO: 242588 - RNA, 19 nt, Homo sapiens
  misc_RNA (1)...(19): siRNA sense strand
ccacguggaacagagauua

SEQ ID NO: 242589 - RNA, 19 nt, Homo sapiens
  misc_RNA (1)...(19): siRNA sense strand
caauaagcuuugcaaucaa

SEQ ID NO: 242590 - RNA, 19 nt, Homo sapiens
  misc_RNA (1)...(19): siRNA sense strand
cgacgugacuacuuacuac

SEQ ID NO: 242591 - RNA, 19 nt, Homo sapiens
  misc_RNA (1)...(19): siRNA sense strand
gcucugacaaugaagauga

SEQ ID NO: 242592 - RNA, 19 nt, Homo sapiens
  misc_RNA (1)...(19): siRNA sense strand
aggaggagcuagaagcaaa

SEQ ID NO: 242593 - RNA, 19 nt, Homo sapiens
  misc_RNA (1)...(19): siRNA sense strand
caaagaaaaugaucugcuu

SEQ ID NO: 242594 - RNA, 19 nt, Homo sapiens
  misc_RNA (1)...(19): siRNA sense strand
cuucaucccucucucuuug

SEQ ID NO: 242595 - RNA, 19 nt, Homo sapiens
  misc_RNA (1)...(19): siRNA sense strand
gauugagcgucccgucuga

SEQ ID NO: 242596 - RNA, 19 nt, Homo sapiens
  misc_RNA (1)...(19): siRNA sense strand
acuauaaguucauccagaa

SEQ ID NO: 242597 - RNA, 19 nt, Homo sapiens
  misc_RNA (1)...(19): siRNA sense strand
gcgaauagaggcccugugu

SEQ ID NO: 242598 - RNA, 19 nt, Homo sapiens
  misc_RNA (1)...(19): siRNA sense strand
aaggaaagcggcguuauuu

SEQ ID NO: 242599 - RNA, 19 nt, Homo sapiens
  misc_RNA (1)...(19): siRNA sense strand
ggaaucgacgugacuacuu

SEQ ID NO: 242600 - RNA, 19 nt, Homo sapiens
  misc_RNA (1)...(19): siRNA sense strand
ccgaguaugucgccaggaa

SEQ ID NO: 242601 - RNA, 19 nt, Homo sapiens
  misc_RNA (1)...(19): siRNA sense strand
ggagaagaagccucaacuu

SEQ ID NO: 242602 - RNA, 19 nt, Homo sapiens
  misc_RNA (1)...(19): siRNA sense strand
acaaugaagaugaugauga

SEQ ID NO: 242603 - RNA, 19 nt, Homo sapiens
  misc_RNA (1)...(19): siRNA sense strand
ccaaguaccauucgucauc

SEQ ID NO: 242604 - RNA, 19 nt, Homo sapiens
  misc_RNA (1)...(19): siRNA sense strand
aaaggaaagcggcguuauu

SEQ ID NO: 242605 - RNA, 19 nt, Homo sapiens
  misc_RNA (1)...(19): siRNA sense strand
aagcaaagaaggccaagaa

SEQ ID NO: 242606 - RNA, 19 nt, Homo sapiens
  misc_RNA (1)...(19): siRNA sense strand
ugccaagaaugaucaaaga

SEQ ID NO: 242607 - RNA, 19 nt, Homo sapiens
  misc_RNA (1)...(19): siRNA sense strand
uagaggcccugugugauga

SEQ ID NO: 242608 - RNA, 19 nt, Homo sapiens
  misc_RNA (1)...(19): siRNA sense strand
cgauaggccuucgagcaaa

SEQ ID NO: 242609 - RNA, 19 nt, Homo sapiens
  misc_RNA (1)...(19): siRNA sense strand
aaggaggcaucguccagua

SEQ ID NO: 242610 - RNA, 19 nt, Homo sapiens
  misc_RNA (1)...(19): siRNA sense strand
gaagguaguggacccagau

SEQ ID NO: 242611 - RNA, 19 nt, Homo sapiens
  misc_RNA (1)...(19): siRNA sense strand
ggaggaggagccuuccaaa

SEQ ID NO: 242612 - RNA, 19 nt, Homo sapiens
  misc_RNA (1)...(19): siRNA sense strand
agaagaagccucaacuuac

SEQ ID NO: 242613 - RNA, 19 nt, Homo sapiens
  misc_RNA (1)...(19): siRNA sense strand
aaagaaggccaagaaaguu

SEQ ID NO: 242614 - RNA, 19 nt, Homo sapiens
  misc_RNA (1)...(19): siRNA sense strand
gaaguguaaccgccuugaa

SEQ ID NO: 242615 - RNA, 19 nt, Homo sapiens
  misc_RNA (1)...(19): siRNA sense strand
gaggaugggagcuacaaug

SEQ ID NO: 242616 - RNA, 19 nt, Homo sapiens
  misc_RNA (1)...(19): siRNA sense strand
ggagcacaguuugagauca

SEQ ID NO: 242617 - RNA, 19 nt, Homo sapiens
  misc_RNA (1)...(19): siRNA sense strand
cuucagcaaucguuucuuc

SEQ ID NO: 242618 - RNA, 19 nt, Homo sapiens
  misc_RNA (1)...(19): siRNA sense strand
cgagagaagaagagaaaga

SEQ ID NO: 242619 - RNA, 19 nt, Homo sapiens
  misc_RNA (1)...(19): siRNA sense strand
ggagcuagaagcaaagcaa

SEQ ID NO: 242620 - RNA, 19 nt, Homo sapiens
  misc_RNA (1)...(19): siRNA sense strand
cagugaugaugaugaagaa

SEQ ID NO: 242621 - RNA, 19 nt, Homo sapiens
  misc_RNA (1)...(19): siRNA sense strand
agaugaugaugaugaagaa

SEQ ID NO: 242622 - RNA, 19 nt, Homo sapiens
  misc_RNA (1)...(19): siRNA sense strand
gaaagagggacgcuacacu

SEQ ID NO: 242623 - RNA, 19 nt, Homo sapiens
  misc_RNA (1)...(19): siRNA sense strand
uuacagcuacuacaugcua

SEQ ID NO: 242624 - RNA, 19 nt, Homo sapiens
  misc_RNA (1)...(19): siRNA sense strand
gagaagaagagaaagaaaa

SEQ ID NO: 242625 - RNA, 19 nt, Homo sapiens
  misc_RNA (1)...(19): siRNA sense strand
gcgccaaacccgagaggaa

SEQ ID NO: 242626 - RNA, 19 nt, Homo sapiens
  misc_RNA (1)...(19): siRNA sense strand
gaaguucgagaccaguguu

SEQ ID NO: 242627 - RNA, 19 nt, Homo sapiens
  misc_RNA (1)...(19): siRNA sense strand
gcuagaugaugacagugau

SEQ ID NO: 242628 - RNA, 19 nt, Homo sapiens
  misc_RNA (1)...(19): siRNA sense strand
gaggcaucguccaguaaga

SEQ ID NO: 242629 - RNA, 19 nt, Homo sapiens
  misc_RNA (1)...(19): siRNA sense strand
gcaugaccuuucugaguac

SEQ ID NO: 242630 - RNA, 19 nt, Homo sapiens
  misc_RNA (1)...(19): siRNA sense strand
ccagaaagccaugaaagag

SEQ ID NO: 242631 - RNA, 19 nt, Homo sapiens
  misc_RNA (1)...(19): siRNA sense strand
gaucucauggccaaaguca

SEQ ID NO: 242632 - RNA, 19 nt, Homo sapiens
  misc_RNA (1)...(19): siRNA sense strand
cgaguggagcucuugguuu

SEQ ID NO: 242633 - RNA, 19 nt, Homo sapiens
  misc_RNA (1)...(19): siRNA sense strand
gucgaggaauccagcacua

SEQ ID NO: 242634 - RNA, 19 nt, Homo sapiens
  misc_RNA (1)...(19): siRNA sense strand
gaugaugacagugaugaug

SEQ ID NO: 242635 - RNA, 19 nt, Homo sapiens
  misc_RNA (1)...(19): siRNA sense strand
ugaugaugaugaagaagau

SEQ ID NO: 242636 - RNA, 19 nt, Homo sapiens
  misc_RNA (1)...(19): siRNA sense strand
aggaggagccuuccaaaca

SEQ ID NO: 242637 - RNA, 19 nt, Homo sapiens
  misc_RNA (1)...(19): siRNA sense strand
ucucauggccaaagucaga

SEQ ID NO: 242638 - RNA, 19 nt, Homo sapiens
  misc_RNA (1)...(19): siRNA sense strand
aauaagcuuugcaaucaag

SEQ ID NO: 242639 - RNA, 19 nt, Homo sapiens
  misc_RNA (1)...(19): siRNA sense strand
ggacgggaagcuggugaaa

SEQ ID NO: 242640 - RNA, 19 nt, Homo sapiens
  misc_RNA (1)...(19): siRNA sense strand
ugaagaggaggcgcgaaua

SEQ ID NO: 242641 - RNA, 19 nt, Homo sapiens
  misc_RNA (1)...(19): siRNA sense strand
gagcugaugaagcccuuga

SEQ ID NO: 242642 - RNA, 19 nt, Homo sapiens
  misc_RNA (1)...(19): siRNA sense strand
augaagaagaugggaauua

SEQ ID NO: 242643 - RNA, 19 nt, Homo sapiens
  misc_RNA (1)...(19): siRNA sense strand
gauaggccuucgagcaaaa

SEQ ID NO: 242644 - RNA, 19 nt, Homo sapiens
  misc_RNA (1)...(19): siRNA sense strand
gaugaagaaagcaaagaag

SEQ ID NO: 242645 - RNA, 19 nt, Homo sapiens
  misc_RNA (1)...(19): siRNA sense strand
gauccucaucgacagauau

SEQ ID NO: 242646 - RNA, 19 nt, Homo sapiens
  misc_RNA (1)...(19): siRNA sense strand
ccacaaccaccaccacaag

SEQ ID NO: 242647 - RNA, 19 nt, Homo sapiens
  misc_RNA (1)...(19): siRNA sense strand
guauuacagcuacuacaug

SEQ ID NO: 242648 - RNA, 19 nt, Homo sapiens
  misc_RNA (1)...(19): siRNA sense strand
gcagggagcacaguuugag

SEQ ID NO: 242649 - RNA, 19 nt, Homo sapiens
  misc_RNA (1)...(19): siRNA sense strand
gacguggucaccugcauga

SEQ ID NO: 242650 - RNA, 19 nt, Homo sapiens
  misc_RNA (1)...(19): siRNA sense strand
aaagagaaacagcuucaag

SEQ ID NO: 242651 - RNA, 19 nt, Homo sapiens
  misc_RNA (1)...(19): siRNA sense strand
aagcaaagcaagcaaagca

SEQ ID NO: 242652 - RNA, 19 nt, Homo sapiens
  misc_RNA (1)...(19): siRNA sense strand
guacgaugcugaguauucc

SEQ ID NO: 242653 - RNA, 19 nt, Homo sapiens
  misc_RNA (1)...(19): siRNA sense strand
ugaugaagaaagcaaagaa

SEQ ID NO: 242654 - RNA, 19 nt, Homo sapiens
  misc_RNA (1)...(19): siRNA sense strand
gaauagaggcccuguguga

SEQ ID NO: 242655 - RNA, 19 nt, Homo sapiens
  misc_RNA (1)...(19): siRNA sense strand
ugcaugaccuuucugagua

SEQ ID NO: 242656 - RNA, 19 nt, Homo sapiens
  misc_RNA (1)...(19): siRNA sense strand
ugaguacgaugcugaguau

SEQ ID NO: 242657 - RNA, 19 nt, Homo sapiens
  misc_RNA (1)...(19): siRNA sense strand
gaagaauacaagcgauuga

SEQ ID NO: 242658 - RNA, 19 nt, Homo sapiens
  misc_RNA (1)...(19): siRNA sense strand
gaguggagcucuugguuuu

SEQ ID NO: 242659 - RNA, 19 nt, Homo sapiens
  misc_RNA (1)...(19): siRNA sense strand
gaagaggaggcgcgaauag

SEQ ID NO: 242660 - RNA, 19 nt, Homo sapiens
  misc_RNA (1)...(19): siRNA sense strand
ggaagaauacaagcgauug

SEQ ID NO: 242661 - RNA, 19 nt, Homo sapiens
  misc_RNA (1)...(19): siRNA sense strand
ccacguggaacagagauua

SEQ ID NO: 242662 - RNA, 19 nt, Homo sapiens
  misc_RNA (1)...(19): siRNA sense strand
gcgaauagaggcccugugu

SEQ ID NO: 242663 - RNA, 19 nt, Homo sapiens
  misc_RNA (1)...(19): siRNA sense strand
uagaggcccugugugauga

SEQ ID NO: 242664 - RNA, 19 nt, Homo sapiens
  misc_RNA (1)...(19): siRNA sense strand
gcgccaaacccgagaggaa

SEQ ID NO: 242665 - RNA, 19 nt, Homo sapiens
  misc_RNA (1)...(19): siRNA sense strand
gcaugaccuuucugaguac

SEQ ID NO: 242666 - RNA, 19 nt, Homo sapiens
  misc_RNA (1)...(19): siRNA sense strand
cgaguggagcucuugguuu

SEQ ID NO: 242667 - RNA, 19 nt, Homo sapiens
  misc_RNA (1)...(19): siRNA sense strand
ugaagaggaggcgcgaaua

SEQ ID NO: 242668 - RNA, 19 nt, Homo sapiens
  misc_RNA (1)...(19): siRNA sense strand
aauacaagcgauugaguga

SEQ ID NO: 242669 - RNA, 19 nt, Homo sapiens
  misc_RNA (1)...(19): siRNA sense strand
gauccucaucgacagauau

SEQ ID NO: 242670 - RNA, 19 nt, Homo sapiens
  misc_RNA (1)...(19): siRNA sense strand
gacguggucaccugcauga

SEQ ID NO: 242671 - RNA, 19 nt, Homo sapiens
  misc_RNA (1)...(19): siRNA sense strand
guacgaugcugaguauucc

SEQ ID NO: 242672 - RNA, 19 nt, Homo sapiens
  misc_RNA (1)...(19): siRNA sense strand
caagauccucaucgacaga

SEQ ID NO: 242673 - RNA, 19 nt, Homo sapiens
  misc_RNA (1)...(19): siRNA sense strand
ucaccugcaugaccuuucu

SEQ ID NO: 242674 - RNA, 19 nt, Homo sapiens
  misc_RNA (1)...(19): siRNA sense strand
auagaggcccugugugaug

SEQ ID NO: 242675 - RNA, 19 nt, Homo sapiens
  misc_RNA (1)...(19): siRNA sense strand
cugaguacgaugcugagua

SEQ ID NO: 242676 - RNA, 19 nt, Homo sapiens
  misc_RNA (1)...(19): siRNA sense strand
gcagccgaguggagcucuu

SEQ ID NO: 242677 - RNA, 19 nt, Homo sapiens
  misc_RNA (1)...(19): siRNA sense strand
gcucuugguuuucggcuau

SEQ ID NO: 242678 - RNA, 19 nt, Homo sapiens
  misc_RNA (1)...(19): siRNA sense strand
gaaaggagauaaagcauua

SEQ ID NO: 242679 - RNA, 19 nt, Homo sapiens
  misc_RNA (1)...(19): siRNA sense strand
ggaaauaccucucaucaaa

SEQ ID NO: 242680 - RNA, 19 nt, Homo sapiens
  misc_RNA (1)...(19): siRNA sense strand
ggacguggaugacuugcua

SEQ ID NO: 242681 - RNA, 19 nt, Homo sapiens
  misc_RNA (1)...(19): siRNA sense strand
ccaacaacauuacgaaauu

SEQ ID NO: 242682 - RNA, 19 nt, Homo sapiens
  misc_RNA (1)...(19): siRNA sense strand
gcaccaaacuucccugugu

SEQ ID NO: 242683 - RNA, 19 nt, Homo sapiens
  misc_RNA (1)...(19): siRNA sense strand
gacaguggaugauguagaa

SEQ ID NO: 242684 - RNA, 19 nt, Homo sapiens
  misc_RNA (1)...(19): siRNA sense strand
gaagaaaggagauaaagca

SEQ ID NO: 242685 - RNA, 19 nt, Homo sapiens
  misc_RNA (1)...(19): siRNA sense strand
ggauaaccauggccuuuga

SEQ ID NO: 242686 - RNA, 19 nt, Homo sapiens
  misc_RNA (1)...(19): siRNA sense strand
gcacacuuauucuuauguu

SEQ ID NO: 242687 - RNA, 19 nt, Homo sapiens
  misc_RNA (1)...(19): siRNA sense strand
gaaaugcacacuuauucuu

SEQ ID NO: 242688 - RNA, 19 nt, Homo sapiens
  misc_RNA (1)...(19): siRNA sense strand
guucaggucugugugauuu

SEQ ID NO: 242689 - RNA, 19 nt, Homo sapiens
  misc_RNA (1)...(19): siRNA sense strand
gaucgucauuuacuugcua

SEQ ID NO: 242690 - RNA, 19 nt, Homo sapiens
  misc_RNA (1)...(19): siRNA sense strand
gguauugccuugccagaga

SEQ ID NO: 242691 - RNA, 19 nt, Homo sapiens
  misc_RNA (1)...(19): siRNA sense strand
ggagauaaagcauuacaga

SEQ ID NO: 242692 - RNA, 19 nt, Homo sapiens
  misc_RNA (1)...(19): siRNA sense strand
gccaggagcucucuugauc

SEQ ID NO: 242693 - RNA, 19 nt, Homo sapiens
  misc_RNA (1)...(19): siRNA sense strand
gaaggaauagcaugguuga

SEQ ID NO: 242694 - RNA, 19 nt, Homo sapiens
  misc_RNA (1)...(19): siRNA sense strand
gaaauaccucucaucaaau

SEQ ID NO: 242695 - RNA, 19 nt, Homo sapiens
  misc_RNA (1)...(19): siRNA sense strand
augaggaaaugcacacuua

SEQ ID NO: 242696 - RNA, 19 nt, Homo sapiens
  misc_RNA (1)...(19): siRNA sense strand
gacuggagcauucaccuua

SEQ ID NO: 242697 - RNA, 19 nt, Homo sapiens
  misc_RNA (1)...(19): siRNA sense strand
guaaauguggcaggaauaa

SEQ ID NO: 242698 - RNA, 19 nt, Homo sapiens
  misc_RNA (1)...(19): siRNA sense strand
gaggaaaugcacacuuauu

SEQ ID NO: 242699 - RNA, 19 nt, Homo sapiens
  misc_RNA (1)...(19): siRNA sense strand
gcaggaucgucauuuacuu

SEQ ID NO: 242700 - RNA, 19 nt, Homo sapiens
  misc_RNA (1)...(19): siRNA sense strand
gauugugacagaaauagua

SEQ ID NO: 242701 - RNA, 19 nt, Homo sapiens
  misc_RNA (1)...(19): siRNA sense strand
aaacuuggcaguccacauu

SEQ ID NO: 242702 - RNA, 19 nt, Homo sapiens
  misc_RNA (1)...(19): siRNA sense strand
ucaaauuacucagagauca

SEQ ID NO: 242703 - RNA, 19 nt, Homo sapiens
  misc_RNA (1)...(19): siRNA sense strand
gcaguccacauuccuguaa

SEQ ID NO: 242704 - RNA, 19 nt, Homo sapiens
  misc_RNA (1)...(19): siRNA sense strand
aaccauggccuuugaaauu

SEQ ID NO: 242705 - RNA, 19 nt, Homo sapiens
  misc_RNA (1)...(19): siRNA sense strand
caggagcucucuugaucuu

SEQ ID NO: 242706 - RNA, 19 nt, Homo sapiens
  misc_RNA (1)...(19): siRNA sense strand
gcugauuacucggaagaaa

SEQ ID NO: 242707 - RNA, 19 nt, Homo sapiens
  misc_RNA (1)...(19): siRNA sense strand
gaccuugucugugucaaug

SEQ ID NO: 242708 - RNA, 19 nt, Homo sapiens
  misc_RNA (1)...(19): siRNA sense strand
caagcgcagugguguauca

SEQ ID NO: 242709 - RNA, 19 nt, Homo sapiens
  misc_RNA (1)...(19): siRNA sense strand
aauaguagguucgaaacaa

SEQ ID NO: 242710 - RNA, 19 nt, Homo sapiens
  misc_RNA (1)...(19): siRNA sense strand
cagaaggaauagcaugguu

SEQ ID NO: 242711 - RNA, 19 nt, Homo sapiens
  misc_RNA (1)...(19): siRNA sense strand
ggagcucucuugaucuuac

SEQ ID NO: 242712 - RNA, 19 nt, Homo sapiens
  misc_RNA (1)...(19): siRNA sense strand
ggugagaacuccccaaaug

SEQ ID NO: 242713 - RNA, 19 nt, Homo sapiens
  misc_RNA (1)...(19): siRNA sense strand
cagaugaggaaguuaguaa

SEQ ID NO: 242714 - RNA, 19 nt, Homo sapiens
  misc_RNA (1)...(19): siRNA sense strand
ggaauccaguuagccauca

SEQ ID NO: 242715 - RNA, 19 nt, Homo sapiens
  misc_RNA (1)...(19): siRNA sense strand
gucaugcgccugggaauua

SEQ ID NO: 242716 - RNA, 19 nt, Homo sapiens
  misc_RNA (1)...(19): siRNA sense strand
aaaggaggauugugggaau

SEQ ID NO: 242717 - RNA, 19 nt, Homo sapiens
  misc_RNA (1)...(19): siRNA sense strand
ccucugaucaucuuuggua

SEQ ID NO: 242718 - RNA, 19 nt, Homo sapiens
  misc_RNA (1)...(19): siRNA sense strand
gcauucaccuuaggcuaug

SEQ ID NO: 242719 - RNA, 19 nt, Homo sapiens
  misc_RNA (1)...(19): siRNA sense strand
cagagacaguggaugaugu

SEQ ID NO: 242720 - RNA, 19 nt, Homo sapiens
  misc_RNA (1)...(19): siRNA sense strand
ggaaaugcacacuuauucu

SEQ ID NO: 242721 - RNA, 19 nt, Homo sapiens
  misc_RNA (1)...(19): siRNA sense strand
agaaauaguagguucgaaa

SEQ ID NO: 242722 - RNA, 19 nt, Homo sapiens
  misc_RNA (1)...(19): siRNA sense strand
gaacuaccucugaucaucu

SEQ ID NO: 242723 - RNA, 19 nt, Homo sapiens
  misc_RNA (1)...(19): siRNA sense strand
gcuacgugauugugacaga

SEQ ID NO: 242724 - RNA, 19 nt, Homo sapiens
  misc_RNA (1)...(19): siRNA sense strand
ccuugucacugcguucuua

SEQ ID NO: 242725 - RNA, 19 nt, Homo sapiens
  misc_RNA (1)...(19): siRNA sense strand
gagauaaagcauuacagau

SEQ ID NO: 242726 - RNA, 19 nt, Homo sapiens
  misc_RNA (1)...(19): siRNA sense strand
gaaauaguagguucgaaac

SEQ ID NO: 242727 - RNA, 19 nt, Homo sapiens
  misc_RNA (1)...(19): siRNA sense strand
auaguagguucgaaacaaa

SEQ ID NO: 242728 - RNA, 19 nt, Homo sapiens
  misc_RNA (1)...(19): siRNA sense strand
ugagacgcauugcuaagug

SEQ ID NO: 242729 - RNA, 19 nt, Homo sapiens
  misc_RNA (1)...(19): siRNA sense strand
gaugaggaaguuaguaauc

SEQ ID NO: 242730 - RNA, 19 nt, Homo sapiens
  misc_RNA (1)...(19): siRNA sense strand
caccaaacuucccuguguu

SEQ ID NO: 242731 - RNA, 19 nt, Homo sapiens
  misc_RNA (1)...(19): siRNA sense strand
aaauguggcaggaauaaga

SEQ ID NO: 242732 - RNA, 19 nt, Homo sapiens
  misc_RNA (1)...(19): siRNA sense strand
acucagagaucacuguuac

SEQ ID NO: 242733 - RNA, 19 nt, Homo sapiens
  misc_RNA (1)...(19): siRNA sense strand
agauaaagcauuacagauc

SEQ ID NO: 242734 - RNA, 19 nt, Homo sapiens
  misc_RNA (1)...(19): siRNA sense strand
gggaaauaccucucaucaa

SEQ ID NO: 242735 - RNA, 19 nt, Homo sapiens
  misc_RNA (1)...(19): siRNA sense strand
uaagugcaaugggaaauac

SEQ ID NO: 242736 - RNA, 19 nt, Homo sapiens
  misc_RNA (1)...(19): siRNA sense strand
agaacuaccucugaucauc

SEQ ID NO: 242737 - RNA, 19 nt, Homo sapiens
  misc_RNA (1)...(19): siRNA sense strand
caagguguauuuggaaagg

SEQ ID NO: 242738 - RNA, 19 nt, Homo sapiens
  misc_RNA (1)...(19): siRNA sense strand
gaaccucggcuuccugacu

SEQ ID NO: 242739 - RNA, 19 nt, Homo sapiens
  misc_RNA (1)...(19): siRNA sense strand
gaucuuccgcuuccugcaa

SEQ ID NO: 242740 - RNA, 19 nt, Homo sapiens
  misc_RNA (1)...(19): siRNA sense strand
ccugcaagguguauuugga

SEQ ID NO: 242741 - RNA, 19 nt, Homo sapiens
  misc_RNA (1)...(19): siRNA sense strand
ggaaaggggacguggauga

SEQ ID NO: 242742 - RNA, 19 nt, Homo sapiens
  misc_RNA (1)...(19): siRNA sense strand
cuaagugcaaugggaaaua

SEQ ID NO: 242743 - RNA, 19 nt, Homo sapiens
  misc_RNA (1)...(19): siRNA sense strand
gcuaugcagcagacaggua

SEQ ID NO: 242744 - RNA, 19 nt, Homo sapiens
  misc_RNA (1)...(19): siRNA sense strand
agaaaggagauaaagcauu

SEQ ID NO: 242745 - RNA, 19 nt, Homo sapiens
  misc_RNA (1)...(19): siRNA sense strand
auggcaggaucgucauuua

SEQ ID NO: 242746 - RNA, 19 nt, Homo sapiens
  misc_RNA (1)...(19): siRNA sense strand
caccuucgccuuccucuuc

SEQ ID NO: 242747 - RNA, 19 nt, Homo sapiens
  misc_RNA (1)...(19): siRNA sense strand
ucagcgaguuugaccuugu

SEQ ID NO: 242748 - RNA, 19 nt, Homo sapiens
  misc_RNA (1)...(19): siRNA sense strand
ggaagaaaggagauaaagc

SEQ ID NO: 242749 - RNA, 19 nt, Homo sapiens
  misc_RNA (1)...(19): siRNA sense strand
caucugugguggccuugug

SEQ ID NO: 242750 - RNA, 19 nt, Homo sapiens
  misc_RNA (1)...(19): siRNA sense strand
gaugacuugcuacgugauu

SEQ ID NO: 242751 - RNA, 19 nt, Homo sapiens
  misc_RNA (1)...(19): siRNA sense strand
agagacaguggaugaugua

SEQ ID NO: 242752 - RNA, 19 nt, Homo sapiens
  misc_RNA (1)...(19): siRNA sense strand
gggauaaccauggccuuug

SEQ ID NO: 242753 - RNA, 19 nt, Homo sapiens
  misc_RNA (1)...(19): siRNA sense strand
ggaagacuagggauaacca

SEQ ID NO: 242754 - RNA, 19 nt, Homo sapiens
  misc_RNA (1)...(19): siRNA sense strand
ucacaagcgcaguggugua

SEQ ID NO: 242755 - RNA, 19 nt, Homo sapiens
  misc_RNA (1)...(19): siRNA sense strand
uguuacagaugaggaaguu

SEQ ID NO: 242756 - RNA, 19 nt, Homo sapiens
  misc_RNA (1)...(19): siRNA sense strand
guuucccgcucucaccuuu

SEQ ID NO: 242757 - RNA, 19 nt, Homo sapiens
  misc_RNA (1)...(19): siRNA sense strand
aguuugaccuugucugugu

SEQ ID NO: 242758 - RNA, 19 nt, Homo sapiens
  misc_RNA (1)...(19): siRNA sense strand
cuagaacuaccucugauca

SEQ ID NO: 242759 - RNA, 19 nt, Homo sapiens
  misc_RNA (1)...(19): siRNA sense strand
ccauggccuuugaaauugu

SEQ ID NO: 242760 - RNA, 19 nt, Homo sapiens
  misc_RNA (1)...(19): siRNA sense strand
accauggccuuugaaauug

SEQ ID NO: 242761 - RNA, 19 nt, Homo sapiens
  misc_RNA (1)...(19): siRNA sense strand
caggaucgucauuuacuug

SEQ ID NO: 242762 - RNA, 19 nt, Homo sapiens
  misc_RNA (1)...(19): siRNA sense strand
ggcuagaacuaccucugau

SEQ ID NO: 242763 - RNA, 19 nt, Homo sapiens
  misc_RNA (1)...(19): siRNA sense strand
uaaccauggccuuugaaau

SEQ ID NO: 242764 - RNA, 19 nt, Homo sapiens
  misc_RNA (1)...(19): siRNA sense strand
ugcaagguguauuuggaaa

SEQ ID NO: 242765 - RNA, 19 nt, Homo sapiens
  misc_RNA (1)...(19): siRNA sense strand
gauaaccauggccuuugaa

SEQ ID NO: 242766 - RNA, 19 nt, Homo sapiens
  misc_RNA (1)...(19): siRNA sense strand
ugaucuuacuaaccauuga

SEQ ID NO: 242767 - RNA, 19 nt, Homo sapiens
  misc_RNA (1)...(19): siRNA sense strand
caucaaauuacucagagau

SEQ ID NO: 242768 - RNA, 19 nt, Homo sapiens
  misc_RNA (1)...(19): siRNA sense strand
cuacgugauugugacagaa

SEQ ID NO: 242769 - RNA, 19 nt, Homo sapiens
  misc_RNA (1)...(19): siRNA sense strand
cagaaauaguagguucgaa

SEQ ID NO: 242770 - RNA, 19 nt, Homo sapiens
  misc_RNA (1)...(19): siRNA sense strand
caccaucgucagcgaguuu

SEQ ID NO: 242771 - RNA, 19 nt, Homo sapiens
  misc_RNA (1)...(19): siRNA sense strand
aggaaaugcacacuuauuc

SEQ ID NO: 242772 - RNA, 19 nt, Homo sapiens
  misc_RNA (1)...(19): siRNA sense strand
ugaggaaguuaguaaucca

SEQ ID NO: 242773 - RNA, 19 nt, Homo sapiens
  misc_RNA (1)...(19): siRNA sense strand
cuuccugacuggagcauuc

SEQ ID NO: 242774 - RNA, 19 nt, Homo sapiens
  misc_RNA (1)...(19): siRNA sense strand
uuacagaugaggaaguuag

SEQ ID NO: 242775 - RNA, 19 nt, Homo sapiens
  misc_RNA (1)...(19): siRNA sense strand
ugccagagacaguggauga

SEQ ID NO: 242776 - RNA, 19 nt, Homo sapiens
  misc_RNA (1)...(19): siRNA sense strand
gcaagguguauuuggaaag

SEQ ID NO: 242777 - RNA, 19 nt, Homo sapiens
  misc_RNA (1)...(19): siRNA sense strand
cauggccuuugaaauuguu

SEQ ID NO: 242778 - RNA, 19 nt, Homo sapiens
  misc_RNA (1)...(19): siRNA sense strand
gaauaaaucugcugucuug

SEQ ID NO: 242779 - RNA, 19 nt, Homo sapiens
  misc_RNA (1)...(19): siRNA sense strand
gcaaaucucugaaggaucu

SEQ ID NO: 242780 - RNA, 19 nt, Homo sapiens
  misc_RNA (1)...(19): siRNA sense strand
ugacuucccuggccuauuu

SEQ ID NO: 242781 - RNA, 19 nt, Homo sapiens
  misc_RNA (1)...(19): siRNA sense strand
aggcaaagcugaauaaauc

SEQ ID NO: 242782 - RNA, 19 nt, Homo sapiens
  misc_RNA (1)...(19): siRNA sense strand
acauugagcuccucucuug

SEQ ID NO: 242783 - RNA, 19 nt, Homo sapiens
  misc_RNA (1)...(19): siRNA sense strand
gcgcacugcuguccacaaa

SEQ ID NO: 242784 - RNA, 19 nt, Homo sapiens
  misc_RNA (1)...(19): siRNA sense strand
gaacacagacgugcucaug

SEQ ID NO: 242785 - RNA, 19 nt, Homo sapiens
  misc_RNA (1)...(19): siRNA sense strand
ugacagccaugaagacaga

SEQ ID NO: 242786 - RNA, 19 nt, Homo sapiens
  misc_RNA (1)...(19): siRNA sense strand
cggagaagcugccuaucaa

SEQ ID NO: 242787 - RNA, 19 nt, Homo sapiens
  misc_RNA (1)...(19): siRNA sense strand
gcaaggccaucgacuacau

SEQ ID NO: 242788 - RNA, 19 nt, Homo sapiens
  misc_RNA (1)...(19): siRNA sense strand
ggaggguguuccuacauga

SEQ ID NO: 242789 - RNA, 19 nt, Homo sapiens
  misc_RNA (1)...(19): siRNA sense strand
gcacugaggcaaagcugaa

SEQ ID NO: 242790 - RNA, 19 nt, Homo sapiens
  misc_RNA (1)...(19): siRNA sense strand
acacagacgugcucaugga

SEQ ID NO: 242791 - RNA, 19 nt, Homo sapiens
  misc_RNA (1)...(19): siRNA sense strand
gggagagccuguacagcuu

SEQ ID NO: 242792 - RNA, 19 nt, Homo sapiens
  misc_RNA (1)...(19): siRNA sense strand
gcacgacugucagcagaug

SEQ ID NO: 242793 - RNA, 19 nt, Homo sapiens
  misc_RNA (1)...(19): siRNA sense strand
ccacuccauugaagaugua

SEQ ID NO: 242794 - RNA, 19 nt, Homo sapiens
  misc_RNA (1)...(19): siRNA sense strand
ggaggcuucucuacaggaa

SEQ ID NO: 242795 - RNA, 19 nt, Homo sapiens
  misc_RNA (1)...(19): siRNA sense strand
gccuacagcuucuccauca

SEQ ID NO: 242796 - RNA, 19 nt, Homo sapiens
  misc_RNA (1)...(19): siRNA sense strand
gccagcagcuccauugaca

SEQ ID NO: 242797 - RNA, 19 nt, Homo sapiens
  misc_RNA (1)...(19): siRNA sense strand
ccaggugacucagcuauuc

SEQ ID NO: 242798 - RNA, 19 nt, Homo sapiens
  misc_RNA (1)...(19): siRNA sense strand
caaccaagacagugacuuc

SEQ ID NO: 242799 - RNA, 19 nt, Homo sapiens
  misc_RNA (1)...(19): siRNA sense strand
aagcaaaucucugaaggau

SEQ ID NO: 242800 - RNA, 19 nt, Homo sapiens
  misc_RNA (1)...(19): siRNA sense strand
gcggagaagcugccuauca

SEQ ID NO: 242801 - RNA, 19 nt, Homo sapiens
  misc_RNA (1)...(19): siRNA sense strand
ggucguagaugcggagaag

SEQ ID NO: 242802 - RNA, 19 nt, Homo sapiens
  misc_RNA (1)...(19): siRNA sense strand
gaggcaaagcugaauaaau

SEQ ID NO: 242803 - RNA, 19 nt, Homo sapiens
  misc_RNA (1)...(19): siRNA sense strand
ccacaacgccauugagaag

SEQ ID NO: 242804 - RNA, 19 nt, Homo sapiens
  misc_RNA (1)...(19): siRNA sense strand
ggccugguaucaaggaaga

SEQ ID NO: 242805 - RNA, 19 nt, Homo sapiens
  misc_RNA (1)...(19): siRNA sense strand
gcaacacagcaaccagaaa

SEQ ID NO: 242806 - RNA, 19 nt, Homo sapiens
  misc_RNA (1)...(19): siRNA sense strand
ggaaccaucuuggcaacag

SEQ ID NO: 242807 - RNA, 19 nt, Homo sapiens
  misc_RNA (1)...(19): siRNA sense strand
cgacaucgaagacaugcuu

SEQ ID NO: 242808 - RNA, 19 nt, Homo sapiens
  misc_RNA (1)...(19): siRNA sense strand
gaaccaucuuggcaacagu

SEQ ID NO: 242809 - RNA, 19 nt, Homo sapiens
  misc_RNA (1)...(19): siRNA sense strand
ccagagccguggagagaag

SEQ ID NO: 242810 - RNA, 19 nt, Homo sapiens
  misc_RNA (1)...(19): siRNA sense strand
gcggcugcauugagaguga

SEQ ID NO: 242811 - RNA, 19 nt, Homo sapiens
  misc_RNA (1)...(19): siRNA sense strand
ccaccagcgucuaccauag

SEQ ID NO: 242812 - RNA, 19 nt, Homo sapiens
  misc_RNA (1)...(19): siRNA sense strand
caacacagcaaccagaaac

SEQ ID NO: 242813 - RNA, 19 nt, Homo sapiens
  misc_RNA (1)...(19): siRNA sense strand
gcuccuccaucaaugacaa

SEQ ID NO: 242814 - RNA, 19 nt, Homo sapiens
  misc_RNA (1)...(19): siRNA sense strand
gaaggcggcaggucucagu

SEQ ID NO: 242815 - RNA, 19 nt, Homo sapiens
  misc_RNA (1)...(19): siRNA sense strand
ugugugaccugcuucuugu

SEQ ID NO: 242816 - RNA, 19 nt, Homo sapiens
  misc_RNA (1)...(19): siRNA sense strand
gcacugcuguccacaaaag

SEQ ID NO: 242817 - RNA, 19 nt, Homo sapiens
  misc_RNA (1)...(19): siRNA sense strand
gcaaagcugaauaaaucug

SEQ ID NO: 242818 - RNA, 19 nt, Homo sapiens
  misc_RNA (1)...(19): siRNA sense strand
aagacaugcuucagcuuau

SEQ ID NO: 242819 - RNA, 19 nt, Homo sapiens
  misc_RNA (1)...(19): siRNA sense strand
ucaacaaccaagacaguga

SEQ ID NO: 242820 - RNA, 19 nt, Homo sapiens
  misc_RNA (1)...(19): siRNA sense strand
cgacuacauucgcuuucug

SEQ ID NO: 242821 - RNA, 19 nt, Homo sapiens
  misc_RNA (1)...(19): siRNA sense strand
gcgcaaggccaucgacuac

SEQ ID NO: 242822 - RNA, 19 nt, Homo sapiens
  misc_RNA (1)...(19): siRNA sense strand
ugaccgacaucgaagacau

SEQ ID NO: 242823 - RNA, 19 nt, Homo sapiens
  misc_RNA (1)...(19): siRNA sense strand
cggaggguguuccuacaug

SEQ ID NO: 242824 - RNA, 19 nt, Homo sapiens
  misc_RNA (1)...(19): siRNA sense strand
ugacagcuguggugaucca

SEQ ID NO: 242825 - RNA, 19 nt, Homo sapiens
  misc_RNA (1)...(19): siRNA sense strand
gcacccacuccauugaaga

SEQ ID NO: 242826 - RNA, 19 nt, Homo sapiens
  misc_RNA (1)...(19): siRNA sense strand
gaugcuggcucaccuuucc

SEQ ID NO: 242827 - RNA, 19 nt, Homo sapiens
  misc_RNA (1)...(19): siRNA sense strand
gcaguggagggaacacaga

SEQ ID NO: 242828 - RNA, 19 nt, Homo sapiens
  misc_RNA (1)...(19): siRNA sense strand
gcccacaacgccauugaga

SEQ ID NO: 242829 - RNA, 19 nt, Homo sapiens
  misc_RNA (1)...(19): siRNA sense strand
acaaggccgugcagcuguu

SEQ ID NO: 242830 - RNA, 19 nt, Homo sapiens
  misc_RNA (1)...(19): siRNA sense strand
ccacgggccuugcauuuuc

SEQ ID NO: 242831 - RNA, 19 nt, Homo sapiens
  misc_RNA (1)...(19): siRNA sense strand
ugcuucagcuuaucaacaa

SEQ ID NO: 242832 - RNA, 19 nt, Homo sapiens
  misc_RNA (1)...(19): siRNA sense strand
agacggagccacugugaag

SEQ ID NO: 242833 - RNA, 19 nt, Homo sapiens
  misc_RNA (1)...(19): siRNA sense strand
ccagccagcagcuccauug

SEQ ID NO: 242834 - RNA, 19 nt, Homo sapiens
  misc_RNA (1)...(19): siRNA sense strand
uguggcggcugcauugaga

SEQ ID NO: 242835 - RNA, 19 nt, Homo sapiens
  misc_RNA (1)...(19): siRNA sense strand
cuuguagccuccucuggaa

SEQ ID NO: 242836 - RNA, 19 nt, Homo sapiens
  misc_RNA (1)...(19): siRNA sense strand
caucgacuacauucgcuuu

SEQ ID NO: 242837 - RNA, 19 nt, Homo sapiens
  misc_RNA (1)...(19): siRNA sense strand
ucugacagcuguggugauc

SEQ ID NO: 242838 - RNA, 19 nt, Homo sapiens
  misc_RNA (1)...(19): siRNA sense strand
ugaauaaaucugcugucuu

SEQ ID NO: 242839 - RNA, 19 nt, Homo sapiens
  misc_RNA (1)...(19): siRNA sense strand
ccacugucacuuccagcua

SEQ ID NO: 242840 - RNA, 19 nt, Homo sapiens
  misc_RNA (1)...(19): siRNA sense strand
cugaauaaaucugcugucu

SEQ ID NO: 242841 - RNA, 19 nt, Homo sapiens
  misc_RNA (1)...(19): siRNA sense strand
uaucaacaaccaagacagu

SEQ ID NO: 242842 - RNA, 19 nt, Homo sapiens
  misc_RNA (1)...(19): siRNA sense strand
cagccagccugaccaucug

SEQ ID NO: 242843 - RNA, 19 nt, Homo sapiens
  misc_RNA (1)...(19): siRNA sense strand
ccuuggugcuucucuuugu

SEQ ID NO: 242844 - RNA, 19 nt, Homo sapiens
  misc_RNA (1)...(19): siRNA sense strand
gcaaccagaaacucaagca

SEQ ID NO: 242845 - RNA, 19 nt, Homo sapiens
  misc_RNA (1)...(19): siRNA sense strand
caaggccaucgacuacauu

SEQ ID NO: 242846 - RNA, 19 nt, Homo sapiens
  misc_RNA (1)...(19): siRNA sense strand
ccgggaggcuucucuacag

SEQ ID NO: 242847 - RNA, 19 nt, Homo sapiens
  misc_RNA (1)...(19): siRNA sense strand
gcacacccagguccagagu

SEQ ID NO: 242848 - RNA, 19 nt, Homo sapiens
  misc_RNA (1)...(19): siRNA sense strand
cagcagcuccauugacaag

SEQ ID NO: 242849 - RNA, 19 nt, Homo sapiens
  misc_RNA (1)...(19): siRNA sense strand
agacaugcuucagcuuauc

SEQ ID NO: 242850 - RNA, 19 nt, Homo sapiens
  misc_RNA (1)...(19): siRNA sense strand
ggugggcacugaggcaaag

SEQ ID NO: 242851 - RNA, 19 nt, Homo sapiens
  misc_RNA (1)...(19): siRNA sense strand
cugaggcaaagcugaauaa

SEQ ID NO: 242852 - RNA, 19 nt, Homo sapiens
  misc_RNA (1)...(19): siRNA sense strand
guuccugugugaccugcuu

SEQ ID NO: 242853 - RNA, 19 nt, Homo sapiens
  misc_RNA (1)...(19): siRNA sense strand
gcugcugaccgacaucgaa

SEQ ID NO: 242854 - RNA, 19 nt, Homo sapiens
  misc_RNA (1)...(19): siRNA sense strand
aaagcaaaucucugaagga

SEQ ID NO: 242855 - RNA, 19 nt, Homo sapiens
  misc_RNA (1)...(19): siRNA sense strand
gacaugcuucagcuuauca

SEQ ID NO: 242856 - RNA, 19 nt, Homo sapiens
  misc_RNA (1)...(19): siRNA sense strand
uacagcuucuccaucaguu

SEQ ID NO: 242857 - RNA, 19 nt, Homo sapiens
  misc_RNA (1)...(19): siRNA sense strand
cuauguggcggcugcauug

SEQ ID NO: 242858 - RNA, 19 nt, Homo sapiens
  misc_RNA (1)...(19): siRNA sense strand
cuaccgcuccuccaucaau

SEQ ID NO: 242859 - RNA, 19 nt, Homo sapiens
  misc_RNA (1)...(19): siRNA sense strand
gaccgacaucgaagacaug

SEQ ID NO: 242860 - RNA, 19 nt, Homo sapiens
  misc_RNA (1)...(19): siRNA sense strand
agcgagcacugaacugugu

SEQ ID NO: 242861 - RNA, 19 nt, Homo sapiens
  misc_RNA (1)...(19): siRNA sense strand
ugacagcccagucuuugag

SEQ ID NO: 242862 - RNA, 19 nt, Homo sapiens
  misc_RNA (1)...(19): siRNA sense strand
cacaaaagcaaaucucuga

SEQ ID NO: 242863 - RNA, 19 nt, Homo sapiens
  misc_RNA (1)...(19): siRNA sense strand
gagcggagcuggucuguga

SEQ ID NO: 242864 - RNA, 19 nt, Homo sapiens
  misc_RNA (1)...(19): siRNA sense strand
gaagagagcugugaauucu

SEQ ID NO: 242865 - RNA, 19 nt, Homo sapiens
  misc_RNA (1)...(19): siRNA sense strand
caagagaaagugcccauua

SEQ ID NO: 242866 - RNA, 19 nt, Homo sapiens
  misc_RNA (1)...(19): siRNA sense strand
gcacaagucuggcguucug

SEQ ID NO: 242867 - RNA, 19 nt, Homo sapiens
  misc_RNA (1)...(19): siRNA sense strand
gaaaggcggacaacccaua

SEQ ID NO: 242868 - RNA, 19 nt, Homo sapiens
  misc_RNA (1)...(19): siRNA sense strand
aaacucagcugcaacaaca

SEQ ID NO: 242869 - RNA, 19 nt, Homo sapiens
  misc_RNA (1)...(19): siRNA sense strand
guagaccgcucacggauuc

SEQ ID NO: 242870 - RNA, 19 nt, Homo sapiens
  misc_RNA (1)...(19): siRNA sense strand
gcaagguguuccugcauga

SEQ ID NO: 242871 - RNA, 19 nt, Homo sapiens
  misc_RNA (1)...(19): siRNA sense strand
gcugguaaauggugugauu

SEQ ID NO: 242872 - RNA, 19 nt, Homo sapiens
  misc_RNA (1)...(19): siRNA sense strand
agaguucccugacuuguuu

SEQ ID NO: 242873 - RNA, 19 nt, Homo sapiens
  misc_RNA (1)...(19): siRNA sense strand
gccagcagaugauuguuaa

SEQ ID NO: 242874 - RNA, 19 nt, Homo sapiens
  misc_RNA (1)...(19): siRNA sense strand
gaagaucgaggacuuuaau

SEQ ID NO: 242875 - RNA, 19 nt, Homo sapiens
  misc_RNA (1)...(19): siRNA sense strand
cgauaucgcuccuccauca

SEQ ID NO: 242876 - RNA, 19 nt, Homo sapiens
  misc_RNA (1)...(19): siRNA sense strand
aagagaaagugcccauuaa

SEQ ID NO: 242877 - RNA, 19 nt, Homo sapiens
  misc_RNA (1)...(19): siRNA sense strand
gcagucugguggacaauga

SEQ ID NO: 242878 - RNA, 19 nt, Homo sapiens
  misc_RNA (1)...(19): siRNA sense strand
gaagcccucuauuggauga

SEQ ID NO: 242879 - RNA, 19 nt, Homo sapiens
  misc_RNA (1)...(19): siRNA sense strand
gcaggucaaucauaaacug

SEQ ID NO: 242880 - RNA, 19 nt, Homo sapiens
  misc_RNA (1)...(19): siRNA sense strand
gaugccuacucuucucuua

SEQ ID NO: 242881 - RNA, 19 nt, Homo sapiens
  misc_RNA (1)...(19): siRNA sense strand
cacaaugccuguaaugaug

SEQ ID NO: 242882 - RNA, 19 nt, Homo sapiens
  misc_RNA (1)...(19): siRNA sense strand
gcugugcgcucucauuuua

SEQ ID NO: 242883 - RNA, 19 nt, Homo sapiens
  misc_RNA (1)...(19): siRNA sense strand
caacagacgguaaugauca

SEQ ID NO: 242884 - RNA, 19 nt, Homo sapiens
  misc_RNA (1)...(19): siRNA sense strand
ggaccauucugaccacaau

SEQ ID NO: 242885 - RNA, 19 nt, Homo sapiens
  misc_RNA (1)...(19): siRNA sense strand
ggacagcgcucuggcaaaa

SEQ ID NO: 242886 - RNA, 19 nt, Homo sapiens
  misc_RNA (1)...(19): siRNA sense strand
caaggagagucuauacugu

SEQ ID NO: 242887 - RNA, 19 nt, Homo sapiens
  misc_RNA (1)...(19): siRNA sense strand
augcaaaggucaaagauga

SEQ ID NO: 242888 - RNA, 19 nt, Homo sapiens
  misc_RNA (1)...(19): siRNA sense strand
gacaacccauaauaucauu

SEQ ID NO: 242889 - RNA, 19 nt, Homo sapiens
  misc_RNA (1)...(19): siRNA sense strand
gagcuggucugugaaguca

SEQ ID NO: 242890 - RNA, 19 nt, Homo sapiens
  misc_RNA (1)...(19): siRNA sense strand
gaacccagcugaccccauu

SEQ ID NO: 242891 - RNA, 19 nt, Homo sapiens
  misc_RNA (1)...(19): siRNA sense strand
ugaccacacugaagacaga

SEQ ID NO: 242892 - RNA, 19 nt, Homo sapiens
  misc_RNA (1)...(19): siRNA sense strand
gaaacaggcagaucuggau

SEQ ID NO: 242893 - RNA, 19 nt, Homo sapiens
  misc_RNA (1)...(19): siRNA sense strand
ggugacauccucccaggua

SEQ ID NO: 242894 - RNA, 19 nt, Homo sapiens
  misc_RNA (1)...(19): siRNA sense strand
gaagaagagagcugugaau

SEQ ID NO: 242895 - RNA, 19 nt, Homo sapiens
  misc_RNA (1)...(19): siRNA sense strand
caccaggccuucugcaaga

SEQ ID NO: 242896 - RNA, 19 nt, Homo sapiens
  misc_RNA (1)...(19): siRNA sense strand
ggacaacccauaauaucau

SEQ ID NO: 242897 - RNA, 19 nt, Homo sapiens
  misc_RNA (1)...(19): siRNA sense strand
ccagacggcugcccuucaa

SEQ ID NO: 242898 - RNA, 19 nt, Homo sapiens
  misc_RNA (1)...(19): siRNA sense strand
ggacagacgccaagaugca

SEQ ID NO: 242899 - RNA, 19 nt, Homo sapiens
  misc_RNA (1)...(19): siRNA sense strand
guaaucaagugggagaguu

SEQ ID NO: 242900 - RNA, 19 nt, Homo sapiens
  misc_RNA (1)...(19): siRNA sense strand
cacauuaccuuccuucucu

SEQ ID NO: 242901 - RNA, 19 nt, Homo sapiens
  misc_RNA (1)...(19): siRNA sense strand
gacgagaugcugcaauuug

SEQ ID NO: 242902 - RNA, 19 nt, Homo sapiens
  misc_RNA (1)...(19): siRNA sense strand
gaaggccauugauuacauc

SEQ ID NO: 242903 - RNA, 19 nt, Homo sapiens
  misc_RNA (1)...(19): siRNA sense strand
cccauaauaucauugagaa

SEQ ID NO: 242904 - RNA, 19 nt, Homo sapiens
  misc_RNA (1)...(19): siRNA sense strand
caacaacagacgguaauga

SEQ ID NO: 242905 - RNA, 19 nt, Homo sapiens
  misc_RNA (1)...(19): siRNA sense strand
ggaagaagagagcugugaa

SEQ ID NO: 242906 - RNA, 19 nt, Homo sapiens
  misc_RNA (1)...(19): siRNA sense strand
ugcagcaggucaaucauaa

SEQ ID NO: 242907 - RNA, 19 nt, Homo sapiens
  misc_RNA (1)...(19): siRNA sense strand
gcaguguccugucauucga

SEQ ID NO: 242908 - RNA, 19 nt, Homo sapiens
  misc_RNA (1)...(19): siRNA sense strand
ucgacgagaugcugcaauu

SEQ ID NO: 242909 - RNA, 19 nt, Homo sapiens
  misc_RNA (1)...(19): siRNA sense strand
gggcaacuccuauucuuca

SEQ ID NO: 242910 - RNA, 19 nt, Homo sapiens
  misc_RNA (1)...(19): siRNA sense strand
gcagaugggcagcagaguu

SEQ ID NO: 242911 - RNA, 19 nt, Homo sapiens
  misc_RNA (1)...(19): siRNA sense strand
ccacaaugccuguaaugau

SEQ ID NO: 242912 - RNA, 19 nt, Homo sapiens
  misc_RNA (1)...(19): siRNA sense strand
guaaugaucacgccaacau

SEQ ID NO: 242913 - RNA, 19 nt, Homo sapiens
  misc_RNA (1)...(19): siRNA sense strand
ccaggaagcccucuauugg

SEQ ID NO: 242914 - RNA, 19 nt, Homo sapiens
  misc_RNA (1)...(19): siRNA sense strand
caacccauaauaucauuga

SEQ ID NO: 242915 - RNA, 19 nt, Homo sapiens
  misc_RNA (1)...(19): siRNA sense strand
gcucuggaguacuugaaau

SEQ ID NO: 242916 - RNA, 19 nt, Homo sapiens
  misc_RNA (1)...(19): siRNA sense strand
cagggcaacuccuauucuu

SEQ ID NO: 242917 - RNA, 19 nt, Homo sapiens
  misc_RNA (1)...(19): siRNA sense strand
ccaaggagagucuauacug

SEQ ID NO: 242918 - RNA, 19 nt, Homo sapiens
  misc_RNA (1)...(19): siRNA sense strand
gcacacugguugagaucca

SEQ ID NO: 242919 - RNA, 19 nt, Homo sapiens
  misc_RNA (1)...(19): siRNA sense strand
ucuuauggcugguaaaugg

SEQ ID NO: 242920 - RNA, 19 nt, Homo sapiens
  misc_RNA (1)...(19): siRNA sense strand
gaugaugccuacucuucuc

SEQ ID NO: 242921 - RNA, 19 nt, Homo sapiens
  misc_RNA (1)...(19): siRNA sense strand
gccaggaagcccucuauug

SEQ ID NO: 242922 - RNA, 19 nt, Homo sapiens
  misc_RNA (1)...(19): siRNA sense strand
uccagcagccuuugauaua

SEQ ID NO: 242923 - RNA, 19 nt, Homo sapiens
  misc_RNA (1)...(19): siRNA sense strand
guccugagcgucuuuguga

SEQ ID NO: 242924 - RNA, 19 nt, Homo sapiens
  misc_RNA (1)...(19): siRNA sense strand
gagaguucccugacuuguu

SEQ ID NO: 242925 - RNA, 19 nt, Homo sapiens
  misc_RNA (1)...(19): siRNA sense strand
ucgaggacuuuaaucagaa

SEQ ID NO: 242926 - RNA, 19 nt, Homo sapiens
  misc_RNA (1)...(19): siRNA sense strand
gggcagcagugggaccauu

SEQ ID NO: 242927 - RNA, 19 nt, Homo sapiens
  misc_RNA (1)...(19): siRNA sense strand
cagcauaccgcaagguguu

SEQ ID NO: 242928 - RNA, 19 nt, Homo sapiens
  misc_RNA (1)...(19): siRNA sense strand
gcacaucacagggaagcuu

SEQ ID NO: 242929 - RNA, 19 nt, Homo sapiens
  misc_RNA (1)...(19): siRNA sense strand
ugcugaagcuggcaaauca

SEQ ID NO: 242930 - RNA, 19 nt, Homo sapiens
  misc_RNA (1)...(19): siRNA sense strand
gcggacaacccauaauauc

SEQ ID NO: 242931 - RNA, 19 nt, Homo sapiens
  misc_RNA (1)...(19): siRNA sense strand
cagcugugcgcucucauuu

SEQ ID NO: 242932 - RNA, 19 nt, Homo sapiens
  misc_RNA (1)...(19): siRNA sense strand
ugaaaccucaggccaagaa

SEQ ID NO: 242933 - RNA, 19 nt, Homo sapiens
  misc_RNA (1)...(19): siRNA sense strand
ggaugcggcucuggccuau

SEQ ID NO: 242934 - RNA, 19 nt, Homo sapiens
  misc_RNA (1)...(19): siRNA sense strand
ggacuuuaaucagaauguc

SEQ ID NO: 242935 - RNA, 19 nt, Homo sapiens
  misc_RNA (1)...(19): siRNA sense strand
gcuccuccaucaaugacaa

SEQ ID NO: 242936 - RNA, 19 nt, Homo sapiens
  misc_RNA (1)...(19): siRNA sense strand
ccuacuccauugacucuga

SEQ ID NO: 242937 - RNA, 19 nt, Homo sapiens
  misc_RNA (1)...(19): siRNA sense strand
ggacgucugcaaucacugu

SEQ ID NO: 242938 - RNA, 19 nt, Homo sapiens
  misc_RNA (1)...(19): siRNA sense strand
cgagcacacugguugagau

SEQ ID NO: 242939 - RNA, 19 nt, Homo sapiens
  misc_RNA (1)...(19): siRNA sense strand
gcuggcugcucaagaaagu

SEQ ID NO: 242940 - RNA, 19 nt, Homo sapiens
  misc_RNA (1)...(19): siRNA sense strand
ucuauuggaugaugcaaag

SEQ ID NO: 242941 - RNA, 19 nt, Homo sapiens
  misc_RNA (1)...(19): siRNA sense strand
guacagccggucaccauuc

SEQ ID NO: 242942 - RNA, 19 nt, Homo sapiens
  misc_RNA (1)...(19): siRNA sense strand
ccgugaaccuggcugaaug

SEQ ID NO: 242943 - RNA, 19 nt, Homo sapiens
  misc_RNA (1)...(19): siRNA sense strand
agaaagugcccauuaagca

SEQ ID NO: 242944 - RNA, 19 nt, Homo sapiens
  misc_RNA (1)...(19): siRNA sense strand
gaaggagaaaggcggacaa

SEQ ID NO: 242945 - RNA, 19 nt, Homo sapiens
  misc_RNA (1)...(19): siRNA sense strand
gcagcugugcgcucucauu

SEQ ID NO: 242946 - RNA, 19 nt, Homo sapiens
  misc_RNA (1)...(19): siRNA sense strand
ugccuacucuucucuuaug

SEQ ID NO: 242947 - RNA, 19 nt, Homo sapiens
  misc_RNA (1)...(19): siRNA sense strand
aggaagcccucuauuggau

SEQ ID NO: 242948 - RNA, 19 nt, Homo sapiens
  misc_RNA (1)...(19): siRNA sense strand
gagaugcugcaauuuguca

SEQ ID NO: 242949 - RNA, 19 nt, Homo sapiens
  misc_RNA (1)...(19): siRNA sense strand
aagacagauucccuuguuu

SEQ ID NO: 242950 - RNA, 19 nt, Homo sapiens
  misc_RNA (1)...(19): siRNA sense strand
agaagagagcugugaauuc

SEQ ID NO: 242951 - RNA, 19 nt, Homo sapiens
  misc_RNA (1)...(19): siRNA sense strand
ccacugaggcaggcuuuga

SEQ ID NO: 242952 - RNA, 19 nt, Homo sapiens
  misc_RNA (1)...(19): siRNA sense strand
gguaaauggugugauuguc

SEQ ID NO: 242953 - RNA, 19 nt, Homo sapiens
  misc_RNA (1)...(19): siRNA sense strand
gcagcaggucaaucauaaa

SEQ ID NO: 242954 - RNA, 19 nt, Homo sapiens
  misc_RNA (1)...(19): siRNA sense strand
gagaaagugcccauuaagc

SEQ ID NO: 242955 - RNA, 19 nt, Homo sapiens
  misc_RNA (1)...(19): siRNA sense strand
gacggcugcccuucaagua

SEQ ID NO: 242956 - RNA, 19 nt, Homo sapiens
  misc_RNA (1)...(19): siRNA sense strand
ugacacaaacggccaaugg

SEQ ID NO: 242957 - RNA, 19 nt, Homo sapiens
  misc_RNA (1)...(19): siRNA sense strand
acgagaugcugcaauuugu

SEQ ID NO: 242958 - RNA, 19 nt, Homo sapiens
  misc_RNA (1)...(19): siRNA sense strand
cagaugggcagcagaguuc

SEQ ID NO: 242959 - RNA, 19 nt, Homo sapiens
  misc_RNA (1)...(19): siRNA sense strand
gcaauuugucaguaaucaa

SEQ ID NO: 242960 - RNA, 19 nt, Homo sapiens
  misc_RNA (1)...(19): siRNA sense strand
gagcugacccugggagaca

SEQ ID NO: 242961 - RNA, 19 nt, Homo sapiens
  misc_RNA (1)...(19): siRNA sense strand
ggcaggcuuugaagacgaa

SEQ ID NO: 242962 - RNA, 19 nt, Homo sapiens
  misc_RNA (1)...(19): siRNA sense strand
aagaagagagcugugaauu

SEQ ID NO: 242963 - RNA, 19 nt, Homo sapiens
  misc_RNA (1)...(19): siRNA sense strand
ggaaggagcugcgcuguga

SEQ ID NO: 242964 - RNA, 19 nt, Homo sapiens
  misc_RNA (1)...(19): siRNA sense strand
gagacaggcucguguuguu

SEQ ID NO: 242965 - RNA, 19 nt, Homo sapiens
  misc_RNA (1)...(19): siRNA sense strand
ggaggccgcuuacguaaag

SEQ ID NO: 242966 - RNA, 19 nt, Homo sapiens
  misc_RNA (1)...(19): siRNA sense strand
acacaaggcucccucuguu

SEQ ID NO: 242967 - RNA, 19 nt, Homo sapiens
  misc_RNA (1)...(19): siRNA sense strand
gcaccuacccucccuccua

SEQ ID NO: 242968 - RNA, 19 nt, Homo sapiens
  misc_RNA (1)...(19): siRNA sense strand
gagaaauacugcggagaga

SEQ ID NO: 242969 - RNA, 19 nt, Homo sapiens
  misc_RNA (1)...(19): siRNA sense strand
acaugaggaucacaaauga

SEQ ID NO: 242970 - RNA, 19 nt, Homo sapiens
  misc_RNA (1)...(19): siRNA sense strand
gaacaagccaggcguguac

SEQ ID NO: 242971 - RNA, 19 nt, Homo sapiens
  misc_RNA (1)...(19): siRNA sense strand
ggucuucaauggcuacaug

SEQ ID NO: 242972 - RNA, 19 nt, Homo sapiens
  misc_RNA (1)...(19): siRNA sense strand
gggacuggaucaaagagaa

SEQ ID NO: 242973 - RNA, 19 nt, Homo sapiens
  misc_RNA (1)...(19): siRNA sense strand
cugaauaccucuccuacga

SEQ ID NO: 242974 - RNA, 19 nt, Homo sapiens
  misc_RNA (1)...(19): siRNA sense strand
cgucgucacuuguaccaaa

SEQ ID NO: 242975 - RNA, 19 nt, Homo sapiens
  misc_RNA (1)...(19): siRNA sense strand
ggagaaaccggcagaguac

SEQ ID NO: 242976 - RNA, 19 nt, Homo sapiens
  misc_RNA (1)...(19): siRNA sense strand
ugacuucaccuucgacuau

SEQ ID NO: 242977 - RNA, 19 nt, Homo sapiens
  misc_RNA (1)...(19): siRNA sense strand
caccgacaccggcuucuua

SEQ ID NO: 242978 - RNA, 19 nt, Homo sapiens
  misc_RNA (1)...(19): siRNA sense strand
ggaacaagccaggcgugua

SEQ ID NO: 242979 - RNA, 19 nt, Homo sapiens
  misc_RNA (1)...(19): siRNA sense strand
gcagcgucaucgccuacua

SEQ ID NO: 242980 - RNA, 19 nt, Homo sapiens
  misc_RNA (1)...(19): siRNA sense strand
ggaagugccucucgaaaag

SEQ ID NO: 242981 - RNA, 19 nt, Homo sapiens
  misc_RNA (1)...(19): siRNA sense strand
acauugaggugcccaacaa

SEQ ID NO: 242982 - RNA, 19 nt, Homo sapiens
  misc_RNA (1)...(19): siRNA sense strand
ggacgccucccaugucuuc

SEQ ID NO: 242983 - RNA, 19 nt, Homo sapiens
  misc_RNA (1)...(19): siRNA sense strand
guacagcggagucccauuc

SEQ ID NO: 242984 - RNA, 19 nt, Homo sapiens
  misc_RNA (1)...(19): siRNA sense strand
ucaacaacgucaagaaggu

SEQ ID NO: 242985 - RNA, 19 nt, Homo sapiens
  misc_RNA (1)...(19): siRNA sense strand
ccacuacccacccaacauu

SEQ ID NO: 242986 - RNA, 19 nt, Homo sapiens
  misc_RNA (1)...(19): siRNA sense strand
gcugaucggccuccucuug

SEQ ID NO: 242987 - RNA, 19 nt, Homo sapiens
  misc_RNA (1)...(19): siRNA sense strand
uggagaaaccggcagagua

SEQ ID NO: 242988 - RNA, 19 nt, Homo sapiens
  misc_RNA (1)...(19): siRNA sense strand
gacugcacauggaacauug

SEQ ID NO: 242989 - RNA, 19 nt, Homo sapiens
  misc_RNA (1)...(19): siRNA sense strand
ucaaugacuucaccuucga

SEQ ID NO: 242990 - RNA, 19 nt, Homo sapiens
  misc_RNA (1)...(19): siRNA sense strand
ggaggaaggcguggaguuc

SEQ ID NO: 242991 - RNA, 19 nt, Homo sapiens
  misc_RNA (1)...(19): siRNA sense strand
gcaccgaccacagcgauga

SEQ ID NO: 242992 - RNA, 19 nt, Homo sapiens
  misc_RNA (1)...(19): siRNA sense strand
gaacgacugcggagacaac

SEQ ID NO: 242993 - RNA, 19 nt, Homo sapiens
  misc_RNA (1)...(19): siRNA sense strand
gaggaucacaaaugagaau

SEQ ID NO: 242994 - RNA, 19 nt, Homo sapiens
  misc_RNA (1)...(19): siRNA sense strand
ccacagcgaugagcucaac

SEQ ID NO: 242995 - RNA, 19 nt, Homo sapiens
  misc_RNA (1)...(19): siRNA sense strand
gcggagagaggucccaguu

SEQ ID NO: 242996 - RNA, 19 nt, Homo sapiens
  misc_RNA (1)...(19): siRNA sense strand
caacaaccagcaugugaag

SEQ ID NO: 242997 - RNA, 19 nt, Homo sapiens
  misc_RNA (1)...(19): siRNA sense strand
aaggugcgcuucaaauucu

SEQ ID NO: 242998 - RNA, 19 nt, Homo sapiens
  misc_RNA (1)...(19): siRNA sense strand
ggagaucaauggggagaaa

SEQ ID NO: 242999 - RNA, 19 nt, Homo sapiens
  misc_RNA (1)...(19): siRNA sense strand
ggugagauccgcgucauca

SEQ ID NO: 243000 - RNA, 19 nt, Homo sapiens
  misc_RNA (1)...(19): siRNA sense strand
gacagaggauucagguacu

SEQ ID NO: 243001 - RNA, 19 nt, Homo sapiens
  misc_RNA (1)...(19): siRNA sense strand
ccaacaaccagcaugugaa

SEQ ID NO: 243002 - RNA, 19 nt, Homo sapiens
  misc_RNA (1)...(19): siRNA sense strand
ucaagaagguggaaaagca

SEQ ID NO: 243003 - RNA, 19 nt, Homo sapiens
  misc_RNA (1)...(19): siRNA sense strand
ugagaaggacugcgacugu

SEQ ID NO: 243004 - RNA, 19 nt, Homo sapiens
  misc_RNA (1)...(19): siRNA sense strand
uacaugaggaucacaaaug

SEQ ID NO: 243005 - RNA, 19 nt, Homo sapiens
  misc_RNA (1)...(19): siRNA sense strand
ggccacaucugcggugcuu

SEQ ID NO: 243006 - RNA, 19 nt, Homo sapiens
  misc_RNA (1)...(19): siRNA sense strand
gaacguccugcucaucaca

SEQ ID NO: 243007 - RNA, 19 nt, Homo sapiens
  misc_RNA (1)...(19): siRNA sense strand
cagaacguccugcucauca

SEQ ID NO: 243008 - RNA, 19 nt, Homo sapiens
  misc_RNA (1)...(19): siRNA sense strand
aacauugacugcacaugga

SEQ ID NO: 243009 - RNA, 19 nt, Homo sapiens
  misc_RNA (1)...(19): siRNA sense strand
ucacgugcaagaacaaguu

SEQ ID NO: 243010 - RNA, 19 nt, Homo sapiens
  misc_RNA (1)...(19): siRNA sense strand
uguggaggccgcuuacgua

SEQ ID NO: 243011 - RNA, 19 nt, Homo sapiens
  misc_RNA (1)...(19): siRNA sense strand
caacucccggcacgagaaa

SEQ ID NO: 243012 - RNA, 19 nt, Homo sapiens
  misc_RNA (1)...(19): siRNA sense strand
guggaggccgcuuacguaa

SEQ ID NO: 243013 - RNA, 19 nt, Homo sapiens
  misc_RNA (1)...(19): siRNA sense strand
ugacugcacauggaacauu

SEQ ID NO: 243014 - RNA, 19 nt, Homo sapiens
  misc_RNA (1)...(19): siRNA sense strand
guagcgacggcucagauga

SEQ ID NO: 243015 - RNA, 19 nt, Homo sapiens
  misc_RNA (1)...(19): siRNA sense strand
ggacuacguggagaucaau

SEQ ID NO: 243016 - RNA, 19 nt, Homo sapiens
  misc_RNA (1)...(19): siRNA sense strand
cacaaggcucccucuguuu

SEQ ID NO: 243017 - RNA, 19 nt, Homo sapiens
  misc_RNA (1)...(19): siRNA sense strand
gcgaccuggugacggugua

SEQ ID NO: 243018 - RNA, 19 nt, Homo sapiens
  misc_RNA (1)...(19): siRNA sense strand
acaaggcucccucuguuuc

SEQ ID NO: 243019 - RNA, 19 nt, Homo sapiens
  misc_RNA (1)...(19): siRNA sense strand
gagcaggggugcaguuguc

SEQ ID NO: 243020 - RNA, 19 nt, Homo sapiens
  misc_RNA (1)...(19): siRNA sense strand
ccuacaaccugaccuucca

SEQ ID NO: 243021 - RNA, 19 nt, Homo sapiens
  misc_RNA (1)...(19): siRNA sense strand
gggaagugccucucgaaaa

SEQ ID NO: 243022 - RNA, 19 nt, Homo sapiens
  misc_RNA (1)...(19): siRNA sense strand
caacagcaacaagaucaca

SEQ ID NO: 243023 - RNA, 19 nt, Homo sapiens
  misc_RNA (1)...(19): siRNA sense strand
cagcuguggaggccgcuua

SEQ ID NO: 243024 - RNA, 19 nt, Homo sapiens
  misc_RNA (1)...(19): siRNA sense strand
gcuuugaggccaccuucuu

SEQ ID NO: 243025 - RNA, 19 nt, Homo sapiens
  misc_RNA (1)...(19): siRNA sense strand
gcgcugaagcugcuguaca

SEQ ID NO: 243026 - RNA, 19 nt, Homo sapiens
  misc_RNA (1)...(19): siRNA sense strand
gacuucaccuucgacuaug

SEQ ID NO: 243027 - RNA, 19 nt, Homo sapiens
  misc_RNA (1)...(19): siRNA sense strand
gaggauucagguacucaga

SEQ ID NO: 243028 - RNA, 19 nt, Homo sapiens
  misc_RNA (1)...(19): siRNA sense strand
gcuacaugaggaucacaaa

SEQ ID NO: 243029 - RNA, 19 nt, Homo sapiens
  misc_RNA (1)...(19): siRNA sense strand
acugugggcugcggucauu

SEQ ID NO: 243030 - RNA, 19 nt, Homo sapiens
  misc_RNA (1)...(19): siRNA sense strand
gugaacgacugcggagaca

SEQ ID NO: 243031 - RNA, 19 nt, Homo sapiens
  misc_RNA (1)...(19): siRNA sense strand
cccaacaaccagcauguga

SEQ ID NO: 243032 - RNA, 19 nt, Homo sapiens
  misc_RNA (1)...(19): siRNA sense strand
gccaccaguucacgugcaa

SEQ ID NO: 243033 - RNA, 19 nt, Homo sapiens
  misc_RNA (1)...(19): siRNA sense strand
uuucgggacuggaucaaag

SEQ ID NO: 243034 - RNA, 19 nt, Homo sapiens
  misc_RNA (1)...(19): siRNA sense strand
cgaggagcgcguagucaug

SEQ ID NO: 243035 - RNA, 19 nt, Homo sapiens
  misc_RNA (1)...(19): siRNA sense strand
cagcaacaagaucacaguu

SEQ ID NO: 243036 - RNA, 19 nt, Homo sapiens
  misc_RNA (1)...(19): siRNA sense strand
guccugcucaucacacuga

SEQ ID NO: 243037 - RNA, 19 nt, Homo sapiens
  misc_RNA (1)...(19): siRNA sense strand
gcaagaagauuucaaagaa

SEQ ID NO: 243038 - RNA, 19 nt, Homo sapiens
  misc_RNA (1)...(19): siRNA sense strand
aaacggaacuugccuguga

SEQ ID NO: 243039 - RNA, 19 nt, Homo sapiens
  misc_RNA (1)...(19): siRNA sense strand
gaacuugccugugaauuuc

SEQ ID NO: 243040 - RNA, 19 nt, Homo sapiens
  misc_RNA (1)...(19): siRNA sense strand
gaacgaauuuguaucucuu

SEQ ID NO: 243041 - RNA, 19 nt, Homo sapiens
  misc_RNA (1)...(19): siRNA sense strand
gaagacacccauaaagaaa

SEQ ID NO: 243042 - RNA, 19 nt, Homo sapiens
  misc_RNA (1)...(19): siRNA sense strand
ggaacuugccugugaauuu

SEQ ID NO: 243043 - RNA, 19 nt, Homo sapiens
  misc_RNA (1)...(19): siRNA sense strand
ggagauccuugguuucaaa

SEQ ID NO: 243044 - RNA, 19 nt, Homo sapiens
  misc_RNA (1)...(19): siRNA sense strand
ggacaucacaccaaagauu

SEQ ID NO: 243045 - RNA, 19 nt, Homo sapiens
  misc_RNA (1)...(19): siRNA sense strand
uaaaguugcugucugaguu

SEQ ID NO: 243046 - RNA, 19 nt, Homo sapiens
  misc_RNA (1)...(19): siRNA sense strand
gagaagacacccauaaaga

SEQ ID NO: 243047 - RNA, 19 nt, Homo sapiens
  misc_RNA (1)...(19): siRNA sense strand
guacagagaugccaagaac

SEQ ID NO: 243048 - RNA, 19 nt, Homo sapiens
  misc_RNA (1)...(19): siRNA sense strand
gaaaaugggacuaguaaua

SEQ ID NO: 243049 - RNA, 19 nt, Homo sapiens
  misc_RNA (1)...(19): siRNA sense strand
gcaauuuaauggcaaagga

SEQ ID NO: 243050 - RNA, 19 nt, Homo sapiens
  misc_RNA (1)...(19): siRNA sense strand
cacgguaacugccaugaua

SEQ ID NO: 243051 - RNA, 19 nt, Homo sapiens
  misc_RNA (1)...(19): siRNA sense strand
gaagagaauccgaagaaga

SEQ ID NO: 243052 - RNA, 19 nt, Homo sapiens
  misc_RNA (1)...(19): siRNA sense strand
ggaggugaauggaagagaa

SEQ ID NO: 243053 - RNA, 19 nt, Homo sapiens
  misc_RNA (1)...(19): siRNA sense strand
gaacgggcaccaacaagaa

SEQ ID NO: 243054 - RNA, 19 nt, Homo sapiens
  misc_RNA (1)...(19): siRNA sense strand
ucaaggacaucacaccaaa

SEQ ID NO: 243055 - RNA, 19 nt, Homo sapiens
  misc_RNA (1)...(19): siRNA sense strand
caugauagcccgagaguug

SEQ ID NO: 243056 - RNA, 19 nt, Homo sapiens
  misc_RNA (1)...(19): siRNA sense strand
uugaggagcugaagaaguu

SEQ ID NO: 243057 - RNA, 19 nt, Homo sapiens
  misc_RNA (1)...(19): siRNA sense strand
gaggagaagacacccauaa

SEQ ID NO: 243058 - RNA, 19 nt, Homo sapiens
  misc_RNA (1)...(19): siRNA sense strand
gaaauaagucaaguguuug

SEQ ID NO: 243059 - RNA, 19 nt, Homo sapiens
  misc_RNA (1)...(19): siRNA sense strand
guggaguccugccaugaua

SEQ ID NO: 243060 - RNA, 19 nt, Homo sapiens
  misc_RNA (1)...(19): siRNA sense strand
gcagggaguuugugaugca

SEQ ID NO: 243061 - RNA, 19 nt, Homo sapiens
  misc_RNA (1)...(19): siRNA sense strand
ugaggauccugcagaauga

SEQ ID NO: 243062 - RNA, 19 nt, Homo sapiens
  misc_RNA (1)...(19): siRNA sense strand
ggaugcaguccaccuauaa

SEQ ID NO: 243063 - RNA, 19 nt, Homo sapiens
  misc_RNA (1)...(19): siRNA sense strand
cagagaggcuggaggugaa

SEQ ID NO: 243064 - RNA, 19 nt, Homo sapiens
  misc_RNA (1)...(19): siRNA sense strand
aaaccacacugcagaagga

SEQ ID NO: 243065 - RNA, 19 nt, Homo sapiens
  misc_RNA (1)...(19): siRNA sense strand
gaacgaguaaagccuagaa

SEQ ID NO: 243066 - RNA, 19 nt, Homo sapiens
  misc_RNA (1)...(19): siRNA sense strand
gacaucacaccaaagauuu

SEQ ID NO: 243067 - RNA, 19 nt, Homo sapiens
  misc_RNA (1)...(19): siRNA sense strand
guaauaaagaggaugaguu

SEQ ID NO: 243068 - RNA, 19 nt, Homo sapiens
  misc_RNA (1)...(19): siRNA sense strand
ugaagaacuuugugaccaa

SEQ ID NO: 243069 - RNA, 19 nt, Homo sapiens
  misc_RNA (1)...(19): siRNA sense strand
ggagaagacacccauaaag

SEQ ID NO: 243070 - RNA, 19 nt, Homo sapiens
  misc_RNA (1)...(19): siRNA sense strand
aguaaagccuagaaucaaa

SEQ ID NO: 243071 - RNA, 19 nt, Homo sapiens
  misc_RNA (1)...(19): siRNA sense strand
caagacaggcugcgaaaca

SEQ ID NO: 243072 - RNA, 19 nt, Homo sapiens
  misc_RNA (1)...(19): siRNA sense strand
ccaacaaaguacagagaug

SEQ ID NO: 243073 - RNA, 19 nt, Homo sapiens
  misc_RNA (1)...(19): siRNA sense strand
acacgaugcugcugccaaa

SEQ ID NO: 243074 - RNA, 19 nt, Homo sapiens
  misc_RNA (1)...(19): siRNA sense strand
aagagaauccgaagaagaa

SEQ ID NO: 243075 - RNA, 19 nt, Homo sapiens
  misc_RNA (1)...(19): siRNA sense strand
gaaacggaccaaugucugu

SEQ ID NO: 243076 - RNA, 19 nt, Homo sapiens
  misc_RNA (1)...(19): siRNA sense strand
caagaacgaauuuguaucu

SEQ ID NO: 243077 - RNA, 19 nt, Homo sapiens
  misc_RNA (1)...(19): siRNA sense strand
gagcaacuggacuaucuuu

SEQ ID NO: 243078 - RNA, 19 nt, Homo sapiens
  misc_RNA (1)...(19): siRNA sense strand
uaauaaagaggaugaguuc

SEQ ID NO: 243079 - RNA, 19 nt, Homo sapiens
  misc_RNA (1)...(19): siRNA sense strand
agaagacacccauaaagaa

SEQ ID NO: 243080 - RNA, 19 nt, Homo sapiens
  misc_RNA (1)...(19): siRNA sense strand
ggaacgggcaccaacaaga

SEQ ID NO: 243081 - RNA, 19 nt, Homo sapiens
  misc_RNA (1)...(19): siRNA sense strand
uguuugagauugcacuuaa

SEQ ID NO: 243082 - RNA, 19 nt, Homo sapiens
  misc_RNA (1)...(19): siRNA sense strand
ggaagagaauccgaagaag

SEQ ID NO: 243083 - RNA, 19 nt, Homo sapiens
  misc_RNA (1)...(19): siRNA sense strand
gaguaaagccuagaaucaa

SEQ ID NO: 243084 - RNA, 19 nt, Homo sapiens
  misc_RNA (1)...(19): siRNA sense strand
cgaguaaagccuagaauca

SEQ ID NO: 243085 - RNA, 19 nt, Homo sapiens
  misc_RNA (1)...(19): siRNA sense strand
gcaaaggaaagacaagaca

SEQ ID NO: 243086 - RNA, 19 nt, Homo sapiens
  misc_RNA (1)...(19): siRNA sense strand
cgccauagcuguucuugag

SEQ ID NO: 243087 - RNA, 19 nt, Homo sapiens
  misc_RNA (1)...(19): siRNA sense strand
cggaugcaguccaccuaua

SEQ ID NO: 243088 - RNA, 19 nt, Homo sapiens
  misc_RNA (1)...(19): siRNA sense strand
ucuuaaaguugcugucuga

SEQ ID NO: 243089 - RNA, 19 nt, Homo sapiens
  misc_RNA (1)...(19): siRNA sense strand
gcgcugaacaucuuaaagu

SEQ ID NO: 243090 - RNA, 19 nt, Homo sapiens
  misc_RNA (1)...(19): siRNA sense strand
ccaguuccaccuuuacuuu

SEQ ID NO: 243091 - RNA, 19 nt, Homo sapiens
  misc_RNA (1)...(19): siRNA sense strand
gauccuugguuucaaaguc

SEQ ID NO: 243092 - RNA, 19 nt, Homo sapiens
  misc_RNA (1)...(19): siRNA sense strand
gaggacagcaauuuaaugg

SEQ ID NO: 243093 - RNA, 19 nt, Homo sapiens
  misc_RNA (1)...(19): siRNA sense strand
ggaggacagcaauuuaaug

SEQ ID NO: 243094 - RNA, 19 nt, Homo sapiens
  misc_RNA (1)...(19): siRNA sense strand
gggaaaagcaagaagauuu

SEQ ID NO: 243095 - RNA, 19 nt, Homo sapiens
  misc_RNA (1)...(19): siRNA sense strand
gacaagacaggcugcgaaa

SEQ ID NO: 243096 - RNA, 19 nt, Homo sapiens
  misc_RNA (1)...(19): siRNA sense strand
uggcugcgcugaacaucuu

SEQ ID NO: 243097 - RNA, 19 nt, Homo sapiens
  misc_RNA (1)...(19): siRNA sense strand
gaaggaacgggcaccaaca

SEQ ID NO: 243098 - RNA, 19 nt, Homo sapiens
  misc_RNA (1)...(19): siRNA sense strand
uggaagagaauccgaagaa

SEQ ID NO: 243099 - RNA, 19 nt, Homo sapiens
  misc_RNA (1)...(19): siRNA sense strand
ccacagacaagcccagaau

SEQ ID NO: 243100 - RNA, 19 nt, Homo sapiens
  misc_RNA (1)...(19): siRNA sense strand
ccucugaucagccauggua

SEQ ID NO: 243101 - RNA, 19 nt, Homo sapiens
  misc_RNA (1)...(19): siRNA sense strand
gcaaugcagccgagaacau

SEQ ID NO: 243102 - RNA, 19 nt, Homo sapiens
  misc_RNA (1)...(19): siRNA sense strand
gcugaacaucuuaaaguug

SEQ ID NO: 243103 - RNA, 19 nt, Homo sapiens
  misc_RNA (1)...(19): siRNA sense strand
gugggaggacagcaauuua

SEQ ID NO: 243104 - RNA, 19 nt, Homo sapiens
  misc_RNA (1)...(19): siRNA sense strand
ggagaaggagccagaguac

SEQ ID NO: 243105 - RNA, 19 nt, Homo sapiens
  misc_RNA (1)...(19): siRNA sense strand
acagacaagcccagaauau

SEQ ID NO: 243106 - RNA, 19 nt, Homo sapiens
  misc_RNA (1)...(19): siRNA sense strand
caauguauaagccuguuga

SEQ ID NO: 243107 - RNA, 19 nt, Homo sapiens
  misc_RNA (1)...(19): siRNA sense strand
gaacaggaaacggaccaau

SEQ ID NO: 243108 - RNA, 19 nt, Homo sapiens
  misc_RNA (1)...(19): siRNA sense strand
gaccaacaaaguacagaga

SEQ ID NO: 243109 - RNA, 19 nt, Homo sapiens
  misc_RNA (1)...(19): siRNA sense strand
uguaggaguuagucaagga

SEQ ID NO: 243110 - RNA, 19 nt, Homo sapiens
  misc_RNA (1)...(19): siRNA sense strand
ccgagaacaugcuggagau

SEQ ID NO: 243111 - RNA, 19 nt, Homo sapiens
  misc_RNA (1)...(19): siRNA sense strand
gcaguccaccuauaacuac

SEQ ID NO: 243112 - RNA, 19 nt, Homo sapiens
  misc_RNA (1)...(19): siRNA sense strand
gggaggacagcaauuuaau

SEQ ID NO: 243113 - RNA, 19 nt, Homo sapiens
  misc_RNA (1)...(19): siRNA sense strand
gagaugccaagaacaggaa

SEQ ID NO: 243114 - RNA, 19 nt, Homo sapiens
  misc_RNA (1)...(19): siRNA sense strand
gaacuuugugaccaagguu

SEQ ID NO: 243115 - RNA, 19 nt, Homo sapiens
  misc_RNA (1)...(19): siRNA sense strand
gcccgagaguuguuguaug

SEQ ID NO: 243116 - RNA, 19 nt, Homo sapiens
  misc_RNA (1)...(19): siRNA sense strand
caguuccaccuuuacuuua

SEQ ID NO: 243117 - RNA, 19 nt, Homo sapiens
  misc_RNA (1)...(19): siRNA sense strand
caugagaggaggugcuuau

SEQ ID NO: 243118 - RNA, 19 nt, Homo sapiens
  misc_RNA (1)...(19): siRNA sense strand
accuauaacuacaacauga

SEQ ID NO: 243119 - RNA, 19 nt, Homo sapiens
  misc_RNA (1)...(19): siRNA sense strand
aguacacgcuccucacaga

SEQ ID NO: 243120 - RNA, 19 nt, Homo sapiens
  misc_RNA (1)...(19): siRNA sense strand
gccugcaguugaacgagua

SEQ ID NO: 243121 - RNA, 19 nt, Homo sapiens
  misc_RNA (1)...(19): siRNA sense strand
cagacaagcccagaauaug

SEQ ID NO: 243122 - RNA, 19 nt, Homo sapiens
  misc_RNA (1)...(19): siRNA sense strand
acaggaaacggaccaaugu

SEQ ID NO: 243123 - RNA, 19 nt, Homo sapiens
  misc_RNA (1)...(19): siRNA sense strand
cgcugaacaucuuaaaguu

SEQ ID NO: 243124 - RNA, 19 nt, Homo sapiens
  misc_RNA (1)...(19): siRNA sense strand
cugagcaacuggacuaucu

SEQ ID NO: 243125 - RNA, 19 nt, Homo sapiens
  misc_RNA (1)...(19): siRNA sense strand
cccgagaguuguuguaugg

SEQ ID NO: 243126 - RNA, 19 nt, Homo sapiens
  misc_RNA (1)...(19): siRNA sense strand
caaacccgcacucaaguca

SEQ ID NO: 243127 - RNA, 19 nt, Homo sapiens
  misc_RNA (1)...(19): siRNA sense strand
gaagguggccaagcgcaau

SEQ ID NO: 243128 - RNA, 19 nt, Homo sapiens
  misc_RNA (1)...(19): siRNA sense strand
ccucugagcaacuggacua

SEQ ID NO: 243129 - RNA, 19 nt, Homo sapiens
  misc_RNA (1)...(19): siRNA sense strand
agaacgaauuuguaucucu

SEQ ID NO: 243130 - RNA, 19 nt, Homo sapiens
  misc_RNA (1)...(19): siRNA sense strand
uacaaagacuuccccaaaa

SEQ ID NO: 243131 - RNA, 19 nt, Homo sapiens
  misc_RNA (1)...(19): siRNA sense strand
agacaagcccagaauaugg

SEQ ID NO: 243132 - RNA, 19 nt, Homo sapiens
  misc_RNA (1)...(19): siRNA sense strand
ggaguccugccaugauaug

SEQ ID NO: 243133 - RNA, 19 nt, Homo sapiens
  misc_RNA (1)...(19): siRNA sense strand
caccaaacccgcacucaag

SEQ ID NO: 243134 - RNA, 19 nt, Homo sapiens
  misc_RNA (1)...(19): siRNA sense strand
gaacaugcuggagauccuu

SEQ ID NO: 243135 - RNA, 19 nt, Homo sapiens
  misc_RNA (1)...(19): siRNA sense strand
caaugcagccgagaacaug

SEQ ID NO: 243136 - RNA, 19 nt, Homo sapiens
  misc_RNA (1)...(19): siRNA sense strand
ugggaggacagcaauuuaa

SEQ ID NO: 243137 - RNA, 19 nt, Homo sapiens
  misc_RNA (1)...(19): siRNA sense strand
gcaagaagauuucaaagaa

SEQ ID NO: 243138 - RNA, 19 nt, Homo sapiens
  misc_RNA (1)...(19): siRNA sense strand
aaacggaacuugccuguga

SEQ ID NO: 243139 - RNA, 19 nt, Homo sapiens
  misc_RNA (1)...(19): siRNA sense strand
gaacuugccugugaauuuc

SEQ ID NO: 243140 - RNA, 19 nt, Homo sapiens
  misc_RNA (1)...(19): siRNA sense strand
gaacgaauuuguaucucuu

SEQ ID NO: 243141 - RNA, 19 nt, Homo sapiens
  misc_RNA (1)...(19): siRNA sense strand
gaagacacccauaaagaaa

SEQ ID NO: 243142 - RNA, 19 nt, Homo sapiens
  misc_RNA (1)...(19): siRNA sense strand
ggaacuugccugugaauuu

SEQ ID NO: 243143 - RNA, 19 nt, Homo sapiens
  misc_RNA (1)...(19): siRNA sense strand
ggagauccuugguuucaaa

SEQ ID NO: 243144 - RNA, 19 nt, Homo sapiens
  misc_RNA (1)...(19): siRNA sense strand
ggacaucacaccaaagauu

SEQ ID NO: 243145 - RNA, 19 nt, Homo sapiens
  misc_RNA (1)...(19): siRNA sense strand
uaaaguugcugucugaguu

SEQ ID NO: 243146 - RNA, 19 nt, Homo sapiens
  misc_RNA (1)...(19): siRNA sense strand
gagaagacacccauaaaga

SEQ ID NO: 243147 - RNA, 19 nt, Homo sapiens
  misc_RNA (1)...(19): siRNA sense strand
guacagagaugccaagaac

SEQ ID NO: 243148 - RNA, 19 nt, Homo sapiens
  misc_RNA (1)...(19): siRNA sense strand
gaaaaugggacuaguaaua

SEQ ID NO: 243149 - RNA, 19 nt, Homo sapiens
  misc_RNA (1)...(19): siRNA sense strand
gcaauuuaauggcaaagga

SEQ ID NO: 243150 - RNA, 19 nt, Homo sapiens
  misc_RNA (1)...(19): siRNA sense strand
cacgguaacugccaugaua

SEQ ID NO: 243151 - RNA, 19 nt, Homo sapiens
  misc_RNA (1)...(19): siRNA sense strand
gaagagaauccgaagaaga

SEQ ID NO: 243152 - RNA, 19 nt, Homo sapiens
  misc_RNA (1)...(19): siRNA sense strand
ggaggugaauggaagagaa

SEQ ID NO: 243153 - RNA, 19 nt, Homo sapiens
  misc_RNA (1)...(19): siRNA sense strand
gaacgggcaccaacaagaa

SEQ ID NO: 243154 - RNA, 19 nt, Homo sapiens
  misc_RNA (1)...(19): siRNA sense strand
ucaaggacaucacaccaaa

SEQ ID NO: 243155 - RNA, 19 nt, Homo sapiens
  misc_RNA (1)...(19): siRNA sense strand
caugauagcccgagaguug

SEQ ID NO: 243156 - RNA, 19 nt, Homo sapiens
  misc_RNA (1)...(19): siRNA sense strand
uugaggagcugaagaaguu

SEQ ID NO: 243157 - RNA, 19 nt, Homo sapiens
  misc_RNA (1)...(19): siRNA sense strand
gaggagaagacacccauaa

SEQ ID NO: 243158 - RNA, 19 nt, Homo sapiens
  misc_RNA (1)...(19): siRNA sense strand
gaaauaagucaaguguuug

SEQ ID NO: 243159 - RNA, 19 nt, Homo sapiens
  misc_RNA (1)...(19): siRNA sense strand
guggaguccugccaugaua

SEQ ID NO: 243160 - RNA, 19 nt, Homo sapiens
  misc_RNA (1)...(19): siRNA sense strand
gcagggaguuugugaugca

SEQ ID NO: 243161 - RNA, 19 nt, Homo sapiens
  misc_RNA (1)...(19): siRNA sense strand
ugaggauccugcagaauga

SEQ ID NO: 243162 - RNA, 19 nt, Homo sapiens
  misc_RNA (1)...(19): siRNA sense strand
ggaugcaguccaccuauaa

SEQ ID NO: 243163 - RNA, 19 nt, Homo sapiens
  misc_RNA (1)...(19): siRNA sense strand
cagagaggcuggaggugaa

SEQ ID NO: 243164 - RNA, 19 nt, Homo sapiens
  misc_RNA (1)...(19): siRNA sense strand
aaaccacacugcagaagga

SEQ ID NO: 243165 - RNA, 19 nt, Homo sapiens
  misc_RNA (1)...(19): siRNA sense strand
gaacgaguaaagccuagaa

SEQ ID NO: 243166 - RNA, 19 nt, Homo sapiens
  misc_RNA (1)...(19): siRNA sense strand
gacaucacaccaaagauuu

SEQ ID NO: 243167 - RNA, 19 nt, Homo sapiens
  misc_RNA (1)...(19): siRNA sense strand
guaauaaagaggaugaguu

SEQ ID NO: 243168 - RNA, 19 nt, Homo sapiens
  misc_RNA (1)...(19): siRNA sense strand
ugaagaacuuugugaccaa

SEQ ID NO: 243169 - RNA, 19 nt, Homo sapiens
  misc_RNA (1)...(19): siRNA sense strand
ggagaagacacccauaaag

SEQ ID NO: 243170 - RNA, 19 nt, Homo sapiens
  misc_RNA (1)...(19): siRNA sense strand
aguaaagccuagaaucaaa

SEQ ID NO: 243171 - RNA, 19 nt, Homo sapiens
  misc_RNA (1)...(19): siRNA sense strand
caagacaggcugcgaaaca

SEQ ID NO: 243172 - RNA, 19 nt, Homo sapiens
  misc_RNA (1)...(19): siRNA sense strand
ccaacaaaguacagagaug

SEQ ID NO: 243173 - RNA, 19 nt, Homo sapiens
  misc_RNA (1)...(19): siRNA sense strand
acacgaugcugcugccaaa

SEQ ID NO: 243174 - RNA, 19 nt, Homo sapiens
  misc_RNA (1)...(19): siRNA sense strand
aagagaauccgaagaagaa

SEQ ID NO: 243175 - RNA, 19 nt, Homo sapiens
  misc_RNA (1)...(19): siRNA sense strand
gaaacggaccaaugucugu

SEQ ID NO: 243176 - RNA, 19 nt, Homo sapiens
  misc_RNA (1)...(19): siRNA sense strand
caagaacgaauuuguaucu

SEQ ID NO: 243177 - RNA, 19 nt, Homo sapiens
  misc_RNA (1)...(19): siRNA sense strand
gagcaacuggacuaucuuu

SEQ ID NO: 243178 - RNA, 19 nt, Homo sapiens
  misc_RNA (1)...(19): siRNA sense strand
uaauaaagaggaugaguuc

SEQ ID NO: 243179 - RNA, 19 nt, Homo sapiens
  misc_RNA (1)...(19): siRNA sense strand
agaagacacccauaaagaa

SEQ ID NO: 243180 - RNA, 19 nt, Homo sapiens
  misc_RNA (1)...(19): siRNA sense strand
ggaacgggcaccaacaaga

SEQ ID NO: 243181 - RNA, 19 nt, Homo sapiens
  misc_RNA (1)...(19): siRNA sense strand
uguuugagauugcacuuaa

SEQ ID NO: 243182 - RNA, 19 nt, Homo sapiens
  misc_RNA (1)...(19): siRNA sense strand
ggaagagaauccgaagaag

SEQ ID NO: 243183 - RNA, 19 nt, Homo sapiens
  misc_RNA (1)...(19): siRNA sense strand
gaguaaagccuagaaucaa

SEQ ID NO: 243184 - RNA, 19 nt, Homo sapiens
  misc_RNA (1)...(19): siRNA sense strand
cgaguaaagccuagaauca

SEQ ID NO: 243185 - RNA, 19 nt, Homo sapiens
  misc_RNA (1)...(19): siRNA sense strand
gcaaaggaaagacaagaca

SEQ ID NO: 243186 - RNA, 19 nt, Homo sapiens
  misc_RNA (1)...(19): siRNA sense strand
cgccauagcuguucuugag

SEQ ID NO: 243187 - RNA, 19 nt, Homo sapiens
  misc_RNA (1)...(19): siRNA sense strand
cggaugcaguccaccuaua

SEQ ID NO: 243188 - RNA, 19 nt, Homo sapiens
  misc_RNA (1)...(19): siRNA sense strand
ucuuaaaguugcugucuga

SEQ ID NO: 243189 - RNA, 19 nt, Homo sapiens
  misc_RNA (1)...(19): siRNA sense strand
gcgcugaacaucuuaaagu

SEQ ID NO: 243190 - RNA, 19 nt, Homo sapiens
  misc_RNA (1)...(19): siRNA sense strand
ccaguuccaccuuuacuuu

SEQ ID NO: 243191 - RNA, 19 nt, Homo sapiens
  misc_RNA (1)...(19): siRNA sense strand
gauccuugguuucaaaguc

SEQ ID NO: 243192 - RNA, 19 nt, Homo sapiens
  misc_RNA (1)...(19): siRNA sense strand
gaggacagcaauuuaaugg

SEQ ID NO: 243193 - RNA, 19 nt, Homo sapiens
  misc_RNA (1)...(19): siRNA sense strand
ggaggacagcaauuuaaug

SEQ ID NO: 243194 - RNA, 19 nt, Homo sapiens
  misc_RNA (1)...(19): siRNA sense strand
gggaaaagcaagaagauuu

SEQ ID NO: 243195 - RNA, 19 nt, Homo sapiens
  misc_RNA (1)...(19): siRNA sense strand
gacaagacaggcugcgaaa

SEQ ID NO: 243196 - RNA, 19 nt, Homo sapiens
  misc_RNA (1)...(19): siRNA sense strand
uggcugcgcugaacaucuu

SEQ ID NO: 243197 - RNA, 19 nt, Homo sapiens
  misc_RNA (1)...(19): siRNA sense strand
gaaggaacgggcaccaaca

SEQ ID NO: 243198 - RNA, 19 nt, Homo sapiens
  misc_RNA (1)...(19): siRNA sense strand
uggaagagaauccgaagaa

SEQ ID NO: 243199 - RNA, 19 nt, Homo sapiens
  misc_RNA (1)...(19): siRNA sense strand
ccacagacaagcccagaau

SEQ ID NO: 243200 - RNA, 19 nt, Homo sapiens
  misc_RNA (1)...(19): siRNA sense strand
ccucugaucagccauggua

SEQ ID NO: 243201 - RNA, 19 nt, Homo sapiens
  misc_RNA (1)...(19): siRNA sense strand
gcaaugcagccgagaacau

SEQ ID NO: 243202 - RNA, 19 nt, Homo sapiens
  misc_RNA (1)...(19): siRNA sense strand
gcugaacaucuuaaaguug

SEQ ID NO: 243203 - RNA, 19 nt, Homo sapiens
  misc_RNA (1)...(19): siRNA sense strand
gugggaggacagcaauuua

SEQ ID NO: 243204 - RNA, 19 nt, Homo sapiens
  misc_RNA (1)...(19): siRNA sense strand
ggagaaggagccagaguac

SEQ ID NO: 243205 - RNA, 19 nt, Homo sapiens
  misc_RNA (1)...(19): siRNA sense strand
acagacaagcccagaauau

SEQ ID NO: 243206 - RNA, 19 nt, Homo sapiens
  misc_RNA (1)...(19): siRNA sense strand
caauguauaagccuguuga

SEQ ID NO: 243207 - RNA, 19 nt, Homo sapiens
  misc_RNA (1)...(19): siRNA sense strand
gaacaggaaacggaccaau

SEQ ID NO: 243208 - RNA, 19 nt, Homo sapiens
  misc_RNA (1)...(19): siRNA sense strand
gaccaacaaaguacagaga

SEQ ID NO: 243209 - RNA, 19 nt, Homo sapiens
  misc_RNA (1)...(19): siRNA sense strand
uguaggaguuagucaagga

SEQ ID NO: 243210 - RNA, 19 nt, Homo sapiens
  misc_RNA (1)...(19): siRNA sense strand
ccgagaacaugcuggagau

SEQ ID NO: 243211 - RNA, 19 nt, Homo sapiens
  misc_RNA (1)...(19): siRNA sense strand
gcaguccaccuauaacuac

SEQ ID NO: 243212 - RNA, 19 nt, Homo sapiens
  misc_RNA (1)...(19): siRNA sense strand
gggaggacagcaauuuaau

SEQ ID NO: 243213 - RNA, 19 nt, Homo sapiens
  misc_RNA (1)...(19): siRNA sense strand
gagaugccaagaacaggaa

SEQ ID NO: 243214 - RNA, 19 nt, Homo sapiens
  misc_RNA (1)...(19): siRNA sense strand
gaacuuugugaccaagguu

SEQ ID NO: 243215 - RNA, 19 nt, Homo sapiens
  misc_RNA (1)...(19): siRNA sense strand
gcccgagaguuguuguaug

SEQ ID NO: 243216 - RNA, 19 nt, Homo sapiens
  misc_RNA (1)...(19): siRNA sense strand
caguuccaccuuuacuuua

SEQ ID NO: 243217 - RNA, 19 nt, Homo sapiens
  misc_RNA (1)...(19): siRNA sense strand
caugagaggaggugcuuau

SEQ ID NO: 243218 - RNA, 19 nt, Homo sapiens
  misc_RNA (1)...(19): siRNA sense strand
accuauaacuacaacauga

SEQ ID NO: 243219 - RNA, 19 nt, Homo sapiens
  misc_RNA (1)...(19): siRNA sense strand
aguacacgcuccucacaga

SEQ ID NO: 243220 - RNA, 19 nt, Homo sapiens
  misc_RNA (1)...(19): siRNA sense strand
gccugcaguugaacgagua

SEQ ID NO: 243221 - RNA, 19 nt, Homo sapiens
  misc_RNA (1)...(19): siRNA sense strand
cagacaagcccagaauaug

SEQ ID NO: 243222 - RNA, 19 nt, Homo sapiens
  misc_RNA (1)...(19): siRNA sense strand
acaggaaacggaccaaugu

SEQ ID NO: 243223 - RNA, 19 nt, Homo sapiens
  misc_RNA (1)...(19): siRNA sense strand
cgcugaacaucuuaaaguu

SEQ ID NO: 243224 - RNA, 19 nt, Homo sapiens
  misc_RNA (1)...(19): siRNA sense strand
cugagcaacuggacuaucu

SEQ ID NO: 243225 - RNA, 19 nt, Homo sapiens
  misc_RNA (1)...(19): siRNA sense strand
cccgagaguuguuguaugg

SEQ ID NO: 243226 - RNA, 19 nt, Homo sapiens
  misc_RNA (1)...(19): siRNA sense strand
caaacccgcacucaaguca

SEQ ID NO: 243227 - RNA, 19 nt, Homo sapiens
  misc_RNA (1)...(19): siRNA sense strand
gaagguggccaagcgcaau

SEQ ID NO: 243228 - RNA, 19 nt, Homo sapiens
  misc_RNA (1)...(19): siRNA sense strand
ccucugagcaacuggacua

SEQ ID NO: 243229 - RNA, 19 nt, Homo sapiens
  misc_RNA (1)...(19): siRNA sense strand
agaacgaauuuguaucucu

SEQ ID NO: 243230 - RNA, 19 nt, Homo sapiens
  misc_RNA (1)...(19): siRNA sense strand
uacaaagacuuccccaaaa

SEQ ID NO: 243231 - RNA, 19 nt, Homo sapiens
  misc_RNA (1)...(19): siRNA sense strand
agacaagcccagaauaugg

SEQ ID NO: 243232 - RNA, 19 nt, Homo sapiens
  misc_RNA (1)...(19): siRNA sense strand
ggaguccugccaugauaug

SEQ ID NO: 243233 - RNA, 19 nt, Homo sapiens
  misc_RNA (1)...(19): siRNA sense strand
caccaaacccgcacucaag

SEQ ID NO: 243234 - RNA, 19 nt, Homo sapiens
  misc_RNA (1)...(19): siRNA sense strand
gaacaugcuggagauccuu

SEQ ID NO: 243235 - RNA, 19 nt, Homo sapiens
  misc_RNA (1)...(19): siRNA sense strand
caaugcagccgagaacaug

SEQ ID NO: 243236 - RNA, 19 nt, Homo sapiens
  misc_RNA (1)...(19): siRNA sense strand
ugggaggacagcaauuuaa

SEQ ID NO: 243237 - RNA, 19 nt, Homo sapiens
  misc_RNA (1)...(19): siRNA sense strand
gcaagaagauuucaaagaa

SEQ ID NO: 243238 - RNA, 19 nt, Homo sapiens
  misc_RNA (1)...(19): siRNA sense strand
aaacggaacuugccuguga

SEQ ID NO: 243239 - RNA, 19 nt, Homo sapiens
  misc_RNA (1)...(19): siRNA sense strand
gaacuugccugugaauuuc

SEQ ID NO: 243240 - RNA, 19 nt, Homo sapiens
  misc_RNA (1)...(19): siRNA sense strand
gaacgaauuuguaucucuu

SEQ ID NO: 243241 - RNA, 19 nt, Homo sapiens
  misc_RNA (1)...(19): siRNA sense strand
gaagacacccauaaagaaa

SEQ ID NO: 243242 - RNA, 19 nt, Homo sapiens
  misc_RNA (1)...(19): siRNA sense strand
ggaacuugccugugaauuu

SEQ ID NO: 243243 - RNA, 19 nt, Homo sapiens
  misc_RNA (1)...(19): siRNA sense strand
ggagauccuugguuucaaa

SEQ ID NO: 243244 - RNA, 19 nt, Homo sapiens
  misc_RNA (1)...(19): siRNA sense strand
ggacaucacaccaaagauu

SEQ ID NO: 243245 - RNA, 19 nt, Homo sapiens
  misc_RNA (1)...(19): siRNA sense strand
uaaaguugcugucugaguu

SEQ ID NO: 243246 - RNA, 19 nt, Homo sapiens
  misc_RNA (1)...(19): siRNA sense strand
gagaagacacccauaaaga

SEQ ID NO: 243247 - RNA, 19 nt, Homo sapiens
  misc_RNA (1)...(19): siRNA sense strand
guacagagaugccaagaac

SEQ ID NO: 243248 - RNA, 19 nt, Homo sapiens
  misc_RNA (1)...(19): siRNA sense strand
gaaaaugggacuaguaaua

SEQ ID NO: 243249 - RNA, 19 nt, Homo sapiens
  misc_RNA (1)...(19): siRNA sense strand
gcaauuuaauggcaaagga

SEQ ID NO: 243250 - RNA, 19 nt, Homo sapiens
  misc_RNA (1)...(19): siRNA sense strand
cacgguaacugccaugaua

SEQ ID NO: 243251 - RNA, 19 nt, Homo sapiens
  misc_RNA (1)...(19): siRNA sense strand
gaagagaauccgaagaaga

SEQ ID NO: 243252 - RNA, 19 nt, Homo sapiens
  misc_RNA (1)...(19): siRNA sense strand
ggaggugaauggaagagaa

SEQ ID NO: 243253 - RNA, 19 nt, Homo sapiens
  misc_RNA (1)...(19): siRNA sense strand
gaacgggcaccaacaagaa

SEQ ID NO: 243254 - RNA, 19 nt, Homo sapiens
  misc_RNA (1)...(19): siRNA sense strand
ucaaggacaucacaccaaa

SEQ ID NO: 243255 - RNA, 19 nt, Homo sapiens
  misc_RNA (1)...(19): siRNA sense strand
caugauagcccgagaguug

SEQ ID NO: 243256 - RNA, 19 nt, Homo sapiens
  misc_RNA (1)...(19): siRNA sense strand
uugaggagcugaagaaguu

SEQ ID NO: 243257 - RNA, 19 nt, Homo sapiens
  misc_RNA (1)...(19): siRNA sense strand
gaggagaagacacccauaa

SEQ ID NO: 243258 - RNA, 19 nt, Homo sapiens
  misc_RNA (1)...(19): siRNA sense strand
gaaauaagucaaguguuug

SEQ ID NO: 243259 - RNA, 19 nt, Homo sapiens
  misc_RNA (1)...(19): siRNA sense strand
guggaguccugccaugaua

SEQ ID NO: 243260 - RNA, 19 nt, Homo sapiens
  misc_RNA (1)...(19): siRNA sense strand
gcagggaguuugugaugca

SEQ ID NO: 243261 - RNA, 19 nt, Homo sapiens
  misc_RNA (1)...(19): siRNA sense strand
ugaggauccugcagaauga

SEQ ID NO: 243262 - RNA, 19 nt, Homo sapiens
  misc_RNA (1)...(19): siRNA sense strand
ggaugcaguccaccuauaa

SEQ ID NO: 243263 - RNA, 19 nt, Homo sapiens
  misc_RNA (1)...(19): siRNA sense strand
cagagaggcuggaggugaa

SEQ ID NO: 243264 - RNA, 19 nt, Homo sapiens
  misc_RNA (1)...(19): siRNA sense strand
aaaccacacugcagaagga

SEQ ID NO: 243265 - RNA, 19 nt, Homo sapiens
  misc_RNA (1)...(19): siRNA sense strand
gaacgaguaaagccuagaa

SEQ ID NO: 243266 - RNA, 19 nt, Homo sapiens
  misc_RNA (1)...(19): siRNA sense strand
gacaucacaccaaagauuu

SEQ ID NO: 243267 - RNA, 19 nt, Homo sapiens
  misc_RNA (1)...(19): siRNA sense strand
guaauaaagaggaugaguu

SEQ ID NO: 243268 - RNA, 19 nt, Homo sapiens
  misc_RNA (1)...(19): siRNA sense strand
ugaagaacuuugugaccaa

SEQ ID NO: 243269 - RNA, 19 nt, Homo sapiens
  misc_RNA (1)...(19): siRNA sense strand
ggagaagacacccauaaag

SEQ ID NO: 243270 - RNA, 19 nt, Homo sapiens
  misc_RNA (1)...(19): siRNA sense strand
aguaaagccuagaaucaaa

SEQ ID NO: 243271 - RNA, 19 nt, Homo sapiens
  misc_RNA (1)...(19): siRNA sense strand
caagacaggcugcgaaaca

SEQ ID NO: 243272 - RNA, 19 nt, Homo sapiens
  misc_RNA (1)...(19): siRNA sense strand
ccaacaaaguacagagaug

SEQ ID NO: 243273 - RNA, 19 nt, Homo sapiens
  misc_RNA (1)...(19): siRNA sense strand
acacgaugcugcugccaaa

SEQ ID NO: 243274 - RNA, 19 nt, Homo sapiens
  misc_RNA (1)...(19): siRNA sense strand
aagagaauccgaagaagaa

SEQ ID NO: 243275 - RNA, 19 nt, Homo sapiens
  misc_RNA (1)...(19): siRNA sense strand
gaaacggaccaaugucugu

SEQ ID NO: 243276 - RNA, 19 nt, Homo sapiens
  misc_RNA (1)...(19): siRNA sense strand
caagaacgaauuuguaucu

SEQ ID NO: 243277 - RNA, 19 nt, Homo sapiens
  misc_RNA (1)...(19): siRNA sense strand
gagcaacuggacuaucuuu

SEQ ID NO: 243278 - RNA, 19 nt, Homo sapiens
  misc_RNA (1)...(19): siRNA sense strand
uaauaaagaggaugaguuc

SEQ ID NO: 243279 - RNA, 19 nt, Homo sapiens
  misc_RNA (1)...(19): siRNA sense strand
agaagacacccauaaagaa

SEQ ID NO: 243280 - RNA, 19 nt, Homo sapiens
  misc_RNA (1)...(19): siRNA sense strand
ggaacgggcaccaacaaga

SEQ ID NO: 243281 - RNA, 19 nt, Homo sapiens
  misc_RNA (1)...(19): siRNA sense strand
uguuugagauugcacuuaa

SEQ ID NO: 243282 - RNA, 19 nt, Homo sapiens
  misc_RNA (1)...(19): siRNA sense strand
ggaagagaauccgaagaag

SEQ ID NO: 243283 - RNA, 19 nt, Homo sapiens
  misc_RNA (1)...(19): siRNA sense strand
gaguaaagccuagaaucaa

SEQ ID NO: 243284 - RNA, 19 nt, Homo sapiens
  misc_RNA (1)...(19): siRNA sense strand
cgaguaaagccuagaauca

SEQ ID NO: 243285 - RNA, 19 nt, Homo sapiens
  misc_RNA (1)...(19): siRNA sense strand
gcaaaggaaagacaagaca

SEQ ID NO: 243286 - RNA, 19 nt, Homo sapiens
  misc_RNA (1)...(19): siRNA sense strand
cgccauagcuguucuugag

SEQ ID NO: 243287 - RNA, 19 nt, Homo sapiens
  misc_RNA (1)...(19): siRNA sense strand
cggaugcaguccaccuaua

SEQ ID NO: 243288 - RNA, 19 nt, Homo sapiens
  misc_RNA (1)...(19): siRNA sense strand
ucuuaaaguugcugucuga

SEQ ID NO: 243289 - RNA, 19 nt, Homo sapiens
  misc_RNA (1)...(19): siRNA sense strand
ccaguuccaccuuuacuuu

SEQ ID NO: 243290 - RNA, 19 nt, Homo sapiens
  misc_RNA (1)...(19): siRNA sense strand
gcgcugaacaucuuaaagu

SEQ ID NO: 243291 - RNA, 19 nt, Homo sapiens
  misc_RNA (1)...(19): siRNA sense strand
gauccuugguuucaaaguc

SEQ ID NO: 243292 - RNA, 19 nt, Homo sapiens
  misc_RNA (1)...(19): siRNA sense strand
ggaggacagcaauuuaaug

SEQ ID NO: 243293 - RNA, 19 nt, Homo sapiens
  misc_RNA (1)...(19): siRNA sense strand
gaggacagcaauuuaaugg

SEQ ID NO: 243294 - RNA, 19 nt, Homo sapiens
  misc_RNA (1)...(19): siRNA sense strand
gggaaaagcaagaagauuu

SEQ ID NO: 243295 - RNA, 19 nt, Homo sapiens
  misc_RNA (1)...(19): siRNA sense strand
gacaagacaggcugcgaaa

SEQ ID NO: 243296 - RNA, 19 nt, Homo sapiens
  misc_RNA (1)...(19): siRNA sense strand
uggcugcgcugaacaucuu

SEQ ID NO: 243297 - RNA, 19 nt, Homo sapiens
  misc_RNA (1)...(19): siRNA sense strand
gaaggaacgggcaccaaca

SEQ ID NO: 243298 - RNA, 19 nt, Homo sapiens
  misc_RNA (1)...(19): siRNA sense strand
uggaagagaauccgaagaa

SEQ ID NO: 243299 - RNA, 19 nt, Homo sapiens
  misc_RNA (1)...(19): siRNA sense strand
ccacagacaagcccagaau

SEQ ID NO: 243300 - RNA, 19 nt, Homo sapiens
  misc_RNA (1)...(19): siRNA sense strand
ccucugaucagccauggua

SEQ ID NO: 243301 - RNA, 19 nt, Homo sapiens
  misc_RNA (1)...(19): siRNA sense strand
gcaaugcagccgagaacau

SEQ ID NO: 243302 - RNA, 19 nt, Homo sapiens
  misc_RNA (1)...(19): siRNA sense strand
gcugaacaucuuaaaguug

SEQ ID NO: 243303 - RNA, 19 nt, Homo sapiens
  misc_RNA (1)...(19): siRNA sense strand
ggagaaggagccagaguac

SEQ ID NO: 243304 - RNA, 19 nt, Homo sapiens
  misc_RNA (1)...(19): siRNA sense strand
gugggaggacagcaauuua

SEQ ID NO: 243305 - RNA, 19 nt, Homo sapiens
  misc_RNA (1)...(19): siRNA sense strand
acagacaagcccagaauau

SEQ ID NO: 243306 - RNA, 19 nt, Homo sapiens
  misc_RNA (1)...(19): siRNA sense strand
gcaguccaccuauaacuac

SEQ ID NO: 243307 - RNA, 19 nt, Homo sapiens
  misc_RNA (1)...(19): siRNA sense strand
gaacaggaaacggaccaau

SEQ ID NO: 243308 - RNA, 19 nt, Homo sapiens
  misc_RNA (1)...(19): siRNA sense strand
gaccaacaaaguacagaga

SEQ ID NO: 243309 - RNA, 19 nt, Homo sapiens
  misc_RNA (1)...(19): siRNA sense strand
caauguauaagccuguuga

SEQ ID NO: 243310 - RNA, 19 nt, Homo sapiens
  misc_RNA (1)...(19): siRNA sense strand
uguaggaguuagucaagga

SEQ ID NO: 243311 - RNA, 19 nt, Homo sapiens
  misc_RNA (1)...(19): siRNA sense strand
ccgagaacaugcuggagau

SEQ ID NO: 243312 - RNA, 19 nt, Homo sapiens
  misc_RNA (1)...(19): siRNA sense strand
gggaggacagcaauuuaau

SEQ ID NO: 243313 - RNA, 19 nt, Homo sapiens
  misc_RNA (1)...(19): siRNA sense strand
gagaugccaagaacaggaa

SEQ ID NO: 243314 - RNA, 19 nt, Homo sapiens
  misc_RNA (1)...(19): siRNA sense strand
gaacuuugugaccaagguu

SEQ ID NO: 243315 - RNA, 19 nt, Homo sapiens
  misc_RNA (1)...(19): siRNA sense strand
caugagaggaggugcuuau

SEQ ID NO: 243316 - RNA, 19 nt, Homo sapiens
  misc_RNA (1)...(19): siRNA sense strand
caguuccaccuuuacuuua

SEQ ID NO: 243317 - RNA, 19 nt, Homo sapiens
  misc_RNA (1)...(19): siRNA sense strand
gcccgagaguuguuguaug

SEQ ID NO: 243318 - RNA, 19 nt, Homo sapiens
  misc_RNA (1)...(19): siRNA sense strand
aguacacgcuccucacaga

SEQ ID NO: 243319 - RNA, 19 nt, Homo sapiens
  misc_RNA (1)...(19): siRNA sense strand
accuauaacuacaacauga

SEQ ID NO: 243320 - RNA, 19 nt, Homo sapiens
  misc_RNA (1)...(19): siRNA sense strand
gccugcaguugaacgagua

SEQ ID NO: 243321 - RNA, 19 nt, Homo sapiens
  misc_RNA (1)...(19): siRNA sense strand
cagacaagcccagaauaug

SEQ ID NO: 243322 - RNA, 19 nt, Homo sapiens
  misc_RNA (1)...(19): siRNA sense strand
acaggaaacggaccaaugu

SEQ ID NO: 243323 - RNA, 19 nt, Homo sapiens
  misc_RNA (1)...(19): siRNA sense strand
cgcugaacaucuuaaaguu

SEQ ID NO: 243324 - RNA, 19 nt, Homo sapiens
  misc_RNA (1)...(19): siRNA sense strand
cugagcaacuggacuaucu

SEQ ID NO: 243325 - RNA, 19 nt, Homo sapiens
  misc_RNA (1)...(19): siRNA sense strand
cccgagaguuguuguaugg

SEQ ID NO: 243326 - RNA, 19 nt, Homo sapiens
  misc_RNA (1)...(19): siRNA sense strand
caaacccgcacucaaguca

SEQ ID NO: 243327 - RNA, 19 nt, Homo sapiens
  misc_RNA (1)...(19): siRNA sense strand
gaagguggccaagcgcaau

SEQ ID NO: 243328 - RNA, 19 nt, Homo sapiens
  misc_RNA (1)...(19): siRNA sense strand
ccucugagcaacuggacua

SEQ ID NO: 243329 - RNA, 19 nt, Homo sapiens
  misc_RNA (1)...(19): siRNA sense strand
agaacgaauuuguaucucu

SEQ ID NO: 243330 - RNA, 19 nt, Homo sapiens
  misc_RNA (1)...(19): siRNA sense strand
uacaaagacuuccccaaaa

SEQ ID NO: 243331 - RNA, 19 nt, Homo sapiens
  misc_RNA (1)...(19): siRNA sense strand
caauuuaauggcaaaggaa

SEQ ID NO: 243332 - RNA, 19 nt, Homo sapiens
  misc_RNA (1)...(19): siRNA sense strand
ggaguccugccaugauaug

SEQ ID NO: 243333 - RNA, 19 nt, Homo sapiens
  misc_RNA (1)...(19): siRNA sense strand
caccaaacccgcacucaag

SEQ ID NO: 243334 - RNA, 19 nt, Homo sapiens
  misc_RNA (1)...(19): siRNA sense strand
gaacaugcuggagauccuu

SEQ ID NO: 243335 - RNA, 19 nt, Homo sapiens
  misc_RNA (1)...(19): siRNA sense strand
caaugcagccgagaacaug

SEQ ID NO: 243336 - RNA, 19 nt, Homo sapiens
  misc_RNA (1)...(19): siRNA sense strand
ugggaggacagcaauuuaa

SEQ ID NO: 243337 - RNA, 19 nt, Homo sapiens
  misc_RNA (1)...(19): siRNA sense strand
gcaagaagauuucaaagaa

SEQ ID NO: 243338 - RNA, 19 nt, Homo sapiens
  misc_RNA (1)...(19): siRNA sense strand
aaacggaacuugccuguga

SEQ ID NO: 243339 - RNA, 19 nt, Homo sapiens
  misc_RNA (1)...(19): siRNA sense strand
gaacuugccugugaauuuc

SEQ ID NO: 243340 - RNA, 19 nt, Homo sapiens
  misc_RNA (1)...(19): siRNA sense strand
gaacgaauuuguaucucuu

SEQ ID NO: 243341 - RNA, 19 nt, Homo sapiens
  misc_RNA (1)...(19): siRNA sense strand
gaagacacccauaaagaaa

SEQ ID NO: 243342 - RNA, 19 nt, Homo sapiens
  misc_RNA (1)...(19): siRNA sense strand
ggaacuugccugugaauuu

SEQ ID NO: 243343 - RNA, 19 nt, Homo sapiens
  misc_RNA (1)...(19): siRNA sense strand
ggagauccuugguuucaaa

SEQ ID NO: 243344 - RNA, 19 nt, Homo sapiens
  misc_RNA (1)...(19): siRNA sense strand
ggacaucacaccaaagauu

SEQ ID NO: 243345 - RNA, 19 nt, Homo sapiens
  misc_RNA (1)...(19): siRNA sense strand
uaaaguugcugucugaguu

SEQ ID NO: 243346 - RNA, 19 nt, Homo sapiens
  misc_RNA (1)...(19): siRNA sense strand
gagaagacacccauaaaga

SEQ ID NO: 243347 - RNA, 19 nt, Homo sapiens
  misc_RNA (1)...(19): siRNA sense strand
guacagagaugccaagaac

SEQ ID NO: 243348 - RNA, 19 nt, Homo sapiens
  misc_RNA (1)...(19): siRNA sense strand
gaaaaugggacuaguaaua

SEQ ID NO: 243349 - RNA, 19 nt, Homo sapiens
  misc_RNA (1)...(19): siRNA sense strand
gcaauuuaauggcaaagga

SEQ ID NO: 243350 - RNA, 19 nt, Homo sapiens
  misc_RNA (1)...(19): siRNA sense strand
cacgguaacugccaugaua

SEQ ID NO: 243351 - RNA, 19 nt, Homo sapiens
  misc_RNA (1)...(19): siRNA sense strand
gaagagaauccgaagaaga

SEQ ID NO: 243352 - RNA, 19 nt, Homo sapiens
  misc_RNA (1)...(19): siRNA sense strand
ggaggugaauggaagagaa

SEQ ID NO: 243353 - RNA, 19 nt, Homo sapiens
  misc_RNA (1)...(19): siRNA sense strand
gaacgggcaccaacaagaa

SEQ ID NO: 243354 - RNA, 19 nt, Homo sapiens
  misc_RNA (1)...(19): siRNA sense strand
ucaaggacaucacaccaaa

SEQ ID NO: 243355 - RNA, 19 nt, Homo sapiens
  misc_RNA (1)...(19): siRNA sense strand
caugauagcccgagaguug

SEQ ID NO: 243356 - RNA, 19 nt, Homo sapiens
  misc_RNA (1)...(19): siRNA sense strand
uugaggagcugaagaaguu

SEQ ID NO: 243357 - RNA, 19 nt, Homo sapiens
  misc_RNA (1)...(19): siRNA sense strand
gaggagaagacacccauaa

SEQ ID NO: 243358 - RNA, 19 nt, Homo sapiens
  misc_RNA (1)...(19): siRNA sense strand
gaaauaagucaaguguuug

SEQ ID NO: 243359 - RNA, 19 nt, Homo sapiens
  misc_RNA (1)...(19): siRNA sense strand
guggaguccugccaugaua

SEQ ID NO: 243360 - RNA, 19 nt, Homo sapiens
  misc_RNA (1)...(19): siRNA sense strand
gcagggaguuugugaugca

SEQ ID NO: 243361 - RNA, 19 nt, Homo sapiens
  misc_RNA (1)...(19): siRNA sense strand
ugaggauccugcagaauga

SEQ ID NO: 243362 - RNA, 19 nt, Homo sapiens
  misc_RNA (1)...(19): siRNA sense strand
ggaugcaguccaccuauaa

SEQ ID NO: 243363 - RNA, 19 nt, Homo sapiens
  misc_RNA (1)...(19): siRNA sense strand
cagagaggcuggaggugaa

SEQ ID NO: 243364 - RNA, 19 nt, Homo sapiens
  misc_RNA (1)...(19): siRNA sense strand
aaaccacacugcagaagga

SEQ ID NO: 243365 - RNA, 19 nt, Homo sapiens
  misc_RNA (1)...(19): siRNA sense strand
gaacgaguaaagccuagaa

SEQ ID NO: 243366 - RNA, 19 nt, Homo sapiens
  misc_RNA (1)...(19): siRNA sense strand
gacaucacaccaaagauuu

SEQ ID NO: 243367 - RNA, 19 nt, Homo sapiens
  misc_RNA (1)...(19): siRNA sense strand
guaauaaagaggaugaguu

SEQ ID NO: 243368 - RNA, 19 nt, Homo sapiens
  misc_RNA (1)...(19): siRNA sense strand
ugaagaacuuugugaccaa

SEQ ID NO: 243369 - RNA, 19 nt, Homo sapiens
  misc_RNA (1)...(19): siRNA sense strand
ggagaagacacccauaaag

SEQ ID NO: 243370 - RNA, 19 nt, Homo sapiens
  misc_RNA (1)...(19): siRNA sense strand
aguaaagccuagaaucaaa

SEQ ID NO: 243371 - RNA, 19 nt, Homo sapiens
  misc_RNA (1)...(19): siRNA sense strand
caagacaggcugcgaaaca

SEQ ID NO: 243372 - RNA, 19 nt, Homo sapiens
  misc_RNA (1)...(19): siRNA sense strand
ccaacaaaguacagagaug

SEQ ID NO: 243373 - RNA, 19 nt, Homo sapiens
  misc_RNA (1)...(19): siRNA sense strand
acacgaugcugcugccaaa

SEQ ID NO: 243374 - RNA, 19 nt, Homo sapiens
  misc_RNA (1)...(19): siRNA sense strand
aagagaauccgaagaagaa

SEQ ID NO: 243375 - RNA, 19 nt, Homo sapiens
  misc_RNA (1)...(19): siRNA sense strand
gaaacggaccaaugucugu

SEQ ID NO: 243376 - RNA, 19 nt, Homo sapiens
  misc_RNA (1)...(19): siRNA sense strand
caagaacgaauuuguaucu

SEQ ID NO: 243377 - RNA, 19 nt, Homo sapiens
  misc_RNA (1)...(19): siRNA sense strand
gagcaacuggacuaucuuu

SEQ ID NO: 243378 - RNA, 19 nt, Homo sapiens
  misc_RNA (1)...(19): siRNA sense strand
uaauaaagaggaugaguuc

SEQ ID NO: 243379 - RNA, 19 nt, Homo sapiens
  misc_RNA (1)...(19): siRNA sense strand
agaagacacccauaaagaa

SEQ ID NO: 243380 - RNA, 19 nt, Homo sapiens
  misc_RNA (1)...(19): siRNA sense strand
ggaacgggcaccaacaaga

SEQ ID NO: 243381 - RNA, 19 nt, Homo sapiens
  misc_RNA (1)...(19): siRNA sense strand
uguuugagauugcacuuaa

SEQ ID NO: 243382 - RNA, 19 nt, Homo sapiens
  misc_RNA (1)...(19): siRNA sense strand
ggaagagaauccgaagaag

SEQ ID NO: 243383 - RNA, 19 nt, Homo sapiens
  misc_RNA (1)...(19): siRNA sense strand
gaguaaagccuagaaucaa

SEQ ID NO: 243384 - RNA, 19 nt, Homo sapiens
  misc_RNA (1)...(19): siRNA sense strand
cgaguaaagccuagaauca

SEQ ID NO: 243385 - RNA, 19 nt, Homo sapiens
  misc_RNA (1)...(19): siRNA sense strand
gcaaaggaaagacaagaca

SEQ ID NO: 243386 - RNA, 19 nt, Homo sapiens
  misc_RNA (1)...(19): siRNA sense strand
cgccauagcuguucuugag

SEQ ID NO: 243387 - RNA, 19 nt, Homo sapiens
  misc_RNA (1)...(19): siRNA sense strand
cggaugcaguccaccuaua

SEQ ID NO: 243388 - RNA, 19 nt, Homo sapiens
  misc_RNA (1)...(19): siRNA sense strand
ucuuaaaguugcugucuga

SEQ ID NO: 243389 - RNA, 19 nt, Homo sapiens
  misc_RNA (1)...(19): siRNA sense strand
gcgcugaacaucuuaaagu

SEQ ID NO: 243390 - RNA, 19 nt, Homo sapiens
  misc_RNA (1)...(19): siRNA sense strand
ccaguuccaccuuuacuuu

SEQ ID NO: 243391 - RNA, 19 nt, Homo sapiens
  misc_RNA (1)...(19): siRNA sense strand
gauccuugguuucaaaguc

SEQ ID NO: 243392 - RNA, 19 nt, Homo sapiens
  misc_RNA (1)...(19): siRNA sense strand
gaggacagcaauuuaaugg

SEQ ID NO: 243393 - RNA, 19 nt, Homo sapiens
  misc_RNA (1)...(19): siRNA sense strand
ggaggacagcaauuuaaug

SEQ ID NO: 243394 - RNA, 19 nt, Homo sapiens
  misc_RNA (1)...(19): siRNA sense strand
gggaaaagcaagaagauuu

SEQ ID NO: 243395 - RNA, 19 nt, Homo sapiens
  misc_RNA (1)...(19): siRNA sense strand
gacaagacaggcugcgaaa

SEQ ID NO: 243396 - RNA, 19 nt, Homo sapiens
  misc_RNA (1)...(19): siRNA sense strand
uggcugcgcugaacaucuu

SEQ ID NO: 243397 - RNA, 19 nt, Homo sapiens
  misc_RNA (1)...(19): siRNA sense strand
gaaggaacgggcaccaaca

SEQ ID NO: 243398 - RNA, 19 nt, Homo sapiens
  misc_RNA (1)...(19): siRNA sense strand
uggaagagaauccgaagaa

SEQ ID NO: 243399 - RNA, 19 nt, Homo sapiens
  misc_RNA (1)...(19): siRNA sense strand
ccacagacaagcccagaau

SEQ ID NO: 243400 - RNA, 19 nt, Homo sapiens
  misc_RNA (1)...(19): siRNA sense strand
ccucugaucagccauggua

SEQ ID NO: 243401 - RNA, 19 nt, Homo sapiens
  misc_RNA (1)...(19): siRNA sense strand
gcaaugcagccgagaacau

SEQ ID NO: 243402 - RNA, 19 nt, Homo sapiens
  misc_RNA (1)...(19): siRNA sense strand
gcugaacaucuuaaaguug

SEQ ID NO: 243403 - RNA, 19 nt, Homo sapiens
  misc_RNA (1)...(19): siRNA sense strand
gugggaggacagcaauuua

SEQ ID NO: 243404 - RNA, 19 nt, Homo sapiens
  misc_RNA (1)...(19): siRNA sense strand
ggagaaggagccagaguac

SEQ ID NO: 243405 - RNA, 19 nt, Homo sapiens
  misc_RNA (1)...(19): siRNA sense strand
acagacaagcccagaauau

SEQ ID NO: 243406 - RNA, 19 nt, Homo sapiens
  misc_RNA (1)...(19): siRNA sense strand
caauguauaagccuguuga

SEQ ID NO: 243407 - RNA, 19 nt, Homo sapiens
  misc_RNA (1)...(19): siRNA sense strand
gaacaggaaacggaccaau

SEQ ID NO: 243408 - RNA, 19 nt, Homo sapiens
  misc_RNA (1)...(19): siRNA sense strand
gaccaacaaaguacagaga

SEQ ID NO: 243409 - RNA, 19 nt, Homo sapiens
  misc_RNA (1)...(19): siRNA sense strand
uguaggaguuagucaagga

SEQ ID NO: 243410 - RNA, 19 nt, Homo sapiens
  misc_RNA (1)...(19): siRNA sense strand
ccgagaacaugcuggagau

SEQ ID NO: 243411 - RNA, 19 nt, Homo sapiens
  misc_RNA (1)...(19): siRNA sense strand
gcaguccaccuauaacuac

SEQ ID NO: 243412 - RNA, 19 nt, Homo sapiens
  misc_RNA (1)...(19): siRNA sense strand
gggaggacagcaauuuaau

SEQ ID NO: 243413 - RNA, 19 nt, Homo sapiens
  misc_RNA (1)...(19): siRNA sense strand
gagaugccaagaacaggaa

SEQ ID NO: 243414 - RNA, 19 nt, Homo sapiens
  misc_RNA (1)...(19): siRNA sense strand
gaacuuugugaccaagguu

SEQ ID NO: 243415 - RNA, 19 nt, Homo sapiens
  misc_RNA (1)...(19): siRNA sense strand
gcccgagaguuguuguaug

SEQ ID NO: 243416 - RNA, 19 nt, Homo sapiens
  misc_RNA (1)...(19): siRNA sense strand
caguuccaccuuuacuuua

SEQ ID NO: 243417 - RNA, 19 nt, Homo sapiens
  misc_RNA (1)...(19): siRNA sense strand
caugagaggaggugcuuau

SEQ ID NO: 243418 - RNA, 19 nt, Homo sapiens
  misc_RNA (1)...(19): siRNA sense strand
accuauaacuacaacauga

SEQ ID NO: 243419 - RNA, 19 nt, Homo sapiens
  misc_RNA (1)...(19): siRNA sense strand
aguacacgcuccucacaga

SEQ ID NO: 243420 - RNA, 19 nt, Homo sapiens
  misc_RNA (1)...(19): siRNA sense strand
gccugcaguugaacgagua

SEQ ID NO: 243421 - RNA, 19 nt, Homo sapiens
  misc_RNA (1)...(19): siRNA sense strand
cagacaagcccagaauaug

SEQ ID NO: 243422 - RNA, 19 nt, Homo sapiens
  misc_RNA (1)...(19): siRNA sense strand
acaggaaacggaccaaugu

SEQ ID NO: 243423 - RNA, 19 nt, Homo sapiens
  misc_RNA (1)...(19): siRNA sense strand
cgcugaacaucuuaaaguu

SEQ ID NO: 243424 - RNA, 19 nt, Homo sapiens
  misc_RNA (1)...(19): siRNA sense strand
cugagcaacuggacuaucu

SEQ ID NO: 243425 - RNA, 19 nt, Homo sapiens
  misc_RNA (1)...(19): siRNA sense strand
cccgagaguuguuguaugg

SEQ ID NO: 243426 - RNA, 19 nt, Homo sapiens
  misc_RNA (1)...(19): siRNA sense strand
caaacccgcacucaaguca

SEQ ID NO: 243427 - RNA, 19 nt, Homo sapiens
  misc_RNA (1)...(19): siRNA sense strand
gaagguggccaagcgcaau

SEQ ID NO: 243428 - RNA, 19 nt, Homo sapiens
  misc_RNA (1)...(19): siRNA sense strand
ccucugagcaacuggacua

SEQ ID NO: 243429 - RNA, 19 nt, Homo sapiens
  misc_RNA (1)...(19): siRNA sense strand
agaacgaauuuguaucucu

SEQ ID NO: 243430 - RNA, 19 nt, Homo sapiens
  misc_RNA (1)...(19): siRNA sense strand
uacaaagacuuccccaaaa

SEQ ID NO: 243431 - RNA, 19 nt, Homo sapiens
  misc_RNA (1)...(19): siRNA sense strand
agacaagcccagaauaugg

SEQ ID NO: 243432 - RNA, 19 nt, Homo sapiens
  misc_RNA (1)...(19): siRNA sense strand
ggaguccugccaugauaug

SEQ ID NO: 243433 - RNA, 19 nt, Homo sapiens
  misc_RNA (1)...(19): siRNA sense strand
caccaaacccgcacucaag

SEQ ID NO: 243434 - RNA, 19 nt, Homo sapiens
  misc_RNA (1)...(19): siRNA sense strand
gaacaugcuggagauccuu

SEQ ID NO: 243435 - RNA, 19 nt, Homo sapiens
  misc_RNA (1)...(19): siRNA sense strand
caaugcagccgagaacaug

SEQ ID NO: 243436 - RNA, 19 nt, Homo sapiens
  misc_RNA (1)...(19): siRNA sense strand
ugggaggacagcaauuuaa

SEQ ID NO: 243437 - RNA, 19 nt, Homo sapiens
  misc_RNA (1)...(19): siRNA sense strand
gcagaaggaugauaaagaa

SEQ ID NO: 243438 - RNA, 19 nt, Homo sapiens
  misc_RNA (1)...(19): siRNA sense strand
gcacagggauggacucaaa

SEQ ID NO: 243439 - RNA, 19 nt, Homo sapiens
  misc_RNA (1)...(19): siRNA sense strand
gaagauugaugaugaaguu

SEQ ID NO: 243440 - RNA, 19 nt, Homo sapiens
  misc_RNA (1)...(19): siRNA sense strand
ccaaucaacuggagauaua

SEQ ID NO: 243441 - RNA, 19 nt, Homo sapiens
  misc_RNA (1)...(19): siRNA sense strand
gaaagaacauugagaacau

SEQ ID NO: 243442 - RNA, 19 nt, Homo sapiens
  misc_RNA (1)...(19): siRNA sense strand
caaauuagcucgcuuagag

SEQ ID NO: 243443 - RNA, 19 nt, Homo sapiens
  misc_RNA (1)...(19): siRNA sense strand
gaacaugucucagccagaa

SEQ ID NO: 243444 - RNA, 19 nt, Homo sapiens
  misc_RNA (1)...(19): siRNA sense strand
caaccaagauaaagaacua

SEQ ID NO: 243445 - RNA, 19 nt, Homo sapiens
  misc_RNA (1)...(19): siRNA sense strand
ggaaugcgauggcuuacaa

SEQ ID NO: 243446 - RNA, 19 nt, Homo sapiens
  misc_RNA (1)...(19): siRNA sense strand
ggaagaaugucccaucugu

SEQ ID NO: 243447 - RNA, 19 nt, Homo sapiens
  misc_RNA (1)...(19): siRNA sense strand
ccaagcaacuucuacguaa

SEQ ID NO: 243448 - RNA, 19 nt, Homo sapiens
  misc_RNA (1)...(19): siRNA sense strand
gcucugcgcugacuucaaa

SEQ ID NO: 243449 - RNA, 19 nt, Homo sapiens
  misc_RNA (1)...(19): siRNA sense strand
ggaggaagcagaauuagaa

SEQ ID NO: 243450 - RNA, 19 nt, Homo sapiens
  misc_RNA (1)...(19): siRNA sense strand
gaacaugaaccugugauaa

SEQ ID NO: 243451 - RNA, 19 nt, Homo sapiens
  misc_RNA (1)...(19): siRNA sense strand
gauagugacuuugaagaaa

SEQ ID NO: 243452 - RNA, 19 nt, Homo sapiens
  misc_RNA (1)...(19): siRNA sense strand
gaucagagcuaugguguca

SEQ ID NO: 243453 - RNA, 19 nt, Homo sapiens
  misc_RNA (1)...(19): siRNA sense strand
ggagaaagaggaagaagaa

SEQ ID NO: 243454 - RNA, 19 nt, Homo sapiens
  misc_RNA (1)...(19): siRNA sense strand
gucaucaacugaagucuua

SEQ ID NO: 243455 - RNA, 19 nt, Homo sapiens
  misc_RNA (1)...(19): siRNA sense strand
gacuauggcuucaaacuga

SEQ ID NO: 243456 - RNA, 19 nt, Homo sapiens
  misc_RNA (1)...(19): siRNA sense strand
ugagagaucuuccaaauac

SEQ ID NO: 243457 - RNA, 19 nt, Homo sapiens
  misc_RNA (1)...(19): siRNA sense strand
ggaaggaacuacagcgaau

SEQ ID NO: 243458 - RNA, 19 nt, Homo sapiens
  misc_RNA (1)...(19): siRNA sense strand
caacacagcagaaggauga

SEQ ID NO: 243459 - RNA, 19 nt, Homo sapiens
  misc_RNA (1)...(19): siRNA sense strand
ucacugaacucacggcaaa

SEQ ID NO: 243460 - RNA, 19 nt, Homo sapiens
  misc_RNA (1)...(19): siRNA sense strand
ucacagagaugaugacaca

SEQ ID NO: 243461 - RNA, 19 nt, Homo sapiens
  misc_RNA (1)...(19): siRNA sense strand
ccacucagauuaugaugaa

SEQ ID NO: 243462 - RNA, 19 nt, Homo sapiens
  misc_RNA (1)...(19): siRNA sense strand
caugauagcugcagagcaa

SEQ ID NO: 243463 - RNA, 19 nt, Homo sapiens
  misc_RNA (1)...(19): siRNA sense strand
gacgcugucucaagauuua

SEQ ID NO: 243464 - RNA, 19 nt, Homo sapiens
  misc_RNA (1)...(19): siRNA sense strand
ucaaugagguggcagaaga

SEQ ID NO: 243465 - RNA, 19 nt, Homo sapiens
  misc_RNA (1)...(19): siRNA sense strand
gaaagcagcauccggaaga

SEQ ID NO: 243466 - RNA, 19 nt, Homo sapiens
  misc_RNA (1)...(19): siRNA sense strand
gcagugcugugcuuauuau

SEQ ID NO: 243467 - RNA, 19 nt, Homo sapiens
  misc_RNA (1)...(19): siRNA sense strand
caacugaggcggcuuaaga

SEQ ID NO: 243468 - RNA, 19 nt, Homo sapiens
  misc_RNA (1)...(19): siRNA sense strand
gaaaauggacccuuaauga

SEQ ID NO: 243469 - RNA, 19 nt, Homo sapiens
  misc_RNA (1)...(19): siRNA sense strand
caugagagaucuuccaaau

SEQ ID NO: 243470 - RNA, 19 nt, Homo sapiens
  misc_RNA (1)...(19): siRNA sense strand
gggaaagcgucuuggauga

SEQ ID NO: 243471 - RNA, 19 nt, Homo sapiens
  misc_RNA (1)...(19): siRNA sense strand
gaaaagacagucauucaua

SEQ ID NO: 243472 - RNA, 19 nt, Homo sapiens
  misc_RNA (1)...(19): siRNA sense strand
gaaagcgucuuggaugaug

SEQ ID NO: 243473 - RNA, 19 nt, Homo sapiens
  misc_RNA (1)...(19): siRNA sense strand
caagauuuaucgcacguuu

SEQ ID NO: 243474 - RNA, 19 nt, Homo sapiens
  misc_RNA (1)...(19): siRNA sense strand
guaagaacaucuccaagca

SEQ ID NO: 243475 - RNA, 19 nt, Homo sapiens
  misc_RNA (1)...(19): siRNA sense strand
gagagucaguauacuaaga

SEQ ID NO: 243476 - RNA, 19 nt, Homo sapiens
  misc_RNA (1)...(19): siRNA sense strand
aaacaggagucaucaagga

SEQ ID NO: 243477 - RNA, 19 nt, Homo sapiens
  misc_RNA (1)...(19): siRNA sense strand
ugacuagccuuaacucuuc

SEQ ID NO: 243478 - RNA, 19 nt, Homo sapiens
  misc_RNA (1)...(19): siRNA sense strand
caacugaagucuuaucaac

SEQ ID NO: 243479 - RNA, 19 nt, Homo sapiens
  misc_RNA (1)...(19): siRNA sense strand
gaagauaccagcagacgau

SEQ ID NO: 243480 - RNA, 19 nt, Homo sapiens
  misc_RNA (1)...(19): siRNA sense strand
gaaacaaucacagagauga

SEQ ID NO: 243481 - RNA, 19 nt, Homo sapiens
  misc_RNA (1)...(19): siRNA sense strand
agacauugauugcaaguug

SEQ ID NO: 243482 - RNA, 19 nt, Homo sapiens
  misc_RNA (1)...(19): siRNA sense strand
ugugggaucugguggaaua

SEQ ID NO: 243483 - RNA, 19 nt, Homo sapiens
  misc_RNA (1)...(19): siRNA sense strand
caauaugucugucuuggau

SEQ ID NO: 243484 - RNA, 19 nt, Homo sapiens
  misc_RNA (1)...(19): siRNA sense strand
gagagcaucuggagcuaau

SEQ ID NO: 243485 - RNA, 19 nt, Homo sapiens
  misc_RNA (1)...(19): siRNA sense strand
gaaaaucucugguucucaa

SEQ ID NO: 243486 - RNA, 19 nt, Homo sapiens
  misc_RNA (1)...(19): siRNA sense strand
gaugaagauugaugaugaa

SEQ ID NO: 243487 - RNA, 19 nt, Homo sapiens
  misc_RNA (1)...(19): siRNA sense strand
agaugaagauugaugauga

SEQ ID NO: 243488 - RNA, 19 nt, Homo sapiens
  misc_RNA (1)...(19): siRNA sense strand
caagacaggguuacuauau

SEQ ID NO: 243489 - RNA, 19 nt, Homo sapiens
  misc_RNA (1)...(19): siRNA sense strand
ggaaucaucucugaagaag

SEQ ID NO: 243490 - RNA, 19 nt, Homo sapiens
  misc_RNA (1)...(19): siRNA sense strand
ggagauauagauaaaguga

SEQ ID NO: 243491 - RNA, 19 nt, Homo sapiens
  misc_RNA (1)...(19): siRNA sense strand
gaagcaccgugagcugaua

SEQ ID NO: 243492 - RNA, 19 nt, Homo sapiens
  misc_RNA (1)...(19): siRNA sense strand
gugaagacauugauugcaa

SEQ ID NO: 243493 - RNA, 19 nt, Homo sapiens
  misc_RNA (1)...(19): siRNA sense strand
gaagaaaugggaaagaaca

SEQ ID NO: 243494 - RNA, 19 nt, Homo sapiens
  misc_RNA (1)...(19): siRNA sense strand
caacuucuacguaaauuug

SEQ ID NO: 243495 - RNA, 19 nt, Homo sapiens
  misc_RNA (1)...(19): siRNA sense strand
ggauacgaauggaagauau

SEQ ID NO: 243496 - RNA, 19 nt, Homo sapiens
  misc_RNA (1)...(19): siRNA sense strand
gcuccaauuuaucuucaua

SEQ ID NO: 243497 - RNA, 19 nt, Homo sapiens
  misc_RNA (1)...(19): siRNA sense strand
caacuggagauauagauaa

SEQ ID NO: 243498 - RNA, 19 nt, Homo sapiens
  misc_RNA (1)...(19): siRNA sense strand
gaaagaagacaaauuagcu

SEQ ID NO: 243499 - RNA, 19 nt, Homo sapiens
  misc_RNA (1)...(19): siRNA sense strand
caugaggacuaacaaauuc

SEQ ID NO: 243500 - RNA, 19 nt, Homo sapiens
  misc_RNA (1)...(19): siRNA sense strand
gaaggaugcuggcuauggu

SEQ ID NO: 243501 - RNA, 19 nt, Homo sapiens
  misc_RNA (1)...(19): siRNA sense strand
gagaaagacagaacaugaa

SEQ ID NO: 243502 - RNA, 19 nt, Homo sapiens
  misc_RNA (1)...(19): siRNA sense strand
gcuuaugucugaaggagaa

SEQ ID NO: 243503 - RNA, 19 nt, Homo sapiens
  misc_RNA (1)...(19): siRNA sense strand
gaagaagagaucagagcua

SEQ ID NO: 243504 - RNA, 19 nt, Homo sapiens
  misc_RNA (1)...(19): siRNA sense strand
ggugggugcuuaagucuga

SEQ ID NO: 243505 - RNA, 19 nt, Homo sapiens
  misc_RNA (1)...(19): siRNA sense strand
ggacaagacaggguuacua

SEQ ID NO: 243506 - RNA, 19 nt, Homo sapiens
  misc_RNA (1)...(19): siRNA sense strand
gcccgacugugguaugaua

SEQ ID NO: 243507 - RNA, 19 nt, Homo sapiens
  misc_RNA (1)...(19): siRNA sense strand
ggaauaagacccaaacaac

SEQ ID NO: 243508 - RNA, 19 nt, Homo sapiens
  misc_RNA (1)...(19): siRNA sense strand
gacaauccuuucucugcua

SEQ ID NO: 243509 - RNA, 19 nt, Homo sapiens
  misc_RNA (1)...(19): siRNA sense strand
caacacaucccucaguaug

SEQ ID NO: 243510 - RNA, 19 nt, Homo sapiens
  misc_RNA (1)...(19): siRNA sense strand
gcaccagauuguaaauaug

SEQ ID NO: 243511 - RNA, 19 nt, Homo sapiens
  misc_RNA (1)...(19): siRNA sense strand
gaaggaaucaucucugaag

SEQ ID NO: 243512 - RNA, 19 nt, Homo sapiens
  misc_RNA (1)...(19): siRNA sense strand
gggaggaugucaaacacaa

SEQ ID NO: 243513 - RNA, 19 nt, Homo sapiens
  misc_RNA (1)...(19): siRNA sense strand
gcaguggguuugacuaugg

SEQ ID NO: 243514 - RNA, 19 nt, Homo sapiens
  misc_RNA (1)...(19): siRNA sense strand
cuggaaagguguuacguuu

SEQ ID NO: 243515 - RNA, 19 nt, Homo sapiens
  misc_RNA (1)...(19): siRNA sense strand
gaggauagcaacaucaguu

SEQ ID NO: 243516 - RNA, 19 nt, Homo sapiens
  misc_RNA (1)...(19): siRNA sense strand
ggaaagaacauugagaaca

SEQ ID NO: 243517 - RNA, 19 nt, Homo sapiens
  misc_RNA (1)...(19): siRNA sense strand
gaagauuuccagaugaaga

SEQ ID NO: 243518 - RNA, 19 nt, Homo sapiens
  misc_RNA (1)...(19): siRNA sense strand
caaugaggaucugguauau

SEQ ID NO: 243519 - RNA, 19 nt, Homo sapiens
  misc_RNA (1)...(19): siRNA sense strand
gaaagaggaagaagaagca

SEQ ID NO: 243520 - RNA, 19 nt, Homo sapiens
  misc_RNA (1)...(19): siRNA sense strand
gagaagaugaugaggaaga

SEQ ID NO: 243521 - RNA, 19 nt, Homo sapiens
  misc_RNA (1)...(19): siRNA sense strand
guaaaggacuacuacaaaa

SEQ ID NO: 243522 - RNA, 19 nt, Homo sapiens
  misc_RNA (1)...(19): siRNA sense strand
ugacacagcuuccgugacu

SEQ ID NO: 243523 - RNA, 19 nt, Homo sapiens
  misc_RNA (1)...(19): siRNA sense strand
gaagagaucagagcuaugg

SEQ ID NO: 243524 - RNA, 19 nt, Homo sapiens
  misc_RNA (1)...(19): siRNA sense strand
aagaaggaaucaucucuga

SEQ ID NO: 243525 - RNA, 19 nt, Homo sapiens
  misc_RNA (1)...(19): siRNA sense strand
cagccacucuugaugauga

SEQ ID NO: 243526 - RNA, 19 nt, Homo sapiens
  misc_RNA (1)...(19): siRNA sense strand
gaugaaggguggguuagga

SEQ ID NO: 243527 - RNA, 19 nt, Homo sapiens
  misc_RNA (1)...(19): siRNA sense strand
acacaaggauggacaugga

SEQ ID NO: 243528 - RNA, 19 nt, Homo sapiens
  misc_RNA (1)...(19): siRNA sense strand
ugacucagaucucucaauc

SEQ ID NO: 243529 - RNA, 19 nt, Homo sapiens
  misc_RNA (1)...(19): siRNA sense strand
gaagauggcaguggguuug

SEQ ID NO: 243530 - RNA, 19 nt, Homo sapiens
  misc_RNA (1)...(19): siRNA sense strand
ggaccaggauucuauuacu

SEQ ID NO: 243531 - RNA, 19 nt, Homo sapiens
  misc_RNA (1)...(19): siRNA sense strand
ugaguaugaugaacauuug

SEQ ID NO: 243532 - RNA, 19 nt, Homo sapiens
  misc_RNA (1)...(19): siRNA sense strand
gaagaaacggcgaguugga

SEQ ID NO: 243533 - RNA, 19 nt, Homo sapiens
  misc_RNA (1)...(19): siRNA sense strand
gagcaacugaggcggcuua

SEQ ID NO: 243534 - RNA, 19 nt, Homo sapiens
  misc_RNA (1)...(19): siRNA sense strand
caagcaacuucuacguaaa

SEQ ID NO: 243535 - RNA, 19 nt, Homo sapiens
  misc_RNA (1)...(19): siRNA sense strand
agacaggguuacuauauuc

SEQ ID NO: 243536 - RNA, 19 nt, Homo sapiens
  misc_RNA (1)...(19): siRNA sense strand
ugagaaagacagaacauga

SEQ ID NO: 243537 - RNA, 19 nt, Homo sapiens
  misc_RNA (1)...(19): siRNA sense strand
gcagaaggaugauaaagaa

SEQ ID NO: 243538 - RNA, 19 nt, Homo sapiens
  misc_RNA (1)...(19): siRNA sense strand
gcacagggauggacucaaa

SEQ ID NO: 243539 - RNA, 19 nt, Homo sapiens
  misc_RNA (1)...(19): siRNA sense strand
gaagauugaugaugaaguu

SEQ ID NO: 243540 - RNA, 19 nt, Homo sapiens
  misc_RNA (1)...(19): siRNA sense strand
ccaaucaacuggagauaua

SEQ ID NO: 243541 - RNA, 19 nt, Homo sapiens
  misc_RNA (1)...(19): siRNA sense strand
gaaagaacauugagaacau

SEQ ID NO: 243542 - RNA, 19 nt, Homo sapiens
  misc_RNA (1)...(19): siRNA sense strand
caaauuagcucgcuuagag

SEQ ID NO: 243543 - RNA, 19 nt, Homo sapiens
  misc_RNA (1)...(19): siRNA sense strand
gaacaugucucagccagaa

SEQ ID NO: 243544 - RNA, 19 nt, Homo sapiens
  misc_RNA (1)...(19): siRNA sense strand
caaccaagauaaagaacua

SEQ ID NO: 243545 - RNA, 19 nt, Homo sapiens
  misc_RNA (1)...(19): siRNA sense strand
ggaaugcgauggcuuacaa

SEQ ID NO: 243546 - RNA, 19 nt, Homo sapiens
  misc_RNA (1)...(19): siRNA sense strand
ggaagaaugucccaucugu

SEQ ID NO: 243547 - RNA, 19 nt, Homo sapiens
  misc_RNA (1)...(19): siRNA sense strand
ccaagcaacuucuacguaa

SEQ ID NO: 243548 - RNA, 19 nt, Homo sapiens
  misc_RNA (1)...(19): siRNA sense strand
gcucugcgcugacuucaaa

SEQ ID NO: 243549 - RNA, 19 nt, Homo sapiens
  misc_RNA (1)...(19): siRNA sense strand
ggaggaagcagaauuagaa

SEQ ID NO: 243550 - RNA, 19 nt, Homo sapiens
  misc_RNA (1)...(19): siRNA sense strand
gaacaugaaccugugauaa

SEQ ID NO: 243551 - RNA, 19 nt, Homo sapiens
  misc_RNA (1)...(19): siRNA sense strand
gauagugacuuugaagaaa

SEQ ID NO: 243552 - RNA, 19 nt, Homo sapiens
  misc_RNA (1)...(19): siRNA sense strand
gaucagagcuaugguguca

SEQ ID NO: 243553 - RNA, 19 nt, Homo sapiens
  misc_RNA (1)...(19): siRNA sense strand
ggagaaagaggaagaagaa

SEQ ID NO: 243554 - RNA, 19 nt, Homo sapiens
  misc_RNA (1)...(19): siRNA sense strand
gucaucaacugaagucuua

SEQ ID NO: 243555 - RNA, 19 nt, Homo sapiens
  misc_RNA (1)...(19): siRNA sense strand
gacuauggcuucaaacuga

SEQ ID NO: 243556 - RNA, 19 nt, Homo sapiens
  misc_RNA (1)...(19): siRNA sense strand
ugagagaucuuccaaauac

SEQ ID NO: 243557 - RNA, 19 nt, Homo sapiens
  misc_RNA (1)...(19): siRNA sense strand
ggaaggaacuacagcgaau

SEQ ID NO: 243558 - RNA, 19 nt, Homo sapiens
  misc_RNA (1)...(19): siRNA sense strand
caacacagcagaaggauga

SEQ ID NO: 243559 - RNA, 19 nt, Homo sapiens
  misc_RNA (1)...(19): siRNA sense strand
ucacugaacucacggcaaa

SEQ ID NO: 243560 - RNA, 19 nt, Homo sapiens
  misc_RNA (1)...(19): siRNA sense strand
ucacagagaugaugacaca

SEQ ID NO: 243561 - RNA, 19 nt, Homo sapiens
  misc_RNA (1)...(19): siRNA sense strand
ccacucagauuaugaugaa

SEQ ID NO: 243562 - RNA, 19 nt, Homo sapiens
  misc_RNA (1)...(19): siRNA sense strand
caugauagcugcagagcaa

SEQ ID NO: 243563 - RNA, 19 nt, Homo sapiens
  misc_RNA (1)...(19): siRNA sense strand
gacgcugucucaagauuua

SEQ ID NO: 243564 - RNA, 19 nt, Homo sapiens
  misc_RNA (1)...(19): siRNA sense strand
ucaaugagguggcagaaga

SEQ ID NO: 243565 - RNA, 19 nt, Homo sapiens
  misc_RNA (1)...(19): siRNA sense strand
gaaagcagcauccggaaga

SEQ ID NO: 243566 - RNA, 19 nt, Homo sapiens
  misc_RNA (1)...(19): siRNA sense strand
gcagugcugugcuuauuau

SEQ ID NO: 243567 - RNA, 19 nt, Homo sapiens
  misc_RNA (1)...(19): siRNA sense strand
caacugaggcggcuuaaga

SEQ ID NO: 243568 - RNA, 19 nt, Homo sapiens
  misc_RNA (1)...(19): siRNA sense strand
gaaaauggacccuuaauga

SEQ ID NO: 243569 - RNA, 19 nt, Homo sapiens
  misc_RNA (1)...(19): siRNA sense strand
caugagagaucuuccaaau

SEQ ID NO: 243570 - RNA, 19 nt, Homo sapiens
  misc_RNA (1)...(19): siRNA sense strand
gggaaagcgucuuggauga

SEQ ID NO: 243571 - RNA, 19 nt, Homo sapiens
  misc_RNA (1)...(19): siRNA sense strand
gaaaagacagucauucaua

SEQ ID NO: 243572 - RNA, 19 nt, Homo sapiens
  misc_RNA (1)...(19): siRNA sense strand
gaaagcgucuuggaugaug

SEQ ID NO: 243573 - RNA, 19 nt, Homo sapiens
  misc_RNA (1)...(19): siRNA sense strand
caagauuuaucgcacguuu

SEQ ID NO: 243574 - RNA, 19 nt, Homo sapiens
  misc_RNA (1)...(19): siRNA sense strand
guaagaacaucuccaagca

SEQ ID NO: 243575 - RNA, 19 nt, Homo sapiens
  misc_RNA (1)...(19): siRNA sense strand
gagagucaguauacuaaga

SEQ ID NO: 243576 - RNA, 19 nt, Homo sapiens
  misc_RNA (1)...(19): siRNA sense strand
aaacaggagucaucaagga

SEQ ID NO: 243577 - RNA, 19 nt, Homo sapiens
  misc_RNA (1)...(19): siRNA sense strand
ugacuagccuuaacucuuc

SEQ ID NO: 243578 - RNA, 19 nt, Homo sapiens
  misc_RNA (1)...(19): siRNA sense strand
caacugaagucuuaucaac

SEQ ID NO: 243579 - RNA, 19 nt, Homo sapiens
  misc_RNA (1)...(19): siRNA sense strand
gaagauaccagcagacgau

SEQ ID NO: 243580 - RNA, 19 nt, Homo sapiens
  misc_RNA (1)...(19): siRNA sense strand
gaaacaaucacagagauga

SEQ ID NO: 243581 - RNA, 19 nt, Homo sapiens
  misc_RNA (1)...(19): siRNA sense strand
agacauugauugcaaguug

SEQ ID NO: 243582 - RNA, 19 nt, Homo sapiens
  misc_RNA (1)...(19): siRNA sense strand
ugugggaucugguggaaua

SEQ ID NO: 243583 - RNA, 19 nt, Homo sapiens
  misc_RNA (1)...(19): siRNA sense strand
caauaugucugucuuggau

SEQ ID NO: 243584 - RNA, 19 nt, Homo sapiens
  misc_RNA (1)...(19): siRNA sense strand
gagagcaucuggagcuaau

SEQ ID NO: 243585 - RNA, 19 nt, Homo sapiens
  misc_RNA (1)...(19): siRNA sense strand
gaaaaucucugguucucaa

SEQ ID NO: 243586 - RNA, 19 nt, Homo sapiens
  misc_RNA (1)...(19): siRNA sense strand
gaugaagauugaugaugaa

SEQ ID NO: 243587 - RNA, 19 nt, Homo sapiens
  misc_RNA (1)...(19): siRNA sense strand
agaugaagauugaugauga

SEQ ID NO: 243588 - RNA, 19 nt, Homo sapiens
  misc_RNA (1)...(19): siRNA sense strand
caagacaggguuacuauau

SEQ ID NO: 243589 - RNA, 19 nt, Homo sapiens
  misc_RNA (1)...(19): siRNA sense strand
ggaaucaucucugaagaag

SEQ ID NO: 243590 - RNA, 19 nt, Homo sapiens
  misc_RNA (1)...(19): siRNA sense strand
ggagauauagauaaaguga

SEQ ID NO: 243591 - RNA, 19 nt, Homo sapiens
  misc_RNA (1)...(19): siRNA sense strand
gaagcaccgugagcugaua

SEQ ID NO: 243592 - RNA, 19 nt, Homo sapiens
  misc_RNA (1)...(19): siRNA sense strand
gugaagacauugauugcaa

SEQ ID NO: 243593 - RNA, 19 nt, Homo sapiens
  misc_RNA (1)...(19): siRNA sense strand
gaagaaaugggaaagaaca

SEQ ID NO: 243594 - RNA, 19 nt, Homo sapiens
  misc_RNA (1)...(19): siRNA sense strand
caacuucuacguaaauuug

SEQ ID NO: 243595 - RNA, 19 nt, Homo sapiens
  misc_RNA (1)...(19): siRNA sense strand
ggauacgaauggaagauau

SEQ ID NO: 243596 - RNA, 19 nt, Homo sapiens
  misc_RNA (1)...(19): siRNA sense strand
gcuccaauuuaucuucaua

SEQ ID NO: 243597 - RNA, 19 nt, Homo sapiens
  misc_RNA (1)...(19): siRNA sense strand
caacuggagauauagauaa

SEQ ID NO: 243598 - RNA, 19 nt, Homo sapiens
  misc_RNA (1)...(19): siRNA sense strand
gaaagaagacaaauuagcu

SEQ ID NO: 243599 - RNA, 19 nt, Homo sapiens
  misc_RNA (1)...(19): siRNA sense strand
caugaggacuaacaaauuc

SEQ ID NO: 243600 - RNA, 19 nt, Homo sapiens
  misc_RNA (1)...(19): siRNA sense strand
gaaggaugcuggcuauggu

SEQ ID NO: 243601 - RNA, 19 nt, Homo sapiens
  misc_RNA (1)...(19): siRNA sense strand
gagaaagacagaacaugaa

SEQ ID NO: 243602 - RNA, 19 nt, Homo sapiens
  misc_RNA (1)...(19): siRNA sense strand
gcuuaugucugaaggagaa

SEQ ID NO: 243603 - RNA, 19 nt, Homo sapiens
  misc_RNA (1)...(19): siRNA sense strand
gaagaagagaucagagcua

SEQ ID NO: 243604 - RNA, 19 nt, Homo sapiens
  misc_RNA (1)...(19): siRNA sense strand
ggugggugcuuaagucuga

SEQ ID NO: 243605 - RNA, 19 nt, Homo sapiens
  misc_RNA (1)...(19): siRNA sense strand
ggacaagacaggguuacua

SEQ ID NO: 243606 - RNA, 19 nt, Homo sapiens
  misc_RNA (1)...(19): siRNA sense strand
gcccgacugugguaugaua

SEQ ID NO: 243607 - RNA, 19 nt, Homo sapiens
  misc_RNA (1)...(19): siRNA sense strand
ggaauaagacccaaacaac

SEQ ID NO: 243608 - RNA, 19 nt, Homo sapiens
  misc_RNA (1)...(19): siRNA sense strand
gacaauccuuucucugcua

SEQ ID NO: 243609 - RNA, 19 nt, Homo sapiens
  misc_RNA (1)...(19): siRNA sense strand
caacacaucccucaguaug

SEQ ID NO: 243610 - RNA, 19 nt, Homo sapiens
  misc_RNA (1)...(19): siRNA sense strand
gcaccagauuguaaauaug

SEQ ID NO: 243611 - RNA, 19 nt, Homo sapiens
  misc_RNA (1)...(19): siRNA sense strand
gaaggaaucaucucugaag

SEQ ID NO: 243612 - RNA, 19 nt, Homo sapiens
  misc_RNA (1)...(19): siRNA sense strand
gggaggaugucaaacacaa

SEQ ID NO: 243613 - RNA, 19 nt, Homo sapiens
  misc_RNA (1)...(19): siRNA sense strand
gcaguggguuugacuaugg

SEQ ID NO: 243614 - RNA, 19 nt, Homo sapiens
  misc_RNA (1)...(19): siRNA sense strand
cuggaaagguguuacguuu

SEQ ID NO: 243615 - RNA, 19 nt, Homo sapiens
  misc_RNA (1)...(19): siRNA sense strand
gaggauagcaacaucaguu

SEQ ID NO: 243616 - RNA, 19 nt, Homo sapiens
  misc_RNA (1)...(19): siRNA sense strand
ggaaagaacauugagaaca

SEQ ID NO: 243617 - RNA, 19 nt, Homo sapiens
  misc_RNA (1)...(19): siRNA sense strand
gaagauuuccagaugaaga

SEQ ID NO: 243618 - RNA, 19 nt, Homo sapiens
  misc_RNA (1)...(19): siRNA sense strand
caaugaggaucugguauau

SEQ ID NO: 243619 - RNA, 19 nt, Homo sapiens
  misc_RNA (1)...(19): siRNA sense strand
gaaagaggaagaagaagca

SEQ ID NO: 243620 - RNA, 19 nt, Homo sapiens
  misc_RNA (1)...(19): siRNA sense strand
gagaagaugaugaggaaga

SEQ ID NO: 243621 - RNA, 19 nt, Homo sapiens
  misc_RNA (1)...(19): siRNA sense strand
guaaaggacuacuacaaaa

SEQ ID NO: 243622 - RNA, 19 nt, Homo sapiens
  misc_RNA (1)...(19): siRNA sense strand
ugacacagcuuccgugacu

SEQ ID NO: 243623 - RNA, 19 nt, Homo sapiens
  misc_RNA (1)...(19): siRNA sense strand
gaagagaucagagcuaugg

SEQ ID NO: 243624 - RNA, 19 nt, Homo sapiens
  misc_RNA (1)...(19): siRNA sense strand
aagaaggaaucaucucuga

SEQ ID NO: 243625 - RNA, 19 nt, Homo sapiens
  misc_RNA (1)...(19): siRNA sense strand
cagccacucuugaugauga

SEQ ID NO: 243626 - RNA, 19 nt, Homo sapiens
  misc_RNA (1)...(19): siRNA sense strand
gaugaaggguggguuagga

SEQ ID NO: 243627 - RNA, 19 nt, Homo sapiens
  misc_RNA (1)...(19): siRNA sense strand
acacaaggauggacaugga

SEQ ID NO: 243628 - RNA, 19 nt, Homo sapiens
  misc_RNA (1)...(19): siRNA sense strand
ugacucagaucucucaauc

SEQ ID NO: 243629 - RNA, 19 nt, Homo sapiens
  misc_RNA (1)...(19): siRNA sense strand
gaagauggcaguggguuug

SEQ ID NO: 243630 - RNA, 19 nt, Homo sapiens
  misc_RNA (1)...(19): siRNA sense strand
ggaccaggauucuauuacu

SEQ ID NO: 243631 - RNA, 19 nt, Homo sapiens
  misc_RNA (1)...(19): siRNA sense strand
ugaguaugaugaacauuug

SEQ ID NO: 243632 - RNA, 19 nt, Homo sapiens
  misc_RNA (1)...(19): siRNA sense strand
gaagaaacggcgaguugga

SEQ ID NO: 243633 - RNA, 19 nt, Homo sapiens
  misc_RNA (1)...(19): siRNA sense strand
gagcaacugaggcggcuua

SEQ ID NO: 243634 - RNA, 19 nt, Homo sapiens
  misc_RNA (1)...(19): siRNA sense strand
caagcaacuucuacguaaa

SEQ ID NO: 243635 - RNA, 19 nt, Homo sapiens
  misc_RNA (1)...(19): siRNA sense strand
agacaggguuacuauauuc

SEQ ID NO: 243636 - RNA, 19 nt, Homo sapiens
  misc_RNA (1)...(19): siRNA sense strand
ugagaaagacagaacauga

SEQ ID NO: 243637 - RNA, 19 nt, Homo sapiens
  misc_RNA (1)...(19): siRNA sense strand
ggaagaagcugaggaauau

SEQ ID NO: 243638 - RNA, 19 nt, Homo sapiens
  misc_RNA (1)...(19): siRNA sense strand
gcagagauccuacaagaau

SEQ ID NO: 243639 - RNA, 19 nt, Homo sapiens
  misc_RNA (1)...(19): siRNA sense strand
aggcagagauccuacaaga

SEQ ID NO: 243640 - RNA, 19 nt, Homo sapiens
  misc_RNA (1)...(19): siRNA sense strand
uggaagaagcugaggaaua

SEQ ID NO: 243641 - RNA, 19 nt, Homo sapiens
  misc_RNA (1)...(19): siRNA sense strand
ugaagcgguuggucaaaga

SEQ ID NO: 243642 - RNA, 19 nt, Homo sapiens
  misc_RNA (1)...(19): siRNA sense strand
ccgcauauuuggaucuuca

SEQ ID NO: 243643 - RNA, 19 nt, Homo sapiens
  misc_RNA (1)...(19): siRNA sense strand
ugaggaauauaaagaagca

SEQ ID NO: 243644 - RNA, 19 nt, Homo sapiens
  misc_RNA (1)...(19): siRNA sense strand
aagaagcugaggaauauaa

SEQ ID NO: 243645 - RNA, 19 nt, Homo sapiens
  misc_RNA (1)...(19): siRNA sense strand
gaucuucaacggauacuag

SEQ ID NO: 243646 - RNA, 19 nt, Homo sapiens
  misc_RNA (1)...(19): siRNA sense strand
gaagaagcugaggaauaua

SEQ ID NO: 243647 - RNA, 19 nt, Homo sapiens
  misc_RNA (1)...(19): siRNA sense strand
gauccucgcgugagacaga

SEQ ID NO: 243648 - RNA, 19 nt, Homo sapiens
  misc_RNA (1)...(19): siRNA sense strand
agaagcacguuuaguacug

SEQ ID NO: 243649 - RNA, 19 nt, Homo sapiens
  misc_RNA (1)...(19): siRNA sense strand
gcugaggaauauaaagaag

SEQ ID NO: 243650 - RNA, 19 nt, Homo sapiens
  misc_RNA (1)...(19): siRNA sense strand
gaauauaaagaagcacguu

SEQ ID NO: 243651 - RNA, 19 nt, Homo sapiens
  misc_RNA (1)...(19): siRNA sense strand
gcacguuuaguacuggauu

SEQ ID NO: 243652 - RNA, 19 nt, Homo sapiens
  misc_RNA (1)...(19): siRNA sense strand
gaagcgguuggucaaagaa

SEQ ID NO: 243653 - RNA, 19 nt, Homo sapiens
  misc_RNA (1)...(19): siRNA sense strand
gugaagcgguuggucaaag

SEQ ID NO: 243654 - RNA, 19 nt, Homo sapiens
  misc_RNA (1)...(19): siRNA sense strand
gcaggcagagauccuacaa

SEQ ID NO: 243655 - RNA, 19 nt, Homo sapiens
  misc_RNA (1)...(19): siRNA sense strand
cagagauccuacaagaauc

SEQ ID NO: 243656 - RNA, 19 nt, Homo sapiens
  misc_RNA (1)...(19): siRNA sense strand
aagcugaggaauauaaaga

SEQ ID NO: 243657 - RNA, 19 nt, Homo sapiens
  misc_RNA (1)...(19): siRNA sense strand
cuucaacggauacuagaaa

SEQ ID NO: 243658 - RNA, 19 nt, Homo sapiens
  misc_RNA (1)...(19): siRNA sense strand
aaagaagcacguuuaguac

SEQ ID NO: 243659 - RNA, 19 nt, Homo sapiens
  misc_RNA (1)...(19): siRNA sense strand
gaagcugaggaauauaaag

SEQ ID NO: 243660 - RNA, 19 nt, Homo sapiens
  misc_RNA (1)...(19): siRNA sense strand
caacggauacuagaaaaug

SEQ ID NO: 243661 - RNA, 19 nt, Homo sapiens
  misc_RNA (1)...(19): siRNA sense strand
gcaaaacaacaagaagaaa

SEQ ID NO: 243662 - RNA, 19 nt, Homo sapiens
  misc_RNA (1)...(19): siRNA sense strand
ggcagagauccuacaagaa

SEQ ID NO: 243663 - RNA, 19 nt, Homo sapiens
  misc_RNA (1)...(19): siRNA sense strand
caacaagaagaaaagauug

SEQ ID NO: 243664 - RNA, 19 nt, Homo sapiens
  misc_RNA (1)...(19): siRNA sense strand
ccacagaucacacaacuga

SEQ ID NO: 243665 - RNA, 19 nt, Homo sapiens
  misc_RNA (1)...(19): siRNA sense strand
ggaaggaguucagcucugu

SEQ ID NO: 243666 - RNA, 19 nt, Homo sapiens
  misc_RNA (1)...(19): siRNA sense strand
gagaacggcagaaacugua

SEQ ID NO: 243667 - RNA, 19 nt, Homo sapiens
  misc_RNA (1)...(19): siRNA sense strand
ucacacaacugaagauugc

SEQ ID NO: 243668 - RNA, 19 nt, Homo sapiens
  misc_RNA (1)...(19): siRNA sense strand
ggagaacggcagaaacugu

SEQ ID NO: 243669 - RNA, 19 nt, Homo sapiens
  misc_RNA (1)...(19): siRNA sense strand
gaucacacaacugaagauu

SEQ ID NO: 243670 - RNA, 19 nt, Homo sapiens
  misc_RNA (1)...(19): siRNA sense strand
uaccagaacccacagauca

SEQ ID NO: 243671 - RNA, 19 nt, Homo sapiens
  misc_RNA (1)...(19): siRNA sense strand
ccaaaggcuuccgggagaa

SEQ ID NO: 243672 - RNA, 19 nt, Homo sapiens
  misc_RNA (1)...(19): siRNA sense strand
guaccauccacgagaauug

SEQ ID NO: 243673 - RNA, 19 nt, Homo sapiens
  misc_RNA (1)...(19): siRNA sense strand
cuacuuguuucuucuggau

SEQ ID NO: 243674 - RNA, 19 nt, Homo sapiens
  misc_RNA (1)...(19): siRNA sense strand
gcccgcuacuuguuucuuc

SEQ ID NO: 243675 - RNA, 19 nt, Homo sapiens
  misc_RNA (1)...(19): siRNA sense strand
gccugaccgugucuacauu

SEQ ID NO: 243676 - RNA, 19 nt, Homo sapiens
  misc_RNA (1)...(19): siRNA sense strand
ggacaccccuaaacuggau

SEQ ID NO: 243677 - RNA, 19 nt, Homo sapiens
  misc_RNA (1)...(19): siRNA sense strand
gaacccacagaucacacaa

SEQ ID NO: 243678 - RNA, 19 nt, Homo sapiens
  misc_RNA (1)...(19): siRNA sense strand
gugucaagcucaccaacag

SEQ ID NO: 243679 - RNA, 19 nt, Homo sapiens
  misc_RNA (1)...(19): siRNA sense strand
gaacggcagaaacuguaag

SEQ ID NO: 243680 - RNA, 19 nt, Homo sapiens
  misc_RNA (1)...(19): siRNA sense strand
ugcggcagccugugucuuu

SEQ ID NO: 243681 - RNA, 19 nt, Homo sapiens
  misc_RNA (1)...(19): siRNA sense strand
cagaucacacaacugaaga

SEQ ID NO: 243682 - RNA, 19 nt, Homo sapiens
  misc_RNA (1)...(19): siRNA sense strand
ccacagaucacacaacuga

SEQ ID NO: 243683 - RNA, 19 nt, Homo sapiens
  misc_RNA (1)...(19): siRNA sense strand
ggaaggaguucagcucugu

SEQ ID NO: 243684 - RNA, 19 nt, Homo sapiens
  misc_RNA (1)...(19): siRNA sense strand
gagaacggcagaaacugua

SEQ ID NO: 243685 - RNA, 19 nt, Homo sapiens
  misc_RNA (1)...(19): siRNA sense strand
ucacacaacugaagauugc

SEQ ID NO: 243686 - RNA, 19 nt, Homo sapiens
  misc_RNA (1)...(19): siRNA sense strand
ggagaacggcagaaacugu

SEQ ID NO: 243687 - RNA, 19 nt, Homo sapiens
  misc_RNA (1)...(19): siRNA sense strand
gaucacacaacugaagauu

SEQ ID NO: 243688 - RNA, 19 nt, Homo sapiens
  misc_RNA (1)...(19): siRNA sense strand
uaccagaacccacagauca

SEQ ID NO: 243689 - RNA, 19 nt, Homo sapiens
  misc_RNA (1)...(19): siRNA sense strand
ccaaaggcuuccgggagaa

SEQ ID NO: 243690 - RNA, 19 nt, Homo sapiens
  misc_RNA (1)...(19): siRNA sense strand
guaccauccacgagaauug

SEQ ID NO: 243691 - RNA, 19 nt, Homo sapiens
  misc_RNA (1)...(19): siRNA sense strand
cuacuuguuucuucuggau

SEQ ID NO: 243692 - RNA, 19 nt, Homo sapiens
  misc_RNA (1)...(19): siRNA sense strand
gcccgcuacuuguuucuuc

SEQ ID NO: 243693 - RNA, 19 nt, Homo sapiens
  misc_RNA (1)...(19): siRNA sense strand
gccugaccgugucuacauu

SEQ ID NO: 243694 - RNA, 19 nt, Homo sapiens
  misc_RNA (1)...(19): siRNA sense strand
ggacaccccuaaacuggau

SEQ ID NO: 243695 - RNA, 19 nt, Homo sapiens
  misc_RNA (1)...(19): siRNA sense strand
gaacccacagaucacacaa

SEQ ID NO: 243696 - RNA, 19 nt, Homo sapiens
  misc_RNA (1)...(19): siRNA sense strand
gugucaagcucaccaacag

SEQ ID NO: 243697 - RNA, 19 nt, Homo sapiens
  misc_RNA (1)...(19): siRNA sense strand
gaacggcagaaacuguaag

SEQ ID NO: 243698 - RNA, 19 nt, Homo sapiens
  misc_RNA (1)...(19): siRNA sense strand
ugcggcagccugugucuuu

SEQ ID NO: 243699 - RNA, 19 nt, Homo sapiens
  misc_RNA (1)...(19): siRNA sense strand
cagaucacacaacugaaga

SEQ ID NO: 243700 - RNA, 19 nt, Homo sapiens
  misc_RNA (1)...(19): siRNA sense strand
gaucaaagauuagccguuu

SEQ ID NO: 243701 - RNA, 19 nt, Homo sapiens
  misc_RNA (1)...(19): siRNA sense strand
gaagagcgcuacaaaugug

SEQ ID NO: 243702 - RNA, 19 nt, Homo sapiens
  misc_RNA (1)...(19): siRNA sense strand
ggucacaccugucccuaua

SEQ ID NO: 243703 - RNA, 19 nt, Homo sapiens
  misc_RNA (1)...(19): siRNA sense strand
caagaacgccuacauuaaa

SEQ ID NO: 243704 - RNA, 19 nt, Homo sapiens
  misc_RNA (1)...(19): siRNA sense strand
gagcaagacuguccuuuua

SEQ ID NO: 243705 - RNA, 19 nt, Homo sapiens
  misc_RNA (1)...(19): siRNA sense strand
gugcgaagauuauucuaaa

SEQ ID NO: 243706 - RNA, 19 nt, Homo sapiens
  misc_RNA (1)...(19): siRNA sense strand
caugauacccacauuaaua

SEQ ID NO: 243707 - RNA, 19 nt, Homo sapiens
  misc_RNA (1)...(19): siRNA sense strand
ggaggaaccugcagcaaca

SEQ ID NO: 243708 - RNA, 19 nt, Homo sapiens
  misc_RNA (1)...(19): siRNA sense strand
gccaagaacgccuacauua

SEQ ID NO: 243709 - RNA, 19 nt, Homo sapiens
  misc_RNA (1)...(19): siRNA sense strand
gcagcuagcagaaacuaua

SEQ ID NO: 243710 - RNA, 19 nt, Homo sapiens
  misc_RNA (1)...(19): siRNA sense strand
auaaagaggucaucaaauc

SEQ ID NO: 243711 - RNA, 19 nt, Homo sapiens
  misc_RNA (1)...(19): siRNA sense strand
gcuagaagcucaagugcau

SEQ ID NO: 243712 - RNA, 19 nt, Homo sapiens
  misc_RNA (1)...(19): siRNA sense strand
uaacugaccuggaggaucu

SEQ ID NO: 243713 - RNA, 19 nt, Homo sapiens
  misc_RNA (1)...(19): siRNA sense strand
ggugacagauuacaagaug

SEQ ID NO: 243714 - RNA, 19 nt, Homo sapiens
  misc_RNA (1)...(19): siRNA sense strand
caucaaaucucaggagguu

SEQ ID NO: 243715 - RNA, 19 nt, Homo sapiens
  misc_RNA (1)...(19): siRNA sense strand
gcaaugcuccuggauguaa

SEQ ID NO: 243716 - RNA, 19 nt, Homo sapiens
  misc_RNA (1)...(19): siRNA sense strand
ccaagaacgccuacauuaa

SEQ ID NO: 243717 - RNA, 19 nt, Homo sapiens
  misc_RNA (1)...(19): siRNA sense strand
gaggguacuugcuauaaug

SEQ ID NO: 243718 - RNA, 19 nt, Homo sapiens
  misc_RNA (1)...(19): siRNA sense strand
ccaauuagaagaacagauu

SEQ ID NO: 243719 - RNA, 19 nt, Homo sapiens
  misc_RNA (1)...(19): siRNA sense strand
gcacaugcguuugguuuua

SEQ ID NO: 243720 - RNA, 19 nt, Homo sapiens
  misc_RNA (1)...(19): siRNA sense strand
uuuggaaggugacagauua

SEQ ID NO: 243721 - RNA, 19 nt, Homo sapiens
  misc_RNA (1)...(19): siRNA sense strand
ggaggguacuugcuauaau

SEQ ID NO: 243722 - RNA, 19 nt, Homo sapiens
  misc_RNA (1)...(19): siRNA sense strand
cagaagagcauaaagguau

SEQ ID NO: 243723 - RNA, 19 nt, Homo sapiens
  misc_RNA (1)...(19): siRNA sense strand
caacaauugugcgaagauu

SEQ ID NO: 243724 - RNA, 19 nt, Homo sapiens
  misc_RNA (1)...(19): siRNA sense strand
aaacugagguagaugaaca

SEQ ID NO: 243725 - RNA, 19 nt, Homo sapiens
  misc_RNA (1)...(19): siRNA sense strand
gagcacaugcguuugguuu

SEQ ID NO: 243726 - RNA, 19 nt, Homo sapiens
  misc_RNA (1)...(19): siRNA sense strand
ggaagagcgcuacaaaugu

SEQ ID NO: 243727 - RNA, 19 nt, Homo sapiens
  misc_RNA (1)...(19): siRNA sense strand
cccaauagcagcagcuuua

SEQ ID NO: 243728 - RNA, 19 nt, Homo sapiens
  misc_RNA (1)...(19): siRNA sense strand
aaacaugauacccacauua

SEQ ID NO: 243729 - RNA, 19 nt, Homo sapiens
  misc_RNA (1)...(19): siRNA sense strand
guccucaacuuauauguau

SEQ ID NO: 243730 - RNA, 19 nt, Homo sapiens
  misc_RNA (1)...(19): siRNA sense strand
aaacuuguguccugaauac

SEQ ID NO: 243731 - RNA, 19 nt, Homo sapiens
  misc_RNA (1)...(19): siRNA sense strand
caaacaugauacccacauu

SEQ ID NO: 243732 - RNA, 19 nt, Homo sapiens
  misc_RNA (1)...(19): siRNA sense strand
ucaagcaguuugcacaguu

SEQ ID NO: 243733 - RNA, 19 nt, Homo sapiens
  misc_RNA (1)...(19): siRNA sense strand
ggacuuugagcccaguaua

SEQ ID NO: 243734 - RNA, 19 nt, Homo sapiens
  misc_RNA (1)...(19): siRNA sense strand
auggaaagcucauuuggaa

SEQ ID NO: 243735 - RNA, 19 nt, Homo sapiens
  misc_RNA (1)...(19): siRNA sense strand
gcugugcuguaacggauaa

SEQ ID NO: 243736 - RNA, 19 nt, Homo sapiens
  misc_RNA (1)...(19): siRNA sense strand
gauggaagcaguugauaca

SEQ ID NO: 243737 - RNA, 19 nt, Homo sapiens
  misc_RNA (1)...(19): siRNA sense strand
gaagcuuccucccaaacau

SEQ ID NO: 243738 - RNA, 19 nt, Homo sapiens
  misc_RNA (1)...(19): siRNA sense strand
gaauguccaauuagaagaa

SEQ ID NO: 243739 - RNA, 19 nt, Homo sapiens
  misc_RNA (1)...(19): siRNA sense strand
uggaagagcgcuacaaaug

SEQ ID NO: 243740 - RNA, 19 nt, Homo sapiens
  misc_RNA (1)...(19): siRNA sense strand
gguacuugcuauaauggaa

SEQ ID NO: 243741 - RNA, 19 nt, Homo sapiens
  misc_RNA (1)...(19): siRNA sense strand
acaagagccuagaacagaa

SEQ ID NO: 243742 - RNA, 19 nt, Homo sapiens
  misc_RNA (1)...(19): siRNA sense strand
ggauguaaugccaagguua

SEQ ID NO: 243743 - RNA, 19 nt, Homo sapiens
  misc_RNA (1)...(19): siRNA sense strand
gauaaagaggucaucaaau

SEQ ID NO: 243744 - RNA, 19 nt, Homo sapiens
  misc_RNA (1)...(19): siRNA sense strand
gaaggugacagauuacaag

SEQ ID NO: 243745 - RNA, 19 nt, Homo sapiens
  misc_RNA (1)...(19): siRNA sense strand
caguauagaguaccaguuu

SEQ ID NO: 243746 - RNA, 19 nt, Homo sapiens
  misc_RNA (1)...(19): siRNA sense strand
gcagcaacaugagcauuca

SEQ ID NO: 243747 - RNA, 19 nt, Homo sapiens
  misc_RNA (1)...(19): siRNA sense strand
gauguaaugccaagguuau

SEQ ID NO: 243748 - RNA, 19 nt, Homo sapiens
  misc_RNA (1)...(19): siRNA sense strand
ccugagaccuuugauggaa

SEQ ID NO: 243749 - RNA, 19 nt, Homo sapiens
  misc_RNA (1)...(19): siRNA sense strand
acaugagcauucagccuua

SEQ ID NO: 243750 - RNA, 19 nt, Homo sapiens
  misc_RNA (1)...(19): siRNA sense strand
cacuauggcugugcuguaa

SEQ ID NO: 243751 - RNA, 19 nt, Homo sapiens
  misc_RNA (1)...(19): siRNA sense strand
ucaucaaucuacagaauca

SEQ ID NO: 243752 - RNA, 19 nt, Homo sapiens
  misc_RNA (1)...(19): siRNA sense strand
gguaugcccugugguuuca

SEQ ID NO: 243753 - RNA, 19 nt, Homo sapiens
  misc_RNA (1)...(19): siRNA sense strand
aagcucaagugcaucaauu

SEQ ID NO: 243754 - RNA, 19 nt, Homo sapiens
  misc_RNA (1)...(19): siRNA sense strand
gcaguuugcacaguuguuu

SEQ ID NO: 243755 - RNA, 19 nt, Homo sapiens
  misc_RNA (1)...(19): siRNA sense strand
gugccaaucugcccuguag

SEQ ID NO: 243756 - RNA, 19 nt, Homo sapiens
  misc_RNA (1)...(19): siRNA sense strand
cagauuacaagaugaagaa

SEQ ID NO: 243757 - RNA, 19 nt, Homo sapiens
  misc_RNA (1)...(19): siRNA sense strand
agaggaaacuaacaaacau

SEQ ID NO: 243758 - RNA, 19 nt, Homo sapiens
  misc_RNA (1)...(19): siRNA sense strand
caagcaguuugcacaguug

SEQ ID NO: 243759 - RNA, 19 nt, Homo sapiens
  misc_RNA (1)...(19): siRNA sense strand
auaaagcacagcugaguaa

SEQ ID NO: 243760 - RNA, 19 nt, Homo sapiens
  misc_RNA (1)...(19): siRNA sense strand
ggucaugcgaggagaguuu

SEQ ID NO: 243761 - RNA, 19 nt, Homo sapiens
  misc_RNA (1)...(19): siRNA sense strand
gcuagagcauaccugaaug

SEQ ID NO: 243762 - RNA, 19 nt, Homo sapiens
  misc_RNA (1)...(19): siRNA sense strand
gugcaguguucuaaugaga

SEQ ID NO: 243763 - RNA, 19 nt, Homo sapiens
  misc_RNA (1)...(19): siRNA sense strand
gaacgccuacauuaaagau

SEQ ID NO: 243764 - RNA, 19 nt, Homo sapiens
  misc_RNA (1)...(19): siRNA sense strand
ggaaggugacagauuacaa

SEQ ID NO: 243765 - RNA, 19 nt, Homo sapiens
  misc_RNA (1)...(19): siRNA sense strand
cacaagagccuagaacaga

SEQ ID NO: 243766 - RNA, 19 nt, Homo sapiens
  misc_RNA (1)...(19): siRNA sense strand
gaugaacaccuggcuguau

SEQ ID NO: 243767 - RNA, 19 nt, Homo sapiens
  misc_RNA (1)...(19): siRNA sense strand
agauaaagaggucaucaaa

SEQ ID NO: 243768 - RNA, 19 nt, Homo sapiens
  misc_RNA (1)...(19): siRNA sense strand
acaccugucccuauacuuu

SEQ ID NO: 243769 - RNA, 19 nt, Homo sapiens
  misc_RNA (1)...(19): siRNA sense strand
gaagagagaggcgguggau

SEQ ID NO: 243770 - RNA, 19 nt, Homo sapiens
  misc_RNA (1)...(19): siRNA sense strand
gcucaagugcaucaauuau

SEQ ID NO: 243771 - RNA, 19 nt, Homo sapiens
  misc_RNA (1)...(19): siRNA sense strand
gaagaggaaacuaacaaac

SEQ ID NO: 243772 - RNA, 19 nt, Homo sapiens
  misc_RNA (1)...(19): siRNA sense strand
ugagagaauuaaacacagu

SEQ ID NO: 243773 - RNA, 19 nt, Homo sapiens
  misc_RNA (1)...(19): siRNA sense strand
acgccuacauuaaagauga

SEQ ID NO: 243774 - RNA, 19 nt, Homo sapiens
  misc_RNA (1)...(19): siRNA sense strand
ugacagauuacaagaugaa

SEQ ID NO: 243775 - RNA, 19 nt, Homo sapiens
  misc_RNA (1)...(19): siRNA sense strand
cauaaagcacagcugagua

SEQ ID NO: 243776 - RNA, 19 nt, Homo sapiens
  misc_RNA (1)...(19): siRNA sense strand
gauacccacauuaauauuc

SEQ ID NO: 243777 - RNA, 19 nt, Homo sapiens
  misc_RNA (1)...(19): siRNA sense strand
ccauuuccuuggacuuuga

SEQ ID NO: 243778 - RNA, 19 nt, Homo sapiens
  misc_RNA (1)...(19): siRNA sense strand
agucaucaaucuacagaau

SEQ ID NO: 243779 - RNA, 19 nt, Homo sapiens
  misc_RNA (1)...(19): siRNA sense strand
gcuggaggguacuugcuau

SEQ ID NO: 243780 - RNA, 19 nt, Homo sapiens
  misc_RNA (1)...(19): siRNA sense strand
gagccuagaacagaaagaa

SEQ ID NO: 243781 - RNA, 19 nt, Homo sapiens
  misc_RNA (1)...(19): siRNA sense strand
gaaaacuuguguccugaau

SEQ ID NO: 243782 - RNA, 19 nt, Homo sapiens
  misc_RNA (1)...(19): siRNA sense strand
gaugacacucuguucuuga

SEQ ID NO: 243783 - RNA, 19 nt, Homo sapiens
  misc_RNA (1)...(19): siRNA sense strand
caauagcagcagcuuuaaa

SEQ ID NO: 243784 - RNA, 19 nt, Homo sapiens
  misc_RNA (1)...(19): siRNA sense strand
ucagaagagcauaaaggua

SEQ ID NO: 243785 - RNA, 19 nt, Homo sapiens
  misc_RNA (1)...(19): siRNA sense strand
uagaagaggaaacuaacaa

SEQ ID NO: 243786 - RNA, 19 nt, Homo sapiens
  misc_RNA (1)...(19): siRNA sense strand
aaaaggaguucaagcaguu

SEQ ID NO: 243787 - RNA, 19 nt, Homo sapiens
  misc_RNA (1)...(19): siRNA sense strand
caagagccuagaacagaaa

SEQ ID NO: 243788 - RNA, 19 nt, Homo sapiens
  misc_RNA (1)...(19): siRNA sense strand
ccugugcaguguucuaaug

SEQ ID NO: 243789 - RNA, 19 nt, Homo sapiens
  misc_RNA (1)...(19): siRNA sense strand
gaaagcucauuuggaaggu

SEQ ID NO: 243790 - RNA, 19 nt, Homo sapiens
  misc_RNA (1)...(19): siRNA sense strand
aacaugauacccacauuaa

SEQ ID NO: 243791 - RNA, 19 nt, Homo sapiens
  misc_RNA (1)...(19): siRNA sense strand
uaaacacagugccaaucug

SEQ ID NO: 243792 - RNA, 19 nt, Homo sapiens
  misc_RNA (1)...(19): siRNA sense strand
gcagaaacuauaaagaaac

SEQ ID NO: 243793 - RNA, 19 nt, Homo sapiens
  misc_RNA (1)...(19): siRNA sense strand
gaaaagaauguccaauuag

SEQ ID NO: 243794 - RNA, 19 nt, Homo sapiens
  misc_RNA (1)...(19): siRNA sense strand
ggaaccugcagcaacauga

SEQ ID NO: 243795 - RNA, 19 nt, Homo sapiens
  misc_RNA (1)...(19): siRNA sense strand
acaauugugcgaagauuau

SEQ ID NO: 243796 - RNA, 19 nt, Homo sapiens
  misc_RNA (1)...(19): siRNA sense strand
aauuugaccugagaccuuu

SEQ ID NO: 243797 - RNA, 19 nt, Homo sapiens
  misc_RNA (1)...(19): siRNA sense strand
cagcuagcagaaacuauaa

SEQ ID NO: 243798 - RNA, 19 nt, Homo sapiens
  misc_RNA (1)...(19): siRNA sense strand
aagaacgccuacauuaaag

SEQ ID NO: 243799 - RNA, 19 nt, Homo sapiens
  misc_RNA (1)...(19): siRNA sense strand
gacacucuguucuugaaag

SEQ ID NO: 243800 - RNA, 19 nt, Homo sapiens
  misc_RNA (1)...(19): siRNA sense strand
gaucaaagauuagccguuu

SEQ ID NO: 243801 - RNA, 19 nt, Homo sapiens
  misc_RNA (1)...(19): siRNA sense strand
gaagagcgcuacaaaugug

SEQ ID NO: 243802 - RNA, 19 nt, Homo sapiens
  misc_RNA (1)...(19): siRNA sense strand
ggucacaccugucccuaua

SEQ ID NO: 243803 - RNA, 19 nt, Homo sapiens
  misc_RNA (1)...(19): siRNA sense strand
caagaacgccuacauuaaa

SEQ ID NO: 243804 - RNA, 19 nt, Homo sapiens
  misc_RNA (1)...(19): siRNA sense strand
gagcaagacuguccuuuua

SEQ ID NO: 243805 - RNA, 19 nt, Homo sapiens
  misc_RNA (1)...(19): siRNA sense strand
gugcgaagauuauucuaaa

SEQ ID NO: 243806 - RNA, 19 nt, Homo sapiens
  misc_RNA (1)...(19): siRNA sense strand
caugauacccacauuaaua

SEQ ID NO: 243807 - RNA, 19 nt, Homo sapiens
  misc_RNA (1)...(19): siRNA sense strand
ggaggaaccugcagcaaca

SEQ ID NO: 243808 - RNA, 19 nt, Homo sapiens
  misc_RNA (1)...(19): siRNA sense strand
gccaagaacgccuacauua

SEQ ID NO: 243809 - RNA, 19 nt, Homo sapiens
  misc_RNA (1)...(19): siRNA sense strand
gcagcuagcagaaacuaua

SEQ ID NO: 243810 - RNA, 19 nt, Homo sapiens
  misc_RNA (1)...(19): siRNA sense strand
auaaagaggucaucaaauc

SEQ ID NO: 243811 - RNA, 19 nt, Homo sapiens
  misc_RNA (1)...(19): siRNA sense strand
gcuagaagcucaagugcau

SEQ ID NO: 243812 - RNA, 19 nt, Homo sapiens
  misc_RNA (1)...(19): siRNA sense strand
uaacugaccuggaggaucu

SEQ ID NO: 243813 - RNA, 19 nt, Homo sapiens
  misc_RNA (1)...(19): siRNA sense strand
ggugacagauuacaagaug

SEQ ID NO: 243814 - RNA, 19 nt, Homo sapiens
  misc_RNA (1)...(19): siRNA sense strand
caucaaaucucaggagguu

SEQ ID NO: 243815 - RNA, 19 nt, Homo sapiens
  misc_RNA (1)...(19): siRNA sense strand
gcaaugcuccuggauguaa

SEQ ID NO: 243816 - RNA, 19 nt, Homo sapiens
  misc_RNA (1)...(19): siRNA sense strand
ccaagaacgccuacauuaa

SEQ ID NO: 243817 - RNA, 19 nt, Homo sapiens
  misc_RNA (1)...(19): siRNA sense strand
gaggguacuugcuauaaug

SEQ ID NO: 243818 - RNA, 19 nt, Homo sapiens
  misc_RNA (1)...(19): siRNA sense strand
ccaauuagaagaacagauu

SEQ ID NO: 243819 - RNA, 19 nt, Homo sapiens
  misc_RNA (1)...(19): siRNA sense strand
gcacaugcguuugguuuua

SEQ ID NO: 243820 - RNA, 19 nt, Homo sapiens
  misc_RNA (1)...(19): siRNA sense strand
uuuggaaggugacagauua

SEQ ID NO: 243821 - RNA, 19 nt, Homo sapiens
  misc_RNA (1)...(19): siRNA sense strand
ggaggguacuugcuauaau

SEQ ID NO: 243822 - RNA, 19 nt, Homo sapiens
  misc_RNA (1)...(19): siRNA sense strand
cagaagagcauaaagguau

SEQ ID NO: 243823 - RNA, 19 nt, Homo sapiens
  misc_RNA (1)...(19): siRNA sense strand
caacaauugugcgaagauu

SEQ ID NO: 243824 - RNA, 19 nt, Homo sapiens
  misc_RNA (1)...(19): siRNA sense strand
aaacugagguagaugaaca

SEQ ID NO: 243825 - RNA, 19 nt, Homo sapiens
  misc_RNA (1)...(19): siRNA sense strand
gagcacaugcguuugguuu

SEQ ID NO: 243826 - RNA, 19 nt, Homo sapiens
  misc_RNA (1)...(19): siRNA sense strand
ggaagagcgcuacaaaugu

SEQ ID NO: 243827 - RNA, 19 nt, Homo sapiens
  misc_RNA (1)...(19): siRNA sense strand
cccaauagcagcagcuuua

SEQ ID NO: 243828 - RNA, 19 nt, Homo sapiens
  misc_RNA (1)...(19): siRNA sense strand
aaacaugauacccacauua

SEQ ID NO: 243829 - RNA, 19 nt, Homo sapiens
  misc_RNA (1)...(19): siRNA sense strand
guccucaacuuauauguau

SEQ ID NO: 243830 - RNA, 19 nt, Homo sapiens
  misc_RNA (1)...(19): siRNA sense strand
aaacuuguguccugaauac

SEQ ID NO: 243831 - RNA, 19 nt, Homo sapiens
  misc_RNA (1)...(19): siRNA sense strand
caaacaugauacccacauu

SEQ ID NO: 243832 - RNA, 19 nt, Homo sapiens
  misc_RNA (1)...(19): siRNA sense strand
ucaagcaguuugcacaguu

SEQ ID NO: 243833 - RNA, 19 nt, Homo sapiens
  misc_RNA (1)...(19): siRNA sense strand
ggacuuugagcccaguaua

SEQ ID NO: 243834 - RNA, 19 nt, Homo sapiens
  misc_RNA (1)...(19): siRNA sense strand
auggaaagcucauuuggaa

SEQ ID NO: 243835 - RNA, 19 nt, Homo sapiens
  misc_RNA (1)...(19): siRNA sense strand
gcugugcuguaacggauaa

SEQ ID NO: 243836 - RNA, 19 nt, Homo sapiens
  misc_RNA (1)...(19): siRNA sense strand
gauggaagcaguugauaca

SEQ ID NO: 243837 - RNA, 19 nt, Homo sapiens
  misc_RNA (1)...(19): siRNA sense strand
gaagcuuccucccaaacau

SEQ ID NO: 243838 - RNA, 19 nt, Homo sapiens
  misc_RNA (1)...(19): siRNA sense strand
gaauguccaauuagaagaa

SEQ ID NO: 243839 - RNA, 19 nt, Homo sapiens
  misc_RNA (1)...(19): siRNA sense strand
uggaagagcgcuacaaaug

SEQ ID NO: 243840 - RNA, 19 nt, Homo sapiens
  misc_RNA (1)...(19): siRNA sense strand
gguacuugcuauaauggaa

SEQ ID NO: 243841 - RNA, 19 nt, Homo sapiens
  misc_RNA (1)...(19): siRNA sense strand
acaagagccuagaacagaa

SEQ ID NO: 243842 - RNA, 19 nt, Homo sapiens
  misc_RNA (1)...(19): siRNA sense strand
ggauguaaugccaagguua

SEQ ID NO: 243843 - RNA, 19 nt, Homo sapiens
  misc_RNA (1)...(19): siRNA sense strand
gauaaagaggucaucaaau

SEQ ID NO: 243844 - RNA, 19 nt, Homo sapiens
  misc_RNA (1)...(19): siRNA sense strand
gaaggugacagauuacaag

SEQ ID NO: 243845 - RNA, 19 nt, Homo sapiens
  misc_RNA (1)...(19): siRNA sense strand
caguauagaguaccaguuu

SEQ ID NO: 243846 - RNA, 19 nt, Homo sapiens
  misc_RNA (1)...(19): siRNA sense strand
gcagcaacaugagcauuca

SEQ ID NO: 243847 - RNA, 19 nt, Homo sapiens
  misc_RNA (1)...(19): siRNA sense strand
gauguaaugccaagguuau

SEQ ID NO: 243848 - RNA, 19 nt, Homo sapiens
  misc_RNA (1)...(19): siRNA sense strand
ccugagaccuuugauggaa

SEQ ID NO: 243849 - RNA, 19 nt, Homo sapiens
  misc_RNA (1)...(19): siRNA sense strand
acaugagcauucagccuua

SEQ ID NO: 243850 - RNA, 19 nt, Homo sapiens
  misc_RNA (1)...(19): siRNA sense strand
cacuauggcugugcuguaa

SEQ ID NO: 243851 - RNA, 19 nt, Homo sapiens
  misc_RNA (1)...(19): siRNA sense strand
ucaucaaucuacagaauca

SEQ ID NO: 243852 - RNA, 19 nt, Homo sapiens
  misc_RNA (1)...(19): siRNA sense strand
gguaugcccugugguuuca

SEQ ID NO: 243853 - RNA, 19 nt, Homo sapiens
  misc_RNA (1)...(19): siRNA sense strand
aagcucaagugcaucaauu

SEQ ID NO: 243854 - RNA, 19 nt, Homo sapiens
  misc_RNA (1)...(19): siRNA sense strand
gcaguuugcacaguuguuu

SEQ ID NO: 243855 - RNA, 19 nt, Homo sapiens
  misc_RNA (1)...(19): siRNA sense strand
gugccaaucugcccuguag

SEQ ID NO: 243856 - RNA, 19 nt, Homo sapiens
  misc_RNA (1)...(19): siRNA sense strand
cagauuacaagaugaagaa

SEQ ID NO: 243857 - RNA, 19 nt, Homo sapiens
  misc_RNA (1)...(19): siRNA sense strand
agaggaaacuaacaaacau

SEQ ID NO: 243858 - RNA, 19 nt, Homo sapiens
  misc_RNA (1)...(19): siRNA sense strand
caagcaguuugcacaguug

SEQ ID NO: 243859 - RNA, 19 nt, Homo sapiens
  misc_RNA (1)...(19): siRNA sense strand
auaaagcacagcugaguaa

SEQ ID NO: 243860 - RNA, 19 nt, Homo sapiens
  misc_RNA (1)...(19): siRNA sense strand
ggucaugcgaggagaguuu

SEQ ID NO: 243861 - RNA, 19 nt, Homo sapiens
  misc_RNA (1)...(19): siRNA sense strand
gcuagagcauaccugaaug

SEQ ID NO: 243862 - RNA, 19 nt, Homo sapiens
  misc_RNA (1)...(19): siRNA sense strand
gugcaguguucuaaugaga

SEQ ID NO: 243863 - RNA, 19 nt, Homo sapiens
  misc_RNA (1)...(19): siRNA sense strand
gaacgccuacauuaaagau

SEQ ID NO: 243864 - RNA, 19 nt, Homo sapiens
  misc_RNA (1)...(19): siRNA sense strand
ggaaggugacagauuacaa

SEQ ID NO: 243865 - RNA, 19 nt, Homo sapiens
  misc_RNA (1)...(19): siRNA sense strand
cacaagagccuagaacaga

SEQ ID NO: 243866 - RNA, 19 nt, Homo sapiens
  misc_RNA (1)...(19): siRNA sense strand
gaugaacaccuggcuguau

SEQ ID NO: 243867 - RNA, 19 nt, Homo sapiens
  misc_RNA (1)...(19): siRNA sense strand
agauaaagaggucaucaaa

SEQ ID NO: 243868 - RNA, 19 nt, Homo sapiens
  misc_RNA (1)...(19): siRNA sense strand
acaccugucccuauacuuu

SEQ ID NO: 243869 - RNA, 19 nt, Homo sapiens
  misc_RNA (1)...(19): siRNA sense strand
gaagagagaggcgguggau

SEQ ID NO: 243870 - RNA, 19 nt, Homo sapiens
  misc_RNA (1)...(19): siRNA sense strand
gcucaagugcaucaauuau

SEQ ID NO: 243871 - RNA, 19 nt, Homo sapiens
  misc_RNA (1)...(19): siRNA sense strand
gaagaggaaacuaacaaac

SEQ ID NO: 243872 - RNA, 19 nt, Homo sapiens
  misc_RNA (1)...(19): siRNA sense strand
ugagagaauuaaacacagu

SEQ ID NO: 243873 - RNA, 19 nt, Homo sapiens
  misc_RNA (1)...(19): siRNA sense strand
acgccuacauuaaagauga

SEQ ID NO: 243874 - RNA, 19 nt, Homo sapiens
  misc_RNA (1)...(19): siRNA sense strand
ugacagauuacaagaugaa

SEQ ID NO: 243875 - RNA, 19 nt, Homo sapiens
  misc_RNA (1)...(19): siRNA sense strand
cauaaagcacagcugagua

SEQ ID NO: 243876 - RNA, 19 nt, Homo sapiens
  misc_RNA (1)...(19): siRNA sense strand
gauacccacauuaauauuc

SEQ ID NO: 243877 - RNA, 19 nt, Homo sapiens
  misc_RNA (1)...(19): siRNA sense strand
ccauuuccuuggacuuuga

SEQ ID NO: 243878 - RNA, 19 nt, Homo sapiens
  misc_RNA (1)...(19): siRNA sense strand
agucaucaaucuacagaau

SEQ ID NO: 243879 - RNA, 19 nt, Homo sapiens
  misc_RNA (1)...(19): siRNA sense strand
gcuggaggguacuugcuau

SEQ ID NO: 243880 - RNA, 19 nt, Homo sapiens
  misc_RNA (1)...(19): siRNA sense strand
gagccuagaacagaaagaa

SEQ ID NO: 243881 - RNA, 19 nt, Homo sapiens
  misc_RNA (1)...(19): siRNA sense strand
gaaaacuuguguccugaau

SEQ ID NO: 243882 - RNA, 19 nt, Homo sapiens
  misc_RNA (1)...(19): siRNA sense strand
gaugacacucuguucuuga

SEQ ID NO: 243883 - RNA, 19 nt, Homo sapiens
  misc_RNA (1)...(19): siRNA sense strand
caauagcagcagcuuuaaa

SEQ ID NO: 243884 - RNA, 19 nt, Homo sapiens
  misc_RNA (1)...(19): siRNA sense strand
ucagaagagcauaaaggua

SEQ ID NO: 243885 - RNA, 19 nt, Homo sapiens
  misc_RNA (1)...(19): siRNA sense strand
uagaagaggaaacuaacaa

SEQ ID NO: 243886 - RNA, 19 nt, Homo sapiens
  misc_RNA (1)...(19): siRNA sense strand
aaaaggaguucaagcaguu

SEQ ID NO: 243887 - RNA, 19 nt, Homo sapiens
  misc_RNA (1)...(19): siRNA sense strand
caagagccuagaacagaaa

SEQ ID NO: 243888 - RNA, 19 nt, Homo sapiens
  misc_RNA (1)...(19): siRNA sense strand
ccugugcaguguucuaaug

SEQ ID NO: 243889 - RNA, 19 nt, Homo sapiens
  misc_RNA (1)...(19): siRNA sense strand
gaaagcucauuuggaaggu

SEQ ID NO: 243890 - RNA, 19 nt, Homo sapiens
  misc_RNA (1)...(19): siRNA sense strand
aacaugauacccacauuaa

SEQ ID NO: 243891 - RNA, 19 nt, Homo sapiens
  misc_RNA (1)...(19): siRNA sense strand
uaaacacagugccaaucug

SEQ ID NO: 243892 - RNA, 19 nt, Homo sapiens
  misc_RNA (1)...(19): siRNA sense strand
gcagaaacuauaaagaaac

SEQ ID NO: 243893 - RNA, 19 nt, Homo sapiens
  misc_RNA (1)...(19): siRNA sense strand
gaaaagaauguccaauuag

SEQ ID NO: 243894 - RNA, 19 nt, Homo sapiens
  misc_RNA (1)...(19): siRNA sense strand
ggaaccugcagcaacauga

SEQ ID NO: 243895 - RNA, 19 nt, Homo sapiens
  misc_RNA (1)...(19): siRNA sense strand
acaauugugcgaagauuau

SEQ ID NO: 243896 - RNA, 19 nt, Homo sapiens
  misc_RNA (1)...(19): siRNA sense strand
aauuugaccugagaccuuu

SEQ ID NO: 243897 - RNA, 19 nt, Homo sapiens
  misc_RNA (1)...(19): siRNA sense strand
cagcuagcagaaacuauaa

SEQ ID NO: 243898 - RNA, 19 nt, Homo sapiens
  misc_RNA (1)...(19): siRNA sense strand
aagaacgccuacauuaaag

SEQ ID NO: 243899 - RNA, 19 nt, Homo sapiens
  misc_RNA (1)...(19): siRNA sense strand
gacacucuguucuugaaag

SEQ ID NO: 243900 - RNA, 19 nt, Homo sapiens
  misc_RNA (1)...(19): siRNA sense strand
ggagaaaccuguugugauu

SEQ ID NO: 243901 - RNA, 19 nt, Homo sapiens
  misc_RNA (1)...(19): siRNA sense strand
ggacaaaguugcugaaauc

SEQ ID NO: 243902 - RNA, 19 nt, Homo sapiens
  misc_RNA (1)...(19): siRNA sense strand
gaacagaugccuaaucauu

SEQ ID NO: 243903 - RNA, 19 nt, Homo sapiens
  misc_RNA (1)...(19): siRNA sense strand
ggagacagguuucuuguga

SEQ ID NO: 243904 - RNA, 19 nt, Homo sapiens
  misc_RNA (1)...(19): siRNA sense strand
gagaacagaugccuaauca

SEQ ID NO: 243905 - RNA, 19 nt, Homo sapiens
  misc_RNA (1)...(19): siRNA sense strand
guucauaguuugagcguua

SEQ ID NO: 243906 - RNA, 19 nt, Homo sapiens
  misc_RNA (1)...(19): siRNA sense strand
caaaguugcugaaaucgaa

SEQ ID NO: 243907 - RNA, 19 nt, Homo sapiens
  misc_RNA (1)...(19): siRNA sense strand
cauuaaggaugacacauua

SEQ ID NO: 243908 - RNA, 19 nt, Homo sapiens
  misc_RNA (1)...(19): siRNA sense strand
gauaugauguagaguuuga

SEQ ID NO: 243909 - RNA, 19 nt, Homo sapiens
  misc_RNA (1)...(19): siRNA sense strand
caacugugcugcaucaaug

SEQ ID NO: 243910 - RNA, 19 nt, Homo sapiens
  misc_RNA (1)...(19): siRNA sense strand
gcagugcaauggaauuuau

SEQ ID NO: 243911 - RNA, 19 nt, Homo sapiens
  misc_RNA (1)...(19): siRNA sense strand
gggauaugauguagaguuu

SEQ ID NO: 243912 - RNA, 19 nt, Homo sapiens
  misc_RNA (1)...(19): siRNA sense strand
ggugaaauguccaaaugaa

SEQ ID NO: 243913 - RNA, 19 nt, Homo sapiens
  misc_RNA (1)...(19): siRNA sense strand
ggucacaaauguccaguug

SEQ ID NO: 243914 - RNA, 19 nt, Homo sapiens
  misc_RNA (1)...(19): siRNA sense strand
aaccagagcugcuugcuuu

SEQ ID NO: 243915 - RNA, 19 nt, Homo sapiens
  misc_RNA (1)...(19): siRNA sense strand
gaccagaacuguccuuugg

SEQ ID NO: 243916 - RNA, 19 nt, Homo sapiens
  misc_RNA (1)...(19): siRNA sense strand
gauaauggaugccaaacca

SEQ ID NO: 243917 - RNA, 19 nt, Homo sapiens
  misc_RNA (1)...(19): siRNA sense strand
ggaugcaggucacaaaugu

SEQ ID NO: 243918 - RNA, 19 nt, Homo sapiens
  misc_RNA (1)...(19): siRNA sense strand
gaaccucuccagcucauuu

SEQ ID NO: 243919 - RNA, 19 nt, Homo sapiens
  misc_RNA (1)...(19): siRNA sense strand
caaaugucaucugugaaua

SEQ ID NO: 243920 - RNA, 19 nt, Homo sapiens
  misc_RNA (1)...(19): siRNA sense strand
gcaaaugucaucugugaau

SEQ ID NO: 243921 - RNA, 19 nt, Homo sapiens
  misc_RNA (1)...(19): siRNA sense strand
ucucagagguccggaauuu

SEQ ID NO: 243922 - RNA, 19 nt, Homo sapiens
  misc_RNA (1)...(19): siRNA sense strand
ugagacaucuugaggauca

SEQ ID NO: 243923 - RNA, 19 nt, Homo sapiens
  misc_RNA (1)...(19): siRNA sense strand
uggcaaaugucaucuguga

SEQ ID NO: 243924 - RNA, 19 nt, Homo sapiens
  misc_RNA (1)...(19): siRNA sense strand
guuagagggucgccuugua

SEQ ID NO: 243925 - RNA, 19 nt, Homo sapiens
  misc_RNA (1)...(19): siRNA sense strand
ggccauagguucugcaaag

SEQ ID NO: 243926 - RNA, 19 nt, Homo sapiens
  misc_RNA (1)...(19): siRNA sense strand
ccaauuccaugcacauuca

SEQ ID NO: 243927 - RNA, 19 nt, Homo sapiens
  misc_RNA (1)...(19): siRNA sense strand
ugacaacugugcugcauca

SEQ ID NO: 243928 - RNA, 19 nt, Homo sapiens
  misc_RNA (1)...(19): siRNA sense strand
acaauacgccuuacaauuc

SEQ ID NO: 243929 - RNA, 19 nt, Homo sapiens
  misc_RNA (1)...(19): siRNA sense strand
gcgcuugcaccuucaguua

SEQ ID NO: 243930 - RNA, 19 nt, Homo sapiens
  misc_RNA (1)...(19): siRNA sense strand
ucagagaacagaugccuaa

SEQ ID NO: 243931 - RNA, 19 nt, Homo sapiens
  misc_RNA (1)...(19): siRNA sense strand
gcaaagccugcaucauaaa

SEQ ID NO: 243932 - RNA, 19 nt, Homo sapiens
  misc_RNA (1)...(19): siRNA sense strand
gaucuagacugcccuacag

SEQ ID NO: 243933 - RNA, 19 nt, Homo sapiens
  misc_RNA (1)...(19): siRNA sense strand
guauguaagugagcucaaa

SEQ ID NO: 243934 - RNA, 19 nt, Homo sapiens
  misc_RNA (1)...(19): siRNA sense strand
gcaaaaccacgaagagaua

SEQ ID NO: 243935 - RNA, 19 nt, Homo sapiens
  misc_RNA (1)...(19): siRNA sense strand
ugugaauacugcaauacua

SEQ ID NO: 243936 - RNA, 19 nt, Homo sapiens
  misc_RNA (1)...(19): siRNA sense strand
ccagggauaugauguagag

SEQ ID NO: 243937 - RNA, 19 nt, Homo sapiens
  misc_RNA (1)...(19): siRNA sense strand
caauacgccuuacaauucu

SEQ ID NO: 243938 - RNA, 19 nt, Homo sapiens
  misc_RNA (1)...(19): siRNA sense strand
gcucagcgcugugcaaacu

SEQ ID NO: 243939 - RNA, 19 nt, Homo sapiens
  misc_RNA (1)...(19): siRNA sense strand
gaagaggagaaaccuguug

SEQ ID NO: 243940 - RNA, 19 nt, Homo sapiens
  misc_RNA (1)...(19): siRNA sense strand
gcacgccaccuacaagaga

SEQ ID NO: 243941 - RNA, 19 nt, Homo sapiens
  misc_RNA (1)...(19): siRNA sense strand
gaacacccagucacacaug

SEQ ID NO: 243942 - RNA, 19 nt, Homo sapiens
  misc_RNA (1)...(19): siRNA sense strand
ucacaaauguccaguugac

SEQ ID NO: 243943 - RNA, 19 nt, Homo sapiens
  misc_RNA (1)...(19): siRNA sense strand
gaggagaaaccuguuguga

SEQ ID NO: 243944 - RNA, 19 nt, Homo sapiens
  misc_RNA (1)...(19): siRNA sense strand
ggaaagcaaguaugaaugc

SEQ ID NO: 243945 - RNA, 19 nt, Homo sapiens
  misc_RNA (1)...(19): siRNA sense strand
agaaaccuguugugauuca

SEQ ID NO: 243946 - RNA, 19 nt, Homo sapiens
  misc_RNA (1)...(19): siRNA sense strand
guaagugagcucaaacgaa

SEQ ID NO: 243947 - RNA, 19 nt, Homo sapiens
  misc_RNA (1)...(19): siRNA sense strand
uccgggagcugacugcuaa

SEQ ID NO: 243948 - RNA, 19 nt, Homo sapiens
  misc_RNA (1)...(19): siRNA sense strand
ugaguuugcucuuauggau

SEQ ID NO: 243949 - RNA, 19 nt, Homo sapiens
  misc_RNA (1)...(19): siRNA sense strand
ucaacuauuuccagacaau

SEQ ID NO: 243950 - RNA, 19 nt, Homo sapiens
  misc_RNA (1)...(19): siRNA sense strand
caaacgccaugcggccaua

SEQ ID NO: 243951 - RNA, 19 nt, Homo sapiens
  misc_RNA (1)...(19): siRNA sense strand
gcacaagauggaacugaga

SEQ ID NO: 243952 - RNA, 19 nt, Homo sapiens
  misc_RNA (1)...(19): siRNA sense strand
gaagauuggcaacuuugga

SEQ ID NO: 243953 - RNA, 19 nt, Homo sapiens
  misc_RNA (1)...(19): siRNA sense strand
cauugugaguuugcucuua

SEQ ID NO: 243954 - RNA, 19 nt, Homo sapiens
  misc_RNA (1)...(19): siRNA sense strand
gcaauacuauacucaucag

SEQ ID NO: 243955 - RNA, 19 nt, Homo sapiens
  misc_RNA (1)...(19): siRNA sense strand
uacaauacgccuuacaauu

SEQ ID NO: 243956 - RNA, 19 nt, Homo sapiens
  misc_RNA (1)...(19): siRNA sense strand
gcucauuuauggaggagau

SEQ ID NO: 243957 - RNA, 19 nt, Homo sapiens
  misc_RNA (1)...(19): siRNA sense strand
ggaugacacauuauuagug

SEQ ID NO: 243958 - RNA, 19 nt, Homo sapiens
  misc_RNA (1)...(19): siRNA sense strand
guacaauacgccuuacaau

SEQ ID NO: 243959 - RNA, 19 nt, Homo sapiens
  misc_RNA (1)...(19): siRNA sense strand
gcgcugugcaaacuauaua

SEQ ID NO: 243960 - RNA, 19 nt, Homo sapiens
  misc_RNA (1)...(19): siRNA sense strand
gagcucaaacgaaccauuc

SEQ ID NO: 243961 - RNA, 19 nt, Homo sapiens
  misc_RNA (1)...(19): siRNA sense strand
aaucaacuauuuccagaca

SEQ ID NO: 243962 - RNA, 19 nt, Homo sapiens
  misc_RNA (1)...(19): siRNA sense strand
auacuauacucaucagaga

SEQ ID NO: 243963 - RNA, 19 nt, Homo sapiens
  misc_RNA (1)...(19): siRNA sense strand
gaaaacagcuguggaucca

SEQ ID NO: 243964 - RNA, 19 nt, Homo sapiens
  misc_RNA (1)...(19): siRNA sense strand
cccaggcuguucauaguuu

SEQ ID NO: 243965 - RNA, 19 nt, Homo sapiens
  misc_RNA (1)...(19): siRNA sense strand
ccaugcacauucaguacuu

SEQ ID NO: 243966 - RNA, 19 nt, Homo sapiens
  misc_RNA (1)...(19): siRNA sense strand
ucauagcccuggauucuac

SEQ ID NO: 243967 - RNA, 19 nt, Homo sapiens
  misc_RNA (1)...(19): siRNA sense strand
ggagcugacugcuaaaaug

SEQ ID NO: 243968 - RNA, 19 nt, Homo sapiens
  misc_RNA (1)...(19): siRNA sense strand
gagaacacccagucacaca

SEQ ID NO: 243969 - RNA, 19 nt, Homo sapiens
  misc_RNA (1)...(19): siRNA sense strand
cagaguauguauguaagug

SEQ ID NO: 243970 - RNA, 19 nt, Homo sapiens
  misc_RNA (1)...(19): siRNA sense strand
caggguacaauacgccuua

SEQ ID NO: 243971 - RNA, 19 nt, Homo sapiens
  misc_RNA (1)...(19): siRNA sense strand
ggauccagccagucugaaa

SEQ ID NO: 243972 - RNA, 19 nt, Homo sapiens
  misc_RNA (1)...(19): siRNA sense strand
agacagguuucuugugaca

SEQ ID NO: 243973 - RNA, 19 nt, Homo sapiens
  misc_RNA (1)...(19): siRNA sense strand
gguacaauacgccuuacaa

SEQ ID NO: 243974 - RNA, 19 nt, Homo sapiens
  misc_RNA (1)...(19): siRNA sense strand
gaaauguccaaaugaaggu

SEQ ID NO: 243975 - RNA, 19 nt, Homo sapiens
  misc_RNA (1)...(19): siRNA sense strand
gcaaacuauauaucccuuu

SEQ ID NO: 243976 - RNA, 19 nt, Homo sapiens
  misc_RNA (1)...(19): siRNA sense strand
guaagacaagaccaucaaa

SEQ ID NO: 243977 - RNA, 19 nt, Homo sapiens
  misc_RNA (1)...(19): siRNA sense strand
ggcccaggcuguucauagu

SEQ ID NO: 243978 - RNA, 19 nt, Homo sapiens
  misc_RNA (1)...(19): siRNA sense strand
gugaauacugcaauacuau

SEQ ID NO: 243979 - RNA, 19 nt, Homo sapiens
  misc_RNA (1)...(19): siRNA sense strand
gcccuaagacaaagaacuu

SEQ ID NO: 243980 - RNA, 19 nt, Homo sapiens
  misc_RNA (1)...(19): siRNA sense strand
aaugaaauacugcuggaaa

SEQ ID NO: 243981 - RNA, 19 nt, Homo sapiens
  misc_RNA (1)...(19): siRNA sense strand
ucagcgcugugcaaacuau

SEQ ID NO: 243982 - RNA, 19 nt, Homo sapiens
  misc_RNA (1)...(19): siRNA sense strand
uaagacaagaccaucaaau

SEQ ID NO: 243983 - RNA, 19 nt, Homo sapiens
  misc_RNA (1)...(19): siRNA sense strand
gaaaagaugcagaggaauc

SEQ ID NO: 243984 - RNA, 19 nt, Homo sapiens
  misc_RNA (1)...(19): siRNA sense strand
gaauacugcaauacuauac

SEQ ID NO: 243985 - RNA, 19 nt, Homo sapiens
  misc_RNA (1)...(19): siRNA sense strand
uuagagggucgccuuguaa

SEQ ID NO: 243986 - RNA, 19 nt, Homo sapiens
  misc_RNA (1)...(19): siRNA sense strand
gaagcccuaagacaaagaa

SEQ ID NO: 243987 - RNA, 19 nt, Homo sapiens
  misc_RNA (1)...(19): siRNA sense strand
aagauaaagagauccauga

SEQ ID NO: 243988 - RNA, 19 nt, Homo sapiens
  misc_RNA (1)...(19): siRNA sense strand
gggaaccucuccagcucau

SEQ ID NO: 243989 - RNA, 19 nt, Homo sapiens
  misc_RNA (1)...(19): siRNA sense strand
cagcagugcaauggaauuu

SEQ ID NO: 243990 - RNA, 19 nt, Homo sapiens
  misc_RNA (1)...(19): siRNA sense strand
gaaccauucgaacccuuga

SEQ ID NO: 243991 - RNA, 19 nt, Homo sapiens
  misc_RNA (1)...(19): siRNA sense strand
gcaaaacgugagauucuuu

SEQ ID NO: 243992 - RNA, 19 nt, Homo sapiens
  misc_RNA (1)...(19): siRNA sense strand
ccacgaagagauaauggau

SEQ ID NO: 243993 - RNA, 19 nt, Homo sapiens
  misc_RNA (1)...(19): siRNA sense strand
cacaaugcaaggagaauau

SEQ ID NO: 243994 - RNA, 19 nt, Homo sapiens
  misc_RNA (1)...(19): siRNA sense strand
uggcaaacccggguacaaa

SEQ ID NO: 243995 - RNA, 19 nt, Homo sapiens
  misc_RNA (1)...(19): siRNA sense strand
aaaccuguugugauucaua

SEQ ID NO: 243996 - RNA, 19 nt, Homo sapiens
  misc_RNA (1)...(19): siRNA sense strand
gcaacuuuggaaugcauuu

SEQ ID NO: 243997 - RNA, 19 nt, Homo sapiens
  misc_RNA (1)...(19): siRNA sense strand
gaugauaguguggguggaa

SEQ ID NO: 243998 - RNA, 19 nt, Homo sapiens
  misc_RNA (1)...(19): siRNA sense strand
aguuugcucuuauggauug

SEQ ID NO: 243999 - RNA, 19 nt, Homo sapiens
  misc_RNA (1)...(19): siRNA sense strand
gccuuacaauucuugauca

SEQ ID NO: 244000 - RNA, 19 nt, Homo sapiens
  misc_RNA (1)...(19): siRNA sense strand
ggagaaaccuguugugauu

SEQ ID NO: 244001 - RNA, 19 nt, Homo sapiens
  misc_RNA (1)...(19): siRNA sense strand
ggacaaaguugcugaaauc

SEQ ID NO: 244002 - RNA, 19 nt, Homo sapiens
  misc_RNA (1)...(19): siRNA sense strand
gaacagaugccuaaucauu

SEQ ID NO: 244003 - RNA, 19 nt, Homo sapiens
  misc_RNA (1)...(19): siRNA sense strand
ggagacagguuucuuguga

SEQ ID NO: 244004 - RNA, 19 nt, Homo sapiens
  misc_RNA (1)...(19): siRNA sense strand
gagaacagaugccuaauca

SEQ ID NO: 244005 - RNA, 19 nt, Homo sapiens
  misc_RNA (1)...(19): siRNA sense strand
guucauaguuugagcguua

SEQ ID NO: 244006 - RNA, 19 nt, Homo sapiens
  misc_RNA (1)...(19): siRNA sense strand
caaaguugcugaaaucgaa

SEQ ID NO: 244007 - RNA, 19 nt, Homo sapiens
  misc_RNA (1)...(19): siRNA sense strand
cauuaaggaugacacauua

SEQ ID NO: 244008 - RNA, 19 nt, Homo sapiens
  misc_RNA (1)...(19): siRNA sense strand
gauaugauguagaguuuga

SEQ ID NO: 244009 - RNA, 19 nt, Homo sapiens
  misc_RNA (1)...(19): siRNA sense strand
caacugugcugcaucaaug

SEQ ID NO: 244010 - RNA, 19 nt, Homo sapiens
  misc_RNA (1)...(19): siRNA sense strand
gcagugcaauggaauuuau

SEQ ID NO: 244011 - RNA, 19 nt, Homo sapiens
  misc_RNA (1)...(19): siRNA sense strand
gggauaugauguagaguuu

SEQ ID NO: 244012 - RNA, 19 nt, Homo sapiens
  misc_RNA (1)...(19): siRNA sense strand
ggugaaauguccaaaugaa

SEQ ID NO: 244013 - RNA, 19 nt, Homo sapiens
  misc_RNA (1)...(19): siRNA sense strand
ggucacaaauguccaguug

SEQ ID NO: 244014 - RNA, 19 nt, Homo sapiens
  misc_RNA (1)...(19): siRNA sense strand
aaccagagcugcuugcuuu

SEQ ID NO: 244015 - RNA, 19 nt, Homo sapiens
  misc_RNA (1)...(19): siRNA sense strand
gaccagaacuguccuuugg

SEQ ID NO: 244016 - RNA, 19 nt, Homo sapiens
  misc_RNA (1)...(19): siRNA sense strand
gauaauggaugccaaacca

SEQ ID NO: 244017 - RNA, 19 nt, Homo sapiens
  misc_RNA (1)...(19): siRNA sense strand
ggaugcaggucacaaaugu

SEQ ID NO: 244018 - RNA, 19 nt, Homo sapiens
  misc_RNA (1)...(19): siRNA sense strand
gaaccucuccagcucauuu

SEQ ID NO: 244019 - RNA, 19 nt, Homo sapiens
  misc_RNA (1)...(19): siRNA sense strand
caaaugucaucugugaaua

SEQ ID NO: 244020 - RNA, 19 nt, Homo sapiens
  misc_RNA (1)...(19): siRNA sense strand
gcaaaugucaucugugaau

SEQ ID NO: 244021 - RNA, 19 nt, Homo sapiens
  misc_RNA (1)...(19): siRNA sense strand
ucucagagguccggaauuu

SEQ ID NO: 244022 - RNA, 19 nt, Homo sapiens
  misc_RNA (1)...(19): siRNA sense strand
ugagacaucuugaggauca

SEQ ID NO: 244023 - RNA, 19 nt, Homo sapiens
  misc_RNA (1)...(19): siRNA sense strand
uggcaaaugucaucuguga

SEQ ID NO: 244024 - RNA, 19 nt, Homo sapiens
  misc_RNA (1)...(19): siRNA sense strand
guuagagggucgccuugua

SEQ ID NO: 244025 - RNA, 19 nt, Homo sapiens
  misc_RNA (1)...(19): siRNA sense strand
ggccauagguucugcaaag

SEQ ID NO: 244026 - RNA, 19 nt, Homo sapiens
  misc_RNA (1)...(19): siRNA sense strand
ccaauuccaugcacauuca

SEQ ID NO: 244027 - RNA, 19 nt, Homo sapiens
  misc_RNA (1)...(19): siRNA sense strand
ugacaacugugcugcauca

SEQ ID NO: 244028 - RNA, 19 nt, Homo sapiens
  misc_RNA (1)...(19): siRNA sense strand
acaauacgccuuacaauuc

SEQ ID NO: 244029 - RNA, 19 nt, Homo sapiens
  misc_RNA (1)...(19): siRNA sense strand
gcgcuugcaccuucaguua

SEQ ID NO: 244030 - RNA, 19 nt, Homo sapiens
  misc_RNA (1)...(19): siRNA sense strand
ucagagaacagaugccuaa

SEQ ID NO: 244031 - RNA, 19 nt, Homo sapiens
  misc_RNA (1)...(19): siRNA sense strand
gcaaagccugcaucauaaa

SEQ ID NO: 244032 - RNA, 19 nt, Homo sapiens
  misc_RNA (1)...(19): siRNA sense strand
gaucuagacugcccuacag

SEQ ID NO: 244033 - RNA, 19 nt, Homo sapiens
  misc_RNA (1)...(19): siRNA sense strand
guauguaagugagcucaaa

SEQ ID NO: 244034 - RNA, 19 nt, Homo sapiens
  misc_RNA (1)...(19): siRNA sense strand
gcaaaaccacgaagagaua

SEQ ID NO: 244035 - RNA, 19 nt, Homo sapiens
  misc_RNA (1)...(19): siRNA sense strand
ugugaauacugcaauacua

SEQ ID NO: 244036 - RNA, 19 nt, Homo sapiens
  misc_RNA (1)...(19): siRNA sense strand
ccagggauaugauguagag

SEQ ID NO: 244037 - RNA, 19 nt, Homo sapiens
  misc_RNA (1)...(19): siRNA sense strand
caauacgccuuacaauucu

SEQ ID NO: 244038 - RNA, 19 nt, Homo sapiens
  misc_RNA (1)...(19): siRNA sense strand
gcucagcgcugugcaaacu

SEQ ID NO: 244039 - RNA, 19 nt, Homo sapiens
  misc_RNA (1)...(19): siRNA sense strand
gaagaggagaaaccuguug

SEQ ID NO: 244040 - RNA, 19 nt, Homo sapiens
  misc_RNA (1)...(19): siRNA sense strand
gcacgccaccuacaagaga

SEQ ID NO: 244041 - RNA, 19 nt, Homo sapiens
  misc_RNA (1)...(19): siRNA sense strand
gaacacccagucacacaug

SEQ ID NO: 244042 - RNA, 19 nt, Homo sapiens
  misc_RNA (1)...(19): siRNA sense strand
ucacaaauguccaguugac

SEQ ID NO: 244043 - RNA, 19 nt, Homo sapiens
  misc_RNA (1)...(19): siRNA sense strand
gaggagaaaccuguuguga

SEQ ID NO: 244044 - RNA, 19 nt, Homo sapiens
  misc_RNA (1)...(19): siRNA sense strand
ggaaagcaaguaugaaugc

SEQ ID NO: 244045 - RNA, 19 nt, Homo sapiens
  misc_RNA (1)...(19): siRNA sense strand
agaaaccuguugugauuca

SEQ ID NO: 244046 - RNA, 19 nt, Homo sapiens
  misc_RNA (1)...(19): siRNA sense strand
guaagugagcucaaacgaa

SEQ ID NO: 244047 - RNA, 19 nt, Homo sapiens
  misc_RNA (1)...(19): siRNA sense strand
uccgggagcugacugcuaa

SEQ ID NO: 244048 - RNA, 19 nt, Homo sapiens
  misc_RNA (1)...(19): siRNA sense strand
ugaguuugcucuuauggau

SEQ ID NO: 244049 - RNA, 19 nt, Homo sapiens
  misc_RNA (1)...(19): siRNA sense strand
ucaacuauuuccagacaau

SEQ ID NO: 244050 - RNA, 19 nt, Homo sapiens
  misc_RNA (1)...(19): siRNA sense strand
caaacgccaugcggccaua

SEQ ID NO: 244051 - RNA, 19 nt, Homo sapiens
  misc_RNA (1)...(19): siRNA sense strand
gcacaagauggaacugaga

SEQ ID NO: 244052 - RNA, 19 nt, Homo sapiens
  misc_RNA (1)...(19): siRNA sense strand
gaagauuggcaacuuugga

SEQ ID NO: 244053 - RNA, 19 nt, Homo sapiens
  misc_RNA (1)...(19): siRNA sense strand
cauugugaguuugcucuua

SEQ ID NO: 244054 - RNA, 19 nt, Homo sapiens
  misc_RNA (1)...(19): siRNA sense strand
gcaauacuauacucaucag

SEQ ID NO: 244055 - RNA, 19 nt, Homo sapiens
  misc_RNA (1)...(19): siRNA sense strand
uacaauacgccuuacaauu

SEQ ID NO: 244056 - RNA, 19 nt, Homo sapiens
  misc_RNA (1)...(19): siRNA sense strand
gcucauuuauggaggagau

SEQ ID NO: 244057 - RNA, 19 nt, Homo sapiens
  misc_RNA (1)...(19): siRNA sense strand
ggaugacacauuauuagug

SEQ ID NO: 244058 - RNA, 19 nt, Homo sapiens
  misc_RNA (1)...(19): siRNA sense strand
guacaauacgccuuacaau

SEQ ID NO: 244059 - RNA, 19 nt, Homo sapiens
  misc_RNA (1)...(19): siRNA sense strand
gcgcugugcaaacuauaua

SEQ ID NO: 244060 - RNA, 19 nt, Homo sapiens
  misc_RNA (1)...(19): siRNA sense strand
gagcucaaacgaaccauuc

SEQ ID NO: 244061 - RNA, 19 nt, Homo sapiens
  misc_RNA (1)...(19): siRNA sense strand
aaucaacuauuuccagaca

SEQ ID NO: 244062 - RNA, 19 nt, Homo sapiens
  misc_RNA (1)...(19): siRNA sense strand
auacuauacucaucagaga

SEQ ID NO: 244063 - RNA, 19 nt, Homo sapiens
  misc_RNA (1)...(19): siRNA sense strand
gaaaacagcuguggaucca

SEQ ID NO: 244064 - RNA, 19 nt, Homo sapiens
  misc_RNA (1)...(19): siRNA sense strand
cccaggcuguucauaguuu

SEQ ID NO: 244065 - RNA, 19 nt, Homo sapiens
  misc_RNA (1)...(19): siRNA sense strand
ccaugcacauucaguacuu

SEQ ID NO: 244066 - RNA, 19 nt, Homo sapiens
  misc_RNA (1)...(19): siRNA sense strand
ucauagcccuggauucuac

SEQ ID NO: 244067 - RNA, 19 nt, Homo sapiens
  misc_RNA (1)...(19): siRNA sense strand
ggagcugacugcuaaaaug

SEQ ID NO: 244068 - RNA, 19 nt, Homo sapiens
  misc_RNA (1)...(19): siRNA sense strand
gagaacacccagucacaca

SEQ ID NO: 244069 - RNA, 19 nt, Homo sapiens
  misc_RNA (1)...(19): siRNA sense strand
cagaguauguauguaagug

SEQ ID NO: 244070 - RNA, 19 nt, Homo sapiens
  misc_RNA (1)...(19): siRNA sense strand
caggguacaauacgccuua

SEQ ID NO: 244071 - RNA, 19 nt, Homo sapiens
  misc_RNA (1)...(19): siRNA sense strand
ggauccagccagucugaaa

SEQ ID NO: 244072 - RNA, 19 nt, Homo sapiens
  misc_RNA (1)...(19): siRNA sense strand
agacagguuucuugugaca

SEQ ID NO: 244073 - RNA, 19 nt, Homo sapiens
  misc_RNA (1)...(19): siRNA sense strand
gguacaauacgccuuacaa

SEQ ID NO: 244074 - RNA, 19 nt, Homo sapiens
  misc_RNA (1)...(19): siRNA sense strand
gaaauguccaaaugaaggu

SEQ ID NO: 244075 - RNA, 19 nt, Homo sapiens
  misc_RNA (1)...(19): siRNA sense strand
gcaaacuauauaucccuuu

SEQ ID NO: 244076 - RNA, 19 nt, Homo sapiens
  misc_RNA (1)...(19): siRNA sense strand
guaagacaagaccaucaaa

SEQ ID NO: 244077 - RNA, 19 nt, Homo sapiens
  misc_RNA (1)...(19): siRNA sense strand
ggcccaggcuguucauagu

SEQ ID NO: 244078 - RNA, 19 nt, Homo sapiens
  misc_RNA (1)...(19): siRNA sense strand
gugaauacugcaauacuau

SEQ ID NO: 244079 - RNA, 19 nt, Homo sapiens
  misc_RNA (1)...(19): siRNA sense strand
gcccuaagacaaagaacuu

SEQ ID NO: 244080 - RNA, 19 nt, Homo sapiens
  misc_RNA (1)...(19): siRNA sense strand
aaugaaauacugcuggaaa

SEQ ID NO: 244081 - RNA, 19 nt, Homo sapiens
  misc_RNA (1)...(19): siRNA sense strand
ucagcgcugugcaaacuau

SEQ ID NO: 244082 - RNA, 19 nt, Homo sapiens
  misc_RNA (1)...(19): siRNA sense strand
uaagacaagaccaucaaau

SEQ ID NO: 244083 - RNA, 19 nt, Homo sapiens
  misc_RNA (1)...(19): siRNA sense strand
gaaaagaugcagaggaauc

SEQ ID NO: 244084 - RNA, 19 nt, Homo sapiens
  misc_RNA (1)...(19): siRNA sense strand
gaauacugcaauacuauac

SEQ ID NO: 244085 - RNA, 19 nt, Homo sapiens
  misc_RNA (1)...(19): siRNA sense strand
uuagagggucgccuuguaa

SEQ ID NO: 244086 - RNA, 19 nt, Homo sapiens
  misc_RNA (1)...(19): siRNA sense strand
gaagcccuaagacaaagaa

SEQ ID NO: 244087 - RNA, 19 nt, Homo sapiens
  misc_RNA (1)...(19): siRNA sense strand
aagauaaagagauccauga

SEQ ID NO: 244088 - RNA, 19 nt, Homo sapiens
  misc_RNA (1)...(19): siRNA sense strand
gggaaccucuccagcucau

SEQ ID NO: 244089 - RNA, 19 nt, Homo sapiens
  misc_RNA (1)...(19): siRNA sense strand
cagcagugcaauggaauuu

SEQ ID NO: 244090 - RNA, 19 nt, Homo sapiens
  misc_RNA (1)...(19): siRNA sense strand
gaaccauucgaacccuuga

SEQ ID NO: 244091 - RNA, 19 nt, Homo sapiens
  misc_RNA (1)...(19): siRNA sense strand
gcaaaacgugagauucuuu

SEQ ID NO: 244092 - RNA, 19 nt, Homo sapiens
  misc_RNA (1)...(19): siRNA sense strand
ccacgaagagauaauggau

SEQ ID NO: 244093 - RNA, 19 nt, Homo sapiens
  misc_RNA (1)...(19): siRNA sense strand
cacaaugcaaggagaauau

SEQ ID NO: 244094 - RNA, 19 nt, Homo sapiens
  misc_RNA (1)...(19): siRNA sense strand
uggcaaacccggguacaaa

SEQ ID NO: 244095 - RNA, 19 nt, Homo sapiens
  misc_RNA (1)...(19): siRNA sense strand
aaaccuguugugauucaua

SEQ ID NO: 244096 - RNA, 19 nt, Homo sapiens
  misc_RNA (1)...(19): siRNA sense strand
gcaacuuuggaaugcauuu

SEQ ID NO: 244097 - RNA, 19 nt, Homo sapiens
  misc_RNA (1)...(19): siRNA sense strand
gaugauaguguggguggaa

SEQ ID NO: 244098 - RNA, 19 nt, Homo sapiens
  misc_RNA (1)...(19): siRNA sense strand
aguuugcucuuauggauug

SEQ ID NO: 244099 - RNA, 19 nt, Homo sapiens
  misc_RNA (1)...(19): siRNA sense strand
gccuuacaauucuugauca

SEQ ID NO: 244100 - RNA, 19 nt, Homo sapiens
  misc_RNA (1)...(19): siRNA sense strand
guacagaguuuagaacaaa

SEQ ID NO: 244101 - RNA, 19 nt, Homo sapiens
  misc_RNA (1)...(19): siRNA sense strand
acaaacagcucgagagauu

SEQ ID NO: 244102 - RNA, 19 nt, Homo sapiens
  misc_RNA (1)...(19): siRNA sense strand
gaacaaacagcucgagaga

SEQ ID NO: 244103 - RNA, 19 nt, Homo sapiens
  misc_RNA (1)...(19): siRNA sense strand
gagaagcaguuacagaaau

SEQ ID NO: 244104 - RNA, 19 nt, Homo sapiens
  misc_RNA (1)...(19): siRNA sense strand
cagcauuuguuguguauuu

SEQ ID NO: 244105 - RNA, 19 nt, Homo sapiens
  misc_RNA (1)...(19): siRNA sense strand
gaacaguauuacagauuuc

SEQ ID NO: 244106 - RNA, 19 nt, Homo sapiens
  misc_RNA (1)...(19): siRNA sense strand
ggcagcagcuuguguugaa

SEQ ID NO: 244107 - RNA, 19 nt, Homo sapiens
  misc_RNA (1)...(19): siRNA sense strand
gaaauaugacgugaagaaa

SEQ ID NO: 244108 - RNA, 19 nt, Homo sapiens
  misc_RNA (1)...(19): siRNA sense strand
gaaaaguuguacagaguuu

SEQ ID NO: 244109 - RNA, 19 nt, Homo sapiens
  misc_RNA (1)...(19): siRNA sense strand
gaccaaauuuccugcugaa

SEQ ID NO: 244110 - RNA, 19 nt, Homo sapiens
  misc_RNA (1)...(19): siRNA sense strand
gaaacagaaacacuaguga

SEQ ID NO: 244111 - RNA, 19 nt, Homo sapiens
  misc_RNA (1)...(19): siRNA sense strand
ugaaauaugacgugaagaa

SEQ ID NO: 244112 - RNA, 19 nt, Homo sapiens
  misc_RNA (1)...(19): siRNA sense strand
caugagcacuggagguuug

SEQ ID NO: 244113 - RNA, 19 nt, Homo sapiens
  misc_RNA (1)...(19): siRNA sense strand
agaagcaguuacagaaauu

SEQ ID NO: 244114 - RNA, 19 nt, Homo sapiens
  misc_RNA (1)...(19): siRNA sense strand
ggaaacagaaacacuagug

SEQ ID NO: 244115 - RNA, 19 nt, Homo sapiens
  misc_RNA (1)...(19): siRNA sense strand
gauuaucucucaggaguuc

SEQ ID NO: 244116 - RNA, 19 nt, Homo sapiens
  misc_RNA (1)...(19): siRNA sense strand
ugaaagcucgagaacauuu

SEQ ID NO: 244117 - RNA, 19 nt, Homo sapiens
  misc_RNA (1)...(19): siRNA sense strand
gaagaaaguagaggaagug

SEQ ID NO: 244118 - RNA, 19 nt, Homo sapiens
  misc_RNA (1)...(19): siRNA sense strand
caaauuuccugcugaacag

SEQ ID NO: 244119 - RNA, 19 nt, Homo sapiens
  misc_RNA (1)...(19): siRNA sense strand
gaaguggucuaugaucucu

SEQ ID NO: 244120 - RNA, 19 nt, Homo sapiens
  misc_RNA (1)...(19): siRNA sense strand
gcacuggagguuuguguug

SEQ ID NO: 244121 - RNA, 19 nt, Homo sapiens
  misc_RNA (1)...(19): siRNA sense strand
aauaugacgugaagaaagu

SEQ ID NO: 244122 - RNA, 19 nt, Homo sapiens
  misc_RNA (1)...(19): siRNA sense strand
gcgcuacgacggauugaaa

SEQ ID NO: 244123 - RNA, 19 nt, Homo sapiens
  misc_RNA (1)...(19): siRNA sense strand
uuugaaagcucgagaacau

SEQ ID NO: 244124 - RNA, 19 nt, Homo sapiens
  misc_RNA (1)...(19): siRNA sense strand
ugaagaaaguagaggaagu

SEQ ID NO: 244125 - RNA, 19 nt, Homo sapiens
  misc_RNA (1)...(19): siRNA sense strand
gaagcgcuacgacggauug

SEQ ID NO: 244126 - RNA, 19 nt, Homo sapiens
  misc_RNA (1)...(19): siRNA sense strand
gcuacgacggauugaaaua

SEQ ID NO: 244127 - RNA, 19 nt, Homo sapiens
  misc_RNA (1)...(19): siRNA sense strand
ggcagcauuuguuguguau

SEQ ID NO: 244128 - RNA, 19 nt, Homo sapiens
  misc_RNA (1)...(19): siRNA sense strand
acacaucuaacaucuuuga

SEQ ID NO: 244129 - RNA, 19 nt, Homo sapiens
  misc_RNA (1)...(19): siRNA sense strand
cgagaagcaguuacagaaa

SEQ ID NO: 244130 - RNA, 19 nt, Homo sapiens
  misc_RNA (1)...(19): siRNA sense strand
gcugaacaguauuacagau

SEQ ID NO: 244131 - RNA, 19 nt, Homo sapiens
  misc_RNA (1)...(19): siRNA sense strand
ccaaauuuccugcugaaca

SEQ ID NO: 244132 - RNA, 19 nt, Homo sapiens
  misc_RNA (1)...(19): siRNA sense strand
ccaucagggugcuggguuu

SEQ ID NO: 244133 - RNA, 19 nt, Homo sapiens
  misc_RNA (1)...(19): siRNA sense strand
gauuuuaacucuacugcaa

SEQ ID NO: 244134 - RNA, 19 nt, Homo sapiens
  misc_RNA (1)...(19): siRNA sense strand
gcagcagcuuguguugaaa

SEQ ID NO: 244135 - RNA, 19 nt, Homo sapiens
  misc_RNA (1)...(19): siRNA sense strand
ucgagaagcaguuacagaa

SEQ ID NO: 244136 - RNA, 19 nt, Homo sapiens
  misc_RNA (1)...(19): siRNA sense strand
uggcagcauuuguugugua

SEQ ID NO: 244137 - RNA, 19 nt, Homo sapiens
  misc_RNA (1)...(19): siRNA sense strand
gaggaaaucagaaaaguug

SEQ ID NO: 244138 - RNA, 19 nt, Homo sapiens
  misc_RNA (1)...(19): siRNA sense strand
ccacaucuccaccuucauc

SEQ ID NO: 244139 - RNA, 19 nt, Homo sapiens
  misc_RNA (1)...(19): siRNA sense strand
ugucgaggcugucugucaa

SEQ ID NO: 244140 - RNA, 19 nt, Homo sapiens
  misc_RNA (1)...(19): siRNA sense strand
ggagacggcagcagcuugu

SEQ ID NO: 244141 - RNA, 19 nt, Homo sapiens
  misc_RNA (1)...(19): siRNA sense strand
uacgacggauugaaauaug

SEQ ID NO: 244142 - RNA, 19 nt, Homo sapiens
  misc_RNA (1)...(19): siRNA sense strand
ggacauccgagaggaaauc

SEQ ID NO: 244143 - RNA, 19 nt, Homo sapiens
  misc_RNA (1)...(19): siRNA sense strand
gaacauuuugguacaguaa

SEQ ID NO: 244144 - RNA, 19 nt, Homo sapiens
  misc_RNA (1)...(19): siRNA sense strand
ucucaggaguucuaauucu

SEQ ID NO: 244145 - RNA, 19 nt, Homo sapiens
  misc_RNA (1)...(19): siRNA sense strand
ggaaguggucuaugaucuc

SEQ ID NO: 244146 - RNA, 19 nt, Homo sapiens
  misc_RNA (1)...(19): siRNA sense strand
uguacagaguuuagaacaa

SEQ ID NO: 244147 - RNA, 19 nt, Homo sapiens
  misc_RNA (1)...(19): siRNA sense strand
cagaaaaguuguacagagu

SEQ ID NO: 244148 - RNA, 19 nt, Homo sapiens
  misc_RNA (1)...(19): siRNA sense strand
ucucucaggaguucuaauu

SEQ ID NO: 244149 - RNA, 19 nt, Homo sapiens
  misc_RNA (1)...(19): siRNA sense strand
ugagccagaucgggagaaa

SEQ ID NO: 244150 - RNA, 19 nt, Homo sapiens
  misc_RNA (1)...(19): siRNA sense strand
gcaggacauccgagaggaa

SEQ ID NO: 244151 - RNA, 19 nt, Homo sapiens
  misc_RNA (1)...(19): siRNA sense strand
ggucuucuuggcagcauuu

SEQ ID NO: 244152 - RNA, 19 nt, Homo sapiens
  misc_RNA (1)...(19): siRNA sense strand
ggaaaucagaaaaguugua

SEQ ID NO: 244153 - RNA, 19 nt, Homo sapiens
  misc_RNA (1)...(19): siRNA sense strand
gagaggaaaucagaaaagu

SEQ ID NO: 244154 - RNA, 19 nt, Homo sapiens
  misc_RNA (1)...(19): siRNA sense strand
cauccgagaggaaaucaga

SEQ ID NO: 244155 - RNA, 19 nt, Homo sapiens
  misc_RNA (1)...(19): siRNA sense strand
caaacagcucgagagauuu

SEQ ID NO: 244156 - RNA, 19 nt, Homo sapiens
  misc_RNA (1)...(19): siRNA sense strand
acuagugacucgagaagca

SEQ ID NO: 244157 - RNA, 19 nt, Homo sapiens
  misc_RNA (1)...(19): siRNA sense strand
caucuccaccuucaucaau

SEQ ID NO: 244158 - RNA, 19 nt, Homo sapiens
  misc_RNA (1)...(19): siRNA sense strand
gaggaaguggucuaugauc

SEQ ID NO: 244159 - RNA, 19 nt, Homo sapiens
  misc_RNA (1)...(19): siRNA sense strand
cuacgacggauugaaauau

SEQ ID NO: 244160 - RNA, 19 nt, Homo sapiens
  misc_RNA (1)...(19): siRNA sense strand
ucaggaguucuaauucuug

SEQ ID NO: 244161 - RNA, 19 nt, Homo sapiens
  misc_RNA (1)...(19): siRNA sense strand
acgacggauugaaauauga

SEQ ID NO: 244162 - RNA, 19 nt, Homo sapiens
  misc_RNA (1)...(19): siRNA sense strand
cucaggaguucuaauucuu

SEQ ID NO: 244163 - RNA, 19 nt, Homo sapiens
  misc_RNA (1)...(19): siRNA sense strand
cuccacaucuccaccuuca

SEQ ID NO: 244164 - RNA, 19 nt, Homo sapiens
  misc_RNA (1)...(19): siRNA sense strand
aaagagguguuugaaagcu

SEQ ID NO: 244165 - RNA, 19 nt, Homo sapiens
  misc_RNA (1)...(19): siRNA sense strand
aaauaugacgugaagaaag

SEQ ID NO: 244166 - RNA, 19 nt, Homo sapiens
  misc_RNA (1)...(19): siRNA sense strand
uuucaggacauuccaaaga

SEQ ID NO: 244167 - RNA, 19 nt, Homo sapiens
  misc_RNA (1)...(19): siRNA sense strand
auugaaauaugacgugaag

SEQ ID NO: 244168 - RNA, 19 nt, Homo sapiens
  misc_RNA (1)...(19): siRNA sense strand
gugcuggguuucaggacau

SEQ ID NO: 244169 - RNA, 19 nt, Homo sapiens
  misc_RNA (1)...(19): siRNA sense strand
gacggcagcagcuuguguu

SEQ ID NO: 244170 - RNA, 19 nt, Homo sapiens
  misc_RNA (1)...(19): siRNA sense strand
gaagcaguuacagaaauuc

SEQ ID NO: 244171 - RNA, 19 nt, Homo sapiens
  misc_RNA (1)...(19): siRNA sense strand
gagcacuggagguuugugu

SEQ ID NO: 244172 - RNA, 19 nt, Homo sapiens
  misc_RNA (1)...(19): siRNA sense strand
caggacauccgagaggaaa

SEQ ID NO: 244173 - RNA, 19 nt, Homo sapiens
  misc_RNA (1)...(19): siRNA sense strand
cugaacaguauuacagauu

SEQ ID NO: 244174 - RNA, 19 nt, Homo sapiens
  misc_RNA (1)...(19): siRNA sense strand
cuucuuggcagcauuuguu

SEQ ID NO: 244175 - RNA, 19 nt, Homo sapiens
  misc_RNA (1)...(19): siRNA sense strand
aggaaguggucuaugaucu

SEQ ID NO: 244176 - RNA, 19 nt, Homo sapiens
  misc_RNA (1)...(19): siRNA sense strand
aaacagcucgagagauuuu

SEQ ID NO: 244177 - RNA, 19 nt, Homo sapiens
  misc_RNA (1)...(19): siRNA sense strand
guauuuggaaacagaaaca

SEQ ID NO: 244178 - RNA, 19 nt, Homo sapiens
  misc_RNA (1)...(19): siRNA sense strand
gguuucaggacauuccaaa

SEQ ID NO: 244179 - RNA, 19 nt, Homo sapiens
  misc_RNA (1)...(19): siRNA sense strand
cgugacugcuggagacuac

SEQ ID NO: 244180 - RNA, 19 nt, Homo sapiens
  misc_RNA (1)...(19): siRNA sense strand
gaaaggagauggaggauug

SEQ ID NO: 244181 - RNA, 19 nt, Homo sapiens
  misc_RNA (1)...(19): siRNA sense strand
ggaaaugccuuugguguaa

SEQ ID NO: 244182 - RNA, 19 nt, Homo sapiens
  misc_RNA (1)...(19): siRNA sense strand
ggaagaagaugcuguggaa

SEQ ID NO: 244183 - RNA, 19 nt, Homo sapiens
  misc_RNA (1)...(19): siRNA sense strand
ggaaggacauuauagaaga

SEQ ID NO: 244184 - RNA, 19 nt, Homo sapiens
  misc_RNA (1)...(19): siRNA sense strand
ugaaggcgcuguauaauga

SEQ ID NO: 244185 - RNA, 19 nt, Homo sapiens
  misc_RNA (1)...(19): siRNA sense strand
gaucaucacuccauucaga

SEQ ID NO: 244186 - RNA, 19 nt, Homo sapiens
  misc_RNA (1)...(19): siRNA sense strand
ggacagcuauugaagcaaa

SEQ ID NO: 244187 - RNA, 19 nt, Homo sapiens
  misc_RNA (1)...(19): siRNA sense strand
agaagcaucugaagaauuu

SEQ ID NO: 244188 - RNA, 19 nt, Homo sapiens
  misc_RNA (1)...(19): siRNA sense strand
gcagugagagcaacaaaua

SEQ ID NO: 244189 - RNA, 19 nt, Homo sapiens
  misc_RNA (1)...(19): siRNA sense strand
ggaguucgauuaucaacaa

SEQ ID NO: 244190 - RNA, 19 nt, Homo sapiens
  misc_RNA (1)...(19): siRNA sense strand
gaaagugggucaugugaag

SEQ ID NO: 244191 - RNA, 19 nt, Homo sapiens
  misc_RNA (1)...(19): siRNA sense strand
gaacucaaauugccaccaa

SEQ ID NO: 244192 - RNA, 19 nt, Homo sapiens
  misc_RNA (1)...(19): siRNA sense strand
gaaauagccaucaauguga

SEQ ID NO: 244193 - RNA, 19 nt, Homo sapiens
  misc_RNA (1)...(19): siRNA sense strand
ggaggaagcuaaagaugau

SEQ ID NO: 244194 - RNA, 19 nt, Homo sapiens
  misc_RNA (1)...(19): siRNA sense strand
caacagaagcaccguauuu

SEQ ID NO: 244195 - RNA, 19 nt, Homo sapiens
  misc_RNA (1)...(19): siRNA sense strand
guagauggauauucagaaa

SEQ ID NO: 244196 - RNA, 19 nt, Homo sapiens
  misc_RNA (1)...(19): siRNA sense strand
ggaguauaaugacauauga

SEQ ID NO: 244197 - RNA, 19 nt, Homo sapiens
  misc_RNA (1)...(19): siRNA sense strand
gaagugugauucugguaaa

SEQ ID NO: 244198 - RNA, 19 nt, Homo sapiens
  misc_RNA (1)...(19): siRNA sense strand
gaacuaaagaggaugauau

SEQ ID NO: 244199 - RNA, 19 nt, Homo sapiens
  misc_RNA (1)...(19): siRNA sense strand
cagaggagcucauuacuag

SEQ ID NO: 244200 - RNA, 19 nt, Homo sapiens
  misc_RNA (1)...(19): siRNA sense strand
uuacagagaucguacaaga

SEQ ID NO: 244201 - RNA, 19 nt, Homo sapiens
  misc_RNA (1)...(19): siRNA sense strand
gaauagugccaaaguuuaa

SEQ ID NO: 244202 - RNA, 19 nt, Homo sapiens
  misc_RNA (1)...(19): siRNA sense strand
guacauccaucacgccauu

SEQ ID NO: 244203 - RNA, 19 nt, Homo sapiens
  misc_RNA (1)...(19): siRNA sense strand
agaauaaucugcccagguu

SEQ ID NO: 244204 - RNA, 19 nt, Homo sapiens
  misc_RNA (1)...(19): siRNA sense strand
gcaaaccaguucuuuccaa

SEQ ID NO: 244205 - RNA, 19 nt, Homo sapiens
  misc_RNA (1)...(19): siRNA sense strand
gcucagguguuugauuuaa

SEQ ID NO: 244206 - RNA, 19 nt, Homo sapiens
  misc_RNA (1)...(19): siRNA sense strand
gaacaauuacuuugggauu

SEQ ID NO: 244207 - RNA, 19 nt, Homo sapiens
  misc_RNA (1)...(19): siRNA sense strand
gagcaacaaauaacuguaa

SEQ ID NO: 244208 - RNA, 19 nt, Homo sapiens
  misc_RNA (1)...(19): siRNA sense strand
gcacuaaacagcaccgauu

SEQ ID NO: 244209 - RNA, 19 nt, Homo sapiens
  misc_RNA (1)...(19): siRNA sense strand
gaaguugaccucucagaug

SEQ ID NO: 244210 - RNA, 19 nt, Homo sapiens
  misc_RNA (1)...(19): siRNA sense strand
gagauuccuuggcuuuauu

SEQ ID NO: 244211 - RNA, 19 nt, Homo sapiens
  misc_RNA (1)...(19): siRNA sense strand
gcgaguauccaaugccuua

SEQ ID NO: 244212 - RNA, 19 nt, Homo sapiens
  misc_RNA (1)...(19): siRNA sense strand
ggaccaagaccaguauuaa

SEQ ID NO: 244213 - RNA, 19 nt, Homo sapiens
  misc_RNA (1)...(19): siRNA sense strand
uggcaaacauugauccuuu

SEQ ID NO: 244214 - RNA, 19 nt, Homo sapiens
  misc_RNA (1)...(19): siRNA sense strand
gcagaggagcucauuacua

SEQ ID NO: 244215 - RNA, 19 nt, Homo sapiens
  misc_RNA (1)...(19): siRNA sense strand
caaaccaguucuuuccaaa

SEQ ID NO: 244216 - RNA, 19 nt, Homo sapiens
  misc_RNA (1)...(19): siRNA sense strand
gaagagcgaguauccaaug

SEQ ID NO: 244217 - RNA, 19 nt, Homo sapiens
  misc_RNA (1)...(19): siRNA sense strand
gcaccucggucuccagaug

SEQ ID NO: 244218 - RNA, 19 nt, Homo sapiens
  misc_RNA (1)...(19): siRNA sense strand
uaaagaugauggugccaaa

SEQ ID NO: 244219 - RNA, 19 nt, Homo sapiens
  misc_RNA (1)...(19): siRNA sense strand
cggcucagguguuugauuu

SEQ ID NO: 244220 - RNA, 19 nt, Homo sapiens
  misc_RNA (1)...(19): siRNA sense strand
cgaauagugccaaaguuua

SEQ ID NO: 244221 - RNA, 19 nt, Homo sapiens
  misc_RNA (1)...(19): siRNA sense strand
caagagacacugccacuga

SEQ ID NO: 244222 - RNA, 19 nt, Homo sapiens
  misc_RNA (1)...(19): siRNA sense strand
cagaagaggugucgcagau

SEQ ID NO: 244223 - RNA, 19 nt, Homo sapiens
  misc_RNA (1)...(19): siRNA sense strand
ccuggaaguuguagcaaua

SEQ ID NO: 244224 - RNA, 19 nt, Homo sapiens
  misc_RNA (1)...(19): siRNA sense strand
gcugggaguucgauuauca

SEQ ID NO: 244225 - RNA, 19 nt, Homo sapiens
  misc_RNA (1)...(19): siRNA sense strand
gggcaaauaguuuaaagaa

SEQ ID NO: 244226 - RNA, 19 nt, Homo sapiens
  misc_RNA (1)...(19): siRNA sense strand
ggaacgagccaguaccaaa

SEQ ID NO: 244227 - RNA, 19 nt, Homo sapiens
  misc_RNA (1)...(19): siRNA sense strand
caacuugaauaaacagugu

SEQ ID NO: 244228 - RNA, 19 nt, Homo sapiens
  misc_RNA (1)...(19): siRNA sense strand
uaucauaccuccaauugca

SEQ ID NO: 244229 - RNA, 19 nt, Homo sapiens
  misc_RNA (1)...(19): siRNA sense strand
gaaguuguagcaauauuug

SEQ ID NO: 244230 - RNA, 19 nt, Homo sapiens
  misc_RNA (1)...(19): siRNA sense strand
ggaaguuguagcaauauuu

SEQ ID NO: 244231 - RNA, 19 nt, Homo sapiens
  misc_RNA (1)...(19): siRNA sense strand
gaaaagacguaugacaaaa

SEQ ID NO: 244232 - RNA, 19 nt, Homo sapiens
  misc_RNA (1)...(19): siRNA sense strand
gguggaguauaaugacaua

SEQ ID NO: 244233 - RNA, 19 nt, Homo sapiens
  misc_RNA (1)...(19): siRNA sense strand
gaaggacauuauagaagau

SEQ ID NO: 244234 - RNA, 19 nt, Homo sapiens
  misc_RNA (1)...(19): siRNA sense strand
ugaaauagccaucaaugug

SEQ ID NO: 244235 - RNA, 19 nt, Homo sapiens
  misc_RNA (1)...(19): siRNA sense strand
ucauuaaacugcagcauca

SEQ ID NO: 244236 - RNA, 19 nt, Homo sapiens
  misc_RNA (1)...(19): siRNA sense strand
caaaagaugugcagugaga

SEQ ID NO: 244237 - RNA, 19 nt, Homo sapiens
  misc_RNA (1)...(19): siRNA sense strand
gcacagaaacagaugaauc

SEQ ID NO: 244238 - RNA, 19 nt, Homo sapiens
  misc_RNA (1)...(19): siRNA sense strand
caguaaauguucaguccua

SEQ ID NO: 244239 - RNA, 19 nt, Homo sapiens
  misc_RNA (1)...(19): siRNA sense strand
cauccaauauguccacuug

SEQ ID NO: 244240 - RNA, 19 nt, Homo sapiens
  misc_RNA (1)...(19): siRNA sense strand
ggacuacccuggccuccau

SEQ ID NO: 244241 - RNA, 19 nt, Homo sapiens
  misc_RNA (1)...(19): siRNA sense strand
gggcagauccggaccaaga

SEQ ID NO: 244242 - RNA, 19 nt, Homo sapiens
  misc_RNA (1)...(19): siRNA sense strand
gacaagauccuggaaguug

SEQ ID NO: 244243 - RNA, 19 nt, Homo sapiens
  misc_RNA (1)...(19): siRNA sense strand
ggagguggaauuacagaaa

SEQ ID NO: 244244 - RNA, 19 nt, Homo sapiens
  misc_RNA (1)...(19): siRNA sense strand
aacaacagcuucacgauca

SEQ ID NO: 244245 - RNA, 19 nt, Homo sapiens
  misc_RNA (1)...(19): siRNA sense strand
gaccaagaccaguauuaaa

SEQ ID NO: 244246 - RNA, 19 nt, Homo sapiens
  misc_RNA (1)...(19): siRNA sense strand
aaacugauccgcaaagugu

SEQ ID NO: 244247 - RNA, 19 nt, Homo sapiens
  misc_RNA (1)...(19): siRNA sense strand
gguacacacugccugcaaa

SEQ ID NO: 244248 - RNA, 19 nt, Homo sapiens
  misc_RNA (1)...(19): siRNA sense strand
ccacugaaauagccaucaa

SEQ ID NO: 244249 - RNA, 19 nt, Homo sapiens
  misc_RNA (1)...(19): siRNA sense strand
gaucguacaagaauuuaga

SEQ ID NO: 244250 - RNA, 19 nt, Homo sapiens
  misc_RNA (1)...(19): siRNA sense strand
gaacaugcaguggucauau

SEQ ID NO: 244251 - RNA, 19 nt, Homo sapiens
  misc_RNA (1)...(19): siRNA sense strand
uuggacagguggaguauaa

SEQ ID NO: 244252 - RNA, 19 nt, Homo sapiens
  misc_RNA (1)...(19): siRNA sense strand
ccucucagaugcuagugua

SEQ ID NO: 244253 - RNA, 19 nt, Homo sapiens
  misc_RNA (1)...(19): siRNA sense strand
ugaaacagaaucuuugcua

SEQ ID NO: 244254 - RNA, 19 nt, Homo sapiens
  misc_RNA (1)...(19): siRNA sense strand
ggaaguguagguuggguuu

SEQ ID NO: 244255 - RNA, 19 nt, Homo sapiens
  misc_RNA (1)...(19): siRNA sense strand
ggagaggauucgucugaca

SEQ ID NO: 244256 - RNA, 19 nt, Homo sapiens
  misc_RNA (1)...(19): siRNA sense strand
cucaaagucucugauauuu

SEQ ID NO: 244257 - RNA, 19 nt, Homo sapiens
  misc_RNA (1)...(19): siRNA sense strand
gccaaagaaucaauaacug

SEQ ID NO: 244258 - RNA, 19 nt, Homo sapiens
  misc_RNA (1)...(19): siRNA sense strand
gacgcuaugugaaacugua

SEQ ID NO: 244259 - RNA, 19 nt, Homo sapiens
  misc_RNA (1)...(19): siRNA sense strand
gaugguuucuguagagcaa

SEQ ID NO: 244260 - RNA, 19 nt, Homo sapiens
  misc_RNA (1)...(19): siRNA sense strand
gaagcaaaccaguucuuuc

SEQ ID NO: 244261 - RNA, 19 nt, Homo sapiens
  misc_RNA (1)...(19): siRNA sense strand
gaacuggcccaugcuguga

SEQ ID NO: 244262 - RNA, 19 nt, Homo sapiens
  misc_RNA (1)...(19): siRNA sense strand
aagauaagcagaaguguga

SEQ ID NO: 244263 - RNA, 19 nt, Homo sapiens
  misc_RNA (1)...(19): siRNA sense strand
ccagaaagccgucaaacca

SEQ ID NO: 244264 - RNA, 19 nt, Homo sapiens
  misc_RNA (1)...(19): siRNA sense strand
gaagagucccugggugaaa

SEQ ID NO: 244265 - RNA, 19 nt, Homo sapiens
  misc_RNA (1)...(19): siRNA sense strand
gccaagacgcuaugugaaa

SEQ ID NO: 244266 - RNA, 19 nt, Homo sapiens
  misc_RNA (1)...(19): siRNA sense strand
gacaauuuccggauucuug

SEQ ID NO: 244267 - RNA, 19 nt, Homo sapiens
  misc_RNA (1)...(19): siRNA sense strand
ucagaaguuugacaauuuc

SEQ ID NO: 244268 - RNA, 19 nt, Homo sapiens
  misc_RNA (1)...(19): siRNA sense strand
ggagcucauuacuaggaua

SEQ ID NO: 244269 - RNA, 19 nt, Homo sapiens
  misc_RNA (1)...(19): siRNA sense strand
gacaaaaccuuggaaaaug

SEQ ID NO: 244270 - RNA, 19 nt, Homo sapiens
  misc_RNA (1)...(19): siRNA sense strand
ggacagguggaguauaaug

SEQ ID NO: 244271 - RNA, 19 nt, Homo sapiens
  misc_RNA (1)...(19): siRNA sense strand
gcaccgauuccgaugguuu

SEQ ID NO: 244272 - RNA, 19 nt, Homo sapiens
  misc_RNA (1)...(19): siRNA sense strand
gauuaugacagcacagaaa

SEQ ID NO: 244273 - RNA, 19 nt, Homo sapiens
  misc_RNA (1)...(19): siRNA sense strand
ucagguguuugauuuaaug

SEQ ID NO: 244274 - RNA, 19 nt, Homo sapiens
  misc_RNA (1)...(19): siRNA sense strand
gagauaaucagggaguaaa

SEQ ID NO: 244275 - RNA, 19 nt, Homo sapiens
  misc_RNA (1)...(19): siRNA sense strand
uacagaaacugacagagau

SEQ ID NO: 244276 - RNA, 19 nt, Homo sapiens
  misc_RNA (1)...(19): siRNA sense strand
agacacugccacugaaaua

SEQ ID NO: 244277 - RNA, 19 nt, Homo sapiens
  misc_RNA (1)...(19): siRNA sense strand
gcaugcaaauggcaguuuc

SEQ ID NO: 244278 - RNA, 19 nt, Homo sapiens
  misc_RNA (1)...(19): siRNA sense strand
gaugugguauggaguccuu

SEQ ID NO: 244279 - RNA, 19 nt, Homo sapiens
  misc_RNA (1)...(19): siRNA sense strand
uagauuccguagauggaua

SEQ ID NO: 244280 - RNA, 19 nt, Homo sapiens
  misc_RNA (1)...(19): siRNA sense strand
gaaaggagauggaggauug

SEQ ID NO: 244281 - RNA, 19 nt, Homo sapiens
  misc_RNA (1)...(19): siRNA sense strand
ggaaaugccuuugguguaa

SEQ ID NO: 244282 - RNA, 19 nt, Homo sapiens
  misc_RNA (1)...(19): siRNA sense strand
ggaagaagaugcuguggaa

SEQ ID NO: 244283 - RNA, 19 nt, Homo sapiens
  misc_RNA (1)...(19): siRNA sense strand
ggaaggacauuauagaaga

SEQ ID NO: 244284 - RNA, 19 nt, Homo sapiens
  misc_RNA (1)...(19): siRNA sense strand
ugaaggcgcuguauaauga

SEQ ID NO: 244285 - RNA, 19 nt, Homo sapiens
  misc_RNA (1)...(19): siRNA sense strand
gaucaucacuccauucaga

SEQ ID NO: 244286 - RNA, 19 nt, Homo sapiens
  misc_RNA (1)...(19): siRNA sense strand
ggacagcuauugaagcaaa

SEQ ID NO: 244287 - RNA, 19 nt, Homo sapiens
  misc_RNA (1)...(19): siRNA sense strand
agaagcaucugaagaauuu

SEQ ID NO: 244288 - RNA, 19 nt, Homo sapiens
  misc_RNA (1)...(19): siRNA sense strand
gcagugagagcaacaaaua

SEQ ID NO: 244289 - RNA, 19 nt, Homo sapiens
  misc_RNA (1)...(19): siRNA sense strand
ggaguucgauuaucaacaa

SEQ ID NO: 244290 - RNA, 19 nt, Homo sapiens
  misc_RNA (1)...(19): siRNA sense strand
gaaagugggucaugugaag

SEQ ID NO: 244291 - RNA, 19 nt, Homo sapiens
  misc_RNA (1)...(19): siRNA sense strand
gaacucaaauugccaccaa

SEQ ID NO: 244292 - RNA, 19 nt, Homo sapiens
  misc_RNA (1)...(19): siRNA sense strand
gaaauagccaucaauguga

SEQ ID NO: 244293 - RNA, 19 nt, Homo sapiens
  misc_RNA (1)...(19): siRNA sense strand
ggaggaagcuaaagaugau

SEQ ID NO: 244294 - RNA, 19 nt, Homo sapiens
  misc_RNA (1)...(19): siRNA sense strand
caacagaagcaccguauuu

SEQ ID NO: 244295 - RNA, 19 nt, Homo sapiens
  misc_RNA (1)...(19): siRNA sense strand
guagauggauauucagaaa

SEQ ID NO: 244296 - RNA, 19 nt, Homo sapiens
  misc_RNA (1)...(19): siRNA sense strand
ggaguauaaugacauauga

SEQ ID NO: 244297 - RNA, 19 nt, Homo sapiens
  misc_RNA (1)...(19): siRNA sense strand
gaagugugauucugguaaa

SEQ ID NO: 244298 - RNA, 19 nt, Homo sapiens
  misc_RNA (1)...(19): siRNA sense strand
gaacuaaagaggaugauau

SEQ ID NO: 244299 - RNA, 19 nt, Homo sapiens
  misc_RNA (1)...(19): siRNA sense strand
cagaggagcucauuacuag

SEQ ID NO: 244300 - RNA, 19 nt, Homo sapiens
  misc_RNA (1)...(19): siRNA sense strand
uuacagagaucguacaaga

SEQ ID NO: 244301 - RNA, 19 nt, Homo sapiens
  misc_RNA (1)...(19): siRNA sense strand
gaauagugccaaaguuuaa

SEQ ID NO: 244302 - RNA, 19 nt, Homo sapiens
  misc_RNA (1)...(19): siRNA sense strand
guacauccaucacgccauu

SEQ ID NO: 244303 - RNA, 19 nt, Homo sapiens
  misc_RNA (1)...(19): siRNA sense strand
agaauaaucugcccagguu

SEQ ID NO: 244304 - RNA, 19 nt, Homo sapiens
  misc_RNA (1)...(19): siRNA sense strand
gcaaaccaguucuuuccaa

SEQ ID NO: 244305 - RNA, 19 nt, Homo sapiens
  misc_RNA (1)...(19): siRNA sense strand
gcucagguguuugauuuaa

SEQ ID NO: 244306 - RNA, 19 nt, Homo sapiens
  misc_RNA (1)...(19): siRNA sense strand
gaacaauuacuuugggauu

SEQ ID NO: 244307 - RNA, 19 nt, Homo sapiens
  misc_RNA (1)...(19): siRNA sense strand
gagcaacaaauaacuguaa

SEQ ID NO: 244308 - RNA, 19 nt, Homo sapiens
  misc_RNA (1)...(19): siRNA sense strand
gcacuaaacagcaccgauu

SEQ ID NO: 244309 - RNA, 19 nt, Homo sapiens
  misc_RNA (1)...(19): siRNA sense strand
gaaguugaccucucagaug

SEQ ID NO: 244310 - RNA, 19 nt, Homo sapiens
  misc_RNA (1)...(19): siRNA sense strand
gagauuccuuggcuuuauu

SEQ ID NO: 244311 - RNA, 19 nt, Homo sapiens
  misc_RNA (1)...(19): siRNA sense strand
gcgaguauccaaugccuua

SEQ ID NO: 244312 - RNA, 19 nt, Homo sapiens
  misc_RNA (1)...(19): siRNA sense strand
ggaccaagaccaguauuaa

SEQ ID NO: 244313 - RNA, 19 nt, Homo sapiens
  misc_RNA (1)...(19): siRNA sense strand
uggcaaacauugauccuuu

SEQ ID NO: 244314 - RNA, 19 nt, Homo sapiens
  misc_RNA (1)...(19): siRNA sense strand
gcagaggagcucauuacua

SEQ ID NO: 244315 - RNA, 19 nt, Homo sapiens
  misc_RNA (1)...(19): siRNA sense strand
caaaccaguucuuuccaaa

SEQ ID NO: 244316 - RNA, 19 nt, Homo sapiens
  misc_RNA (1)...(19): siRNA sense strand
gaagagcgaguauccaaug

SEQ ID NO: 244317 - RNA, 19 nt, Homo sapiens
  misc_RNA (1)...(19): siRNA sense strand
gcaccucggucuccagaug

SEQ ID NO: 244318 - RNA, 19 nt, Homo sapiens
  misc_RNA (1)...(19): siRNA sense strand
uaaagaugauggugccaaa

SEQ ID NO: 244319 - RNA, 19 nt, Homo sapiens
  misc_RNA (1)...(19): siRNA sense strand
cggcucagguguuugauuu

SEQ ID NO: 244320 - RNA, 19 nt, Homo sapiens
  misc_RNA (1)...(19): siRNA sense strand
cgaauagugccaaaguuua

SEQ ID NO: 244321 - RNA, 19 nt, Homo sapiens
  misc_RNA (1)...(19): siRNA sense strand
caagagacacugccacuga

SEQ ID NO: 244322 - RNA, 19 nt, Homo sapiens
  misc_RNA (1)...(19): siRNA sense strand
cagaagaggugucgcagau

SEQ ID NO: 244323 - RNA, 19 nt, Homo sapiens
  misc_RNA (1)...(19): siRNA sense strand
ccuggaaguuguagcaaua

SEQ ID NO: 244324 - RNA, 19 nt, Homo sapiens
  misc_RNA (1)...(19): siRNA sense strand
gcugggaguucgauuauca

SEQ ID NO: 244325 - RNA, 19 nt, Homo sapiens
  misc_RNA (1)...(19): siRNA sense strand
gggcaaauaguuuaaagaa

SEQ ID NO: 244326 - RNA, 19 nt, Homo sapiens
  misc_RNA (1)...(19): siRNA sense strand
ggaacgagccaguaccaaa

SEQ ID NO: 244327 - RNA, 19 nt, Homo sapiens
  misc_RNA (1)...(19): siRNA sense strand
caacuugaauaaacagugu

SEQ ID NO: 244328 - RNA, 19 nt, Homo sapiens
  misc_RNA (1)...(19): siRNA sense strand
uaucauaccuccaauugca

SEQ ID NO: 244329 - RNA, 19 nt, Homo sapiens
  misc_RNA (1)...(19): siRNA sense strand
gaaguuguagcaauauuug

SEQ ID NO: 244330 - RNA, 19 nt, Homo sapiens
  misc_RNA (1)...(19): siRNA sense strand
ggaaguuguagcaauauuu

SEQ ID NO: 244331 - RNA, 19 nt, Homo sapiens
  misc_RNA (1)...(19): siRNA sense strand
gaaaagacguaugacaaaa

SEQ ID NO: 244332 - RNA, 19 nt, Homo sapiens
  misc_RNA (1)...(19): siRNA sense strand
gguggaguauaaugacaua

SEQ ID NO: 244333 - RNA, 19 nt, Homo sapiens
  misc_RNA (1)...(19): siRNA sense strand
gaaggacauuauagaagau

SEQ ID NO: 244334 - RNA, 19 nt, Homo sapiens
  misc_RNA (1)...(19): siRNA sense strand
ugaaauagccaucaaugug

SEQ ID NO: 244335 - RNA, 19 nt, Homo sapiens
  misc_RNA (1)...(19): siRNA sense strand
ucauuaaacugcagcauca

SEQ ID NO: 244336 - RNA, 19 nt, Homo sapiens
  misc_RNA (1)...(19): siRNA sense strand
caaaagaugugcagugaga

SEQ ID NO: 244337 - RNA, 19 nt, Homo sapiens
  misc_RNA (1)...(19): siRNA sense strand
gcacagaaacagaugaauc

SEQ ID NO: 244338 - RNA, 19 nt, Homo sapiens
  misc_RNA (1)...(19): siRNA sense strand
caguaaauguucaguccua

SEQ ID NO: 244339 - RNA, 19 nt, Homo sapiens
  misc_RNA (1)...(19): siRNA sense strand
cauccaauauguccacuug

SEQ ID NO: 244340 - RNA, 19 nt, Homo sapiens
  misc_RNA (1)...(19): siRNA sense strand
ggacuacccuggccuccau

SEQ ID NO: 244341 - RNA, 19 nt, Homo sapiens
  misc_RNA (1)...(19): siRNA sense strand
gggcagauccggaccaaga

SEQ ID NO: 244342 - RNA, 19 nt, Homo sapiens
  misc_RNA (1)...(19): siRNA sense strand
gacaagauccuggaaguug

SEQ ID NO: 244343 - RNA, 19 nt, Homo sapiens
  misc_RNA (1)...(19): siRNA sense strand
ggagguggaauuacagaaa

SEQ ID NO: 244344 - RNA, 19 nt, Homo sapiens
  misc_RNA (1)...(19): siRNA sense strand
aacaacagcuucacgauca

SEQ ID NO: 244345 - RNA, 19 nt, Homo sapiens
  misc_RNA (1)...(19): siRNA sense strand
gaccaagaccaguauuaaa

SEQ ID NO: 244346 - RNA, 19 nt, Homo sapiens
  misc_RNA (1)...(19): siRNA sense strand
aaacugauccgcaaagugu

SEQ ID NO: 244347 - RNA, 19 nt, Homo sapiens
  misc_RNA (1)...(19): siRNA sense strand
gguacacacugccugcaaa

SEQ ID NO: 244348 - RNA, 19 nt, Homo sapiens
  misc_RNA (1)...(19): siRNA sense strand
ccacugaaauagccaucaa

SEQ ID NO: 244349 - RNA, 19 nt, Homo sapiens
  misc_RNA (1)...(19): siRNA sense strand
gaucguacaagaauuuaga

SEQ ID NO: 244350 - RNA, 19 nt, Homo sapiens
  misc_RNA (1)...(19): siRNA sense strand
gaacaugcaguggucauau

SEQ ID NO: 244351 - RNA, 19 nt, Homo sapiens
  misc_RNA (1)...(19): siRNA sense strand
uuggacagguggaguauaa

SEQ ID NO: 244352 - RNA, 19 nt, Homo sapiens
  misc_RNA (1)...(19): siRNA sense strand
ccucucagaugcuagugua

SEQ ID NO: 244353 - RNA, 19 nt, Homo sapiens
  misc_RNA (1)...(19): siRNA sense strand
ggaauuaaagagcuuggaa

SEQ ID NO: 244354 - RNA, 19 nt, Homo sapiens
  misc_RNA (1)...(19): siRNA sense strand
ugaaacagaaucuuugcua

SEQ ID NO: 244355 - RNA, 19 nt, Homo sapiens
  misc_RNA (1)...(19): siRNA sense strand
ggaaguguagguuggguuu

SEQ ID NO: 244356 - RNA, 19 nt, Homo sapiens
  misc_RNA (1)...(19): siRNA sense strand
ggagaggauucgucugaca

SEQ ID NO: 244357 - RNA, 19 nt, Homo sapiens
  misc_RNA (1)...(19): siRNA sense strand
cucaaagucucugauauuu

SEQ ID NO: 244358 - RNA, 19 nt, Homo sapiens
  misc_RNA (1)...(19): siRNA sense strand
gccaaagaaucaauaacug

SEQ ID NO: 244359 - RNA, 19 nt, Homo sapiens
  misc_RNA (1)...(19): siRNA sense strand
gacgcuaugugaaacugua

SEQ ID NO: 244360 - RNA, 19 nt, Homo sapiens
  misc_RNA (1)...(19): siRNA sense strand
gaugguuucuguagagcaa

SEQ ID NO: 244361 - RNA, 19 nt, Homo sapiens
  misc_RNA (1)...(19): siRNA sense strand
gaagcaaaccaguucuuuc

SEQ ID NO: 244362 - RNA, 19 nt, Homo sapiens
  misc_RNA (1)...(19): siRNA sense strand
gaacuggcccaugcuguga

SEQ ID NO: 244363 - RNA, 19 nt, Homo sapiens
  misc_RNA (1)...(19): siRNA sense strand
aagauaagcagaaguguga

SEQ ID NO: 244364 - RNA, 19 nt, Homo sapiens
  misc_RNA (1)...(19): siRNA sense strand
ccagaaagccgucaaacca

SEQ ID NO: 244365 - RNA, 19 nt, Homo sapiens
  misc_RNA (1)...(19): siRNA sense strand
gaagagucccugggugaaa

SEQ ID NO: 244366 - RNA, 19 nt, Homo sapiens
  misc_RNA (1)...(19): siRNA sense strand
gccaagacgcuaugugaaa

SEQ ID NO: 244367 - RNA, 19 nt, Homo sapiens
  misc_RNA (1)...(19): siRNA sense strand
gacaauuuccggauucuug

SEQ ID NO: 244368 - RNA, 19 nt, Homo sapiens
  misc_RNA (1)...(19): siRNA sense strand
ucagaaguuugacaauuuc

SEQ ID NO: 244369 - RNA, 19 nt, Homo sapiens
  misc_RNA (1)...(19): siRNA sense strand
ggagcucauuacuaggaua

SEQ ID NO: 244370 - RNA, 19 nt, Homo sapiens
  misc_RNA (1)...(19): siRNA sense strand
gacaaaaccuuggaaaaug

SEQ ID NO: 244371 - RNA, 19 nt, Homo sapiens
  misc_RNA (1)...(19): siRNA sense strand
ggacagguggaguauaaug

SEQ ID NO: 244372 - RNA, 19 nt, Homo sapiens
  misc_RNA (1)...(19): siRNA sense strand
gcaccgauuccgaugguuu

SEQ ID NO: 244373 - RNA, 19 nt, Homo sapiens
  misc_RNA (1)...(19): siRNA sense strand
gauuaugacagcacagaaa

SEQ ID NO: 244374 - RNA, 19 nt, Homo sapiens
  misc_RNA (1)...(19): siRNA sense strand
ucagguguuugauuuaaug

SEQ ID NO: 244375 - RNA, 19 nt, Homo sapiens
  misc_RNA (1)...(19): siRNA sense strand
uagauuccguagauggaua

SEQ ID NO: 244376 - RNA, 19 nt, Homo sapiens
  misc_RNA (1)...(19): siRNA sense strand
uacagaaacugacagagau

SEQ ID NO: 244377 - RNA, 19 nt, Homo sapiens
  misc_RNA (1)...(19): siRNA sense strand
agacacugccacugaaaua

SEQ ID NO: 244378 - RNA, 19 nt, Homo sapiens
  misc_RNA (1)...(19): siRNA sense strand
gcaugcaaauggcaguuuc

SEQ ID NO: 244379 - RNA, 19 nt, Homo sapiens
  misc_RNA (1)...(19): siRNA sense strand
gaugugguauggaguccuu

SEQ ID NO: 244380 - RNA, 19 nt, Homo sapiens
  misc_RNA (1)...(19): siRNA sense strand
ggcagaagcucucaaguuc

SEQ ID NO: 244381 - RNA, 19 nt, Homo sapiens
  misc_RNA (1)...(19): siRNA sense strand
uacaaggccugcagaauuu

SEQ ID NO: 244382 - RNA, 19 nt, Homo sapiens
  misc_RNA (1)...(19): siRNA sense strand
gcaacagccucaccaagga

SEQ ID NO: 244383 - RNA, 19 nt, Homo sapiens
  misc_RNA (1)...(19): siRNA sense strand
caaauaccuucaacugaga

SEQ ID NO: 244384 - RNA, 19 nt, Homo sapiens
  misc_RNA (1)...(19): siRNA sense strand
cagagaagccucaccauug

SEQ ID NO: 244385 - RNA, 19 nt, Homo sapiens
  misc_RNA (1)...(19): siRNA sense strand
agagaagccucaccauuga

SEQ ID NO: 244386 - RNA, 19 nt, Homo sapiens
  misc_RNA (1)...(19): siRNA sense strand
cuacaaggccugcagaauu

SEQ ID NO: 244387 - RNA, 19 nt, Homo sapiens
  misc_RNA (1)...(19): siRNA sense strand
augagcagcuggccaaaua

SEQ ID NO: 244388 - RNA, 19 nt, Homo sapiens
  misc_RNA (1)...(19): siRNA sense strand
accaaggacuccaugaaua

SEQ ID NO: 244389 - RNA, 19 nt, Homo sapiens
  misc_RNA (1)...(19): siRNA sense strand
ucacagagcucagcaacag

SEQ ID NO: 244390 - RNA, 19 nt, Homo sapiens
  misc_RNA (1)...(19): siRNA sense strand
gcuguaacuucuucguuga

SEQ ID NO: 244391 - RNA, 19 nt, Homo sapiens
  misc_RNA (1)...(19): siRNA sense strand
ccaaggacuccaugaauau

SEQ ID NO: 244392 - RNA, 19 nt, Homo sapiens
  misc_RNA (1)...(19): siRNA sense strand
cagaagcucucaaguucau

SEQ ID NO: 244393 - RNA, 19 nt, Homo sapiens
  misc_RNA (1)...(19): siRNA sense strand
gauuugggcuguaacuucu

SEQ ID NO: 244394 - RNA, 19 nt, Homo sapiens
  misc_RNA (1)...(19): siRNA sense strand
gaagcucucaaguucauug

SEQ ID NO: 244395 - RNA, 19 nt, Homo sapiens
  misc_RNA (1)...(19): siRNA sense strand
ccagagaagccucaccauu

SEQ ID NO: 244396 - RNA, 19 nt, Homo sapiens
  misc_RNA (1)...(19): siRNA sense strand
caaagcccauauccacaug

SEQ ID NO: 244397 - RNA, 19 nt, Homo sapiens
  misc_RNA (1)...(19): siRNA sense strand
ggauuugggcuguaacuuc

SEQ ID NO: 244398 - RNA, 19 nt, Homo sapiens
  misc_RNA (1)...(19): siRNA sense strand
gccaaauaccuucaacuga

SEQ ID NO: 244399 - RNA, 19 nt, Homo sapiens
  misc_RNA (1)...(19): siRNA sense strand
uauauaugcagguggauuu

SEQ ID NO: 244400 - RNA, 19 nt, Homo sapiens
  misc_RNA (1)...(19): siRNA sense strand
cagcgggacuugcgaaagg

SEQ ID NO: 244401 - RNA, 19 nt, Homo sapiens
  misc_RNA (1)...(19): siRNA sense strand
cugcagaauuucccagaga

SEQ ID NO: 244402 - RNA, 19 nt, Homo sapiens
  misc_RNA (1)...(19): siRNA sense strand
uggcagaagcucucaaguu

SEQ ID NO: 244403 - RNA, 19 nt, Homo sapiens
  misc_RNA (1)...(19): siRNA sense strand
agaaagugcugcgcuacga

SEQ ID NO: 244404 - RNA, 19 nt, Homo sapiens
  misc_RNA (1)...(19): siRNA sense strand
caaguucauugaucguaag

SEQ ID NO: 244405 - RNA, 19 nt, Homo sapiens
  misc_RNA (1)...(19): siRNA sense strand
ggccaaauaccuucaacug

SEQ ID NO: 244406 - RNA, 19 nt, Homo sapiens
  misc_RNA (1)...(19): siRNA sense strand
gcagaagcucucaaguuca

SEQ ID NO: 244407 - RNA, 19 nt, Homo sapiens
  misc_RNA (1)...(19): siRNA sense strand
acacaguggucccagauac

SEQ ID NO: 244408 - RNA, 19 nt, Homo sapiens
  misc_RNA (1)...(19): siRNA sense strand
gcagcuggccaaauaccuu

SEQ ID NO: 244409 - RNA, 19 nt, Homo sapiens
  misc_RNA (1)...(19): siRNA sense strand
ggaguugacacuggcagaa

SEQ ID NO: 244410 - RNA, 19 nt, Homo sapiens
  misc_RNA (1)...(19): siRNA sense strand
caccaaggacuccaugaau

SEQ ID NO: 244411 - RNA, 19 nt, Homo sapiens
  misc_RNA (1)...(19): siRNA sense strand
ucaccaaggacuccaugaa

SEQ ID NO: 244412 - RNA, 19 nt, Homo sapiens
  misc_RNA (1)...(19): siRNA sense strand
gcuggaccaucgagacaag

SEQ ID NO: 244413 - RNA, 19 nt, Homo sapiens
  misc_RNA (1)...(19): siRNA sense strand
ggaccaucgagacaaggua

SEQ ID NO: 244414 - RNA, 19 nt, Homo sapiens
  misc_RNA (1)...(19): siRNA sense strand
gacacaguggucccagaua

SEQ ID NO: 244415 - RNA, 19 nt, Homo sapiens
  misc_RNA (1)...(19): siRNA sense strand
gaccaucgagacaagguau

SEQ ID NO: 244416 - RNA, 19 nt, Homo sapiens
  misc_RNA (1)...(19): siRNA sense strand
ggacuccaugaauaucaaa

SEQ ID NO: 244417 - RNA, 19 nt, Homo sapiens
  misc_RNA (1)...(19): siRNA sense strand
gagcgacuccaggaagcua

SEQ ID NO: 244418 - RNA, 19 nt, Homo sapiens
  misc_RNA (1)...(19): siRNA sense strand
cuacgagaccuucaucagu

SEQ ID NO: 244419 - RNA, 19 nt, Homo sapiens
  misc_RNA (1)...(19): siRNA sense strand
uaacuucuucguugacaca

SEQ ID NO: 244420 - RNA, 19 nt, Homo sapiens
  misc_RNA (1)...(19): siRNA sense strand
ucaaagcccauauccacau

SEQ ID NO: 244421 - RNA, 19 nt, Homo sapiens
  misc_RNA (1)...(19): siRNA sense strand
ugcagaauuucccagagaa

SEQ ID NO: 244422 - RNA, 19 nt, Homo sapiens
  misc_RNA (1)...(19): siRNA sense strand
auacuucacgcaucuaugu

SEQ ID NO: 244423 - RNA, 19 nt, Homo sapiens
  misc_RNA (1)...(19): siRNA sense strand
gggcuuagagaacuacaag

SEQ ID NO: 244424 - RNA, 19 nt, Homo sapiens
  misc_RNA (1)...(19): siRNA sense strand
aagcccauauccacauguu

SEQ ID NO: 244425 - RNA, 19 nt, Homo sapiens
  misc_RNA (1)...(19): siRNA sense strand
acgagaccuucaucaguga

SEQ ID NO: 244426 - RNA, 19 nt, Homo sapiens
  misc_RNA (1)...(19): siRNA sense strand
gggcuguaacuucuucguu

SEQ ID NO: 244427 - RNA, 19 nt, Homo sapiens
  misc_RNA (1)...(19): siRNA sense strand
uaccuucaacugagaaaug

SEQ ID NO: 244428 - RNA, 19 nt, Homo sapiens
  misc_RNA (1)...(19): siRNA sense strand
gcagaauuucccagagaag

SEQ ID NO: 244429 - RNA, 19 nt, Homo sapiens
  misc_RNA (1)...(19): siRNA sense strand
ggcagaagcucucaaguuc

SEQ ID NO: 244430 - RNA, 19 nt, Homo sapiens
  misc_RNA (1)...(19): siRNA sense strand
uacaaggccugcagaauuu

SEQ ID NO: 244431 - RNA, 19 nt, Homo sapiens
  misc_RNA (1)...(19): siRNA sense strand
gcaacagccucaccaagga

SEQ ID NO: 244432 - RNA, 19 nt, Homo sapiens
  misc_RNA (1)...(19): siRNA sense strand
caaauaccuucaacugaga

SEQ ID NO: 244433 - RNA, 19 nt, Homo sapiens
  misc_RNA (1)...(19): siRNA sense strand
cagagaagccucaccauug

SEQ ID NO: 244434 - RNA, 19 nt, Homo sapiens
  misc_RNA (1)...(19): siRNA sense strand
agagaagccucaccauuga

SEQ ID NO: 244435 - RNA, 19 nt, Homo sapiens
  misc_RNA (1)...(19): siRNA sense strand
cuacaaggccugcagaauu

SEQ ID NO: 244436 - RNA, 19 nt, Homo sapiens
  misc_RNA (1)...(19): siRNA sense strand
augagcagcuggccaaaua

SEQ ID NO: 244437 - RNA, 19 nt, Homo sapiens
  misc_RNA (1)...(19): siRNA sense strand
accaaggacuccaugaaua

SEQ ID NO: 244438 - RNA, 19 nt, Homo sapiens
  misc_RNA (1)...(19): siRNA sense strand
ucacagagcucagcaacag

SEQ ID NO: 244439 - RNA, 19 nt, Homo sapiens
  misc_RNA (1)...(19): siRNA sense strand
gcuguaacuucuucguuga

SEQ ID NO: 244440 - RNA, 19 nt, Homo sapiens
  misc_RNA (1)...(19): siRNA sense strand
ccaaggacuccaugaauau

SEQ ID NO: 244441 - RNA, 19 nt, Homo sapiens
  misc_RNA (1)...(19): siRNA sense strand
cagaagcucucaaguucau

SEQ ID NO: 244442 - RNA, 19 nt, Homo sapiens
  misc_RNA (1)...(19): siRNA sense strand
gauuugggcuguaacuucu

SEQ ID NO: 244443 - RNA, 19 nt, Homo sapiens
  misc_RNA (1)...(19): siRNA sense strand
gaagcucucaaguucauug

SEQ ID NO: 244444 - RNA, 19 nt, Homo sapiens
  misc_RNA (1)...(19): siRNA sense strand
ccagagaagccucaccauu

SEQ ID NO: 244445 - RNA, 19 nt, Homo sapiens
  misc_RNA (1)...(19): siRNA sense strand
caaagcccauauccacaug

SEQ ID NO: 244446 - RNA, 19 nt, Homo sapiens
  misc_RNA (1)...(19): siRNA sense strand
ggauuugggcuguaacuuc

SEQ ID NO: 244447 - RNA, 19 nt, Homo sapiens
  misc_RNA (1)...(19): siRNA sense strand
gccaaauaccuucaacuga

SEQ ID NO: 244448 - RNA, 19 nt, Homo sapiens
  misc_RNA (1)...(19): siRNA sense strand
uauauaugcagguggauuu

SEQ ID NO: 244449 - RNA, 19 nt, Homo sapiens
  misc_RNA (1)...(19): siRNA sense strand
cagcgggacuugcgaaagg

SEQ ID NO: 244450 - RNA, 19 nt, Homo sapiens
  misc_RNA (1)...(19): siRNA sense strand
cugcagaauuucccagaga

SEQ ID NO: 244451 - RNA, 19 nt, Homo sapiens
  misc_RNA (1)...(19): siRNA sense strand
uggcagaagcucucaaguu

SEQ ID NO: 244452 - RNA, 19 nt, Homo sapiens
  misc_RNA (1)...(19): siRNA sense strand
agaaagugcugcgcuacga

SEQ ID NO: 244453 - RNA, 19 nt, Homo sapiens
  misc_RNA (1)...(19): siRNA sense strand
caaguucauugaucguaag

SEQ ID NO: 244454 - RNA, 19 nt, Homo sapiens
  misc_RNA (1)...(19): siRNA sense strand
ggccaaauaccuucaacug

SEQ ID NO: 244455 - RNA, 19 nt, Homo sapiens
  misc_RNA (1)...(19): siRNA sense strand
gcagaagcucucaaguuca

SEQ ID NO: 244456 - RNA, 19 nt, Homo sapiens
  misc_RNA (1)...(19): siRNA sense strand
acacaguggucccagauac

SEQ ID NO: 244457 - RNA, 19 nt, Homo sapiens
  misc_RNA (1)...(19): siRNA sense strand
gcagcuggccaaauaccuu

SEQ ID NO: 244458 - RNA, 19 nt, Homo sapiens
  misc_RNA (1)...(19): siRNA sense strand
ggaguugacacuggcagaa

SEQ ID NO: 244459 - RNA, 19 nt, Homo sapiens
  misc_RNA (1)...(19): siRNA sense strand
caccaaggacuccaugaau

SEQ ID NO: 244460 - RNA, 19 nt, Homo sapiens
  misc_RNA (1)...(19): siRNA sense strand
ucaccaaggacuccaugaa

SEQ ID NO: 244461 - RNA, 19 nt, Homo sapiens
  misc_RNA (1)...(19): siRNA sense strand
gcuggaccaucgagacaag

SEQ ID NO: 244462 - RNA, 19 nt, Homo sapiens
  misc_RNA (1)...(19): siRNA sense strand
ggaccaucgagacaaggua

SEQ ID NO: 244463 - RNA, 19 nt, Homo sapiens
  misc_RNA (1)...(19): siRNA sense strand
gacacaguggucccagaua

SEQ ID NO: 244464 - RNA, 19 nt, Homo sapiens
  misc_RNA (1)...(19): siRNA sense strand
gaccaucgagacaagguau

SEQ ID NO: 244465 - RNA, 19 nt, Homo sapiens
  misc_RNA (1)...(19): siRNA sense strand
ggacuccaugaauaucaaa

SEQ ID NO: 244466 - RNA, 19 nt, Homo sapiens
  misc_RNA (1)...(19): siRNA sense strand
gagcgacuccaggaagcua

SEQ ID NO: 244467 - RNA, 19 nt, Homo sapiens
  misc_RNA (1)...(19): siRNA sense strand
cuacgagaccuucaucagu

SEQ ID NO: 244468 - RNA, 19 nt, Homo sapiens
  misc_RNA (1)...(19): siRNA sense strand
uaacuucuucguugacaca

SEQ ID NO: 244469 - RNA, 19 nt, Homo sapiens
  misc_RNA (1)...(19): siRNA sense strand
ucaaagcccauauccacau

SEQ ID NO: 244470 - RNA, 19 nt, Homo sapiens
  misc_RNA (1)...(19): siRNA sense strand
ugcagaauuucccagagaa

SEQ ID NO: 244471 - RNA, 19 nt, Homo sapiens
  misc_RNA (1)...(19): siRNA sense strand
auacuucacgcaucuaugu

SEQ ID NO: 244472 - RNA, 19 nt, Homo sapiens
  misc_RNA (1)...(19): siRNA sense strand
gggcuuagagaacuacaag

SEQ ID NO: 244473 - RNA, 19 nt, Homo sapiens
  misc_RNA (1)...(19): siRNA sense strand
aagcccauauccacauguu

SEQ ID NO: 244474 - RNA, 19 nt, Homo sapiens
  misc_RNA (1)...(19): siRNA sense strand
acgagaccuucaucaguga

SEQ ID NO: 244475 - RNA, 19 nt, Homo sapiens
  misc_RNA (1)...(19): siRNA sense strand
gggcuguaacuucuucguu

SEQ ID NO: 244476 - RNA, 19 nt, Homo sapiens
  misc_RNA (1)...(19): siRNA sense strand
uaccuucaacugagaaaug

SEQ ID NO: 244477 - RNA, 19 nt, Homo sapiens
  misc_RNA (1)...(19): siRNA sense strand
gcagaauuucccagagaag

SEQ ID NO: 244478 - RNA, 19 nt, Homo sapiens
  misc_RNA (1)...(19): siRNA sense strand
caacaagacuuucauauuc

SEQ ID NO: 244479 - RNA, 19 nt, Homo sapiens
  misc_RNA (1)...(19): siRNA sense strand
gcaaggaggucacggauga

SEQ ID NO: 244480 - RNA, 19 nt, Homo sapiens
  misc_RNA (1)...(19): siRNA sense strand
gagcucagguuucuacaaa

SEQ ID NO: 244481 - RNA, 19 nt, Homo sapiens
  misc_RNA (1)...(19): siRNA sense strand
gaaauugauucugcaguaa

SEQ ID NO: 244482 - RNA, 19 nt, Homo sapiens
  misc_RNA (1)...(19): siRNA sense strand
caaaguggcuccaggaugu

SEQ ID NO: 244483 - RNA, 19 nt, Homo sapiens
  misc_RNA (1)...(19): siRNA sense strand
ugaaauugauucugcagua

SEQ ID NO: 244484 - RNA, 19 nt, Homo sapiens
  misc_RNA (1)...(19): siRNA sense strand
ccacagaucuuccgagaca

SEQ ID NO: 244485 - RNA, 19 nt, Homo sapiens
  misc_RNA (1)...(19): siRNA sense strand
gauccuuacuuuagaauga

SEQ ID NO: 244486 - RNA, 19 nt, Homo sapiens
  misc_RNA (1)...(19): siRNA sense strand
ggacgugucuuucauguac

SEQ ID NO: 244487 - RNA, 19 nt, Homo sapiens
  misc_RNA (1)...(19): siRNA sense strand
ugaccaggauccuuacuuu

SEQ ID NO: 244488 - RNA, 19 nt, Homo sapiens
  misc_RNA (1)...(19): siRNA sense strand
gagcagaucaggaaggauu

SEQ ID NO: 244489 - RNA, 19 nt, Homo sapiens
  misc_RNA (1)...(19): siRNA sense strand
gaaaugcgucaaaggauga

SEQ ID NO: 244490 - RNA, 19 nt, Homo sapiens
  misc_RNA (1)...(19): siRNA sense strand
ggaggucacggaugagaua

SEQ ID NO: 244491 - RNA, 19 nt, Homo sapiens
  misc_RNA (1)...(19): siRNA sense strand
uaaagauguuggugucauu

SEQ ID NO: 244492 - RNA, 19 nt, Homo sapiens
  misc_RNA (1)...(19): siRNA sense strand
ggucaccucauuccauuua

SEQ ID NO: 244493 - RNA, 19 nt, Homo sapiens
  misc_RNA (1)...(19): siRNA sense strand
caucaucgccuguggcuuu

SEQ ID NO: 244494 - RNA, 19 nt, Homo sapiens
  misc_RNA (1)...(19): siRNA sense strand
aaaccaaggucaauaagca

SEQ ID NO: 244495 - RNA, 19 nt, Homo sapiens
  misc_RNA (1)...(19): siRNA sense strand
cuaauaaaccgaauagaga

SEQ ID NO: 244496 - RNA, 19 nt, Homo sapiens
  misc_RNA (1)...(19): siRNA sense strand
cggaugagauagugaaaga

SEQ ID NO: 244497 - RNA, 19 nt, Homo sapiens
  misc_RNA (1)...(19): siRNA sense strand
cacagaagcugaagaggau

SEQ ID NO: 244498 - RNA, 19 nt, Homo sapiens
  misc_RNA (1)...(19): siRNA sense strand
gcaccuaccaguaaucaug

SEQ ID NO: 244499 - RNA, 19 nt, Homo sapiens
  misc_RNA (1)...(19): siRNA sense strand
agaaguaucuguggaagga

SEQ ID NO: 244500 - RNA, 19 nt, Homo sapiens
  misc_RNA (1)...(19): siRNA sense strand
ccaaagaccacaccacuuc

SEQ ID NO: 244501 - RNA, 19 nt, Homo sapiens
  misc_RNA (1)...(19): siRNA sense strand
gggaugagcucagguuucu

SEQ ID NO: 244502 - RNA, 19 nt, Homo sapiens
  misc_RNA (1)...(19): siRNA sense strand
gaccaggauccuuacuuua

SEQ ID NO: 244503 - RNA, 19 nt, Homo sapiens
  misc_RNA (1)...(19): siRNA sense strand
gcucaagaaggcacucaua

SEQ ID NO: 244504 - RNA, 19 nt, Homo sapiens
  misc_RNA (1)...(19): siRNA sense strand
gcauugggaagaucaguuu

SEQ ID NO: 244505 - RNA, 19 nt, Homo sapiens
  misc_RNA (1)...(19): siRNA sense strand
ccaggauccuuacuuuaga

SEQ ID NO: 244506 - RNA, 19 nt, Homo sapiens
  misc_RNA (1)...(19): siRNA sense strand
ccauugaccaggauccuua

SEQ ID NO: 244507 - RNA, 19 nt, Homo sapiens
  misc_RNA (1)...(19): siRNA sense strand
gcuaauaaaccgaauagag

SEQ ID NO: 244508 - RNA, 19 nt, Homo sapiens
  misc_RNA (1)...(19): siRNA sense strand
ugacggaugacgagaagua

SEQ ID NO: 244509 - RNA, 19 nt, Homo sapiens
  misc_RNA (1)...(19): siRNA sense strand
ugacaaagagcuaauaaac

SEQ ID NO: 244510 - RNA, 19 nt, Homo sapiens
  misc_RNA (1)...(19): siRNA sense strand
ucauguaccugaccuucuu

SEQ ID NO: 244511 - RNA, 19 nt, Homo sapiens
  misc_RNA (1)...(19): siRNA sense strand
gacccaaacuccuccaucu

SEQ ID NO: 244512 - RNA, 19 nt, Homo sapiens
  misc_RNA (1)...(19): siRNA sense strand
gaugacggaugacgagaag

SEQ ID NO: 244513 - RNA, 19 nt, Homo sapiens
  misc_RNA (1)...(19): siRNA sense strand
gcagaggcaucuucuucuc

SEQ ID NO: 244514 - RNA, 19 nt, Homo sapiens
  misc_RNA (1)...(19): siRNA sense strand
guaaagauguuggugucau

SEQ ID NO: 244515 - RNA, 19 nt, Homo sapiens
  misc_RNA (1)...(19): siRNA sense strand
caagaaggcacucauagag

SEQ ID NO: 244516 - RNA, 19 nt, Homo sapiens
  misc_RNA (1)...(19): siRNA sense strand
gaucggcuauccuaaacca

SEQ ID NO: 244517 - RNA, 19 nt, Homo sapiens
  misc_RNA (1)...(19): siRNA sense strand
gcgcagaggcaucuucuuc

SEQ ID NO: 244518 - RNA, 19 nt, Homo sapiens
  misc_RNA (1)...(19): siRNA sense strand
caaaggaugaaauugauuc

SEQ ID NO: 244519 - RNA, 19 nt, Homo sapiens
  misc_RNA (1)...(19): siRNA sense strand
guacagacaagcagugcaa

SEQ ID NO: 244520 - RNA, 19 nt, Homo sapiens
  misc_RNA (1)...(19): siRNA sense strand
ucaccucauuccauuuauu

SEQ ID NO: 244521 - RNA, 19 nt, Homo sapiens
  misc_RNA (1)...(19): siRNA sense strand
uaagcucauuguucgguuu

SEQ ID NO: 244522 - RNA, 19 nt, Homo sapiens
  misc_RNA (1)...(19): siRNA sense strand
ggucacggaugagauagug

SEQ ID NO: 244523 - RNA, 19 nt, Homo sapiens
  misc_RNA (1)...(19): siRNA sense strand
caucaacaagacuuucaua

SEQ ID NO: 244524 - RNA, 19 nt, Homo sapiens
  misc_RNA (1)...(19): siRNA sense strand
gagcuaauaaaccgaauag

SEQ ID NO: 244525 - RNA, 19 nt, Homo sapiens
  misc_RNA (1)...(19): siRNA sense strand
ucaagaaggcacucauaga

SEQ ID NO: 244526 - RNA, 19 nt, Homo sapiens
  misc_RNA (1)...(19): siRNA sense strand
gcaacucauucccacagau

SEQ ID NO: 244527 - RNA, 19 nt, Homo sapiens
  misc_RNA (1)...(19): siRNA sense strand
gagagccaccggccaaaga

SEQ ID NO: 244528 - RNA, 19 nt, Homo sapiens
  misc_RNA (1)...(19): siRNA sense strand
ucucugaccuggacuacau

SEQ ID NO: 244529 - RNA, 19 nt, Homo sapiens
  misc_RNA (1)...(19): siRNA sense strand
agacuacgauaagcucauu

SEQ ID NO: 244530 - RNA, 19 nt, Homo sapiens
  misc_RNA (1)...(19): siRNA sense strand
gaugagauagugaaagagu

SEQ ID NO: 244531 - RNA, 19 nt, Homo sapiens
  misc_RNA (1)...(19): siRNA sense strand
gcucguaaggucccucaaa

SEQ ID NO: 244532 - RNA, 19 nt, Homo sapiens
  misc_RNA (1)...(19): siRNA sense strand
caggauccuuacuuuagaa

SEQ ID NO: 244533 - RNA, 19 nt, Homo sapiens
  misc_RNA (1)...(19): siRNA sense strand
gcgaugcuguugagaaugc

SEQ ID NO: 244534 - RNA, 19 nt, Homo sapiens
  misc_RNA (1)...(19): siRNA sense strand
agacuuucauauucucuga

SEQ ID NO: 244535 - RNA, 19 nt, Homo sapiens
  misc_RNA (1)...(19): siRNA sense strand
gaggagcacaggcaguuug

SEQ ID NO: 244536 - RNA, 19 nt, Homo sapiens
  misc_RNA (1)...(19): siRNA sense strand
agauguuggugucauuaaa

SEQ ID NO: 244537 - RNA, 19 nt, Homo sapiens
  misc_RNA (1)...(19): siRNA sense strand
gcuccaggauguauuuaac

SEQ ID NO: 244538 - RNA, 19 nt, Homo sapiens
  misc_RNA (1)...(19): siRNA sense strand
caccucauuccauuuauuu

SEQ ID NO: 244539 - RNA, 19 nt, Homo sapiens
  misc_RNA (1)...(19): siRNA sense strand
uggcgaugcuguugagaau

SEQ ID NO: 244540 - RNA, 19 nt, Homo sapiens
  misc_RNA (1)...(19): siRNA sense strand
gauguggacgugucuuuca

SEQ ID NO: 244541 - RNA, 19 nt, Homo sapiens
  misc_RNA (1)...(19): siRNA sense strand
caacagcaucgccacacaa

SEQ ID NO: 244542 - RNA, 19 nt, Homo sapiens
  misc_RNA (1)...(19): siRNA sense strand
acggauauccagugccuua

SEQ ID NO: 244543 - RNA, 19 nt, Homo sapiens
  misc_RNA (1)...(19): siRNA sense strand
aaagauguuggugucauua

SEQ ID NO: 244544 - RNA, 19 nt, Homo sapiens
  misc_RNA (1)...(19): siRNA sense strand
caucucugcuggagcuguu

SEQ ID NO: 244545 - RNA, 19 nt, Homo sapiens
  misc_RNA (1)...(19): siRNA sense strand
gaugagcucagguuucuac

SEQ ID NO: 244546 - RNA, 19 nt, Homo sapiens
  misc_RNA (1)...(19): siRNA sense strand
gaaggcacucauagagguu

SEQ ID NO: 244547 - RNA, 19 nt, Homo sapiens
  misc_RNA (1)...(19): siRNA sense strand
cagaagcugaagaggauuu

SEQ ID NO: 244548 - RNA, 19 nt, Homo sapiens
  misc_RNA (1)...(19): siRNA sense strand
acgacaagcucgagcagau

SEQ ID NO: 244549 - RNA, 19 nt, Homo sapiens
  misc_RNA (1)...(19): siRNA sense strand
ggucaauaagcaugcguuu

SEQ ID NO: 244550 - RNA, 19 nt, Homo sapiens
  misc_RNA (1)...(19): siRNA sense strand
ccaagcagaucaaaaccaa

SEQ ID NO: 244551 - RNA, 19 nt, Homo sapiens
  misc_RNA (1)...(19): siRNA sense strand
gggaaaugcgucaaaggau

SEQ ID NO: 244552 - RNA, 19 nt, Homo sapiens
  misc_RNA (1)...(19): siRNA sense strand
gauaugaaucagguucuug

SEQ ID NO: 244553 - RNA, 19 nt, Homo sapiens
  misc_RNA (1)...(19): siRNA sense strand
ccagggaacccagcaccua

SEQ ID NO: 244554 - RNA, 19 nt, Homo sapiens
  misc_RNA (1)...(19): siRNA sense strand
gcauguuaccuucaaccaa

SEQ ID NO: 244555 - RNA, 19 nt, Homo sapiens
  misc_RNA (1)...(19): siRNA sense strand
caaccaagugaaaggcauu

SEQ ID NO: 244556 - RNA, 19 nt, Homo sapiens
  misc_RNA (1)...(19): siRNA sense strand
caaaaggcauagacuacga

SEQ ID NO: 244557 - RNA, 19 nt, Homo sapiens
  misc_RNA (1)...(19): siRNA sense strand
gacaagcucgagcagauca

SEQ ID NO: 244558 - RNA, 19 nt, Homo sapiens
  misc_RNA (1)...(19): siRNA sense strand
guggacgugucuuucaugu

SEQ ID NO: 244559 - RNA, 19 nt, Homo sapiens
  misc_RNA (1)...(19): siRNA sense strand
caacucauucccacagauc

SEQ ID NO: 244560 - RNA, 19 nt, Homo sapiens
  misc_RNA (1)...(19): siRNA sense strand
gcucauuguucgguuugga

SEQ ID NO: 244561 - RNA, 19 nt, Homo sapiens
  misc_RNA (1)...(19): siRNA sense strand
ucacacagagauaugaauc

SEQ ID NO: 244562 - RNA, 19 nt, Homo sapiens
  misc_RNA (1)...(19): siRNA sense strand
ugagauagugaaagaguuc

SEQ ID NO: 244563 - RNA, 19 nt, Homo sapiens
  misc_RNA (1)...(19): siRNA sense strand
ucaacagcaucgccacaca

SEQ ID NO: 244564 - RNA, 19 nt, Homo sapiens
  misc_RNA (1)...(19): siRNA sense strand
ucaaaaccaaggucaauaa

SEQ ID NO: 244565 - RNA, 19 nt, Homo sapiens
  misc_RNA (1)...(19): siRNA sense strand
acagugagcccgcaucucu

SEQ ID NO: 244566 - RNA, 19 nt, Homo sapiens
  misc_RNA (1)...(19): siRNA sense strand
gacaucaacaagacuuuca

SEQ ID NO: 244567 - RNA, 19 nt, Homo sapiens
  misc_RNA (1)...(19): siRNA sense strand
acacagagauaugaaucag

SEQ ID NO: 244568 - RNA, 19 nt, Homo sapiens
  misc_RNA (1)...(19): siRNA sense strand
gagaaugccaaggacauca

SEQ ID NO: 244569 - RNA, 19 nt, Homo sapiens
  misc_RNA (1)...(19): siRNA sense strand
cgggaaaugcgucaaagga

SEQ ID NO: 244570 - RNA, 19 nt, Homo sapiens
  misc_RNA (1)...(19): siRNA sense strand
gccuguggcuuugacauca

SEQ ID NO: 244571 - RNA, 19 nt, Homo sapiens
  misc_RNA (1)...(19): siRNA sense strand
uacgauaagcucauuguuc

SEQ ID NO: 244572 - RNA, 19 nt, Homo sapiens
  misc_RNA (1)...(19): siRNA sense strand
ucaauaagcaugcguuuuc

SEQ ID NO: 244573 - RNA, 19 nt, Homo sapiens
  misc_RNA (1)...(19): siRNA sense strand
acccagcaccuaccaguaa

SEQ ID NO: 244574 - RNA, 19 nt, Homo sapiens
  misc_RNA (1)...(19): siRNA sense strand
aggcauagacuacgauaag

SEQ ID NO: 244575 - RNA, 19 nt, Homo sapiens
  misc_RNA (1)...(19): siRNA sense strand
cccaaacuccuccaucuuc

SEQ ID NO: 244576 - RNA, 19 nt, Homo sapiens
  misc_RNA (1)...(19): siRNA sense strand
uaacgugcccuuggucauc

SEQ ID NO: 244577 - RNA, 19 nt, Homo sapiens
  misc_RNA (1)...(19): siRNA sense strand
gguucuugaugccuaugaa

SEQ ID NO: 244578 - RNA, 19 nt, Homo sapiens
  misc_RNA (1)...(19): siRNA sense strand
gcauguaaaccacugaaga

SEQ ID NO: 244579 - RNA, 19 nt, Homo sapiens
  misc_RNA (1)...(19): siRNA sense strand
cauguaaaccacugaagaa

SEQ ID NO: 244580 - RNA, 19 nt, Homo sapiens
  misc_RNA (1)...(19): siRNA sense strand
gcucuuggguuuagcaaaa

SEQ ID NO: 244581 - RNA, 19 nt, Homo sapiens
  misc_RNA (1)...(19): siRNA sense strand
aaaucugucugaugcaugu

SEQ ID NO: 244582 - RNA, 19 nt, Homo sapiens
  misc_RNA (1)...(19): siRNA sense strand
ggcagcaucuucagcucuu

SEQ ID NO: 244583 - RNA, 19 nt, Homo sapiens
  misc_RNA (1)...(19): siRNA sense strand
cuucagcucuuggguuuag

SEQ ID NO: 244584 - RNA, 19 nt, Homo sapiens
  misc_RNA (1)...(19): siRNA sense strand
ccacugaagaagcgaaauc

SEQ ID NO: 244585 - RNA, 19 nt, Homo sapiens
  misc_RNA (1)...(19): siRNA sense strand
cauccuuaacugagaauga

SEQ ID NO: 244586 - RNA, 19 nt, Homo sapiens
  misc_RNA (1)...(19): siRNA sense strand
gcagcaucuucagcucuug

SEQ ID NO: 244587 - RNA, 19 nt, Homo sapiens
  misc_RNA (1)...(19): siRNA sense strand
cugcauccuuaacugagaa

SEQ ID NO: 244588 - RNA, 19 nt, Homo sapiens
  misc_RNA (1)...(19): siRNA sense strand
gcauguaaaccacugaaga

SEQ ID NO: 244589 - RNA, 19 nt, Homo sapiens
  misc_RNA (1)...(19): siRNA sense strand
cauguaaaccacugaagaa

SEQ ID NO: 244590 - RNA, 19 nt, Homo sapiens
  misc_RNA (1)...(19): siRNA sense strand
gcucuuggguuuagcaaaa

SEQ ID NO: 244591 - RNA, 19 nt, Homo sapiens
  misc_RNA (1)...(19): siRNA sense strand
aaaucugucugaugcaugu

SEQ ID NO: 244592 - RNA, 19 nt, Homo sapiens
  misc_RNA (1)...(19): siRNA sense strand
ggcagcaucuucagcucuu

SEQ ID NO: 244593 - RNA, 19 nt, Homo sapiens
  misc_RNA (1)...(19): siRNA sense strand
cuucagcucuuggguuuag

SEQ ID NO: 244594 - RNA, 19 nt, Homo sapiens
  misc_RNA (1)...(19): siRNA sense strand
ccacugaagaagcgaaauc

SEQ ID NO: 244595 - RNA, 19 nt, Homo sapiens
  misc_RNA (1)...(19): siRNA sense strand
cauccuuaacugagaauga

SEQ ID NO: 244596 - RNA, 19 nt, Homo sapiens
  misc_RNA (1)...(19): siRNA sense strand
gcagcaucuucagcucuug

SEQ ID NO: 244597 - RNA, 19 nt, Homo sapiens
  misc_RNA (1)...(19): siRNA sense strand
cugcauccuuaacugagaa

SEQ ID NO: 244598 - RNA, 19 nt, Homo sapiens
  misc_RNA (1)...(19): siRNA sense strand
gcauguaaaccacugaaga

SEQ ID NO: 244599 - RNA, 19 nt, Homo sapiens
  misc_RNA (1)...(19): siRNA sense strand
cauguaaaccacugaagaa

SEQ ID NO: 244600 - RNA, 19 nt, Homo sapiens
  misc_RNA (1)...(19): siRNA sense strand
gcucuuggguuuagcaaaa

SEQ ID NO: 244601 - RNA, 19 nt, Homo sapiens
  misc_RNA (1)...(19): siRNA sense strand
aaaucugucugaugcaugu

SEQ ID NO: 244602 - RNA, 19 nt, Homo sapiens
  misc_RNA (1)...(19): siRNA sense strand
ggcagcaucuucagcucuu

SEQ ID NO: 244603 - RNA, 19 nt, Homo sapiens
  misc_RNA (1)...(19): siRNA sense strand
cuucagcucuuggguuuag

SEQ ID NO: 244604 - RNA, 19 nt, Homo sapiens
  misc_RNA (1)...(19): siRNA sense strand
ccacugaagaagcgaaauc

SEQ ID NO: 244605 - RNA, 19 nt, Homo sapiens
  misc_RNA (1)...(19): siRNA sense strand
cauccuuaacugagaauga

SEQ ID NO: 244606 - RNA, 19 nt, Homo sapiens
  misc_RNA (1)...(19): siRNA sense strand
gcagcaucuucagcucuug

SEQ ID NO: 244607 - RNA, 19 nt, Homo sapiens
  misc_RNA (1)...(19): siRNA sense strand
cugcauccuuaacugagaa

SEQ ID NO: 244608 - RNA, 19 nt, Homo sapiens
  misc_RNA (1)...(19): siRNA sense strand
gcauguaaaccacugaaga

SEQ ID NO: 244609 - RNA, 19 nt, Homo sapiens
  misc_RNA (1)...(19): siRNA sense strand
cauguaaaccacugaagaa

SEQ ID NO: 244610 - RNA, 19 nt, Homo sapiens
  misc_RNA (1)...(19): siRNA sense strand
gcucuuggguuuagcaaaa

SEQ ID NO: 244611 - RNA, 19 nt, Homo sapiens
  misc_RNA (1)...(19): siRNA sense strand
aaaucugucugaugcaugu

SEQ ID NO: 244612 - RNA, 19 nt, Homo sapiens
  misc_RNA (1)...(19): siRNA sense strand
ggcagcaucuucagcucuu

SEQ ID NO: 244613 - RNA, 19 nt, Homo sapiens
  misc_RNA (1)...(19): siRNA sense strand
cuucagcucuuggguuuag

SEQ ID NO: 244614 - RNA, 19 nt, Homo sapiens
  misc_RNA (1)...(19): siRNA sense strand
ccacugaagaagcgaaauc

SEQ ID NO: 244615 - RNA, 19 nt, Homo sapiens
  misc_RNA (1)...(19): siRNA sense strand
cauccuuaacugagaauga

SEQ ID NO: 244616 - RNA, 19 nt, Homo sapiens
  misc_RNA (1)...(19): siRNA sense strand
gcagcaucuucagcucuug

SEQ ID NO: 244617 - RNA, 19 nt, Homo sapiens
  misc_RNA (1)...(19): siRNA sense strand
cugcauccuuaacugagaa

SEQ ID NO: 244618 - RNA, 19 nt, Homo sapiens
  misc_RNA (1)...(19): siRNA sense strand
gcauguaaaccacugaaga

SEQ ID NO: 244619 - RNA, 19 nt, Homo sapiens
  misc_RNA (1)...(19): siRNA sense strand
cauguaaaccacugaagaa

SEQ ID NO: 244620 - RNA, 19 nt, Homo sapiens
  misc_RNA (1)...(19): siRNA sense strand
gcucuuggguuuagcaaaa

SEQ ID NO: 244621 - RNA, 19 nt, Homo sapiens
  misc_RNA (1)...(19): siRNA sense strand
aaaucugucugaugcaugu

SEQ ID NO: 244622 - RNA, 19 nt, Homo sapiens
  misc_RNA (1)...(19): siRNA sense strand
ggcagcaucuucagcucuu

SEQ ID NO: 244623 - RNA, 19 nt, Homo sapiens
  misc_RNA (1)...(19): siRNA sense strand
cuucagcucuuggguuuag

SEQ ID NO: 244624 - RNA, 19 nt, Homo sapiens
  misc_RNA (1)...(19): siRNA sense strand
ccacugaagaagcgaaauc

SEQ ID NO: 244625 - RNA, 19 nt, Homo sapiens
  misc_RNA (1)...(19): siRNA sense strand
cauccuuaacugagaauga

SEQ ID NO: 244626 - RNA, 19 nt, Homo sapiens
  misc_RNA (1)...(19): siRNA sense strand
gcagcaucuucagcucuug

SEQ ID NO: 244627 - RNA, 19 nt, Homo sapiens
  misc_RNA (1)...(19): siRNA sense strand
cugcauccuuaacugagaa

SEQ ID NO: 244628 - RNA, 19 nt, Homo sapiens
  misc_RNA (1)...(19): siRNA sense strand
gcauguaaaccacugaaga

SEQ ID NO: 244629 - RNA, 19 nt, Homo sapiens
  misc_RNA (1)...(19): siRNA sense strand
cauguaaaccacugaagaa

SEQ ID NO: 244630 - RNA, 19 nt, Homo sapiens
  misc_RNA (1)...(19): siRNA sense strand
gcucuuggguuuagcaaaa

SEQ ID NO: 244631 - RNA, 19 nt, Homo sapiens
  misc_RNA (1)...(19): siRNA sense strand
aaaucugucugaugcaugu

SEQ ID NO: 244632 - RNA, 19 nt, Homo sapiens
  misc_RNA (1)...(19): siRNA sense strand
ggcagcaucuucagcucuu

SEQ ID NO: 244633 - RNA, 19 nt, Homo sapiens
  misc_RNA (1)...(19): siRNA sense strand
cuucagcucuuggguuuag

SEQ ID NO: 244634 - RNA, 19 nt, Homo sapiens
  misc_RNA (1)...(19): siRNA sense strand
ccacugaagaagcgaaauc

SEQ ID NO: 244635 - RNA, 19 nt, Homo sapiens
  misc_RNA (1)...(19): siRNA sense strand
cauccuuaacugagaauga

SEQ ID NO: 244636 - RNA, 19 nt, Homo sapiens
  misc_RNA (1)...(19): siRNA sense strand
gcagcaucuucagcucuug

SEQ ID NO: 244637 - RNA, 19 nt, Homo sapiens
  misc_RNA (1)...(19): siRNA sense strand
cugcauccuuaacugagaa

SEQ ID NO: 244638 - RNA, 19 nt, Homo sapiens
  misc_RNA (1)...(19): siRNA sense strand
gcauguaaaccacugaaga

SEQ ID NO: 244639 - RNA, 19 nt, Homo sapiens
  misc_RNA (1)...(19): siRNA sense strand
cauguaaaccacugaagaa

SEQ ID NO: 244640 - RNA, 19 nt, Homo sapiens
  misc_RNA (1)...(19): siRNA sense strand
gcucuuggguuuagcaaaa

SEQ ID NO: 244641 - RNA, 19 nt, Homo sapiens
  misc_RNA (1)...(19): siRNA sense strand
aaaucugucugaugcaugu

SEQ ID NO: 244642 - RNA, 19 nt, Homo sapiens
  misc_RNA (1)...(19): siRNA sense strand
ggcagcaucuucagcucuu

SEQ ID NO: 244643 - RNA, 19 nt, Homo sapiens
  misc_RNA (1)...(19): siRNA sense strand
cuucagcucuuggguuuag

SEQ ID NO: 244644 - RNA, 19 nt, Homo sapiens
  misc_RNA (1)...(19): siRNA sense strand
ccacugaagaagcgaaauc

SEQ ID NO: 244645 - RNA, 19 nt, Homo sapiens
  misc_RNA (1)...(19): siRNA sense strand
cauccuuaacugagaauga

SEQ ID NO: 244646 - RNA, 19 nt, Homo sapiens
  misc_RNA (1)...(19): siRNA sense strand
gcagcaucuucagcucuug

SEQ ID NO: 244647 - RNA, 19 nt, Homo sapiens
  misc_RNA (1)...(19): siRNA sense strand
cugcauccuuaacugagaa

SEQ ID NO: 244648 - RNA, 19 nt, Homo sapiens
  misc_RNA (1)...(19): siRNA sense strand
gcauguaaaccacugaaga

SEQ ID NO: 244649 - RNA, 19 nt, Homo sapiens
  misc_RNA (1)...(19): siRNA sense strand
cauguaaaccacugaagaa

SEQ ID NO: 244650 - RNA, 19 nt, Homo sapiens
  misc_RNA (1)...(19): siRNA sense strand
gcucuuggguuuagcaaaa

SEQ ID NO: 244651 - RNA, 19 nt, Homo sapiens
  misc_RNA (1)...(19): siRNA sense strand
aaaucugucugaugcaugu

SEQ ID NO: 244652 - RNA, 19 nt, Homo sapiens
  misc_RNA (1)...(19): siRNA sense strand
ggcagcaucuucagcucuu

SEQ ID NO: 244653 - RNA, 19 nt, Homo sapiens
  misc_RNA (1)...(19): siRNA sense strand
cuucagcucuuggguuuag

SEQ ID NO: 244654 - RNA, 19 nt, Homo sapiens
  misc_RNA (1)...(19): siRNA sense strand
ccacugaagaagcgaaauc

SEQ ID NO: 244655 - RNA, 19 nt, Homo sapiens
  misc_RNA (1)...(19): siRNA sense strand
cauccuuaacugagaauga

SEQ ID NO: 244656 - RNA, 19 nt, Homo sapiens
  misc_RNA (1)...(19): siRNA sense strand
gcagcaucuucagcucuug

SEQ ID NO: 244657 - RNA, 19 nt, Homo sapiens
  misc_RNA (1)...(19): siRNA sense strand
cugcauccuuaacugagaa

SEQ ID NO: 244658 - RNA, 19 nt, Homo sapiens
  misc_RNA (1)...(19): siRNA sense strand
ucaccugacuucugcauga

SEQ ID NO: 244659 - RNA, 19 nt, Homo sapiens
  misc_RNA (1)...(19): siRNA sense strand
gaacugcuccuccauugag

SEQ ID NO: 244660 - RNA, 19 nt, Homo sapiens
  misc_RNA (1)...(19): siRNA sense strand
gcgccucucuggaaaugaa

SEQ ID NO: 244661 - RNA, 19 nt, Homo sapiens
  misc_RNA (1)...(19): siRNA sense strand
ggagucggccuucguguau

SEQ ID NO: 244662 - RNA, 19 nt, Homo sapiens
  misc_RNA (1)...(19): siRNA sense strand
gacaggcagugcaacaaga

SEQ ID NO: 244663 - RNA, 19 nt, Homo sapiens
  misc_RNA (1)...(19): siRNA sense strand
gcagagcucaccugacuuc

SEQ ID NO: 244664 - RNA, 19 nt, Homo sapiens
  misc_RNA (1)...(19): siRNA sense strand
gcagcaaccuggagcucau

SEQ ID NO: 244665 - RNA, 19 nt, Homo sapiens
  misc_RNA (1)...(19): siRNA sense strand
caucggcccuggcacugaa

SEQ ID NO: 244666 - RNA, 19 nt, Homo sapiens
  misc_RNA (1)...(19): siRNA sense strand
caggaucccaagccaauaa

SEQ ID NO: 244667 - RNA, 19 nt, Homo sapiens
  misc_RNA (1)...(19): siRNA sense strand
ccaagccaauaaacugaug

SEQ ID NO: 244668 - RNA, 19 nt, Homo sapiens
  misc_RNA (1)...(19): siRNA sense strand
gggagucggccuucgugua

SEQ ID NO: 244669 - RNA, 19 nt, Homo sapiens
  misc_RNA (1)...(19): siRNA sense strand
cgacagcugcgaccuuaug

SEQ ID NO: 244670 - RNA, 19 nt, Homo sapiens
  misc_RNA (1)...(19): siRNA sense strand
ggaacugcuccuccauuga

SEQ ID NO: 244671 - RNA, 19 nt, Homo sapiens
  misc_RNA (1)...(19): siRNA sense strand
gcaugaagaaugagaaggu

SEQ ID NO: 244672 - RNA, 19 nt, Homo sapiens
  misc_RNA (1)...(19): siRNA sense strand
aaacugaugcgucuacaca

SEQ ID NO: 244673 - RNA, 19 nt, Homo sapiens
  misc_RNA (1)...(19): siRNA sense strand
gucgagcggugccacugua

SEQ ID NO: 244674 - RNA, 19 nt, Homo sapiens
  misc_RNA (1)...(19): siRNA sense strand
caagacaggcagugcaaca

SEQ ID NO: 244675 - RNA, 19 nt, Homo sapiens
  misc_RNA (1)...(19): siRNA sense strand
agcgacagcugcgaccuua

SEQ ID NO: 244676 - RNA, 19 nt, Homo sapiens
  misc_RNA (1)...(19): siRNA sense strand
cuggauauccggccuguga

SEQ ID NO: 244677 - RNA, 19 nt, Homo sapiens
  misc_RNA (1)...(19): siRNA sense strand
gagcggugccacuguaagu

SEQ ID NO: 244678 - RNA, 19 nt, Homo sapiens
  misc_RNA (1)...(19): siRNA sense strand
cucuggaaaugaaguguaa

SEQ ID NO: 244679 - RNA, 19 nt, Homo sapiens
  misc_RNA (1)...(19): siRNA sense strand
gcgcuaugucugcaaguga

SEQ ID NO: 244680 - RNA, 19 nt, Homo sapiens
  misc_RNA (1)...(19): siRNA sense strand
caccugacuucugcaugaa

SEQ ID NO: 244681 - RNA, 19 nt, Homo sapiens
  misc_RNA (1)...(19): siRNA sense strand
gugcggacaaccucagcua

SEQ ID NO: 244682 - RNA, 19 nt, Homo sapiens
  misc_RNA (1)...(19): siRNA sense strand
gaucccaagccaauaaacu

SEQ ID NO: 244683 - RNA, 19 nt, Homo sapiens
  misc_RNA (1)...(19): siRNA sense strand
ggaauuaccuguuggauuu

SEQ ID NO: 244684 - RNA, 19 nt, Homo sapiens
  misc_RNA (1)...(19): siRNA sense strand
ucaacaagaugacggauaa

SEQ ID NO: 244685 - RNA, 19 nt, Homo sapiens
  misc_RNA (1)...(19): siRNA sense strand
gagcaggagucacagauga

SEQ ID NO: 244686 - RNA, 19 nt, Homo sapiens
  misc_RNA (1)...(19): siRNA sense strand
gaaagaaagaucaacaaga

SEQ ID NO: 244687 - RNA, 19 nt, Homo sapiens
  misc_RNA (1)...(19): siRNA sense strand
ggacgaguuugccagauau

SEQ ID NO: 244688 - RNA, 19 nt, Homo sapiens
  misc_RNA (1)...(19): siRNA sense strand
gagcggagauccaggacau

SEQ ID NO: 244689 - RNA, 19 nt, Homo sapiens
  misc_RNA (1)...(19): siRNA sense strand
ggugauaagugucgcuuuc

SEQ ID NO: 244690 - RNA, 19 nt, Homo sapiens
  misc_RNA (1)...(19): siRNA sense strand
caacaugauggacgaguuu

SEQ ID NO: 244691 - RNA, 19 nt, Homo sapiens
  misc_RNA (1)...(19): siRNA sense strand
gcaggugguguuggaauua

SEQ ID NO: 244692 - RNA, 19 nt, Homo sapiens
  misc_RNA (1)...(19): siRNA sense strand
agaaagaucaacaagauga

SEQ ID NO: 244693 - RNA, 19 nt, Homo sapiens
  misc_RNA (1)...(19): siRNA sense strand
uaaaaugggugauaagugu

SEQ ID NO: 244694 - RNA, 19 nt, Homo sapiens
  misc_RNA (1)...(19): siRNA sense strand
gaugcaauguucuuaggau

SEQ ID NO: 244695 - RNA, 19 nt, Homo sapiens
  misc_RNA (1)...(19): siRNA sense strand
aagugucgcuuucuacgua

SEQ ID NO: 244696 - RNA, 19 nt, Homo sapiens
  misc_RNA (1)...(19): siRNA sense strand
ccagggugcugcagaagga

SEQ ID NO: 244697 - RNA, 19 nt, Homo sapiens
  misc_RNA (1)...(19): siRNA sense strand
ucacucauuuggaaguauu

SEQ ID NO: 244698 - RNA, 19 nt, Homo sapiens
  misc_RNA (1)...(19): siRNA sense strand
ugauaagugucgcuuucua

SEQ ID NO: 244699 - RNA, 19 nt, Homo sapiens
  misc_RNA (1)...(19): siRNA sense strand
ggaaagaaagaucaacaag

SEQ ID NO: 244700 - RNA, 19 nt, Homo sapiens
  misc_RNA (1)...(19): siRNA sense strand
uggacgaguuugccagaua

SEQ ID NO: 244701 - RNA, 19 nt, Homo sapiens
  misc_RNA (1)...(19): siRNA sense strand
gaugacggauaagcucaaa

SEQ ID NO: 244702 - RNA, 19 nt, Homo sapiens
  misc_RNA (1)...(19): siRNA sense strand
gugcucagcuucguguuug

SEQ ID NO: 244703 - RNA, 19 nt, Homo sapiens
  misc_RNA (1)...(19): siRNA sense strand
gcucaaaacccaugugaaa

SEQ ID NO: 244704 - RNA, 19 nt, Homo sapiens
  misc_RNA (1)...(19): siRNA sense strand
gcucaauuagccaagauaa

SEQ ID NO: 244705 - RNA, 19 nt, Homo sapiens
  misc_RNA (1)...(19): siRNA sense strand
ucaacaugauggacgaguu

SEQ ID NO: 244706 - RNA, 19 nt, Homo sapiens
  misc_RNA (1)...(19): siRNA sense strand
ugaucucacucauuuggaa

SEQ ID NO: 244707 - RNA, 19 nt, Homo sapiens
  misc_RNA (1)...(19): siRNA sense strand
guguuuggaugcaauguuc

SEQ ID NO: 244708 - RNA, 19 nt, Homo sapiens
  misc_RNA (1)...(19): siRNA sense strand
uagaguagcaggugguguu

SEQ ID NO: 244709 - RNA, 19 nt, Homo sapiens
  misc_RNA (1)...(19): siRNA sense strand
guguuggaauuaccuguug

SEQ ID NO: 244710 - RNA, 19 nt, Homo sapiens
  misc_RNA (1)...(19): siRNA sense strand
gcggagauccaggacauga

SEQ ID NO: 244711 - RNA, 19 nt, Homo sapiens
  misc_RNA (1)...(19): siRNA sense strand
ggagauccaggacaugaag

SEQ ID NO: 244712 - RNA, 19 nt, Homo sapiens
  misc_RNA (1)...(19): siRNA sense strand
gauaagugucgcuuucuac

SEQ ID NO: 244713 - RNA, 19 nt, Homo sapiens
  misc_RNA (1)...(19): siRNA sense strand
gcaggagucacagaugaga

SEQ ID NO: 244714 - RNA, 19 nt, Homo sapiens
  misc_RNA (1)...(19): siRNA sense strand
ggagcaggagucacagaug

SEQ ID NO: 244715 - RNA, 19 nt, Homo sapiens
  misc_RNA (1)...(19): siRNA sense strand
caaaguugucgcuauugug

SEQ ID NO: 244716 - RNA, 19 nt, Homo sapiens
  misc_RNA (1)...(19): siRNA sense strand
gcucggacagcucaauuag

SEQ ID NO: 244717 - RNA, 19 nt, Homo sapiens
  misc_RNA (1)...(19): siRNA sense strand
caagauaaaaugggugaua

SEQ ID NO: 244718 - RNA, 19 nt, Homo sapiens
  misc_RNA (1)...(19): siRNA sense strand
uggcugucgugccgaguaa

SEQ ID NO: 244719 - RNA, 19 nt, Homo sapiens
  misc_RNA (1)...(19): siRNA sense strand
ggugcucagcuucguguuu

SEQ ID NO: 244720 - RNA, 19 nt, Homo sapiens
  misc_RNA (1)...(19): siRNA sense strand
ucucacucauuuggaagua

SEQ ID NO: 244721 - RNA, 19 nt, Homo sapiens
  misc_RNA (1)...(19): siRNA sense strand
cagcucaauuagccaagau

SEQ ID NO: 244722 - RNA, 19 nt, Homo sapiens
  misc_RNA (1)...(19): siRNA sense strand
gcaauguucuuaggauccu

SEQ ID NO: 244723 - RNA, 19 nt, Homo sapiens
  misc_RNA (1)...(19): siRNA sense strand
uguccagggugcugcagaa

SEQ ID NO: 244724 - RNA, 19 nt, Homo sapiens
  misc_RNA (1)...(19): siRNA sense strand
uggaauuaccuguuggauu

SEQ ID NO: 244725 - RNA, 19 nt, Homo sapiens
  misc_RNA (1)...(19): siRNA sense strand
aguagcaggugguguugga

SEQ ID NO: 244726 - RNA, 19 nt, Homo sapiens
  misc_RNA (1)...(19): siRNA sense strand
gcucuccacagucaacaug

SEQ ID NO: 244727 - RNA, 19 nt, Homo sapiens
  misc_RNA (1)...(19): siRNA sense strand
gguguuggaauuaccuguu

SEQ ID NO: 244728 - RNA, 19 nt, Homo sapiens
  misc_RNA (1)...(19): siRNA sense strand
gaaagaucaacaagaugac

SEQ ID NO: 244729 - RNA, 19 nt, Homo sapiens
  misc_RNA (1)...(19): siRNA sense strand
gugccgaguaaauggauaa

SEQ ID NO: 244730 - RNA, 19 nt, Homo sapiens
  misc_RNA (1)...(19): siRNA sense strand
gcccugaugaucucacuca

SEQ ID NO: 244731 - RNA, 19 nt, Homo sapiens
  misc_RNA (1)...(19): siRNA sense strand
ggaugcaauguucuuagga

SEQ ID NO: 244732 - RNA, 19 nt, Homo sapiens
  misc_RNA (1)...(19): siRNA sense strand
uggaaagaaagaucaacaa

SEQ ID NO: 244733 - RNA, 19 nt, Homo sapiens
  misc_RNA (1)...(19): siRNA sense strand
ggaauuagaugcuccauug

SEQ ID NO: 244734 - RNA, 19 nt, Homo sapiens
  misc_RNA (1)...(19): siRNA sense strand
ggacaucucugccaaaguc

SEQ ID NO: 244735 - RNA, 19 nt, Homo sapiens
  misc_RNA (1)...(19): siRNA sense strand
gcaagcaggugccuacaga

SEQ ID NO: 244736 - RNA, 19 nt, Homo sapiens
  misc_RNA (1)...(19): siRNA sense strand
gaucugcuguuacuucuga

SEQ ID NO: 244737 - RNA, 19 nt, Homo sapiens
  misc_RNA (1)...(19): siRNA sense strand
gcacuaagcagccuucaug

SEQ ID NO: 244738 - RNA, 19 nt, Homo sapiens
  misc_RNA (1)...(19): siRNA sense strand
ccaaggaacugccauacug

SEQ ID NO: 244739 - RNA, 19 nt, Homo sapiens
  misc_RNA (1)...(19): siRNA sense strand
gugcagaugugcccaggua

SEQ ID NO: 244740 - RNA, 19 nt, Homo sapiens
  misc_RNA (1)...(19): siRNA sense strand
gaugggaaauccacagaga

SEQ ID NO: 244741 - RNA, 19 nt, Homo sapiens
  misc_RNA (1)...(19): siRNA sense strand
gaaccaaggaacugccaua

SEQ ID NO: 244742 - RNA, 19 nt, Homo sapiens
  misc_RNA (1)...(19): siRNA sense strand
gggcagcuuucaacuguga

SEQ ID NO: 244743 - RNA, 19 nt, Homo sapiens
  misc_RNA (1)...(19): siRNA sense strand
gaccuggccuuguuacuag

SEQ ID NO: 244744 - RNA, 19 nt, Homo sapiens
  misc_RNA (1)...(19): siRNA sense strand
agagagcacuguuguacuu

SEQ ID NO: 244745 - RNA, 19 nt, Homo sapiens
  misc_RNA (1)...(19): siRNA sense strand
ggaccuggccuuguuacua

SEQ ID NO: 244746 - RNA, 19 nt, Homo sapiens
  misc_RNA (1)...(19): siRNA sense strand
cuaaggaucugcuguuacu

SEQ ID NO: 244747 - RNA, 19 nt, Homo sapiens
  misc_RNA (1)...(19): siRNA sense strand
cagguaaucgagacacuua

SEQ ID NO: 244748 - RNA, 19 nt, Homo sapiens
  misc_RNA (1)...(19): siRNA sense strand
gcaguuggcucaggaugca

SEQ ID NO: 244749 - RNA, 19 nt, Homo sapiens
  misc_RNA (1)...(19): siRNA sense strand
gagacgcugcagagcauua

SEQ ID NO: 244750 - RNA, 19 nt, Homo sapiens
  misc_RNA (1)...(19): siRNA sense strand
guaccuagaaagcuauuug

SEQ ID NO: 244751 - RNA, 19 nt, Homo sapiens
  misc_RNA (1)...(19): siRNA sense strand
gucuggagcugcuaguuga

SEQ ID NO: 244752 - RNA, 19 nt, Homo sapiens
  misc_RNA (1)...(19): siRNA sense strand
gaguggagccucuaaggau

SEQ ID NO: 244753 - RNA, 19 nt, Homo sapiens
  misc_RNA (1)...(19): siRNA sense strand
uaaucgagacacuuacuuu

SEQ ID NO: 244754 - RNA, 19 nt, Homo sapiens
  misc_RNA (1)...(19): siRNA sense strand
gcacucagagccagaccaa

SEQ ID NO: 244755 - RNA, 19 nt, Homo sapiens
  misc_RNA (1)...(19): siRNA sense strand
agagagugcuggagacaca

SEQ ID NO: 244756 - RNA, 19 nt, Homo sapiens
  misc_RNA (1)...(19): siRNA sense strand
gaggaucaggcccaggaua

SEQ ID NO: 244757 - RNA, 19 nt, Homo sapiens
  misc_RNA (1)...(19): siRNA sense strand
gcagggauguaagucagau

SEQ ID NO: 244758 - RNA, 19 nt, Homo sapiens
  misc_RNA (1)...(19): siRNA sense strand
gaauuagaugcuccauuga

SEQ ID NO: 244759 - RNA, 19 nt, Homo sapiens
  misc_RNA (1)...(19): siRNA sense strand
gcagaugugcccagguaau

SEQ ID NO: 244760 - RNA, 19 nt, Homo sapiens
  misc_RNA (1)...(19): siRNA sense strand
ccaaagccuuacaggacuu

SEQ ID NO: 244761 - RNA, 19 nt, Homo sapiens
  misc_RNA (1)...(19): siRNA sense strand
guagccagcggccaggaua

SEQ ID NO: 244762 - RNA, 19 nt, Homo sapiens
  misc_RNA (1)...(19): siRNA sense strand
gcaggaugcccagggauug

SEQ ID NO: 244763 - RNA, 19 nt, Homo sapiens
  misc_RNA (1)...(19): siRNA sense strand
ccaggauaccaaagccuua

SEQ ID NO: 244764 - RNA, 19 nt, Homo sapiens
  misc_RNA (1)...(19): siRNA sense strand
gaagaugccagaaaaggaa

SEQ ID NO: 244765 - RNA, 19 nt, Homo sapiens
  misc_RNA (1)...(19): siRNA sense strand
gcaggcagagcccaagaug

SEQ ID NO: 244766 - RNA, 19 nt, Homo sapiens
  misc_RNA (1)...(19): siRNA sense strand
gaacccagacaaggcacua

SEQ ID NO: 244767 - RNA, 19 nt, Homo sapiens
  misc_RNA (1)...(19): siRNA sense strand
caaagucuugugaccugua

SEQ ID NO: 244768 - RNA, 19 nt, Homo sapiens
  misc_RNA (1)...(19): siRNA sense strand
guugagugcugaccgucuu

SEQ ID NO: 244769 - RNA, 19 nt, Homo sapiens
  misc_RNA (1)...(19): siRNA sense strand
ggcuggaggcccaaacuaa

SEQ ID NO: 244770 - RNA, 19 nt, Homo sapiens
  misc_RNA (1)...(19): siRNA sense strand
gagccagaccaagcacaua

SEQ ID NO: 244771 - RNA, 19 nt, Homo sapiens
  misc_RNA (1)...(19): siRNA sense strand
cugcagagcauuacuugga

SEQ ID NO: 244772 - RNA, 19 nt, Homo sapiens
  misc_RNA (1)...(19): siRNA sense strand
gagcacuguuguacuuggu

SEQ ID NO: 244773 - RNA, 19 nt, Homo sapiens
  misc_RNA (1)...(19): siRNA sense strand
ugaagaauuucggacaucu

SEQ ID NO: 244774 - RNA, 19 nt, Homo sapiens
  misc_RNA (1)...(19): siRNA sense strand
gugggaagaugccagaaaa

SEQ ID NO: 244775 - RNA, 19 nt, Homo sapiens
  misc_RNA (1)...(19): siRNA sense strand
ccgcacaucaucucugcua

SEQ ID NO: 244776 - RNA, 19 nt, Homo sapiens
  misc_RNA (1)...(19): siRNA sense strand
cucuaaggaucugcuguua

SEQ ID NO: 244777 - RNA, 19 nt, Homo sapiens
  misc_RNA (1)...(19): siRNA sense strand
ccagaccaagcacauacua

SEQ ID NO: 244778 - RNA, 19 nt, Homo sapiens
  misc_RNA (1)...(19): siRNA sense strand
ucauugagguagaauuacu

SEQ ID NO: 244779 - RNA, 19 nt, Homo sapiens
  misc_RNA (1)...(19): siRNA sense strand
ucacagggaacccagacaa

SEQ ID NO: 244780 - RNA, 19 nt, Homo sapiens
  misc_RNA (1)...(19): siRNA sense strand
uaguugaggccuugaaugu

SEQ ID NO: 244781 - RNA, 19 nt, Homo sapiens
  misc_RNA (1)...(19): siRNA sense strand
cuguaugccugagguguuu

SEQ ID NO: 244782 - RNA, 19 nt, Homo sapiens
  misc_RNA (1)...(19): siRNA sense strand
caagcuuggcccaggguuu

SEQ ID NO: 244783 - RNA, 19 nt, Homo sapiens
  misc_RNA (1)...(19): siRNA sense strand
cccuguaccuagaaagcua

SEQ ID NO: 244784 - RNA, 19 nt, Homo sapiens
  misc_RNA (1)...(19): siRNA sense strand
gcuccuccauagucugcaa

SEQ ID NO: 244785 - RNA, 19 nt, Homo sapiens
  misc_RNA (1)...(19): siRNA sense strand
aaacuaaggggucacauga

SEQ ID NO: 244786 - RNA, 19 nt, Homo sapiens
  misc_RNA (1)...(19): siRNA sense strand
uugaaugucccaugcaguu

SEQ ID NO: 244787 - RNA, 19 nt, Homo sapiens
  misc_RNA (1)...(19): siRNA sense strand
gcuggaggcccaaacuaag

SEQ ID NO: 244788 - RNA, 19 nt, Homo sapiens
  misc_RNA (1)...(19): siRNA sense strand
ccucuaaggaucugcuguu

SEQ ID NO: 244789 - RNA, 19 nt, Homo sapiens
  misc_RNA (1)...(19): siRNA sense strand
caucucugccaaagucuug

SEQ ID NO: 244790 - RNA, 19 nt, Homo sapiens
  misc_RNA (1)...(19): siRNA sense strand
gaaaaggaaccaaggaacu

SEQ ID NO: 244791 - RNA, 19 nt, Homo sapiens
  misc_RNA (1)...(19): siRNA sense strand
gacugucaccugcaacuuc

SEQ ID NO: 244792 - RNA, 19 nt, Homo sapiens
  misc_RNA (1)...(19): siRNA sense strand
aggagacgcugcagagcau

SEQ ID NO: 244793 - RNA, 19 nt, Homo sapiens
  misc_RNA (1)...(19): siRNA sense strand
gaccaagcacauacuagca

SEQ ID NO: 244794 - RNA, 19 nt, Homo sapiens
  misc_RNA (1)...(19): siRNA sense strand
ggaagaugccagaaaagga

SEQ ID NO: 244795 - RNA, 19 nt, Homo sapiens
  misc_RNA (1)...(19): siRNA sense strand
aaagucuugugaccuguag

SEQ ID NO: 244796 - RNA, 19 nt, Homo sapiens
  misc_RNA (1)...(19): siRNA sense strand
gaagaauuucggacaucuc

SEQ ID NO: 244797 - RNA, 19 nt, Homo sapiens
  misc_RNA (1)...(19): siRNA sense strand
acugucaccugcaacuuca

SEQ ID NO: 244798 - RNA, 19 nt, Homo sapiens
  misc_RNA (1)...(19): siRNA sense strand
gaugugcccagguaaucga

SEQ ID NO: 244799 - RNA, 19 nt, Homo sapiens
  misc_RNA (1)...(19): siRNA sense strand
gaacaaggggcagcuuuca

SEQ ID NO: 244800 - RNA, 19 nt, Homo sapiens
  misc_RNA (1)...(19): siRNA sense strand
aaaguggcaauuagugaau

SEQ ID NO: 244801 - RNA, 19 nt, Homo sapiens
  misc_RNA (1)...(19): siRNA sense strand
aagaugccuugacucuaug

SEQ ID NO: 244802 - RNA, 19 nt, Homo sapiens
  misc_RNA (1)...(19): siRNA sense strand
gcaacugccucaaguauaa

SEQ ID NO: 244803 - RNA, 19 nt, Homo sapiens
  misc_RNA (1)...(19): siRNA sense strand
gaacugggcccuuaaagaa

SEQ ID NO: 244804 - RNA, 19 nt, Homo sapiens
  misc_RNA (1)...(19): siRNA sense strand
gugcaaagaugaucaagaa

SEQ ID NO: 244805 - RNA, 19 nt, Homo sapiens
  misc_RNA (1)...(19): siRNA sense strand
caaagaugaucaagaaaga

SEQ ID NO: 244806 - RNA, 19 nt, Homo sapiens
  misc_RNA (1)...(19): siRNA sense strand
gcuggaagcucaccugcua

SEQ ID NO: 244807 - RNA, 19 nt, Homo sapiens
  misc_RNA (1)...(19): siRNA sense strand
ggagagauucugaggauaa

SEQ ID NO: 244808 - RNA, 19 nt, Homo sapiens
  misc_RNA (1)...(19): siRNA sense strand
gagaaggagucguacuuug

SEQ ID NO: 244809 - RNA, 19 nt, Homo sapiens
  misc_RNA (1)...(19): siRNA sense strand
cgaaaggucuacaagaguu

SEQ ID NO: 244810 - RNA, 19 nt, Homo sapiens
  misc_RNA (1)...(19): siRNA sense strand
ggaagauccuggcagagaa

SEQ ID NO: 244811 - RNA, 19 nt, Homo sapiens
  misc_RNA (1)...(19): siRNA sense strand
ggaaguagaguaugacaug

SEQ ID NO: 244812 - RNA, 19 nt, Homo sapiens
  misc_RNA (1)...(19): siRNA sense strand
gaccagcgauagugauuga

SEQ ID NO: 244813 - RNA, 19 nt, Homo sapiens
  misc_RNA (1)...(19): siRNA sense strand
gaucaagguucagcagauu

SEQ ID NO: 244814 - RNA, 19 nt, Homo sapiens
  misc_RNA (1)...(19): siRNA sense strand
gacuacaucuggcuggaua

SEQ ID NO: 244815 - RNA, 19 nt, Homo sapiens
  misc_RNA (1)...(19): siRNA sense strand
agacacaccugcaaucuca

SEQ ID NO: 244816 - RNA, 19 nt, Homo sapiens
  misc_RNA (1)...(19): siRNA sense strand
gaaaccaaccagugaagaa

SEQ ID NO: 244817 - RNA, 19 nt, Homo sapiens
  misc_RNA (1)...(19): siRNA sense strand
gaaaggucuacaagaguua

SEQ ID NO: 244818 - RNA, 19 nt, Homo sapiens
  misc_RNA (1)...(19): siRNA sense strand
aagcucaccugcuacauuu

SEQ ID NO: 244819 - RNA, 19 nt, Homo sapiens
  misc_RNA (1)...(19): siRNA sense strand
gcaacaaggagaacacuga

SEQ ID NO: 244820 - RNA, 19 nt, Homo sapiens
  misc_RNA (1)...(19): siRNA sense strand
gaagcucaccugcuacauu

SEQ ID NO: 244821 - RNA, 19 nt, Homo sapiens
  misc_RNA (1)...(19): siRNA sense strand
gcaaacauaagaacaagga

SEQ ID NO: 244822 - RNA, 19 nt, Homo sapiens
  misc_RNA (1)...(19): siRNA sense strand
cgcaggagaucuuugagua

SEQ ID NO: 244823 - RNA, 19 nt, Homo sapiens
  misc_RNA (1)...(19): siRNA sense strand
gaagacagaggguguaagu

SEQ ID NO: 244824 - RNA, 19 nt, Homo sapiens
  misc_RNA (1)...(19): siRNA sense strand
gcaaagaugaucaagaaag

SEQ ID NO: 244825 - RNA, 19 nt, Homo sapiens
  misc_RNA (1)...(19): siRNA sense strand
ggacgaggaugcuguuugc

SEQ ID NO: 244826 - RNA, 19 nt, Homo sapiens
  misc_RNA (1)...(19): siRNA sense strand
ggacacaggcaacaucuuc

SEQ ID NO: 244827 - RNA, 19 nt, Homo sapiens
  misc_RNA (1)...(19): siRNA sense strand
ggacgaggaaguagaguau

SEQ ID NO: 244828 - RNA, 19 nt, Homo sapiens
  misc_RNA (1)...(19): siRNA sense strand
ggcggaagcuugcccauca

SEQ ID NO: 244829 - RNA, 19 nt, Homo sapiens
  misc_RNA (1)...(19): siRNA sense strand
ggagaucuuugaguaccua

SEQ ID NO: 244830 - RNA, 19 nt, Homo sapiens
  misc_RNA (1)...(19): siRNA sense strand
uacaagaguuacaguggua

SEQ ID NO: 244831 - RNA, 19 nt, Homo sapiens
  misc_RNA (1)...(19): siRNA sense strand
gccacaaggccaacuguua

SEQ ID NO: 244832 - RNA, 19 nt, Homo sapiens
  misc_RNA (1)...(19): siRNA sense strand
gccgugaggugaugagcua

SEQ ID NO: 244833 - RNA, 19 nt, Homo sapiens
  misc_RNA (1)...(19): siRNA sense strand
agaugcagcugacuccuuu

SEQ ID NO: 244834 - RNA, 19 nt, Homo sapiens
  misc_RNA (1)...(19): siRNA sense strand
gcucagagaaagucaagaa

SEQ ID NO: 244835 - RNA, 19 nt, Homo sapiens
  misc_RNA (1)...(19): siRNA sense strand
ggagaaggagucguacuuu

SEQ ID NO: 244836 - RNA, 19 nt, Homo sapiens
  misc_RNA (1)...(19): siRNA sense strand
gggagacgaucaagguuca

SEQ ID NO: 244837 - RNA, 19 nt, Homo sapiens
  misc_RNA (1)...(19): siRNA sense strand
ccaaggacaccaucuucua

SEQ ID NO: 244838 - RNA, 19 nt, Homo sapiens
  misc_RNA (1)...(19): siRNA sense strand
gcaaggacuccaaccauca

SEQ ID NO: 244839 - RNA, 19 nt, Homo sapiens
  misc_RNA (1)...(19): siRNA sense strand
ucagacagcgacagugaua

SEQ ID NO: 244840 - RNA, 19 nt, Homo sapiens
  misc_RNA (1)...(19): siRNA sense strand
gcuuaccgcuaccugaauu

SEQ ID NO: 244841 - RNA, 19 nt, Homo sapiens
  misc_RNA (1)...(19): siRNA sense strand
gccgaaaggucuacaagag

SEQ ID NO: 244842 - RNA, 19 nt, Homo sapiens
  misc_RNA (1)...(19): siRNA sense strand
cgacuaagccaccauacga

SEQ ID NO: 244843 - RNA, 19 nt, Homo sapiens
  misc_RNA (1)...(19): siRNA sense strand
ccacacgccuccagguuca

SEQ ID NO: 244844 - RNA, 19 nt, Homo sapiens
  misc_RNA (1)...(19): siRNA sense strand
gaagaaggcacggaagauc

SEQ ID NO: 244845 - RNA, 19 nt, Homo sapiens
  misc_RNA (1)...(19): siRNA sense strand
gaggacagcagugaggaua

SEQ ID NO: 244846 - RNA, 19 nt, Homo sapiens
  misc_RNA (1)...(19): siRNA sense strand
ccaagucaggcaaacauaa

SEQ ID NO: 244847 - RNA, 19 nt, Homo sapiens
  misc_RNA (1)...(19): siRNA sense strand
gaaccaggaccuagacaag

SEQ ID NO: 244848 - RNA, 19 nt, Homo sapiens
  misc_RNA (1)...(19): siRNA sense strand
gcucagacagcgacaguga

SEQ ID NO: 244849 - RNA, 19 nt, Homo sapiens
  misc_RNA (1)...(19): siRNA sense strand
ccaacacggucuuccuaga

SEQ ID NO: 244850 - RNA, 19 nt, Homo sapiens
  misc_RNA (1)...(19): siRNA sense strand
caaccuggaugugguguca

SEQ ID NO: 244851 - RNA, 19 nt, Homo sapiens
  misc_RNA (1)...(19): siRNA sense strand
gggcaaacccuccuucucu

SEQ ID NO: 244852 - RNA, 19 nt, Homo sapiens
  misc_RNA (1)...(19): siRNA sense strand
gcacaacgcccucaaaaca

SEQ ID NO: 244853 - RNA, 19 nt, Homo sapiens
  misc_RNA (1)...(19): siRNA sense strand
ccacacaccacacugaaga

SEQ ID NO: 244854 - RNA, 19 nt, Homo sapiens
  misc_RNA (1)...(19): siRNA sense strand
cuaccuagaccacaucaaa

SEQ ID NO: 244855 - RNA, 19 nt, Homo sapiens
  misc_RNA (1)...(19): siRNA sense strand
gcaaugucauccucuucug

SEQ ID NO: 244856 - RNA, 19 nt, Homo sapiens
  misc_RNA (1)...(19): siRNA sense strand
guggagaccugccgaaagg

SEQ ID NO: 244857 - RNA, 19 nt, Homo sapiens
  misc_RNA (1)...(19): siRNA sense strand
ugucugagguaccugacua

SEQ ID NO: 244858 - RNA, 19 nt, Homo sapiens
  misc_RNA (1)...(19): siRNA sense strand
gaaggacacaggcaacauc

SEQ ID NO: 244859 - RNA, 19 nt, Homo sapiens
  misc_RNA (1)...(19): siRNA sense strand
agaaggagucguacuuuga

SEQ ID NO: 244860 - RNA, 19 nt, Homo sapiens
  misc_RNA (1)...(19): siRNA sense strand
gaucuuugaguaccuaaug

SEQ ID NO: 244861 - RNA, 19 nt, Homo sapiens
  misc_RNA (1)...(19): siRNA sense strand
ccaccacacaggcuuagua

SEQ ID NO: 244862 - RNA, 19 nt, Homo sapiens
  misc_RNA (1)...(19): siRNA sense strand
caacggcaccucuuucagu

SEQ ID NO: 244863 - RNA, 19 nt, Homo sapiens
  misc_RNA (1)...(19): siRNA sense strand
acgaggaaguagaguauga

SEQ ID NO: 244864 - RNA, 19 nt, Homo sapiens
  misc_RNA (1)...(19): siRNA sense strand
gguggaaaccaaccaguga

SEQ ID NO: 244865 - RNA, 19 nt, Homo sapiens
  misc_RNA (1)...(19): siRNA sense strand
gauggugagugccagaaca

SEQ ID NO: 244866 - RNA, 19 nt, Homo sapiens
  misc_RNA (1)...(19): siRNA sense strand
uaauaaaggcgacccuaau

SEQ ID NO: 244867 - RNA, 19 nt, Homo sapiens
  misc_RNA (1)...(19): siRNA sense strand
gugaggaggaugaagauga

SEQ ID NO: 244868 - RNA, 19 nt, Homo sapiens
  misc_RNA (1)...(19): siRNA sense strand
acccagcucugaucauuga

SEQ ID NO: 244869 - RNA, 19 nt, Homo sapiens
  misc_RNA (1)...(19): siRNA sense strand
ugacaaggaugggcagaca

SEQ ID NO: 244870 - RNA, 19 nt, Homo sapiens
  misc_RNA (1)...(19): siRNA sense strand
gggagagauucugaggaua

SEQ ID NO: 244871 - RNA, 19 nt, Homo sapiens
  misc_RNA (1)...(19): siRNA sense strand
gcaucagcaucuuugacaa

SEQ ID NO: 244872 - RNA, 19 nt, Homo sapiens
  misc_RNA (1)...(19): siRNA sense strand
gagaccagcgauagugauu

SEQ ID NO: 244873 - RNA, 19 nt, Homo sapiens
  misc_RNA (1)...(19): siRNA sense strand
gcagugagaccagcgauag

SEQ ID NO: 244874 - RNA, 19 nt, Homo sapiens
  misc_RNA (1)...(19): siRNA sense strand
caacauccgcaagucagua

SEQ ID NO: 244875 - RNA, 19 nt, Homo sapiens
  misc_RNA (1)...(19): siRNA sense strand
ugggagagauucugaggau

SEQ ID NO: 244876 - RNA, 19 nt, Homo sapiens
  misc_RNA (1)...(19): siRNA sense strand
ccacacaggcuuaguaaaa

SEQ ID NO: 244877 - RNA, 19 nt, Homo sapiens
  misc_RNA (1)...(19): siRNA sense strand
ggacgaggaggacuacauc

SEQ ID NO: 244878 - RNA, 19 nt, Homo sapiens
  misc_RNA (1)...(19): siRNA sense strand
ggagcuggacgaggaagua

SEQ ID NO: 244879 - RNA, 19 nt, Homo sapiens
  misc_RNA (1)...(19): siRNA sense strand
acuuugaugugaagacuuu

SEQ ID NO: 244880 - RNA, 19 nt, Homo sapiens
  misc_RNA (1)...(19): siRNA sense strand
ccucaguucuguucuccaa

SEQ ID NO: 244881 - RNA, 19 nt, Homo sapiens
  misc_RNA (1)...(19): siRNA sense strand
gaaggagucguacuuugag

SEQ ID NO: 244882 - RNA, 19 nt, Homo sapiens
  misc_RNA (1)...(19): siRNA sense strand
cagcaacugccucaaguau

SEQ ID NO: 244883 - RNA, 19 nt, Homo sapiens
  misc_RNA (1)...(19): siRNA sense strand
uuaaagaacagcucaaguc

SEQ ID NO: 244884 - RNA, 19 nt, Homo sapiens
  misc_RNA (1)...(19): siRNA sense strand
gagagauucugaggauaag

SEQ ID NO: 244885 - RNA, 19 nt, Homo sapiens
  misc_RNA (1)...(19): siRNA sense strand
ggacuuugaugugaagacu

SEQ ID NO: 244886 - RNA, 19 nt, Homo sapiens
  misc_RNA (1)...(19): siRNA sense strand
caaaggaagagccaguuca

SEQ ID NO: 244887 - RNA, 19 nt, Homo sapiens
  misc_RNA (1)...(19): siRNA sense strand
cgaucaagguucagcagau

SEQ ID NO: 244888 - RNA, 19 nt, Homo sapiens
  misc_RNA (1)...(19): siRNA sense strand
auacccagcucugaucauu

SEQ ID NO: 244889 - RNA, 19 nt, Homo sapiens
  misc_RNA (1)...(19): siRNA sense strand
ggaaaccaaccagugaaga

SEQ ID NO: 244890 - RNA, 19 nt, Homo sapiens
  misc_RNA (1)...(19): siRNA sense strand
gugauaaguccacagaaga

SEQ ID NO: 244891 - RNA, 19 nt, Homo sapiens
  misc_RNA (1)...(19): siRNA sense strand
gaaugagcgucggaagaca

SEQ ID NO: 244892 - RNA, 19 nt, Homo sapiens
  misc_RNA (1)...(19): siRNA sense strand
ggaagagccaguucaugca

SEQ ID NO: 244893 - RNA, 19 nt, Homo sapiens
  misc_RNA (1)...(19): siRNA sense strand
ccacaaggccaacuguuac

SEQ ID NO: 244894 - RNA, 19 nt, Homo sapiens
  misc_RNA (1)...(19): siRNA sense strand
cuucagcgguggaaaccaa

SEQ ID NO: 244895 - RNA, 19 nt, Homo sapiens
  misc_RNA (1)...(19): siRNA sense strand
ucaaguauaacgccaagga

SEQ ID NO: 244896 - RNA, 19 nt, Homo sapiens
  misc_RNA (1)...(19): siRNA sense strand
gggcuggagcucagagaaa

SEQ ID NO: 244897 - RNA, 19 nt, Homo sapiens
  misc_RNA (1)...(19): siRNA sense strand
ggaggaggaugaggguaag

SEQ ID NO: 244898 - RNA, 19 nt, Homo sapiens
  misc_RNA (1)...(19): siRNA sense strand
ccaugaagcagaacuugga

SEQ ID NO: 244899 - RNA, 19 nt, Homo sapiens
  misc_RNA (1)...(19): siRNA sense strand
agcagaacuuggaggcuua

SEQ ID NO: 244900 - RNA, 19 nt, Homo sapiens
  misc_RNA (1)...(19): siRNA sense strand
ggccaaaugccgaggcuau

SEQ ID NO: 244901 - RNA, 19 nt, Homo sapiens
  misc_RNA (1)...(19): siRNA sense strand
ccaggaagcccgagagcau

SEQ ID NO: 244902 - RNA, 19 nt, Homo sapiens
  misc_RNA (1)...(19): siRNA sense strand
gagagaagcugcagagaua

SEQ ID NO: 244903 - RNA, 19 nt, Homo sapiens
  misc_RNA (1)...(19): siRNA sense strand
gcaaagugcuggagugcuu

SEQ ID NO: 244904 - RNA, 19 nt, Homo sapiens
  misc_RNA (1)...(19): siRNA sense strand
gcagagauaaugcgggaua

SEQ ID NO: 244905 - RNA, 19 nt, Homo sapiens
  misc_RNA (1)...(19): siRNA sense strand
cauggaagguggugaguug

SEQ ID NO: 244906 - RNA, 19 nt, Homo sapiens
  misc_RNA (1)...(19): siRNA sense strand
ggagaaagacgcagugcuu

SEQ ID NO: 244907 - RNA, 19 nt, Homo sapiens
  misc_RNA (1)...(19): siRNA sense strand
gagaaagacgcagugcuua

SEQ ID NO: 244908 - RNA, 19 nt, Homo sapiens
  misc_RNA (1)...(19): siRNA sense strand
gaccaucacucaguucaug

SEQ ID NO: 244909 - RNA, 19 nt, Homo sapiens
  misc_RNA (1)...(19): siRNA sense strand
ggcgggagcccaagaagua

SEQ ID NO: 244910 - RNA, 19 nt, Homo sapiens
  misc_RNA (1)...(19): siRNA sense strand
gcuauacucccuauuaugu

SEQ ID NO: 244911 - RNA, 19 nt, Homo sapiens
  misc_RNA (1)...(19): siRNA sense strand
gagauaaugcgggauauug

SEQ ID NO: 244912 - RNA, 19 nt, Homo sapiens
  misc_RNA (1)...(19): siRNA sense strand
cuacacaucuaaggagaaa

SEQ ID NO: 244913 - RNA, 19 nt, Homo sapiens
  misc_RNA (1)...(19): siRNA sense strand
cccugaagcuccuguauga

SEQ ID NO: 244914 - RNA, 19 nt, Homo sapiens
  misc_RNA (1)...(19): siRNA sense strand
ggaagguggugaguuguuc

SEQ ID NO: 244915 - RNA, 19 nt, Homo sapiens
  misc_RNA (1)...(19): siRNA sense strand
ugcuuaagcucaccgauuu

SEQ ID NO: 244916 - RNA, 19 nt, Homo sapiens
  misc_RNA (1)...(19): siRNA sense strand
gaccaggcuuucacugaga

SEQ ID NO: 244917 - RNA, 19 nt, Homo sapiens
  misc_RNA (1)...(19): siRNA sense strand
gaaagacgcagugcuuaag

SEQ ID NO: 244918 - RNA, 19 nt, Homo sapiens
  misc_RNA (1)...(19): siRNA sense strand
ggcaggagguagaccauca

SEQ ID NO: 244919 - RNA, 19 nt, Homo sapiens
  misc_RNA (1)...(19): siRNA sense strand
uaacauugcccaccgagau

SEQ ID NO: 244920 - RNA, 19 nt, Homo sapiens
  misc_RNA (1)...(19): siRNA sense strand
ucauguacauccuccuuug

SEQ ID NO: 244921 - RNA, 19 nt, Homo sapiens
  misc_RNA (1)...(19): siRNA sense strand
ccugcuauacucccuauua

SEQ ID NO: 244922 - RNA, 19 nt, Homo sapiens
  misc_RNA (1)...(19): siRNA sense strand
agaaagacgcagugcuuaa

SEQ ID NO: 244923 - RNA, 19 nt, Homo sapiens
  misc_RNA (1)...(19): siRNA sense strand
gaagaucaaggaccugaag

SEQ ID NO: 244924 - RNA, 19 nt, Homo sapiens
  misc_RNA (1)...(19): siRNA sense strand
gaccgacgacuaccaguug

SEQ ID NO: 244925 - RNA, 19 nt, Homo sapiens
  misc_RNA (1)...(19): siRNA sense strand
acaaccggcuccucaacaa

SEQ ID NO: 244926 - RNA, 19 nt, Homo sapiens
  misc_RNA (1)...(19): siRNA sense strand
acagagaggcugaccauca

SEQ ID NO: 244927 - RNA, 19 nt, Homo sapiens
  misc_RNA (1)...(19): siRNA sense strand
gagaagcugcagagauaau

SEQ ID NO: 244928 - RNA, 19 nt, Homo sapiens
  misc_RNA (1)...(19): siRNA sense strand
ccacuaugcggguagacua

SEQ ID NO: 244929 - RNA, 19 nt, Homo sapiens
  misc_RNA (1)...(19): siRNA sense strand
gcucaccgauuuuggcuuu

SEQ ID NO: 244930 - RNA, 19 nt, Homo sapiens
  misc_RNA (1)...(19): siRNA sense strand
cgagaugucaagccugaaa

SEQ ID NO: 244931 - RNA, 19 nt, Homo sapiens
  misc_RNA (1)...(19): siRNA sense strand
acacaucuaaggagaaaga

SEQ ID NO: 244932 - RNA, 19 nt, Homo sapiens
  misc_RNA (1)...(19): siRNA sense strand
gcgaccaggcuuucacuga

SEQ ID NO: 244933 - RNA, 19 nt, Homo sapiens
  misc_RNA (1)...(19): siRNA sense strand
ccagagaaguaugacaagu

SEQ ID NO: 244934 - RNA, 19 nt, Homo sapiens
  misc_RNA (1)...(19): siRNA sense strand
cugcuauacucccuauuau

SEQ ID NO: 244935 - RNA, 19 nt, Homo sapiens
  misc_RNA (1)...(19): siRNA sense strand
caagcgcugucuccucauc

SEQ ID NO: 244936 - RNA, 19 nt, Homo sapiens
  misc_RNA (1)...(19): siRNA sense strand
ccacagagaggcugaccau

SEQ ID NO: 244937 - RNA, 19 nt, Homo sapiens
  misc_RNA (1)...(19): siRNA sense strand
gugcuuaagcucaccgauu

SEQ ID NO: 244938 - RNA, 19 nt, Homo sapiens
  misc_RNA (1)...(19): siRNA sense strand
aaccuacucuacacaucua

SEQ ID NO: 244939 - RNA, 19 nt, Homo sapiens
  misc_RNA (1)...(19): siRNA sense strand
cugcacagccauaacauug

SEQ ID NO: 244940 - RNA, 19 nt, Homo sapiens
  misc_RNA (1)...(19): siRNA sense strand
gggaugaagaggaggauuc

SEQ ID NO: 244941 - RNA, 19 nt, Homo sapiens
  misc_RNA (1)...(19): siRNA sense strand
gcugauccgccuccuguug

SEQ ID NO: 244942 - RNA, 19 nt, Homo sapiens
  misc_RNA (1)...(19): siRNA sense strand
gcuaaggagaccacccaaa

SEQ ID NO: 244943 - RNA, 19 nt, Homo sapiens
  misc_RNA (1)...(19): siRNA sense strand
gaccugaagaccucuaaca

SEQ ID NO: 244944 - RNA, 19 nt, Homo sapiens
  misc_RNA (1)...(19): siRNA sense strand
cagacacccugcuauacuc

SEQ ID NO: 244945 - RNA, 19 nt, Homo sapiens
  misc_RNA (1)...(19): siRNA sense strand
acagaagugugcccugaag

SEQ ID NO: 244946 - RNA, 19 nt, Homo sapiens
  misc_RNA (1)...(19): siRNA sense strand
ccacugggacgaagucaag

SEQ ID NO: 244947 - RNA, 19 nt, Homo sapiens
  misc_RNA (1)...(19): siRNA sense strand
cagagaggcugaccaucac

SEQ ID NO: 244948 - RNA, 19 nt, Homo sapiens
  misc_RNA (1)...(19): siRNA sense strand
caaagaccacugggacgaa

SEQ ID NO: 244949 - RNA, 19 nt, Homo sapiens
  misc_RNA (1)...(19): siRNA sense strand
guccagagaaguaugacaa

SEQ ID NO: 244950 - RNA, 19 nt, Homo sapiens
  misc_RNA (1)...(19): siRNA sense strand
gaagucaaggaggagauga

SEQ ID NO: 244951 - RNA, 19 nt, Homo sapiens
  misc_RNA (1)...(19): siRNA sense strand
cccaagaaguacgcaguga

SEQ ID NO: 244952 - RNA, 19 nt, Homo sapiens
  misc_RNA (1)...(19): siRNA sense strand
ugucaagccugaaaaccua

SEQ ID NO: 244953 - RNA, 19 nt, Homo sapiens
  misc_RNA (1)...(19): siRNA sense strand
gaagguggugaguuguuca

SEQ ID NO: 244954 - RNA, 19 nt, Homo sapiens
  misc_RNA (1)...(19): siRNA sense strand
cagagauaaugcgggauau

SEQ ID NO: 244955 - RNA, 19 nt, Homo sapiens
  misc_RNA (1)...(19): siRNA sense strand
gacagaagugugcccugaa

SEQ ID NO: 244956 - RNA, 19 nt, Homo sapiens
  misc_RNA (1)...(19): siRNA sense strand
gucccugggugucaucaug

SEQ ID NO: 244957 - RNA, 19 nt, Homo sapiens
  misc_RNA (1)...(19): siRNA sense strand
agagagaagcugcagagau

SEQ ID NO: 244958 - RNA, 19 nt, Homo sapiens
  misc_RNA (1)...(19): siRNA sense strand
cagagaaguaugacaaguc

SEQ ID NO: 244959 - RNA, 19 nt, Homo sapiens
  misc_RNA (1)...(19): siRNA sense strand
ggcuuucacugagagagaa

SEQ ID NO: 244960 - RNA, 19 nt, Homo sapiens
  misc_RNA (1)...(19): siRNA sense strand
cuaaggagaccacccaaaa

SEQ ID NO: 244961 - RNA, 19 nt, Homo sapiens
  misc_RNA (1)...(19): siRNA sense strand
gcccugaagcuccuguaug

SEQ ID NO: 244962 - RNA, 19 nt, Homo sapiens
  misc_RNA (1)...(19): siRNA sense strand
caucauguacauccuccuu

SEQ ID NO: 244963 - RNA, 19 nt, Homo sapiens
  misc_RNA (1)...(19): siRNA sense strand
ggacaaaccuggaauuucu

SEQ ID NO: 244964 - RNA, 19 nt, Homo sapiens
  misc_RNA (1)...(19): siRNA sense strand
auaagaagcuucaggaaua

SEQ ID NO: 244965 - RNA, 19 nt, Homo sapiens
  misc_RNA (1)...(19): siRNA sense strand
caacagcuaugucaugguu

SEQ ID NO: 244966 - RNA, 19 nt, Homo sapiens
  misc_RNA (1)...(19): siRNA sense strand
cagaaugggucccuauuau

SEQ ID NO: 244967 - RNA, 19 nt, Homo sapiens
  misc_RNA (1)...(19): siRNA sense strand
caagagcaguuuaauagca

SEQ ID NO: 244968 - RNA, 19 nt, Homo sapiens
  misc_RNA (1)...(19): siRNA sense strand
gcaggcagccauucccaua

SEQ ID NO: 244969 - RNA, 19 nt, Homo sapiens
  misc_RNA (1)...(19): siRNA sense strand
gacgaguucugcaagauga

SEQ ID NO: 244970 - RNA, 19 nt, Homo sapiens
  misc_RNA (1)...(19): siRNA sense strand
guuggaaccuucaaucuuc

SEQ ID NO: 244971 - RNA, 19 nt, Homo sapiens
  misc_RNA (1)...(19): siRNA sense strand
cagcagcuccggucugaua

SEQ ID NO: 244972 - RNA, 19 nt, Homo sapiens
  misc_RNA (1)...(19): siRNA sense strand
gauaagaagcuucaggaau

SEQ ID NO: 244973 - RNA, 19 nt, Homo sapiens
  misc_RNA (1)...(19): siRNA sense strand
ccagaaugggucccuauua

SEQ ID NO: 244974 - RNA, 19 nt, Homo sapiens
  misc_RNA (1)...(19): siRNA sense strand
cagaaccaguugaaaguga

SEQ ID NO: 244975 - RNA, 19 nt, Homo sapiens
  misc_RNA (1)...(19): siRNA sense strand
aaguauugcugccuucaua

SEQ ID NO: 244976 - RNA, 19 nt, Homo sapiens
  misc_RNA (1)...(19): siRNA sense strand
gcuccggucugauauacaa

SEQ ID NO: 244977 - RNA, 19 nt, Homo sapiens
  misc_RNA (1)...(19): siRNA sense strand
ggugauggcucagcacaug

SEQ ID NO: 244978 - RNA, 19 nt, Homo sapiens
  misc_RNA (1)...(19): siRNA sense strand
gggcccagaugaauguaaa

SEQ ID NO: 244979 - RNA, 19 nt, Homo sapiens
  misc_RNA (1)...(19): siRNA sense strand
aggcaugacugacuucuug

SEQ ID NO: 244980 - RNA, 19 nt, Homo sapiens
  misc_RNA (1)...(19): siRNA sense strand
ugagcuggcugaccacuau

SEQ ID NO: 244981 - RNA, 19 nt, Homo sapiens
  misc_RNA (1)...(19): siRNA sense strand
ggauauacagaccuuacua

SEQ ID NO: 244982 - RNA, 19 nt, Homo sapiens
  misc_RNA (1)...(19): siRNA sense strand
ggagcuugcugcuguuauc

SEQ ID NO: 244983 - RNA, 19 nt, Homo sapiens
  misc_RNA (1)...(19): siRNA sense strand
gauggcaacccacacauug

SEQ ID NO: 244984 - RNA, 19 nt, Homo sapiens
  misc_RNA (1)...(19): siRNA sense strand
ccaccacggacuacaauaa

SEQ ID NO: 244985 - RNA, 19 nt, Homo sapiens
  misc_RNA (1)...(19): siRNA sense strand
gcacaugaucagggauaua

SEQ ID NO: 244986 - RNA, 19 nt, Homo sapiens
  misc_RNA (1)...(19): siRNA sense strand
uugcacagauaguggauuu

SEQ ID NO: 244987 - RNA, 19 nt, Homo sapiens
  misc_RNA (1)...(19): siRNA sense strand
ucaaacaucagaaccaguu

SEQ ID NO: 244988 - RNA, 19 nt, Homo sapiens
  misc_RNA (1)...(19): siRNA sense strand
caaacucguaccuuuauug

SEQ ID NO: 244989 - RNA, 19 nt, Homo sapiens
  misc_RNA (1)...(19): siRNA sense strand
gcuuggagguguuggugaa

SEQ ID NO: 244990 - RNA, 19 nt, Homo sapiens
  misc_RNA (1)...(19): siRNA sense strand
gauauacagaccuuacuau

SEQ ID NO: 244991 - RNA, 19 nt, Homo sapiens
  misc_RNA (1)...(19): siRNA sense strand
ugacggcucugcuguggau

SEQ ID NO: 244992 - RNA, 19 nt, Homo sapiens
  misc_RNA (1)...(19): siRNA sense strand
ucucaaacucguaccuuua

SEQ ID NO: 244993 - RNA, 19 nt, Homo sapiens
  misc_RNA (1)...(19): siRNA sense strand
gcaagaugauaagaagcuu

SEQ ID NO: 244994 - RNA, 19 nt, Homo sapiens
  misc_RNA (1)...(19): siRNA sense strand
gaacgggcuccuccucaga

SEQ ID NO: 244995 - RNA, 19 nt, Homo sapiens
  misc_RNA (1)...(19): siRNA sense strand
ccuucaaucuuccuaguga

SEQ ID NO: 244996 - RNA, 19 nt, Homo sapiens
  misc_RNA (1)...(19): siRNA sense strand
gaaccacugugaccaugac

SEQ ID NO: 244997 - RNA, 19 nt, Homo sapiens
  misc_RNA (1)...(19): siRNA sense strand
gcucugcuguggauguuca

SEQ ID NO: 244998 - RNA, 19 nt, Homo sapiens
  misc_RNA (1)...(19): siRNA sense strand
uggcagcagugaaaguauu

SEQ ID NO: 244999 - RNA, 19 nt, Homo sapiens
  misc_RNA (1)...(19): siRNA sense strand
ggacgaguucugcaagaug

SEQ ID NO: 245000 - RNA, 19 nt, Homo sapiens
  misc_RNA (1)...(19): siRNA sense strand
uccaagagcaguuuaauag

SEQ ID NO: 245001 - RNA, 19 nt, Homo sapiens
  misc_RNA (1)...(19): siRNA sense strand
ugaagaccuuggacucuca

SEQ ID NO: 245002 - RNA, 19 nt, Homo sapiens
  misc_RNA (1)...(19): siRNA sense strand
gcagcuccggucugauaua

SEQ ID NO: 245003 - RNA, 19 nt, Homo sapiens
  misc_RNA (1)...(19): siRNA sense strand
uguaggcccugaugccauu

SEQ ID NO: 245004 - RNA, 19 nt, Homo sapiens
  misc_RNA (1)...(19): siRNA sense strand
uugaaugccuggcccuaaa

SEQ ID NO: 245005 - RNA, 19 nt, Homo sapiens
  misc_RNA (1)...(19): siRNA sense strand
caucagaaccaguugaaag

SEQ ID NO: 245006 - RNA, 19 nt, Homo sapiens
  misc_RNA (1)...(19): siRNA sense strand
ucaaacucguaccuuuauu

SEQ ID NO: 245007 - RNA, 19 nt, Homo sapiens
  misc_RNA (1)...(19): siRNA sense strand
cuucaggaauacaauguug

SEQ ID NO: 245008 - RNA, 19 nt, Homo sapiens
  misc_RNA (1)...(19): siRNA sense strand
gcacagauaguggauuugg

SEQ ID NO: 245009 - RNA, 19 nt, Homo sapiens
  misc_RNA (1)...(19): siRNA sense strand
cagcacaugaucagggaua

SEQ ID NO: 245010 - RNA, 19 nt, Homo sapiens
  misc_RNA (1)...(19): siRNA sense strand
gaaguucagggagcagaaa

SEQ ID NO: 245011 - RNA, 19 nt, Homo sapiens
  misc_RNA (1)...(19): siRNA sense strand
ucacggggcuagaagagua

SEQ ID NO: 245012 - RNA, 19 nt, Homo sapiens
  misc_RNA (1)...(19): siRNA sense strand
ggauggcaacccacacauu

SEQ ID NO: 245013 - RNA, 19 nt, Homo sapiens
  misc_RNA (1)...(19): siRNA sense strand
ucagggauauacagaccuu

SEQ ID NO: 245014 - RNA, 19 nt, Homo sapiens
  misc_RNA (1)...(19): siRNA sense strand
uaagaagcuucaggaauac

SEQ ID NO: 245015 - RNA, 19 nt, Homo sapiens
  misc_RNA (1)...(19): siRNA sense strand
uaaccaaggccuguuugaa

SEQ ID NO: 245016 - RNA, 19 nt, Homo sapiens
  misc_RNA (1)...(19): siRNA sense strand
ggacuacaauaacaaucac

SEQ ID NO: 245017 - RNA, 19 nt, Homo sapiens
  misc_RNA (1)...(19): siRNA sense strand
gcccauggaggcagaagaa

SEQ ID NO: 245018 - RNA, 19 nt, Homo sapiens
  misc_RNA (1)...(19): siRNA sense strand
gaaugggucccuauuaucc

SEQ ID NO: 245019 - RNA, 19 nt, Homo sapiens
  misc_RNA (1)...(19): siRNA sense strand
gauggagcuugcugcuguu

SEQ ID NO: 245020 - RNA, 19 nt, Homo sapiens
  misc_RNA (1)...(19): siRNA sense strand
accaaggccuguuugaaug

SEQ ID NO: 245021 - RNA, 19 nt, Homo sapiens
  misc_RNA (1)...(19): siRNA sense strand
gaaaguauugcugccuuca

SEQ ID NO: 245022 - RNA, 19 nt, Homo sapiens
  misc_RNA (1)...(19): siRNA sense strand
agaaccaguugaaagugaa

SEQ ID NO: 245023 - RNA, 19 nt, Homo sapiens
  misc_RNA (1)...(19): siRNA sense strand
uguuaucaauggccgaauu

SEQ ID NO: 245024 - RNA, 19 nt, Homo sapiens
  misc_RNA (1)...(19): siRNA sense strand
gcaacccacacauugauca

SEQ ID NO: 245025 - RNA, 19 nt, Homo sapiens
  misc_RNA (1)...(19): siRNA sense strand
gauccagcaacaucuuuga

SEQ ID NO: 245026 - RNA, 19 nt, Homo sapiens
  misc_RNA (1)...(19): siRNA sense strand
ggaaugccaacagcuaugu

SEQ ID NO: 245027 - RNA, 19 nt, Homo sapiens
  misc_RNA (1)...(19): siRNA sense strand
gcuugcugcuguuaucaau

SEQ ID NO: 245028 - RNA, 19 nt, Homo sapiens
  misc_RNA (1)...(19): siRNA sense strand
gggacgaguucugcaagau

SEQ ID NO: 245029 - RNA, 19 nt, Homo sapiens
  misc_RNA (1)...(19): siRNA sense strand
ccacggacuacaauaacaa

SEQ ID NO: 245030 - RNA, 19 nt, Homo sapiens
  misc_RNA (1)...(19): siRNA sense strand
auacaacgccucaguggau

SEQ ID NO: 245031 - RNA, 19 nt, Homo sapiens
  misc_RNA (1)...(19): siRNA sense strand
aaccaaggccuguuugaau

SEQ ID NO: 245032 - RNA, 19 nt, Homo sapiens
  misc_RNA (1)...(19): siRNA sense strand
caggagcccacacccagua

SEQ ID NO: 245033 - RNA, 19 nt, Homo sapiens
  misc_RNA (1)...(19): siRNA sense strand
ggaaccacugugaccauga

SEQ ID NO: 245034 - RNA, 19 nt, Homo sapiens
  misc_RNA (1)...(19): siRNA sense strand
ugguaugccugccaagaga

SEQ ID NO: 245035 - RNA, 19 nt, Homo sapiens
  misc_RNA (1)...(19): siRNA sense strand
ggaaguucagggagcagaa

SEQ ID NO: 245036 - RNA, 19 nt, Homo sapiens
  misc_RNA (1)...(19): siRNA sense strand
guaaccaaggccuguuuga

SEQ ID NO: 245037 - RNA, 19 nt, Homo sapiens
  misc_RNA (1)...(19): siRNA sense strand
ggauuucccaccagagugu

SEQ ID NO: 245038 - RNA, 19 nt, Homo sapiens
  misc_RNA (1)...(19): siRNA sense strand
gggccuugcuuucucuucu

SEQ ID NO: 245039 - RNA, 19 nt, Homo sapiens
  misc_RNA (1)...(19): siRNA sense strand
uggaggagccugacagcuu

SEQ ID NO: 245040 - RNA, 19 nt, Homo sapiens
  misc_RNA (1)...(19): siRNA sense strand
aacaacggcucauuuacca

SEQ ID NO: 245041 - RNA, 19 nt, Homo sapiens
  misc_RNA (1)...(19): siRNA sense strand
cccuaaaccugcacugcuu

SEQ ID NO: 245042 - RNA, 19 nt, Homo sapiens
  misc_RNA (1)...(19): siRNA sense strand
aaacaucagaaccaguuga

SEQ ID NO: 245043 - RNA, 19 nt, Homo sapiens
  misc_RNA (1)...(19): siRNA sense strand
gaccuuggacucucaaacu

SEQ ID NO: 245044 - RNA, 19 nt, Homo sapiens
  misc_RNA (1)...(19): siRNA sense strand
cugcgcaugugcugcauug

SEQ ID NO: 245045 - RNA, 19 nt, Homo sapiens
  misc_RNA (1)...(19): siRNA sense strand
ucugcaagaugauaagaag

SEQ ID NO: 245046 - RNA, 19 nt, Homo sapiens
  misc_RNA (1)...(19): siRNA sense strand
ccgagggucauccggauuu

SEQ ID NO: 245047 - RNA, 19 nt, Homo sapiens
  misc_RNA (1)...(19): siRNA sense strand
gcagcgcuacuacgagguu

SEQ ID NO: 245048 - RNA, 19 nt, Homo sapiens
  misc_RNA (1)...(19): siRNA sense strand
aaacaaaugcacccaacca

SEQ ID NO: 245049 - RNA, 19 nt, Homo sapiens
  misc_RNA (1)...(19): siRNA sense strand
aaacucguaccuuuauugu

SEQ ID NO: 245050 - RNA, 19 nt, Homo sapiens
  misc_RNA (1)...(19): siRNA sense strand
ccaagagacgcaagacgau

SEQ ID NO: 245051 - RNA, 19 nt, Homo sapiens
  misc_RNA (1)...(19): siRNA sense strand
gagccugucaccggaguuu

SEQ ID NO: 245052 - RNA, 19 nt, Homo sapiens
  misc_RNA (1)...(19): siRNA sense strand
caacccggguggugauugc

SEQ ID NO: 245053 - RNA, 19 nt, Homo sapiens
  misc_RNA (1)...(19): siRNA sense strand
caugugguccggccuaugu

SEQ ID NO: 245054 - RNA, 19 nt, Homo sapiens
  misc_RNA (1)...(19): siRNA sense strand
cauggaggcagaagaagug

SEQ ID NO: 245055 - RNA, 19 nt, Homo sapiens
  misc_RNA (1)...(19): siRNA sense strand
ugucugaccugcgcugcaa

SEQ ID NO: 245056 - RNA, 19 nt, Homo sapiens
  misc_RNA (1)...(19): siRNA sense strand
gaguuuaaggagcacauug

SEQ ID NO: 245057 - RNA, 19 nt, Homo sapiens
  misc_RNA (1)...(19): siRNA sense strand
ccuaaugauaguaccagua

SEQ ID NO: 245058 - RNA, 19 nt, Homo sapiens
  misc_RNA (1)...(19): siRNA sense strand
gcauuuccagccacuacaa

SEQ ID NO: 245059 - RNA, 19 nt, Homo sapiens
  misc_RNA (1)...(19): siRNA sense strand
gugccaggcuucccaacag

SEQ ID NO: 245060 - RNA, 19 nt, Homo sapiens
  misc_RNA (1)...(19): siRNA sense strand
aagagcaguuuaauagcau

SEQ ID NO: 245061 - RNA, 19 nt, Homo sapiens
  misc_RNA (1)...(19): siRNA sense strand
ggccgaauucgucguaugu

SEQ ID NO: 245062 - RNA, 19 nt, Homo sapiens
  misc_RNA (1)...(19): siRNA sense strand
cgaguucugcaagaugaua

SEQ ID NO: 245063 - RNA, 19 nt, Homo sapiens
  misc_RNA (1)...(19): siRNA sense strand
ggacaaaccuggaauuucu

SEQ ID NO: 245064 - RNA, 19 nt, Homo sapiens
  misc_RNA (1)...(19): siRNA sense strand
auaagaagcuucaggaaua

SEQ ID NO: 245065 - RNA, 19 nt, Homo sapiens
  misc_RNA (1)...(19): siRNA sense strand
caacagcuaugucaugguu

SEQ ID NO: 245066 - RNA, 19 nt, Homo sapiens
  misc_RNA (1)...(19): siRNA sense strand
cagaaugggucccuauuau

SEQ ID NO: 245067 - RNA, 19 nt, Homo sapiens
  misc_RNA (1)...(19): siRNA sense strand
caagagcaguuuaauagca

SEQ ID NO: 245068 - RNA, 19 nt, Homo sapiens
  misc_RNA (1)...(19): siRNA sense strand
gcaggcagccauucccaua

SEQ ID NO: 245069 - RNA, 19 nt, Homo sapiens
  misc_RNA (1)...(19): siRNA sense strand
gacgaguucugcaagauga

SEQ ID NO: 245070 - RNA, 19 nt, Homo sapiens
  misc_RNA (1)...(19): siRNA sense strand
guuggaaccuucaaucuuc

SEQ ID NO: 245071 - RNA, 19 nt, Homo sapiens
  misc_RNA (1)...(19): siRNA sense strand
cagcagcuccggucugaua

SEQ ID NO: 245072 - RNA, 19 nt, Homo sapiens
  misc_RNA (1)...(19): siRNA sense strand
gauaagaagcuucaggaau

SEQ ID NO: 245073 - RNA, 19 nt, Homo sapiens
  misc_RNA (1)...(19): siRNA sense strand
ccagaaugggucccuauua

SEQ ID NO: 245074 - RNA, 19 nt, Homo sapiens
  misc_RNA (1)...(19): siRNA sense strand
cagaaccaguugaaaguga

SEQ ID NO: 245075 - RNA, 19 nt, Homo sapiens
  misc_RNA (1)...(19): siRNA sense strand
aaguauugcugccuucaua

SEQ ID NO: 245076 - RNA, 19 nt, Homo sapiens
  misc_RNA (1)...(19): siRNA sense strand
gcuccggucugauauacaa

SEQ ID NO: 245077 - RNA, 19 nt, Homo sapiens
  misc_RNA (1)...(19): siRNA sense strand
ggugauggcucagcacaug

SEQ ID NO: 245078 - RNA, 19 nt, Homo sapiens
  misc_RNA (1)...(19): siRNA sense strand
gggcccagaugaauguaaa

SEQ ID NO: 245079 - RNA, 19 nt, Homo sapiens
  misc_RNA (1)...(19): siRNA sense strand
aggcaugacugacuucuug

SEQ ID NO: 245080 - RNA, 19 nt, Homo sapiens
  misc_RNA (1)...(19): siRNA sense strand
ugagcuggcugaccacuau

SEQ ID NO: 245081 - RNA, 19 nt, Homo sapiens
  misc_RNA (1)...(19): siRNA sense strand
ggauauacagaccuuacua

SEQ ID NO: 245082 - RNA, 19 nt, Homo sapiens
  misc_RNA (1)...(19): siRNA sense strand
ggagcuugcugcuguuauc

SEQ ID NO: 245083 - RNA, 19 nt, Homo sapiens
  misc_RNA (1)...(19): siRNA sense strand
gauggcaacccacacauug

SEQ ID NO: 245084 - RNA, 19 nt, Homo sapiens
  misc_RNA (1)...(19): siRNA sense strand
ccaccacggacuacaauaa

SEQ ID NO: 245085 - RNA, 19 nt, Homo sapiens
  misc_RNA (1)...(19): siRNA sense strand
gcacaugaucagggauaua

SEQ ID NO: 245086 - RNA, 19 nt, Homo sapiens
  misc_RNA (1)...(19): siRNA sense strand
uugcacagauaguggauuu

SEQ ID NO: 245087 - RNA, 19 nt, Homo sapiens
  misc_RNA (1)...(19): siRNA sense strand
ucaaacaucagaaccaguu

SEQ ID NO: 245088 - RNA, 19 nt, Homo sapiens
  misc_RNA (1)...(19): siRNA sense strand
caaacucguaccuuuauug

SEQ ID NO: 245089 - RNA, 19 nt, Homo sapiens
  misc_RNA (1)...(19): siRNA sense strand
gcuuggagguguuggugaa

SEQ ID NO: 245090 - RNA, 19 nt, Homo sapiens
  misc_RNA (1)...(19): siRNA sense strand
gauauacagaccuuacuau

SEQ ID NO: 245091 - RNA, 19 nt, Homo sapiens
  misc_RNA (1)...(19): siRNA sense strand
ugacggcucugcuguggau

SEQ ID NO: 245092 - RNA, 19 nt, Homo sapiens
  misc_RNA (1)...(19): siRNA sense strand
ucucaaacucguaccuuua

SEQ ID NO: 245093 - RNA, 19 nt, Homo sapiens
  misc_RNA (1)...(19): siRNA sense strand
gcaagaugauaagaagcuu

SEQ ID NO: 245094 - RNA, 19 nt, Homo sapiens
  misc_RNA (1)...(19): siRNA sense strand
gaacgggcuccuccucaga

SEQ ID NO: 245095 - RNA, 19 nt, Homo sapiens
  misc_RNA (1)...(19): siRNA sense strand
ccuucaaucuuccuaguga

SEQ ID NO: 245096 - RNA, 19 nt, Homo sapiens
  misc_RNA (1)...(19): siRNA sense strand
gaaccacugugaccaugac

SEQ ID NO: 245097 - RNA, 19 nt, Homo sapiens
  misc_RNA (1)...(19): siRNA sense strand
gcucugcuguggauguuca

SEQ ID NO: 245098 - RNA, 19 nt, Homo sapiens
  misc_RNA (1)...(19): siRNA sense strand
uggcagcagugaaaguauu

SEQ ID NO: 245099 - RNA, 19 nt, Homo sapiens
  misc_RNA (1)...(19): siRNA sense strand
ggacgaguucugcaagaug

SEQ ID NO: 245100 - RNA, 19 nt, Homo sapiens
  misc_RNA (1)...(19): siRNA sense strand
uccaagagcaguuuaauag

SEQ ID NO: 245101 - RNA, 19 nt, Homo sapiens
  misc_RNA (1)...(19): siRNA sense strand
ugaagaccuuggacucuca

SEQ ID NO: 245102 - RNA, 19 nt, Homo sapiens
  misc_RNA (1)...(19): siRNA sense strand
gcagcuccggucugauaua

SEQ ID NO: 245103 - RNA, 19 nt, Homo sapiens
  misc_RNA (1)...(19): siRNA sense strand
uguaggcccugaugccauu

SEQ ID NO: 245104 - RNA, 19 nt, Homo sapiens
  misc_RNA (1)...(19): siRNA sense strand
uugaaugccuggcccuaaa

SEQ ID NO: 245105 - RNA, 19 nt, Homo sapiens
  misc_RNA (1)...(19): siRNA sense strand
caucagaaccaguugaaag

SEQ ID NO: 245106 - RNA, 19 nt, Homo sapiens
  misc_RNA (1)...(19): siRNA sense strand
ucaaacucguaccuuuauu

SEQ ID NO: 245107 - RNA, 19 nt, Homo sapiens
  misc_RNA (1)...(19): siRNA sense strand
cuucaggaauacaauguug

SEQ ID NO: 245108 - RNA, 19 nt, Homo sapiens
  misc_RNA (1)...(19): siRNA sense strand
gcacagauaguggauuugg

SEQ ID NO: 245109 - RNA, 19 nt, Homo sapiens
  misc_RNA (1)...(19): siRNA sense strand
cagcacaugaucagggaua

SEQ ID NO: 245110 - RNA, 19 nt, Homo sapiens
  misc_RNA (1)...(19): siRNA sense strand
gaaguucagggagcagaaa

SEQ ID NO: 245111 - RNA, 19 nt, Homo sapiens
  misc_RNA (1)...(19): siRNA sense strand
ucacggggcuagaagagua

SEQ ID NO: 245112 - RNA, 19 nt, Homo sapiens
  misc_RNA (1)...(19): siRNA sense strand
ggauggcaacccacacauu

SEQ ID NO: 245113 - RNA, 19 nt, Homo sapiens
  misc_RNA (1)...(19): siRNA sense strand
ucagggauauacagaccuu

SEQ ID NO: 245114 - RNA, 19 nt, Homo sapiens
  misc_RNA (1)...(19): siRNA sense strand
uaagaagcuucaggaauac

SEQ ID NO: 245115 - RNA, 19 nt, Homo sapiens
  misc_RNA (1)...(19): siRNA sense strand
uaaccaaggccuguuugaa

SEQ ID NO: 245116 - RNA, 19 nt, Homo sapiens
  misc_RNA (1)...(19): siRNA sense strand
ggacuacaauaacaaucac

SEQ ID NO: 245117 - RNA, 19 nt, Homo sapiens
  misc_RNA (1)...(19): siRNA sense strand
gcccauggaggcagaagaa

SEQ ID NO: 245118 - RNA, 19 nt, Homo sapiens
  misc_RNA (1)...(19): siRNA sense strand
gaaugggucccuauuaucc

SEQ ID NO: 245119 - RNA, 19 nt, Homo sapiens
  misc_RNA (1)...(19): siRNA sense strand
gauggagcuugcugcuguu

SEQ ID NO: 245120 - RNA, 19 nt, Homo sapiens
  misc_RNA (1)...(19): siRNA sense strand
accaaggccuguuugaaug

SEQ ID NO: 245121 - RNA, 19 nt, Homo sapiens
  misc_RNA (1)...(19): siRNA sense strand
gaaaguauugcugccuuca

SEQ ID NO: 245122 - RNA, 19 nt, Homo sapiens
  misc_RNA (1)...(19): siRNA sense strand
agaaccaguugaaagugaa

SEQ ID NO: 245123 - RNA, 19 nt, Homo sapiens
  misc_RNA (1)...(19): siRNA sense strand
uguuaucaauggccgaauu

SEQ ID NO: 245124 - RNA, 19 nt, Homo sapiens
  misc_RNA (1)...(19): siRNA sense strand
gcaacccacacauugauca

SEQ ID NO: 245125 - RNA, 19 nt, Homo sapiens
  misc_RNA (1)...(19): siRNA sense strand
gauccagcaacaucuuuga

SEQ ID NO: 245126 - RNA, 19 nt, Homo sapiens
  misc_RNA (1)...(19): siRNA sense strand
ggaaugccaacagcuaugu

SEQ ID NO: 245127 - RNA, 19 nt, Homo sapiens
  misc_RNA (1)...(19): siRNA sense strand
gcuugcugcuguuaucaau

SEQ ID NO: 245128 - RNA, 19 nt, Homo sapiens
  misc_RNA (1)...(19): siRNA sense strand
gggacgaguucugcaagau

SEQ ID NO: 245129 - RNA, 19 nt, Homo sapiens
  misc_RNA (1)...(19): siRNA sense strand
ccacggacuacaauaacaa

SEQ ID NO: 245130 - RNA, 19 nt, Homo sapiens
  misc_RNA (1)...(19): siRNA sense strand
auacaacgccucaguggau

SEQ ID NO: 245131 - RNA, 19 nt, Homo sapiens
  misc_RNA (1)...(19): siRNA sense strand
aaccaaggccuguuugaau

SEQ ID NO: 245132 - RNA, 19 nt, Homo sapiens
  misc_RNA (1)...(19): siRNA sense strand
caggagcccacacccagua

SEQ ID NO: 245133 - RNA, 19 nt, Homo sapiens
  misc_RNA (1)...(19): siRNA sense strand
ggaaccacugugaccauga

SEQ ID NO: 245134 - RNA, 19 nt, Homo sapiens
  misc_RNA (1)...(19): siRNA sense strand
ugguaugccugccaagaga

SEQ ID NO: 245135 - RNA, 19 nt, Homo sapiens
  misc_RNA (1)...(19): siRNA sense strand
ggaaguucagggagcagaa

SEQ ID NO: 245136 - RNA, 19 nt, Homo sapiens
  misc_RNA (1)...(19): siRNA sense strand
guaaccaaggccuguuuga

SEQ ID NO: 245137 - RNA, 19 nt, Homo sapiens
  misc_RNA (1)...(19): siRNA sense strand
ggauuucccaccagagugu

SEQ ID NO: 245138 - RNA, 19 nt, Homo sapiens
  misc_RNA (1)...(19): siRNA sense strand
gggccuugcuuucucuucu

SEQ ID NO: 245139 - RNA, 19 nt, Homo sapiens
  misc_RNA (1)...(19): siRNA sense strand
uggaggagccugacagcuu

SEQ ID NO: 245140 - RNA, 19 nt, Homo sapiens
  misc_RNA (1)...(19): siRNA sense strand
aacaacggcucauuuacca

SEQ ID NO: 245141 - RNA, 19 nt, Homo sapiens
  misc_RNA (1)...(19): siRNA sense strand
cccuaaaccugcacugcuu

SEQ ID NO: 245142 - RNA, 19 nt, Homo sapiens
  misc_RNA (1)...(19): siRNA sense strand
aaacaucagaaccaguuga

SEQ ID NO: 245143 - RNA, 19 nt, Homo sapiens
  misc_RNA (1)...(19): siRNA sense strand
gaccuuggacucucaaacu

SEQ ID NO: 245144 - RNA, 19 nt, Homo sapiens
  misc_RNA (1)...(19): siRNA sense strand
cugcgcaugugcugcauug

SEQ ID NO: 245145 - RNA, 19 nt, Homo sapiens
  misc_RNA (1)...(19): siRNA sense strand
ucugcaagaugauaagaag

SEQ ID NO: 245146 - RNA, 19 nt, Homo sapiens
  misc_RNA (1)...(19): siRNA sense strand
ccgagggucauccggauuu

SEQ ID NO: 245147 - RNA, 19 nt, Homo sapiens
  misc_RNA (1)...(19): siRNA sense strand
gcagcgcuacuacgagguu

SEQ ID NO: 245148 - RNA, 19 nt, Homo sapiens
  misc_RNA (1)...(19): siRNA sense strand
aaacaaaugcacccaacca

SEQ ID NO: 245149 - RNA, 19 nt, Homo sapiens
  misc_RNA (1)...(19): siRNA sense strand
aaacucguaccuuuauugu

SEQ ID NO: 245150 - RNA, 19 nt, Homo sapiens
  misc_RNA (1)...(19): siRNA sense strand
ccaagagacgcaagacgau

SEQ ID NO: 245151 - RNA, 19 nt, Homo sapiens
  misc_RNA (1)...(19): siRNA sense strand
gagccugucaccggaguuu

SEQ ID NO: 245152 - RNA, 19 nt, Homo sapiens
  misc_RNA (1)...(19): siRNA sense strand
caacccggguggugauugc

SEQ ID NO: 245153 - RNA, 19 nt, Homo sapiens
  misc_RNA (1)...(19): siRNA sense strand
caugugguccggccuaugu

SEQ ID NO: 245154 - RNA, 19 nt, Homo sapiens
  misc_RNA (1)...(19): siRNA sense strand
cauggaggcagaagaagug

SEQ ID NO: 245155 - RNA, 19 nt, Homo sapiens
  misc_RNA (1)...(19): siRNA sense strand
ugucugaccugcgcugcaa

SEQ ID NO: 245156 - RNA, 19 nt, Homo sapiens
  misc_RNA (1)...(19): siRNA sense strand
gaguuuaaggagcacauug

SEQ ID NO: 245157 - RNA, 19 nt, Homo sapiens
  misc_RNA (1)...(19): siRNA sense strand
ccuaaugauaguaccagua

SEQ ID NO: 245158 - RNA, 19 nt, Homo sapiens
  misc_RNA (1)...(19): siRNA sense strand
gcauuuccagccacuacaa

SEQ ID NO: 245159 - RNA, 19 nt, Homo sapiens
  misc_RNA (1)...(19): siRNA sense strand
gugccaggcuucccaacag

SEQ ID NO: 245160 - RNA, 19 nt, Homo sapiens
  misc_RNA (1)...(19): siRNA sense strand
aagagcaguuuaauagcau

SEQ ID NO: 245161 - RNA, 19 nt, Homo sapiens
  misc_RNA (1)...(19): siRNA sense strand
ggccgaauucgucguaugu

SEQ ID NO: 245162 - RNA, 19 nt, Homo sapiens
  misc_RNA (1)...(19): siRNA sense strand
cgaguucugcaagaugaua

SEQ ID NO: 245163 - RNA, 19 nt, Homo sapiens
  misc_RNA (1)...(19): siRNA sense strand
ggacaaaccuggaauuucu

SEQ ID NO: 245164 - RNA, 19 nt, Homo sapiens
  misc_RNA (1)...(19): siRNA sense strand
auaagaagcuucaggaaua

SEQ ID NO: 245165 - RNA, 19 nt, Homo sapiens
  misc_RNA (1)...(19): siRNA sense strand
caacagcuaugucaugguu

SEQ ID NO: 245166 - RNA, 19 nt, Homo sapiens
  misc_RNA (1)...(19): siRNA sense strand
cagaaugggucccuauuau

SEQ ID NO: 245167 - RNA, 19 nt, Homo sapiens
  misc_RNA (1)...(19): siRNA sense strand
caagagcaguuuaauagca

SEQ ID NO: 245168 - RNA, 19 nt, Homo sapiens
  misc_RNA (1)...(19): siRNA sense strand
gcaggcagccauucccaua

SEQ ID NO: 245169 - RNA, 19 nt, Homo sapiens
  misc_RNA (1)...(19): siRNA sense strand
gacgaguucugcaagauga

SEQ ID NO: 245170 - RNA, 19 nt, Homo sapiens
  misc_RNA (1)...(19): siRNA sense strand
guuggaaccuucaaucuuc

SEQ ID NO: 245171 - RNA, 19 nt, Homo sapiens
  misc_RNA (1)...(19): siRNA sense strand
cagcagcuccggucugaua

SEQ ID NO: 245172 - RNA, 19 nt, Homo sapiens
  misc_RNA (1)...(19): siRNA sense strand
gauaagaagcuucaggaau

SEQ ID NO: 245173 - RNA, 19 nt, Homo sapiens
  misc_RNA (1)...(19): siRNA sense strand
ccagaaugggucccuauua

SEQ ID NO: 245174 - RNA, 19 nt, Homo sapiens
  misc_RNA (1)...(19): siRNA sense strand
cagaaccaguugaaaguga

SEQ ID NO: 245175 - RNA, 19 nt, Homo sapiens
  misc_RNA (1)...(19): siRNA sense strand
aaguauugcugccuucaua

SEQ ID NO: 245176 - RNA, 19 nt, Homo sapiens
  misc_RNA (1)...(19): siRNA sense strand
gcuccggucugauauacaa

SEQ ID NO: 245177 - RNA, 19 nt, Homo sapiens
  misc_RNA (1)...(19): siRNA sense strand
ggugauggcucagcacaug

SEQ ID NO: 245178 - RNA, 19 nt, Homo sapiens
  misc_RNA (1)...(19): siRNA sense strand
gggcccagaugaauguaaa

SEQ ID NO: 245179 - RNA, 19 nt, Homo sapiens
  misc_RNA (1)...(19): siRNA sense strand
aggcaugacugacuucuug

SEQ ID NO: 245180 - RNA, 19 nt, Homo sapiens
  misc_RNA (1)...(19): siRNA sense strand
ugagcuggcugaccacuau

SEQ ID NO: 245181 - RNA, 19 nt, Homo sapiens
  misc_RNA (1)...(19): siRNA sense strand
ggauauacagaccuuacua

SEQ ID NO: 245182 - RNA, 19 nt, Homo sapiens
  misc_RNA (1)...(19): siRNA sense strand
ggagcuugcugcuguuauc

SEQ ID NO: 245183 - RNA, 19 nt, Homo sapiens
  misc_RNA (1)...(19): siRNA sense strand
gauggcaacccacacauug

SEQ ID NO: 245184 - RNA, 19 nt, Homo sapiens
  misc_RNA (1)...(19): siRNA sense strand
ccaccacggacuacaauaa

SEQ ID NO: 245185 - RNA, 19 nt, Homo sapiens
  misc_RNA (1)...(19): siRNA sense strand
gcacaugaucagggauaua

SEQ ID NO: 245186 - RNA, 19 nt, Homo sapiens
  misc_RNA (1)...(19): siRNA sense strand
uugcacagauaguggauuu

SEQ ID NO: 245187 - RNA, 19 nt, Homo sapiens
  misc_RNA (1)...(19): siRNA sense strand
ucaaacaucagaaccaguu

SEQ ID NO: 245188 - RNA, 19 nt, Homo sapiens
  misc_RNA (1)...(19): siRNA sense strand
caaacucguaccuuuauug

SEQ ID NO: 245189 - RNA, 19 nt, Homo sapiens
  misc_RNA (1)...(19): siRNA sense strand
gcuuggagguguuggugaa

SEQ ID NO: 245190 - RNA, 19 nt, Homo sapiens
  misc_RNA (1)...(19): siRNA sense strand
gauauacagaccuuacuau

SEQ ID NO: 245191 - RNA, 19 nt, Homo sapiens
  misc_RNA (1)...(19): siRNA sense strand
ugacggcucugcuguggau

SEQ ID NO: 245192 - RNA, 19 nt, Homo sapiens
  misc_RNA (1)...(19): siRNA sense strand
ucucaaacucguaccuuua

SEQ ID NO: 245193 - RNA, 19 nt, Homo sapiens
  misc_RNA (1)...(19): siRNA sense strand
gcaagaugauaagaagcuu

SEQ ID NO: 245194 - RNA, 19 nt, Homo sapiens
  misc_RNA (1)...(19): siRNA sense strand
gaacgggcuccuccucaga

SEQ ID NO: 245195 - RNA, 19 nt, Homo sapiens
  misc_RNA (1)...(19): siRNA sense strand
ccuucaaucuuccuaguga

SEQ ID NO: 245196 - RNA, 19 nt, Homo sapiens
  misc_RNA (1)...(19): siRNA sense strand
gaaccacugugaccaugac

SEQ ID NO: 245197 - RNA, 19 nt, Homo sapiens
  misc_RNA (1)...(19): siRNA sense strand
gcucugcuguggauguuca

SEQ ID NO: 245198 - RNA, 19 nt, Homo sapiens
  misc_RNA (1)...(19): siRNA sense strand
uggcagcagugaaaguauu

SEQ ID NO: 245199 - RNA, 19 nt, Homo sapiens
  misc_RNA (1)...(19): siRNA sense strand
ggacgaguucugcaagaug

SEQ ID NO: 245200 - RNA, 19 nt, Homo sapiens
  misc_RNA (1)...(19): siRNA sense strand
uccaagagcaguuuaauag

SEQ ID NO: 245201 - RNA, 19 nt, Homo sapiens
  misc_RNA (1)...(19): siRNA sense strand
ugaagaccuuggacucuca

SEQ ID NO: 245202 - RNA, 19 nt, Homo sapiens
  misc_RNA (1)...(19): siRNA sense strand
gcagcuccggucugauaua

SEQ ID NO: 245203 - RNA, 19 nt, Homo sapiens
  misc_RNA (1)...(19): siRNA sense strand
uguaggcccugaugccauu

SEQ ID NO: 245204 - RNA, 19 nt, Homo sapiens
  misc_RNA (1)...(19): siRNA sense strand
uugaaugccuggcccuaaa

SEQ ID NO: 245205 - RNA, 19 nt, Homo sapiens
  misc_RNA (1)...(19): siRNA sense strand
caucagaaccaguugaaag

SEQ ID NO: 245206 - RNA, 19 nt, Homo sapiens
  misc_RNA (1)...(19): siRNA sense strand
ucaaacucguaccuuuauu

SEQ ID NO: 245207 - RNA, 19 nt, Homo sapiens
  misc_RNA (1)...(19): siRNA sense strand
cuucaggaauacaauguug

SEQ ID NO: 245208 - RNA, 19 nt, Homo sapiens
  misc_RNA (1)...(19): siRNA sense strand
gcacagauaguggauuugg

SEQ ID NO: 245209 - RNA, 19 nt, Homo sapiens
  misc_RNA (1)...(19): siRNA sense strand
cagcacaugaucagggaua

SEQ ID NO: 245210 - RNA, 19 nt, Homo sapiens
  misc_RNA (1)...(19): siRNA sense strand
gaaguucagggagcagaaa

SEQ ID NO: 245211 - RNA, 19 nt, Homo sapiens
  misc_RNA (1)...(19): siRNA sense strand
ucacggggcuagaagagua

SEQ ID NO: 245212 - RNA, 19 nt, Homo sapiens
  misc_RNA (1)...(19): siRNA sense strand
ggauggcaacccacacauu

SEQ ID NO: 245213 - RNA, 19 nt, Homo sapiens
  misc_RNA (1)...(19): siRNA sense strand
ucagggauauacagaccuu

SEQ ID NO: 245214 - RNA, 19 nt, Homo sapiens
  misc_RNA (1)...(19): siRNA sense strand
uaagaagcuucaggaauac

SEQ ID NO: 245215 - RNA, 19 nt, Homo sapiens
  misc_RNA (1)...(19): siRNA sense strand
uaaccaaggccuguuugaa

SEQ ID NO: 245216 - RNA, 19 nt, Homo sapiens
  misc_RNA (1)...(19): siRNA sense strand
ggacuacaauaacaaucac

SEQ ID NO: 245217 - RNA, 19 nt, Homo sapiens
  misc_RNA (1)...(19): siRNA sense strand
gcccauggaggcagaagaa

SEQ ID NO: 245218 - RNA, 19 nt, Homo sapiens
  misc_RNA (1)...(19): siRNA sense strand
gaaugggucccuauuaucc

SEQ ID NO: 245219 - RNA, 19 nt, Homo sapiens
  misc_RNA (1)...(19): siRNA sense strand
gauggagcuugcugcuguu

SEQ ID NO: 245220 - RNA, 19 nt, Homo sapiens
  misc_RNA (1)...(19): siRNA sense strand
accaaggccuguuugaaug

SEQ ID NO: 245221 - RNA, 19 nt, Homo sapiens
  misc_RNA (1)...(19): siRNA sense strand
gaaaguauugcugccuuca

SEQ ID NO: 245222 - RNA, 19 nt, Homo sapiens
  misc_RNA (1)...(19): siRNA sense strand
agaaccaguugaaagugaa

SEQ ID NO: 245223 - RNA, 19 nt, Homo sapiens
  misc_RNA (1)...(19): siRNA sense strand
uguuaucaauggccgaauu

SEQ ID NO: 245224 - RNA, 19 nt, Homo sapiens
  misc_RNA (1)...(19): siRNA sense strand
gcaacccacacauugauca

SEQ ID NO: 245225 - RNA, 19 nt, Homo sapiens
  misc_RNA (1)...(19): siRNA sense strand
gauccagcaacaucuuuga

SEQ ID NO: 245226 - RNA, 19 nt, Homo sapiens
  misc_RNA (1)...(19): siRNA sense strand
ggaaugccaacagcuaugu

SEQ ID NO: 245227 - RNA, 19 nt, Homo sapiens
  misc_RNA (1)...(19): siRNA sense strand
gcuugcugcuguuaucaau

SEQ ID NO: 245228 - RNA, 19 nt, Homo sapiens
  misc_RNA (1)...(19): siRNA sense strand
gggacgaguucugcaagau

SEQ ID NO: 245229 - RNA, 19 nt, Homo sapiens
  misc_RNA (1)...(19): siRNA sense strand
ccacggacuacaauaacaa

SEQ ID NO: 245230 - RNA, 19 nt, Homo sapiens
  misc_RNA (1)...(19): siRNA sense strand
auacaacgccucaguggau

SEQ ID NO: 245231 - RNA, 19 nt, Homo sapiens
  misc_RNA (1)...(19): siRNA sense strand
aaccaaggccuguuugaau

SEQ ID NO: 245232 - RNA, 19 nt, Homo sapiens
  misc_RNA (1)...(19): siRNA sense strand
caggagcccacacccagua

SEQ ID NO: 245233 - RNA, 19 nt, Homo sapiens
  misc_RNA (1)...(19): siRNA sense strand
ggaaccacugugaccauga

SEQ ID NO: 245234 - RNA, 19 nt, Homo sapiens
  misc_RNA (1)...(19): siRNA sense strand
ugguaugccugccaagaga

SEQ ID NO: 245235 - RNA, 19 nt, Homo sapiens
  misc_RNA (1)...(19): siRNA sense strand
ggaaguucagggagcagaa

SEQ ID NO: 245236 - RNA, 19 nt, Homo sapiens
  misc_RNA (1)...(19): siRNA sense strand
guaaccaaggccuguuuga

SEQ ID NO: 245237 - RNA, 19 nt, Homo sapiens
  misc_RNA (1)...(19): siRNA sense strand
ggauuucccaccagagugu

SEQ ID NO: 245238 - RNA, 19 nt, Homo sapiens
  misc_RNA (1)...(19): siRNA sense strand
gggccuugcuuucucuucu

SEQ ID NO: 245239 - RNA, 19 nt, Homo sapiens
  misc_RNA (1)...(19): siRNA sense strand
uggaggagccugacagcuu

SEQ ID NO: 245240 - RNA, 19 nt, Homo sapiens
  misc_RNA (1)...(19): siRNA sense strand
aacaacggcucauuuacca

SEQ ID NO: 245241 - RNA, 19 nt, Homo sapiens
  misc_RNA (1)...(19): siRNA sense strand
cccuaaaccugcacugcuu

SEQ ID NO: 245242 - RNA, 19 nt, Homo sapiens
  misc_RNA (1)...(19): siRNA sense strand
aaacaucagaaccaguuga

SEQ ID NO: 245243 - RNA, 19 nt, Homo sapiens
  misc_RNA (1)...(19): siRNA sense strand
gaccuuggacucucaaacu

SEQ ID NO: 245244 - RNA, 19 nt, Homo sapiens
  misc_RNA (1)...(19): siRNA sense strand
cugcgcaugugcugcauug

SEQ ID NO: 245245 - RNA, 19 nt, Homo sapiens
  misc_RNA (1)...(19): siRNA sense strand
ucugcaagaugauaagaag

SEQ ID NO: 245246 - RNA, 19 nt, Homo sapiens
  misc_RNA (1)...(19): siRNA sense strand
ccgagggucauccggauuu

SEQ ID NO: 245247 - RNA, 19 nt, Homo sapiens
  misc_RNA (1)...(19): siRNA sense strand
gcagcgcuacuacgagguu

SEQ ID NO: 245248 - RNA, 19 nt, Homo sapiens
  misc_RNA (1)...(19): siRNA sense strand
aaacaaaugcacccaacca

SEQ ID NO: 245249 - RNA, 19 nt, Homo sapiens
  misc_RNA (1)...(19): siRNA sense strand
aaacucguaccuuuauugu

SEQ ID NO: 245250 - RNA, 19 nt, Homo sapiens
  misc_RNA (1)...(19): siRNA sense strand
ccaagagacgcaagacgau

SEQ ID NO: 245251 - RNA, 19 nt, Homo sapiens
  misc_RNA (1)...(19): siRNA sense strand
gagccugucaccggaguuu

SEQ ID NO: 245252 - RNA, 19 nt, Homo sapiens
  misc_RNA (1)...(19): siRNA sense strand
caacccggguggugauugc

SEQ ID NO: 245253 - RNA, 19 nt, Homo sapiens
  misc_RNA (1)...(19): siRNA sense strand
caugugguccggccuaugu

SEQ ID NO: 245254 - RNA, 19 nt, Homo sapiens
  misc_RNA (1)...(19): siRNA sense strand
cauggaggcagaagaagug

SEQ ID NO: 245255 - RNA, 19 nt, Homo sapiens
  misc_RNA (1)...(19): siRNA sense strand
ugucugaccugcgcugcaa

SEQ ID NO: 245256 - RNA, 19 nt, Homo sapiens
  misc_RNA (1)...(19): siRNA sense strand
gaguuuaaggagcacauug

SEQ ID NO: 245257 - RNA, 19 nt, Homo sapiens
  misc_RNA (1)...(19): siRNA sense strand
ccuaaugauaguaccagua

SEQ ID NO: 245258 - RNA, 19 nt, Homo sapiens
  misc_RNA (1)...(19): siRNA sense strand
gcauuuccagccacuacaa

SEQ ID NO: 245259 - RNA, 19 nt, Homo sapiens
  misc_RNA (1)...(19): siRNA sense strand
gugccaggcuucccaacag

SEQ ID NO: 245260 - RNA, 19 nt, Homo sapiens
  misc_RNA (1)...(19): siRNA sense strand
aagagcaguuuaauagcau

SEQ ID NO: 245261 - RNA, 19 nt, Homo sapiens
  misc_RNA (1)...(19): siRNA sense strand
ggccgaauucgucguaugu

SEQ ID NO: 245262 - RNA, 19 nt, Homo sapiens
  misc_RNA (1)...(19): siRNA sense strand
cgaguucugcaagaugaua

SEQ ID NO: 245263 - RNA, 19 nt, Homo sapiens
  misc_RNA (1)...(19): siRNA sense strand
gaacggacauguauucaau

SEQ ID NO: 245264 - RNA, 19 nt, Homo sapiens
  misc_RNA (1)...(19): siRNA sense strand
ccagaugauucuuaauuug

SEQ ID NO: 245265 - RNA, 19 nt, Homo sapiens
  misc_RNA (1)...(19): siRNA sense strand
ggacauguauucaauuuuc

SEQ ID NO: 245266 - RNA, 19 nt, Homo sapiens
  misc_RNA (1)...(19): siRNA sense strand
uaucuuggcuuguuuaugc

SEQ ID NO: 245267 - RNA, 19 nt, Homo sapiens
  misc_RNA (1)...(19): siRNA sense strand
gguaccaggucuucuaugu

SEQ ID NO: 245268 - RNA, 19 nt, Homo sapiens
  misc_RNA (1)...(19): siRNA sense strand
agaccacacucgacucuug

SEQ ID NO: 245269 - RNA, 19 nt, Homo sapiens
  misc_RNA (1)...(19): siRNA sense strand
cuaugugggugucaggaua

SEQ ID NO: 245270 - RNA, 19 nt, Homo sapiens
  misc_RNA (1)...(19): siRNA sense strand
caucagcuccucccugcua

SEQ ID NO: 245271 - RNA, 19 nt, Homo sapiens
  misc_RNA (1)...(19): siRNA sense strand
cagcgucacuggcacuuuc

SEQ ID NO: 245272 - RNA, 19 nt, Homo sapiens
  misc_RNA (1)...(19): siRNA sense strand
ugggaucauugucugcuua

SEQ ID NO: 245273 - RNA, 19 nt, Homo sapiens
  misc_RNA (1)...(19): siRNA sense strand
acggacauguauucaauuu

SEQ ID NO: 245274 - RNA, 19 nt, Homo sapiens
  misc_RNA (1)...(19): siRNA sense strand
gaucauugucugcuuagug

SEQ ID NO: 245275 - RNA, 19 nt, Homo sapiens
  misc_RNA (1)...(19): siRNA sense strand
ucagcaggaccuuuguuua

SEQ ID NO: 245276 - RNA, 19 nt, Homo sapiens
  misc_RNA (1)...(19): siRNA sense strand
ucgcagcucacacaguuua

SEQ ID NO: 245277 - RNA, 19 nt, Homo sapiens
  misc_RNA (1)...(19): siRNA sense strand
gacgaacggacauguauuc

SEQ ID NO: 245278 - RNA, 19 nt, Homo sapiens
  misc_RNA (1)...(19): siRNA sense strand
ggccuaucuuggcuuguuu

SEQ ID NO: 245279 - RNA, 19 nt, Homo sapiens
  misc_RNA (1)...(19): siRNA sense strand
cagcaggaccuuuguuuac

SEQ ID NO: 245280 - RNA, 19 nt, Homo sapiens
  misc_RNA (1)...(19): siRNA sense strand
auucgcagcucacacaguu

SEQ ID NO: 245281 - RNA, 19 nt, Homo sapiens
  misc_RNA (1)...(19): siRNA sense strand
guuuaugcuuugugucuca

SEQ ID NO: 245282 - RNA, 19 nt, Homo sapiens
  misc_RNA (1)...(19): siRNA sense strand
uggccuaucuuggcuuguu

SEQ ID NO: 245283 - RNA, 19 nt, Homo sapiens
  misc_RNA (1)...(19): siRNA sense strand
cagaugauucuuaauuugg

SEQ ID NO: 245284 - RNA, 19 nt, Homo sapiens
  misc_RNA (1)...(19): siRNA sense strand
gcuuguuuaugcuuugugu

SEQ ID NO: 245285 - RNA, 19 nt, Homo sapiens
  misc_RNA (1)...(19): siRNA sense strand
uucaaacuguucuuacuca

SEQ ID NO: 245286 - RNA, 19 nt, Homo sapiens
  misc_RNA (1)...(19): siRNA sense strand
agucagggacacuccauuu

SEQ ID NO: 245287 - RNA, 19 nt, Homo sapiens
  misc_RNA (1)...(19): siRNA sense strand
cgaacggacauguauucaa

SEQ ID NO: 245288 - RNA, 19 nt, Homo sapiens
  misc_RNA (1)...(19): siRNA sense strand
caaacuguucuuacucauc

SEQ ID NO: 245289 - RNA, 19 nt, Homo sapiens
  misc_RNA (1)...(19): siRNA sense strand
ugacgaacggacauguauu

SEQ ID NO: 245290 - RNA, 19 nt, Homo sapiens
  misc_RNA (1)...(19): siRNA sense strand
guaccaggucuucuaugug

SEQ ID NO: 245291 - RNA, 19 nt, Homo sapiens
  misc_RNA (1)...(19): siRNA sense strand
guugacgaacggacaugua

SEQ ID NO: 245292 - RNA, 19 nt, Homo sapiens
  misc_RNA (1)...(19): siRNA sense strand
auagguaccaggucuucua

SEQ ID NO: 245293 - RNA, 19 nt, Homo sapiens
  misc_RNA (1)...(19): siRNA sense strand
cacuggcacuuucaaacug

SEQ ID NO: 245294 - RNA, 19 nt, Homo sapiens
  misc_RNA (1)...(19): siRNA sense strand
ccgcucagcaggaccuuug

SEQ ID NO: 245295 - RNA, 19 nt, Homo sapiens
  misc_RNA (1)...(19): siRNA sense strand
uuguuggccugcuuuguga

SEQ ID NO: 245296 - RNA, 19 nt, Homo sapiens
  misc_RNA (1)...(19): siRNA sense strand
gcucagcaggaccuuuguu

SEQ ID NO: 245297 - RNA, 19 nt, Homo sapiens
  misc_RNA (1)...(19): siRNA sense strand
ucaaacuguucuuacucau

SEQ ID NO: 245298 - RNA, 19 nt, Homo sapiens
  misc_RNA (1)...(19): siRNA sense strand
ucacuggcacuuucaaacu

SEQ ID NO: 245299 - RNA, 19 nt, Homo sapiens
  misc_RNA (1)...(19): siRNA sense strand
gcagaaacggaacggaaug

SEQ ID NO: 245300 - RNA, 19 nt, Homo sapiens
  misc_RNA (1)...(19): siRNA sense strand
ggcaacgucuucacaguac

SEQ ID NO: 245301 - RNA, 19 nt, Homo sapiens
  misc_RNA (1)...(19): siRNA sense strand
gagcugcuggccaucauug

SEQ ID NO: 245302 - RNA, 19 nt, Homo sapiens
  misc_RNA (1)...(19): siRNA sense strand
ggagcaagagugccaugga

SEQ ID NO: 245303 - RNA, 19 nt, Homo sapiens
  misc_RNA (1)...(19): siRNA sense strand
cgggagugcuuggcagaaa

SEQ ID NO: 245304 - RNA, 19 nt, Homo sapiens
  misc_RNA (1)...(19): siRNA sense strand
uggcaacgucuucacagua

SEQ ID NO: 245305 - RNA, 19 nt, Homo sapiens
  misc_RNA (1)...(19): siRNA sense strand
cggcaucauucacgcuaga

SEQ ID NO: 245306 - RNA, 19 nt, Homo sapiens
  misc_RNA (1)...(19): siRNA sense strand
gccagcugcucagugacua

SEQ ID NO: 245307 - RNA, 19 nt, Homo sapiens
  misc_RNA (1)...(19): siRNA sense strand
ggcagaaacggaacggaau

SEQ ID NO: 245308 - RNA, 19 nt, Homo sapiens
  misc_RNA (1)...(19): siRNA sense strand
gcugcuggccaucauugaa

SEQ ID NO: 245309 - RNA, 19 nt, Homo sapiens
  misc_RNA (1)...(19): siRNA sense strand
gcauggcaacgucuucaca

SEQ ID NO: 245310 - RNA, 19 nt, Homo sapiens
  misc_RNA (1)...(19): siRNA sense strand
gggagugcuuggcagaaac

SEQ ID NO: 245311 - RNA, 19 nt, Homo sapiens
  misc_RNA (1)...(19): siRNA sense strand
guaaagcgcuugcugauua

SEQ ID NO: 245312 - RNA, 19 nt, Homo sapiens
  misc_RNA (1)...(19): siRNA sense strand
caacaaauuuggcacuuua

SEQ ID NO: 245313 - RNA, 19 nt, Homo sapiens
  misc_RNA (1)...(19): siRNA sense strand
caaaggagauuuacuagaa

SEQ ID NO: 245314 - RNA, 19 nt, Homo sapiens
  misc_RNA (1)...(19): siRNA sense strand
gaaccugcauuuccacaua

SEQ ID NO: 245315 - RNA, 19 nt, Homo sapiens
  misc_RNA (1)...(19): siRNA sense strand
agacacagcuucugaaauu

SEQ ID NO: 245316 - RNA, 19 nt, Homo sapiens
  misc_RNA (1)...(19): siRNA sense strand
ggaaguagauauagucaug

SEQ ID NO: 245317 - RNA, 19 nt, Homo sapiens
  misc_RNA (1)...(19): siRNA sense strand
agaaaucgcugguauaaau

SEQ ID NO: 245318 - RNA, 19 nt, Homo sapiens
  misc_RNA (1)...(19): siRNA sense strand
ggucaucuuuggucauuua

SEQ ID NO: 245319 - RNA, 19 nt, Homo sapiens
  misc_RNA (1)...(19): siRNA sense strand
gguagucuaugccuuguua

SEQ ID NO: 245320 - RNA, 19 nt, Homo sapiens
  misc_RNA (1)...(19): siRNA sense strand
gcacagcaauaacuacuug

SEQ ID NO: 245321 - RNA, 19 nt, Homo sapiens
  misc_RNA (1)...(19): siRNA sense strand
acacgaugcuuuagaauuu

SEQ ID NO: 245322 - RNA, 19 nt, Homo sapiens
  misc_RNA (1)...(19): siRNA sense strand
caacauugguguccuaaga

SEQ ID NO: 245323 - RNA, 19 nt, Homo sapiens
  misc_RNA (1)...(19): siRNA sense strand
gcucacagcugaacgaaug

SEQ ID NO: 245324 - RNA, 19 nt, Homo sapiens
  misc_RNA (1)...(19): siRNA sense strand
gaaagaagaccauauacug

SEQ ID NO: 245325 - RNA, 19 nt, Homo sapiens
  misc_RNA (1)...(19): siRNA sense strand
gagaugaacuugaaagaag

SEQ ID NO: 245326 - RNA, 19 nt, Homo sapiens
  misc_RNA (1)...(19): siRNA sense strand
gaagauaaaccagcauuaa

SEQ ID NO: 245327 - RNA, 19 nt, Homo sapiens
  misc_RNA (1)...(19): siRNA sense strand
cagaaaaccuuguaacuua

SEQ ID NO: 245328 - RNA, 19 nt, Homo sapiens
  misc_RNA (1)...(19): siRNA sense strand
ccugauagcucuucugauu

SEQ ID NO: 245329 - RNA, 19 nt, Homo sapiens
  misc_RNA (1)...(19): siRNA sense strand
agacuuagauccugauauu

SEQ ID NO: 245330 - RNA, 19 nt, Homo sapiens
  misc_RNA (1)...(19): siRNA sense strand
gaaagagaaugugcaauca

SEQ ID NO: 245331 - RNA, 19 nt, Homo sapiens
  misc_RNA (1)...(19): siRNA sense strand
ucaaagagauauacacgaa

SEQ ID NO: 245332 - RNA, 19 nt, Homo sapiens
  misc_RNA (1)...(19): siRNA sense strand
gaacaauucucccuauguc

SEQ ID NO: 245333 - RNA, 19 nt, Homo sapiens
  misc_RNA (1)...(19): siRNA sense strand
gaugaggcuucaagauaua

SEQ ID NO: 245334 - RNA, 19 nt, Homo sapiens
  misc_RNA (1)...(19): siRNA sense strand
gcagacagguugaugacuu

SEQ ID NO: 245335 - RNA, 19 nt, Homo sapiens
  misc_RNA (1)...(19): siRNA sense strand
caccacagcuugaagauga

SEQ ID NO: 245336 - RNA, 19 nt, Homo sapiens
  misc_RNA (1)...(19): siRNA sense strand
ggaaacagaacguacaauu

SEQ ID NO: 245337 - RNA, 19 nt, Homo sapiens
  misc_RNA (1)...(19): siRNA sense strand
gagccuauaugauggauga

SEQ ID NO: 245338 - RNA, 19 nt, Homo sapiens
  misc_RNA (1)...(19): siRNA sense strand
guaaugugcuucagcuuga

SEQ ID NO: 245339 - RNA, 19 nt, Homo sapiens
  misc_RNA (1)...(19): siRNA sense strand
ggacaagaagaaacuguua

SEQ ID NO: 245340 - RNA, 19 nt, Homo sapiens
  misc_RNA (1)...(19): siRNA sense strand
guacgacgauguauucuca

SEQ ID NO: 245341 - RNA, 19 nt, Homo sapiens
  misc_RNA (1)...(19): siRNA sense strand
gcaauccucaguacacuua

SEQ ID NO: 245342 - RNA, 19 nt, Homo sapiens
  misc_RNA (1)...(19): siRNA sense strand
ugaaaggaauuccagauga

SEQ ID NO: 245343 - RNA, 19 nt, Homo sapiens
  misc_RNA (1)...(19): siRNA sense strand
gcugcuagguuccucuuua

SEQ ID NO: 245344 - RNA, 19 nt, Homo sapiens
  misc_RNA (1)...(19): siRNA sense strand
caccagaccucaucagauu

SEQ ID NO: 245345 - RNA, 19 nt, Homo sapiens
  misc_RNA (1)...(19): siRNA sense strand
agaaaugguuccacaguuu

SEQ ID NO: 245346 - RNA, 19 nt, Homo sapiens
  misc_RNA (1)...(19): siRNA sense strand
ucaaaucgcuucuccgaau

SEQ ID NO: 245347 - RNA, 19 nt, Homo sapiens
  misc_RNA (1)...(19): siRNA sense strand
guacgaaugugaagaaucu

SEQ ID NO: 245348 - RNA, 19 nt, Homo sapiens
  misc_RNA (1)...(19): siRNA sense strand
gggaugauguauuuggaua

SEQ ID NO: 245349 - RNA, 19 nt, Homo sapiens
  misc_RNA (1)...(19): siRNA sense strand
cuauagaucuccucaaaga

SEQ ID NO: 245350 - RNA, 19 nt, Homo sapiens
  misc_RNA (1)...(19): siRNA sense strand
ugaaggcagugaagaagua

SEQ ID NO: 245351 - RNA, 19 nt, Homo sapiens
  misc_RNA (1)...(19): siRNA sense strand
caaagacaguguuaauugu

SEQ ID NO: 245352 - RNA, 19 nt, Homo sapiens
  misc_RNA (1)...(19): siRNA sense strand
ggauacagcagaacaauau

SEQ ID NO: 245353 - RNA, 19 nt, Homo sapiens
  misc_RNA (1)...(19): siRNA sense strand
gauaaaccagcauuaagua

SEQ ID NO: 245354 - RNA, 19 nt, Homo sapiens
  misc_RNA (1)...(19): siRNA sense strand
cuagagaccaugaagauua

SEQ ID NO: 245355 - RNA, 19 nt, Homo sapiens
  misc_RNA (1)...(19): siRNA sense strand
caagacugguuuccacuuu

SEQ ID NO: 245356 - RNA, 19 nt, Homo sapiens
  misc_RNA (1)...(19): siRNA sense strand
uaacagagguagucuaugc

SEQ ID NO: 245357 - RNA, 19 nt, Homo sapiens
  misc_RNA (1)...(19): siRNA sense strand
gaugcucuuucaaugauua

SEQ ID NO: 245358 - RNA, 19 nt, Homo sapiens
  misc_RNA (1)...(19): siRNA sense strand
gaacuucgcacaaaugaca

SEQ ID NO: 245359 - RNA, 19 nt, Homo sapiens
  misc_RNA (1)...(19): siRNA sense strand
gaacaaguuaugugaagaa

SEQ ID NO: 245360 - RNA, 19 nt, Homo sapiens
  misc_RNA (1)...(19): siRNA sense strand
gaugaugaguugauaagau

SEQ ID NO: 245361 - RNA, 19 nt, Homo sapiens
  misc_RNA (1)...(19): siRNA sense strand
ggaaagagaaugugcaauc

SEQ ID NO: 245362 - RNA, 19 nt, Homo sapiens
  misc_RNA (1)...(19): siRNA sense strand
guacaacauugguguccua

SEQ ID NO: 245363 - RNA, 19 nt, Homo sapiens
  misc_RNA (1)...(19): siRNA sense strand
guagugauguagaugauga

SEQ ID NO: 245364 - RNA, 19 nt, Homo sapiens
  misc_RNA (1)...(19): siRNA sense strand
ggacaccggccucuacuuu

SEQ ID NO: 245365 - RNA, 19 nt, Homo sapiens
  misc_RNA (1)...(19): siRNA sense strand
gagcaagaguacuuaugaa

SEQ ID NO: 245366 - RNA, 19 nt, Homo sapiens
  misc_RNA (1)...(19): siRNA sense strand
gaacaacccucagagaacu

SEQ ID NO: 245367 - RNA, 19 nt, Homo sapiens
  misc_RNA (1)...(19): siRNA sense strand
gagaacaaguuaugugaag

SEQ ID NO: 245368 - RNA, 19 nt, Homo sapiens
  misc_RNA (1)...(19): siRNA sense strand
caaaucgcuucuccgaaua

SEQ ID NO: 245369 - RNA, 19 nt, Homo sapiens
  misc_RNA (1)...(19): siRNA sense strand
guacaugggagaaguguuu

SEQ ID NO: 245370 - RNA, 19 nt, Homo sapiens
  misc_RNA (1)...(19): siRNA sense strand
ggaacaguaugucaaagga

SEQ ID NO: 245371 - RNA, 19 nt, Homo sapiens
  misc_RNA (1)...(19): siRNA sense strand
ggaaacaguucaggcuuug

SEQ ID NO: 245372 - RNA, 19 nt, Homo sapiens
  misc_RNA (1)...(19): siRNA sense strand
agagagagcuaaacacuca

SEQ ID NO: 245373 - RNA, 19 nt, Homo sapiens
  misc_RNA (1)...(19): siRNA sense strand
ugauaaagauggugugaug

SEQ ID NO: 245374 - RNA, 19 nt, Homo sapiens
  misc_RNA (1)...(19): siRNA sense strand
ccaagaugcuccagaugaa

SEQ ID NO: 245375 - RNA, 19 nt, Homo sapiens
  misc_RNA (1)...(19): siRNA sense strand
acacagaucaaccaaguua

SEQ ID NO: 245376 - RNA, 19 nt, Homo sapiens
  misc_RNA (1)...(19): siRNA sense strand
guucgaguauuaacuguuu

SEQ ID NO: 245377 - RNA, 19 nt, Homo sapiens
  misc_RNA (1)...(19): siRNA sense strand
ggaaaugcuuagcugagaa

SEQ ID NO: 245378 - RNA, 19 nt, Homo sapiens
  misc_RNA (1)...(19): siRNA sense strand
ucaaucaacuucaacacaa

SEQ ID NO: 245379 - RNA, 19 nt, Homo sapiens
  misc_RNA (1)...(19): siRNA sense strand
guaacuguccuguugcuua

SEQ ID NO: 245380 - RNA, 19 nt, Homo sapiens
  misc_RNA (1)...(19): siRNA sense strand
caaacucacagaauucaua

SEQ ID NO: 245381 - RNA, 19 nt, Homo sapiens
  misc_RNA (1)...(19): siRNA sense strand
gcagaagaaaucacuauga

SEQ ID NO: 245382 - RNA, 19 nt, Homo sapiens
  misc_RNA (1)...(19): siRNA sense strand
ugagagaaguguacggaaa

SEQ ID NO: 245383 - RNA, 19 nt, Homo sapiens
  misc_RNA (1)...(19): siRNA sense strand
gcaaugagccagacuugga

SEQ ID NO: 245384 - RNA, 19 nt, Homo sapiens
  misc_RNA (1)...(19): siRNA sense strand
gaaagcagccuuaguccau

SEQ ID NO: 245385 - RNA, 19 nt, Homo sapiens
  misc_RNA (1)...(19): siRNA sense strand
ggagaaagcagccuuaguc

SEQ ID NO: 245386 - RNA, 19 nt, Homo sapiens
  misc_RNA (1)...(19): siRNA sense strand
gaaugcaguuuaccuuugu

SEQ ID NO: 245387 - RNA, 19 nt, Homo sapiens
  misc_RNA (1)...(19): siRNA sense strand
uaagugguauuccaaguug

SEQ ID NO: 245388 - RNA, 19 nt, Homo sapiens
  misc_RNA (1)...(19): siRNA sense strand
ggaauggcuuggagaugaa

SEQ ID NO: 245389 - RNA, 19 nt, Homo sapiens
  misc_RNA (1)...(19): siRNA sense strand
gaaacagaacguacaauuc

SEQ ID NO: 245390 - RNA, 19 nt, Homo sapiens
  misc_RNA (1)...(19): siRNA sense strand
ccaagaugaugaguugaua

SEQ ID NO: 245391 - RNA, 19 nt, Homo sapiens
  misc_RNA (1)...(19): siRNA sense strand
agaccaagaugaugaguug

SEQ ID NO: 245392 - RNA, 19 nt, Homo sapiens
  misc_RNA (1)...(19): siRNA sense strand
cauggaaccuuacacaguu

SEQ ID NO: 245393 - RNA, 19 nt, Homo sapiens
  misc_RNA (1)...(19): siRNA sense strand
aaacuuaugccgccagaua

SEQ ID NO: 245394 - RNA, 19 nt, Homo sapiens
  misc_RNA (1)...(19): siRNA sense strand
ggagcaagaguacuuauga

SEQ ID NO: 245395 - RNA, 19 nt, Homo sapiens
  misc_RNA (1)...(19): siRNA sense strand
gcugauagauccugcagau

SEQ ID NO: 245396 - RNA, 19 nt, Homo sapiens
  misc_RNA (1)...(19): siRNA sense strand
gaugaacucuuugcucguu

SEQ ID NO: 245397 - RNA, 19 nt, Homo sapiens
  misc_RNA (1)...(19): siRNA sense strand
ucagagaacuggccaacga

SEQ ID NO: 245398 - RNA, 19 nt, Homo sapiens
  misc_RNA (1)...(19): siRNA sense strand
caaguuggaugacaugauc

SEQ ID NO: 245399 - RNA, 19 nt, Homo sapiens
  misc_RNA (1)...(19): siRNA sense strand
uaaagcgauuugacuauga

SEQ ID NO: 245400 - RNA, 19 nt, Homo sapiens
  misc_RNA (1)...(19): siRNA sense strand
gaacgguauucuugccauu

SEQ ID NO: 245401 - RNA, 19 nt, Homo sapiens
  misc_RNA (1)...(19): siRNA sense strand
ucacaagugcuauaucuaa

SEQ ID NO: 245402 - RNA, 19 nt, Homo sapiens
  misc_RNA (1)...(19): siRNA sense strand
acagauaaguuccaauaug

SEQ ID NO: 245403 - RNA, 19 nt, Homo sapiens
  misc_RNA (1)...(19): siRNA sense strand
gcuugauccuucucuguua

SEQ ID NO: 245404 - RNA, 19 nt, Homo sapiens
  misc_RNA (1)...(19): siRNA sense strand
ggauagaucgcuuuauaga

SEQ ID NO: 245405 - RNA, 19 nt, Homo sapiens
  misc_RNA (1)...(19): siRNA sense strand
gagcauuccuaauccauca

SEQ ID NO: 245406 - RNA, 19 nt, Homo sapiens
  misc_RNA (1)...(19): siRNA sense strand
uaugacaacuuaagcuuga

SEQ ID NO: 245407 - RNA, 19 nt, Homo sapiens
  misc_RNA (1)...(19): siRNA sense strand
aaacagaacguacaauuca

SEQ ID NO: 245408 - RNA, 19 nt, Homo sapiens
  misc_RNA (1)...(19): siRNA sense strand
ugccaaggcugcccacaua

SEQ ID NO: 245409 - RNA, 19 nt, Homo sapiens
  misc_RNA (1)...(19): siRNA sense strand
ggacauccagcuaugcuaa

SEQ ID NO: 245410 - RNA, 19 nt, Homo sapiens
  misc_RNA (1)...(19): siRNA sense strand
ugaugaggcuucaagauau

SEQ ID NO: 245411 - RNA, 19 nt, Homo sapiens
  misc_RNA (1)...(19): siRNA sense strand
guaaagcgcuugcugauua

SEQ ID NO: 245412 - RNA, 19 nt, Homo sapiens
  misc_RNA (1)...(19): siRNA sense strand
caacaaauuuggcacuuua

SEQ ID NO: 245413 - RNA, 19 nt, Homo sapiens
  misc_RNA (1)...(19): siRNA sense strand
caaaggagauuuacuagaa

SEQ ID NO: 245414 - RNA, 19 nt, Homo sapiens
  misc_RNA (1)...(19): siRNA sense strand
gaaccugcauuuccacaua

SEQ ID NO: 245415 - RNA, 19 nt, Homo sapiens
  misc_RNA (1)...(19): siRNA sense strand
agacacagcuucugaaauu

SEQ ID NO: 245416 - RNA, 19 nt, Homo sapiens
  misc_RNA (1)...(19): siRNA sense strand
ggaaguagauauagucaug

SEQ ID NO: 245417 - RNA, 19 nt, Homo sapiens
  misc_RNA (1)...(19): siRNA sense strand
agaaaucgcugguauaaau

SEQ ID NO: 245418 - RNA, 19 nt, Homo sapiens
  misc_RNA (1)...(19): siRNA sense strand
ggucaucuuuggucauuua

SEQ ID NO: 245419 - RNA, 19 nt, Homo sapiens
  misc_RNA (1)...(19): siRNA sense strand
gguagucuaugccuuguua

SEQ ID NO: 245420 - RNA, 19 nt, Homo sapiens
  misc_RNA (1)...(19): siRNA sense strand
gcacagcaauaacuacuug

SEQ ID NO: 245421 - RNA, 19 nt, Homo sapiens
  misc_RNA (1)...(19): siRNA sense strand
acacgaugcuuuagaauuu

SEQ ID NO: 245422 - RNA, 19 nt, Homo sapiens
  misc_RNA (1)...(19): siRNA sense strand
caacauugguguccuaaga

SEQ ID NO: 245423 - RNA, 19 nt, Homo sapiens
  misc_RNA (1)...(19): siRNA sense strand
gcucacagcugaacgaaug

SEQ ID NO: 245424 - RNA, 19 nt, Homo sapiens
  misc_RNA (1)...(19): siRNA sense strand
gaaagaagaccauauacug

SEQ ID NO: 245425 - RNA, 19 nt, Homo sapiens
  misc_RNA (1)...(19): siRNA sense strand
gagaugaacuugaaagaag

SEQ ID NO: 245426 - RNA, 19 nt, Homo sapiens
  misc_RNA (1)...(19): siRNA sense strand
gaagauaaaccagcauuaa

SEQ ID NO: 245427 - RNA, 19 nt, Homo sapiens
  misc_RNA (1)...(19): siRNA sense strand
cagaaaaccuuguaacuua

SEQ ID NO: 245428 - RNA, 19 nt, Homo sapiens
  misc_RNA (1)...(19): siRNA sense strand
ccugauagcucuucugauu

SEQ ID NO: 245429 - RNA, 19 nt, Homo sapiens
  misc_RNA (1)...(19): siRNA sense strand
agacuuagauccugauauu

SEQ ID NO: 245430 - RNA, 19 nt, Homo sapiens
  misc_RNA (1)...(19): siRNA sense strand
gaaagagaaugugcaauca

SEQ ID NO: 245431 - RNA, 19 nt, Homo sapiens
  misc_RNA (1)...(19): siRNA sense strand
ucaaagagauauacacgaa

SEQ ID NO: 245432 - RNA, 19 nt, Homo sapiens
  misc_RNA (1)...(19): siRNA sense strand
gaacaauucucccuauguc

SEQ ID NO: 245433 - RNA, 19 nt, Homo sapiens
  misc_RNA (1)...(19): siRNA sense strand
gaugaggcuucaagauaua

SEQ ID NO: 245434 - RNA, 19 nt, Homo sapiens
  misc_RNA (1)...(19): siRNA sense strand
gcagacagguugaugacuu

SEQ ID NO: 245435 - RNA, 19 nt, Homo sapiens
  misc_RNA (1)...(19): siRNA sense strand
caccacagcuugaagauga

SEQ ID NO: 245436 - RNA, 19 nt, Homo sapiens
  misc_RNA (1)...(19): siRNA sense strand
ggaaacagaacguacaauu

SEQ ID NO: 245437 - RNA, 19 nt, Homo sapiens
  misc_RNA (1)...(19): siRNA sense strand
gagccuauaugauggauga

SEQ ID NO: 245438 - RNA, 19 nt, Homo sapiens
  misc_RNA (1)...(19): siRNA sense strand
guaaugugcuucagcuuga

SEQ ID NO: 245439 - RNA, 19 nt, Homo sapiens
  misc_RNA (1)...(19): siRNA sense strand
ggacaagaagaaacuguua

SEQ ID NO: 245440 - RNA, 19 nt, Homo sapiens
  misc_RNA (1)...(19): siRNA sense strand
guacgacgauguauucuca

SEQ ID NO: 245441 - RNA, 19 nt, Homo sapiens
  misc_RNA (1)...(19): siRNA sense strand
gcaauccucaguacacuua

SEQ ID NO: 245442 - RNA, 19 nt, Homo sapiens
  misc_RNA (1)...(19): siRNA sense strand
ugaaaggaauuccagauga

SEQ ID NO: 245443 - RNA, 19 nt, Homo sapiens
  misc_RNA (1)...(19): siRNA sense strand
gcugcuagguuccucuuua

SEQ ID NO: 245444 - RNA, 19 nt, Homo sapiens
  misc_RNA (1)...(19): siRNA sense strand
caccagaccucaucagauu

SEQ ID NO: 245445 - RNA, 19 nt, Homo sapiens
  misc_RNA (1)...(19): siRNA sense strand
agaaaugguuccacaguuu

SEQ ID NO: 245446 - RNA, 19 nt, Homo sapiens
  misc_RNA (1)...(19): siRNA sense strand
ucaaaucgcuucuccgaau

SEQ ID NO: 245447 - RNA, 19 nt, Homo sapiens
  misc_RNA (1)...(19): siRNA sense strand
guacgaaugugaagaaucu

SEQ ID NO: 245448 - RNA, 19 nt, Homo sapiens
  misc_RNA (1)...(19): siRNA sense strand
gggaugauguauuuggaua

SEQ ID NO: 245449 - RNA, 19 nt, Homo sapiens
  misc_RNA (1)...(19): siRNA sense strand
cuauagaucuccucaaaga

SEQ ID NO: 245450 - RNA, 19 nt, Homo sapiens
  misc_RNA (1)...(19): siRNA sense strand
ugaaggcagugaagaagua

SEQ ID NO: 245451 - RNA, 19 nt, Homo sapiens
  misc_RNA (1)...(19): siRNA sense strand
caaagacaguguuaauugu

SEQ ID NO: 245452 - RNA, 19 nt, Homo sapiens
  misc_RNA (1)...(19): siRNA sense strand
ggauacagcagaacaauau

SEQ ID NO: 245453 - RNA, 19 nt, Homo sapiens
  misc_RNA (1)...(19): siRNA sense strand
gauaaaccagcauuaagua

SEQ ID NO: 245454 - RNA, 19 nt, Homo sapiens
  misc_RNA (1)...(19): siRNA sense strand
cuagagaccaugaagauua

SEQ ID NO: 245455 - RNA, 19 nt, Homo sapiens
  misc_RNA (1)...(19): siRNA sense strand
caagacugguuuccacuuu

SEQ ID NO: 245456 - RNA, 19 nt, Homo sapiens
  misc_RNA (1)...(19): siRNA sense strand
uaacagagguagucuaugc

SEQ ID NO: 245457 - RNA, 19 nt, Homo sapiens
  misc_RNA (1)...(19): siRNA sense strand
gaugcucuuucaaugauua

SEQ ID NO: 245458 - RNA, 19 nt, Homo sapiens
  misc_RNA (1)...(19): siRNA sense strand
gaacuucgcacaaaugaca

SEQ ID NO: 245459 - RNA, 19 nt, Homo sapiens
  misc_RNA (1)...(19): siRNA sense strand
gaacaaguuaugugaagaa

SEQ ID NO: 245460 - RNA, 19 nt, Homo sapiens
  misc_RNA (1)...(19): siRNA sense strand
gaugaugaguugauaagau

SEQ ID NO: 245461 - RNA, 19 nt, Homo sapiens
  misc_RNA (1)...(19): siRNA sense strand
ggaaagagaaugugcaauc

SEQ ID NO: 245462 - RNA, 19 nt, Homo sapiens
  misc_RNA (1)...(19): siRNA sense strand
guacaacauugguguccua

SEQ ID NO: 245463 - RNA, 19 nt, Homo sapiens
  misc_RNA (1)...(19): siRNA sense strand
guagugauguagaugauga

SEQ ID NO: 245464 - RNA, 19 nt, Homo sapiens
  misc_RNA (1)...(19): siRNA sense strand
ggacaccggccucuacuuu

SEQ ID NO: 245465 - RNA, 19 nt, Homo sapiens
  misc_RNA (1)...(19): siRNA sense strand
gagcaagaguacuuaugaa

SEQ ID NO: 245466 - RNA, 19 nt, Homo sapiens
  misc_RNA (1)...(19): siRNA sense strand
gaacaacccucagagaacu

SEQ ID NO: 245467 - RNA, 19 nt, Homo sapiens
  misc_RNA (1)...(19): siRNA sense strand
gagaacaaguuaugugaag

SEQ ID NO: 245468 - RNA, 19 nt, Homo sapiens
  misc_RNA (1)...(19): siRNA sense strand
caaaucgcuucuccgaaua

SEQ ID NO: 245469 - RNA, 19 nt, Homo sapiens
  misc_RNA (1)...(19): siRNA sense strand
guacaugggagaaguguuu

SEQ ID NO: 245470 - RNA, 19 nt, Homo sapiens
  misc_RNA (1)...(19): siRNA sense strand
ggaacaguaugucaaagga

SEQ ID NO: 245471 - RNA, 19 nt, Homo sapiens
  misc_RNA (1)...(19): siRNA sense strand
ggaaacaguucaggcuuug

SEQ ID NO: 245472 - RNA, 19 nt, Homo sapiens
  misc_RNA (1)...(19): siRNA sense strand
agagagagcuaaacacuca

SEQ ID NO: 245473 - RNA, 19 nt, Homo sapiens
  misc_RNA (1)...(19): siRNA sense strand
ugauaaagauggugugaug

SEQ ID NO: 245474 - RNA, 19 nt, Homo sapiens
  misc_RNA (1)...(19): siRNA sense strand
ccaagaugcuccagaugaa

SEQ ID NO: 245475 - RNA, 19 nt, Homo sapiens
  misc_RNA (1)...(19): siRNA sense strand
acacagaucaaccaaguua

SEQ ID NO: 245476 - RNA, 19 nt, Homo sapiens
  misc_RNA (1)...(19): siRNA sense strand
guucgaguauuaacuguuu

SEQ ID NO: 245477 - RNA, 19 nt, Homo sapiens
  misc_RNA (1)...(19): siRNA sense strand
ggaaaugcuuagcugagaa

SEQ ID NO: 245478 - RNA, 19 nt, Homo sapiens
  misc_RNA (1)...(19): siRNA sense strand
ucaaucaacuucaacacaa

SEQ ID NO: 245479 - RNA, 19 nt, Homo sapiens
  misc_RNA (1)...(19): siRNA sense strand
guaacuguccuguugcuua

SEQ ID NO: 245480 - RNA, 19 nt, Homo sapiens
  misc_RNA (1)...(19): siRNA sense strand
caaacucacagaauucaua

SEQ ID NO: 245481 - RNA, 19 nt, Homo sapiens
  misc_RNA (1)...(19): siRNA sense strand
gcagaagaaaucacuauga

SEQ ID NO: 245482 - RNA, 19 nt, Homo sapiens
  misc_RNA (1)...(19): siRNA sense strand
ugagagaaguguacggaaa

SEQ ID NO: 245483 - RNA, 19 nt, Homo sapiens
  misc_RNA (1)...(19): siRNA sense strand
gcaaugagccagacuugga

SEQ ID NO: 245484 - RNA, 19 nt, Homo sapiens
  misc_RNA (1)...(19): siRNA sense strand
gaaagcagccuuaguccau

SEQ ID NO: 245485 - RNA, 19 nt, Homo sapiens
  misc_RNA (1)...(19): siRNA sense strand
ggagaaagcagccuuaguc

SEQ ID NO: 245486 - RNA, 19 nt, Homo sapiens
  misc_RNA (1)...(19): siRNA sense strand
gaaugcaguuuaccuuugu

SEQ ID NO: 245487 - RNA, 19 nt, Homo sapiens
  misc_RNA (1)...(19): siRNA sense strand
uaagugguauuccaaguug

SEQ ID NO: 245488 - RNA, 19 nt, Homo sapiens
  misc_RNA (1)...(19): siRNA sense strand
ggaauggcuuggagaugaa

SEQ ID NO: 245489 - RNA, 19 nt, Homo sapiens
  misc_RNA (1)...(19): siRNA sense strand
gaaacagaacguacaauuc

SEQ ID NO: 245490 - RNA, 19 nt, Homo sapiens
  misc_RNA (1)...(19): siRNA sense strand
ccaagaugaugaguugaua

SEQ ID NO: 245491 - RNA, 19 nt, Homo sapiens
  misc_RNA (1)...(19): siRNA sense strand
agaccaagaugaugaguug

SEQ ID NO: 245492 - RNA, 19 nt, Homo sapiens
  misc_RNA (1)...(19): siRNA sense strand
cauggaaccuuacacaguu

SEQ ID NO: 245493 - RNA, 19 nt, Homo sapiens
  misc_RNA (1)...(19): siRNA sense strand
aaacuuaugccgccagaua

SEQ ID NO: 245494 - RNA, 19 nt, Homo sapiens
  misc_RNA (1)...(19): siRNA sense strand
ggagcaagaguacuuauga

SEQ ID NO: 245495 - RNA, 19 nt, Homo sapiens
  misc_RNA (1)...(19): siRNA sense strand
gcugauagauccugcagau

SEQ ID NO: 245496 - RNA, 19 nt, Homo sapiens
  misc_RNA (1)...(19): siRNA sense strand
gaugaacucuuugcucguu

SEQ ID NO: 245497 - RNA, 19 nt, Homo sapiens
  misc_RNA (1)...(19): siRNA sense strand
ucagagaacuggccaacga

SEQ ID NO: 245498 - RNA, 19 nt, Homo sapiens
  misc_RNA (1)...(19): siRNA sense strand
caaguuggaugacaugauc

SEQ ID NO: 245499 - RNA, 19 nt, Homo sapiens
  misc_RNA (1)...(19): siRNA sense strand
uaaagcgauuugacuauga

SEQ ID NO: 245500 - RNA, 19 nt, Homo sapiens
  misc_RNA (1)...(19): siRNA sense strand
gaacgguauucuugccauu

SEQ ID NO: 245501 - RNA, 19 nt, Homo sapiens
  misc_RNA (1)...(19): siRNA sense strand
ucacaagugcuauaucuaa

SEQ ID NO: 245502 - RNA, 19 nt, Homo sapiens
  misc_RNA (1)...(19): siRNA sense strand
acagauaaguuccaauaug

SEQ ID NO: 245503 - RNA, 19 nt, Homo sapiens
  misc_RNA (1)...(19): siRNA sense strand
gcuugauccuucucuguua

SEQ ID NO: 245504 - RNA, 19 nt, Homo sapiens
  misc_RNA (1)...(19): siRNA sense strand
ggauagaucgcuuuauaga

SEQ ID NO: 245505 - RNA, 19 nt, Homo sapiens
  misc_RNA (1)...(19): siRNA sense strand
gagcauuccuaauccauca

SEQ ID NO: 245506 - RNA, 19 nt, Homo sapiens
  misc_RNA (1)...(19): siRNA sense strand
uaugacaacuuaagcuuga

SEQ ID NO: 245507 - RNA, 19 nt, Homo sapiens
  misc_RNA (1)...(19): siRNA sense strand
aaacagaacguacaauuca

SEQ ID NO: 245508 - RNA, 19 nt, Homo sapiens
  misc_RNA (1)...(19): siRNA sense strand
ugccaaggcugcccacaua

SEQ ID NO: 245509 - RNA, 19 nt, Homo sapiens
  misc_RNA (1)...(19): siRNA sense strand
ggacauccagcuaugcuaa

SEQ ID NO: 245510 - RNA, 19 nt, Homo sapiens
  misc_RNA (1)...(19): siRNA sense strand
ugaugaggcuucaagauau

SEQ ID NO: 245511 - RNA, 19 nt, Homo sapiens
  misc_RNA (1)...(19): siRNA sense strand
gaacauggcuccaggaaag

SEQ ID NO: 245512 - RNA, 19 nt, Homo sapiens
  misc_RNA (1)...(19): siRNA sense strand
caacaugccuguacauaug

SEQ ID NO: 245513 - RNA, 19 nt, Homo sapiens
  misc_RNA (1)...(19): siRNA sense strand
gcagagcgcugggaagaaa

SEQ ID NO: 245514 - RNA, 19 nt, Homo sapiens
  misc_RNA (1)...(19): siRNA sense strand
gcacauuccuggagagaga

SEQ ID NO: 245515 - RNA, 19 nt, Homo sapiens
  misc_RNA (1)...(19): siRNA sense strand
caguagaaguugacaauuu

SEQ ID NO: 245516 - RNA, 19 nt, Homo sapiens
  misc_RNA (1)...(19): siRNA sense strand
gcagacaucucaggcauga

SEQ ID NO: 245517 - RNA, 19 nt, Homo sapiens
  misc_RNA (1)...(19): siRNA sense strand
caaaauagcuuacaacaca

SEQ ID NO: 245518 - RNA, 19 nt, Homo sapiens
  misc_RNA (1)...(19): siRNA sense strand
ggacagaauucgcacacuu

SEQ ID NO: 245519 - RNA, 19 nt, Homo sapiens
  misc_RNA (1)...(19): siRNA sense strand
acaaggagauguucauuau

SEQ ID NO: 245520 - RNA, 19 nt, Homo sapiens
  misc_RNA (1)...(19): siRNA sense strand
gaacgugucaucaacauug

SEQ ID NO: 245521 - RNA, 19 nt, Homo sapiens
  misc_RNA (1)...(19): siRNA sense strand
ggaugaagaugauaagcuu

SEQ ID NO: 245522 - RNA, 19 nt, Homo sapiens
  misc_RNA (1)...(19): siRNA sense strand
gagcugauauucauuccaa

SEQ ID NO: 245523 - RNA, 19 nt, Homo sapiens
  misc_RNA (1)...(19): siRNA sense strand
gcaacaauauuucuaaggu

SEQ ID NO: 245524 - RNA, 19 nt, Homo sapiens
  misc_RNA (1)...(19): siRNA sense strand
guagaaacguugagaaucu

SEQ ID NO: 245525 - RNA, 19 nt, Homo sapiens
  misc_RNA (1)...(19): siRNA sense strand
gguuaugggugccaagaua

SEQ ID NO: 245526 - RNA, 19 nt, Homo sapiens
  misc_RNA (1)...(19): siRNA sense strand
gcucagggauuaugucuca

SEQ ID NO: 245527 - RNA, 19 nt, Homo sapiens
  misc_RNA (1)...(19): siRNA sense strand
ucaaagaagcucugacuaa

SEQ ID NO: 245528 - RNA, 19 nt, Homo sapiens
  misc_RNA (1)...(19): siRNA sense strand
ucacagcagugcccaguuu

SEQ ID NO: 245529 - RNA, 19 nt, Homo sapiens
  misc_RNA (1)...(19): siRNA sense strand
caaagaagcucugacuaag

SEQ ID NO: 245530 - RNA, 19 nt, Homo sapiens
  misc_RNA (1)...(19): siRNA sense strand
uaagggcacuggagucuga

SEQ ID NO: 245531 - RNA, 19 nt, Homo sapiens
  misc_RNA (1)...(19): siRNA sense strand
ggagaaagcagaccgugaa

SEQ ID NO: 245532 - RNA, 19 nt, Homo sapiens
  misc_RNA (1)...(19): siRNA sense strand
ccaaccaugugcaauguaa

SEQ ID NO: 245533 - RNA, 19 nt, Homo sapiens
  misc_RNA (1)...(19): siRNA sense strand
aacaggagcuucagucaaa

SEQ ID NO: 245534 - RNA, 19 nt, Homo sapiens
  misc_RNA (1)...(19): siRNA sense strand
cauccaggcucucaaagaa

SEQ ID NO: 245535 - RNA, 19 nt, Homo sapiens
  misc_RNA (1)...(19): siRNA sense strand
caccugagcuguuugauag

SEQ ID NO: 245536 - RNA, 19 nt, Homo sapiens
  misc_RNA (1)...(19): siRNA sense strand
ccacaucuucugcuuguua

SEQ ID NO: 245537 - RNA, 19 nt, Homo sapiens
  misc_RNA (1)...(19): siRNA sense strand
caaacuagagugaaauuga

SEQ ID NO: 245538 - RNA, 19 nt, Homo sapiens
  misc_RNA (1)...(19): siRNA sense strand
auucaaggcuccucuuuaa

SEQ ID NO: 245539 - RNA, 19 nt, Homo sapiens
  misc_RNA (1)...(19): siRNA sense strand
gaaggcaguggcaacaaua

SEQ ID NO: 245540 - RNA, 19 nt, Homo sapiens
  misc_RNA (1)...(19): siRNA sense strand
ugaggaagguggcuaugaa

SEQ ID NO: 245541 - RNA, 19 nt, Homo sapiens
  misc_RNA (1)...(19): siRNA sense strand
gcugacaccugagcuguuu

SEQ ID NO: 245542 - RNA, 19 nt, Homo sapiens
  misc_RNA (1)...(19): siRNA sense strand
cuagagcccugcacuaaga

SEQ ID NO: 245543 - RNA, 19 nt, Homo sapiens
  misc_RNA (1)...(19): siRNA sense strand
gcuaaagaaguuacagaua

SEQ ID NO: 245544 - RNA, 19 nt, Homo sapiens
  misc_RNA (1)...(19): siRNA sense strand
gaacuggaggcccaaacua

SEQ ID NO: 245545 - RNA, 19 nt, Homo sapiens
  misc_RNA (1)...(19): siRNA sense strand
gacguuggaucucaaucua

SEQ ID NO: 245546 - RNA, 19 nt, Homo sapiens
  misc_RNA (1)...(19): siRNA sense strand
gaccacagcccuuucuuga

SEQ ID NO: 245547 - RNA, 19 nt, Homo sapiens
  misc_RNA (1)...(19): siRNA sense strand
gggcugagcugcaagaacu

SEQ ID NO: 245548 - RNA, 19 nt, Homo sapiens
  misc_RNA (1)...(19): siRNA sense strand
gggaguuugucaucacuuu

SEQ ID NO: 245549 - RNA, 19 nt, Homo sapiens
  misc_RNA (1)...(19): siRNA sense strand
gaagguggaucaggguaga

SEQ ID NO: 245550 - RNA, 19 nt, Homo sapiens
  misc_RNA (1)...(19): siRNA sense strand
ggaucucaaucuagcagua

SEQ ID NO: 245551 - RNA, 19 nt, Homo sapiens
  misc_RNA (1)...(19): siRNA sense strand
gauaagacugugcauaaga

SEQ ID NO: 245552 - RNA, 19 nt, Homo sapiens
  misc_RNA (1)...(19): siRNA sense strand
ucaaugaccucugcaagug

SEQ ID NO: 245553 - RNA, 19 nt, Homo sapiens
  misc_RNA (1)...(19): siRNA sense strand
gaacgccagugcaucaagu

SEQ ID NO: 245554 - RNA, 19 nt, Homo sapiens
  misc_RNA (1)...(19): siRNA sense strand
ggcaguggcuuuccuguca

SEQ ID NO: 245555 - RNA, 19 nt, Homo sapiens
  misc_RNA (1)...(19): siRNA sense strand
caagaacuacugaccauug

SEQ ID NO: 245556 - RNA, 19 nt, Homo sapiens
  misc_RNA (1)...(19): siRNA sense strand
gagaagaagaacauuauca

SEQ ID NO: 245557 - RNA, 19 nt, Homo sapiens
  misc_RNA (1)...(19): siRNA sense strand
gagcuacuguccucacugu

SEQ ID NO: 245558 - RNA, 19 nt, Homo sapiens
  misc_RNA (1)...(19): siRNA sense strand
gcaagaccgugccagaaag

SEQ ID NO: 245559 - RNA, 19 nt, Homo sapiens
  misc_RNA (1)...(19): siRNA sense strand
gaguacaguuugcagaguu

SEQ ID NO: 245560 - RNA, 19 nt, Homo sapiens
  misc_RNA (1)...(19): siRNA sense strand
uccaagaccuuucucaaga

SEQ ID NO: 245561 - RNA, 19 nt, Homo sapiens
  misc_RNA (1)...(19): siRNA sense strand
ggagguuuccuaauaguga

SEQ ID NO: 245562 - RNA, 19 nt, Homo sapiens
  misc_RNA (1)...(19): siRNA sense strand
ugagaagcauccagagcua

SEQ ID NO: 245563 - RNA, 19 nt, Homo sapiens
  misc_RNA (1)...(19): siRNA sense strand
uagcugggcugaauuccaa

SEQ ID NO: 245564 - RNA, 19 nt, Homo sapiens
  misc_RNA (1)...(19): siRNA sense strand
ucacaucaaugcagacauc

SEQ ID NO: 245565 - RNA, 19 nt, Homo sapiens
  misc_RNA (1)...(19): siRNA sense strand
gcagugcccaguuuauuga

SEQ ID NO: 245566 - RNA, 19 nt, Homo sapiens
  misc_RNA (1)...(19): siRNA sense strand
gaggaucacuggaguuacu

SEQ ID NO: 245567 - RNA, 19 nt, Homo sapiens
  misc_RNA (1)...(19): siRNA sense strand
uggaggagcucaugaugga

SEQ ID NO: 245568 - RNA, 19 nt, Homo sapiens
  misc_RNA (1)...(19): siRNA sense strand
gaacuccggguccuucuug

SEQ ID NO: 245569 - RNA, 19 nt, Homo sapiens
  misc_RNA (1)...(19): siRNA sense strand
ucaugaaucccaacacuuu

SEQ ID NO: 245570 - RNA, 19 nt, Homo sapiens
  misc_RNA (1)...(19): siRNA sense strand
ggcccaaacuagagugaaa

SEQ ID NO: 245571 - RNA, 19 nt, Homo sapiens
  misc_RNA (1)...(19): siRNA sense strand
gcuugggccuuauggcuaa

SEQ ID NO: 245572 - RNA, 19 nt, Homo sapiens
  misc_RNA (1)...(19): siRNA sense strand
cuacagaggaggacauuga

SEQ ID NO: 245573 - RNA, 19 nt, Homo sapiens
  misc_RNA (1)...(19): siRNA sense strand
ggauaagacugugcauaag

SEQ ID NO: 245574 - RNA, 19 nt, Homo sapiens
  misc_RNA (1)...(19): siRNA sense strand
ucacauuacgaacgcauua

SEQ ID NO: 245575 - RNA, 19 nt, Homo sapiens
  misc_RNA (1)...(19): siRNA sense strand
gagaauggagacaguguga

SEQ ID NO: 245576 - RNA, 19 nt, Homo sapiens
  misc_RNA (1)...(19): siRNA sense strand
ugcugaagcugucaacuuu

SEQ ID NO: 245577 - RNA, 19 nt, Homo sapiens
  misc_RNA (1)...(19): siRNA sense strand
gaggaagacgugacaguug

SEQ ID NO: 245578 - RNA, 19 nt, Homo sapiens
  misc_RNA (1)...(19): siRNA sense strand
cuuuaaagauucccaaugu

SEQ ID NO: 245579 - RNA, 19 nt, Homo sapiens
  misc_RNA (1)...(19): siRNA sense strand
gacccaggcucugugauug

SEQ ID NO: 245580 - RNA, 19 nt, Homo sapiens
  misc_RNA (1)...(19): siRNA sense strand
uaacauccaggcucucaaa

SEQ ID NO: 245581 - RNA, 19 nt, Homo sapiens
  misc_RNA (1)...(19): siRNA sense strand
gguggaggauggccguaaa

SEQ ID NO: 245582 - RNA, 19 nt, Homo sapiens
  misc_RNA (1)...(19): siRNA sense strand
auaagacugugcauaagaa

SEQ ID NO: 245583 - RNA, 19 nt, Homo sapiens
  misc_RNA (1)...(19): siRNA sense strand
ggaagaucuuggaccucua

SEQ ID NO: 245584 - RNA, 19 nt, Homo sapiens
  misc_RNA (1)...(19): siRNA sense strand
ggcaguggcaacaauauuu

SEQ ID NO: 245585 - RNA, 19 nt, Homo sapiens
  misc_RNA (1)...(19): siRNA sense strand
ggagcgacgucuacgaaag

SEQ ID NO: 245586 - RNA, 19 nt, Homo sapiens
  misc_RNA (1)...(19): siRNA sense strand
gaacuauuuggaucagauu

SEQ ID NO: 245587 - RNA, 19 nt, Homo sapiens
  misc_RNA (1)...(19): siRNA sense strand
gaggagcgacgucuacgaa

SEQ ID NO: 245588 - RNA, 19 nt, Homo sapiens
  misc_RNA (1)...(19): siRNA sense strand
aaggagauguucauuaugg

SEQ ID NO: 245589 - RNA, 19 nt, Homo sapiens
  misc_RNA (1)...(19): siRNA sense strand
cacaaggagauguucauua

SEQ ID NO: 245590 - RNA, 19 nt, Homo sapiens
  misc_RNA (1)...(19): siRNA sense strand
gcacaaggagauguucauu

SEQ ID NO: 245591 - RNA, 19 nt, Homo sapiens
  misc_RNA (1)...(19): siRNA sense strand
acgaggagcucaucugcaa

SEQ ID NO: 245592 - RNA, 19 nt, Homo sapiens
  misc_RNA (1)...(19): siRNA sense strand
uggaggaggugaugaagau

SEQ ID NO: 245593 - RNA, 19 nt, Homo sapiens
  misc_RNA (1)...(19): siRNA sense strand
gaagaccugguauggugua

SEQ ID NO: 245594 - RNA, 19 nt, Homo sapiens
  misc_RNA (1)...(19): siRNA sense strand
gcacuaagacaaccaugca

SEQ ID NO: 245595 - RNA, 19 nt, Homo sapiens
  misc_RNA (1)...(19): siRNA sense strand
aggauaagacugugcauaa

SEQ ID NO: 245596 - RNA, 19 nt, Homo sapiens
  misc_RNA (1)...(19): siRNA sense strand
ugucagcccuggccugcua

SEQ ID NO: 245597 - RNA, 19 nt, Homo sapiens
  misc_RNA (1)...(19): siRNA sense strand
gcuugucacucucaugaau

SEQ ID NO: 245598 - RNA, 19 nt, Homo sapiens
  misc_RNA (1)...(19): siRNA sense strand
ccaugcaacuucgaaagaa

SEQ ID NO: 245599 - RNA, 19 nt, Homo sapiens
  misc_RNA (1)...(19): siRNA sense strand
auccagagcuaaagaaguu

SEQ ID NO: 245600 - RNA, 19 nt, Homo sapiens
  misc_RNA (1)...(19): siRNA sense strand
ccacagaccacagcccuuu

SEQ ID NO: 245601 - RNA, 19 nt, Homo sapiens
  misc_RNA (1)...(19): siRNA sense strand
gaaagcagaccgugaaaau

SEQ ID NO: 245602 - RNA, 19 nt, Homo sapiens
  misc_RNA (1)...(19): siRNA sense strand
aggaagacgugacaguuga

SEQ ID NO: 245603 - RNA, 19 nt, Homo sapiens
  misc_RNA (1)...(19): siRNA sense strand
ggugaaggaugagcaaagu

SEQ ID NO: 245604 - RNA, 19 nt, Homo sapiens
  misc_RNA (1)...(19): siRNA sense strand
gaaguugacaauuucagau

SEQ ID NO: 245605 - RNA, 19 nt, Homo sapiens
  misc_RNA (1)...(19): siRNA sense strand
caacucuccuacucugaug

SEQ ID NO: 245606 - RNA, 19 nt, Homo sapiens
  misc_RNA (1)...(19): siRNA sense strand
agaugugacugcucuguug

SEQ ID NO: 245607 - RNA, 19 nt, Homo sapiens
  misc_RNA (1)...(19): siRNA sense strand
aguagaaguugacaauuuc

SEQ ID NO: 245608 - RNA, 19 nt, Homo sapiens
  misc_RNA (1)...(19): siRNA sense strand
caagggagucggacaagga

SEQ ID NO: 245609 - RNA, 19 nt, Homo sapiens
  misc_RNA (1)...(19): siRNA sense strand
gccgagaagaagaacauua

SEQ ID NO: 245610 - RNA, 19 nt, Homo sapiens
  misc_RNA (1)...(19): siRNA sense strand
ggaucaggguagaaacguu

SEQ ID NO: 245611 - RNA, 19 nt, Homo sapiens
  misc_RNA (1)...(19): siRNA sense strand
gaacuuagcuucaagaauu

SEQ ID NO: 245612 - RNA, 19 nt, Homo sapiens
  misc_RNA (1)...(19): siRNA sense strand
gaaagagaaugugcaauua

SEQ ID NO: 245613 - RNA, 19 nt, Homo sapiens
  misc_RNA (1)...(19): siRNA sense strand
guaaagcgccugcuaauua

SEQ ID NO: 245614 - RNA, 19 nt, Homo sapiens
  misc_RNA (1)...(19): siRNA sense strand
aaacacagcuucugaaauu

SEQ ID NO: 245615 - RNA, 19 nt, Homo sapiens
  misc_RNA (1)...(19): siRNA sense strand
ggaaugaaaugcuuugaaa

SEQ ID NO: 245616 - RNA, 19 nt, Homo sapiens
  misc_RNA (1)...(19): siRNA sense strand
guacggcgauguauuguua

SEQ ID NO: 245617 - RNA, 19 nt, Homo sapiens
  misc_RNA (1)...(19): siRNA sense strand
caaaggagauuuauuggaa

SEQ ID NO: 245618 - RNA, 19 nt, Homo sapiens
  misc_RNA (1)...(19): siRNA sense strand
gaauguaccugcuaccuuu

SEQ ID NO: 245619 - RNA, 19 nt, Homo sapiens
  misc_RNA (1)...(19): siRNA sense strand
gaaauaacuucuugccaaa

SEQ ID NO: 245620 - RNA, 19 nt, Homo sapiens
  misc_RNA (1)...(19): siRNA sense strand
gcaaacaccucucucuuau

SEQ ID NO: 245621 - RNA, 19 nt, Homo sapiens
  misc_RNA (1)...(19): siRNA sense strand
gcacagcaauuacuacuug

SEQ ID NO: 245622 - RNA, 19 nt, Homo sapiens
  misc_RNA (1)...(19): siRNA sense strand
guggauagaucacuuuaua

SEQ ID NO: 245623 - RNA, 19 nt, Homo sapiens
  misc_RNA (1)...(19): siRNA sense strand
uaacagagcuauagaucuu

SEQ ID NO: 245624 - RNA, 19 nt, Homo sapiens
  misc_RNA (1)...(19): siRNA sense strand
uaagugguauuccaaguua

SEQ ID NO: 245625 - RNA, 19 nt, Homo sapiens
  misc_RNA (1)...(19): siRNA sense strand
ggaaagagaaugugcaauu

SEQ ID NO: 245626 - RNA, 19 nt, Homo sapiens
  misc_RNA (1)...(19): siRNA sense strand
gaauguacaugaucugcua

SEQ ID NO: 245627 - RNA, 19 nt, Homo sapiens
  misc_RNA (1)...(19): siRNA sense strand
ggucaucuuuggucauuua

SEQ ID NO: 245628 - RNA, 19 nt, Homo sapiens
  misc_RNA (1)...(19): siRNA sense strand
gagaugauguauuuggaua

SEQ ID NO: 245629 - RNA, 19 nt, Homo sapiens
  misc_RNA (1)...(19): siRNA sense strand
gaacaguauucuugcaauu

SEQ ID NO: 245630 - RNA, 19 nt, Homo sapiens
  misc_RNA (1)...(19): siRNA sense strand
gcagacagguugaugaguu

SEQ ID NO: 245631 - RNA, 19 nt, Homo sapiens
  misc_RNA (1)...(19): siRNA sense strand
ucaaaucgcuucucugaau

SEQ ID NO: 245632 - RNA, 19 nt, Homo sapiens
  misc_RNA (1)...(19): siRNA sense strand
cauaaccgauugcaauaua

SEQ ID NO: 245633 - RNA, 19 nt, Homo sapiens
  misc_RNA (1)...(19): siRNA sense strand
gaaagaagaccauauacug

SEQ ID NO: 245634 - RNA, 19 nt, Homo sapiens
  misc_RNA (1)...(19): siRNA sense strand
gagaugaacuugaaagaag

SEQ ID NO: 245635 - RNA, 19 nt, Homo sapiens
  misc_RNA (1)...(19): siRNA sense strand
uaaagcgccugcuaauuaa

SEQ ID NO: 245636 - RNA, 19 nt, Homo sapiens
  misc_RNA (1)...(19): siRNA sense strand
guacuucauuccaguuaua

SEQ ID NO: 245637 - RNA, 19 nt, Homo sapiens
  misc_RNA (1)...(19): siRNA sense strand
gauggaugauuuggaauua

SEQ ID NO: 245638 - RNA, 19 nt, Homo sapiens
  misc_RNA (1)...(19): siRNA sense strand
gcuaggagaugaacuugaa

SEQ ID NO: 245639 - RNA, 19 nt, Homo sapiens
  misc_RNA (1)...(19): siRNA sense strand
caaguuauauucaguagug

SEQ ID NO: 245640 - RNA, 19 nt, Homo sapiens
  misc_RNA (1)...(19): siRNA sense strand
agaaaaggcucuuacauua

SEQ ID NO: 245641 - RNA, 19 nt, Homo sapiens
  misc_RNA (1)...(19): siRNA sense strand
gcaauccucaguauaguua

SEQ ID NO: 245642 - RNA, 19 nt, Homo sapiens
  misc_RNA (1)...(19): siRNA sense strand
gcugcuagauuccucuuua

SEQ ID NO: 245643 - RNA, 19 nt, Homo sapiens
  misc_RNA (1)...(19): siRNA sense strand
guacaugggagaaguauuu

SEQ ID NO: 245644 - RNA, 19 nt, Homo sapiens
  misc_RNA (1)...(19): siRNA sense strand
gaaaggaaacuaauagcaa

SEQ ID NO: 245645 - RNA, 19 nt, Homo sapiens
  misc_RNA (1)...(19): siRNA sense strand
gcaguuguccuguugcuua

SEQ ID NO: 245646 - RNA, 19 nt, Homo sapiens
  misc_RNA (1)...(19): siRNA sense strand
ggaaagggauaauguaaac

SEQ ID NO: 245647 - RNA, 19 nt, Homo sapiens
  misc_RNA (1)...(19): siRNA sense strand
ugaacaacaugaugccuua

SEQ ID NO: 245648 - RNA, 19 nt, Homo sapiens
  misc_RNA (1)...(19): siRNA sense strand
gguggaagaugaacaaguu

SEQ ID NO: 245649 - RNA, 19 nt, Homo sapiens
  misc_RNA (1)...(19): siRNA sense strand
uaacacagauuaaccaagu

SEQ ID NO: 245650 - RNA, 19 nt, Homo sapiens
  misc_RNA (1)...(19): siRNA sense strand
ugaaggcaaugaagaagua

SEQ ID NO: 245651 - RNA, 19 nt, Homo sapiens
  misc_RNA (1)...(19): siRNA sense strand
uaguggaucucaucaauaa

SEQ ID NO: 245652 - RNA, 19 nt, Homo sapiens
  misc_RNA (1)...(19): siRNA sense strand
gaaguauccucaccucaga

SEQ ID NO: 245653 - RNA, 19 nt, Homo sapiens
  misc_RNA (1)...(19): siRNA sense strand
uaaugaggcuucaagauau

SEQ ID NO: 245654 - RNA, 19 nt, Homo sapiens
  misc_RNA (1)...(19): siRNA sense strand
gguaguuuaugccuuguua

SEQ ID NO: 245655 - RNA, 19 nt, Homo sapiens
  misc_RNA (1)...(19): siRNA sense strand
gguaauuccugcucugaaa

SEQ ID NO: 245656 - RNA, 19 nt, Homo sapiens
  misc_RNA (1)...(19): siRNA sense strand
cagaagaggugguggaaug

SEQ ID NO: 245657 - RNA, 19 nt, Homo sapiens
  misc_RNA (1)...(19): siRNA sense strand
caagagagaaggguaaaua

SEQ ID NO: 245658 - RNA, 19 nt, Homo sapiens
  misc_RNA (1)...(19): siRNA sense strand
ggacacaggccucugcuuu

SEQ ID NO: 245659 - RNA, 19 nt, Homo sapiens
  misc_RNA (1)...(19): siRNA sense strand
uaacagagguaguuuaugc

SEQ ID NO: 245660 - RNA, 19 nt, Homo sapiens
  misc_RNA (1)...(19): siRNA sense strand
ggaaaccaccguaaucauu

SEQ ID NO: 245661 - RNA, 19 nt, Homo sapiens
  misc_RNA (1)...(19): siRNA sense strand
ggaagucgauacagucaug

SEQ ID NO: 245662 - RNA, 19 nt, Homo sapiens
  misc_RNA (1)...(19): siRNA sense strand
aaacaccucucucuuauag

SEQ ID NO: 245663 - RNA, 19 nt, Homo sapiens
  misc_RNA (1)...(19): siRNA sense strand
gagccugcauuuccacaua

SEQ ID NO: 245664 - RNA, 19 nt, Homo sapiens
  misc_RNA (1)...(19): siRNA sense strand
caauuggucuccuccagua

SEQ ID NO: 245665 - RNA, 19 nt, Homo sapiens
  misc_RNA (1)...(19): siRNA sense strand
gagaugggcuguucgauac

SEQ ID NO: 245666 - RNA, 19 nt, Homo sapiens
  misc_RNA (1)...(19): siRNA sense strand
gaacuucggccauauuuag

SEQ ID NO: 245667 - RNA, 19 nt, Homo sapiens
  misc_RNA (1)...(19): siRNA sense strand
caaaucgcuucucugaaua

SEQ ID NO: 245668 - RNA, 19 nt, Homo sapiens
  misc_RNA (1)...(19): siRNA sense strand
cuaaugaggcuucaagaua

SEQ ID NO: 245669 - RNA, 19 nt, Homo sapiens
  misc_RNA (1)...(19): siRNA sense strand
ccugauagcucuuccgauu

SEQ ID NO: 245670 - RNA, 19 nt, Homo sapiens
  misc_RNA (1)...(19): siRNA sense strand
ucgaaugguuagaguauua

SEQ ID NO: 245671 - RNA, 19 nt, Homo sapiens
  misc_RNA (1)...(19): siRNA sense strand
uacaggaccuugauaauau

SEQ ID NO: 245672 - RNA, 19 nt, Homo sapiens
  misc_RNA (1)...(19): siRNA sense strand
gguuauaucuaguguauca

SEQ ID NO: 245673 - RNA, 19 nt, Homo sapiens
  misc_RNA (1)...(19): siRNA sense strand
ggcaaacaccucucucuua

SEQ ID NO: 245674 - RNA, 19 nt, Homo sapiens
  misc_RNA (1)...(19): siRNA sense strand
uggcagaccuucaucauug

SEQ ID NO: 245675 - RNA, 19 nt, Homo sapiens
  misc_RNA (1)...(19): siRNA sense strand
gaacuucgcacaaaugaca

SEQ ID NO: 245676 - RNA, 19 nt, Homo sapiens
  misc_RNA (1)...(19): siRNA sense strand
uuagaaagaucacauagug

SEQ ID NO: 245677 - RNA, 19 nt, Homo sapiens
  misc_RNA (1)...(19): siRNA sense strand
cagcaucucuuccaacaga

SEQ ID NO: 245678 - RNA, 19 nt, Homo sapiens
  misc_RNA (1)...(19): siRNA sense strand
gaacaaguuaugugaagaa

SEQ ID NO: 245679 - RNA, 19 nt, Homo sapiens
  misc_RNA (1)...(19): siRNA sense strand
ggacaucauuuacagcaau

SEQ ID NO: 245680 - RNA, 19 nt, Homo sapiens
  misc_RNA (1)...(19): siRNA sense strand
gcagaagaaauuacuauga

SEQ ID NO: 245681 - RNA, 19 nt, Homo sapiens
  misc_RNA (1)...(19): siRNA sense strand
gaacaaauggauaugauag

SEQ ID NO: 245682 - RNA, 19 nt, Homo sapiens
  misc_RNA (1)...(19): siRNA sense strand
uaugggaccuuacacagua

SEQ ID NO: 245683 - RNA, 19 nt, Homo sapiens
  misc_RNA (1)...(19): siRNA sense strand
ggacuagacuaccuuugga

SEQ ID NO: 245684 - RNA, 19 nt, Homo sapiens
  misc_RNA (1)...(19): siRNA sense strand
guaauguacuucagcuuga

SEQ ID NO: 245685 - RNA, 19 nt, Homo sapiens
  misc_RNA (1)...(19): siRNA sense strand
ugaaugcacugaaugaaau

SEQ ID NO: 245686 - RNA, 19 nt, Homo sapiens
  misc_RNA (1)...(19): siRNA sense strand
gagaacaaguuaugugaag

SEQ ID NO: 245687 - RNA, 19 nt, Homo sapiens
  misc_RNA (1)...(19): siRNA sense strand
acagaucacugguauaaau

SEQ ID NO: 245688 - RNA, 19 nt, Homo sapiens
  misc_RNA (1)...(19): siRNA sense strand
ggaaacaguucaggcuuug

SEQ ID NO: 245689 - RNA, 19 nt, Homo sapiens
  misc_RNA (1)...(19): siRNA sense strand
gaagauaggaaagaguaua

SEQ ID NO: 245690 - RNA, 19 nt, Homo sapiens
  misc_RNA (1)...(19): siRNA sense strand
uacggcaccuucucaauua

SEQ ID NO: 245691 - RNA, 19 nt, Homo sapiens
  misc_RNA (1)...(19): siRNA sense strand
gagagaaggguaaauauuc

SEQ ID NO: 245692 - RNA, 19 nt, Homo sapiens
  misc_RNA (1)...(19): siRNA sense strand
aaacuuaugccaccagaua

SEQ ID NO: 245693 - RNA, 19 nt, Homo sapiens
  misc_RNA (1)...(19): siRNA sense strand
gagcaagaguacuuaugaa

SEQ ID NO: 245694 - RNA, 19 nt, Homo sapiens
  misc_RNA (1)...(19): siRNA sense strand
ugacacaauugguucagua

SEQ ID NO: 245695 - RNA, 19 nt, Homo sapiens
  misc_RNA (1)...(19): siRNA sense strand
gaacgacuaaacuuccuua

SEQ ID NO: 245696 - RNA, 19 nt, Homo sapiens
  misc_RNA (1)...(19): siRNA sense strand
caagauugguuuccacuuc

SEQ ID NO: 245697 - RNA, 19 nt, Homo sapiens
  misc_RNA (1)...(19): siRNA sense strand
aaguuuaccugcaguauuu

SEQ ID NO: 245698 - RNA, 19 nt, Homo sapiens
  misc_RNA (1)...(19): siRNA sense strand
guggugagcugauagauuc

SEQ ID NO: 245699 - RNA, 19 nt, Homo sapiens
  misc_RNA (1)...(19): siRNA sense strand
ugauaaagauggugugaug

SEQ ID NO: 245700 - RNA, 19 nt, Homo sapiens
  misc_RNA (1)...(19): siRNA sense strand
gcgaauggcagaauggaua

SEQ ID NO: 245701 - RNA, 19 nt, Homo sapiens
  misc_RNA (1)...(19): siRNA sense strand
ggauagaucacuuuauaga

SEQ ID NO: 245702 - RNA, 19 nt, Homo sapiens
  misc_RNA (1)...(19): siRNA sense strand
uuaaaggaauuccagauga

SEQ ID NO: 245703 - RNA, 19 nt, Homo sapiens
  misc_RNA (1)...(19): siRNA sense strand
ugagagaaguguacggaaa

SEQ ID NO: 245704 - RNA, 19 nt, Homo sapiens
  misc_RNA (1)...(19): siRNA sense strand
uuucaaagcugucaauugu

SEQ ID NO: 245705 - RNA, 19 nt, Homo sapiens
  misc_RNA (1)...(19): siRNA sense strand
agacuuggauccugauauu

SEQ ID NO: 245706 - RNA, 19 nt, Homo sapiens
  misc_RNA (1)...(19): siRNA sense strand
gaagaauuauuugcucguu

SEQ ID NO: 245707 - RNA, 19 nt, Homo sapiens
  misc_RNA (1)...(19): siRNA sense strand
ggaugaugaugaagaaaug

SEQ ID NO: 245708 - RNA, 19 nt, Homo sapiens
  misc_RNA (1)...(19): siRNA sense strand
ucaaaggaaugguaaagau

SEQ ID NO: 245709 - RNA, 19 nt, Homo sapiens
  misc_RNA (1)...(19): siRNA sense strand
gaagacaagccagcauuaa

SEQ ID NO: 245710 - RNA, 19 nt, Homo sapiens
  misc_RNA (1)...(19): siRNA sense strand
ggagcaagaguacuuauga

SEQ ID NO: 245711 - RNA, 19 nt, Homo sapiens
  misc_RNA (1)...(19): siRNA sense strand
aaacacagcuuacaugagu

SEQ ID NO: 245712 - RNA, 19 nt, Homo sapiens
  misc_RNA (1)...(19): siRNA sense strand
gaaaugcguggauaccuua

SEQ ID NO: 245713 - RNA, 19 nt, Homo sapiens
  misc_RNA (1)...(19): siRNA sense strand
agaaacagcuccagagaga

SEQ ID NO: 245714 - RNA, 19 nt, Homo sapiens
  misc_RNA (1)...(19): siRNA sense strand
ggauacagguccuucaaga

SEQ ID NO: 245715 - RNA, 19 nt, Homo sapiens
  misc_RNA (1)...(19): siRNA sense strand
ggacagcaguguagaugga

SEQ ID NO: 245716 - RNA, 19 nt, Homo sapiens
  misc_RNA (1)...(19): siRNA sense strand
gaagaggaguggacuugug

SEQ ID NO: 245717 - RNA, 19 nt, Homo sapiens
  misc_RNA (1)...(19): siRNA sense strand
gcgauccuguuaauccuua

SEQ ID NO: 245718 - RNA, 19 nt, Homo sapiens
  misc_RNA (1)...(19): siRNA sense strand
gugaugcgcugacggauga

SEQ ID NO: 245719 - RNA, 19 nt, Homo sapiens
  misc_RNA (1)...(19): siRNA sense strand
uagauggaauuccuccuua

SEQ ID NO: 245720 - RNA, 19 nt, Homo sapiens
  misc_RNA (1)...(19): siRNA sense strand
cagaugaaccugaaggaua

SEQ ID NO: 245721 - RNA, 19 nt, Homo sapiens
  misc_RNA (1)...(19): siRNA sense strand
ucacaaagagccaaagaaa

SEQ ID NO: 245722 - RNA, 19 nt, Homo sapiens
  misc_RNA (1)...(19): siRNA sense strand
aaagguacauugagaacaa

SEQ ID NO: 245723 - RNA, 19 nt, Homo sapiens
  misc_RNA (1)...(19): siRNA sense strand
gaaaugcaucgcaguguga

SEQ ID NO: 245724 - RNA, 19 nt, Homo sapiens
  misc_RNA (1)...(19): siRNA sense strand
gaaaaugccuaccagaugu

SEQ ID NO: 245725 - RNA, 19 nt, Homo sapiens
  misc_RNA (1)...(19): siRNA sense strand
acagugagauauccaguga

SEQ ID NO: 245726 - RNA, 19 nt, Homo sapiens
  misc_RNA (1)...(19): siRNA sense strand
agacggugcucccgaugua

SEQ ID NO: 245727 - RNA, 19 nt, Homo sapiens
  misc_RNA (1)...(19): siRNA sense strand
aaacagcuccagagagaaa

SEQ ID NO: 245728 - RNA, 19 nt, Homo sapiens
  misc_RNA (1)...(19): siRNA sense strand
agacggugcuuaccuguuc

SEQ ID NO: 245729 - RNA, 19 nt, Homo sapiens
  misc_RNA (1)...(19): siRNA sense strand
uaccaaaacuuuacgagua

SEQ ID NO: 245730 - RNA, 19 nt, Homo sapiens
  misc_RNA (1)...(19): siRNA sense strand
agaaaugcguggauaccuu

SEQ ID NO: 245731 - RNA, 19 nt, Homo sapiens
  misc_RNA (1)...(19): siRNA sense strand
gaaccugaaggauaccaaa

SEQ ID NO: 245732 - RNA, 19 nt, Homo sapiens
  misc_RNA (1)...(19): siRNA sense strand
ggaagacccgcagacgaua

SEQ ID NO: 245733 - RNA, 19 nt, Homo sapiens
  misc_RNA (1)...(19): siRNA sense strand
caccaagaccuacauaaga

SEQ ID NO: 245734 - RNA, 19 nt, Homo sapiens
  misc_RNA (1)...(19): siRNA sense strand
gcgcuauguuggugacuug

SEQ ID NO: 245735 - RNA, 19 nt, Homo sapiens
  misc_RNA (1)...(19): siRNA sense strand
acaaagagccaaagaaacu

SEQ ID NO: 245736 - RNA, 19 nt, Homo sapiens
  misc_RNA (1)...(19): siRNA sense strand
ccgagaggaugaagagaga

SEQ ID NO: 245737 - RNA, 19 nt, Homo sapiens
  misc_RNA (1)...(19): siRNA sense strand
gaaaacacagcuuacauga

SEQ ID NO: 245738 - RNA, 19 nt, Homo sapiens
  misc_RNA (1)...(19): siRNA sense strand
uaagaaacagcuccagaga

SEQ ID NO: 245739 - RNA, 19 nt, Homo sapiens
  misc_RNA (1)...(19): siRNA sense strand
ccaagugucucuaccucau

SEQ ID NO: 245740 - RNA, 19 nt, Homo sapiens
  misc_RNA (1)...(19): siRNA sense strand
uaccuuagacuucugguuu

SEQ ID NO: 245741 - RNA, 19 nt, Homo sapiens
  misc_RNA (1)...(19): siRNA sense strand
gaucacaaagagccaaaga

SEQ ID NO: 245742 - RNA, 19 nt, Homo sapiens
  misc_RNA (1)...(19): siRNA sense strand
ggacuugugccgacuucaa

SEQ ID NO: 245743 - RNA, 19 nt, Homo sapiens
  misc_RNA (1)...(19): siRNA sense strand
ccaaagcgaucuacaaaag

SEQ ID NO: 245744 - RNA, 19 nt, Homo sapiens
  misc_RNA (1)...(19): siRNA sense strand
agacgauacuggacgauca

SEQ ID NO: 245745 - RNA, 19 nt, Homo sapiens
  misc_RNA (1)...(19): siRNA sense strand
agaugaaccugaaggauac

SEQ ID NO: 245746 - RNA, 19 nt, Homo sapiens
  misc_RNA (1)...(19): siRNA sense strand
ugaccaagcagacgacgaa

SEQ ID NO: 245747 - RNA, 19 nt, Homo sapiens
  misc_RNA (1)...(19): siRNA sense strand
gcaagggccaggucaccaa

SEQ ID NO: 245748 - RNA, 19 nt, Homo sapiens
  misc_RNA (1)...(19): siRNA sense strand
guccuuacacuccuuauug

SEQ ID NO: 245749 - RNA, 19 nt, Homo sapiens
  misc_RNA (1)...(19): siRNA sense strand
gcaauggauucaggcagau

SEQ ID NO: 245750 - RNA, 19 nt, Homo sapiens
  misc_RNA (1)...(19): siRNA sense strand
agugagauauccagugaug

SEQ ID NO: 245751 - RNA, 19 nt, Homo sapiens
  misc_RNA (1)...(19): siRNA sense strand
ucaccaaacccaugucugu

SEQ ID NO: 245752 - RNA, 19 nt, Homo sapiens
  misc_RNA (1)...(19): siRNA sense strand
ggaaaaugccuaccagaug

SEQ ID NO: 245753 - RNA, 19 nt, Homo sapiens
  misc_RNA (1)...(19): siRNA sense strand
agaagcagcagauugauuc

SEQ ID NO: 245754 - RNA, 19 nt, Homo sapiens
  misc_RNA (1)...(19): siRNA sense strand
gaaggauaccaaaacuuua

SEQ ID NO: 245755 - RNA, 19 nt, Homo sapiens
  misc_RNA (1)...(19): siRNA sense strand
guagauggaauuccuccuu

SEQ ID NO: 245756 - RNA, 19 nt, Homo sapiens
  misc_RNA (1)...(19): siRNA sense strand
guuaauccuuaucacauag

SEQ ID NO: 245757 - RNA, 19 nt, Homo sapiens
  misc_RNA (1)...(19): siRNA sense strand
gagcgguguuugaggagau

SEQ ID NO: 245758 - RNA, 19 nt, Homo sapiens
  misc_RNA (1)...(19): siRNA sense strand
ccaccaagaccuacauaag

SEQ ID NO: 245759 - RNA, 19 nt, Homo sapiens
  misc_RNA (1)...(19): siRNA sense strand
cagagggacaggaaucauu

SEQ ID NO: 245760 - RNA, 19 nt, Homo sapiens
  misc_RNA (1)...(19): siRNA sense strand
aagugucucuaccucauuu

SEQ ID NO: 245761 - RNA, 19 nt, Homo sapiens
  misc_RNA (1)...(19): siRNA sense strand
gaagaagaggaguggacuu

SEQ ID NO: 245762 - RNA, 19 nt, Homo sapiens
  misc_RNA (1)...(19): siRNA sense strand
agugugagguccacggaaa

SEQ ID NO: 245763 - RNA, 19 nt, Homo sapiens
  misc_RNA (1)...(19): siRNA sense strand
gacccugggccacuuuaaa

SEQ ID NO: 245764 - RNA, 19 nt, Homo sapiens
  misc_RNA (1)...(19): siRNA sense strand
gagaggaugaagagagaga

SEQ ID NO: 245765 - RNA, 19 nt, Homo sapiens
  misc_RNA (1)...(19): siRNA sense strand
guggauaccuuagacuucu

SEQ ID NO: 245766 - RNA, 19 nt, Homo sapiens
  misc_RNA (1)...(19): siRNA sense strand
uccagaagaucacaaagag

SEQ ID NO: 245767 - RNA, 19 nt, Homo sapiens
  misc_RNA (1)...(19): siRNA sense strand
ggagcgauccuguuaaucc

SEQ ID NO: 245768 - RNA, 19 nt, Homo sapiens
  misc_RNA (1)...(19): siRNA sense strand
ugaaggauaccaaaacuuu

SEQ ID NO: 245769 - RNA, 19 nt, Homo sapiens
  misc_RNA (1)...(19): siRNA sense strand
gcuccaggccagugaguug

SEQ ID NO: 245770 - RNA, 19 nt, Homo sapiens
  misc_RNA (1)...(19): siRNA sense strand
agggagaaaugcguggaua

SEQ ID NO: 245771 - RNA, 19 nt, Homo sapiens
  misc_RNA (1)...(19): siRNA sense strand
ccaugucugucucuuccaa

SEQ ID NO: 245772 - RNA, 19 nt, Homo sapiens
  misc_RNA (1)...(19): siRNA sense strand
ccaagcagacgacgaagca

SEQ ID NO: 245773 - RNA, 19 nt, Homo sapiens
  misc_RNA (1)...(19): siRNA sense strand
gagaaaugcaucgcagugu

SEQ ID NO: 245774 - RNA, 19 nt, Homo sapiens
  misc_RNA (1)...(19): siRNA sense strand
caacgacagugagauaucc

SEQ ID NO: 245775 - RNA, 19 nt, Homo sapiens
  misc_RNA (1)...(19): siRNA sense strand
gccacacccuucuccaauc

SEQ ID NO: 245776 - RNA, 19 nt, Homo sapiens
  misc_RNA (1)...(19): siRNA sense strand
gagccacacccuucuccaa

SEQ ID NO: 245777 - RNA, 19 nt, Homo sapiens
  misc_RNA (1)...(19): siRNA sense strand
ccaaguccuuacacuccuu

SEQ ID NO: 245778 - RNA, 19 nt, Homo sapiens
  misc_RNA (1)...(19): siRNA sense strand
aguggaugcuggagaguga

SEQ ID NO: 245779 - RNA, 19 nt, Homo sapiens
  misc_RNA (1)...(19): siRNA sense strand
guauuacugcuacucgaaa

SEQ ID NO: 245780 - RNA, 19 nt, Homo sapiens
  misc_RNA (1)...(19): siRNA sense strand
gauggaauuccuccuuauc

SEQ ID NO: 245781 - RNA, 19 nt, Homo sapiens
  misc_RNA (1)...(19): siRNA sense strand
cgccaacgacagugagaua

SEQ ID NO: 245782 - RNA, 19 nt, Homo sapiens
  misc_RNA (1)...(19): siRNA sense strand
caaguccuuacacuccuua

SEQ ID NO: 245783 - RNA, 19 nt, Homo sapiens
  misc_RNA (1)...(19): siRNA sense strand
ucugauauauaccucgaau

SEQ ID NO: 245784 - RNA, 19 nt, Homo sapiens
  misc_RNA (1)...(19): siRNA sense strand
caccuugaaugaagaagag

SEQ ID NO: 245785 - RNA, 19 nt, Homo sapiens
  misc_RNA (1)...(19): siRNA sense strand
gcaguaccuugcccaaacg

SEQ ID NO: 245786 - RNA, 19 nt, Homo sapiens
  misc_RNA (1)...(19): siRNA sense strand
gagccuaaaggucgugugu

SEQ ID NO: 245787 - RNA, 19 nt, Homo sapiens
  misc_RNA (1)...(19): siRNA sense strand
gaaacagcuccagagagaa

SEQ ID NO: 245788 - RNA, 19 nt, Homo sapiens
  misc_RNA (1)...(19): siRNA sense strand
agauggaauuccuccuuau

SEQ ID NO: 245789 - RNA, 19 nt, Homo sapiens
  misc_RNA (1)...(19): siRNA sense strand
gcagaugaaccugaaggau

SEQ ID NO: 245790 - RNA, 19 nt, Homo sapiens
  misc_RNA (1)...(19): siRNA sense strand
accaagaccuacauaagag

SEQ ID NO: 245791 - RNA, 19 nt, Homo sapiens
  misc_RNA (1)...(19): siRNA sense strand
ugaguugguugucacuuac

SEQ ID NO: 245792 - RNA, 19 nt, Homo sapiens
  misc_RNA (1)...(19): siRNA sense strand
cuaccucauuucccgagaa

SEQ ID NO: 245793 - RNA, 19 nt, Homo sapiens
  misc_RNA (1)...(19): siRNA sense strand
gagcgauccuguuaauccu

SEQ ID NO: 245794 - RNA, 19 nt, Homo sapiens
  misc_RNA (1)...(19): siRNA sense strand
agccaaagcgaucuacaaa

SEQ ID NO: 245795 - RNA, 19 nt, Homo sapiens
  misc_RNA (1)...(19): siRNA sense strand
agagugagcggcagagcaa

SEQ ID NO: 245796 - RNA, 19 nt, Homo sapiens
  misc_RNA (1)...(19): siRNA sense strand
gcgaucaagacggugcuua

SEQ ID NO: 245797 - RNA, 19 nt, Homo sapiens
  misc_RNA (1)...(19): siRNA sense strand
ggucguguguggcuaucuc

SEQ ID NO: 245798 - RNA, 19 nt, Homo sapiens
  misc_RNA (1)...(19): siRNA sense strand
uacaaaagguacauugaga

SEQ ID NO: 245799 - RNA, 19 nt, Homo sapiens
  misc_RNA (1)...(19): siRNA sense strand
aagaagaggaguggacuug

SEQ ID NO: 245800 - RNA, 19 nt, Homo sapiens
  misc_RNA (1)...(19): siRNA sense strand
gccagugaguugguuguca

SEQ ID NO: 245801 - RNA, 19 nt, Homo sapiens
  misc_RNA (1)...(19): siRNA sense strand
ggugcuguguggccaguca

SEQ ID NO: 245802 - RNA, 19 nt, Homo sapiens
  misc_RNA (1)...(19): siRNA sense strand
ccaaggcuccggaaaccau

SEQ ID NO: 245803 - RNA, 19 nt, Homo sapiens
  misc_RNA (1)...(19): siRNA sense strand
caagugucucuaccucauu

SEQ ID NO: 245804 - RNA, 19 nt, Homo sapiens
  misc_RNA (1)...(19): siRNA sense strand
gcaucaagaagcagcagau

SEQ ID NO: 245805 - RNA, 19 nt, Homo sapiens
  misc_RNA (1)...(19): siRNA sense strand
aaaguggagcggaucgauu

SEQ ID NO: 245806 - RNA, 19 nt, Homo sapiens
  misc_RNA (1)...(19): siRNA sense strand
gaagacccgcagacgauac

SEQ ID NO: 245807 - RNA, 19 nt, Homo sapiens
  misc_RNA (1)...(19): siRNA sense strand
caagggccaggucaccaaa

SEQ ID NO: 245808 - RNA, 19 nt, Homo sapiens
  misc_RNA (1)...(19): siRNA sense strand
aagaagcagcagauugauu

SEQ ID NO: 245809 - RNA, 19 nt, Homo sapiens
  misc_RNA (1)...(19): siRNA sense strand
cagcagagggacaggaauc

SEQ ID NO: 245810 - RNA, 19 nt, Homo sapiens
  misc_RNA (1)...(19): siRNA sense strand
gggaaauuauagguauuac

SEQ ID NO: 245811 - RNA, 19 nt, Homo sapiens
  misc_RNA (1)...(19): siRNA sense strand
ccacaagucucaagaguca

SEQ ID NO: 245812 - RNA, 19 nt, Homo sapiens
  misc_RNA (1)...(19): siRNA sense strand
gaguucaucugcaccuuua

SEQ ID NO: 245813 - RNA, 19 nt, Homo sapiens
  misc_RNA (1)...(19): siRNA sense strand
ggauuuaucuuccuguuca

SEQ ID NO: 245814 - RNA, 19 nt, Homo sapiens
  misc_RNA (1)...(19): siRNA sense strand
caagauugaugaccagaga

SEQ ID NO: 245815 - RNA, 19 nt, Homo sapiens
  misc_RNA (1)...(19): siRNA sense strand
gaugauacguccgugauug

SEQ ID NO: 245816 - RNA, 19 nt, Homo sapiens
  misc_RNA (1)...(19): siRNA sense strand
gagcaaaggauaugcgauu

SEQ ID NO: 245817 - RNA, 19 nt, Homo sapiens
  misc_RNA (1)...(19): siRNA sense strand
aggcugagauugcaaacua

SEQ ID NO: 245818 - RNA, 19 nt, Homo sapiens
  misc_RNA (1)...(19): siRNA sense strand
aggaagaaguucaagauug

SEQ ID NO: 245819 - RNA, 19 nt, Homo sapiens
  misc_RNA (1)...(19): siRNA sense strand
gugaauaacauguucuuug

SEQ ID NO: 245820 - RNA, 19 nt, Homo sapiens
  misc_RNA (1)...(19): siRNA sense strand
cagaaggaccucucaauuc

SEQ ID NO: 245821 - RNA, 19 nt, Homo sapiens
  misc_RNA (1)...(19): siRNA sense strand
ccagaaggaccucucaauu

SEQ ID NO: 245822 - RNA, 19 nt, Homo sapiens
  misc_RNA (1)...(19): siRNA sense strand
ugaauaacauguucuuugc

SEQ ID NO: 245823 - RNA, 19 nt, Homo sapiens
  misc_RNA (1)...(19): siRNA sense strand
gaagcagaauggccuuagu

SEQ ID NO: 245824 - RNA, 19 nt, Homo sapiens
  misc_RNA (1)...(19): siRNA sense strand
caacaaacccaagcuagug

SEQ ID NO: 245825 - RNA, 19 nt, Homo sapiens
  misc_RNA (1)...(19): siRNA sense strand
cgugauugaugaugauauu

SEQ ID NO: 245826 - RNA, 19 nt, Homo sapiens
  misc_RNA (1)...(19): siRNA sense strand
ucaaagagucccagaagga

SEQ ID NO: 245827 - RNA, 19 nt, Homo sapiens
  misc_RNA (1)...(19): siRNA sense strand
ggagaaggaggucguggaa

SEQ ID NO: 245828 - RNA, 19 nt, Homo sapiens
  misc_RNA (1)...(19): siRNA sense strand
gagaaggacccacaacuac

SEQ ID NO: 245829 - RNA, 19 nt, Homo sapiens
  misc_RNA (1)...(19): siRNA sense strand
ggugaaccgucagacagua

SEQ ID NO: 245830 - RNA, 19 nt, Homo sapiens
  misc_RNA (1)...(19): siRNA sense strand
gaggaagaaguucaagauu

SEQ ID NO: 245831 - RNA, 19 nt, Homo sapiens
  misc_RNA (1)...(19): siRNA sense strand
uggaugggcugaaggucua

SEQ ID NO: 245832 - RNA, 19 nt, Homo sapiens
  misc_RNA (1)...(19): siRNA sense strand
gaaggacccacaacuacga

SEQ ID NO: 245833 - RNA, 19 nt, Homo sapiens
  misc_RNA (1)...(19): siRNA sense strand
gagaagaggaagaaguuca

SEQ ID NO: 245834 - RNA, 19 nt, Homo sapiens
  misc_RNA (1)...(19): siRNA sense strand
acucugcccuuagguauaa

SEQ ID NO: 245835 - RNA, 19 nt, Homo sapiens
  misc_RNA (1)...(19): siRNA sense strand
auacguccgugauugauga

SEQ ID NO: 245836 - RNA, 19 nt, Homo sapiens
  misc_RNA (1)...(19): siRNA sense strand
agagaaggacccacaacua

SEQ ID NO: 245837 - RNA, 19 nt, Homo sapiens
  misc_RNA (1)...(19): siRNA sense strand
uagagaagaggaagaaguu

SEQ ID NO: 245838 - RNA, 19 nt, Homo sapiens
  misc_RNA (1)...(19): siRNA sense strand
caauuccucuguccaucaa

SEQ ID NO: 245839 - RNA, 19 nt, Homo sapiens
  misc_RNA (1)...(19): siRNA sense strand
gcccugagagcaaaggaua

SEQ ID NO: 245840 - RNA, 19 nt, Homo sapiens
  misc_RNA (1)...(19): siRNA sense strand
gauugaugaugauauugug

SEQ ID NO: 245841 - RNA, 19 nt, Homo sapiens
  misc_RNA (1)...(19): siRNA sense strand
gaaggugaaccgucagaca

SEQ ID NO: 245842 - RNA, 19 nt, Homo sapiens
  misc_RNA (1)...(19): siRNA sense strand
ucaaggaggagguagagaa

SEQ ID NO: 245843 - RNA, 19 nt, Homo sapiens
  misc_RNA (1)...(19): siRNA sense strand
gaucggcagugcuuucaac

SEQ ID NO: 245844 - RNA, 19 nt, Homo sapiens
  misc_RNA (1)...(19): siRNA sense strand
caacucugcccuuagguau

SEQ ID NO: 245845 - RNA, 19 nt, Homo sapiens
  misc_RNA (1)...(19): siRNA sense strand
gcucaaagagucccagaag

SEQ ID NO: 245846 - RNA, 19 nt, Homo sapiens
  misc_RNA (1)...(19): siRNA sense strand
cagcaguacucagaugaug

SEQ ID NO: 245847 - RNA, 19 nt, Homo sapiens
  misc_RNA (1)...(19): siRNA sense strand
caaccgugcuguccgugau

SEQ ID NO: 245848 - RNA, 19 nt, Homo sapiens
  misc_RNA (1)...(19): siRNA sense strand
agaaggaccucucaauucc

SEQ ID NO: 245849 - RNA, 19 nt, Homo sapiens
  misc_RNA (1)...(19): siRNA sense strand
ggacccacaacuacgauga

SEQ ID NO: 245850 - RNA, 19 nt, Homo sapiens
  misc_RNA (1)...(19): siRNA sense strand
gacgaggaguggacagaca

SEQ ID NO: 245851 - RNA, 19 nt, Homo sapiens
  misc_RNA (1)...(19): siRNA sense strand
ucuacgaccuucagagcaa

SEQ ID NO: 245852 - RNA, 19 nt, Homo sapiens
  misc_RNA (1)...(19): siRNA sense strand
gcugauacccaacucuugu

SEQ ID NO: 245853 - RNA, 19 nt, Homo sapiens
  misc_RNA (1)...(19): siRNA sense strand
guagagaagaggaagaagu

SEQ ID NO: 245854 - RNA, 19 nt, Homo sapiens
  misc_RNA (1)...(19): siRNA sense strand
ggcccuguauauggauuua

SEQ ID NO: 245855 - RNA, 19 nt, Homo sapiens
  misc_RNA (1)...(19): siRNA sense strand
gcagcccaguggagaagga

SEQ ID NO: 245856 - RNA, 19 nt, Homo sapiens
  misc_RNA (1)...(19): siRNA sense strand
ccaacucugcccuuaggua

SEQ ID NO: 245857 - RNA, 19 nt, Homo sapiens
  misc_RNA (1)...(19): siRNA sense strand
cagaugaugaggaugacua

SEQ ID NO: 245858 - RNA, 19 nt, Homo sapiens
  misc_RNA (1)...(19): siRNA sense strand
gagaagcagaauggccuua

SEQ ID NO: 245859 - RNA, 19 nt, Homo sapiens
  misc_RNA (1)...(19): siRNA sense strand
caagucagccagcaacaag

SEQ ID NO: 245860 - RNA, 19 nt, Homo sapiens
  misc_RNA (1)...(19): siRNA sense strand
gaggaugacgugcagaaca

SEQ ID NO: 245861 - RNA, 19 nt, Homo sapiens
  misc_RNA (1)...(19): siRNA sense strand
cguccgugauugaugauga

SEQ ID NO: 245862 - RNA, 19 nt, Homo sapiens
  misc_RNA (1)...(19): siRNA sense strand
gcaaaggauaugcgauugg

SEQ ID NO: 245863 - RNA, 19 nt, Homo sapiens
  misc_RNA (1)...(19): siRNA sense strand
ccaacaccaucaacgucuu

SEQ ID NO: 245864 - RNA, 19 nt, Homo sapiens
  misc_RNA (1)...(19): siRNA sense strand
caccaacucugcccuuagg

SEQ ID NO: 245865 - RNA, 19 nt, Homo sapiens
  misc_RNA (1)...(19): siRNA sense strand
ucacccugcucguggaaga

SEQ ID NO: 245866 - RNA, 19 nt, Homo sapiens
  misc_RNA (1)...(19): siRNA sense strand
ggaugauacguccgugauu

SEQ ID NO: 245867 - RNA, 19 nt, Homo sapiens
  misc_RNA (1)...(19): siRNA sense strand
gcugcguguugacugcaua

SEQ ID NO: 245868 - RNA, 19 nt, Homo sapiens
  misc_RNA (1)...(19): siRNA sense strand
caacaccaucaacgucuug

SEQ ID NO: 245869 - RNA, 19 nt, Homo sapiens
  misc_RNA (1)...(19): siRNA sense strand
ccaacaaacccaagcuagu

SEQ ID NO: 245870 - RNA, 19 nt, Homo sapiens
  misc_RNA (1)...(19): siRNA sense strand
ucucuaccuugguggauga

SEQ ID NO: 245871 - RNA, 19 nt, Homo sapiens
  misc_RNA (1)...(19): siRNA sense strand
gaaccgucagacaguacua

SEQ ID NO: 245872 - RNA, 19 nt, Homo sapiens
  misc_RNA (1)...(19): siRNA sense strand
auacccaacucuugugcaa

SEQ ID NO: 245873 - RNA, 19 nt, Homo sapiens
  misc_RNA (1)...(19): siRNA sense strand
ggacuucaccaaggguuuc

SEQ ID NO: 245874 - RNA, 19 nt, Homo sapiens
  misc_RNA (1)...(19): siRNA sense strand
agacacggccucugagauc

SEQ ID NO: 245875 - RNA, 19 nt, Homo sapiens
  misc_RNA (1)...(19): siRNA sense strand
gagggcaaccacacagaug

SEQ ID NO: 245876 - RNA, 19 nt, Homo sapiens
  misc_RNA (1)...(19): siRNA sense strand
aacaccaacucugcccuua

SEQ ID NO: 245877 - RNA, 19 nt, Homo sapiens
  misc_RNA (1)...(19): siRNA sense strand
agaggaagaaguucaagau

SEQ ID NO: 245878 - RNA, 19 nt, Homo sapiens
  misc_RNA (1)...(19): siRNA sense strand
aacccaagcuaguggugaa

SEQ ID NO: 245879 - RNA, 19 nt, Homo sapiens
  misc_RNA (1)...(19): siRNA sense strand
agaaauacucacccaagga

SEQ ID NO: 245880 - RNA, 19 nt, Homo sapiens
  misc_RNA (1)...(19): siRNA sense strand
ugaugaggaugacuaugag

SEQ ID NO: 245881 - RNA, 19 nt, Homo sapiens
  misc_RNA (1)...(19): siRNA sense strand
gcaaguggaggagaucuac

SEQ ID NO: 245882 - RNA, 19 nt, Homo sapiens
  misc_RNA (1)...(19): siRNA sense strand
augaugaggaugacuauga

SEQ ID NO: 245883 - RNA, 19 nt, Homo sapiens
  misc_RNA (1)...(19): siRNA sense strand
ggagaucuacgaccuucag

SEQ ID NO: 245884 - RNA, 19 nt, Homo sapiens
  misc_RNA (1)...(19): siRNA sense strand
caaggaggagguagagaag

SEQ ID NO: 245885 - RNA, 19 nt, Homo sapiens
  misc_RNA (1)...(19): siRNA sense strand
ggaggagaucuacgaccuu

SEQ ID NO: 245886 - RNA, 19 nt, Homo sapiens
  misc_RNA (1)...(19): siRNA sense strand
uuaucuuccuguucaaaug

SEQ ID NO: 245887 - RNA, 19 nt, Homo sapiens
  misc_RNA (1)...(19): siRNA sense strand
gauuuaucuuccuguucaa

SEQ ID NO: 245888 - RNA, 19 nt, Homo sapiens
  misc_RNA (1)...(19): siRNA sense strand
gaucuggguccugucauca

SEQ ID NO: 245889 - RNA, 19 nt, Homo sapiens
  misc_RNA (1)...(19): siRNA sense strand
gagaucggcagugcuuuca

SEQ ID NO: 245890 - RNA, 19 nt, Homo sapiens
  misc_RNA (1)...(19): siRNA sense strand
gauacguccgugauugaug

SEQ ID NO: 245891 - RNA, 19 nt, Homo sapiens
  misc_RNA (1)...(19): siRNA sense strand
gcaccuuuaucuccaugcu

SEQ ID NO: 245892 - RNA, 19 nt, Homo sapiens
  misc_RNA (1)...(19): siRNA sense strand
ugaguucaucugcaccuuu

SEQ ID NO: 245893 - RNA, 19 nt, Homo sapiens
  misc_RNA (1)...(19): siRNA sense strand
agaagaggaagaaguucaa

SEQ ID NO: 245894 - RNA, 19 nt, Homo sapiens
  misc_RNA (1)...(19): siRNA sense strand
gcugagauugcaaacuaug

SEQ ID NO: 245895 - RNA, 19 nt, Homo sapiens
  misc_RNA (1)...(19): siRNA sense strand
ccugucaccucccacaucu

SEQ ID NO: 245896 - RNA, 19 nt, Homo sapiens
  misc_RNA (1)...(19): siRNA sense strand
ucaauuccucuguccauca

SEQ ID NO: 245897 - RNA, 19 nt, Homo sapiens
  misc_RNA (1)...(19): siRNA sense strand
cagcugauacccaacucuu

SEQ ID NO: 245898 - RNA, 19 nt, Homo sapiens
  misc_RNA (1)...(19): siRNA sense strand
cuacgaccuucagagcaaa

SEQ ID NO: 245899 - RNA, 19 nt, Homo sapiens
  misc_RNA (1)...(19): siRNA sense strand
ugcaugugcugaaggugaa

SEQ ID NO: 245900 - RNA, 19 nt, Homo sapiens
  misc_RNA (1)...(19): siRNA sense strand
guuccacuuugucagcuau

SEQ ID NO: 245901 - RNA, 19 nt, Homo sapiens
  misc_RNA (1)...(19): siRNA sense strand
gaccgcaggaucaaguaug

SEQ ID NO: 245902 - RNA, 19 nt, Homo sapiens
  misc_RNA (1)...(19): siRNA sense strand
ccaaccuaguggagcagaa

SEQ ID NO: 245903 - RNA, 19 nt, Homo sapiens
  misc_RNA (1)...(19): siRNA sense strand
ggcugagauugcaaacuau

SEQ ID NO: 245904 - RNA, 19 nt, Homo sapiens
  misc_RNA (1)...(19): siRNA sense strand
ccacaucuccaaggugcuu

SEQ ID NO: 245905 - RNA, 19 nt, Homo sapiens
  misc_RNA (1)...(19): siRNA sense strand
cuaccuugguggaugauac

SEQ ID NO: 245906 - RNA, 19 nt, Homo sapiens
  misc_RNA (1)...(19): siRNA sense strand
cggccuuucuagacaauca

SEQ ID NO: 245907 - RNA, 19 nt, Homo sapiens
  misc_RNA (1)...(19): siRNA sense strand
ggaagauuucggugucaag

SEQ ID NO: 245908 - RNA, 19 nt, Homo sapiens
  misc_RNA (1)...(19): siRNA sense strand
gaagaggaagaaguucaag

SEQ ID NO: 245909 - RNA, 19 nt, Homo sapiens
  misc_RNA (1)...(19): siRNA sense strand
aggaggagguagagaagag

SEQ ID NO: 245910 - RNA, 19 nt, Homo sapiens
  misc_RNA (1)...(19): siRNA sense strand
caacucuugugcaacucau

SEQ ID NO: 245911 - RNA, 19 nt, Homo sapiens
  misc_RNA (1)...(19): siRNA sense strand
caaagacccuccagcagaa

SEQ ID NO: 245912 - RNA, 19 nt, Homo sapiens
  misc_RNA (1)...(19): siRNA sense strand
ccaagucgauggaacaguu

SEQ ID NO: 245913 - RNA, 19 nt, Homo sapiens
  misc_RNA (1)...(19): siRNA sense strand
ggacccagaugcagaagug

SEQ ID NO: 245914 - RNA, 19 nt, Homo sapiens
  misc_RNA (1)...(19): siRNA sense strand
uggcacaucugacccauuu

SEQ ID NO: 245915 - RNA, 19 nt, Homo sapiens
  misc_RNA (1)...(19): siRNA sense strand
ugaaauuacuggaggauuc

SEQ ID NO: 245916 - RNA, 19 nt, Homo sapiens
  misc_RNA (1)...(19): siRNA sense strand
gggauugacagcuggauua

SEQ ID NO: 245917 - RNA, 19 nt, Homo sapiens
  misc_RNA (1)...(19): siRNA sense strand
ccaccuaccuccagugcaa

SEQ ID NO: 245918 - RNA, 19 nt, Homo sapiens
  misc_RNA (1)...(19): siRNA sense strand
gggacuggcugggcacuuu

SEQ ID NO: 245919 - RNA, 19 nt, Homo sapiens
  misc_RNA (1)...(19): siRNA sense strand
gcaccugccucuggauuuc

SEQ ID NO: 245920 - RNA, 19 nt, Homo sapiens
  misc_RNA (1)...(19): siRNA sense strand
agacaucucuggcacaucu

SEQ ID NO: 245921 - RNA, 19 nt, Homo sapiens
  misc_RNA (1)...(19): siRNA sense strand
gccaggaccuugccaccaa

SEQ ID NO: 245922 - RNA, 19 nt, Homo sapiens
  misc_RNA (1)...(19): siRNA sense strand
ggacauggugggcaagaau

SEQ ID NO: 245923 - RNA, 19 nt, Homo sapiens
  misc_RNA (1)...(19): siRNA sense strand
ggaggauucuaacauggau

SEQ ID NO: 245924 - RNA, 19 nt, Homo sapiens
  misc_RNA (1)...(19): siRNA sense strand
gcaccaggaugugaaguac

SEQ ID NO: 245925 - RNA, 19 nt, Homo sapiens
  misc_RNA (1)...(19): siRNA sense strand
ugaaguaccuggccaucag

SEQ ID NO: 245926 - RNA, 19 nt, Homo sapiens
  misc_RNA (1)...(19): siRNA sense strand
uuggagaccucaaccauca

SEQ ID NO: 245927 - RNA, 19 nt, Homo sapiens
  misc_RNA (1)...(19): siRNA sense strand
gugauuagccgugucuuug

SEQ ID NO: 245928 - RNA, 19 nt, Homo sapiens
  misc_RNA (1)...(19): siRNA sense strand
caguggauuucucuucuug

SEQ ID NO: 245929 - RNA, 19 nt, Homo sapiens
  misc_RNA (1)...(19): siRNA sense strand
ggauugacagcuggauuaa

SEQ ID NO: 245930 - RNA, 19 nt, Homo sapiens
  misc_RNA (1)...(19): siRNA sense strand
cagcagaagccaccuaaag

SEQ ID NO: 245931 - RNA, 19 nt, Homo sapiens
  misc_RNA (1)...(19): siRNA sense strand
cuaacucccuggcauccaa

SEQ ID NO: 245932 - RNA, 19 nt, Homo sapiens
  misc_RNA (1)...(19): siRNA sense strand
cgauggaacaguuuaugaa

SEQ ID NO: 245933 - RNA, 19 nt, Homo sapiens
  misc_RNA (1)...(19): siRNA sense strand
gugaagguacgccugauug

SEQ ID NO: 245934 - RNA, 19 nt, Homo sapiens
  misc_RNA (1)...(19): siRNA sense strand
gauuagccgugucuuugag

SEQ ID NO: 245935 - RNA, 19 nt, Homo sapiens
  misc_RNA (1)...(19): siRNA sense strand
guccugaagccugugauua

SEQ ID NO: 245936 - RNA, 19 nt, Homo sapiens
  misc_RNA (1)...(19): siRNA sense strand
gaaugugaaugagcucaac

SEQ ID NO: 245937 - RNA, 19 nt, Homo sapiens
  misc_RNA (1)...(19): siRNA sense strand
ccaaggcugugcagagcau

SEQ ID NO: 245938 - RNA, 19 nt, Homo sapiens
  misc_RNA (1)...(19): siRNA sense strand
gcuaccagccucucaugga

SEQ ID NO: 245939 - RNA, 19 nt, Homo sapiens
  misc_RNA (1)...(19): siRNA sense strand
gaaauuacuggaggauucu

SEQ ID NO: 245940 - RNA, 19 nt, Homo sapiens
  misc_RNA (1)...(19): siRNA sense strand
gauggaacaguuuaugaag

SEQ ID NO: 245941 - RNA, 19 nt, Homo sapiens
  misc_RNA (1)...(19): siRNA sense strand
gcacaucugacccauuugc

SEQ ID NO: 245942 - RNA, 19 nt, Homo sapiens
  misc_RNA (1)...(19): siRNA sense strand
ugacagcuggauuaacuug

SEQ ID NO: 245943 - RNA, 19 nt, Homo sapiens
  misc_RNA (1)...(19): siRNA sense strand
ucaguggauuucucuucuu

SEQ ID NO: 245944 - RNA, 19 nt, Homo sapiens
  misc_RNA (1)...(19): siRNA sense strand
ccucaaccaucaagaagac

SEQ ID NO: 245945 - RNA, 19 nt, Homo sapiens
  misc_RNA (1)...(19): siRNA sense strand
acuggaggauucuaacaug

SEQ ID NO: 245946 - RNA, 19 nt, Homo sapiens
  misc_RNA (1)...(19): siRNA sense strand
ccaagcuggugaaacucuu

SEQ ID NO: 245947 - RNA, 19 nt, Homo sapiens
  misc_RNA (1)...(19): siRNA sense strand
uccaccagcuggccuucua

SEQ ID NO: 245948 - RNA, 19 nt, Homo sapiens
  misc_RNA (1)...(19): siRNA sense strand
gagcuggaucccugcaaga

SEQ ID NO: 245949 - RNA, 19 nt, Homo sapiens
  misc_RNA (1)...(19): siRNA sense strand
gaagguacgccugauugag

SEQ ID NO: 245950 - RNA, 19 nt, Homo sapiens
  misc_RNA (1)...(19): siRNA sense strand
ugaagguacgccugauuga

SEQ ID NO: 245951 - RNA, 19 nt, Homo sapiens
  misc_RNA (1)...(19): siRNA sense strand
auugacagcuggauuaacu

SEQ ID NO: 245952 - RNA, 19 nt, Homo sapiens
  misc_RNA (1)...(19): siRNA sense strand
ggccaucaguggauuucuc

SEQ ID NO: 245953 - RNA, 19 nt, Homo sapiens
  misc_RNA (1)...(19): siRNA sense strand
gggacauggugggcaagaa

SEQ ID NO: 245954 - RNA, 19 nt, Homo sapiens
  misc_RNA (1)...(19): siRNA sense strand
ggcacuuucuggacuaucu

SEQ ID NO: 245955 - RNA, 19 nt, Homo sapiens
  misc_RNA (1)...(19): siRNA sense strand
gagaaggcuaucugcugaa

SEQ ID NO: 245956 - RNA, 19 nt, Homo sapiens
  misc_RNA (1)...(19): siRNA sense strand
cgacaucaucggcaagauc

SEQ ID NO: 245957 - RNA, 19 nt, Homo sapiens
  misc_RNA (1)...(19): siRNA sense strand
caucaguggauuucucuuc

SEQ ID NO: 245958 - RNA, 19 nt, Homo sapiens
  misc_RNA (1)...(19): siRNA sense strand
uggaacaguuuaugaagcu

SEQ ID NO: 245959 - RNA, 19 nt, Homo sapiens
  misc_RNA (1)...(19): siRNA sense strand
caagucgauggaacaguuu

SEQ ID NO: 245960 - RNA, 19 nt, Homo sapiens
  misc_RNA (1)...(19): siRNA sense strand
caagcuggugaaacucuuu

SEQ ID NO: 245961 - RNA, 19 nt, Homo sapiens
  misc_RNA (1)...(19): siRNA sense strand
cuucgcaccugccauccuu

SEQ ID NO: 245962 - RNA, 19 nt, Homo sapiens
  misc_RNA (1)...(19): siRNA sense strand
ccuacugccuagugaaagu

SEQ ID NO: 245963 - RNA, 19 nt, Homo sapiens
  misc_RNA (1)...(19): siRNA sense strand
ccuucuacgugcuggauga

SEQ ID NO: 245964 - RNA, 19 nt, Homo sapiens
  misc_RNA (1)...(19): siRNA sense strand
ugauuagccgugucuuuga

SEQ ID NO: 245965 - RNA, 19 nt, Homo sapiens
  misc_RNA (1)...(19): siRNA sense strand
agaccucaaccaucaagaa

SEQ ID NO: 245966 - RNA, 19 nt, Homo sapiens
  misc_RNA (1)...(19): siRNA sense strand
ccacgcgcuuugccuucaa

SEQ ID NO: 245967 - RNA, 19 nt, Homo sapiens
  misc_RNA (1)...(19): siRNA sense strand
gaccucaaccaucaagaag

SEQ ID NO: 245968 - RNA, 19 nt, Homo sapiens
  misc_RNA (1)...(19): siRNA sense strand
gcugaggcccagacagugu

SEQ ID NO: 245969 - RNA, 19 nt, Homo sapiens
  misc_RNA (1)...(19): siRNA sense strand
gcagaagugcagggugaga

SEQ ID NO: 245970 - RNA, 19 nt, Homo sapiens
  misc_RNA (1)...(19): siRNA sense strand
ccaugcgccucgccuucaa

SEQ ID NO: 245971 - RNA, 19 nt, Homo sapiens
  misc_RNA (1)...(19): siRNA sense strand
gacaucaucggcaagaucu

SEQ ID NO: 245972 - RNA, 19 nt, Homo sapiens
  misc_RNA (1)...(19): siRNA sense strand
gagcagggaggcgauuaca

SEQ ID NO: 245973 - RNA, 19 nt, Homo sapiens
  misc_RNA (1)...(19): siRNA sense strand
gugcaagaaugugaaugag

SEQ ID NO: 245974 - RNA, 19 nt, Homo sapiens
  misc_RNA (1)...(19): siRNA sense strand
gccacgcgcuuugccuuca

SEQ ID NO: 245975 - RNA, 19 nt, Homo sapiens
  misc_RNA (1)...(19): siRNA sense strand
gaaguaccuggccaucagu

SEQ ID NO: 245976 - RNA, 19 nt, Homo sapiens
  misc_RNA (1)...(19): siRNA sense strand
ucgauggaacaguuuauga

SEQ ID NO: 245977 - RNA, 19 nt, Homo sapiens
  misc_RNA (1)...(19): siRNA sense strand
cccauuugcacguguguuu

SEQ ID NO: 245978 - RNA, 19 nt, Homo sapiens
  misc_RNA (1)...(19): siRNA sense strand
gauucuaacauggauacaa

SEQ ID NO: 245979 - RNA, 19 nt, Homo sapiens
  misc_RNA (1)...(19): siRNA sense strand
cguacacacucagcuguca

SEQ ID NO: 245980 - RNA, 19 nt, Homo sapiens
  misc_RNA (1)...(19): siRNA sense strand
gacauggugggcaagaaug

SEQ ID NO: 245981 - RNA, 19 nt, Homo sapiens
  misc_RNA (1)...(19): siRNA sense strand
ggagaccucaaccaucaag

SEQ ID NO: 245982 - RNA, 19 nt, Homo sapiens
  misc_RNA (1)...(19): siRNA sense strand
gcucugggacugggacaug

SEQ ID NO: 245983 - RNA, 19 nt, Homo sapiens
  misc_RNA (1)...(19): siRNA sense strand
acagcuggauuaacuugag

SEQ ID NO: 245984 - RNA, 19 nt, Homo sapiens
  misc_RNA (1)...(19): siRNA sense strand
cuauauaccuccucacuua

SEQ ID NO: 245985 - RNA, 19 nt, Homo sapiens
  misc_RNA (1)...(19): siRNA sense strand
gaacagagaagcaucuaaa

SEQ ID NO: 245986 - RNA, 19 nt, Homo sapiens
  misc_RNA (1)...(19): siRNA sense strand
aaacaugccauuccuauua

SEQ ID NO: 245987 - RNA, 19 nt, Homo sapiens
  misc_RNA (1)...(19): siRNA sense strand
gaggaaagccugguuauuu

SEQ ID NO: 245988 - RNA, 19 nt, Homo sapiens
  misc_RNA (1)...(19): siRNA sense strand
gaacaucacacagaaagua

SEQ ID NO: 245989 - RNA, 19 nt, Homo sapiens
  misc_RNA (1)...(19): siRNA sense strand
gaaaguaguuuggguggaa

SEQ ID NO: 245990 - RNA, 19 nt, Homo sapiens
  misc_RNA (1)...(19): siRNA sense strand
gcaaagauaaggaugcaua

SEQ ID NO: 245991 - RNA, 19 nt, Homo sapiens
  misc_RNA (1)...(19): siRNA sense strand
gagcaaagggcgcuauaua

SEQ ID NO: 245992 - RNA, 19 nt, Homo sapiens
  misc_RNA (1)...(19): siRNA sense strand
ggauaugcuuguacuagua

SEQ ID NO: 245993 - RNA, 19 nt, Homo sapiens
  misc_RNA (1)...(19): siRNA sense strand
ucuaaaggauuccaugaua

SEQ ID NO: 245994 - RNA, 19 nt, Homo sapiens
  misc_RNA (1)...(19): siRNA sense strand
uauggaggcuucuacaaua

SEQ ID NO: 245995 - RNA, 19 nt, Homo sapiens
  misc_RNA (1)...(19): siRNA sense strand
gauaaacggucauuucuac

SEQ ID NO: 245996 - RNA, 19 nt, Homo sapiens
  misc_RNA (1)...(19): siRNA sense strand
gaggaaagauuggauuaga

SEQ ID NO: 245997 - RNA, 19 nt, Homo sapiens
  misc_RNA (1)...(19): siRNA sense strand
cagauucccuggaggauuu

SEQ ID NO: 245998 - RNA, 19 nt, Homo sapiens
  misc_RNA (1)...(19): siRNA sense strand
ggauauggaggaaauuaua

SEQ ID NO: 245999 - RNA, 19 nt, Homo sapiens
  misc_RNA (1)...(19): siRNA sense strand
cuaaaggauuccaugauaa

SEQ ID NO: 246000 - RNA, 19 nt, Homo sapiens
  misc_RNA (1)...(19): siRNA sense strand
uguagaagcuaaacaagaa

SEQ ID NO: 246001 - RNA, 19 nt, Homo sapiens
  misc_RNA (1)...(19): siRNA sense strand
uaacuguccuccacauauu

SEQ ID NO: 246002 - RNA, 19 nt, Homo sapiens
  misc_RNA (1)...(19): siRNA sense strand
gggauuaacuuugagaaau

SEQ ID NO: 246003 - RNA, 19 nt, Homo sapiens
  misc_RNA (1)...(19): siRNA sense strand
gaugcuugcucgugacuuu

SEQ ID NO: 246004 - RNA, 19 nt, Homo sapiens
  misc_RNA (1)...(19): siRNA sense strand
gcacgaggacuagacauuu

SEQ ID NO: 246005 - RNA, 19 nt, Homo sapiens
  misc_RNA (1)...(19): siRNA sense strand
agaauuggcuguacagauc

SEQ ID NO: 246006 - RNA, 19 nt, Homo sapiens
  misc_RNA (1)...(19): siRNA sense strand
gcaaguacuuaguguugga

SEQ ID NO: 246007 - RNA, 19 nt, Homo sapiens
  misc_RNA (1)...(19): siRNA sense strand
gauaaagacaguucagguu

SEQ ID NO: 246008 - RNA, 19 nt, Homo sapiens
  misc_RNA (1)...(19): siRNA sense strand
uagauucaguggaggauuu

SEQ ID NO: 246009 - RNA, 19 nt, Homo sapiens
  misc_RNA (1)...(19): siRNA sense strand
acaagucaguugaagauga

SEQ ID NO: 246010 - RNA, 19 nt, Homo sapiens
  misc_RNA (1)...(19): siRNA sense strand
aagaauaugugcaucguau

SEQ ID NO: 246011 - RNA, 19 nt, Homo sapiens
  misc_RNA (1)...(19): siRNA sense strand
gguggaagacuuagauaaa

SEQ ID NO: 246012 - RNA, 19 nt, Homo sapiens
  misc_RNA (1)...(19): siRNA sense strand
gcugauaggaugcuggaua

SEQ ID NO: 246013 - RNA, 19 nt, Homo sapiens
  misc_RNA (1)...(19): siRNA sense strand
gaaggaaaauggaagguau

SEQ ID NO: 246014 - RNA, 19 nt, Homo sapiens
  misc_RNA (1)...(19): siRNA sense strand
cuccacauauugagaauuu

SEQ ID NO: 246015 - RNA, 19 nt, Homo sapiens
  misc_RNA (1)...(19): siRNA sense strand
cuacaauagugauggauau

SEQ ID NO: 246016 - RNA, 19 nt, Homo sapiens
  misc_RNA (1)...(19): siRNA sense strand
caagagaauuggcuguaca

SEQ ID NO: 246017 - RNA, 19 nt, Homo sapiens
  misc_RNA (1)...(19): siRNA sense strand
cagagaagcaucuaaagga

SEQ ID NO: 246018 - RNA, 19 nt, Homo sapiens
  misc_RNA (1)...(19): siRNA sense strand
gaacggaguggacauaguc

SEQ ID NO: 246019 - RNA, 19 nt, Homo sapiens
  misc_RNA (1)...(19): siRNA sense strand
caagucaguugaagaugau

SEQ ID NO: 246020 - RNA, 19 nt, Homo sapiens
  misc_RNA (1)...(19): siRNA sense strand
caauagugauggauaugga

SEQ ID NO: 246021 - RNA, 19 nt, Homo sapiens
  misc_RNA (1)...(19): siRNA sense strand
gccagagacuaucgacaaa

SEQ ID NO: 246022 - RNA, 19 nt, Homo sapiens
  misc_RNA (1)...(19): siRNA sense strand
gccaagugauauugaagaa

SEQ ID NO: 246023 - RNA, 19 nt, Homo sapiens
  misc_RNA (1)...(19): siRNA sense strand
ggaggcccuucaccaguuu

SEQ ID NO: 246024 - RNA, 19 nt, Homo sapiens
  misc_RNA (1)...(19): siRNA sense strand
ggaugccacuuguuaguag

SEQ ID NO: 246025 - RNA, 19 nt, Homo sapiens
  misc_RNA (1)...(19): siRNA sense strand
ccgcaaacaauauccaaua

SEQ ID NO: 246026 - RNA, 19 nt, Homo sapiens
  misc_RNA (1)...(19): siRNA sense strand
agaagcaucuaaaggauuc

SEQ ID NO: 246027 - RNA, 19 nt, Homo sapiens
  misc_RNA (1)...(19): siRNA sense strand
ugagucagauauauacaga

SEQ ID NO: 246028 - RNA, 19 nt, Homo sapiens
  misc_RNA (1)...(19): siRNA sense strand
gaacuuacucgcuauacuc

SEQ ID NO: 246029 - RNA, 19 nt, Homo sapiens
  misc_RNA (1)...(19): siRNA sense strand
cgucacaccaugauguuua

SEQ ID NO: 246030 - RNA, 19 nt, Homo sapiens
  misc_RNA (1)...(19): siRNA sense strand
gagugacuaugaugguauu

SEQ ID NO: 246031 - RNA, 19 nt, Homo sapiens
  misc_RNA (1)...(19): siRNA sense strand
gaagaauaugugcaucgua

SEQ ID NO: 246032 - RNA, 19 nt, Homo sapiens
  misc_RNA (1)...(19): siRNA sense strand
guaacuguccuccacauau

SEQ ID NO: 246033 - RNA, 19 nt, Homo sapiens
  misc_RNA (1)...(19): siRNA sense strand
gauggaaagaggaaagauu

SEQ ID NO: 246034 - RNA, 19 nt, Homo sapiens
  misc_RNA (1)...(19): siRNA sense strand
gagaagcaucuaaaggauu

SEQ ID NO: 246035 - RNA, 19 nt, Homo sapiens
  misc_RNA (1)...(19): siRNA sense strand
caugaaggauaugcuugua

SEQ ID NO: 246036 - RNA, 19 nt, Homo sapiens
  misc_RNA (1)...(19): siRNA sense strand
ccaaacaggaucugggaaa

SEQ ID NO: 246037 - RNA, 19 nt, Homo sapiens
  misc_RNA (1)...(19): siRNA sense strand
aaauauggcuuaugaacac

SEQ ID NO: 246038 - RNA, 19 nt, Homo sapiens
  misc_RNA (1)...(19): siRNA sense strand
ugugagacauguuaucaau

SEQ ID NO: 246039 - RNA, 19 nt, Homo sapiens
  misc_RNA (1)...(19): siRNA sense strand
gaaagaggaaagauuggau

SEQ ID NO: 246040 - RNA, 19 nt, Homo sapiens
  misc_RNA (1)...(19): siRNA sense strand
gagaacaucacacagaaag

SEQ ID NO: 246041 - RNA, 19 nt, Homo sapiens
  misc_RNA (1)...(19): siRNA sense strand
cagagacuaucgacaaagu

SEQ ID NO: 246042 - RNA, 19 nt, Homo sapiens
  misc_RNA (1)...(19): siRNA sense strand
ggacgucuaguggauauga

SEQ ID NO: 246043 - RNA, 19 nt, Homo sapiens
  misc_RNA (1)...(19): siRNA sense strand
gaugcuggauaugggauuu

SEQ ID NO: 246044 - RNA, 19 nt, Homo sapiens
  misc_RNA (1)...(19): siRNA sense strand
gauauugacaugggagaaa

SEQ ID NO: 246045 - RNA, 19 nt, Homo sapiens
  misc_RNA (1)...(19): siRNA sense strand
ugauggauauggaggaaau

SEQ ID NO: 246046 - RNA, 19 nt, Homo sapiens
  misc_RNA (1)...(19): siRNA sense strand
ccaaagggcguucgucaca

SEQ ID NO: 246047 - RNA, 19 nt, Homo sapiens
  misc_RNA (1)...(19): siRNA sense strand
ggaaagaggaaagauugga

SEQ ID NO: 246048 - RNA, 19 nt, Homo sapiens
  misc_RNA (1)...(19): siRNA sense strand
agucagauauauacagaug

SEQ ID NO: 246049 - RNA, 19 nt, Homo sapiens
  misc_RNA (1)...(19): siRNA sense strand
ggaggcuucuacaauagug

SEQ ID NO: 246050 - RNA, 19 nt, Homo sapiens
  misc_RNA (1)...(19): siRNA sense strand
uggaaaauauggcuuauga

SEQ ID NO: 246051 - RNA, 19 nt, Homo sapiens
  misc_RNA (1)...(19): siRNA sense strand
gggauuugaaccucagaua

SEQ ID NO: 246052 - RNA, 19 nt, Homo sapiens
  misc_RNA (1)...(19): siRNA sense strand
cugauaggaugcuggauau

SEQ ID NO: 246053 - RNA, 19 nt, Homo sapiens
  misc_RNA (1)...(19): siRNA sense strand
gggaagauuugaugaucgu

SEQ ID NO: 246054 - RNA, 19 nt, Homo sapiens
  misc_RNA (1)...(19): siRNA sense strand
cugagaacaucacacagaa

SEQ ID NO: 246055 - RNA, 19 nt, Homo sapiens
  misc_RNA (1)...(19): siRNA sense strand
gcaaguacagcgagcaaag

SEQ ID NO: 246056 - RNA, 19 nt, Homo sapiens
  misc_RNA (1)...(19): siRNA sense strand
gauaugauggaaagaggaa

SEQ ID NO: 246057 - RNA, 19 nt, Homo sapiens
  misc_RNA (1)...(19): siRNA sense strand
ucagauauauacagauggu

SEQ ID NO: 246058 - RNA, 19 nt, Homo sapiens
  misc_RNA (1)...(19): siRNA sense strand
ggacggagugacuaugaug

SEQ ID NO: 246059 - RNA, 19 nt, Homo sapiens
  misc_RNA (1)...(19): siRNA sense strand
ggaacagagaagcaucuaa

SEQ ID NO: 246060 - RNA, 19 nt, Homo sapiens
  misc_RNA (1)...(19): siRNA sense strand
uuuguuggaucuucuugua

SEQ ID NO: 246061 - RNA, 19 nt, Homo sapiens
  misc_RNA (1)...(19): siRNA sense strand
cuugccaccucauucuuua

SEQ ID NO: 246062 - RNA, 19 nt, Homo sapiens
  misc_RNA (1)...(19): siRNA sense strand
aagauacuaugccaccaaa

SEQ ID NO: 246063 - RNA, 19 nt, Homo sapiens
  misc_RNA (1)...(19): siRNA sense strand
ggaaagauuggauuagacu

SEQ ID NO: 246064 - RNA, 19 nt, Homo sapiens
  misc_RNA (1)...(19): siRNA sense strand
caggacgucuaguggauau

SEQ ID NO: 246065 - RNA, 19 nt, Homo sapiens
  misc_RNA (1)...(19): siRNA sense strand
gagaauuggcuguacagau

SEQ ID NO: 246066 - RNA, 19 nt, Homo sapiens
  misc_RNA (1)...(19): siRNA sense strand
gaacguggaaguggaucaa

SEQ ID NO: 246067 - RNA, 19 nt, Homo sapiens
  misc_RNA (1)...(19): siRNA sense strand
gaaggauaugcuuguacua

SEQ ID NO: 246068 - RNA, 19 nt, Homo sapiens
  misc_RNA (1)...(19): siRNA sense strand
ugaaggauaugcuuguacu

SEQ ID NO: 246069 - RNA, 19 nt, Homo sapiens
  misc_RNA (1)...(19): siRNA sense strand
cuuauaccaugaaggauau

SEQ ID NO: 246070 - RNA, 19 nt, Homo sapiens
  misc_RNA (1)...(19): siRNA sense strand
agagaagcaucuaaaggau

SEQ ID NO: 246071 - RNA, 19 nt, Homo sapiens
  misc_RNA (1)...(19): siRNA sense strand
aagaggaaagauuggauua

SEQ ID NO: 246072 - RNA, 19 nt, Homo sapiens
  misc_RNA (1)...(19): siRNA sense strand
gcagauucgggacuuagaa

SEQ ID NO: 246073 - RNA, 19 nt, Homo sapiens
  misc_RNA (1)...(19): siRNA sense strand
caugccauuccuauuauua

SEQ ID NO: 246074 - RNA, 19 nt, Homo sapiens
  misc_RNA (1)...(19): siRNA sense strand
cauagucguuggugugaca

SEQ ID NO: 246075 - RNA, 19 nt, Homo sapiens
  misc_RNA (1)...(19): siRNA sense strand
ccuggaggauuucuuauac

SEQ ID NO: 246076 - RNA, 19 nt, Homo sapiens
  misc_RNA (1)...(19): siRNA sense strand
ugggaaaacugcagcauuu

SEQ ID NO: 246077 - RNA, 19 nt, Homo sapiens
  misc_RNA (1)...(19): siRNA sense strand
uugcuaaucuggaccugaa

SEQ ID NO: 246078 - RNA, 19 nt, Homo sapiens
  misc_RNA (1)...(19): siRNA sense strand
caaagauaaggaugcauau

SEQ ID NO: 246079 - RNA, 19 nt, Homo sapiens
  misc_RNA (1)...(19): siRNA sense strand
gauaugcuuguacuaguau

SEQ ID NO: 246080 - RNA, 19 nt, Homo sapiens
  misc_RNA (1)...(19): siRNA sense strand
uuagauaaacggucauuuc

SEQ ID NO: 246081 - RNA, 19 nt, Homo sapiens
  misc_RNA (1)...(19): siRNA sense strand
cagcaaagauaaggaugca

SEQ ID NO: 246082 - RNA, 19 nt, Homo sapiens
  misc_RNA (1)...(19): siRNA sense strand
ugaggaagccagaaaauuu

SEQ ID NO: 246083 - RNA, 19 nt, Homo sapiens
  misc_RNA (1)...(19): siRNA sense strand
gcaaagggcgcuauauacc

SEQ ID NO: 246084 - RNA, 19 nt, Homo sapiens
  misc_RNA (1)...(19): siRNA sense strand
ccacgaaggccacugcaaa

SEQ ID NO: 246085 - RNA, 19 nt, Homo sapiens
  misc_RNA (1)...(19): siRNA sense strand
cgagugggacugcaugugu

SEQ ID NO: 246086 - RNA, 19 nt, Homo sapiens
  misc_RNA (1)...(19): siRNA sense strand
caggggaaauucaguuuug

SEQ ID NO: 246087 - RNA, 19 nt, Homo sapiens
  misc_RNA (1)...(19): siRNA sense strand
ccacgaaggccacugcaaa

SEQ ID NO: 246088 - RNA, 19 nt, Homo sapiens
  misc_RNA (1)...(19): siRNA sense strand
ggagagagagacacaguca

SEQ ID NO: 246089 - RNA, 19 nt, Homo sapiens
  misc_RNA (1)...(19): siRNA sense strand
agagagagacacagucaug

SEQ ID NO: 246090 - RNA, 19 nt, Homo sapiens
  misc_RNA (1)...(19): siRNA sense strand
ggagggagagagagacaca

SEQ ID NO: 246091 - RNA, 19 nt, Homo sapiens
  misc_RNA (1)...(19): siRNA sense strand
cgagugggacugcaugugu

SEQ ID NO: 246092 - RNA, 19 nt, Homo sapiens
  misc_RNA (1)...(19): siRNA sense strand
caggggaaauucaguuuug

SEQ ID NO: 246093 - RNA, 19 nt, Homo sapiens
  misc_RNA (1)...(19): siRNA sense strand
gcagaagugggugcaggaa

SEQ ID NO: 246094 - RNA, 19 nt, Homo sapiens
  misc_RNA (1)...(19): siRNA sense strand
ccacgaaggccacugcaaa

SEQ ID NO: 246095 - RNA, 19 nt, Homo sapiens
  misc_RNA (1)...(19): siRNA sense strand
cgagugggacugcaugugu

SEQ ID NO: 246096 - RNA, 19 nt, Homo sapiens
  misc_RNA (1)...(19): siRNA sense strand
caggggaaauucaguuuug

SEQ ID NO: 246097 - RNA, 19 nt, Homo sapiens
  misc_RNA (1)...(19): siRNA sense strand
gcacaagcaagaauaauaa

SEQ ID NO: 246098 - RNA, 19 nt, Homo sapiens
  misc_RNA (1)...(19): siRNA sense strand
gaucucugcugucauuuaa

SEQ ID NO: 246099 - RNA, 19 nt, Homo sapiens
  misc_RNA (1)...(19): siRNA sense strand
gcaggaaauuauacaguuu

SEQ ID NO: 246100 - RNA, 19 nt, Homo sapiens
  misc_RNA (1)...(19): siRNA sense strand
gaacauaccaaaugaagug

SEQ ID NO: 246101 - RNA, 19 nt, Homo sapiens
  misc_RNA (1)...(19): siRNA sense strand
aaagaucucugcugucauu

SEQ ID NO: 246102 - RNA, 19 nt, Homo sapiens
  misc_RNA (1)...(19): siRNA sense strand
gaucagggugcgcauauua

SEQ ID NO: 246103 - RNA, 19 nt, Homo sapiens
  misc_RNA (1)...(19): siRNA sense strand
ugaggaggcuuuggcauua

SEQ ID NO: 246104 - RNA, 19 nt, Homo sapiens
  misc_RNA (1)...(19): siRNA sense strand
gaagggcgcuauuaucuac

SEQ ID NO: 246105 - RNA, 19 nt, Homo sapiens
  misc_RNA (1)...(19): siRNA sense strand
gauauacucuuccaugauc

SEQ ID NO: 246106 - RNA, 19 nt, Homo sapiens
  misc_RNA (1)...(19): siRNA sense strand
caacacugaugugguauuu

SEQ ID NO: 246107 - RNA, 19 nt, Homo sapiens
  misc_RNA (1)...(19): siRNA sense strand
gaagcgcucucaucaggaa

SEQ ID NO: 246108 - RNA, 19 nt, Homo sapiens
  misc_RNA (1)...(19): siRNA sense strand
auacaacacugauguggua

SEQ ID NO: 246109 - RNA, 19 nt, Homo sapiens
  misc_RNA (1)...(19): siRNA sense strand
acacugaugugguauuuga

SEQ ID NO: 246110 - RNA, 19 nt, Homo sapiens
  misc_RNA (1)...(19): siRNA sense strand
gcuugcaccuggagaauuu

SEQ ID NO: 246111 - RNA, 19 nt, Homo sapiens
  misc_RNA (1)...(19): siRNA sense strand
gacaggaaguggcaucuau

SEQ ID NO: 246112 - RNA, 19 nt, Homo sapiens
  misc_RNA (1)...(19): siRNA sense strand
cuacucaguugccagcuua

SEQ ID NO: 246113 - RNA, 19 nt, Homo sapiens
  misc_RNA (1)...(19): siRNA sense strand
cgacuaauuuaaacacuug

SEQ ID NO: 246114 - RNA, 19 nt, Homo sapiens
  misc_RNA (1)...(19): siRNA sense strand
gggacucucucuacccaua

SEQ ID NO: 246115 - RNA, 19 nt, Homo sapiens
  misc_RNA (1)...(19): siRNA sense strand
gacaagaagccaugcgaua

SEQ ID NO: 246116 - RNA, 19 nt, Homo sapiens
  misc_RNA (1)...(19): siRNA sense strand
ggaaggagcgaucacauca

SEQ ID NO: 246117 - RNA, 19 nt, Homo sapiens
  misc_RNA (1)...(19): siRNA sense strand
ccuauuguaugcucauuaa

SEQ ID NO: 246118 - RNA, 19 nt, Homo sapiens
  misc_RNA (1)...(19): siRNA sense strand
agaaagaucucugcuguca

SEQ ID NO: 246119 - RNA, 19 nt, Homo sapiens
  misc_RNA (1)...(19): siRNA sense strand
ccaaggagccugagauugu

SEQ ID NO: 246120 - RNA, 19 nt, Homo sapiens
  misc_RNA (1)...(19): siRNA sense strand
ucacaggaguugcaggaaa

SEQ ID NO: 246121 - RNA, 19 nt, Homo sapiens
  misc_RNA (1)...(19): siRNA sense strand
ggaguugcaggaaauuaua

SEQ ID NO: 246122 - RNA, 19 nt, Homo sapiens
  misc_RNA (1)...(19): siRNA sense strand
caagaacaacucuaucuau

SEQ ID NO: 246123 - RNA, 19 nt, Homo sapiens
  misc_RNA (1)...(19): siRNA sense strand
ggacgcuuguuuagucuga

SEQ ID NO: 246124 - RNA, 19 nt, Homo sapiens
  misc_RNA (1)...(19): siRNA sense strand
ucaagagcauuucauuaug

SEQ ID NO: 246125 - RNA, 19 nt, Homo sapiens
  misc_RNA (1)...(19): siRNA sense strand
gagaaggacugggcaucaa

SEQ ID NO: 246126 - RNA, 19 nt, Homo sapiens
  misc_RNA (1)...(19): siRNA sense strand
ggaagggcgcuauuaucua

SEQ ID NO: 246127 - RNA, 19 nt, Homo sapiens
  misc_RNA (1)...(19): siRNA sense strand
aagaacaacucuaucuaug

SEQ ID NO: 246128 - RNA, 19 nt, Homo sapiens
  misc_RNA (1)...(19): siRNA sense strand
gacggacgcuuguuuaguc

SEQ ID NO: 246129 - RNA, 19 nt, Homo sapiens
  misc_RNA (1)...(19): siRNA sense strand
gaggaggcuuuggcauuaa

SEQ ID NO: 246130 - RNA, 19 nt, Homo sapiens
  misc_RNA (1)...(19): siRNA sense strand
uccagaagaugcuauuuau

SEQ ID NO: 246131 - RNA, 19 nt, Homo sapiens
  misc_RNA (1)...(19): siRNA sense strand
ggacaucccagacccugaa

SEQ ID NO: 246132 - RNA, 19 nt, Homo sapiens
  misc_RNA (1)...(19): siRNA sense strand
caggaaacaaggaauuuaa

SEQ ID NO: 246133 - RNA, 19 nt, Homo sapiens
  misc_RNA (1)...(19): siRNA sense strand
ccacguggacaccauagua

SEQ ID NO: 246134 - RNA, 19 nt, Homo sapiens
  misc_RNA (1)...(19): siRNA sense strand
agccugagauugugacuuu

SEQ ID NO: 246135 - RNA, 19 nt, Homo sapiens
  misc_RNA (1)...(19): siRNA sense strand
caacagggacucucucuac

SEQ ID NO: 246136 - RNA, 19 nt, Homo sapiens
  misc_RNA (1)...(19): siRNA sense strand
gaaacaaggaauuuaaagg

SEQ ID NO: 246137 - RNA, 19 nt, Homo sapiens
  misc_RNA (1)...(19): siRNA sense strand
ccacucagcuugggcuaug

SEQ ID NO: 246138 - RNA, 19 nt, Homo sapiens
  misc_RNA (1)...(19): siRNA sense strand
cagaagaugcuauuuaugg

SEQ ID NO: 246139 - RNA, 19 nt, Homo sapiens
  misc_RNA (1)...(19): siRNA sense strand
guacccuguugaaauguaa

SEQ ID NO: 246140 - RNA, 19 nt, Homo sapiens
  misc_RNA (1)...(19): siRNA sense strand
ucaauuuccuugcauccaa

SEQ ID NO: 246141 - RNA, 19 nt, Homo sapiens
  misc_RNA (1)...(19): siRNA sense strand
ccaagaacaacucuaucua

SEQ ID NO: 246142 - RNA, 19 nt, Homo sapiens
  misc_RNA (1)...(19): siRNA sense strand
cugagaacauaccaaauga

SEQ ID NO: 246143 - RNA, 19 nt, Homo sapiens
  misc_RNA (1)...(19): siRNA sense strand
ggaaacaaggaauuuaaag

SEQ ID NO: 246144 - RNA, 19 nt, Homo sapiens
  misc_RNA (1)...(19): siRNA sense strand
uuaccuuggugaaagauuu

SEQ ID NO: 246145 - RNA, 19 nt, Homo sapiens
  misc_RNA (1)...(19): siRNA sense strand
gaaucggaaucuggacauu

SEQ ID NO: 246146 - RNA, 19 nt, Homo sapiens
  misc_RNA (1)...(19): siRNA sense strand
gagaacauaccaaaugaag

SEQ ID NO: 246147 - RNA, 19 nt, Homo sapiens
  misc_RNA (1)...(19): siRNA sense strand
ccacauuugucagcuguug

SEQ ID NO: 246148 - RNA, 19 nt, Homo sapiens
  misc_RNA (1)...(19): siRNA sense strand
ccaggacacuuucauugca

SEQ ID NO: 246149 - RNA, 19 nt, Homo sapiens
  misc_RNA (1)...(19): siRNA sense strand
uauagaagcgcucucauca

SEQ ID NO: 246150 - RNA, 19 nt, Homo sapiens
  misc_RNA (1)...(19): siRNA sense strand
uuugucagcuguugaauuc

SEQ ID NO: 246151 - RNA, 19 nt, Homo sapiens
  misc_RNA (1)...(19): siRNA sense strand
uaaacuggauccccuguaa

SEQ ID NO: 246152 - RNA, 19 nt, Homo sapiens
  misc_RNA (1)...(19): siRNA sense strand
caaggagccugagauugug

SEQ ID NO: 246153 - RNA, 19 nt, Homo sapiens
  misc_RNA (1)...(19): siRNA sense strand
ucagcugccuggccaagaa

SEQ ID NO: 246154 - RNA, 19 nt, Homo sapiens
  misc_RNA (1)...(19): siRNA sense strand
gaucacaucagcagcagau

SEQ ID NO: 246155 - RNA, 19 nt, Homo sapiens
  misc_RNA (1)...(19): siRNA sense strand
cacaggaguugcaggaaau

SEQ ID NO: 246156 - RNA, 19 nt, Homo sapiens
  misc_RNA (1)...(19): siRNA sense strand
ucaggaaacaaggaauuua

SEQ ID NO: 246157 - RNA, 19 nt, Homo sapiens
  misc_RNA (1)...(19): siRNA sense strand
caacagcuuggaugaaugu

SEQ ID NO: 246158 - RNA, 19 nt, Homo sapiens
  misc_RNA (1)...(19): siRNA sense strand
gcuguuaccuuggugaaag

SEQ ID NO: 246159 - RNA, 19 nt, Homo sapiens
  misc_RNA (1)...(19): siRNA sense strand
cagcuuacguggcaauuuu

SEQ ID NO: 246160 - RNA, 19 nt, Homo sapiens
  misc_RNA (1)...(19): siRNA sense strand
caucccagacccugaagua

SEQ ID NO: 246161 - RNA, 19 nt, Homo sapiens
  misc_RNA (1)...(19): siRNA sense strand
gaaggacugggcaucaaau

SEQ ID NO: 246162 - RNA, 19 nt, Homo sapiens
  misc_RNA (1)...(19): siRNA sense strand
cuaccagguuugaaauguu

SEQ ID NO: 246163 - RNA, 19 nt, Homo sapiens
  misc_RNA (1)...(19): siRNA sense strand
ugcaggaaauuauacaguu

SEQ ID NO: 246164 - RNA, 19 nt, Homo sapiens
  misc_RNA (1)...(19): siRNA sense strand
gugaggaggcuuuggcauu

SEQ ID NO: 246165 - RNA, 19 nt, Homo sapiens
  misc_RNA (1)...(19): siRNA sense strand
cuucaagagcauuucauua

SEQ ID NO: 246166 - RNA, 19 nt, Homo sapiens
  misc_RNA (1)...(19): siRNA sense strand
gagggucaauuuccuugca

SEQ ID NO: 246167 - RNA, 19 nt, Homo sapiens
  misc_RNA (1)...(19): siRNA sense strand
gaauuuaaaggcacugucu

SEQ ID NO: 246168 - RNA, 19 nt, Homo sapiens
  misc_RNA (1)...(19): siRNA sense strand
caucaggaaacaaggaauu

SEQ ID NO: 246169 - RNA, 19 nt, Homo sapiens
  misc_RNA (1)...(19): siRNA sense strand
ucuauguuguggcaaauau

SEQ ID NO: 246170 - RNA, 19 nt, Homo sapiens
  misc_RNA (1)...(19): siRNA sense strand
cagcuuggaugaauguuuu

SEQ ID NO: 246171 - RNA, 19 nt, Homo sapiens
  misc_RNA (1)...(19): siRNA sense strand
ucacaugcuuugauauacu

SEQ ID NO: 246172 - RNA, 19 nt, Homo sapiens
  misc_RNA (1)...(19): siRNA sense strand
cuccagaagaugcuauuua

SEQ ID NO: 246173 - RNA, 19 nt, Homo sapiens
  misc_RNA (1)...(19): siRNA sense strand
caagcaagaauaauaaugc

SEQ ID NO: 246174 - RNA, 19 nt, Homo sapiens
  misc_RNA (1)...(19): siRNA sense strand
ccucacagcacaagcaaga

SEQ ID NO: 246175 - RNA, 19 nt, Homo sapiens
  misc_RNA (1)...(19): siRNA sense strand
ucugagaacauaccaaaug

SEQ ID NO: 246176 - RNA, 19 nt, Homo sapiens
  misc_RNA (1)...(19): siRNA sense strand
uugauauacucuuccauga

SEQ ID NO: 246177 - RNA, 19 nt, Homo sapiens
  misc_RNA (1)...(19): siRNA sense strand
gacuuucaauaccaccuuu

SEQ ID NO: 246178 - RNA, 19 nt, Homo sapiens
  misc_RNA (1)...(19): siRNA sense strand
gcagaucagggugcgcaua

SEQ ID NO: 246179 - RNA, 19 nt, Homo sapiens
  misc_RNA (1)...(19): siRNA sense strand
uuugggagguuguaugaga

SEQ ID NO: 246180 - RNA, 19 nt, Homo sapiens
  misc_RNA (1)...(19): siRNA sense strand
uuuguacccuguugaaaug

SEQ ID NO: 246181 - RNA, 19 nt, Homo sapiens
  misc_RNA (1)...(19): siRNA sense strand
uauugugacuccagaagau

SEQ ID NO: 246182 - RNA, 19 nt, Homo sapiens
  misc_RNA (1)...(19): siRNA sense strand
cauugcagcuguuuaugag

SEQ ID NO: 246183 - RNA, 19 nt, Homo sapiens
  misc_RNA (1)...(19): siRNA sense strand
uuaugagcaugcagcgaua

SEQ ID NO: 246184 - RNA, 19 nt, Homo sapiens
  misc_RNA (1)...(19): siRNA sense strand
uaccagguuugaaauguuc

SEQ ID NO: 246185 - RNA, 19 nt, Homo sapiens
  misc_RNA (1)...(19): siRNA sense strand
aaacagcuucuaccagguu

SEQ ID NO: 246186 - RNA, 19 nt, Homo sapiens
  misc_RNA (1)...(19): siRNA sense strand
gcuuuggcauuaaugaauc

SEQ ID NO: 246187 - RNA, 19 nt, Homo sapiens
  misc_RNA (1)...(19): siRNA sense strand
guauagaagcgcucucauc

SEQ ID NO: 246188 - RNA, 19 nt, Homo sapiens
  misc_RNA (1)...(19): siRNA sense strand
cuaucuauguuguggcaaa

SEQ ID NO: 246189 - RNA, 19 nt, Homo sapiens
  misc_RNA (1)...(19): siRNA sense strand
uugcauccaacauacauua

SEQ ID NO: 246190 - RNA, 19 nt, Homo sapiens
  misc_RNA (1)...(19): siRNA sense strand
gacucucucuacccauauu

SEQ ID NO: 246191 - RNA, 19 nt, Homo sapiens
  misc_RNA (1)...(19): siRNA sense strand
cauaccaaaugaaguguac

SEQ ID NO: 246192 - RNA, 19 nt, Homo sapiens
  misc_RNA (1)...(19): siRNA sense strand
aauaccaccuuuggaaguu

SEQ ID NO: 246193 - RNA, 19 nt, Homo sapiens
  misc_RNA (1)...(19): siRNA sense strand
gcacgcuaccauaagcaaa

SEQ ID NO: 246194 - RNA, 19 nt, Homo sapiens
  misc_RNA (1)...(19): siRNA sense strand
ucccagacccugaaguaaa

SEQ ID NO: 246195 - RNA, 19 nt, Homo sapiens
  misc_RNA (1)...(19): siRNA sense strand
uaccagugauccucagugu

SEQ ID NO: 246196 - RNA, 19 nt, Homo sapiens
  misc_RNA (1)...(19): siRNA sense strand
gccaagaacaacucuaucu

SEQ ID NO: 246197 - RNA, 19 nt, Homo sapiens
  misc_RNA (1)...(19): siRNA sense strand
uggagaagaugcaguauua

SEQ ID NO: 246198 - RNA, 19 nt, Homo sapiens
  misc_RNA (1)...(19): siRNA sense strand
caggaacucugcaguauau

SEQ ID NO: 246199 - RNA, 19 nt, Homo sapiens
  misc_RNA (1)...(19): siRNA sense strand
ccaaagagcuccggcuaau

SEQ ID NO: 246200 - RNA, 19 nt, Homo sapiens
  misc_RNA (1)...(19): siRNA sense strand
gcagggacuuggcuacuug

SEQ ID NO: 246201 - RNA, 19 nt, Homo sapiens
  misc_RNA (1)...(19): siRNA sense strand
gcagaaaccauguggaaga

SEQ ID NO: 246202 - RNA, 19 nt, Homo sapiens
  misc_RNA (1)...(19): siRNA sense strand
ucacugggcugcacuguca

SEQ ID NO: 246203 - RNA, 19 nt, Homo sapiens
  misc_RNA (1)...(19): siRNA sense strand
ggacuacucggccaucauu

SEQ ID NO: 246204 - RNA, 19 nt, Homo sapiens
  misc_RNA (1)...(19): siRNA sense strand
ccgaagcgcugccucaguu

SEQ ID NO: 246205 - RNA, 19 nt, Homo sapiens
  misc_RNA (1)...(19): siRNA sense strand
ggaguuugauuaugaguac

SEQ ID NO: 246206 - RNA, 19 nt, Homo sapiens
  misc_RNA (1)...(19): siRNA sense strand
gggcagcacuuugaggauu

SEQ ID NO: 246207 - RNA, 19 nt, Homo sapiens
  misc_RNA (1)...(19): siRNA sense strand
gcucaagauuucugacuuc

SEQ ID NO: 246208 - RNA, 19 nt, Homo sapiens
  misc_RNA (1)...(19): siRNA sense strand
ucagugggcugcucaagau

SEQ ID NO: 246209 - RNA, 19 nt, Homo sapiens
  misc_RNA (1)...(19): siRNA sense strand
ugaacuugcugcucuccua

SEQ ID NO: 246210 - RNA, 19 nt, Homo sapiens
  misc_RNA (1)...(19): siRNA sense strand
gggcagaaaccauguggaa

SEQ ID NO: 246211 - RNA, 19 nt, Homo sapiens
  misc_RNA (1)...(19): siRNA sense strand
guuggcagcuacacacuga

SEQ ID NO: 246212 - RNA, 19 nt, Homo sapiens
  misc_RNA (1)...(19): siRNA sense strand
ucacaggaacucugcagua

SEQ ID NO: 246213 - RNA, 19 nt, Homo sapiens
  misc_RNA (1)...(19): siRNA sense strand
gggagauguuggaguuuga

SEQ ID NO: 246214 - RNA, 19 nt, Homo sapiens
  misc_RNA (1)...(19): siRNA sense strand
gcggcuaccuuaagaucuu

SEQ ID NO: 246215 - RNA, 19 nt, Homo sapiens
  misc_RNA (1)...(19): siRNA sense strand
gcaggccuaucacugguau

SEQ ID NO: 246216 - RNA, 19 nt, Homo sapiens
  misc_RNA (1)...(19): siRNA sense strand
acugagaccuucacaggaa

SEQ ID NO: 246217 - RNA, 19 nt, Homo sapiens
  misc_RNA (1)...(19): siRNA sense strand
aaagagcuccggcuaauag

SEQ ID NO: 246218 - RNA, 19 nt, Homo sapiens
  misc_RNA (1)...(19): siRNA sense strand
cacaggaacucugcaguau

SEQ ID NO: 246219 - RNA, 19 nt, Homo sapiens
  misc_RNA (1)...(19): siRNA sense strand
gggacaaugugcugaucaa

SEQ ID NO: 246220 - RNA, 19 nt, Homo sapiens
  misc_RNA (1)...(19): siRNA sense strand
uguuggaguuugauuauga

SEQ ID NO: 246221 - RNA, 19 nt, Homo sapiens
  misc_RNA (1)...(19): siRNA sense strand
gauguuggaguuugauuau

SEQ ID NO: 246222 - RNA, 19 nt, Homo sapiens
  misc_RNA (1)...(19): siRNA sense strand
caaagagcuccggcuaaua

SEQ ID NO: 246223 - RNA, 19 nt, Homo sapiens
  misc_RNA (1)...(19): siRNA sense strand
cccacaggcugccauguuu

SEQ ID NO: 246224 - RNA, 19 nt, Homo sapiens
  misc_RNA (1)...(19): siRNA sense strand
ggaaagcagcugacaucug

SEQ ID NO: 246225 - RNA, 19 nt, Homo sapiens
  misc_RNA (1)...(19): siRNA sense strand
gggcugcacugucauugag

SEQ ID NO: 246226 - RNA, 19 nt, Homo sapiens
  misc_RNA (1)...(19): siRNA sense strand
ucgcaaggcuuuugacgua

SEQ ID NO: 246227 - RNA, 19 nt, Homo sapiens
  misc_RNA (1)...(19): siRNA sense strand
gcaaaggcugcguggagaa

SEQ ID NO: 246228 - RNA, 19 nt, Homo sapiens
  misc_RNA (1)...(19): siRNA sense strand
caagguccauccgccaaug

SEQ ID NO: 246229 - RNA, 19 nt, Homo sapiens
  misc_RNA (1)...(19): siRNA sense strand
caugcuggccgcaguauug

SEQ ID NO: 246230 - RNA, 19 nt, Homo sapiens
  misc_RNA (1)...(19): siRNA sense strand
gcagcugugcuccucauug

SEQ ID NO: 246231 - RNA, 19 nt, Homo sapiens
  misc_RNA (1)...(19): siRNA sense strand
gaagcgcugccucaguuau

SEQ ID NO: 246232 - RNA, 19 nt, Homo sapiens
  misc_RNA (1)...(19): siRNA sense strand
gacaaugugcugaucaaca

SEQ ID NO: 246233 - RNA, 19 nt, Homo sapiens
  misc_RNA (1)...(19): siRNA sense strand
cccagauccucgccaauga

SEQ ID NO: 246234 - RNA, 19 nt, Homo sapiens
  misc_RNA (1)...(19): siRNA sense strand
gcguggagaagaugcagua

SEQ ID NO: 246235 - RNA, 19 nt, Homo sapiens
  misc_RNA (1)...(19): siRNA sense strand
gggaggauguuuuccagaa

SEQ ID NO: 246236 - RNA, 19 nt, Homo sapiens
  misc_RNA (1)...(19): siRNA sense strand
gauguggccgagcagcaua

SEQ ID NO: 246237 - RNA, 19 nt, Homo sapiens
  misc_RNA (1)...(19): siRNA sense strand
cuacaguccugccaaccau

SEQ ID NO: 246238 - RNA, 19 nt, Homo sapiens
  misc_RNA (1)...(19): siRNA sense strand
gcagagcagcuguauaagc

SEQ ID NO: 246239 - RNA, 19 nt, Homo sapiens
  misc_RNA (1)...(19): siRNA sense strand
acaaggacauguucuucag

SEQ ID NO: 246240 - RNA, 19 nt, Homo sapiens
  misc_RNA (1)...(19): siRNA sense strand
cagcugugcuccucauugc

SEQ ID NO: 246241 - RNA, 19 nt, Homo sapiens
  misc_RNA (1)...(19): siRNA sense strand
caacucaaccacccagucu

SEQ ID NO: 246242 - RNA, 19 nt, Homo sapiens
  misc_RNA (1)...(19): siRNA sense strand
gcccacaggcugccauguu

SEQ ID NO: 246243 - RNA, 19 nt, Homo sapiens
  misc_RNA (1)...(19): siRNA sense strand
gagagcaccaucaguuucu

SEQ ID NO: 246244 - RNA, 19 nt, Homo sapiens
  misc_RNA (1)...(19): siRNA sense strand
gcgcugcugcuuccucuau

SEQ ID NO: 246245 - RNA, 19 nt, Homo sapiens
  misc_RNA (1)...(19): siRNA sense strand
ggcagcacuuugaggauuc

SEQ ID NO: 246246 - RNA, 19 nt, Homo sapiens
  misc_RNA (1)...(19): siRNA sense strand
gcccagauccucgccaaug

SEQ ID NO: 246247 - RNA, 19 nt, Homo sapiens
  misc_RNA (1)...(19): siRNA sense strand
cagaaaccauguggaagag

SEQ ID NO: 246248 - RNA, 19 nt, Homo sapiens
  misc_RNA (1)...(19): siRNA sense strand
ccaaugcccagcucucugu

SEQ ID NO: 246249 - RNA, 19 nt, Homo sapiens
  misc_RNA (1)...(19): siRNA sense strand
acaggaacucugcaguaua

SEQ ID NO: 246250 - RNA, 19 nt, Homo sapiens
  misc_RNA (1)...(19): siRNA sense strand
acaaugugcugaucaacac

SEQ ID NO: 246251 - RNA, 19 nt, Homo sapiens
  misc_RNA (1)...(19): siRNA sense strand
gcaucgccaucaaggagau

SEQ ID NO: 246252 - RNA, 19 nt, Homo sapiens
  misc_RNA (1)...(19): siRNA sense strand
ggagucagcgccucaaagc

SEQ ID NO: 246253 - RNA, 19 nt, Homo sapiens
  misc_RNA (1)...(19): siRNA sense strand
cagcucggguuuccaggau

SEQ ID NO: 246254 - RNA, 19 nt, Homo sapiens
  misc_RNA (1)...(19): siRNA sense strand
ggaacucugcaguauaugg

SEQ ID NO: 246255 - RNA, 19 nt, Homo sapiens
  misc_RNA (1)...(19): siRNA sense strand
cgagagcaccaucaguuuc

SEQ ID NO: 246256 - RNA, 19 nt, Homo sapiens
  misc_RNA (1)...(19): siRNA sense strand
cgaagcgcugccucaguua

SEQ ID NO: 246257 - RNA, 19 nt, Homo sapiens
  misc_RNA (1)...(19): siRNA sense strand
gugggcugcucaagauuuc

SEQ ID NO: 246258 - RNA, 19 nt, Homo sapiens
  misc_RNA (1)...(19): siRNA sense strand
agauguuggaguuugauua

SEQ ID NO: 246259 - RNA, 19 nt, Homo sapiens
  misc_RNA (1)...(19): siRNA sense strand
gcaaggcuuuugacguaga

SEQ ID NO: 246260 - RNA, 19 nt, Homo sapiens
  misc_RNA (1)...(19): siRNA sense strand
gaggauguuuuccagaaga

SEQ ID NO: 246261 - RNA, 19 nt, Homo sapiens
  misc_RNA (1)...(19): siRNA sense strand
gcaucacaccuugcacuga

SEQ ID NO: 246262 - RNA, 19 nt, Homo sapiens
  misc_RNA (1)...(19): siRNA sense strand
ccacacccacagacucuug

SEQ ID NO: 246263 - RNA, 19 nt, Homo sapiens
  misc_RNA (1)...(19): siRNA sense strand
uuacugggauguggguuuc

SEQ ID NO: 246264 - RNA, 19 nt, Homo sapiens
  misc_RNA (1)...(19): siRNA sense strand
guggagaagaugcaguauu

SEQ ID NO: 246265 - RNA, 19 nt, Homo sapiens
  misc_RNA (1)...(19): siRNA sense strand
aacgagagcaccaucaguu

SEQ ID NO: 246266 - RNA, 19 nt, Homo sapiens
  misc_RNA (1)...(19): siRNA sense strand
gcugcacugucauugagau

SEQ ID NO: 246267 - RNA, 19 nt, Homo sapiens
  misc_RNA (1)...(19): siRNA sense strand
gcaggcaucacaccuugca

SEQ ID NO: 246268 - RNA, 19 nt, Homo sapiens
  misc_RNA (1)...(19): siRNA sense strand
gagauguuggaguuugauu

SEQ ID NO: 246269 - RNA, 19 nt, Homo sapiens
  misc_RNA (1)...(19): siRNA sense strand
uggccgagcagcauaaugu

SEQ ID NO: 246270 - RNA, 19 nt, Homo sapiens
  misc_RNA (1)...(19): siRNA sense strand
agacucuuguggcuauuuc

SEQ ID NO: 246271 - RNA, 19 nt, Homo sapiens
  misc_RNA (1)...(19): siRNA sense strand
ugggaaagcagcugacauc

SEQ ID NO: 246272 - RNA, 19 nt, Homo sapiens
  misc_RNA (1)...(19): siRNA sense strand
ccacuucuggcuccacuuc

SEQ ID NO: 246273 - RNA, 19 nt, Homo sapiens
  misc_RNA (1)...(19): siRNA sense strand
cuacaaggacauguucuuc

SEQ ID NO: 246274 - RNA, 19 nt, Homo sapiens
  misc_RNA (1)...(19): siRNA sense strand
cggauugcguuggcagcua

SEQ ID NO: 246275 - RNA, 19 nt, Homo sapiens
  misc_RNA (1)...(19): siRNA sense strand
caacgagagcaccaucagu

SEQ ID NO: 246276 - RNA, 19 nt, Homo sapiens
  misc_RNA (1)...(19): siRNA sense strand
gcacguaugggguggugua

SEQ ID NO: 246277 - RNA, 19 nt, Homo sapiens
  misc_RNA (1)...(19): siRNA sense strand
gugcugguccuggagauga

SEQ ID NO: 246278 - RNA, 19 nt, Homo sapiens
  misc_RNA (1)...(19): siRNA sense strand
uguuucagguggguaugua

SEQ ID NO: 246279 - RNA, 19 nt, Homo sapiens
  misc_RNA (1)...(19): siRNA sense strand
guauauggccccagaaauc

SEQ ID NO: 246280 - RNA, 19 nt, Homo sapiens
  misc_RNA (1)...(19): siRNA sense strand
uggagaagaugcaguauua

SEQ ID NO: 246281 - RNA, 19 nt, Homo sapiens
  misc_RNA (1)...(19): siRNA sense strand
ggacaaaggcagcuucuga

SEQ ID NO: 246282 - RNA, 19 nt, Homo sapiens
  misc_RNA (1)...(19): siRNA sense strand
caggaacucugcaguauau

SEQ ID NO: 246283 - RNA, 19 nt, Homo sapiens
  misc_RNA (1)...(19): siRNA sense strand
ccaaagagcuccggcuaau

SEQ ID NO: 246284 - RNA, 19 nt, Homo sapiens
  misc_RNA (1)...(19): siRNA sense strand
gcagggacuuggcuacuug

SEQ ID NO: 246285 - RNA, 19 nt, Homo sapiens
  misc_RNA (1)...(19): siRNA sense strand
gcagaaaccauguggaaga

SEQ ID NO: 246286 - RNA, 19 nt, Homo sapiens
  misc_RNA (1)...(19): siRNA sense strand
ucacugggcugcacuguca

SEQ ID NO: 246287 - RNA, 19 nt, Homo sapiens
  misc_RNA (1)...(19): siRNA sense strand
ggacuacucggccaucauu

SEQ ID NO: 246288 - RNA, 19 nt, Homo sapiens
  misc_RNA (1)...(19): siRNA sense strand
ccgaagcgcugccucaguu

SEQ ID NO: 246289 - RNA, 19 nt, Homo sapiens
  misc_RNA (1)...(19): siRNA sense strand
ggaguuugauuaugaguac

SEQ ID NO: 246290 - RNA, 19 nt, Homo sapiens
  misc_RNA (1)...(19): siRNA sense strand
gggcagcacuuugaggauu

SEQ ID NO: 246291 - RNA, 19 nt, Homo sapiens
  misc_RNA (1)...(19): siRNA sense strand
gcucaagauuucugacuuc

SEQ ID NO: 246292 - RNA, 19 nt, Homo sapiens
  misc_RNA (1)...(19): siRNA sense strand
ucagugggcugcucaagau

SEQ ID NO: 246293 - RNA, 19 nt, Homo sapiens
  misc_RNA (1)...(19): siRNA sense strand
ugaacuugcugcucuccua

SEQ ID NO: 246294 - RNA, 19 nt, Homo sapiens
  misc_RNA (1)...(19): siRNA sense strand
gggcagaaaccauguggaa

SEQ ID NO: 246295 - RNA, 19 nt, Homo sapiens
  misc_RNA (1)...(19): siRNA sense strand
guuggcagcuacacacuga

SEQ ID NO: 246296 - RNA, 19 nt, Homo sapiens
  misc_RNA (1)...(19): siRNA sense strand
ucacaggaacucugcagua

SEQ ID NO: 246297 - RNA, 19 nt, Homo sapiens
  misc_RNA (1)...(19): siRNA sense strand
gggagauguuggaguuuga

SEQ ID NO: 246298 - RNA, 19 nt, Homo sapiens
  misc_RNA (1)...(19): siRNA sense strand
gcggcuaccuuaagaucuu

SEQ ID NO: 246299 - RNA, 19 nt, Homo sapiens
  misc_RNA (1)...(19): siRNA sense strand
gcaggccuaucacugguau

SEQ ID NO: 246300 - RNA, 19 nt, Homo sapiens
  misc_RNA (1)...(19): siRNA sense strand
acugagaccuucacaggaa

SEQ ID NO: 246301 - RNA, 19 nt, Homo sapiens
  misc_RNA (1)...(19): siRNA sense strand
aaagagcuccggcuaauag

SEQ ID NO: 246302 - RNA, 19 nt, Homo sapiens
  misc_RNA (1)...(19): siRNA sense strand
cacaggaacucugcaguau

SEQ ID NO: 246303 - RNA, 19 nt, Homo sapiens
  misc_RNA (1)...(19): siRNA sense strand
gggacaaugugcugaucaa

SEQ ID NO: 246304 - RNA, 19 nt, Homo sapiens
  misc_RNA (1)...(19): siRNA sense strand
uguuggaguuugauuauga

SEQ ID NO: 246305 - RNA, 19 nt, Homo sapiens
  misc_RNA (1)...(19): siRNA sense strand
gauguuggaguuugauuau

SEQ ID NO: 246306 - RNA, 19 nt, Homo sapiens
  misc_RNA (1)...(19): siRNA sense strand
caaagagcuccggcuaaua

SEQ ID NO: 246307 - RNA, 19 nt, Homo sapiens
  misc_RNA (1)...(19): siRNA sense strand
cccacaggcugccauguuu

SEQ ID NO: 246308 - RNA, 19 nt, Homo sapiens
  misc_RNA (1)...(19): siRNA sense strand
ggaaagcagcugacaucug

SEQ ID NO: 246309 - RNA, 19 nt, Homo sapiens
  misc_RNA (1)...(19): siRNA sense strand
gggcugcacugucauugag

SEQ ID NO: 246310 - RNA, 19 nt, Homo sapiens
  misc_RNA (1)...(19): siRNA sense strand
ucgcaaggcuuuugacgua

SEQ ID NO: 246311 - RNA, 19 nt, Homo sapiens
  misc_RNA (1)...(19): siRNA sense strand
gcaaaggcugcguggagaa

SEQ ID NO: 246312 - RNA, 19 nt, Homo sapiens
  misc_RNA (1)...(19): siRNA sense strand
caagguccauccgccaaug

SEQ ID NO: 246313 - RNA, 19 nt, Homo sapiens
  misc_RNA (1)...(19): siRNA sense strand
caugcuggccgcaguauug

SEQ ID NO: 246314 - RNA, 19 nt, Homo sapiens
  misc_RNA (1)...(19): siRNA sense strand
gcagcugugcuccucauug

SEQ ID NO: 246315 - RNA, 19 nt, Homo sapiens
  misc_RNA (1)...(19): siRNA sense strand
gaagcgcugccucaguuau

SEQ ID NO: 246316 - RNA, 19 nt, Homo sapiens
  misc_RNA (1)...(19): siRNA sense strand
gacaaugugcugaucaaca

SEQ ID NO: 246317 - RNA, 19 nt, Homo sapiens
  misc_RNA (1)...(19): siRNA sense strand
cccagauccucgccaauga

SEQ ID NO: 246318 - RNA, 19 nt, Homo sapiens
  misc_RNA (1)...(19): siRNA sense strand
gcguggagaagaugcagua

SEQ ID NO: 246319 - RNA, 19 nt, Homo sapiens
  misc_RNA (1)...(19): siRNA sense strand
gggaggauguuuuccagaa

SEQ ID NO: 246320 - RNA, 19 nt, Homo sapiens
  misc_RNA (1)...(19): siRNA sense strand
gauguggccgagcagcaua

SEQ ID NO: 246321 - RNA, 19 nt, Homo sapiens
  misc_RNA (1)...(19): siRNA sense strand
cuacaguccugccaaccau

SEQ ID NO: 246322 - RNA, 19 nt, Homo sapiens
  misc_RNA (1)...(19): siRNA sense strand
gcagagcagcuguauaagc

SEQ ID NO: 246323 - RNA, 19 nt, Homo sapiens
  misc_RNA (1)...(19): siRNA sense strand
acaaggacauguucuucag

SEQ ID NO: 246324 - RNA, 19 nt, Homo sapiens
  misc_RNA (1)...(19): siRNA sense strand
cagcugugcuccucauugc

SEQ ID NO: 246325 - RNA, 19 nt, Homo sapiens
  misc_RNA (1)...(19): siRNA sense strand
caacucaaccacccagucu

SEQ ID NO: 246326 - RNA, 19 nt, Homo sapiens
  misc_RNA (1)...(19): siRNA sense strand
gcccacaggcugccauguu

SEQ ID NO: 246327 - RNA, 19 nt, Homo sapiens
  misc_RNA (1)...(19): siRNA sense strand
gagagcaccaucaguuucu

SEQ ID NO: 246328 - RNA, 19 nt, Homo sapiens
  misc_RNA (1)...(19): siRNA sense strand
gcgcugcugcuuccucuau

SEQ ID NO: 246329 - RNA, 19 nt, Homo sapiens
  misc_RNA (1)...(19): siRNA sense strand
ggcagcacuuugaggauuc

SEQ ID NO: 246330 - RNA, 19 nt, Homo sapiens
  misc_RNA (1)...(19): siRNA sense strand
gcccagauccucgccaaug

SEQ ID NO: 246331 - RNA, 19 nt, Homo sapiens
  misc_RNA (1)...(19): siRNA sense strand
cagaaaccauguggaagag

SEQ ID NO: 246332 - RNA, 19 nt, Homo sapiens
  misc_RNA (1)...(19): siRNA sense strand
ccaaugcccagcucucugu

SEQ ID NO: 246333 - RNA, 19 nt, Homo sapiens
  misc_RNA (1)...(19): siRNA sense strand
acaggaacucugcaguaua

SEQ ID NO: 246334 - RNA, 19 nt, Homo sapiens
  misc_RNA (1)...(19): siRNA sense strand
acaaugugcugaucaacac

SEQ ID NO: 246335 - RNA, 19 nt, Homo sapiens
  misc_RNA (1)...(19): siRNA sense strand
gcaucgccaucaaggagau

SEQ ID NO: 246336 - RNA, 19 nt, Homo sapiens
  misc_RNA (1)...(19): siRNA sense strand
ggagucagcgccucaaagc

SEQ ID NO: 246337 - RNA, 19 nt, Homo sapiens
  misc_RNA (1)...(19): siRNA sense strand
cagcucggguuuccaggau

SEQ ID NO: 246338 - RNA, 19 nt, Homo sapiens
  misc_RNA (1)...(19): siRNA sense strand
ggaacucugcaguauaugg

SEQ ID NO: 246339 - RNA, 19 nt, Homo sapiens
  misc_RNA (1)...(19): siRNA sense strand
cgagagcaccaucaguuuc

SEQ ID NO: 246340 - RNA, 19 nt, Homo sapiens
  misc_RNA (1)...(19): siRNA sense strand
cgaagcgcugccucaguua

SEQ ID NO: 246341 - RNA, 19 nt, Homo sapiens
  misc_RNA (1)...(19): siRNA sense strand
gugggcugcucaagauuuc

SEQ ID NO: 246342 - RNA, 19 nt, Homo sapiens
  misc_RNA (1)...(19): siRNA sense strand
agauguuggaguuugauua

SEQ ID NO: 246343 - RNA, 19 nt, Homo sapiens
  misc_RNA (1)...(19): siRNA sense strand
gcaaggcuuuugacguaga

SEQ ID NO: 246344 - RNA, 19 nt, Homo sapiens
  misc_RNA (1)...(19): siRNA sense strand
gaugaauggagaggacaaa

SEQ ID NO: 246345 - RNA, 19 nt, Homo sapiens
  misc_RNA (1)...(19): siRNA sense strand
gcaucacaccuugcacuga

SEQ ID NO: 246346 - RNA, 19 nt, Homo sapiens
  misc_RNA (1)...(19): siRNA sense strand
uuacugggauguggguuuc

SEQ ID NO: 246347 - RNA, 19 nt, Homo sapiens
  misc_RNA (1)...(19): siRNA sense strand
gaggauguuuuccagaaga

SEQ ID NO: 246348 - RNA, 19 nt, Homo sapiens
  misc_RNA (1)...(19): siRNA sense strand
guggagaagaugcaguauu

SEQ ID NO: 246349 - RNA, 19 nt, Homo sapiens
  misc_RNA (1)...(19): siRNA sense strand
ccacacccacagacucuug

SEQ ID NO: 246350 - RNA, 19 nt, Homo sapiens
  misc_RNA (1)...(19): siRNA sense strand
aacgagagcaccaucaguu

SEQ ID NO: 246351 - RNA, 19 nt, Homo sapiens
  misc_RNA (1)...(19): siRNA sense strand
gcugcacugucauugagau

SEQ ID NO: 246352 - RNA, 19 nt, Homo sapiens
  misc_RNA (1)...(19): siRNA sense strand
gcaggcaucacaccuugca

SEQ ID NO: 246353 - RNA, 19 nt, Homo sapiens
  misc_RNA (1)...(19): siRNA sense strand
gagauguuggaguuugauu

SEQ ID NO: 246354 - RNA, 19 nt, Homo sapiens
  misc_RNA (1)...(19): siRNA sense strand
uggccgagcagcauaaugu

SEQ ID NO: 246355 - RNA, 19 nt, Homo sapiens
  misc_RNA (1)...(19): siRNA sense strand
ugggaaagcagcugacauc

SEQ ID NO: 246356 - RNA, 19 nt, Homo sapiens
  misc_RNA (1)...(19): siRNA sense strand
ccacuucuggcuccacuuc

SEQ ID NO: 246357 - RNA, 19 nt, Homo sapiens
  misc_RNA (1)...(19): siRNA sense strand
agacucuuguggcuauuuc

SEQ ID NO: 246358 - RNA, 19 nt, Homo sapiens
  misc_RNA (1)...(19): siRNA sense strand
cuacaaggacauguucuuc

SEQ ID NO: 246359 - RNA, 19 nt, Homo sapiens
  misc_RNA (1)...(19): siRNA sense strand
cggauugcguuggcagcua

SEQ ID NO: 246360 - RNA, 19 nt, Homo sapiens
  misc_RNA (1)...(19): siRNA sense strand
caacgagagcaccaucagu

SEQ ID NO: 246361 - RNA, 19 nt, Homo sapiens
  misc_RNA (1)...(19): siRNA sense strand
gcacguaugggguggugua

SEQ ID NO: 246362 - RNA, 19 nt, Homo sapiens
  misc_RNA (1)...(19): siRNA sense strand
gugcugguccuggagauga

SEQ ID NO: 246363 - RNA, 19 nt, Homo sapiens
  misc_RNA (1)...(19): siRNA sense strand
uguuucagguggguaugua

SEQ ID NO: 246364 - RNA, 19 nt, Homo sapiens
  misc_RNA (1)...(19): siRNA sense strand
guauauggccccagaaauc

SEQ ID NO: 246365 - RNA, 19 nt, Homo sapiens
  misc_RNA (1)...(19): siRNA sense strand
ggaugaauggagaggacaa

SEQ ID NO: 246366 - RNA, 19 nt, Homo sapiens
  misc_RNA (1)...(19): siRNA sense strand
gaacagugcuugaggauau

SEQ ID NO: 246367 - RNA, 19 nt, Homo sapiens
  misc_RNA (1)...(19): siRNA sense strand
ggacagagauaaagauaug

SEQ ID NO: 246368 - RNA, 19 nt, Homo sapiens
  misc_RNA (1)...(19): siRNA sense strand
ggagauagauguucugcaa

SEQ ID NO: 246369 - RNA, 19 nt, Homo sapiens
  misc_RNA (1)...(19): siRNA sense strand
gaaauacgcuuccuugacu

SEQ ID NO: 246370 - RNA, 19 nt, Homo sapiens
  misc_RNA (1)...(19): siRNA sense strand
ccacagaaauguugaagau

SEQ ID NO: 246371 - RNA, 19 nt, Homo sapiens
  misc_RNA (1)...(19): siRNA sense strand
gcaaagaaaugugcauaca

SEQ ID NO: 246372 - RNA, 19 nt, Homo sapiens
  misc_RNA (1)...(19): siRNA sense strand
uuagaagacuggagugaua

SEQ ID NO: 246373 - RNA, 19 nt, Homo sapiens
  misc_RNA (1)...(19): siRNA sense strand
gaaagugaauucuauagac

SEQ ID NO: 246374 - RNA, 19 nt, Homo sapiens
  misc_RNA (1)...(19): siRNA sense strand
caagaugcaaguaccauua

SEQ ID NO: 246375 - RNA, 19 nt, Homo sapiens
  misc_RNA (1)...(19): siRNA sense strand
uacaugagauuauccguaa

SEQ ID NO: 246376 - RNA, 19 nt, Homo sapiens
  misc_RNA (1)...(19): siRNA sense strand
gaugaucacuuuguuggaa

SEQ ID NO: 246377 - RNA, 19 nt, Homo sapiens
  misc_RNA (1)...(19): siRNA sense strand
gcauaaugguaaacaauuc

SEQ ID NO: 246378 - RNA, 19 nt, Homo sapiens
  misc_RNA (1)...(19): siRNA sense strand
guaaagaggaagcaaagaa

SEQ ID NO: 246379 - RNA, 19 nt, Homo sapiens
  misc_RNA (1)...(19): siRNA sense strand
aaacagcaauggaccaaug

SEQ ID NO: 246380 - RNA, 19 nt, Homo sapiens
  misc_RNA (1)...(19): siRNA sense strand
gcaaguaccauuaaagaca

SEQ ID NO: 246381 - RNA, 19 nt, Homo sapiens
  misc_RNA (1)...(19): siRNA sense strand
uaaccuaaauggaguaugg

SEQ ID NO: 246382 - RNA, 19 nt, Homo sapiens
  misc_RNA (1)...(19): siRNA sense strand
ccugguaccugaacaaaga

SEQ ID NO: 246383 - RNA, 19 nt, Homo sapiens
  misc_RNA (1)...(19): siRNA sense strand
uaagagggauaauucacuu

SEQ ID NO: 246384 - RNA, 19 nt, Homo sapiens
  misc_RNA (1)...(19): siRNA sense strand
gcugggagguaacgagauu

SEQ ID NO: 246385 - RNA, 19 nt, Homo sapiens
  misc_RNA (1)...(19): siRNA sense strand
agguaaagcugcugagaaa

SEQ ID NO: 246386 - RNA, 19 nt, Homo sapiens
  misc_RNA (1)...(19): siRNA sense strand
gaaggaccauucaaagacu

SEQ ID NO: 246387 - RNA, 19 nt, Homo sapiens
  misc_RNA (1)...(19): siRNA sense strand
aaggaaagccguaacauga

SEQ ID NO: 246388 - RNA, 19 nt, Homo sapiens
  misc_RNA (1)...(19): siRNA sense strand
uaaagaggaagcaaagaaa

SEQ ID NO: 246389 - RNA, 19 nt, Homo sapiens
  misc_RNA (1)...(19): siRNA sense strand
caccugaucuggcaacuuc

SEQ ID NO: 246390 - RNA, 19 nt, Homo sapiens
  misc_RNA (1)...(19): siRNA sense strand
ucagagggauccagguuau

SEQ ID NO: 246391 - RNA, 19 nt, Homo sapiens
  misc_RNA (1)...(19): siRNA sense strand
gaagauggcaacaagauac

SEQ ID NO: 246392 - RNA, 19 nt, Homo sapiens
  misc_RNA (1)...(19): siRNA sense strand
uugcagagguggacaauuc

SEQ ID NO: 246393 - RNA, 19 nt, Homo sapiens
  misc_RNA (1)...(19): siRNA sense strand
gcaauggaccaaugcaguu

SEQ ID NO: 246394 - RNA, 19 nt, Homo sapiens
  misc_RNA (1)...(19): siRNA sense strand
uaaccaaucugugaugauc

SEQ ID NO: 246395 - RNA, 19 nt, Homo sapiens
  misc_RNA (1)...(19): siRNA sense strand
ggaaagccguaacaugaac

SEQ ID NO: 246396 - RNA, 19 nt, Homo sapiens
  misc_RNA (1)...(19): siRNA sense strand
uaagagcaguucagaugau

SEQ ID NO: 246397 - RNA, 19 nt, Homo sapiens
  misc_RNA (1)...(19): siRNA sense strand
gcaccaagauggaauuuuc

SEQ ID NO: 246398 - RNA, 19 nt, Homo sapiens
  misc_RNA (1)...(19): siRNA sense strand
agacggcucugucaacuuc

SEQ ID NO: 246399 - RNA, 19 nt, Homo sapiens
  misc_RNA (1)...(19): siRNA sense strand
guaccugaacaaagaauaa

SEQ ID NO: 246400 - RNA, 19 nt, Homo sapiens
  misc_RNA (1)...(19): siRNA sense strand
ccuaacagccaacaguaua

SEQ ID NO: 246401 - RNA, 19 nt, Homo sapiens
  misc_RNA (1)...(19): siRNA sense strand
gacccuaggugugcuauuc

SEQ ID NO: 246402 - RNA, 19 nt, Homo sapiens
  misc_RNA (1)...(19): siRNA sense strand
gauguggcauaaugguaaa

SEQ ID NO: 246403 - RNA, 19 nt, Homo sapiens
  misc_RNA (1)...(19): siRNA sense strand
caaguaccauuaaagacau

SEQ ID NO: 246404 - RNA, 19 nt, Homo sapiens
  misc_RNA (1)...(19): siRNA sense strand
ucaccacacuggacagaga

SEQ ID NO: 246405 - RNA, 19 nt, Homo sapiens
  misc_RNA (1)...(19): siRNA sense strand
gaacuuaccagggaaaugc

SEQ ID NO: 246406 - RNA, 19 nt, Homo sapiens
  misc_RNA (1)...(19): siRNA sense strand
ucagugggauuuauaugau

SEQ ID NO: 246407 - RNA, 19 nt, Homo sapiens
  misc_RNA (1)...(19): siRNA sense strand
ggagguaacgagauucaga

SEQ ID NO: 246408 - RNA, 19 nt, Homo sapiens
  misc_RNA (1)...(19): siRNA sense strand
gaacucucguguuacucaa

SEQ ID NO: 246409 - RNA, 19 nt, Homo sapiens
  misc_RNA (1)...(19): siRNA sense strand
aaagauauguaugcaggaa

SEQ ID NO: 246410 - RNA, 19 nt, Homo sapiens
  misc_RNA (1)...(19): siRNA sense strand
gcuuagcaaucaagauaau

SEQ ID NO: 246411 - RNA, 19 nt, Homo sapiens
  misc_RNA (1)...(19): siRNA sense strand
ucaccaggauggaccuuga

SEQ ID NO: 246412 - RNA, 19 nt, Homo sapiens
  misc_RNA (1)...(19): siRNA sense strand
guaaacaauucaccacacu

SEQ ID NO: 246413 - RNA, 19 nt, Homo sapiens
  misc_RNA (1)...(19): siRNA sense strand
gucaauaaccaaucuguga

SEQ ID NO: 246414 - RNA, 19 nt, Homo sapiens
  misc_RNA (1)...(19): siRNA sense strand
ggugguggauguagaugga

SEQ ID NO: 246415 - RNA, 19 nt, Homo sapiens
  misc_RNA (1)...(19): siRNA sense strand
guacagaggaggccauuac

SEQ ID NO: 246416 - RNA, 19 nt, Homo sapiens
  misc_RNA (1)...(19): siRNA sense strand
aaaggaggcuggugguaca

SEQ ID NO: 246417 - RNA, 19 nt, Homo sapiens
  misc_RNA (1)...(19): siRNA sense strand
uaaagcugcugagaaagga

SEQ ID NO: 246418 - RNA, 19 nt, Homo sapiens
  misc_RNA (1)...(19): siRNA sense strand
gagguaaagcugcugagaa

SEQ ID NO: 246419 - RNA, 19 nt, Homo sapiens
  misc_RNA (1)...(19): siRNA sense strand
guagauggaaacauuguga

SEQ ID NO: 246420 - RNA, 19 nt, Homo sapiens
  misc_RNA (1)...(19): siRNA sense strand
gcaagaugcaaguaccauu

SEQ ID NO: 246421 - RNA, 19 nt, Homo sapiens
  misc_RNA (1)...(19): siRNA sense strand
cagaggaggccauuacaga

SEQ ID NO: 246422 - RNA, 19 nt, Homo sapiens
  misc_RNA (1)...(19): siRNA sense strand
ggaggcuggugguacaaug

SEQ ID NO: 246423 - RNA, 19 nt, Homo sapiens
  misc_RNA (1)...(19): siRNA sense strand
caagauacagggaacuaga

SEQ ID NO: 246424 - RNA, 19 nt, Homo sapiens
  misc_RNA (1)...(19): siRNA sense strand
uuacucaacucuauaugca

SEQ ID NO: 246425 - RNA, 19 nt, Homo sapiens
  misc_RNA (1)...(19): siRNA sense strand
cagcagcuuucgucuggaa

SEQ ID NO: 246426 - RNA, 19 nt, Homo sapiens
  misc_RNA (1)...(19): siRNA sense strand
cagguuaucccagagauuu

SEQ ID NO: 246427 - RNA, 19 nt, Homo sapiens
  misc_RNA (1)...(19): siRNA sense strand
gagauaaagauauguaugc

SEQ ID NO: 246428 - RNA, 19 nt, Homo sapiens
  misc_RNA (1)...(19): siRNA sense strand
caauggaccaaugcaguua

SEQ ID NO: 246429 - RNA, 19 nt, Homo sapiens
  misc_RNA (1)...(19): siRNA sense strand
caaagacugucagcaagca

SEQ ID NO: 246430 - RNA, 19 nt, Homo sapiens
  misc_RNA (1)...(19): siRNA sense strand
guuggacuguuauucagaa

SEQ ID NO: 246431 - RNA, 19 nt, Homo sapiens
  misc_RNA (1)...(19): siRNA sense strand
gugcuauucuuccuacuag

SEQ ID NO: 246432 - RNA, 19 nt, Homo sapiens
  misc_RNA (1)...(19): siRNA sense strand
ggcauaaugguaaacaauu

SEQ ID NO: 246433 - RNA, 19 nt, Homo sapiens
  misc_RNA (1)...(19): siRNA sense strand
ucuggaaccugaaagugaa

SEQ ID NO: 246434 - RNA, 19 nt, Homo sapiens
  misc_RNA (1)...(19): siRNA sense strand
ggcagaagcgggagauaga

SEQ ID NO: 246435 - RNA, 19 nt, Homo sapiens
  misc_RNA (1)...(19): siRNA sense strand
cuuaagagcaguucagaug

SEQ ID NO: 246436 - RNA, 19 nt, Homo sapiens
  misc_RNA (1)...(19): siRNA sense strand
guacaaugccugugcacau

SEQ ID NO: 246437 - RNA, 19 nt, Homo sapiens
  misc_RNA (1)...(19): siRNA sense strand
uauaagaaaggguuuggaa

SEQ ID NO: 246438 - RNA, 19 nt, Homo sapiens
  misc_RNA (1)...(19): siRNA sense strand
acagggaacuagaggugaa

SEQ ID NO: 246439 - RNA, 19 nt, Homo sapiens
  misc_RNA (1)...(19): siRNA sense strand
ugaagauggcaacaagaua

SEQ ID NO: 246440 - RNA, 19 nt, Homo sapiens
  misc_RNA (1)...(19): siRNA sense strand
caugaacucucguguuacu

SEQ ID NO: 246441 - RNA, 19 nt, Homo sapiens
  misc_RNA (1)...(19): siRNA sense strand
gaaaggaaagccguaacau

SEQ ID NO: 246442 - RNA, 19 nt, Homo sapiens
  misc_RNA (1)...(19): siRNA sense strand
guaaagcugcugagaaagg

SEQ ID NO: 246443 - RNA, 19 nt, Homo sapiens
  misc_RNA (1)...(19): siRNA sense strand
aaacauugacggagaauac

SEQ ID NO: 246444 - RNA, 19 nt, Homo sapiens
  misc_RNA (1)...(19): siRNA sense strand
gggccaaucugugucaaca

SEQ ID NO: 246445 - RNA, 19 nt, Homo sapiens
  misc_RNA (1)...(19): siRNA sense strand
gaaaacaaaauccucaaug

SEQ ID NO: 246446 - RNA, 19 nt, Homo sapiens
  misc_RNA (1)...(19): siRNA sense strand
gacugcgccugggaacuua

SEQ ID NO: 246447 - RNA, 19 nt, Homo sapiens
  misc_RNA (1)...(19): siRNA sense strand
gaaacauugacggagaaua

SEQ ID NO: 246448 - RNA, 19 nt, Homo sapiens
  misc_RNA (1)...(19): siRNA sense strand
ggcaacuucucccaccaaa

SEQ ID NO: 246449 - RNA, 19 nt, Homo sapiens
  misc_RNA (1)...(19): siRNA sense strand
ggaacuagaggugaaauac

SEQ ID NO: 246450 - RNA, 19 nt, Homo sapiens
  misc_RNA (1)...(19): siRNA sense strand
aaaggaaagccguaacaug

SEQ ID NO: 246451 - RNA, 19 nt, Homo sapiens
  misc_RNA (1)...(19): siRNA sense strand
ugauguggcauaaugguaa

SEQ ID NO: 246452 - RNA, 19 nt, Homo sapiens
  misc_RNA (1)...(19): siRNA sense strand
gggaacuagaggugaaaua

SEQ ID NO: 246453 - RNA, 19 nt, Homo sapiens
  misc_RNA (1)...(19): siRNA sense strand
caaugucaccacagaaaug

SEQ ID NO: 246454 - RNA, 19 nt, Homo sapiens
  misc_RNA (1)...(19): siRNA sense strand
gcagaauacagcagcuuuc

SEQ ID NO: 246455 - RNA, 19 nt, Homo sapiens
  misc_RNA (1)...(19): siRNA sense strand
aauaaccaaucugugauga

SEQ ID NO: 246456 - RNA, 19 nt, Homo sapiens
  misc_RNA (1)...(19): siRNA sense strand
gcaagcaccaagauggaau

SEQ ID NO: 246457 - RNA, 19 nt, Homo sapiens
  misc_RNA (1)...(19): siRNA sense strand
aaacugcgcccacuuucau

SEQ ID NO: 246458 - RNA, 19 nt, Homo sapiens
  misc_RNA (1)...(19): siRNA sense strand
uggaaacauugacggagaa

SEQ ID NO: 246459 - RNA, 19 nt, Homo sapiens
  misc_RNA (1)...(19): siRNA sense strand
cagugggauuuauaugauu

SEQ ID NO: 246460 - RNA, 19 nt, Homo sapiens
  misc_RNA (1)...(19): siRNA sense strand
ccgguaacuuucaucaaug

SEQ ID NO: 246461 - RNA, 19 nt, Homo sapiens
  misc_RNA (1)...(19): siRNA sense strand
acucaacucuauaugcaau

SEQ ID NO: 246462 - RNA, 19 nt, Homo sapiens
  misc_RNA (1)...(19): siRNA sense strand
caaugcaguuaugguguga

SEQ ID NO: 246463 - RNA, 19 nt, Homo sapiens
  misc_RNA (1)...(19): siRNA sense strand
gucagugggauuuauauga

SEQ ID NO: 246464 - RNA, 19 nt, Homo sapiens
  misc_RNA (1)...(19): siRNA sense strand
cacaacauauuccuaacag

SEQ ID NO: 246465 - RNA, 19 nt, Homo sapiens
  misc_RNA (1)...(19): siRNA sense strand
gaucuugucaauaaccaau

SEQ ID NO: 246466 - RNA, 19 nt, Homo sapiens
  misc_RNA (1)...(19): siRNA sense strand
guaacaaccugcauaaguu

SEQ ID NO: 246467 - RNA, 19 nt, Homo sapiens
  misc_RNA (1)...(19): siRNA sense strand
acaggaagaucagagauua

SEQ ID NO: 246468 - RNA, 19 nt, Homo sapiens
  misc_RNA (1)...(19): siRNA sense strand
ucuaugagcugaucugcaa

SEQ ID NO: 246469 - RNA, 19 nt, Homo sapiens
  misc_RNA (1)...(19): siRNA sense strand
aaaguacgcugcugcacaa

SEQ ID NO: 246470 - RNA, 19 nt, Homo sapiens
  misc_RNA (1)...(19): siRNA sense strand
caacuuccgucaugaguac

SEQ ID NO: 246471 - RNA, 19 nt, Homo sapiens
  misc_RNA (1)...(19): siRNA sense strand
guacgcugcugcacaagug

SEQ ID NO: 246472 - RNA, 19 nt, Homo sapiens
  misc_RNA (1)...(19): siRNA sense strand
uccacaugcugcugaauua

SEQ ID NO: 246473 - RNA, 19 nt, Homo sapiens
  misc_RNA (1)...(19): siRNA sense strand
gguaacaaccugcauaagu

SEQ ID NO: 246474 - RNA, 19 nt, Homo sapiens
  misc_RNA (1)...(19): siRNA sense strand
gcugcugaauuacaagaaa

SEQ ID NO: 246475 - RNA, 19 nt, Homo sapiens
  misc_RNA (1)...(19): siRNA sense strand
gaaggaaacccuggaagag

SEQ ID NO: 246476 - RNA, 19 nt, Homo sapiens
  misc_RNA (1)...(19): siRNA sense strand
ucugcaagaucaaagguaa

SEQ ID NO: 246477 - RNA, 19 nt, Homo sapiens
  misc_RNA (1)...(19): siRNA sense strand
gcaacuuccgucaugagua

SEQ ID NO: 246478 - RNA, 19 nt, Homo sapiens
  misc_RNA (1)...(19): siRNA sense strand
gcucugcagcgccacguua

SEQ ID NO: 246479 - RNA, 19 nt, Homo sapiens
  misc_RNA (1)...(19): siRNA sense strand
ggaauugcgccuucaugga

SEQ ID NO: 246480 - RNA, 19 nt, Homo sapiens
  misc_RNA (1)...(19): siRNA sense strand
caagaccgaugugaaugug

SEQ ID NO: 246481 - RNA, 19 nt, Homo sapiens
  misc_RNA (1)...(19): siRNA sense strand
gacaagugcauaaucaugu

SEQ ID NO: 246482 - RNA, 19 nt, Homo sapiens
  misc_RNA (1)...(19): siRNA sense strand
gagguggcccugaaugaug

SEQ ID NO: 246483 - RNA, 19 nt, Homo sapiens
  misc_RNA (1)...(19): siRNA sense strand
caagaaggaaacccuggaa

SEQ ID NO: 246484 - RNA, 19 nt, Homo sapiens
  misc_RNA (1)...(19): siRNA sense strand
gggagguggcccugaauga

SEQ ID NO: 246485 - RNA, 19 nt, Homo sapiens
  misc_RNA (1)...(19): siRNA sense strand
agaaggaaacccuggaaga

SEQ ID NO: 246486 - RNA, 19 nt, Homo sapiens
  misc_RNA (1)...(19): siRNA sense strand
uaacaaccugcauaaguuc

SEQ ID NO: 246487 - RNA, 19 nt, Homo sapiens
  misc_RNA (1)...(19): siRNA sense strand
ccugugcgauggaguggaa

SEQ ID NO: 246488 - RNA, 19 nt, Homo sapiens
  misc_RNA (1)...(19): siRNA sense strand
ugacaagugcauaaucaug

SEQ ID NO: 246489 - RNA, 19 nt, Homo sapiens
  misc_RNA (1)...(19): siRNA sense strand
ggagguggcccugaaugau

SEQ ID NO: 246490 - RNA, 19 nt, Homo sapiens
  misc_RNA (1)...(19): siRNA sense strand
uccaggagcccgagaagaa

SEQ ID NO: 246491 - RNA, 19 nt, Homo sapiens
  misc_RNA (1)...(19): siRNA sense strand
acaagugcauaaucaugug

SEQ ID NO: 246492 - RNA, 19 nt, Homo sapiens
  misc_RNA (1)...(19): siRNA sense strand
ccaagaccgaugugaaugu

SEQ ID NO: 246493 - RNA, 19 nt, Homo sapiens
  misc_RNA (1)...(19): siRNA sense strand
ugcaggagcuguuccacau

SEQ ID NO: 246494 - RNA, 19 nt, Homo sapiens
  misc_RNA (1)...(19): siRNA sense strand
acaugcugcugaauuacaa

SEQ ID NO: 246495 - RNA, 19 nt, Homo sapiens
  misc_RNA (1)...(19): siRNA sense strand
cgagaagaaaucccagaug

SEQ ID NO: 246496 - RNA, 19 nt, Homo sapiens
  misc_RNA (1)...(19): siRNA sense strand
cacaggaagaucagagauu

SEQ ID NO: 246497 - RNA, 19 nt, Homo sapiens
  misc_RNA (1)...(19): siRNA sense strand
ccaggagcccgagaagaaa

SEQ ID NO: 246498 - RNA, 19 nt, Homo sapiens
  misc_RNA (1)...(19): siRNA sense strand
cagccaagaccgaugugaa

SEQ ID NO: 246499 - RNA, 19 nt, Homo sapiens
  misc_RNA (1)...(19): siRNA sense strand
gcgccuucauggagauuuc

SEQ ID NO: 246500 - RNA, 19 nt, Homo sapiens
  misc_RNA (1)...(19): siRNA sense strand
caagaucaaagguaacaac

SEQ ID NO: 246501 - RNA, 19 nt, Homo sapiens
  misc_RNA (1)...(19): siRNA sense strand
gcggcaacuuccgucauga

SEQ ID NO: 246502 - RNA, 19 nt, Homo sapiens
  misc_RNA (1)...(19): siRNA sense strand
gaguaccugccgaccauug

SEQ ID NO: 246503 - RNA, 19 nt, Homo sapiens
  misc_RNA (1)...(19): siRNA sense strand
caagugcauaaucauguga

SEQ ID NO: 246504 - RNA, 19 nt, Homo sapiens
  misc_RNA (1)...(19): siRNA sense strand
ugaaugugcaggagcuguu

SEQ ID NO: 246505 - RNA, 19 nt, Homo sapiens
  misc_RNA (1)...(19): siRNA sense strand
guaccugccgaccauugaa

SEQ ID NO: 246506 - RNA, 19 nt, Homo sapiens
  misc_RNA (1)...(19): siRNA sense strand
gcaggagcuguuccacaug

SEQ ID NO: 246507 - RNA, 19 nt, Homo sapiens
  misc_RNA (1)...(19): siRNA sense strand
gaugacauauucccucuua

SEQ ID NO: 246508 - RNA, 19 nt, Homo sapiens
  misc_RNA (1)...(19): siRNA sense strand
gagcuuacacuuucuauua

SEQ ID NO: 246509 - RNA, 19 nt, Homo sapiens
  misc_RNA (1)...(19): siRNA sense strand
gaacucaucuuccuagcaa

SEQ ID NO: 246510 - RNA, 19 nt, Homo sapiens
  misc_RNA (1)...(19): siRNA sense strand
gacauacaauccuacacua

SEQ ID NO: 246511 - RNA, 19 nt, Homo sapiens
  misc_RNA (1)...(19): siRNA sense strand
caacgacuuugcugccauu

SEQ ID NO: 246512 - RNA, 19 nt, Homo sapiens
  misc_RNA (1)...(19): siRNA sense strand
cauauucccucuuaucagu

SEQ ID NO: 246513 - RNA, 19 nt, Homo sapiens
  misc_RNA (1)...(19): siRNA sense strand
cgacuuugcugccauuaag

SEQ ID NO: 246514 - RNA, 19 nt, Homo sapiens
  misc_RNA (1)...(19): siRNA sense strand
gccauucacugcaauauac

SEQ ID NO: 246515 - RNA, 19 nt, Homo sapiens
  misc_RNA (1)...(19): siRNA sense strand
guauggaugcuuaucuuaa

SEQ ID NO: 246516 - RNA, 19 nt, Homo sapiens
  misc_RNA (1)...(19): siRNA sense strand
ggugggacauacaauccua

SEQ ID NO: 246517 - RNA, 19 nt, Homo sapiens
  misc_RNA (1)...(19): siRNA sense strand
ggcauucguuggugauuau

SEQ ID NO: 246518 - RNA, 19 nt, Homo sapiens
  misc_RNA (1)...(19): siRNA sense strand
gcugucaaaugaggaauug

SEQ ID NO: 246519 - RNA, 19 nt, Homo sapiens
  misc_RNA (1)...(19): siRNA sense strand
caucaauucuccugcuugu

SEQ ID NO: 246520 - RNA, 19 nt, Homo sapiens
  misc_RNA (1)...(19): siRNA sense strand
ggacauacaauccuacacu

SEQ ID NO: 246521 - RNA, 19 nt, Homo sapiens
  misc_RNA (1)...(19): siRNA sense strand
ccauuaagcuacaggugau

SEQ ID NO: 246522 - RNA, 19 nt, Homo sapiens
  misc_RNA (1)...(19): siRNA sense strand
ucaauucuccugcuuguca

SEQ ID NO: 246523 - RNA, 19 nt, Homo sapiens
  misc_RNA (1)...(19): siRNA sense strand
caaaugaggaauugauaag

SEQ ID NO: 246524 - RNA, 19 nt, Homo sapiens
  misc_RNA (1)...(19): siRNA sense strand
gacauauucccucuuauca

SEQ ID NO: 246525 - RNA, 19 nt, Homo sapiens
  misc_RNA (1)...(19): siRNA sense strand
aacugcagcugucaaauga

SEQ ID NO: 246526 - RNA, 19 nt, Homo sapiens
  misc_RNA (1)...(19): siRNA sense strand
aaacugcagcugucaaaug

SEQ ID NO: 246527 - RNA, 19 nt, Homo sapiens
  misc_RNA (1)...(19): siRNA sense strand
uggcauucguuggugauua

SEQ ID NO: 246528 - RNA, 19 nt, Homo sapiens
  misc_RNA (1)...(19): siRNA sense strand
ugacauauucccucuuauc

SEQ ID NO: 246529 - RNA, 19 nt, Homo sapiens
  misc_RNA (1)...(19): siRNA sense strand
acacuacagauuucaguuu

SEQ ID NO: 246530 - RNA, 19 nt, Homo sapiens
  misc_RNA (1)...(19): siRNA sense strand
ugaaacugcagcugucaaa

SEQ ID NO: 246531 - RNA, 19 nt, Homo sapiens
  misc_RNA (1)...(19): siRNA sense strand
gauuaucucaccuguagug

SEQ ID NO: 246532 - RNA, 19 nt, Homo sapiens
  misc_RNA (1)...(19): siRNA sense strand
gcauugcugaugacauauu

SEQ ID NO: 246533 - RNA, 19 nt, Homo sapiens
  misc_RNA (1)...(19): siRNA sense strand
ccagcaugguggguaagua

SEQ ID NO: 246534 - RNA, 19 nt, Homo sapiens
  misc_RNA (1)...(19): siRNA sense strand
aguauaugcugccaucaau

SEQ ID NO: 246535 - RNA, 19 nt, Homo sapiens
  misc_RNA (1)...(19): siRNA sense strand
aaguauggaugcuuaucuu

SEQ ID NO: 246536 - RNA, 19 nt, Homo sapiens
  misc_RNA (1)...(19): siRNA sense strand
uauaugcugccaucaauuc

SEQ ID NO: 246537 - RNA, 19 nt, Homo sapiens
  misc_RNA (1)...(19): siRNA sense strand
aaugaggaauugauaagag

SEQ ID NO: 246538 - RNA, 19 nt, Homo sapiens
  misc_RNA (1)...(19): siRNA sense strand
ccucuuaucaguuguguag

SEQ ID NO: 246539 - RNA, 19 nt, Homo sapiens
  misc_RNA (1)...(19): siRNA sense strand
caccauggcuggaguuuuc

SEQ ID NO: 246540 - RNA, 19 nt, Homo sapiens
  misc_RNA (1)...(19): siRNA sense strand
gacacgaggugggacauac

SEQ ID NO: 246541 - RNA, 19 nt, Homo sapiens
  misc_RNA (1)...(19): siRNA sense strand
cagcaugguggguaaguau

SEQ ID NO: 246542 - RNA, 19 nt, Homo sapiens
  misc_RNA (1)...(19): siRNA sense strand
ggagcuuacacuuucuauu

SEQ ID NO: 246543 - RNA, 19 nt, Homo sapiens
  misc_RNA (1)...(19): siRNA sense strand
cauacaauccuacacuaca

SEQ ID NO: 246544 - RNA, 19 nt, Homo sapiens
  misc_RNA (1)...(19): siRNA sense strand
uguagugacucuggcauuc

SEQ ID NO: 246545 - RNA, 19 nt, Homo sapiens
  misc_RNA (1)...(19): siRNA sense strand
caggggagcuuacacuuuc

SEQ ID NO: 246546 - RNA, 19 nt, Homo sapiens
  misc_RNA (1)...(19): siRNA sense strand
uagugacucuggcauucuu

SEQ ID NO: 246547 - RNA, 19 nt, Homo sapiens
  misc_RNA (1)...(19): siRNA sense strand
cauugcugaugacauauuc

SEQ ID NO: 246548 - RNA, 19 nt, Homo sapiens
  misc_RNA (1)...(19): siRNA sense strand
gcagcugucaaaugaggaa

SEQ ID NO: 246549 - RNA, 19 nt, Homo sapiens
  misc_RNA (1)...(19): siRNA sense strand
gaaacugcagcugucaaau

SEQ ID NO: 246550 - RNA, 19 nt, Homo sapiens
  misc_RNA (1)...(19): siRNA sense strand
gccaucaauucuccugcuu

SEQ ID NO: 246551 - RNA, 19 nt, Homo sapiens
  misc_RNA (1)...(19): siRNA sense strand
uaaucaugcuaguauaugc

SEQ ID NO: 246552 - RNA, 19 nt, Homo sapiens
  misc_RNA (1)...(19): siRNA sense strand
guauaugcugccaucaauu

SEQ ID NO: 246553 - RNA, 19 nt, Homo sapiens
  misc_RNA (1)...(19): siRNA sense strand
uaggugccauucacugcaa

SEQ ID NO: 246554 - RNA, 19 nt, Homo sapiens
  misc_RNA (1)...(19): siRNA sense strand
augaggaauugauaagaga

SEQ ID NO: 246555 - RNA, 19 nt, Homo sapiens
  misc_RNA (1)...(19): siRNA sense strand
uauucccucuuaucaguug

SEQ ID NO: 246556 - RNA, 19 nt, Homo sapiens
  misc_RNA (1)...(19): siRNA sense strand
guauuauuguugacaccau

SEQ ID NO: 246557 - RNA, 19 nt, Homo sapiens
  misc_RNA (1)...(19): siRNA sense strand
ggaugcuuaucuuaaucau

SEQ ID NO: 246558 - RNA, 19 nt, Homo sapiens
  misc_RNA (1)...(19): siRNA sense strand
aguauggaugcuuaucuua

SEQ ID NO: 246559 - RNA, 19 nt, Homo sapiens
  misc_RNA (1)...(19): siRNA sense strand
ugccauucacugcaauaua

SEQ ID NO: 246560 - RNA, 19 nt, Homo sapiens
  misc_RNA (1)...(19): siRNA sense strand
cacuacagauuucaguuuu

SEQ ID NO: 246561 - RNA, 19 nt, Homo sapiens
  misc_RNA (1)...(19): siRNA sense strand
caaaugagauuaugcugua

SEQ ID NO: 246562 - RNA, 19 nt, Homo sapiens
  misc_RNA (1)...(19): siRNA sense strand
gaaccuaagugauguuaau

SEQ ID NO: 246563 - RNA, 19 nt, Homo sapiens
  misc_RNA (1)...(19): siRNA sense strand
agaaauaccuugcuucagu

SEQ ID NO: 246564 - RNA, 19 nt, Homo sapiens
  misc_RNA (1)...(19): siRNA sense strand
caaagaaccuaagugaugu

SEQ ID NO: 246565 - RNA, 19 nt, Homo sapiens
  misc_RNA (1)...(19): siRNA sense strand
cagagggcaucaugacaua

SEQ ID NO: 246566 - RNA, 19 nt, Homo sapiens
  misc_RNA (1)...(19): siRNA sense strand
ugacaaagaaccuaaguga

SEQ ID NO: 246567 - RNA, 19 nt, Homo sapiens
  misc_RNA (1)...(19): siRNA sense strand
acaaagaaccuaagugaug

SEQ ID NO: 246568 - RNA, 19 nt, Homo sapiens
  misc_RNA (1)...(19): siRNA sense strand
gugcaggacaggaucauua

SEQ ID NO: 246569 - RNA, 19 nt, Homo sapiens
  misc_RNA (1)...(19): siRNA sense strand
acauauugcuugacaaaga

SEQ ID NO: 246570 - RNA, 19 nt, Homo sapiens
  misc_RNA (1)...(19): siRNA sense strand
ugggcuugcugacauauua

SEQ ID NO: 246571 - RNA, 19 nt, Homo sapiens
  misc_RNA (1)...(19): siRNA sense strand
cauauugcuugacaaagaa

SEQ ID NO: 246572 - RNA, 19 nt, Homo sapiens
  misc_RNA (1)...(19): siRNA sense strand
ugacauauugcuugacaaa

SEQ ID NO: 246573 - RNA, 19 nt, Homo sapiens
  misc_RNA (1)...(19): siRNA sense strand
aaagugggcuugcugacau

SEQ ID NO: 246574 - RNA, 19 nt, Homo sapiens
  misc_RNA (1)...(19): siRNA sense strand
gacaggaucauuacucuca

SEQ ID NO: 246575 - RNA, 19 nt, Homo sapiens
  misc_RNA (1)...(19): siRNA sense strand
cagcauacaaaugagauua

SEQ ID NO: 246576 - RNA, 19 nt, Homo sapiens
  misc_RNA (1)...(19): siRNA sense strand
gagggcaucaugacauauu

SEQ ID NO: 246577 - RNA, 19 nt, Homo sapiens
  misc_RNA (1)...(19): siRNA sense strand
gcccagaucacagaaguaa

SEQ ID NO: 246578 - RNA, 19 nt, Homo sapiens
  misc_RNA (1)...(19): siRNA sense strand
caugacauauugcuugaca

SEQ ID NO: 246579 - RNA, 19 nt, Homo sapiens
  misc_RNA (1)...(19): siRNA sense strand
cacaggugcugcuuacaga

SEQ ID NO: 246580 - RNA, 19 nt, Homo sapiens
  misc_RNA (1)...(19): siRNA sense strand
gagauuaugcuguaucacu

SEQ ID NO: 246581 - RNA, 19 nt, Homo sapiens
  misc_RNA (1)...(19): siRNA sense strand
ugagaaauaccuugcuuca

SEQ ID NO: 246582 - RNA, 19 nt, Homo sapiens
  misc_RNA (1)...(19): siRNA sense strand
guuaauauucugcauaggu

SEQ ID NO: 246583 - RNA, 19 nt, Homo sapiens
  misc_RNA (1)...(19): siRNA sense strand
aaugggaaugugagaaaua

SEQ ID NO: 246584 - RNA, 19 nt, Homo sapiens
  misc_RNA (1)...(19): siRNA sense strand
ggaaugugagaaauaccuu

SEQ ID NO: 246585 - RNA, 19 nt, Homo sapiens
  misc_RNA (1)...(19): siRNA sense strand
ugugagaaauaccuugcuu

SEQ ID NO: 246586 - RNA, 19 nt, Homo sapiens
  misc_RNA (1)...(19): siRNA sense strand
gacaaagaaccuaagugau

SEQ ID NO: 246587 - RNA, 19 nt, Homo sapiens
  misc_RNA (1)...(19): siRNA sense strand
caaagugggcuugcugaca

SEQ ID NO: 246588 - RNA, 19 nt, Homo sapiens
  misc_RNA (1)...(19): siRNA sense strand
auaccuugcuucaguccaa

SEQ ID NO: 246589 - RNA, 19 nt, Homo sapiens
  misc_RNA (1)...(19): siRNA sense strand
gaaacuguacccgggugaa

SEQ ID NO: 246590 - RNA, 19 nt, Homo sapiens
  misc_RNA (1)...(19): siRNA sense strand
aagugacucuucugacuag

SEQ ID NO: 246591 - RNA, 19 nt, Homo sapiens
  misc_RNA (1)...(19): siRNA sense strand
aaaugggaaugugagaaau

SEQ ID NO: 246592 - RNA, 19 nt, Homo sapiens
  misc_RNA (1)...(19): siRNA sense strand
ugacuaggcccagcauaca

SEQ ID NO: 246593 - RNA, 19 nt, Homo sapiens
  misc_RNA (1)...(19): siRNA sense strand
guacccgggugaagugacu

SEQ ID NO: 246594 - RNA, 19 nt, Homo sapiens
  misc_RNA (1)...(19): siRNA sense strand
caggaucauuacucucauc

SEQ ID NO: 246595 - RNA, 19 nt, Homo sapiens
  misc_RNA (1)...(19): siRNA sense strand
aagugggcuugcugacaua

SEQ ID NO: 246596 - RNA, 19 nt, Homo sapiens
  misc_RNA (1)...(19): siRNA sense strand
aagaaccuaagugauguua

SEQ ID NO: 246597 - RNA, 19 nt, Homo sapiens
  misc_RNA (1)...(19): siRNA sense strand
aagcccagaucacagaagu

SEQ ID NO: 246598 - RNA, 19 nt, Homo sapiens
  misc_RNA (1)...(19): siRNA sense strand
gcuuacagagggcaucaug

SEQ ID NO: 246599 - RNA, 19 nt, Homo sapiens
  misc_RNA (1)...(19): siRNA sense strand
aggcccagcauacaaauga

SEQ ID NO: 246600 - RNA, 19 nt, Homo sapiens
  misc_RNA (1)...(19): siRNA sense strand
uuucacaggugcugcuuac

SEQ ID NO: 246601 - RNA, 19 nt, Homo sapiens
  misc_RNA (1)...(19): siRNA sense strand
ucgaagcccagaucacaga

SEQ ID NO: 246602 - RNA, 19 nt, Homo sapiens
  misc_RNA (1)...(19): siRNA sense strand
gacuaggcccagcauacaa

SEQ ID NO: 246603 - RNA, 19 nt, Homo sapiens
  misc_RNA (1)...(19): siRNA sense strand
cuaccaagguggccgagaa

SEQ ID NO: 246604 - RNA, 19 nt, Homo sapiens
  misc_RNA (1)...(19): siRNA sense strand
cgaagaagaagacuaccaa

SEQ ID NO: 246605 - RNA, 19 nt, Homo sapiens
  misc_RNA (1)...(19): siRNA sense strand
ccaguggcccgaagaagaa

SEQ ID NO: 246606 - RNA, 19 nt, Homo sapiens
  misc_RNA (1)...(19): siRNA sense strand
gaaaggggcugcgacaaag

SEQ ID NO: 246607 - RNA, 19 nt, Homo sapiens
  misc_RNA (1)...(19): siRNA sense strand
uggaggaaccacugaguaa

SEQ ID NO: 246608 - RNA, 19 nt, Homo sapiens
  misc_RNA (1)...(19): siRNA sense strand
agaagaagacuaccaaggu

SEQ ID NO: 246609 - RNA, 19 nt, Homo sapiens
  misc_RNA (1)...(19): siRNA sense strand
gaagggagaagcaguucgu

SEQ ID NO: 246610 - RNA, 19 nt, Homo sapiens
  misc_RNA (1)...(19): siRNA sense strand
cgagaagggagaagcaguu

SEQ ID NO: 246611 - RNA, 19 nt, Homo sapiens
  misc_RNA (1)...(19): siRNA sense strand
ggagagcgagcuggaggaa

SEQ ID NO: 246612 - RNA, 19 nt, Homo sapiens
  misc_RNA (1)...(19): siRNA sense strand
gaggaaccacugaguaagg

SEQ ID NO: 246613 - RNA, 19 nt, Homo sapiens
  misc_RNA (1)...(19): siRNA sense strand
gggagacgcgggaagaaag

SEQ ID NO: 246614 - RNA, 19 nt, Homo sapiens
  misc_RNA (1)...(19): siRNA sense strand
gagcuggaggaaccacuga

SEQ ID NO: 246615 - RNA, 19 nt, Homo sapiens
  misc_RNA (1)...(19): siRNA sense strand
gagaagggagaagcaguuc

SEQ ID NO: 246616 - RNA, 19 nt, Homo sapiens
  misc_RNA (1)...(19): siRNA sense strand
ggaggaaccacugaguaag

SEQ ID NO: 246617 - RNA, 19 nt, Homo sapiens
  misc_RNA (1)...(19): siRNA sense strand
gcccgaagaagaagacuac

SEQ ID NO: 246618 - RNA, 19 nt, Homo sapiens
  misc_RNA (1)...(19): siRNA sense strand
cccaguggcccgaagaaga

SEQ ID NO: 246619 - RNA, 19 nt, Homo sapiens
  misc_RNA (1)...(19): siRNA sense strand
gagggagacgcgggaagaa

SEQ ID NO: 246620 - RNA, 19 nt, Homo sapiens
  misc_RNA (1)...(19): siRNA sense strand
uuaaggagcuugccucaua

SEQ ID NO: 246621 - RNA, 19 nt, Homo sapiens
  misc_RNA (1)...(19): siRNA sense strand
gugaagcacuuaaggaaua

SEQ ID NO: 246622 - RNA, 19 nt, Homo sapiens
  misc_RNA (1)...(19): siRNA sense strand
ccagauggcuguucuucua

SEQ ID NO: 246623 - RNA, 19 nt, Homo sapiens
  misc_RNA (1)...(19): siRNA sense strand
gcaagaacguuaggagaaa

SEQ ID NO: 246624 - RNA, 19 nt, Homo sapiens
  misc_RNA (1)...(19): siRNA sense strand
guggaaagguuaugacaaa

SEQ ID NO: 246625 - RNA, 19 nt, Homo sapiens
  misc_RNA (1)...(19): siRNA sense strand
uaaagcaucugccaaugaa

SEQ ID NO: 246626 - RNA, 19 nt, Homo sapiens
  misc_RNA (1)...(19): siRNA sense strand
gaagaaagaggauggauuc

SEQ ID NO: 246627 - RNA, 19 nt, Homo sapiens
  misc_RNA (1)...(19): siRNA sense strand
gaaaggguauagugguauu

SEQ ID NO: 246628 - RNA, 19 nt, Homo sapiens
  misc_RNA (1)...(19): siRNA sense strand
ucaacuagaucgacagaaa

SEQ ID NO: 246629 - RNA, 19 nt, Homo sapiens
  misc_RNA (1)...(19): siRNA sense strand
gagaaaggcagcuucaauu

SEQ ID NO: 246630 - RNA, 19 nt, Homo sapiens
  misc_RNA (1)...(19): siRNA sense strand
ccaaaggccuggucucuca

SEQ ID NO: 246631 - RNA, 19 nt, Homo sapiens
  misc_RNA (1)...(19): siRNA sense strand
aaacugacauggacuacaa

SEQ ID NO: 246632 - RNA, 19 nt, Homo sapiens
  misc_RNA (1)...(19): siRNA sense strand
gagcucagcccaagggaua

SEQ ID NO: 246633 - RNA, 19 nt, Homo sapiens
  misc_RNA (1)...(19): siRNA sense strand
gauggcuguucuucuauua

SEQ ID NO: 246634 - RNA, 19 nt, Homo sapiens
  misc_RNA (1)...(19): siRNA sense strand
gaacagacuggaauacaga

SEQ ID NO: 246635 - RNA, 19 nt, Homo sapiens
  misc_RNA (1)...(19): siRNA sense strand
cucguucgcuguaauauua

SEQ ID NO: 246636 - RNA, 19 nt, Homo sapiens
  misc_RNA (1)...(19): siRNA sense strand
gagcuugccucauacaauc

SEQ ID NO: 246637 - RNA, 19 nt, Homo sapiens
  misc_RNA (1)...(19): siRNA sense strand
aagaugcacuucaccauaa

SEQ ID NO: 246638 - RNA, 19 nt, Homo sapiens
  misc_RNA (1)...(19): siRNA sense strand
gaacaagacucagauacac

SEQ ID NO: 246639 - RNA, 19 nt, Homo sapiens
  misc_RNA (1)...(19): siRNA sense strand
ccacuaaugucgcagaugu

SEQ ID NO: 246640 - RNA, 19 nt, Homo sapiens
  misc_RNA (1)...(19): siRNA sense strand
ggguauagugguauuaaua

SEQ ID NO: 246641 - RNA, 19 nt, Homo sapiens
  misc_RNA (1)...(19): siRNA sense strand
gcuguaauauuaaguugga

SEQ ID NO: 246642 - RNA, 19 nt, Homo sapiens
  misc_RNA (1)...(19): siRNA sense strand
ggagaaaggcagcuucaau

SEQ ID NO: 246643 - RNA, 19 nt, Homo sapiens
  misc_RNA (1)...(19): siRNA sense strand
guaaagcaucugccaauga

SEQ ID NO: 246644 - RNA, 19 nt, Homo sapiens
  misc_RNA (1)...(19): siRNA sense strand
gaaagguuaugacaaacag

SEQ ID NO: 246645 - RNA, 19 nt, Homo sapiens
  misc_RNA (1)...(19): siRNA sense strand
cccaagagguuaugauuca

SEQ ID NO: 246646 - RNA, 19 nt, Homo sapiens
  misc_RNA (1)...(19): siRNA sense strand
ccgaaaggguauaguggua

SEQ ID NO: 246647 - RNA, 19 nt, Homo sapiens
  misc_RNA (1)...(19): siRNA sense strand
gaacuuccagaucuacaaa

SEQ ID NO: 246648 - RNA, 19 nt, Homo sapiens
  misc_RNA (1)...(19): siRNA sense strand
ucaagaacuuugugaauac

SEQ ID NO: 246649 - RNA, 19 nt, Homo sapiens
  misc_RNA (1)...(19): siRNA sense strand
gaauacagaacaagacuca

SEQ ID NO: 246650 - RNA, 19 nt, Homo sapiens
  misc_RNA (1)...(19): siRNA sense strand
ggugggcaaagaaauauua

SEQ ID NO: 246651 - RNA, 19 nt, Homo sapiens
  misc_RNA (1)...(19): siRNA sense strand
acagagacauuguagugaa

SEQ ID NO: 246652 - RNA, 19 nt, Homo sapiens
  misc_RNA (1)...(19): siRNA sense strand
ucuaagaacucuccuaaaa

SEQ ID NO: 246653 - RNA, 19 nt, Homo sapiens
  misc_RNA (1)...(19): siRNA sense strand
aaaggugggcaaagaaaua

SEQ ID NO: 246654 - RNA, 19 nt, Homo sapiens
  misc_RNA (1)...(19): siRNA sense strand
gcacuuaaggaauaacaga

SEQ ID NO: 246655 - RNA, 19 nt, Homo sapiens
  misc_RNA (1)...(19): siRNA sense strand
caauuguacuggaagaaug

SEQ ID NO: 246656 - RNA, 19 nt, Homo sapiens
  misc_RNA (1)...(19): siRNA sense strand
gaaaggcagcuucaauucu

SEQ ID NO: 246657 - RNA, 19 nt, Homo sapiens
  misc_RNA (1)...(19): siRNA sense strand
ggaacaggccaaugagaga

SEQ ID NO: 246658 - RNA, 19 nt, Homo sapiens
  misc_RNA (1)...(19): siRNA sense strand
gcacugaauacagaaguaa

SEQ ID NO: 246659 - RNA, 19 nt, Homo sapiens
  misc_RNA (1)...(19): siRNA sense strand
ucagauacacccacuaaug

SEQ ID NO: 246660 - RNA, 19 nt, Homo sapiens
  misc_RNA (1)...(19): siRNA sense strand
ccauaaggcuaacagaaag

SEQ ID NO: 246661 - RNA, 19 nt, Homo sapiens
  misc_RNA (1)...(19): siRNA sense strand
gaaaggugggcaaagaaau

SEQ ID NO: 246662 - RNA, 19 nt, Homo sapiens
  misc_RNA (1)...(19): siRNA sense strand
gguaaagcaucugccaaug

SEQ ID NO: 246663 - RNA, 19 nt, Homo sapiens
  misc_RNA (1)...(19): siRNA sense strand
cacaaagaauauggagaua

SEQ ID NO: 246664 - RNA, 19 nt, Homo sapiens
  misc_RNA (1)...(19): siRNA sense strand
ccaaugagagagaguguga

SEQ ID NO: 246665 - RNA, 19 nt, Homo sapiens
  misc_RNA (1)...(19): siRNA sense strand
ggaaagguuaugacaaaca

SEQ ID NO: 246666 - RNA, 19 nt, Homo sapiens
  misc_RNA (1)...(19): siRNA sense strand
aaacaaugccagaagaaga

SEQ ID NO: 246667 - RNA, 19 nt, Homo sapiens
  misc_RNA (1)...(19): siRNA sense strand
gcauccauccugccucuuu

SEQ ID NO: 246668 - RNA, 19 nt, Homo sapiens
  misc_RNA (1)...(19): siRNA sense strand
ugaagcacuuaaggaauaa

SEQ ID NO: 246669 - RNA, 19 nt, Homo sapiens
  misc_RNA (1)...(19): siRNA sense strand
gagaaacuggacccuauug

SEQ ID NO: 246670 - RNA, 19 nt, Homo sapiens
  misc_RNA (1)...(19): siRNA sense strand
aaaggcagcuucaauucuc

SEQ ID NO: 246671 - RNA, 19 nt, Homo sapiens
  misc_RNA (1)...(19): siRNA sense strand
gaaacuggacccuauugca

SEQ ID NO: 246672 - RNA, 19 nt, Homo sapiens
  misc_RNA (1)...(19): siRNA sense strand
agacaugcauaccucaguu

SEQ ID NO: 246673 - RNA, 19 nt, Homo sapiens
  misc_RNA (1)...(19): siRNA sense strand
cagauacacccacuaaugu

SEQ ID NO: 246674 - RNA, 19 nt, Homo sapiens
  misc_RNA (1)...(19): siRNA sense strand
ucaauucucuccgacacaa

SEQ ID NO: 246675 - RNA, 19 nt, Homo sapiens
  misc_RNA (1)...(19): siRNA sense strand
caagagguuaugauucaaa

SEQ ID NO: 246676 - RNA, 19 nt, Homo sapiens
  misc_RNA (1)...(19): siRNA sense strand
acaaacaggaugacacuug

SEQ ID NO: 246677 - RNA, 19 nt, Homo sapiens
  misc_RNA (1)...(19): siRNA sense strand
aaaaugcacugaauacaga

SEQ ID NO: 246678 - RNA, 19 nt, Homo sapiens
  misc_RNA (1)...(19): siRNA sense strand
ggauggauucacccagaua

SEQ ID NO: 246679 - RNA, 19 nt, Homo sapiens
  misc_RNA (1)...(19): siRNA sense strand
gagacauuguagugaagaa

SEQ ID NO: 246680 - RNA, 19 nt, Homo sapiens
  misc_RNA (1)...(19): siRNA sense strand
acacaaagaauauggagau

SEQ ID NO: 246681 - RNA, 19 nt, Homo sapiens
  misc_RNA (1)...(19): siRNA sense strand
gggcaaagaaauauuacug

SEQ ID NO: 246682 - RNA, 19 nt, Homo sapiens
  misc_RNA (1)...(19): siRNA sense strand
ggacaacagacaugcauac

SEQ ID NO: 246683 - RNA, 19 nt, Homo sapiens
  misc_RNA (1)...(19): siRNA sense strand
uugagaaacuggacccuau

SEQ ID NO: 246684 - RNA, 19 nt, Homo sapiens
  misc_RNA (1)...(19): siRNA sense strand
caaggugacagaagggaaa

SEQ ID NO: 246685 - RNA, 19 nt, Homo sapiens
  misc_RNA (1)...(19): siRNA sense strand
uauacgaccuuuggacaga

SEQ ID NO: 246686 - RNA, 19 nt, Homo sapiens
  misc_RNA (1)...(19): siRNA sense strand
gaucucgugugggcuaaug

SEQ ID NO: 246687 - RNA, 19 nt, Homo sapiens
  misc_RNA (1)...(19): siRNA sense strand
caucaagaacuuugugaau

SEQ ID NO: 246688 - RNA, 19 nt, Homo sapiens
  misc_RNA (1)...(19): siRNA sense strand
ggcaaagaaauauuacuga

SEQ ID NO: 246689 - RNA, 19 nt, Homo sapiens
  misc_RNA (1)...(19): siRNA sense strand
ugaaaggugggcaaagaaa

SEQ ID NO: 246690 - RNA, 19 nt, Homo sapiens
  misc_RNA (1)...(19): siRNA sense strand
agacuggaauacagaacaa

SEQ ID NO: 246691 - RNA, 19 nt, Homo sapiens
  misc_RNA (1)...(19): siRNA sense strand
gagcagcaccucaugaacu

SEQ ID NO: 246692 - RNA, 19 nt, Homo sapiens
  misc_RNA (1)...(19): siRNA sense strand
gguauagugguauuaauag

SEQ ID NO: 246693 - RNA, 19 nt, Homo sapiens
  misc_RNA (1)...(19): siRNA sense strand
ggagcuugccucauacaau

SEQ ID NO: 246694 - RNA, 19 nt, Homo sapiens
  misc_RNA (1)...(19): siRNA sense strand
agugaaaggugggcaaaga

SEQ ID NO: 246695 - RNA, 19 nt, Homo sapiens
  misc_RNA (1)...(19): siRNA sense strand
ugaagaaagaggauggauu

SEQ ID NO: 246696 - RNA, 19 nt, Homo sapiens
  misc_RNA (1)...(19): siRNA sense strand
gcagagaccagccuuuuau

SEQ ID NO: 246697 - RNA, 19 nt, Homo sapiens
  misc_RNA (1)...(19): siRNA sense strand
gagguugaagcuauuguug

SEQ ID NO: 246698 - RNA, 19 nt, Homo sapiens
  misc_RNA (1)...(19): siRNA sense strand
cccaggaguuugagguuga

SEQ ID NO: 246699 - RNA, 19 nt, Homo sapiens
  misc_RNA (1)...(19): siRNA sense strand
ucagaaacuugagaaacug

SEQ ID NO: 246700 - RNA, 19 nt, Homo sapiens
  misc_RNA (1)...(19): siRNA sense strand
ggguaaagcaucugccaau

SEQ ID NO: 246701 - RNA, 19 nt, Homo sapiens
  misc_RNA (1)...(19): siRNA sense strand
gaaauaguuaaugcucuga

SEQ ID NO: 246702 - RNA, 19 nt, Homo sapiens
  misc_RNA (1)...(19): siRNA sense strand
cagagcagcaccucaugaa

SEQ ID NO: 246703 - RNA, 19 nt, Homo sapiens
  misc_RNA (1)...(19): siRNA sense strand
gcauaccucaguuccaaga

SEQ ID NO: 246704 - RNA, 19 nt, Homo sapiens
  misc_RNA (1)...(19): siRNA sense strand
ucaaacaaugccagaagaa

SEQ ID NO: 246705 - RNA, 19 nt, Homo sapiens
  misc_RNA (1)...(19): siRNA sense strand
agugugaggugcugaggaa

SEQ ID NO: 246706 - RNA, 19 nt, Homo sapiens
  misc_RNA (1)...(19): siRNA sense strand
gguugaagcuauuguugac

SEQ ID NO: 246707 - RNA, 19 nt, Homo sapiens
  misc_RNA (1)...(19): siRNA sense strand
guuaauugcugggcgaaag

SEQ ID NO: 246708 - RNA, 19 nt, Homo sapiens
  misc_RNA (1)...(19): siRNA sense strand
caagaacguuaggagaaag

SEQ ID NO: 246709 - RNA, 19 nt, Homo sapiens
  misc_RNA (1)...(19): siRNA sense strand
ggacaccaucaagaacuuu

SEQ ID NO: 246710 - RNA, 19 nt, Homo sapiens
  misc_RNA (1)...(19): siRNA sense strand
gugcagaacagacuggaau

SEQ ID NO: 246711 - RNA, 19 nt, Homo sapiens
  misc_RNA (1)...(19): siRNA sense strand
agaaaggcagcuucaauuc

SEQ ID NO: 246712 - RNA, 19 nt, Homo sapiens
  misc_RNA (1)...(19): siRNA sense strand
guauuugguucgguggaaa

SEQ ID NO: 246713 - RNA, 19 nt, Homo sapiens
  misc_RNA (1)...(19): siRNA sense strand
gcuguucuucuauuacauu

SEQ ID NO: 246714 - RNA, 19 nt, Homo sapiens
  misc_RNA (1)...(19): siRNA sense strand
cauccauccugccucuuug

SEQ ID NO: 246715 - RNA, 19 nt, Homo sapiens
  misc_RNA (1)...(19): siRNA sense strand
ggaugacacuugggaacca

SEQ ID NO: 246716 - RNA, 19 nt, Homo sapiens
  misc_RNA (1)...(19): siRNA sense strand
acucagauacacccacuaa

SEQ ID NO: 246717 - RNA, 19 nt, Homo sapiens
  misc_RNA (1)...(19): siRNA sense strand
ccaagagguuaugauucaa

SEQ ID NO: 246718 - RNA, 19 nt, Homo sapiens
  misc_RNA (1)...(19): siRNA sense strand
caccauaaggcuaacagaa

SEQ ID NO: 246719 - RNA, 19 nt, Homo sapiens
  misc_RNA (1)...(19): siRNA sense strand
uaaggagcuugccucauac

SEQ ID NO: 246720 - RNA, 19 nt, Homo sapiens
  misc_RNA (1)...(19): siRNA sense strand
uuaaggagcuugccucaua

SEQ ID NO: 246721 - RNA, 19 nt, Homo sapiens
  misc_RNA (1)...(19): siRNA sense strand
gugaagcacuuaaggaaua

SEQ ID NO: 246722 - RNA, 19 nt, Homo sapiens
  misc_RNA (1)...(19): siRNA sense strand
ccagauggcuguucuucua

SEQ ID NO: 246723 - RNA, 19 nt, Homo sapiens
  misc_RNA (1)...(19): siRNA sense strand
gcaagaacguuaggagaaa

SEQ ID NO: 246724 - RNA, 19 nt, Homo sapiens
  misc_RNA (1)...(19): siRNA sense strand
guggaaagguuaugacaaa

SEQ ID NO: 246725 - RNA, 19 nt, Homo sapiens
  misc_RNA (1)...(19): siRNA sense strand
uaaagcaucugccaaugaa

SEQ ID NO: 246726 - RNA, 19 nt, Homo sapiens
  misc_RNA (1)...(19): siRNA sense strand
gaagaaagaggauggauuc

SEQ ID NO: 246727 - RNA, 19 nt, Homo sapiens
  misc_RNA (1)...(19): siRNA sense strand
gaaaggguauagugguauu

SEQ ID NO: 246728 - RNA, 19 nt, Homo sapiens
  misc_RNA (1)...(19): siRNA sense strand
ucaacuagaucgacagaaa

SEQ ID NO: 246729 - RNA, 19 nt, Homo sapiens
  misc_RNA (1)...(19): siRNA sense strand
gagaaaggcagcuucaauu

SEQ ID NO: 246730 - RNA, 19 nt, Homo sapiens
  misc_RNA (1)...(19): siRNA sense strand
ccaaaggccuggucucuca

SEQ ID NO: 246731 - RNA, 19 nt, Homo sapiens
  misc_RNA (1)...(19): siRNA sense strand
aaacugacauggacuacaa

SEQ ID NO: 246732 - RNA, 19 nt, Homo sapiens
  misc_RNA (1)...(19): siRNA sense strand
gagcucagcccaagggaua

SEQ ID NO: 246733 - RNA, 19 nt, Homo sapiens
  misc_RNA (1)...(19): siRNA sense strand
gauggcuguucuucuauua

SEQ ID NO: 246734 - RNA, 19 nt, Homo sapiens
  misc_RNA (1)...(19): siRNA sense strand
gaacagacuggaauacaga

SEQ ID NO: 246735 - RNA, 19 nt, Homo sapiens
  misc_RNA (1)...(19): siRNA sense strand
cucguucgcuguaauauua

SEQ ID NO: 246736 - RNA, 19 nt, Homo sapiens
  misc_RNA (1)...(19): siRNA sense strand
aagaugcacuucaccauaa

SEQ ID NO: 246737 - RNA, 19 nt, Homo sapiens
  misc_RNA (1)...(19): siRNA sense strand
gaacaagacucagauacac

SEQ ID NO: 246738 - RNA, 19 nt, Homo sapiens
  misc_RNA (1)...(19): siRNA sense strand
ccacuaaugucgcagaugu

SEQ ID NO: 246739 - RNA, 19 nt, Homo sapiens
  misc_RNA (1)...(19): siRNA sense strand
ggguauagugguauuaaua

SEQ ID NO: 246740 - RNA, 19 nt, Homo sapiens
  misc_RNA (1)...(19): siRNA sense strand
gcuguaauauuaaguugga

SEQ ID NO: 246741 - RNA, 19 nt, Homo sapiens
  misc_RNA (1)...(19): siRNA sense strand
ggagaaaggcagcuucaau

SEQ ID NO: 246742 - RNA, 19 nt, Homo sapiens
  misc_RNA (1)...(19): siRNA sense strand
guaaagcaucugccaauga

SEQ ID NO: 246743 - RNA, 19 nt, Homo sapiens
  misc_RNA (1)...(19): siRNA sense strand
gaaagguuaugacaaacag

SEQ ID NO: 246744 - RNA, 19 nt, Homo sapiens
  misc_RNA (1)...(19): siRNA sense strand
cccaagagguuaugauuca

SEQ ID NO: 246745 - RNA, 19 nt, Homo sapiens
  misc_RNA (1)...(19): siRNA sense strand
ccgaaaggguauaguggua

SEQ ID NO: 246746 - RNA, 19 nt, Homo sapiens
  misc_RNA (1)...(19): siRNA sense strand
gaacuuccagaucuacaaa

SEQ ID NO: 246747 - RNA, 19 nt, Homo sapiens
  misc_RNA (1)...(19): siRNA sense strand
ucaagaacuuugugaauac

SEQ ID NO: 246748 - RNA, 19 nt, Homo sapiens
  misc_RNA (1)...(19): siRNA sense strand
gaauacagaacaagacuca

SEQ ID NO: 246749 - RNA, 19 nt, Homo sapiens
  misc_RNA (1)...(19): siRNA sense strand
ggugggcaaagaaauauua

SEQ ID NO: 246750 - RNA, 19 nt, Homo sapiens
  misc_RNA (1)...(19): siRNA sense strand
acagagacauuguagugaa

SEQ ID NO: 246751 - RNA, 19 nt, Homo sapiens
  misc_RNA (1)...(19): siRNA sense strand
ucuaagaacucuccuaaaa

SEQ ID NO: 246752 - RNA, 19 nt, Homo sapiens
  misc_RNA (1)...(19): siRNA sense strand
aaaggugggcaaagaaaua

SEQ ID NO: 246753 - RNA, 19 nt, Homo sapiens
  misc_RNA (1)...(19): siRNA sense strand
gcacuuaaggaauaacaga

SEQ ID NO: 246754 - RNA, 19 nt, Homo sapiens
  misc_RNA (1)...(19): siRNA sense strand
caauuguacuggaagaaug

SEQ ID NO: 246755 - RNA, 19 nt, Homo sapiens
  misc_RNA (1)...(19): siRNA sense strand
gaaaggcagcuucaauucu

SEQ ID NO: 246756 - RNA, 19 nt, Homo sapiens
  misc_RNA (1)...(19): siRNA sense strand
ggaacaggccaaugagaga

SEQ ID NO: 246757 - RNA, 19 nt, Homo sapiens
  misc_RNA (1)...(19): siRNA sense strand
gcacugaauacagaaguaa

SEQ ID NO: 246758 - RNA, 19 nt, Homo sapiens
  misc_RNA (1)...(19): siRNA sense strand
ucagauacacccacuaaug

SEQ ID NO: 246759 - RNA, 19 nt, Homo sapiens
  misc_RNA (1)...(19): siRNA sense strand
ccauaaggcuaacagaaag

SEQ ID NO: 246760 - RNA, 19 nt, Homo sapiens
  misc_RNA (1)...(19): siRNA sense strand
gaaaggugggcaaagaaau

SEQ ID NO: 246761 - RNA, 19 nt, Homo sapiens
  misc_RNA (1)...(19): siRNA sense strand
gguaaagcaucugccaaug

SEQ ID NO: 246762 - RNA, 19 nt, Homo sapiens
  misc_RNA (1)...(19): siRNA sense strand
ggaaagguuaugacaaaca

SEQ ID NO: 246763 - RNA, 19 nt, Homo sapiens
  misc_RNA (1)...(19): siRNA sense strand
ccaaugagagagaguguga

SEQ ID NO: 246764 - RNA, 19 nt, Homo sapiens
  misc_RNA (1)...(19): siRNA sense strand
cacaaagaauauggagaua

SEQ ID NO: 246765 - RNA, 19 nt, Homo sapiens
  misc_RNA (1)...(19): siRNA sense strand
aaacaaugccagaagaaga

SEQ ID NO: 246766 - RNA, 19 nt, Homo sapiens
  misc_RNA (1)...(19): siRNA sense strand
gcauccauccugccucuuu

SEQ ID NO: 246767 - RNA, 19 nt, Homo sapiens
  misc_RNA (1)...(19): siRNA sense strand
ugaagcacuuaaggaauaa

SEQ ID NO: 246768 - RNA, 19 nt, Homo sapiens
  misc_RNA (1)...(19): siRNA sense strand
gagaaacuggacccuauug

SEQ ID NO: 246769 - RNA, 19 nt, Homo sapiens
  misc_RNA (1)...(19): siRNA sense strand
aaaggcagcuucaauucuc

SEQ ID NO: 246770 - RNA, 19 nt, Homo sapiens
  misc_RNA (1)...(19): siRNA sense strand
gaaacuggacccuauugca

SEQ ID NO: 246771 - RNA, 19 nt, Homo sapiens
  misc_RNA (1)...(19): siRNA sense strand
agacaugcauaccucaguu

SEQ ID NO: 246772 - RNA, 19 nt, Homo sapiens
  misc_RNA (1)...(19): siRNA sense strand
cagauacacccacuaaugu

SEQ ID NO: 246773 - RNA, 19 nt, Homo sapiens
  misc_RNA (1)...(19): siRNA sense strand
ucaauucucuccgacacaa

SEQ ID NO: 246774 - RNA, 19 nt, Homo sapiens
  misc_RNA (1)...(19): siRNA sense strand
caagagguuaugauucaaa

SEQ ID NO: 246775 - RNA, 19 nt, Homo sapiens
  misc_RNA (1)...(19): siRNA sense strand
gagacauuguagugaagaa

SEQ ID NO: 246776 - RNA, 19 nt, Homo sapiens
  misc_RNA (1)...(19): siRNA sense strand
acaaacaggaugacacuug

SEQ ID NO: 246777 - RNA, 19 nt, Homo sapiens
  misc_RNA (1)...(19): siRNA sense strand
aaaaugcacugaauacaga

SEQ ID NO: 246778 - RNA, 19 nt, Homo sapiens
  misc_RNA (1)...(19): siRNA sense strand
ggauggauucacccagaua

SEQ ID NO: 246779 - RNA, 19 nt, Homo sapiens
  misc_RNA (1)...(19): siRNA sense strand
acacaaagaauauggagau

SEQ ID NO: 246780 - RNA, 19 nt, Homo sapiens
  misc_RNA (1)...(19): siRNA sense strand
gggcaaagaaauauuacug

SEQ ID NO: 246781 - RNA, 19 nt, Homo sapiens
  misc_RNA (1)...(19): siRNA sense strand
ggacaacagacaugcauac

SEQ ID NO: 246782 - RNA, 19 nt, Homo sapiens
  misc_RNA (1)...(19): siRNA sense strand
uugagaaacuggacccuau

SEQ ID NO: 246783 - RNA, 19 nt, Homo sapiens
  misc_RNA (1)...(19): siRNA sense strand
caaggugacagaagggaaa

SEQ ID NO: 246784 - RNA, 19 nt, Homo sapiens
  misc_RNA (1)...(19): siRNA sense strand
uauacgaccuuuggacaga

SEQ ID NO: 246785 - RNA, 19 nt, Homo sapiens
  misc_RNA (1)...(19): siRNA sense strand
gaucucgugugggcuaaug

SEQ ID NO: 246786 - RNA, 19 nt, Homo sapiens
  misc_RNA (1)...(19): siRNA sense strand
caucaagaacuuugugaau

SEQ ID NO: 246787 - RNA, 19 nt, Homo sapiens
  misc_RNA (1)...(19): siRNA sense strand
ggcaaagaaauauuacuga

SEQ ID NO: 246788 - RNA, 19 nt, Homo sapiens
  misc_RNA (1)...(19): siRNA sense strand
ugaaaggugggcaaagaaa

SEQ ID NO: 246789 - RNA, 19 nt, Homo sapiens
  misc_RNA (1)...(19): siRNA sense strand
gagcagcaccucaugaacu

SEQ ID NO: 246790 - RNA, 19 nt, Homo sapiens
  misc_RNA (1)...(19): siRNA sense strand
agacuggaauacagaacaa

SEQ ID NO: 246791 - RNA, 19 nt, Homo sapiens
  misc_RNA (1)...(19): siRNA sense strand
gguauagugguauuaauag

SEQ ID NO: 246792 - RNA, 19 nt, Homo sapiens
  misc_RNA (1)...(19): siRNA sense strand
ggagcuugccucauacaau

SEQ ID NO: 246793 - RNA, 19 nt, Homo sapiens
  misc_RNA (1)...(19): siRNA sense strand
agugaaaggugggcaaaga

SEQ ID NO: 246794 - RNA, 19 nt, Homo sapiens
  misc_RNA (1)...(19): siRNA sense strand
ugaagaaagaggauggauu

SEQ ID NO: 246795 - RNA, 19 nt, Homo sapiens
  misc_RNA (1)...(19): siRNA sense strand
gcagagaccagccuuuuau

SEQ ID NO: 246796 - RNA, 19 nt, Homo sapiens
  misc_RNA (1)...(19): siRNA sense strand
gagguugaagcuauuguug

SEQ ID NO: 246797 - RNA, 19 nt, Homo sapiens
  misc_RNA (1)...(19): siRNA sense strand
cccaggaguuugagguuga

SEQ ID NO: 246798 - RNA, 19 nt, Homo sapiens
  misc_RNA (1)...(19): siRNA sense strand
ucagaaacuugagaaacug

SEQ ID NO: 246799 - RNA, 19 nt, Homo sapiens
  misc_RNA (1)...(19): siRNA sense strand
ggguaaagcaucugccaau

SEQ ID NO: 246800 - RNA, 19 nt, Homo sapiens
  misc_RNA (1)...(19): siRNA sense strand
gaaauaguuaaugcucuga

SEQ ID NO: 246801 - RNA, 19 nt, Homo sapiens
  misc_RNA (1)...(19): siRNA sense strand
gcauaccucaguuccaaga

SEQ ID NO: 246802 - RNA, 19 nt, Homo sapiens
  misc_RNA (1)...(19): siRNA sense strand
cagagcagcaccucaugaa

SEQ ID NO: 246803 - RNA, 19 nt, Homo sapiens
  misc_RNA (1)...(19): siRNA sense strand
ucaaacaaugccagaagaa

SEQ ID NO: 246804 - RNA, 19 nt, Homo sapiens
  misc_RNA (1)...(19): siRNA sense strand
agugugaggugcugaggaa

SEQ ID NO: 246805 - RNA, 19 nt, Homo sapiens
  misc_RNA (1)...(19): siRNA sense strand
gguugaagcuauuguugac

SEQ ID NO: 246806 - RNA, 19 nt, Homo sapiens
  misc_RNA (1)...(19): siRNA sense strand
guuaauugcugggcgaaag

SEQ ID NO: 246807 - RNA, 19 nt, Homo sapiens
  misc_RNA (1)...(19): siRNA sense strand
caagaacguuaggagaaag

SEQ ID NO: 246808 - RNA, 19 nt, Homo sapiens
  misc_RNA (1)...(19): siRNA sense strand
ggacaccaucaagaacuuu

SEQ ID NO: 246809 - RNA, 19 nt, Homo sapiens
  misc_RNA (1)...(19): siRNA sense strand
gugcagaacagacuggaau

SEQ ID NO: 246810 - RNA, 19 nt, Homo sapiens
  misc_RNA (1)...(19): siRNA sense strand
agaaaggcagcuucaauuc

SEQ ID NO: 246811 - RNA, 19 nt, Homo sapiens
  misc_RNA (1)...(19): siRNA sense strand
ggaugacacuugggaacca

SEQ ID NO: 246812 - RNA, 19 nt, Homo sapiens
  misc_RNA (1)...(19): siRNA sense strand
guauuugguucgguggaaa

SEQ ID NO: 246813 - RNA, 19 nt, Homo sapiens
  misc_RNA (1)...(19): siRNA sense strand
gcuguucuucuauuacauu

SEQ ID NO: 246814 - RNA, 19 nt, Homo sapiens
  misc_RNA (1)...(19): siRNA sense strand
cauccauccugccucuuug

SEQ ID NO: 246815 - RNA, 19 nt, Homo sapiens
  misc_RNA (1)...(19): siRNA sense strand
acucagauacacccacuaa

SEQ ID NO: 246816 - RNA, 19 nt, Homo sapiens
  misc_RNA (1)...(19): siRNA sense strand
ccaagagguuaugauucaa

SEQ ID NO: 246817 - RNA, 19 nt, Homo sapiens
  misc_RNA (1)...(19): siRNA sense strand
caccauaaggcuaacagaa

SEQ ID NO: 246818 - RNA, 19 nt, Homo sapiens
  misc_RNA (1)...(19): siRNA sense strand
agauggcuguucuucuauu

SEQ ID NO: 246819 - RNA, 19 nt, Homo sapiens
  misc_RNA (1)...(19): siRNA sense strand
uaaggagcuugccucauac

SEQ ID NO: 246820 - RNA, 19 nt, Homo sapiens
  misc_RNA (1)...(19): siRNA sense strand
aaagagaguugguguuuaa

SEQ ID NO: 246821 - RNA, 19 nt, Homo sapiens
  misc_RNA (1)...(19): siRNA sense strand
gaaauccaguuugacgaua

SEQ ID NO: 246822 - RNA, 19 nt, Homo sapiens
  misc_RNA (1)...(19): siRNA sense strand
gagaguugguguuuaaaga

SEQ ID NO: 246823 - RNA, 19 nt, Homo sapiens
  misc_RNA (1)...(19): siRNA sense strand
gaaggcauauggcgagcuu

SEQ ID NO: 246824 - RNA, 19 nt, Homo sapiens
  misc_RNA (1)...(19): siRNA sense strand
uaaagaggauggacaagag

SEQ ID NO: 246825 - RNA, 19 nt, Homo sapiens
  misc_RNA (1)...(19): siRNA sense strand
acaagaguaugcucaggua

SEQ ID NO: 246826 - RNA, 19 nt, Homo sapiens
  misc_RNA (1)...(19): siRNA sense strand
caucagacauuauauuggu

SEQ ID NO: 246827 - RNA, 19 nt, Homo sapiens
  misc_RNA (1)...(19): siRNA sense strand
gaugaagacauugaugaua

SEQ ID NO: 246828 - RNA, 19 nt, Homo sapiens
  misc_RNA (1)...(19): siRNA sense strand
uaaaguacaaugcagauga

SEQ ID NO: 246829 - RNA, 19 nt, Homo sapiens
  misc_RNA (1)...(19): siRNA sense strand
aaaguacaaugcagaugaa

SEQ ID NO: 246830 - RNA, 19 nt, Homo sapiens
  misc_RNA (1)...(19): siRNA sense strand
caaugcagaugaagcuaga

SEQ ID NO: 246831 - RNA, 19 nt, Homo sapiens
  misc_RNA (1)...(19): siRNA sense strand
guugggaaauggacgauug

SEQ ID NO: 246832 - RNA, 19 nt, Homo sapiens
  misc_RNA (1)...(19): siRNA sense strand
gauaacaaagcugauguaa

SEQ ID NO: 246833 - RNA, 19 nt, Homo sapiens
  misc_RNA (1)...(19): siRNA sense strand
ggauaacaaagcugaugua

SEQ ID NO: 246834 - RNA, 19 nt, Homo sapiens
  misc_RNA (1)...(19): siRNA sense strand
uauuggagaugaugaugaa

SEQ ID NO: 246835 - RNA, 19 nt, Homo sapiens
  misc_RNA (1)...(19): siRNA sense strand
gcccaagaauaaagguaaa

SEQ ID NO: 246836 - RNA, 19 nt, Homo sapiens
  misc_RNA (1)...(19): siRNA sense strand
gauuggaagcauuguguuu

SEQ ID NO: 246837 - RNA, 19 nt, Homo sapiens
  misc_RNA (1)...(19): siRNA sense strand
cauaucagagggaaauuga

SEQ ID NO: 246838 - RNA, 19 nt, Homo sapiens
  misc_RNA (1)...(19): siRNA sense strand
ugaagacauugaugauauc

SEQ ID NO: 246839 - RNA, 19 nt, Homo sapiens
  misc_RNA (1)...(19): siRNA sense strand
augaugaaauccaguuuga

SEQ ID NO: 246840 - RNA, 19 nt, Homo sapiens
  misc_RNA (1)...(19): siRNA sense strand
gaugaugaaauccaguuug

SEQ ID NO: 246841 - RNA, 19 nt, Homo sapiens
  misc_RNA (1)...(19): siRNA sense strand
agaugaugaugaagacauu

SEQ ID NO: 246842 - RNA, 19 nt, Homo sapiens
  misc_RNA (1)...(19): siRNA sense strand
uaucagagggaaauugaga

SEQ ID NO: 246843 - RNA, 19 nt, Homo sapiens
  misc_RNA (1)...(19): siRNA sense strand
aaauccaguuugacgauau

SEQ ID NO: 246844 - RNA, 19 nt, Homo sapiens
  misc_RNA (1)...(19): siRNA sense strand
ggauaaauacaucagacau

SEQ ID NO: 246845 - RNA, 19 nt, Homo sapiens
  misc_RNA (1)...(19): siRNA sense strand
caagaauaaagguaaagga

SEQ ID NO: 246846 - RNA, 19 nt, Homo sapiens
  misc_RNA (1)...(19): siRNA sense strand
ucagagggaaauugagaaa

SEQ ID NO: 246847 - RNA, 19 nt, Homo sapiens
  misc_RNA (1)...(19): siRNA sense strand
uggagaugaugaugaaauc

SEQ ID NO: 246848 - RNA, 19 nt, Homo sapiens
  misc_RNA (1)...(19): siRNA sense strand
aaaagagaguugguguuua

SEQ ID NO: 246849 - RNA, 19 nt, Homo sapiens
  misc_RNA (1)...(19): siRNA sense strand
guacaaugcagaugaagcu

SEQ ID NO: 246850 - RNA, 19 nt, Homo sapiens
  misc_RNA (1)...(19): siRNA sense strand
gagaugaugaugaagacau

SEQ ID NO: 246851 - RNA, 19 nt, Homo sapiens
  misc_RNA (1)...(19): siRNA sense strand
agaguaugcucagguaauc

SEQ ID NO: 246852 - RNA, 19 nt, Homo sapiens
  misc_RNA (1)...(19): siRNA sense strand
gggaaauggacgauuggaa

SEQ ID NO: 246853 - RNA, 19 nt, Homo sapiens
  misc_RNA (1)...(19): siRNA sense strand
uuaaagaggauggacaaga

SEQ ID NO: 246854 - RNA, 19 nt, Homo sapiens
  misc_RNA (1)...(19): siRNA sense strand
gaugaugaagacauugaug

SEQ ID NO: 246855 - RNA, 19 nt, Homo sapiens
  misc_RNA (1)...(19): siRNA sense strand
gagcuuccagaacaugcua

SEQ ID NO: 246856 - RNA, 19 nt, Homo sapiens
  misc_RNA (1)...(19): siRNA sense strand
aauccaguuugacgauauu

SEQ ID NO: 246857 - RNA, 19 nt, Homo sapiens
  misc_RNA (1)...(19): siRNA sense strand
caagaguaugcucagguaa

SEQ ID NO: 246858 - RNA, 19 nt, Homo sapiens
  misc_RNA (1)...(19): siRNA sense strand
gagaugaugaugaaaucca

SEQ ID NO: 246859 - RNA, 19 nt, Homo sapiens
  misc_RNA (1)...(19): siRNA sense strand
ugaaacagacacauuuggu

SEQ ID NO: 246860 - RNA, 19 nt, Homo sapiens
  misc_RNA (1)...(19): siRNA sense strand
uaaagguaaaggagguaaa

SEQ ID NO: 246861 - RNA, 19 nt, Homo sapiens
  misc_RNA (1)...(19): siRNA sense strand
ugaaauccaguuugacgau

SEQ ID NO: 246862 - RNA, 19 nt, Homo sapiens
  misc_RNA (1)...(19): siRNA sense strand
gaagcauuguguuuugaug

SEQ ID NO: 246863 - RNA, 19 nt, Homo sapiens
  misc_RNA (1)...(19): siRNA sense strand
gauauuggagaugaugaug

SEQ ID NO: 246864 - RNA, 19 nt, Homo sapiens
  misc_RNA (1)...(19): siRNA sense strand
uccuggagaugaugaugaa

SEQ ID NO: 246865 - RNA, 19 nt, Homo sapiens
  misc_RNA (1)...(19): siRNA sense strand
guuuaaagaggauggacaa

SEQ ID NO: 246866 - RNA, 19 nt, Homo sapiens
  misc_RNA (1)...(19): siRNA sense strand
cacauuugguccuggagau

SEQ ID NO: 246867 - RNA, 19 nt, Homo sapiens
  misc_RNA (1)...(19): siRNA sense strand
ugacgauauuggagaugau

SEQ ID NO: 246868 - RNA, 19 nt, Homo sapiens
  misc_RNA (1)...(19): siRNA sense strand
ccaguuugacgauauugga

SEQ ID NO: 246869 - RNA, 19 nt, Homo sapiens
  misc_RNA (1)...(19): siRNA sense strand
gaagacauugaugauaucu

SEQ ID NO: 246870 - RNA, 19 nt, Homo sapiens
  misc_RNA (1)...(19): siRNA sense strand
ccauaucagagggaaauug

SEQ ID NO: 246871 - RNA, 19 nt, Homo sapiens
  misc_RNA (1)...(19): siRNA sense strand
uugacgauauuggagauga

SEQ ID NO: 246872 - RNA, 19 nt, Homo sapiens
  misc_RNA (1)...(19): siRNA sense strand
gaggauggacaagaguaug

SEQ ID NO: 246873 - RNA, 19 nt, Homo sapiens
  misc_RNA (1)...(19): siRNA sense strand
aagaggauggacaagagua

SEQ ID NO: 246874 - RNA, 19 nt, Homo sapiens
  misc_RNA (1)...(19): siRNA sense strand
gcagugaccgcuuugauga

SEQ ID NO: 246875 - RNA, 19 nt, Homo sapiens
  misc_RNA (1)...(19): siRNA sense strand
gagccugggugcugucuuc

SEQ ID NO: 246876 - RNA, 19 nt, Homo sapiens
  misc_RNA (1)...(19): siRNA sense strand
ggacucugcucuucaccau

SEQ ID NO: 246877 - RNA, 19 nt, Homo sapiens
  misc_RNA (1)...(19): siRNA sense strand
ucaacucccugccgcugua

SEQ ID NO: 246878 - RNA, 19 nt, Homo sapiens
  misc_RNA (1)...(19): siRNA sense strand
ccgaggagcuccagcaucu

SEQ ID NO: 246879 - RNA, 19 nt, Homo sapiens
  misc_RNA (1)...(19): siRNA sense strand
ccaacacgguggccucugu

SEQ ID NO: 246880 - RNA, 19 nt, Homo sapiens
  misc_RNA (1)...(19): siRNA sense strand
gcaccucacgcuaaucuuc

SEQ ID NO: 246881 - RNA, 19 nt, Homo sapiens
  misc_RNA (1)...(19): siRNA sense strand
caucgggacucugcucuuc

SEQ ID NO: 246882 - RNA, 19 nt, Homo sapiens
  misc_RNA (1)...(19): siRNA sense strand
guacacggaaggcggagaa

SEQ ID NO: 246883 - RNA, 19 nt, Homo sapiens
  misc_RNA (1)...(19): siRNA sense strand
ggacuccuguuccuaugac

SEQ ID NO: 246884 - RNA, 19 nt, Homo sapiens
  misc_RNA (1)...(19): siRNA sense strand
gagcaccucacgcuaaucu

SEQ ID NO: 246885 - RNA, 19 nt, Homo sapiens
  misc_RNA (1)...(19): siRNA sense strand
cugcccagcugaugaggaa

SEQ ID NO: 246886 - RNA, 19 nt, Homo sapiens
  misc_RNA (1)...(19): siRNA sense strand
guccugcacuuucccuuca

SEQ ID NO: 246887 - RNA, 19 nt, Homo sapiens
  misc_RNA (1)...(19): siRNA sense strand
gucagugccugccgagugu

SEQ ID NO: 246888 - RNA, 19 nt, Homo sapiens
  misc_RNA (1)...(19): siRNA sense strand
ggucaugcucaucuucuau

SEQ ID NO: 246889 - RNA, 19 nt, Homo sapiens
  misc_RNA (1)...(19): siRNA sense strand
ucccuccucucggacauua

SEQ ID NO: 246890 - RNA, 19 nt, Homo sapiens
  misc_RNA (1)...(19): siRNA sense strand
uggagcaccucacgcuaau

SEQ ID NO: 246891 - RNA, 19 nt, Homo sapiens
  misc_RNA (1)...(19): siRNA sense strand
uaaacccacugcccuacag

SEQ ID NO: 246892 - RNA, 19 nt, Homo sapiens
  misc_RNA (1)...(19): siRNA sense strand
gagagaggcggcacguucu

SEQ ID NO: 246893 - RNA, 19 nt, Homo sapiens
  misc_RNA (1)...(19): siRNA sense strand
acgcuaaucuucaguacac

SEQ ID NO: 246894 - RNA, 19 nt, Homo sapiens
  misc_RNA (1)...(19): siRNA sense strand
gaacccugcccagcugaug

SEQ ID NO: 246895 - RNA, 19 nt, Homo sapiens
  misc_RNA (1)...(19): siRNA sense strand
cuggagcaccucacgcuaa

SEQ ID NO: 246896 - RNA, 19 nt, Homo sapiens
  misc_RNA (1)...(19): siRNA sense strand
guggacuccuguuccuaug

SEQ ID NO: 246897 - RNA, 19 nt, Homo sapiens
  misc_RNA (1)...(19): siRNA sense strand
gagccucgggacccauuug

SEQ ID NO: 246898 - RNA, 19 nt, Homo sapiens
  misc_RNA (1)...(19): siRNA sense strand
gcucguggaccucaucaac

SEQ ID NO: 246899 - RNA, 19 nt, Homo sapiens
  misc_RNA (1)...(19): siRNA sense strand
ucacgcuaaucuucaguac

SEQ ID NO: 246900 - RNA, 19 nt, Homo sapiens
  misc_RNA (1)...(19): siRNA sense strand
ggagggaccuugccaggau

SEQ ID NO: 246901 - RNA, 19 nt, Homo sapiens
  misc_RNA (1)...(19): siRNA sense strand
gcagugaccgcuuugauga

SEQ ID NO: 246902 - RNA, 19 nt, Homo sapiens
  misc_RNA (1)...(19): siRNA sense strand
gagccugggugcugucuuc

SEQ ID NO: 246903 - RNA, 19 nt, Homo sapiens
  misc_RNA (1)...(19): siRNA sense strand
ggacucugcucuucaccau

SEQ ID NO: 246904 - RNA, 19 nt, Homo sapiens
  misc_RNA (1)...(19): siRNA sense strand
ucaacucccugccgcugua

SEQ ID NO: 246905 - RNA, 19 nt, Homo sapiens
  misc_RNA (1)...(19): siRNA sense strand
ccgaggagcuccagcaucu

SEQ ID NO: 246906 - RNA, 19 nt, Homo sapiens
  misc_RNA (1)...(19): siRNA sense strand
gaacagcacccugcaucug

SEQ ID NO: 246907 - RNA, 19 nt, Homo sapiens
  misc_RNA (1)...(19): siRNA sense strand
ccaacacgguggccucugu

SEQ ID NO: 246908 - RNA, 19 nt, Homo sapiens
  misc_RNA (1)...(19): siRNA sense strand
gcaccucacgcuaaucuuc

SEQ ID NO: 246909 - RNA, 19 nt, Homo sapiens
  misc_RNA (1)...(19): siRNA sense strand
caucgggacucugcucuuc

SEQ ID NO: 246910 - RNA, 19 nt, Homo sapiens
  misc_RNA (1)...(19): siRNA sense strand
guacacggaaggcggagaa

SEQ ID NO: 246911 - RNA, 19 nt, Homo sapiens
  misc_RNA (1)...(19): siRNA sense strand
ggacuccuguuccuaugac

SEQ ID NO: 246912 - RNA, 19 nt, Homo sapiens
  misc_RNA (1)...(19): siRNA sense strand
gagcaccucacgcuaaucu

SEQ ID NO: 246913 - RNA, 19 nt, Homo sapiens
  misc_RNA (1)...(19): siRNA sense strand
cuggagaggucgcuuugug

SEQ ID NO: 246914 - RNA, 19 nt, Homo sapiens
  misc_RNA (1)...(19): siRNA sense strand
cugcccagcugaugaggaa

SEQ ID NO: 246915 - RNA, 19 nt, Homo sapiens
  misc_RNA (1)...(19): siRNA sense strand
guccugcacuuucccuuca

SEQ ID NO: 246916 - RNA, 19 nt, Homo sapiens
  misc_RNA (1)...(19): siRNA sense strand
gucagugccugccgagugu

SEQ ID NO: 246917 - RNA, 19 nt, Homo sapiens
  misc_RNA (1)...(19): siRNA sense strand
ggucaugcucaucuucuau

SEQ ID NO: 246918 - RNA, 19 nt, Homo sapiens
  misc_RNA (1)...(19): siRNA sense strand
ucccuccucucggacauua

SEQ ID NO: 246919 - RNA, 19 nt, Homo sapiens
  misc_RNA (1)...(19): siRNA sense strand
uggagcaccucacgcuaau

SEQ ID NO: 246920 - RNA, 19 nt, Homo sapiens
  misc_RNA (1)...(19): siRNA sense strand
uaaacccacugcccuacag

SEQ ID NO: 246921 - RNA, 19 nt, Homo sapiens
  misc_RNA (1)...(19): siRNA sense strand
gagagaggcggcacguucu

SEQ ID NO: 246922 - RNA, 19 nt, Homo sapiens
  misc_RNA (1)...(19): siRNA sense strand
acgcuaaucuucaguacac

SEQ ID NO: 246923 - RNA, 19 nt, Homo sapiens
  misc_RNA (1)...(19): siRNA sense strand
gaacccugcccagcugaug

SEQ ID NO: 246924 - RNA, 19 nt, Homo sapiens
  misc_RNA (1)...(19): siRNA sense strand
ggguuuauuugcggauguu

SEQ ID NO: 246925 - RNA, 19 nt, Homo sapiens
  misc_RNA (1)...(19): siRNA sense strand
gcugcugugugcuccugaa

SEQ ID NO: 246926 - RNA, 19 nt, Homo sapiens
  misc_RNA (1)...(19): siRNA sense strand
cuggagcaccucacgcuaa

SEQ ID NO: 246927 - RNA, 19 nt, Homo sapiens
  misc_RNA (1)...(19): siRNA sense strand
guggacuccuguuccuaug

SEQ ID NO: 246928 - RNA, 19 nt, Homo sapiens
  misc_RNA (1)...(19): siRNA sense strand
gagccucgggacccauuug

SEQ ID NO: 246929 - RNA, 19 nt, Homo sapiens
  misc_RNA (1)...(19): siRNA sense strand
gcucguggaccucaucaac

SEQ ID NO: 246930 - RNA, 19 nt, Homo sapiens
  misc_RNA (1)...(19): siRNA sense strand
ucacgcuaaucuucaguac

SEQ ID NO: 246931 - RNA, 19 nt, Homo sapiens
  misc_RNA (1)...(19): siRNA sense strand
gcacuguccucuuugaaau

SEQ ID NO: 246932 - RNA, 19 nt, Homo sapiens
  misc_RNA (1)...(19): siRNA sense strand
gaucgacuuugucagguuu

SEQ ID NO: 246933 - RNA, 19 nt, Homo sapiens
  misc_RNA (1)...(19): siRNA sense strand
gucaacaacuuccgcauga

SEQ ID NO: 246934 - RNA, 19 nt, Homo sapiens
  misc_RNA (1)...(19): siRNA sense strand
ucagaacgguugcccauca

SEQ ID NO: 246935 - RNA, 19 nt, Homo sapiens
  misc_RNA (1)...(19): siRNA sense strand
gcacaauaaagcagacuau

SEQ ID NO: 246936 - RNA, 19 nt, Homo sapiens
  misc_RNA (1)...(19): siRNA sense strand
gaacaccugcgagcacauu

SEQ ID NO: 246937 - RNA, 19 nt, Homo sapiens
  misc_RNA (1)...(19): siRNA sense strand
gcgagcacauuuacgacuu

SEQ ID NO: 246938 - RNA, 19 nt, Homo sapiens
  misc_RNA (1)...(19): siRNA sense strand
ggcuggugaugcacaauaa

SEQ ID NO: 246939 - RNA, 19 nt, Homo sapiens
  misc_RNA (1)...(19): siRNA sense strand
gaggagaauaucuacaaga

SEQ ID NO: 246940 - RNA, 19 nt, Homo sapiens
  misc_RNA (1)...(19): siRNA sense strand
aagcuucgacuuccacuuu

SEQ ID NO: 246941 - RNA, 19 nt, Homo sapiens
  misc_RNA (1)...(19): siRNA sense strand
cucaggcacuguccucuuu

SEQ ID NO: 246942 - RNA, 19 nt, Homo sapiens
  misc_RNA (1)...(19): siRNA sense strand
caacaacuuccgcaugauc

SEQ ID NO: 246943 - RNA, 19 nt, Homo sapiens
  misc_RNA (1)...(19): siRNA sense strand
gcaaccagcuacucaaaag

SEQ ID NO: 246944 - RNA, 19 nt, Homo sapiens
  misc_RNA (1)...(19): siRNA sense strand
acaagccugucaacaacuu

SEQ ID NO: 246945 - RNA, 19 nt, Homo sapiens
  misc_RNA (1)...(19): siRNA sense strand
cagaacgguugcccaucaa

SEQ ID NO: 246946 - RNA, 19 nt, Homo sapiens
  misc_RNA (1)...(19): siRNA sense strand
gcuucuacuucguggauga

SEQ ID NO: 246947 - RNA, 19 nt, Homo sapiens
  misc_RNA (1)...(19): siRNA sense strand
gaugauccgccacccguau

SEQ ID NO: 246948 - RNA, 19 nt, Homo sapiens
  misc_RNA (1)...(19): siRNA sense strand
caggcacuguccucuuuga

SEQ ID NO: 246949 - RNA, 19 nt, Homo sapiens
  misc_RNA (1)...(19): siRNA sense strand
ggcacuguccucuuugaaa

SEQ ID NO: 246950 - RNA, 19 nt, Homo sapiens
  misc_RNA (1)...(19): siRNA sense strand
gaucgagaggcacuacuuc

SEQ ID NO: 246951 - RNA, 19 nt, Homo sapiens
  misc_RNA (1)...(19): siRNA sense strand
uuugucagguuuaagauuc

SEQ ID NO: 246952 - RNA, 19 nt, Homo sapiens
  misc_RNA (1)...(19): siRNA sense strand
gacuuugucagguuuaaga

SEQ ID NO: 246953 - RNA, 19 nt, Homo sapiens
  misc_RNA (1)...(19): siRNA sense strand
cgagcacauuuacgacuuc

SEQ ID NO: 246954 - RNA, 19 nt, Homo sapiens
  misc_RNA (1)...(19): siRNA sense strand
acaccugcgagcacauuua

SEQ ID NO: 246955 - RNA, 19 nt, Homo sapiens
  misc_RNA (1)...(19): siRNA sense strand
ugaggagaauaucuacaag

SEQ ID NO: 246956 - RNA, 19 nt, Homo sapiens
  misc_RNA (1)...(19): siRNA sense strand
gguuuaagauucgggacau

SEQ ID NO: 246957 - RNA, 19 nt, Homo sapiens
  misc_RNA (1)...(19): siRNA sense strand
auaaagcagacuauuccua

SEQ ID NO: 246958 - RNA, 19 nt, Homo sapiens
  misc_RNA (1)...(19): siRNA sense strand
aaagcagacuauuccuaca

SEQ ID NO: 246959 - RNA, 19 nt, Homo sapiens
  misc_RNA (1)...(19): siRNA sense strand
cggcuggugaugcacaaua

SEQ ID NO: 246960 - RNA, 19 nt, Homo sapiens
  misc_RNA (1)...(19): siRNA sense strand
cugaggagaauaucuacaa

SEQ ID NO: 246961 - RNA, 19 nt, Homo sapiens
  misc_RNA (1)...(19): siRNA sense strand
ccgcaaccagcuacucaaa

SEQ ID NO: 246962 - RNA, 19 nt, Homo sapiens
  misc_RNA (1)...(19): siRNA sense strand
gcacuguccucuuugaaau

SEQ ID NO: 246963 - RNA, 19 nt, Homo sapiens
  misc_RNA (1)...(19): siRNA sense strand
gaucgacuuugucagguuu

SEQ ID NO: 246964 - RNA, 19 nt, Homo sapiens
  misc_RNA (1)...(19): siRNA sense strand
gucaacaacuuccgcauga

SEQ ID NO: 246965 - RNA, 19 nt, Homo sapiens
  misc_RNA (1)...(19): siRNA sense strand
ucagaacgguugcccauca

SEQ ID NO: 246966 - RNA, 19 nt, Homo sapiens
  misc_RNA (1)...(19): siRNA sense strand
gaacaccugcgagcacauu

SEQ ID NO: 246967 - RNA, 19 nt, Homo sapiens
  misc_RNA (1)...(19): siRNA sense strand
gcgagcacauuuacgacuu

SEQ ID NO: 246968 - RNA, 19 nt, Homo sapiens
  misc_RNA (1)...(19): siRNA sense strand
gaggagaauaucuacaaga

SEQ ID NO: 246969 - RNA, 19 nt, Homo sapiens
  misc_RNA (1)...(19): siRNA sense strand
aagcuucgacuuccacuuu

SEQ ID NO: 246970 - RNA, 19 nt, Homo sapiens
  misc_RNA (1)...(19): siRNA sense strand
cucaggcacuguccucuuu

SEQ ID NO: 246971 - RNA, 19 nt, Homo sapiens
  misc_RNA (1)...(19): siRNA sense strand
caacaacuuccgcaugauc

SEQ ID NO: 246972 - RNA, 19 nt, Homo sapiens
  misc_RNA (1)...(19): siRNA sense strand
gcaaccagcuacucaaaag

SEQ ID NO: 246973 - RNA, 19 nt, Homo sapiens
  misc_RNA (1)...(19): siRNA sense strand
acaagccugucaacaacuu

SEQ ID NO: 246974 - RNA, 19 nt, Homo sapiens
  misc_RNA (1)...(19): siRNA sense strand
cagaacgguugcccaucaa

SEQ ID NO: 246975 - RNA, 19 nt, Homo sapiens
  misc_RNA (1)...(19): siRNA sense strand
caggcacuguccucuuuga

SEQ ID NO: 246976 - RNA, 19 nt, Homo sapiens
  misc_RNA (1)...(19): siRNA sense strand
ggcacuguccucuuugaaa

SEQ ID NO: 246977 - RNA, 19 nt, Homo sapiens
  misc_RNA (1)...(19): siRNA sense strand
gaucgagaggcacuacuuc

SEQ ID NO: 246978 - RNA, 19 nt, Homo sapiens
  misc_RNA (1)...(19): siRNA sense strand
uuugucagguuuaagauuc

SEQ ID NO: 246979 - RNA, 19 nt, Homo sapiens
  misc_RNA (1)...(19): siRNA sense strand
gacuuugucagguuuaaga

SEQ ID NO: 246980 - RNA, 19 nt, Homo sapiens
  misc_RNA (1)...(19): siRNA sense strand
cgagcacauuuacgacuuc

SEQ ID NO: 246981 - RNA, 19 nt, Homo sapiens
  misc_RNA (1)...(19): siRNA sense strand
acaccugcgagcacauuua

SEQ ID NO: 246982 - RNA, 19 nt, Homo sapiens
  misc_RNA (1)...(19): siRNA sense strand
ugaggagaauaucuacaag

SEQ ID NO: 246983 - RNA, 19 nt, Homo sapiens
  misc_RNA (1)...(19): siRNA sense strand
gguuuaagauucgggacau

SEQ ID NO: 246984 - RNA, 19 nt, Homo sapiens
  misc_RNA (1)...(19): siRNA sense strand
cugaggagaauaucuacaa

SEQ ID NO: 246985 - RNA, 19 nt, Homo sapiens
  misc_RNA (1)...(19): siRNA sense strand
ccgcaaccagcuacucaaa

SEQ ID NO: 246986 - RNA, 19 nt, Homo sapiens
  misc_RNA (1)...(19): siRNA sense strand
ggaaagaaaucaccuaaga

SEQ ID NO: 246987 - RNA, 19 nt, Homo sapiens
  misc_RNA (1)...(19): siRNA sense strand
auagaaagcucaagcaaua

SEQ ID NO: 246988 - RNA, 19 nt, Homo sapiens
  misc_RNA (1)...(19): siRNA sense strand
ucaaggaagucacuaauga

SEQ ID NO: 246989 - RNA, 19 nt, Homo sapiens
  misc_RNA (1)...(19): siRNA sense strand
gcaauaaucugcaaguuuu

SEQ ID NO: 246990 - RNA, 19 nt, Homo sapiens
  misc_RNA (1)...(19): siRNA sense strand
ggaagucacuaaugagaug

SEQ ID NO: 246991 - RNA, 19 nt, Homo sapiens
  misc_RNA (1)...(19): siRNA sense strand
cagcaggaaacuccaauua

SEQ ID NO: 246992 - RNA, 19 nt, Homo sapiens
  misc_RNA (1)...(19): siRNA sense strand
gaaacuccaauuaccagua

SEQ ID NO: 246993 - RNA, 19 nt, Homo sapiens
  misc_RNA (1)...(19): siRNA sense strand
gggcagauaauguugaauu

SEQ ID NO: 246994 - RNA, 19 nt, Homo sapiens
  misc_RNA (1)...(19): siRNA sense strand
ucaaugugguggagaguga

SEQ ID NO: 246995 - RNA, 19 nt, Homo sapiens
  misc_RNA (1)...(19): siRNA sense strand
aaagaaaucaccuaagaga

SEQ ID NO: 246996 - RNA, 19 nt, Homo sapiens
  misc_RNA (1)...(19): siRNA sense strand
aaacuccaauuaccaguau

SEQ ID NO: 246997 - RNA, 19 nt, Homo sapiens
  misc_RNA (1)...(19): siRNA sense strand
gauaacggcucucaaaauc

SEQ ID NO: 246998 - RNA, 19 nt, Homo sapiens
  misc_RNA (1)...(19): siRNA sense strand
gcaggaaacuccaauuacc

SEQ ID NO: 246999 - RNA, 19 nt, Homo sapiens
  misc_RNA (1)...(19): siRNA sense strand
ccacagcugcgucuacauu

SEQ ID NO: 247000 - RNA, 19 nt, Homo sapiens
  misc_RNA (1)...(19): siRNA sense strand
gauagaaagcucaagcaau

SEQ ID NO: 247001 - RNA, 19 nt, Homo sapiens
  misc_RNA (1)...(19): siRNA sense strand
aagugaagcugaccaacaa

SEQ ID NO: 247002 - RNA, 19 nt, Homo sapiens
  misc_RNA (1)...(19): siRNA sense strand
gaaagaaaucaccuaagag

SEQ ID NO: 247003 - RNA, 19 nt, Homo sapiens
  misc_RNA (1)...(19): siRNA sense strand
gccagcaugugaccuauuc

SEQ ID NO: 247004 - RNA, 19 nt, Homo sapiens
  misc_RNA (1)...(19): siRNA sense strand
cuuccucacuggaugguua

SEQ ID NO: 247005 - RNA, 19 nt, Homo sapiens
  misc_RNA (1)...(19): siRNA sense strand
gcgggcagauaauguugaa

SEQ ID NO: 247006 - RNA, 19 nt, Homo sapiens
  misc_RNA (1)...(19): siRNA sense strand
gcccagcgauggcacuguu

SEQ ID NO: 247007 - RNA, 19 nt, Homo sapiens
  misc_RNA (1)...(19): siRNA sense strand
cugcguacaugcacagaaa

SEQ ID NO: 247008 - RNA, 19 nt, Homo sapiens
  misc_RNA (1)...(19): siRNA sense strand
cagauaauguugaauucuc

SEQ ID NO: 247009 - RNA, 19 nt, Homo sapiens
  misc_RNA (1)...(19): siRNA sense strand
ggcagauaauguugaauuc

SEQ ID NO: 247010 - RNA, 19 nt, Homo sapiens
  misc_RNA (1)...(19): siRNA sense strand
ugaaagcucccaucuccuu

SEQ ID NO: 247011 - RNA, 19 nt, Homo sapiens
  misc_RNA (1)...(19): siRNA sense strand
guugaauucucugcauaaa

SEQ ID NO: 247012 - RNA, 19 nt, Homo sapiens
  misc_RNA (1)...(19): siRNA sense strand
gcaaagugaagcugaccaa

SEQ ID NO: 247013 - RNA, 19 nt, Homo sapiens
  misc_RNA (1)...(19): siRNA sense strand
uuucucaucugcucaaugu

SEQ ID NO: 247014 - RNA, 19 nt, Homo sapiens
  misc_RNA (1)...(19): siRNA sense strand
gagaugauugugaccaaga

SEQ ID NO: 247015 - RNA, 19 nt, Homo sapiens
  misc_RNA (1)...(19): siRNA sense strand
aaacccagcugugacuuca

SEQ ID NO: 247016 - RNA, 19 nt, Homo sapiens
  misc_RNA (1)...(19): siRNA sense strand
caaggaaagaaaucaccua

SEQ ID NO: 247017 - RNA, 19 nt, Homo sapiens
  misc_RNA (1)...(19): siRNA sense strand
ugacagcuggacuuccuua

SEQ ID NO: 247018 - RNA, 19 nt, Homo sapiens
  misc_RNA (1)...(19): siRNA sense strand
aaacugcuccuucccugaa

SEQ ID NO: 247019 - RNA, 19 nt, Homo sapiens
  misc_RNA (1)...(19): siRNA sense strand
gaaacccagcugugacuuc

SEQ ID NO: 247020 - RNA, 19 nt, Homo sapiens
  misc_RNA (1)...(19): siRNA sense strand
ucugagagccagcauguga

SEQ ID NO: 247021 - RNA, 19 nt, Homo sapiens
  misc_RNA (1)...(19): siRNA sense strand
uaacggcucucaaaaucaa

SEQ ID NO: 247022 - RNA, 19 nt, Homo sapiens
  misc_RNA (1)...(19): siRNA sense strand
ucacuaaugagaugauugu

SEQ ID NO: 247023 - RNA, 19 nt, Homo sapiens
  misc_RNA (1)...(19): siRNA sense strand
cauagugcguguuggaagu

SEQ ID NO: 247024 - RNA, 19 nt, Homo sapiens
  misc_RNA (1)...(19): siRNA sense strand
uuuccaguccuaaagauua

SEQ ID NO: 247025 - RNA, 19 nt, Homo sapiens
  misc_RNA (1)...(19): siRNA sense strand
cagcuggacuuccuuaucc

SEQ ID NO: 247026 - RNA, 19 nt, Homo sapiens
  misc_RNA (1)...(19): siRNA sense strand
ucacauagugcguguugga

SEQ ID NO: 247027 - RNA, 19 nt, Homo sapiens
  misc_RNA (1)...(19): siRNA sense strand
gaaagcucaagcaauaauc

SEQ ID NO: 247028 - RNA, 19 nt, Homo sapiens
  misc_RNA (1)...(19): siRNA sense strand
uaccggaggcuaucucuga

SEQ ID NO: 247029 - RNA, 19 nt, Homo sapiens
  misc_RNA (1)...(19): siRNA sense strand
gauucaaggaagucacuaa

SEQ ID NO: 247030 - RNA, 19 nt, Homo sapiens
  misc_RNA (1)...(19): siRNA sense strand
gugacugccuaucagaaug

SEQ ID NO: 247031 - RNA, 19 nt, Homo sapiens
  misc_RNA (1)...(19): siRNA sense strand
gcacagcaggaaacuccaa

SEQ ID NO: 247032 - RNA, 19 nt, Homo sapiens
  misc_RNA (1)...(19): siRNA sense strand
gaauggcagacggauguuu

SEQ ID NO: 247033 - RNA, 19 nt, Homo sapiens
  misc_RNA (1)...(19): siRNA sense strand
aaggaaagaaaucaccuaa

SEQ ID NO: 247034 - RNA, 19 nt, Homo sapiens
  misc_RNA (1)...(19): siRNA sense strand
ggaccugacagcuggacuu

SEQ ID NO: 247035 - RNA, 19 nt, Homo sapiens
  misc_RNA (1)...(19): siRNA sense strand
gaaaccauucucccucagu

SEQ ID NO: 247036 - RNA, 19 nt, Homo sapiens
  misc_RNA (1)...(19): siRNA sense strand
gagccagcaugugaccuau

SEQ ID NO: 247037 - RNA, 19 nt, Homo sapiens
  misc_RNA (1)...(19): siRNA sense strand
aagaauggcagacggaugu

SEQ ID NO: 247038 - RNA, 19 nt, Homo sapiens
  misc_RNA (1)...(19): siRNA sense strand
aagcaauaaucugcaaguu

SEQ ID NO: 247039 - RNA, 19 nt, Homo sapiens
  misc_RNA (1)...(19): siRNA sense strand
gcgauggcacuguuucuca

SEQ ID NO: 247040 - RNA, 19 nt, Homo sapiens
  misc_RNA (1)...(19): siRNA sense strand
guucacauagugcguguug

SEQ ID NO: 247041 - RNA, 19 nt, Homo sapiens
  misc_RNA (1)...(19): siRNA sense strand
aaagugaagcugaccaaca

SEQ ID NO: 247042 - RNA, 19 nt, Homo sapiens
  misc_RNA (1)...(19): siRNA sense strand
ugacugccuaucagaauga

SEQ ID NO: 247043 - RNA, 19 nt, Homo sapiens
  misc_RNA (1)...(19): siRNA sense strand
cagugaauuugauagaaag

SEQ ID NO: 247044 - RNA, 19 nt, Homo sapiens
  misc_RNA (1)...(19): siRNA sense strand
agaaagcucaagcaauaau

SEQ ID NO: 247045 - RNA, 19 nt, Homo sapiens
  misc_RNA (1)...(19): siRNA sense strand
gacagucaccgcuggaagu

SEQ ID NO: 247046 - RNA, 19 nt, Homo sapiens
  misc_RNA (1)...(19): siRNA sense strand
agcaauaaucugcaaguuu

SEQ ID NO: 247047 - RNA, 19 nt, Homo sapiens
  misc_RNA (1)...(19): siRNA sense strand
gcagauaauguugaauucu

SEQ ID NO: 247048 - RNA, 19 nt, Homo sapiens
  misc_RNA (1)...(19): siRNA sense strand
ggauguuuccaguccuaaa

SEQ ID NO: 247049 - RNA, 19 nt, Homo sapiens
  misc_RNA (1)...(19): siRNA sense strand
agaugauugugaccaagaa

SEQ ID NO: 247050 - RNA, 19 nt, Homo sapiens
  misc_RNA (1)...(19): siRNA sense strand
gaccaacaagcucaaugga

SEQ ID NO: 247051 - RNA, 19 nt, Homo sapiens
  misc_RNA (1)...(19): siRNA sense strand
cgauggcacuguuucucau

SEQ ID NO: 247052 - RNA, 19 nt, Homo sapiens
  misc_RNA (1)...(19): siRNA sense strand
caacggaccaaucaaucca

SEQ ID NO: 247053 - RNA, 19 nt, Homo sapiens
  misc_RNA (1)...(19): siRNA sense strand
guacaugcacagaaaccau

SEQ ID NO: 247054 - RNA, 19 nt, Homo sapiens
  misc_RNA (1)...(19): siRNA sense strand
uggaagugcccaucgaaug

SEQ ID NO: 247055 - RNA, 19 nt, Homo sapiens
  misc_RNA (1)...(19): siRNA sense strand
gaagucacuaaugagauga

SEQ ID NO: 247056 - RNA, 19 nt, Homo sapiens
  misc_RNA (1)...(19): siRNA sense strand
ggcagagauucaaggaagu

SEQ ID NO: 247057 - RNA, 19 nt, Homo sapiens
  misc_RNA (1)...(19): siRNA sense strand
caagcaauaaucugcaagu

SEQ ID NO: 247058 - RNA, 19 nt, Homo sapiens
  misc_RNA (1)...(19): siRNA sense strand
uagaaagcucaagcaauaa

SEQ ID NO: 247059 - RNA, 19 nt, Homo sapiens
  misc_RNA (1)...(19): siRNA sense strand
ccauggcugugagcacuau

SEQ ID NO: 247060 - RNA, 19 nt, Homo sapiens
  misc_RNA (1)...(19): siRNA sense strand
ggagugugcacagcaggaa

SEQ ID NO: 247061 - RNA, 19 nt, Homo sapiens
  misc_RNA (1)...(19): siRNA sense strand
acagcugcgucuacauuca

SEQ ID NO: 247062 - RNA, 19 nt, Homo sapiens
  misc_RNA (1)...(19): siRNA sense strand
gauguuuccaguccuaaag

SEQ ID NO: 247063 - RNA, 19 nt, Homo sapiens
  misc_RNA (1)...(19): siRNA sense strand
caaggaagucacuaaugag

SEQ ID NO: 247064 - RNA, 19 nt, Homo sapiens
  misc_RNA (1)...(19): siRNA sense strand
aaggaagucacuaaugaga

SEQ ID NO: 247065 - RNA, 19 nt, Homo sapiens
  misc_RNA (1)...(19): siRNA sense strand
ucccaucuccuucagcaaa

SEQ ID NO: 247066 - RNA, 19 nt, Homo sapiens
  misc_RNA (1)...(19): siRNA sense strand
ccacaccaacggaccaauc

SEQ ID NO: 247067 - RNA, 19 nt, Homo sapiens
  misc_RNA (1)...(19): siRNA sense strand
ugauagaaagcucaagcaa

SEQ ID NO: 247068 - RNA, 19 nt, Homo sapiens
  misc_RNA (1)...(19): siRNA sense strand
acuaaugagaugauuguga

SEQ ID NO: 247069 - RNA, 19 nt, Homo sapiens
  misc_RNA (1)...(19): siRNA sense strand
gagacguaccggaggcuau

SEQ ID NO: 247070 - RNA, 19 nt, Homo sapiens
  misc_RNA (1)...(19): siRNA sense strand
gcagagauucaaggaaguc

SEQ ID NO: 247071 - RNA, 19 nt, Homo sapiens
  misc_RNA (1)...(19): siRNA sense strand
caucgaaugguaacaaacu

SEQ ID NO: 247072 - RNA, 19 nt, Homo sapiens
  misc_RNA (1)...(19): siRNA sense strand
ccucagugaauuugauaga

SEQ ID NO: 247073 - RNA, 19 nt, Homo sapiens
  misc_RNA (1)...(19): siRNA sense strand
caccaacggaccaaucaau

SEQ ID NO: 247074 - RNA, 19 nt, Homo sapiens
  misc_RNA (1)...(19): siRNA sense strand
acggauguuuccaguccua

SEQ ID NO: 247075 - RNA, 19 nt, Homo sapiens
  misc_RNA (1)...(19): siRNA sense strand
gaaaguuccuuaugagaua

SEQ ID NO: 247076 - RNA, 19 nt, Homo sapiens
  misc_RNA (1)...(19): siRNA sense strand
gaauggagguggagaagua

SEQ ID NO: 247077 - RNA, 19 nt, Homo sapiens
  misc_RNA (1)...(19): siRNA sense strand
ccaaagaauuccagauuaa

SEQ ID NO: 247078 - RNA, 19 nt, Homo sapiens
  misc_RNA (1)...(19): siRNA sense strand
caagugagcucgaaaguuc

SEQ ID NO: 247079 - RNA, 19 nt, Homo sapiens
  misc_RNA (1)...(19): siRNA sense strand
gcucgaaaguuccuuauga

SEQ ID NO: 247080 - RNA, 19 nt, Homo sapiens
  misc_RNA (1)...(19): siRNA sense strand
ggagucagauuccagguuu

SEQ ID NO: 247081 - RNA, 19 nt, Homo sapiens
  misc_RNA (1)...(19): siRNA sense strand
gcacuuaucaccuuugaaa

SEQ ID NO: 247082 - RNA, 19 nt, Homo sapiens
  misc_RNA (1)...(19): siRNA sense strand
ucacauagcauacuuugaa

SEQ ID NO: 247083 - RNA, 19 nt, Homo sapiens
  misc_RNA (1)...(19): siRNA sense strand
gacaagcacuuaucaccuu

SEQ ID NO: 247084 - RNA, 19 nt, Homo sapiens
  misc_RNA (1)...(19): siRNA sense strand
acaagaggcuaccaaagaa

SEQ ID NO: 247085 - RNA, 19 nt, Homo sapiens
  misc_RNA (1)...(19): siRNA sense strand
ugauaaagaugacacacaa

SEQ ID NO: 247086 - RNA, 19 nt, Homo sapiens
  misc_RNA (1)...(19): siRNA sense strand
ucaaauaucuccuguucgu

SEQ ID NO: 247087 - RNA, 19 nt, Homo sapiens
  misc_RNA (1)...(19): siRNA sense strand
acacagaaauacacuugaa

SEQ ID NO: 247088 - RNA, 19 nt, Homo sapiens
  misc_RNA (1)...(19): siRNA sense strand
gaguuacuguuucuccaua

SEQ ID NO: 247089 - RNA, 19 nt, Homo sapiens
  misc_RNA (1)...(19): siRNA sense strand
ggagugcagucaucacguu

SEQ ID NO: 247090 - RNA, 19 nt, Homo sapiens
  misc_RNA (1)...(19): siRNA sense strand
gcgugaagaucaaaugaga

SEQ ID NO: 247091 - RNA, 19 nt, Homo sapiens
  misc_RNA (1)...(19): siRNA sense strand
uggaguggcugacaagauu

SEQ ID NO: 247092 - RNA, 19 nt, Homo sapiens
  misc_RNA (1)...(19): siRNA sense strand
accaaagaauuccagauua

SEQ ID NO: 247093 - RNA, 19 nt, Homo sapiens
  misc_RNA (1)...(19): siRNA sense strand
ggauauuccugaaacaaag

SEQ ID NO: 247094 - RNA, 19 nt, Homo sapiens
  misc_RNA (1)...(19): siRNA sense strand
ugucaaauaucuccuguuc

SEQ ID NO: 247095 - RNA, 19 nt, Homo sapiens
  misc_RNA (1)...(19): siRNA sense strand
aaucaaaccugccauagag

SEQ ID NO: 247096 - RNA, 19 nt, Homo sapiens
  misc_RNA (1)...(19): siRNA sense strand
ccaagccaguuccauuaaa

SEQ ID NO: 247097 - RNA, 19 nt, Homo sapiens
  misc_RNA (1)...(19): siRNA sense strand
ggccaagccaguuccauua

SEQ ID NO: 247098 - RNA, 19 nt, Homo sapiens
  misc_RNA (1)...(19): siRNA sense strand
cacaacaaauucuuaagga

SEQ ID NO: 247099 - RNA, 19 nt, Homo sapiens
  misc_RNA (1)...(19): siRNA sense strand
caagccaguuccauuaaau

SEQ ID NO: 247100 - RNA, 19 nt, Homo sapiens
  misc_RNA (1)...(19): siRNA sense strand
ggucaaguguucucuaggu

SEQ ID NO: 247101 - RNA, 19 nt, Homo sapiens
  misc_RNA (1)...(19): siRNA sense strand
auaagggacuaauugauga

SEQ ID NO: 247102 - RNA, 19 nt, Homo sapiens
  misc_RNA (1)...(19): siRNA sense strand
caaaccugccauagaguua

SEQ ID NO: 247103 - RNA, 19 nt, Homo sapiens
  misc_RNA (1)...(19): siRNA sense strand
aaagaugacacacaacaaa

SEQ ID NO: 247104 - RNA, 19 nt, Homo sapiens
  misc_RNA (1)...(19): siRNA sense strand
aaauaucuccuguucguuu

SEQ ID NO: 247105 - RNA, 19 nt, Homo sapiens
  misc_RNA (1)...(19): siRNA sense strand
caaaugagagacaaacuag

SEQ ID NO: 247106 - RNA, 19 nt, Homo sapiens
  misc_RNA (1)...(19): siRNA sense strand
gaagaucaaaugagagaca

SEQ ID NO: 247107 - RNA, 19 nt, Homo sapiens
  misc_RNA (1)...(19): siRNA sense strand
ccagguuuauguagaaguu

SEQ ID NO: 247108 - RNA, 19 nt, Homo sapiens
  misc_RNA (1)...(19): siRNA sense strand
ucaaaugagagacaaacua

SEQ ID NO: 247109 - RNA, 19 nt, Homo sapiens
  misc_RNA (1)...(19): siRNA sense strand
uacaagaggcuaccaaaga

SEQ ID NO: 247110 - RNA, 19 nt, Homo sapiens
  misc_RNA (1)...(19): siRNA sense strand
caaaauaagggacuaauug

SEQ ID NO: 247111 - RNA, 19 nt, Homo sapiens
  misc_RNA (1)...(19): siRNA sense strand
gacacacaacaaauucuua

SEQ ID NO: 247112 - RNA, 19 nt, Homo sapiens
  misc_RNA (1)...(19): siRNA sense strand
caaguguucucuaggucaa

SEQ ID NO: 247113 - RNA, 19 nt, Homo sapiens
  misc_RNA (1)...(19): siRNA sense strand
gaagaaauuguggaggauu

SEQ ID NO: 247114 - RNA, 19 nt, Homo sapiens
  misc_RNA (1)...(19): siRNA sense strand
gauguaaaucuggagguua

SEQ ID NO: 247115 - RNA, 19 nt, Homo sapiens
  misc_RNA (1)...(19): siRNA sense strand
gagucagauuccagguuua

SEQ ID NO: 247116 - RNA, 19 nt, Homo sapiens
  misc_RNA (1)...(19): siRNA sense strand
gaugacacacaacaaauuc

SEQ ID NO: 247117 - RNA, 19 nt, Homo sapiens
  misc_RNA (1)...(19): siRNA sense strand
uaccaaagaauuccagauu

SEQ ID NO: 247118 - RNA, 19 nt, Homo sapiens
  misc_RNA (1)...(19): siRNA sense strand
cauagcauacuuugaagaa

SEQ ID NO: 247119 - RNA, 19 nt, Homo sapiens
  misc_RNA (1)...(19): siRNA sense strand
gagaaugacagccaguugu

SEQ ID NO: 247120 - RNA, 19 nt, Homo sapiens
  misc_RNA (1)...(19): siRNA sense strand
gauuccagguuuauguaga

SEQ ID NO: 247121 - RNA, 19 nt, Homo sapiens
  misc_RNA (1)...(19): siRNA sense strand
agaaguagauguggucaag

SEQ ID NO: 247122 - RNA, 19 nt, Homo sapiens
  misc_RNA (1)...(19): siRNA sense strand
uugaaacuccugagaauga

SEQ ID NO: 247123 - RNA, 19 nt, Homo sapiens
  misc_RNA (1)...(19): siRNA sense strand
guggaggauuuaauuaaca

SEQ ID NO: 247124 - RNA, 19 nt, Homo sapiens
  misc_RNA (1)...(19): siRNA sense strand
ugccauagaguuacuguuu

SEQ ID NO: 247125 - RNA, 19 nt, Homo sapiens
  misc_RNA (1)...(19): siRNA sense strand
gugaagaucaaaugagaga

SEQ ID NO: 247126 - RNA, 19 nt, Homo sapiens
  misc_RNA (1)...(19): siRNA sense strand
aauaagggacuaauugaug

SEQ ID NO: 247127 - RNA, 19 nt, Homo sapiens
  misc_RNA (1)...(19): siRNA sense strand
cgaaaguuccuuaugagau

SEQ ID NO: 247128 - RNA, 19 nt, Homo sapiens
  misc_RNA (1)...(19): siRNA sense strand
acagccaguugucaaauau

SEQ ID NO: 247129 - RNA, 19 nt, Homo sapiens
  misc_RNA (1)...(19): siRNA sense strand
gccauagaguuacuguuuc

SEQ ID NO: 247130 - RNA, 19 nt, Homo sapiens
  misc_RNA (1)...(19): siRNA sense strand
uagauguggucaaguguuc

SEQ ID NO: 247131 - RNA, 19 nt, Homo sapiens
  misc_RNA (1)...(19): siRNA sense strand
ccauagaguuacuguuucu

SEQ ID NO: 247132 - RNA, 19 nt, Homo sapiens
  misc_RNA (1)...(19): siRNA sense strand
gaacaucuaagaggacagu

SEQ ID NO: 247133 - RNA, 19 nt, Homo sapiens
  misc_RNA (1)...(19): siRNA sense strand
acaagcacuuaucaccuuu

SEQ ID NO: 247134 - RNA, 19 nt, Homo sapiens
  misc_RNA (1)...(19): siRNA sense strand
gccaagccaguuccauuaa

SEQ ID NO: 247135 - RNA, 19 nt, Homo sapiens
  misc_RNA (1)...(19): siRNA sense strand
aagaagaaguugcucaaaa

SEQ ID NO: 247136 - RNA, 19 nt, Homo sapiens
  misc_RNA (1)...(19): siRNA sense strand
aaguagauguggucaagug

SEQ ID NO: 247137 - RNA, 19 nt, Homo sapiens
  misc_RNA (1)...(19): siRNA sense strand
uaaauucaggagucagauu

SEQ ID NO: 247138 - RNA, 19 nt, Homo sapiens
  misc_RNA (1)...(19): siRNA sense strand
cagauuccagguuuaugua

SEQ ID NO: 247139 - RNA, 19 nt, Homo sapiens
  misc_RNA (1)...(19): siRNA sense strand
auauucagcuaaagaagga

SEQ ID NO: 247140 - RNA, 19 nt, Homo sapiens
  misc_RNA (1)...(19): siRNA sense strand
uaaagaugacacacaacaa

SEQ ID NO: 247141 - RNA, 19 nt, Homo sapiens
  misc_RNA (1)...(19): siRNA sense strand
gugcagucaucacguuugu

SEQ ID NO: 247142 - RNA, 19 nt, Homo sapiens
  misc_RNA (1)...(19): siRNA sense strand
agaagaaguugcucaaaau

SEQ ID NO: 247143 - RNA, 19 nt, Homo sapiens
  misc_RNA (1)...(19): siRNA sense strand
uaaagaaggagauccaaaa

SEQ ID NO: 247144 - RNA, 19 nt, Homo sapiens
  misc_RNA (1)...(19): siRNA sense strand
cuaaagaaggagauccaaa

SEQ ID NO: 247145 - RNA, 19 nt, Homo sapiens
  misc_RNA (1)...(19): siRNA sense strand
aagcacuuaucaccuuuga

SEQ ID NO: 247146 - RNA, 19 nt, Homo sapiens
  misc_RNA (1)...(19): siRNA sense strand
ugaagaaauuguggaggau

SEQ ID NO: 247147 - RNA, 19 nt, Homo sapiens
  misc_RNA (1)...(19): siRNA sense strand
auaaaucaaaccugccaua

SEQ ID NO: 247148 - RNA, 19 nt, Homo sapiens
  misc_RNA (1)...(19): siRNA sense strand
guaagcaugaguaaacauc

SEQ ID NO: 247149 - RNA, 19 nt, Homo sapiens
  misc_RNA (1)...(19): siRNA sense strand
guggucaaguguucucuag

SEQ ID NO: 247150 - RNA, 19 nt, Homo sapiens
  misc_RNA (1)...(19): siRNA sense strand
ucaaaccugccauagaguu

SEQ ID NO: 247151 - RNA, 19 nt, Homo sapiens
  misc_RNA (1)...(19): siRNA sense strand
gauauuccugaaacaaaga

SEQ ID NO: 247152 - RNA, 19 nt, Homo sapiens
  misc_RNA (1)...(19): siRNA sense strand
aaaucaaaccugccauaga

SEQ ID NO: 247153 - RNA, 19 nt, Homo sapiens
  misc_RNA (1)...(19): siRNA sense strand
ccaguuccauuaaauucag

SEQ ID NO: 247154 - RNA, 19 nt, Homo sapiens
  misc_RNA (1)...(19): siRNA sense strand
ggaguggcugacaagauuu

SEQ ID NO: 247155 - RNA, 19 nt, Homo sapiens
  misc_RNA (1)...(19): siRNA sense strand
caucacguuuguggagauu

SEQ ID NO: 247156 - RNA, 19 nt, Homo sapiens
  misc_RNA (1)...(19): siRNA sense strand
ugacacacaacaaauucuu

SEQ ID NO: 247157 - RNA, 19 nt, Homo sapiens
  misc_RNA (1)...(19): siRNA sense strand
ccauuaaauucaggaguca

SEQ ID NO: 247158 - RNA, 19 nt, Homo sapiens
  misc_RNA (1)...(19): siRNA sense strand
agaugacacacaacaaauu

SEQ ID NO: 247159 - RNA, 19 nt, Homo sapiens
  misc_RNA (1)...(19): siRNA sense strand
guagauguggucaaguguu

SEQ ID NO: 247160 - RNA, 19 nt, Homo sapiens
  misc_RNA (1)...(19): siRNA sense strand
ucagauuccagguuuaugu

SEQ ID NO: 247161 - RNA, 19 nt, Homo sapiens
  misc_RNA (1)...(19): siRNA sense strand
gaacaaaauaagggacuaa

SEQ ID NO: 247162 - RNA, 19 nt, Homo sapiens
  misc_RNA (1)...(19): siRNA sense strand
caaaaugugguaagcauga

SEQ ID NO: 247163 - RNA, 19 nt, Homo sapiens
  misc_RNA (1)...(19): siRNA sense strand
gugguaagcaugaguaaac

SEQ ID NO: 247164 - RNA, 19 nt, Homo sapiens
  misc_RNA (1)...(19): siRNA sense strand
guuacaagaggcuaccaaa

SEQ ID NO: 247165 - RNA, 19 nt, Homo sapiens
  misc_RNA (1)...(19): siRNA sense strand
ggaagcugauaaagaugac

SEQ ID NO: 247166 - RNA, 19 nt, Homo sapiens
  misc_RNA (1)...(19): siRNA sense strand
gucaaccucacauagcaua

SEQ ID NO: 247167 - RNA, 19 nt, Homo sapiens
  misc_RNA (1)...(19): siRNA sense strand
auacacagaaauacacuug

SEQ ID NO: 247168 - RNA, 19 nt, Homo sapiens
  misc_RNA (1)...(19): siRNA sense strand
uaaaucaaaccugccauag

SEQ ID NO: 247169 - RNA, 19 nt, Homo sapiens
  misc_RNA (1)...(19): siRNA sense strand
ucacguuuguggagauugg

SEQ ID NO: 247170 - RNA, 19 nt, Homo sapiens
  misc_RNA (1)...(19): siRNA sense strand
aaaggacaagcacuuauca

SEQ ID NO: 247171 - RNA, 19 nt, Homo sapiens
  misc_RNA (1)...(19): siRNA sense strand
aagaggcuaccaaagaauu

SEQ ID NO: 247172 - RNA, 19 nt, Homo sapiens
  misc_RNA (1)...(19): siRNA sense strand
caaauggaugaagaaauug

SEQ ID NO: 247173 - RNA, 19 nt, Homo sapiens
  misc_RNA (1)...(19): siRNA sense strand
caagaggcuaccaaagaau

SEQ ID NO: 247174 - RNA, 19 nt, Homo sapiens
  misc_RNA (1)...(19): siRNA sense strand
gaucaaaugagagacaaac

SEQ ID NO: 247175 - RNA, 19 nt, Homo sapiens
  misc_RNA (1)...(19): siRNA sense strand
gaaauaugguggcuugaaa

SEQ ID NO: 247176 - RNA, 19 nt, Homo sapiens
  misc_RNA (1)...(19): siRNA sense strand
agacaucaccgacuuguua

SEQ ID NO: 247177 - RNA, 19 nt, Homo sapiens
  misc_RNA (1)...(19): siRNA sense strand
ggaaauagaagaggaaaug

SEQ ID NO: 247178 - RNA, 19 nt, Homo sapiens
  misc_RNA (1)...(19): siRNA sense strand
gaggauuucuucuucuauu

SEQ ID NO: 247179 - RNA, 19 nt, Homo sapiens
  misc_RNA (1)...(19): siRNA sense strand
ggaagaccaccgacagaua

SEQ ID NO: 247180 - RNA, 19 nt, Homo sapiens
  misc_RNA (1)...(19): siRNA sense strand
gggaggauuucuucuucua

SEQ ID NO: 247181 - RNA, 19 nt, Homo sapiens
  misc_RNA (1)...(19): siRNA sense strand
ucacggacauucagcaaga

SEQ ID NO: 247182 - RNA, 19 nt, Homo sapiens
  misc_RNA (1)...(19): siRNA sense strand
ggaccaaaccgcaguaaca

SEQ ID NO: 247183 - RNA, 19 nt, Homo sapiens
  misc_RNA (1)...(19): siRNA sense strand
ccgagucgcucaaguccua

SEQ ID NO: 247184 - RNA, 19 nt, Homo sapiens
  misc_RNA (1)...(19): siRNA sense strand
uaaaggagagauucgagua

SEQ ID NO: 247185 - RNA, 19 nt, Homo sapiens
  misc_RNA (1)...(19): siRNA sense strand
gaacguggaggccaaagug

SEQ ID NO: 247186 - RNA, 19 nt, Homo sapiens
  misc_RNA (1)...(19): siRNA sense strand
ggaaggauuucacggacau

SEQ ID NO: 247187 - RNA, 19 nt, Homo sapiens
  misc_RNA (1)...(19): siRNA sense strand
acagauacgugcagcagaa

SEQ ID NO: 247188 - RNA, 19 nt, Homo sapiens
  misc_RNA (1)...(19): siRNA sense strand
ccaaaccgcaguaacauga

SEQ ID NO: 247189 - RNA, 19 nt, Homo sapiens
  misc_RNA (1)...(19): siRNA sense strand
ugaccagcaucauugagua

SEQ ID NO: 247190 - RNA, 19 nt, Homo sapiens
  misc_RNA (1)...(19): siRNA sense strand
ccaaagaggagaccaggaa

SEQ ID NO: 247191 - RNA, 19 nt, Homo sapiens
  misc_RNA (1)...(19): siRNA sense strand
acaagcagaucgaccaguu

SEQ ID NO: 247192 - RNA, 19 nt, Homo sapiens
  misc_RNA (1)...(19): siRNA sense strand
gcgggaggauuucuucuuc

SEQ ID NO: 247193 - RNA, 19 nt, Homo sapiens
  misc_RNA (1)...(19): siRNA sense strand
ccaaaguggugugcuucua

SEQ ID NO: 247194 - RNA, 19 nt, Homo sapiens
  misc_RNA (1)...(19): siRNA sense strand
gaagaccaccgacagauac

SEQ ID NO: 247195 - RNA, 19 nt, Homo sapiens
  misc_RNA (1)...(19): siRNA sense strand
gaaauggagaauccggaaa

SEQ ID NO: 247196 - RNA, 19 nt, Homo sapiens
  misc_RNA (1)...(19): siRNA sense strand
ggaccugcccgagaaacua

SEQ ID NO: 247197 - RNA, 19 nt, Homo sapiens
  misc_RNA (1)...(19): siRNA sense strand
gaagcugagagcaaguuaa

SEQ ID NO: 247198 - RNA, 19 nt, Homo sapiens
  misc_RNA (1)...(19): siRNA sense strand
gcagauaaaggagagauuc

SEQ ID NO: 247199 - RNA, 19 nt, Homo sapiens
  misc_RNA (1)...(19): siRNA sense strand
acaagaacaucuacgacau

SEQ ID NO: 247200 - RNA, 19 nt, Homo sapiens
  misc_RNA (1)...(19): siRNA sense strand
gugcuucgguaucuugaga

SEQ ID NO: 247201 - RNA, 19 nt, Homo sapiens
  misc_RNA (1)...(19): siRNA sense strand
gaaucgaggagcucaacaa

SEQ ID NO: 247202 - RNA, 19 nt, Homo sapiens
  misc_RNA (1)...(19): siRNA sense strand
ggagagaggccaggaccaa

SEQ ID NO: 247203 - RNA, 19 nt, Homo sapiens
  misc_RNA (1)...(19): siRNA sense strand
gcaucuuguuggacauauu

SEQ ID NO: 247204 - RNA, 19 nt, Homo sapiens
  misc_RNA (1)...(19): siRNA sense strand
ucgaggagcucaacaagac

SEQ ID NO: 247205 - RNA, 19 nt, Homo sapiens
  misc_RNA (1)...(19): siRNA sense strand
ggagagauucgaguaggaa

SEQ ID NO: 247206 - RNA, 19 nt, Homo sapiens
  misc_RNA (1)...(19): siRNA sense strand
ccagcaucauugaguacua

SEQ ID NO: 247207 - RNA, 19 nt, Homo sapiens
  misc_RNA (1)...(19): siRNA sense strand
aagcugagagcaaguuaaa

SEQ ID NO: 247208 - RNA, 19 nt, Homo sapiens
  misc_RNA (1)...(19): siRNA sense strand
gaccugcccgagaaacuaa

SEQ ID NO: 247209 - RNA, 19 nt, Homo sapiens
  misc_RNA (1)...(19): siRNA sense strand
gacuacgucuacuuugaga

SEQ ID NO: 247210 - RNA, 19 nt, Homo sapiens
  misc_RNA (1)...(19): siRNA sense strand
cagcccagccugcacauga

SEQ ID NO: 247211 - RNA, 19 nt, Homo sapiens
  misc_RNA (1)...(19): siRNA sense strand
uagaagaggaaauggagaa

SEQ ID NO: 247212 - RNA, 19 nt, Homo sapiens
  misc_RNA (1)...(19): siRNA sense strand
ccaacuauaacaagccaaa

SEQ ID NO: 247213 - RNA, 19 nt, Homo sapiens
  misc_RNA (1)...(19): siRNA sense strand
cagcagaaacgcuugaaag

SEQ ID NO: 247214 - RNA, 19 nt, Homo sapiens
  misc_RNA (1)...(19): siRNA sense strand
gacaucaccgacuuguuaa

SEQ ID NO: 247215 - RNA, 19 nt, Homo sapiens
  misc_RNA (1)...(19): siRNA sense strand
ccaaauccgaaccaaauca

SEQ ID NO: 247216 - RNA, 19 nt, Homo sapiens
  misc_RNA (1)...(19): siRNA sense strand
gccggaaccuccugcucaa

SEQ ID NO: 247217 - RNA, 19 nt, Homo sapiens
  misc_RNA (1)...(19): siRNA sense strand
gaagaggaaauggagaauc

SEQ ID NO: 247218 - RNA, 19 nt, Homo sapiens
  misc_RNA (1)...(19): siRNA sense strand
gagagaggccaggaccaaa

SEQ ID NO: 247219 - RNA, 19 nt, Homo sapiens
  misc_RNA (1)...(19): siRNA sense strand
aggcagacaucaccgacuu

SEQ ID NO: 247220 - RNA, 19 nt, Homo sapiens
  misc_RNA (1)...(19): siRNA sense strand
ucaacaagacggccaaugg

SEQ ID NO: 247221 - RNA, 19 nt, Homo sapiens
  misc_RNA (1)...(19): siRNA sense strand
guacagggucggagacuac

SEQ ID NO: 247222 - RNA, 19 nt, Homo sapiens
  misc_RNA (1)...(19): siRNA sense strand
ggaggauuucuucuucuau

SEQ ID NO: 247223 - RNA, 19 nt, Homo sapiens
  misc_RNA (1)...(19): siRNA sense strand
gaccaggcaggcuuucuau

SEQ ID NO: 247224 - RNA, 19 nt, Homo sapiens
  misc_RNA (1)...(19): siRNA sense strand
gcagcagaaacgcuugaaa

SEQ ID NO: 247225 - RNA, 19 nt, Homo sapiens
  misc_RNA (1)...(19): siRNA sense strand
caagaacaucuacgacauc

SEQ ID NO: 247226 - RNA, 19 nt, Homo sapiens
  misc_RNA (1)...(19): siRNA sense strand
ucuauucucuagucuacga

SEQ ID NO: 247227 - RNA, 19 nt, Homo sapiens
  misc_RNA (1)...(19): siRNA sense strand
gaaauagaagaggaaaugg

SEQ ID NO: 247228 - RNA, 19 nt, Homo sapiens
  misc_RNA (1)...(19): siRNA sense strand
caggcaggcuuucuaucug

SEQ ID NO: 247229 - RNA, 19 nt, Homo sapiens
  misc_RNA (1)...(19): siRNA sense strand
caucagaggccaaccuuuu

SEQ ID NO: 247230 - RNA, 19 nt, Homo sapiens
  misc_RNA (1)...(19): siRNA sense strand
guuacaccacacagucuua

SEQ ID NO: 247231 - RNA, 19 nt, Homo sapiens
  misc_RNA (1)...(19): siRNA sense strand
ggagcgggaggauuucuuc

SEQ ID NO: 247232 - RNA, 19 nt, Homo sapiens
  misc_RNA (1)...(19): siRNA sense strand
ccaggcaggcuuucuaucu

SEQ ID NO: 247233 - RNA, 19 nt, Homo sapiens
  misc_RNA (1)...(19): siRNA sense strand
caucuuguuggacauauug

SEQ ID NO: 247234 - RNA, 19 nt, Homo sapiens
  misc_RNA (1)...(19): siRNA sense strand
ggaggaguggucugcauca

SEQ ID NO: 247235 - RNA, 19 nt, Homo sapiens
  misc_RNA (1)...(19): siRNA sense strand
acaacccacucacagacaa

SEQ ID NO: 247236 - RNA, 19 nt, Homo sapiens
  misc_RNA (1)...(19): siRNA sense strand
ccaggaagauccgcaagcu

SEQ ID NO: 247237 - RNA, 19 nt, Homo sapiens
  misc_RNA (1)...(19): siRNA sense strand
gaccaaaccgcaguaacau

SEQ ID NO: 247238 - RNA, 19 nt, Homo sapiens
  misc_RNA (1)...(19): siRNA sense strand
gcgcaucuuguuggacaua

SEQ ID NO: 247239 - RNA, 19 nt, Homo sapiens
  misc_RNA (1)...(19): siRNA sense strand
ccaaaucagcgucaacaac

SEQ ID NO: 247240 - RNA, 19 nt, Homo sapiens
  misc_RNA (1)...(19): siRNA sense strand
gcugagagcaaguuaaagc

SEQ ID NO: 247241 - RNA, 19 nt, Homo sapiens
  misc_RNA (1)...(19): siRNA sense strand
ggacauucagcaagauuuu

SEQ ID NO: 247242 - RNA, 19 nt, Homo sapiens
  misc_RNA (1)...(19): siRNA sense strand
gauacucuccacaagaaca

SEQ ID NO: 247243 - RNA, 19 nt, Homo sapiens
  misc_RNA (1)...(19): siRNA sense strand
aagaggaaauggagaaucc

SEQ ID NO: 247244 - RNA, 19 nt, Homo sapiens
  misc_RNA (1)...(19): siRNA sense strand
cagcaacccauaccugauc

SEQ ID NO: 247245 - RNA, 19 nt, Homo sapiens
  misc_RNA (1)...(19): siRNA sense strand
gccgagaccaguccagguu

SEQ ID NO: 247246 - RNA, 19 nt, Homo sapiens
  misc_RNA (1)...(19): siRNA sense strand
caaaguggugugcuucuac

SEQ ID NO: 247247 - RNA, 19 nt, Homo sapiens
  misc_RNA (1)...(19): siRNA sense strand
gcagacaucaccgacuugu

SEQ ID NO: 247248 - RNA, 19 nt, Homo sapiens
  misc_RNA (1)...(19): siRNA sense strand
gagagauucgaguaggaaa

SEQ ID NO: 247249 - RNA, 19 nt, Homo sapiens
  misc_RNA (1)...(19): siRNA sense strand
cuucuucuauucucuaguc

SEQ ID NO: 247250 - RNA, 19 nt, Homo sapiens
  misc_RNA (1)...(19): siRNA sense strand
cgggugacguguucuacau

SEQ ID NO: 247251 - RNA, 19 nt, Homo sapiens
  misc_RNA (1)...(19): siRNA sense strand
aaauggagaauccggaaau

SEQ ID NO: 247252 - RNA, 19 nt, Homo sapiens
  misc_RNA (1)...(19): siRNA sense strand
ugaagaccaggcaggcuuu

SEQ ID NO: 247253 - RNA, 19 nt, Homo sapiens
  misc_RNA (1)...(19): siRNA sense strand
agaaauaugguggcuugaa

SEQ ID NO: 247254 - RNA, 19 nt, Homo sapiens
  misc_RNA (1)...(19): siRNA sense strand
caagccaaauccgaaccaa

SEQ ID NO: 247255 - RNA, 19 nt, Homo sapiens
  misc_RNA (1)...(19): siRNA sense strand
ugguggaccugcccgagaa

SEQ ID NO: 247256 - RNA, 19 nt, Homo sapiens
  misc_RNA (1)...(19): siRNA sense strand
ugaagcugagagcaaguua

SEQ ID NO: 247257 - RNA, 19 nt, Homo sapiens
  misc_RNA (1)...(19): siRNA sense strand
aaauagaagaggaaaugga

SEQ ID NO: 247258 - RNA, 19 nt, Homo sapiens
  misc_RNA (1)...(19): siRNA sense strand
ucacagacaagcagaucga

SEQ ID NO: 247259 - RNA, 19 nt, Homo sapiens
  misc_RNA (1)...(19): siRNA sense strand
gagaccgagucgcucaagu

SEQ ID NO: 247260 - RNA, 19 nt, Homo sapiens
  misc_RNA (1)...(19): siRNA sense strand
agaccaggcaggcuuucua

SEQ ID NO: 247261 - RNA, 19 nt, Homo sapiens
  misc_RNA (1)...(19): siRNA sense strand
cccgagacaucacccuguu

SEQ ID NO: 247262 - RNA, 19 nt, Homo sapiens
  misc_RNA (1)...(19): siRNA sense strand
cagcaucauugaguacuac

SEQ ID NO: 247263 - RNA, 19 nt, Homo sapiens
  misc_RNA (1)...(19): siRNA sense strand
aaagaggagaccaggaaga

SEQ ID NO: 247264 - RNA, 19 nt, Homo sapiens
  misc_RNA (1)...(19): siRNA sense strand
aaaccgcaguaacaugagu

SEQ ID NO: 247265 - RNA, 19 nt, Homo sapiens
  misc_RNA (1)...(19): siRNA sense strand
gaaccaaaucagcgucaac

SEQ ID NO: 247266 - RNA, 19 nt, Homo sapiens
  misc_RNA (1)...(19): siRNA sense strand
agccaaauccgaaccaaau

SEQ ID NO: 247267 - RNA, 19 nt, Homo sapiens
  misc_RNA (1)...(19): siRNA sense strand
ucaccgacuuguuaaaaga

SEQ ID NO: 247268 - RNA, 19 nt, Homo sapiens
  misc_RNA (1)...(19): siRNA sense strand
uguucuacaugcccaaaga

SEQ ID NO: 247269 - RNA, 19 nt, Homo sapiens
  misc_RNA (1)...(19): siRNA sense strand
gcagcuacgagcagcacaa

SEQ ID NO: 247270 - RNA, 19 nt, Homo sapiens
  misc_RNA (1)...(19): siRNA sense strand
cuucuauucucuagucuac

SEQ ID NO: 247271 - RNA, 19 nt, Homo sapiens
  misc_RNA (1)...(19): siRNA sense strand
uuggacauauuggaagaaa

SEQ ID NO: 247272 - RNA, 19 nt, Homo sapiens
  misc_RNA (1)...(19): siRNA sense strand
ugagagcaaguuaaagcaa

SEQ ID NO: 247273 - RNA, 19 nt, Homo sapiens
  misc_RNA (1)...(19): siRNA sense strand
aagaacaucuacgacaucu

SEQ ID NO: 247274 - RNA, 19 nt, Homo sapiens
  misc_RNA (1)...(19): siRNA sense strand
gcgucacccugcucaacga

SEQ ID NO: 247275 - RNA, 19 nt, Homo sapiens
  misc_RNA (1)...(19): siRNA sense strand
gcaaacaucucuucacauu

SEQ ID NO: 247276 - RNA, 19 nt, Homo sapiens
  misc_RNA (1)...(19): siRNA sense strand
gaauggugcugaugaaaua

SEQ ID NO: 247277 - RNA, 19 nt, Homo sapiens
  misc_RNA (1)...(19): siRNA sense strand
gaaccaaacucucaaacaa

SEQ ID NO: 247278 - RNA, 19 nt, Homo sapiens
  misc_RNA (1)...(19): siRNA sense strand
aaacagagcuggaaagguu

SEQ ID NO: 247279 - RNA, 19 nt, Homo sapiens
  misc_RNA (1)...(19): siRNA sense strand
gaagaucgcuuaggcaaga

SEQ ID NO: 247280 - RNA, 19 nt, Homo sapiens
  misc_RNA (1)...(19): siRNA sense strand
gcagaguucuagcaaauuu

SEQ ID NO: 247281 - RNA, 19 nt, Homo sapiens
  misc_RNA (1)...(19): siRNA sense strand
gaaacucucugcuuccauu

SEQ ID NO: 247282 - RNA, 19 nt, Homo sapiens
  misc_RNA (1)...(19): siRNA sense strand
gcacaaacaccauuagaaa

SEQ ID NO: 247283 - RNA, 19 nt, Homo sapiens
  misc_RNA (1)...(19): siRNA sense strand
gcaagucacucugcuaauu

SEQ ID NO: 247284 - RNA, 19 nt, Homo sapiens
  misc_RNA (1)...(19): siRNA sense strand
gaaaucaagucgcucaugu

SEQ ID NO: 247285 - RNA, 19 nt, Homo sapiens
  misc_RNA (1)...(19): siRNA sense strand
gauaaagacacuaggaaua

SEQ ID NO: 247286 - RNA, 19 nt, Homo sapiens
  misc_RNA (1)...(19): siRNA sense strand
ggacagagaggcauuaguu

SEQ ID NO: 247287 - RNA, 19 nt, Homo sapiens
  misc_RNA (1)...(19): siRNA sense strand
uauacaagcucuucagaaa

SEQ ID NO: 247288 - RNA, 19 nt, Homo sapiens
  misc_RNA (1)...(19): siRNA sense strand
gagaaaguguggccuauca

SEQ ID NO: 247289 - RNA, 19 nt, Homo sapiens
  misc_RNA (1)...(19): siRNA sense strand
ggacacacgauucuaagua

SEQ ID NO: 247290 - RNA, 19 nt, Homo sapiens
  misc_RNA (1)...(19): siRNA sense strand
caacagaaguauagaagca

SEQ ID NO: 247291 - RNA, 19 nt, Homo sapiens
  misc_RNA (1)...(19): siRNA sense strand
gauuacaacuucaccuauu

SEQ ID NO: 247292 - RNA, 19 nt, Homo sapiens
  misc_RNA (1)...(19): siRNA sense strand
cggcaaauguuacaagaaa

SEQ ID NO: 247293 - RNA, 19 nt, Homo sapiens
  misc_RNA (1)...(19): siRNA sense strand
agaaacagauuacaacuuc

SEQ ID NO: 247294 - RNA, 19 nt, Homo sapiens
  misc_RNA (1)...(19): siRNA sense strand
cauaaagccuugcaggaaa

SEQ ID NO: 247295 - RNA, 19 nt, Homo sapiens
  misc_RNA (1)...(19): siRNA sense strand
ccagaaggauauagacaaa

SEQ ID NO: 247296 - RNA, 19 nt, Homo sapiens
  misc_RNA (1)...(19): siRNA sense strand
gaaacacaaaugaagguua

SEQ ID NO: 247297 - RNA, 19 nt, Homo sapiens
  misc_RNA (1)...(19): siRNA sense strand
gggacaaccuccuuucuug

SEQ ID NO: 247298 - RNA, 19 nt, Homo sapiens
  misc_RNA (1)...(19): siRNA sense strand
gcaaucaguuaaccgcaaa

SEQ ID NO: 247299 - RNA, 19 nt, Homo sapiens
  misc_RNA (1)...(19): siRNA sense strand
gauaugaugagccuauuaa

SEQ ID NO: 247300 - RNA, 19 nt, Homo sapiens
  misc_RNA (1)...(19): siRNA sense strand
gaaauagucauaacaugga

SEQ ID NO: 247301 - RNA, 19 nt, Homo sapiens
  misc_RNA (1)...(19): siRNA sense strand
acaaagcgcuauucuggaa

SEQ ID NO: 247302 - RNA, 19 nt, Homo sapiens
  misc_RNA (1)...(19): siRNA sense strand
caagaauggugcugaugaa

SEQ ID NO: 247303 - RNA, 19 nt, Homo sapiens
  misc_RNA (1)...(19): siRNA sense strand
gcagcugccagaccuauua

SEQ ID NO: 247304 - RNA, 19 nt, Homo sapiens
  misc_RNA (1)...(19): siRNA sense strand
ccagugaggucaaauucuu

SEQ ID NO: 247305 - RNA, 19 nt, Homo sapiens
  misc_RNA (1)...(19): siRNA sense strand
gcaagaauggugcugauga

SEQ ID NO: 247306 - RNA, 19 nt, Homo sapiens
  misc_RNA (1)...(19): siRNA sense strand
gagacagacugaagccauu

SEQ ID NO: 247307 - RNA, 19 nt, Homo sapiens
  misc_RNA (1)...(19): siRNA sense strand
gaaaguguggccuaucauu

SEQ ID NO: 247308 - RNA, 19 nt, Homo sapiens
  misc_RNA (1)...(19): siRNA sense strand
gaucgugauggucauauua

SEQ ID NO: 247309 - RNA, 19 nt, Homo sapiens
  misc_RNA (1)...(19): siRNA sense strand
ucaagucgcucauguuaag

SEQ ID NO: 247310 - RNA, 19 nt, Homo sapiens
  misc_RNA (1)...(19): siRNA sense strand
gggaaccgcuucaaaugug

SEQ ID NO: 247311 - RNA, 19 nt, Homo sapiens
  misc_RNA (1)...(19): siRNA sense strand
gucauaacauggaacuaua

SEQ ID NO: 247312 - RNA, 19 nt, Homo sapiens
  misc_RNA (1)...(19): siRNA sense strand
ccaaacagaaauagucaua

SEQ ID NO: 247313 - RNA, 19 nt, Homo sapiens
  misc_RNA (1)...(19): siRNA sense strand
gaaguauuccucagucuau

SEQ ID NO: 247314 - RNA, 19 nt, Homo sapiens
  misc_RNA (1)...(19): siRNA sense strand
gcauggauuucaguaauga

SEQ ID NO: 247315 - RNA, 19 nt, Homo sapiens
  misc_RNA (1)...(19): siRNA sense strand
ucagaaauccacccaaauu

SEQ ID NO: 247316 - RNA, 19 nt, Homo sapiens
  misc_RNA (1)...(19): siRNA sense strand
gaagauaaagacacuagga

SEQ ID NO: 247317 - RNA, 19 nt, Homo sapiens
  misc_RNA (1)...(19): siRNA sense strand
caacuucaccuauuacugu

SEQ ID NO: 247318 - RNA, 19 nt, Homo sapiens
  misc_RNA (1)...(19): siRNA sense strand
gcaagcugcuggauuugau

SEQ ID NO: 247319 - RNA, 19 nt, Homo sapiens
  misc_RNA (1)...(19): siRNA sense strand
aaacacaggcucagagauu

SEQ ID NO: 247320 - RNA, 19 nt, Homo sapiens
  misc_RNA (1)...(19): siRNA sense strand
caauugacuucuccaguga

SEQ ID NO: 247321 - RNA, 19 nt, Homo sapiens
  misc_RNA (1)...(19): siRNA sense strand
agaaggauauagacaaaug

SEQ ID NO: 247322 - RNA, 19 nt, Homo sapiens
  misc_RNA (1)...(19): siRNA sense strand
ggugaagucugucuagcaa

SEQ ID NO: 247323 - RNA, 19 nt, Homo sapiens
  misc_RNA (1)...(19): siRNA sense strand
caaggaagaugagagugaa

SEQ ID NO: 247324 - RNA, 19 nt, Homo sapiens
  misc_RNA (1)...(19): siRNA sense strand
caaccuaacauaccaguga

SEQ ID NO: 247325 - RNA, 19 nt, Homo sapiens
  misc_RNA (1)...(19): siRNA sense strand
caaauuggccucagucauc

SEQ ID NO: 247326 - RNA, 19 nt, Homo sapiens
  misc_RNA (1)...(19): siRNA sense strand
gaucugguauaucagcauu

SEQ ID NO: 247327 - RNA, 19 nt, Homo sapiens
  misc_RNA (1)...(19): siRNA sense strand
guaaaugacacucucaaug

SEQ ID NO: 247328 - RNA, 19 nt, Homo sapiens
  misc_RNA (1)...(19): siRNA sense strand
cuaauuacauccgucuuaa

SEQ ID NO: 247329 - RNA, 19 nt, Homo sapiens
  misc_RNA (1)...(19): siRNA sense strand
ggaaucccuuaggaauuua

SEQ ID NO: 247330 - RNA, 19 nt, Homo sapiens
  misc_RNA (1)...(19): siRNA sense strand
ggacaaacugauuucauga

SEQ ID NO: 247331 - RNA, 19 nt, Homo sapiens
  misc_RNA (1)...(19): siRNA sense strand
acagacagauguaggaaga

SEQ ID NO: 247332 - RNA, 19 nt, Homo sapiens
  misc_RNA (1)...(19): siRNA sense strand
caagauagcauggauuuca

SEQ ID NO: 247333 - RNA, 19 nt, Homo sapiens
  misc_RNA (1)...(19): siRNA sense strand
ggaaacauggaauacguaa

SEQ ID NO: 247334 - RNA, 19 nt, Homo sapiens
  misc_RNA (1)...(19): siRNA sense strand
gcaggaaauucgaaacucu

SEQ ID NO: 247335 - RNA, 19 nt, Homo sapiens
  misc_RNA (1)...(19): siRNA sense strand
ggcugaagcugacaaugaa

SEQ ID NO: 247336 - RNA, 19 nt, Homo sapiens
  misc_RNA (1)...(19): siRNA sense strand
aaucaagucgcucauguua

SEQ ID NO: 247337 - RNA, 19 nt, Homo sapiens
  misc_RNA (1)...(19): siRNA sense strand
ggaaauagagcaagucacu

SEQ ID NO: 247338 - RNA, 19 nt, Homo sapiens
  misc_RNA (1)...(19): siRNA sense strand
gacagcagcuaauggacaa

SEQ ID NO: 247339 - RNA, 19 nt, Homo sapiens
  misc_RNA (1)...(19): siRNA sense strand
gagcauaacaugaguaaaa

SEQ ID NO: 247340 - RNA, 19 nt, Homo sapiens
  misc_RNA (1)...(19): siRNA sense strand
aaaugaagguuaucaacug

SEQ ID NO: 247341 - RNA, 19 nt, Homo sapiens
  misc_RNA (1)...(19): siRNA sense strand
uagcauggauuucaguaau

SEQ ID NO: 247342 - RNA, 19 nt, Homo sapiens
  misc_RNA (1)...(19): siRNA sense strand
gaccauccacggcaagaua

SEQ ID NO: 247343 - RNA, 19 nt, Homo sapiens
  misc_RNA (1)...(19): siRNA sense strand
ugaagucugucuagcaaga

SEQ ID NO: 247344 - RNA, 19 nt, Homo sapiens
  misc_RNA (1)...(19): siRNA sense strand
gaacaggauacacacaguu

SEQ ID NO: 247345 - RNA, 19 nt, Homo sapiens
  misc_RNA (1)...(19): siRNA sense strand
gauggacacacgauucuaa

SEQ ID NO: 247346 - RNA, 19 nt, Homo sapiens
  misc_RNA (1)...(19): siRNA sense strand
cuugcaagcugcuggauuu

SEQ ID NO: 247347 - RNA, 19 nt, Homo sapiens
  misc_RNA (1)...(19): siRNA sense strand
ugaagcuucugaucuuauu

SEQ ID NO: 247348 - RNA, 19 nt, Homo sapiens
  misc_RNA (1)...(19): siRNA sense strand
gguaguucgucuauauuau

SEQ ID NO: 247349 - RNA, 19 nt, Homo sapiens
  misc_RNA (1)...(19): siRNA sense strand
gcaauuacaccagcuccua

SEQ ID NO: 247350 - RNA, 19 nt, Homo sapiens
  misc_RNA (1)...(19): siRNA sense strand
guacuggacaaacugauuu

SEQ ID NO: 247351 - RNA, 19 nt, Homo sapiens
  misc_RNA (1)...(19): siRNA sense strand
gcagaaugguacuggacaa

SEQ ID NO: 247352 - RNA, 19 nt, Homo sapiens
  misc_RNA (1)...(19): siRNA sense strand
gcgcuauucuggaaacaug

SEQ ID NO: 247353 - RNA, 19 nt, Homo sapiens
  misc_RNA (1)...(19): siRNA sense strand
cacaaaugcuucaagacuu

SEQ ID NO: 247354 - RNA, 19 nt, Homo sapiens
  misc_RNA (1)...(19): siRNA sense strand
gcagucggaugaagaugau

SEQ ID NO: 247355 - RNA, 19 nt, Homo sapiens
  misc_RNA (1)...(19): siRNA sense strand
uaaaugacacucucaaugg

SEQ ID NO: 247356 - RNA, 19 nt, Homo sapiens
  misc_RNA (1)...(19): siRNA sense strand
ggguaguucgucuauauua

SEQ ID NO: 247357 - RNA, 19 nt, Homo sapiens
  misc_RNA (1)...(19): siRNA sense strand
gagcgaagggaaucucgua

SEQ ID NO: 247358 - RNA, 19 nt, Homo sapiens
  misc_RNA (1)...(19): siRNA sense strand
gaaacagauuacaacuuca

SEQ ID NO: 247359 - RNA, 19 nt, Homo sapiens
  misc_RNA (1)...(19): siRNA sense strand
cagaaauagucauaacaug

SEQ ID NO: 247360 - RNA, 19 nt, Homo sapiens
  misc_RNA (1)...(19): siRNA sense strand
uauagaagcagcaauugaa

SEQ ID NO: 247361 - RNA, 19 nt, Homo sapiens
  misc_RNA (1)...(19): siRNA sense strand
aaaucgcgaucuaguauau

SEQ ID NO: 247362 - RNA, 19 nt, Homo sapiens
  misc_RNA (1)...(19): siRNA sense strand
gaagauccucgacaaguca

SEQ ID NO: 247363 - RNA, 19 nt, Homo sapiens
  misc_RNA (1)...(19): siRNA sense strand
aaacaucucuucacauucc

SEQ ID NO: 247364 - RNA, 19 nt, Homo sapiens
  misc_RNA (1)...(19): siRNA sense strand
ggcaagauagcauggauuu

SEQ ID NO: 247365 - RNA, 19 nt, Homo sapiens
  misc_RNA (1)...(19): siRNA sense strand
ccauacgagucaaucagua

SEQ ID NO: 247366 - RNA, 19 nt, Homo sapiens
  misc_RNA (1)...(19): siRNA sense strand
ggaaccgcuucaaauguga

SEQ ID NO: 247367 - RNA, 19 nt, Homo sapiens
  misc_RNA (1)...(19): siRNA sense strand
gagggaaccgcuucaaaug

SEQ ID NO: 247368 - RNA, 19 nt, Homo sapiens
  misc_RNA (1)...(19): siRNA sense strand
uaccuggacugcaaacaaa

SEQ ID NO: 247369 - RNA, 19 nt, Homo sapiens
  misc_RNA (1)...(19): siRNA sense strand
gaaugguacuggacaaacu

SEQ ID NO: 247370 - RNA, 19 nt, Homo sapiens
  misc_RNA (1)...(19): siRNA sense strand
gaaguuaauccacaaaugc

SEQ ID NO: 247371 - RNA, 19 nt, Homo sapiens
  misc_RNA (1)...(19): siRNA sense strand
ccaagauaaggacaauuua

SEQ ID NO: 247372 - RNA, 19 nt, Homo sapiens
  misc_RNA (1)...(19): siRNA sense strand
ucaguaagccuagcaaaga

SEQ ID NO: 247373 - RNA, 19 nt, Homo sapiens
  misc_RNA (1)...(19): siRNA sense strand
guuaucaacuggcaaacau

SEQ ID NO: 247374 - RNA, 19 nt, Homo sapiens
  misc_RNA (1)...(19): siRNA sense strand
gacaaugaauggguaguuc

SEQ ID NO: 247375 - RNA, 19 nt, Homo sapiens
  misc_RNA (1)...(19): siRNA sense strand
ggagacggcucaagaguuu

SEQ ID NO: 247376 - RNA, 19 nt, Homo sapiens
  misc_RNA (1)...(19): siRNA sense strand
gcagaagguugugacuuua

SEQ ID NO: 247377 - RNA, 19 nt, Homo sapiens
  misc_RNA (1)...(19): siRNA sense strand
ugaggaaauuggaaacauu

SEQ ID NO: 247378 - RNA, 19 nt, Homo sapiens
  misc_RNA (1)...(19): siRNA sense strand
ugcagaagguugugacuuu

SEQ ID NO: 247379 - RNA, 19 nt, Homo sapiens
  misc_RNA (1)...(19): siRNA sense strand
aaagugaaguggcauuuua

SEQ ID NO: 247380 - RNA, 19 nt, Homo sapiens
  misc_RNA (1)...(19): siRNA sense strand
gaaguggcauuuuaacuau

SEQ ID NO: 247381 - RNA, 19 nt, Homo sapiens
  misc_RNA (1)...(19): siRNA sense strand
gguauccucucccucauuc

SEQ ID NO: 247382 - RNA, 19 nt, Homo sapiens
  misc_RNA (1)...(19): siRNA sense strand
gguugugacuuuaguauac

SEQ ID NO: 247383 - RNA, 19 nt, Homo sapiens
  misc_RNA (1)...(19): siRNA sense strand
uauguaaguuccucucaga

SEQ ID NO: 247384 - RNA, 19 nt, Homo sapiens
  misc_RNA (1)...(19): siRNA sense strand
gaagguugugacuuuagua

SEQ ID NO: 247385 - RNA, 19 nt, Homo sapiens
  misc_RNA (1)...(19): siRNA sense strand
uuggaaacauucuggcuuu

SEQ ID NO: 247386 - RNA, 19 nt, Homo sapiens
  misc_RNA (1)...(19): siRNA sense strand
acacaccgaugcacuugga

SEQ ID NO: 247387 - RNA, 19 nt, Homo sapiens
  misc_RNA (1)...(19): siRNA sense strand
gaggaaauuggaaacauuc

SEQ ID NO: 247388 - RNA, 19 nt, Homo sapiens
  misc_RNA (1)...(19): siRNA sense strand
gcuccuaauuuccgaaugg

SEQ ID NO: 247389 - RNA, 19 nt, Homo sapiens
  misc_RNA (1)...(19): siRNA sense strand
caaauggggugaugaaugg

SEQ ID NO: 247390 - RNA, 19 nt, Homo sapiens
  misc_RNA (1)...(19): siRNA sense strand
caugugugcugcccugaau

SEQ ID NO: 247391 - RNA, 19 nt, Homo sapiens
  misc_RNA (1)...(19): siRNA sense strand
aggaggagcucaaguugca

SEQ ID NO: 247392 - RNA, 19 nt, Homo sapiens
  misc_RNA (1)...(19): siRNA sense strand
cagcaucauucagaaagug

SEQ ID NO: 247393 - RNA, 19 nt, Homo sapiens
  misc_RNA (1)...(19): siRNA sense strand
cuuuacagguugcccauga

SEQ ID NO: 247394 - RNA, 19 nt, Homo sapiens
  misc_RNA (1)...(19): siRNA sense strand
ugacagcaucauucagaaa

SEQ ID NO: 247395 - RNA, 19 nt, Homo sapiens
  misc_RNA (1)...(19): siRNA sense strand
cagcagccauggccuucug

SEQ ID NO: 247396 - RNA, 19 nt, Homo sapiens
  misc_RNA (1)...(19): siRNA sense strand
gcaaauggggugaugaaug

SEQ ID NO: 247397 - RNA, 19 nt, Homo sapiens
  misc_RNA (1)...(19): siRNA sense strand
cuaugacacuaccugcauu

SEQ ID NO: 247398 - RNA, 19 nt, Homo sapiens
  misc_RNA (1)...(19): siRNA sense strand
gaauucacagcuuccuaug

SEQ ID NO: 247399 - RNA, 19 nt, Homo sapiens
  misc_RNA (1)...(19): siRNA sense strand
ggaaauuggaaacauucug

SEQ ID NO: 247400 - RNA, 19 nt, Homo sapiens
  misc_RNA (1)...(19): siRNA sense strand
ugaaguggcauuuuaacua

SEQ ID NO: 247401 - RNA, 19 nt, Homo sapiens
  misc_RNA (1)...(19): siRNA sense strand
gaguuugacagcaucauuc

SEQ ID NO: 247402 - RNA, 19 nt, Homo sapiens
  misc_RNA (1)...(19): siRNA sense strand
gaggagacggcucaagagu

SEQ ID NO: 247403 - RNA, 19 nt, Homo sapiens
  misc_RNA (1)...(19): siRNA sense strand
ggaggagacggcucaagag

SEQ ID NO: 247404 - RNA, 19 nt, Homo sapiens
  misc_RNA (1)...(19): siRNA sense strand
gacagcaucauucagaaag

SEQ ID NO: 247405 - RNA, 19 nt, Homo sapiens
  misc_RNA (1)...(19): siRNA sense strand
ucaggaggagcucaaguug

SEQ ID NO: 247406 - RNA, 19 nt, Homo sapiens
  misc_RNA (1)...(19): siRNA sense strand
agaagguugugacuuuagu

SEQ ID NO: 247407 - RNA, 19 nt, Homo sapiens
  misc_RNA (1)...(19): siRNA sense strand
gugcugcccugaaucucau

SEQ ID NO: 247408 - RNA, 19 nt, Homo sapiens
  misc_RNA (1)...(19): siRNA sense strand
uggaggagacggcucaaga

SEQ ID NO: 247409 - RNA, 19 nt, Homo sapiens
  misc_RNA (1)...(19): siRNA sense strand
gaaagugaaguggcauuuu

SEQ ID NO: 247410 - RNA, 19 nt, Homo sapiens
  misc_RNA (1)...(19): siRNA sense strand
uaucugcuccugccagugu

SEQ ID NO: 247411 - RNA, 19 nt, Homo sapiens
  misc_RNA (1)...(19): siRNA sense strand
agaaagugaaguggcauuu

SEQ ID NO: 247412 - RNA, 19 nt, Homo sapiens
  misc_RNA (1)...(19): siRNA sense strand
gagacccuguggugggaau

SEQ ID NO: 247413 - RNA, 19 nt, Homo sapiens
  misc_RNA (1)...(19): siRNA sense strand
ucgaggaguucaccuugca

SEQ ID NO: 247414 - RNA, 19 nt, Homo sapiens
  misc_RNA (1)...(19): siRNA sense strand
gguugcccaugaggaaauu

SEQ ID NO: 247415 - RNA, 19 nt, Homo sapiens
  misc_RNA (1)...(19): siRNA sense strand
uguaaguuccucucagaug

SEQ ID NO: 247416 - RNA, 19 nt, Homo sapiens
  misc_RNA (1)...(19): siRNA sense strand
acagguugcccaugaggaa

SEQ ID NO: 247417 - RNA, 19 nt, Homo sapiens
  misc_RNA (1)...(19): siRNA sense strand
gauggagugcagcuuggaa

SEQ ID NO: 247418 - RNA, 19 nt, Homo sapiens
  misc_RNA (1)...(19): siRNA sense strand
auucacagcuuccuaugac

SEQ ID NO: 247419 - RNA, 19 nt, Homo sapiens
  misc_RNA (1)...(19): siRNA sense strand
ucacacaccgaugcacuug

SEQ ID NO: 247420 - RNA, 19 nt, Homo sapiens
  misc_RNA (1)...(19): siRNA sense strand
guugugacuuuaguauaca

SEQ ID NO: 247421 - RNA, 19 nt, Homo sapiens
  misc_RNA (1)...(19): siRNA sense strand
ugaguuugacagcaucauu

SEQ ID NO: 247422 - RNA, 19 nt, Homo sapiens
  misc_RNA (1)...(19): siRNA sense strand
ccuccaggccauacgcuuu

SEQ ID NO: 247423 - RNA, 19 nt, Homo sapiens
  misc_RNA (1)...(19): siRNA sense strand
ggagacggcucaagaguuu

SEQ ID NO: 247424 - RNA, 19 nt, Homo sapiens
  misc_RNA (1)...(19): siRNA sense strand
gcagaagguugugacuuua

SEQ ID NO: 247425 - RNA, 19 nt, Homo sapiens
  misc_RNA (1)...(19): siRNA sense strand
ugaggaaauuggaaacauu

SEQ ID NO: 247426 - RNA, 19 nt, Homo sapiens
  misc_RNA (1)...(19): siRNA sense strand
ugcagaagguugugacuuu

SEQ ID NO: 247427 - RNA, 19 nt, Homo sapiens
  misc_RNA (1)...(19): siRNA sense strand
aaagugaaguggcauuuua

SEQ ID NO: 247428 - RNA, 19 nt, Homo sapiens
  misc_RNA (1)...(19): siRNA sense strand
gaaguggcauuuuaacuau

SEQ ID NO: 247429 - RNA, 19 nt, Homo sapiens
  misc_RNA (1)...(19): siRNA sense strand
gguauccucucccucauuc

SEQ ID NO: 247430 - RNA, 19 nt, Homo sapiens
  misc_RNA (1)...(19): siRNA sense strand
gguugugacuuuaguauac

SEQ ID NO: 247431 - RNA, 19 nt, Homo sapiens
  misc_RNA (1)...(19): siRNA sense strand
uauguaaguuccucucaga

SEQ ID NO: 247432 - RNA, 19 nt, Homo sapiens
  misc_RNA (1)...(19): siRNA sense strand
gaagguugugacuuuagua

SEQ ID NO: 247433 - RNA, 19 nt, Homo sapiens
  misc_RNA (1)...(19): siRNA sense strand
uuggaaacauucuggcuuu

SEQ ID NO: 247434 - RNA, 19 nt, Homo sapiens
  misc_RNA (1)...(19): siRNA sense strand
acacaccgaugcacuugga

SEQ ID NO: 247435 - RNA, 19 nt, Homo sapiens
  misc_RNA (1)...(19): siRNA sense strand
gaggaaauuggaaacauuc

SEQ ID NO: 247436 - RNA, 19 nt, Homo sapiens
  misc_RNA (1)...(19): siRNA sense strand
gcuccuaauuuccgaaugg

SEQ ID NO: 247437 - RNA, 19 nt, Homo sapiens
  misc_RNA (1)...(19): siRNA sense strand
caaauggggugaugaaugg

SEQ ID NO: 247438 - RNA, 19 nt, Homo sapiens
  misc_RNA (1)...(19): siRNA sense strand
caugugugcugcccugaau

SEQ ID NO: 247439 - RNA, 19 nt, Homo sapiens
  misc_RNA (1)...(19): siRNA sense strand
aggaggagcucaaguugca

SEQ ID NO: 247440 - RNA, 19 nt, Homo sapiens
  misc_RNA (1)...(19): siRNA sense strand
cagcaucauucagaaagug

SEQ ID NO: 247441 - RNA, 19 nt, Homo sapiens
  misc_RNA (1)...(19): siRNA sense strand
cuuuacagguugcccauga

SEQ ID NO: 247442 - RNA, 19 nt, Homo sapiens
  misc_RNA (1)...(19): siRNA sense strand
ugacagcaucauucagaaa

SEQ ID NO: 247443 - RNA, 19 nt, Homo sapiens
  misc_RNA (1)...(19): siRNA sense strand
cagcagccauggccuucug

SEQ ID NO: 247444 - RNA, 19 nt, Homo sapiens
  misc_RNA (1)...(19): siRNA sense strand
gcaaauggggugaugaaug

SEQ ID NO: 247445 - RNA, 19 nt, Homo sapiens
  misc_RNA (1)...(19): siRNA sense strand
cuaugacacuaccugcauu

SEQ ID NO: 247446 - RNA, 19 nt, Homo sapiens
  misc_RNA (1)...(19): siRNA sense strand
gaauucacagcuuccuaug

SEQ ID NO: 247447 - RNA, 19 nt, Homo sapiens
  misc_RNA (1)...(19): siRNA sense strand
ggaaauuggaaacauucug

SEQ ID NO: 247448 - RNA, 19 nt, Homo sapiens
  misc_RNA (1)...(19): siRNA sense strand
ugaaguggcauuuuaacua

SEQ ID NO: 247449 - RNA, 19 nt, Homo sapiens
  misc_RNA (1)...(19): siRNA sense strand
gaguuugacagcaucauuc

SEQ ID NO: 247450 - RNA, 19 nt, Homo sapiens
  misc_RNA (1)...(19): siRNA sense strand
gaggagacggcucaagagu

SEQ ID NO: 247451 - RNA, 19 nt, Homo sapiens
  misc_RNA (1)...(19): siRNA sense strand
ggaggagacggcucaagag

SEQ ID NO: 247452 - RNA, 19 nt, Homo sapiens
  misc_RNA (1)...(19): siRNA sense strand
gacagcaucauucagaaag

SEQ ID NO: 247453 - RNA, 19 nt, Homo sapiens
  misc_RNA (1)...(19): siRNA sense strand
ucaggaggagcucaaguug

SEQ ID NO: 247454 - RNA, 19 nt, Homo sapiens
  misc_RNA (1)...(19): siRNA sense strand
agaagguugugacuuuagu

SEQ ID NO: 247455 - RNA, 19 nt, Homo sapiens
  misc_RNA (1)...(19): siRNA sense strand
gugcugcccugaaucucau

SEQ ID NO: 247456 - RNA, 19 nt, Homo sapiens
  misc_RNA (1)...(19): siRNA sense strand
uggaggagacggcucaaga

SEQ ID NO: 247457 - RNA, 19 nt, Homo sapiens
  misc_RNA (1)...(19): siRNA sense strand
gaaagugaaguggcauuuu

SEQ ID NO: 247458 - RNA, 19 nt, Homo sapiens
  misc_RNA (1)...(19): siRNA sense strand
uaucugcuccugccagugu

SEQ ID NO: 247459 - RNA, 19 nt, Homo sapiens
  misc_RNA (1)...(19): siRNA sense strand
agaaagugaaguggcauuu

SEQ ID NO: 247460 - RNA, 19 nt, Homo sapiens
  misc_RNA (1)...(19): siRNA sense strand
gagacccuguggugggaau

SEQ ID NO: 247461 - RNA, 19 nt, Homo sapiens
  misc_RNA (1)...(19): siRNA sense strand
ucgaggaguucaccuugca

SEQ ID NO: 247462 - RNA, 19 nt, Homo sapiens
  misc_RNA (1)...(19): siRNA sense strand
gguugcccaugaggaaauu

SEQ ID NO: 247463 - RNA, 19 nt, Homo sapiens
  misc_RNA (1)...(19): siRNA sense strand
uguaaguuccucucagaug

SEQ ID NO: 247464 - RNA, 19 nt, Homo sapiens
  misc_RNA (1)...(19): siRNA sense strand
acagguugcccaugaggaa

SEQ ID NO: 247465 - RNA, 19 nt, Homo sapiens
  misc_RNA (1)...(19): siRNA sense strand
gauggagugcagcuuggaa

SEQ ID NO: 247466 - RNA, 19 nt, Homo sapiens
  misc_RNA (1)...(19): siRNA sense strand
auucacagcuuccuaugac

SEQ ID NO: 247467 - RNA, 19 nt, Homo sapiens
  misc_RNA (1)...(19): siRNA sense strand
ucacacaccgaugcacuug

SEQ ID NO: 247468 - RNA, 19 nt, Homo sapiens
  misc_RNA (1)...(19): siRNA sense strand
guugugacuuuaguauaca

SEQ ID NO: 247469 - RNA, 19 nt, Homo sapiens
  misc_RNA (1)...(19): siRNA sense strand
ugaguuugacagcaucauu

SEQ ID NO: 247470 - RNA, 19 nt, Homo sapiens
  misc_RNA (1)...(19): siRNA sense strand
ccuccaggccauacgcuuu

SEQ ID NO: 247471 - RNA, 19 nt, Homo sapiens
  misc_RNA (1)...(19): siRNA sense strand
gguagaaacugaccacaua

SEQ ID NO: 247472 - RNA, 19 nt, Homo sapiens
  misc_RNA (1)...(19): siRNA sense strand
gcaaaggugucaucuucua

SEQ ID NO: 247473 - RNA, 19 nt, Homo sapiens
  misc_RNA (1)...(19): siRNA sense strand
caaggaagaucauuaagga

SEQ ID NO: 247474 - RNA, 19 nt, Homo sapiens
  misc_RNA (1)...(19): siRNA sense strand
gcaggaagguagaaacuga

SEQ ID NO: 247475 - RNA, 19 nt, Homo sapiens
  misc_RNA (1)...(19): siRNA sense strand
gcaugaagaucucaaugaa

SEQ ID NO: 247476 - RNA, 19 nt, Homo sapiens
  misc_RNA (1)...(19): siRNA sense strand
gaacaucuuuaaccgaaug

SEQ ID NO: 247477 - RNA, 19 nt, Homo sapiens
  misc_RNA (1)...(19): siRNA sense strand
caacauucaugaagacuga

SEQ ID NO: 247478 - RNA, 19 nt, Homo sapiens
  misc_RNA (1)...(19): siRNA sense strand
gcacagaagugauucaacu

SEQ ID NO: 247479 - RNA, 19 nt, Homo sapiens
  misc_RNA (1)...(19): siRNA sense strand
gaacugguauccgaucaga

SEQ ID NO: 247480 - RNA, 19 nt, Homo sapiens
  misc_RNA (1)...(19): siRNA sense strand
gaaagauccuccccgaaua

SEQ ID NO: 247481 - RNA, 19 nt, Homo sapiens
  misc_RNA (1)...(19): siRNA sense strand
gauauaaaguugggaagga

SEQ ID NO: 247482 - RNA, 19 nt, Homo sapiens
  misc_RNA (1)...(19): siRNA sense strand
gaucagagagugagacaga

SEQ ID NO: 247483 - RNA, 19 nt, Homo sapiens
  misc_RNA (1)...(19): siRNA sense strand
ugaaguagccaaacuauuc

SEQ ID NO: 247484 - RNA, 19 nt, Homo sapiens
  misc_RNA (1)...(19): siRNA sense strand
cggcaaaggugucaucuuc

SEQ ID NO: 247485 - RNA, 19 nt, Homo sapiens
  misc_RNA (1)...(19): siRNA sense strand
gaaaggaaauaugggaaag

SEQ ID NO: 247486 - RNA, 19 nt, Homo sapiens
  misc_RNA (1)...(19): siRNA sense strand
ucaauguucuggagugauu

SEQ ID NO: 247487 - RNA, 19 nt, Homo sapiens
  misc_RNA (1)...(19): siRNA sense strand
agucagcaguggcaaguua

SEQ ID NO: 247488 - RNA, 19 nt, Homo sapiens
  misc_RNA (1)...(19): siRNA sense strand
gccaaacuauucaacauuc

SEQ ID NO: 247489 - RNA, 19 nt, Homo sapiens
  misc_RNA (1)...(19): siRNA sense strand
gauguuggcuaugaagcua

SEQ ID NO: 247490 - RNA, 19 nt, Homo sapiens
  misc_RNA (1)...(19): siRNA sense strand
caagcacgcucuaacaucu

SEQ ID NO: 247491 - RNA, 19 nt, Homo sapiens
  misc_RNA (1)...(19): siRNA sense strand
gcugcaugcuucuacgaua

SEQ ID NO: 247492 - RNA, 19 nt, Homo sapiens
  misc_RNA (1)...(19): siRNA sense strand
gaaagacggcaggaaggua

SEQ ID NO: 247493 - RNA, 19 nt, Homo sapiens
  misc_RNA (1)...(19): siRNA sense strand
uagcaaggaagaucauuaa

SEQ ID NO: 247494 - RNA, 19 nt, Homo sapiens
  misc_RNA (1)...(19): siRNA sense strand
gcaccaugaucacgcuguu

SEQ ID NO: 247495 - RNA, 19 nt, Homo sapiens
  misc_RNA (1)...(19): siRNA sense strand
gaaguagccaaacuauuca

SEQ ID NO: 247496 - RNA, 19 nt, Homo sapiens
  misc_RNA (1)...(19): siRNA sense strand
uccgaggccucagaaauua

SEQ ID NO: 247497 - RNA, 19 nt, Homo sapiens
  misc_RNA (1)...(19): siRNA sense strand
ggagcccaauguugaguug

SEQ ID NO: 247498 - RNA, 19 nt, Homo sapiens
  misc_RNA (1)...(19): siRNA sense strand
caagacugguggccuggaa

SEQ ID NO: 247499 - RNA, 19 nt, Homo sapiens
  misc_RNA (1)...(19): siRNA sense strand
gcaaggaagaucauuaagg

SEQ ID NO: 247500 - RNA, 19 nt, Homo sapiens
  misc_RNA (1)...(19): siRNA sense strand
gaaugccaauagcaaggaa

SEQ ID NO: 247501 - RNA, 19 nt, Homo sapiens
  misc_RNA (1)...(19): siRNA sense strand
gcaugcuucuacgauauaa

SEQ ID NO: 247502 - RNA, 19 nt, Homo sapiens
  misc_RNA (1)...(19): siRNA sense strand
caaugaaguagccaaacua

SEQ ID NO: 247503 - RNA, 19 nt, Homo sapiens
  misc_RNA (1)...(19): siRNA sense strand
ccgaauaccucagcaacug

SEQ ID NO: 247504 - RNA, 19 nt, Homo sapiens
  misc_RNA (1)...(19): siRNA sense strand
cagaagugauucaacucuu

SEQ ID NO: 247505 - RNA, 19 nt, Homo sapiens
  misc_RNA (1)...(19): siRNA sense strand
cuucuacgauauaaaguug

SEQ ID NO: 247506 - RNA, 19 nt, Homo sapiens
  misc_RNA (1)...(19): siRNA sense strand
ucaaugaaguagccaaacu

SEQ ID NO: 247507 - RNA, 19 nt, Homo sapiens
  misc_RNA (1)...(19): siRNA sense strand
augaagaucucaaugaagu

SEQ ID NO: 247508 - RNA, 19 nt, Homo sapiens
  misc_RNA (1)...(19): siRNA sense strand
guccgaggccucagaaauu

SEQ ID NO: 247509 - RNA, 19 nt, Homo sapiens
  misc_RNA (1)...(19): siRNA sense strand
ccggguaaaugcagagcua

SEQ ID NO: 247510 - RNA, 19 nt, Homo sapiens
  misc_RNA (1)...(19): siRNA sense strand
gaagaucucaaugaaguag

SEQ ID NO: 247511 - RNA, 19 nt, Homo sapiens
  misc_RNA (1)...(19): siRNA sense strand
ggguagagcaccaugauca

SEQ ID NO: 247512 - RNA, 19 nt, Homo sapiens
  misc_RNA (1)...(19): siRNA sense strand
ccaaacuauucaacauuca

SEQ ID NO: 247513 - RNA, 19 nt, Homo sapiens
  misc_RNA (1)...(19): siRNA sense strand
cuaugaagcuauuggucuu

SEQ ID NO: 247514 - RNA, 19 nt, Homo sapiens
  misc_RNA (1)...(19): siRNA sense strand
ggaaagauccuccccgaau

SEQ ID NO: 247515 - RNA, 19 nt, Homo sapiens
  misc_RNA (1)...(19): siRNA sense strand
uagccaaacuauucaacau

SEQ ID NO: 247516 - RNA, 19 nt, Homo sapiens
  misc_RNA (1)...(19): siRNA sense strand
uuugguggcuuccggguaa

SEQ ID NO: 247517 - RNA, 19 nt, Homo sapiens
  misc_RNA (1)...(19): siRNA sense strand
ccucagaaauuacuauucc

SEQ ID NO: 247518 - RNA, 19 nt, Homo sapiens
  misc_RNA (1)...(19): siRNA sense strand
ggaacaucuuuaaccgaau

SEQ ID NO: 247519 - RNA, 19 nt, Homo sapiens
  misc_RNA (1)...(19): siRNA sense strand
ggugaugcccaaugcuauu

SEQ ID NO: 247520 - RNA, 19 nt, Homo sapiens
  misc_RNA (1)...(19): siRNA sense strand
aaggaaauaugggaaagau

SEQ ID NO: 247521 - RNA, 19 nt, Homo sapiens
  misc_RNA (1)...(19): siRNA sense strand
agaaaggaaauaugggaaa

SEQ ID NO: 247522 - RNA, 19 nt, Homo sapiens
  misc_RNA (1)...(19): siRNA sense strand
cuacaagcacgcucuaaca

SEQ ID NO: 247523 - RNA, 19 nt, Homo sapiens
  misc_RNA (1)...(19): siRNA sense strand
cugcaugcuucuacgauau

SEQ ID NO: 247524 - RNA, 19 nt, Homo sapiens
  misc_RNA (1)...(19): siRNA sense strand
gccuggagcccaauguuga

SEQ ID NO: 247525 - RNA, 19 nt, Homo sapiens
  misc_RNA (1)...(19): siRNA sense strand
aagauuggcuggagaaaau

SEQ ID NO: 247526 - RNA, 19 nt, Homo sapiens
  misc_RNA (1)...(19): siRNA sense strand
gguaaaugcagagcuacaa

SEQ ID NO: 247527 - RNA, 19 nt, Homo sapiens
  misc_RNA (1)...(19): siRNA sense strand
ccaauagcaaggaagauca

SEQ ID NO: 247528 - RNA, 19 nt, Homo sapiens
  misc_RNA (1)...(19): siRNA sense strand
ggauugugcuauggaacau

SEQ ID NO: 247529 - RNA, 19 nt, Homo sapiens
  misc_RNA (1)...(19): siRNA sense strand
ggaggacuacggcaaaggu

SEQ ID NO: 247530 - RNA, 19 nt, Homo sapiens
  misc_RNA (1)...(19): siRNA sense strand
auagcaaggaagaucauua

SEQ ID NO: 247531 - RNA, 19 nt, Homo sapiens
  misc_RNA (1)...(19): siRNA sense strand
gcaacuggaccauggaaaa

SEQ ID NO: 247532 - RNA, 19 nt, Homo sapiens
  misc_RNA (1)...(19): siRNA sense strand
cugguggccuggaaauaga

SEQ ID NO: 247533 - RNA, 19 nt, Homo sapiens
  misc_RNA (1)...(19): siRNA sense strand
caaaagcaacugcacaaga

SEQ ID NO: 247534 - RNA, 19 nt, Homo sapiens
  misc_RNA (1)...(19): siRNA sense strand
gccuggaaauagacucaga

SEQ ID NO: 247535 - RNA, 19 nt, Homo sapiens
  misc_RNA (1)...(19): siRNA sense strand
gggauugugcuauggaaca

SEQ ID NO: 247536 - RNA, 19 nt, Homo sapiens
  misc_RNA (1)...(19): siRNA sense strand
ggaagauuggcuggagaaa

SEQ ID NO: 247537 - RNA, 19 nt, Homo sapiens
  misc_RNA (1)...(19): siRNA sense strand
ugaagaucucaaugaagua

SEQ ID NO: 247538 - RNA, 19 nt, Homo sapiens
  misc_RNA (1)...(19): siRNA sense strand
gaagcccgaggcagaggaa

SEQ ID NO: 247539 - RNA, 19 nt, Homo sapiens
  misc_RNA (1)...(19): siRNA sense strand
uuaaggugaugcccaaugc

SEQ ID NO: 247540 - RNA, 19 nt, Homo sapiens
  misc_RNA (1)...(19): siRNA sense strand
ggagucagcaguggcaagu

SEQ ID NO: 247541 - RNA, 19 nt, Homo sapiens
  misc_RNA (1)...(19): siRNA sense strand
guagaaacugaccacauag

SEQ ID NO: 247542 - RNA, 19 nt, Homo sapiens
  misc_RNA (1)...(19): siRNA sense strand
uaaggacggugagcagcau

SEQ ID NO: 247543 - RNA, 19 nt, Homo sapiens
  misc_RNA (1)...(19): siRNA sense strand
gugcuauggaacaucuuua

SEQ ID NO: 247544 - RNA, 19 nt, Homo sapiens
  misc_RNA (1)...(19): siRNA sense strand
guaaaugcagagcuacaag

SEQ ID NO: 247545 - RNA, 19 nt, Homo sapiens
  misc_RNA (1)...(19): siRNA sense strand
uguugugaguggaagauug

SEQ ID NO: 247546 - RNA, 19 nt, Homo sapiens
  misc_RNA (1)...(19): siRNA sense strand
uggcaucagucaauguucu

SEQ ID NO: 247547 - RNA, 19 nt, Homo sapiens
  misc_RNA (1)...(19): siRNA sense strand
gaagauuggcuggagaaaa

SEQ ID NO: 247548 - RNA, 19 nt, Homo sapiens
  misc_RNA (1)...(19): siRNA sense strand
gcuucuacgauauaaaguu

SEQ ID NO: 247549 - RNA, 19 nt, Homo sapiens
  misc_RNA (1)...(19): siRNA sense strand
gugagcagcaugaagaucu

SEQ ID NO: 247550 - RNA, 19 nt, Homo sapiens
  misc_RNA (1)...(19): siRNA sense strand
agaaacugaccacauagug

SEQ ID NO: 247551 - RNA, 19 nt, Homo sapiens
  misc_RNA (1)...(19): siRNA sense strand
ggccuggagcccaauguug

SEQ ID NO: 247552 - RNA, 19 nt, Homo sapiens
  misc_RNA (1)...(19): siRNA sense strand
gccaauagcaaggaagauc

SEQ ID NO: 247553 - RNA, 19 nt, Homo sapiens
  misc_RNA (1)...(19): siRNA sense strand
guuaaggugaugcccaaug

SEQ ID NO: 247554 - RNA, 19 nt, Homo sapiens
  misc_RNA (1)...(19): siRNA sense strand
ggucuuguggacaguaguu

SEQ ID NO: 247555 - RNA, 19 nt, Homo sapiens
  misc_RNA (1)...(19): siRNA sense strand
gggcacagaagugauucaa

SEQ ID NO: 247556 - RNA, 19 nt, Homo sapiens
  misc_RNA (1)...(19): siRNA sense strand
guagccaaacuauucaaca

SEQ ID NO: 247557 - RNA, 19 nt, Homo sapiens
  misc_RNA (1)...(19): siRNA sense strand
gcagcaugaagaucucaau

SEQ ID NO: 247558 - RNA, 19 nt, Homo sapiens
  misc_RNA (1)...(19): siRNA sense strand
ggacggugagcagcaugaa

SEQ ID NO: 247559 - RNA, 19 nt, Homo sapiens
  misc_RNA (1)...(19): siRNA sense strand
aaggugaugcccaaugcua

SEQ ID NO: 247560 - RNA, 19 nt, Homo sapiens
  misc_RNA (1)...(19): siRNA sense strand
cagcaugaagaucucaaug

SEQ ID NO: 247561 - RNA, 19 nt, Homo sapiens
  misc_RNA (1)...(19): siRNA sense strand
uuacuuaucaagcugaaag

SEQ ID NO: 247562 - RNA, 19 nt, Homo sapiens
  misc_RNA (1)...(19): siRNA sense strand
acugguauccgaucagaga

SEQ ID NO: 247563 - RNA, 19 nt, Homo sapiens
  misc_RNA (1)...(19): siRNA sense strand
gagcugcuaagccguacug

SEQ ID NO: 247564 - RNA, 19 nt, Homo sapiens
  misc_RNA (1)...(19): siRNA sense strand
gcggguagagcaccaugau

SEQ ID NO: 247565 - RNA, 19 nt, Homo sapiens
  misc_RNA (1)...(19): siRNA sense strand
gguagaaacugaccacaua

SEQ ID NO: 247566 - RNA, 19 nt, Homo sapiens
  misc_RNA (1)...(19): siRNA sense strand
gcaaaggugucaucuucua

SEQ ID NO: 247567 - RNA, 19 nt, Homo sapiens
  misc_RNA (1)...(19): siRNA sense strand
caaggaagaucauuaagga

SEQ ID NO: 247568 - RNA, 19 nt, Homo sapiens
  misc_RNA (1)...(19): siRNA sense strand
gcaggaagguagaaacuga

SEQ ID NO: 247569 - RNA, 19 nt, Homo sapiens
  misc_RNA (1)...(19): siRNA sense strand
gcaugaagaucucaaugaa

SEQ ID NO: 247570 - RNA, 19 nt, Homo sapiens
  misc_RNA (1)...(19): siRNA sense strand
gaacaucuuuaaccgaaug

SEQ ID NO: 247571 - RNA, 19 nt, Homo sapiens
  misc_RNA (1)...(19): siRNA sense strand
caacauucaugaagacuga

SEQ ID NO: 247572 - RNA, 19 nt, Homo sapiens
  misc_RNA (1)...(19): siRNA sense strand
gcacagaagugauucaacu

SEQ ID NO: 247573 - RNA, 19 nt, Homo sapiens
  misc_RNA (1)...(19): siRNA sense strand
gaacugguauccgaucaga

SEQ ID NO: 247574 - RNA, 19 nt, Homo sapiens
  misc_RNA (1)...(19): siRNA sense strand
gaaagauccuccccgaaua

SEQ ID NO: 247575 - RNA, 19 nt, Homo sapiens
  misc_RNA (1)...(19): siRNA sense strand
gauauaaaguugggaagga

SEQ ID NO: 247576 - RNA, 19 nt, Homo sapiens
  misc_RNA (1)...(19): siRNA sense strand
gaucagagagugagacaga

SEQ ID NO: 247577 - RNA, 19 nt, Homo sapiens
  misc_RNA (1)...(19): siRNA sense strand
ugaaguagccaaacuauuc

SEQ ID NO: 247578 - RNA, 19 nt, Homo sapiens
  misc_RNA (1)...(19): siRNA sense strand
cggcaaaggugucaucuuc

SEQ ID NO: 247579 - RNA, 19 nt, Homo sapiens
  misc_RNA (1)...(19): siRNA sense strand
gaaaggaaauaugggaaag

SEQ ID NO: 247580 - RNA, 19 nt, Homo sapiens
  misc_RNA (1)...(19): siRNA sense strand
ucaauguucuggagugauu

SEQ ID NO: 247581 - RNA, 19 nt, Homo sapiens
  misc_RNA (1)...(19): siRNA sense strand
agucagcaguggcaaguua

SEQ ID NO: 247582 - RNA, 19 nt, Homo sapiens
  misc_RNA (1)...(19): siRNA sense strand
gccaaacuauucaacauuc

SEQ ID NO: 247583 - RNA, 19 nt, Homo sapiens
  misc_RNA (1)...(19): siRNA sense strand
gauguuggcuaugaagcua

SEQ ID NO: 247584 - RNA, 19 nt, Homo sapiens
  misc_RNA (1)...(19): siRNA sense strand
caagcacgcucuaacaucu

SEQ ID NO: 247585 - RNA, 19 nt, Homo sapiens
  misc_RNA (1)...(19): siRNA sense strand
gcugcaugcuucuacgaua

SEQ ID NO: 247586 - RNA, 19 nt, Homo sapiens
  misc_RNA (1)...(19): siRNA sense strand
gaaagacggcaggaaggua

SEQ ID NO: 247587 - RNA, 19 nt, Homo sapiens
  misc_RNA (1)...(19): siRNA sense strand
uagcaaggaagaucauuaa

SEQ ID NO: 247588 - RNA, 19 nt, Homo sapiens
  misc_RNA (1)...(19): siRNA sense strand
gcaccaugaucacgcuguu

SEQ ID NO: 247589 - RNA, 19 nt, Homo sapiens
  misc_RNA (1)...(19): siRNA sense strand
gaaguagccaaacuauuca

SEQ ID NO: 247590 - RNA, 19 nt, Homo sapiens
  misc_RNA (1)...(19): siRNA sense strand
uccgaggccucagaaauua

SEQ ID NO: 247591 - RNA, 19 nt, Homo sapiens
  misc_RNA (1)...(19): siRNA sense strand
ggagcccaauguugaguug

SEQ ID NO: 247592 - RNA, 19 nt, Homo sapiens
  misc_RNA (1)...(19): siRNA sense strand
caagacugguggccuggaa

SEQ ID NO: 247593 - RNA, 19 nt, Homo sapiens
  misc_RNA (1)...(19): siRNA sense strand
gcaaggaagaucauuaagg

SEQ ID NO: 247594 - RNA, 19 nt, Homo sapiens
  misc_RNA (1)...(19): siRNA sense strand
gaaugccaauagcaaggaa

SEQ ID NO: 247595 - RNA, 19 nt, Homo sapiens
  misc_RNA (1)...(19): siRNA sense strand
gcaugcuucuacgauauaa

SEQ ID NO: 247596 - RNA, 19 nt, Homo sapiens
  misc_RNA (1)...(19): siRNA sense strand
caaugaaguagccaaacua

SEQ ID NO: 247597 - RNA, 19 nt, Homo sapiens
  misc_RNA (1)...(19): siRNA sense strand
ccgaauaccucagcaacug

SEQ ID NO: 247598 - RNA, 19 nt, Homo sapiens
  misc_RNA (1)...(19): siRNA sense strand
cagaagugauucaacucuu

SEQ ID NO: 247599 - RNA, 19 nt, Homo sapiens
  misc_RNA (1)...(19): siRNA sense strand
cuucuacgauauaaaguug

SEQ ID NO: 247600 - RNA, 19 nt, Homo sapiens
  misc_RNA (1)...(19): siRNA sense strand
ucaaugaaguagccaaacu

SEQ ID NO: 247601 - RNA, 19 nt, Homo sapiens
  misc_RNA (1)...(19): siRNA sense strand
augaagaucucaaugaagu

SEQ ID NO: 247602 - RNA, 19 nt, Homo sapiens
  misc_RNA (1)...(19): siRNA sense strand
guccgaggccucagaaauu

SEQ ID NO: 247603 - RNA, 19 nt, Homo sapiens
  misc_RNA (1)...(19): siRNA sense strand
ccggguaaaugcagagcua

SEQ ID NO: 247604 - RNA, 19 nt, Homo sapiens
  misc_RNA (1)...(19): siRNA sense strand
gaagaucucaaugaaguag

SEQ ID NO: 247605 - RNA, 19 nt, Homo sapiens
  misc_RNA (1)...(19): siRNA sense strand
ggguagagcaccaugauca

SEQ ID NO: 247606 - RNA, 19 nt, Homo sapiens
  misc_RNA (1)...(19): siRNA sense strand
ccaaacuauucaacauuca

SEQ ID NO: 247607 - RNA, 19 nt, Homo sapiens
  misc_RNA (1)...(19): siRNA sense strand
cuaugaagcuauuggucuu

SEQ ID NO: 247608 - RNA, 19 nt, Homo sapiens
  misc_RNA (1)...(19): siRNA sense strand
ggaaagauccuccccgaau

SEQ ID NO: 247609 - RNA, 19 nt, Homo sapiens
  misc_RNA (1)...(19): siRNA sense strand
uagccaaacuauucaacau

SEQ ID NO: 247610 - RNA, 19 nt, Homo sapiens
  misc_RNA (1)...(19): siRNA sense strand
uuugguggcuuccggguaa

SEQ ID NO: 247611 - RNA, 19 nt, Homo sapiens
  misc_RNA (1)...(19): siRNA sense strand
ccucagaaauuacuauucc

SEQ ID NO: 247612 - RNA, 19 nt, Homo sapiens
  misc_RNA (1)...(19): siRNA sense strand
ggaacaucuuuaaccgaau

SEQ ID NO: 247613 - RNA, 19 nt, Homo sapiens
  misc_RNA (1)...(19): siRNA sense strand
ggugaugcccaaugcuauu

SEQ ID NO: 247614 - RNA, 19 nt, Homo sapiens
  misc_RNA (1)...(19): siRNA sense strand
aaggaaauaugggaaagau

SEQ ID NO: 247615 - RNA, 19 nt, Homo sapiens
  misc_RNA (1)...(19): siRNA sense strand
agaaaggaaauaugggaaa

SEQ ID NO: 247616 - RNA, 19 nt, Homo sapiens
  misc_RNA (1)...(19): siRNA sense strand
cuacaagcacgcucuaaca

SEQ ID NO: 247617 - RNA, 19 nt, Homo sapiens
  misc_RNA (1)...(19): siRNA sense strand
cugcaugcuucuacgauau

SEQ ID NO: 247618 - RNA, 19 nt, Homo sapiens
  misc_RNA (1)...(19): siRNA sense strand
gccuggagcccaauguuga

SEQ ID NO: 247619 - RNA, 19 nt, Homo sapiens
  misc_RNA (1)...(19): siRNA sense strand
aagauuggcuggagaaaau

SEQ ID NO: 247620 - RNA, 19 nt, Homo sapiens
  misc_RNA (1)...(19): siRNA sense strand
gguaaaugcagagcuacaa

SEQ ID NO: 247621 - RNA, 19 nt, Homo sapiens
  misc_RNA (1)...(19): siRNA sense strand
ccaauagcaaggaagauca

SEQ ID NO: 247622 - RNA, 19 nt, Homo sapiens
  misc_RNA (1)...(19): siRNA sense strand
ggauugugcuauggaacau

SEQ ID NO: 247623 - RNA, 19 nt, Homo sapiens
  misc_RNA (1)...(19): siRNA sense strand
ggaggacuacggcaaaggu

SEQ ID NO: 247624 - RNA, 19 nt, Homo sapiens
  misc_RNA (1)...(19): siRNA sense strand
auagcaaggaagaucauua

SEQ ID NO: 247625 - RNA, 19 nt, Homo sapiens
  misc_RNA (1)...(19): siRNA sense strand
gcaacuggaccauggaaaa

SEQ ID NO: 247626 - RNA, 19 nt, Homo sapiens
  misc_RNA (1)...(19): siRNA sense strand
cugguggccuggaaauaga

SEQ ID NO: 247627 - RNA, 19 nt, Homo sapiens
  misc_RNA (1)...(19): siRNA sense strand
caaaagcaacugcacaaga

SEQ ID NO: 247628 - RNA, 19 nt, Homo sapiens
  misc_RNA (1)...(19): siRNA sense strand
gccuggaaauagacucaga

SEQ ID NO: 247629 - RNA, 19 nt, Homo sapiens
  misc_RNA (1)...(19): siRNA sense strand
gggauugugcuauggaaca

SEQ ID NO: 247630 - RNA, 19 nt, Homo sapiens
  misc_RNA (1)...(19): siRNA sense strand
ggaagauuggcuggagaaa

SEQ ID NO: 247631 - RNA, 19 nt, Homo sapiens
  misc_RNA (1)...(19): siRNA sense strand
ugaagaucucaaugaagua

SEQ ID NO: 247632 - RNA, 19 nt, Homo sapiens
  misc_RNA (1)...(19): siRNA sense strand
gaagcccgaggcagaggaa

SEQ ID NO: 247633 - RNA, 19 nt, Homo sapiens
  misc_RNA (1)...(19): siRNA sense strand
uuaaggugaugcccaaugc

SEQ ID NO: 247634 - RNA, 19 nt, Homo sapiens
  misc_RNA (1)...(19): siRNA sense strand
ggagucagcaguggcaagu

SEQ ID NO: 247635 - RNA, 19 nt, Homo sapiens
  misc_RNA (1)...(19): siRNA sense strand
guagaaacugaccacauag

SEQ ID NO: 247636 - RNA, 19 nt, Homo sapiens
  misc_RNA (1)...(19): siRNA sense strand
uaaggacggugagcagcau

SEQ ID NO: 247637 - RNA, 19 nt, Homo sapiens
  misc_RNA (1)...(19): siRNA sense strand
gugcuauggaacaucuuua

SEQ ID NO: 247638 - RNA, 19 nt, Homo sapiens
  misc_RNA (1)...(19): siRNA sense strand
guaaaugcagagcuacaag

SEQ ID NO: 247639 - RNA, 19 nt, Homo sapiens
  misc_RNA (1)...(19): siRNA sense strand
uguugugaguggaagauug

SEQ ID NO: 247640 - RNA, 19 nt, Homo sapiens
  misc_RNA (1)...(19): siRNA sense strand
uggcaucagucaauguucu

SEQ ID NO: 247641 - RNA, 19 nt, Homo sapiens
  misc_RNA (1)...(19): siRNA sense strand
gaagauuggcuggagaaaa

SEQ ID NO: 247642 - RNA, 19 nt, Homo sapiens
  misc_RNA (1)...(19): siRNA sense strand
gcuucuacgauauaaaguu

SEQ ID NO: 247643 - RNA, 19 nt, Homo sapiens
  misc_RNA (1)...(19): siRNA sense strand
gugagcagcaugaagaucu

SEQ ID NO: 247644 - RNA, 19 nt, Homo sapiens
  misc_RNA (1)...(19): siRNA sense strand
agaaacugaccacauagug

SEQ ID NO: 247645 - RNA, 19 nt, Homo sapiens
  misc_RNA (1)...(19): siRNA sense strand
ggccuggagcccaauguug

SEQ ID NO: 247646 - RNA, 19 nt, Homo sapiens
  misc_RNA (1)...(19): siRNA sense strand
gccaauagcaaggaagauc

SEQ ID NO: 247647 - RNA, 19 nt, Homo sapiens
  misc_RNA (1)...(19): siRNA sense strand
guuaaggugaugcccaaug

SEQ ID NO: 247648 - RNA, 19 nt, Homo sapiens
  misc_RNA (1)...(19): siRNA sense strand
ggucuuguggacaguaguu

SEQ ID NO: 247649 - RNA, 19 nt, Homo sapiens
  misc_RNA (1)...(19): siRNA sense strand
gggcacagaagugauucaa

SEQ ID NO: 247650 - RNA, 19 nt, Homo sapiens
  misc_RNA (1)...(19): siRNA sense strand
guagccaaacuauucaaca

SEQ ID NO: 247651 - RNA, 19 nt, Homo sapiens
  misc_RNA (1)...(19): siRNA sense strand
gcagcaugaagaucucaau

SEQ ID NO: 247652 - RNA, 19 nt, Homo sapiens
  misc_RNA (1)...(19): siRNA sense strand
ggacggugagcagcaugaa

SEQ ID NO: 247653 - RNA, 19 nt, Homo sapiens
  misc_RNA (1)...(19): siRNA sense strand
aaggugaugcccaaugcua

SEQ ID NO: 247654 - RNA, 19 nt, Homo sapiens
  misc_RNA (1)...(19): siRNA sense strand
cagcaugaagaucucaaug

SEQ ID NO: 247655 - RNA, 19 nt, Homo sapiens
  misc_RNA (1)...(19): siRNA sense strand
uuacuuaucaagcugaaag

SEQ ID NO: 247656 - RNA, 19 nt, Homo sapiens
  misc_RNA (1)...(19): siRNA sense strand
acugguauccgaucagaga

SEQ ID NO: 247657 - RNA, 19 nt, Homo sapiens
  misc_RNA (1)...(19): siRNA sense strand
gagcugcuaagccguacug

SEQ ID NO: 247658 - RNA, 19 nt, Homo sapiens
  misc_RNA (1)...(19): siRNA sense strand
gcggguagagcaccaugau

SEQ ID NO: 247659 - RNA, 19 nt, Homo sapiens
  misc_RNA (1)...(19): siRNA sense strand
gguagaaacugaccacaua

SEQ ID NO: 247660 - RNA, 19 nt, Homo sapiens
  misc_RNA (1)...(19): siRNA sense strand
gcaaaggugucaucuucua

SEQ ID NO: 247661 - RNA, 19 nt, Homo sapiens
  misc_RNA (1)...(19): siRNA sense strand
caaggaagaucauuaagga

SEQ ID NO: 247662 - RNA, 19 nt, Homo sapiens
  misc_RNA (1)...(19): siRNA sense strand
gcaggaagguagaaacuga

SEQ ID NO: 247663 - RNA, 19 nt, Homo sapiens
  misc_RNA (1)...(19): siRNA sense strand
gcaugaagaucucaaugaa

SEQ ID NO: 247664 - RNA, 19 nt, Homo sapiens
  misc_RNA (1)...(19): siRNA sense strand
gaacaucuuuaaccgaaug

SEQ ID NO: 247665 - RNA, 19 nt, Homo sapiens
  misc_RNA (1)...(19): siRNA sense strand
caacauucaugaagacuga

SEQ ID NO: 247666 - RNA, 19 nt, Homo sapiens
  misc_RNA (1)...(19): siRNA sense strand
gcacagaagugauucaacu

SEQ ID NO: 247667 - RNA, 19 nt, Homo sapiens
  misc_RNA (1)...(19): siRNA sense strand
gaacugguauccgaucaga

SEQ ID NO: 247668 - RNA, 19 nt, Homo sapiens
  misc_RNA (1)...(19): siRNA sense strand
gaaagauccuccccgaaua

SEQ ID NO: 247669 - RNA, 19 nt, Homo sapiens
  misc_RNA (1)...(19): siRNA sense strand
gauauaaaguugggaagga

SEQ ID NO: 247670 - RNA, 19 nt, Homo sapiens
  misc_RNA (1)...(19): siRNA sense strand
gaucagagagugagacaga

SEQ ID NO: 247671 - RNA, 19 nt, Homo sapiens
  misc_RNA (1)...(19): siRNA sense strand
ugaaguagccaaacuauuc

SEQ ID NO: 247672 - RNA, 19 nt, Homo sapiens
  misc_RNA (1)...(19): siRNA sense strand
cggcaaaggugucaucuuc

SEQ ID NO: 247673 - RNA, 19 nt, Homo sapiens
  misc_RNA (1)...(19): siRNA sense strand
gaaaggaaauaugggaaag

SEQ ID NO: 247674 - RNA, 19 nt, Homo sapiens
  misc_RNA (1)...(19): siRNA sense strand
ucaauguucuggagugauu

SEQ ID NO: 247675 - RNA, 19 nt, Homo sapiens
  misc_RNA (1)...(19): siRNA sense strand
agucagcaguggcaaguua

SEQ ID NO: 247676 - RNA, 19 nt, Homo sapiens
  misc_RNA (1)...(19): siRNA sense strand
gccaaacuauucaacauuc

SEQ ID NO: 247677 - RNA, 19 nt, Homo sapiens
  misc_RNA (1)...(19): siRNA sense strand
gauguuggcuaugaagcua

SEQ ID NO: 247678 - RNA, 19 nt, Homo sapiens
  misc_RNA (1)...(19): siRNA sense strand
caagcacgcucuaacaucu

SEQ ID NO: 247679 - RNA, 19 nt, Homo sapiens
  misc_RNA (1)...(19): siRNA sense strand
gcugcaugcuucuacgaua

SEQ ID NO: 247680 - RNA, 19 nt, Homo sapiens
  misc_RNA (1)...(19): siRNA sense strand
gaaagacggcaggaaggua

SEQ ID NO: 247681 - RNA, 19 nt, Homo sapiens
  misc_RNA (1)...(19): siRNA sense strand
uagcaaggaagaucauuaa

SEQ ID NO: 247682 - RNA, 19 nt, Homo sapiens
  misc_RNA (1)...(19): siRNA sense strand
gcaccaugaucacgcuguu

SEQ ID NO: 247683 - RNA, 19 nt, Homo sapiens
  misc_RNA (1)...(19): siRNA sense strand
gaaguagccaaacuauuca

SEQ ID NO: 247684 - RNA, 19 nt, Homo sapiens
  misc_RNA (1)...(19): siRNA sense strand
uccgaggccucagaaauua

SEQ ID NO: 247685 - RNA, 19 nt, Homo sapiens
  misc_RNA (1)...(19): siRNA sense strand
ggagcccaauguugaguug

SEQ ID NO: 247686 - RNA, 19 nt, Homo sapiens
  misc_RNA (1)...(19): siRNA sense strand
caagacugguggccuggaa

SEQ ID NO: 247687 - RNA, 19 nt, Homo sapiens
  misc_RNA (1)...(19): siRNA sense strand
gcaaggaagaucauuaagg

SEQ ID NO: 247688 - RNA, 19 nt, Homo sapiens
  misc_RNA (1)...(19): siRNA sense strand
gaaugccaauagcaaggaa

SEQ ID NO: 247689 - RNA, 19 nt, Homo sapiens
  misc_RNA (1)...(19): siRNA sense strand
gcaugcuucuacgauauaa

SEQ ID NO: 247690 - RNA, 19 nt, Homo sapiens
  misc_RNA (1)...(19): siRNA sense strand
caaugaaguagccaaacua

SEQ ID NO: 247691 - RNA, 19 nt, Homo sapiens
  misc_RNA (1)...(19): siRNA sense strand
ccgaauaccucagcaacug

SEQ ID NO: 247692 - RNA, 19 nt, Homo sapiens
  misc_RNA (1)...(19): siRNA sense strand
cagaagugauucaacucuu

SEQ ID NO: 247693 - RNA, 19 nt, Homo sapiens
  misc_RNA (1)...(19): siRNA sense strand
cuucuacgauauaaaguug

SEQ ID NO: 247694 - RNA, 19 nt, Homo sapiens
  misc_RNA (1)...(19): siRNA sense strand
ucaaugaaguagccaaacu

SEQ ID NO: 247695 - RNA, 19 nt, Homo sapiens
  misc_RNA (1)...(19): siRNA sense strand
augaagaucucaaugaagu

SEQ ID NO: 247696 - RNA, 19 nt, Homo sapiens
  misc_RNA (1)...(19): siRNA sense strand
guccgaggccucagaaauu

SEQ ID NO: 247697 - RNA, 19 nt, Homo sapiens
  misc_RNA (1)...(19): siRNA sense strand
ccggguaaaugcagagcua

SEQ ID NO: 247698 - RNA, 19 nt, Homo sapiens
  misc_RNA (1)...(19): siRNA sense strand
gaagaucucaaugaaguag

SEQ ID NO: 247699 - RNA, 19 nt, Homo sapiens
  misc_RNA (1)...(19): siRNA sense strand
ggguagagcaccaugauca

SEQ ID NO: 247700 - RNA, 19 nt, Homo sapiens
  misc_RNA (1)...(19): siRNA sense strand
ccaaacuauucaacauuca

SEQ ID NO: 247701 - RNA, 19 nt, Homo sapiens
  misc_RNA (1)...(19): siRNA sense strand
cuaugaagcuauuggucuu

SEQ ID NO: 247702 - RNA, 19 nt, Homo sapiens
  misc_RNA (1)...(19): siRNA sense strand
ggaaagauccuccccgaau

SEQ ID NO: 247703 - RNA, 19 nt, Homo sapiens
  misc_RNA (1)...(19): siRNA sense strand
uagccaaacuauucaacau

SEQ ID NO: 247704 - RNA, 19 nt, Homo sapiens
  misc_RNA (1)...(19): siRNA sense strand
uuugguggcuuccggguaa

SEQ ID NO: 247705 - RNA, 19 nt, Homo sapiens
  misc_RNA (1)...(19): siRNA sense strand
ccucagaaauuacuauucc

SEQ ID NO: 247706 - RNA, 19 nt, Homo sapiens
  misc_RNA (1)...(19): siRNA sense strand
ggaacaucuuuaaccgaau

SEQ ID NO: 247707 - RNA, 19 nt, Homo sapiens
  misc_RNA (1)...(19): siRNA sense strand
ggugaugcccaaugcuauu

SEQ ID NO: 247708 - RNA, 19 nt, Homo sapiens
  misc_RNA (1)...(19): siRNA sense strand
aaggaaauaugggaaagau

SEQ ID NO: 247709 - RNA, 19 nt, Homo sapiens
  misc_RNA (1)...(19): siRNA sense strand
agaaaggaaauaugggaaa

SEQ ID NO: 247710 - RNA, 19 nt, Homo sapiens
  misc_RNA (1)...(19): siRNA sense strand
cuacaagcacgcucuaaca

SEQ ID NO: 247711 - RNA, 19 nt, Homo sapiens
  misc_RNA (1)...(19): siRNA sense strand
cugcaugcuucuacgauau

SEQ ID NO: 247712 - RNA, 19 nt, Homo sapiens
  misc_RNA (1)...(19): siRNA sense strand
gccuggagcccaauguuga

SEQ ID NO: 247713 - RNA, 19 nt, Homo sapiens
  misc_RNA (1)...(19): siRNA sense strand
aagauuggcuggagaaaau

SEQ ID NO: 247714 - RNA, 19 nt, Homo sapiens
  misc_RNA (1)...(19): siRNA sense strand
gguaaaugcagagcuacaa

SEQ ID NO: 247715 - RNA, 19 nt, Homo sapiens
  misc_RNA (1)...(19): siRNA sense strand
ccaauagcaaggaagauca

SEQ ID NO: 247716 - RNA, 19 nt, Homo sapiens
  misc_RNA (1)...(19): siRNA sense strand
ggauugugcuauggaacau

SEQ ID NO: 247717 - RNA, 19 nt, Homo sapiens
  misc_RNA (1)...(19): siRNA sense strand
ggaggacuacggcaaaggu

SEQ ID NO: 247718 - RNA, 19 nt, Homo sapiens
  misc_RNA (1)...(19): siRNA sense strand
auagcaaggaagaucauua

SEQ ID NO: 247719 - RNA, 19 nt, Homo sapiens
  misc_RNA (1)...(19): siRNA sense strand
gcaacuggaccauggaaaa

SEQ ID NO: 247720 - RNA, 19 nt, Homo sapiens
  misc_RNA (1)...(19): siRNA sense strand
cugguggccuggaaauaga

SEQ ID NO: 247721 - RNA, 19 nt, Homo sapiens
  misc_RNA (1)...(19): siRNA sense strand
caaaagcaacugcacaaga

SEQ ID NO: 247722 - RNA, 19 nt, Homo sapiens
  misc_RNA (1)...(19): siRNA sense strand
gccuggaaauagacucaga

SEQ ID NO: 247723 - RNA, 19 nt, Homo sapiens
  misc_RNA (1)...(19): siRNA sense strand
gggauugugcuauggaaca

SEQ ID NO: 247724 - RNA, 19 nt, Homo sapiens
  misc_RNA (1)...(19): siRNA sense strand
ggaagauuggcuggagaaa

SEQ ID NO: 247725 - RNA, 19 nt, Homo sapiens
  misc_RNA (1)...(19): siRNA sense strand
ugaagaucucaaugaagua

SEQ ID NO: 247726 - RNA, 19 nt, Homo sapiens
  misc_RNA (1)...(19): siRNA sense strand
gaagcccgaggcagaggaa

SEQ ID NO: 247727 - RNA, 19 nt, Homo sapiens
  misc_RNA (1)...(19): siRNA sense strand
uuaaggugaugcccaaugc

SEQ ID NO: 247728 - RNA, 19 nt, Homo sapiens
  misc_RNA (1)...(19): siRNA sense strand
ggagucagcaguggcaagu

SEQ ID NO: 247729 - RNA, 19 nt, Homo sapiens
  misc_RNA (1)...(19): siRNA sense strand
guagaaacugaccacauag

SEQ ID NO: 247730 - RNA, 19 nt, Homo sapiens
  misc_RNA (1)...(19): siRNA sense strand
uaaggacggugagcagcau

SEQ ID NO: 247731 - RNA, 19 nt, Homo sapiens
  misc_RNA (1)...(19): siRNA sense strand
gugcuauggaacaucuuua

SEQ ID NO: 247732 - RNA, 19 nt, Homo sapiens
  misc_RNA (1)...(19): siRNA sense strand
guaaaugcagagcuacaag

SEQ ID NO: 247733 - RNA, 19 nt, Homo sapiens
  misc_RNA (1)...(19): siRNA sense strand
uguugugaguggaagauug

SEQ ID NO: 247734 - RNA, 19 nt, Homo sapiens
  misc_RNA (1)...(19): siRNA sense strand
uggcaucagucaauguucu

SEQ ID NO: 247735 - RNA, 19 nt, Homo sapiens
  misc_RNA (1)...(19): siRNA sense strand
gaagauuggcuggagaaaa

SEQ ID NO: 247736 - RNA, 19 nt, Homo sapiens
  misc_RNA (1)...(19): siRNA sense strand
gcuucuacgauauaaaguu

SEQ ID NO: 247737 - RNA, 19 nt, Homo sapiens
  misc_RNA (1)...(19): siRNA sense strand
gugagcagcaugaagaucu

SEQ ID NO: 247738 - RNA, 19 nt, Homo sapiens
  misc_RNA (1)...(19): siRNA sense strand
agaaacugaccacauagug

SEQ ID NO: 247739 - RNA, 19 nt, Homo sapiens
  misc_RNA (1)...(19): siRNA sense strand
ggccuggagcccaauguug

SEQ ID NO: 247740 - RNA, 19 nt, Homo sapiens
  misc_RNA (1)...(19): siRNA sense strand
gccaauagcaaggaagauc

SEQ ID NO: 247741 - RNA, 19 nt, Homo sapiens
  misc_RNA (1)...(19): siRNA sense strand
guuaaggugaugcccaaug

SEQ ID NO: 247742 - RNA, 19 nt, Homo sapiens
  misc_RNA (1)...(19): siRNA sense strand
ggucuuguggacaguaguu

SEQ ID NO: 247743 - RNA, 19 nt, Homo sapiens
  misc_RNA (1)...(19): siRNA sense strand
gggcacagaagugauucaa

SEQ ID NO: 247744 - RNA, 19 nt, Homo sapiens
  misc_RNA (1)...(19): siRNA sense strand
guagccaaacuauucaaca

SEQ ID NO: 247745 - RNA, 19 nt, Homo sapiens
  misc_RNA (1)...(19): siRNA sense strand
gcagcaugaagaucucaau

SEQ ID NO: 247746 - RNA, 19 nt, Homo sapiens
  misc_RNA (1)...(19): siRNA sense strand
ggacggugagcagcaugaa

SEQ ID NO: 247747 - RNA, 19 nt, Homo sapiens
  misc_RNA (1)...(19): siRNA sense strand
aaggugaugcccaaugcua

SEQ ID NO: 247748 - RNA, 19 nt, Homo sapiens
  misc_RNA (1)...(19): siRNA sense strand
cagcaugaagaucucaaug

SEQ ID NO: 247749 - RNA, 19 nt, Homo sapiens
  misc_RNA (1)...(19): siRNA sense strand
uuacuuaucaagcugaaag

SEQ ID NO: 247750 - RNA, 19 nt, Homo sapiens
  misc_RNA (1)...(19): siRNA sense strand
acugguauccgaucagaga

SEQ ID NO: 247751 - RNA, 19 nt, Homo sapiens
  misc_RNA (1)...(19): siRNA sense strand
gagcugcuaagccguacug

SEQ ID NO: 247752 - RNA, 19 nt, Homo sapiens
  misc_RNA (1)...(19): siRNA sense strand
gcggguagagcaccaugau

SEQ ID NO: 247753 - RNA, 19 nt, Homo sapiens
  misc_RNA (1)...(19): siRNA sense strand
caacgagugucuccucauc

SEQ ID NO: 247754 - RNA, 19 nt, Homo sapiens
  misc_RNA (1)...(19): siRNA sense strand
caucaugccugcugugaag

SEQ ID NO: 247755 - RNA, 19 nt, Homo sapiens
  misc_RNA (1)...(19): siRNA sense strand
gcacagacgcucagcaucu

SEQ ID NO: 247756 - RNA, 19 nt, Homo sapiens
  misc_RNA (1)...(19): siRNA sense strand
cagggucgcuuccgcuuug

SEQ ID NO: 247757 - RNA, 19 nt, Homo sapiens
  misc_RNA (1)...(19): siRNA sense strand
caucaggauucucaaguuc

SEQ ID NO: 247758 - RNA, 19 nt, Homo sapiens
  misc_RNA (1)...(19): siRNA sense strand
ggaaguagcagaggagaag

SEQ ID NO: 247759 - RNA, 19 nt, Homo sapiens
  misc_RNA (1)...(19): siRNA sense strand
aaacucggguggaccaaau

SEQ ID NO: 247760 - RNA, 19 nt, Homo sapiens
  misc_RNA (1)...(19): siRNA sense strand
ccaucaggauucucaaguu

SEQ ID NO: 247761 - RNA, 19 nt, Homo sapiens
  misc_RNA (1)...(19): siRNA sense strand
ggagaagagcuaccagugu

SEQ ID NO: 247762 - RNA, 19 nt, Homo sapiens
  misc_RNA (1)...(19): siRNA sense strand
acgcggaggugguggauga

SEQ ID NO: 247763 - RNA, 19 nt, Homo sapiens
  misc_RNA (1)...(19): siRNA sense strand
ugucugugcuguccacuau

SEQ ID NO: 247764 - RNA, 19 nt, Homo sapiens
  misc_RNA (1)...(19): siRNA sense strand
cuaccacgucuucauauuu

SEQ ID NO: 247765 - RNA, 19 nt, Homo sapiens
  misc_RNA (1)...(19): siRNA sense strand
cgacaucaccuccgacuac

SEQ ID NO: 247766 - RNA, 19 nt, Homo sapiens
  misc_RNA (1)...(19): siRNA sense strand
cauccuaggcuccggcuuu

SEQ ID NO: 247767 - RNA, 19 nt, Homo sapiens
  misc_RNA (1)...(19): siRNA sense strand
ggaagcugcugggcucagu

SEQ ID NO: 247768 - RNA, 19 nt, Homo sapiens
  misc_RNA (1)...(19): siRNA sense strand
ucaguggucuacgcgcaua

SEQ ID NO: 247769 - RNA, 19 nt, Homo sapiens
  misc_RNA (1)...(19): siRNA sense strand
cgucuaccacgucuucaua

SEQ ID NO: 247770 - RNA, 19 nt, Homo sapiens
  misc_RNA (1)...(19): siRNA sense strand
ggacgucauugagcaguac

SEQ ID NO: 247771 - RNA, 19 nt, Homo sapiens
  misc_RNA (1)...(19): siRNA sense strand
ggaacuugccaacgagugu

SEQ ID NO: 247772 - RNA, 19 nt, Homo sapiens
  misc_RNA (1)...(19): siRNA sense strand
gaucaccgccugguacauc

SEQ ID NO: 247773 - RNA, 19 nt, Homo sapiens
  misc_RNA (1)...(19): siRNA sense strand
caucggcuauggugacaag

SEQ ID NO: 247774 - RNA, 19 nt, Homo sapiens
  misc_RNA (1)...(19): siRNA sense strand
ggacgccaacuccgacuuc

SEQ ID NO: 247775 - RNA, 19 nt, Homo sapiens
  misc_RNA (1)...(19): siRNA sense strand
acaagacaccgcacacaug

SEQ ID NO: 247776 - RNA, 19 nt, Homo sapiens
  misc_RNA (1)...(19): siRNA sense strand
agaagcaggugcaguccau

SEQ ID NO: 247777 - RNA, 19 nt, Homo sapiens
  misc_RNA (1)...(19): siRNA sense strand
ggaggugguggaugaaauc

SEQ ID NO: 247778 - RNA, 19 nt, Homo sapiens
  misc_RNA (1)...(19): siRNA sense strand
ccaccugguacuacuauga

SEQ ID NO: 247779 - RNA, 19 nt, Homo sapiens
  misc_RNA (1)...(19): siRNA sense strand
cgccuguacuccaccgaua

SEQ ID NO: 247780 - RNA, 19 nt, Homo sapiens
  misc_RNA (1)...(19): siRNA sense strand
ucuaccacgucuucauauu

SEQ ID NO: 247781 - RNA, 19 nt, Homo sapiens
  misc_RNA (1)...(19): siRNA sense strand
ugacagccaccugguacua

SEQ ID NO: 247782 - RNA, 19 nt, Homo sapiens
  misc_RNA (1)...(19): siRNA sense strand
ucuggcaccuccaacaaug

SEQ ID NO: 247783 - RNA, 19 nt, Homo sapiens
  misc_RNA (1)...(19): siRNA sense strand
gcagggucgcuuccgcuuu

SEQ ID NO: 247784 - RNA, 19 nt, Homo sapiens
  misc_RNA (1)...(19): siRNA sense strand
cugggcaucucuuucuuug

SEQ ID NO: 247785 - RNA, 19 nt, Homo sapiens
  misc_RNA (1)...(19): siRNA sense strand
gacaagacaccgcacacau

SEQ ID NO: 247786 - RNA, 19 nt, Homo sapiens
  misc_RNA (1)...(19): siRNA sense strand
uaccacgucuucauauuuu

SEQ ID NO: 247787 - RNA, 19 nt, Homo sapiens
  misc_RNA (1)...(19): siRNA sense strand
acgagugucuccucaucuu

SEQ ID NO: 247788 - RNA, 19 nt, Homo sapiens
  misc_RNA (1)...(19): siRNA sense strand
cggaggugguggaugaaau

SEQ ID NO: 247789 - RNA, 19 nt, Homo sapiens
  misc_RNA (1)...(19): siRNA sense strand
gaccguacgacgugaagga

SEQ ID NO: 247790 - RNA, 19 nt, Homo sapiens
  misc_RNA (1)...(19): siRNA sense strand
accaggaacuugccaacga

SEQ ID NO: 247791 - RNA, 19 nt, Homo sapiens
  misc_RNA (1)...(19): siRNA sense strand
acaguauccucccauccuu

SEQ ID NO: 247792 - RNA, 19 nt, Homo sapiens
  misc_RNA (1)...(19): siRNA sense strand
acgauuacauugacaacca

SEQ ID NO: 247793 - RNA, 19 nt, Homo sapiens
  misc_RNA (1)...(19): siRNA sense strand
agaacugggucuacaacgu

SEQ ID NO: 247794 - RNA, 19 nt, Homo sapiens
  misc_RNA (1)...(19): siRNA sense strand
guggaugaaaucagcauga

SEQ ID NO: 247795 - RNA, 19 nt, Homo sapiens
  misc_RNA (1)...(19): siRNA sense strand
cggcuauggugacaagaca

SEQ ID NO: 247796 - RNA, 19 nt, Homo sapiens
  misc_RNA (1)...(19): siRNA sense strand
gcagaacugggucuacaac

SEQ ID NO: 247797 - RNA, 19 nt, Homo sapiens
  misc_RNA (1)...(19): siRNA sense strand
cugcagaacugggucuaca

SEQ ID NO: 247798 - RNA, 19 nt, Homo sapiens
  misc_RNA (1)...(19): siRNA sense strand
caucuggcaccuccaacaa

SEQ ID NO: 247799 - RNA, 19 nt, Homo sapiens
  misc_RNA (1)...(19): siRNA sense strand
gacaucaugccugcuguga

SEQ ID NO: 247800 - RNA, 19 nt, Homo sapiens
  misc_RNA (1)...(19): siRNA sense strand
caagcuggaccugcuguug

SEQ ID NO: 247801 - RNA, 19 nt, Homo sapiens
  misc_RNA (1)...(19): siRNA sense strand
gaucaagagccugcaaacu

SEQ ID NO: 247802 - RNA, 19 nt, Homo sapiens
  misc_RNA (1)...(19): siRNA sense strand
ggaaauucaaggagacacu

SEQ ID NO: 247803 - RNA, 19 nt, Homo sapiens
  misc_RNA (1)...(19): siRNA sense strand
acagucauccgcuccauca

SEQ ID NO: 247804 - RNA, 19 nt, Homo sapiens
  misc_RNA (1)...(19): siRNA sense strand
gaaagcccuucugugucau

SEQ ID NO: 247805 - RNA, 19 nt, Homo sapiens
  misc_RNA (1)...(19): siRNA sense strand
uggucuaccuggcugagaa

SEQ ID NO: 247806 - RNA, 19 nt, Homo sapiens
  misc_RNA (1)...(19): siRNA sense strand
guacccagggcaacaucuu

SEQ ID NO: 247807 - RNA, 19 nt, Homo sapiens
  misc_RNA (1)...(19): siRNA sense strand
gaaguagcagaggagaaga

SEQ ID NO: 247808 - RNA, 19 nt, Homo sapiens
  misc_RNA (1)...(19): siRNA sense strand
gcaucuggcaccuccaaca

SEQ ID NO: 247809 - RNA, 19 nt, Homo sapiens
  misc_RNA (1)...(19): siRNA sense strand
uuacugggcaucucuuucu

SEQ ID NO: 247810 - RNA, 19 nt, Homo sapiens
  misc_RNA (1)...(19): siRNA sense strand
caaacucggguggaccaaa

SEQ ID NO: 247811 - RNA, 19 nt, Homo sapiens
  misc_RNA (1)...(19): siRNA sense strand
caacgagugucuccucauc

SEQ ID NO: 247812 - RNA, 19 nt, Homo sapiens
  misc_RNA (1)...(19): siRNA sense strand
caucaugccugcugugaag

SEQ ID NO: 247813 - RNA, 19 nt, Homo sapiens
  misc_RNA (1)...(19): siRNA sense strand
gcacagacgcucagcaucu

SEQ ID NO: 247814 - RNA, 19 nt, Homo sapiens
  misc_RNA (1)...(19): siRNA sense strand
cagggucgcuuccgcuuug

SEQ ID NO: 247815 - RNA, 19 nt, Homo sapiens
  misc_RNA (1)...(19): siRNA sense strand
caucaggauucucaaguuc

SEQ ID NO: 247816 - RNA, 19 nt, Homo sapiens
  misc_RNA (1)...(19): siRNA sense strand
ggaaguagcagaggagaag

SEQ ID NO: 247817 - RNA, 19 nt, Homo sapiens
  misc_RNA (1)...(19): siRNA sense strand
aaacucggguggaccaaau

SEQ ID NO: 247818 - RNA, 19 nt, Homo sapiens
  misc_RNA (1)...(19): siRNA sense strand
ccaucaggauucucaaguu

SEQ ID NO: 247819 - RNA, 19 nt, Homo sapiens
  misc_RNA (1)...(19): siRNA sense strand
ggagaagagcuaccagugu

SEQ ID NO: 247820 - RNA, 19 nt, Homo sapiens
  misc_RNA (1)...(19): siRNA sense strand
acgcggaggugguggauga

SEQ ID NO: 247821 - RNA, 19 nt, Homo sapiens
  misc_RNA (1)...(19): siRNA sense strand
ugucugugcuguccacuau

SEQ ID NO: 247822 - RNA, 19 nt, Homo sapiens
  misc_RNA (1)...(19): siRNA sense strand
cuaccacgucuucauauuu

SEQ ID NO: 247823 - RNA, 19 nt, Homo sapiens
  misc_RNA (1)...(19): siRNA sense strand
cgacaucaccuccgacuac

SEQ ID NO: 247824 - RNA, 19 nt, Homo sapiens
  misc_RNA (1)...(19): siRNA sense strand
cauccuaggcuccggcuuu

SEQ ID NO: 247825 - RNA, 19 nt, Homo sapiens
  misc_RNA (1)...(19): siRNA sense strand
ggaagcugcugggcucagu

SEQ ID NO: 247826 - RNA, 19 nt, Homo sapiens
  misc_RNA (1)...(19): siRNA sense strand
ucaguggucuacgcgcaua

SEQ ID NO: 247827 - RNA, 19 nt, Homo sapiens
  misc_RNA (1)...(19): siRNA sense strand
cgucuaccacgucuucaua

SEQ ID NO: 247828 - RNA, 19 nt, Homo sapiens
  misc_RNA (1)...(19): siRNA sense strand
ggacgucauugagcaguac

SEQ ID NO: 247829 - RNA, 19 nt, Homo sapiens
  misc_RNA (1)...(19): siRNA sense strand
ggaacuugccaacgagugu

SEQ ID NO: 247830 - RNA, 19 nt, Homo sapiens
  misc_RNA (1)...(19): siRNA sense strand
gaucaccgccugguacauc

SEQ ID NO: 247831 - RNA, 19 nt, Homo sapiens
  misc_RNA (1)...(19): siRNA sense strand
caucggcuauggugacaag

SEQ ID NO: 247832 - RNA, 19 nt, Homo sapiens
  misc_RNA (1)...(19): siRNA sense strand
ggacgccaacuccgacuuc

SEQ ID NO: 247833 - RNA, 19 nt, Homo sapiens
  misc_RNA (1)...(19): siRNA sense strand
acaagacaccgcacacaug

SEQ ID NO: 247834 - RNA, 19 nt, Homo sapiens
  misc_RNA (1)...(19): siRNA sense strand
agaagcaggugcaguccau

SEQ ID NO: 247835 - RNA, 19 nt, Homo sapiens
  misc_RNA (1)...(19): siRNA sense strand
ggaggugguggaugaaauc

SEQ ID NO: 247836 - RNA, 19 nt, Homo sapiens
  misc_RNA (1)...(19): siRNA sense strand
ccaccugguacuacuauga

SEQ ID NO: 247837 - RNA, 19 nt, Homo sapiens
  misc_RNA (1)...(19): siRNA sense strand
cgccuguacuccaccgaua

SEQ ID NO: 247838 - RNA, 19 nt, Homo sapiens
  misc_RNA (1)...(19): siRNA sense strand
ucuaccacgucuucauauu

SEQ ID NO: 247839 - RNA, 19 nt, Homo sapiens
  misc_RNA (1)...(19): siRNA sense strand
ugacagccaccugguacua

SEQ ID NO: 247840 - RNA, 19 nt, Homo sapiens
  misc_RNA (1)...(19): siRNA sense strand
ucuggcaccuccaacaaug

SEQ ID NO: 247841 - RNA, 19 nt, Homo sapiens
  misc_RNA (1)...(19): siRNA sense strand
gcagggucgcuuccgcuuu

SEQ ID NO: 247842 - RNA, 19 nt, Homo sapiens
  misc_RNA (1)...(19): siRNA sense strand
cugggcaucucuuucuuug

SEQ ID NO: 247843 - RNA, 19 nt, Homo sapiens
  misc_RNA (1)...(19): siRNA sense strand
gacaagacaccgcacacau

SEQ ID NO: 247844 - RNA, 19 nt, Homo sapiens
  misc_RNA (1)...(19): siRNA sense strand
uaccacgucuucauauuuu

SEQ ID NO: 247845 - RNA, 19 nt, Homo sapiens
  misc_RNA (1)...(19): siRNA sense strand
acgagugucuccucaucuu

SEQ ID NO: 247846 - RNA, 19 nt, Homo sapiens
  misc_RNA (1)...(19): siRNA sense strand
cggaggugguggaugaaau

SEQ ID NO: 247847 - RNA, 19 nt, Homo sapiens
  misc_RNA (1)...(19): siRNA sense strand
gaccguacgacgugaagga

SEQ ID NO: 247848 - RNA, 19 nt, Homo sapiens
  misc_RNA (1)...(19): siRNA sense strand
accaggaacuugccaacga

SEQ ID NO: 247849 - RNA, 19 nt, Homo sapiens
  misc_RNA (1)...(19): siRNA sense strand
acaguauccucccauccuu

SEQ ID NO: 247850 - RNA, 19 nt, Homo sapiens
  misc_RNA (1)...(19): siRNA sense strand
acgauuacauugacaacca

SEQ ID NO: 247851 - RNA, 19 nt, Homo sapiens
  misc_RNA (1)...(19): siRNA sense strand
agaacugggucuacaacgu

SEQ ID NO: 247852 - RNA, 19 nt, Homo sapiens
  misc_RNA (1)...(19): siRNA sense strand
guggaugaaaucagcauga

SEQ ID NO: 247853 - RNA, 19 nt, Homo sapiens
  misc_RNA (1)...(19): siRNA sense strand
cggcuauggugacaagaca

SEQ ID NO: 247854 - RNA, 19 nt, Homo sapiens
  misc_RNA (1)...(19): siRNA sense strand
gcagaacugggucuacaac

SEQ ID NO: 247855 - RNA, 19 nt, Homo sapiens
  misc_RNA (1)...(19): siRNA sense strand
cugcagaacugggucuaca

SEQ ID NO: 247856 - RNA, 19 nt, Homo sapiens
  misc_RNA (1)...(19): siRNA sense strand
caucuggcaccuccaacaa

SEQ ID NO: 247857 - RNA, 19 nt, Homo sapiens
  misc_RNA (1)...(19): siRNA sense strand
gacaucaugccugcuguga

SEQ ID NO: 247858 - RNA, 19 nt, Homo sapiens
  misc_RNA (1)...(19): siRNA sense strand
caagcuggaccugcuguug

SEQ ID NO: 247859 - RNA, 19 nt, Homo sapiens
  misc_RNA (1)...(19): siRNA sense strand
gaucaagagccugcaaacu

SEQ ID NO: 247860 - RNA, 19 nt, Homo sapiens
  misc_RNA (1)...(19): siRNA sense strand
ggaaauucaaggagacacu

SEQ ID NO: 247861 - RNA, 19 nt, Homo sapiens
  misc_RNA (1)...(19): siRNA sense strand
acagucauccgcuccauca

SEQ ID NO: 247862 - RNA, 19 nt, Homo sapiens
  misc_RNA (1)...(19): siRNA sense strand
gaaagcccuucugugucau

SEQ ID NO: 247863 - RNA, 19 nt, Homo sapiens
  misc_RNA (1)...(19): siRNA sense strand
uggucuaccuggcugagaa

SEQ ID NO: 247864 - RNA, 19 nt, Homo sapiens
  misc_RNA (1)...(19): siRNA sense strand
guacccagggcaacaucuu

SEQ ID NO: 247865 - RNA, 19 nt, Homo sapiens
  misc_RNA (1)...(19): siRNA sense strand
gaaguagcagaggagaaga

SEQ ID NO: 247866 - RNA, 19 nt, Homo sapiens
  misc_RNA (1)...(19): siRNA sense strand
gcaucuggcaccuccaaca

SEQ ID NO: 247867 - RNA, 19 nt, Homo sapiens
  misc_RNA (1)...(19): siRNA sense strand
uuacugggcaucucuuucu

SEQ ID NO: 247868 - RNA, 19 nt, Homo sapiens
  misc_RNA (1)...(19): siRNA sense strand
caaacucggguggaccaaa

SEQ ID NO: 247869 - RNA, 19 nt, Homo sapiens
  misc_RNA (1)...(19): siRNA sense strand
caacaaaugucaacaaaca

SEQ ID NO: 247870 - RNA, 19 nt, Homo sapiens
  misc_RNA (1)...(19): siRNA sense strand
caaguccacuccaaguuua

SEQ ID NO: 247871 - RNA, 19 nt, Homo sapiens
  misc_RNA (1)...(19): siRNA sense strand
acacaggaguuaauucuaa

SEQ ID NO: 247872 - RNA, 19 nt, Homo sapiens
  misc_RNA (1)...(19): siRNA sense strand
cauaaacccacauuucuua

SEQ ID NO: 247873 - RNA, 19 nt, Homo sapiens
  misc_RNA (1)...(19): siRNA sense strand
gcagcaaacuccugaagau

SEQ ID NO: 247874 - RNA, 19 nt, Homo sapiens
  misc_RNA (1)...(19): siRNA sense strand
ggacauugauaacgaagau

SEQ ID NO: 247875 - RNA, 19 nt, Homo sapiens
  misc_RNA (1)...(19): siRNA sense strand
acuaugauauggugcauua

SEQ ID NO: 247876 - RNA, 19 nt, Homo sapiens
  misc_RNA (1)...(19): siRNA sense strand
ccaagaauguggugaaagu

SEQ ID NO: 247877 - RNA, 19 nt, Homo sapiens
  misc_RNA (1)...(19): siRNA sense strand
ccagugauuuggagaauau

SEQ ID NO: 247878 - RNA, 19 nt, Homo sapiens
  misc_RNA (1)...(19): siRNA sense strand
ggaaauagaguuacaacca

SEQ ID NO: 247879 - RNA, 19 nt, Homo sapiens
  misc_RNA (1)...(19): siRNA sense strand
gcaggagacucuguacaug

SEQ ID NO: 247880 - RNA, 19 nt, Homo sapiens
  misc_RNA (1)...(19): siRNA sense strand
gaacuuaaagcagcaguau

SEQ ID NO: 247881 - RNA, 19 nt, Homo sapiens
  misc_RNA (1)...(19): siRNA sense strand
ccacauuucuuagauggaa

SEQ ID NO: 247882 - RNA, 19 nt, Homo sapiens
  misc_RNA (1)...(19): siRNA sense strand
acuuaaagcagcaguauua

SEQ ID NO: 247883 - RNA, 19 nt, Homo sapiens
  misc_RNA (1)...(19): siRNA sense strand
cacagagaaugaaguauug

SEQ ID NO: 247884 - RNA, 19 nt, Homo sapiens
  misc_RNA (1)...(19): siRNA sense strand
cagcacaaguagcuaagaa

SEQ ID NO: 247885 - RNA, 19 nt, Homo sapiens
  misc_RNA (1)...(19): siRNA sense strand
gaagaaauuggaaauagag

SEQ ID NO: 247886 - RNA, 19 nt, Homo sapiens
  misc_RNA (1)...(19): siRNA sense strand
caaggaaaauggaacuuaa

SEQ ID NO: 247887 - RNA, 19 nt, Homo sapiens
  misc_RNA (1)...(19): siRNA sense strand
caacugaaaccuacugcuu

SEQ ID NO: 247888 - RNA, 19 nt, Homo sapiens
  misc_RNA (1)...(19): siRNA sense strand
uggaagagauauaaaugga

SEQ ID NO: 247889 - RNA, 19 nt, Homo sapiens
  misc_RNA (1)...(19): siRNA sense strand
gugacuacguuaaggauau

SEQ ID NO: 247890 - RNA, 19 nt, Homo sapiens
  misc_RNA (1)...(19): siRNA sense strand
aaccagagcagcacaagua

SEQ ID NO: 247891 - RNA, 19 nt, Homo sapiens
  misc_RNA (1)...(19): siRNA sense strand
acacagagaaugaaguauu

SEQ ID NO: 247892 - RNA, 19 nt, Homo sapiens
  misc_RNA (1)...(19): siRNA sense strand
gauggaagagauauaaaug

SEQ ID NO: 247893 - RNA, 19 nt, Homo sapiens
  misc_RNA (1)...(19): siRNA sense strand
gcucugcagugacuacguu

SEQ ID NO: 247894 - RNA, 19 nt, Homo sapiens
  misc_RNA (1)...(19): siRNA sense strand
caccaaaguuccaguucaa

SEQ ID NO: 247895 - RNA, 19 nt, Homo sapiens
  misc_RNA (1)...(19): siRNA sense strand
gagcagcacaaguagcuaa

SEQ ID NO: 247896 - RNA, 19 nt, Homo sapiens
  misc_RNA (1)...(19): siRNA sense strand
guacaugugcguuggcauu

SEQ ID NO: 247897 - RNA, 19 nt, Homo sapiens
  misc_RNA (1)...(19): siRNA sense strand
agaauguggugaaaguaaa

SEQ ID NO: 247898 - RNA, 19 nt, Homo sapiens
  misc_RNA (1)...(19): siRNA sense strand
cgagaaauggaaacucuaa

SEQ ID NO: 247899 - RNA, 19 nt, Homo sapiens
  misc_RNA (1)...(19): siRNA sense strand
uaacgaagauugggagaac

SEQ ID NO: 247900 - RNA, 19 nt, Homo sapiens
  misc_RNA (1)...(19): siRNA sense strand
ucccucagcugaacucaaa

SEQ ID NO: 247901 - RNA, 19 nt, Homo sapiens
  misc_RNA (1)...(19): siRNA sense strand
ucaucgccaucaagaauaa

SEQ ID NO: 247902 - RNA, 19 nt, Homo sapiens
  misc_RNA (1)...(19): siRNA sense strand
aaacccacauuucuuagau

SEQ ID NO: 247903 - RNA, 19 nt, Homo sapiens
  misc_RNA (1)...(19): siRNA sense strand
gacaaugcuuauaccaguu

SEQ ID NO: 247904 - RNA, 19 nt, Homo sapiens
  misc_RNA (1)...(19): siRNA sense strand
gcacaaguagcuaagaaag

SEQ ID NO: 247905 - RNA, 19 nt, Homo sapiens
  misc_RNA (1)...(19): siRNA sense strand
cacaggaguuaauucuaaa

SEQ ID NO: 247906 - RNA, 19 nt, Homo sapiens
  misc_RNA (1)...(19): siRNA sense strand
ggucgacccuugccacuac

SEQ ID NO: 247907 - RNA, 19 nt, Homo sapiens
  misc_RNA (1)...(19): siRNA sense strand
caggauacacagagaauga

SEQ ID NO: 247908 - RNA, 19 nt, Homo sapiens
  misc_RNA (1)...(19): siRNA sense strand
acuauuaggcgaacuguuu

SEQ ID NO: 247909 - RNA, 19 nt, Homo sapiens
  misc_RNA (1)...(19): siRNA sense strand
ggccaagaauguggugaaa

SEQ ID NO: 247910 - RNA, 19 nt, Homo sapiens
  misc_RNA (1)...(19): siRNA sense strand
cgaggacauugauaacgaa

SEQ ID NO: 247911 - RNA, 19 nt, Homo sapiens
  misc_RNA (1)...(19): siRNA sense strand
gaauauugacacaggaguu

SEQ ID NO: 247912 - RNA, 19 nt, Homo sapiens
  misc_RNA (1)...(19): siRNA sense strand
gauuacugcucugcucuug

SEQ ID NO: 247913 - RNA, 19 nt, Homo sapiens
  misc_RNA (1)...(19): siRNA sense strand
aaaguuaagagucauguga

SEQ ID NO: 247914 - RNA, 19 nt, Homo sapiens
  misc_RNA (1)...(19): siRNA sense strand
agaaugaaguauuggaagu

SEQ ID NO: 247915 - RNA, 19 nt, Homo sapiens
  misc_RNA (1)...(19): siRNA sense strand
ugaagacuuuguuuacauc

SEQ ID NO: 247916 - RNA, 19 nt, Homo sapiens
  misc_RNA (1)...(19): siRNA sense strand
ccuaguggauuggcuggua

SEQ ID NO: 247917 - RNA, 19 nt, Homo sapiens
  misc_RNA (1)...(19): siRNA sense strand
ucacagacaaugcuuauac

SEQ ID NO: 247918 - RNA, 19 nt, Homo sapiens
  misc_RNA (1)...(19): siRNA sense strand
uggauuggcugguacaagu

SEQ ID NO: 247919 - RNA, 19 nt, Homo sapiens
  misc_RNA (1)...(19): siRNA sense strand
guacaaguccacuccaagu

SEQ ID NO: 247920 - RNA, 19 nt, Homo sapiens
  misc_RNA (1)...(19): siRNA sense strand
cuaaauucaucgccaucaa

SEQ ID NO: 247921 - RNA, 19 nt, Homo sapiens
  misc_RNA (1)...(19): siRNA sense strand
ccaaauccgagaaauggaa

SEQ ID NO: 247922 - RNA, 19 nt, Homo sapiens
  misc_RNA (1)...(19): siRNA sense strand
gcuuauaccaguucccaaa

SEQ ID NO: 247923 - RNA, 19 nt, Homo sapiens
  misc_RNA (1)...(19): siRNA sense strand
ccaaguaugaggagauguu

SEQ ID NO: 247924 - RNA, 19 nt, Homo sapiens
  misc_RNA (1)...(19): siRNA sense strand
acaaguccacuccaaguuu

SEQ ID NO: 247925 - RNA, 19 nt, Homo sapiens
  misc_RNA (1)...(19): siRNA sense strand
gcuaagaaagcucagaaca

SEQ ID NO: 247926 - RNA, 19 nt, Homo sapiens
  misc_RNA (1)...(19): siRNA sense strand
gaaaauggaacuuaaagca

SEQ ID NO: 247927 - RNA, 19 nt, Homo sapiens
  misc_RNA (1)...(19): siRNA sense strand
acaccaaaguuccaguuca

SEQ ID NO: 247928 - RNA, 19 nt, Homo sapiens
  misc_RNA (1)...(19): siRNA sense strand
auacacagagaaugaagua

SEQ ID NO: 247929 - RNA, 19 nt, Homo sapiens
  misc_RNA (1)...(19): siRNA sense strand
ucgaggacauugauaacga

SEQ ID NO: 247930 - RNA, 19 nt, Homo sapiens
  misc_RNA (1)...(19): siRNA sense strand
cugaggaugucuccaugaa

SEQ ID NO: 247931 - RNA, 19 nt, Homo sapiens
  misc_RNA (1)...(19): siRNA sense strand
aagaauguggugaaaguaa

SEQ ID NO: 247932 - RNA, 19 nt, Homo sapiens
  misc_RNA (1)...(19): siRNA sense strand
ugcauuaucauccuucuaa

SEQ ID NO: 247933 - RNA, 19 nt, Homo sapiens
  misc_RNA (1)...(19): siRNA sense strand
ugauggagcugacucucau

SEQ ID NO: 247934 - RNA, 19 nt, Homo sapiens
  misc_RNA (1)...(19): siRNA sense strand
cuccaaauauugaagacuu

SEQ ID NO: 247935 - RNA, 19 nt, Homo sapiens
  misc_RNA (1)...(19): siRNA sense strand
caugugcguuggcauuaug

SEQ ID NO: 247936 - RNA, 19 nt, Homo sapiens
  misc_RNA (1)...(19): siRNA sense strand
gcagugacuacguuaagga

SEQ ID NO: 247937 - RNA, 19 nt, Homo sapiens
  misc_RNA (1)...(19): siRNA sense strand
aaaucgaggacauugauaa

SEQ ID NO: 247938 - RNA, 19 nt, Homo sapiens
  misc_RNA (1)...(19): siRNA sense strand
ccauaaacccacauuucuu

SEQ ID NO: 247939 - RNA, 19 nt, Homo sapiens
  misc_RNA (1)...(19): siRNA sense strand
caucacagacaaugcuuau

SEQ ID NO: 247940 - RNA, 19 nt, Homo sapiens
  misc_RNA (1)...(19): siRNA sense strand
ugucaaaccaguacagaug

SEQ ID NO: 247941 - RNA, 19 nt, Homo sapiens
  misc_RNA (1)...(19): siRNA sense strand
gaauguggugaaaguaaau

SEQ ID NO: 247942 - RNA, 19 nt, Homo sapiens
  misc_RNA (1)...(19): siRNA sense strand
ggaacuuaaagcagcagua

SEQ ID NO: 247943 - RNA, 19 nt, Homo sapiens
  misc_RNA (1)...(19): siRNA sense strand
aauauugacacaggaguua

SEQ ID NO: 247944 - RNA, 19 nt, Homo sapiens
  misc_RNA (1)...(19): siRNA sense strand
ucaaaccaguacagaugga

SEQ ID NO: 247945 - RNA, 19 nt, Homo sapiens
  misc_RNA (1)...(19): siRNA sense strand
caagaauguggugaaagua

SEQ ID NO: 247946 - RNA, 19 nt, Homo sapiens
  misc_RNA (1)...(19): siRNA sense strand
ucaauuaguugggauuacu

SEQ ID NO: 247947 - RNA, 19 nt, Homo sapiens
  misc_RNA (1)...(19): siRNA sense strand
ucaggcagcuggagguuuu

SEQ ID NO: 247948 - RNA, 19 nt, Homo sapiens
  misc_RNA (1)...(19): siRNA sense strand
guccauaaacccacauuuc

SEQ ID NO: 247949 - RNA, 19 nt, Homo sapiens
  misc_RNA (1)...(19): siRNA sense strand
guggugaaaguaaaugaaa

SEQ ID NO: 247950 - RNA, 19 nt, Homo sapiens
  misc_RNA (1)...(19): siRNA sense strand
caaauccgagaaauggaaa

SEQ ID NO: 247951 - RNA, 19 nt, Homo sapiens
  misc_RNA (1)...(19): siRNA sense strand
ccucagcucugcagugacu

SEQ ID NO: 247952 - RNA, 19 nt, Homo sapiens
  misc_RNA (1)...(19): siRNA sense strand
agacuuuguuuacaucaca

SEQ ID NO: 247953 - RNA, 19 nt, Homo sapiens
  misc_RNA (1)...(19): siRNA sense strand
gacacaggaguuaauucua

SEQ ID NO: 247954 - RNA, 19 nt, Homo sapiens
  misc_RNA (1)...(19): siRNA sense strand
ugacacaggaguuaauucu

SEQ ID NO: 247955 - RNA, 19 nt, Homo sapiens
  misc_RNA (1)...(19): siRNA sense strand
gaccuugccuccccacuga

SEQ ID NO: 247956 - RNA, 19 nt, Homo sapiens
  misc_RNA (1)...(19): siRNA sense strand
gaacucaaaagccgucaaa

SEQ ID NO: 247957 - RNA, 19 nt, Homo sapiens
  misc_RNA (1)...(19): siRNA sense strand
uaaagcagcaguauuacac

SEQ ID NO: 247958 - RNA, 19 nt, Homo sapiens
  misc_RNA (1)...(19): siRNA sense strand
agaaagcucagaacaccaa

SEQ ID NO: 247959 - RNA, 19 nt, Homo sapiens
  misc_RNA (1)...(19): siRNA sense strand
caaguaugaggagauguuu

SEQ ID NO: 247960 - RNA, 19 nt, Homo sapiens
  misc_RNA (1)...(19): siRNA sense strand
gcauuaucauccuucuaag

SEQ ID NO: 247961 - RNA, 19 nt, Homo sapiens
  misc_RNA (1)...(19): siRNA sense strand
uaaacccacauuucuuaga

SEQ ID NO: 247962 - RNA, 19 nt, Homo sapiens
  misc_RNA (1)...(19): siRNA sense strand
ugaaguauuggaagucaug

SEQ ID NO: 247963 - RNA, 19 nt, Homo sapiens
  misc_RNA (1)...(19): siRNA sense strand
gaagacuuuguuuacauca

SEQ ID NO: 247964 - RNA, 19 nt, Homo sapiens
  misc_RNA (1)...(19): siRNA sense strand
aggagacucuguacaugug

SEQ ID NO: 247965 - RNA, 19 nt, Homo sapiens
  misc_RNA (1)...(19): siRNA sense strand
ccgacgguguccagugauu

SEQ ID NO: 247966 - RNA, 19 nt, Homo sapiens
  misc_RNA (1)...(19): siRNA sense strand
gacgguguccagugauuug

SEQ ID NO: 247967 - RNA, 19 nt, Homo sapiens
  misc_RNA (1)...(19): siRNA sense strand
aagaauaaguaugcaagca

SEQ ID NO: 247968 - RNA, 19 nt, Homo sapiens
  misc_RNA (1)...(19): siRNA sense strand
gaaugaaguauuggaaguc

SEQ ID NO: 247969 - RNA, 19 nt, Homo sapiens
  misc_RNA (1)...(19): siRNA sense strand
ggauggaacucauuauauu

SEQ ID NO: 247970 - RNA, 19 nt, Homo sapiens
  misc_RNA (1)...(19): siRNA sense strand
gcagauauguucaugacaa

SEQ ID NO: 247971 - RNA, 19 nt, Homo sapiens
  misc_RNA (1)...(19): siRNA sense strand
uaaagaugcuccuaaaguu

SEQ ID NO: 247972 - RNA, 19 nt, Homo sapiens
  misc_RNA (1)...(19): siRNA sense strand
cagugaagcugaagacuuu

SEQ ID NO: 247973 - RNA, 19 nt, Homo sapiens
  misc_RNA (1)...(19): siRNA sense strand
caggaaacauucauucaaa

SEQ ID NO: 247974 - RNA, 19 nt, Homo sapiens
  misc_RNA (1)...(19): siRNA sense strand
cauaauauccagacacaua

SEQ ID NO: 247975 - RNA, 19 nt, Homo sapiens
  misc_RNA (1)...(19): siRNA sense strand
uaagaaagccucagguuug

SEQ ID NO: 247976 - RNA, 19 nt, Homo sapiens
  misc_RNA (1)...(19): siRNA sense strand
ggacaguauuucagaaugu

SEQ ID NO: 247977 - RNA, 19 nt, Homo sapiens
  misc_RNA (1)...(19): siRNA sense strand
aaagaagucuggcuaaaca

SEQ ID NO: 247978 - RNA, 19 nt, Homo sapiens
  misc_RNA (1)...(19): siRNA sense strand
cagaugagguccauacuuc

SEQ ID NO: 247979 - RNA, 19 nt, Homo sapiens
  misc_RNA (1)...(19): siRNA sense strand
ccaaguugaugcucuuaaa

SEQ ID NO: 247980 - RNA, 19 nt, Homo sapiens
  misc_RNA (1)...(19): siRNA sense strand
acaaucaucuccuggcuaa

SEQ ID NO: 247981 - RNA, 19 nt, Homo sapiens
  misc_RNA (1)...(19): siRNA sense strand
ccauugaagugguuaagaa

SEQ ID NO: 247982 - RNA, 19 nt, Homo sapiens
  misc_RNA (1)...(19): siRNA sense strand
uagauuggaugguaccuuu

SEQ ID NO: 247983 - RNA, 19 nt, Homo sapiens
  misc_RNA (1)...(19): siRNA sense strand
uuaagaagauuccuaugga

SEQ ID NO: 247984 - RNA, 19 nt, Homo sapiens
  misc_RNA (1)...(19): siRNA sense strand
gacauaauauccagacaca

SEQ ID NO: 247985 - RNA, 19 nt, Homo sapiens
  misc_RNA (1)...(19): siRNA sense strand
gagcagauauguucaugac

SEQ ID NO: 247986 - RNA, 19 nt, Homo sapiens
  misc_RNA (1)...(19): siRNA sense strand
ccagacacauacaaacuau

SEQ ID NO: 247987 - RNA, 19 nt, Homo sapiens
  misc_RNA (1)...(19): siRNA sense strand
cagauauguucaugacaaa

SEQ ID NO: 247988 - RNA, 19 nt, Homo sapiens
  misc_RNA (1)...(19): siRNA sense strand
ggaacuuuguccuguaaca

SEQ ID NO: 247989 - RNA, 19 nt, Homo sapiens
  misc_RNA (1)...(19): siRNA sense strand
gaugagguccauacuucua

SEQ ID NO: 247990 - RNA, 19 nt, Homo sapiens
  misc_RNA (1)...(19): siRNA sense strand
gagagcagauauguucaug

SEQ ID NO: 247991 - RNA, 19 nt, Homo sapiens
  misc_RNA (1)...(19): siRNA sense strand
gggacaguauuucagaaug

SEQ ID NO: 247992 - RNA, 19 nt, Homo sapiens
  misc_RNA (1)...(19): siRNA sense strand
gaagacagacauaauaucc

SEQ ID NO: 247993 - RNA, 19 nt, Homo sapiens
  misc_RNA (1)...(19): siRNA sense strand
gaugguaccuuuugucaau

SEQ ID NO: 247994 - RNA, 19 nt, Homo sapiens
  misc_RNA (1)...(19): siRNA sense strand
ucuagccauugauucauua

SEQ ID NO: 247995 - RNA, 19 nt, Homo sapiens
  misc_RNA (1)...(19): siRNA sense strand
caaaagaagucuggcuaaa

SEQ ID NO: 247996 - RNA, 19 nt, Homo sapiens
  misc_RNA (1)...(19): siRNA sense strand
uuaaggauggaacucauua

SEQ ID NO: 247997 - RNA, 19 nt, Homo sapiens
  misc_RNA (1)...(19): siRNA sense strand
uuaaagaugcuccuaaagu

SEQ ID NO: 247998 - RNA, 19 nt, Homo sapiens
  misc_RNA (1)...(19): siRNA sense strand
uuaagaaagccucagguuu

SEQ ID NO: 247999 - RNA, 19 nt, Homo sapiens
  misc_RNA (1)...(19): siRNA sense strand
uugaaguucugcauucuga

SEQ ID NO: 248000 - RNA, 19 nt, Homo sapiens
  misc_RNA (1)...(19): siRNA sense strand
ggaagacagacauaauauc

SEQ ID NO: 248001 - RNA, 19 nt, Homo sapiens
  misc_RNA (1)...(19): siRNA sense strand
ggagugggacaguauuuca

SEQ ID NO: 248002 - RNA, 19 nt, Homo sapiens
  misc_RNA (1)...(19): siRNA sense strand
gcugcugccuugugccauu

SEQ ID NO: 248003 - RNA, 19 nt, Homo sapiens
  misc_RNA (1)...(19): siRNA sense strand
acauaaacaccuucagaaa

SEQ ID NO: 248004 - RNA, 19 nt, Homo sapiens
  misc_RNA (1)...(19): siRNA sense strand
cagaauguguagauuggau

SEQ ID NO: 248005 - RNA, 19 nt, Homo sapiens
  misc_RNA (1)...(19): siRNA sense strand
aaggauggaacucauuaua

SEQ ID NO: 248006 - RNA, 19 nt, Homo sapiens
  misc_RNA (1)...(19): siRNA sense strand
gaagucuggcuaaacaugu

SEQ ID NO: 248007 - RNA, 19 nt, Homo sapiens
  misc_RNA (1)...(19): siRNA sense strand
ugggaacuuuguccuguaa

SEQ ID NO: 248008 - RNA, 19 nt, Homo sapiens
  misc_RNA (1)...(19): siRNA sense strand
aaggagagcagauauguuc

SEQ ID NO: 248009 - RNA, 19 nt, Homo sapiens
  misc_RNA (1)...(19): siRNA sense strand
gacaguauuucagaaugug

SEQ ID NO: 248010 - RNA, 19 nt, Homo sapiens
  misc_RNA (1)...(19): siRNA sense strand
uuacauaaacaccuucaga

SEQ ID NO: 248011 - RNA, 19 nt, Homo sapiens
  misc_RNA (1)...(19): siRNA sense strand
uuagagguaugugaaguau

SEQ ID NO: 248012 - RNA, 19 nt, Homo sapiens
  misc_RNA (1)...(19): siRNA sense strand
guuaagaaagccucagguu

SEQ ID NO: 248013 - RNA, 19 nt, Homo sapiens
  misc_RNA (1)...(19): siRNA sense strand
ucaggaaacauucauucaa

SEQ ID NO: 248014 - RNA, 19 nt, Homo sapiens
  misc_RNA (1)...(19): siRNA sense strand
ugauggugcuugcagugaa

SEQ ID NO: 248015 - RNA, 19 nt, Homo sapiens
  misc_RNA (1)...(19): siRNA sense strand
ccacagaugagguccauac

SEQ ID NO: 248016 - RNA, 19 nt, Homo sapiens
  misc_RNA (1)...(19): siRNA sense strand
cauuagaguuccaguacag

SEQ ID NO: 248017 - RNA, 19 nt, Homo sapiens
  misc_RNA (1)...(19): siRNA sense strand
ccaccgaagagcacugaaa

SEQ ID NO: 248018 - RNA, 19 nt, Homo sapiens
  misc_RNA (1)...(19): siRNA sense strand
cauaaacaccuucagaaaa

SEQ ID NO: 248019 - RNA, 19 nt, Homo sapiens
  misc_RNA (1)...(19): siRNA sense strand
uacauaaacaccuucagaa

SEQ ID NO: 248020 - RNA, 19 nt, Homo sapiens
  misc_RNA (1)...(19): siRNA sense strand
ccagugaagcugaagacuu

SEQ ID NO: 248021 - RNA, 19 nt, Homo sapiens
  misc_RNA (1)...(19): siRNA sense strand
gauggugcuugcagugaag

SEQ ID NO: 248022 - RNA, 19 nt, Homo sapiens
  misc_RNA (1)...(19): siRNA sense strand
agaguuccaguacagaaua

SEQ ID NO: 248023 - RNA, 19 nt, Homo sapiens
  misc_RNA (1)...(19): siRNA sense strand
ucaguauucucaggaaaca

SEQ ID NO: 248024 - RNA, 19 nt, Homo sapiens
  misc_RNA (1)...(19): siRNA sense strand
uggaagacagacauaauau

SEQ ID NO: 248025 - RNA, 19 nt, Homo sapiens
  misc_RNA (1)...(19): siRNA sense strand
gcugaagacuuuuaagaag

SEQ ID NO: 248026 - RNA, 19 nt, Homo sapiens
  misc_RNA (1)...(19): siRNA sense strand
ugacuuggaaccacagaug

SEQ ID NO: 248027 - RNA, 19 nt, Homo sapiens
  misc_RNA (1)...(19): siRNA sense strand
gccauugauucauuagagu

SEQ ID NO: 248028 - RNA, 19 nt, Homo sapiens
  misc_RNA (1)...(19): siRNA sense strand
aaaucucuuucuccaaguu

SEQ ID NO: 248029 - RNA, 19 nt, Homo sapiens
  misc_RNA (1)...(19): siRNA sense strand
auggaagacagacauaaua

SEQ ID NO: 248030 - RNA, 19 nt, Homo sapiens
  misc_RNA (1)...(19): siRNA sense strand
gguuuggagugggacagua

SEQ ID NO: 248031 - RNA, 19 nt, Homo sapiens
  misc_RNA (1)...(19): siRNA sense strand
ccucaguauucucaggaaa

SEQ ID NO: 248032 - RNA, 19 nt, Homo sapiens
  misc_RNA (1)...(19): siRNA sense strand
aaagaugcuccuaaaguuc

SEQ ID NO: 248033 - RNA, 19 nt, Homo sapiens
  misc_RNA (1)...(19): siRNA sense strand
guucuucuaccucaguauu

SEQ ID NO: 248034 - RNA, 19 nt, Homo sapiens
  misc_RNA (1)...(19): siRNA sense strand
ugagguccauacuucuaga

SEQ ID NO: 248035 - RNA, 19 nt, Homo sapiens
  misc_RNA (1)...(19): siRNA sense strand
ggagagcagauauguucau

SEQ ID NO: 248036 - RNA, 19 nt, Homo sapiens
  misc_RNA (1)...(19): siRNA sense strand
gugggacaguauuucagaa

SEQ ID NO: 248037 - RNA, 19 nt, Homo sapiens
  misc_RNA (1)...(19): siRNA sense strand
aagaaagccucagguuugg

SEQ ID NO: 248038 - RNA, 19 nt, Homo sapiens
  misc_RNA (1)...(19): siRNA sense strand
aaucaucuccuggcuaaau

SEQ ID NO: 248039 - RNA, 19 nt, Homo sapiens
  misc_RNA (1)...(19): siRNA sense strand
cauugaagugguuaagaaa

SEQ ID NO: 248040 - RNA, 19 nt, Homo sapiens
  misc_RNA (1)...(19): siRNA sense strand
gaaguucugcauucugacu

SEQ ID NO: 248041 - RNA, 19 nt, Homo sapiens
  misc_RNA (1)...(19): siRNA sense strand
auaaacaccuucagaaaag

SEQ ID NO: 248042 - RNA, 19 nt, Homo sapiens
  misc_RNA (1)...(19): siRNA sense strand
uggcuaugcuggaggaagu

SEQ ID NO: 248043 - RNA, 19 nt, Homo sapiens
  misc_RNA (1)...(19): siRNA sense strand
uaaaucucuuucuccaagu

SEQ ID NO: 248044 - RNA, 19 nt, Homo sapiens
  misc_RNA (1)...(19): siRNA sense strand
uguguauucuagccauuga

SEQ ID NO: 248045 - RNA, 19 nt, Homo sapiens
  misc_RNA (1)...(19): siRNA sense strand
aggauggaacucauuauau

SEQ ID NO: 248046 - RNA, 19 nt, Homo sapiens
  misc_RNA (1)...(19): siRNA sense strand
gcuuuaaaaugggaacuuu

SEQ ID NO: 248047 - RNA, 19 nt, Homo sapiens
  misc_RNA (1)...(19): siRNA sense strand
guacuaguccagugaagcu

SEQ ID NO: 248048 - RNA, 19 nt, Homo sapiens
  misc_RNA (1)...(19): siRNA sense strand
aguauucucaggaaacauu

SEQ ID NO: 248049 - RNA, 19 nt, Homo sapiens
  misc_RNA (1)...(19): siRNA sense strand
gacuuggaaccacagauga

SEQ ID NO: 248050 - RNA, 19 nt, Homo sapiens
  misc_RNA (1)...(19): siRNA sense strand
gaguuccaguacagaauac

SEQ ID NO: 248051 - RNA, 19 nt, Homo sapiens
  misc_RNA (1)...(19): siRNA sense strand
ucauuagaguuccaguaca

SEQ ID NO: 248052 - RNA, 19 nt, Homo sapiens
  misc_RNA (1)...(19): siRNA sense strand
caaguugaugcucuuaaag

SEQ ID NO: 248053 - RNA, 19 nt, Homo sapiens
  misc_RNA (1)...(19): siRNA sense strand
agggaaacauuuuaucuug

SEQ ID NO: 248054 - RNA, 19 nt, Homo sapiens
  misc_RNA (1)...(19): siRNA sense strand
cuaguccagugaagcugaa

SEQ ID NO: 248055 - RNA, 19 nt, Homo sapiens
  misc_RNA (1)...(19): siRNA sense strand
gcuaaaucucuuucuccaa

SEQ ID NO: 248056 - RNA, 19 nt, Homo sapiens
  misc_RNA (1)...(19): siRNA sense strand
ucuccuggcuaaaucucuu

SEQ ID NO: 248057 - RNA, 19 nt, Homo sapiens
  misc_RNA (1)...(19): siRNA sense strand
ugcuggaggaaguaaauua

SEQ ID NO: 248058 - RNA, 19 nt, Homo sapiens
  misc_RNA (1)...(19): siRNA sense strand
uccagacacauacaaacua

SEQ ID NO: 248059 - RNA, 19 nt, Homo sapiens
  misc_RNA (1)...(19): siRNA sense strand
caguauuucagaaugugua

SEQ ID NO: 248060 - RNA, 19 nt, Homo sapiens
  misc_RNA (1)...(19): siRNA sense strand
aagucuggcuaaacauguu

SEQ ID NO: 248061 - RNA, 19 nt, Homo sapiens
  misc_RNA (1)...(19): siRNA sense strand
ucuccaaguugaugcucuu

SEQ ID NO: 248062 - RNA, 19 nt, Homo sapiens
  misc_RNA (1)...(19): siRNA sense strand
ggauggaacucauuauauu

SEQ ID NO: 248063 - RNA, 19 nt, Homo sapiens
  misc_RNA (1)...(19): siRNA sense strand
gcagauauguucaugacaa

SEQ ID NO: 248064 - RNA, 19 nt, Homo sapiens
  misc_RNA (1)...(19): siRNA sense strand
uaaagaugcuccuaaaguu

SEQ ID NO: 248065 - RNA, 19 nt, Homo sapiens
  misc_RNA (1)...(19): siRNA sense strand
cagugaagcugaagacuuu

SEQ ID NO: 248066 - RNA, 19 nt, Homo sapiens
  misc_RNA (1)...(19): siRNA sense strand
caggaaacauucauucaaa

SEQ ID NO: 248067 - RNA, 19 nt, Homo sapiens
  misc_RNA (1)...(19): siRNA sense strand
cauaauauccagacacaua

SEQ ID NO: 248068 - RNA, 19 nt, Homo sapiens
  misc_RNA (1)...(19): siRNA sense strand
uaagaaagccucagguuug

SEQ ID NO: 248069 - RNA, 19 nt, Homo sapiens
  misc_RNA (1)...(19): siRNA sense strand
ggacaguauuucagaaugu

SEQ ID NO: 248070 - RNA, 19 nt, Homo sapiens
  misc_RNA (1)...(19): siRNA sense strand
aaagaagucuggcuaaaca

SEQ ID NO: 248071 - RNA, 19 nt, Homo sapiens
  misc_RNA (1)...(19): siRNA sense strand
cagaugagguccauacuuc

SEQ ID NO: 248072 - RNA, 19 nt, Homo sapiens
  misc_RNA (1)...(19): siRNA sense strand
ccaaguugaugcucuuaaa

SEQ ID NO: 248073 - RNA, 19 nt, Homo sapiens
  misc_RNA (1)...(19): siRNA sense strand
acaaucaucuccuggcuaa

SEQ ID NO: 248074 - RNA, 19 nt, Homo sapiens
  misc_RNA (1)...(19): siRNA sense strand
ccauugaagugguuaagaa

SEQ ID NO: 248075 - RNA, 19 nt, Homo sapiens
  misc_RNA (1)...(19): siRNA sense strand
uagauuggaugguaccuuu

SEQ ID NO: 248076 - RNA, 19 nt, Homo sapiens
  misc_RNA (1)...(19): siRNA sense strand
uuaagaagauuccuaugga

SEQ ID NO: 248077 - RNA, 19 nt, Homo sapiens
  misc_RNA (1)...(19): siRNA sense strand
gacauaauauccagacaca

SEQ ID NO: 248078 - RNA, 19 nt, Homo sapiens
  misc_RNA (1)...(19): siRNA sense strand
gagcagauauguucaugac

SEQ ID NO: 248079 - RNA, 19 nt, Homo sapiens
  misc_RNA (1)...(19): siRNA sense strand
cgaaguagccguuuacaag

SEQ ID NO: 248080 - RNA, 19 nt, Homo sapiens
  misc_RNA (1)...(19): siRNA sense strand
ccagacacauacaaacuau

SEQ ID NO: 248081 - RNA, 19 nt, Homo sapiens
  misc_RNA (1)...(19): siRNA sense strand
ccaagaagcccagauaauc

SEQ ID NO: 248082 - RNA, 19 nt, Homo sapiens
  misc_RNA (1)...(19): siRNA sense strand
cagauauguucaugacaaa

SEQ ID NO: 248083 - RNA, 19 nt, Homo sapiens
  misc_RNA (1)...(19): siRNA sense strand
ggaacuuuguccuguaaca

SEQ ID NO: 248084 - RNA, 19 nt, Homo sapiens
  misc_RNA (1)...(19): siRNA sense strand
gagagcagauauguucaug

SEQ ID NO: 248085 - RNA, 19 nt, Homo sapiens
  misc_RNA (1)...(19): siRNA sense strand
gaugagguccauacuucua

SEQ ID NO: 248086 - RNA, 19 nt, Homo sapiens
  misc_RNA (1)...(19): siRNA sense strand
gggacaguauuucagaaug

SEQ ID NO: 248087 - RNA, 19 nt, Homo sapiens
  misc_RNA (1)...(19): siRNA sense strand
gaagacagacauaauaucc

SEQ ID NO: 248088 - RNA, 19 nt, Homo sapiens
  misc_RNA (1)...(19): siRNA sense strand
gaugguaccuuuugucaau

SEQ ID NO: 248089 - RNA, 19 nt, Homo sapiens
  misc_RNA (1)...(19): siRNA sense strand
ucuagccauugauucauua

SEQ ID NO: 248090 - RNA, 19 nt, Homo sapiens
  misc_RNA (1)...(19): siRNA sense strand
caaaagaagucuggcuaaa

SEQ ID NO: 248091 - RNA, 19 nt, Homo sapiens
  misc_RNA (1)...(19): siRNA sense strand
uuaaggauggaacucauua

SEQ ID NO: 248092 - RNA, 19 nt, Homo sapiens
  misc_RNA (1)...(19): siRNA sense strand
aagacgaaguagccguuua

SEQ ID NO: 248093 - RNA, 19 nt, Homo sapiens
  misc_RNA (1)...(19): siRNA sense strand
uuaaagaugcuccuaaagu

SEQ ID NO: 248094 - RNA, 19 nt, Homo sapiens
  misc_RNA (1)...(19): siRNA sense strand
uuaagaaagccucagguuu

SEQ ID NO: 248095 - RNA, 19 nt, Homo sapiens
  misc_RNA (1)...(19): siRNA sense strand
uugaaguucugcauucuga

SEQ ID NO: 248096 - RNA, 19 nt, Homo sapiens
  misc_RNA (1)...(19): siRNA sense strand
ggaagacagacauaauauc

SEQ ID NO: 248097 - RNA, 19 nt, Homo sapiens
  misc_RNA (1)...(19): siRNA sense strand
ggagugggacaguauuuca

SEQ ID NO: 248098 - RNA, 19 nt, Homo sapiens
  misc_RNA (1)...(19): siRNA sense strand
gcugcugccuugugccauu

SEQ ID NO: 248099 - RNA, 19 nt, Homo sapiens
  misc_RNA (1)...(19): siRNA sense strand
acauaaacaccuucagaaa

SEQ ID NO: 248100 - RNA, 19 nt, Homo sapiens
  misc_RNA (1)...(19): siRNA sense strand
cagaauguguagauuggau

SEQ ID NO: 248101 - RNA, 19 nt, Homo sapiens
  misc_RNA (1)...(19): siRNA sense strand
gaagucuggcuaaacaugu

SEQ ID NO: 248102 - RNA, 19 nt, Homo sapiens
  misc_RNA (1)...(19): siRNA sense strand
ugggaacuuuguccuguaa

SEQ ID NO: 248103 - RNA, 19 nt, Homo sapiens
  misc_RNA (1)...(19): siRNA sense strand
aaggauggaacucauuaua

SEQ ID NO: 248104 - RNA, 19 nt, Homo sapiens
  misc_RNA (1)...(19): siRNA sense strand
aaggagagcagauauguuc

SEQ ID NO: 248105 - RNA, 19 nt, Homo sapiens
  misc_RNA (1)...(19): siRNA sense strand
gacaguauuucagaaugug

SEQ ID NO: 248106 - RNA, 19 nt, Homo sapiens
  misc_RNA (1)...(19): siRNA sense strand
uuacauaaacaccuucaga

SEQ ID NO: 248107 - RNA, 19 nt, Homo sapiens
  misc_RNA (1)...(19): siRNA sense strand
uuagagguaugugaaguau

SEQ ID NO: 248108 - RNA, 19 nt, Homo sapiens
  misc_RNA (1)...(19): siRNA sense strand
guuaagaaagccucagguu

SEQ ID NO: 248109 - RNA, 19 nt, Homo sapiens
  misc_RNA (1)...(19): siRNA sense strand
ucaggaaacauucauucaa

SEQ ID NO: 248110 - RNA, 19 nt, Homo sapiens
  misc_RNA (1)...(19): siRNA sense strand
ccacagaugagguccauac

SEQ ID NO: 248111 - RNA, 19 nt, Homo sapiens
  misc_RNA (1)...(19): siRNA sense strand
ugauggugcuugcagugaa

SEQ ID NO: 248112 - RNA, 19 nt, Homo sapiens
  misc_RNA (1)...(19): siRNA sense strand
gaggaaaacuacccaggau

SEQ ID NO: 248113 - RNA, 19 nt, Homo sapiens
  misc_RNA (1)...(19): siRNA sense strand
ccaccgaagagcacugaaa

SEQ ID NO: 248114 - RNA, 19 nt, Homo sapiens
  misc_RNA (1)...(19): siRNA sense strand
cauaaacaccuucagaaaa

SEQ ID NO: 248115 - RNA, 19 nt, Homo sapiens
  misc_RNA (1)...(19): siRNA sense strand
uacauaaacaccuucagaa

SEQ ID NO: 248116 - RNA, 19 nt, Homo sapiens
  misc_RNA (1)...(19): siRNA sense strand
gauaauccaggccaagaag

SEQ ID NO: 248117 - RNA, 19 nt, Homo sapiens
  misc_RNA (1)...(19): siRNA sense strand
ccagugaagcugaagacuu

SEQ ID NO: 248118 - RNA, 19 nt, Homo sapiens
  misc_RNA (1)...(19): siRNA sense strand
cauuagaguuccaguacag

SEQ ID NO: 248119 - RNA, 19 nt, Homo sapiens
  misc_RNA (1)...(19): siRNA sense strand
gauggugcuugcagugaag

SEQ ID NO: 248120 - RNA, 19 nt, Homo sapiens
  misc_RNA (1)...(19): siRNA sense strand
agaguuccaguacagaaua

SEQ ID NO: 248121 - RNA, 19 nt, Homo sapiens
  misc_RNA (1)...(19): siRNA sense strand
ugacuuggaaccacagaug

SEQ ID NO: 248122 - RNA, 19 nt, Homo sapiens
  misc_RNA (1)...(19): siRNA sense strand
uggaagacagacauaauau

SEQ ID NO: 248123 - RNA, 19 nt, Homo sapiens
  misc_RNA (1)...(19): siRNA sense strand
gcugaagacuuuuaagaag

SEQ ID NO: 248124 - RNA, 19 nt, Homo sapiens
  misc_RNA (1)...(19): siRNA sense strand
gccauugauucauuagagu

SEQ ID NO: 248125 - RNA, 19 nt, Homo sapiens
  misc_RNA (1)...(19): siRNA sense strand
ucaguauucucaggaaaca

SEQ ID NO: 248126 - RNA, 19 nt, Homo sapiens
  misc_RNA (1)...(19): siRNA sense strand
aaaucucuuucuccaaguu

SEQ ID NO: 248127 - RNA, 19 nt, Homo sapiens
  misc_RNA (1)...(19): siRNA sense strand
auggaagacagacauaaua

SEQ ID NO: 248128 - RNA, 19 nt, Homo sapiens
  misc_RNA (1)...(19): siRNA sense strand
gguuuggagugggacagua

SEQ ID NO: 248129 - RNA, 19 nt, Homo sapiens
  misc_RNA (1)...(19): siRNA sense strand
ccucaguauucucaggaaa

SEQ ID NO: 248130 - RNA, 19 nt, Homo sapiens
  misc_RNA (1)...(19): siRNA sense strand
aaagaugcuccuaaaguuc

SEQ ID NO: 248131 - RNA, 19 nt, Homo sapiens
  misc_RNA (1)...(19): siRNA sense strand
ugagguccauacuucuaga

SEQ ID NO: 248132 - RNA, 19 nt, Homo sapiens
  misc_RNA (1)...(19): siRNA sense strand
ggagagcagauauguucau

SEQ ID NO: 248133 - RNA, 19 nt, Homo sapiens
  misc_RNA (1)...(19): siRNA sense strand
gugggacaguauuucagaa

SEQ ID NO: 248134 - RNA, 19 nt, Homo sapiens
  misc_RNA (1)...(19): siRNA sense strand
aagaaagccucagguuugg

SEQ ID NO: 248135 - RNA, 19 nt, Homo sapiens
  misc_RNA (1)...(19): siRNA sense strand
guucuucuaccucaguauu

SEQ ID NO: 248136 - RNA, 19 nt, Homo sapiens
  misc_RNA (1)...(19): siRNA sense strand
aaucaucuccuggcuaaau

SEQ ID NO: 248137 - RNA, 19 nt, Homo sapiens
  misc_RNA (1)...(19): siRNA sense strand
ggaaaacuacccaggaugu

SEQ ID NO: 248138 - RNA, 19 nt, Homo sapiens
  misc_RNA (1)...(19): siRNA sense strand
caagaagcccagauaaucc

SEQ ID NO: 248139 - RNA, 19 nt, Homo sapiens
  misc_RNA (1)...(19): siRNA sense strand
cauugaagugguuaagaaa

SEQ ID NO: 248140 - RNA, 19 nt, Homo sapiens
  misc_RNA (1)...(19): siRNA sense strand
gaaguucugcauucugacu

SEQ ID NO: 248141 - RNA, 19 nt, Homo sapiens
  misc_RNA (1)...(19): siRNA sense strand
auaaacaccuucagaaaag

SEQ ID NO: 248142 - RNA, 19 nt, Homo sapiens
  misc_RNA (1)...(19): siRNA sense strand
uggcuaugcuggaggaagu

SEQ ID NO: 248143 - RNA, 19 nt, Homo sapiens
  misc_RNA (1)...(19): siRNA sense strand
uaaaucucuuucuccaagu

SEQ ID NO: 248144 - RNA, 19 nt, Homo sapiens
  misc_RNA (1)...(19): siRNA sense strand
cagauaauccaggccaaga

SEQ ID NO: 248145 - RNA, 19 nt, Homo sapiens
  misc_RNA (1)...(19): siRNA sense strand
uguguauucuagccauuga

SEQ ID NO: 248146 - RNA, 19 nt, Homo sapiens
  misc_RNA (1)...(19): siRNA sense strand
aggauggaacucauuauau

SEQ ID NO: 248147 - RNA, 19 nt, Homo sapiens
  misc_RNA (1)...(19): siRNA sense strand
aaacuacccaggaugucaa

SEQ ID NO: 248148 - RNA, 19 nt, Homo sapiens
  misc_RNA (1)...(19): siRNA sense strand
gcuuuaaaaugggaacuuu

SEQ ID NO: 248149 - RNA, 19 nt, Homo sapiens
  misc_RNA (1)...(19): siRNA sense strand
guacuaguccagugaagcu

SEQ ID NO: 248150 - RNA, 19 nt, Homo sapiens
  misc_RNA (1)...(19): siRNA sense strand
aguauucucaggaaacauu

SEQ ID NO: 248151 - RNA, 19 nt, Homo sapiens
  misc_RNA (1)...(19): siRNA sense strand
caaguugaugcucuuaaag

SEQ ID NO: 248152 - RNA, 19 nt, Homo sapiens
  misc_RNA (1)...(19): siRNA sense strand
cccaagaagcccagauaau

SEQ ID NO: 248153 - RNA, 19 nt, Homo sapiens
  misc_RNA (1)...(19): siRNA sense strand
gaguuccaguacagaauac

SEQ ID NO: 248154 - RNA, 19 nt, Homo sapiens
  misc_RNA (1)...(19): siRNA sense strand
ucauuagaguuccaguaca

SEQ ID NO: 248155 - RNA, 19 nt, Homo sapiens
  misc_RNA (1)...(19): siRNA sense strand
gacuuggaaccacagauga

SEQ ID NO: 248156 - RNA, 19 nt, Homo sapiens
  misc_RNA (1)...(19): siRNA sense strand
agggaaacauuuuaucuug

SEQ ID NO: 248157 - RNA, 19 nt, Homo sapiens
  misc_RNA (1)...(19): siRNA sense strand
cuaguccagugaagcugaa

SEQ ID NO: 248158 - RNA, 19 nt, Homo sapiens
  misc_RNA (1)...(19): siRNA sense strand
gcuaaaucucuuucuccaa

SEQ ID NO: 248159 - RNA, 19 nt, Homo sapiens
  misc_RNA (1)...(19): siRNA sense strand
caguauuucagaaugugua

SEQ ID NO: 248160 - RNA, 19 nt, Homo sapiens
  misc_RNA (1)...(19): siRNA sense strand
ugcuggaggaaguaaauua

SEQ ID NO: 248161 - RNA, 19 nt, Homo sapiens
  misc_RNA (1)...(19): siRNA sense strand
uccagacacauacaaacua

SEQ ID NO: 248162 - RNA, 19 nt, Homo sapiens
  misc_RNA (1)...(19): siRNA sense strand
ggauggaacucauuauauu

SEQ ID NO: 248163 - RNA, 19 nt, Homo sapiens
  misc_RNA (1)...(19): siRNA sense strand
gcagauauguucaugacaa

SEQ ID NO: 248164 - RNA, 19 nt, Homo sapiens
  misc_RNA (1)...(19): siRNA sense strand
uaaagaugcuccuaaaguu

SEQ ID NO: 248165 - RNA, 19 nt, Homo sapiens
  misc_RNA (1)...(19): siRNA sense strand
cagugaagcugaagacuuu

SEQ ID NO: 248166 - RNA, 19 nt, Homo sapiens
  misc_RNA (1)...(19): siRNA sense strand
caggaaacauucauucaaa

SEQ ID NO: 248167 - RNA, 19 nt, Homo sapiens
  misc_RNA (1)...(19): siRNA sense strand
cauaauauccagacacaua

SEQ ID NO: 248168 - RNA, 19 nt, Homo sapiens
  misc_RNA (1)...(19): siRNA sense strand
uaagaaagccucagguuug

SEQ ID NO: 248169 - RNA, 19 nt, Homo sapiens
  misc_RNA (1)...(19): siRNA sense strand
ggacaguauuucagaaugu

SEQ ID NO: 248170 - RNA, 19 nt, Homo sapiens
  misc_RNA (1)...(19): siRNA sense strand
aaagaagucuggcuaaaca

SEQ ID NO: 248171 - RNA, 19 nt, Homo sapiens
  misc_RNA (1)...(19): siRNA sense strand
cagaugagguccauacuuc

SEQ ID NO: 248172 - RNA, 19 nt, Homo sapiens
  misc_RNA (1)...(19): siRNA sense strand
ccaaguugaugcucuuaaa

SEQ ID NO: 248173 - RNA, 19 nt, Homo sapiens
  misc_RNA (1)...(19): siRNA sense strand
acaaucaucuccuggcuaa

SEQ ID NO: 248174 - RNA, 19 nt, Homo sapiens
  misc_RNA (1)...(19): siRNA sense strand
ccauugaagugguuaagaa

SEQ ID NO: 248175 - RNA, 19 nt, Homo sapiens
  misc_RNA (1)...(19): siRNA sense strand
uagauuggaugguaccuuu

SEQ ID NO: 248176 - RNA, 19 nt, Homo sapiens
  misc_RNA (1)...(19): siRNA sense strand
uuaagaagauuccuaugga

SEQ ID NO: 248177 - RNA, 19 nt, Homo sapiens
  misc_RNA (1)...(19): siRNA sense strand
gacauaauauccagacaca

SEQ ID NO: 248178 - RNA, 19 nt, Homo sapiens
  misc_RNA (1)...(19): siRNA sense strand
gagcagauauguucaugac

SEQ ID NO: 248179 - RNA, 19 nt, Homo sapiens
  misc_RNA (1)...(19): siRNA sense strand
cgaaguagccguuuacaag

SEQ ID NO: 248180 - RNA, 19 nt, Homo sapiens
  misc_RNA (1)...(19): siRNA sense strand
ccagacacauacaaacuau

SEQ ID NO: 248181 - RNA, 19 nt, Homo sapiens
  misc_RNA (1)...(19): siRNA sense strand
ccaagaagcccagauaauc

SEQ ID NO: 248182 - RNA, 19 nt, Homo sapiens
  misc_RNA (1)...(19): siRNA sense strand
cagauauguucaugacaaa

SEQ ID NO: 248183 - RNA, 19 nt, Homo sapiens
  misc_RNA (1)...(19): siRNA sense strand
ggaacuuuguccuguaaca

SEQ ID NO: 248184 - RNA, 19 nt, Homo sapiens
  misc_RNA (1)...(19): siRNA sense strand
gagagcagauauguucaug

SEQ ID NO: 248185 - RNA, 19 nt, Homo sapiens
  misc_RNA (1)...(19): siRNA sense strand
gaugagguccauacuucua

SEQ ID NO: 248186 - RNA, 19 nt, Homo sapiens
  misc_RNA (1)...(19): siRNA sense strand
gggacaguauuucagaaug

SEQ ID NO: 248187 - RNA, 19 nt, Homo sapiens
  misc_RNA (1)...(19): siRNA sense strand
gaagacagacauaauaucc

SEQ ID NO: 248188 - RNA, 19 nt, Homo sapiens
  misc_RNA (1)...(19): siRNA sense strand
gaugguaccuuuugucaau

SEQ ID NO: 248189 - RNA, 19 nt, Homo sapiens
  misc_RNA (1)...(19): siRNA sense strand
ucuagccauugauucauua

SEQ ID NO: 248190 - RNA, 19 nt, Homo sapiens
  misc_RNA (1)...(19): siRNA sense strand
caaaagaagucuggcuaaa

SEQ ID NO: 248191 - RNA, 19 nt, Homo sapiens
  misc_RNA (1)...(19): siRNA sense strand
uuaaggauggaacucauua

SEQ ID NO: 248192 - RNA, 19 nt, Homo sapiens
  misc_RNA (1)...(19): siRNA sense strand
aagacgaaguagccguuua

SEQ ID NO: 248193 - RNA, 19 nt, Homo sapiens
  misc_RNA (1)...(19): siRNA sense strand
uuaaagaugcuccuaaagu

SEQ ID NO: 248194 - RNA, 19 nt, Homo sapiens
  misc_RNA (1)...(19): siRNA sense strand
uuaagaaagccucagguuu

SEQ ID NO: 248195 - RNA, 19 nt, Homo sapiens
  misc_RNA (1)...(19): siRNA sense strand
uugaaguucugcauucuga

SEQ ID NO: 248196 - RNA, 19 nt, Homo sapiens
  misc_RNA (1)...(19): siRNA sense strand
ggaagacagacauaauauc

SEQ ID NO: 248197 - RNA, 19 nt, Homo sapiens
  misc_RNA (1)...(19): siRNA sense strand
ggagugggacaguauuuca

SEQ ID NO: 248198 - RNA, 19 nt, Homo sapiens
  misc_RNA (1)...(19): siRNA sense strand
gcugcugccuugugccauu

SEQ ID NO: 248199 - RNA, 19 nt, Homo sapiens
  misc_RNA (1)...(19): siRNA sense strand
acauaaacaccuucagaaa

SEQ ID NO: 248200 - RNA, 19 nt, Homo sapiens
  misc_RNA (1)...(19): siRNA sense strand
cagaauguguagauuggau

SEQ ID NO: 248201 - RNA, 19 nt, Homo sapiens
  misc_RNA (1)...(19): siRNA sense strand
gaagucuggcuaaacaugu

SEQ ID NO: 248202 - RNA, 19 nt, Homo sapiens
  misc_RNA (1)...(19): siRNA sense strand
ugggaacuuuguccuguaa

SEQ ID NO: 248203 - RNA, 19 nt, Homo sapiens
  misc_RNA (1)...(19): siRNA sense strand
aaggauggaacucauuaua

SEQ ID NO: 248204 - RNA, 19 nt, Homo sapiens
  misc_RNA (1)...(19): siRNA sense strand
aaggagagcagauauguuc

SEQ ID NO: 248205 - RNA, 19 nt, Homo sapiens
  misc_RNA (1)...(19): siRNA sense strand
gacaguauuucagaaugug

SEQ ID NO: 248206 - RNA, 19 nt, Homo sapiens
  misc_RNA (1)...(19): siRNA sense strand
uuacauaaacaccuucaga

SEQ ID NO: 248207 - RNA, 19 nt, Homo sapiens
  misc_RNA (1)...(19): siRNA sense strand
uuagagguaugugaaguau

SEQ ID NO: 248208 - RNA, 19 nt, Homo sapiens
  misc_RNA (1)...(19): siRNA sense strand
guuaagaaagccucagguu

SEQ ID NO: 248209 - RNA, 19 nt, Homo sapiens
  misc_RNA (1)...(19): siRNA sense strand
ucaggaaacauucauucaa

SEQ ID NO: 248210 - RNA, 19 nt, Homo sapiens
  misc_RNA (1)...(19): siRNA sense strand
ccacagaugagguccauac

SEQ ID NO: 248211 - RNA, 19 nt, Homo sapiens
  misc_RNA (1)...(19): siRNA sense strand
ugauggugcuugcagugaa

SEQ ID NO: 248212 - RNA, 19 nt, Homo sapiens
  misc_RNA (1)...(19): siRNA sense strand
gaggaaaacuacccaggau

SEQ ID NO: 248213 - RNA, 19 nt, Homo sapiens
  misc_RNA (1)...(19): siRNA sense strand
ccaccgaagagcacugaaa

SEQ ID NO: 248214 - RNA, 19 nt, Homo sapiens
  misc_RNA (1)...(19): siRNA sense strand
cauaaacaccuucagaaaa

SEQ ID NO: 248215 - RNA, 19 nt, Homo sapiens
  misc_RNA (1)...(19): siRNA sense strand
uacauaaacaccuucagaa

SEQ ID NO: 248216 - RNA, 19 nt, Homo sapiens
  misc_RNA (1)...(19): siRNA sense strand
gauaauccaggccaagaag

SEQ ID NO: 248217 - RNA, 19 nt, Homo sapiens
  misc_RNA (1)...(19): siRNA sense strand
ccagugaagcugaagacuu

SEQ ID NO: 248218 - RNA, 19 nt, Homo sapiens
  misc_RNA (1)...(19): siRNA sense strand
cauuagaguuccaguacag

SEQ ID NO: 248219 - RNA, 19 nt, Homo sapiens
  misc_RNA (1)...(19): siRNA sense strand
gauggugcuugcagugaag

SEQ ID NO: 248220 - RNA, 19 nt, Homo sapiens
  misc_RNA (1)...(19): siRNA sense strand
agaguuccaguacagaaua

SEQ ID NO: 248221 - RNA, 19 nt, Homo sapiens
  misc_RNA (1)...(19): siRNA sense strand
ugacuuggaaccacagaug

SEQ ID NO: 248222 - RNA, 19 nt, Homo sapiens
  misc_RNA (1)...(19): siRNA sense strand
uggaagacagacauaauau

SEQ ID NO: 248223 - RNA, 19 nt, Homo sapiens
  misc_RNA (1)...(19): siRNA sense strand
gcugaagacuuuuaagaag

SEQ ID NO: 248224 - RNA, 19 nt, Homo sapiens
  misc_RNA (1)...(19): siRNA sense strand
gccauugauucauuagagu

SEQ ID NO: 248225 - RNA, 19 nt, Homo sapiens
  misc_RNA (1)...(19): siRNA sense strand
ucaguauucucaggaaaca

SEQ ID NO: 248226 - RNA, 19 nt, Homo sapiens
  misc_RNA (1)...(19): siRNA sense strand
aaaucucuuucuccaaguu

SEQ ID NO: 248227 - RNA, 19 nt, Homo sapiens
  misc_RNA (1)...(19): siRNA sense strand
auggaagacagacauaaua

SEQ ID NO: 248228 - RNA, 19 nt, Homo sapiens
  misc_RNA (1)...(19): siRNA sense strand
gguuuggagugggacagua

SEQ ID NO: 248229 - RNA, 19 nt, Homo sapiens
  misc_RNA (1)...(19): siRNA sense strand
ccucaguauucucaggaaa

SEQ ID NO: 248230 - RNA, 19 nt, Homo sapiens
  misc_RNA (1)...(19): siRNA sense strand
aaagaugcuccuaaaguuc

SEQ ID NO: 248231 - RNA, 19 nt, Homo sapiens
  misc_RNA (1)...(19): siRNA sense strand
ugagguccauacuucuaga

SEQ ID NO: 248232 - RNA, 19 nt, Homo sapiens
  misc_RNA (1)...(19): siRNA sense strand
ggagagcagauauguucau

SEQ ID NO: 248233 - RNA, 19 nt, Homo sapiens
  misc_RNA (1)...(19): siRNA sense strand
gugggacaguauuucagaa

SEQ ID NO: 248234 - RNA, 19 nt, Homo sapiens
  misc_RNA (1)...(19): siRNA sense strand
aagaaagccucagguuugg

SEQ ID NO: 248235 - RNA, 19 nt, Homo sapiens
  misc_RNA (1)...(19): siRNA sense strand
guucuucuaccucaguauu

SEQ ID NO: 248236 - RNA, 19 nt, Homo sapiens
  misc_RNA (1)...(19): siRNA sense strand
aaucaucuccuggcuaaau

SEQ ID NO: 248237 - RNA, 19 nt, Homo sapiens
  misc_RNA (1)...(19): siRNA sense strand
ggaaaacuacccaggaugu

SEQ ID NO: 248238 - RNA, 19 nt, Homo sapiens
  misc_RNA (1)...(19): siRNA sense strand
caagaagcccagauaaucc

SEQ ID NO: 248239 - RNA, 19 nt, Homo sapiens
  misc_RNA (1)...(19): siRNA sense strand
cauugaagugguuaagaaa

SEQ ID NO: 248240 - RNA, 19 nt, Homo sapiens
  misc_RNA (1)...(19): siRNA sense strand
gaaguucugcauucugacu

SEQ ID NO: 248241 - RNA, 19 nt, Homo sapiens
  misc_RNA (1)...(19): siRNA sense strand
auaaacaccuucagaaaag

SEQ ID NO: 248242 - RNA, 19 nt, Homo sapiens
  misc_RNA (1)...(19): siRNA sense strand
uggcuaugcuggaggaagu

SEQ ID NO: 248243 - RNA, 19 nt, Homo sapiens
  misc_RNA (1)...(19): siRNA sense strand
uaaaucucuuucuccaagu

SEQ ID NO: 248244 - RNA, 19 nt, Homo sapiens
  misc_RNA (1)...(19): siRNA sense strand
cagauaauccaggccaaga

SEQ ID NO: 248245 - RNA, 19 nt, Homo sapiens
  misc_RNA (1)...(19): siRNA sense strand
uguguauucuagccauuga

SEQ ID NO: 248246 - RNA, 19 nt, Homo sapiens
  misc_RNA (1)...(19): siRNA sense strand
aggauggaacucauuauau

SEQ ID NO: 248247 - RNA, 19 nt, Homo sapiens
  misc_RNA (1)...(19): siRNA sense strand
aaacuacccaggaugucaa

SEQ ID NO: 248248 - RNA, 19 nt, Homo sapiens
  misc_RNA (1)...(19): siRNA sense strand
gcuuuaaaaugggaacuuu

SEQ ID NO: 248249 - RNA, 19 nt, Homo sapiens
  misc_RNA (1)...(19): siRNA sense strand
guacuaguccagugaagcu

SEQ ID NO: 248250 - RNA, 19 nt, Homo sapiens
  misc_RNA (1)...(19): siRNA sense strand
aguauucucaggaaacauu

SEQ ID NO: 248251 - RNA, 19 nt, Homo sapiens
  misc_RNA (1)...(19): siRNA sense strand
caaguugaugcucuuaaag

SEQ ID NO: 248252 - RNA, 19 nt, Homo sapiens
  misc_RNA (1)...(19): siRNA sense strand
cccaagaagcccagauaau

SEQ ID NO: 248253 - RNA, 19 nt, Homo sapiens
  misc_RNA (1)...(19): siRNA sense strand
gaguuccaguacagaauac

SEQ ID NO: 248254 - RNA, 19 nt, Homo sapiens
  misc_RNA (1)...(19): siRNA sense strand
ucauuagaguuccaguaca

SEQ ID NO: 248255 - RNA, 19 nt, Homo sapiens
  misc_RNA (1)...(19): siRNA sense strand
gacuuggaaccacagauga

SEQ ID NO: 248256 - RNA, 19 nt, Homo sapiens
  misc_RNA (1)...(19): siRNA sense strand
agggaaacauuuuaucuug

SEQ ID NO: 248257 - RNA, 19 nt, Homo sapiens
  misc_RNA (1)...(19): siRNA sense strand
cuaguccagugaagcugaa

SEQ ID NO: 248258 - RNA, 19 nt, Homo sapiens
  misc_RNA (1)...(19): siRNA sense strand
gcuaaaucucuuucuccaa

SEQ ID NO: 248259 - RNA, 19 nt, Homo sapiens
  misc_RNA (1)...(19): siRNA sense strand
caguauuucagaaugugua

SEQ ID NO: 248260 - RNA, 19 nt, Homo sapiens
  misc_RNA (1)...(19): siRNA sense strand
ugcuggaggaaguaaauua

SEQ ID NO: 248261 - RNA, 19 nt, Homo sapiens
  misc_RNA (1)...(19): siRNA sense strand
uccagacacauacaaacua

SEQ ID NO: 248262 - RNA, 19 nt, Homo sapiens
  misc_RNA (1)...(19): siRNA sense strand
ggaaagugcugucccugaa

SEQ ID NO: 248263 - RNA, 19 nt, Homo sapiens
  misc_RNA (1)...(19): siRNA sense strand
agaacgagcuggagacaaa

SEQ ID NO: 248264 - RNA, 19 nt, Homo sapiens
  misc_RNA (1)...(19): siRNA sense strand
ugaagcagcuggaggaguu

SEQ ID NO: 248265 - RNA, 19 nt, Homo sapiens
  misc_RNA (1)...(19): siRNA sense strand
caacgucgccuuugaacuu

SEQ ID NO: 248266 - RNA, 19 nt, Homo sapiens
  misc_RNA (1)...(19): siRNA sense strand
gcacguggcccugcaguuu

SEQ ID NO: 248267 - RNA, 19 nt, Homo sapiens
  misc_RNA (1)...(19): siRNA sense strand
ggugugcucucaucacuga

SEQ ID NO: 248268 - RNA, 19 nt, Homo sapiens
  misc_RNA (1)...(19): siRNA sense strand
ggacaucaccaagaagaaa

SEQ ID NO: 248269 - RNA, 19 nt, Homo sapiens
  misc_RNA (1)...(19): siRNA sense strand
ggucgggacuggagcuuga

SEQ ID NO: 248270 - RNA, 19 nt, Homo sapiens
  misc_RNA (1)...(19): siRNA sense strand
gggcugaggaugaggauuu

SEQ ID NO: 248271 - RNA, 19 nt, Homo sapiens
  misc_RNA (1)...(19): siRNA sense strand
ccacagaacgggagaaagu

SEQ ID NO: 248272 - RNA, 19 nt, Homo sapiens
  misc_RNA (1)...(19): siRNA sense strand
ggaccaggaggcccagaua

SEQ ID NO: 248273 - RNA, 19 nt, Homo sapiens
  misc_RNA (1)...(19): siRNA sense strand
ugacguggcgggugacuaa

SEQ ID NO: 248274 - RNA, 19 nt, Homo sapiens
  misc_RNA (1)...(19): siRNA sense strand
ggaguuggaggaggaauuu

SEQ ID NO: 248275 - RNA, 19 nt, Homo sapiens
  misc_RNA (1)...(19): siRNA sense strand
caaugagccuggaguccuu

SEQ ID NO: 248276 - RNA, 19 nt, Homo sapiens
  misc_RNA (1)...(19): siRNA sense strand
uggaggagcugcagaacau

SEQ ID NO: 248277 - RNA, 19 nt, Homo sapiens
  misc_RNA (1)...(19): siRNA sense strand
gaccaagaguggagacaag

SEQ ID NO: 248278 - RNA, 19 nt, Homo sapiens
  misc_RNA (1)...(19): siRNA sense strand
caaggacccucgguucugu

SEQ ID NO: 248279 - RNA, 19 nt, Homo sapiens
  misc_RNA (1)...(19): siRNA sense strand
aaacuggugugcucucauc

SEQ ID NO: 248280 - RNA, 19 nt, Homo sapiens
  misc_RNA (1)...(19): siRNA sense strand
gcgagcugcuggugacaga

SEQ ID NO: 248281 - RNA, 19 nt, Homo sapiens
  misc_RNA (1)...(19): siRNA sense strand
ccgagagaauccucaguga

SEQ ID NO: 248282 - RNA, 19 nt, Homo sapiens
  misc_RNA (1)...(19): siRNA sense strand
ggagacaaacucagaagag

SEQ ID NO: 248283 - RNA, 19 nt, Homo sapiens
  misc_RNA (1)...(19): siRNA sense strand
ucccauagccggacacuga

SEQ ID NO: 248284 - RNA, 19 nt, Homo sapiens
  misc_RNA (1)...(19): siRNA sense strand
cgaggugcauucccuguuc

SEQ ID NO: 248285 - RNA, 19 nt, Homo sapiens
  misc_RNA (1)...(19): siRNA sense strand
uggaggagaugcaacauac

SEQ ID NO: 248286 - RNA, 19 nt, Homo sapiens
  misc_RNA (1)...(19): siRNA sense strand
ccacggcccuucggaaagu

SEQ ID NO: 248287 - RNA, 19 nt, Homo sapiens
  misc_RNA (1)...(19): siRNA sense strand
gacaaacucagaagagcaa

SEQ ID NO: 248288 - RNA, 19 nt, Homo sapiens
  misc_RNA (1)...(19): siRNA sense strand
ucaagaaccuggacaucac

SEQ ID NO: 248289 - RNA, 19 nt, Homo sapiens
  misc_RNA (1)...(19): siRNA sense strand
uaccaucucuaccgacgaa

SEQ ID NO: 248290 - RNA, 19 nt, Homo sapiens
  misc_RNA (1)...(19): siRNA sense strand
ggagaguggcuaccucauc

SEQ ID NO: 248291 - RNA, 19 nt, Homo sapiens
  misc_RNA (1)...(19): siRNA sense strand
aggagaaccugcucagcuu

SEQ ID NO: 248292 - RNA, 19 nt, Homo sapiens
  misc_RNA (1)...(19): siRNA sense strand
cccaggaaauccaggagaa

SEQ ID NO: 248293 - RNA, 19 nt, Homo sapiens
  misc_RNA (1)...(19): siRNA sense strand
gcagagcagcgacccuaug

SEQ ID NO: 248294 - RNA, 19 nt, Homo sapiens
  misc_RNA (1)...(19): siRNA sense strand
gcaaggacccucgguucug

SEQ ID NO: 248295 - RNA, 19 nt, Homo sapiens
  misc_RNA (1)...(19): siRNA sense strand
guuccucgaucgccugaug

SEQ ID NO: 248296 - RNA, 19 nt, Homo sapiens
  misc_RNA (1)...(19): siRNA sense strand
gccagucauuugccuuaga

SEQ ID NO: 248297 - RNA, 19 nt, Homo sapiens
  misc_RNA (1)...(19): siRNA sense strand
cacuagggcugaccucauc

SEQ ID NO: 248298 - RNA, 19 nt, Homo sapiens
  misc_RNA (1)...(19): siRNA sense strand
gcacuagggcugaccucau

SEQ ID NO: 248299 - RNA, 19 nt, Homo sapiens
  misc_RNA (1)...(19): siRNA sense strand
acacagaagagcccacaga

SEQ ID NO: 248300 - RNA, 19 nt, Homo sapiens
  misc_RNA (1)...(19): siRNA sense strand
ggaccaagaguggagacaa

SEQ ID NO: 248301 - RNA, 19 nt, Homo sapiens
  misc_RNA (1)...(19): siRNA sense strand
gaaagugcugucccugaag

SEQ ID NO: 248302 - RNA, 19 nt, Homo sapiens
  misc_RNA (1)...(19): siRNA sense strand
gcaucgggcagaacacaga

SEQ ID NO: 248303 - RNA, 19 nt, Homo sapiens
  misc_RNA (1)...(19): siRNA sense strand
ucaugcaccuggaggagau

SEQ ID NO: 248304 - RNA, 19 nt, Homo sapiens
  misc_RNA (1)...(19): siRNA sense strand
gaccaggaggcccagauau

SEQ ID NO: 248305 - RNA, 19 nt, Homo sapiens
  misc_RNA (1)...(19): siRNA sense strand
ccagucauuugccuuagag

SEQ ID NO: 248306 - RNA, 19 nt, Homo sapiens
  misc_RNA (1)...(19): siRNA sense strand
ggacaccccuggagucucu

SEQ ID NO: 248307 - RNA, 19 nt, Homo sapiens
  misc_RNA (1)...(19): siRNA sense strand
cugcacagccugcccaaga

SEQ ID NO: 248308 - RNA, 19 nt, Homo sapiens
  misc_RNA (1)...(19): siRNA sense strand
accaggaggcccagauaua

SEQ ID NO: 248309 - RNA, 19 nt, Homo sapiens
  misc_RNA (1)...(19): siRNA sense strand
gaggagaugcaacauacca

SEQ ID NO: 248310 - RNA, 19 nt, Homo sapiens
  misc_RNA (1)...(19): siRNA sense strand
ccaagaguggagacaagaa

SEQ ID NO: 248311 - RNA, 19 nt, Homo sapiens
  misc_RNA (1)...(19): siRNA sense strand
gacaucaccaagaagaaau

SEQ ID NO: 248312 - RNA, 19 nt, Homo sapiens
  misc_RNA (1)...(19): siRNA sense strand
cacagaagagcccacagaa

SEQ ID NO: 248313 - RNA, 19 nt, Homo sapiens
  misc_RNA (1)...(19): siRNA sense strand
ccgccagucauuugccuua

SEQ ID NO: 248314 - RNA, 19 nt, Homo sapiens
  misc_RNA (1)...(19): siRNA sense strand
gugcugagggcuccugguu

SEQ ID NO: 248315 - RNA, 19 nt, Homo sapiens
  misc_RNA (1)...(19): siRNA sense strand
ccaggaggcccagauauac

SEQ ID NO: 248316 - RNA, 19 nt, Homo sapiens
  misc_RNA (1)...(19): siRNA sense strand
cagcacggacccaggaaau

SEQ ID NO: 248317 - RNA, 19 nt, Homo sapiens
  misc_RNA (1)...(19): siRNA sense strand
caucucuaccgacgaagaa

SEQ ID NO: 248318 - RNA, 19 nt, Homo sapiens
  misc_RNA (1)...(19): siRNA sense strand
gcuuggaggagaccaugaa

SEQ ID NO: 248319 - RNA, 19 nt, Homo sapiens
  misc_RNA (1)...(19): siRNA sense strand
gagcaucgggcagaacaca

SEQ ID NO: 248320 - RNA, 19 nt, Homo sapiens
  misc_RNA (1)...(19): siRNA sense strand
caagaguggagacaagaag

SEQ ID NO: 248321 - RNA, 19 nt, Homo sapiens
  misc_RNA (1)...(19): siRNA sense strand
gccugcagcugaaggacau

SEQ ID NO: 248322 - RNA, 19 nt, Homo sapiens
  misc_RNA (1)...(19): siRNA sense strand
cgagugcugccgggaaauu

SEQ ID NO: 248323 - RNA, 19 nt, Homo sapiens
  misc_RNA (1)...(19): siRNA sense strand
gcacggacccaggaaaucc

SEQ ID NO: 248324 - RNA, 19 nt, Homo sapiens
  misc_RNA (1)...(19): siRNA sense strand
gcucugagaacggcaaugg

SEQ ID NO: 248325 - RNA, 19 nt, Homo sapiens
  misc_RNA (1)...(19): siRNA sense strand
cguggcgggugacuaagga

SEQ ID NO: 248326 - RNA, 19 nt, Homo sapiens
  misc_RNA (1)...(19): siRNA sense strand
uggaggagaccaugaagca

SEQ ID NO: 248327 - RNA, 19 nt, Homo sapiens
  misc_RNA (1)...(19): siRNA sense strand
ggaaagugcugucccugaa

SEQ ID NO: 248328 - RNA, 19 nt, Homo sapiens
  misc_RNA (1)...(19): siRNA sense strand
agaacgagcuggagacaaa

SEQ ID NO: 248329 - RNA, 19 nt, Homo sapiens
  misc_RNA (1)...(19): siRNA sense strand
ugaagcagcuggaggaguu

SEQ ID NO: 248330 - RNA, 19 nt, Homo sapiens
  misc_RNA (1)...(19): siRNA sense strand
caacgucgccuuugaacuu

SEQ ID NO: 248331 - RNA, 19 nt, Homo sapiens
  misc_RNA (1)...(19): siRNA sense strand
gcacguggcccugcaguuu

SEQ ID NO: 248332 - RNA, 19 nt, Homo sapiens
  misc_RNA (1)...(19): siRNA sense strand
ggugugcucucaucacuga

SEQ ID NO: 248333 - RNA, 19 nt, Homo sapiens
  misc_RNA (1)...(19): siRNA sense strand
ggacaucaccaagaagaaa

SEQ ID NO: 248334 - RNA, 19 nt, Homo sapiens
  misc_RNA (1)...(19): siRNA sense strand
ggucgggacuggagcuuga

SEQ ID NO: 248335 - RNA, 19 nt, Homo sapiens
  misc_RNA (1)...(19): siRNA sense strand
gggcugaggaugaggauuu

SEQ ID NO: 248336 - RNA, 19 nt, Homo sapiens
  misc_RNA (1)...(19): siRNA sense strand
ccacagaacgggagaaagu

SEQ ID NO: 248337 - RNA, 19 nt, Homo sapiens
  misc_RNA (1)...(19): siRNA sense strand
ggaccaggaggcccagaua

SEQ ID NO: 248338 - RNA, 19 nt, Homo sapiens
  misc_RNA (1)...(19): siRNA sense strand
ugacguggcgggugacuaa

SEQ ID NO: 248339 - RNA, 19 nt, Homo sapiens
  misc_RNA (1)...(19): siRNA sense strand
ggaguuggaggaggaauuu

SEQ ID NO: 248340 - RNA, 19 nt, Homo sapiens
  misc_RNA (1)...(19): siRNA sense strand
caaugagccuggaguccuu

SEQ ID NO: 248341 - RNA, 19 nt, Homo sapiens
  misc_RNA (1)...(19): siRNA sense strand
uggaggagcugcagaacau

SEQ ID NO: 248342 - RNA, 19 nt, Homo sapiens
  misc_RNA (1)...(19): siRNA sense strand
gaccaagaguggagacaag

SEQ ID NO: 248343 - RNA, 19 nt, Homo sapiens
  misc_RNA (1)...(19): siRNA sense strand
caaggacccucgguucugu

SEQ ID NO: 248344 - RNA, 19 nt, Homo sapiens
  misc_RNA (1)...(19): siRNA sense strand
aaacuggugugcucucauc

SEQ ID NO: 248345 - RNA, 19 nt, Homo sapiens
  misc_RNA (1)...(19): siRNA sense strand
gcgagcugcuggugacaga

SEQ ID NO: 248346 - RNA, 19 nt, Homo sapiens
  misc_RNA (1)...(19): siRNA sense strand
ccgagagaauccucaguga

SEQ ID NO: 248347 - RNA, 19 nt, Homo sapiens
  misc_RNA (1)...(19): siRNA sense strand
ggagacaaacucagaagag

SEQ ID NO: 248348 - RNA, 19 nt, Homo sapiens
  misc_RNA (1)...(19): siRNA sense strand
ucccauagccggacacuga

SEQ ID NO: 248349 - RNA, 19 nt, Homo sapiens
  misc_RNA (1)...(19): siRNA sense strand
cgaggugcauucccuguuc

SEQ ID NO: 248350 - RNA, 19 nt, Homo sapiens
  misc_RNA (1)...(19): siRNA sense strand
uggaggagaugcaacauac

SEQ ID NO: 248351 - RNA, 19 nt, Homo sapiens
  misc_RNA (1)...(19): siRNA sense strand
ccacggcccuucggaaagu

SEQ ID NO: 248352 - RNA, 19 nt, Homo sapiens
  misc_RNA (1)...(19): siRNA sense strand
gacaaacucagaagagcaa

SEQ ID NO: 248353 - RNA, 19 nt, Homo sapiens
  misc_RNA (1)...(19): siRNA sense strand
ucaagaaccuggacaucac

SEQ ID NO: 248354 - RNA, 19 nt, Homo sapiens
  misc_RNA (1)...(19): siRNA sense strand
uaccaucucuaccgacgaa

SEQ ID NO: 248355 - RNA, 19 nt, Homo sapiens
  misc_RNA (1)...(19): siRNA sense strand
ggagaguggcuaccucauc

SEQ ID NO: 248356 - RNA, 19 nt, Homo sapiens
  misc_RNA (1)...(19): siRNA sense strand
aggagaaccugcucagcuu

SEQ ID NO: 248357 - RNA, 19 nt, Homo sapiens
  misc_RNA (1)...(19): siRNA sense strand
cccaggaaauccaggagaa

SEQ ID NO: 248358 - RNA, 19 nt, Homo sapiens
  misc_RNA (1)...(19): siRNA sense strand
gcagagcagcgacccuaug

SEQ ID NO: 248359 - RNA, 19 nt, Homo sapiens
  misc_RNA (1)...(19): siRNA sense strand
gcaaggacccucgguucug

SEQ ID NO: 248360 - RNA, 19 nt, Homo sapiens
  misc_RNA (1)...(19): siRNA sense strand
guuccucgaucgccugaug

SEQ ID NO: 248361 - RNA, 19 nt, Homo sapiens
  misc_RNA (1)...(19): siRNA sense strand
gccagucauuugccuuaga

SEQ ID NO: 248362 - RNA, 19 nt, Homo sapiens
  misc_RNA (1)...(19): siRNA sense strand
cacuagggcugaccucauc

SEQ ID NO: 248363 - RNA, 19 nt, Homo sapiens
  misc_RNA (1)...(19): siRNA sense strand
gcacuagggcugaccucau

SEQ ID NO: 248364 - RNA, 19 nt, Homo sapiens
  misc_RNA (1)...(19): siRNA sense strand
acacagaagagcccacaga

SEQ ID NO: 248365 - RNA, 19 nt, Homo sapiens
  misc_RNA (1)...(19): siRNA sense strand
ggaccaagaguggagacaa

SEQ ID NO: 248366 - RNA, 19 nt, Homo sapiens
  misc_RNA (1)...(19): siRNA sense strand
gaaagugcugucccugaag

SEQ ID NO: 248367 - RNA, 19 nt, Homo sapiens
  misc_RNA (1)...(19): siRNA sense strand
gcaucgggcagaacacaga

SEQ ID NO: 248368 - RNA, 19 nt, Homo sapiens
  misc_RNA (1)...(19): siRNA sense strand
ucaugcaccuggaggagau

SEQ ID NO: 248369 - RNA, 19 nt, Homo sapiens
  misc_RNA (1)...(19): siRNA sense strand
gaccaggaggcccagauau

SEQ ID NO: 248370 - RNA, 19 nt, Homo sapiens
  misc_RNA (1)...(19): siRNA sense strand
ccagucauuugccuuagag

SEQ ID NO: 248371 - RNA, 19 nt, Homo sapiens
  misc_RNA (1)...(19): siRNA sense strand
ggacaccccuggagucucu

SEQ ID NO: 248372 - RNA, 19 nt, Homo sapiens
  misc_RNA (1)...(19): siRNA sense strand
cugcacagccugcccaaga

SEQ ID NO: 248373 - RNA, 19 nt, Homo sapiens
  misc_RNA (1)...(19): siRNA sense strand
accaggaggcccagauaua

SEQ ID NO: 248374 - RNA, 19 nt, Homo sapiens
  misc_RNA (1)...(19): siRNA sense strand
gaggagaugcaacauacca

SEQ ID NO: 248375 - RNA, 19 nt, Homo sapiens
  misc_RNA (1)...(19): siRNA sense strand
ccaagaguggagacaagaa

SEQ ID NO: 248376 - RNA, 19 nt, Homo sapiens
  misc_RNA (1)...(19): siRNA sense strand
gacaucaccaagaagaaau

SEQ ID NO: 248377 - RNA, 19 nt, Homo sapiens
  misc_RNA (1)...(19): siRNA sense strand
cacagaagagcccacagaa

SEQ ID NO: 248378 - RNA, 19 nt, Homo sapiens
  misc_RNA (1)...(19): siRNA sense strand
ccgccagucauuugccuua

SEQ ID NO: 248379 - RNA, 19 nt, Homo sapiens
  misc_RNA (1)...(19): siRNA sense strand
gugcugagggcuccugguu

SEQ ID NO: 248380 - RNA, 19 nt, Homo sapiens
  misc_RNA (1)...(19): siRNA sense strand
ccaggaggcccagauauac

SEQ ID NO: 248381 - RNA, 19 nt, Homo sapiens
  misc_RNA (1)...(19): siRNA sense strand
cagcacggacccaggaaau

SEQ ID NO: 248382 - RNA, 19 nt, Homo sapiens
  misc_RNA (1)...(19): siRNA sense strand
caucucuaccgacgaagaa

SEQ ID NO: 248383 - RNA, 19 nt, Homo sapiens
  misc_RNA (1)...(19): siRNA sense strand
gcuuggaggagaccaugaa

SEQ ID NO: 248384 - RNA, 19 nt, Homo sapiens
  misc_RNA (1)...(19): siRNA sense strand
gagcaucgggcagaacaca

SEQ ID NO: 248385 - RNA, 19 nt, Homo sapiens
  misc_RNA (1)...(19): siRNA sense strand
caagaguggagacaagaag

SEQ ID NO: 248386 - RNA, 19 nt, Homo sapiens
  misc_RNA (1)...(19): siRNA sense strand
gccugcagcugaaggacau

SEQ ID NO: 248387 - RNA, 19 nt, Homo sapiens
  misc_RNA (1)...(19): siRNA sense strand
cgagugcugccgggaaauu

SEQ ID NO: 248388 - RNA, 19 nt, Homo sapiens
  misc_RNA (1)...(19): siRNA sense strand
gcacggacccaggaaaucc

SEQ ID NO: 248389 - RNA, 19 nt, Homo sapiens
  misc_RNA (1)...(19): siRNA sense strand
gcucugagaacggcaaugg

SEQ ID NO: 248390 - RNA, 19 nt, Homo sapiens
  misc_RNA (1)...(19): siRNA sense strand
cguggcgggugacuaagga

SEQ ID NO: 248391 - RNA, 19 nt, Homo sapiens
  misc_RNA (1)...(19): siRNA sense strand
uggaggagaccaugaagca

SEQ ID NO: 248392 - RNA, 19 nt, Homo sapiens
  misc_RNA (1)...(19): siRNA sense strand
ggaaagugcugucccugaa

SEQ ID NO: 248393 - RNA, 19 nt, Homo sapiens
  misc_RNA (1)...(19): siRNA sense strand
agaacgagcuggagacaaa

SEQ ID NO: 248394 - RNA, 19 nt, Homo sapiens
  misc_RNA (1)...(19): siRNA sense strand
ugaagcagcuggaggaguu

SEQ ID NO: 248395 - RNA, 19 nt, Homo sapiens
  misc_RNA (1)...(19): siRNA sense strand
caacgucgccuuugaacuu

SEQ ID NO: 248396 - RNA, 19 nt, Homo sapiens
  misc_RNA (1)...(19): siRNA sense strand
gcacguggcccugcaguuu

SEQ ID NO: 248397 - RNA, 19 nt, Homo sapiens
  misc_RNA (1)...(19): siRNA sense strand
ggugugcucucaucacuga

SEQ ID NO: 248398 - RNA, 19 nt, Homo sapiens
  misc_RNA (1)...(19): siRNA sense strand
ccagggagauggaagacuu

SEQ ID NO: 248399 - RNA, 19 nt, Homo sapiens
  misc_RNA (1)...(19): siRNA sense strand
ggacaucaccaagaagaaa

SEQ ID NO: 248400 - RNA, 19 nt, Homo sapiens
  misc_RNA (1)...(19): siRNA sense strand
ggucgggacuggagcuuga

SEQ ID NO: 248401 - RNA, 19 nt, Homo sapiens
  misc_RNA (1)...(19): siRNA sense strand
gggcugaggaugaggauuu

SEQ ID NO: 248402 - RNA, 19 nt, Homo sapiens
  misc_RNA (1)...(19): siRNA sense strand
ccacagaacgggagaaagu

SEQ ID NO: 248403 - RNA, 19 nt, Homo sapiens
  misc_RNA (1)...(19): siRNA sense strand
ggaccaggaggcccagaua

SEQ ID NO: 248404 - RNA, 19 nt, Homo sapiens
  misc_RNA (1)...(19): siRNA sense strand
ugacguggcgggugacuaa

SEQ ID NO: 248405 - RNA, 19 nt, Homo sapiens
  misc_RNA (1)...(19): siRNA sense strand
ggaguuggaggaggaauuu

SEQ ID NO: 248406 - RNA, 19 nt, Homo sapiens
  misc_RNA (1)...(19): siRNA sense strand
caaugagccuggaguccuu

SEQ ID NO: 248407 - RNA, 19 nt, Homo sapiens
  misc_RNA (1)...(19): siRNA sense strand
uggaggagcugcagaacau

SEQ ID NO: 248408 - RNA, 19 nt, Homo sapiens
  misc_RNA (1)...(19): siRNA sense strand
gaccaagaguggagacaag

SEQ ID NO: 248409 - RNA, 19 nt, Homo sapiens
  misc_RNA (1)...(19): siRNA sense strand
caaggacccucgguucugu

SEQ ID NO: 248410 - RNA, 19 nt, Homo sapiens
  misc_RNA (1)...(19): siRNA sense strand
aaacuggugugcucucauc

SEQ ID NO: 248411 - RNA, 19 nt, Homo sapiens
  misc_RNA (1)...(19): siRNA sense strand
gcgagcugcuggugacaga

SEQ ID NO: 248412 - RNA, 19 nt, Homo sapiens
  misc_RNA (1)...(19): siRNA sense strand
ccgagagaauccucaguga

SEQ ID NO: 248413 - RNA, 19 nt, Homo sapiens
  misc_RNA (1)...(19): siRNA sense strand
ggagacaaacucagaagag

SEQ ID NO: 248414 - RNA, 19 nt, Homo sapiens
  misc_RNA (1)...(19): siRNA sense strand
ucccauagccggacacuga

SEQ ID NO: 248415 - RNA, 19 nt, Homo sapiens
  misc_RNA (1)...(19): siRNA sense strand
cgaggugcauucccuguuc

SEQ ID NO: 248416 - RNA, 19 nt, Homo sapiens
  misc_RNA (1)...(19): siRNA sense strand
uggaggagaugcaacauac

SEQ ID NO: 248417 - RNA, 19 nt, Homo sapiens
  misc_RNA (1)...(19): siRNA sense strand
ccacggcccuucggaaagu

SEQ ID NO: 248418 - RNA, 19 nt, Homo sapiens
  misc_RNA (1)...(19): siRNA sense strand
gacaaacucagaagagcaa

SEQ ID NO: 248419 - RNA, 19 nt, Homo sapiens
  misc_RNA (1)...(19): siRNA sense strand
ucaagaaccuggacaucac

SEQ ID NO: 248420 - RNA, 19 nt, Homo sapiens
  misc_RNA (1)...(19): siRNA sense strand
uaccaucucuaccgacgaa

SEQ ID NO: 248421 - RNA, 19 nt, Homo sapiens
  misc_RNA (1)...(19): siRNA sense strand
ggagaguggcuaccucauc

SEQ ID NO: 248422 - RNA, 19 nt, Homo sapiens
  misc_RNA (1)...(19): siRNA sense strand
aggagaaccugcucagcuu

SEQ ID NO: 248423 - RNA, 19 nt, Homo sapiens
  misc_RNA (1)...(19): siRNA sense strand
cccaggaaauccaggagaa

SEQ ID NO: 248424 - RNA, 19 nt, Homo sapiens
  misc_RNA (1)...(19): siRNA sense strand
gcagagcagcgacccuaug

SEQ ID NO: 248425 - RNA, 19 nt, Homo sapiens
  misc_RNA (1)...(19): siRNA sense strand
gcaaggacccucgguucug

SEQ ID NO: 248426 - RNA, 19 nt, Homo sapiens
  misc_RNA (1)...(19): siRNA sense strand
guuccucgaucgccugaug

SEQ ID NO: 248427 - RNA, 19 nt, Homo sapiens
  misc_RNA (1)...(19): siRNA sense strand
gccagucauuugccuuaga

SEQ ID NO: 248428 - RNA, 19 nt, Homo sapiens
  misc_RNA (1)...(19): siRNA sense strand
cacuagggcugaccucauc

SEQ ID NO: 248429 - RNA, 19 nt, Homo sapiens
  misc_RNA (1)...(19): siRNA sense strand
gcacuagggcugaccucau

SEQ ID NO: 248430 - RNA, 19 nt, Homo sapiens
  misc_RNA (1)...(19): siRNA sense strand
acacagaagagcccacaga

SEQ ID NO: 248431 - RNA, 19 nt, Homo sapiens
  misc_RNA (1)...(19): siRNA sense strand
ggaccaagaguggagacaa

SEQ ID NO: 248432 - RNA, 19 nt, Homo sapiens
  misc_RNA (1)...(19): siRNA sense strand
gaaagugcugucccugaag

SEQ ID NO: 248433 - RNA, 19 nt, Homo sapiens
  misc_RNA (1)...(19): siRNA sense strand
gcaucgggcagaacacaga

SEQ ID NO: 248434 - RNA, 19 nt, Homo sapiens
  misc_RNA (1)...(19): siRNA sense strand
ucaugcaccuggaggagau

SEQ ID NO: 248435 - RNA, 19 nt, Homo sapiens
  misc_RNA (1)...(19): siRNA sense strand
gaccaggaggcccagauau

SEQ ID NO: 248436 - RNA, 19 nt, Homo sapiens
  misc_RNA (1)...(19): siRNA sense strand
ccagucauuugccuuagag

SEQ ID NO: 248437 - RNA, 19 nt, Homo sapiens
  misc_RNA (1)...(19): siRNA sense strand
ggacaccccuggagucucu

SEQ ID NO: 248438 - RNA, 19 nt, Homo sapiens
  misc_RNA (1)...(19): siRNA sense strand
cugcacagccugcccaaga

SEQ ID NO: 248439 - RNA, 19 nt, Homo sapiens
  misc_RNA (1)...(19): siRNA sense strand
accaggaggcccagauaua

SEQ ID NO: 248440 - RNA, 19 nt, Homo sapiens
  misc_RNA (1)...(19): siRNA sense strand
gaggagaugcaacauacca

SEQ ID NO: 248441 - RNA, 19 nt, Homo sapiens
  misc_RNA (1)...(19): siRNA sense strand
ccaagaguggagacaagaa

SEQ ID NO: 248442 - RNA, 19 nt, Homo sapiens
  misc_RNA (1)...(19): siRNA sense strand
gacaucaccaagaagaaau

SEQ ID NO: 248443 - RNA, 19 nt, Homo sapiens
  misc_RNA (1)...(19): siRNA sense strand
cacagaagagcccacagaa

SEQ ID NO: 248444 - RNA, 19 nt, Homo sapiens
  misc_RNA (1)...(19): siRNA sense strand
ccgccagucauuugccuua

SEQ ID NO: 248445 - RNA, 19 nt, Homo sapiens
  misc_RNA (1)...(19): siRNA sense strand
gugcugagggcuccugguu

SEQ ID NO: 248446 - RNA, 19 nt, Homo sapiens
  misc_RNA (1)...(19): siRNA sense strand
ccaggaggcccagauauac

SEQ ID NO: 248447 - RNA, 19 nt, Homo sapiens
  misc_RNA (1)...(19): siRNA sense strand
cagcacggacccaggaaau

SEQ ID NO: 248448 - RNA, 19 nt, Homo sapiens
  misc_RNA (1)...(19): siRNA sense strand
caucucuaccgacgaagaa

SEQ ID NO: 248449 - RNA, 19 nt, Homo sapiens
  misc_RNA (1)...(19): siRNA sense strand
gcuuggaggagaccaugaa

SEQ ID NO: 248450 - RNA, 19 nt, Homo sapiens
  misc_RNA (1)...(19): siRNA sense strand
gagcaucgggcagaacaca

SEQ ID NO: 248451 - RNA, 19 nt, Homo sapiens
  misc_RNA (1)...(19): siRNA sense strand
caagaguggagacaagaag

SEQ ID NO: 248452 - RNA, 19 nt, Homo sapiens
  misc_RNA (1)...(19): siRNA sense strand
gccugcagcugaaggacau

SEQ ID NO: 248453 - RNA, 19 nt, Homo sapiens
  misc_RNA (1)...(19): siRNA sense strand
cgagugcugccgggaaauu

SEQ ID NO: 248454 - RNA, 19 nt, Homo sapiens
  misc_RNA (1)...(19): siRNA sense strand
gcacggacccaggaaaucc

SEQ ID NO: 248455 - RNA, 19 nt, Homo sapiens
  misc_RNA (1)...(19): siRNA sense strand
gcucugagaacggcaaugg

SEQ ID NO: 248456 - RNA, 19 nt, Homo sapiens
  misc_RNA (1)...(19): siRNA sense strand
cguggcgggugacuaagga

SEQ ID NO: 248457 - RNA, 19 nt, Homo sapiens
  misc_RNA (1)...(19): siRNA sense strand
uggaggagaccaugaagca

SEQ ID NO: 248458 - RNA, 19 nt, Homo sapiens
  misc_RNA (1)...(19): siRNA sense strand
ggaauaagcuugaaagaaa

SEQ ID NO: 248459 - RNA, 19 nt, Homo sapiens
  misc_RNA (1)...(19): siRNA sense strand
ggaaucagaucgugaagaa

SEQ ID NO: 248460 - RNA, 19 nt, Homo sapiens
  misc_RNA (1)...(19): siRNA sense strand
ggaaugggcugaugaaugg

SEQ ID NO: 248461 - RNA, 19 nt, Homo sapiens
  misc_RNA (1)...(19): siRNA sense strand
ccacagagauucagcaaug

SEQ ID NO: 248462 - RNA, 19 nt, Homo sapiens
  misc_RNA (1)...(19): siRNA sense strand
gaucaucguuugacagaaa

SEQ ID NO: 248463 - RNA, 19 nt, Homo sapiens
  misc_RNA (1)...(19): siRNA sense strand
gcuaaagaaucuggaauaa

SEQ ID NO: 248464 - RNA, 19 nt, Homo sapiens
  misc_RNA (1)...(19): siRNA sense strand
ccaagaagccacaaacuuu

SEQ ID NO: 248465 - RNA, 19 nt, Homo sapiens
  misc_RNA (1)...(19): siRNA sense strand
ggagagaagagaauaguuu

SEQ ID NO: 248466 - RNA, 19 nt, Homo sapiens
  misc_RNA (1)...(19): siRNA sense strand
cagaagaagcugugaauaa

SEQ ID NO: 248467 - RNA, 19 nt, Homo sapiens
  misc_RNA (1)...(19): siRNA sense strand
uaaagaaucuggaauaagc

SEQ ID NO: 248468 - RNA, 19 nt, Homo sapiens
  misc_RNA (1)...(19): siRNA sense strand
gugaagaacucaacuacug

SEQ ID NO: 248469 - RNA, 19 nt, Homo sapiens
  misc_RNA (1)...(19): siRNA sense strand
caucugcacucacaaauca

SEQ ID NO: 248470 - RNA, 19 nt, Homo sapiens
  misc_RNA (1)...(19): siRNA sense strand
gaacucaacuacuggaaaa

SEQ ID NO: 248471 - RNA, 19 nt, Homo sapiens
  misc_RNA (1)...(19): siRNA sense strand
gaaagggaaugggcugaug

SEQ ID NO: 248472 - RNA, 19 nt, Homo sapiens
  misc_RNA (1)...(19): siRNA sense strand
gaacucaacagugacaauu

SEQ ID NO: 248473 - RNA, 19 nt, Homo sapiens
  misc_RNA (1)...(19): siRNA sense strand
cagauucucucagcaauga

SEQ ID NO: 248474 - RNA, 19 nt, Homo sapiens
  misc_RNA (1)...(19): siRNA sense strand
gcuagagcaucgagaaguu

SEQ ID NO: 248475 - RNA, 19 nt, Homo sapiens
  misc_RNA (1)...(19): siRNA sense strand
guugguagaucaucguuug

SEQ ID NO: 248476 - RNA, 19 nt, Homo sapiens
  misc_RNA (1)...(19): siRNA sense strand
uagaggauauugcaacuuc

SEQ ID NO: 248477 - RNA, 19 nt, Homo sapiens
  misc_RNA (1)...(19): siRNA sense strand
auacguaccuguggaguuu

SEQ ID NO: 248478 - RNA, 19 nt, Homo sapiens
  misc_RNA (1)...(19): siRNA sense strand
agaagaagcugugaauaag

SEQ ID NO: 248479 - RNA, 19 nt, Homo sapiens
  misc_RNA (1)...(19): siRNA sense strand
gcacaguccugcucucacu

SEQ ID NO: 248480 - RNA, 19 nt, Homo sapiens
  misc_RNA (1)...(19): siRNA sense strand
gagaaggugcggacucuug

SEQ ID NO: 248481 - RNA, 19 nt, Homo sapiens
  misc_RNA (1)...(19): siRNA sense strand
ugacagcuaucgacaccaa

SEQ ID NO: 248482 - RNA, 19 nt, Homo sapiens
  misc_RNA (1)...(19): siRNA sense strand
gcgcugaauugcauuaugg

SEQ ID NO: 248483 - RNA, 19 nt, Homo sapiens
  misc_RNA (1)...(19): siRNA sense strand
guaccuggcucagcacgaa

SEQ ID NO: 248484 - RNA, 19 nt, Homo sapiens
  misc_RNA (1)...(19): siRNA sense strand
cuccaccucuucagcauua

SEQ ID NO: 248485 - RNA, 19 nt, Homo sapiens
  misc_RNA (1)...(19): siRNA sense strand
ggaaaagacgguacaauga

SEQ ID NO: 248486 - RNA, 19 nt, Homo sapiens
  misc_RNA (1)...(19): siRNA sense strand
cauuacaccuuagaggaua

SEQ ID NO: 248487 - RNA, 19 nt, Homo sapiens
  misc_RNA (1)...(19): siRNA sense strand
gagaggagagaagagaaua

SEQ ID NO: 248488 - RNA, 19 nt, Homo sapiens
  misc_RNA (1)...(19): siRNA sense strand
gaagugauugcaacagaga

SEQ ID NO: 248489 - RNA, 19 nt, Homo sapiens
  misc_RNA (1)...(19): siRNA sense strand
cuggugaacucaacaguga

SEQ ID NO: 248490 - RNA, 19 nt, Homo sapiens
  misc_RNA (1)...(19): siRNA sense strand
gggaaugggcugaugaaug

SEQ ID NO: 248491 - RNA, 19 nt, Homo sapiens
  misc_RNA (1)...(19): siRNA sense strand
aagaugaguugguagauca

SEQ ID NO: 248492 - RNA, 19 nt, Homo sapiens
  misc_RNA (1)...(19): siRNA sense strand
ccacagucuuggucuaaau

SEQ ID NO: 248493 - RNA, 19 nt, Homo sapiens
  misc_RNA (1)...(19): siRNA sense strand
ucauggaggugcacggaaa

SEQ ID NO: 248494 - RNA, 19 nt, Homo sapiens
  misc_RNA (1)...(19): siRNA sense strand
cgucagaguugcucaugga

SEQ ID NO: 248495 - RNA, 19 nt, Homo sapiens
  misc_RNA (1)...(19): siRNA sense strand
ggcuaaagaaucuggaaua

SEQ ID NO: 248496 - RNA, 19 nt, Homo sapiens
  misc_RNA (1)...(19): siRNA sense strand
caagaugaguugguagauc

SEQ ID NO: 248497 - RNA, 19 nt, Homo sapiens
  misc_RNA (1)...(19): siRNA sense strand
gcaaagccagcgagacaug

SEQ ID NO: 248498 - RNA, 19 nt, Homo sapiens
  misc_RNA (1)...(19): siRNA sense strand
gaaaagacgguacaaugaa

SEQ ID NO: 248499 - RNA, 19 nt, Homo sapiens
  misc_RNA (1)...(19): siRNA sense strand
gacaagaccucggcaacca

SEQ ID NO: 248500 - RNA, 19 nt, Homo sapiens
  misc_RNA (1)...(19): siRNA sense strand
ucgagaaguucgugauaga

SEQ ID NO: 248501 - RNA, 19 nt, Homo sapiens
  misc_RNA (1)...(19): siRNA sense strand
caacagagagagcacgaau

SEQ ID NO: 248502 - RNA, 19 nt, Homo sapiens
  misc_RNA (1)...(19): siRNA sense strand
caagaagccacaaacuuuc

SEQ ID NO: 248503 - RNA, 19 nt, Homo sapiens
  misc_RNA (1)...(19): siRNA sense strand
gcgauacuguggcucuuuc

SEQ ID NO: 248504 - RNA, 19 nt, Homo sapiens
  misc_RNA (1)...(19): siRNA sense strand
uuaccacucugcaacaguu

SEQ ID NO: 248505 - RNA, 19 nt, Homo sapiens
  misc_RNA (1)...(19): siRNA sense strand
gaucgccuguggaagugaa

SEQ ID NO: 248506 - RNA, 19 nt, Homo sapiens
  misc_RNA (1)...(19): siRNA sense strand
cuucacuccuacugcauua

SEQ ID NO: 248507 - RNA, 19 nt, Homo sapiens
  misc_RNA (1)...(19): siRNA sense strand
gaacaccuucugcucaaca

SEQ ID NO: 248508 - RNA, 19 nt, Homo sapiens
  misc_RNA (1)...(19): siRNA sense strand
uugaggaauuccacuguaa

SEQ ID NO: 248509 - RNA, 19 nt, Homo sapiens
  misc_RNA (1)...(19): siRNA sense strand
gcaauugccagccacuugu

SEQ ID NO: 248510 - RNA, 19 nt, Homo sapiens
  misc_RNA (1)...(19): siRNA sense strand
uuauggaaaugguagagaa

SEQ ID NO: 248511 - RNA, 19 nt, Homo sapiens
  misc_RNA (1)...(19): siRNA sense strand
cacaucaucugcacucaca

SEQ ID NO: 248512 - RNA, 19 nt, Homo sapiens
  misc_RNA (1)...(19): siRNA sense strand
gagcacgaauggagcaaac

SEQ ID NO: 248513 - RNA, 19 nt, Homo sapiens
  misc_RNA (1)...(19): siRNA sense strand
cuaucaagaugaguuggua

SEQ ID NO: 248514 - RNA, 19 nt, Homo sapiens
  misc_RNA (1)...(19): siRNA sense strand
caucgagaaguucgugaua

SEQ ID NO: 248515 - RNA, 19 nt, Homo sapiens
  misc_RNA (1)...(19): siRNA sense strand
gaaucuggaauaagcuuga

SEQ ID NO: 248516 - RNA, 19 nt, Homo sapiens
  misc_RNA (1)...(19): siRNA sense strand
caucaccgccacagagauu

SEQ ID NO: 248517 - RNA, 19 nt, Homo sapiens
  misc_RNA (1)...(19): siRNA sense strand
aauggaggcuaucaagaug

SEQ ID NO: 248518 - RNA, 19 nt, Homo sapiens
  misc_RNA (1)...(19): siRNA sense strand
gcauuacaccuuagaggau

SEQ ID NO: 248519 - RNA, 19 nt, Homo sapiens
  misc_RNA (1)...(19): siRNA sense strand
aagagaguauguaccauca

SEQ ID NO: 248520 - RNA, 19 nt, Homo sapiens
  misc_RNA (1)...(19): siRNA sense strand
acucacaaaucagcaauug

SEQ ID NO: 248521 - RNA, 19 nt, Homo sapiens
  misc_RNA (1)...(19): siRNA sense strand
gggagaaggugcggacucu

SEQ ID NO: 248522 - RNA, 19 nt, Homo sapiens
  misc_RNA (1)...(19): siRNA sense strand
cgacaccaacggacucuga

SEQ ID NO: 248523 - RNA, 19 nt, Homo sapiens
  misc_RNA (1)...(19): siRNA sense strand
aagaagcugugaauaaggu

SEQ ID NO: 248524 - RNA, 19 nt, Homo sapiens
  misc_RNA (1)...(19): siRNA sense strand
uaaauggaggcuaucaaga

SEQ ID NO: 248525 - RNA, 19 nt, Homo sapiens
  misc_RNA (1)...(19): siRNA sense strand
gagaaguucgugauagaca

SEQ ID NO: 248526 - RNA, 19 nt, Homo sapiens
  misc_RNA (1)...(19): siRNA sense strand
gaagaagcugugaauaagg

SEQ ID NO: 248527 - RNA, 19 nt, Homo sapiens
  misc_RNA (1)...(19): siRNA sense strand
aaaagacgguacaaugaaa

SEQ ID NO: 248528 - RNA, 19 nt, Homo sapiens
  misc_RNA (1)...(19): siRNA sense strand
gguagaucaucguuugaca

SEQ ID NO: 248529 - RNA, 19 nt, Homo sapiens
  misc_RNA (1)...(19): siRNA sense strand
caucaucugcacucacaaa

SEQ ID NO: 248530 - RNA, 19 nt, Homo sapiens
  misc_RNA (1)...(19): siRNA sense strand
aaauggaggcuaucaagau

SEQ ID NO: 248531 - RNA, 19 nt, Homo sapiens
  misc_RNA (1)...(19): siRNA sense strand
caacuucucaccuguaucg

SEQ ID NO: 248532 - RNA, 19 nt, Homo sapiens
  misc_RNA (1)...(19): siRNA sense strand
ggugcggacucuuguucuu

SEQ ID NO: 248533 - RNA, 19 nt, Homo sapiens
  misc_RNA (1)...(19): siRNA sense strand
gagaauaguuuugauagag

SEQ ID NO: 248534 - RNA, 19 nt, Homo sapiens
  misc_RNA (1)...(19): siRNA sense strand
ccacaucgcguuccucaac

SEQ ID NO: 248535 - RNA, 19 nt, Homo sapiens
  misc_RNA (1)...(19): siRNA sense strand
uggaauaagcuugaaagaa

SEQ ID NO: 248536 - RNA, 19 nt, Homo sapiens
  misc_RNA (1)...(19): siRNA sense strand
ccucaacaccugcuucugu

SEQ ID NO: 248537 - RNA, 19 nt, Homo sapiens
  misc_RNA (1)...(19): siRNA sense strand
ggagaacugcuggaacugu

SEQ ID NO: 248538 - RNA, 19 nt, Homo sapiens
  misc_RNA (1)...(19): siRNA sense strand
uugaagugauugcaacaga

SEQ ID NO: 248539 - RNA, 19 nt, Homo sapiens
  misc_RNA (1)...(19): siRNA sense strand
gagaagagaauaguuuuga

SEQ ID NO: 248540 - RNA, 19 nt, Homo sapiens
  misc_RNA (1)...(19): siRNA sense strand
ugcaacaguuuggcaauga

SEQ ID NO: 248541 - RNA, 19 nt, Homo sapiens
  misc_RNA (1)...(19): siRNA sense strand
acgaacaccuucugcucaa

SEQ ID NO: 248542 - RNA, 19 nt, Homo sapiens
  misc_RNA (1)...(19): siRNA sense strand
gauacguaccuguggaguu

SEQ ID NO: 248543 - RNA, 19 nt, Homo sapiens
  misc_RNA (1)...(19): siRNA sense strand
gcaggccagguacaggaua

SEQ ID NO: 248544 - RNA, 19 nt, Homo sapiens
  misc_RNA (1)...(19): siRNA sense strand
gcagauucucucagcaaug

SEQ ID NO: 248545 - RNA, 19 nt, Homo sapiens
  misc_RNA (1)...(19): siRNA sense strand
aaacacagagcugaggaaa

SEQ ID NO: 248546 - RNA, 19 nt, Homo sapiens
  misc_RNA (1)...(19): siRNA sense strand
ucaggaaucagaucgugaa

SEQ ID NO: 248547 - RNA, 19 nt, Homo sapiens
  misc_RNA (1)...(19): siRNA sense strand
ccagagaggagagaagaga

SEQ ID NO: 248548 - RNA, 19 nt, Homo sapiens
  misc_RNA (1)...(19): siRNA sense strand
gaaggugcggacucuuguu

SEQ ID NO: 248549 - RNA, 19 nt, Homo sapiens
  misc_RNA (1)...(19): siRNA sense strand
ccgcaaagccagcgagaca

SEQ ID NO: 248550 - RNA, 19 nt, Homo sapiens
  misc_RNA (1)...(19): siRNA sense strand
uagaucaucguuugacaga

SEQ ID NO: 248551 - RNA, 19 nt, Homo sapiens
  misc_RNA (1)...(19): siRNA sense strand
gaggagagaagagaauagu

SEQ ID NO: 248552 - RNA, 19 nt, Homo sapiens
  misc_RNA (1)...(19): siRNA sense strand
gaggcuaucaagaugaguu

SEQ ID NO: 248553 - RNA, 19 nt, Homo sapiens
  misc_RNA (1)...(19): siRNA sense strand
acagagagagcacgaaugg

SEQ ID NO: 248554 - RNA, 19 nt, Homo sapiens
  misc_RNA (1)...(19): siRNA sense strand
cuaaauggaggcuaucaag

SEQ ID NO: 248555 - RNA, 19 nt, Homo sapiens
  misc_RNA (1)...(19): siRNA sense strand
ccacggagaacugcuggaa

SEQ ID NO: 248556 - RNA, 19 nt, Homo sapiens
  misc_RNA (1)...(19): siRNA sense strand
gguccugccuccuccacau

SEQ ID NO: 248557 - RNA, 19 nt, Homo sapiens
  misc_RNA (1)...(19): siRNA sense strand
gauucucucagcaaugauu

SEQ ID NO: 248558 - RNA, 19 nt, Homo sapiens
  misc_RNA (1)...(19): siRNA sense strand
ggaaucagaucgugaagaa

SEQ ID NO: 248559 - RNA, 19 nt, Homo sapiens
  misc_RNA (1)...(19): siRNA sense strand
ggaaugggcugaugaaugg

SEQ ID NO: 248560 - RNA, 19 nt, Homo sapiens
  misc_RNA (1)...(19): siRNA sense strand
ccacagagauucagcaaug

SEQ ID NO: 248561 - RNA, 19 nt, Homo sapiens
  misc_RNA (1)...(19): siRNA sense strand
gaucaucguuugacagaaa

SEQ ID NO: 248562 - RNA, 19 nt, Homo sapiens
  misc_RNA (1)...(19): siRNA sense strand
ccaagaagccacaaacuuu

SEQ ID NO: 248563 - RNA, 19 nt, Homo sapiens
  misc_RNA (1)...(19): siRNA sense strand
ggagagaagagaauaguuu

SEQ ID NO: 248564 - RNA, 19 nt, Homo sapiens
  misc_RNA (1)...(19): siRNA sense strand
cagaagaagcugugaauaa

SEQ ID NO: 248565 - RNA, 19 nt, Homo sapiens
  misc_RNA (1)...(19): siRNA sense strand
gugaagaacucaacuacug

SEQ ID NO: 248566 - RNA, 19 nt, Homo sapiens
  misc_RNA (1)...(19): siRNA sense strand
caucugcacucacaaauca

SEQ ID NO: 248567 - RNA, 19 nt, Homo sapiens
  misc_RNA (1)...(19): siRNA sense strand
gaacucaacuacuggaaaa

SEQ ID NO: 248568 - RNA, 19 nt, Homo sapiens
  misc_RNA (1)...(19): siRNA sense strand
gaaagggaaugggcugaug

SEQ ID NO: 248569 - RNA, 19 nt, Homo sapiens
  misc_RNA (1)...(19): siRNA sense strand
gaacucaacagugacaauu

SEQ ID NO: 248570 - RNA, 19 nt, Homo sapiens
  misc_RNA (1)...(19): siRNA sense strand
cagauucucucagcaauga

SEQ ID NO: 248571 - RNA, 19 nt, Homo sapiens
  misc_RNA (1)...(19): siRNA sense strand
gcuagagcaucgagaaguu

SEQ ID NO: 248572 - RNA, 19 nt, Homo sapiens
  misc_RNA (1)...(19): siRNA sense strand
guugguagaucaucguuug

SEQ ID NO: 248573 - RNA, 19 nt, Homo sapiens
  misc_RNA (1)...(19): siRNA sense strand
uagaggauauugcaacuuc

SEQ ID NO: 248574 - RNA, 19 nt, Homo sapiens
  misc_RNA (1)...(19): siRNA sense strand
auacguaccuguggaguuu

SEQ ID NO: 248575 - RNA, 19 nt, Homo sapiens
  misc_RNA (1)...(19): siRNA sense strand
agaagaagcugugaauaag

SEQ ID NO: 248576 - RNA, 19 nt, Homo sapiens
  misc_RNA (1)...(19): siRNA sense strand
gcacaguccugcucucacu

SEQ ID NO: 248577 - RNA, 19 nt, Homo sapiens
  misc_RNA (1)...(19): siRNA sense strand
gagaaggugcggacucuug

SEQ ID NO: 248578 - RNA, 19 nt, Homo sapiens
  misc_RNA (1)...(19): siRNA sense strand
ugacagcuaucgacaccaa

SEQ ID NO: 248579 - RNA, 19 nt, Homo sapiens
  misc_RNA (1)...(19): siRNA sense strand
gcgcugaauugcauuaugg

SEQ ID NO: 248580 - RNA, 19 nt, Homo sapiens
  misc_RNA (1)...(19): siRNA sense strand
guaccuggcucagcacgaa

SEQ ID NO: 248581 - RNA, 19 nt, Homo sapiens
  misc_RNA (1)...(19): siRNA sense strand
cuccaccucuucagcauua

SEQ ID NO: 248582 - RNA, 19 nt, Homo sapiens
  misc_RNA (1)...(19): siRNA sense strand
ggaaaagacgguacaauga

SEQ ID NO: 248583 - RNA, 19 nt, Homo sapiens
  misc_RNA (1)...(19): siRNA sense strand
cauuacaccuuagaggaua

SEQ ID NO: 248584 - RNA, 19 nt, Homo sapiens
  misc_RNA (1)...(19): siRNA sense strand
gagaggagagaagagaaua

SEQ ID NO: 248585 - RNA, 19 nt, Homo sapiens
  misc_RNA (1)...(19): siRNA sense strand
gaagugauugcaacagaga

SEQ ID NO: 248586 - RNA, 19 nt, Homo sapiens
  misc_RNA (1)...(19): siRNA sense strand
cuggugaacucaacaguga

SEQ ID NO: 248587 - RNA, 19 nt, Homo sapiens
  misc_RNA (1)...(19): siRNA sense strand
gggaaugggcugaugaaug

SEQ ID NO: 248588 - RNA, 19 nt, Homo sapiens
  misc_RNA (1)...(19): siRNA sense strand
aagaugaguugguagauca

SEQ ID NO: 248589 - RNA, 19 nt, Homo sapiens
  misc_RNA (1)...(19): siRNA sense strand
ccacagucuuggucuaaau

SEQ ID NO: 248590 - RNA, 19 nt, Homo sapiens
  misc_RNA (1)...(19): siRNA sense strand
ucauggaggugcacggaaa

SEQ ID NO: 248591 - RNA, 19 nt, Homo sapiens
  misc_RNA (1)...(19): siRNA sense strand
cgucagaguugcucaugga

SEQ ID NO: 248592 - RNA, 19 nt, Homo sapiens
  misc_RNA (1)...(19): siRNA sense strand
caagaugaguugguagauc

SEQ ID NO: 248593 - RNA, 19 nt, Homo sapiens
  misc_RNA (1)...(19): siRNA sense strand
gcaaagccagcgagacaug

SEQ ID NO: 248594 - RNA, 19 nt, Homo sapiens
  misc_RNA (1)...(19): siRNA sense strand
gaaaagacgguacaaugaa

SEQ ID NO: 248595 - RNA, 19 nt, Homo sapiens
  misc_RNA (1)...(19): siRNA sense strand
gacaagaccucggcaacca

SEQ ID NO: 248596 - RNA, 19 nt, Homo sapiens
  misc_RNA (1)...(19): siRNA sense strand
ucgagaaguucgugauaga

SEQ ID NO: 248597 - RNA, 19 nt, Homo sapiens
  misc_RNA (1)...(19): siRNA sense strand
caacagagagagcacgaau

SEQ ID NO: 248598 - RNA, 19 nt, Homo sapiens
  misc_RNA (1)...(19): siRNA sense strand
caagaagccacaaacuuuc

SEQ ID NO: 248599 - RNA, 19 nt, Homo sapiens
  misc_RNA (1)...(19): siRNA sense strand
gcgauacuguggcucuuuc

SEQ ID NO: 248600 - RNA, 19 nt, Homo sapiens
  misc_RNA (1)...(19): siRNA sense strand
uuaccacucugcaacaguu

SEQ ID NO: 248601 - RNA, 19 nt, Homo sapiens
  misc_RNA (1)...(19): siRNA sense strand
gaucgccuguggaagugaa

SEQ ID NO: 248602 - RNA, 19 nt, Homo sapiens
  misc_RNA (1)...(19): siRNA sense strand
gcaauugccagccacuugu

SEQ ID NO: 248603 - RNA, 19 nt, Homo sapiens
  misc_RNA (1)...(19): siRNA sense strand
gaacaccuucugcucaaca

SEQ ID NO: 248604 - RNA, 19 nt, Homo sapiens
  misc_RNA (1)...(19): siRNA sense strand
uugaggaauuccacuguaa

SEQ ID NO: 248605 - RNA, 19 nt, Homo sapiens
  misc_RNA (1)...(19): siRNA sense strand
cuucacuccuacugcauua

SEQ ID NO: 248606 - RNA, 19 nt, Homo sapiens
  misc_RNA (1)...(19): siRNA sense strand
uuauggaaaugguagagaa

SEQ ID NO: 248607 - RNA, 19 nt, Homo sapiens
  misc_RNA (1)...(19): siRNA sense strand
cacaucaucugcacucaca

SEQ ID NO: 248608 - RNA, 19 nt, Homo sapiens
  misc_RNA (1)...(19): siRNA sense strand
gagcacgaauggagcaaac

SEQ ID NO: 248609 - RNA, 19 nt, Homo sapiens
  misc_RNA (1)...(19): siRNA sense strand
cuaucaagaugaguuggua

SEQ ID NO: 248610 - RNA, 19 nt, Homo sapiens
  misc_RNA (1)...(19): siRNA sense strand
caucgagaaguucgugaua

SEQ ID NO: 248611 - RNA, 19 nt, Homo sapiens
  misc_RNA (1)...(19): siRNA sense strand
acucacaaaucagcaauug

SEQ ID NO: 248612 - RNA, 19 nt, Homo sapiens
  misc_RNA (1)...(19): siRNA sense strand
caucaccgccacagagauu

SEQ ID NO: 248613 - RNA, 19 nt, Homo sapiens
  misc_RNA (1)...(19): siRNA sense strand
aauggaggcuaucaagaug

SEQ ID NO: 248614 - RNA, 19 nt, Homo sapiens
  misc_RNA (1)...(19): siRNA sense strand
gcauuacaccuuagaggau

SEQ ID NO: 248615 - RNA, 19 nt, Homo sapiens
  misc_RNA (1)...(19): siRNA sense strand
aagagaguauguaccauca

SEQ ID NO: 248616 - RNA, 19 nt, Homo sapiens
  misc_RNA (1)...(19): siRNA sense strand
gggagaaggugcggacucu

SEQ ID NO: 248617 - RNA, 19 nt, Homo sapiens
  misc_RNA (1)...(19): siRNA sense strand
cgacaccaacggacucuga

SEQ ID NO: 248618 - RNA, 19 nt, Homo sapiens
  misc_RNA (1)...(19): siRNA sense strand
aagaagcugugaauaaggu

SEQ ID NO: 248619 - RNA, 19 nt, Homo sapiens
  misc_RNA (1)...(19): siRNA sense strand
uaaauggaggcuaucaaga

SEQ ID NO: 248620 - RNA, 19 nt, Homo sapiens
  misc_RNA (1)...(19): siRNA sense strand
gagaaguucgugauagaca

SEQ ID NO: 248621 - RNA, 19 nt, Homo sapiens
  misc_RNA (1)...(19): siRNA sense strand
gaagaagcugugaauaagg

SEQ ID NO: 248622 - RNA, 19 nt, Homo sapiens
  misc_RNA (1)...(19): siRNA sense strand
aaaagacgguacaaugaaa

SEQ ID NO: 248623 - RNA, 19 nt, Homo sapiens
  misc_RNA (1)...(19): siRNA sense strand
gguagaucaucguuugaca

SEQ ID NO: 248624 - RNA, 19 nt, Homo sapiens
  misc_RNA (1)...(19): siRNA sense strand
caucaucugcacucacaaa

SEQ ID NO: 248625 - RNA, 19 nt, Homo sapiens
  misc_RNA (1)...(19): siRNA sense strand
aaauggaggcuaucaagau

SEQ ID NO: 248626 - RNA, 19 nt, Homo sapiens
  misc_RNA (1)...(19): siRNA sense strand
caacuucucaccuguaucg

SEQ ID NO: 248627 - RNA, 19 nt, Homo sapiens
  misc_RNA (1)...(19): siRNA sense strand
ggugcggacucuuguucuu

SEQ ID NO: 248628 - RNA, 19 nt, Homo sapiens
  misc_RNA (1)...(19): siRNA sense strand
gagaauaguuuugauagag

SEQ ID NO: 248629 - RNA, 19 nt, Homo sapiens
  misc_RNA (1)...(19): siRNA sense strand
ccacaucgcguuccucaac

SEQ ID NO: 248630 - RNA, 19 nt, Homo sapiens
  misc_RNA (1)...(19): siRNA sense strand
ugcaacaguuuggcaauga

SEQ ID NO: 248631 - RNA, 19 nt, Homo sapiens
  misc_RNA (1)...(19): siRNA sense strand
ccucaacaccugcuucugu

SEQ ID NO: 248632 - RNA, 19 nt, Homo sapiens
  misc_RNA (1)...(19): siRNA sense strand
ggagaacugcuggaacugu

SEQ ID NO: 248633 - RNA, 19 nt, Homo sapiens
  misc_RNA (1)...(19): siRNA sense strand
uugaagugauugcaacaga

SEQ ID NO: 248634 - RNA, 19 nt, Homo sapiens
  misc_RNA (1)...(19): siRNA sense strand
gagaagagaauaguuuuga

SEQ ID NO: 248635 - RNA, 19 nt, Homo sapiens
  misc_RNA (1)...(19): siRNA sense strand
acgaacaccuucugcucaa

SEQ ID NO: 248636 - RNA, 19 nt, Homo sapiens
  misc_RNA (1)...(19): siRNA sense strand
gauacguaccuguggaguu

SEQ ID NO: 248637 - RNA, 19 nt, Homo sapiens
  misc_RNA (1)...(19): siRNA sense strand
gcaggccagguacaggaua

SEQ ID NO: 248638 - RNA, 19 nt, Homo sapiens
  misc_RNA (1)...(19): siRNA sense strand
gcagauucucucagcaaug

SEQ ID NO: 248639 - RNA, 19 nt, Homo sapiens
  misc_RNA (1)...(19): siRNA sense strand
aaacacagagcugaggaaa

SEQ ID NO: 248640 - RNA, 19 nt, Homo sapiens
  misc_RNA (1)...(19): siRNA sense strand
ucaggaaucagaucgugaa

SEQ ID NO: 248641 - RNA, 19 nt, Homo sapiens
  misc_RNA (1)...(19): siRNA sense strand
ccagagaggagagaagaga

SEQ ID NO: 248642 - RNA, 19 nt, Homo sapiens
  misc_RNA (1)...(19): siRNA sense strand
gaaggugcggacucuuguu

SEQ ID NO: 248643 - RNA, 19 nt, Homo sapiens
  misc_RNA (1)...(19): siRNA sense strand
ccgcaaagccagcgagaca

SEQ ID NO: 248644 - RNA, 19 nt, Homo sapiens
  misc_RNA (1)...(19): siRNA sense strand
uagaucaucguuugacaga

SEQ ID NO: 248645 - RNA, 19 nt, Homo sapiens
  misc_RNA (1)...(19): siRNA sense strand
gaggagagaagagaauagu

SEQ ID NO: 248646 - RNA, 19 nt, Homo sapiens
  misc_RNA (1)...(19): siRNA sense strand
gaggcuaucaagaugaguu

SEQ ID NO: 248647 - RNA, 19 nt, Homo sapiens
  misc_RNA (1)...(19): siRNA sense strand
acagagagagcacgaaugg

SEQ ID NO: 248648 - RNA, 19 nt, Homo sapiens
  misc_RNA (1)...(19): siRNA sense strand
gcaacaguuuggcaaugac

SEQ ID NO: 248649 - RNA, 19 nt, Homo sapiens
  misc_RNA (1)...(19): siRNA sense strand
gguccugccuccuccacau

SEQ ID NO: 248650 - RNA, 19 nt, Homo sapiens
  misc_RNA (1)...(19): siRNA sense strand
ccacggagaacugcuggaa

SEQ ID NO: 248651 - RNA, 19 nt, Homo sapiens
  misc_RNA (1)...(19): siRNA sense strand
gauucucucagcaaugauu

SEQ ID NO: 248652 - RNA, 19 nt, Homo sapiens
  misc_RNA (1)...(19): siRNA sense strand
cuaaauggaggcuaucaag

SEQ ID NO: 248653 - RNA, 19 nt, Homo sapiens
  misc_RNA (1)...(19): siRNA sense strand
gccaagagaguauguacca

SEQ ID NO: 248654 - RNA, 19 nt, Homo sapiens
  misc_RNA (1)...(19): siRNA sense strand
gagagaagagaauaguuuu

SEQ ID NO: 248655 - RNA, 19 nt, Homo sapiens
  misc_RNA (1)...(19): siRNA sense strand
ucuucagcauuacaccuua

SEQ ID NO: 248656 - RNA, 19 nt, Homo sapiens
  misc_RNA (1)...(19): siRNA sense strand
aaauucaggccaugucaga

SEQ ID NO: 248657 - RNA, 19 nt, Homo sapiens
  misc_RNA (1)...(19): siRNA sense strand
gcacgaauggagcaaacca

SEQ ID NO: 248658 - RNA, 19 nt, Homo sapiens
  misc_RNA (1)...(19): siRNA sense strand
cuaaagcaguagagaauua

SEQ ID NO: 248659 - RNA, 19 nt, Homo sapiens
  misc_RNA (1)...(19): siRNA sense strand
ggcaagauauggacaacua

SEQ ID NO: 248660 - RNA, 19 nt, Homo sapiens
  misc_RNA (1)...(19): siRNA sense strand
gcagaaaugagaaacagua

SEQ ID NO: 248661 - RNA, 19 nt, Homo sapiens
  misc_RNA (1)...(19): siRNA sense strand
uaacuuagcacuuguaaag

SEQ ID NO: 248662 - RNA, 19 nt, Homo sapiens
  misc_RNA (1)...(19): siRNA sense strand
gcacagggaagcagaaaug

SEQ ID NO: 248663 - RNA, 19 nt, Homo sapiens
  misc_RNA (1)...(19): siRNA sense strand
uuauacagauggcaagaua

SEQ ID NO: 248664 - RNA, 19 nt, Homo sapiens
  misc_RNA (1)...(19): siRNA sense strand
gaaaugagaaacaguaucu

SEQ ID NO: 248665 - RNA, 19 nt, Homo sapiens
  misc_RNA (1)...(19): siRNA sense strand
ugaugaagaugacgauuau

SEQ ID NO: 248666 - RNA, 19 nt, Homo sapiens
  misc_RNA (1)...(19): siRNA sense strand
gagaauuaccuuauacaga

SEQ ID NO: 248667 - RNA, 19 nt, Homo sapiens
  misc_RNA (1)...(19): siRNA sense strand
gaaaaguaauggacucuga

SEQ ID NO: 248668 - RNA, 19 nt, Homo sapiens
  misc_RNA (1)...(19): siRNA sense strand
gaagguaucagaacaaggu

SEQ ID NO: 248669 - RNA, 19 nt, Homo sapiens
  misc_RNA (1)...(19): siRNA sense strand
gguaucagaacaagguuua

SEQ ID NO: 248670 - RNA, 19 nt, Homo sapiens
  misc_RNA (1)...(19): siRNA sense strand
guagagaauuaccuuauac

SEQ ID NO: 248671 - RNA, 19 nt, Homo sapiens
  misc_RNA (1)...(19): siRNA sense strand
gaauuaccuuauacagaug

SEQ ID NO: 248672 - RNA, 19 nt, Homo sapiens
  misc_RNA (1)...(19): siRNA sense strand
guaauggacucugaugaag

SEQ ID NO: 248673 - RNA, 19 nt, Homo sapiens
  misc_RNA (1)...(19): siRNA sense strand
gcaguagagaauuaccuua

SEQ ID NO: 248674 - RNA, 19 nt, Homo sapiens
  misc_RNA (1)...(19): siRNA sense strand
gauauggacaacuaaguga

SEQ ID NO: 248675 - RNA, 19 nt, Homo sapiens
  misc_RNA (1)...(19): siRNA sense strand
gagaagguaucagaacaag

SEQ ID NO: 248676 - RNA, 19 nt, Homo sapiens
  misc_RNA (1)...(19): siRNA sense strand
uaagugagaagguaucaga

SEQ ID NO: 248677 - RNA, 19 nt, Homo sapiens
  misc_RNA (1)...(19): siRNA sense strand
acaacuaagugagaaggua

SEQ ID NO: 248678 - RNA, 19 nt, Homo sapiens
  misc_RNA (1)...(19): siRNA sense strand
gugagaagguaucagaaca

SEQ ID NO: 248679 - RNA, 19 nt, Homo sapiens
  misc_RNA (1)...(19): siRNA sense strand
gcacuuguaaagccugaaa

SEQ ID NO: 248680 - RNA, 19 nt, Homo sapiens
  misc_RNA (1)...(19): siRNA sense strand
ugaagaugacgauuauuga

SEQ ID NO: 248681 - RNA, 19 nt, Homo sapiens
  misc_RNA (1)...(19): siRNA sense strand
agacaacaacagugaaauu

SEQ ID NO: 248682 - RNA, 19 nt, Homo sapiens
  misc_RNA (1)...(19): siRNA sense strand
gcaagauauggacaacuaa

SEQ ID NO: 248683 - RNA, 19 nt, Homo sapiens
  misc_RNA (1)...(19): siRNA sense strand
aaacuaaagcaguagagaa

SEQ ID NO: 248684 - RNA, 19 nt, Homo sapiens
  misc_RNA (1)...(19): siRNA sense strand
cagggaagcagaaaugaga

SEQ ID NO: 248685 - RNA, 19 nt, Homo sapiens
  misc_RNA (1)...(19): siRNA sense strand
caacuaagugagaagguau

SEQ ID NO: 248686 - RNA, 19 nt, Homo sapiens
  misc_RNA (1)...(19): siRNA sense strand
gacaacaacagugaaauuc

SEQ ID NO: 248687 - RNA, 19 nt, Homo sapiens
  misc_RNA (1)...(19): siRNA sense strand
aaagacaacaacagugaaa

SEQ ID NO: 248688 - RNA, 19 nt, Homo sapiens
  misc_RNA (1)...(19): siRNA sense strand
uaucuuagcccaaguucug

SEQ ID NO: 248689 - RNA, 19 nt, Homo sapiens
  misc_RNA (1)...(19): siRNA sense strand
cugaugaagaugacgauua

SEQ ID NO: 248690 - RNA, 19 nt, Homo sapiens
  misc_RNA (1)...(19): siRNA sense strand
aauggacucugaugaagau

SEQ ID NO: 248691 - RNA, 19 nt, Homo sapiens
  misc_RNA (1)...(19): siRNA sense strand
gaagcagaaaugagaaaca

SEQ ID NO: 248692 - RNA, 19 nt, Homo sapiens
  misc_RNA (1)...(19): siRNA sense strand
cagaacaagguuuaauaga

SEQ ID NO: 248693 - RNA, 19 nt, Homo sapiens
  misc_RNA (1)...(19): siRNA sense strand
ucagaacaagguuuaauag

SEQ ID NO: 248694 - RNA, 19 nt, Homo sapiens
  misc_RNA (1)...(19): siRNA sense strand
ggacucugaugaagaugac

SEQ ID NO: 248695 - RNA, 19 nt, Homo sapiens
  misc_RNA (1)...(19): siRNA sense strand
gggaagcagaaaugagaaa

SEQ ID NO: 248696 - RNA, 19 nt, Homo sapiens
  misc_RNA (1)...(19): siRNA sense strand
caguagagaauuaccuuau

SEQ ID NO: 248697 - RNA, 19 nt, Homo sapiens
  misc_RNA (1)...(19): siRNA sense strand
caacagaagaaaaguaaug

SEQ ID NO: 248698 - RNA, 19 nt, Homo sapiens
  misc_RNA (1)...(19): siRNA sense strand
aguaauggacucugaugaa

SEQ ID NO: 248699 - RNA, 19 nt, Homo sapiens
  misc_RNA (1)...(19): siRNA sense strand
auacagauggcaagauaug

SEQ ID NO: 248700 - RNA, 19 nt, Homo sapiens
  misc_RNA (1)...(19): siRNA sense strand
uaauggacucugaugaaga

SEQ ID NO: 248701 - RNA, 19 nt, Homo sapiens
  misc_RNA (1)...(19): siRNA sense strand
uagcccaaguucuggauca

SEQ ID NO: 248702 - RNA, 19 nt, Homo sapiens
  misc_RNA (1)...(19): siRNA sense strand
ugagaagguaucagaacaa

SEQ ID NO: 248703 - RNA, 19 nt, Homo sapiens
  misc_RNA (1)...(19): siRNA sense strand
aagcagaaaugagaaacag

SEQ ID NO: 248704 - RNA, 19 nt, Homo sapiens
  misc_RNA (1)...(19): siRNA sense strand
augaagaugacgauuauug

SEQ ID NO: 248705 - RNA, 19 nt, Homo sapiens
  misc_RNA (1)...(19): siRNA sense strand
cagaaaugagaaacaguau

SEQ ID NO: 248706 - RNA, 19 nt, Homo sapiens
  misc_RNA (1)...(19): siRNA sense strand
caagauauggacaacuaag

SEQ ID NO: 248707 - RNA, 19 nt, Homo sapiens
  misc_RNA (1)...(19): siRNA sense strand
acagauggcaagauaugga

SEQ ID NO: 248708 - RNA, 19 nt, Homo sapiens
  misc_RNA (1)...(19): siRNA sense strand
aaaguaauggacucugaug

SEQ ID NO: 248709 - RNA, 19 nt, Homo sapiens
  misc_RNA (1)...(19): siRNA sense strand
gauggcaagauauggacaa

SEQ ID NO: 248710 - RNA, 19 nt, Homo sapiens
  misc_RNA (1)...(19): siRNA sense strand
aacuaaagcaguagagaau

SEQ ID NO: 248711 - RNA, 19 nt, Homo sapiens
  misc_RNA (1)...(19): siRNA sense strand
gcaaguaccuggucauugg

SEQ ID NO: 248712 - RNA, 19 nt, Homo sapiens
  misc_RNA (1)...(19): siRNA sense strand
gcaaugcccacgagucuaa

SEQ ID NO: 248713 - RNA, 19 nt, Homo sapiens
  misc_RNA (1)...(19): siRNA sense strand
gugcaucuguggacaacua

SEQ ID NO: 248714 - RNA, 19 nt, Homo sapiens
  misc_RNA (1)...(19): siRNA sense strand
ggugagggcuacagcaaug

SEQ ID NO: 248715 - RNA, 19 nt, Homo sapiens
  misc_RNA (1)...(19): siRNA sense strand
gaggaugccugccgcuaug

SEQ ID NO: 248716 - RNA, 19 nt, Homo sapiens
  misc_RNA (1)...(19): siRNA sense strand
ccacgagucuaagcagaug

SEQ ID NO: 248717 - RNA, 19 nt, Homo sapiens
  misc_RNA (1)...(19): siRNA sense strand
ggaccuuccugugguuugu

SEQ ID NO: 248718 - RNA, 19 nt, Homo sapiens
  misc_RNA (1)...(19): siRNA sense strand
acgacuucauccagaauua

SEQ ID NO: 248719 - RNA, 19 nt, Homo sapiens
  misc_RNA (1)...(19): siRNA sense strand
gccaucaccuucagcuucu

SEQ ID NO: 248720 - RNA, 19 nt, Homo sapiens
  misc_RNA (1)...(19): siRNA sense strand
ggacgacuucauccagaau

SEQ ID NO: 248721 - RNA, 19 nt, Homo sapiens
  misc_RNA (1)...(19): siRNA sense strand
gggcagccaucaccuucag

SEQ ID NO: 248722 - RNA, 19 nt, Homo sapiens
  misc_RNA (1)...(19): siRNA sense strand
ucucagcucucuggaccuu

SEQ ID NO: 248723 - RNA, 19 nt, Homo sapiens
  misc_RNA (1)...(19): siRNA sense strand
cguguucuccugcaucuau

SEQ ID NO: 248724 - RNA, 19 nt, Homo sapiens
  misc_RNA (1)...(19): siRNA sense strand
cgaggaugccugccgcuau

SEQ ID NO: 248725 - RNA, 19 nt, Homo sapiens
  misc_RNA (1)...(19): siRNA sense strand
cagcaaugcccacgagucu

SEQ ID NO: 248726 - RNA, 19 nt, Homo sapiens
  misc_RNA (1)...(19): siRNA sense strand
agucuaagcagauguacug

SEQ ID NO: 248727 - RNA, 19 nt, Homo sapiens
  misc_RNA (1)...(19): siRNA sense strand
cagauguacugcguguuca

SEQ ID NO: 248728 - RNA, 19 nt, Homo sapiens
  misc_RNA (1)...(19): siRNA sense strand
caucaccuucagcuucuuu

SEQ ID NO: 248729 - RNA, 19 nt, Homo sapiens
  misc_RNA (1)...(19): siRNA sense strand
gacgacuucauccagaauu

SEQ ID NO: 248730 - RNA, 19 nt, Homo sapiens
  misc_RNA (1)...(19): siRNA sense strand
gggaggaguucugcaucua

SEQ ID NO: 248731 - RNA, 19 nt, Homo sapiens
  misc_RNA (1)...(19): siRNA sense strand
ggacaacccacugaacgaa

SEQ ID NO: 248732 - RNA, 19 nt, Homo sapiens
  misc_RNA (1)...(19): siRNA sense strand
gaggaguucugcaucuaca

SEQ ID NO: 248733 - RNA, 19 nt, Homo sapiens
  misc_RNA (1)...(19): siRNA sense strand
cgucaaggaccgcaagaaa

SEQ ID NO: 248734 - RNA, 19 nt, Homo sapiens
  misc_RNA (1)...(19): siRNA sense strand
ccaaggacaacccacugaa

SEQ ID NO: 248735 - RNA, 19 nt, Homo sapiens
  misc_RNA (1)...(19): siRNA sense strand
gcagaucagcagcgucaag

SEQ ID NO: 248736 - RNA, 19 nt, Homo sapiens
  misc_RNA (1)...(19): siRNA sense strand
ucaaggaccgcaagaaagc

SEQ ID NO: 248737 - RNA, 19 nt, Homo sapiens
  misc_RNA (1)...(19): siRNA sense strand
ucuccaagcccaaggacaa

SEQ ID NO: 248738 - RNA, 19 nt, Homo sapiens
  misc_RNA (1)...(19): siRNA sense strand
ggaggaguucugcaucuac

SEQ ID NO: 248739 - RNA, 19 nt, Homo sapiens
  misc_RNA (1)...(19): siRNA sense strand
cccaacgccugcagcuaug

SEQ ID NO: 248740 - RNA, 19 nt, Homo sapiens
  misc_RNA (1)...(19): siRNA sense strand
gggaggaguucugcaucua

SEQ ID NO: 248741 - RNA, 19 nt, Homo sapiens
  misc_RNA (1)...(19): siRNA sense strand
ggacaacccacugaacgaa

SEQ ID NO: 248742 - RNA, 19 nt, Homo sapiens
  misc_RNA (1)...(19): siRNA sense strand
gaggaguucugcaucuaca

SEQ ID NO: 248743 - RNA, 19 nt, Homo sapiens
  misc_RNA (1)...(19): siRNA sense strand
cgucaaggaccgcaagaaa

SEQ ID NO: 248744 - RNA, 19 nt, Homo sapiens
  misc_RNA (1)...(19): siRNA sense strand
ccaaggacaacccacugaa

SEQ ID NO: 248745 - RNA, 19 nt, Homo sapiens
  misc_RNA (1)...(19): siRNA sense strand
gcagaucagcagcgucaag

SEQ ID NO: 248746 - RNA, 19 nt, Homo sapiens
  misc_RNA (1)...(19): siRNA sense strand
ucaaggaccgcaagaaagc

SEQ ID NO: 248747 - RNA, 19 nt, Homo sapiens
  misc_RNA (1)...(19): siRNA sense strand
ucuccaagcccaaggacaa

SEQ ID NO: 248748 - RNA, 19 nt, Homo sapiens
  misc_RNA (1)...(19): siRNA sense strand
ggaggaguucugcaucuac

SEQ ID NO: 248749 - RNA, 19 nt, Homo sapiens
  misc_RNA (1)...(19): siRNA sense strand
cccaacgccugcagcuaug

SEQ ID NO: 248750 - RNA, 19 nt, Homo sapiens
  misc_RNA (1)...(19): siRNA sense strand
gggaggaguucugcaucua

SEQ ID NO: 248751 - RNA, 19 nt, Homo sapiens
  misc_RNA (1)...(19): siRNA sense strand
ggacaacccacugaacgaa

SEQ ID NO: 248752 - RNA, 19 nt, Homo sapiens
  misc_RNA (1)...(19): siRNA sense strand
gaggaguucugcaucuaca

SEQ ID NO: 248753 - RNA, 19 nt, Homo sapiens
  misc_RNA (1)...(19): siRNA sense strand
cgucaaggaccgcaagaaa

SEQ ID NO: 248754 - RNA, 19 nt, Homo sapiens
  misc_RNA (1)...(19): siRNA sense strand
ccaaggacaacccacugaa

SEQ ID NO: 248755 - RNA, 19 nt, Homo sapiens
  misc_RNA (1)...(19): siRNA sense strand
gcagaucagcagcgucaag

SEQ ID NO: 248756 - RNA, 19 nt, Homo sapiens
  misc_RNA (1)...(19): siRNA sense strand
ucaaggaccgcaagaaagc

SEQ ID NO: 248757 - RNA, 19 nt, Homo sapiens
  misc_RNA (1)...(19): siRNA sense strand
ucuccaagcccaaggacaa

SEQ ID NO: 248758 - RNA, 19 nt, Homo sapiens
  misc_RNA (1)...(19): siRNA sense strand
ggaggaguucugcaucuac

SEQ ID NO: 248759 - RNA, 19 nt, Homo sapiens
  misc_RNA (1)...(19): siRNA sense strand
cccaacgccugcagcuaug

SEQ ID NO: 248760 - RNA, 19 nt, Homo sapiens
  misc_RNA (1)...(19): siRNA sense strand
gcaagaagcuguccaaagg

SEQ ID NO: 248761 - RNA, 19 nt, Homo sapiens
  misc_RNA (1)...(19): siRNA sense strand
ggacuuagacaaggaauuu

SEQ ID NO: 248762 - RNA, 19 nt, Homo sapiens
  misc_RNA (1)...(19): siRNA sense strand
ggacauggacuuagacaag

SEQ ID NO: 248763 - RNA, 19 nt, Homo sapiens
  misc_RNA (1)...(19): siRNA sense strand
agaaagaccuggaugacau

SEQ ID NO: 248764 - RNA, 19 nt, Homo sapiens
  misc_RNA (1)...(19): siRNA sense strand
gcgcugagcucaugaucca

SEQ ID NO: 248765 - RNA, 19 nt, Homo sapiens
  misc_RNA (1)...(19): siRNA sense strand
gcuaacaaccgcuuugaga

SEQ ID NO: 248766 - RNA, 19 nt, Homo sapiens
  misc_RNA (1)...(19): siRNA sense strand
ccaaaggcaccaagaaaga

SEQ ID NO: 248767 - RNA, 19 nt, Homo sapiens
  misc_RNA (1)...(19): siRNA sense strand
gccaucgucuucuuugcua

SEQ ID NO: 248768 - RNA, 19 nt, Homo sapiens
  misc_RNA (1)...(19): siRNA sense strand
gcgccuguaucaugacuga

SEQ ID NO: 248769 - RNA, 19 nt, Homo sapiens
  misc_RNA (1)...(19): siRNA sense strand
gccucuggcucgaugguua

SEQ ID NO: 248770 - RNA, 19 nt, Homo sapiens
  misc_RNA (1)...(19): siRNA sense strand
caagcugacccacaauaaa

SEQ ID NO: 248771 - RNA, 19 nt, Homo sapiens
  misc_RNA (1)...(19): siRNA sense strand
ccaagaaagaccuggauga

SEQ ID NO: 248772 - RNA, 19 nt, Homo sapiens
  misc_RNA (1)...(19): siRNA sense strand
aaacaggcaucacccucaa

SEQ ID NO: 248773 - RNA, 19 nt, Homo sapiens
  misc_RNA (1)...(19): siRNA sense strand
gagguacuaugccuuugau

SEQ ID NO: 248774 - RNA, 19 nt, Homo sapiens
  misc_RNA (1)...(19): siRNA sense strand
gggaggugcugggcaagaa

SEQ ID NO: 248775 - RNA, 19 nt, Homo sapiens
  misc_RNA (1)...(19): siRNA sense strand
gguacuaugccuuugauga

SEQ ID NO: 248776 - RNA, 19 nt, Homo sapiens
  misc_RNA (1)...(19): siRNA sense strand
cgagagguacuaugccuuu

SEQ ID NO: 248777 - RNA, 19 nt, Homo sapiens
  misc_RNA (1)...(19): siRNA sense strand
ccaagcugacccacaauaa

SEQ ID NO: 248778 - RNA, 19 nt, Homo sapiens
  misc_RNA (1)...(19): siRNA sense strand
ccgccaagcugacccacaa

SEQ ID NO: 248779 - RNA, 19 nt, Homo sapiens
  misc_RNA (1)...(19): siRNA sense strand
uaacaaccgcuuugagaca

SEQ ID NO: 248780 - RNA, 19 nt, Homo sapiens
  misc_RNA (1)...(19): siRNA sense strand
uuaaacgggucuucaaggu

SEQ ID NO: 248781 - RNA, 19 nt, Homo sapiens
  misc_RNA (1)...(19): siRNA sense strand
guccaaaggcaccaagaaa

SEQ ID NO: 248782 - RNA, 19 nt, Homo sapiens
  misc_RNA (1)...(19): siRNA sense strand
gccaagcugacccacaaua

SEQ ID NO: 248783 - RNA, 19 nt, Homo sapiens
  misc_RNA (1)...(19): siRNA sense strand
gcugagcucaugauccaaa

SEQ ID NO: 248784 - RNA, 19 nt, Homo sapiens
  misc_RNA (1)...(19): siRNA sense strand
gagagguacuaugccuuug

SEQ ID NO: 248785 - RNA, 19 nt, Homo sapiens
  misc_RNA (1)...(19): siRNA sense strand
uaucugagcuucggugacu

SEQ ID NO: 248786 - RNA, 19 nt, Homo sapiens
  misc_RNA (1)...(19): siRNA sense strand
gcucccugguggacaauau

SEQ ID NO: 248787 - RNA, 19 nt, Homo sapiens
  misc_RNA (1)...(19): siRNA sense strand
guacuaugccuuugaugag

SEQ ID NO: 248788 - RNA, 19 nt, Homo sapiens
  misc_RNA (1)...(19): siRNA sense strand
acaauaaagaugucagaga

SEQ ID NO: 248789 - RNA, 19 nt, Homo sapiens
  misc_RNA (1)...(19): siRNA sense strand
ggaacacgacccuuaucga

SEQ ID NO: 248790 - RNA, 19 nt, Homo sapiens
  misc_RNA (1)...(19): siRNA sense strand
ucaaggugguagaggaaau

SEQ ID NO: 248791 - RNA, 19 nt, Homo sapiens
  misc_RNA (1)...(19): siRNA sense strand
gcagccaucgucuucuuug

SEQ ID NO: 248792 - RNA, 19 nt, Homo sapiens
  misc_RNA (1)...(19): siRNA sense strand
gaauuucuccaggacuuga

SEQ ID NO: 248793 - RNA, 19 nt, Homo sapiens
  misc_RNA (1)...(19): siRNA sense strand
gguggacaauauucagcaa

SEQ ID NO: 248794 - RNA, 19 nt, Homo sapiens
  misc_RNA (1)...(19): siRNA sense strand
gagcugccggagacaguuu

SEQ ID NO: 248795 - RNA, 19 nt, Homo sapiens
  misc_RNA (1)...(19): siRNA sense strand
gugcgguucuuccugaauc

SEQ ID NO: 248796 - RNA, 19 nt, Homo sapiens
  misc_RNA (1)...(19): siRNA sense strand
ccacaauaaagaugucaga

SEQ ID NO: 248797 - RNA, 19 nt, Homo sapiens
  misc_RNA (1)...(19): siRNA sense strand
gcacugcucuccggggaaa

SEQ ID NO: 248798 - RNA, 19 nt, Homo sapiens
  misc_RNA (1)...(19): siRNA sense strand
ggaccucguggagaaguuu

SEQ ID NO: 248799 - RNA, 19 nt, Homo sapiens
  misc_RNA (1)...(19): siRNA sense strand
ggcaagaagcuguccaaag

SEQ ID NO: 248800 - RNA, 19 nt, Homo sapiens
  misc_RNA (1)...(19): siRNA sense strand
uggacaauauucagcaaca

SEQ ID NO: 248801 - RNA, 19 nt, Homo sapiens
  misc_RNA (1)...(19): siRNA sense strand
acucacagauggaugacau

SEQ ID NO: 248802 - RNA, 19 nt, Homo sapiens
  misc_RNA (1)...(19): siRNA sense strand
aggaauuucuccaggacuu

SEQ ID NO: 248803 - RNA, 19 nt, Homo sapiens
  misc_RNA (1)...(19): siRNA sense strand
cuucugcgcugagcucaug

SEQ ID NO: 248804 - RNA, 19 nt, Homo sapiens
  misc_RNA (1)...(19): siRNA sense strand
caagaaagaccuggaugac

SEQ ID NO: 248805 - RNA, 19 nt, Homo sapiens
  misc_RNA (1)...(19): siRNA sense strand
ggcaggcacuacucaucga

SEQ ID NO: 248806 - RNA, 19 nt, Homo sapiens
  misc_RNA (1)...(19): siRNA sense strand
gaugucagagaccuguuug

SEQ ID NO: 248807 - RNA, 19 nt, Homo sapiens
  misc_RNA (1)...(19): siRNA sense strand
ggaauuucuccaggacuug

SEQ ID NO: 248808 - RNA, 19 nt, Homo sapiens
  misc_RNA (1)...(19): siRNA sense strand
uaucgacgaggacguguau

SEQ ID NO: 248809 - RNA, 19 nt, Homo sapiens
  misc_RNA (1)...(19): siRNA sense strand
aagcugacccacaauaaag

SEQ ID NO: 248810 - RNA, 19 nt, Homo sapiens
  misc_RNA (1)...(19): siRNA sense strand
ggacaauauucagcaacac

SEQ ID NO: 248811 - RNA, 19 nt, Homo sapiens
  misc_RNA (1)...(19): siRNA sense strand
caauauucagcaacacuuc

SEQ ID NO: 248812 - RNA, 19 nt, Homo sapiens
  misc_RNA (1)...(19): siRNA sense strand
uuguggaccucguggagaa

SEQ ID NO: 248813 - RNA, 19 nt, Homo sapiens
  misc_RNA (1)...(19): siRNA sense strand
caaggugguagaggaaaug

SEQ ID NO: 248814 - RNA, 19 nt, Homo sapiens
  misc_RNA (1)...(19): siRNA sense strand
gacccacaauaaagauguc

SEQ ID NO: 248815 - RNA, 19 nt, Homo sapiens
  misc_RNA (1)...(19): siRNA sense strand
gaaggagcucaaggugcua

SEQ ID NO: 248816 - RNA, 19 nt, Homo sapiens
  misc_RNA (1)...(19): siRNA sense strand
acauggacuuagacaagga

SEQ ID NO: 248817 - RNA, 19 nt, Homo sapiens
  misc_RNA (1)...(19): siRNA sense strand
aacacuuccuccucucuga

SEQ ID NO: 248818 - RNA, 19 nt, Homo sapiens
  misc_RNA (1)...(19): siRNA sense strand
gcaagaagcuguccaaagg

SEQ ID NO: 248819 - RNA, 19 nt, Homo sapiens
  misc_RNA (1)...(19): siRNA sense strand
ggacuuagacaaggaauuu

SEQ ID NO: 248820 - RNA, 19 nt, Homo sapiens
  misc_RNA (1)...(19): siRNA sense strand
ggacauggacuuagacaag

SEQ ID NO: 248821 - RNA, 19 nt, Homo sapiens
  misc_RNA (1)...(19): siRNA sense strand
agaaagaccuggaugacau

SEQ ID NO: 248822 - RNA, 19 nt, Homo sapiens
  misc_RNA (1)...(19): siRNA sense strand
gcgcugagcucaugaucca

SEQ ID NO: 248823 - RNA, 19 nt, Homo sapiens
  misc_RNA (1)...(19): siRNA sense strand
gcuaacaaccgcuuugaga

SEQ ID NO: 248824 - RNA, 19 nt, Homo sapiens
  misc_RNA (1)...(19): siRNA sense strand
ccaaaggcaccaagaaaga

SEQ ID NO: 248825 - RNA, 19 nt, Homo sapiens
  misc_RNA (1)...(19): siRNA sense strand
gccaucgucuucuuugcua

SEQ ID NO: 248826 - RNA, 19 nt, Homo sapiens
  misc_RNA (1)...(19): siRNA sense strand
gcgccuguaucaugacuga

SEQ ID NO: 248827 - RNA, 19 nt, Homo sapiens
  misc_RNA (1)...(19): siRNA sense strand
gccucuggcucgaugguua

SEQ ID NO: 248828 - RNA, 19 nt, Homo sapiens
  misc_RNA (1)...(19): siRNA sense strand
caagcugacccacaauaaa

SEQ ID NO: 248829 - RNA, 19 nt, Homo sapiens
  misc_RNA (1)...(19): siRNA sense strand
ccaagaaagaccuggauga

SEQ ID NO: 248830 - RNA, 19 nt, Homo sapiens
  misc_RNA (1)...(19): siRNA sense strand
aaacaggcaucacccucaa

SEQ ID NO: 248831 - RNA, 19 nt, Homo sapiens
  misc_RNA (1)...(19): siRNA sense strand
gagguacuaugccuuugau

SEQ ID NO: 248832 - RNA, 19 nt, Homo sapiens
  misc_RNA (1)...(19): siRNA sense strand
gggaggugcugggcaagaa

SEQ ID NO: 248833 - RNA, 19 nt, Homo sapiens
  misc_RNA (1)...(19): siRNA sense strand
gguacuaugccuuugauga

SEQ ID NO: 248834 - RNA, 19 nt, Homo sapiens
  misc_RNA (1)...(19): siRNA sense strand
cgagagguacuaugccuuu

SEQ ID NO: 248835 - RNA, 19 nt, Homo sapiens
  misc_RNA (1)...(19): siRNA sense strand
ccaagcugacccacaauaa

SEQ ID NO: 248836 - RNA, 19 nt, Homo sapiens
  misc_RNA (1)...(19): siRNA sense strand
ccgccaagcugacccacaa

SEQ ID NO: 248837 - RNA, 19 nt, Homo sapiens
  misc_RNA (1)...(19): siRNA sense strand
uaacaaccgcuuugagaca

SEQ ID NO: 248838 - RNA, 19 nt, Homo sapiens
  misc_RNA (1)...(19): siRNA sense strand
uuaaacgggucuucaaggu

SEQ ID NO: 248839 - RNA, 19 nt, Homo sapiens
  misc_RNA (1)...(19): siRNA sense strand
guccaaaggcaccaagaaa

SEQ ID NO: 248840 - RNA, 19 nt, Homo sapiens
  misc_RNA (1)...(19): siRNA sense strand
gccaagcugacccacaaua

SEQ ID NO: 248841 - RNA, 19 nt, Homo sapiens
  misc_RNA (1)...(19): siRNA sense strand
gcugagcucaugauccaaa

SEQ ID NO: 248842 - RNA, 19 nt, Homo sapiens
  misc_RNA (1)...(19): siRNA sense strand
gagagguacuaugccuuug

SEQ ID NO: 248843 - RNA, 19 nt, Homo sapiens
  misc_RNA (1)...(19): siRNA sense strand
uaucugagcuucggugacu

SEQ ID NO: 248844 - RNA, 19 nt, Homo sapiens
  misc_RNA (1)...(19): siRNA sense strand
gcucccugguggacaauau

SEQ ID NO: 248845 - RNA, 19 nt, Homo sapiens
  misc_RNA (1)...(19): siRNA sense strand
guacuaugccuuugaugag

SEQ ID NO: 248846 - RNA, 19 nt, Homo sapiens
  misc_RNA (1)...(19): siRNA sense strand
acaauaaagaugucagaga

SEQ ID NO: 248847 - RNA, 19 nt, Homo sapiens
  misc_RNA (1)...(19): siRNA sense strand
ggaacacgacccuuaucga

SEQ ID NO: 248848 - RNA, 19 nt, Homo sapiens
  misc_RNA (1)...(19): siRNA sense strand
ucaaggugguagaggaaau

SEQ ID NO: 248849 - RNA, 19 nt, Homo sapiens
  misc_RNA (1)...(19): siRNA sense strand
gcagccaucgucuucuuug

SEQ ID NO: 248850 - RNA, 19 nt, Homo sapiens
  misc_RNA (1)...(19): siRNA sense strand
gaauuucuccaggacuuga

SEQ ID NO: 248851 - RNA, 19 nt, Homo sapiens
  misc_RNA (1)...(19): siRNA sense strand
gguggacaauauucagcaa

SEQ ID NO: 248852 - RNA, 19 nt, Homo sapiens
  misc_RNA (1)...(19): siRNA sense strand
gagcugccggagacaguuu

SEQ ID NO: 248853 - RNA, 19 nt, Homo sapiens
  misc_RNA (1)...(19): siRNA sense strand
gugcgguucuuccugaauc

SEQ ID NO: 248854 - RNA, 19 nt, Homo sapiens
  misc_RNA (1)...(19): siRNA sense strand
ccacaauaaagaugucaga

SEQ ID NO: 248855 - RNA, 19 nt, Homo sapiens
  misc_RNA (1)...(19): siRNA sense strand
gcacugcucuccggggaaa

SEQ ID NO: 248856 - RNA, 19 nt, Homo sapiens
  misc_RNA (1)...(19): siRNA sense strand
ggaccucguggagaaguuu

SEQ ID NO: 248857 - RNA, 19 nt, Homo sapiens
  misc_RNA (1)...(19): siRNA sense strand
ggcaagaagcuguccaaag

SEQ ID NO: 248858 - RNA, 19 nt, Homo sapiens
  misc_RNA (1)...(19): siRNA sense strand
uggacaauauucagcaaca

SEQ ID NO: 248859 - RNA, 19 nt, Homo sapiens
  misc_RNA (1)...(19): siRNA sense strand
acucacagauggaugacau

SEQ ID NO: 248860 - RNA, 19 nt, Homo sapiens
  misc_RNA (1)...(19): siRNA sense strand
aggaauuucuccaggacuu

SEQ ID NO: 248861 - RNA, 19 nt, Homo sapiens
  misc_RNA (1)...(19): siRNA sense strand
cuucugcgcugagcucaug

SEQ ID NO: 248862 - RNA, 19 nt, Homo sapiens
  misc_RNA (1)...(19): siRNA sense strand
caagaaagaccuggaugac

SEQ ID NO: 248863 - RNA, 19 nt, Homo sapiens
  misc_RNA (1)...(19): siRNA sense strand
ggcaggcacuacucaucga

SEQ ID NO: 248864 - RNA, 19 nt, Homo sapiens
  misc_RNA (1)...(19): siRNA sense strand
gaugucagagaccuguuug

SEQ ID NO: 248865 - RNA, 19 nt, Homo sapiens
  misc_RNA (1)...(19): siRNA sense strand
ggaauuucuccaggacuug

SEQ ID NO: 248866 - RNA, 19 nt, Homo sapiens
  misc_RNA (1)...(19): siRNA sense strand
uaucgacgaggacguguau

SEQ ID NO: 248867 - RNA, 19 nt, Homo sapiens
  misc_RNA (1)...(19): siRNA sense strand
aagcugacccacaauaaag

SEQ ID NO: 248868 - RNA, 19 nt, Homo sapiens
  misc_RNA (1)...(19): siRNA sense strand
ggacaauauucagcaacac

SEQ ID NO: 248869 - RNA, 19 nt, Homo sapiens
  misc_RNA (1)...(19): siRNA sense strand
caauauucagcaacacuuc

SEQ ID NO: 248870 - RNA, 19 nt, Homo sapiens
  misc_RNA (1)...(19): siRNA sense strand
uuguggaccucguggagaa

SEQ ID NO: 248871 - RNA, 19 nt, Homo sapiens
  misc_RNA (1)...(19): siRNA sense strand
caaggugguagaggaaaug

SEQ ID NO: 248872 - RNA, 19 nt, Homo sapiens
  misc_RNA (1)...(19): siRNA sense strand
gacccacaauaaagauguc

SEQ ID NO: 248873 - RNA, 19 nt, Homo sapiens
  misc_RNA (1)...(19): siRNA sense strand
gaaggagcucaaggugcua

SEQ ID NO: 248874 - RNA, 19 nt, Homo sapiens
  misc_RNA (1)...(19): siRNA sense strand
acauggacuuagacaagga

SEQ ID NO: 248875 - RNA, 19 nt, Homo sapiens
  misc_RNA (1)...(19): siRNA sense strand
aacacuuccuccucucuga

SEQ ID NO: 248876 - RNA, 19 nt, Homo sapiens
  misc_RNA (1)...(19): siRNA sense strand
gaagagggcuguggucaua

SEQ ID NO: 248877 - RNA, 19 nt, Homo sapiens
  misc_RNA (1)...(19): siRNA sense strand
ggcgagagcuccacggaaa

SEQ ID NO: 248878 - RNA, 19 nt, Homo sapiens
  misc_RNA (1)...(19): siRNA sense strand
ggaaagugaugaggaggaa

SEQ ID NO: 248879 - RNA, 19 nt, Homo sapiens
  misc_RNA (1)...(19): siRNA sense strand
ugagaaaccucgggccuuu

SEQ ID NO: 248880 - RNA, 19 nt, Homo sapiens
  misc_RNA (1)...(19): siRNA sense strand
gaaacggaagccagagaaa

SEQ ID NO: 248881 - RNA, 19 nt, Homo sapiens
  misc_RNA (1)...(19): siRNA sense strand
ggaaacggaagccagagaa

SEQ ID NO: 248882 - RNA, 19 nt, Homo sapiens
  misc_RNA (1)...(19): siRNA sense strand
gugacacuguggacaauga

SEQ ID NO: 248883 - RNA, 19 nt, Homo sapiens
  misc_RNA (1)...(19): siRNA sense strand
gcugcuguauuuaugagaa

SEQ ID NO: 248884 - RNA, 19 nt, Homo sapiens
  misc_RNA (1)...(19): siRNA sense strand
gugaugaggaggaagaaga

SEQ ID NO: 248885 - RNA, 19 nt, Homo sapiens
  misc_RNA (1)...(19): siRNA sense strand
ugagcgagaccgucacuga

SEQ ID NO: 248886 - RNA, 19 nt, Homo sapiens
  misc_RNA (1)...(19): siRNA sense strand
guacguggccaccgcaaag

SEQ ID NO: 248887 - RNA, 19 nt, Homo sapiens
  misc_RNA (1)...(19): siRNA sense strand
aaccggagccuuaccauca

SEQ ID NO: 248888 - RNA, 19 nt, Homo sapiens
  misc_RNA (1)...(19): siRNA sense strand
aaagugaugaggaggaaga

SEQ ID NO: 248889 - RNA, 19 nt, Homo sapiens
  misc_RNA (1)...(19): siRNA sense strand
aagguagaauggacaagug

SEQ ID NO: 248890 - RNA, 19 nt, Homo sapiens
  misc_RNA (1)...(19): siRNA sense strand
ucauccaaaugcugcugua

SEQ ID NO: 248891 - RNA, 19 nt, Homo sapiens
  misc_RNA (1)...(19): siRNA sense strand
cagggccaaugcagcacua

SEQ ID NO: 248892 - RNA, 19 nt, Homo sapiens
  misc_RNA (1)...(19): siRNA sense strand
guagaauggacaagugaca

SEQ ID NO: 248893 - RNA, 19 nt, Homo sapiens
  misc_RNA (1)...(19): siRNA sense strand
gagccuuaccaucaaacuu

SEQ ID NO: 248894 - RNA, 19 nt, Homo sapiens
  misc_RNA (1)...(19): siRNA sense strand
agagggcuguggucauaca

SEQ ID NO: 248895 - RNA, 19 nt, Homo sapiens
  misc_RNA (1)...(19): siRNA sense strand
ccggagccuuaccaucaaa

SEQ ID NO: 248896 - RNA, 19 nt, Homo sapiens
  misc_RNA (1)...(19): siRNA sense strand
ucacugagacaacgguuac

SEQ ID NO: 248897 - RNA, 19 nt, Homo sapiens
  misc_RNA (1)...(19): siRNA sense strand
cugcuguauuuaugagaaa

SEQ ID NO: 248898 - RNA, 19 nt, Homo sapiens
  misc_RNA (1)...(19): siRNA sense strand
gagaaaccucgggccuuug

SEQ ID NO: 248899 - RNA, 19 nt, Homo sapiens
  misc_RNA (1)...(19): siRNA sense strand
ugagcgagaccgucacuga

SEQ ID NO: 248900 - RNA, 19 nt, Homo sapiens
  misc_RNA (1)...(19): siRNA sense strand
ucacugagacaacgguuac

SEQ ID NO: 248901 - RNA, 19 nt, Homo sapiens
  misc_RNA (1)...(19): siRNA sense strand
guaaagagauuguggcuau

SEQ ID NO: 248902 - RNA, 19 nt, Homo sapiens
  misc_RNA (1)...(19): siRNA sense strand
uaagacaccucaagaaaga

SEQ ID NO: 248903 - RNA, 19 nt, Homo sapiens
  misc_RNA (1)...(19): siRNA sense strand
gguaagggcuuccagcaaa

SEQ ID NO: 248904 - RNA, 19 nt, Homo sapiens
  misc_RNA (1)...(19): siRNA sense strand
gaacagaucucaccccaaa

SEQ ID NO: 248905 - RNA, 19 nt, Homo sapiens
  misc_RNA (1)...(19): siRNA sense strand
gaggagaacugccaaguca

SEQ ID NO: 248906 - RNA, 19 nt, Homo sapiens
  misc_RNA (1)...(19): siRNA sense strand
gaagagaacaagcuuuaaa

SEQ ID NO: 248907 - RNA, 19 nt, Homo sapiens
  misc_RNA (1)...(19): siRNA sense strand
ggaaacgcaugcugaguga

SEQ ID NO: 248908 - RNA, 19 nt, Homo sapiens
  misc_RNA (1)...(19): siRNA sense strand
cgacuugccuccagaagaa

SEQ ID NO: 248909 - RNA, 19 nt, Homo sapiens
  misc_RNA (1)...(19): siRNA sense strand
gaacauccaugccuuuacu

SEQ ID NO: 248910 - RNA, 19 nt, Homo sapiens
  misc_RNA (1)...(19): siRNA sense strand
gaaccaaaguccugcagau

SEQ ID NO: 248911 - RNA, 19 nt, Homo sapiens
  misc_RNA (1)...(19): siRNA sense strand
aagaugcgcuugaauugua

SEQ ID NO: 248912 - RNA, 19 nt, Homo sapiens
  misc_RNA (1)...(19): siRNA sense strand
gaacugccaagucagauuu

SEQ ID NO: 248913 - RNA, 19 nt, Homo sapiens
  misc_RNA (1)...(19): siRNA sense strand
agacuuggcugcuuaccua

SEQ ID NO: 248914 - RNA, 19 nt, Homo sapiens
  misc_RNA (1)...(19): siRNA sense strand
gaaguuccaguguauagua

SEQ ID NO: 248915 - RNA, 19 nt, Homo sapiens
  misc_RNA (1)...(19): siRNA sense strand
gcagucauuuggagcgaua

SEQ ID NO: 248916 - RNA, 19 nt, Homo sapiens
  misc_RNA (1)...(19): siRNA sense strand
ccaaacauguuaaaguugu

SEQ ID NO: 248917 - RNA, 19 nt, Homo sapiens
  misc_RNA (1)...(19): siRNA sense strand
ccaaaguccugcagauguu

SEQ ID NO: 248918 - RNA, 19 nt, Homo sapiens
  misc_RNA (1)...(19): siRNA sense strand
gguaagacaccucaagaaa

SEQ ID NO: 248919 - RNA, 19 nt, Homo sapiens
  misc_RNA (1)...(19): siRNA sense strand
aagcaggcguuucacaaua

SEQ ID NO: 248920 - RNA, 19 nt, Homo sapiens
  misc_RNA (1)...(19): siRNA sense strand
aguaauagcuggugaucuu

SEQ ID NO: 248921 - RNA, 19 nt, Homo sapiens
  misc_RNA (1)...(19): siRNA sense strand
gaacauuugcacuuuguga

SEQ ID NO: 248922 - RNA, 19 nt, Homo sapiens
  misc_RNA (1)...(19): siRNA sense strand
cggcaagucuuugaucuuu

SEQ ID NO: 248923 - RNA, 19 nt, Homo sapiens
  misc_RNA (1)...(19): siRNA sense strand
gggagauugugaaauauau

SEQ ID NO: 248924 - RNA, 19 nt, Homo sapiens
  misc_RNA (1)...(19): siRNA sense strand
gaacuagugcagucauuug

SEQ ID NO: 248925 - RNA, 19 nt, Homo sapiens
  misc_RNA (1)...(19): siRNA sense strand
gauuuaccauggccucuuu

SEQ ID NO: 248926 - RNA, 19 nt, Homo sapiens
  misc_RNA (1)...(19): siRNA sense strand
ccacuuggaucauuaaggu

SEQ ID NO: 248927 - RNA, 19 nt, Homo sapiens
  misc_RNA (1)...(19): siRNA sense strand
uauguaagcucccucugaa

SEQ ID NO: 248928 - RNA, 19 nt, Homo sapiens
  misc_RNA (1)...(19): siRNA sense strand
aagaagagaacaagcuuua

SEQ ID NO: 248929 - RNA, 19 nt, Homo sapiens
  misc_RNA (1)...(19): siRNA sense strand
gcgcuugaauuguauagga

SEQ ID NO: 248930 - RNA, 19 nt, Homo sapiens
  misc_RNA (1)...(19): siRNA sense strand
ggaagcaggucucguacag

SEQ ID NO: 248931 - RNA, 19 nt, Homo sapiens
  misc_RNA (1)...(19): siRNA sense strand
gagaacauccaugccuuua

SEQ ID NO: 248932 - RNA, 19 nt, Homo sapiens
  misc_RNA (1)...(19): siRNA sense strand
ggaagugugcagucuguaa

SEQ ID NO: 248933 - RNA, 19 nt, Homo sapiens
  misc_RNA (1)...(19): siRNA sense strand
ucaggaacauuugcacuuu

SEQ ID NO: 248934 - RNA, 19 nt, Homo sapiens
  misc_RNA (1)...(19): siRNA sense strand
ugacagaucucaggaacau

SEQ ID NO: 248935 - RNA, 19 nt, Homo sapiens
  misc_RNA (1)...(19): siRNA sense strand
agaagcaaauccagagaaa

SEQ ID NO: 248936 - RNA, 19 nt, Homo sapiens
  misc_RNA (1)...(19): siRNA sense strand
gaggaagugugcagucugu

SEQ ID NO: 248937 - RNA, 19 nt, Homo sapiens
  misc_RNA (1)...(19): siRNA sense strand
gaucuauccaaacauguua

SEQ ID NO: 248938 - RNA, 19 nt, Homo sapiens
  misc_RNA (1)...(19): siRNA sense strand
gaagauggcguauguaagc

SEQ ID NO: 248939 - RNA, 19 nt, Homo sapiens
  misc_RNA (1)...(19): siRNA sense strand
gcaagucuuugaucuuucu

SEQ ID NO: 248940 - RNA, 19 nt, Homo sapiens
  misc_RNA (1)...(19): siRNA sense strand
gaagugugcagucuguaaa

SEQ ID NO: 248941 - RNA, 19 nt, Homo sapiens
  misc_RNA (1)...(19): siRNA sense strand
ugauggagauuucccaaga

SEQ ID NO: 248942 - RNA, 19 nt, Homo sapiens
  misc_RNA (1)...(19): siRNA sense strand
aagcaaauccagagaaauu

SEQ ID NO: 248943 - RNA, 19 nt, Homo sapiens
  misc_RNA (1)...(19): siRNA sense strand
gaagaagagaacaagcuuu

SEQ ID NO: 248944 - RNA, 19 nt, Homo sapiens
  misc_RNA (1)...(19): siRNA sense strand
gaaucaggccaacauggua

SEQ ID NO: 248945 - RNA, 19 nt, Homo sapiens
  misc_RNA (1)...(19): siRNA sense strand
gaaagccgucagaacuaua

SEQ ID NO: 248946 - RNA, 19 nt, Homo sapiens
  misc_RNA (1)...(19): siRNA sense strand
gcaagcaggcguuucacaa

SEQ ID NO: 248947 - RNA, 19 nt, Homo sapiens
  misc_RNA (1)...(19): siRNA sense strand
gauccugugucaaguggaa

SEQ ID NO: 248948 - RNA, 19 nt, Homo sapiens
  misc_RNA (1)...(19): siRNA sense strand
gagaagcugaggaacuuaa

SEQ ID NO: 248949 - RNA, 19 nt, Homo sapiens
  misc_RNA (1)...(19): siRNA sense strand
ggacaguuguacagcuaga

SEQ ID NO: 248950 - RNA, 19 nt, Homo sapiens
  misc_RNA (1)...(19): siRNA sense strand
ggagaacugccaagucaga

SEQ ID NO: 248951 - RNA, 19 nt, Homo sapiens
  misc_RNA (1)...(19): siRNA sense strand
ggagaacauccaugccuuu

SEQ ID NO: 248952 - RNA, 19 nt, Homo sapiens
  misc_RNA (1)...(19): siRNA sense strand
gaugaugguuauauugaag

SEQ ID NO: 248953 - RNA, 19 nt, Homo sapiens
  misc_RNA (1)...(19): siRNA sense strand
guuccaguguauaguauuu

SEQ ID NO: 248954 - RNA, 19 nt, Homo sapiens
  misc_RNA (1)...(19): siRNA sense strand
cugaugaaccuguuucuaa

SEQ ID NO: 248955 - RNA, 19 nt, Homo sapiens
  misc_RNA (1)...(19): siRNA sense strand
acaagacuaugaaggauuc

SEQ ID NO: 248956 - RNA, 19 nt, Homo sapiens
  misc_RNA (1)...(19): siRNA sense strand
agagaucuauccaaacaug

SEQ ID NO: 248957 - RNA, 19 nt, Homo sapiens
  misc_RNA (1)...(19): siRNA sense strand
gaaacccuugcuuguauuu

SEQ ID NO: 248958 - RNA, 19 nt, Homo sapiens
  misc_RNA (1)...(19): siRNA sense strand
acgaagcgcuggaggagaa

SEQ ID NO: 248959 - RNA, 19 nt, Homo sapiens
  misc_RNA (1)...(19): siRNA sense strand
guacauagaccgccuacag

SEQ ID NO: 248960 - RNA, 19 nt, Homo sapiens
  misc_RNA (1)...(19): siRNA sense strand
uaaaguuguuugugaugga

SEQ ID NO: 248961 - RNA, 19 nt, Homo sapiens
  misc_RNA (1)...(19): siRNA sense strand
aaaccaacauuucgagaag

SEQ ID NO: 248962 - RNA, 19 nt, Homo sapiens
  misc_RNA (1)...(19): siRNA sense strand
ggauauggcagacagugaa

SEQ ID NO: 248963 - RNA, 19 nt, Homo sapiens
  misc_RNA (1)...(19): siRNA sense strand
uaugaaggauuccacuaug

SEQ ID NO: 248964 - RNA, 19 nt, Homo sapiens
  misc_RNA (1)...(19): siRNA sense strand
cagaagagcaagaggagaa

SEQ ID NO: 248965 - RNA, 19 nt, Homo sapiens
  misc_RNA (1)...(19): siRNA sense strand
gaaccucagcgucaugaug

SEQ ID NO: 248966 - RNA, 19 nt, Homo sapiens
  misc_RNA (1)...(19): siRNA sense strand
caugaaacccuugcuugua

SEQ ID NO: 248967 - RNA, 19 nt, Homo sapiens
  misc_RNA (1)...(19): siRNA sense strand
gcaaauccagagaaauuca

SEQ ID NO: 248968 - RNA, 19 nt, Homo sapiens
  misc_RNA (1)...(19): siRNA sense strand
ggaacuagugcagucauuu

SEQ ID NO: 248969 - RNA, 19 nt, Homo sapiens
  misc_RNA (1)...(19): siRNA sense strand
gcaggucucguacaggaaa

SEQ ID NO: 248970 - RNA, 19 nt, Homo sapiens
  misc_RNA (1)...(19): siRNA sense strand
guaagacaccucaagaaag

SEQ ID NO: 248971 - RNA, 19 nt, Homo sapiens
  misc_RNA (1)...(19): siRNA sense strand
gaucuuaugaagcuaauag

SEQ ID NO: 248972 - RNA, 19 nt, Homo sapiens
  misc_RNA (1)...(19): siRNA sense strand
acagaucucaggaacauuu

SEQ ID NO: 248973 - RNA, 19 nt, Homo sapiens
  misc_RNA (1)...(19): siRNA sense strand
gggaacuagugcagucauu

SEQ ID NO: 248974 - RNA, 19 nt, Homo sapiens
  misc_RNA (1)...(19): siRNA sense strand
ggagugagaaugccgugaa

SEQ ID NO: 248975 - RNA, 19 nt, Homo sapiens
  misc_RNA (1)...(19): siRNA sense strand
gagaagcaaauccagagaa

SEQ ID NO: 248976 - RNA, 19 nt, Homo sapiens
  misc_RNA (1)...(19): siRNA sense strand
caaaagaugcgcuugaauu

SEQ ID NO: 248977 - RNA, 19 nt, Homo sapiens
  misc_RNA (1)...(19): siRNA sense strand
caaaugguccagccaagga

SEQ ID NO: 248978 - RNA, 19 nt, Homo sapiens
  misc_RNA (1)...(19): siRNA sense strand
uagaaagccgucagaacua

SEQ ID NO: 248979 - RNA, 19 nt, Homo sapiens
  misc_RNA (1)...(19): siRNA sense strand
uucagaagaucaugcaauu

SEQ ID NO: 248980 - RNA, 19 nt, Homo sapiens
  misc_RNA (1)...(19): siRNA sense strand
ggaaagaaaccccgacuug

SEQ ID NO: 248981 - RNA, 19 nt, Homo sapiens
  misc_RNA (1)...(19): siRNA sense strand
uuucuaagauccuguguca

SEQ ID NO: 248982 - RNA, 19 nt, Homo sapiens
  misc_RNA (1)...(19): siRNA sense strand
ugaaacccuugcuuguauu

SEQ ID NO: 248983 - RNA, 19 nt, Homo sapiens
  misc_RNA (1)...(19): siRNA sense strand
agaaagccgucagaacuau

SEQ ID NO: 248984 - RNA, 19 nt, Homo sapiens
  misc_RNA (1)...(19): siRNA sense strand
ugagaaagacggacuccaa

SEQ ID NO: 248985 - RNA, 19 nt, Homo sapiens
  misc_RNA (1)...(19): siRNA sense strand
gauggagauuucccaagau

SEQ ID NO: 248986 - RNA, 19 nt, Homo sapiens
  misc_RNA (1)...(19): siRNA sense strand
augaaacccuugcuuguau

SEQ ID NO: 248987 - RNA, 19 nt, Homo sapiens
  misc_RNA (1)...(19): siRNA sense strand
ggaucucccugaggaauca

SEQ ID NO: 248988 - RNA, 19 nt, Homo sapiens
  misc_RNA (1)...(19): siRNA sense strand
cuacuucagccuuggauuu

SEQ ID NO: 248989 - RNA, 19 nt, Homo sapiens
  misc_RNA (1)...(19): siRNA sense strand
ggaagaagaagagaacaag

SEQ ID NO: 248990 - RNA, 19 nt, Homo sapiens
  misc_RNA (1)...(19): siRNA sense strand
gguggugcuuccuagauga

SEQ ID NO: 248991 - RNA, 19 nt, Homo sapiens
  misc_RNA (1)...(19): siRNA sense strand
ggaaucaggccaacauggu

SEQ ID NO: 248992 - RNA, 19 nt, Homo sapiens
  misc_RNA (1)...(19): siRNA sense strand
guauguaagcucccucuga

SEQ ID NO: 248993 - RNA, 19 nt, Homo sapiens
  misc_RNA (1)...(19): siRNA sense strand
ggaagaugggacaguugua

SEQ ID NO: 248994 - RNA, 19 nt, Homo sapiens
  misc_RNA (1)...(19): siRNA sense strand
ugaugaaccuguuucuaag

SEQ ID NO: 248995 - RNA, 19 nt, Homo sapiens
  misc_RNA (1)...(19): siRNA sense strand
guaccaaaucugcgaauuc

SEQ ID NO: 248996 - RNA, 19 nt, Homo sapiens
  misc_RNA (1)...(19): siRNA sense strand
gagaaacuccgagaagcuu

SEQ ID NO: 248997 - RNA, 19 nt, Homo sapiens
  misc_RNA (1)...(19): siRNA sense strand
ucagaacuauaaggucauu

SEQ ID NO: 248998 - RNA, 19 nt, Homo sapiens
  misc_RNA (1)...(19): siRNA sense strand
aggagaagcugaggaacuu

SEQ ID NO: 248999 - RNA, 19 nt, Homo sapiens
  misc_RNA (1)...(19): siRNA sense strand
guaauagcuggugaucuua

SEQ ID NO: 249000 - RNA, 19 nt, Homo sapiens
  misc_RNA (1)...(19): siRNA sense strand
caggaacauuugcacuuug

SEQ ID NO: 249001 - RNA, 19 nt, Homo sapiens
  misc_RNA (1)...(19): siRNA sense strand
ggaaguagauagugaaguu

SEQ ID NO: 249002 - RNA, 19 nt, Homo sapiens
  misc_RNA (1)...(19): siRNA sense strand
aaacaguccugaugaguua

SEQ ID NO: 249003 - RNA, 19 nt, Homo sapiens
  misc_RNA (1)...(19): siRNA sense strand
gaucacaccucgauugcua

SEQ ID NO: 249004 - RNA, 19 nt, Homo sapiens
  misc_RNA (1)...(19): siRNA sense strand
ggaaugaaccugucucuga

SEQ ID NO: 249005 - RNA, 19 nt, Homo sapiens
  misc_RNA (1)...(19): siRNA sense strand
aaacagacguggcagagua

SEQ ID NO: 249006 - RNA, 19 nt, Homo sapiens
  misc_RNA (1)...(19): siRNA sense strand
gaaugaaccugucucugaa

SEQ ID NO: 249007 - RNA, 19 nt, Homo sapiens
  misc_RNA (1)...(19): siRNA sense strand
gaaguugaauuuccacgaa

SEQ ID NO: 249008 - RNA, 19 nt, Homo sapiens
  misc_RNA (1)...(19): siRNA sense strand
aagcggaacugaagacaua

SEQ ID NO: 249009 - RNA, 19 nt, Homo sapiens
  misc_RNA (1)...(19): siRNA sense strand
gaucucaaaucaccuaaug

SEQ ID NO: 249010 - RNA, 19 nt, Homo sapiens
  misc_RNA (1)...(19): siRNA sense strand
agacggauaucaagcauuu

SEQ ID NO: 249011 - RNA, 19 nt, Homo sapiens
  misc_RNA (1)...(19): siRNA sense strand
ggaauugagugccaucaug

SEQ ID NO: 249012 - RNA, 19 nt, Homo sapiens
  misc_RNA (1)...(19): siRNA sense strand
ggaaaggagugccucacaa

SEQ ID NO: 249013 - RNA, 19 nt, Homo sapiens
  misc_RNA (1)...(19): siRNA sense strand
gaagaccgcuuggcagaga

SEQ ID NO: 249014 - RNA, 19 nt, Homo sapiens
  misc_RNA (1)...(19): siRNA sense strand
gaagaucacaccucgauug

SEQ ID NO: 249015 - RNA, 19 nt, Homo sapiens
  misc_RNA (1)...(19): siRNA sense strand
gaaaggagugccucacaaa

SEQ ID NO: 249016 - RNA, 19 nt, Homo sapiens
  misc_RNA (1)...(19): siRNA sense strand
ggcagacacucaugcauuu

SEQ ID NO: 249017 - RNA, 19 nt, Homo sapiens
  misc_RNA (1)...(19): siRNA sense strand
gaacugaagacauaaagau

SEQ ID NO: 249018 - RNA, 19 nt, Homo sapiens
  misc_RNA (1)...(19): siRNA sense strand
gcaaguggaaugaauuauu

SEQ ID NO: 249019 - RNA, 19 nt, Homo sapiens
  misc_RNA (1)...(19): siRNA sense strand
gaacagaaugagacggaua

SEQ ID NO: 249020 - RNA, 19 nt, Homo sapiens
  misc_RNA (1)...(19): siRNA sense strand
caggagagaucccuuacaa

SEQ ID NO: 249021 - RNA, 19 nt, Homo sapiens
  misc_RNA (1)...(19): siRNA sense strand
ucaauggacuacaagauga

SEQ ID NO: 249022 - RNA, 19 nt, Homo sapiens
  misc_RNA (1)...(19): siRNA sense strand
ggagagaucccuuacaaag

SEQ ID NO: 249023 - RNA, 19 nt, Homo sapiens
  misc_RNA (1)...(19): siRNA sense strand
acaagaaacuuacuucaag

SEQ ID NO: 249024 - RNA, 19 nt, Homo sapiens
  misc_RNA (1)...(19): siRNA sense strand
ggaauacugugcccaugga

SEQ ID NO: 249025 - RNA, 19 nt, Homo sapiens
  misc_RNA (1)...(19): siRNA sense strand
gagccgauaucgaagcaaa

SEQ ID NO: 249026 - RNA, 19 nt, Homo sapiens
  misc_RNA (1)...(19): siRNA sense strand
aaacaaggccucugcagaa

SEQ ID NO: 249027 - RNA, 19 nt, Homo sapiens
  misc_RNA (1)...(19): siRNA sense strand
ccagucauauucaaccuuu

SEQ ID NO: 249028 - RNA, 19 nt, Homo sapiens
  misc_RNA (1)...(19): siRNA sense strand
cgccagagauucccauuga

SEQ ID NO: 249029 - RNA, 19 nt, Homo sapiens
  misc_RNA (1)...(19): siRNA sense strand
ggauauucgugaacacuau

SEQ ID NO: 249030 - RNA, 19 nt, Homo sapiens
  misc_RNA (1)...(19): siRNA sense strand
gaaggcauauuccacugau

SEQ ID NO: 249031 - RNA, 19 nt, Homo sapiens
  misc_RNA (1)...(19): siRNA sense strand
gggagaaggagcucauuaa

SEQ ID NO: 249032 - RNA, 19 nt, Homo sapiens
  misc_RNA (1)...(19): siRNA sense strand
agagaucccuuacaaagau

SEQ ID NO: 249033 - RNA, 19 nt, Homo sapiens
  misc_RNA (1)...(19): siRNA sense strand
gaagcacccuaacaucauc

SEQ ID NO: 249034 - RNA, 19 nt, Homo sapiens
  misc_RNA (1)...(19): siRNA sense strand
guagauucuucagccauua

SEQ ID NO: 249035 - RNA, 19 nt, Homo sapiens
  misc_RNA (1)...(19): siRNA sense strand
guaccaagaugucauuugc

SEQ ID NO: 249036 - RNA, 19 nt, Homo sapiens
  misc_RNA (1)...(19): siRNA sense strand
gaaagugagagaacagaau

SEQ ID NO: 249037 - RNA, 19 nt, Homo sapiens
  misc_RNA (1)...(19): siRNA sense strand
cggaagagguggccaucaa

SEQ ID NO: 249038 - RNA, 19 nt, Homo sapiens
  misc_RNA (1)...(19): siRNA sense strand
ccaagucaccagcacauaa

SEQ ID NO: 249039 - RNA, 19 nt, Homo sapiens
  misc_RNA (1)...(19): siRNA sense strand
ccaauacccuucucuucau

SEQ ID NO: 249040 - RNA, 19 nt, Homo sapiens
  misc_RNA (1)...(19): siRNA sense strand
ugaaggaacuuguauacac

SEQ ID NO: 249041 - RNA, 19 nt, Homo sapiens
  misc_RNA (1)...(19): siRNA sense strand
gagagaucccuuacaaaga

SEQ ID NO: 249042 - RNA, 19 nt, Homo sapiens
  misc_RNA (1)...(19): siRNA sense strand
gcccugaccuuuccaaguc

SEQ ID NO: 249043 - RNA, 19 nt, Homo sapiens
  misc_RNA (1)...(19): siRNA sense strand
gaagagguggccaucaaga

SEQ ID NO: 249044 - RNA, 19 nt, Homo sapiens
  misc_RNA (1)...(19): siRNA sense strand
ggaggaacguggcuaugag

SEQ ID NO: 249045 - RNA, 19 nt, Homo sapiens
  misc_RNA (1)...(19): siRNA sense strand
cuaaggaacucagugacaa

SEQ ID NO: 249046 - RNA, 19 nt, Homo sapiens
  misc_RNA (1)...(19): siRNA sense strand
caaacaguccugaugaguu

SEQ ID NO: 249047 - RNA, 19 nt, Homo sapiens
  misc_RNA (1)...(19): siRNA sense strand
gaugaagaacugauucgaa

SEQ ID NO: 249048 - RNA, 19 nt, Homo sapiens
  misc_RNA (1)...(19): siRNA sense strand
ggaaguugaagcacccuaa

SEQ ID NO: 249049 - RNA, 19 nt, Homo sapiens
  misc_RNA (1)...(19): siRNA sense strand
ccacaguuaggaccaauaa

SEQ ID NO: 249050 - RNA, 19 nt, Homo sapiens
  misc_RNA (1)...(19): siRNA sense strand
gggaggagcccugaccuuu

SEQ ID NO: 249051 - RNA, 19 nt, Homo sapiens
  misc_RNA (1)...(19): siRNA sense strand
acucaugcauuuagacauu

SEQ ID NO: 249052 - RNA, 19 nt, Homo sapiens
  misc_RNA (1)...(19): siRNA sense strand
ugacaggagagaucccuua

SEQ ID NO: 249053 - RNA, 19 nt, Homo sapiens
  misc_RNA (1)...(19): siRNA sense strand
cugaugaguuagcugauaa

SEQ ID NO: 249054 - RNA, 19 nt, Homo sapiens
  misc_RNA (1)...(19): siRNA sense strand
gaauuucucugugucugau

SEQ ID NO: 249055 - RNA, 19 nt, Homo sapiens
  misc_RNA (1)...(19): siRNA sense strand
ggaauugcaaguggaauga

SEQ ID NO: 249056 - RNA, 19 nt, Homo sapiens
  misc_RNA (1)...(19): siRNA sense strand
cggaugggcucucugacaa

SEQ ID NO: 249057 - RNA, 19 nt, Homo sapiens
  misc_RNA (1)...(19): siRNA sense strand
gaauuuccacgaagacaga

SEQ ID NO: 249058 - RNA, 19 nt, Homo sapiens
  misc_RNA (1)...(19): siRNA sense strand
gcagaggcagccauaguga

SEQ ID NO: 249059 - RNA, 19 nt, Homo sapiens
  misc_RNA (1)...(19): siRNA sense strand
gcuuaaggccuguauggaa

SEQ ID NO: 249060 - RNA, 19 nt, Homo sapiens
  misc_RNA (1)...(19): siRNA sense strand
guauacaccgguuagauga

SEQ ID NO: 249061 - RNA, 19 nt, Homo sapiens
  misc_RNA (1)...(19): siRNA sense strand
gacauugccucugcagaug

SEQ ID NO: 249062 - RNA, 19 nt, Homo sapiens
  misc_RNA (1)...(19): siRNA sense strand
gcagacacucaugcauuua

SEQ ID NO: 249063 - RNA, 19 nt, Homo sapiens
  misc_RNA (1)...(19): siRNA sense strand
ccacuugcccugauggauu

SEQ ID NO: 249064 - RNA, 19 nt, Homo sapiens
  misc_RNA (1)...(19): siRNA sense strand
guagacugguccacaggaa

SEQ ID NO: 249065 - RNA, 19 nt, Homo sapiens
  misc_RNA (1)...(19): siRNA sense strand
aggcauauuccacugauua

SEQ ID NO: 249066 - RNA, 19 nt, Homo sapiens
  misc_RNA (1)...(19): siRNA sense strand
caccaucccagacucaaua

SEQ ID NO: 249067 - RNA, 19 nt, Homo sapiens
  misc_RNA (1)...(19): siRNA sense strand
gacugugacucuucagaug

SEQ ID NO: 249068 - RNA, 19 nt, Homo sapiens
  misc_RNA (1)...(19): siRNA sense strand
ccugaugaguuagcugaua

SEQ ID NO: 249069 - RNA, 19 nt, Homo sapiens
  misc_RNA (1)...(19): siRNA sense strand
gagaugacuccucagaaga

SEQ ID NO: 249070 - RNA, 19 nt, Homo sapiens
  misc_RNA (1)...(19): siRNA sense strand
gcagaagaguggagaugac

SEQ ID NO: 249071 - RNA, 19 nt, Homo sapiens
  misc_RNA (1)...(19): siRNA sense strand
ucaagaaagugagagaaca

SEQ ID NO: 249072 - RNA, 19 nt, Homo sapiens
  misc_RNA (1)...(19): siRNA sense strand
gaccaaacggccagacuug

SEQ ID NO: 249073 - RNA, 19 nt, Homo sapiens
  misc_RNA (1)...(19): siRNA sense strand
ccaaugccauggagaaacu

SEQ ID NO: 249074 - RNA, 19 nt, Homo sapiens
  misc_RNA (1)...(19): siRNA sense strand
gcuaagggaacacgaugaa

SEQ ID NO: 249075 - RNA, 19 nt, Homo sapiens
  misc_RNA (1)...(19): siRNA sense strand
ggccagacuuguugagauc

SEQ ID NO: 249076 - RNA, 19 nt, Homo sapiens
  misc_RNA (1)...(19): siRNA sense strand
ggagaaggagcucauuaag

SEQ ID NO: 249077 - RNA, 19 nt, Homo sapiens
  misc_RNA (1)...(19): siRNA sense strand
ccgguuagaugaagaacug

SEQ ID NO: 249078 - RNA, 19 nt, Homo sapiens
  misc_RNA (1)...(19): siRNA sense strand
ccacacagaugcgguaaaa

SEQ ID NO: 249079 - RNA, 19 nt, Homo sapiens
  misc_RNA (1)...(19): siRNA sense strand
agaaugagacggauaucaa

SEQ ID NO: 249080 - RNA, 19 nt, Homo sapiens
  misc_RNA (1)...(19): siRNA sense strand
gagcacaagcggaacugaa

SEQ ID NO: 249081 - RNA, 19 nt, Homo sapiens
  misc_RNA (1)...(19): siRNA sense strand
caaacggccagacuuguug

SEQ ID NO: 249082 - RNA, 19 nt, Homo sapiens
  misc_RNA (1)...(19): siRNA sense strand
ccaaacggccagacuuguu

SEQ ID NO: 249083 - RNA, 19 nt, Homo sapiens
  misc_RNA (1)...(19): siRNA sense strand
guacucaggccccauguua

SEQ ID NO: 249084 - RNA, 19 nt, Homo sapiens
  misc_RNA (1)...(19): siRNA sense strand
gcacaagcggaacugaaga

SEQ ID NO: 249085 - RNA, 19 nt, Homo sapiens
  misc_RNA (1)...(19): siRNA sense strand
agaacaguauggguccuua

SEQ ID NO: 249086 - RNA, 19 nt, Homo sapiens
  misc_RNA (1)...(19): siRNA sense strand
gcacggacaggacauagca

SEQ ID NO: 249087 - RNA, 19 nt, Homo sapiens
  misc_RNA (1)...(19): siRNA sense strand
gaauggagagaagaaguga

SEQ ID NO: 249088 - RNA, 19 nt, Homo sapiens
  misc_RNA (1)...(19): siRNA sense strand
ucucaaaucaccuaauguu

SEQ ID NO: 249089 - RNA, 19 nt, Homo sapiens
  misc_RNA (1)...(19): siRNA sense strand
aggacuauuuggaugcuua

SEQ ID NO: 249090 - RNA, 19 nt, Homo sapiens
  misc_RNA (1)...(19): siRNA sense strand
gaagacauaaagauucagu

SEQ ID NO: 249091 - RNA, 19 nt, Homo sapiens
  misc_RNA (1)...(19): siRNA sense strand
cuuaaggccuguauggaau

SEQ ID NO: 249092 - RNA, 19 nt, Homo sapiens
  misc_RNA (1)...(19): siRNA sense strand
ggacugugacucuucagau

SEQ ID NO: 249093 - RNA, 19 nt, Homo sapiens
  misc_RNA (1)...(19): siRNA sense strand
gagauucccauugacauau

SEQ ID NO: 249094 - RNA, 19 nt, Homo sapiens
  misc_RNA (1)...(19): siRNA sense strand
gcagcugccagucauauuc

SEQ ID NO: 249095 - RNA, 19 nt, Homo sapiens
  misc_RNA (1)...(19): siRNA sense strand
ccagggaccaguuugagaa

SEQ ID NO: 249096 - RNA, 19 nt, Homo sapiens
  misc_RNA (1)...(19): siRNA sense strand
acauaauccucucuuggaa

SEQ ID NO: 249097 - RNA, 19 nt, Homo sapiens
  misc_RNA (1)...(19): siRNA sense strand
ggaggagcccugaccuuuc

SEQ ID NO: 249098 - RNA, 19 nt, Homo sapiens
  misc_RNA (1)...(19): siRNA sense strand
cauugccucugcagaugua

SEQ ID NO: 249099 - RNA, 19 nt, Homo sapiens
  misc_RNA (1)...(19): siRNA sense strand
acaccucgauugcuaguag

SEQ ID NO: 249100 - RNA, 19 nt, Homo sapiens
  misc_RNA (1)...(19): siRNA sense strand
uaagggaacacgaugaauc

SEQ ID NO: 249101 - RNA, 19 nt, Homo sapiens
  misc_RNA (1)...(19): siRNA sense strand
gagauugucuguacugaua

SEQ ID NO: 249102 - RNA, 19 nt, Homo sapiens
  misc_RNA (1)...(19): siRNA sense strand
gaugugaccugcucucaaa

SEQ ID NO: 249103 - RNA, 19 nt, Homo sapiens
  misc_RNA (1)...(19): siRNA sense strand
ccacggagaugcugaggaa

SEQ ID NO: 249104 - RNA, 19 nt, Homo sapiens
  misc_RNA (1)...(19): siRNA sense strand
cagcagcguuggcuuguuu

SEQ ID NO: 249105 - RNA, 19 nt, Homo sapiens
  misc_RNA (1)...(19): siRNA sense strand
uauacgaacuccuggauga

SEQ ID NO: 249106 - RNA, 19 nt, Homo sapiens
  misc_RNA (1)...(19): siRNA sense strand
caaggaggcucucaacucu

SEQ ID NO: 249107 - RNA, 19 nt, Homo sapiens
  misc_RNA (1)...(19): siRNA sense strand
gcaauguggcucugguaua

SEQ ID NO: 249108 - RNA, 19 nt, Homo sapiens
  misc_RNA (1)...(19): siRNA sense strand
gguaccaacucuccgauga

SEQ ID NO: 249109 - RNA, 19 nt, Homo sapiens
  misc_RNA (1)...(19): siRNA sense strand
cucaagagcuuccuuccua

SEQ ID NO: 249110 - RNA, 19 nt, Homo sapiens
  misc_RNA (1)...(19): siRNA sense strand
gcuggacuauggcuaugua

SEQ ID NO: 249111 - RNA, 19 nt, Homo sapiens
  misc_RNA (1)...(19): siRNA sense strand
guacugauagcaucuaaug

SEQ ID NO: 249112 - RNA, 19 nt, Homo sapiens
  misc_RNA (1)...(19): siRNA sense strand
cggagaugcugaggaauuu

SEQ ID NO: 249113 - RNA, 19 nt, Homo sapiens
  misc_RNA (1)...(19): siRNA sense strand
gcaaggaggcucucaacuc

SEQ ID NO: 249114 - RNA, 19 nt, Homo sapiens
  misc_RNA (1)...(19): siRNA sense strand
ggagagauucggcucaaga

SEQ ID NO: 249115 - RNA, 19 nt, Homo sapiens
  misc_RNA (1)...(19): siRNA sense strand
cagcgacgccuaugucauu

SEQ ID NO: 249116 - RNA, 19 nt, Homo sapiens
  misc_RNA (1)...(19): siRNA sense strand
caauguggcucugguauac

SEQ ID NO: 249117 - RNA, 19 nt, Homo sapiens
  misc_RNA (1)...(19): siRNA sense strand
uaucuaaaguugcgaugug

SEQ ID NO: 249118 - RNA, 19 nt, Homo sapiens
  misc_RNA (1)...(19): siRNA sense strand
gggacccgcucaucuacaa

SEQ ID NO: 249119 - RNA, 19 nt, Homo sapiens
  misc_RNA (1)...(19): siRNA sense strand
gagagauugucuguacuga

SEQ ID NO: 249120 - RNA, 19 nt, Homo sapiens
  misc_RNA (1)...(19): siRNA sense strand
uagaacugcucuccagguu

SEQ ID NO: 249121 - RNA, 19 nt, Homo sapiens
  misc_RNA (1)...(19): siRNA sense strand
uggaugaagugcuggacua

SEQ ID NO: 249122 - RNA, 19 nt, Homo sapiens
  misc_RNA (1)...(19): siRNA sense strand
ccauggccgucauuucauu

SEQ ID NO: 249123 - RNA, 19 nt, Homo sapiens
  misc_RNA (1)...(19): siRNA sense strand
acacagcggccucuauuug

SEQ ID NO: 249124 - RNA, 19 nt, Homo sapiens
  misc_RNA (1)...(19): siRNA sense strand
ucucaacucucaggccuuu

SEQ ID NO: 249125 - RNA, 19 nt, Homo sapiens
  misc_RNA (1)...(19): siRNA sense strand
gcucugagaugcgcauugg

SEQ ID NO: 249126 - RNA, 19 nt, Homo sapiens
  misc_RNA (1)...(19): siRNA sense strand
gagccaagcccucaauguc

SEQ ID NO: 249127 - RNA, 19 nt, Homo sapiens
  misc_RNA (1)...(19): siRNA sense strand
gcauuggcuugacggaaga

SEQ ID NO: 249128 - RNA, 19 nt, Homo sapiens
  misc_RNA (1)...(19): siRNA sense strand
gacuauggcuauguacaga

SEQ ID NO: 249129 - RNA, 19 nt, Homo sapiens
  misc_RNA (1)...(19): siRNA sense strand
gucgagagauugucuguac

SEQ ID NO: 249130 - RNA, 19 nt, Homo sapiens
  misc_RNA (1)...(19): siRNA sense strand
caccauggccgucauuuca

SEQ ID NO: 249131 - RNA, 19 nt, Homo sapiens
  misc_RNA (1)...(19): siRNA sense strand
agacacagcggccucuauu

SEQ ID NO: 249132 - RNA, 19 nt, Homo sapiens
  misc_RNA (1)...(19): siRNA sense strand
ccacccuucugggcgauua

SEQ ID NO: 249133 - RNA, 19 nt, Homo sapiens
  misc_RNA (1)...(19): siRNA sense strand
cugugaaucuggacgaauu

SEQ ID NO: 249134 - RNA, 19 nt, Homo sapiens
  misc_RNA (1)...(19): siRNA sense strand
gaccaucucccgcaaugug

SEQ ID NO: 249135 - RNA, 19 nt, Homo sapiens
  misc_RNA (1)...(19): siRNA sense strand
gagaugcgcauuggcuuga

SEQ ID NO: 249136 - RNA, 19 nt, Homo sapiens
  misc_RNA (1)...(19): siRNA sense strand
gaauccgggucgaugaagu

SEQ ID NO: 249137 - RNA, 19 nt, Homo sapiens
  misc_RNA (1)...(19): siRNA sense strand
gcucaucuacaaagacuuc

SEQ ID NO: 249138 - RNA, 19 nt, Homo sapiens
  misc_RNA (1)...(19): siRNA sense strand
ggucacaacuucagaaaac

SEQ ID NO: 249139 - RNA, 19 nt, Homo sapiens
  misc_RNA (1)...(19): siRNA sense strand
uggauguggucgagagauu

SEQ ID NO: 249140 - RNA, 19 nt, Homo sapiens
  misc_RNA (1)...(19): siRNA sense strand
gagaugcugaggaauuuca

SEQ ID NO: 249141 - RNA, 19 nt, Homo sapiens
  misc_RNA (1)...(19): siRNA sense strand
ucauuucauucacaucaga

SEQ ID NO: 249142 - RNA, 19 nt, Homo sapiens
  misc_RNA (1)...(19): siRNA sense strand
aggaggcucucaacucuca

SEQ ID NO: 249143 - RNA, 19 nt, Homo sapiens
  misc_RNA (1)...(19): siRNA sense strand
ggacuauggcuauguacag

SEQ ID NO: 249144 - RNA, 19 nt, Homo sapiens
  misc_RNA (1)...(19): siRNA sense strand
ggauguggccgagcucuuc

SEQ ID NO: 249145 - RNA, 19 nt, Homo sapiens
  misc_RNA (1)...(19): siRNA sense strand
ccacagcgacgccuauguc

SEQ ID NO: 249146 - RNA, 19 nt, Homo sapiens
  misc_RNA (1)...(19): siRNA sense strand
ucccaauucuucauucugu

SEQ ID NO: 249147 - RNA, 19 nt, Homo sapiens
  misc_RNA (1)...(19): siRNA sense strand
gacacagcggccucuauuu

SEQ ID NO: 249148 - RNA, 19 nt, Homo sapiens
  misc_RNA (1)...(19): siRNA sense strand
gaccagagccaaaagaaug

SEQ ID NO: 249149 - RNA, 19 nt, Homo sapiens
  misc_RNA (1)...(19): siRNA sense strand
ggaugugcagggagagauu

SEQ ID NO: 249150 - RNA, 19 nt, Homo sapiens
  misc_RNA (1)...(19): siRNA sense strand
ggucgaugaagucucguuu

SEQ ID NO: 249151 - RNA, 19 nt, Homo sapiens
  misc_RNA (1)...(19): siRNA sense strand
uggcuugacggaagaguuu

SEQ ID NO: 249152 - RNA, 19 nt, Homo sapiens
  misc_RNA (1)...(19): siRNA sense strand
augaagugcuggacuaugg

SEQ ID NO: 249153 - RNA, 19 nt, Homo sapiens
  misc_RNA (1)...(19): siRNA sense strand
gaaucuggacgaauuugag

SEQ ID NO: 249154 - RNA, 19 nt, Homo sapiens
  misc_RNA (1)...(19): siRNA sense strand
acugauagcaucuaaugga

SEQ ID NO: 249155 - RNA, 19 nt, Homo sapiens
  misc_RNA (1)...(19): siRNA sense strand
gugaugcgguaccaacucu

SEQ ID NO: 249156 - RNA, 19 nt, Homo sapiens
  misc_RNA (1)...(19): siRNA sense strand
ggccgucauuucauucaca

SEQ ID NO: 249157 - RNA, 19 nt, Homo sapiens
  misc_RNA (1)...(19): siRNA sense strand
ggaugaagugcuggacuau

SEQ ID NO: 249158 - RNA, 19 nt, Homo sapiens
  misc_RNA (1)...(19): siRNA sense strand
gguauacgaacuccuggau

SEQ ID NO: 249159 - RNA, 19 nt, Homo sapiens
  misc_RNA (1)...(19): siRNA sense strand
ggauguggucgagagauug

SEQ ID NO: 249160 - RNA, 19 nt, Homo sapiens
  misc_RNA (1)...(19): siRNA sense strand
gauguggucgagagauugu

SEQ ID NO: 249161 - RNA, 19 nt, Homo sapiens
  misc_RNA (1)...(19): siRNA sense strand
gagguuaugggccaggaau

SEQ ID NO: 249162 - RNA, 19 nt, Homo sapiens
  misc_RNA (1)...(19): siRNA sense strand
cugauagcaucuaauggau

SEQ ID NO: 249163 - RNA, 19 nt, Homo sapiens
  misc_RNA (1)...(19): siRNA sense strand
cgagagauugucuguacug

SEQ ID NO: 249164 - RNA, 19 nt, Homo sapiens
  misc_RNA (1)...(19): siRNA sense strand
acggagaugcugaggaauu

SEQ ID NO: 249165 - RNA, 19 nt, Homo sapiens
  misc_RNA (1)...(19): siRNA sense strand
cgucauuucauucacauca

SEQ ID NO: 249166 - RNA, 19 nt, Homo sapiens
  misc_RNA (1)...(19): siRNA sense strand
gaugaagugcuggacuaug

SEQ ID NO: 249167 - RNA, 19 nt, Homo sapiens
  misc_RNA (1)...(19): siRNA sense strand
caaagagccaagcccucaa

SEQ ID NO: 249168 - RNA, 19 nt, Homo sapiens
  misc_RNA (1)...(19): siRNA sense strand
ugaaucuggacgaauuuga

SEQ ID NO: 249169 - RNA, 19 nt, Homo sapiens
  misc_RNA (1)...(19): siRNA sense strand
gauuucccaauucuucauu

SEQ ID NO: 249170 - RNA, 19 nt, Homo sapiens
  misc_RNA (1)...(19): siRNA sense strand
caggaauccgggucgauga

SEQ ID NO: 249171 - RNA, 19 nt, Homo sapiens
  misc_RNA (1)...(19): siRNA sense strand
gagagauucggcucaagag

SEQ ID NO: 249172 - RNA, 19 nt, Homo sapiens
  misc_RNA (1)...(19): siRNA sense strand
ccgcucaucuacaaagacu

SEQ ID NO: 249173 - RNA, 19 nt, Homo sapiens
  misc_RNA (1)...(19): siRNA sense strand
gaacauacuuuaucaccuu

SEQ ID NO: 249174 - RNA, 19 nt, Homo sapiens
  misc_RNA (1)...(19): siRNA sense strand
gaacuacacagcaagcuua

SEQ ID NO: 249175 - RNA, 19 nt, Homo sapiens
  misc_RNA (1)...(19): siRNA sense strand
guacauugcucaccacuug

SEQ ID NO: 249176 - RNA, 19 nt, Homo sapiens
  misc_RNA (1)...(19): siRNA sense strand
gcacagaaaugcuugaagu

SEQ ID NO: 249177 - RNA, 19 nt, Homo sapiens
  misc_RNA (1)...(19): siRNA sense strand
gaaagauuaucaagugcua

SEQ ID NO: 249178 - RNA, 19 nt, Homo sapiens
  misc_RNA (1)...(19): siRNA sense strand
ccaaguauuugcaccuuua

SEQ ID NO: 249179 - RNA, 19 nt, Homo sapiens
  misc_RNA (1)...(19): siRNA sense strand
gaagaaagcaagaacaaga

SEQ ID NO: 249180 - RNA, 19 nt, Homo sapiens
  misc_RNA (1)...(19): siRNA sense strand
guacagaaaguauccaaua

SEQ ID NO: 249181 - RNA, 19 nt, Homo sapiens
  misc_RNA (1)...(19): siRNA sense strand
gcuaggaacuuuucaaaua

SEQ ID NO: 249182 - RNA, 19 nt, Homo sapiens
  misc_RNA (1)...(19): siRNA sense strand
uaagcuaucugaagacauu

SEQ ID NO: 249183 - RNA, 19 nt, Homo sapiens
  misc_RNA (1)...(19): siRNA sense strand
gcauggagcucacaauaca

SEQ ID NO: 249184 - RNA, 19 nt, Homo sapiens
  misc_RNA (1)...(19): siRNA sense strand
gcaaauuacagcaauauga

SEQ ID NO: 249185 - RNA, 19 nt, Homo sapiens
  misc_RNA (1)...(19): siRNA sense strand
caagaaauaucaagaagag

SEQ ID NO: 249186 - RNA, 19 nt, Homo sapiens
  misc_RNA (1)...(19): siRNA sense strand
gaaacagcuucuagauuug

SEQ ID NO: 249187 - RNA, 19 nt, Homo sapiens
  misc_RNA (1)...(19): siRNA sense strand
caacauaucacaaggagaa

SEQ ID NO: 249188 - RNA, 19 nt, Homo sapiens
  misc_RNA (1)...(19): siRNA sense strand
gcaauaugauuagcaagaa

SEQ ID NO: 249189 - RNA, 19 nt, Homo sapiens
  misc_RNA (1)...(19): siRNA sense strand
ugaagauggugauagguua

SEQ ID NO: 249190 - RNA, 19 nt, Homo sapiens
  misc_RNA (1)...(19): siRNA sense strand
acagcaagcuuaaaucauu

SEQ ID NO: 249191 - RNA, 19 nt, Homo sapiens
  misc_RNA (1)...(19): siRNA sense strand
uaacagagaagaaguaugu

SEQ ID NO: 249192 - RNA, 19 nt, Homo sapiens
  misc_RNA (1)...(19): siRNA sense strand
uaauggaacucgccuauca

SEQ ID NO: 249193 - RNA, 19 nt, Homo sapiens
  misc_RNA (1)...(19): siRNA sense strand
ggugaggugugcaauauga

SEQ ID NO: 249194 - RNA, 19 nt, Homo sapiens
  misc_RNA (1)...(19): siRNA sense strand
gcaagaacaagaaauauca

SEQ ID NO: 249195 - RNA, 19 nt, Homo sapiens
  misc_RNA (1)...(19): siRNA sense strand
gcagcaaauuacagcaaua

SEQ ID NO: 249196 - RNA, 19 nt, Homo sapiens
  misc_RNA (1)...(19): siRNA sense strand
cagaaaugcuugaaguuau

SEQ ID NO: 249197 - RNA, 19 nt, Homo sapiens
  misc_RNA (1)...(19): siRNA sense strand
ggcagaagcugauuguaug

SEQ ID NO: 249198 - RNA, 19 nt, Homo sapiens
  misc_RNA (1)...(19): siRNA sense strand
ggaaagagacucaguuguc

SEQ ID NO: 249199 - RNA, 19 nt, Homo sapiens
  misc_RNA (1)...(19): siRNA sense strand
gaaaucuaaugaccucaga

SEQ ID NO: 249200 - RNA, 19 nt, Homo sapiens
  misc_RNA (1)...(19): siRNA sense strand
cuaaugaccucagaaauuc

SEQ ID NO: 249201 - RNA, 19 nt, Homo sapiens
  misc_RNA (1)...(19): siRNA sense strand
gaacucgccuaucagacuu

SEQ ID NO: 249202 - RNA, 19 nt, Homo sapiens
  misc_RNA (1)...(19): siRNA sense strand
caacaaauagcagcaaauu

SEQ ID NO: 249203 - RNA, 19 nt, Homo sapiens
  misc_RNA (1)...(19): siRNA sense strand
ucaaugugcuguucaacuu

SEQ ID NO: 249204 - RNA, 19 nt, Homo sapiens
  misc_RNA (1)...(19): siRNA sense strand
aaucuuaccuacaaacuga

SEQ ID NO: 249205 - RNA, 19 nt, Homo sapiens
  misc_RNA (1)...(19): siRNA sense strand
caucaguucuguccucuug

SEQ ID NO: 249206 - RNA, 19 nt, Homo sapiens
  misc_RNA (1)...(19): siRNA sense strand
aagaagagguuccagucua

SEQ ID NO: 249207 - RNA, 19 nt, Homo sapiens
  misc_RNA (1)...(19): siRNA sense strand
gcaaaacagugauggauga

SEQ ID NO: 249208 - RNA, 19 nt, Homo sapiens
  misc_RNA (1)...(19): siRNA sense strand
gugagucugugaagaaauu

SEQ ID NO: 249209 - RNA, 19 nt, Homo sapiens
  misc_RNA (1)...(19): siRNA sense strand
gauaaaugugccagaguua

SEQ ID NO: 249210 - RNA, 19 nt, Homo sapiens
  misc_RNA (1)...(19): siRNA sense strand
uaaagagacuuggaauugu

SEQ ID NO: 249211 - RNA, 19 nt, Homo sapiens
  misc_RNA (1)...(19): siRNA sense strand
gaauauccaucaccaucug

SEQ ID NO: 249212 - RNA, 19 nt, Homo sapiens
  misc_RNA (1)...(19): siRNA sense strand
cuaaagagacuuggaauug

SEQ ID NO: 249213 - RNA, 19 nt, Homo sapiens
  misc_RNA (1)...(19): siRNA sense strand
ccagcaguuuggaaucuua

SEQ ID NO: 249214 - RNA, 19 nt, Homo sapiens
  misc_RNA (1)...(19): siRNA sense strand
gaaaaugcccuaaaggaaa

SEQ ID NO: 249215 - RNA, 19 nt, Homo sapiens
  misc_RNA (1)...(19): siRNA sense strand
uagaagugcuccagaaaca

SEQ ID NO: 249216 - RNA, 19 nt, Homo sapiens
  misc_RNA (1)...(19): siRNA sense strand
uuucaaauauggacgauga

SEQ ID NO: 249217 - RNA, 19 nt, Homo sapiens
  misc_RNA (1)...(19): siRNA sense strand
gaagauuauuccugauucu

SEQ ID NO: 249218 - RNA, 19 nt, Homo sapiens
  misc_RNA (1)...(19): siRNA sense strand
gaggacauaucuacugaag

SEQ ID NO: 249219 - RNA, 19 nt, Homo sapiens
  misc_RNA (1)...(19): siRNA sense strand
gaggugugcaauaugauua

SEQ ID NO: 249220 - RNA, 19 nt, Homo sapiens
  misc_RNA (1)...(19): siRNA sense strand
caacuaaagagacuuggaa

SEQ ID NO: 249221 - RNA, 19 nt, Homo sapiens
  misc_RNA (1)...(19): siRNA sense strand
gaacuucuggaaagauuau

SEQ ID NO: 249222 - RNA, 19 nt, Homo sapiens
  misc_RNA (1)...(19): siRNA sense strand
ccacaugccguaucaguga

SEQ ID NO: 249223 - RNA, 19 nt, Homo sapiens
  misc_RNA (1)...(19): siRNA sense strand
gaucagacugguacuagaa

SEQ ID NO: 249224 - RNA, 19 nt, Homo sapiens
  misc_RNA (1)...(19): siRNA sense strand
cagcauggagcucacaaua

SEQ ID NO: 249225 - RNA, 19 nt, Homo sapiens
  misc_RNA (1)...(19): siRNA sense strand
acagaaaugcuugaaguua

SEQ ID NO: 249226 - RNA, 19 nt, Homo sapiens
  misc_RNA (1)...(19): siRNA sense strand
cguaucaaccggugaauuu

SEQ ID NO: 249227 - RNA, 19 nt, Homo sapiens
  misc_RNA (1)...(19): siRNA sense strand
guacugcaccaacuaaaga

SEQ ID NO: 249228 - RNA, 19 nt, Homo sapiens
  misc_RNA (1)...(19): siRNA sense strand
cuggaaagauuaucaagug

SEQ ID NO: 249229 - RNA, 19 nt, Homo sapiens
  misc_RNA (1)...(19): siRNA sense strand
gaaaggugaacuucuggaa

SEQ ID NO: 249230 - RNA, 19 nt, Homo sapiens
  misc_RNA (1)...(19): siRNA sense strand
ucuaaugaccucagaaauu

SEQ ID NO: 249231 - RNA, 19 nt, Homo sapiens
  misc_RNA (1)...(19): siRNA sense strand
uuaaacaguugcaggaguu

SEQ ID NO: 249232 - RNA, 19 nt, Homo sapiens
  misc_RNA (1)...(19): siRNA sense strand
ugaaaucucucagcaugga

SEQ ID NO: 249233 - RNA, 19 nt, Homo sapiens
  misc_RNA (1)...(19): siRNA sense strand
aaagagacuuggaauugug

SEQ ID NO: 249234 - RNA, 19 nt, Homo sapiens
  misc_RNA (1)...(19): siRNA sense strand
gugaacuucuggaaagauu

SEQ ID NO: 249235 - RNA, 19 nt, Homo sapiens
  misc_RNA (1)...(19): siRNA sense strand
cauaacacugugaagauua

SEQ ID NO: 249236 - RNA, 19 nt, Homo sapiens
  misc_RNA (1)...(19): siRNA sense strand
ucauaacacugugaagauu

SEQ ID NO: 249237 - RNA, 19 nt, Homo sapiens
  misc_RNA (1)...(19): siRNA sense strand
gcaagaaguacagugaauu

SEQ ID NO: 249238 - RNA, 19 nt, Homo sapiens
  misc_RNA (1)...(19): siRNA sense strand
acaaauagcagcaaauuac

SEQ ID NO: 249239 - RNA, 19 nt, Homo sapiens
  misc_RNA (1)...(19): siRNA sense strand
acacugaccuggaaaauga

SEQ ID NO: 249240 - RNA, 19 nt, Homo sapiens
  misc_RNA (1)...(19): siRNA sense strand
cugcugaaguauauccuua

SEQ ID NO: 249241 - RNA, 19 nt, Homo sapiens
  misc_RNA (1)...(19): siRNA sense strand
gaauaucuuccauuuguuc

SEQ ID NO: 249242 - RNA, 19 nt, Homo sapiens
  misc_RNA (1)...(19): siRNA sense strand
ccaguuggcugcuauucau

SEQ ID NO: 249243 - RNA, 19 nt, Homo sapiens
  misc_RNA (1)...(19): siRNA sense strand
gaaauucauaacacuguga

SEQ ID NO: 249244 - RNA, 19 nt, Homo sapiens
  misc_RNA (1)...(19): siRNA sense strand
agaagagguuccagucuau

SEQ ID NO: 249245 - RNA, 19 nt, Homo sapiens
  misc_RNA (1)...(19): siRNA sense strand
agauaaaugugccagaguu

SEQ ID NO: 249246 - RNA, 19 nt, Homo sapiens
  misc_RNA (1)...(19): siRNA sense strand
acauugaccugcugaaauc

SEQ ID NO: 249247 - RNA, 19 nt, Homo sapiens
  misc_RNA (1)...(19): siRNA sense strand
gaaauaucaagaagagguu

SEQ ID NO: 249248 - RNA, 19 nt, Homo sapiens
  misc_RNA (1)...(19): siRNA sense strand
gcaccuuuaucugaagaaa

SEQ ID NO: 249249 - RNA, 19 nt, Homo sapiens
  misc_RNA (1)...(19): siRNA sense strand
gcacagaaaggugaacuuc

SEQ ID NO: 249250 - RNA, 19 nt, Homo sapiens
  misc_RNA (1)...(19): siRNA sense strand
caaacuggaaguacagaaa

SEQ ID NO: 249251 - RNA, 19 nt, Homo sapiens
  misc_RNA (1)...(19): siRNA sense strand
gaaagccagccuaacauag

SEQ ID NO: 249252 - RNA, 19 nt, Homo sapiens
  misc_RNA (1)...(19): siRNA sense strand
gcaacaaccaguagugauc

SEQ ID NO: 249253 - RNA, 19 nt, Homo sapiens
  misc_RNA (1)...(19): siRNA sense strand
caagaaguacagugaauuc

SEQ ID NO: 249254 - RNA, 19 nt, Homo sapiens
  misc_RNA (1)...(19): siRNA sense strand
aaacaucuacugucccauu

SEQ ID NO: 249255 - RNA, 19 nt, Homo sapiens
  misc_RNA (1)...(19): siRNA sense strand
gaaagcaagaacaagaaau

SEQ ID NO: 249256 - RNA, 19 nt, Homo sapiens
  misc_RNA (1)...(19): siRNA sense strand
ugaagauuauuccugauuc

SEQ ID NO: 249257 - RNA, 19 nt, Homo sapiens
  misc_RNA (1)...(19): siRNA sense strand
aaggagauacuacagauuu

SEQ ID NO: 249258 - RNA, 19 nt, Homo sapiens
  misc_RNA (1)...(19): siRNA sense strand
ggugauagguuauauuccu

SEQ ID NO: 249259 - RNA, 19 nt, Homo sapiens
  misc_RNA (1)...(19): siRNA sense strand
agaaagccagccuaacaua

SEQ ID NO: 249260 - RNA, 19 nt, Homo sapiens
  misc_RNA (1)...(19): siRNA sense strand
gaagauggugauagguuau

SEQ ID NO: 249261 - RNA, 19 nt, Homo sapiens
  misc_RNA (1)...(19): siRNA sense strand
caguucagauugcgucuug

SEQ ID NO: 249262 - RNA, 19 nt, Homo sapiens
  misc_RNA (1)...(19): siRNA sense strand
ccacgaagugaugaauuua

SEQ ID NO: 249263 - RNA, 19 nt, Homo sapiens
  misc_RNA (1)...(19): siRNA sense strand
cuacacagcaagcuuaaau

SEQ ID NO: 249264 - RNA, 19 nt, Homo sapiens
  misc_RNA (1)...(19): siRNA sense strand
ugaaggaccccaaguauuu

SEQ ID NO: 249265 - RNA, 19 nt, Homo sapiens
  misc_RNA (1)...(19): siRNA sense strand
agacucaguuguccuaagu

SEQ ID NO: 249266 - RNA, 19 nt, Homo sapiens
  misc_RNA (1)...(19): siRNA sense strand
uaaagcagcaguuggaaag

SEQ ID NO: 249267 - RNA, 19 nt, Homo sapiens
  misc_RNA (1)...(19): siRNA sense strand
uauggacgaugaagagaau

SEQ ID NO: 249268 - RNA, 19 nt, Homo sapiens
  misc_RNA (1)...(19): siRNA sense strand
ucagugagucugugaagaa

SEQ ID NO: 249269 - RNA, 19 nt, Homo sapiens
  misc_RNA (1)...(19): siRNA sense strand
ggauaacaaacuggaagua

SEQ ID NO: 249270 - RNA, 19 nt, Homo sapiens
  misc_RNA (1)...(19): siRNA sense strand
gauuauuccugauucuaag

SEQ ID NO: 249271 - RNA, 19 nt, Homo sapiens
  misc_RNA (1)...(19): siRNA sense strand
gacauugaccugcugaaau

SEQ ID NO: 249272 - RNA, 19 nt, Homo sapiens
  misc_RNA (1)...(19): siRNA sense strand
uuuggaaucuuaccuacaa

SEQ ID NO: 249273 - RNA, 19 nt, Homo sapiens
  misc_RNA (1)...(19): siRNA sense strand
ggaagaauaucaguuagua

SEQ ID NO: 249274 - RNA, 19 nt, Homo sapiens
  misc_RNA (1)...(19): siRNA sense strand
gcaaagacauuccaucaug

SEQ ID NO: 249275 - RNA, 19 nt, Homo sapiens
  misc_RNA (1)...(19): siRNA sense strand
ggaauuaaguucaaacgaa

SEQ ID NO: 249276 - RNA, 19 nt, Homo sapiens
  misc_RNA (1)...(19): siRNA sense strand
ggaaauaccuguggaacaa

SEQ ID NO: 249277 - RNA, 19 nt, Homo sapiens
  misc_RNA (1)...(19): siRNA sense strand
ccaagaagaugaagaaaga

SEQ ID NO: 249278 - RNA, 19 nt, Homo sapiens
  misc_RNA (1)...(19): siRNA sense strand
ggagugaccuuccuauuuc

SEQ ID NO: 249279 - RNA, 19 nt, Homo sapiens
  misc_RNA (1)...(19): siRNA sense strand
gaaagauucugaagacaau

SEQ ID NO: 249280 - RNA, 19 nt, Homo sapiens
  misc_RNA (1)...(19): siRNA sense strand
caagagaguuggcaaauca

SEQ ID NO: 249281 - RNA, 19 nt, Homo sapiens
  misc_RNA (1)...(19): siRNA sense strand
caaacuagaucucaccaaa

SEQ ID NO: 249282 - RNA, 19 nt, Homo sapiens
  misc_RNA (1)...(19): siRNA sense strand
caaggaagaauaucaguua

SEQ ID NO: 249283 - RNA, 19 nt, Homo sapiens
  misc_RNA (1)...(19): siRNA sense strand
uaacagaaauacaggagaa

SEQ ID NO: 249284 - RNA, 19 nt, Homo sapiens
  misc_RNA (1)...(19): siRNA sense strand
gaaaucacccugaaagguu

SEQ ID NO: 249285 - RNA, 19 nt, Homo sapiens
  misc_RNA (1)...(19): siRNA sense strand
ggaaaugaauggagaaacu

SEQ ID NO: 249286 - RNA, 19 nt, Homo sapiens
  misc_RNA (1)...(19): siRNA sense strand
gaccagcgcuccuugauca

SEQ ID NO: 249287 - RNA, 19 nt, Homo sapiens
  misc_RNA (1)...(19): siRNA sense strand
gggaagacauucuccuuug

SEQ ID NO: 249288 - RNA, 19 nt, Homo sapiens
  misc_RNA (1)...(19): siRNA sense strand
guaaagcauuuggucaaua

SEQ ID NO: 249289 - RNA, 19 nt, Homo sapiens
  misc_RNA (1)...(19): siRNA sense strand
ggagauugauuccaaagug

SEQ ID NO: 249290 - RNA, 19 nt, Homo sapiens
  misc_RNA (1)...(19): siRNA sense strand
gaaggcgcuuucucuaauu

SEQ ID NO: 249291 - RNA, 19 nt, Homo sapiens
  misc_RNA (1)...(19): siRNA sense strand
auacaaagcucuccaccaa

SEQ ID NO: 249292 - RNA, 19 nt, Homo sapiens
  misc_RNA (1)...(19): siRNA sense strand
gcgaggagauugauuccaa

SEQ ID NO: 249293 - RNA, 19 nt, Homo sapiens
  misc_RNA (1)...(19): siRNA sense strand
gagauugauuccaaaguga

SEQ ID NO: 249294 - RNA, 19 nt, Homo sapiens
  misc_RNA (1)...(19): siRNA sense strand
caggagaaauggcaugauu

SEQ ID NO: 249295 - RNA, 19 nt, Homo sapiens
  misc_RNA (1)...(19): siRNA sense strand
gaagcggaguuucaguaaa

SEQ ID NO: 249296 - RNA, 19 nt, Homo sapiens
  misc_RNA (1)...(19): siRNA sense strand
ucaccaaacuuaagcaugu

SEQ ID NO: 249297 - RNA, 19 nt, Homo sapiens
  misc_RNA (1)...(19): siRNA sense strand
cagcagcacuggcccauau

SEQ ID NO: 249298 - RNA, 19 nt, Homo sapiens
  misc_RNA (1)...(19): siRNA sense strand
gaaaguaacagugagauag

SEQ ID NO: 249299 - RNA, 19 nt, Homo sapiens
  misc_RNA (1)...(19): siRNA sense strand
gggauuugcugaucaagug

SEQ ID NO: 249300 - RNA, 19 nt, Homo sapiens
  misc_RNA (1)...(19): siRNA sense strand
agaaauagaugcuccuaag

SEQ ID NO: 249301 - RNA, 19 nt, Homo sapiens
  misc_RNA (1)...(19): siRNA sense strand
gaaaugaauggagaaacua

SEQ ID NO: 249302 - RNA, 19 nt, Homo sapiens
  misc_RNA (1)...(19): siRNA sense strand
guaccuaccgcaucaguaa

SEQ ID NO: 249303 - RNA, 19 nt, Homo sapiens
  misc_RNA (1)...(19): siRNA sense strand
uggagcaucuggcuauuaa

SEQ ID NO: 249304 - RNA, 19 nt, Homo sapiens
  misc_RNA (1)...(19): siRNA sense strand
cuagaucucaccaaacuua

SEQ ID NO: 249305 - RNA, 19 nt, Homo sapiens
  misc_RNA (1)...(19): siRNA sense strand
gaagaaaguaacagugaga

SEQ ID NO: 249306 - RNA, 19 nt, Homo sapiens
  misc_RNA (1)...(19): siRNA sense strand
gagaaaagccccaaacuga

SEQ ID NO: 249307 - RNA, 19 nt, Homo sapiens
  misc_RNA (1)...(19): siRNA sense strand
ucaaagaccacauacagaa

SEQ ID NO: 249308 - RNA, 19 nt, Homo sapiens
  misc_RNA (1)...(19): siRNA sense strand
gauguuggauaugggauuu

SEQ ID NO: 249309 - RNA, 19 nt, Homo sapiens
  misc_RNA (1)...(19): siRNA sense strand
ugagauagagcaggaaaua

SEQ ID NO: 249310 - RNA, 19 nt, Homo sapiens
  misc_RNA (1)...(19): siRNA sense strand
gccaagaaauacaugaaau

SEQ ID NO: 249311 - RNA, 19 nt, Homo sapiens
  misc_RNA (1)...(19): siRNA sense strand
caaaucaaguaagcaaaga

SEQ ID NO: 249312 - RNA, 19 nt, Homo sapiens
  misc_RNA (1)...(19): siRNA sense strand
uggagaaacuagagagaaa

SEQ ID NO: 249313 - RNA, 19 nt, Homo sapiens
  misc_RNA (1)...(19): siRNA sense strand
gaguuucaguaaagcauuu

SEQ ID NO: 249314 - RNA, 19 nt, Homo sapiens
  misc_RNA (1)...(19): siRNA sense strand
ggagaaauggcaugauuca

SEQ ID NO: 249315 - RNA, 19 nt, Homo sapiens
  misc_RNA (1)...(19): siRNA sense strand
gaauaucaguuaguacaag

SEQ ID NO: 249316 - RNA, 19 nt, Homo sapiens
  misc_RNA (1)...(19): siRNA sense strand
uaacagaucccaaaacaaa

SEQ ID NO: 249317 - RNA, 19 nt, Homo sapiens
  misc_RNA (1)...(19): siRNA sense strand
gcacaggcacggacaggaa

SEQ ID NO: 249318 - RNA, 19 nt, Homo sapiens
  misc_RNA (1)...(19): siRNA sense strand
ggacggaaacagaagauuc

SEQ ID NO: 249319 - RNA, 19 nt, Homo sapiens
  misc_RNA (1)...(19): siRNA sense strand
acaaagcucuccaccaaag

SEQ ID NO: 249320 - RNA, 19 nt, Homo sapiens
  misc_RNA (1)...(19): siRNA sense strand
gauaugggauuugcugauc

SEQ ID NO: 249321 - RNA, 19 nt, Homo sapiens
  misc_RNA (1)...(19): siRNA sense strand
gaccagauguuggauaugg

SEQ ID NO: 249322 - RNA, 19 nt, Homo sapiens
  misc_RNA (1)...(19): siRNA sense strand
cauacagaauggcaaacua

SEQ ID NO: 249323 - RNA, 19 nt, Homo sapiens
  misc_RNA (1)...(19): siRNA sense strand
gcaaagacuucagugacau

SEQ ID NO: 249324 - RNA, 19 nt, Homo sapiens
  misc_RNA (1)...(19): siRNA sense strand
aauaaaagcuuccagcaaa

SEQ ID NO: 249325 - RNA, 19 nt, Homo sapiens
  misc_RNA (1)...(19): siRNA sense strand
ugaggagccuucugaggaa

SEQ ID NO: 249326 - RNA, 19 nt, Homo sapiens
  misc_RNA (1)...(19): siRNA sense strand
gaauucuccuaaauccaaa

SEQ ID NO: 249327 - RNA, 19 nt, Homo sapiens
  misc_RNA (1)...(19): siRNA sense strand
cccaggagcugucccagaa

SEQ ID NO: 249328 - RNA, 19 nt, Homo sapiens
  misc_RNA (1)...(19): siRNA sense strand
aagaauggauuuccucauc

SEQ ID NO: 249329 - RNA, 19 nt, Homo sapiens
  misc_RNA (1)...(19): siRNA sense strand
aaggaaagcuggguguuug

SEQ ID NO: 249330 - RNA, 19 nt, Homo sapiens
  misc_RNA (1)...(19): siRNA sense strand
uugcagugcucaauugaaa

SEQ ID NO: 249331 - RNA, 19 nt, Homo sapiens
  misc_RNA (1)...(19): siRNA sense strand
ugagguugauuugguuaua

SEQ ID NO: 249332 - RNA, 19 nt, Homo sapiens
  misc_RNA (1)...(19): siRNA sense strand
caggagcugucccagaauu

SEQ ID NO: 249333 - RNA, 19 nt, Homo sapiens
  misc_RNA (1)...(19): siRNA sense strand
caucaaggacgcacuauca

SEQ ID NO: 249334 - RNA, 19 nt, Homo sapiens
  misc_RNA (1)...(19): siRNA sense strand
cagugaagcugccagugaa

SEQ ID NO: 249335 - RNA, 19 nt, Homo sapiens
  misc_RNA (1)...(19): siRNA sense strand
gcaaaucaaguaagcaaag

SEQ ID NO: 249336 - RNA, 19 nt, Homo sapiens
  misc_RNA (1)...(19): siRNA sense strand
gaaagaggagccaucucaa

SEQ ID NO: 249337 - RNA, 19 nt, Homo sapiens
  misc_RNA (1)...(19): siRNA sense strand
gaagaaauagaugcuccua

SEQ ID NO: 249338 - RNA, 19 nt, Homo sapiens
  misc_RNA (1)...(19): siRNA sense strand
gugaagaaaguaacaguga

SEQ ID NO: 249339 - RNA, 19 nt, Homo sapiens
  misc_RNA (1)...(19): siRNA sense strand
ggagaagggagcuguggaa

SEQ ID NO: 249340 - RNA, 19 nt, Homo sapiens
  misc_RNA (1)...(19): siRNA sense strand
aaaucacccugaaagguuu

SEQ ID NO: 249341 - RNA, 19 nt, Homo sapiens
  misc_RNA (1)...(19): siRNA sense strand
ggaaaucacccugaaaggu

SEQ ID NO: 249342 - RNA, 19 nt, Homo sapiens
  misc_RNA (1)...(19): siRNA sense strand
gacaggaacugggaagaca

SEQ ID NO: 249343 - RNA, 19 nt, Homo sapiens
  misc_RNA (1)...(19): siRNA sense strand
cuauuaaacuucucaaagg

SEQ ID NO: 249344 - RNA, 19 nt, Homo sapiens
  misc_RNA (1)...(19): siRNA sense strand
ucagagggcagcaguuauu

SEQ ID NO: 249345 - RNA, 19 nt, Homo sapiens
  misc_RNA (1)...(19): siRNA sense strand
cagaagcggaguuucagua

SEQ ID NO: 249346 - RNA, 19 nt, Homo sapiens
  misc_RNA (1)...(19): siRNA sense strand
ccacagaagcaaagggaaa

SEQ ID NO: 249347 - RNA, 19 nt, Homo sapiens
  misc_RNA (1)...(19): siRNA sense strand
ggaagacauucuccuuugc

SEQ ID NO: 249348 - RNA, 19 nt, Homo sapiens
  misc_RNA (1)...(19): siRNA sense strand
aaaaggagcccauugaaaa

SEQ ID NO: 249349 - RNA, 19 nt, Homo sapiens
  misc_RNA (1)...(19): siRNA sense strand
gcagugcucaauugaaaug

SEQ ID NO: 249350 - RNA, 19 nt, Homo sapiens
  misc_RNA (1)...(19): siRNA sense strand
caauaacuguggagcaucu

SEQ ID NO: 249351 - RNA, 19 nt, Homo sapiens
  misc_RNA (1)...(19): siRNA sense strand
ucccauaucugaagaaacu

SEQ ID NO: 249352 - RNA, 19 nt, Homo sapiens
  misc_RNA (1)...(19): siRNA sense strand
cgaggagauugauuccaaa

SEQ ID NO: 249353 - RNA, 19 nt, Homo sapiens
  misc_RNA (1)...(19): siRNA sense strand
gaucuugcagugcucaauu

SEQ ID NO: 249354 - RNA, 19 nt, Homo sapiens
  misc_RNA (1)...(19): siRNA sense strand
gcacuaucaucuuuuguga

SEQ ID NO: 249355 - RNA, 19 nt, Homo sapiens
  misc_RNA (1)...(19): siRNA sense strand
gaacugcaagacaggaaga

SEQ ID NO: 249356 - RNA, 19 nt, Homo sapiens
  misc_RNA (1)...(19): siRNA sense strand
gaaauaccuguggaacaaa

SEQ ID NO: 249357 - RNA, 19 nt, Homo sapiens
  misc_RNA (1)...(19): siRNA sense strand
aagcggaguuucaguaaag

SEQ ID NO: 249358 - RNA, 19 nt, Homo sapiens
  misc_RNA (1)...(19): siRNA sense strand
ggaaggaccacgggaagga

SEQ ID NO: 249359 - RNA, 19 nt, Homo sapiens
  misc_RNA (1)...(19): siRNA sense strand
gcagcacuggcccauauuu

SEQ ID NO: 249360 - RNA, 19 nt, Homo sapiens
  misc_RNA (1)...(19): siRNA sense strand
ucccagaauucagcuauaa

SEQ ID NO: 249361 - RNA, 19 nt, Homo sapiens
  misc_RNA (1)...(19): siRNA sense strand
aaagaggagccaucucaaa

SEQ ID NO: 249362 - RNA, 19 nt, Homo sapiens
  misc_RNA (1)...(19): siRNA sense strand
ccagugaagcugccaguga

SEQ ID NO: 249363 - RNA, 19 nt, Homo sapiens
  misc_RNA (1)...(19): siRNA sense strand
gagcaucuggcuauuaagu

SEQ ID NO: 249364 - RNA, 19 nt, Homo sapiens
  misc_RNA (1)...(19): siRNA sense strand
ggcaauaacuguggagcau

SEQ ID NO: 249365 - RNA, 19 nt, Homo sapiens
  misc_RNA (1)...(19): siRNA sense strand
ccacauacagaauggcaaa

SEQ ID NO: 249366 - RNA, 19 nt, Homo sapiens
  misc_RNA (1)...(19): siRNA sense strand
agaaagaggagccaucuca

SEQ ID NO: 249367 - RNA, 19 nt, Homo sapiens
  misc_RNA (1)...(19): siRNA sense strand
agaguuggcaaaucaagua

SEQ ID NO: 249368 - RNA, 19 nt, Homo sapiens
  misc_RNA (1)...(19): siRNA sense strand
caaagugaagggaaugguu

SEQ ID NO: 249369 - RNA, 19 nt, Homo sapiens
  misc_RNA (1)...(19): siRNA sense strand
caaacaaucagcugagaag

SEQ ID NO: 249370 - RNA, 19 nt, Homo sapiens
  misc_RNA (1)...(19): siRNA sense strand
gcacaaggaagaauaucag

SEQ ID NO: 249371 - RNA, 19 nt, Homo sapiens
  misc_RNA (1)...(19): siRNA sense strand
ggacagcgggaaggcagua

SEQ ID NO: 249372 - RNA, 19 nt, Homo sapiens
  misc_RNA (1)...(19): siRNA sense strand
aaagugaagggaaugguuu

SEQ ID NO: 249373 - RNA, 19 nt, Homo sapiens
  misc_RNA (1)...(19): siRNA sense strand
cuacaucaauggcucuuua

SEQ ID NO: 249374 - RNA, 19 nt, Homo sapiens
  misc_RNA (1)...(19): siRNA sense strand
aaauggacgugacuucuua

SEQ ID NO: 249375 - RNA, 19 nt, Homo sapiens
  misc_RNA (1)...(19): siRNA sense strand
ggacgugacuucuuauugg

SEQ ID NO: 249376 - RNA, 19 nt, Homo sapiens
  misc_RNA (1)...(19): siRNA sense strand
caucaauggcucuuuauua

SEQ ID NO: 249377 - RNA, 19 nt, Homo sapiens
  misc_RNA (1)...(19): siRNA sense strand
ggcaaugucuucucuaaca

SEQ ID NO: 249378 - RNA, 19 nt, Homo sapiens
  misc_RNA (1)...(19): siRNA sense strand
ucaccuaccucgaugcauu

SEQ ID NO: 249379 - RNA, 19 nt, Homo sapiens
  misc_RNA (1)...(19): siRNA sense strand
gaaauggacgugacuucuu

SEQ ID NO: 249380 - RNA, 19 nt, Homo sapiens
  misc_RNA (1)...(19): siRNA sense strand
ccaucaagcugcugguaaa

SEQ ID NO: 249381 - RNA, 19 nt, Homo sapiens
  misc_RNA (1)...(19): siRNA sense strand
gcaaugucuucucuaacaa

SEQ ID NO: 249382 - RNA, 19 nt, Homo sapiens
  misc_RNA (1)...(19): siRNA sense strand
gaccugggcuccaucaucu

SEQ ID NO: 249383 - RNA, 19 nt, Homo sapiens
  misc_RNA (1)...(19): siRNA sense strand
ucaagcugcugguaaaugu

SEQ ID NO: 249384 - RNA, 19 nt, Homo sapiens
  misc_RNA (1)...(19): siRNA sense strand
gcagggcaaugucuucucu

SEQ ID NO: 249385 - RNA, 19 nt, Homo sapiens
  misc_RNA (1)...(19): siRNA sense strand
caucaucugugacaucaag

SEQ ID NO: 249386 - RNA, 19 nt, Homo sapiens
  misc_RNA (1)...(19): siRNA sense strand
ugugugcccugaucuugua

SEQ ID NO: 249387 - RNA, 19 nt, Homo sapiens
  misc_RNA (1)...(19): siRNA sense strand
ccaaggagaagcagacaug

SEQ ID NO: 249388 - RNA, 19 nt, Homo sapiens
  misc_RNA (1)...(19): siRNA sense strand
caccagaucccaaggagaa

SEQ ID NO: 249389 - RNA, 19 nt, Homo sapiens
  misc_RNA (1)...(19): siRNA sense strand
ggagacaucaauucgcuau

SEQ ID NO: 249390 - RNA, 19 nt, Homo sapiens
  misc_RNA (1)...(19): siRNA sense strand
gaauacugccagcaugaga

SEQ ID NO: 249391 - RNA, 19 nt, Homo sapiens
  misc_RNA (1)...(19): siRNA sense strand
ccucuuuguugaugucauu

SEQ ID NO: 249392 - RNA, 19 nt, Homo sapiens
  misc_RNA (1)...(19): siRNA sense strand
cgagggagagccacacuug

SEQ ID NO: 249393 - RNA, 19 nt, Homo sapiens
  misc_RNA (1)...(19): siRNA sense strand
aucaauggcucuuuauuag

SEQ ID NO: 249394 - RNA, 19 nt, Homo sapiens
  misc_RNA (1)...(19): siRNA sense strand
ccaacaccauccucaaguc

SEQ ID NO: 249395 - RNA, 19 nt, Homo sapiens
  misc_RNA (1)...(19): siRNA sense strand
gagcugggccgacagaaac

SEQ ID NO: 249396 - RNA, 19 nt, Homo sapiens
  misc_RNA (1)...(19): siRNA sense strand
cgugcuuucuuuccucuuu

SEQ ID NO: 249397 - RNA, 19 nt, Homo sapiens
  misc_RNA (1)...(19): siRNA sense strand
gcacuuaaaggugucuuca

SEQ ID NO: 249398 - RNA, 19 nt, Homo sapiens
  misc_RNA (1)...(19): siRNA sense strand
ggaccugggcuccaucauc

SEQ ID NO: 249399 - RNA, 19 nt, Homo sapiens
  misc_RNA (1)...(19): siRNA sense strand
aggagaagcagacauguga

SEQ ID NO: 249400 - RNA, 19 nt, Homo sapiens
  misc_RNA (1)...(19): siRNA sense strand
gaugugcgcgugcuuucuu

SEQ ID NO: 249401 - RNA, 19 nt, Homo sapiens
  misc_RNA (1)...(19): siRNA sense strand
agggcaaugucuucucuaa

SEQ ID NO: 249402 - RNA, 19 nt, Homo sapiens
  misc_RNA (1)...(19): siRNA sense strand
uagacgaggaggacuauga

SEQ ID NO: 249403 - RNA, 19 nt, Homo sapiens
  misc_RNA (1)...(19): siRNA sense strand
gagaagcagacaugugaca

SEQ ID NO: 249404 - RNA, 19 nt, Homo sapiens
  misc_RNA (1)...(19): siRNA sense strand
acuuaaaggugucuucauc

SEQ ID NO: 249405 - RNA, 19 nt, Homo sapiens
  misc_RNA (1)...(19): siRNA sense strand
ucucugagcucaccuaccu

SEQ ID NO: 249406 - RNA, 19 nt, Homo sapiens
  misc_RNA (1)...(19): siRNA sense strand
uggcgugacuacaucaaug

SEQ ID NO: 249407 - RNA, 19 nt, Homo sapiens
  misc_RNA (1)...(19): siRNA sense strand
uaacaagcaggacccacuu

SEQ ID NO: 249408 - RNA, 19 nt, Homo sapiens
  misc_RNA (1)...(19): siRNA sense strand
caucacagacucccucaag

SEQ ID NO: 249409 - RNA, 19 nt, Homo sapiens
  misc_RNA (1)...(19): siRNA sense strand
ccacuugagcgccaguuug

SEQ ID NO: 249410 - RNA, 19 nt, Homo sapiens
  misc_RNA (1)...(19): siRNA sense strand
ucaauggcucuuuauuaga

SEQ ID NO: 249411 - RNA, 19 nt, Homo sapiens
  misc_RNA (1)...(19): siRNA sense strand
uuucuuuccucuuuguuga

SEQ ID NO: 249412 - RNA, 19 nt, Homo sapiens
  misc_RNA (1)...(19): siRNA sense strand
gccaucaagcugcugguaa

SEQ ID NO: 249413 - RNA, 19 nt, Homo sapiens
  misc_RNA (1)...(19): siRNA sense strand
gagaugugcgcgugcuuuc

SEQ ID NO: 249414 - RNA, 19 nt, Homo sapiens
  misc_RNA (1)...(19): siRNA sense strand
ucacagacucccucaagca

SEQ ID NO: 249415 - RNA, 19 nt, Homo sapiens
  misc_RNA (1)...(19): siRNA sense strand
cgugggcacucaucugaca

SEQ ID NO: 249416 - RNA, 19 nt, Homo sapiens
  misc_RNA (1)...(19): siRNA sense strand
ccucagugauccagaacca

SEQ ID NO: 249417 - RNA, 19 nt, Homo sapiens
  misc_RNA (1)...(19): siRNA sense strand
cacuugagcgccaguuuga

SEQ ID NO: 249418 - RNA, 19 nt, Homo sapiens
  misc_RNA (1)...(19): siRNA sense strand
cagccugcaccgcauguuu

SEQ ID NO: 249419 - RNA, 19 nt, Homo sapiens
  misc_RNA (1)...(19): siRNA sense strand
uaaaggugucuucaucaca

SEQ ID NO: 249420 - RNA, 19 nt, Homo sapiens
  misc_RNA (1)...(19): siRNA sense strand
gugcuuucuuuccucuuug

SEQ ID NO: 249421 - RNA, 19 nt, Homo sapiens
  misc_RNA (1)...(19): siRNA sense strand
caagcugcugguaaaugua

SEQ ID NO: 249422 - RNA, 19 nt, Homo sapiens
  misc_RNA (1)...(19): siRNA sense strand
acuauccugugguguguug

SEQ ID NO: 249423 - RNA, 19 nt, Homo sapiens
  misc_RNA (1)...(19): siRNA sense strand
ugagcugggccgacagaaa

SEQ ID NO: 249424 - RNA, 19 nt, Homo sapiens
  misc_RNA (1)...(19): siRNA sense strand
ccacuucggguccucagau

SEQ ID NO: 249425 - RNA, 19 nt, Homo sapiens
  misc_RNA (1)...(19): siRNA sense strand
cgaaauggacgugacuucu

SEQ ID NO: 249426 - RNA, 19 nt, Homo sapiens
  misc_RNA (1)...(19): siRNA sense strand
uuaaaggugucuucaucac

SEQ ID NO: 249427 - RNA, 19 nt, Homo sapiens
  misc_RNA (1)...(19): siRNA sense strand
gccaacaccauccucaagu

SEQ ID NO: 249428 - RNA, 19 nt, Homo sapiens
  misc_RNA (1)...(19): siRNA sense strand
guccucagauguguagcaa

SEQ ID NO: 249429 - RNA, 19 nt, Homo sapiens
  misc_RNA (1)...(19): siRNA sense strand
gcugugugcccugaucuug

SEQ ID NO: 249430 - RNA, 19 nt, Homo sapiens
  misc_RNA (1)...(19): siRNA sense strand
uccaucaucugugacauca

SEQ ID NO: 249431 - RNA, 19 nt, Homo sapiens
  misc_RNA (1)...(19): siRNA sense strand
gaugcauucuggcgugacu

SEQ ID NO: 249432 - RNA, 19 nt, Homo sapiens
  misc_RNA (1)...(19): siRNA sense strand
cuacaucaauggcucuuua

SEQ ID NO: 249433 - RNA, 19 nt, Homo sapiens
  misc_RNA (1)...(19): siRNA sense strand
aaauggacgugacuucuua

SEQ ID NO: 249434 - RNA, 19 nt, Homo sapiens
  misc_RNA (1)...(19): siRNA sense strand
ggacgugacuucuuauugg

SEQ ID NO: 249435 - RNA, 19 nt, Homo sapiens
  misc_RNA (1)...(19): siRNA sense strand
caucaauggcucuuuauua

SEQ ID NO: 249436 - RNA, 19 nt, Homo sapiens
  misc_RNA (1)...(19): siRNA sense strand
ggcaaugucuucucuaaca

SEQ ID NO: 249437 - RNA, 19 nt, Homo sapiens
  misc_RNA (1)...(19): siRNA sense strand
ucaccuaccucgaugcauu

SEQ ID NO: 249438 - RNA, 19 nt, Homo sapiens
  misc_RNA (1)...(19): siRNA sense strand
gaaauggacgugacuucuu

SEQ ID NO: 249439 - RNA, 19 nt, Homo sapiens
  misc_RNA (1)...(19): siRNA sense strand
ccaucaagcugcugguaaa

SEQ ID NO: 249440 - RNA, 19 nt, Homo sapiens
  misc_RNA (1)...(19): siRNA sense strand
gcaaugucuucucuaacaa

SEQ ID NO: 249441 - RNA, 19 nt, Homo sapiens
  misc_RNA (1)...(19): siRNA sense strand
gaccugggcuccaucaucu

SEQ ID NO: 249442 - RNA, 19 nt, Homo sapiens
  misc_RNA (1)...(19): siRNA sense strand
ucaagcugcugguaaaugu

SEQ ID NO: 249443 - RNA, 19 nt, Homo sapiens
  misc_RNA (1)...(19): siRNA sense strand
gcagggcaaugucuucucu

SEQ ID NO: 249444 - RNA, 19 nt, Homo sapiens
  misc_RNA (1)...(19): siRNA sense strand
caucaucugugacaucaag

SEQ ID NO: 249445 - RNA, 19 nt, Homo sapiens
  misc_RNA (1)...(19): siRNA sense strand
ugugugcccugaucuugua

SEQ ID NO: 249446 - RNA, 19 nt, Homo sapiens
  misc_RNA (1)...(19): siRNA sense strand
ccaaggagaagcagacaug

SEQ ID NO: 249447 - RNA, 19 nt, Homo sapiens
  misc_RNA (1)...(19): siRNA sense strand
caccagaucccaaggagaa

SEQ ID NO: 249448 - RNA, 19 nt, Homo sapiens
  misc_RNA (1)...(19): siRNA sense strand
ggagacaucaauucgcuau

SEQ ID NO: 249449 - RNA, 19 nt, Homo sapiens
  misc_RNA (1)...(19): siRNA sense strand
gaauacugccagcaugaga

SEQ ID NO: 249450 - RNA, 19 nt, Homo sapiens
  misc_RNA (1)...(19): siRNA sense strand
ccucuuuguugaugucauu

SEQ ID NO: 249451 - RNA, 19 nt, Homo sapiens
  misc_RNA (1)...(19): siRNA sense strand
cgagggagagccacacuug

SEQ ID NO: 249452 - RNA, 19 nt, Homo sapiens
  misc_RNA (1)...(19): siRNA sense strand
aucaauggcucuuuauuag

SEQ ID NO: 249453 - RNA, 19 nt, Homo sapiens
  misc_RNA (1)...(19): siRNA sense strand
ccaacaccauccucaaguc

SEQ ID NO: 249454 - RNA, 19 nt, Homo sapiens
  misc_RNA (1)...(19): siRNA sense strand
gagcugggccgacagaaac

SEQ ID NO: 249455 - RNA, 19 nt, Homo sapiens
  misc_RNA (1)...(19): siRNA sense strand
cgugcuuucuuuccucuuu

SEQ ID NO: 249456 - RNA, 19 nt, Homo sapiens
  misc_RNA (1)...(19): siRNA sense strand
gcacuuaaaggugucuuca

SEQ ID NO: 249457 - RNA, 19 nt, Homo sapiens
  misc_RNA (1)...(19): siRNA sense strand
ggaccugggcuccaucauc

SEQ ID NO: 249458 - RNA, 19 nt, Homo sapiens
  misc_RNA (1)...(19): siRNA sense strand
aggagaagcagacauguga

SEQ ID NO: 249459 - RNA, 19 nt, Homo sapiens
  misc_RNA (1)...(19): siRNA sense strand
gaugugcgcgugcuuucuu

SEQ ID NO: 249460 - RNA, 19 nt, Homo sapiens
  misc_RNA (1)...(19): siRNA sense strand
agggcaaugucuucucuaa

SEQ ID NO: 249461 - RNA, 19 nt, Homo sapiens
  misc_RNA (1)...(19): siRNA sense strand
uagacgaggaggacuauga

SEQ ID NO: 249462 - RNA, 19 nt, Homo sapiens
  misc_RNA (1)...(19): siRNA sense strand
gagaagcagacaugugaca

SEQ ID NO: 249463 - RNA, 19 nt, Homo sapiens
  misc_RNA (1)...(19): siRNA sense strand
acuuaaaggugucuucauc

SEQ ID NO: 249464 - RNA, 19 nt, Homo sapiens
  misc_RNA (1)...(19): siRNA sense strand
ucucugagcucaccuaccu

SEQ ID NO: 249465 - RNA, 19 nt, Homo sapiens
  misc_RNA (1)...(19): siRNA sense strand
uggcgugacuacaucaaug

SEQ ID NO: 249466 - RNA, 19 nt, Homo sapiens
  misc_RNA (1)...(19): siRNA sense strand
uaacaagcaggacccacuu

SEQ ID NO: 249467 - RNA, 19 nt, Homo sapiens
  misc_RNA (1)...(19): siRNA sense strand
caucacagacucccucaag

SEQ ID NO: 249468 - RNA, 19 nt, Homo sapiens
  misc_RNA (1)...(19): siRNA sense strand
ccacuugagcgccaguuug

SEQ ID NO: 249469 - RNA, 19 nt, Homo sapiens
  misc_RNA (1)...(19): siRNA sense strand
ucaauggcucuuuauuaga

SEQ ID NO: 249470 - RNA, 19 nt, Homo sapiens
  misc_RNA (1)...(19): siRNA sense strand
uuucuuuccucuuuguuga

SEQ ID NO: 249471 - RNA, 19 nt, Homo sapiens
  misc_RNA (1)...(19): siRNA sense strand
gccaucaagcugcugguaa

SEQ ID NO: 249472 - RNA, 19 nt, Homo sapiens
  misc_RNA (1)...(19): siRNA sense strand
gagaugugcgcgugcuuuc

SEQ ID NO: 249473 - RNA, 19 nt, Homo sapiens
  misc_RNA (1)...(19): siRNA sense strand
ucacagacucccucaagca

SEQ ID NO: 249474 - RNA, 19 nt, Homo sapiens
  misc_RNA (1)...(19): siRNA sense strand
cgugggcacucaucugaca

SEQ ID NO: 249475 - RNA, 19 nt, Homo sapiens
  misc_RNA (1)...(19): siRNA sense strand
ccucagugauccagaacca

SEQ ID NO: 249476 - RNA, 19 nt, Homo sapiens
  misc_RNA (1)...(19): siRNA sense strand
cacuugagcgccaguuuga

SEQ ID NO: 249477 - RNA, 19 nt, Homo sapiens
  misc_RNA (1)...(19): siRNA sense strand
cagccugcaccgcauguuu

SEQ ID NO: 249478 - RNA, 19 nt, Homo sapiens
  misc_RNA (1)...(19): siRNA sense strand
uaaaggugucuucaucaca

SEQ ID NO: 249479 - RNA, 19 nt, Homo sapiens
  misc_RNA (1)...(19): siRNA sense strand
gugcuuucuuuccucuuug

SEQ ID NO: 249480 - RNA, 19 nt, Homo sapiens
  misc_RNA (1)...(19): siRNA sense strand
caagcugcugguaaaugua

SEQ ID NO: 249481 - RNA, 19 nt, Homo sapiens
  misc_RNA (1)...(19): siRNA sense strand
acuauccugugguguguug

SEQ ID NO: 249482 - RNA, 19 nt, Homo sapiens
  misc_RNA (1)...(19): siRNA sense strand
ugagcugggccgacagaaa

SEQ ID NO: 249483 - RNA, 19 nt, Homo sapiens
  misc_RNA (1)...(19): siRNA sense strand
ccacuucggguccucagau

SEQ ID NO: 249484 - RNA, 19 nt, Homo sapiens
  misc_RNA (1)...(19): siRNA sense strand
cgaaauggacgugacuucu

SEQ ID NO: 249485 - RNA, 19 nt, Homo sapiens
  misc_RNA (1)...(19): siRNA sense strand
uuaaaggugucuucaucac

SEQ ID NO: 249486 - RNA, 19 nt, Homo sapiens
  misc_RNA (1)...(19): siRNA sense strand
gccaacaccauccucaagu

SEQ ID NO: 249487 - RNA, 19 nt, Homo sapiens
  misc_RNA (1)...(19): siRNA sense strand
guccucagauguguagcaa

SEQ ID NO: 249488 - RNA, 19 nt, Homo sapiens
  misc_RNA (1)...(19): siRNA sense strand
gcugugugcccugaucuug

SEQ ID NO: 249489 - RNA, 19 nt, Homo sapiens
  misc_RNA (1)...(19): siRNA sense strand
uccaucaucugugacauca

SEQ ID NO: 249490 - RNA, 19 nt, Homo sapiens
  misc_RNA (1)...(19): siRNA sense strand
gaugcauucuggcgugacu

SEQ ID NO: 249491 - RNA, 19 nt, Homo sapiens
  misc_RNA (1)...(19): siRNA sense strand
gaaacaagccgcauuccaa

SEQ ID NO: 249492 - RNA, 19 nt, Homo sapiens
  misc_RNA (1)...(19): siRNA sense strand
gcaacaagccaaagucaug

SEQ ID NO: 249493 - RNA, 19 nt, Homo sapiens
  misc_RNA (1)...(19): siRNA sense strand
gaaagaacccuagggaaca

SEQ ID NO: 249494 - RNA, 19 nt, Homo sapiens
  misc_RNA (1)...(19): siRNA sense strand
ccagagcucuaccacaaga

SEQ ID NO: 249495 - RNA, 19 nt, Homo sapiens
  misc_RNA (1)...(19): siRNA sense strand
gcacuggcaugaaauacag

SEQ ID NO: 249496 - RNA, 19 nt, Homo sapiens
  misc_RNA (1)...(19): siRNA sense strand
agacagugauggaaauaga

SEQ ID NO: 249497 - RNA, 19 nt, Homo sapiens
  misc_RNA (1)...(19): siRNA sense strand
ggaacauccucaagagcaa

SEQ ID NO: 249498 - RNA, 19 nt, Homo sapiens
  misc_RNA (1)...(19): siRNA sense strand
ugucaucacuaccaagauu

SEQ ID NO: 249499 - RNA, 19 nt, Homo sapiens
  misc_RNA (1)...(19): siRNA sense strand
gagugaagauggcaagaag

SEQ ID NO: 249500 - RNA, 19 nt, Homo sapiens
  misc_RNA (1)...(19): siRNA sense strand
gccgaaagcacaucauuga

SEQ ID NO: 249501 - RNA, 19 nt, Homo sapiens
  misc_RNA (1)...(19): siRNA sense strand
gggagaagguggagaugca

SEQ ID NO: 249502 - RNA, 19 nt, Homo sapiens
  misc_RNA (1)...(19): siRNA sense strand
ggaguuggaucagucacuu

SEQ ID NO: 249503 - RNA, 19 nt, Homo sapiens
  misc_RNA (1)...(19): siRNA sense strand
cagaggaugugcugacugu

SEQ ID NO: 249504 - RNA, 19 nt, Homo sapiens
  misc_RNA (1)...(19): siRNA sense strand
ccgaggcacuggcaugaaa

SEQ ID NO: 249505 - RNA, 19 nt, Homo sapiens
  misc_RNA (1)...(19): siRNA sense strand
ugccagagcucuaccacaa

SEQ ID NO: 249506 - RNA, 19 nt, Homo sapiens
  misc_RNA (1)...(19): siRNA sense strand
caagcuaugucaucacuac

SEQ ID NO: 249507 - RNA, 19 nt, Homo sapiens
  misc_RNA (1)...(19): siRNA sense strand
ccacaagauuggaguugga

SEQ ID NO: 249508 - RNA, 19 nt, Homo sapiens
  misc_RNA (1)...(19): siRNA sense strand
guaccugggucacauuugg

SEQ ID NO: 249509 - RNA, 19 nt, Homo sapiens
  misc_RNA (1)...(19): siRNA sense strand
gcagacagugauggaaaua

SEQ ID NO: 249510 - RNA, 19 nt, Homo sapiens
  misc_RNA (1)...(19): siRNA sense strand
uagacgggcuccugggaaa

SEQ ID NO: 249511 - RNA, 19 nt, Homo sapiens
  misc_RNA (1)...(19): siRNA sense strand
uggaggagaucaagcuaug

SEQ ID NO: 249512 - RNA, 19 nt, Homo sapiens
  misc_RNA (1)...(19): siRNA sense strand
ggacaaagugcagagugaa

SEQ ID NO: 249513 - RNA, 19 nt, Homo sapiens
  misc_RNA (1)...(19): siRNA sense strand
gugcggagcaguugauaga

SEQ ID NO: 249514 - RNA, 19 nt, Homo sapiens
  misc_RNA (1)...(19): siRNA sense strand
caagaagcaacaagccaaa

SEQ ID NO: 249515 - RNA, 19 nt, Homo sapiens
  misc_RNA (1)...(19): siRNA sense strand
gcaggaaaggcugaaagaa

SEQ ID NO: 249516 - RNA, 19 nt, Homo sapiens
  misc_RNA (1)...(19): siRNA sense strand
gaggcacuggcaugaaaua

SEQ ID NO: 249517 - RNA, 19 nt, Homo sapiens
  misc_RNA (1)...(19): siRNA sense strand
gaacauccucaagagcaaa

SEQ ID NO: 249518 - RNA, 19 nt, Homo sapiens
  misc_RNA (1)...(19): siRNA sense strand
gagaucaagcuaugucauc

SEQ ID NO: 249519 - RNA, 19 nt, Homo sapiens
  misc_RNA (1)...(19): siRNA sense strand
ccuguggucucauuacuag

SEQ ID NO: 249520 - RNA, 19 nt, Homo sapiens
  misc_RNA (1)...(19): siRNA sense strand
gcuaugucaucacuaccaa

SEQ ID NO: 249521 - RNA, 19 nt, Homo sapiens
  misc_RNA (1)...(19): siRNA sense strand
ugggauacguggacauugu

SEQ ID NO: 249522 - RNA, 19 nt, Homo sapiens
  misc_RNA (1)...(19): siRNA sense strand
gaggaugugcugacuguag

SEQ ID NO: 249523 - RNA, 19 nt, Homo sapiens
  misc_RNA (1)...(19): siRNA sense strand
gaagcaacaagccaaaguc

SEQ ID NO: 249524 - RNA, 19 nt, Homo sapiens
  misc_RNA (1)...(19): siRNA sense strand
caagauuggaguuggauca

SEQ ID NO: 249525 - RNA, 19 nt, Homo sapiens
  misc_RNA (1)...(19): siRNA sense strand
uuggaucagucacuuggua

SEQ ID NO: 249526 - RNA, 19 nt, Homo sapiens
  misc_RNA (1)...(19): siRNA sense strand
gagauugugcgagccauga

SEQ ID NO: 249527 - RNA, 19 nt, Homo sapiens
  misc_RNA (1)...(19): siRNA sense strand
gcggagcaguugauagaac

SEQ ID NO: 249528 - RNA, 19 nt, Homo sapiens
  misc_RNA (1)...(19): siRNA sense strand
ccaaagucauggaccuucu

SEQ ID NO: 249529 - RNA, 19 nt, Homo sapiens
  misc_RNA (1)...(19): siRNA sense strand
aggacaaagugcagaguga

SEQ ID NO: 249530 - RNA, 19 nt, Homo sapiens
  misc_RNA (1)...(19): siRNA sense strand
acaagccgcauuccaagaa

SEQ ID NO: 249531 - RNA, 19 nt, Homo sapiens
  misc_RNA (1)...(19): siRNA sense strand
cuagggaacauccucaaga

SEQ ID NO: 249532 - RNA, 19 nt, Homo sapiens
  misc_RNA (1)...(19): siRNA sense strand
cuucggguauccugucuug

SEQ ID NO: 249533 - RNA, 19 nt, Homo sapiens
  misc_RNA (1)...(19): siRNA sense strand
uagggaacauccucaagag

SEQ ID NO: 249534 - RNA, 19 nt, Homo sapiens
  misc_RNA (1)...(19): siRNA sense strand
aaagaacccuagggaacau

SEQ ID NO: 249535 - RNA, 19 nt, Homo sapiens
  misc_RNA (1)...(19): siRNA sense strand
cggagcaguugauagaaca

SEQ ID NO: 249536 - RNA, 19 nt, Homo sapiens
  misc_RNA (1)...(19): siRNA sense strand
gaggagaucaagcuauguc

SEQ ID NO: 249537 - RNA, 19 nt, Homo sapiens
  misc_RNA (1)...(19): siRNA sense strand
ccuaugagcaugguguaaa

SEQ ID NO: 249538 - RNA, 19 nt, Homo sapiens
  misc_RNA (1)...(19): siRNA sense strand
caggaaaggcugaaagaac

SEQ ID NO: 249539 - RNA, 19 nt, Homo sapiens
  misc_RNA (1)...(19): siRNA sense strand
cacauuugguucucagauc

SEQ ID NO: 249540 - RNA, 19 nt, Homo sapiens
  misc_RNA (1)...(19): siRNA sense strand
gagcucuaccacaagauug

SEQ ID NO: 249541 - RNA, 19 nt, Homo sapiens
  misc_RNA (1)...(19): siRNA sense strand
ccucuagccuguggucuca

SEQ ID NO: 249542 - RNA, 19 nt, Homo sapiens
  misc_RNA (1)...(19): siRNA sense strand
gacuguagccuaugagcau

SEQ ID NO: 249543 - RNA, 19 nt, Homo sapiens
  misc_RNA (1)...(19): siRNA sense strand
ccgcagacagugauggaaa

SEQ ID NO: 249544 - RNA, 19 nt, Homo sapiens
  misc_RNA (1)...(19): siRNA sense strand
ucuagccuguggucucauu

SEQ ID NO: 249545 - RNA, 19 nt, Homo sapiens
  misc_RNA (1)...(19): siRNA sense strand
ucugauuccuccagugugu

SEQ ID NO: 249546 - RNA, 19 nt, Homo sapiens
  misc_RNA (1)...(19): siRNA sense strand
gaaguguacgcagcaggaa

SEQ ID NO: 249547 - RNA, 19 nt, Homo sapiens
  misc_RNA (1)...(19): siRNA sense strand
agaucaagcuaugucauca

SEQ ID NO: 249548 - RNA, 19 nt, Homo sapiens
  misc_RNA (1)...(19): siRNA sense strand
cguggugucuccgcaguga

SEQ ID NO: 249549 - RNA, 19 nt, Homo sapiens
  misc_RNA (1)...(19): siRNA sense strand
caaagugcagagugaagau

SEQ ID NO: 249550 - RNA, 19 nt, Homo sapiens
  misc_RNA (1)...(19): siRNA sense strand
accaguggcucaaggacaa

SEQ ID NO: 249551 - RNA, 19 nt, Homo sapiens
  misc_RNA (1)...(19): siRNA sense strand
gcugggauacguggacauu

SEQ ID NO: 249552 - RNA, 19 nt, Homo sapiens
  misc_RNA (1)...(19): siRNA sense strand
gugaagauggcaagaagca

SEQ ID NO: 249553 - RNA, 19 nt, Homo sapiens
  misc_RNA (1)...(19): siRNA sense strand
aagcggagcaccaucuguu

SEQ ID NO: 249554 - RNA, 19 nt, Homo sapiens
  misc_RNA (1)...(19): siRNA sense strand
cuagguaccugggucacau

SEQ ID NO: 249555 - RNA, 19 nt, Homo sapiens
  misc_RNA (1)...(19): siRNA sense strand
cgcagacagugauggaaau

SEQ ID NO: 249556 - RNA, 19 nt, Homo sapiens
  misc_RNA (1)...(19): siRNA sense strand
gggcgagucccagauacuu

SEQ ID NO: 249557 - RNA, 19 nt, Homo sapiens
  misc_RNA (1)...(19): siRNA sense strand
ggagaucaagcuaugucau

SEQ ID NO: 249558 - RNA, 19 nt, Homo sapiens
  misc_RNA (1)...(19): siRNA sense strand
caagccgcauuccaagaag

SEQ ID NO: 249559 - RNA, 19 nt, Homo sapiens
  misc_RNA (1)...(19): siRNA sense strand
caaagucauggaccuucuu

SEQ ID NO: 249560 - RNA, 19 nt, Homo sapiens
  misc_RNA (1)...(19): siRNA sense strand
caugaaauacaggaaccua

SEQ ID NO: 249561 - RNA, 19 nt, Homo sapiens
  misc_RNA (1)...(19): siRNA sense strand
acaggaaccuagggaaguc

SEQ ID NO: 249562 - RNA, 19 nt, Homo sapiens
  misc_RNA (1)...(19): siRNA sense strand
gcggagcaccaucuguuuc

SEQ ID NO: 249563 - RNA, 19 nt, Homo sapiens
  misc_RNA (1)...(19): siRNA sense strand
uaugucaucacuaccaaga

SEQ ID NO: 249564 - RNA, 19 nt, Homo sapiens
  misc_RNA (1)...(19): siRNA sense strand
ugugcugacuguagccuau

SEQ ID NO: 249565 - RNA, 19 nt, Homo sapiens
  misc_RNA (1)...(19): siRNA sense strand
acaaagugcagagugaaga

SEQ ID NO: 249566 - RNA, 19 nt, Homo sapiens
  misc_RNA (1)...(19): siRNA sense strand
ugcgagccaugaccuaugu

SEQ ID NO: 249567 - RNA, 19 nt, Homo sapiens
  misc_RNA (1)...(19): siRNA sense strand
auugagggcuugcgaggau

SEQ ID NO: 249568 - RNA, 19 nt, Homo sapiens
  misc_RNA (1)...(19): siRNA sense strand
gacaaagugcagagugaag

SEQ ID NO: 249569 - RNA, 19 nt, Homo sapiens
  misc_RNA (1)...(19): siRNA sense strand
caaagaacauuuagccuua

SEQ ID NO: 249570 - RNA, 19 nt, Homo sapiens
  misc_RNA (1)...(19): siRNA sense strand
gaacuucggucgucgcaaa

SEQ ID NO: 249571 - RNA, 19 nt, Homo sapiens
  misc_RNA (1)...(19): siRNA sense strand
ggaggaaacuggccuucua

SEQ ID NO: 249572 - RNA, 19 nt, Homo sapiens
  misc_RNA (1)...(19): siRNA sense strand
gaacauacaugacccuuuu

SEQ ID NO: 249573 - RNA, 19 nt, Homo sapiens
  misc_RNA (1)...(19): siRNA sense strand
ggaagcaucccacucauuu

SEQ ID NO: 249574 - RNA, 19 nt, Homo sapiens
  misc_RNA (1)...(19): siRNA sense strand
gcccuucagucucaaauua

SEQ ID NO: 249575 - RNA, 19 nt, Homo sapiens
  misc_RNA (1)...(19): siRNA sense strand
uuacagcccuggaugguua

SEQ ID NO: 249576 - RNA, 19 nt, Homo sapiens
  misc_RNA (1)...(19): siRNA sense strand
cagcauguauguuucuaua

SEQ ID NO: 249577 - RNA, 19 nt, Homo sapiens
  misc_RNA (1)...(19): siRNA sense strand
gaauaugcccuacugguuu

SEQ ID NO: 249578 - RNA, 19 nt, Homo sapiens
  misc_RNA (1)...(19): siRNA sense strand
ccaaacagcggguuacuuu

SEQ ID NO: 249579 - RNA, 19 nt, Homo sapiens
  misc_RNA (1)...(19): siRNA sense strand
gauucuaacugcaaagauu

SEQ ID NO: 249580 - RNA, 19 nt, Homo sapiens
  misc_RNA (1)...(19): siRNA sense strand
uaacaggacugaaauuggu

SEQ ID NO: 249581 - RNA, 19 nt, Homo sapiens
  misc_RNA (1)...(19): siRNA sense strand
gaucacagauacuuacaag

SEQ ID NO: 249582 - RNA, 19 nt, Homo sapiens
  misc_RNA (1)...(19): siRNA sense strand
gaauaccgaugacagaaca

SEQ ID NO: 249583 - RNA, 19 nt, Homo sapiens
  misc_RNA (1)...(19): siRNA sense strand
uauaauggcuuucaaugca

SEQ ID NO: 249584 - RNA, 19 nt, Homo sapiens
  misc_RNA (1)...(19): siRNA sense strand
ggacugaaauugguagaag

SEQ ID NO: 249585 - RNA, 19 nt, Homo sapiens
  misc_RNA (1)...(19): siRNA sense strand
cuggguggcucauguguua

SEQ ID NO: 249586 - RNA, 19 nt, Homo sapiens
  misc_RNA (1)...(19): siRNA sense strand
aaacgaaguaucaguagua

SEQ ID NO: 249587 - RNA, 19 nt, Homo sapiens
  misc_RNA (1)...(19): siRNA sense strand
uaaauaccguguccaaucu

SEQ ID NO: 249588 - RNA, 19 nt, Homo sapiens
  misc_RNA (1)...(19): siRNA sense strand
gagcaucaaaccagaauug

SEQ ID NO: 249589 - RNA, 19 nt, Homo sapiens
  misc_RNA (1)...(19): siRNA sense strand
agaccaagcuuucuucagu

SEQ ID NO: 249590 - RNA, 19 nt, Homo sapiens
  misc_RNA (1)...(19): siRNA sense strand
gauaauacugccucugauu

SEQ ID NO: 249591 - RNA, 19 nt, Homo sapiens
  misc_RNA (1)...(19): siRNA sense strand
ccuugaaucugccgacuuu

SEQ ID NO: 249592 - RNA, 19 nt, Homo sapiens
  misc_RNA (1)...(19): siRNA sense strand
gaccaagcuuucuucaguu

SEQ ID NO: 249593 - RNA, 19 nt, Homo sapiens
  misc_RNA (1)...(19): siRNA sense strand
acacaagggaucacagaua

SEQ ID NO: 249594 - RNA, 19 nt, Homo sapiens
  misc_RNA (1)...(19): siRNA sense strand
gauuauugcuuggguuaga

SEQ ID NO: 249595 - RNA, 19 nt, Homo sapiens
  misc_RNA (1)...(19): siRNA sense strand
cagaacacccgacgugauu

SEQ ID NO: 249596 - RNA, 19 nt, Homo sapiens
  misc_RNA (1)...(19): siRNA sense strand
gcacuggcgacuucuuaaa

SEQ ID NO: 249597 - RNA, 19 nt, Homo sapiens
  misc_RNA (1)...(19): siRNA sense strand
gaagaaacacaagggauca

SEQ ID NO: 249598 - RNA, 19 nt, Homo sapiens
  misc_RNA (1)...(19): siRNA sense strand
guuagaauaugcccuacug

SEQ ID NO: 249599 - RNA, 19 nt, Homo sapiens
  misc_RNA (1)...(19): siRNA sense strand
gaagagggaguacccaaag

SEQ ID NO: 249600 - RNA, 19 nt, Homo sapiens
  misc_RNA (1)...(19): siRNA sense strand
ucguuacucuuucagauuu

SEQ ID NO: 249601 - RNA, 19 nt, Homo sapiens
  misc_RNA (1)...(19): siRNA sense strand
gccaugcccuacagauuau

SEQ ID NO: 249602 - RNA, 19 nt, Homo sapiens
  misc_RNA (1)...(19): siRNA sense strand
ggacauugccgucgauggu

SEQ ID NO: 249603 - RNA, 19 nt, Homo sapiens
  misc_RNA (1)...(19): siRNA sense strand
uaacugcaaagauugguuu

SEQ ID NO: 249604 - RNA, 19 nt, Homo sapiens
  misc_RNA (1)...(19): siRNA sense strand
gaggaaucguuacucuuuc

SEQ ID NO: 249605 - RNA, 19 nt, Homo sapiens
  misc_RNA (1)...(19): siRNA sense strand
gaacauuuagccuuauugg

SEQ ID NO: 249606 - RNA, 19 nt, Homo sapiens
  misc_RNA (1)...(19): siRNA sense strand
ucguaguccugcugaguua

SEQ ID NO: 249607 - RNA, 19 nt, Homo sapiens
  misc_RNA (1)...(19): siRNA sense strand
cagauuauugcuuggguua

SEQ ID NO: 249608 - RNA, 19 nt, Homo sapiens
  misc_RNA (1)...(19): siRNA sense strand
gcaauucggugggccaaac

SEQ ID NO: 249609 - RNA, 19 nt, Homo sapiens
  misc_RNA (1)...(19): siRNA sense strand
guuacaggaugaaggauca

SEQ ID NO: 249610 - RNA, 19 nt, Homo sapiens
  misc_RNA (1)...(19): siRNA sense strand
uugguggacuccuaaagua

SEQ ID NO: 249611 - RNA, 19 nt, Homo sapiens
  misc_RNA (1)...(19): siRNA sense strand
cacaagggaucacagauac

SEQ ID NO: 249612 - RNA, 19 nt, Homo sapiens
  misc_RNA (1)...(19): siRNA sense strand
gccagcaguucugacauuu

SEQ ID NO: 249613 - RNA, 19 nt, Homo sapiens
  misc_RNA (1)...(19): siRNA sense strand
ggaacauacaugacccuuu

SEQ ID NO: 249614 - RNA, 19 nt, Homo sapiens
  misc_RNA (1)...(19): siRNA sense strand
cgaaguaucaguaguaaaa

SEQ ID NO: 249615 - RNA, 19 nt, Homo sapiens
  misc_RNA (1)...(19): siRNA sense strand
gacugaaauugguagaaga

SEQ ID NO: 249616 - RNA, 19 nt, Homo sapiens
  misc_RNA (1)...(19): siRNA sense strand
ccugcugaguuaugcuuua

SEQ ID NO: 249617 - RNA, 19 nt, Homo sapiens
  misc_RNA (1)...(19): siRNA sense strand
uaauggcuuucaaugcaaa

SEQ ID NO: 249618 - RNA, 19 nt, Homo sapiens
  misc_RNA (1)...(19): siRNA sense strand
ugaguuaugcuuuacauca

SEQ ID NO: 249619 - RNA, 19 nt, Homo sapiens
  misc_RNA (1)...(19): siRNA sense strand
uugaugcggucuacguuaa

SEQ ID NO: 249620 - RNA, 19 nt, Homo sapiens
  misc_RNA (1)...(19): siRNA sense strand
gguuggugguucuuucuug

SEQ ID NO: 249621 - RNA, 19 nt, Homo sapiens
  misc_RNA (1)...(19): siRNA sense strand
aaaccagaauugucgaaca

SEQ ID NO: 249622 - RNA, 19 nt, Homo sapiens
  misc_RNA (1)...(19): siRNA sense strand
uuaaauaccguguccaauc

SEQ ID NO: 249623 - RNA, 19 nt, Homo sapiens
  misc_RNA (1)...(19): siRNA sense strand
agccaugcccuacagauua

SEQ ID NO: 249624 - RNA, 19 nt, Homo sapiens
  misc_RNA (1)...(19): siRNA sense strand
gacucuucaugaucuauuu

SEQ ID NO: 249625 - RNA, 19 nt, Homo sapiens
  misc_RNA (1)...(19): siRNA sense strand
cuaggacucuucaugaucu

SEQ ID NO: 249626 - RNA, 19 nt, Homo sapiens
  misc_RNA (1)...(19): siRNA sense strand
gguugggcguuaacuaugu

SEQ ID NO: 249627 - RNA, 19 nt, Homo sapiens
  misc_RNA (1)...(19): siRNA sense strand
gaugcggucuacguuaaga

SEQ ID NO: 249628 - RNA, 19 nt, Homo sapiens
  misc_RNA (1)...(19): siRNA sense strand
aauaugcccuacugguuug

SEQ ID NO: 249629 - RNA, 19 nt, Homo sapiens
  misc_RNA (1)...(19): siRNA sense strand
gaacuaagcagcauuuugc

SEQ ID NO: 249630 - RNA, 19 nt, Homo sapiens
  misc_RNA (1)...(19): siRNA sense strand
caagggaucacagauacuu

SEQ ID NO: 249631 - RNA, 19 nt, Homo sapiens
  misc_RNA (1)...(19): siRNA sense strand
ggacucuucaugaucuauu

SEQ ID NO: 249632 - RNA, 19 nt, Homo sapiens
  misc_RNA (1)...(19): siRNA sense strand
auacuaggacucuucauga

SEQ ID NO: 249633 - RNA, 19 nt, Homo sapiens
  misc_RNA (1)...(19): siRNA sense strand
gaucaucuucguggaaaug

SEQ ID NO: 249634 - RNA, 19 nt, Homo sapiens
  misc_RNA (1)...(19): siRNA sense strand
guagauccccucacaguaa

SEQ ID NO: 249635 - RNA, 19 nt, Homo sapiens
  misc_RNA (1)...(19): siRNA sense strand
gcugaguuaugcuuuacau

SEQ ID NO: 249636 - RNA, 19 nt, Homo sapiens
  misc_RNA (1)...(19): siRNA sense strand
cuacuacucuuucuuuacg

SEQ ID NO: 249637 - RNA, 19 nt, Homo sapiens
  misc_RNA (1)...(19): siRNA sense strand
aaacacaagggaucacaga

SEQ ID NO: 249638 - RNA, 19 nt, Homo sapiens
  misc_RNA (1)...(19): siRNA sense strand
ucacagauacuuacaagcu

SEQ ID NO: 249639 - RNA, 19 nt, Homo sapiens
  misc_RNA (1)...(19): siRNA sense strand
ucaaugcaaagguuaguga

SEQ ID NO: 249640 - RNA, 19 nt, Homo sapiens
  misc_RNA (1)...(19): siRNA sense strand
gcuauacagaccaagcuuu

SEQ ID NO: 249641 - RNA, 19 nt, Homo sapiens
  misc_RNA (1)...(19): siRNA sense strand
agaauaugcccuacugguu

SEQ ID NO: 249642 - RNA, 19 nt, Homo sapiens
  misc_RNA (1)...(19): siRNA sense strand
ugccagcaguucugacauu

SEQ ID NO: 249643 - RNA, 19 nt, Homo sapiens
  misc_RNA (1)...(19): siRNA sense strand
gggaguacccaaagaacau

SEQ ID NO: 249644 - RNA, 19 nt, Homo sapiens
  misc_RNA (1)...(19): siRNA sense strand
ggauuugguuggugguucu

SEQ ID NO: 249645 - RNA, 19 nt, Homo sapiens
  misc_RNA (1)...(19): siRNA sense strand
guugaugcggucuacguua

SEQ ID NO: 249646 - RNA, 19 nt, Homo sapiens
  misc_RNA (1)...(19): siRNA sense strand
aaaguuacaggaugaagga

SEQ ID NO: 249647 - RNA, 19 nt, Homo sapiens
  misc_RNA (1)...(19): siRNA sense strand
ggaguccauuauuuguguu

SEQ ID NO: 249648 - RNA, 19 nt, Homo sapiens
  misc_RNA (1)...(19): siRNA sense strand
gaguuaugcuuuacaucag

SEQ ID NO: 249649 - RNA, 19 nt, Homo sapiens
  misc_RNA (1)...(19): siRNA sense strand
aaugguuccuuugcagaua

SEQ ID NO: 249650 - RNA, 19 nt, Homo sapiens
  misc_RNA (1)...(19): siRNA sense strand
guaacaggacugaaauugg

SEQ ID NO: 249651 - RNA, 19 nt, Homo sapiens
  misc_RNA (1)...(19): siRNA sense strand
accaagcuuucuucaguuu

SEQ ID NO: 249652 - RNA, 19 nt, Homo sapiens
  misc_RNA (1)...(19): siRNA sense strand
gaugguugggcguuaacua

SEQ ID NO: 249653 - RNA, 19 nt, Homo sapiens
  misc_RNA (1)...(19): siRNA sense strand
cgucgaugguugggcguua

SEQ ID NO: 249654 - RNA, 19 nt, Homo sapiens
  misc_RNA (1)...(19): siRNA sense strand
ggucuacguuaagaacuuc

SEQ ID NO: 249655 - RNA, 19 nt, Homo sapiens
  misc_RNA (1)...(19): siRNA sense strand
cagcaguucugacauuuug

SEQ ID NO: 249656 - RNA, 19 nt, Homo sapiens
  misc_RNA (1)...(19): siRNA sense strand
aacgaaguaucaguaguaa

SEQ ID NO: 249657 - RNA, 19 nt, Homo sapiens
  misc_RNA (1)...(19): siRNA sense strand
cggcacuggcgacuucuua

SEQ ID NO: 249658 - RNA, 19 nt, Homo sapiens
  misc_RNA (1)...(19): siRNA sense strand
gggaauaccgaugacagaa

SEQ ID NO: 249659 - RNA, 19 nt, Homo sapiens
  misc_RNA (1)...(19): siRNA sense strand
ucgcaaaucuuggcuuguc

SEQ ID NO: 249660 - RNA, 19 nt, Homo sapiens
  misc_RNA (1)...(19): siRNA sense strand
aaucguuacucuuucagau

SEQ ID NO: 249661 - RNA, 19 nt, Homo sapiens
  misc_RNA (1)...(19): siRNA sense strand
uaccggcacuggcgacuuc

SEQ ID NO: 249662 - RNA, 19 nt, Homo sapiens
  misc_RNA (1)...(19): siRNA sense strand
guggacuccuaaaguagaa

SEQ ID NO: 249663 - RNA, 19 nt, Homo sapiens
  misc_RNA (1)...(19): siRNA sense strand
gguggacuccuaaaguaga

SEQ ID NO: 249664 - RNA, 19 nt, Homo sapiens
  misc_RNA (1)...(19): siRNA sense strand
acaaagccaugcccuacag

SEQ ID NO: 249665 - RNA, 19 nt, Homo sapiens
  misc_RNA (1)...(19): siRNA sense strand
ggaguacccaaagaacauu

SEQ ID NO: 249666 - RNA, 19 nt, Homo sapiens
  misc_RNA (1)...(19): siRNA sense strand
aagagggaguacccaaaga

SEQ ID NO: 249667 - RNA, 19 nt, Homo sapiens
  misc_RNA (1)...(19): siRNA sense strand
guagcucuuuggcuuguag

SEQ ID NO: 249668 - RNA, 19 nt, Homo sapiens
  misc_RNA (1)...(19): siRNA sense strand
ccagggaauuucagucacu

SEQ ID NO: 249669 - RNA, 19 nt, Homo sapiens
  misc_RNA (1)...(19): siRNA sense strand
gaacaagcauguggaguuu

SEQ ID NO: 249670 - RNA, 19 nt, Homo sapiens
  misc_RNA (1)...(19): siRNA sense strand
caaaguggcucauaucaug

SEQ ID NO: 249671 - RNA, 19 nt, Homo sapiens
  misc_RNA (1)...(19): siRNA sense strand
ggaacaaaguggcucauau

SEQ ID NO: 249672 - RNA, 19 nt, Homo sapiens
  misc_RNA (1)...(19): siRNA sense strand
aaacauuacucugggauuu

SEQ ID NO: 249673 - RNA, 19 nt, Homo sapiens
  misc_RNA (1)...(19): siRNA sense strand
uguaugggcucuaugagua

SEQ ID NO: 249674 - RNA, 19 nt, Homo sapiens
  misc_RNA (1)...(19): siRNA sense strand
gaacaaaguggcucauauc

SEQ ID NO: 249675 - RNA, 19 nt, Homo sapiens
  misc_RNA (1)...(19): siRNA sense strand
ccucugcacuuccaccuua

SEQ ID NO: 249676 - RNA, 19 nt, Homo sapiens
  misc_RNA (1)...(19): siRNA sense strand
gagcucaagucugaaguuu

SEQ ID NO: 249677 - RNA, 19 nt, Homo sapiens
  misc_RNA (1)...(19): siRNA sense strand
caucagcacucccuacaug

SEQ ID NO: 249678 - RNA, 19 nt, Homo sapiens
  misc_RNA (1)...(19): siRNA sense strand
ggucaaauccguccuguuc

SEQ ID NO: 249679 - RNA, 19 nt, Homo sapiens
  misc_RNA (1)...(19): siRNA sense strand
ccaagaagcuccgggugaa

SEQ ID NO: 249680 - RNA, 19 nt, Homo sapiens
  misc_RNA (1)...(19): siRNA sense strand
gauaagcugcggaagauga

SEQ ID NO: 249681 - RNA, 19 nt, Homo sapiens
  misc_RNA (1)...(19): siRNA sense strand
ugacacggauaucaccuuu

SEQ ID NO: 249682 - RNA, 19 nt, Homo sapiens
  misc_RNA (1)...(19): siRNA sense strand
ggaaagcccgugucucugu

SEQ ID NO: 249683 - RNA, 19 nt, Homo sapiens
  misc_RNA (1)...(19): siRNA sense strand
uaaaggucauucacuggaa

SEQ ID NO: 249684 - RNA, 19 nt, Homo sapiens
  misc_RNA (1)...(19): siRNA sense strand
gcucugaggugcuuaugag

SEQ ID NO: 249685 - RNA, 19 nt, Homo sapiens
  misc_RNA (1)...(19): siRNA sense strand
ugaccuuccuggaguauga

SEQ ID NO: 249686 - RNA, 19 nt, Homo sapiens
  misc_RNA (1)...(19): siRNA sense strand
caugcucucuacauccuua

SEQ ID NO: 249687 - RNA, 19 nt, Homo sapiens
  misc_RNA (1)...(19): siRNA sense strand
ucaaugccgucaucaaaca

SEQ ID NO: 249688 - RNA, 19 nt, Homo sapiens
  misc_RNA (1)...(19): siRNA sense strand
ggaaugugcagcugucaga

SEQ ID NO: 249689 - RNA, 19 nt, Homo sapiens
  misc_RNA (1)...(19): siRNA sense strand
guucaaaggucagcaaguc

SEQ ID NO: 249690 - RNA, 19 nt, Homo sapiens
  misc_RNA (1)...(19): siRNA sense strand
cggcuuugcugcccugaaa

SEQ ID NO: 249691 - RNA, 19 nt, Homo sapiens
  misc_RNA (1)...(19): siRNA sense strand
gcucaagucugaaguuucc

SEQ ID NO: 249692 - RNA, 19 nt, Homo sapiens
  misc_RNA (1)...(19): siRNA sense strand
caaguuccguuccaacaag

SEQ ID NO: 249693 - RNA, 19 nt, Homo sapiens
  misc_RNA (1)...(19): siRNA sense strand
gcagagcugugggcugugu

SEQ ID NO: 249694 - RNA, 19 nt, Homo sapiens
  misc_RNA (1)...(19): siRNA sense strand
ucaccuggauuuaccuguu

SEQ ID NO: 249695 - RNA, 19 nt, Homo sapiens
  misc_RNA (1)...(19): siRNA sense strand
gcuucgacauuaccaaguu

SEQ ID NO: 249696 - RNA, 19 nt, Homo sapiens
  misc_RNA (1)...(19): siRNA sense strand
guacaaggagggccaguuc

SEQ ID NO: 249697 - RNA, 19 nt, Homo sapiens
  misc_RNA (1)...(19): siRNA sense strand
uggauaagcugcggaagau

SEQ ID NO: 249698 - RNA, 19 nt, Homo sapiens
  misc_RNA (1)...(19): siRNA sense strand
gcuaccacaucguguacaa

SEQ ID NO: 249699 - RNA, 19 nt, Homo sapiens
  misc_RNA (1)...(19): siRNA sense strand
aggcugaugucaacaguga

SEQ ID NO: 249700 - RNA, 19 nt, Homo sapiens
  misc_RNA (1)...(19): siRNA sense strand
caccuggauuuaccuguuu

SEQ ID NO: 249701 - RNA, 19 nt, Homo sapiens
  misc_RNA (1)...(19): siRNA sense strand
gacaauccacguugcuauu

SEQ ID NO: 249702 - RNA, 19 nt, Homo sapiens
  misc_RNA (1)...(19): siRNA sense strand
ucaaaacccucaaggaaga

SEQ ID NO: 249703 - RNA, 19 nt, Homo sapiens
  misc_RNA (1)...(19): siRNA sense strand
ggagagagucaucguccuu

SEQ ID NO: 249704 - RNA, 19 nt, Homo sapiens
  misc_RNA (1)...(19): siRNA sense strand
ggauuuauggucugaugaa

SEQ ID NO: 249705 - RNA, 19 nt, Homo sapiens
  misc_RNA (1)...(19): siRNA sense strand
ggagaaaugcgagacaauc

SEQ ID NO: 249706 - RNA, 19 nt, Homo sapiens
  misc_RNA (1)...(19): siRNA sense strand
cguguggacuucuacaaug

SEQ ID NO: 249707 - RNA, 19 nt, Homo sapiens
  misc_RNA (1)...(19): siRNA sense strand
caaaaccccuuccuugugu

SEQ ID NO: 249708 - RNA, 19 nt, Homo sapiens
  misc_RNA (1)...(19): siRNA sense strand
ggaguacgaccggagguuu

SEQ ID NO: 249709 - RNA, 19 nt, Homo sapiens
  misc_RNA (1)...(19): siRNA sense strand
ccuuauugcugacuccauu

SEQ ID NO: 249710 - RNA, 19 nt, Homo sapiens
  misc_RNA (1)...(19): siRNA sense strand
gcuuugcugcccugaaaua

SEQ ID NO: 249711 - RNA, 19 nt, Homo sapiens
  misc_RNA (1)...(19): siRNA sense strand
gcccaacgccuacaugauc

SEQ ID NO: 249712 - RNA, 19 nt, Homo sapiens
  misc_RNA (1)...(19): siRNA sense strand
gggacccucuucacauuca

SEQ ID NO: 249713 - RNA, 19 nt, Homo sapiens
  misc_RNA (1)...(19): siRNA sense strand
aagcggaguugcugucaau

SEQ ID NO: 249714 - RNA, 19 nt, Homo sapiens
  misc_RNA (1)...(19): siRNA sense strand
ucgcucagcuguccaugga

SEQ ID NO: 249715 - RNA, 19 nt, Homo sapiens
  misc_RNA (1)...(19): siRNA sense strand
agaacaagcauguggaguu

SEQ ID NO: 249716 - RNA, 19 nt, Homo sapiens
  misc_RNA (1)...(19): siRNA sense strand
acacggauaucaccuuugc

SEQ ID NO: 249717 - RNA, 19 nt, Homo sapiens
  misc_RNA (1)...(19): siRNA sense strand
gcugaugucaacagugaaa

SEQ ID NO: 249718 - RNA, 19 nt, Homo sapiens
  misc_RNA (1)...(19): siRNA sense strand
ucugggagcuucgaagaug

SEQ ID NO: 249719 - RNA, 19 nt, Homo sapiens
  misc_RNA (1)...(19): siRNA sense strand
ucaaauccguccuguucca

SEQ ID NO: 249720 - RNA, 19 nt, Homo sapiens
  misc_RNA (1)...(19): siRNA sense strand
caauaccgcaucugucuca

SEQ ID NO: 249721 - RNA, 19 nt, Homo sapiens
  misc_RNA (1)...(19): siRNA sense strand
acaaggagggccaguucua

SEQ ID NO: 249722 - RNA, 19 nt, Homo sapiens
  misc_RNA (1)...(19): siRNA sense strand
gaguaugacggcaaucuuc

SEQ ID NO: 249723 - RNA, 19 nt, Homo sapiens
  misc_RNA (1)...(19): siRNA sense strand
gcaaccacuccaagaccua

SEQ ID NO: 249724 - RNA, 19 nt, Homo sapiens
  misc_RNA (1)...(19): siRNA sense strand
caagcaauaccgcaucugu

SEQ ID NO: 249725 - RNA, 19 nt, Homo sapiens
  misc_RNA (1)...(19): siRNA sense strand
ggcgagagcgcuucacugu

SEQ ID NO: 249726 - RNA, 19 nt, Homo sapiens
  misc_RNA (1)...(19): siRNA sense strand
gagacaauccacguugcua

SEQ ID NO: 249727 - RNA, 19 nt, Homo sapiens
  misc_RNA (1)...(19): siRNA sense strand
ccggagguuuguaggcuuu

SEQ ID NO: 249728 - RNA, 19 nt, Homo sapiens
  misc_RNA (1)...(19): siRNA sense strand
gcacccaccuguacuuccu

SEQ ID NO: 249729 - RNA, 19 nt, Homo sapiens
  misc_RNA (1)...(19): siRNA sense strand
aggacgaccugugcuauga

SEQ ID NO: 249730 - RNA, 19 nt, Homo sapiens
  misc_RNA (1)...(19): siRNA sense strand
gugaaaaccuccagaagca

SEQ ID NO: 249731 - RNA, 19 nt, Homo sapiens
  misc_RNA (1)...(19): siRNA sense strand
ggaguaugacggcaaucuu

SEQ ID NO: 249732 - RNA, 19 nt, Homo sapiens
  misc_RNA (1)...(19): siRNA sense strand
acauuacucugggauuuau

SEQ ID NO: 249733 - RNA, 19 nt, Homo sapiens
  misc_RNA (1)...(19): siRNA sense strand
gacggaacccucugcacuu

SEQ ID NO: 249734 - RNA, 19 nt, Homo sapiens
  misc_RNA (1)...(19): siRNA sense strand
ccacgcacccacaaacuuc

SEQ ID NO: 249735 - RNA, 19 nt, Homo sapiens
  misc_RNA (1)...(19): siRNA sense strand
ccagugaggcugaugucaa

SEQ ID NO: 249736 - RNA, 19 nt, Homo sapiens
  misc_RNA (1)...(19): siRNA sense strand
agagagucaucguccuuga

SEQ ID NO: 249737 - RNA, 19 nt, Homo sapiens
  misc_RNA (1)...(19): siRNA sense strand
guggagaaaugcgagacaa

SEQ ID NO: 249738 - RNA, 19 nt, Homo sapiens
  misc_RNA (1)...(19): siRNA sense strand
gagcuucgaagauggaaag

SEQ ID NO: 249739 - RNA, 19 nt, Homo sapiens
  misc_RNA (1)...(19): siRNA sense strand
uggaagaggcuacaacaca

SEQ ID NO: 249740 - RNA, 19 nt, Homo sapiens
  misc_RNA (1)...(19): siRNA sense strand
gaucuaaaggucauucacu

SEQ ID NO: 249741 - RNA, 19 nt, Homo sapiens
  misc_RNA (1)...(19): siRNA sense strand
ugaaaugggagcagaugug

SEQ ID NO: 249742 - RNA, 19 nt, Homo sapiens
  misc_RNA (1)...(19): siRNA sense strand
gaugaaaugggagcagaug

SEQ ID NO: 249743 - RNA, 19 nt, Homo sapiens
  misc_RNA (1)...(19): siRNA sense strand
gaggacgaccugugcuaug

SEQ ID NO: 249744 - RNA, 19 nt, Homo sapiens
  misc_RNA (1)...(19): siRNA sense strand
uuucaaugccgucaucaaa

SEQ ID NO: 249745 - RNA, 19 nt, Homo sapiens
  misc_RNA (1)...(19): siRNA sense strand
agucugaaguuuccuggau

SEQ ID NO: 249746 - RNA, 19 nt, Homo sapiens
  misc_RNA (1)...(19): siRNA sense strand
cagccgagaacaacagcua

SEQ ID NO: 249747 - RNA, 19 nt, Homo sapiens
  misc_RNA (1)...(19): siRNA sense strand
uugcugcccugaaauaucu

SEQ ID NO: 249748 - RNA, 19 nt, Homo sapiens
  misc_RNA (1)...(19): siRNA sense strand
ccaaguuccguuccaacaa

SEQ ID NO: 249749 - RNA, 19 nt, Homo sapiens
  misc_RNA (1)...(19): siRNA sense strand
caccaagaaagcaaugauu

SEQ ID NO: 249750 - RNA, 19 nt, Homo sapiens
  misc_RNA (1)...(19): siRNA sense strand
caacaccaagaaagcaaug

SEQ ID NO: 249751 - RNA, 19 nt, Homo sapiens
  misc_RNA (1)...(19): siRNA sense strand
gacgaccugugcuaugagu

SEQ ID NO: 249752 - RNA, 19 nt, Homo sapiens
  misc_RNA (1)...(19): siRNA sense strand
cagugaggcugaugucaac

SEQ ID NO: 249753 - RNA, 19 nt, Homo sapiens
  misc_RNA (1)...(19): siRNA sense strand
ccaucagccuggcccucua

SEQ ID NO: 249754 - RNA, 19 nt, Homo sapiens
  misc_RNA (1)...(19): siRNA sense strand
gaguacgaccggagguuug

SEQ ID NO: 249755 - RNA, 19 nt, Homo sapiens
  misc_RNA (1)...(19): siRNA sense strand
gcacuuccaccuuauugcu

SEQ ID NO: 249756 - RNA, 19 nt, Homo sapiens
  misc_RNA (1)...(19): siRNA sense strand
gcacacagccccagguaca

SEQ ID NO: 249757 - RNA, 19 nt, Homo sapiens
  misc_RNA (1)...(19): siRNA sense strand
uaaacauuacucugggauu

SEQ ID NO: 249758 - RNA, 19 nt, Homo sapiens
  misc_RNA (1)...(19): siRNA sense strand
uggaugugcaggaguauga

SEQ ID NO: 249759 - RNA, 19 nt, Homo sapiens
  misc_RNA (1)...(19): siRNA sense strand
gcaacguggccaugaagca

SEQ ID NO: 249760 - RNA, 19 nt, Homo sapiens
  misc_RNA (1)...(19): siRNA sense strand
cgaggcaaccacuccaaga

SEQ ID NO: 249761 - RNA, 19 nt, Homo sapiens
  misc_RNA (1)...(19): siRNA sense strand
caaguucaaaggucagcaa

SEQ ID NO: 249762 - RNA, 19 nt, Homo sapiens
  misc_RNA (1)...(19): siRNA sense strand
ugucugaucuaaaggucau

SEQ ID NO: 249763 - RNA, 19 nt, Homo sapiens
  misc_RNA (1)...(19): siRNA sense strand
gccguauguuguugugaga

SEQ ID NO: 249764 - RNA, 19 nt, Homo sapiens
  misc_RNA (1)...(19): siRNA sense strand
ccuacauguuccugucuga

SEQ ID NO: 249765 - RNA, 19 nt, Homo sapiens
  misc_RNA (1)...(19): siRNA sense strand
cgaccugugcuaugaguuc

SEQ ID NO: 249766 - RNA, 19 nt, Homo sapiens
  misc_RNA (1)...(19): siRNA sense strand
gcacuggagacagcgagaa

SEQ ID NO: 249767 - RNA, 19 nt, Homo sapiens
  misc_RNA (1)...(19): siRNA sense strand
aacauuacucugggauuua

SEQ ID NO: 249768 - RNA, 19 nt, Homo sapiens
  misc_RNA (1)...(19): siRNA sense strand
gggugaagaacaagcaugu

SEQ ID NO: 249769 - RNA, 19 nt, Homo sapiens
  misc_RNA (1)...(19): siRNA sense strand
gaacaagcauguggaguuu

SEQ ID NO: 249770 - RNA, 19 nt, Homo sapiens
  misc_RNA (1)...(19): siRNA sense strand
caaaguggcucauaucaug

SEQ ID NO: 249771 - RNA, 19 nt, Homo sapiens
  misc_RNA (1)...(19): siRNA sense strand
ggaacaaaguggcucauau

SEQ ID NO: 249772 - RNA, 19 nt, Homo sapiens
  misc_RNA (1)...(19): siRNA sense strand
aaacauuacucugggauuu

SEQ ID NO: 249773 - RNA, 19 nt, Homo sapiens
  misc_RNA (1)...(19): siRNA sense strand
uguaugggcucuaugagua

SEQ ID NO: 249774 - RNA, 19 nt, Homo sapiens
  misc_RNA (1)...(19): siRNA sense strand
gaacaaaguggcucauauc

SEQ ID NO: 249775 - RNA, 19 nt, Homo sapiens
  misc_RNA (1)...(19): siRNA sense strand
ccucugcacuuccaccuua

SEQ ID NO: 249776 - RNA, 19 nt, Homo sapiens
  misc_RNA (1)...(19): siRNA sense strand
gagcucaagucugaaguuu

SEQ ID NO: 249777 - RNA, 19 nt, Homo sapiens
  misc_RNA (1)...(19): siRNA sense strand
caucagcacucccuacaug

SEQ ID NO: 249778 - RNA, 19 nt, Homo sapiens
  misc_RNA (1)...(19): siRNA sense strand
ggucaaauccguccuguuc

SEQ ID NO: 249779 - RNA, 19 nt, Homo sapiens
  misc_RNA (1)...(19): siRNA sense strand
ccaagaagcuccgggugaa

SEQ ID NO: 249780 - RNA, 19 nt, Homo sapiens
  misc_RNA (1)...(19): siRNA sense strand
gauaagcugcggaagauga

SEQ ID NO: 249781 - RNA, 19 nt, Homo sapiens
  misc_RNA (1)...(19): siRNA sense strand
ugacacggauaucaccuuu

SEQ ID NO: 249782 - RNA, 19 nt, Homo sapiens
  misc_RNA (1)...(19): siRNA sense strand
ggaaagcccgugucucugu

SEQ ID NO: 249783 - RNA, 19 nt, Homo sapiens
  misc_RNA (1)...(19): siRNA sense strand
uaaaggucauucacuggaa

SEQ ID NO: 249784 - RNA, 19 nt, Homo sapiens
  misc_RNA (1)...(19): siRNA sense strand
gcucugaggugcuuaugag

SEQ ID NO: 249785 - RNA, 19 nt, Homo sapiens
  misc_RNA (1)...(19): siRNA sense strand
ugaccuuccuggaguauga

SEQ ID NO: 249786 - RNA, 19 nt, Homo sapiens
  misc_RNA (1)...(19): siRNA sense strand
caugcucucuacauccuua

SEQ ID NO: 249787 - RNA, 19 nt, Homo sapiens
  misc_RNA (1)...(19): siRNA sense strand
ucaaugccgucaucaaaca

SEQ ID NO: 249788 - RNA, 19 nt, Homo sapiens
  misc_RNA (1)...(19): siRNA sense strand
ggaaugugcagcugucaga

SEQ ID NO: 249789 - RNA, 19 nt, Homo sapiens
  misc_RNA (1)...(19): siRNA sense strand
guucaaaggucagcaaguc

SEQ ID NO: 249790 - RNA, 19 nt, Homo sapiens
  misc_RNA (1)...(19): siRNA sense strand
cggcuuugcugcccugaaa

SEQ ID NO: 249791 - RNA, 19 nt, Homo sapiens
  misc_RNA (1)...(19): siRNA sense strand
gcucaagucugaaguuucc

SEQ ID NO: 249792 - RNA, 19 nt, Homo sapiens
  misc_RNA (1)...(19): siRNA sense strand
caaguuccguuccaacaag

SEQ ID NO: 249793 - RNA, 19 nt, Homo sapiens
  misc_RNA (1)...(19): siRNA sense strand
gcagagcugugggcugugu

SEQ ID NO: 249794 - RNA, 19 nt, Homo sapiens
  misc_RNA (1)...(19): siRNA sense strand
ucaccuggauuuaccuguu

SEQ ID NO: 249795 - RNA, 19 nt, Homo sapiens
  misc_RNA (1)...(19): siRNA sense strand
gcuucgacauuaccaaguu

SEQ ID NO: 249796 - RNA, 19 nt, Homo sapiens
  misc_RNA (1)...(19): siRNA sense strand
guacaaggagggccaguuc

SEQ ID NO: 249797 - RNA, 19 nt, Homo sapiens
  misc_RNA (1)...(19): siRNA sense strand
uggauaagcugcggaagau

SEQ ID NO: 249798 - RNA, 19 nt, Homo sapiens
  misc_RNA (1)...(19): siRNA sense strand
gcuaccacaucguguacaa

SEQ ID NO: 249799 - RNA, 19 nt, Homo sapiens
  misc_RNA (1)...(19): siRNA sense strand
aggcugaugucaacaguga

SEQ ID NO: 249800 - RNA, 19 nt, Homo sapiens
  misc_RNA (1)...(19): siRNA sense strand
caccuggauuuaccuguuu

SEQ ID NO: 249801 - RNA, 19 nt, Homo sapiens
  misc_RNA (1)...(19): siRNA sense strand
gacaauccacguugcuauu

SEQ ID NO: 249802 - RNA, 19 nt, Homo sapiens
  misc_RNA (1)...(19): siRNA sense strand
ucaaaacccucaaggaaga

SEQ ID NO: 249803 - RNA, 19 nt, Homo sapiens
  misc_RNA (1)...(19): siRNA sense strand
ggagagagucaucguccuu

SEQ ID NO: 249804 - RNA, 19 nt, Homo sapiens
  misc_RNA (1)...(19): siRNA sense strand
ggauuuauggucugaugaa

SEQ ID NO: 249805 - RNA, 19 nt, Homo sapiens
  misc_RNA (1)...(19): siRNA sense strand
ggagaaaugcgagacaauc

SEQ ID NO: 249806 - RNA, 19 nt, Homo sapiens
  misc_RNA (1)...(19): siRNA sense strand
cguguggacuucuacaaug

SEQ ID NO: 249807 - RNA, 19 nt, Homo sapiens
  misc_RNA (1)...(19): siRNA sense strand
caaaaccccuuccuugugu

SEQ ID NO: 249808 - RNA, 19 nt, Homo sapiens
  misc_RNA (1)...(19): siRNA sense strand
ggaguacgaccggagguuu

SEQ ID NO: 249809 - RNA, 19 nt, Homo sapiens
  misc_RNA (1)...(19): siRNA sense strand
ccuuauugcugacuccauu

SEQ ID NO: 249810 - RNA, 19 nt, Homo sapiens
  misc_RNA (1)...(19): siRNA sense strand
gcuuugcugcccugaaaua

SEQ ID NO: 249811 - RNA, 19 nt, Homo sapiens
  misc_RNA (1)...(19): siRNA sense strand
gcccaacgccuacaugauc

SEQ ID NO: 249812 - RNA, 19 nt, Homo sapiens
  misc_RNA (1)...(19): siRNA sense strand
gggacccucuucacauuca

SEQ ID NO: 249813 - RNA, 19 nt, Homo sapiens
  misc_RNA (1)...(19): siRNA sense strand
aagcggaguugcugucaau

SEQ ID NO: 249814 - RNA, 19 nt, Homo sapiens
  misc_RNA (1)...(19): siRNA sense strand
ucgcucagcuguccaugga

SEQ ID NO: 249815 - RNA, 19 nt, Homo sapiens
  misc_RNA (1)...(19): siRNA sense strand
agaacaagcauguggaguu

SEQ ID NO: 249816 - RNA, 19 nt, Homo sapiens
  misc_RNA (1)...(19): siRNA sense strand
acacggauaucaccuuugc

SEQ ID NO: 249817 - RNA, 19 nt, Homo sapiens
  misc_RNA (1)...(19): siRNA sense strand
gcugaugucaacagugaaa

SEQ ID NO: 249818 - RNA, 19 nt, Homo sapiens
  misc_RNA (1)...(19): siRNA sense strand
ucugggagcuucgaagaug

SEQ ID NO: 249819 - RNA, 19 nt, Homo sapiens
  misc_RNA (1)...(19): siRNA sense strand
ucaaauccguccuguucca

SEQ ID NO: 249820 - RNA, 19 nt, Homo sapiens
  misc_RNA (1)...(19): siRNA sense strand
caauaccgcaucugucuca

SEQ ID NO: 249821 - RNA, 19 nt, Homo sapiens
  misc_RNA (1)...(19): siRNA sense strand
acaaggagggccaguucua

SEQ ID NO: 249822 - RNA, 19 nt, Homo sapiens
  misc_RNA (1)...(19): siRNA sense strand
gaguaugacggcaaucuuc

SEQ ID NO: 249823 - RNA, 19 nt, Homo sapiens
  misc_RNA (1)...(19): siRNA sense strand
gcaaccacuccaagaccua

SEQ ID NO: 249824 - RNA, 19 nt, Homo sapiens
  misc_RNA (1)...(19): siRNA sense strand
caagcaauaccgcaucugu

SEQ ID NO: 249825 - RNA, 19 nt, Homo sapiens
  misc_RNA (1)...(19): siRNA sense strand
ggcgagagcgcuucacugu

SEQ ID NO: 249826 - RNA, 19 nt, Homo sapiens
  misc_RNA (1)...(19): siRNA sense strand
gagacaauccacguugcua

SEQ ID NO: 249827 - RNA, 19 nt, Homo sapiens
  misc_RNA (1)...(19): siRNA sense strand
ccggagguuuguaggcuuu

SEQ ID NO: 249828 - RNA, 19 nt, Homo sapiens
  misc_RNA (1)...(19): siRNA sense strand
gcacccaccuguacuuccu

SEQ ID NO: 249829 - RNA, 19 nt, Homo sapiens
  misc_RNA (1)...(19): siRNA sense strand
aggacgaccugugcuauga

SEQ ID NO: 249830 - RNA, 19 nt, Homo sapiens
  misc_RNA (1)...(19): siRNA sense strand
gugaaaaccuccagaagca

SEQ ID NO: 249831 - RNA, 19 nt, Homo sapiens
  misc_RNA (1)...(19): siRNA sense strand
ggaguaugacggcaaucuu

SEQ ID NO: 249832 - RNA, 19 nt, Homo sapiens
  misc_RNA (1)...(19): siRNA sense strand
acauuacucugggauuuau

SEQ ID NO: 249833 - RNA, 19 nt, Homo sapiens
  misc_RNA (1)...(19): siRNA sense strand
gacggaacccucugcacuu

SEQ ID NO: 249834 - RNA, 19 nt, Homo sapiens
  misc_RNA (1)...(19): siRNA sense strand
ccacgcacccacaaacuuc

SEQ ID NO: 249835 - RNA, 19 nt, Homo sapiens
  misc_RNA (1)...(19): siRNA sense strand
ccagugaggcugaugucaa

SEQ ID NO: 249836 - RNA, 19 nt, Homo sapiens
  misc_RNA (1)...(19): siRNA sense strand
agagagucaucguccuuga

SEQ ID NO: 249837 - RNA, 19 nt, Homo sapiens
  misc_RNA (1)...(19): siRNA sense strand
guggagaaaugcgagacaa

SEQ ID NO: 249838 - RNA, 19 nt, Homo sapiens
  misc_RNA (1)...(19): siRNA sense strand
gagcuucgaagauggaaag

SEQ ID NO: 249839 - RNA, 19 nt, Homo sapiens
  misc_RNA (1)...(19): siRNA sense strand
uggaagaggcuacaacaca

SEQ ID NO: 249840 - RNA, 19 nt, Homo sapiens
  misc_RNA (1)...(19): siRNA sense strand
gaucuaaaggucauucacu

SEQ ID NO: 249841 - RNA, 19 nt, Homo sapiens
  misc_RNA (1)...(19): siRNA sense strand
ugaaaugggagcagaugug

SEQ ID NO: 249842 - RNA, 19 nt, Homo sapiens
  misc_RNA (1)...(19): siRNA sense strand
gaugaaaugggagcagaug

SEQ ID NO: 249843 - RNA, 19 nt, Homo sapiens
  misc_RNA (1)...(19): siRNA sense strand
gaggacgaccugugcuaug

SEQ ID NO: 249844 - RNA, 19 nt, Homo sapiens
  misc_RNA (1)...(19): siRNA sense strand
uuucaaugccgucaucaaa

SEQ ID NO: 249845 - RNA, 19 nt, Homo sapiens
  misc_RNA (1)...(19): siRNA sense strand
agucugaaguuuccuggau

SEQ ID NO: 249846 - RNA, 19 nt, Homo sapiens
  misc_RNA (1)...(19): siRNA sense strand
cagccgagaacaacagcua

SEQ ID NO: 249847 - RNA, 19 nt, Homo sapiens
  misc_RNA (1)...(19): siRNA sense strand
uugcugcccugaaauaucu

SEQ ID NO: 249848 - RNA, 19 nt, Homo sapiens
  misc_RNA (1)...(19): siRNA sense strand
ccaaguuccguuccaacaa

SEQ ID NO: 249849 - RNA, 19 nt, Homo sapiens
  misc_RNA (1)...(19): siRNA sense strand
caccaagaaagcaaugauu

SEQ ID NO: 249850 - RNA, 19 nt, Homo sapiens
  misc_RNA (1)...(19): siRNA sense strand
caacaccaagaaagcaaug

SEQ ID NO: 249851 - RNA, 19 nt, Homo sapiens
  misc_RNA (1)...(19): siRNA sense strand
gacgaccugugcuaugagu

SEQ ID NO: 249852 - RNA, 19 nt, Homo sapiens
  misc_RNA (1)...(19): siRNA sense strand
cagugaggcugaugucaac

SEQ ID NO: 249853 - RNA, 19 nt, Homo sapiens
  misc_RNA (1)...(19): siRNA sense strand
ccaucagccuggcccucua

SEQ ID NO: 249854 - RNA, 19 nt, Homo sapiens
  misc_RNA (1)...(19): siRNA sense strand
gaguacgaccggagguuug

SEQ ID NO: 249855 - RNA, 19 nt, Homo sapiens
  misc_RNA (1)...(19): siRNA sense strand
gcacuuccaccuuauugcu

SEQ ID NO: 249856 - RNA, 19 nt, Homo sapiens
  misc_RNA (1)...(19): siRNA sense strand
gcacacagccccagguaca

SEQ ID NO: 249857 - RNA, 19 nt, Homo sapiens
  misc_RNA (1)...(19): siRNA sense strand
uaaacauuacucugggauu

SEQ ID NO: 249858 - RNA, 19 nt, Homo sapiens
  misc_RNA (1)...(19): siRNA sense strand
uggaugugcaggaguauga

SEQ ID NO: 249859 - RNA, 19 nt, Homo sapiens
  misc_RNA (1)...(19): siRNA sense strand
gcaacguggccaugaagca

SEQ ID NO: 249860 - RNA, 19 nt, Homo sapiens
  misc_RNA (1)...(19): siRNA sense strand
cgaggcaaccacuccaaga

SEQ ID NO: 249861 - RNA, 19 nt, Homo sapiens
  misc_RNA (1)...(19): siRNA sense strand
caaguucaaaggucagcaa

SEQ ID NO: 249862 - RNA, 19 nt, Homo sapiens
  misc_RNA (1)...(19): siRNA sense strand
ugucugaucuaaaggucau

SEQ ID NO: 249863 - RNA, 19 nt, Homo sapiens
  misc_RNA (1)...(19): siRNA sense strand
gccguauguuguugugaga

SEQ ID NO: 249864 - RNA, 19 nt, Homo sapiens
  misc_RNA (1)...(19): siRNA sense strand
ccuacauguuccugucuga

SEQ ID NO: 249865 - RNA, 19 nt, Homo sapiens
  misc_RNA (1)...(19): siRNA sense strand
cgaccugugcuaugaguuc

SEQ ID NO: 249866 - RNA, 19 nt, Homo sapiens
  misc_RNA (1)...(19): siRNA sense strand
gcacuggagacagcgagaa

SEQ ID NO: 249867 - RNA, 19 nt, Homo sapiens
  misc_RNA (1)...(19): siRNA sense strand
aacauuacucugggauuua

SEQ ID NO: 249868 - RNA, 19 nt, Homo sapiens
  misc_RNA (1)...(19): siRNA sense strand
gggugaagaacaagcaugu

SEQ ID NO: 249869 - RNA, 19 nt, Homo sapiens
  misc_RNA (1)...(19): siRNA sense strand
gaaaccagcugucccagaa

SEQ ID NO: 249870 - RNA, 19 nt, Homo sapiens
  misc_RNA (1)...(19): siRNA sense strand
caacaagacugcaaaugga

SEQ ID NO: 249871 - RNA, 19 nt, Homo sapiens
  misc_RNA (1)...(19): siRNA sense strand
cagccaagcuugcacauga

SEQ ID NO: 249872 - RNA, 19 nt, Homo sapiens
  misc_RNA (1)...(19): siRNA sense strand
gcagggacauuucuaguag

SEQ ID NO: 249873 - RNA, 19 nt, Homo sapiens
  misc_RNA (1)...(19): siRNA sense strand
gggaugagauggaggaaug

SEQ ID NO: 249874 - RNA, 19 nt, Homo sapiens
  misc_RNA (1)...(19): siRNA sense strand
caaagucucucuccuuaca

SEQ ID NO: 249875 - RNA, 19 nt, Homo sapiens
  misc_RNA (1)...(19): siRNA sense strand
gauuagaguugguugcaaa

SEQ ID NO: 249876 - RNA, 19 nt, Homo sapiens
  misc_RNA (1)...(19): siRNA sense strand
ggugggagauuacgucuau

SEQ ID NO: 249877 - RNA, 19 nt, Homo sapiens
  misc_RNA (1)...(19): siRNA sense strand
ggaaggcucugacccaucu

SEQ ID NO: 249878 - RNA, 19 nt, Homo sapiens
  misc_RNA (1)...(19): siRNA sense strand
caagagcccuagauuguag

SEQ ID NO: 249879 - RNA, 19 nt, Homo sapiens
  misc_RNA (1)...(19): siRNA sense strand
agacaccgaucaacagaaa

SEQ ID NO: 249880 - RNA, 19 nt, Homo sapiens
  misc_RNA (1)...(19): siRNA sense strand
gcaagagcccuagauugua

SEQ ID NO: 249881 - RNA, 19 nt, Homo sapiens
  misc_RNA (1)...(19): siRNA sense strand
gcuaagaacagacaaacuu

SEQ ID NO: 249882 - RNA, 19 nt, Homo sapiens
  misc_RNA (1)...(19): siRNA sense strand
agaagggccugacuuguga

SEQ ID NO: 249883 - RNA, 19 nt, Homo sapiens
  misc_RNA (1)...(19): siRNA sense strand
gaaugagacagauaucuug

SEQ ID NO: 249884 - RNA, 19 nt, Homo sapiens
  misc_RNA (1)...(19): siRNA sense strand
cucaaagucucucuccuua

SEQ ID NO: 249885 - RNA, 19 nt, Homo sapiens
  misc_RNA (1)...(19): siRNA sense strand
gagauuacgucuauuuuga

SEQ ID NO: 249886 - RNA, 19 nt, Homo sapiens
  misc_RNA (1)...(19): siRNA sense strand
ccacagaccgguauauuca

SEQ ID NO: 249887 - RNA, 19 nt, Homo sapiens
  misc_RNA (1)...(19): siRNA sense strand
gcaaauaccaagcugagau

SEQ ID NO: 249888 - RNA, 19 nt, Homo sapiens
  misc_RNA (1)...(19): siRNA sense strand
acacuaagccaaacccuaa

SEQ ID NO: 249889 - RNA, 19 nt, Homo sapiens
  misc_RNA (1)...(19): siRNA sense strand
gcugcugccucccgagaua

SEQ ID NO: 249890 - RNA, 19 nt, Homo sapiens
  misc_RNA (1)...(19): siRNA sense strand
ugagaacucuuccagcaau

SEQ ID NO: 249891 - RNA, 19 nt, Homo sapiens
  misc_RNA (1)...(19): siRNA sense strand
cagacaaacuuuccugcuu

SEQ ID NO: 249892 - RNA, 19 nt, Homo sapiens
  misc_RNA (1)...(19): siRNA sense strand
cagaggccaugcuauuuga

SEQ ID NO: 249893 - RNA, 19 nt, Homo sapiens
  misc_RNA (1)...(19): siRNA sense strand
cagcaauccuuaccugguu

SEQ ID NO: 249894 - RNA, 19 nt, Homo sapiens
  misc_RNA (1)...(19): siRNA sense strand
guagagggagaaucugaua

SEQ ID NO: 249895 - RNA, 19 nt, Homo sapiens
  misc_RNA (1)...(19): siRNA sense strand
ccaagcuacuggcuaagaa

SEQ ID NO: 249896 - RNA, 19 nt, Homo sapiens
  misc_RNA (1)...(19): siRNA sense strand
gaagcagacagcaaacuga

SEQ ID NO: 249897 - RNA, 19 nt, Homo sapiens
  misc_RNA (1)...(19): siRNA sense strand
gcaacuaucgucaaagauc

SEQ ID NO: 249898 - RNA, 19 nt, Homo sapiens
  misc_RNA (1)...(19): siRNA sense strand
gugugacccucuugaauga

SEQ ID NO: 249899 - RNA, 19 nt, Homo sapiens
  misc_RNA (1)...(19): siRNA sense strand
uggcaacuaucgucaaaga

SEQ ID NO: 249900 - RNA, 19 nt, Homo sapiens
  misc_RNA (1)...(19): siRNA sense strand
gaucauuucuguggguuca

SEQ ID NO: 249901 - RNA, 19 nt, Homo sapiens
  misc_RNA (1)...(19): siRNA sense strand
gaaacgggccuaugagacu

SEQ ID NO: 249902 - RNA, 19 nt, Homo sapiens
  misc_RNA (1)...(19): siRNA sense strand
cagcagcgccaucaacuga

SEQ ID NO: 249903 - RNA, 19 nt, Homo sapiens
  misc_RNA (1)...(19): siRNA sense strand
ucggcaauuugaaucauua

SEQ ID NO: 249904 - RNA, 19 nt, Homo sapiens
  misc_RNA (1)...(19): siRNA sense strand
caaugccaaugccaucaaa

SEQ ID NO: 249905 - RNA, 19 nt, Homo sapiens
  misc_RNA (1)...(19): siRNA sense strand
gaaacuaaacccagcugau

SEQ ID NO: 249906 - RNA, 19 nt, Homo sapiens
  misc_RNA (1)...(19): siRNA sense strand
caacuaucgucaaagaucu

SEQ ID NO: 249907 - RNA, 19 nt, Homo sapiens
  misc_RNA (1)...(19): siRNA sense strand
gauuguagcagcuccauuc

SEQ ID NO: 249908 - RNA, 19 nt, Homo sapiens
  misc_RNA (1)...(19): siRNA sense strand
gacaaacuuuccugcuuca

SEQ ID NO: 249909 - RNA, 19 nt, Homo sapiens
  misc_RNA (1)...(19): siRNA sense strand
gcucaaagucucucuccuu

SEQ ID NO: 249910 - RNA, 19 nt, Homo sapiens
  misc_RNA (1)...(19): siRNA sense strand
cgagauaucacucuguuuc

SEQ ID NO: 249911 - RNA, 19 nt, Homo sapiens
  misc_RNA (1)...(19): siRNA sense strand
ggaaccagcagaagaugga

SEQ ID NO: 249912 - RNA, 19 nt, Homo sapiens
  misc_RNA (1)...(19): siRNA sense strand
ugaaacaggucuacauucc

SEQ ID NO: 249913 - RNA, 19 nt, Homo sapiens
  misc_RNA (1)...(19): siRNA sense strand
gcucugacccaucuggaaa

SEQ ID NO: 249914 - RNA, 19 nt, Homo sapiens
  misc_RNA (1)...(19): siRNA sense strand
gccaaacccuaaccagauc

SEQ ID NO: 249915 - RNA, 19 nt, Homo sapiens
  misc_RNA (1)...(19): siRNA sense strand
ccaauccugugguguuugu

SEQ ID NO: 249916 - RNA, 19 nt, Homo sapiens
  misc_RNA (1)...(19): siRNA sense strand
aaacuaaacccagcugaug

SEQ ID NO: 249917 - RNA, 19 nt, Homo sapiens
  misc_RNA (1)...(19): siRNA sense strand
aaacgggccuaugagacua

SEQ ID NO: 249918 - RNA, 19 nt, Homo sapiens
  misc_RNA (1)...(19): siRNA sense strand
cagaagggccugacuugug

SEQ ID NO: 249919 - RNA, 19 nt, Homo sapiens
  misc_RNA (1)...(19): siRNA sense strand
gagggagaaucugauaauc

SEQ ID NO: 249920 - RNA, 19 nt, Homo sapiens
  misc_RNA (1)...(19): siRNA sense strand
caugugcagggaccuauua

SEQ ID NO: 249921 - RNA, 19 nt, Homo sapiens
  misc_RNA (1)...(19): siRNA sense strand
gcauaguccaguuuuauua

SEQ ID NO: 249922 - RNA, 19 nt, Homo sapiens
  misc_RNA (1)...(19): siRNA sense strand
aggcaaagguugucugucu

SEQ ID NO: 249923 - RNA, 19 nt, Homo sapiens
  misc_RNA (1)...(19): siRNA sense strand
cuaagaacagacaaacuuu

SEQ ID NO: 249924 - RNA, 19 nt, Homo sapiens
  misc_RNA (1)...(19): siRNA sense strand
gcuacuggcuaagaacaga

SEQ ID NO: 249925 - RNA, 19 nt, Homo sapiens
  misc_RNA (1)...(19): siRNA sense strand
ccuguuggaucuacuggaa

SEQ ID NO: 249926 - RNA, 19 nt, Homo sapiens
  misc_RNA (1)...(19): siRNA sense strand
aggaggcccuagagaagua

SEQ ID NO: 249927 - RNA, 19 nt, Homo sapiens
  misc_RNA (1)...(19): siRNA sense strand
ugaaugagacagauaucuu

SEQ ID NO: 249928 - RNA, 19 nt, Homo sapiens
  misc_RNA (1)...(19): siRNA sense strand
guaaugccagggaguuuga

SEQ ID NO: 249929 - RNA, 19 nt, Homo sapiens
  misc_RNA (1)...(19): siRNA sense strand
agacacuucucgcugauca

SEQ ID NO: 249930 - RNA, 19 nt, Homo sapiens
  misc_RNA (1)...(19): siRNA sense strand
ucaacaagacugcaaaugg

SEQ ID NO: 249931 - RNA, 19 nt, Homo sapiens
  misc_RNA (1)...(19): siRNA sense strand
caagacaccgaucaacaga

SEQ ID NO: 249932 - RNA, 19 nt, Homo sapiens
  misc_RNA (1)...(19): siRNA sense strand
gcagaucgaccaguuucuu

SEQ ID NO: 249933 - RNA, 19 nt, Homo sapiens
  misc_RNA (1)...(19): siRNA sense strand
gaucagggcgagauuagag

SEQ ID NO: 249934 - RNA, 19 nt, Homo sapiens
  misc_RNA (1)...(19): siRNA sense strand
gcagugugacccucuugaa

SEQ ID NO: 249935 - RNA, 19 nt, Homo sapiens
  misc_RNA (1)...(19): siRNA sense strand
ccuggcaacuaucgucaaa

SEQ ID NO: 249936 - RNA, 19 nt, Homo sapiens
  misc_RNA (1)...(19): siRNA sense strand
caaacuuuccugcuucaga

SEQ ID NO: 249937 - RNA, 19 nt, Homo sapiens
  misc_RNA (1)...(19): siRNA sense strand
ccacggagccacacucaag

SEQ ID NO: 249938 - RNA, 19 nt, Homo sapiens
  misc_RNA (1)...(19): siRNA sense strand
gggccugacuugugagagu

SEQ ID NO: 249939 - RNA, 19 nt, Homo sapiens
  misc_RNA (1)...(19): siRNA sense strand
ccaccuacacuaagccaaa

SEQ ID NO: 249940 - RNA, 19 nt, Homo sapiens
  misc_RNA (1)...(19): siRNA sense strand
gaaauguggaggcaaaggu

SEQ ID NO: 249941 - RNA, 19 nt, Homo sapiens
  misc_RNA (1)...(19): siRNA sense strand
ucagaggccaugcuauuug

SEQ ID NO: 249942 - RNA, 19 nt, Homo sapiens
  misc_RNA (1)...(19): siRNA sense strand
uagaguugguugcaaauac

SEQ ID NO: 249943 - RNA, 19 nt, Homo sapiens
  misc_RNA (1)...(19): siRNA sense strand
gcagcgccaucaacugaag

SEQ ID NO: 249944 - RNA, 19 nt, Homo sapiens
  misc_RNA (1)...(19): siRNA sense strand
ccaagacuccauugaagau

SEQ ID NO: 249945 - RNA, 19 nt, Homo sapiens
  misc_RNA (1)...(19): siRNA sense strand
agcagaagauggagaugaa

SEQ ID NO: 249946 - RNA, 19 nt, Homo sapiens
  misc_RNA (1)...(19): siRNA sense strand
ggcaaagguugucugucuu

SEQ ID NO: 249947 - RNA, 19 nt, Homo sapiens
  misc_RNA (1)...(19): siRNA sense strand
cagacaacccucucacaga

SEQ ID NO: 249948 - RNA, 19 nt, Homo sapiens
  misc_RNA (1)...(19): siRNA sense strand
gccaagcgucagaaacuaa

SEQ ID NO: 249949 - RNA, 19 nt, Homo sapiens
  misc_RNA (1)...(19): siRNA sense strand
caacagggccaagcuacug

SEQ ID NO: 249950 - RNA, 19 nt, Homo sapiens
  misc_RNA (1)...(19): siRNA sense strand
gcagacagcaaacugaaac

SEQ ID NO: 249951 - RNA, 19 nt, Homo sapiens
  misc_RNA (1)...(19): siRNA sense strand
ugcaagagcccuagauugu

SEQ ID NO: 249952 - RNA, 19 nt, Homo sapiens
  misc_RNA (1)...(19): siRNA sense strand
gcaauuugaaucauuacca

SEQ ID NO: 249953 - RNA, 19 nt, Homo sapiens
  misc_RNA (1)...(19): siRNA sense strand
gccaagacuccauugaaga

SEQ ID NO: 249954 - RNA, 19 nt, Homo sapiens
  misc_RNA (1)...(19): siRNA sense strand
cgccaagacuccauugaag

SEQ ID NO: 249955 - RNA, 19 nt, Homo sapiens
  misc_RNA (1)...(19): siRNA sense strand
gagauaucacucuguuuca

SEQ ID NO: 249956 - RNA, 19 nt, Homo sapiens
  misc_RNA (1)...(19): siRNA sense strand
uuuacucacugguguuuga

SEQ ID NO: 249957 - RNA, 19 nt, Homo sapiens
  misc_RNA (1)...(19): siRNA sense strand
gugacccucuugaaugaga

SEQ ID NO: 249958 - RNA, 19 nt, Homo sapiens
  misc_RNA (1)...(19): siRNA sense strand
gcugaucagggcgagauua

SEQ ID NO: 249959 - RNA, 19 nt, Homo sapiens
  misc_RNA (1)...(19): siRNA sense strand
guaccaagacaccgaucaa

SEQ ID NO: 249960 - RNA, 19 nt, Homo sapiens
  misc_RNA (1)...(19): siRNA sense strand
caaauaccaagcugagauc

SEQ ID NO: 249961 - RNA, 19 nt, Homo sapiens
  misc_RNA (1)...(19): siRNA sense strand
ccaagcgucagaaacuaaa

SEQ ID NO: 249962 - RNA, 19 nt, Homo sapiens
  misc_RNA (1)...(19): siRNA sense strand
gccuuaugcuccuaucaau

SEQ ID NO: 249963 - RNA, 19 nt, Homo sapiens
  misc_RNA (1)...(19): siRNA sense strand
ucacagaccggcagaucga

SEQ ID NO: 249964 - RNA, 19 nt, Homo sapiens
  misc_RNA (1)...(19): siRNA sense strand
cccgagauaucacucuguu

SEQ ID NO: 249965 - RNA, 19 nt, Homo sapiens
  misc_RNA (1)...(19): siRNA sense strand
gagaacucuuccagcaauc

SEQ ID NO: 249966 - RNA, 19 nt, Homo sapiens
  misc_RNA (1)...(19): siRNA sense strand
uaagaacagacaaacuuuc

SEQ ID NO: 249967 - RNA, 19 nt, Homo sapiens
  misc_RNA (1)...(19): siRNA sense strand
ggaggcaaagguugucugu

SEQ ID NO: 249968 - RNA, 19 nt, Homo sapiens
  misc_RNA (1)...(19): siRNA sense strand
gugaaacgggccuaugaga

SEQ ID NO: 249969 - RNA, 19 nt, Homo sapiens
  misc_RNA (1)...(19): siRNA sense strand
uaugugcaaugaccuauuu

SEQ ID NO: 249970 - RNA, 19 nt, Homo sapiens
  misc_RNA (1)...(19): siRNA sense strand
gguaaacccauuccaacua

SEQ ID NO: 249971 - RNA, 19 nt, Homo sapiens
  misc_RNA (1)...(19): siRNA sense strand
guaaacccauuccaacuac

SEQ ID NO: 249972 - RNA, 19 nt, Homo sapiens
  misc_RNA (1)...(19): siRNA sense strand
uaagguaaacccauuccaa

SEQ ID NO: 249973 - RNA, 19 nt, Homo sapiens
  misc_RNA (1)...(19): siRNA sense strand
caucuucacccuucagaga

SEQ ID NO: 249974 - RNA, 19 nt, Homo sapiens
  misc_RNA (1)...(19): siRNA sense strand
ucagagagcaguccuuucu

SEQ ID NO: 249975 - RNA, 19 nt, Homo sapiens
  misc_RNA (1)...(19): siRNA sense strand
ggaccauaaacucaacuug

SEQ ID NO: 249976 - RNA, 19 nt, Homo sapiens
  misc_RNA (1)...(19): siRNA sense strand
gugcaaugaccuauuuaag

SEQ ID NO: 249977 - RNA, 19 nt, Homo sapiens
  misc_RNA (1)...(19): siRNA sense strand
cuucagagagcaguccuuu

SEQ ID NO: 249978 - RNA, 19 nt, Homo sapiens
  misc_RNA (1)...(19): siRNA sense strand
gaaaugaacagcagcuuua

SEQ ID NO: 249979 - RNA, 19 nt, Homo sapiens
  misc_RNA (1)...(19): siRNA sense strand
ggaugaaccugaugaguuu

SEQ ID NO: 249980 - RNA, 19 nt, Homo sapiens
  misc_RNA (1)...(19): siRNA sense strand
gaaguucccucaauaccua

SEQ ID NO: 249981 - RNA, 19 nt, Homo sapiens
  misc_RNA (1)...(19): siRNA sense strand
gcaacaagcugccaagcaa

SEQ ID NO: 249982 - RNA, 19 nt, Homo sapiens
  misc_RNA (1)...(19): siRNA sense strand
ggacguggcuucaaauagu

SEQ ID NO: 249983 - RNA, 19 nt, Homo sapiens
  misc_RNA (1)...(19): siRNA sense strand
gaggaaggcugaacaagga

SEQ ID NO: 249984 - RNA, 19 nt, Homo sapiens
  misc_RNA (1)...(19): siRNA sense strand
gaaccaaguccuacaauga

SEQ ID NO: 249985 - RNA, 19 nt, Homo sapiens
  misc_RNA (1)...(19): siRNA sense strand
ucaaauaguucucaugguu

SEQ ID NO: 249986 - RNA, 19 nt, Homo sapiens
  misc_RNA (1)...(19): siRNA sense strand
gaggauuggugaugaaauu

SEQ ID NO: 249987 - RNA, 19 nt, Homo sapiens
  misc_RNA (1)...(19): siRNA sense strand
gagacuggauuuggauuua

SEQ ID NO: 249988 - RNA, 19 nt, Homo sapiens
  misc_RNA (1)...(19): siRNA sense strand
gaagcauucucgagcuaua

SEQ ID NO: 249989 - RNA, 19 nt, Homo sapiens
  misc_RNA (1)...(19): siRNA sense strand
gagauggccuauacugaaa

SEQ ID NO: 249990 - RNA, 19 nt, Homo sapiens
  misc_RNA (1)...(19): siRNA sense strand
gcaaguucauucacacaaa

SEQ ID NO: 249991 - RNA, 19 nt, Homo sapiens
  misc_RNA (1)...(19): siRNA sense strand
ccaaagugauccagaagaa

SEQ ID NO: 249992 - RNA, 19 nt, Homo sapiens
  misc_RNA (1)...(19): siRNA sense strand
gaccggaucuuggcaguaa

SEQ ID NO: 249993 - RNA, 19 nt, Homo sapiens
  misc_RNA (1)...(19): siRNA sense strand
caacacaggagcaagauuu

SEQ ID NO: 249994 - RNA, 19 nt, Homo sapiens
  misc_RNA (1)...(19): siRNA sense strand
ggauuuggauuuaggauuc

SEQ ID NO: 249995 - RNA, 19 nt, Homo sapiens
  misc_RNA (1)...(19): siRNA sense strand
ggagagguguggaaagaug

SEQ ID NO: 249996 - RNA, 19 nt, Homo sapiens
  misc_RNA (1)...(19): siRNA sense strand
gaaaacaacaucuugguua

SEQ ID NO: 249997 - RNA, 19 nt, Homo sapiens
  misc_RNA (1)...(19): siRNA sense strand
ccgaggagcuggacaguga

SEQ ID NO: 249998 - RNA, 19 nt, Homo sapiens
  misc_RNA (1)...(19): siRNA sense strand
ggagauggccuauacugaa

SEQ ID NO: 249999 - RNA, 19 nt, Homo sapiens
  misc_RNA (1)...(19): siRNA sense strand
caaaucccauucagacauu

SEQ ID NO: 250000 - RNA, 19 nt, Homo sapiens
  misc_RNA (1)...(19): siRNA sense strand
ggaaagacagccagaauag

SEQ ID NO: 250001 - RNA, 19 nt, Homo sapiens
  misc_RNA (1)...(19): siRNA sense strand
gcaagagaccuaugauuca

SEQ ID NO: 250002 - RNA, 19 nt, Homo sapiens
  misc_RNA (1)...(19): siRNA sense strand
acaaggaccugcgacauuu

SEQ ID NO: 250003 - RNA, 19 nt, Homo sapiens
  misc_RNA (1)...(19): siRNA sense strand
caaauaguucucaugguua

SEQ ID NO: 250004 - RNA, 19 nt, Homo sapiens
  misc_RNA (1)...(19): siRNA sense strand
ggaagagugugaagaugau

SEQ ID NO: 250005 - RNA, 19 nt, Homo sapiens
  misc_RNA (1)...(19): siRNA sense strand
gaaagaaggggaucucaua

SEQ ID NO: 250006 - RNA, 19 nt, Homo sapiens
  misc_RNA (1)...(19): siRNA sense strand
acacacacaugcucaaguu

SEQ ID NO: 250007 - RNA, 19 nt, Homo sapiens
  misc_RNA (1)...(19): siRNA sense strand
ggaugacguuccugaaaug

SEQ ID NO: 250008 - RNA, 19 nt, Homo sapiens
  misc_RNA (1)...(19): siRNA sense strand
gcggagagguguggaaaga

SEQ ID NO: 250009 - RNA, 19 nt, Homo sapiens
  misc_RNA (1)...(19): siRNA sense strand
uaaugacacuguuucuuug

SEQ ID NO: 250010 - RNA, 19 nt, Homo sapiens
  misc_RNA (1)...(19): siRNA sense strand
cagcagaccauaagggaua

SEQ ID NO: 250011 - RNA, 19 nt, Homo sapiens
  misc_RNA (1)...(19): siRNA sense strand
cuaaugacacuguuucuuu

SEQ ID NO: 250012 - RNA, 19 nt, Homo sapiens
  misc_RNA (1)...(19): siRNA sense strand
caaagucaauggcaugaag

SEQ ID NO: 250013 - RNA, 19 nt, Homo sapiens
  misc_RNA (1)...(19): siRNA sense strand
cagcggacguggcuucaaa

SEQ ID NO: 250014 - RNA, 19 nt, Homo sapiens
  misc_RNA (1)...(19): siRNA sense strand
gaagcgggaaacacaguua

SEQ ID NO: 250015 - RNA, 19 nt, Homo sapiens
  misc_RNA (1)...(19): siRNA sense strand
ggaauaccaccaaaccaaa

SEQ ID NO: 250016 - RNA, 19 nt, Homo sapiens
  misc_RNA (1)...(19): siRNA sense strand
gggaugaaccugaugaguu

SEQ ID NO: 250017 - RNA, 19 nt, Homo sapiens
  misc_RNA (1)...(19): siRNA sense strand
gaugaggauuggugaugaa

SEQ ID NO: 250018 - RNA, 19 nt, Homo sapiens
  misc_RNA (1)...(19): siRNA sense strand
gagguuauccauugccuuu

SEQ ID NO: 250019 - RNA, 19 nt, Homo sapiens
  misc_RNA (1)...(19): siRNA sense strand
aaagacagccagaauaguu

SEQ ID NO: 250020 - RNA, 19 nt, Homo sapiens
  misc_RNA (1)...(19): siRNA sense strand
aauguccgauuccagauua

SEQ ID NO: 250021 - RNA, 19 nt, Homo sapiens
  misc_RNA (1)...(19): siRNA sense strand
ccagcuagccacaguagua

SEQ ID NO: 250022 - RNA, 19 nt, Homo sapiens
  misc_RNA (1)...(19): siRNA sense strand
aagcaggaaucucaauuug

SEQ ID NO: 250023 - RNA, 19 nt, Homo sapiens
  misc_RNA (1)...(19): siRNA sense strand
gacaaggaauaccaccaaa

SEQ ID NO: 250024 - RNA, 19 nt, Homo sapiens
  misc_RNA (1)...(19): siRNA sense strand
gcuggacagugaacuagaa

SEQ ID NO: 250025 - RNA, 19 nt, Homo sapiens
  misc_RNA (1)...(19): siRNA sense strand
gaggaggccgagaguauaa

SEQ ID NO: 250026 - RNA, 19 nt, Homo sapiens
  misc_RNA (1)...(19): siRNA sense strand
ggacgccaguaauuggaaa

SEQ ID NO: 250027 - RNA, 19 nt, Homo sapiens
  misc_RNA (1)...(19): siRNA sense strand
ggaagacacaauaugagaa

SEQ ID NO: 250028 - RNA, 19 nt, Homo sapiens
  misc_RNA (1)...(19): siRNA sense strand
ggcaagagaccuaugauuc

SEQ ID NO: 250029 - RNA, 19 nt, Homo sapiens
  misc_RNA (1)...(19): siRNA sense strand
acgaaacccuucugaguug

SEQ ID NO: 250030 - RNA, 19 nt, Homo sapiens
  misc_RNA (1)...(19): siRNA sense strand
ccuaugaaggaaacuauua

SEQ ID NO: 250031 - RNA, 19 nt, Homo sapiens
  misc_RNA (1)...(19): siRNA sense strand
gcuauagaacugauuaaga

SEQ ID NO: 250032 - RNA, 19 nt, Homo sapiens
  misc_RNA (1)...(19): siRNA sense strand
gaucuuggcaguaaaugga

SEQ ID NO: 250033 - RNA, 19 nt, Homo sapiens
  misc_RNA (1)...(19): siRNA sense strand
ggcccaagcuccagaucaa

SEQ ID NO: 250034 - RNA, 19 nt, Homo sapiens
  misc_RNA (1)...(19): siRNA sense strand
gaucucauaguggaaguua

SEQ ID NO: 250035 - RNA, 19 nt, Homo sapiens
  misc_RNA (1)...(19): siRNA sense strand
gggaugugauuguaagugu

SEQ ID NO: 250036 - RNA, 19 nt, Homo sapiens
  misc_RNA (1)...(19): siRNA sense strand
caacaggaagacacaauau

SEQ ID NO: 250037 - RNA, 19 nt, Homo sapiens
  misc_RNA (1)...(19): siRNA sense strand
ccaaagagugaaacagauu

SEQ ID NO: 250038 - RNA, 19 nt, Homo sapiens
  misc_RNA (1)...(19): siRNA sense strand
ggaagucggcaccuaugaa

SEQ ID NO: 250039 - RNA, 19 nt, Homo sapiens
  misc_RNA (1)...(19): siRNA sense strand
cagagaagauugccaccau

SEQ ID NO: 250040 - RNA, 19 nt, Homo sapiens
  misc_RNA (1)...(19): siRNA sense strand
caaggaagcgggaaacaca

SEQ ID NO: 250041 - RNA, 19 nt, Homo sapiens
  misc_RNA (1)...(19): siRNA sense strand
ucucagaaguucccucaau

SEQ ID NO: 250042 - RNA, 19 nt, Homo sapiens
  misc_RNA (1)...(19): siRNA sense strand
gagcacacucuccaagaaa

SEQ ID NO: 250043 - RNA, 19 nt, Homo sapiens
  misc_RNA (1)...(19): siRNA sense strand
cucagaaguucccucaaua

SEQ ID NO: 250044 - RNA, 19 nt, Homo sapiens
  misc_RNA (1)...(19): siRNA sense strand
caaagcaggaaucucaauu

SEQ ID NO: 250045 - RNA, 19 nt, Homo sapiens
  misc_RNA (1)...(19): siRNA sense strand
gaagcaggcacgaccuuug

SEQ ID NO: 250046 - RNA, 19 nt, Homo sapiens
  misc_RNA (1)...(19): siRNA sense strand
gggaaccuauuuauauugg

SEQ ID NO: 250047 - RNA, 19 nt, Homo sapiens
  misc_RNA (1)...(19): siRNA sense strand
gaauaguucucagcacagu

SEQ ID NO: 250048 - RNA, 19 nt, Homo sapiens
  misc_RNA (1)...(19): siRNA sense strand
cgaaccaaguccuacaaug

SEQ ID NO: 250049 - RNA, 19 nt, Homo sapiens
  misc_RNA (1)...(19): siRNA sense strand
ggaugggacgccaguaauu

SEQ ID NO: 250050 - RNA, 19 nt, Homo sapiens
  misc_RNA (1)...(19): siRNA sense strand
ccugaggucuggagaugaa

SEQ ID NO: 250051 - RNA, 19 nt, Homo sapiens
  misc_RNA (1)...(19): siRNA sense strand
acaggaagacacaauauga

SEQ ID NO: 250052 - RNA, 19 nt, Homo sapiens
  misc_RNA (1)...(19): siRNA sense strand
gaggucuggagaugaauua

SEQ ID NO: 250053 - RNA, 19 nt, Homo sapiens
  misc_RNA (1)...(19): siRNA sense strand
uuauauuggucacaucgua

SEQ ID NO: 250054 - RNA, 19 nt, Homo sapiens
  misc_RNA (1)...(19): siRNA sense strand
gauucuggguggaaaugaa

SEQ ID NO: 250055 - RNA, 19 nt, Homo sapiens
  misc_RNA (1)...(19): siRNA sense strand
ggcccuaacucacaaccaa

SEQ ID NO: 250056 - RNA, 19 nt, Homo sapiens
  misc_RNA (1)...(19): siRNA sense strand
agccagaacucauaacugu

SEQ ID NO: 250057 - RNA, 19 nt, Homo sapiens
  misc_RNA (1)...(19): siRNA sense strand
gccaaagagugaaacagau

SEQ ID NO: 250058 - RNA, 19 nt, Homo sapiens
  misc_RNA (1)...(19): siRNA sense strand
ggccaaagagugaaacaga

SEQ ID NO: 250059 - RNA, 19 nt, Homo sapiens
  misc_RNA (1)...(19): siRNA sense strand
ucuaugguaucuacuaugu

SEQ ID NO: 250060 - RNA, 19 nt, Homo sapiens
  misc_RNA (1)...(19): siRNA sense strand
gaacaaggaccugcgacau

SEQ ID NO: 250061 - RNA, 19 nt, Homo sapiens
  misc_RNA (1)...(19): siRNA sense strand
gacguggcuucaaauaguu

SEQ ID NO: 250062 - RNA, 19 nt, Homo sapiens
  misc_RNA (1)...(19): siRNA sense strand
caaguucauucacacaaag

SEQ ID NO: 250063 - RNA, 19 nt, Homo sapiens
  misc_RNA (1)...(19): siRNA sense strand
ucaacaggaagacacaaua

SEQ ID NO: 250064 - RNA, 19 nt, Homo sapiens
  misc_RNA (1)...(19): siRNA sense strand
agaaugaggaggaggauga

SEQ ID NO: 250065 - RNA, 19 nt, Homo sapiens
  misc_RNA (1)...(19): siRNA sense strand
aaagcaggaaucucaauuu

SEQ ID NO: 250066 - RNA, 19 nt, Homo sapiens
  misc_RNA (1)...(19): siRNA sense strand
gagaagauugccaccauca

SEQ ID NO: 250067 - RNA, 19 nt, Homo sapiens
  misc_RNA (1)...(19): siRNA sense strand
ggugagagagagagagaaa

SEQ ID NO: 250068 - RNA, 19 nt, Homo sapiens
  misc_RNA (1)...(19): siRNA sense strand
aaagugauccagaagaaga

SEQ ID NO: 250069 - RNA, 19 nt, Homo sapiens
  misc_RNA (1)...(19): siRNA sense strand
aaaccacccuccaagcaau

SEQ ID NO: 250070 - RNA, 19 nt, Homo sapiens
  misc_RNA (1)...(19): siRNA sense strand
gcccuugugccuccuguua

SEQ ID NO: 250071 - RNA, 19 nt, Homo sapiens
  misc_RNA (1)...(19): siRNA sense strand
gacccucggugccuaaaca

SEQ ID NO: 250072 - RNA, 19 nt, Homo sapiens
  misc_RNA (1)...(19): siRNA sense strand
ccucaauaccuaccucuuu

SEQ ID NO: 250073 - RNA, 19 nt, Homo sapiens
  misc_RNA (1)...(19): siRNA sense strand
aaaggcaaguucauucaca

SEQ ID NO: 250074 - RNA, 19 nt, Homo sapiens
  misc_RNA (1)...(19): siRNA sense strand
gaguucgucuguuucugaa

SEQ ID NO: 250075 - RNA, 19 nt, Homo sapiens
  misc_RNA (1)...(19): siRNA sense strand
cgagcuauagaacugauua

SEQ ID NO: 250076 - RNA, 19 nt, Homo sapiens
  misc_RNA (1)...(19): siRNA sense strand
ucucaugguuauccuaaug

SEQ ID NO: 250077 - RNA, 19 nt, Homo sapiens
  misc_RNA (1)...(19): siRNA sense strand
gaugugauuguaaguguga

SEQ ID NO: 250078 - RNA, 19 nt, Homo sapiens
  misc_RNA (1)...(19): siRNA sense strand
guacgggcuugguaucaua

SEQ ID NO: 250079 - RNA, 19 nt, Homo sapiens
  misc_RNA (1)...(19): siRNA sense strand
ggacccaccugacccacua

SEQ ID NO: 250080 - RNA, 19 nt, Homo sapiens
  misc_RNA (1)...(19): siRNA sense strand
gagcuaacauccuggucaa

SEQ ID NO: 250081 - RNA, 19 nt, Homo sapiens
  misc_RNA (1)...(19): siRNA sense strand
gagacugugaagauaauua

SEQ ID NO: 250082 - RNA, 19 nt, Homo sapiens
  misc_RNA (1)...(19): siRNA sense strand
gaacaacugcgagcacuuc

SEQ ID NO: 250083 - RNA, 19 nt, Homo sapiens
  misc_RNA (1)...(19): siRNA sense strand
gguggugucuuuacuacug

SEQ ID NO: 250084 - RNA, 19 nt, Homo sapiens
  misc_RNA (1)...(19): siRNA sense strand
acaaagggaggaacaguuu

SEQ ID NO: 250085 - RNA, 19 nt, Homo sapiens
  misc_RNA (1)...(19): siRNA sense strand
ggagguggugucuuuacua

SEQ ID NO: 250086 - RNA, 19 nt, Homo sapiens
  misc_RNA (1)...(19): siRNA sense strand
acacuacccuuccugcaau

SEQ ID NO: 250087 - RNA, 19 nt, Homo sapiens
  misc_RNA (1)...(19): siRNA sense strand
gagguggugucuuuacuac

SEQ ID NO: 250088 - RNA, 19 nt, Homo sapiens
  misc_RNA (1)...(19): siRNA sense strand
gugagacugugaagauaau

SEQ ID NO: 250089 - RNA, 19 nt, Homo sapiens
  misc_RNA (1)...(19): siRNA sense strand
cuaacauccuggucaauca

SEQ ID NO: 250090 - RNA, 19 nt, Homo sapiens
  misc_RNA (1)...(19): siRNA sense strand
gcgagcacuucgugaccua

SEQ ID NO: 250091 - RNA, 19 nt, Homo sapiens
  misc_RNA (1)...(19): siRNA sense strand
ggauuggcgucuauagucu

SEQ ID NO: 250092 - RNA, 19 nt, Homo sapiens
  misc_RNA (1)...(19): siRNA sense strand
caacuucacgcucuuuagu

SEQ ID NO: 250093 - RNA, 19 nt, Homo sapiens
  misc_RNA (1)...(19): siRNA sense strand
agaagguggucuccaacaa

SEQ ID NO: 250094 - RNA, 19 nt, Homo sapiens
  misc_RNA (1)...(19): siRNA sense strand
gacaaagggaggaacaguu

SEQ ID NO: 250095 - RNA, 19 nt, Homo sapiens
  misc_RNA (1)...(19): siRNA sense strand
gaagguggucuccaacaag

SEQ ID NO: 250096 - RNA, 19 nt, Homo sapiens
  misc_RNA (1)...(19): siRNA sense strand
gggauuggcgucuauaguc

SEQ ID NO: 250097 - RNA, 19 nt, Homo sapiens
  misc_RNA (1)...(19): siRNA sense strand
cgcagaagguggucuccaa

SEQ ID NO: 250098 - RNA, 19 nt, Homo sapiens
  misc_RNA (1)...(19): siRNA sense strand
gagaagcugcuccucaucu

SEQ ID NO: 250099 - RNA, 19 nt, Homo sapiens
  misc_RNA (1)...(19): siRNA sense strand
cuucagcagucuugggauu

SEQ ID NO: 250100 - RNA, 19 nt, Homo sapiens
  misc_RNA (1)...(19): siRNA sense strand
ggacaaagggaggaacagu

SEQ ID NO: 250101 - RNA, 19 nt, Homo sapiens
  misc_RNA (1)...(19): siRNA sense strand
gcaucuaccuaggagacaa

SEQ ID NO: 250102 - RNA, 19 nt, Homo sapiens
  misc_RNA (1)...(19): siRNA sense strand
gauaauuauucgugaucag

SEQ ID NO: 250103 - RNA, 19 nt, Homo sapiens
  misc_RNA (1)...(19): siRNA sense strand
gggcguuauugucaaagug

SEQ ID NO: 250104 - RNA, 19 nt, Homo sapiens
  misc_RNA (1)...(19): siRNA sense strand
gcuaacauccuggucaauc

SEQ ID NO: 250105 - RNA, 19 nt, Homo sapiens
  misc_RNA (1)...(19): siRNA sense strand
ugcuggagguggugucuuu

SEQ ID NO: 250106 - RNA, 19 nt, Homo sapiens
  misc_RNA (1)...(19): siRNA sense strand
ggacacaguggaggacuuc

SEQ ID NO: 250107 - RNA, 19 nt, Homo sapiens
  misc_RNA (1)...(19): siRNA sense strand
gacccacuauggcaucuac

SEQ ID NO: 250108 - RNA, 19 nt, Homo sapiens
  misc_RNA (1)...(19): siRNA sense strand
cgucucauccugggcguua

SEQ ID NO: 250109 - RNA, 19 nt, Homo sapiens
  misc_RNA (1)...(19): siRNA sense strand
ccacuauggcaucuaccua

SEQ ID NO: 250110 - RNA, 19 nt, Homo sapiens
  misc_RNA (1)...(19): siRNA sense strand
ccugggcguuauugucaaa

SEQ ID NO: 250111 - RNA, 19 nt, Homo sapiens
  misc_RNA (1)...(19): siRNA sense strand
ugucuuuacuacuggagaa

SEQ ID NO: 250112 - RNA, 19 nt, Homo sapiens
  misc_RNA (1)...(19): siRNA sense strand
gcaaggacaaagggaggaa

SEQ ID NO: 250113 - RNA, 19 nt, Homo sapiens
  misc_RNA (1)...(19): siRNA sense strand
aaaaggcacugcucaacga

SEQ ID NO: 250114 - RNA, 19 nt, Homo sapiens
  misc_RNA (1)...(19): siRNA sense strand
ggaacaacugcgagcacuu

SEQ ID NO: 250115 - RNA, 19 nt, Homo sapiens
  misc_RNA (1)...(19): siRNA sense strand
ugugagacugugaagauaa

SEQ ID NO: 250116 - RNA, 19 nt, Homo sapiens
  misc_RNA (1)...(19): siRNA sense strand
uugugagacugugaagaua

SEQ ID NO: 250117 - RNA, 19 nt, Homo sapiens
  misc_RNA (1)...(19): siRNA sense strand
aauuauucgugaucagaga

SEQ ID NO: 250118 - RNA, 19 nt, Homo sapiens
  misc_RNA (1)...(19): siRNA sense strand
acuucacgcucuuuaguuc

SEQ ID NO: 250119 - RNA, 19 nt, Homo sapiens
  misc_RNA (1)...(19): siRNA sense strand
cuccucaucuccaacuuca

SEQ ID NO: 250120 - RNA, 19 nt, Homo sapiens
  misc_RNA (1)...(19): siRNA sense strand
gugaccuacugcagauaug

SEQ ID NO: 250121 - RNA, 19 nt, Homo sapiens
  misc_RNA (1)...(19): siRNA sense strand
gaaaggaaguucauacagu

SEQ ID NO: 250122 - RNA, 19 nt, Homo sapiens
  misc_RNA (1)...(19): siRNA sense strand
gaagaauaccuacguuaua

SEQ ID NO: 250123 - RNA, 19 nt, Homo sapiens
  misc_RNA (1)...(19): siRNA sense strand
gcaaagaggucuaucaacu

SEQ ID NO: 250124 - RNA, 19 nt, Homo sapiens
  misc_RNA (1)...(19): siRNA sense strand
ggacggacuuuccuauaaa

SEQ ID NO: 250125 - RNA, 19 nt, Homo sapiens
  misc_RNA (1)...(19): siRNA sense strand
gggacggacuuuccuauaa

SEQ ID NO: 250126 - RNA, 19 nt, Homo sapiens
  misc_RNA (1)...(19): siRNA sense strand
ggaauagcauggagucaga

SEQ ID NO: 250127 - RNA, 19 nt, Homo sapiens
  misc_RNA (1)...(19): siRNA sense strand
gaaacccgcuggaaauauc

SEQ ID NO: 250128 - RNA, 19 nt, Homo sapiens
  misc_RNA (1)...(19): siRNA sense strand
gaaauaucacuuugaggua

SEQ ID NO: 250129 - RNA, 19 nt, Homo sapiens
  misc_RNA (1)...(19): siRNA sense strand
gaacauauacuguguccau

SEQ ID NO: 250130 - RNA, 19 nt, Homo sapiens
  misc_RNA (1)...(19): siRNA sense strand
caaagaaacccgcuggaaa

SEQ ID NO: 250131 - RNA, 19 nt, Homo sapiens
  misc_RNA (1)...(19): siRNA sense strand
gagguggaguucccuauug

SEQ ID NO: 250132 - RNA, 19 nt, Homo sapiens
  misc_RNA (1)...(19): siRNA sense strand
aaaggaaguucauacaguu

SEQ ID NO: 250133 - RNA, 19 nt, Homo sapiens
  misc_RNA (1)...(19): siRNA sense strand
gcaaagaagagguggaguu

SEQ ID NO: 250134 - RNA, 19 nt, Homo sapiens
  misc_RNA (1)...(19): siRNA sense strand
ucucagacaugacuucuau

SEQ ID NO: 250135 - RNA, 19 nt, Homo sapiens
  misc_RNA (1)...(19): siRNA sense strand
gguccaggcucucaagaug

SEQ ID NO: 250136 - RNA, 19 nt, Homo sapiens
  misc_RNA (1)...(19): siRNA sense strand
agagacacauuacaccuaa

SEQ ID NO: 250137 - RNA, 19 nt, Homo sapiens
  misc_RNA (1)...(19): siRNA sense strand
gcucugggcugcuauaugc

SEQ ID NO: 250138 - RNA, 19 nt, Homo sapiens
  misc_RNA (1)...(19): siRNA sense strand
gcucagugccguggaaaua

SEQ ID NO: 250139 - RNA, 19 nt, Homo sapiens
  misc_RNA (1)...(19): siRNA sense strand
aaagaggucuaucaacugu

SEQ ID NO: 250140 - RNA, 19 nt, Homo sapiens
  misc_RNA (1)...(19): siRNA sense strand
ggaguucccuauugcauac

SEQ ID NO: 250141 - RNA, 19 nt, Homo sapiens
  misc_RNA (1)...(19): siRNA sense strand
aaagagcaaugcagagaug

SEQ ID NO: 250142 - RNA, 19 nt, Homo sapiens
  misc_RNA (1)...(19): siRNA sense strand
ggacuugaauuggaugcuu

SEQ ID NO: 250143 - RNA, 19 nt, Homo sapiens
  misc_RNA (1)...(19): siRNA sense strand
aaagaaacccgcuggaaau

SEQ ID NO: 250144 - RNA, 19 nt, Homo sapiens
  misc_RNA (1)...(19): siRNA sense strand
acccaaagguagaugauaa

SEQ ID NO: 250145 - RNA, 19 nt, Homo sapiens
  misc_RNA (1)...(19): siRNA sense strand
gguagugagagacacauua

SEQ ID NO: 250146 - RNA, 19 nt, Homo sapiens
  misc_RNA (1)...(19): siRNA sense strand
gagagacacauuacaccua

SEQ ID NO: 250147 - RNA, 19 nt, Homo sapiens
  misc_RNA (1)...(19): siRNA sense strand
cccaacaacugauugaaug

SEQ ID NO: 250148 - RNA, 19 nt, Homo sapiens
  misc_RNA (1)...(19): siRNA sense strand
ggucaaagcaauuauuucu

SEQ ID NO: 250149 - RNA, 19 nt, Homo sapiens
  misc_RNA (1)...(19): siRNA sense strand
gagauuucguccaacaugu

SEQ ID NO: 250150 - RNA, 19 nt, Homo sapiens
  misc_RNA (1)...(19): siRNA sense strand
gaugagaaguccccagaaa

SEQ ID NO: 250151 - RNA, 19 nt, Homo sapiens
  misc_RNA (1)...(19): siRNA sense strand
cuaugggacugaacuuuga

SEQ ID NO: 250152 - RNA, 19 nt, Homo sapiens
  misc_RNA (1)...(19): siRNA sense strand
ucucaaagccaguacugua

SEQ ID NO: 250153 - RNA, 19 nt, Homo sapiens
  misc_RNA (1)...(19): siRNA sense strand
uagaagaauaccuacguua

SEQ ID NO: 250154 - RNA, 19 nt, Homo sapiens
  misc_RNA (1)...(19): siRNA sense strand
caaagaggcggucaaagca

SEQ ID NO: 250155 - RNA, 19 nt, Homo sapiens
  misc_RNA (1)...(19): siRNA sense strand
caaagccaguacuguagga

SEQ ID NO: 250156 - RNA, 19 nt, Homo sapiens
  misc_RNA (1)...(19): siRNA sense strand
aaagguagaugauaaugcu

SEQ ID NO: 250157 - RNA, 19 nt, Homo sapiens
  misc_RNA (1)...(19): siRNA sense strand
agaagaagcgagagccuuu

SEQ ID NO: 250158 - RNA, 19 nt, Homo sapiens
  misc_RNA (1)...(19): siRNA sense strand
gugcuuagaagaauaccua

SEQ ID NO: 250159 - RNA, 19 nt, Homo sapiens
  misc_RNA (1)...(19): siRNA sense strand
cauuacaccuaaccaacaa

SEQ ID NO: 250160 - RNA, 19 nt, Homo sapiens
  misc_RNA (1)...(19): siRNA sense strand
gcggucaaagcaauuauuu

SEQ ID NO: 250161 - RNA, 19 nt, Homo sapiens
  misc_RNA (1)...(19): siRNA sense strand
cagcaaagaggucuaucaa

SEQ ID NO: 250162 - RNA, 19 nt, Homo sapiens
  misc_RNA (1)...(19): siRNA sense strand
auaaugcucuucagugcuu

SEQ ID NO: 250163 - RNA, 19 nt, Homo sapiens
  misc_RNA (1)...(19): siRNA sense strand
caacugauugaauggguaa

SEQ ID NO: 250164 - RNA, 19 nt, Homo sapiens
  misc_RNA (1)...(19): siRNA sense strand
agccaguacuguaggaaua

SEQ ID NO: 250165 - RNA, 19 nt, Homo sapiens
  misc_RNA (1)...(19): siRNA sense strand
ggugcaagcugaccucaac

SEQ ID NO: 250166 - RNA, 19 nt, Homo sapiens
  misc_RNA (1)...(19): siRNA sense strand
cauauacuguguccaugug

SEQ ID NO: 250167 - RNA, 19 nt, Homo sapiens
  misc_RNA (1)...(19): siRNA sense strand
caaagaagagguggaguuc

SEQ ID NO: 250168 - RNA, 19 nt, Homo sapiens
  misc_RNA (1)...(19): siRNA sense strand
gaagcgagagccuuucaca

SEQ ID NO: 250169 - RNA, 19 nt, Homo sapiens
  misc_RNA (1)...(19): siRNA sense strand
caaagaggucuaucaacug

SEQ ID NO: 250170 - RNA, 19 nt, Homo sapiens
  misc_RNA (1)...(19): siRNA sense strand
ggaccaagaggcagugcuu

SEQ ID NO: 250171 - RNA, 19 nt, Homo sapiens
  misc_RNA (1)...(19): siRNA sense strand
ucagacaugacuucuauug

SEQ ID NO: 250172 - RNA, 19 nt, Homo sapiens
  misc_RNA (1)...(19): siRNA sense strand
guggaugccuggcucuguu

SEQ ID NO: 250173 - RNA, 19 nt, Homo sapiens
  misc_RNA (1)...(19): siRNA sense strand
uagcauggagucagaggua

SEQ ID NO: 250174 - RNA, 19 nt, Homo sapiens
  misc_RNA (1)...(19): siRNA sense strand
aaacuuucuuucagguuga

SEQ ID NO: 250175 - RNA, 19 nt, Homo sapiens
  misc_RNA (1)...(19): siRNA sense strand
cuucccaaaugucuucaua

SEQ ID NO: 250176 - RNA, 19 nt, Homo sapiens
  misc_RNA (1)...(19): siRNA sense strand
ggugauucaugagaagauu

SEQ ID NO: 250177 - RNA, 19 nt, Homo sapiens
  misc_RNA (1)...(19): siRNA sense strand
agaagaauaccuacguuau

SEQ ID NO: 250178 - RNA, 19 nt, Homo sapiens
  misc_RNA (1)...(19): siRNA sense strand
gugugacucugaccacuug

SEQ ID NO: 250179 - RNA, 19 nt, Homo sapiens
  misc_RNA (1)...(19): siRNA sense strand
ccaaguacgacaucucaga

SEQ ID NO: 250180 - RNA, 19 nt, Homo sapiens
  misc_RNA (1)...(19): siRNA sense strand
agaggucuaucaacuguuc

SEQ ID NO: 250181 - RNA, 19 nt, Homo sapiens
  misc_RNA (1)...(19): siRNA sense strand
ucaaagaggcggucaaagc

SEQ ID NO: 250182 - RNA, 19 nt, Homo sapiens
  misc_RNA (1)...(19): siRNA sense strand
uuagaagaauaccuacguu

SEQ ID NO: 250183 - RNA, 19 nt, Homo sapiens
  misc_RNA (1)...(19): siRNA sense strand
ucaaaaccaucaccuguug

SEQ ID NO: 250184 - RNA, 19 nt, Homo sapiens
  misc_RNA (1)...(19): siRNA sense strand
uacgacaucucagacauga

SEQ ID NO: 250185 - RNA, 19 nt, Homo sapiens
  misc_RNA (1)...(19): siRNA sense strand
aagaaacccgcuggaaaua

SEQ ID NO: 250186 - RNA, 19 nt, Homo sapiens
  misc_RNA (1)...(19): siRNA sense strand
gaaauacuuccugaauaca

SEQ ID NO: 250187 - RNA, 19 nt, Homo sapiens
  misc_RNA (1)...(19): siRNA sense strand
aagcugaccucaacugcau

SEQ ID NO: 250188 - RNA, 19 nt, Homo sapiens
  misc_RNA (1)...(19): siRNA sense strand
cgagagccuuucacagaca

SEQ ID NO: 250189 - RNA, 19 nt, Homo sapiens
  misc_RNA (1)...(19): siRNA sense strand
gaauaccuacguuauaagg

SEQ ID NO: 250190 - RNA, 19 nt, Homo sapiens
  misc_RNA (1)...(19): siRNA sense strand
uaaccaacaagaagaagga

SEQ ID NO: 250191 - RNA, 19 nt, Homo sapiens
  misc_RNA (1)...(19): siRNA sense strand
acucuauggugauucauga

SEQ ID NO: 250192 - RNA, 19 nt, Homo sapiens
  misc_RNA (1)...(19): siRNA sense strand
ucaacugcauggaagacuu

SEQ ID NO: 250193 - RNA, 19 nt, Homo sapiens
  misc_RNA (1)...(19): siRNA sense strand
cauuguggcuucccgagau

SEQ ID NO: 250194 - RNA, 19 nt, Homo sapiens
  misc_RNA (1)...(19): siRNA sense strand
aggcagugcuucaggcuau

SEQ ID NO: 250195 - RNA, 19 nt, Homo sapiens
  misc_RNA (1)...(19): siRNA sense strand
caacugcauggaagacuug

SEQ ID NO: 250196 - RNA, 19 nt, Homo sapiens
  misc_RNA (1)...(19): siRNA sense strand
gauuucguccaacauguuu

SEQ ID NO: 250197 - RNA, 19 nt, Homo sapiens
  misc_RNA (1)...(19): siRNA sense strand
aagaggcggucaaagcaau

SEQ ID NO: 250198 - RNA, 19 nt, Homo sapiens
  misc_RNA (1)...(19): siRNA sense strand
gguagaugauaaugcucuu

SEQ ID NO: 250199 - RNA, 19 nt, Homo sapiens
  misc_RNA (1)...(19): siRNA sense strand
ucaaguggcagggucauga

SEQ ID NO: 250200 - RNA, 19 nt, Homo sapiens
  misc_RNA (1)...(19): siRNA sense strand
guacgacaucucagacaug

SEQ ID NO: 250201 - RNA, 19 nt, Homo sapiens
  misc_RNA (1)...(19): siRNA sense strand
ucugccagcugcauuacuu

SEQ ID NO: 250202 - RNA, 19 nt, Homo sapiens
  misc_RNA (1)...(19): siRNA sense strand
gauguugaaugggaggaau

SEQ ID NO: 250203 - RNA, 19 nt, Homo sapiens
  misc_RNA (1)...(19): siRNA sense strand
gaggcggucaaagcaauua

SEQ ID NO: 250204 - RNA, 19 nt, Homo sapiens
  misc_RNA (1)...(19): siRNA sense strand
cuauggugauucaugagaa

SEQ ID NO: 250205 - RNA, 19 nt, Homo sapiens
  misc_RNA (1)...(19): siRNA sense strand
gaugauaaugcucuucagu

SEQ ID NO: 250206 - RNA, 19 nt, Homo sapiens
  misc_RNA (1)...(19): siRNA sense strand
gggaaucucaaagccagua

SEQ ID NO: 250207 - RNA, 19 nt, Homo sapiens
  misc_RNA (1)...(19): siRNA sense strand
gcuggaaauaucacuuuga

SEQ ID NO: 250208 - RNA, 19 nt, Homo sapiens
  misc_RNA (1)...(19): siRNA sense strand
uccaggcucucaagauguu

SEQ ID NO: 250209 - RNA, 19 nt, Homo sapiens
  misc_RNA (1)...(19): siRNA sense strand
aauacuuccugaauacaug

SEQ ID NO: 250210 - RNA, 19 nt, Homo sapiens
  misc_RNA (1)...(19): siRNA sense strand
uaugcucccugcucuggaa

SEQ ID NO: 250211 - RNA, 19 nt, Homo sapiens
  misc_RNA (1)...(19): siRNA sense strand
gacccaaagguagaugaua

SEQ ID NO: 250212 - RNA, 19 nt, Homo sapiens
  misc_RNA (1)...(19): siRNA sense strand
ccugaaacuuccagcaaag

SEQ ID NO: 250213 - RNA, 19 nt, Homo sapiens
  misc_RNA (1)...(19): siRNA sense strand
caugagggagacaucgaua

SEQ ID NO: 250214 - RNA, 19 nt, Homo sapiens
  misc_RNA (1)...(19): siRNA sense strand
acaaagaaacccgcuggaa

SEQ ID NO: 250215 - RNA, 19 nt, Homo sapiens
  misc_RNA (1)...(19): siRNA sense strand
cagagacugugagcacuuc

SEQ ID NO: 250216 - RNA, 19 nt, Homo sapiens
  misc_RNA (1)...(19): siRNA sense strand
cgagauuucguccaacaug

SEQ ID NO: 250217 - RNA, 19 nt, Homo sapiens
  misc_RNA (1)...(19): siRNA sense strand
uccugaaacuuccagcaaa

SEQ ID NO: 250218 - RNA, 19 nt, Homo sapiens
  misc_RNA (1)...(19): siRNA sense strand
cgacaucucagacaugacu

SEQ ID NO: 250219 - RNA, 19 nt, Homo sapiens
  misc_RNA (1)...(19): siRNA sense strand
ccuaaaucccaacaacuga

SEQ ID NO: 250220 - RNA, 19 nt, Homo sapiens
  misc_RNA (1)...(19): siRNA sense strand
gacucugccagcugcauua

SEQ ID NO: 250221 - RNA, 19 nt, Homo sapiens
  misc_RNA (1)...(19): siRNA sense strand
gaaagaaauugaagaacug

SEQ ID NO: 250222 - RNA, 19 nt, Homo sapiens
  misc_RNA (1)...(19): siRNA sense strand
gagcaacaguggaaucaaa

SEQ ID NO: 250223 - RNA, 19 nt, Homo sapiens
  misc_RNA (1)...(19): siRNA sense strand
cgaauugguugcaucauaa

SEQ ID NO: 250224 - RNA, 19 nt, Homo sapiens
  misc_RNA (1)...(19): siRNA sense strand
guacuccacugcacgcuaa

SEQ ID NO: 250225 - RNA, 19 nt, Homo sapiens
  misc_RNA (1)...(19): siRNA sense strand
agaaguagaugucggagaa

SEQ ID NO: 250226 - RNA, 19 nt, Homo sapiens
  misc_RNA (1)...(19): siRNA sense strand
gauacagucuacagcagua

SEQ ID NO: 250227 - RNA, 19 nt, Homo sapiens
  misc_RNA (1)...(19): siRNA sense strand
cuaauucuaugguuucuga

SEQ ID NO: 250228 - RNA, 19 nt, Homo sapiens
  misc_RNA (1)...(19): siRNA sense strand
ugaagagacuggagcagaa

SEQ ID NO: 250229 - RNA, 19 nt, Homo sapiens
  misc_RNA (1)...(19): siRNA sense strand
caucauaacugcuagaaaa

SEQ ID NO: 250230 - RNA, 19 nt, Homo sapiens
  misc_RNA (1)...(19): siRNA sense strand
gaacugaaacaagagcuaa

SEQ ID NO: 250231 - RNA, 19 nt, Homo sapiens
  misc_RNA (1)...(19): siRNA sense strand
caacaguggaaucaaauaa

SEQ ID NO: 250232 - RNA, 19 nt, Homo sapiens
  misc_RNA (1)...(19): siRNA sense strand
aaagaaagcgaaagagaaa

SEQ ID NO: 250233 - RNA, 19 nt, Homo sapiens
  misc_RNA (1)...(19): siRNA sense strand
uugaagaacugaaacaaga

SEQ ID NO: 250234 - RNA, 19 nt, Homo sapiens
  misc_RNA (1)...(19): siRNA sense strand
ccugaaaccugcaaagaug

SEQ ID NO: 250235 - RNA, 19 nt, Homo sapiens
  misc_RNA (1)...(19): siRNA sense strand
ucgaauugguugcaucaua

SEQ ID NO: 250236 - RNA, 19 nt, Homo sapiens
  misc_RNA (1)...(19): siRNA sense strand
gcaauggucaugugugcua

SEQ ID NO: 250237 - RNA, 19 nt, Homo sapiens
  misc_RNA (1)...(19): siRNA sense strand
agaggcagaucaaaucauu

SEQ ID NO: 250238 - RNA, 19 nt, Homo sapiens
  misc_RNA (1)...(19): siRNA sense strand
ugaaucauguuccucuuga

SEQ ID NO: 250239 - RNA, 19 nt, Homo sapiens
  misc_RNA (1)...(19): siRNA sense strand
aguauuaucucaagcaaug

SEQ ID NO: 250240 - RNA, 19 nt, Homo sapiens
  misc_RNA (1)...(19): siRNA sense strand
gaaagggaagggaguaugu

SEQ ID NO: 250241 - RNA, 19 nt, Homo sapiens
  misc_RNA (1)...(19): siRNA sense strand
ucaguggccuggugaauca

SEQ ID NO: 250242 - RNA, 19 nt, Homo sapiens
  misc_RNA (1)...(19): siRNA sense strand
ggucaugugugcuaguuca

SEQ ID NO: 250243 - RNA, 19 nt, Homo sapiens
  misc_RNA (1)...(19): siRNA sense strand
gcaacaguggaaucaaaua

SEQ ID NO: 250244 - RNA, 19 nt, Homo sapiens
  misc_RNA (1)...(19): siRNA sense strand
agccugaucuucacacuaa

SEQ ID NO: 250245 - RNA, 19 nt, Homo sapiens
  misc_RNA (1)...(19): siRNA sense strand
gcacgcuaauucuaugguu

SEQ ID NO: 250246 - RNA, 19 nt, Homo sapiens
  misc_RNA (1)...(19): siRNA sense strand
ugaugcagauucuuuguau

SEQ ID NO: 250247 - RNA, 19 nt, Homo sapiens
  misc_RNA (1)...(19): siRNA sense strand
augcuaaacugaagaaaga

SEQ ID NO: 250248 - RNA, 19 nt, Homo sapiens
  misc_RNA (1)...(19): siRNA sense strand
ggaguauuaucucaagcaa

SEQ ID NO: 250249 - RNA, 19 nt, Homo sapiens
  misc_RNA (1)...(19): siRNA sense strand
gaucuucacacuaaugaug

SEQ ID NO: 250250 - RNA, 19 nt, Homo sapiens
  misc_RNA (1)...(19): siRNA sense strand
gaaaagaaagcgaaagaga

SEQ ID NO: 250251 - RNA, 19 nt, Homo sapiens
  misc_RNA (1)...(19): siRNA sense strand
gagcugaauccuaagaaga

SEQ ID NO: 250252 - RNA, 19 nt, Homo sapiens
  misc_RNA (1)...(19): siRNA sense strand
gaaucauguuccucuugaa

SEQ ID NO: 250253 - RNA, 19 nt, Homo sapiens
  misc_RNA (1)...(19): siRNA sense strand
guguguggcuacauacaaa

SEQ ID NO: 250254 - RNA, 19 nt, Homo sapiens
  misc_RNA (1)...(19): siRNA sense strand
gaaacaagagcuaauucag

SEQ ID NO: 250255 - RNA, 19 nt, Homo sapiens
  misc_RNA (1)...(19): siRNA sense strand
ggagcugaauccuaagaag

SEQ ID NO: 250256 - RNA, 19 nt, Homo sapiens
  misc_RNA (1)...(19): siRNA sense strand
uaaugaugcuguucugaag

SEQ ID NO: 250257 - RNA, 19 nt, Homo sapiens
  misc_RNA (1)...(19): siRNA sense strand
ccacugcacgcuaauucua

SEQ ID NO: 250258 - RNA, 19 nt, Homo sapiens
  misc_RNA (1)...(19): siRNA sense strand
uaucuuaagcagcaaguuu

SEQ ID NO: 250259 - RNA, 19 nt, Homo sapiens
  misc_RNA (1)...(19): siRNA sense strand
gcuaaacugaagaaagaaa

SEQ ID NO: 250260 - RNA, 19 nt, Homo sapiens
  misc_RNA (1)...(19): siRNA sense strand
gcagaggcagaucaaauca

SEQ ID NO: 250261 - RNA, 19 nt, Homo sapiens
  misc_RNA (1)...(19): siRNA sense strand
caacuuugagggaagagaa

SEQ ID NO: 250262 - RNA, 19 nt, Homo sapiens
  misc_RNA (1)...(19): siRNA sense strand
ggcaaauaaugaugcuguu

SEQ ID NO: 250263 - RNA, 19 nt, Homo sapiens
  misc_RNA (1)...(19): siRNA sense strand
guaccaaagaacagauaaa

SEQ ID NO: 250264 - RNA, 19 nt, Homo sapiens
  misc_RNA (1)...(19): siRNA sense strand
gagacagaauuacuuuuga

SEQ ID NO: 250265 - RNA, 19 nt, Homo sapiens
  misc_RNA (1)...(19): siRNA sense strand
guuccuggagacagaauua

SEQ ID NO: 250266 - RNA, 19 nt, Homo sapiens
  misc_RNA (1)...(19): siRNA sense strand
caaauaaugaugcuguucu

SEQ ID NO: 250267 - RNA, 19 nt, Homo sapiens
  misc_RNA (1)...(19): siRNA sense strand
gugcagaggcagaucaaau

SEQ ID NO: 250268 - RNA, 19 nt, Homo sapiens
  misc_RNA (1)...(19): siRNA sense strand
guagaugucggagaaauag

SEQ ID NO: 250269 - RNA, 19 nt, Homo sapiens
  misc_RNA (1)...(19): siRNA sense strand
gaaaaugugauacagucua

SEQ ID NO: 250270 - RNA, 19 nt, Homo sapiens
  misc_RNA (1)...(19): siRNA sense strand
gcaaauaaugaugcuguuc

SEQ ID NO: 250271 - RNA, 19 nt, Homo sapiens
  misc_RNA (1)...(19): siRNA sense strand
gaaauugaagaacugaaac

SEQ ID NO: 250272 - RNA, 19 nt, Homo sapiens
  misc_RNA (1)...(19): siRNA sense strand
augaguguguggcuacaua

SEQ ID NO: 250273 - RNA, 19 nt, Homo sapiens
  misc_RNA (1)...(19): siRNA sense strand
ggagacagaauuacuuuug

SEQ ID NO: 250274 - RNA, 19 nt, Homo sapiens
  misc_RNA (1)...(19): siRNA sense strand
gaaaagaaaggagagaaga

SEQ ID NO: 250275 - RNA, 19 nt, Homo sapiens
  misc_RNA (1)...(19): siRNA sense strand
aaauaaugaugcuguucug

SEQ ID NO: 250276 - RNA, 19 nt, Homo sapiens
  misc_RNA (1)...(19): siRNA sense strand
gaugcagauucuuuguaug

SEQ ID NO: 250277 - RNA, 19 nt, Homo sapiens
  misc_RNA (1)...(19): siRNA sense strand
cacgcuaauucuaugguuu

SEQ ID NO: 250278 - RNA, 19 nt, Homo sapiens
  misc_RNA (1)...(19): siRNA sense strand
caaaauggagugaagcaaa

SEQ ID NO: 250279 - RNA, 19 nt, Homo sapiens
  misc_RNA (1)...(19): siRNA sense strand
gaaguagaugucggagaaa

SEQ ID NO: 250280 - RNA, 19 nt, Homo sapiens
  misc_RNA (1)...(19): siRNA sense strand
cguaucuucugguaccaaa

SEQ ID NO: 250281 - RNA, 19 nt, Homo sapiens
  misc_RNA (1)...(19): siRNA sense strand
ggugaaucauguuccucuu

SEQ ID NO: 250282 - RNA, 19 nt, Homo sapiens
  misc_RNA (1)...(19): siRNA sense strand
aaagaugaggggaguauua

SEQ ID NO: 250283 - RNA, 19 nt, Homo sapiens
  misc_RNA (1)...(19): siRNA sense strand
gagcuaauucaggcagaaa

SEQ ID NO: 250284 - RNA, 19 nt, Homo sapiens
  misc_RNA (1)...(19): siRNA sense strand
ggugaaagggaagggagua

SEQ ID NO: 250285 - RNA, 19 nt, Homo sapiens
  misc_RNA (1)...(19): siRNA sense strand
aaggagagaagaaggagaa

SEQ ID NO: 250286 - RNA, 19 nt, Homo sapiens
  misc_RNA (1)...(19): siRNA sense strand
agaaaggagagaagaagga

SEQ ID NO: 250287 - RNA, 19 nt, Homo sapiens
  misc_RNA (1)...(19): siRNA sense strand
gcaaucaauagcuggaagu

SEQ ID NO: 250288 - RNA, 19 nt, Homo sapiens
  misc_RNA (1)...(19): siRNA sense strand
aaaauggagugaagcaaau

SEQ ID NO: 250289 - RNA, 19 nt, Homo sapiens
  misc_RNA (1)...(19): siRNA sense strand
gaagagacuggagcagaag

SEQ ID NO: 250290 - RNA, 19 nt, Homo sapiens
  misc_RNA (1)...(19): siRNA sense strand
ggauggugauuuuacuuug

SEQ ID NO: 250291 - RNA, 19 nt, Homo sapiens
  misc_RNA (1)...(19): siRNA sense strand
gguaccaaagaacagauaa

SEQ ID NO: 250292 - RNA, 19 nt, Homo sapiens
  misc_RNA (1)...(19): siRNA sense strand
auaaugaugcuguucugaa

SEQ ID NO: 250293 - RNA, 19 nt, Homo sapiens
  misc_RNA (1)...(19): siRNA sense strand
ugccgacucuaagccaaua

SEQ ID NO: 250294 - RNA, 19 nt, Homo sapiens
  misc_RNA (1)...(19): siRNA sense strand
aaagggaagggaguaugua

SEQ ID NO: 250295 - RNA, 19 nt, Homo sapiens
  misc_RNA (1)...(19): siRNA sense strand
guauguggaagaaguagau

SEQ ID NO: 250296 - RNA, 19 nt, Homo sapiens
  misc_RNA (1)...(19): siRNA sense strand
gcaucauaacugcuagaaa

SEQ ID NO: 250297 - RNA, 19 nt, Homo sapiens
  misc_RNA (1)...(19): siRNA sense strand
gguugcaucauaacugcua

SEQ ID NO: 250298 - RNA, 19 nt, Homo sapiens
  misc_RNA (1)...(19): siRNA sense strand
ccgucuggaucuucgaauu

SEQ ID NO: 250299 - RNA, 19 nt, Homo sapiens
  misc_RNA (1)...(19): siRNA sense strand
ugaaaaugcuaaacugaag

SEQ ID NO: 250300 - RNA, 19 nt, Homo sapiens
  misc_RNA (1)...(19): siRNA sense strand
ugugcuaguucaccagaga

SEQ ID NO: 250301 - RNA, 19 nt, Homo sapiens
  misc_RNA (1)...(19): siRNA sense strand
gugaaucauguuccucuug

SEQ ID NO: 250302 - RNA, 19 nt, Homo sapiens
  misc_RNA (1)...(19): siRNA sense strand
cuaagccaauagauguuuc

SEQ ID NO: 250303 - RNA, 19 nt, Homo sapiens
  misc_RNA (1)...(19): siRNA sense strand
aaagaaaggagagaagaag

SEQ ID NO: 250304 - RNA, 19 nt, Homo sapiens
  misc_RNA (1)...(19): siRNA sense strand
aaauggagugaagcaaaua

SEQ ID NO: 250305 - RNA, 19 nt, Homo sapiens
  misc_RNA (1)...(19): siRNA sense strand
ccaaagaacagauaaaagg

SEQ ID NO: 250306 - RNA, 19 nt, Homo sapiens
  misc_RNA (1)...(19): siRNA sense strand
gggaguauguagggcucaa

SEQ ID NO: 250307 - RNA, 19 nt, Homo sapiens
  misc_RNA (1)...(19): siRNA sense strand
gagggaagagaagaaacuu

SEQ ID NO: 250308 - RNA, 19 nt, Homo sapiens
  misc_RNA (1)...(19): siRNA sense strand
aguagaugucggagaaaua

SEQ ID NO: 250309 - RNA, 19 nt, Homo sapiens
  misc_RNA (1)...(19): siRNA sense strand
cgucuggaucuucgaauug

SEQ ID NO: 250310 - RNA, 19 nt, Homo sapiens
  misc_RNA (1)...(19): siRNA sense strand
aaaagaaagcgaaagagaa

SEQ ID NO: 250311 - RNA, 19 nt, Homo sapiens
  misc_RNA (1)...(19): siRNA sense strand
ggagaaauagccccaagga

SEQ ID NO: 250312 - RNA, 19 nt, Homo sapiens
  misc_RNA (1)...(19): siRNA sense strand
ggaagugccgacucuaagc

SEQ ID NO: 250313 - RNA, 19 nt, Homo sapiens
  misc_RNA (1)...(19): siRNA sense strand
gaagggugcagaggcagau

SEQ ID NO: 250314 - RNA, 19 nt, Homo sapiens
  misc_RNA (1)...(19): siRNA sense strand
gcugaauccuaagaagaag

SEQ ID NO: 250315 - RNA, 19 nt, Homo sapiens
  misc_RNA (1)...(19): siRNA sense strand
gggaguauuaucucaagca

SEQ ID NO: 250316 - RNA, 19 nt, Homo sapiens
  misc_RNA (1)...(19): siRNA sense strand
aaguagaugucggagaaau

SEQ ID NO: 250317 - RNA, 19 nt, Homo sapiens
  misc_RNA (1)...(19): siRNA sense strand
gcaaagaugaggggaguau

SEQ ID NO: 250318 - RNA, 19 nt, Homo sapiens
  misc_RNA (1)...(19): siRNA sense strand
gaaaaugcuaaacugaaga

SEQ ID NO: 250319 - RNA, 19 nt, Homo sapiens
  misc_RNA (1)...(19): siRNA sense strand
gcagaagccuggauuaaug

SEQ ID NO: 250320 - RNA, 19 nt, Homo sapiens
  misc_RNA (1)...(19): siRNA sense strand
ccacccagcuccaucagua

SEQ ID NO: 250321 - RNA, 19 nt, Homo sapiens
  misc_RNA (1)...(19): siRNA sense strand
gcaagcuacucuacuuuga

SEQ ID NO: 250322 - RNA, 19 nt, Homo sapiens
  misc_RNA (1)...(19): siRNA sense strand
gcauaaggcugcaggaaag

SEQ ID NO: 250323 - RNA, 19 nt, Homo sapiens
  misc_RNA (1)...(19): siRNA sense strand
agaaggaacuggcucauuc

SEQ ID NO: 250324 - RNA, 19 nt, Homo sapiens
  misc_RNA (1)...(19): siRNA sense strand
caagaagaauguuggugaa

SEQ ID NO: 250325 - RNA, 19 nt, Homo sapiens
  misc_RNA (1)...(19): siRNA sense strand
ccuuguggcuggauaauaa

SEQ ID NO: 250326 - RNA, 19 nt, Homo sapiens
  misc_RNA (1)...(19): siRNA sense strand
ggaacugaauguccuacuu

SEQ ID NO: 250327 - RNA, 19 nt, Homo sapiens
  misc_RNA (1)...(19): siRNA sense strand
ccucuuugcugcugcauaa

SEQ ID NO: 250328 - RNA, 19 nt, Homo sapiens
  misc_RNA (1)...(19): siRNA sense strand
gaugguaaauuucagaucu

SEQ ID NO: 250329 - RNA, 19 nt, Homo sapiens
  misc_RNA (1)...(19): siRNA sense strand
gcacaggucggaugguaaa

SEQ ID NO: 250330 - RNA, 19 nt, Homo sapiens
  misc_RNA (1)...(19): siRNA sense strand
gucauucgguugcugcuua

SEQ ID NO: 250331 - RNA, 19 nt, Homo sapiens
  misc_RNA (1)...(19): siRNA sense strand
caggucggaugguaaauuu

SEQ ID NO: 250332 - RNA, 19 nt, Homo sapiens
  misc_RNA (1)...(19): siRNA sense strand
gguacaaguucccaugcua

SEQ ID NO: 250333 - RNA, 19 nt, Homo sapiens
  misc_RNA (1)...(19): siRNA sense strand
gaaaguuccugugguugug

SEQ ID NO: 250334 - RNA, 19 nt, Homo sapiens
  misc_RNA (1)...(19): siRNA sense strand
gcugagcaguugcagauug

SEQ ID NO: 250335 - RNA, 19 nt, Homo sapiens
  misc_RNA (1)...(19): siRNA sense strand
gcagauugaauauagcuuu

SEQ ID NO: 250336 - RNA, 19 nt, Homo sapiens
  misc_RNA (1)...(19): siRNA sense strand
gaacugaauguccuacuuc

SEQ ID NO: 250337 - RNA, 19 nt, Homo sapiens
  misc_RNA (1)...(19): siRNA sense strand
uuucagaucuuugccuaua

SEQ ID NO: 250338 - RNA, 19 nt, Homo sapiens
  misc_RNA (1)...(19): siRNA sense strand
gaggagcucuaccuuaguc

SEQ ID NO: 250339 - RNA, 19 nt, Homo sapiens
  misc_RNA (1)...(19): siRNA sense strand
caaccuagcugggcagucu

SEQ ID NO: 250340 - RNA, 19 nt, Homo sapiens
  misc_RNA (1)...(19): siRNA sense strand
gcggcaagcuacucuacuu

SEQ ID NO: 250341 - RNA, 19 nt, Homo sapiens
  misc_RNA (1)...(19): siRNA sense strand
ucugcgagcuggccaguuu

SEQ ID NO: 250342 - RNA, 19 nt, Homo sapiens
  misc_RNA (1)...(19): siRNA sense strand
gugcacaggucggauggua

SEQ ID NO: 250343 - RNA, 19 nt, Homo sapiens
  misc_RNA (1)...(19): siRNA sense strand
ccaggaagcugcggagcaa

SEQ ID NO: 250344 - RNA, 19 nt, Homo sapiens
  misc_RNA (1)...(19): siRNA sense strand
cacauucucuguucuaagu

SEQ ID NO: 250345 - RNA, 19 nt, Homo sapiens
  misc_RNA (1)...(19): siRNA sense strand
uggaggagcucuaccuuag

SEQ ID NO: 250346 - RNA, 19 nt, Homo sapiens
  misc_RNA (1)...(19): siRNA sense strand
gaacggcagcgagcgagua

SEQ ID NO: 250347 - RNA, 19 nt, Homo sapiens
  misc_RNA (1)...(19): siRNA sense strand
caugcaucauuaccaaaua

SEQ ID NO: 250348 - RNA, 19 nt, Homo sapiens
  misc_RNA (1)...(19): siRNA sense strand
cuaugagccucgccacuuu

SEQ ID NO: 250349 - RNA, 19 nt, Homo sapiens
  misc_RNA (1)...(19): siRNA sense strand
gaguaaauguugccuuggu

SEQ ID NO: 250350 - RNA, 19 nt, Homo sapiens
  misc_RNA (1)...(19): siRNA sense strand
ucagaucuuugccuauaga

SEQ ID NO: 250351 - RNA, 19 nt, Homo sapiens
  misc_RNA (1)...(19): siRNA sense strand
gcagcgagcgaguaaaugu

SEQ ID NO: 250352 - RNA, 19 nt, Homo sapiens
  misc_RNA (1)...(19): siRNA sense strand
gagaagaugggacucuguu

SEQ ID NO: 250353 - RNA, 19 nt, Homo sapiens
  misc_RNA (1)...(19): siRNA sense strand
guaaauguugccuugguuu

SEQ ID NO: 250354 - RNA, 19 nt, Homo sapiens
  misc_RNA (1)...(19): siRNA sense strand
gcaaggcccauuuucaaua

SEQ ID NO: 250355 - RNA, 19 nt, Homo sapiens
  misc_RNA (1)...(19): siRNA sense strand
gaagaugggacucuguuac

SEQ ID NO: 250356 - RNA, 19 nt, Homo sapiens
  misc_RNA (1)...(19): siRNA sense strand
uguggaagaucaaagacaa

SEQ ID NO: 250357 - RNA, 19 nt, Homo sapiens
  misc_RNA (1)...(19): siRNA sense strand
ggcauaaggcugcaggaaa

SEQ ID NO: 250358 - RNA, 19 nt, Homo sapiens
  misc_RNA (1)...(19): siRNA sense strand
ggaaggaguggcagagauc

SEQ ID NO: 250359 - RNA, 19 nt, Homo sapiens
  misc_RNA (1)...(19): siRNA sense strand
gcaguugcagauugaauau

SEQ ID NO: 250360 - RNA, 19 nt, Homo sapiens
  misc_RNA (1)...(19): siRNA sense strand
caacuuacacagaguacug

SEQ ID NO: 250361 - RNA, 19 nt, Homo sapiens
  misc_RNA (1)...(19): siRNA sense strand
gagccucgccacuuuccua

SEQ ID NO: 250362 - RNA, 19 nt, Homo sapiens
  misc_RNA (1)...(19): siRNA sense strand
guacaaguucccaugcuau

SEQ ID NO: 250363 - RNA, 19 nt, Homo sapiens
  misc_RNA (1)...(19): siRNA sense strand
gcccagcgacuguggcuaa

SEQ ID NO: 250364 - RNA, 19 nt, Homo sapiens
  misc_RNA (1)...(19): siRNA sense strand
cauccucaaugucuucuuc

SEQ ID NO: 250365 - RNA, 19 nt, Homo sapiens
  misc_RNA (1)...(19): siRNA sense strand
gaagaauguuggugaaaag

SEQ ID NO: 250366 - RNA, 19 nt, Homo sapiens
  misc_RNA (1)...(19): siRNA sense strand
ggaguggcagagaucauuu

SEQ ID NO: 250367 - RNA, 19 nt, Homo sapiens
  misc_RNA (1)...(19): siRNA sense strand
caaagacaacccacugauc

SEQ ID NO: 250368 - RNA, 19 nt, Homo sapiens
  misc_RNA (1)...(19): siRNA sense strand
ugcuagccaugcaucauua

SEQ ID NO: 250369 - RNA, 19 nt, Homo sapiens
  misc_RNA (1)...(19): siRNA sense strand
cagauugaauauagcuuuc

SEQ ID NO: 250370 - RNA, 19 nt, Homo sapiens
  misc_RNA (1)...(19): siRNA sense strand
ggucggaugguaaauuuca

SEQ ID NO: 250371 - RNA, 19 nt, Homo sapiens
  misc_RNA (1)...(19): siRNA sense strand
gcuacaguguccagaucaa

SEQ ID NO: 250372 - RNA, 19 nt, Homo sapiens
  misc_RNA (1)...(19): siRNA sense strand
gggacaaggagaagugcua

SEQ ID NO: 250373 - RNA, 19 nt, Homo sapiens
  misc_RNA (1)...(19): siRNA sense strand
cuugccagcucaugucauu

SEQ ID NO: 250374 - RNA, 19 nt, Homo sapiens
  misc_RNA (1)...(19): siRNA sense strand
ggacauucaccgccagauc

SEQ ID NO: 250375 - RNA, 19 nt, Homo sapiens
  misc_RNA (1)...(19): siRNA sense strand
caacuuggccaccuaugag

SEQ ID NO: 250376 - RNA, 19 nt, Homo sapiens
  misc_RNA (1)...(19): siRNA sense strand
ugacuuagcuggggaugaa

SEQ ID NO: 250377 - RNA, 19 nt, Homo sapiens
  misc_RNA (1)...(19): siRNA sense strand
cugagcaguugcagauuga

SEQ ID NO: 250378 - RNA, 19 nt, Homo sapiens
  misc_RNA (1)...(19): siRNA sense strand
uuccugugguugugaguua

SEQ ID NO: 250379 - RNA, 19 nt, Homo sapiens
  misc_RNA (1)...(19): siRNA sense strand
uggagagccucaugcuaga

SEQ ID NO: 250380 - RNA, 19 nt, Homo sapiens
  misc_RNA (1)...(19): siRNA sense strand
agcgugagcuggaggagaa

SEQ ID NO: 250381 - RNA, 19 nt, Homo sapiens
  misc_RNA (1)...(19): siRNA sense strand
aagagaggaucgcccaauc

SEQ ID NO: 250382 - RNA, 19 nt, Homo sapiens
  misc_RNA (1)...(19): siRNA sense strand
caugcuaugugcagaacga

SEQ ID NO: 250383 - RNA, 19 nt, Homo sapiens
  misc_RNA (1)...(19): siRNA sense strand
caaguucccaugcuaugug

SEQ ID NO: 250384 - RNA, 19 nt, Homo sapiens
  misc_RNA (1)...(19): siRNA sense strand
ggcaagcuacucuacuuug

SEQ ID NO: 250385 - RNA, 19 nt, Homo sapiens
  misc_RNA (1)...(19): siRNA sense strand
gcaugagagcggcaagcua

SEQ ID NO: 250386 - RNA, 19 nt, Homo sapiens
  misc_RNA (1)...(19): siRNA sense strand
ggugcugcccgaccacuuu

SEQ ID NO: 250387 - RNA, 19 nt, Homo sapiens
  misc_RNA (1)...(19): siRNA sense strand
guaaauuucagaucuuugc

SEQ ID NO: 250388 - RNA, 19 nt, Homo sapiens
  misc_RNA (1)...(19): siRNA sense strand
ucauucgguugcugcuuaa

SEQ ID NO: 250389 - RNA, 19 nt, Homo sapiens
  misc_RNA (1)...(19): siRNA sense strand
ggacaguggcaaccugaag

SEQ ID NO: 250390 - RNA, 19 nt, Homo sapiens
  misc_RNA (1)...(19): siRNA sense strand
ucaacuuggccaccuauga

SEQ ID NO: 250391 - RNA, 19 nt, Homo sapiens
  misc_RNA (1)...(19): siRNA sense strand
gacaguggcaaccugaaga

SEQ ID NO: 250392 - RNA, 19 nt, Homo sapiens
  misc_RNA (1)...(19): siRNA sense strand
caucgcagccuaccagaag

SEQ ID NO: 250393 - RNA, 19 nt, Homo sapiens
  misc_RNA (1)...(19): siRNA sense strand
ccuacgaggucugcaugaa

SEQ ID NO: 250394 - RNA, 19 nt, Homo sapiens
  misc_RNA (1)...(19): siRNA sense strand
cggaaggaguggcagagau

SEQ ID NO: 250395 - RNA, 19 nt, Homo sapiens
  misc_RNA (1)...(19): siRNA sense strand
uugaauggguccacagcuu

SEQ ID NO: 250396 - RNA, 19 nt, Homo sapiens
  misc_RNA (1)...(19): siRNA sense strand
agaagaugggacucuguua

SEQ ID NO: 250397 - RNA, 19 nt, Homo sapiens
  misc_RNA (1)...(19): siRNA sense strand
caaccucacccgccucauc

SEQ ID NO: 250398 - RNA, 19 nt, Homo sapiens
  misc_RNA (1)...(19): siRNA sense strand
ugaaaguuaugaggugauc

SEQ ID NO: 250399 - RNA, 19 nt, Homo sapiens
  misc_RNA (1)...(19): siRNA sense strand
caucguguaugacuuagcu

SEQ ID NO: 250400 - RNA, 19 nt, Homo sapiens
  misc_RNA (1)...(19): siRNA sense strand
ccaacgcgguggugugcau

SEQ ID NO: 250401 - RNA, 19 nt, Homo sapiens
  misc_RNA (1)...(19): siRNA sense strand
ggacauugaggcacugaac

SEQ ID NO: 250402 - RNA, 19 nt, Homo sapiens
  misc_RNA (1)...(19): siRNA sense strand
ggagaagaugggacucugu

SEQ ID NO: 250403 - RNA, 19 nt, Homo sapiens
  misc_RNA (1)...(19): siRNA sense strand
ugcuggagcugcuggagaa

SEQ ID NO: 250404 - RNA, 19 nt, Homo sapiens
  misc_RNA (1)...(19): siRNA sense strand
gugcacauucucuguucua

SEQ ID NO: 250405 - RNA, 19 nt, Homo sapiens
  misc_RNA (1)...(19): siRNA sense strand
aguugcagauugaauauag

SEQ ID NO: 250406 - RNA, 19 nt, Homo sapiens
  misc_RNA (1)...(19): siRNA sense strand
cagaaggaacuggcucauu

SEQ ID NO: 250407 - RNA, 19 nt, Homo sapiens
  misc_RNA (1)...(19): siRNA sense strand
aguaaauguugccuugguu

SEQ ID NO: 250408 - RNA, 19 nt, Homo sapiens
  misc_RNA (1)...(19): siRNA sense strand
gagcaguugcagauugaau

SEQ ID NO: 250409 - RNA, 19 nt, Homo sapiens
  misc_RNA (1)...(19): siRNA sense strand
uucaauaccugcucaacca

SEQ ID NO: 250410 - RNA, 19 nt, Homo sapiens
  misc_RNA (1)...(19): siRNA sense strand
ucaaggagcacgucuucca

SEQ ID NO: 250411 - RNA, 19 nt, Homo sapiens
  misc_RNA (1)...(19): siRNA sense strand
gaaggaguggcagagauca

SEQ ID NO: 250412 - RNA, 19 nt, Homo sapiens
  misc_RNA (1)...(19): siRNA sense strand
ucaaagacaacccacugau

SEQ ID NO: 250413 - RNA, 19 nt, Homo sapiens
  misc_RNA (1)...(19): siRNA sense strand
agaagaauguuggugaaaa

SEQ ID NO: 250414 - RNA, 19 nt, Homo sapiens
  misc_RNA (1)...(19): siRNA sense strand
gcacauucucuguucuaag

SEQ ID NO: 250415 - RNA, 19 nt, Homo sapiens
  misc_RNA (1)...(19): siRNA sense strand
gccuauagagggaaaguuc

SEQ ID NO: 250416 - RNA, 19 nt, Homo sapiens
  misc_RNA (1)...(19): siRNA sense strand
caugcagaagccuggauua

SEQ ID NO: 250417 - RNA, 19 nt, Homo sapiens
  misc_RNA (1)...(19): siRNA sense strand
cgagagaucuuccccaacu

SEQ ID NO: 250418 - RNA, 19 nt, Homo sapiens
  misc_RNA (1)...(19): siRNA sense strand
gggcauaaggcugcaggaa

SEQ ID NO: 250419 - RNA, 19 nt, Homo sapiens
  misc_RNA (1)...(19): siRNA sense strand
ggaagugccugcugauugu

SEQ ID NO: 250420 - RNA, 19 nt, Homo sapiens
  misc_RNA (1)...(19): siRNA sense strand
caacaaaggucccucaaac

SEQ ID NO: 250421 - RNA, 19 nt, Homo sapiens
  misc_RNA (1)...(19): siRNA sense strand
gaccaggcauucacagaaa

SEQ ID NO: 250422 - RNA, 19 nt, Homo sapiens
  misc_RNA (1)...(19): siRNA sense strand
gaaccacccuuggaucaug

SEQ ID NO: 250423 - RNA, 19 nt, Homo sapiens
  misc_RNA (1)...(19): siRNA sense strand
gaaugaccaucaccgaguu

SEQ ID NO: 250424 - RNA, 19 nt, Homo sapiens
  misc_RNA (1)...(19): siRNA sense strand
gaagaacgccaucaucgau

SEQ ID NO: 250425 - RNA, 19 nt, Homo sapiens
  misc_RNA (1)...(19): siRNA sense strand
ggagaaauucgcccucaaa

SEQ ID NO: 250426 - RNA, 19 nt, Homo sapiens
  misc_RNA (1)...(19): siRNA sense strand
gaaauucgcccucaaaaug

SEQ ID NO: 250427 - RNA, 19 nt, Homo sapiens
  misc_RNA (1)...(19): siRNA sense strand
gaaagagaagcauccgaaa

SEQ ID NO: 250428 - RNA, 19 nt, Homo sapiens
  misc_RNA (1)...(19): siRNA sense strand
gaagugaagaugcucauuc

SEQ ID NO: 250429 - RNA, 19 nt, Homo sapiens
  misc_RNA (1)...(19): siRNA sense strand
gaaugggccaguaugaauu

SEQ ID NO: 250430 - RNA, 19 nt, Homo sapiens
  misc_RNA (1)...(19): siRNA sense strand
ggacgguggagaacucuuu

SEQ ID NO: 250431 - RNA, 19 nt, Homo sapiens
  misc_RNA (1)...(19): siRNA sense strand
ugacaaguccugugacaug

SEQ ID NO: 250432 - RNA, 19 nt, Homo sapiens
  misc_RNA (1)...(19): siRNA sense strand
caagaggacccaggagaaa

SEQ ID NO: 250433 - RNA, 19 nt, Homo sapiens
  misc_RNA (1)...(19): siRNA sense strand
gggcaucaacggcaaaguu

SEQ ID NO: 250434 - RNA, 19 nt, Homo sapiens
  misc_RNA (1)...(19): siRNA sense strand
ccagaauggucagaaguau

SEQ ID NO: 250435 - RNA, 19 nt, Homo sapiens
  misc_RNA (1)...(19): siRNA sense strand
uccaguaucugcauucaau

SEQ ID NO: 250436 - RNA, 19 nt, Homo sapiens
  misc_RNA (1)...(19): siRNA sense strand
cuauguggcuccagaagug

SEQ ID NO: 250437 - RNA, 19 nt, Homo sapiens
  misc_RNA (1)...(19): siRNA sense strand
gcccaacgccauccugaaa

SEQ ID NO: 250438 - RNA, 19 nt, Homo sapiens
  misc_RNA (1)...(19): siRNA sense strand
cgaaugggccaguaugaau

SEQ ID NO: 250439 - RNA, 19 nt, Homo sapiens
  misc_RNA (1)...(19): siRNA sense strand
guuauacaccguacuaugu

SEQ ID NO: 250440 - RNA, 19 nt, Homo sapiens
  misc_RNA (1)...(19): siRNA sense strand
gaccacuccuuguuauaca

SEQ ID NO: 250441 - RNA, 19 nt, Homo sapiens
  misc_RNA (1)...(19): siRNA sense strand
ugauugucauggaauguuu

SEQ ID NO: 250442 - RNA, 19 nt, Homo sapiens
  misc_RNA (1)...(19): siRNA sense strand
gagcccacccagagaauga

SEQ ID NO: 250443 - RNA, 19 nt, Homo sapiens
  misc_RNA (1)...(19): siRNA sense strand
gacaaguccugugacaugu

SEQ ID NO: 250444 - RNA, 19 nt, Homo sapiens
  misc_RNA (1)...(19): siRNA sense strand
gccugcagaucaagaagaa

SEQ ID NO: 250445 - RNA, 19 nt, Homo sapiens
  misc_RNA (1)...(19): siRNA sense strand
ggcaucaacggcaaaguuu

SEQ ID NO: 250446 - RNA, 19 nt, Homo sapiens
  misc_RNA (1)...(19): siRNA sense strand
cauccgaaaucaugaagag

SEQ ID NO: 250447 - RNA, 19 nt, Homo sapiens
  misc_RNA (1)...(19): siRNA sense strand
ccaccagccacaacucuuu

SEQ ID NO: 250448 - RNA, 19 nt, Homo sapiens
  misc_RNA (1)...(19): siRNA sense strand
agaagcauccgaaaucaug

SEQ ID NO: 250449 - RNA, 19 nt, Homo sapiens
  misc_RNA (1)...(19): siRNA sense strand
caagaagaacgccaucauc

SEQ ID NO: 250450 - RNA, 19 nt, Homo sapiens
  misc_RNA (1)...(19): siRNA sense strand
aagagaagcauccgaaauc

SEQ ID NO: 250451 - RNA, 19 nt, Homo sapiens
  misc_RNA (1)...(19): siRNA sense strand
gaucaugcaaucaacaaag

SEQ ID NO: 250452 - RNA, 19 nt, Homo sapiens
  misc_RNA (1)...(19): siRNA sense strand
ucaccgaguuuaugaacca

SEQ ID NO: 250453 - RNA, 19 nt, Homo sapiens
  misc_RNA (1)...(19): siRNA sense strand
agaauggucagaaguauca

SEQ ID NO: 250454 - RNA, 19 nt, Homo sapiens
  misc_RNA (1)...(19): siRNA sense strand
agagaagcauccgaaauca

SEQ ID NO: 250455 - RNA, 19 nt, Homo sapiens
  misc_RNA (1)...(19): siRNA sense strand
gaccaucaccgaguuuaug

SEQ ID NO: 250456 - RNA, 19 nt, Homo sapiens
  misc_RNA (1)...(19): siRNA sense strand
ccagagaaguaugacaagu

SEQ ID NO: 250457 - RNA, 19 nt, Homo sapiens
  misc_RNA (1)...(19): siRNA sense strand
guacggaucguggaugugu

SEQ ID NO: 250458 - RNA, 19 nt, Homo sapiens
  misc_RNA (1)...(19): siRNA sense strand
uaugacaaguccugugaca

SEQ ID NO: 250459 - RNA, 19 nt, Homo sapiens
  misc_RNA (1)...(19): siRNA sense strand
gaagcauccgaaaucauga

SEQ ID NO: 250460 - RNA, 19 nt, Homo sapiens
  misc_RNA (1)...(19): siRNA sense strand
aaagagaagcauccgaaau

SEQ ID NO: 250461 - RNA, 19 nt, Homo sapiens
  misc_RNA (1)...(19): siRNA sense strand
gugaggccauccaguaucu

SEQ ID NO: 250462 - RNA, 19 nt, Homo sapiens
  misc_RNA (1)...(19): siRNA sense strand
gaauuucccaacccagaau

SEQ ID NO: 250463 - RNA, 19 nt, Homo sapiens
  misc_RNA (1)...(19): siRNA sense strand
gacgguggagaacucuuua

SEQ ID NO: 250464 - RNA, 19 nt, Homo sapiens
  misc_RNA (1)...(19): siRNA sense strand
ucaacaaaggucccucaaa

SEQ ID NO: 250465 - RNA, 19 nt, Homo sapiens
  misc_RNA (1)...(19): siRNA sense strand
gaggaagugccugcugauu

SEQ ID NO: 250466 - RNA, 19 nt, Homo sapiens
  misc_RNA (1)...(19): siRNA sense strand
acaagaggacccaggagaa

SEQ ID NO: 250467 - RNA, 19 nt, Homo sapiens
  misc_RNA (1)...(19): siRNA sense strand
uaucugcauucaaucaaca

SEQ ID NO: 250468 - RNA, 19 nt, Homo sapiens
  misc_RNA (1)...(19): siRNA sense strand
ggcauucacagaaagagaa

SEQ ID NO: 250469 - RNA, 19 nt, Homo sapiens
  misc_RNA (1)...(19): siRNA sense strand
cagaggaagugaagaugcu

SEQ ID NO: 250470 - RNA, 19 nt, Homo sapiens
  misc_RNA (1)...(19): siRNA sense strand
uaucagaggaagugaagau

SEQ ID NO: 250471 - RNA, 19 nt, Homo sapiens
  misc_RNA (1)...(19): siRNA sense strand
gaaaccaccagccacaacu

SEQ ID NO: 250472 - RNA, 19 nt, Homo sapiens
  misc_RNA (1)...(19): siRNA sense strand
ccaacgccauccugaaacu

SEQ ID NO: 250473 - RNA, 19 nt, Homo sapiens
  misc_RNA (1)...(19): siRNA sense strand
agaggacccaggagaaauu

SEQ ID NO: 250474 - RNA, 19 nt, Homo sapiens
  misc_RNA (1)...(19): siRNA sense strand
gagaccaggcauucacaga

SEQ ID NO: 250475 - RNA, 19 nt, Homo sapiens
  misc_RNA (1)...(19): siRNA sense strand
ggaagugaagaugcucauu

SEQ ID NO: 250476 - RNA, 19 nt, Homo sapiens
  misc_RNA (1)...(19): siRNA sense strand
ucggugaggccauccagua

SEQ ID NO: 250477 - RNA, 19 nt, Homo sapiens
  misc_RNA (1)...(19): siRNA sense strand
cccagaauggucagaagua

SEQ ID NO: 250478 - RNA, 19 nt, Homo sapiens
  misc_RNA (1)...(19): siRNA sense strand
guccagagaaguaugacaa

SEQ ID NO: 250479 - RNA, 19 nt, Homo sapiens
  misc_RNA (1)...(19): siRNA sense strand
ggaaaccaccagccacaac

SEQ ID NO: 250480 - RNA, 19 nt, Homo sapiens
  misc_RNA (1)...(19): siRNA sense strand
aggaagugccugcugauug

SEQ ID NO: 250481 - RNA, 19 nt, Homo sapiens
  misc_RNA (1)...(19): siRNA sense strand
ggaucaugcaaucaacaaa

SEQ ID NO: 250482 - RNA, 19 nt, Homo sapiens
  misc_RNA (1)...(19): siRNA sense strand
ccacggccuugccaucucu

SEQ ID NO: 250483 - RNA, 19 nt, Homo sapiens
  misc_RNA (1)...(19): siRNA sense strand
ccugaaacucacugacuuu

SEQ ID NO: 250484 - RNA, 19 nt, Homo sapiens
  misc_RNA (1)...(19): siRNA sense strand
gagaagcauccgaaaucau

SEQ ID NO: 250485 - RNA, 19 nt, Homo sapiens
  misc_RNA (1)...(19): siRNA sense strand
agaccaggcauucacagaa

SEQ ID NO: 250486 - RNA, 19 nt, Homo sapiens
  misc_RNA (1)...(19): siRNA sense strand
ucaagaagaacgccaucau

SEQ ID NO: 250487 - RNA, 19 nt, Homo sapiens
  misc_RNA (1)...(19): siRNA sense strand
agaaguaucagaggaagug
